United States Patent Application Publication US 2016/0331844 A1 - sequence listing, part 2

SEQ ID NO: 2451 - RNA, 1482 nt, Artificial Sequence
  derived and/or modified sequence opt1 from MART-2__Homo_sapiens__EAW93427
augcugccccgcugggagcucgcccuguaccugcucgccagccugggcuuccacuucuacuccuucuacgagguguacaaggucagccgggagcacgaggaggagcuggaccaggaguucgagcucgagaccgacacccuguucgggggccugaagaaggacgcgacggacuucgagugguccuucuggauggagugggggaagcaguggcucguguggcugcugcucggccacaugguggucagccagauggccacccugcuggcccgcaagcaccggccguggauccucaugcuguacgggaugugggccugcuggugcgugcugggcacccccggcguggccaugguccuccugcacaccacgaucuccuucugcguggcgcaguuccgcagccagcugcucaccuggcugugcucccugcuccugcugagcacccuccggcugcaggggguggaggaggucaagcgccggugguacaagaccgagaacgaguacuaccugcuccaguucacgcugaccgugcgcugccuguacuacaccuccuucagccucgagcugugcuggcagcagcugcccgccgccuccaccagcuacuccuuccccuggaugcucgccuacguguucuacuacccgguccugcacaacggccccauccugagcuucuccgaguucaucaagcagaugcagcagcaggagcacgacagccucaaggcgucccugugcgugcuggcccucgggcugggccggcugcucugcuggugguggcuggccgagcugauggcccaccucauguacaugcacgccaucuacagcuccaucccccugcuggagacggugagcugcuggacccucgggggccuggcgcuggcccagguccuguucuucuacgugaaguaccucgugcuguucggcguccccgcccugcucaugcgccuggacgggcugaccccgcccgcccucccccggugcgugagcaccauguucuccuucacgggcauguggcgcuacuucgacguggggcugcacaacuuccugauccgguacgucuacauccccgugggcggcagccagcacgggcuccugggcacccuguucuccaccgccaugaccuucgcguucgugagcuacuggcacgggggcuacgacuaccucuggugcugggccgcccugaacuggcugggggucacgguggagaacggcguccgccggcucguggagaccccgugcauccaggacucccuggcccgcuacuucagcccccaggcccggcgccgguuccacgcggcccuggccuccugcagcaccuccaugcucauccugagcaaccugguguuccucggcgggaacgaggucggcaagaccuacuggaaccgcaucuucauccagggguggcccugggugacgcuguccgugcugggcuuccucuacugcuacagccacgucgggaucgccugggcccagaccuacgcgaccgacuga

SEQ ID NO: 2452 - RNA, 1482 nt, Artificial Sequence
  derived and/or modified sequence opt2 from MART-2__Homo_sapiens__EAW93427
augcucccccgcugggagcucgcccucuaccuccucgccucccucggcuuccacuucuacuccuucuacgaggucuacaaggucucccgcgagcacgaggaggagcucgaccaggaguucgagcucgagaccgacacccucuucggcggccucaagaaggacgccaccgacuucgagugguccuucuggauggaguggggcaagcaguggcucgucuggcuccuccucggccacauggucgucucccagauggccacccuccucgcccgcaagcaccgccccuggauccucaugcucuacggcaugugggccugcuggugcguccucggcacccccggcgucgccaugguccuccuccacaccaccaucuccuucugcgucgcccaguuccgcucccagcuccucaccuggcucugcucccuccuccuccucuccacccuccgccuccagggcgucgaggaggucaagcgccgcugguacaagaccgagaacgaguacuaccuccuccaguucacccucaccguccgcugccucuacuacaccuccuucucccucgagcucugcuggcagcagcuccccgccgccuccaccuccuacuccuuccccuggaugcucgccuacgucuucuacuaccccguccuccacaacggccccauccucuccuucuccgaguucaucaagcagaugcagcagcaggagcacgacucccucaaggccucccucugcguccucgcccucggccucggccgccuccucugcuggugguggcucgccgagcucauggcccaccucauguacaugcacgccaucuacuccuccaucccccuccucgagaccgucuccugcuggacccucggcggccucgcccucgcccagguccucuucuucuacgucaaguaccucguccucuucggcguccccgcccuccucaugcgccucgacggccucaccccccccgcccucccccgcugcgucuccaccauguucuccuucaccggcauguggcgcuacuucgacgucggccuccacaacuuccucauccgcuacgucuacauccccgucggcggcucccagcacggccuccucggcacccucuucuccaccgccaugaccuucgccuucgucuccuacuggcacggcggcuacgacuaccucuggugcugggccgcccucaacuggcucggcgucaccgucgagaacggcguccgccgccucgucgagacccccugcauccaggacucccucgcccgcuacuucuccccccaggcccgccgccgcuuccacgccgcccucgccuccugcuccaccuccaugcucauccucuccaaccucgucuuccucggcggcaacgaggucggcaagaccuacuggaaccgcaucuucauccagggcuggcccugggucacccucuccguccucggcuuccucuacugcuacucccacgucggcaucgccugggcccagaccuacgccaccgacuga

SEQ ID NO: 2453 - RNA, 1482 nt, Artificial Sequence
  derived and/or modified sequence opt3 from MART-2__Homo_sapiens__EAW93427
augcugcccagaugggagcucgcccuuuaccuguuggcuagcuuaggcuuccacuuuuauuccuucuacgaaguguauaaggucucuagggagcaugaagaggaacuggaccaggaguuugagcuagaaaccgauacacucuucgggggacugaaaaaggacgcaacugauuuugaguggucauucuggauggaaugggguaaacaauggcuuguuuggcuguugcucggccacauggugguaagucagauggccacgcugcuggcgcggaagcaucgcccuuggauccucauguuauacgggaugugggcuugcuggugugugcugggaaccccaggcgucgccauggugcuuuugcacacaacuauuagcuuuugcguugcacaguuccgaucccagcugcuaaccuggcucuguucucugcuucuguugucgacacuccgucugcaagguguggaggaggucaaaagaaggugguauaagaccgaaaacgaguacuauuuacugcaguuuacucucacagugcggugccuuuacuacaccucauucagccuggaauuguguuggcagcagcuaccggccgcuaguacguccuauucuuuucccuggaugcuggcauacguauucuauuacccuguucuccauaaugggccaauacugagcuuuuccgaguucaucaagcaaaugcagcagcaggaacacgacucacuuaaagccagucugugcguguuggcucucggacugggccgcuuacuguguuggugguggcuagccgagcucauggcgcaccugauguauaugcaugcaauuuacagcucuaucccccuuuuggagacugucuccugcuggacccugggcgggcucgcccuggcucaagugcuuuucuuuuaugugaaguaccuggucuuguucggaguuccugcccuccugaugagauuagauggucugacaccacccgcacuaccuaggugugugucaacuauguuuagcuucaccggcauguggcgguacuuugacguagggcuccacaacuuccugauucgcuauguguacaucccagucggaggcagucagcauggucuuuuggggacacuguuuucuaccgcuaugacguucgccuuuguguccuauuggcacggaggcuacgauuaucucuggugcugggcggcccugaauugguuaggcguuacuguggaaaacgggguccgaagacugguggagacaccguguauacaggacagccuugcaagguacuucucgccccaagcucggcgucgcuuucacgccgcuuuggccucuugcuccaccucaaugcucauccugaguaaucuaguauuccugggagguaacgaaguuggcaaaacuuauuggaauagaauuuuuauccagggguggccuugggugacacucagcguccugggauuccuuuacugcuacucccaugugggcauugcaugggcccagaccuaugcuacggauuga

SEQ ID NO: 2454 - RNA, 1482 nt, Artificial Sequence
  derived and/or modified sequence opt4 from MART-2__Homo_sapiens__EAW93427
augcugcccagaugggagcuggcccuguaccugcuggccagccugggcuuccacuucuacagcuucuacgagguguacaaggugagcagagagcacgaggaggagcuggaccaggaguucgagcuggagaccgacacccuguucggcggccugaagaaggacgccaccgacuucgaguggagcuucuggauggaguggggcaagcaguggcugguguggcugcugcugggccacaugguggugagccagauggccacccugcuggccagaaagcacagacccuggauccugaugcuguacggcaugugggccugcuggugcgugcugggcacccccggcguggccauggugcugcugcacaccaccaucagcuucugcguggcccaguucagaagccagcugcugaccuggcugugcagccugcugcugcugagcacccugagacugcagggcguggaggaggugaagagaagaugguacaagaccgagaacgaguacuaccugcugcaguucacccugaccgugagaugccuguacuacaccagcuucagccuggagcugugcuggcagcagcugcccgccgccagcaccagcuacagcuuccccuggaugcuggccuacguguucuacuaccccgugcugcacaacggccccauccugagcuucagcgaguucaucaagcagaugcagcagcaggagcacgacagccugaaggccagccugugcgugcuggcccugggccugggcagacugcugugcuggugguggcuggccgagcugauggcccaccugauguacaugcacgccaucuacagcagcaucccccugcuggagaccgugagcugcuggacccugggcggccuggcccuggcccaggugcuguucuucuacgugaaguaccuggugcuguucggcgugcccgcccugcugaugagacuggacggccugaccccccccgcccugcccagaugcgugagcaccauguucagcuucaccggcauguggagauacuucgacgugggccugcacaacuuccugaucagauacguguacauccccgugggcggcagccagcacggccugcugggcacccuguucagcaccgccaugaccuucgccuucgugagcuacuggcacggcggcuacgacuaccuguggugcugggccgcccugaacuggcugggcgugaccguggagaacggcgugagaagacugguggagacccccugcauccaggacagccuggccagauacuucagcccccaggccagaagaagauuccacgccgcccuggccagcugcagcaccagcaugcugauccugagcaaccugguguuccugggcggcaacgaggugggcaagaccuacuggaacagaaucuucauccagggcuggcccugggugacccugagcgugcugggcuuccuguacugcuacagccacgugggcaucgccugggcccagaccuacgccaccgacuga

SEQ ID NO: 2455 - RNA, 1482 nt, Artificial Sequence
  derived and/or modified sequence opt5 from MART-2__Homo_sapiens__EAW93427
augcugcccagaugggagcucgcccuguaccuucuggcuagccucggcuuccacuuuuauuccuucuacgaaguguauaaggucucucgggagcaugaagaggaacuggaccaggaguuugagcuugaaaccgauacacuguucgggggacucaaaaaggacgccacggauuuugaguggagcuucuggauggaauggggcaaacaauggcugguuuggcugcuccuggggcacaugguggugucccagauggcgacccuucuggcucgcaagcauagaccuuggauccucaugcuguacggaaugugggccugcugguguguccuuggcacaccggggguggccaugguucugcuccacaccacaauuucuuuuugcguggcucaguuccggagccagcugcugaccuggcucuguucccugcuucugcucucuacacugcgccuucaaggagucgaggaggugaaaagacggugguauaagaccgaaaacgaguacuaucugcuccaguuuacgcugaccguucgcugccuguacuacacauccuucucccucgaacuguguuggcagcagcuucccgccgcuagcaccucuuauuccuuuccuuggaugcuggccuacguguucuauuaccccguccuccauaauggcccuauccugagcuuuucugaguucauuaagcaaaugcagcagcaggaacacgacucccuuaaagcgagccugugcgugcucgcccugggccuggggagacuccuguguuggugguggcuugcugagcugauggcccaccucauguauaugcaugcuaucuacucuuccauuccccugcuggagacagugagcugcuggacccuuggaggccucgcccuggcgcaaguccuguucuuuuauguuaaguaccucgugcuguucggggugccugcccuucugaugcggcucgauggacugacgccgcccgcucugccucgcugugucuccacaauguuuucuuucaccggcauguggagauacuuugacguggggcuucacaacuuccucauccgguauguuuacauccccgugggaggcagccagcauggccugcuggggacacucuuuuccaccgccaugaccuucgcuuuugucagcuauuggcacggaggcuacgauuaucuguggugcugggccgcccuuaauuggcugggggugacaguugaaaacggagugcgcagacucgucgagacgccuuguauucaggacucucuggcucgguacuucagcccccaagcgcgcagacgguuucacgccgcucuggccagcugcucuaccagcaugcuuauccucuccaaucugguguuccugggcgggaacgaagucggaaaaacauauuggaauagaauuuuuauccagggcuggccgugggugacccucucuguucugggcuuccuuuacugcuacagccauguggggauugccugggcucagacauaugccaccgauuga

SEQ ID NO: 2456 - protein, 317 aa, Artificial Sequence
  MC1_R__Homo_sapiens__Q01726
MAVQGSQRRLLGSLNSTPTAIPQLGLAANQTGARCLEVSISDGLFLSLGLVSLVENALVVATIAKNRNLHSPMYCFICCLALSDLLVSGSNVLETAVILLLEAGALVARAAVLQQLDNVIDVITCSSMLSSLCFLGAIAVDRYISIFYALRYHSIVTLPRARRAVAAIWVASVVFSTLFIAYYDHVAVLLCLVVFFLAMLVLMAVLYVHMLARACQHAQGIARLHKRQRPVHQGFGLKGAVTLTILLGIFFLCWGPFFLHLTLIVLCPEHPTCGCIFKNFNLFLALIICNAIIDPLIYAFHSQELRRTLKEVLTCSW

SEQ ID NO: 2457 - RNA, 954 nt, Artificial Sequence
  MC1_R__Homo_sapiens__AAD41349
auggcugugcagggaucccagagaagacuucugggcucccucaacuccacccccacagccaucccccagcuggggcuggcugccaaccagacaggagcccggugccuggagguguccaucucugacgggcucuuccucagccuggggcuggugagcuugguggagaacgcgcuggugguggccaccaucgccaagaaccggaaccugcacucacccauguacugcuucaucugcugccuggccuugucggaccugcuggugagcgggagcaacgugcuggagacggccgucauccuccugcuggaggccggugcacugguggcccgggcugcggugcugcagcagcuggacaaugucauugacgugaucaccugcagcuccaugcuguccagccucugcuuccugggcgccaucgccguggaccgcuacaucuccaucuucuacgcacugcgcuaccacagcaucgugacccugccgcgggcgcggcgagccguugcggccaucuggguggccagugucgucuucagcacgcucuucaucgccuacuacgaccacguggccguccugcugugccucguggucuucuuccuggcuaugcuggugcucauggccgugcuguacguccacaugcuggcccgggccugccagcacgcccagggcaucgcccggcuccacaagaggcagcgcccgguccaccagggcuuuggccuuaaaggcgcugucacccucaccauccugcugggcauuuucuuccucugcuggggccccuucuuccugcaucucacacucaucguccucugccccgagcaccccacgugcggcugcaucuucaagaacuucaaccucuuucucgcccucaucaucugcaaugccaucaucgacccccucaucuacgccuuccacagccaggagcuccgcaggacgcucaaggaggugcugacaugcuccugguga

SEQ ID NO: 2458 - RNA, 954 nt, Artificial Sequence
  derived and/or modified sequence opt1 from MC1_R__Homo_sapiens__AAD41349
auggccgugcagggcagccagcgccggcugcucgggucccugaacagcacccccaccgccaucccccagcugggccucgcggccaaccagacgggggcccgcugccuggaggucuccaucagcgacggccuguuccucucccuggggcuggugagccucguggagaacgcccuggucguggccaccaucgcgaagaaccggaaccugcacucccccauguacugcuucaucugcugccucgcccugagcgaccugcucguguccggcagcaacguccuggagaccgccgugauccugcuccuggaggccggcgcgcugguggcccgcgccgccguccuccagcagcuggacaacgugaucgacgugaucacgugcuccagcaugcuguccagccucugcuuccugggggccaucgcggucgaccgguacaucuccaucuucuacgcccugcgcuaccacagcaucgugacccucccccgggcccgccgggccguggccgcgaucugggucgccuccgugguguucagcacccuguucaucgccuacuacgaccacgucgccgugcugcucugccugguggucuucuuccuggccaugcucgugcugauggcggugcuguacguccacaugcucgcccgcgccugccagcacgcccagggcaucgcccggcugcacaagcgccagcggcccgugcaccagggguucggccugaagggggcggucacccucaccauccugcugggcaucuucuuccucugcuggggcccguucuuccugcaccugacgcucaucgugcugugccccgagcacccgaccugcgggugcaucuucaagaacuucaaccuguuccucgcccugaucaucugcaacgccaucaucgacccccugaucuacgccuuccacucccaggagcugcgccggacccucaaggaggugcugaccugcagcugguga

SEQ ID NO: 2459 - RNA, 954 nt, Artificial Sequence
  derived and/or modified sequence opt2 from MC1_R__Homo_sapiens__AAD41349
auggccguccagggcucccagcgccgccuccucggcucccucaacuccacccccaccgccaucccccagcucggccucgccgccaaccagaccggcgcccgcugccucgaggucuccaucuccgacggccucuuccucucccucggccucgucucccucgucgagaacgcccucgucgucgccaccaucgccaagaaccgcaaccuccacucccccauguacugcuucaucugcugccucgcccucuccgaccuccucgucuccggcuccaacguccucgagaccgccgucauccuccuccucgaggccggcgcccucgucgcccgcgccgccguccuccagcagcucgacaacgucaucgacgucaucaccugcuccuccaugcucuccucccucugcuuccucggcgccaucgccgucgaccgcuacaucuccaucuucuacgcccuccgcuaccacuccaucgucacccucccccgcgcccgccgcgccgucgccgccaucugggucgccuccgucgucuucuccacccucuucaucgccuacuacgaccacgucgccguccuccucugccucgucgucuucuuccucgccaugcucguccucauggccguccucuacguccacaugcucgcccgcgccugccagcacgcccagggcaucgcccgccuccacaagcgccagcgccccguccaccagggcuucggccucaagggcgccgucacccucaccauccuccucggcaucuucuuccucugcuggggccccuucuuccuccaccucacccucaucguccucugccccgagcaccccaccugcggcugcaucuucaagaacuucaaccucuuccucgcccucaucaucugcaacgccaucaucgacccccucaucuacgccuuccacucccaggagcuccgccgcacccucaaggagguccucaccugcuccugguga

SEQ ID NO: 2460 - RNA, 954 nt, Artificial Sequence
  derived and/or modified sequence opt3 from MC1_R__Homo_sapiens__AAD41349
auggccgugcagggcagccaaagaaggcugcucgggucccuuaacucuacccccacagcuaucccucagcugggauuggcagccaaucagacuggugcgcggugcuuagaggucucaauuagugacggccuguuccuaagccucgggcugguuucccuuguggaaaacgcucugguaguggccacgauagcaaagaaucgcaacuugcacucuccaauguacuguuuuaucugcugucucgcccugucggaucugcucgucucaggaagcaauguguuagagaccgcuguuauucugcuuuuggaagcaggcgcccugguggcucgagccgcgguccuacagcaacucgacaacgugaucgauguaauuacaugcaguuccaugcugucuagccuuuguuuccugggugcaaucgccguugaccguuauauauccaucuuuuacgcuuugagauaucauucaauugugacucucccgagggcccggcgcgcagucgcugccaucuggguggcgaguguggucuucagcacccuguuuauugccuacuaugaucacguugcaguguuacugugccucguaguguucuuucuugcuaugcuggucuugauggccgugcuauacguucauaugcuggcuagagccugucagcacgcacaggggaucgccaggcuccauaaacggcagcgccccgugcaccaaggauucggccugaagggcgcugucacacuuaccauacuguuggggaucuuuuuccucugcuggggaccauuuuuccugcacuuaacucugauugugcuauguccugagcaucccacaugcgguuguauuuuuaaaaauuucaaccucuuccuggcgcuuaucaucugcaaugcaauuauagacccuuugaucuaugccuuucacucucaggaacugcgaagaacccucaaggagguacugacgugcuccugguga

SEQ ID NO: 2461 - RNA, 954 nt, Artificial Sequence
  derived and/or modified sequence opt4 from MC1_R__Homo_sapiens__AAD41349
auggccgugcagggcagccagagaagacugcugggcagccugaacagcacccccaccgccaucccccagcugggccuggccgccaaccagaccggcgccagaugccuggaggugagcaucagcgacggccuguuccugagccugggccuggugagccugguggagaacgcccuggugguggccaccaucgccaagaacagaaaccugcacagccccauguacugcuucaucugcugccuggcccugagcgaccugcuggugagcggcagcaacgugcuggagaccgccgugauccugcugcuggaggccggcgcccugguggccagagccgccgugcugcagcagcuggacaacgugaucgacgugaucaccugcagcagcaugcugagcagccugugcuuccugggcgccaucgccguggacagauacaucagcaucuucuacgcccugagauaccacagcaucgugacccugcccagagccagaagagccguggccgccaucuggguggccagcgugguguucagcacccuguucaucgccuacuacgaccacguggccgugcugcugugccuggugguguucuuccuggccaugcuggugcugauggccgugcuguacgugcacaugcuggccagagccugccagcacgcccagggcaucgccagacugcacaagagacagagacccgugcaccagggcuucggccugaagggcgccgugacccugaccauccugcugggcaucuucuuccugugcuggggccccuucuuccugcaccugacccugaucgugcugugccccgagcaccccaccugcggcugcaucuucaagaacuucaaccuguuccuggcccugaucaucugcaacgccaucaucgacccccugaucuacgccuuccacagccaggagcugagaagaacccugaaggaggugcugaccugcagcugguga

SEQ ID NO: 2462 - RNA, 954 nt, Artificial Sequence
  derived and/or modified sequence opt5 from MC1_R__Homo_sapiens__AAD41349
auggccgugcagggcagccaaagacggcugcucgggucccugaacucuacccccacagcuaucccucagcuuggacuggccgcgaaucagacgggcgcucgcugccucgaggucagcauuuccgacgggcuguuccuuucucugggacucguuagccugguggaaaacgcccugguggucgccaccaucgcuaagaauagaaaccuccacuccccgauguacuguuuuauuugcugucuggcccuuucugaucugcucgugagcggcuccaauguucuggagacagcugugauccuucugcucgaagccggggcgcuggucgcccgggcugccgugcugcagcaacucgacaacguuauugaugugauuaccugcagcucuaugcuguccagccuuuguuuccugggagcuaucgccgucgaccgcuauaucucuaucuuuuacgcgcucagauaucauuccauugugacacugccccgggcccgcagagcuguggccgcuaucugggucgccagcguuguguucucuacccuuuuuauugccuacuaugaucacguggcuguccugcucugccuggugguuuucuuucuggcgaugcucgugcugauggccguccuuuacgugcauaugcuggcucgggccugucagcacgcccagggcaucgcucgccuccauaaaagacagcggccuguucaccaaggcuucgggcugaagggagccgugacacuuaccauucugcucggcaucuuuuuccugugcugggggcccuuuuuccugcaccucacgcugaucguccuuuguccugagcauccuaccugcggauguauuuuuaaaaauuucaaccuguuccucgcgcugaucauuugcaaugcuaucauugacccccugaucuaugccuuucacucccaggaacuucgcagaacacucaaggaggugcugaccugcagcugguga

SEQ ID NO: 2463 - protein, 317 aa, Artificial Sequence; identical to SEQ ID NO: 2456
  MC1_R__Homo_sapiens__Q1JUL4

SEQ ID NO: 2464 - RNA, 954 nt, Artificial Sequence; identical to SEQ ID NO: 2457
  MC1_R__Homo_sapiens__AHC09522

SEQ ID NO: 2465 - RNA, 954 nt, Artificial Sequence; identical to SEQ ID NO: 2458
  derived and/or modified sequence opt1 from MC1_R__Homo_sapiens__AHC09522

SEQ ID NO: 2466 - RNA, 954 nt, Artificial Sequence; identical to SEQ ID NO: 2459
  derived and/or modified sequence opt2 from MC1_R__Homo_sapiens__AHC09522

SEQ ID NO: 2467 - RNA, 954 nt, Artificial Sequence; identical to SEQ ID NO: 2460
  derived and/or modified sequence opt3 from MC1_R__Homo_sapiens__AHC09522

SEQ ID NO: 2468 - RNA, 954 nt, Artificial Sequence; identical to SEQ ID NO: 2461
  derived and/or modified sequence opt4 from MC1_R__Homo_sapiens__AHC09522

SEQ ID NO: 2469 - RNA, 954 nt, Artificial Sequence; identical to SEQ ID NO: 2462
  derived and/or modified sequence opt5 from MC1_R__Homo_sapiens__AHC09522

SEQ ID NO: 2470 - protein, 317 aa, Artificial Sequence
  MC1_R__Homo_sapiens__Q1JUL6
MAVQGSQRRLLGSLNSTPTAIPQLGLAANQTGARCLEVSISDGLFLSLGLVSLVENALVVATIAKNRNLHSPMYCFICCLALSDLLVSGSNVLETAVILLLEAGALVARAAVLQQLDNVIDVITCSSMLSSLCFLGAIAVDRYISIFYALRYHSIVTLPRARQAVAAIWVASVVFSTLFIAYYDHVAVLLCLVVFFLAMLVLMAVLYVHMLARACQHAQGIARLHKRQRPVHQGFGLKGAVTLTILLGIFFLCWGPFFLHLTLIVLCPEHPTCGCIFKNFNLFLALIICNAIIDPLIYAFHSQELRRTLKEVLTCSW

SEQ ID NO: 2471 - RNA, 954 nt, Artificial Sequence
  MC1_R__Homo_sapiens__AHC09804
auggcugugcagggaucccagagaagacuucugggcucccucaacuccacccccacagccaucccccagcuggggcuggcugccaaccagacaggagcccggugccuggagguguccaucucugacgggcucuuccucagccuggggcuggugagcuugguggagaacgcgcuggugguggccaccaucgccaagaaccggaaccugcacucacccauguacugcuucaucugcugccuggccuugucggaccugcuggugagcgggagcaacgugcuggagacggccgucauccuccugcuggaggccggugcacugguggcccgggcugcggugcugcagcagcuggacaaugucauugacgugaucaccugcagcuccaugcuguccagccucugcuuccugggcgccaucgccguggaccgcuacaucuccaucuucuacgcacugcgcuaccacagcaucgugacccugccgcgggcgcggcaagccguugcggccaucuggguggccagugucgucuucagcacgcucuucaucgccuacuacgaccacguggccguccugcugugccucguggucuucuuccuggcuaugcuggugcucauggccgugcuguacguccacaugcuggcccgggccugccagcacgcccagggcaucgcccggcuccacaagaggcagcgcccgguccaccagggcuuuggccuuaaaggcgcugucacccucaccauccugcugggcauuuucuuccucugcuggggccccuucuuccugcaucucacacucaucguccucugccccgagcaccccacgugcggcugcaucuucaagaacuucaaccucuuucucgcccucaucaucugcaaugccaucaucgacccccucaucuacgccuuccacagccaggagcuccgcaggacgcucaaggaggugcugacaugcuccugguga

SEQ ID NO: 2472 - RNA, 954 nt, Artificial Sequence
  derived and/or modified sequence opt1 from MC1_R__Homo_sapiens__AHC09804
auggccgugcagggcagccagcgccggcugcucgggucccugaacagcacccccaccgccaucccccagcugggccucgcggccaaccagacgggggcccgcugccuggaggucuccaucagcgacggccuguuccucucccuggggcuggugagccucguggagaacgcccuggucguggccaccaucgcgaagaaccggaaccugcacucccccauguacugcuucaucugcugccucgcccugagcgaccugcucguguccggcagcaacguccuggagaccgccgugauccugcuccuggaggccggcgcgcugguggcccgcgccgccguccuccagcagcuggacaacgugaucgacgugaucacgugcuccagcaugcuguccagccucugcuuccugggggccaucgcggucgaccgguacaucuccaucuucuacgcccugcgcuaccacagcaucgugacccucccccgggcccgccaggccguggccgcgaucugggucgccuccgugguguucagcacccuguucaucgccuacuacgaccacgucgccgugcugcucugccugguggucuucuuccuggccaugcucgugcugauggcggugcuguacguccacaugcucgcccgggccugccagcacgcccagggcaucgcccgccugcacaagcggcagcgccccgugcaccagggguucggccugaagggggcggucacccucaccauccugcugggcaucuucuuccucugcuggggcccguucuuccugcaccugacgcucaucgugcugugccccgagcacccgaccugcgggugcaucuucaagaacuucaaccuguuccucgcccugaucaucugcaacgccaucaucgacccccugaucuacgccuuccacucccaggagcugcggcgcacccucaaggaggugcugaccugcagcugguga

SEQ ID NO: 2473 - RNA, 954 nt, Artificial Sequence
  derived and/or modified sequence opt2 from MC1_R__Homo_sapiens__AHC09804
auggccguccagggcucccagcgccgccuccucggcucccucaacuccacccccaccgccaucccccagcucggccucgccgccaaccagaccggcgcccgcugccucgaggucuccaucuccgacggccucuuccucucccucggccucgucucccucgucgagaacgcccucgucgucgccaccaucgccaagaaccgcaaccuccacucccccauguacugcuucaucugcugccucgcccucuccgaccuccucgucuccggcuccaacguccucgagaccgccgucauccuccuccucgaggccggcgcccucgucgcccgcgccgccguccuccagcagcucgacaacgucaucgacgucaucaccugcuccuccaugcucuccucccucugcuuccucggcgccaucgccgucgaccgcuacaucuccaucuucuacgcccuccgcuaccacuccaucgucacccucccccgcgcccgccaggccgucgccgccaucugggucgccuccgucgucuucuccacccucuucaucgccuacuacgaccacgucgccguccuccucugccucgucgucuucuuccucgccaugcucguccucauggccguccucuacguccacaugcucgcccgcgccugccagcacgcccagggcaucgcccgccuccacaagcgccagcgccccguccaccagggcuucggccucaagggcgccgucacccucaccauccuccucggcaucuucuuccucugcuggggccccuucuuccuccaccucacccucaucguccucugccccgagcaccccaccugcggcugcaucuucaagaacuucaaccucuuccucgcccucaucaucugcaacgccaucaucgacccccucaucuacgccuuccacucccaggagcuccgccgcacccucaaggagguccucaccugcuccugguga

SEQ ID NO: 2474 - RNA, 954 nt, Artificial Sequence
  derived and/or modified sequence opt3 from MC1_R__Homo_sapiens__AHC09804
auggccgugcagggcagccaaagaaggcugcucgggucccuuaacucuacccccacagcuaucccucagcugggauuggcagccaaucagacuggugcgcggugcuuagaggucucaauuagugacggccuguuccuaagccucgggcugguuucccuuguggaaaacgcucugguaguggccacgauagcaaagaaucgcaacuugcacucuccaauguacuguuuuaucugcugucucgcccugucggaucugcucgucucaggaagcaauguguuagagaccgcuguuauucugcuuuuggaagcaggcgcccugguggcucgagccgcgguccuacagcaacucgacaacgugaucgauguaauuacaugcaguuccaugcugucuagccuuuguuuccugggugcaaucgccguugaccguuauauauccaucuuuuacgcuuugagauaucauucaauugugacucucccgagggcccggcaggcagucgcugccaucuggguggcgaguguggucuucagcacccuguuuauugccuacuaugaucacguugcaguguuacugugccucguaguguucuuucuugcuaugcuggucuugauggccgugcuauacguucauaugcuggcucgcgccugucagcacgcacaggggaucgccagacuccauaaaaggcaacggcccgugcaccagggauucggccugaagggcgcugucacacuuaccauacuguuggggaucuuuuuccucugcuggggaccauuuuuccugcacuuaacucugauugugcuauguccugagcaucccacaugcgguuguauuuuuaaaaauuucaaccucuuccuggcgcuuaucaucugcaaugcaauuauagacccuuugaucuaugccuuucacucucaggaacugcgccgaacccucaaggagguacugacgugcuccugguga

SEQ ID NO: 2475 - RNA, 954 nt, Artificial Sequence
  derived and/or modified sequence opt4 from MC1_R__Homo_sapiens__AHC09804
auggccgugcagggcagccagagaagacugcugggcagccugaacagcacccccaccgccaucccccagcugggccuggccgccaaccagaccggcgccagaugccuggaggugagcaucagcgacggccuguuccugagccugggccuggugagccugguggagaacgcccuggugguggccaccaucgccaagaacagaaaccugcacagccccauguacugcuucaucugcugccuggcccugagcgaccugcuggugagcggcagcaacgugcuggagaccgccgugauccugcugcuggaggccggcgcccugguggccagagccgccgugcugcagcagcuggacaacgugaucgacgugaucaccugcagcagcaugcugagcagccugugcuuccugggcgccaucgccguggacagauacaucagcaucuucuacgcccugagauaccacagcaucgugacccugcccagagccagacaggccguggccgccaucuggguggccagcgugguguucagcacccuguucaucgccuacuacgaccacguggccgugcugcugugccuggugguguucuuccuggccaugcuggugcugauggccgugcuguacgugcacaugcuggccagagccugccagcacgcccagggcaucgccagacugcacaagagacagagacccgugcaccagggcuucggccugaagggcgccgugacccugaccauccugcugggcaucuucuuccugugcuggggccccuucuuccugcaccugacccugaucgugcugugccccgagcaccccaccugcggcugcaucuucaagaacuucaaccuguuccuggcccugaucaucugcaacgccaucaucgacccccugaucuacgccuuccacagccaggagcugagaagaacccugaaggaggugcugaccugcagcugguga

SEQ ID NO: 2476 - RNA, 954 nt, Artificial Sequence
  derived and/or modified sequence opt5 from MC1_R__Homo_sapiens__AHC09804
auggccgugcagggcagccaaagacggcugcucgggucccugaacucuacccccacagcuaucccucagcuuggacuggccgcgaaucagacgggcgcucgcugccucgaggucagcauuuccgacgggcuguuccuuucucugggacucguuagccugguggaaaacgcccugguggucgccaccaucgcuaagaauagaaaccuccacuccccgauguacuguuuuauuugcugucuggcccuuucugaucugcucgugagcggcuccaauguucuggagacagcugugauccuucugcucgaagccggggcgcuggucgcccgggcugccgugcugcagcaacucgacaacguuauugaugugauuaccugcagcucuaugcuguccagccuuuguuuccugggagcuaucgccgucgaccgcuauaucucuaucuuuuacgcgcucagauaucauuccauugugacacugccccgggcccgccaggcuguggccgcuaucugggucgccagcguuguguucucuacccuuuuuauugccuacuaugaucacguggcuguccugcucugccuggugguuuucuuucuggcgaugcucgugcugauggccguccuuuacgugcauaugcuggcuagagccugucagcacgcccagggcaucgcucggcuccauaaacgccaaagaccuguucaccagggcuucgggcugaagggagccgugacacuuaccauucugcucggcaucuuuuuccugugcugggggcccuuuuuccugcaccucacgcugaucguccuuuguccugagcauccuaccugcggauguauuuuuaaaaauuucaaccuguuccucgcgcugaucauuugcaaugcuaucauugacccccugaucuaugccuuucacucccaggaacuucggcgcacacucaaggaggugcugaccugcagcugguga

SEQ ID NO: 2477 - protein, 317 aa, Artificial Sequence
  MC1_R__Homo_sapiens__Q1JUL8
MAVQGSQRRLLGSLNSTPTAIPQLGLAANQTGARCLEVSISDGLFLSLGLVSLVENALVVATIAKNRNLHSPMYCFICCLALSDLLVSGSNVLETAVILLLEAGALVARAAVLQQLDNVTDVITCSSMLSSLCFLGAIAVDRYISIFYALRYHSIVTLPRARRAVAAIWVASVVFSTLFIAYYDHVAVLLCLVVFFLAMLVLMAVLYVHMLARACQHAQGIARLHKRQRPVHQGFGLKGAVTLTILLGIFFLCWGPFFLHLTLIVLCPEHPTCGCIFKNFNLFLALIICNAIIDPLIYAFHSQELRRTLKEVLTCSW

SEQ ID NO: 2478 - RNA, 954 nt, Artificial Sequence
  MC1_R__Homo_sapiens__BAE94313
auggcugugcagggaucccagagaagacuucugggcucccucaacuccacccccacagccaucccccagcuggggcuggcugccaaccagacaggagcccggugccuggagguguccaucucugacgggcucuuccucagccuggggcuggugagcuugguggagaacgcgcuggugguggccaccaucgccaagaaccggaaccugcacucacccauguacugcuucaucugcugccuggccuugucggaccugcuggugagcgggagcaacgugcuggagacggccgucauccuccugcuggaggccggugcacugguggcccgggcugcggugcugcagcagcuggacaaugucacugacgugaucaccugcagcuccaugcuguccagccucugcuuccugggcgccaucgccguggaccgcuacaucuccaucuucuacgcacugcgcuaccacagcaucgugacccugccgcgggcgcggcgagccguugcggccaucuggguggccagugucgucuucagcacgcucuucaucgccuacuacgaccacguggccguccugcugugccucguggucuucuuccuggcuaugcuggugcucauggccgugcuguacguccacaugcuggcccgggccugccagcacgcccagggcaucgcccggcuccacaagaggcagcgcccgguccaccagggcuuuggccuuaaaggcgcugucacccucaccauccugcugggcauuuucuuccucugcuggggccccuucuuccugcaucucacacucaucguccucugccccgagcaccccacgugcggcugcaucuucaagaacuucaaccucuuucucgcccucaucaucugcaaugccaucaucgacccccucaucuacgccuuccacagccaggagcuccgcaggacgcucaaggaggugcugacaugcuccugguga

SEQ ID NO: 2479 - RNA, 954 nt, Artificial Sequence
  derived and/or modified sequence opt1 from MC1_R__Homo_sapiens__BAE94313
auggccgugcagggcagccagcgccggcugcucgggucccugaacagcacccccaccgccaucccccagcugggccucgcggccaaccagacgggggcccgcugccuggaggucuccaucagcgacggccuguuccucucccuggggcuggugagccucguggagaacgcccuggucguggccaccaucgcgaagaaccggaaccugcacucccccauguacugcuucaucugcugccucgcccugagcgaccugcucguguccggcagcaacguccuggagaccgccgugauccugcuccuggaggccggcgcgcugguggcccgcgccgccguccuccagcagcuggacaacgugaccgacgugaucacgugcuccagcaugcuguccagccucugcuuccugggggccaucgcggucgaccgguacaucuccaucuucuacgcccugcgcuaccacagcaucgugacccucccccgggcccgccgggccguggccgcgaucugggucgccuccgugguguucagcacccuguucaucgccuacuacgaccacgucgccgugcugcucugccugguggucuucuuccuggccaugcucgugcugauggcggugcuguacguccacaugcucgcccgcgccugccagcacgcccagggcaucgcccggcugcacaagcgccagcggcccgugcaccagggguucggccugaagggggcggucacccucacgauccugcugggcaucuucuuccucugcuggggcccguucuuccugcaccugacccucaucgugcugugccccgagcacccgaccugcgggugcaucuucaagaacuucaaccuguuccucgcccugaucaucugcaacgccaucaucgacccccugaucuacgccuuccacucccaggagcugcgccggacccucaaggaggugcugacgugcagcugguga

SEQ ID NO: 2480 - RNA, 954 nt, Artificial Sequence
  derived and/or modified sequence opt2 from MC1_R__Homo_sapiens__BAE94313
auggccguccagggcucccagcgccgccuccucggcucccucaacuccacccccaccgccaucccccagcucggccucgccgccaaccagaccggcgcccgcugccucgaggucuccaucuccgacggccucuuccucucccucggccucgucucccucgucgagaacgcccucgucgucgccaccaucgccaagaaccgcaaccuccacucccccauguacugcuucaucugcugccucgcccucuccgaccuccucgucuccggcuccaacguccucgagaccgccgucauccuccuccucgaggccggcgcccucgucgcccgcgccgccguccuccagcagcucgacaacgucaccgacgucaucaccugcuccuccaugcucuccucccucugcuuccucggcgccaucgccgucgaccgcuacaucuccaucuucuacgcccuccgcuaccacuccaucgucacccucccccgcgcccgccgcgccgucgccgccaucugggucgccuccgucgucuucuccacccucuucaucgccuacuacgaccacgucgccguccuccucugccucgucgucuucuuccucgccaugcucguccucauggccguccucuacguccacaugcucgcccgcgccugccagcacgcccagggcaucgcccgccuccacaagcgccagcgccccguccaccagggcuucggccucaagggcgccgucacccucaccauccuccucggcaucuucuuccucugcuggggccccuucuuccuccaccucacccucaucguccucugccccgagcaccccaccugcggcugcaucuucaagaacuucaaccucuuccucgcccucaucaucugcaacgccaucaucgacccccucaucuacgccuuccacucccaggagcuccgccgcacccucaaggagguccucaccugcuccugguga

SEQ ID NO: 2481 - RNA, 954 nt, Artificial Sequence
  derived and/or modified sequence opt3 from MC1_R__Homo_sapiens__BAE94313
auggccgugcagggcagccaaagaaggcugcucgggucccuuaacucuacccccacagcuaucccucagcugggauuggcagccaaucagacuggugcgcggugcuuagaggucucaauuagugacggccuguuccuaagccucgggcugguuucccuuguggaaaacgcucugguaguggccacgauagcaaagaaucgcaacuugcacucuccaauguacuguuuuaucugcugucucgcccugucggaucugcucgucucaggaagcaauguguuagagaccgcuguuauucugcuuuuggaagcaggcgcccugguggcucgagccgcgguccuacagcaacucgacaacgugacagauguaaucacuugcaguuccaugcugucuagccuuuguuuccugggugcaauugccguugaccguuauaucuccauauuuuacgcuuugagauaucauucaaucgugacccucccgagggcccggcgcgcagucgcugccauuuggguggcgaguguggucuucagcacacuguuuaucgccuacuaugaucacguugcaguguuacugugccucguaguguucuuucuugcuaugcuggucuugauggccgugcuauacguucauaugcuggcuagagccugucagcacgcacaggggauugccaggcuccauaaacggcagcgccccgugcaccaaggauucggccugaagggcgcugucacccuuacuauccuguuggggauauuuuuccucugcuggggacccuuuuuccugcacuuaacacugauugugcuauguccagagcauccuaccugcgguuguaucuuuaaaaauuucaaccucuuccuggcgcuuauuaucugcaaugcaaucauugacccuuugauauaugccuuucacucucaggaacugcgaagaacgcucaaggagguacugacuugcuccugguga

SEQ ID NO: 2482 - RNA, 954 nt, Artificial Sequence
  derived and/or modified sequence opt4 from MC1_R__Homo_sapiens__BAE94313
auggccgugcagggcagccagagaagacugcugggcagccugaacagcacccccaccgccaucccccagcugggccuggccgccaaccagaccggcgccagaugccuggaggugagcaucagcgacggccuguuccugagccugggccuggugagccugguggagaacgcccuggugguggccaccaucgccaagaacagaaaccugcacagccccauguacugcuucaucugcugccuggcccugagcgaccugcuggugagcggcagcaacgugcuggagaccgccgugauccugcugcuggaggccggcgcccugguggccagagccgccgugcugcagcagcuggacaacgugaccgacgugaucaccugcagcagcaugcugagcagccugugcuuccugggcgccaucgccguggacagauacaucagcaucuucuacgcccugagauaccacagcaucgugacccugcccagagccagaagagccguggccgccaucuggguggccagcgugguguucagcacccuguucaucgccuacuacgaccacguggccgugcugcugugccuggugguguucuuccuggccaugcuggugcugauggccgugcuguacgugcacaugcuggccagagccugccagcacgcccagggcaucgccagacugcacaagagacagagacccgugcaccagggcuucggccugaagggcgccgugacccugaccauccugcugggcaucuucuuccugugcuggggccccuucuuccugcaccugacccugaucgugcugugccccgagcaccccaccugcggcugcaucuucaagaacuucaaccuguuccuggcccugaucaucugcaacgccaucaucgacccccugaucuacgccuuccacagccaggagcugagaagaacccugaaggaggugcugaccugcagcugguga

SEQ ID NO: 2483 - RNA, 954 nt, Artificial Sequence
  derived and/or modified sequence opt5 from MC1_R__Homo_sapiens__BAE94313
auggccgugcagggcagccaaagacggcugcucgggucccugaacucuacccccacagcuaucccucagcuuggacuggccgcgaaucagacgggcgcucgcugccucgaggucagcauuuccgacgggcuguuccuuucucugggacucguuagccugguggaaaacgcccugguggucgccaccaucgcuaagaauagaaaccuccacuccccgauguacuguuuuauuugcugucuggcccuuucugaucugcucgugagcggcuccaauguucuggagacagcugugauccuucugcucgaagccggggcgcuggucgcccgggcugccgugcugcagcaacucgacaacguuaccgaugugauuacaugcagcucuaugcuguccagccuuuguuuccugggagcuaucgccgucgaccgcuauaucucuaucuuuuacgcgcucagauaucauuccauugugacccugccccgggcccgcagagcuguggccgcuauuugggucgccagcguuguguucucuacacuuuuuaucgccuacuaugaucacguggcuguccugcucugccuggugguuuucuuucuggcgaugcucgugcugauggccguccuuuacgugcauaugcuggcucgggccugucagcacgcccagggcauugcucgccuccauaaaagacagcggccuguucaccaaggcuucgggcugaagggagccgugacccuuacgauccugcucggcaucuuuuuccugugcugggggcccuuuuuccugcaccucacccugauuguccuuuguccugagcaucccacaugcggauguaucuuuaaaaauuucaaccuguuccucgcgcugauuaucugcaaugcuauuaucgacccucugauuuaugccuuucacucccaggaacuucgcagaacccucaaggaggugcugacaugcagcugguga

SEQ ID NO: 2484 - protein, 317 aa, Artificial Sequence [sequence omitted]

SEQ ID NO: 2485 - RNA, 954 nt, Artificial Sequence
  MC1_R__Homo_sapiens__AHC09531
auggcugugcagggaucccagagaagacuucugggcucccucaacuccacccccacagccaucccccagcuggggcuggcugccaaccagacaggagcccggugccuggagguguccaucucugacgggcucuuccucagccuggggcuggugagcuugguggagaacgcgcuggugguggccaccaucgccaagaaccggaaccugcacucacccauguacugcuucaucugcugccuggccuugucggaccugcuggugagcgggagcaacaugcuggagacggccgucauccuccugcuggaggccggugcacugguggcccgggcugcggugcugcagcagcuggacaaugucauugacgugaucaccugcagcuccaugcuguccagccucugcuuccugggcgccaucgccguggaccgcuacaucuccaucuucuacgcacugcgcuaccacagcaucgugacccugccgcgggcgcggcgagccguugcggccaucuggguggccagugucgucuucagcacgcucuucaucgccuacuacgaccacguggccguccugcugugccucguggucuucuuccuggcuaugcuggugcucauggccgugcuguacguccacaugcuggcccgggccugccagcacgcccagggcaucgcccggcuccacaagaggcagcgcccgguccaccagggcuuuggccuuaaaggcgcugucacccucaccauccugcugggcauuuucuuccucugcuggggccccuucuuccugcaucucacacucaucguccucugccccgagcaccccacgugcggcugcaucuucaagaacuucaaccucuuucucgcccucaucaucugcaaugccaucaucgacccccucaucuacgccuuccacagccaggagcuccgcaggacgcucaaggaggugcugacgugcuccugguga

SEQ ID NO: 2486 - RNA, 954 nt, Artificial Sequence
  derived and/or modified sequence opt1 from MC1_R__Homo_sapiens__AHC09531
auggccgugcagggcagccagcgccggcugcucgggucccugaacagcacccccaccgccaucccccagcugggccucgcggccaaccagacgggggcccgcugccuggaggucuccaucagcgacggccuguuccucucccuggggcuggugagccucguggagaacgcccuggucguggccaccaucgcgaagaaccggaaccugcacucccccauguacugcuucaucugcugccucgcccugagcgaccugcucguguccggcagcaacaugcuggagaccgccgucauccugcuccuggaggccggcgcgcugguggcccgcgccgccgugcuccagcagcuggacaacgucaucgacgugaucacgugcuccagcaugcuguccagccucugcuuccugggggccaucgcgguggaccgguacaucuccaucuucuacgcccugcgcuaccacagcaucgucacccucccccgggcccgccgggccguggccgcgaucuggguggccuccgucguguucagcacccuguucaucgccuacuacgaccacguggccguccugcucugccuggugguguucuuccuggccaugcucguccugauggcggugcuguacgugcacaugcucgcccgcgccugccagcacgcccagggcaucgcccggcugcacaagcgccagcggcccguccaccagggguucggccugaagggggcggugacccucaccauccugcugggcaucuucuuccucugcuggggcccguucuuccugcaccugacgcucaucguccugugccccgagcacccgaccugcgggugcaucuucaagaacuucaaccuguuccucgcccugaucaucugcaacgccaucaucgacccccugaucuacgccuuccacucccaggagcugcgccggacccucaaggaggugcugaccugcagcugguga

SEQ ID NO: 2487 - RNA, 954 nt, Artificial Sequence
  derived and/or modified sequence opt2 from MC1_R__Homo_sapiens__AHC09531
auggccguccagggcucccagcgccgccuccucggcucccucaacuccacccccaccgccaucccccagcucggccucgccgccaaccagaccggcgcccgcugccucgaggucuccaucuccgacggccucuuccucucccucggccucgucucccucgucgagaacgcccucgucgucgccaccaucgccaagaaccgcaaccuccacucccccauguacugcuucaucugcugccucgcccucuccgaccuccucgucuccggcuccaacaugcucgagaccgccgucauccuccuccucgaggccggcgcccucgucgcccgcgccgccguccuccagcagcucgacaacgucaucgacgucaucaccugcuccuccaugcucuccucccucugcuuccucggcgccaucgccgucgaccgcuacaucuccaucuucuacgcccuccgcuaccacuccaucgucacccucccccgcgcccgccgcgccgucgccgccaucugggucgccuccgucgucuucuccacccucuucaucgccuacuacgaccacgucgccguccuccucugccucgucgucuucuuccucgccaugcucguccucauggccguccucuacguccacaugcucgcccgcgccugccagcacgcccagggcaucgcccgccuccacaagcgccagcgccccguccaccagggcuucggccucaagggcgccgucacccucaccauccuccucggcaucuucuuccucugcuggggccccuucuuccuccaccucacccucaucguccucugccccgagcaccccaccugcggcugcaucuucaagaacuucaaccucuuccucgcccucaucaucugcaacgccaucaucgacccccucaucuacgccuuccacucccaggagcuccgccgcacccucaaggagguccucaccugcuccugguga

SEQ ID NO: 2488 - RNA, 954 nt, Artificial Sequence
  derived and/or modified sequence opt3 from MC1_R__Homo_sapiens__AHC09531
auggccgugcagggcagccaaagaaggcugcucgggucccuuaacucuacccccacagcuaucccucagcugggauuggcagccaaucagacuggugcgcggugcuuagaggucucaauuagugacggccuguuccuaagccucgggcugguuucccuuguggaaaacgcucugguaguggccacgauagcaaagaaucgcaacuugcacucuccaauguacuguuuuaucugcugucucgcccugucggaucugcucgucucaggaagcaauauguuagagaccgcugugauucugcuuuuggaagcaggcgcccugguugcucgagccgcggugcuacagcaacucgacaacgucaucgaugugauuacaugcaguuccaugcugucuagccuuuguuuccugggugcaaucgccguagaccguuauauauccaucuuuuacgcuuugagauaucauucaauuguuacucucccgagggcccggcgcgcaguggcugccaucugggucgcgagugugguguucagcacccuguuuauugccuacuaugaucacgucgcaguuuuacugugccucgugguauucuuucuugcuaugcugguguugauggccguccuauacgugcauaugcuggcuagagccugucagcacgcacaggggaucgccaggcuccauaaacggcagcgccccguucaccaaggauucggccugaagggcgcugugacacuuaccauacuguuggggaucuuuuuccucugcuggggaccauuuuuccugcacuuaacucugauuguccuauguccugagcaucccacaugcgguuguauuuuuaaaaauuucaaccucuuccuggcgcuuaucaucugcaaugcaauuauagacccuuugaucuaugccuuucacucucaggaacugcgaagaacccucaaggaggugcugacgugcuccugguga

SEQ ID NO: 2489 - RNA, 954 nt, Artificial Sequence
  derived and/or modified sequence opt4 from MC1_R__Homo_sapiens__AHC09531
auggccgugcagggcagccagagaagacugcugggcagccugaacagcacccccaccgccaucccccagcugggccuggccgccaaccagaccggcgccagaugccuggaggugagcaucagcgacggccuguuccugagccugggccuggugagccugguggagaacgcccuggugguggccaccaucgccaagaacagaaaccugcacagccccauguacugcuucaucugcugccuggcccugagcgaccugcuggugagcggcagcaacaugcuggagaccgccgugauccugcugcuggaggccggcgcccugguggccagagccgccgugcugcagcagcuggacaacgugaucgacgugaucaccugcagcagcaugcugagcagccugugcuuccugggcgccaucgccguggacagauacaucagcaucuucuacgcccugagauaccacagcaucgugacccugcccagagccagaagagccguggccgccaucuggguggccagcgugguguucagcacccuguucaucgccuacuacgaccacguggccgugcugcugugccuggugguguucuuccuggccaugcuggugcugauggccgugcuguacgugcacaugcuggccagagccugccagcacgcccagggcaucgccagacugcacaagagacagagacccgugcaccagggcuucggccugaagggcgccgugacccugaccauccugcugggcaucuucuuccugugcuggggccccuucuuccugcaccugacccugaucgugcugugccccgagcaccccaccugcggcugcaucuucaagaacuucaaccuguuccuggcccugaucaucugcaacgccaucaucgacccccugaucuacgccuuccacagccaggagcugagaagaacccugaaggaggugcugaccugcagcugguga

SEQ ID NO: 2490 - RNA, 954 nt, Artificial Sequence
  derived and/or modified sequence opt5 from MC1_R__Homo_sapiens__AHC09531
auggccgugcagggcagccaaagacggcugcucgggucccugaacucuacccccacagcuaucccucagcuuggacuggccgcgaaucagacgggcgcucgcugccucgaggucagcauuuccgacgggcuguuccuuucucugggacucguuagccugguggaaaacgcccugguggucgccaccaucgcuaagaauagaaaccuccacuccccgauguacuguuuuauuugcugucuggcccuuucugaucugcucgugagcggcuccaauaugcuggagacagcuguuauccuucugcucgaagccggggcgcugguggcccgggcugccguccugcagcaacucgacaacgugauugauguuauuaccugcagcucuaugcuguccagccuuuguuuccugggagcuaucgccguggaccgcuauaucucuaucuuuuacgcgcucagauaucauuccauugucacacugccccgggcccgcagagcuguggccgcuaucuggguggccagcgucguuuucucuacccuuuuuauugccuacuaugaucacguggcugugcugcucugccuggucguguucuuucuggcgaugcucguucugauggccgugcuuuacguccauaugcuggcucgggccugucagcacgcccagggcaucgcucgccuccauaaaagacagcggccugugcaccaaggcuucgggcugaagggagccguuacacuuaccauucugcucggcaucuuuuuccugugcugggggcccuuuuuccugcaccucacgcugaucgugcuuuguccugagcauccuaccugcggauguauuuuuaaaaauuucaaccuguuccucgcgcugaucauuugcaaugcuaucauugacccccugaucuaugccuuucacucccaggaacuucgcagaacacucaaggagguccugaccugcagcugguga

SEQ ID NO: 2491 - protein, 317 aa, Artificial Sequence [sequence omitted]

SEQ ID NO: 2492 - RNA, 954 nt, Artificial Sequence
  MC1_R__Homo_sapiens__BAE94311
auggcugugcagggaucccagagaagacuucugggcucccucaacuccacccccacagccaucccccagcuggggcuggcugccaaccagacaggagcccggugccuggagguguccaucucugacgggcucuuccucagccuggggcuggugagcuugguggagaacgcgcuggugguggccaccaucgccaagaaccagaaccugcacucacccauguacugcuucaucugcugccuggccuugucggaccugcuggugagcgggagcaacgugcuggagacggccgucauccuccugcuggaggccggugcacugguggcccgggcugcggugcugcagcagcuggacaaugucauugacgugaucaccugcagcuccaugcuguccagccucugcuuccugggcgccaucgccguggaccgcuacaucuccaucuucuacgcacugcgcuaccacagcaucgugacccugccgcgggcgcggcaagccguugcggccaucuggguggccagugucgucuucagcacgcucuucaucgccuacuacgaccacguggccguccugcugugccucguggucuucuuccuggcuaugcuggugcucauggccgugcuguacguccacaugcuggcccgggccugccagcacgcccagggcaucgcccggcuccacaagaggcagcgcccgguccaccagggcuuuggccuuaaaggcgcugucacccucaccauccugcugggcauuuucuuccucugcuggggccccuucuuccugcaucucacacucaucguccucugccccgagcaccccacgugcggcugcaucuucaagaacuucaaccucuuucucgcccucaucaucugcaaugccaucaucgacccccucaucuacgccuuccacagccaggagcuccgcaggacgcucaaggaggugcugacaugcuccugguga

SEQ ID NO: 2493 - RNA, 954 nt, Artificial Sequence
  derived and/or modified sequence opt1 from MC1_R__Homo_sapiens__BAE94311
auggccgugcagggcagccagcgccggcugcucgggucccugaacagcacccccaccgccaucccccagcugggccucgcggccaaccagacgggggcccgcugccuggaggucuccaucagcgacggccuguuccucucccuggggcuggugagccucguggagaacgcccuggucguggccaccaucgcgaagaaccagaaccugcacucccccauguacugcuucaucugcugccucgcccugagcgaccugcucguguccggcagcaacguccuggagaccgccgugauccugcuccuggaggccggcgcgcugguggcccgggccgccguccuccagcagcuggacaacgugaucgacgugaucacgugcuccagcaugcuguccagccucugcuuccugggggccaucgcggucgaccgcuacaucuccaucuucuacgcccugcgguaccacagcaucgugacccucccccgcgcccggcaggccguggccgcgaucugggucgccuccgugguguucagcacccuguucaucgccuacuacgaccacgucgccgugcugcucugccugguggucuucuuccuggccaugcucgugcugauggcggugcuguacguccacaugcucgcccgcgccugccagcacgcccagggcaucgcccggcugcacaagcgccagcggcccgugcaccagggguucggccugaagggggcggucacccucaccauccugcugggcaucuucuuccucugcuggggcccguucuuccugcaccugacgcucaucgugcugugccccgagcacccgaccugcgggugcaucuucaagaacuucaaccuguuccucgcccugaucaucugcaacgccaucaucgacccccugaucuacgccuuccacucccaggagcugcgccggacccucaaggaggugcugaccugcagcugguga

SEQ ID NO: 2494 - RNA, 954 nt, Artificial Sequence
  derived and/or modified sequence opt2 from MC1_R__Homo_sapiens__BAE94311
auggccguccagggcucccagcgccgccuccucggcucccucaacuccacccccaccgccaucccccagcucggccucgccgccaaccagaccggcgcccgcugccucgaggucuccaucuccgacggccucuuccucucccucggccucgucucccucgucgagaacgcccucgucgucgccaccaucgccaagaaccagaaccuccacucccccauguacugcuucaucugcugccucgcccucuccgaccuccucgucuccggcuccaacguccucgagaccgccgucauccuccuccucgaggccggcgcccucgucgcccgcgccgccguccuccagcagcucgacaacgucaucgacgucaucaccugcuccuccaugcucuccucccucugcuuccucggcgccaucgccgucgaccgcuacaucuccaucuucuacgcccuccgcuaccacuccaucgucacccucccccgcgcccgccaggccgucgccgccaucugggucgccuccgucgucuucuccacccucuucaucgccuacuacgaccacgucgccguccuccucugccucgucgucuucuuccucgccaugcucguccucauggccguccucuacguccacaugcucgcccgcgccugccagcacgcccagggcaucgcccgccuccacaagcgccagcgccccguccaccagggcuucggccucaagggcgccgucacccucaccauccuccucggcaucuucuuccucugcuggggccccuucuuccuccaccucacccucaucguccucugccccgagcaccccaccugcggcugcaucuucaagaacuucaaccucuuccucgcccucaucaucugcaacgccaucaucgacccccucaucuacgccuuccacucccaggagcuccgccgcacccucaaggagguccucaccugcuccugguga

SEQ ID NO: 2495 - RNA, 954 nt, Artificial Sequence
  derived and/or modified sequence opt3 from MC1_R__Homo_sapiens__BAE94311
auggccgugcagggcagccaaagaaggcugcucgggucccuuaacucuacccccacagcuaucccucagcugggauuggcagccaaucagacuggugcgcggugcuuagaggucucaauuagugacggccuguuccuaagccucgggcugguuucccuuguggaaaacgcucugguaguggccacgauagcaaagaaucagaacuugcacucuccaauguacuguuuuaucugcugucucgcccugucggaucugcucgucucaggaagcaauguguuagagaccgcuguuauucugcuuuuggaagcaggcgcccugguggcucgcgccgcgguccuacaacagcucgacaacgugaucgauguaauuacaugcaguuccaugcugucuagccuuuguuuccugggugcaaucgccguugaccgauauauauccaucuuuuacgcuuugcguuaucauucaauugugacucucccgagagccaggcaggcagucgcugccaucuggguggcgaguguggucuucagcacccuguuuauugccuacuaugaucacguugcaguguuacugugccucguaguguucuuucuugcuaugcuggucuugauggccgugcuauacguucauaugcuggcucgggccugucagcacgcacaagggaucgcccgccuccauaaaagacagaggcccgugcaccagggauucggccugaagggcgcugucacacuuaccauacuguuggggaucuuuuuccucugcuggggaccauuuuuccugcacuuaacucugauugugcuauguccugagcaucccacaugcgguuguauuuuuaaaaauuucaaccucuuccuggcgcuuaucaucugcaaugcaauuauagacccuuugaucuaugccuuucacucucaggaacugcggcgcacccucaaggagguacugacgugcuccugguga

SEQ ID NO: 2496 - RNA, 954 nt, Artificial Sequence
  derived and/or modified sequence opt4 from MC1_R__Homo_sapiens__BAE94311
auggccgugcagggcagccagagaagacugcugggcagccugaacagcacccccaccgccaucccccagcugggccuggccgccaaccagaccggcgccagaugccuggaggugagcaucagcgacggccuguuccugagccugggccuggugagccugguggagaacgcccuggugguggccaccaucgccaagaaccagaaccugcacagccccauguacugcuucaucugcugccuggcccugagcgaccugcuggugagcggcagcaacgugcuggagaccgccgugauccugcugcuggaggccggcgcccugguggccagagccgccgugcugcagcagcuggacaacgugaucgacgugaucaccugcagcagcaugcugagcagccugugcuuccugggcgccaucgccguggacagauacaucagcaucuucuacgcccugagauaccacagcaucgugacccugcccagagccagacaggccguggccgccaucuggguggccagcgugguguucagcacccuguucaucgccuacuacgaccacguggccgugcugcugugccuggugguguucuuccuggccaugcuggugcugauggccgugcuguacgugcacaugcuggccagagccugccagcacgcccagggcaucgccagacugcacaagagacagagacccgugcaccagggcuucggccugaagggcgccgugacccugaccauccugcugggcaucuucuuccugugcuggggccccuucuuccugcaccugacccugaucgugcugugccccgagcaccccaccugcggcugcaucuucaagaacuucaaccuguuccuggcccugaucaucugcaacgccaucaucgacccccugaucuacgccuuccacagccaggagcugagaagaacccugaaggaggugcugaccugcagcugguga

SEQ ID NO: 2497 - RNA, 954 nt, Artificial Sequence
  derived and/or modified sequence opt5 from MC1_R__Homo_sapiens__BAE94311
auggccgugcagggcagccaaagacggcugcucgggucccugaacucuacccccacagcuaucccucagcuuggacuggccgcgaaucagacgggcgcucgcugccucgaggucagcauuuccgacgggcuguuccuuucucugggacucguuagccugguggaaaacgcccugguggucgccaccaucgcuaagaaucagaaccuccacuccccgauguacuguuuuauuugcugucuggcccuuucugaucugcucgugagcggcuccaauguucuggagacagcugugauccuucugcucgaagccggggcgcuggucgccagagcugccgugcugcaacagcucgacaacguuauugaugugauuaccugcagcucuaugcuguccagccuuuguuuccugggagcuaucgccgucgaccgguauaucucuaucuuuuacgcgcuccgcuaucauuccauugugacacugcccagagcccggcaggcuguggccgcuaucugggucgccagcguuguguucucuacccuuuuuauugccuacuaugaucacguggcuguccugcucugccuggugguuuucuuucuggcgaugcucgugcugauggccguccuuuacgugcauaugcuggcucgcgccugucagcacgcccaaggcaucgcuagacuccauaaacggcagcgcccuguucaccagggcuucgggcugaagggagccgugacacuuaccauucugcucggcaucuuuuuccugugcugggggcccuuuuuccugcaccucacgcugaucguccuuuguccugagcauccuaccugcggauguauuuuuaaaaauuucaaccuguuccucgcgcugaucauuugcaaugcuaucauugacccccugaucuaugccuuucacucccaggaacuuagacggacacucaaggaggugcugaccugcagcugguga

SEQ ID NO: 2498 - protein, 317 aa, Artificial Sequence [sequence omitted]

SEQ ID NO: 2499 - RNA, 954 nt, Artificial Sequence
  MC1_R__Homo_sapiens__BAE94309
auggcugugcagggaucccagagaagacuucugggcucccucaacuccacccccacagccaucccccagcuggggcuggcugccaaccagacaggagcccggugccuggagguguccaucucugacgggcucuuccucagccuggggcuggugagcuugguggagaacgcgcuggugguggccaccaucgccaagaaccggaaccugcacucacccauguacugcuucaucugcugccuggccuugucggaccugcuggugagcgggagcaacgugcuggagacggccgucauccuccugcuggaggccggugcacugguggcccgggcugcggugcugcagcagcuggacaaugucauugacgugaucaccugcagcuccaugcuguccagccucugcuuccugggcgccaucgccguggaccgcuacaucuccaucuucuacgcacugcgcuaccacagcaucgugacccugccgcgggcgcggcaagccguuggggccaucuggguggccagugucgucuucagcacgcucuucaucgccuacuacgaccacguggccguccugcugugccucguggucuucuuccuggcuaugcuggugcucauggccgugcuguacguccacaugcuggcccgggccugccagcacgcccagggcaucgcccggcuccacaagaggcagcgcccgguccaccagggcuuuggccuuaaaggcgcugucacccucaccauccugcugggcauuuucuuccucugcuggggccccuucuuccugcaucucacacucaucguccucugccccgagcaccccacgugcggcugcaucuucaagaacuucaaccucuuucucgcccucaucaucugcaaugccaucaucgacccccucaucuacgccuuccacagccaggagcuccgcaggacgcucaaggaggugcugacaugcuccugguga

SEQ ID NO: 2500 - RNA, 954 nt, Artificial Sequence
  derived and/or modified sequence opt1 from MC1_R__Homo_sapiens__BAE94309
auggccgugcagggcagccagcgccggcugcucgggucccugaacagcacccccaccgccaucccccagcugggccucgcggccaaccagacgggggcccgcugccuggaggucuccaucagcgacggccuguuccucucccuggggcuggugagccucguggagaacgcccuggucguggccaccaucgcgaagaaccggaaccugcacucccccauguacugcuucaucugcugccucgcccugagcgaccugcucguguccggcagcaacguccuggagaccgccgugauccugcuccuggaggccggcgcgcugguggcccgcgccgccguccuccagcagcuggacaacgugaucgacgugaucacgugcuccagcaugcuguccagccucugcuuccugggggccaucgcggucgaccgguacaucuccaucuucuacgcccugcgcuaccacagcaucgugacccucccccgggcccgccaggccgugggcgccaucugggucgcguccgugguguucagcacccuguucaucgccuacuacgaccacgucgccgugcugcucugccugguggucuucuuccuggccaugcucgugcugauggccgugcuguacguccacaugcucgcgcgggccugccagcacgcccaggggaucgcccgccugcacaagcggcagcgccccgugcaccagggcuucgggcugaagggcgccgucacccucaccauccugcugggcaucuucuuccucugcugggggccguucuuccugcaccugacgcucaucgugcugugccccgagcacccgaccugcggcugcaucuucaagaacuucaaccuguuccucgcgcugaucaucugcaacgccaucaucgacccccugaucuacgccuuccacucccaggagcugcggcgcacccucaaggaggugcugaccugcagcugguga

SEQ ID NO: 2501 - RNA, 954 nt, Artificial Sequence
  derived and/or modified sequence opt2 from MC1_R__Homo_sapiens__BAE94309
auggccguccagggcucccagcgccgccuccucggcucccucaacuccacccccaccgccaucccccagcucggccucgccgccaaccagaccggcgcccgcugccucgaggucuccaucuccgacggccucuuccucucccucggccucgucucccucgucgagaacgcccucgucgucgccaccaucgccaagaaccgcaaccuccacucccccauguacugcuucaucugcugccucgcccucuccgaccuccucgucuccggcuccaacguccucgagaccgccgucauccuccuccucgaggccggcgcccucgucgcccgcgccgccguccuccagcagcucgacaacgucaucgacgucaucaccugcuccuccaugcucuccucccucugcuuccucggcgccaucgccgucgaccgcuacaucuccaucuucuacgcccuccgcuaccacuccaucgucacccucccccgcgcccgccaggccgucggcgccaucugggucgccuccgucgucuucuccacccucuucaucgccuacuacgaccacgucgccguccuccucugccucgucgucuucuuccucgccaugcucguccucauggccguccucuacguccacaugcucgcccgcgccugccagcacgcccagggcaucgcccgccuccacaagcgccagcgccccguccaccagggcuucggccucaagggcgccgucacccucaccauccuccucggcaucuucuuccucugcuggggccccuucuuccuccaccucacccucaucguccucugccccgagcaccccaccugcggcugcaucuucaagaacuucaaccucuuccucgcccucaucaucugcaacgccaucaucgacccccucaucuacgccuuccacucccaggagcuccgccgcacccucaaggagguccucaccugcuccugguga

SEQ ID NO: 2502 - RNA, 954 nt, Artificial Sequence
  derived and/or modified sequence opt3 from MC1_R__Homo_sapiens__BAE94309
auggccgugcagggcagccaaagaaggcugcucgggucccuuaacucuacccccacagcuaucccucagcugggauuggcagccaaucagacuggugcgcggugcuuagaggucucaauuagugacggccuguuccuaagccucgggcugguuucccuuguggaaaacgcucugguaguggccacgauagcaaagaaucgcaacuugcacucuccaauguacuguuuuaucugcugucucgcccugucggaucugcucgucucaggaagcaauguguuagagaccgcuguuauucugcuuuuggaagcaggcgcccugguggcucgagccgcgguccuacagcaacucgacaacgugaucgauguaauuacaugcaguuccaugcugucuagccuuuguuuccugggugcaaucgccguugaccguuauauauccaucuuuuacgcuuugagauaucauucaauugugacucucccgagggcccggcaggcagucggggcuaucuggguggccaguguggucuucagcacccuguuuauugcguacuaugaucacguugccguguuacugugccucguaguguucuuucuugcaaugcuggucuugauggcugugcuauacguucauaugcuggcccgcgcuugucagcacgcccagggaaucgcaagacuccauaaaaggcaacggcccgugcaccagggcuucggccugaagggggccgucacacuuaccauacuguugggaaucuuuuuccucugcugggguccauuuuuccugcacuuaacucugauugugcuauguccugagcaucccacaugcggcuguauuuuuaaaaauuucaaccucuuccuggcucuuaucaucugcaaugcgauuauagacccuuugaucuaugcauuucacucucaggaacugcgccgaacccucaaggagguacugacgugcuccugguga

SEQ ID NO: 2503 - RNA, 954 nt, Artificial Sequence
  derived and/or modified sequence opt4 from MC1_R__Homo_sapiens__BAE94309
auggccgugcagggcagccagagaagacugcugggcagccugaacagcacccccaccgccaucccccagcugggccuggccgccaaccagaccggcgccagaugccuggaggugagcaucagcgacggccuguuccugagccugggccuggugagccugguggagaacgcccuggugguggccaccaucgccaagaacagaaaccugcacagccccauguacugcuucaucugcugccuggcccugagcgaccugcuggugagcggcagcaacgugcuggagaccgccgugauccugcugcuggaggccggcgcccugguggccagagccgccgugcugcagcagcuggacaacgugaucgacgugaucaccugcagcagcaugcugagcagccugugcuuccugggcgccaucgccguggacagauacaucagcaucuucuacgcccugagauaccacagcaucgugacccugcccagagccagacaggccgugggcgccaucuggguggccagcgugguguucagcacccuguucaucgccuacuacgaccacguggccgugcugcugugccuggugguguucuuccuggccaugcuggugcugauggccgugcuguacgugcacaugcuggccagagccugccagcacgcccagggcaucgccagacugcacaagagacagagacccgugcaccagggcuucggccugaagggcgccgugacccugaccauccugcugggcaucuucuuccugugcuggggccccuucuuccugcaccugacccugaucgugcugugccccgagcaccccaccugcggcugcaucuucaagaacuucaaccuguuccuggcccugaucaucugcaacgccaucaucgacccccugaucuacgccuuccacagccaggagcugagaagaacccugaaggaggugcugaccugcagcugguga

SEQ ID NO: 2504 - RNA, 954 nt, Artificial Sequence
  derived and/or modified sequence opt5 from MC1_R__Homo_sapiens__BAE94309
auggccgugcagggcagccaaagacggcugcucgggucccugaacucuacccccacagcuaucccucagcuuggacuggccgcgaaucagacgggcgcucgcugccucgaggucagcauuuccgacgggcuguuccuuucucugggacucguuagccugguggaaaacgcccugguggucgccaccaucgcuaagaauagaaaccuccacuccccgauguacuguuuuauuugcugucuggcccuuucugaucugcucgugagcggcuccaauguucuggagacagcugugauccuucugcucgaagccggggcgcuggucgcccgggcugccgugcugcagcaacucgacaacguuauugaugugauuaccugcagcucuaugcuguccagccuuuguuuccugggagcuaucgccgucgaccgcuauaucucuaucuuuuacgcgcucagauaucauuccauugugacacugccccgggcccgccaggcugugggcgccaucugggucgcuagcguuguguucucuacccuuuuuauugccuacuaugaucacguggccguccugcucugccuggugguuuucuuucuggcuaugcucgugcugauggcgguccuuuacgugcauaugcuggccagagcuugucagcacgcccagggcaucgcccggcuccauaaacgccaaagaccuguucaccagggguucggacugaagggcgcugugacacuuaccauucugcucgggaucuuuuuccugugcuggggacccuuuuuccugcaccucacgcugaucguccuuuguccugagcauccuaccugcggcuguauuuuuaaaaauuucaaccuguuccucgcccugaucauuugcaaugcgaucauugacccccugaucuaugcuuuucacucccaggaacuucggcgcacacucaaggaggugcugaccugcagcugguga

SEQ ID NO: 2505 - protein, 317 aa, Artificial Sequence [sequence omitted]

SEQ ID NO: 2506 - RNA, 954 nt, Artificial Sequence
  MC1_R__Homo_sapiens__BAE94308
auggcugugcagggaucccagagaagacuucugggcucccucaacuccacccccacagccaucccccagcuggggcuggcugccaaccagacaggagcccggugccuggagguguccaucucugacgggcucuuccucagccuggggcuggugagcuugguggagaacgcgcuggugguggccaccaucgccaagaaccggaaccugcacucacccauguacugcuucaucugcugccuggccuugucggaccugcuggugagcgggagcaacgugcuggagacggccgucauccuccugcuggaggccggugcacugguggcccgggcugcggugcugcagcagcuggacaaugucacugacgugaucaccugcagcuccaugcuguccagccucugcuuccugggcgccaucgccguggaccgcuacaucuccaucuucuacgcacugcgcuaccacagcaucgugacccugacgcgggcgcggcgagccguugcggccaucuggguggccagugucgucuucagcacgcucuucaucgccuacuacgaccacguggccguccugcugugccucguggucuucuuccuggcuaugcuggugcucauggccgugcuguacguccacaugcuggcccgggccugccagcacgcccagggcaucgcccggcuccacaagaggcagcgcccgguccaccagggcuuuggccuuaaaggcgcugucacccucaccauccugcugggcauuuucuuccucugcuggggccccuucuuccugcaucucacacucaucguccucugccccgagcaccccacgugcggcugcaucuucaagaacuucaaccucuuucucgcccucaucaucugcaaugccaucaucgacccccucaucuacgccuuccacagccaggagcuccgcaggacgcucaaggaggugcugacaugcuccugguga

SEQ ID NO: 2507 - RNA, 954 nt, Artificial Sequence
  derived and/or modified sequence opt1 from MC1_R__Homo_sapiens__BAE94308
auggccgugcagggcagccagcgccggcugcucgggucccugaacagcacccccaccgccaucccccagcugggccucgcggccaaccagacgggggcccgcugccuggaggucuccaucagcgacggccuguuccucucccuggggcuggugagccucguggagaacgcccuggucguggccaccaucgcgaagaaccggaaccugcacucccccauguacugcuucaucugcugccucgcccugagcgaccugcucguguccggcagcaacguccuggagaccgccgugauccugcuccuggaggccggcgcgcugguggcccgcgccgccguccuccagcagcuggacaacgugaccgacgugaucacgugcuccagcaugcuguccagccucugcuuccugggggccaucgcggucgaccgguacaucuccaucuucuacgcccugcgcuaccacagcaucgugacccucacccgggcccgccgggccguggccgcgaucugggucgccuccgugguguucagcacccuguucaucgccuacuacgaccacgucgccgugcugcucugccugguggucuucuuccuggccaugcucgugcugauggcggugcuguacguccacaugcucgcccgcgccugccagcacgcccagggcaucgcccggcugcacaagcgccagcggcccgugcaccagggguucggccugaagggggcggucacgcucaccauccugcugggcaucuucuuccucugcuggggccccuucuuccugcaccugacccucaucgugcugugcccggagcacccgaccugcgggugcaucuucaagaacuucaaccuguuccucgcccugaucaucugcaacgccaucaucgacccccugaucuacgccuuccacucccaggagcugcgccggacgcucaaggaggugcugaccugcagcugguga

SEQ ID NO: 2508 - RNA, 954 nt, Artificial Sequence
  derived and/or modified sequence opt2 from MC1_R__Homo_sapiens__BAE94308
auggccguccagggcucccagcgccgccuccucggcucccucaacuccacccccaccgccaucccccagcucggccucgccgccaaccagaccggcgcccgcugccucgaggucuccaucuccgacggccucuuccucucccucggccucgucucccucgucgagaacgcccucgucgucgccaccaucgccaagaaccgcaaccuccacucccccauguacugcuucaucugcugccucgcccucuccgaccuccucgucuccggcuccaacguccucgagaccgccgucauccuccuccucgaggccggcgcccucgucgcccgcgccgccguccuccagcagcucgacaacgucaccgacgucaucaccugcuccuccaugcucuccucccucugcuuccucggcgccaucgccgucgaccgcuacaucuccaucuucuacgcccuccgcuaccacuccaucgucacccucacccgcgcccgccgcgccgucgccgccaucugggucgccuccgucgucuucuccacccucuucaucgccuacuacgaccacgucgccguccuccucugccucgucgucuucuuccucgccaugcucguccucauggccguccucuacguccacaugcucgcccgcgccugccagcacgcccagggcaucgcccgccuccacaagcgccagcgccccguccaccagggcuucggccucaagggcgccgucacccucaccauccuccucggcaucuucuuccucugcuggggccccuucuuccuccaccucacccucaucguccucugccccgagcaccccaccugcggcugcaucuucaagaacuucaaccucuuccucgcccucaucaucugcaacgccaucaucgacccccucaucuacgccuuccacucccaggagcuccgccgcacccucaaggagguccucaccugcuccugguga

SEQ ID NO: 2509 - RNA, 954 nt, Artificial Sequence
  derived and/or modified sequence opt3 from MC1_R__Homo_sapiens__BAE94308
auggccgugcagggcagccaaagaaggcugcucgggucccuuaacucuacccccacagcuaucccucagcugggauuggcagccaaucagacuggugcgcggugcuuagaggucucaauuagugacggccuguuccuaagccucgggcugguuucccuuguggaaaacgcucugguaguggccacgauagcaaagaaucgcaacuugcacucuccaauguacuguuuuaucugcugucucgcccugucggaucugcucgucucaggaagcaauguguuagagaccgcuguuauucugcuuuuggaagcaggcgcccugguggcucgagccgcgguccuacagcaacucgacaacgugacagauguaaucacuugcaguuccaugcugucuagccuuuguuuccugggugcaauugccguugaccguuauaucuccauauuuuacgcuuugagauaucauucaaucgugacccucacaagggcccggcgcgcagucgcugccauuuggguggcgaguguggucuucagcacccuguuuaucgccuacuaugaucacguugcaguguuacugugccucguaguguucuuucuugcuaugcuggucuugauggccgugcuauacguucauaugcuggcuagagccugucagcacgcacaggggauugccaggcuccauaaacggcagcgcccggugcaccaaggauucggccugaagggcgcugucacucuuacaauccuguuggggauauuuuuccucugcuggggacccuuuuuccugcacuuaacccugauugugcuauguccugagcauccaacgugcgguuguaucuuuaaaaauuucaaccucuuccuggcgcuuauuaucugcaaugcaaucauugaccccuugauauaugccuuucacucucaggaacugcgaagaacucucaaggagguacugaccugcuccugguga

SEQ ID NO: 2510 - RNA, 954 nt, Artificial Sequence
  derived and/or modified sequence opt4 from MC1_R__Homo_sapiens__BAE94308
auggccgugcagggcagccagagaagacugcugggcagccugaacagcacccccaccgccaucccccagcugggccuggccgccaaccagaccggcgccagaugccuggaggugagcaucagcgacggccuguuccugagccugggccuggugagccugguggagaacgcccuggugguggccaccaucgccaagaacagaaaccugcacagccccauguacugcuucaucugcugccuggcccugagcgaccugcuggugagcggcagcaacgugcuggagaccgccgugauccugcugcuggaggccggcgcccugguggccagagccgccgugcugcagcagcuggacaacgugaccgacgugaucaccugcagcagcaugcugagcagccugugcuuccugggcgccaucgccguggacagauacaucagcaucuucuacgcccugagauaccacagcaucgugacccugaccagagccagaagagccguggccgccaucuggguggccagcgugguguucagcacccuguucaucgccuacuacgaccacguggccgugcugcugugccuggugguguucuuccuggccaugcuggugcugauggccgugcuguacgugcacaugcuggccagagccugccagcacgcccagggcaucgccagacugcacaagagacagagacccgugcaccagggcuucggccugaagggcgccgugacccugaccauccugcugggcaucuucuuccugugcuggggccccuucuuccugcaccugacccugaucgugcugugccccgagcaccccaccugcggcugcaucuucaagaacuucaaccuguuccuggcccugaucaucugcaacgccaucaucgacccccugaucuacgccuuccacagccaggagcugagaagaacccugaaggaggugcugaccugcagcugguga

SEQ ID NO: 2511 - RNA, 954 nt, Artificial Sequence
  derived and/or modified sequence opt5 from MC1_R__Homo_sapiens__BAE94308
auggccgugcagggcagccaaagacggcugcucgggucccugaacucuacccccacagcuaucccucagcuuggacuggccgcgaaucagacgggcgcucgcugccucgaggucagcauuuccgacgggcuguuccuuucucugggacucguuagccugguggaaaacgcccugguggucgccaccaucgcuaagaauagaaaccuccacuccccgauguacuguuuuauuugcugucuggcccuuucugaucugcucgugagcggcuccaauguucuggagacagcugugauccuucugcucgaagccggggcgcuggucgcccgggcugccgugcugcagcaacucgacaacguuaccgaugugauuacaugcagcucuaugcuguccagccuuuguuuccugggagcuaucgccgucgaccgcuauaucucuaucuuuuacgcgcucagauaucauuccauugugacccugacacgggcccgcagagcuguggccgcuauuugggucgccagcguuguguucucuacccuuuuuaucgccuacuaugaucacguggcuguccugcucugccuggugguuuucuuucuggcgaugcucgugcugauggccguccuuuacgugcauaugcuggcucgggccugucagcacgcccagggcauugcucgccuccauaaaagacagcggcccguucaccaaggcuucgggcugaagggagccgugacgcuuaccauccugcucggcaucuuuuuccugugcugggggcccuuuuuccugcaccucacacugauuguccuuuguccugagcauccuaccugcggauguaucuuuaaaaauuucaaccuguuccucgcgcugauuaucugcaaugcuauuaucgacccccugauuuaugccuuucacucccaggaacuucgcagaacacucaaggaggugcugaccugcagcugguga

SEQ ID NO: 2512 - protein, 317 aa, Artificial Sequence [sequence omitted]

SEQ ID NO: 2513 - RNA, 954 nt, Artificial Sequence
  MC1_R__Homo_sapiens__BAE94307
auggcugugcagggaucccagagaagacuucugggcucccucaacuccacccccacagccaucccccagcuggggcuggcugccaaccagacaggagcccggugccuggagguguccaucucugacgggcucuuccucagccuggggcuggugagcuugguggagaacgcgcuggugguggccaccaucgccaagaaccggaaccugcacucacccauguacugcuucaucugcugccuggccuugucggaccugcuggugagcgggagcaacaugcuggagacggccgucauccuccugcuggaggccggugcacugguggcccgggcugcggugcugcagcagcuggacaaugucauugacgugaucaccugcagcuccaugcuguccagccucugcuuccugggcgccaucgccguggaccgcuacaucuccaucuucuacgcacugcgcuaccacagcaucgugauccugccgcgggcgcggcgagccguugcggccaucuggguggccagugucgucuucagcacgcucuucaucgccuacuacgaccacguggccguccugcugugccucguggucuucuuccuggcuaugcuggugcucauggccgugcuguacguccacaugcuggcccgggccugccagcacgcccagggcaucgcccggcuccacaagaggcagcgcccgguccaccagggcuuuggccuuaaaggcgcugucacccucaccauccugcugggcauuuucuuccucugcuggggccccuucuuccugcaucucacacucaucguccucugccccgagcaccccacgugcggcugcaucuucaagaacuucaaccucuuucucgcccucaucaucugcaaugccaucaucgacccccucaucuacgccuuccacagccaggagcuccgcaggacgcucaaggaggugcugacgugcuccugguga

SEQ ID NO: 2514 - RNA, 954 nt, Artificial Sequence
  derived and/or modified sequence opt1 from MC1_R__Homo_sapiens__BAE94307
auggccgugcagggcagccagcgccggcugcucgggucccugaacagcacccccaccgccaucccgcagcugggccucgcggccaaccagacgggggcccgcugccuggaggucuccaucagcgacggccuguuccucucccuggggcuggugagccucguggagaacgcccuggucguggccaccaucgcgaagaaccggaaccugcacucccccauguacugcuucaucugcugccucgcccugagcgaccugcucguguccggcagcaacaugcuggagaccgccgucauccugcuccuggaggccggcgcgcugguggcccgcgccgccgugcuccagcagcuggacaacgucaucgacgugaucacgugcuccagcaugcuguccagccucugcuuccugggggccaucgcgguggaccgguacaucuccaucuucuacgcccugcgcuaccacagcaucgucauccucccccgggcccgccgggccguggccgcgaucuggguggccuccgucguguucagcacccuguucaucgccuacuacgaccacguggccguccugcucugccuggugguguucuuccuggccaugcucguccugauggcggugcuguacgugcacaugcucgcccgcgccugccagcacgcccagggcaucgcccggcugcacaagcgccagcggcccguccaccagggguucggccugaagggggcggugacccucaccauccugcugggcaucuucuuccucugcuggggcccguucuuccugcaccugacccucaucguccugugccccgagcaccccacgugcgggugcaucuucaagaacuucaaccuguuccucgcccugaucaucugcaacgccaucaucgacccccugaucuacgccuuccacucccaggagcugcgccggacccucaaggaggugcugaccugcagcugguga

SEQ ID NO: 2515 - RNA, 954 nt, Artificial Sequence
  derived and/or modified sequence opt2 from MC1_R__Homo_sapiens__BAE94307
auggccguccagggcucccagcgccgccuccucggcucccucaacuccacccccaccgccaucccccagcucggccucgccgccaaccagaccggcgcccgcugccucgaggucuccaucuccgacggccucuuccucucccucggccucgucucccucgucgagaacgcccucgucgucgccaccaucgccaagaaccgcaaccuccacucccccauguacugcuucaucugcugccucgcccucuccgaccuccucgucuccggcuccaacaugcucgagaccgccgucauccuccuccucgaggccggcgcccucgucgcccgcgccgccguccuccagcagcucgacaacgucaucgacgucaucaccugcuccuccaugcucuccucccucugcuuccucggcgccaucgccgucgaccgcuacaucuccaucuucuacgcccuccgcuaccacuccaucgucauccucccccgcgcccgccgcgccgucgccgccaucugggucgccuccgucgucuucuccacccucuucaucgccuacuacgaccacgucgccguccuccucugccucgucgucuucuuccucgccaugcucguccucauggccguccucuacguccacaugcucgcccgcgccugccagcacgcccagggcaucgcccgccuccacaagcgccagcgccccguccaccagggcuucggccucaagggcgccgucacccucaccauccuccucggcaucuucuuccucugcuggggccccuucuuccuccaccucacccucaucguccucugccccgagcaccccaccugcggcugcaucuucaagaacuucaaccucuuccucgcccucaucaucugcaacgccaucaucgacccccucaucuacgccuuccacucccaggagcuccgccgcacccucaaggagguccucaccugcuccugguga

SEQ ID NO: 2516 - RNA, 954 nt, Artificial Sequence
  derived and/or modified sequence opt3 from MC1_R__Homo_sapiens__BAE94307
auggccgugcagggcagccaaagaaggcugcucgggucccuuaacucuacccccacagcuaucccucagcugggauuggcagccaaucagacuggugcgcggugcuuagaggucucaauuagugacggccuguuccuaagccucgggcugguuucccuuguggaaaacgcucugguaguggccacgauagcaaagaaucgcaacuugcacucuccaauguacuguuuuaucugcugucucgcccugucggaucugcucgucucaggaagcaauauguuagagaccgcugugauucugcuuuuggaagcaggcgcccugguugcucgagccgcggugcuacagcaacucgacaacgucaucgaugugauuacaugcaguuccaugcugucuagccuuuguuuccugggugcaaucgccguagaccguuauauauccaucuuuuacgcuuugagauaucauucaauuguuauccucccgagggcccggcgcgcaguggcugccauuugggucgcgagugugguguucagcacucuguuuaucgccuacuaugaucacgucgcaguuuuacugugccucgugguauucuuucuugcuaugcugguguugauggccguccuauacgugcauaugcuggcuagagccugucagcacgcacaggggauagccaggcuccauaaacggcagcgccccguucaccaaggauucggccugaagggcgcugugacccuuacaauucuguuggggaucuuuuuccucugcuggggaccauuuuuccugcacuuaacccugauuguccuauguccugagcaucccacuugcgguuguaucuuuaaaaauuucaaccucuuccuggcgcuuaucauuugcaaugcaauaaucgacccuuugauuuaugccuuucacucucaggaacugcgaagaacacucaaggaggugcugaccugcuccugguga

SEQ ID NO: 2517 - RNA, 954 nt, Artificial Sequence
  derived and/or modified sequence opt4 from MC1_R__Homo_sapiens__BAE94307
auggccgugcagggcagccagagaagacugcugggcagccugaacagcacccccaccgccaucccccagcugggccuggccgccaaccagaccggcgccagaugccuggaggugagcaucagcgacggccuguuccugagccugggccuggugagccugguggagaacgcccuggugguggccaccaucgccaagaacagaaaccugcacagccccauguacugcuucaucugcugccuggcccugagcgaccugcuggugagcggcagcaacaugcuggagaccgccgugauccugcugcuggaggccggcgcccugguggccagagccgccgugcugcagcagcuggacaacgugaucgacgugaucaccugcagcagcaugcugagcagccugugcuuccugggcgccaucgccguggacagauacaucagcaucuucuacgcccugagauaccacagcaucgugauccugcccagagccagaagagccguggccgccaucuggguggccagcgugguguucagcacccuguucaucgccuacuacgaccacguggccgugcugcugugccuggugguguucuuccuggccaugcuggugcugauggccgugcuguacgugcacaugcuggccagagccugccagcacgcccagggcaucgccagacugcacaagagacagagacccgugcaccagggcuucggccugaagggcgccgugacccugaccauccugcugggcaucuucuuccugugcuggggccccuucuuccugcaccugacccugaucgugcugugccccgagcaccccaccugcggcugcaucuucaagaacuucaaccuguuccuggcccugaucaucugcaacgccaucaucgacccccugaucuacgccuuccacagccaggagcugagaagaacccugaaggaggugcugaccugcagcugguga

SEQ ID NO: 2518 - RNA, 954 nt, Artificial Sequence
  derived and/or modified sequence opt5 from MC1_R__Homo_sapiens__BAE94307
auggccgugcagggcagccaaagacggcugcucgggucccugaacucuacccccacagcuaucccucagcuuggacuggccgcgaaucagacgggcgcucgcugccucgaggucagcauuuccgacgggcuguuccuuucucugggacucguuagccugguggaaaacgcccugguggucgccaccaucgcuaagaauagaaaccuccacuccccgauguacuguuuuauuugcugucuggcccuuucugaucugcucgugagcggcuccaauaugcuggagacagcuguuauccuucugcucgaagccggggcgcugguggcccgggcugccguccugcagcaacucgacaacgugauugauguuauuaccugcagcucuaugcuguccagccuuuguuuccugggagcuaucgccguggaccgcuauaucucuaucuuuuacgcgcucagauaucauuccauugucauccugccccgggcccgcagagcuguggccgcuauuuggguggccagcgucguuuucucuacacuuuuuaucgccuacuaugaucacguggcugugcugcucugccuggucguguucuuucuggcgaugcucguucugauggccgugcuuuacguccauaugcuggcucgggccugucagcacgcccagggcauugcucgccuccauaaaagacagcggccugugcaccaaggcuucgggcugaagggagccguuacccuuacaauccugcucggcaucuuuuuccugugcugggggcccuuuuuccugcaccucacccugauugugcuuuguccugagcaucccacgugcggauguaucuuuaaaaauuucaaccuguuccucgcgcugauuaucugcaaugcuauuaucgacccucugaucuaugccuuucacucccaggaacuucgcagaacccucaaggagguccugacaugcagcugguga

SEQ ID NO: 2519 - protein, 316 aa, Artificial Sequence
  MC1_R__Homo_sapiens__Q1JUM5
MAVQGSQRRLLGSLNSTPTAIPQLGLAANQTGARCLEVSISDGLFLSLGLVSLVENALVVATIAKNRNLHSPMYCFICCLALSDLLVSGSNVLETAVILLLEAGALVARAAVLQQLDNVIDVITCSSMLSSLCFLGAIAVDRYISIYALRYHSIVTLPRARQAVAAIWVASVVFSTLFIAYYDHVAVLLCLVVFFLAMLVLMAVLYVHMLARACQHAQGIARLHKRQRPVHQGFGLKGAVTLTILLGIFFLCWGPFFLHLTLIVLCPEHPTCGCIFKNFNLFLALIICNAIIDPLIYAFHSQELRRTLKEVLTCSW

SEQ ID NO: 2520 - RNA, 951 nt, Artificial Sequence
  MC1_R__Homo_sapiens__BAE94306
auggcugugcagggaucccagagaagacuucugggcucccucaacuccacccccacagccaucccccagcuggggcuggcugccaaccagacaggagcccggugccuggagguguccaucucugacgggcucuuccucagccuggggcuggugagcuugguggagaacgcgcuggugguggccaccaucgccaagaaccggaaccugcacucacccauguacugcuucaucugcugccuggccuugucggaccugcuggugagcgggagcaacgugcuggagacggccgucauccuccugcuggaggccggugcacugguggcccgggcugcggugcugcagcagcuggacaaugucauugacgugaucaccugcagcuccaugcuguccagccucugcuuccugggcgccaucgccguggaccgcuacaucuccaucuacgcacugcgcuaccacagcaucgugacccugccgcgggcgcggcaagccguugcggccaucuggguggccagugucgucuucagcacgcucuucaucgccuacuacgaccacguggccguccugcugugccucguggucuucuuccuggcuaugcuggugcucauggccgugcuguacguccacaugcuggcccgggccugccagcacgcccagggcaucgcccggcuccacaagaggcagcgcccgguccaccagggcuuuggccuuaaaggcgcugucacccucaccauccugcugggcauuuucuuccucugcuggggccccuucuuccugcaucucacacucaucguccucugccccgagcaccccacgugcggcugcaucuucaagaacuucaaccucuuucucgcccucaucaucugcaaugccaucaucgacccccucaucuacgccuuccacagccaggagcuccgcaggacgcucaaggaggugcugacaugcuccugguga

SEQ ID NO: 2521 - RNA, 951 nt, Artificial Sequence
  derived and/or modified sequence opt1 from MC1_R__Homo_sapiens__BAE94306
auggccgugcagggcagccagcgccggcugcucgggucccugaacagcacccccaccgccaucccccagcugggccucgcggccaaccagacgggggcccgcugccuggaggucuccaucagcgacggccuguuccucucccuggggcuggugagccucguggagaacgcccuggucguggccaccaucgcgaagaaccggaaccugcacucccccauguacugcuucaucugcugccucgcccugagcgaccugcucguguccggcagcaacguccuggagaccgccgugauccugcuccuggaggccggcgcgcugguggcccgcgccgccguccuccagcagcuggacaacgugaucgacgugaucacgugcuccagcaugcuguccagccucugcuuccugggggccaucgcggucgaccgguacaucuccaucuacgcccugcgcuaccacagcaucgugacccucccccgggcccgccaggccguggccgcgaucugggucgccuccgugguguucagcacccuguucaucgccuacuacgaccacgucgccgugcugcucugccugguggucuucuuccuggccaugcucgugcugauggcggugcuguacguccacaugcucgcccgggccugccagcacgcccagggcaucgcccgccugcacaagcggcagcgccccgugcaccagggguucggccugaagggggcggucacccucaccauccugcugggcaucuucuuccucugcuggggcccguucuuccugcaccugacgcucaucgugcugugccccgagcacccgaccugcgggugcaucuucaagaacuucaaccuguuccucgcccugaucaucugcaacgccaucaucgacccccugaucuacgccuuccacucccaggagcugcggcgcacccucaaggaggugcugaccugcagcugguga

SEQ ID NO: 2522 - RNA, 951 nt, Artificial Sequence
  derived and/or modified sequence opt2 from MC1_R__Homo_sapiens__BAE94306
auggccguccagggcucccagcgccgccuccucggcucccucaacuccacccccaccgccaucccccagcucggccucgccgccaaccagaccggcgcccgcugccucgaggucuccaucuccgacggccucuuccucucccucggccucgucucccucgucgagaacgcccucgucgucgccaccaucgccaagaaccgcaaccuccacucccccauguacugcuucaucugcugccucgcccucuccgaccuccucgucuccggcuccaacguccucgagaccgccgucauccuccuccucgaggccggcgcccucgucgcccgcgccgccguccuccagcagcucgacaacgucaucgacgucaucaccugcuccuccaugcucuccucccucugcuuccucggcgccaucgccgucgaccgcuacaucuccaucuacgcccuccgcuaccacuccaucgucacccucccccgcgcccgccaggccgucgccgccaucugggucgccuccgucgucuucuccacccucuucaucgccuacuacgaccacgucgccguccuccucugccucgucgucuucuuccucgccaugcucguccucauggccguccucuacguccacaugcucgcccgcgccugccagcacgcccagggcaucgcccgccuccacaagcgccagcgccccguccaccagggcuucggccucaagggcgccgucacccucaccauccuccucggcaucuucuuccucugcuggggccccuucuuccuccaccucacccucaucguccucugccccgagcaccccaccugcggcugcaucuucaagaacuucaaccucuuccucgcccucaucaucugcaacgccaucaucgacccccucaucuacgccuuccacucccaggagcuccgccgcacccucaaggagguccucaccugcuccugguga

SEQ ID NO: 2523 - RNA, 951 nt, Artificial Sequence
  derived and/or modified sequence opt3 from MC1_R__Homo_sapiens__BAE94306
auggccgugcagggcagccaaagaaggcugcucgggucccuuaacucuacccccacagcuaucccucagcugggauuggcagccaaucagacuggugcgcggugcuuagaggucucaauuagugacggccuguuccuaagccucgggcugguuucccuuguggaaaacgcucugguaguggccacgauagcaaagaaucgcaacuugcacucuccaauguacuguuuuaucugcugucucgcccugucggaucugcucgucucaggaagcaauguguuagagaccgcuguuauucugcuuuuggaagcaggcgcccugguggcucgagccgcgguccuacagcaacucgacaacgugaucgauguaauuacaugcaguuccaugcugucuagccuuuguuuccugggugcaaucgccguugaccguuauauauccaucuacgcuuugagauaucauucaauugugacucucccgagggcccggcaggcagucgcugccaucuggguggcgaguguggucuuuagcacccuguucauugccuacuaugaucacguugcaguguuacugugccucguaguguuuuuccuugcuaugcuggucuugauggccgugcuauacguucauaugcuggcucgcgccugucagcacgcacaggggaucgccagacuccauaaaaggcaacggcccgugcaccagggauuuggccugaagggcgcugucacacuuaccauacuguuggggauuuucuuucucugcuggggaccuuucuuucugcacuuaacucugaucgugcuauguccagagcaucccacaugcgguuguauuuucaaaaauuuuaaccucuuccuggcgcuuaucaucugcaaugcaauuauagacccuuugaucuaugccuuccacucucaggaacugcgccgaacccucaaggagguacugacgugcuccugguga

SEQ ID NO: 2524 - RNA, 951 nt, Artificial Sequence
  derived and/or modified sequence opt4 from MC1_R__Homo_sapiens__BAE94306
auggccgugcagggcagccagagaagacugcugggcagccugaacagcacccccaccgccaucccccagcugggccuggccgccaaccagaccggcgccagaugccuggaggugagcaucagcgacggccuguuccugagccugggccuggugagccugguggagaacgcccuggugguggccaccaucgccaagaacagaaaccugcacagccccauguacugcuucaucugcugccuggcccugagcgaccugcuggugagcggcagcaacgugcuggagaccgccgugauccugcugcuggaggccggcgcccugguggccagagccgccgugcugcagcagcuggacaacgugaucgacgugaucaccugcagcagcaugcugagcagccugugcuuccugggcgccaucgccguggacagauacaucagcaucuacgcccugagauaccacagcaucgugacccugcccagagccagacaggccguggccgccaucuggguggccagcgugguguucagcacccuguucaucgccuacuacgaccacguggccgugcugcugugccuggugguguucuuccuggccaugcuggugcugauggccgugcuguacgugcacaugcuggccagagccugccagcacgcccagggcaucgccagacugcacaagagacagagacccgugcaccagggcuucggccugaagggcgccgugacccugaccauccugcugggcaucuucuuccugugcuggggccccuucuuccugcaccugacccugaucgugcugugccccgagcaccccaccugcggcugcaucuucaagaacuucaaccuguuccuggcccugaucaucugcaacgccaucaucgacccccugaucuacgccuuccacagccaggagcugagaagaacccugaaggaggugcugaccugcagcugguga

SEQ ID NO: 2525 - RNA, 951 nt, Artificial Sequence
  derived and/or modified sequence opt5 from MC1_R__Homo_sapiens__BAE94306
auggccgugcagggcagccaaagacggcugcucgggucccugaacucuacccccacagcuaucccucagcuuggacuggccgcgaaucagacgggcgcucgcugccucgaggucagcauuuccgacgggcuguuccuuucucugggacucguuagccugguggaaaacgcccugguggucgccaccaucgcuaagaauagaaaccuccacuccccgauguacuguuuuauuugcugucuggcccuuucugaucugcucgugagcggcuccaauguucuggagacagcugugauccuucugcucgaagccggggcgcuggucgcccgggcugccgugcugcagcaacucgacaacguuauugaugugauuaccugcagcucuaugcuguccagccuuuguuuccugggagcuaucgccgucgaccgcuauaucucuaucuacgcgcucagauaucauuccauugugacacugccccgggcccgccaggcuguggccgcuaucugggucgccagcguuguguuuucuacccuuuucauugccuacuaugaucacguggcuguccugcucugccuggugguguuuuuccuggcgaugcucguucugauggccguccuuuacgugcauaugcuggcuagagccugucagcacgcccagggcaucgcucggcuccauaaacgccaaagaccuguucaccagggcuuugggcugaagggagccgugacacuuaccauucugcucggcaucuucuuucugugcugggggcccuucuuucugcaccucacgcugaucguccuuuguccugagcauccuaccugcggauguauuuucaaaaauuuuaaccuguuccucgcgcugaucauuugcaaugcuaucauugacccccugaucuaugccuuccacucccaggaacuucggcgcacacucaaggaggugcugaccugcagcugguga

SEQ ID NO: 2526 - protein, 317 aa, Artificial Sequence [sequence omitted]

SEQ ID NO: 2527 - RNA, 954 nt, Artificial Sequence
  MC1_R__Homo_sapiens__AAQ62977
auggcugugcagggaucccagagaagacuucugggcucccucaacuccacccccacagccaucccccagcuggggcuggcugccaaccagacaggagcccggugccuggagguguccaucucugacgggcucuuccucagccuggggcuggugagcuugguggagaacgcgcuggugguggccaccaucgccaagaaccggaaccugcacucacccauguacugcuucaucugcugccuggccuugucggaccugcuggugagcgggagcaacgugcuggagacggccgucauccuccugcuggaggccggugcacugguggcccgggcugcggugcugcagcagcuggacaaugucauugacgugaucaccugcagcuccaugcuguccagccucugcuuccugggcgccaucgccguggaccgcuacaucuccaucuucuacgcacugcgcuaccacagcaucgugacccugccgcgggcgcggcgagccguugcggccaucuggguggccagugucgucuucagcacgcucuucaucgccuacuacgaccacguggccguccugcugugccucguggucuucuuccuggcuaugcuggugcucauggccgugcuguacguccacaugcuggcccgggccugccagcacgcccagggcaucgcccggcuccacaagaggcagcgcccgguccaccagggcuuuggccuuaaaggcgcugucacccucaccauccugcugggcauuuucuuccucugcuggggccccuucuuccugcaucucacacucaucauccucugccccgagcaccccacgugcggcugcaucuucaagaacuucaaccucuuucucgcccucaucaucugcaaugccaucaucgacccccucaucuacgccuuccacagccaggagcuccgcaggacgcucaaggaggugcugacaugcuccugguga

SEQ ID NO: 2528 - RNA, 954 nt, Artificial Sequence
  derived and/or modified sequence opt1 from MC1_R__Homo_sapiens__AAQ62977
auggccgugcagggcagccagcgccggcugcucgggucccugaacagcacccccaccgccaucccccagcugggccucgcggccaaccagacgggggcccgcugccuggaggucuccaucagcgacggccuguuccucucccuggggcuggugagccucguggagaacgcccuggucguggccaccaucgcgaagaaccggaaccugcacucccccauguacugcuucaucugcugccucgcccugagcgaccugcucguguccggcagcaacguccuggagaccgccgugauccugcuccuggaggccggcgcgcugguggcccgcgccgccguccuccagcagcuggacaacgugaucgacgugaucacgugcuccagcaugcuguccagccucugcuuccugggggccaucgcggucgaccgguacaucuccaucuucuacgcccugcgcuaccacagcaucgugacccucccccgggcccgccgggccguggccgcgaucugggucgccuccgugguguucagcacccuguucaucgccuacuacgaccacgucgccgugcugcucugccugguggucuucuuccuggccaugcucgugcugauggcggugcuguacguccacaugcucgcccgcgccugccagcacgcccagggcaucgcccggcugcacaagcgccagcggcccgugcaccagggguucggccugaagggggcggucacccucaccauccugcugggcaucuucuuccucugcuggggcccguucuuccugcaccugacgcucaucauccugugccccgagcacccgaccugcgggugcaucuucaagaacuucaaccuguuccucgcccugaucaucugcaacgccaucaucgacccccugaucuacgccuuccacucccaggagcugcgccggacccucaaggaggugcugaccugcagcugguga

SEQ ID NO: 2529 - RNA, 954 nt, Artificial Sequence
  derived and/or modified sequence opt2 from MC1_R__Homo_sapiens__AAQ62977
auggccguccagggcucccagcgccgccuccucggcucccucaacuccacccccaccgccaucccccagcucggccucgccgccaaccagaccggcgcccgcugccucgaggucuccaucuccgacggccucuuccucucccucggccucgucucccucgucgagaacgcccucgucgucgccaccaucgccaagaaccgcaaccuccacucccccauguacugcuucaucugcugccucgcccucuccgaccuccucgucuccggcuccaacguccucgagaccgccgucauccuccuccucgaggccggcgcccucgucgcccgcgccgccguccuccagcagcucgacaacgucaucgacgucaucaccugcuccuccaugcucuccucccucugcuuccucggcgccaucgccgucgaccgcuacaucuccaucuucuacgcccuccgcuaccacuccaucgucacccucccccgcgcccgccgcgccgucgccgccaucugggucgccuccgucgucuucuccacccucuucaucgccuacuacgaccacgucgccguccuccucugccucgucgucuucuuccucgccaugcucguccucauggccguccucuacguccacaugcucgcccgcgccugccagcacgcccagggcaucgcccgccuccacaagcgccagcgccccguccaccagggcuucggccucaagggcgccgucacccucaccauccuccucggcaucuucuuccucugcuggggccccuucuuccuccaccucacccucaucauccucugccccgagcaccccaccugcggcugcaucuucaagaacuucaaccucuuccucgcccucaucaucugcaacgccaucaucgacccccucaucuacgccuuccacucccaggagcuccgccgcacccucaaggagguccucaccugcuccugguga

SEQ ID NO: 2530 - RNA, 954 nt, Artificial Sequence
  derived and/or modified sequence opt3 from MC1_R__Homo_sapiens__AAQ62977
auggccgugcagggcagccaaagaaggcugcucgggucccuuaacucuacccccacagcuaucccucagcugggauuggcagccaaucagacuggugcgcggugcuuagaggucucaauuagugacggccuguuccuaagccucgggcugguuucccuuguggaaaacgcucugguaguggccacgauagcaaagaaucgcaacuugcacucuccaauguacuguuuuaucugcugucucgcccugucggaucugcucgucucaggaagcaauguguuagagaccgcuguuauucugcuuuuggaagcaggcgcccugguggcucgagccgcgguccuacagcaacucgacaacgugaucgauguaauuacaugcaguuccaugcugucuagccuuuguuuccugggugcaaucgccguugaccguuauauauccaucuuuuacgcuuugagauaucauucaauugugacucucccgagggcccggcgcgcagucgcugccaucuggguggcgaguguggucuucagcacccuguuuauugccuacuaugaucacguugcaguguuacugugccucguaguguucuuucuugcuaugcuggucuugauggccgugcuauacguucauaugcuggcuagagccugucagcacgcacaggggaucgccaggcuccauaaacggcagcgccccgugcaccaaggauucggccugaagggcgcugucacacuuaccauacuguuggggaucuuuuuccucugcuggggaccauuuuuccugcacuuaacucugauuauucuauguccugagcaucccacaugcgguuguaucuuuaaaaauuucaaccucuuccuggcgcuuaucauuugcaaugcaauaaucgacccuuugauuuaugccuuucacucucaggaacugcgaagaacccucaaggaggugcugacgugcuccugguga

SEQ ID NO: 2531 - RNA, 954 nt, Artificial Sequence
  derived and/or modified sequence opt4 from MC1_R__Homo_sapiens__AAQ62977
auggccgugcagggcagccagagaagacugcugggcagccugaacagcacccccaccgccaucccccagcugggccuggccgccaaccagaccggcgccagaugccuggaggugagcaucagcgacggccuguuccugagccugggccuggugagccugguggagaacgcccuggugguggccaccaucgccaagaacagaaaccugcacagccccauguacugcuucaucugcugccuggcccugagcgaccugcuggugagcggcagcaacgugcuggagaccgccgugauccugcugcuggaggccggcgcccugguggccagagccgccgugcugcagcagcuggacaacgugaucgacgugaucaccugcagcagcaugcugagcagccugugcuuccugggcgccaucgccguggacagauacaucagcaucuucuacgcccugagauaccacagcaucgugacccugcccagagccagaagagccguggccgccaucuggguggccagcgugguguucagcacccuguucaucgccuacuacgaccacguggccgugcugcugugccuggugguguucuuccuggccaugcuggugcugauggccgugcuguacgugcacaugcuggccagagccugccagcacgcccagggcaucgccagacugcacaagagacagagacccgugcaccagggcuucggccugaagggcgccgugacccugaccauccugcugggcaucuucuuccugugcuggggccccuucuuccugcaccugacccugaucauccugugccccgagcaccccaccugcggcugcaucuucaagaacuucaaccuguuccuggcccugaucaucugcaacgccaucaucgacccccugaucuacgccuuccacagccaggagcugagaagaacccugaaggaggugcugaccugcagcugguga

SEQ ID NO: 2532 - RNA, 954 nt, Artificial Sequence
  derived and/or modified sequence opt5 from MC1_R__Homo_sapiens__AAQ62977
auggccgugcagggcagccaaagacggcugcucgggucccugaacucuacccccacagcuaucccucagcuuggacuggccgcgaaucagacgggcgcucgcugccucgaggucagcauuuccgacgggcuguuccuuucucugggacucguuagccugguggaaaacgcccugguggucgccaccaucgcuaagaauagaaaccuccacuccccgauguacuguuuuauuugcugucuggcccuuucugaucugcucgugagcggcuccaauguucuggagacagcugugauccuucugcucgaagccggggcgcuggucgcccgggcugccgugcugcagcaacucgacaacguuauugaugugauuaccugcagcucuaugcuguccagccuuuguuuccugggagcuaucgccgucgaccgcuauaucucuaucuuuuacgcgcucagauaucauuccauugugacacugccccgggcccgcagagcuguggccgcuaucugggucgccagcguuguguucucuacccuuuuuauugccuacuaugaucacguggcuguccugcucugccuggugguuuucuuucuggcgaugcucgugcugauggccguccuuuacgugcauaugcuggcucgggccugucagcacgcccagggcaucgcucgccuccauaaaagacagcggccuguucaccaaggcuucgggcugaagggagccgugacacuuaccauucugcucggcaucuuuuuccugugcugggggcccuuuuuccugcaccucacgcugaucauucuuuguccugagcauccuaccugcggauguaucuuuaaaaauuucaaccuguuccucgcgcugauuaucugcaaugcuauuaucgacccccugaucuaugccuuucacucccaggaacuucgcagaacacucaaggagguccugaccugcagcugguga

SEQ ID NO: 2533 - protein, 317 aa, Artificial Sequence [sequence omitted]

SEQ ID NO: 2534 - RNA, 954 nt, Artificial Sequence
  MC1_R__Homo_sapiens__AAQ62975
auggcugugcagggaucccagagaagacuucugggcucccucaacuccacccccacagccaucccccagcuggggcuggcugccaaccagacaggagcccggugccuggagguguccaucucugacgggcucuuccucagccuggggcuggugagcuugguggagaacgcgcuggugguggccaccaucgccaagaaccggaaccugcacucacccauguacugcuucaucugcugccuggccuugucggaccugcuggugagcgggagcaacgugcuggagacggccgucauccuccugcuggaggccggugcacugguggcccgggcuguggugcugcagcagcuggacaaugucauugacgugaucaccugcagcuccaugcuguccagccucugcuuccugggcgccaucgccguggaccgcuacaucuccaucuucuacgcacugcgcuaccacagcaucgugacccugccgcgggcgcggcgagccguugcggccaucuggguggccagugucgucuucagcacgcucuucaucgccuacuacgaccacguggccguccugcugugccucguggucuucuuccuggcuaugcuggugcucauggccgugcuguacguccacaugcuggcccgggccugccagcacgcccagggcaucgcccggcuccacaagaggcagcgcccgguccaccagggcuuuggccuuaaaggcgcugucacccucaccauccugcugggcauuuucuuccucugcuggggccccuucuuccugcaucucacacucaucguccucugccccgagcaccccacgugcggcugcaucuucaagaacuucaaccucuuucucgcccucaucaucugcaaugccaucaucgacccccucaucuacgccuuccacagccaggagcuccgcaggacgcucaaggaggugcugacaugcuccugguga

SEQ ID NO: 2535 - RNA, 954 nt, Artificial Sequence
  derived and/or modified sequence opt1 from MC1_R__Homo_sapiens__AAQ62975
auggccgugcagggcagccagcgccggcugcucgggucccugaacagcacccccaccgccaucccccagcugggccucgcggccaaccagacgggggcccgcugccuggaggucuccaucagcgacggccuguuccucucccuggggcuggugagccucguggagaacgcccuggucguggccaccaucgcgaagaaccggaaccugcacucccccauguacugcuucaucugcugccucgcccugagcgaccugcucguguccggcagcaacguccuggagaccgccgugauccugcuccuggaggccggcgcgcugguggcccgcgccgucgugcuccagcagcuggacaacgugaucgacgucaucacgugcuccagcaugcuguccagccucugcuuccugggggccaucgccguggaccgguacaucuccaucuucuacgcgcugcgcuaccacagcaucgugacccucccccgggcccgccgggccgucgccgccaucuggguggcguccguggucuucagcacccuguucaucgccuacuacgaccacguggccgugcugcucugccuggucguguucuuccuggccaugcucgugcugauggccguccuguacgugcacaugcucgcgcgcgccugccagcacgcccagggcaucgcccggcugcacaagcgccagcggcccguccaccagggguucggccugaagggggccgugacccucaccauccugcugggcaucuucuuccucugcuggggcccguucuuccugcaccugacgcucaucgugcugugccccgagcacccgaccugcgggugcaucuucaagaacuucaaccuguuccucgcgcugaucaucugcaacgccaucaucgacccccugaucuacgccuuccacucccaggagcugcgccggacccucaaggagguccugaccugcagcugguga

SEQ ID NO: 2536 - RNA, 954 nt, Artificial Sequence
  derived and/or modified sequence opt2 from MC1_R__Homo_sapiens__AAQ62975
auggccguccagggcucccagcgccgccuccucggcucccucaacuccacccccaccgccaucccccagcucggccucgccgccaaccagaccggcgcccgcugccucgaggucuccaucuccgacggccucuuccucucccucggccucgucucccucgucgagaacgcccucgucgucgccaccaucgccaagaaccgcaaccuccacucccccauguacugcuucaucugcugccucgcccucuccgaccuccucgucuccggcuccaacguccucgagaccgccgucauccuccuccucgaggccggcgcccucgucgcccgcgccgucguccuccagcagcucgacaacgucaucgacgucaucaccugcuccuccaugcucuccucccucugcuuccucggcgccaucgccgucgaccgcuacaucuccaucuucuacgcccuccgcuaccacuccaucgucacccucccccgcgcccgccgcgccgucgccgccaucugggucgccuccgucgucuucuccacccucuucaucgccuacuacgaccacgucgccguccuccucugccucgucgucuucuuccucgccaugcucguccucauggccguccucuacguccacaugcucgcccgcgccugccagcacgcccagggcaucgcccgccuccacaagcgccagcgccccguccaccagggcuucggccucaagggcgccgucacccucaccauccuccucggcaucuucuuccucugcuggggccccuucuuccuccaccucacccucaucguccucugccccgagcaccccaccugcggcugcaucuucaagaacuucaaccucuuccucgcccucaucaucugcaacgccaucaucgacccccucaucuacgccuuccacucccaggagcuccgccgcacccucaaggagguccucaccugcuccugguga

SEQ ID NO: 2537 - RNA, 954 nt, Artificial Sequence
  derived and/or modified sequence opt3 from MC1_R__Homo_sapiens__AAQ62975
auggccgugcagggcagccaaagaaggcugcucgggucccuuaacucuacccccacagcuaucccucagcugggauuggcagccaaucagacuggugcgcggugcuuagaggucucaauuagugacggccuguuccuaagccucgggcugguuucccuuguggaaaacgcucugguaguggccacgauagcaaagaaucgcaacuugcacucuccaauguacuguuuuaucugcugucucgcccugucggaucugcucgucucaggaagcaauguguuagagaccgcuguuauucugcuuuuggaagcaggcgcccugguggcucgagccgucgugcuacagcaacucgacaacguaaucgauguuauuacaugcaguuccaugcugucuagccuuuguuuccugggugcgaucgcaguggaccguuauauauccaucuuuuacgccuugagauaucauucaauugucacucucccgagggcucggcgcgccguggcagcuaucuggguggccagugucguuuucagcacccuguuuauugcguacuaugaucacguggccguauuacugugccucguggucuucuuucuugcaaugcugguguugauggcuguucuauacgugcauaugcuggccagagcuugucagcacgcccaggggaucgcaaggcuccauaaacggcagcgccccguccaccaaggauucggccugaagggcgccgugacacuuaccauacuguuggggaucuuuuuccucugcuggggaccauuuuuccugcacuuaacucugauuguacuauguccugagcaucccacaugcgguuguauuuuuaaaaauuucaaccucuuccuggcucuuaucaucugcaaugcgauuauagacccuuugaucuaugcauuucacucucaggaacugcgaagaacccucaaggagguucugacgugcuccugguga

SEQ ID NO: 2538 - RNA, 954 nt, Artificial Sequence
  derived and/or modified sequence opt4 from MC1_R__Homo_sapiens__AAQ62975
auggccgugcagggcagccagagaagacugcugggcagccugaacagcacccccaccgccaucccccagcugggccuggccgccaaccagaccggcgccagaugccuggaggugagcaucagcgacggccuguuccugagccugggccuggugagccugguggagaacgcccuggugguggccaccaucgccaagaacagaaaccugcacagccccauguacugcuucaucugcugccuggcccugagcgaccugcuggugagcggcagcaacgugcuggagaccgccgugauccugcugcuggaggccggcgcccugguggccagagccguggugcugcagcagcuggacaacgugaucgacgugaucaccugcagcagcaugcugagcagccugugcuuccugggcgccaucgccguggacagauacaucagcaucuucuacgcccugagauaccacagcaucgugacccugcccagagccagaagagccguggccgccaucuggguggccagcgugguguucagcacccuguucaucgccuacuacgaccacguggccgugcugcugugccuggugguguucuuccuggccaugcuggugcugauggccgugcuguacgugcacaugcuggccagagccugccagcacgcccagggcaucgccagacugcacaagagacagagacccgugcaccagggcuucggccugaagggcgccgugacccugaccauccugcugggcaucuucuuccugugcuggggccccuucuuccugcaccugacccugaucgugcugugccccgagcaccccaccugcggcugcaucuucaagaacuucaaccuguuccuggcccugaucaucugcaacgccaucaucgacccccugaucuacgccuuccacagccaggagcugagaagaacccugaaggaggugcugaccugcagcugguga

SEQ ID NO: 2539 - RNA, 954 nt, Artificial Sequence
  derived and/or modified sequence opt5 from MC1_R__Homo_sapiens__AAQ62975
auggccgugcagggcagccaaagacggcugcucgggucccugaacucuacccccacagcuaucccucagcuuggacuggccgcgaaucagacgggcgcucgcugccucgaggucagcauuuccgacgggcuguuccuuucucugggacucguuagccugguggaaaacgcccugguggucgccaccaucgcuaagaauagaaaccuccacuccccgauguacuguuuuauuugcugucuggcccuuucugaucugcucgugagcggcuccaauguucuggagacagcugugauccuucugcucgaagccggggcgcuggucgcccgggcugugguucugcagcaacucgacaacgugauugaugucauuaccugcagcucuaugcuguccagccuuuguuuccugggagccaucgcuguggaccgcuauaucucuaucuuuuacgcccucagauaucauuccauugugacacugccccgggcgcgcagagccgucgcugccaucuggguugcuagcgugguguucucuacccuuuuuauugccuacuaugaucacgucgccgugcugcucugccugguuguguucuuucuggcuaugcucguccugauggcggugcuuuacguucauaugcuggcccgggcuugucagcacgcccagggcaucgcccgccuccauaaaagacagcggccugugcaccaaggcuucgggcugaagggagcugucacacuuaccauucugcucggcaucuuuuuccugugcugggggcccuuuuuccugcaccucacgcugaucgugcuuuguccugagcauccuaccugcggauguauuuuuaaaaauuucaaccuguuccucgcccugaucauuugcaaugcgaucauugacccccugaucuaugcuuuucacucccaggaacuucgcagaacacucaaggagguccugaccugcagcugguga

SEQ ID NO: 2540 - protein, 317 aa, Artificial Sequence [sequence omitted]

SEQ ID NO: 2541 - RNA, 954 nt, Artificial Sequence
  MC1_R__Homo_sapiens__AAQ62974
auggcugugcagggaucccagagaagacuucugggcucccucaacuccacccccacagccaucccccagcuggggcuggcugccaaccagacaggagcccggugccuggagguguccaucucugacgggcucuuccucagccuggggcuggugagcuugguggagaacgcgcuggugguggccaccaucgccaagaaccggaaccugcacucacccauguacugcuucaucugcugccuggccuugucggaccugcuggugagcgggagcaacgugcuggagacggccgucauccuccugcuggaggccggugcacugguggcccgggcugcggugcugcagcagcuggacaaugucauugacgugaucaccugcagcuccaugcuguccagccucugcuuccugggcgccaucgccguggaccgcuacaucuccaucuucuacgcacugcgcuaccacagcaucgugacccugccgcgggcgcggcgagccguugcggccaucuggguggccagugucgucuucagcacgcucuucaucgccuacuacgaccacguggccguccugcugugccucguggucuucuuccuggcuaugcuggugcucauggccgugcuguacguccacaugcuggcccgggccugccagcacgcccagggcaucgcccggcuccacaagaggcagcgcccgguccaccagggcuuuggccuuaaaggcgcugucacccucaccauccugcugggcauuuucuuccucugcuggggccccuucuuccugcaucucacacucaucguccucugccccgagcaccccacgugcggcugcaucuucaagaacuucaaccucuuucucgcccucaucaucugcaaugccaucaucgacccccucaucuacgccuuccacagccaggagcuccgcaggacgcucaaggaggugcugacacgcuccugguga

SEQ ID NO: 2542 - RNA, 954 nt, Artificial Sequence
  derived and/or modified sequence opt1 from MC1_R__Homo_sapiens__AAQ62974
auggccgugcagggcagccagcgccggcugcucgggucccugaacagcacccccaccgccaucccccagcugggccucgcggccaaccagacgggggcccgcugccuggaggucuccaucagcgacggccuguuccucucccuggggcuggugagccucguggagaacgcccuggucguggccaccaucgcgaagaaccggaaccugcacucccccauguacugcuucaucugcugccucgcccugagcgaccugcucguguccggcagcaacguccuggagaccgccgugauccugcuccuggaggccggcgcgcugguggcccgcgccgccguccuccagcagcuggacaacgugaucgacgugaucacgugcuccagcaugcuguccagccucugcuuccugggggccaucgcggucgaccgguacaucuccaucuucuacgcccugcgcuaccacagcaucgugacccucccccgggcccgccgggccguggccgcgaucugggucgccuccgugguguucagcacccuguucaucgccuacuacgaccacgucgccgugcugcucugccugguggucuucuuccuggccaugcucgugcugauggcggugcuguacguccacaugcucgcccgcgccugccagcacgcccagggcaucgcccggcugcacaagcgccagcggcccgugcaccagggguucggccugaagggggcggucacccucaccauccugcugggcaucuucuuccucugcuggggcccguucuuccugcaccugacgcucaucgugcugugccccgagcacccgaccugcgggugcaucuucaagaacuucaaccuguuccucgcccugaucaucugcaacgccaucaucgacccccugaucuacgccuuccacucccaggagcugcgccggacccucaaggaggugcugacccgcagcugguga

SEQ ID NO: 2543 - RNA, 954 nt, Artificial Sequence
  derived and/or modified sequence opt2 from MC1_R__Homo_sapiens__AAQ62974
auggccguccagggcucccagcgccgccuccucggcucccucaacuccacccccaccgccaucccccagcucggccucgccgccaaccagaccggcgcccgcugccucgaggucuccaucuccgacggccucuuccucucccucggccucgucucccucgucgagaacgcccucgucgucgccaccaucgccaagaaccgcaaccuccacucccccauguacugcuucaucugcugccucgcccucuccgaccuccucgucuccggcuccaacguccucgagaccgccgucauccuccuccucgaggccggcgcccucgucgcccgcgccgccguccuccagcagcucgacaacgucaucgacgucaucaccugcuccuccaugcucuccucccucugcuuccucggcgccaucgccgucgaccgcuacaucuccaucuucuacgcccuccgcuaccacuccaucgucacccucccccgcgcccgccgcgccgucgccgccaucugggucgccuccgucgucuucuccacccucuucaucgccuacuacgaccacgucgccguccuccucugccucgucgucuucuuccucgccaugcucguccucauggccguccucuacguccacaugcucgcccgcgccugccagcacgcccagggcaucgcccgccuccacaagcgccagcgccccguccaccagggcuucggccucaagggcgccgucacccucaccauccuccucggcaucuucuuccucugcuggggccccuucuuccuccaccucacccucaucguccucugccccgagcaccccaccugcggcugcaucuucaagaacuucaaccucuuccucgcccucaucaucugcaacgccaucaucgacccccucaucuacgccuuccacucccaggagcuccgccgcacccucaaggagguccucacccgcuccugguga

SEQ ID NO: 2544 - RNA, 954 nt, Artificial Sequence
  derived and/or modified sequence opt3 from MC1_R__Homo_sapiens__AAQ62974
auggccgugcagggcagccaaagaaggcugcucgggucccuuaacucuacccccacagcuaucccucagcugggauuggcagccaaucagacuggugcgcggugcuuagaggucucaauuagugacggccuguuccuaagccucgggcugguuucccuuguggaaaacgcucugguaguggccacgauagcaaagaaucgcaacuugcacucuccaauguacuguuuuaucugcugucucgcccugucggaucugcucgucucaggaagcaauguguuagagaccgcuguuauucugcuuuuggaagcaggcgcccugguggcucgagccgcgguccuacagcaacucgacaacgugaucgauguaauuacaugcaguuccaugcugucuagccuuuguuuccugggugcaaucgccguugaccguuauauauccaucuuuuacgcuuugagauaucauucaauugugacucucccgagggcccggcgcgcagucgcugccaucuggguggcgaguguggucuucagcacccuguuuauugccuacuaugaucacguugcaguguuacugugccucguaguguucuuucuugcuaugcuggucuugauggccgugcuauacguucauaugcuggcuagagccugucagcacgcacaggggaucgccaggcuccauaaacggcagcgccccgugcaccaaggauucggccugaagggcgcugucacacuuaccauacuguuggggaucuuuuuccucugcuggggaccauuuuuccugcacuuaacucugauugugcuauguccugagcaucccacaugcgguuguauuuuuaaaaauuucaaccucuuccuggcgcuuaucaucugcaaugcaauuauagacccuuugaucuaugccuuucacucucaggaacugcgaagaacccucaaggagguacugacgagguccugguga

SEQ ID NO: 2545 - RNA, 954 nt, Artificial Sequence
  derived and/or modified sequence opt4 from MC1_R__Homo_sapiens__AAQ62974
auggccgugcagggcagccagagaagacugcugggcagccugaacagcacccccaccgccaucccccagcugggccuggccgccaaccagaccggcgccagaugccuggaggugagcaucagcgacggccuguuccugagccugggccuggugagccugguggagaacgcccuggugguggccaccaucgccaagaacagaaaccugcacagccccauguacugcuucaucugcugccuggcccugagcgaccugcuggugagcggcagcaacgugcuggagaccgccgugauccugcugcuggaggccggcgcccugguggccagagccgccgugcugcagcagcuggacaacgugaucgacgugaucaccugcagcagcaugcugagcagccugugcuuccugggcgccaucgccguggacagauacaucagcaucuucuacgcccugagauaccacagcaucgugacccugcccagagccagaagagccguggccgccaucuggguggccagcgugguguucagcacccuguucaucgccuacuacgaccacguggccgugcugcugugccuggugguguucuuccuggccaugcuggugcugauggccgugcuguacgugcacaugcuggccagagccugccagcacgcccagggcaucgccagacugcacaagagacagagacccgugcaccagggcuucggccugaagggcgccgugacccugaccauccugcugggcaucuucuuccugugcuggggccccuucuuccugcaccugacccugaucgugcugugccccgagcaccccaccugcggcugcaucuucaagaacuucaaccuguuccuggcccugaucaucugcaacgccaucaucgacccccugaucuacgccuuccacagccaggagcugagaagaacccugaaggaggugcugaccagaagcugguga

SEQ ID NO: 2546 - RNA, 954 nt, Artificial Sequence
  derived and/or modified sequence opt5 from MC1_R__Homo_sapiens__AAQ62974
auggccgugcagggcagccaaagacggcugcucgggucccugaacucuacccccacagcuaucccucagcuuggacuggccgcgaaucagacgggcgcucgcugccucgaggucagcauuuccgacgggcuguuccuuucucugggacucguuagccugguggaaaacgcccugguggucgccaccaucgcuaagaauagaaaccuccacuccccgauguacuguuuuauuugcugucuggcccuuucugaucugcucgugagcggcuccaauguucuggagacagcugugauccuucugcucgaagccggggcgcuggucgcccgggcugccgugcugcagcaacucgacaacguuauugaugugauuaccugcagcucuaugcuguccagccuuuguuuccugggagcuaucgccgucgaccgcuauaucucuaucuuuuacgcgcucagauaucauuccauugugacacugccccgggcccgcagagcuguggccgcuaucugggucgccagcguuguguucucuacccuuuuuauugccuacuaugaucacguggcuguccugcucugccuggugguuuucuuucuggcgaugcucgugcugauggccguccuuuacgugcauaugcuggcucgggccugucagcacgcccagggcaucgcucgccuccauaaaagacagcggccuguucaccaaggcuucgggcugaagggagccgugacacuuaccauucugcucggcaucuuuuuccugugcugggggcccuuuuuccugcaccucacgcugaucguccuuuguccugagcauccuaccugcggauguauuuuuaaaaauuucaaccuguuccucgcgcugaucauuugcaaugcuaucauugacccccugaucuaugccuuucacucccaggaacuucgcagaacacucaaggaggugcugacccggagcugguga

SEQ ID NO: 2547 - protein, 317 aa, Artificial Sequence [sequence omitted]

SEQ ID NO: 2548 - RNA, 954 nt, Artificial Sequence
  MC1_R__Homo_sapiens__AAQ62973
auggcugugcagggaucccagagaagacuucugggcucccucaacuccacccccacagccaucccccagcuggggcuggcugccaaccagacaggagcccggugccuggagguguccaucucugacgggcucuuccucagccuggggcuggugagcuugguggagaacgcgcuggugguggccaccaucgccaagaaccggaaccugcacucacccauguacugcuucaucugcugccuggccuugucggaccugcuggugagcgggagcaacgugcuggagacggccgucauccuccugcuggaggccggugcacugguggcccgggcugcggugcugcagcagcuggacaaugucauugacgugaucaccugcagcuccaugcuguccagccucugcuuccugggcgccaucgccguggaccgcuacaucuccaucuucuacgcacugcgcuaccacagcaucgugacccugccgcgggcgcggcgagccguugcggccaucuggguggccagugucgucuucagcacgcucuucaucgccuacuacgaccacguggccguccugcugugccucguggucuucuuccuggcuaugcuggugcucauggccgugcuguacguccacaugcuggcccgggccugccagcacgcccagggcaucgcccggcuccacaagaggcagcgcccgguccaccagggcuuuggccuuaaaggcgcugucacccucaccauccugcugggcauuuucuuccucugcuggggccccuucuuccugcaucucacacucaucguccucugccccgagcaccccacgugcggcugcaucuucaagaacuucaaccucuuucucgcccucaucaucugcaaugccaucaucgacccccucaucuacgccuuccacagccaggagcuccgcaggaugcucaaggaggugcugacaugcuccugguga

SEQ ID NO: 2549 - RNA, 954 nt, Artificial Sequence
  derived and/or modified sequence opt1 from MC1_R__Homo_sapiens__AAQ62973
auggccgugcagggcagccagcgccggcugcucgggucccugaacagcacccccaccgccaucccccagcugggccucgcggccaaccagacgggggcccgcugccuggaggucuccaucagcgacggccuguuccucucccuggggcuggugagccucguggagaacgcccuggucguggccaccaucgcgaagaaccggaaccugcacucccccauguacugcuucaucugcugccucgcccugagcgaccugcucguguccggcagcaacguccuggagaccgccgugauccugcuccuggaggccggcgcgcugguggcccgcgccgccguccuccagcagcuggacaacgugaucgacgugaucacgugcuccagcaugcuguccagccucugcuuccugggggccaucgcggucgaccgguacaucuccaucuucuacgcccugcgcuaccacagcaucgugacccucccccgggcccgccgggccguggccgcgaucugggucgccuccgugguguucagcacccuguucaucgccuacuacgaccacgucgccgugcugcucugccugguggucuucuuccuggccaugcucgugcugauggcggugcuguacguccacaugcucgcccgcgccugccagcacgcccagggcaucgcccggcugcacaagcgccagcggcccgugcaccagggguucggccugaagggggcggucacccucaccauccugcugggcaucuucuuccucugcuggggcccguucuuccugcaccugacgcucaucgugcugugccccgagcacccgaccugcgggugcaucuucaagaacuucaaccuguuccucgcccugaucaucugcaacgccaucaucgacccccugaucuacgccuuccacucccaggagcugcgccggaugcucaaggaggugcugaccugcagcugguga

SEQ ID NO: 2550 - RNA, 954 nt, Artificial Sequence
  derived and/or modified sequence opt2 from MC1_R__Homo_sapiens__AAQ62973
auggccguccagggcucccagcgccgccuccucggcucccucaacuccacccccaccgccaucccccagcucggccucgccgccaaccagaccggcgcccgcugccucgaggucuccaucuccgacggccucuuccucucccucggccucgucucccucgucgagaacgcccucgucgucgccaccaucgccaagaaccgcaaccuccacucccccauguacugcuucaucugcugccucgcccucuccgaccuccucgucuccggcuccaacguccucgagaccgccgucauccuccuccucgaggccggcgcccucgucgcccgcgccgccguccuccagcagcucgacaacgucaucgacgucaucaccugcuccuccaugcucuccucccucugcuuccucggcgccaucgccgucgaccgcuacaucuccaucuucuacgcccuccgcuaccacuccaucgucacccucccccgcgcccgccgcgccgucgccgccaucugggucgccuccgucgucuucuccacccucuucaucgccuacuacgaccacgucgccguccuccucugccucgucgucuucuuccucgccaugcucguccucauggccguccucuacguccacaugcucgcccgcgccugccagcacgcccagggcaucgcccgccuccacaagcgccagcgccccguccaccagggcuucggccucaagggcgccgucacccucaccauccuccucggcaucuucuuccucugcuggggccccuucuuccuccaccucacccucaucguccucugccccgagcaccccaccugcggcugcaucuucaagaacuucaaccucuuccucgcccucaucaucugcaacgccaucaucgacccccucaucuacgccuuccacucccaggagcuccgccgcaugcucaaggagguccucaccugcuccugguga

SEQ ID NO: 2551 - RNA, 954 nt, Artificial Sequence
  derived and/or modified sequence opt3 from MC1_R__Homo_sapiens__AAQ62973
auggccgugcagggcagccaaagaaggcugcucgggucccuuaacucuacccccacagcuaucccucagcugggauuggcagccaaucagacuggugcgcggugcuuagaggucucaauuagugacggccuguuccuaagccucgggcugguuucccuuguggaaaacgcucugguaguggccacgauagcaaagaaucgcaacuugcacucuccaauguacuguuuuaucugcugucucgcccugucggaucugcucgucucaggaagcaauguguuagagaccgcuguuauucugcuuuuggaagcaggcgcccugguggcucgagccgcgguccuacagcaacucgacaacgugaucgauguaauuacaugcaguuccaugcugucuagccuuuguuuccugggugcaaucgccguugaccguuauauauccaucuuuuacgcuuugagauaucauucaauugugacucucccgagggcccggcgcgcagucgcugccaucuggguggcgaguguggucuucagcacccuguuuauugccuacuaugaucacguugcaguguuacugugccucguaguguucuuucuugcuaugcuggucuugauggccgugcuauacguucauaugcuggcuagagccugucagcacgcacaggggaucgccaggcuccauaaacggcagcgccccgugcaccaaggauucggccugaagggcgcugucacacuuaccauacuguuggggaucuuuuuccucugcuggggaccauuuuuccugcacuuaacucugauugugcuauguccugagcaucccacaugcgguuguauuuuuaaaaauuucaaccucuuccuggcgcuuaucaucugcaaugcaauuauagacccuuugaucuaugccuuucacucucaggaacugcgaagaaugcucaaggagguacugaccugcuccugguga

SEQ ID NO: 2552 - RNA, 954 nt, Artificial Sequence
  derived and/or modified sequence opt4 from MC1_R__Homo_sapiens__AAQ62973
auggccgugcagggcagccagagaagacugcugggcagccugaacagcacccccaccgccaucccccagcugggccuggccgccaaccagaccggcgccagaugccuggaggugagcaucagcgacggccuguuccugagccugggccuggugagccugguggagaacgcccuggugguggccaccaucgccaagaacagaaaccugcacagccccauguacugcuucaucugcugccuggcccugagcgaccugcuggugagcggcagcaacgugcuggagaccgccgugauccugcugcuggaggccggcgcccugguggccagagccgccgugcugcagcagcuggacaacgugaucgacgugaucaccugcagcagcaugcugagcagccugugcuuccugggcgccaucgccguggacagauacaucagcaucuucuacgcccugagauaccacagcaucgugacccugcccagagccagaagagccguggccgccaucuggguggccagcgugguguucagcacccuguucaucgccuacuacgaccacguggccgugcugcugugccuggugguguucuuccuggccaugcuggugcugauggccgugcuguacgugcacaugcuggccagagccugccagcacgcccagggcaucgccagacugcacaagagacagagacccgugcaccagggcuucggccugaagggcgccgugacccugaccauccugcugggcaucuucuuccugugcuggggccccuucuuccugcaccugacccugaucgugcugugccccgagcaccccaccugcggcugcaucuucaagaacuucaaccuguuccuggcccugaucaucugcaacgccaucaucgacccccugaucuacgccuuccacagccaggagcugagaagaaugcugaaggaggugcugaccugcagcugguga

SEQ ID NO: 2553 - RNA, 954 nt, Artificial Sequence
  derived and/or modified sequence opt5 from MC1_R__Homo_sapiens__AAQ62973
auggccgugcagggcagccaaagacggcugcucgggucccugaacucuacccccacagcuaucccucagcuuggacuggccgcgaaucagacgggcgcucgcugccucgaggucagcauuuccgacgggcuguuccuuucucugggacucguuagccugguggaaaacgcccugguggucgccaccaucgcuaagaauagaaaccuccacuccccgauguacuguuuuauuugcugucuggcccuuucugaucugcucgugagcggcuccaauguucuggagacagcugugauccuucugcucgaagccggggcgcuggucgcccgggcugccgugcugcagcaacucgacaacguuauugaugugauuaccugcagcucuaugcuguccagccuuuguuuccugggagcuaucgccgucgaccgcuauaucucuaucuuuuacgcgcucagauaucauuccauugugacacugccccgggcccgcagagcuguggccgcuaucugggucgccagcguuguguucucuacccuuuuuauugccuacuaugaucacguggcuguccugcucugccuggugguuuucuuucuggcgaugcucgugcugauggccguccuuuacgugcauaugcuggcucgggccugucagcacgcccagggcaucgcucgccuccauaaaagacagcggccuguucaccaaggcuucgggcugaagggagccgugacacuuaccauucugcucggcaucuuuuuccugugcugggggcccuuuuuccugcaccucacgcugaucguccuuuguccugagcauccuaccugcggauguauuuuuaaaaauuucaaccuguuccucgcgcugaucauuugcaaugcuaucauugacccccugaucuaugccuuucacucccaggaacuucgcagaaugcucaaggaggugcugacaugcagcugguga

SEQ ID NO: 2554 - protein, 317 aa, Artificial Sequence [sequence omitted]

SEQ ID NO: 2555 - RNA, 954 nt, Artificial Sequence
  MC1_R__Homo_sapiens__AAQ62972
auggcugugcagggaucccagagaagacuucugggcucccucaacuccacccccacagccaucccccagcuggggcuggcugccaaccagacaggagcccggugccuggagguguccaucucugacgggcucuuccucagccuggggcuggugagcuugguggagaacgcgcuggugguggccaccaucgccaagaaccggaaccugcacucacccauguacugcuucaucugcugccuggccuugucggaccugcuggugagcgggagcaacgugcuggagacggccgucauccuccugcuggaggccggugcacugguggcccgggcugcggugcugcagcagcuggacaaugucauugacgugaucaccugcagcuccaugcuguccagccucugcuuccugggcgccaucgccguggaccgcuacaucuccaucuucuacgcacugcgcuaccacagcaucgugacccugccgcgggcgcggcgagccguugcggccaucuggguggccagugucgucuucagcacgcucuucaucgccuacuacgaccacguggccguccugcugugccucguggucuucuuccuggcuaugcuggugcucauggccgugcuguacguccacaugcuggccugggccugccagcacgcccagggcaucgcccggcuccacaagaggcagcgcccgguccaccagggcuuuggccuuaaaggcgcugucacccucaccauccugcugggcauuuucuuccucugcuggggccccuucuuccugcaucucacacucaucguccucugccccgagcaccccacgugcggcugcaucuucaagaacuucaaccucuuucucgcccucaucaucugcaaugccaucaucgacccccucaucuacgccuuccacagccaggagcuccgcaggacgcucaaggaggugcugacaugcuccugguga

SEQ ID NO: 2556 - RNA, 954 nt, Artificial Sequence
  derived and/or modified sequence opt1 from MC1_R__Homo_sapiens__AAQ62972
auggccgugcagggcagccagcgccggcugcucgggucccugaacagcacccccaccgccaucccccagcugggccucgcggccaaccagacgggggcccgcugccuggaggucuccaucagcgacggccuguuccucucccuggggcuggugagccucguggagaacgcccuggucguggccaccaucgcgaagaaccggaaccugcacucccccauguacugcuucaucugcugccucgcccugagcgaccugcucguguccggcagcaacguccuggagaccgccgugauccugcuccuggaggccggcgcgcugguggcccgcgccgccguccuccagcagcuggacaacgugaucgacgugaucacgugcuccagcaugcuguccagccucugcuuccugggggccaucgcggucgaccgguacaucuccaucuucuacgcccugcgcuaccacagcaucgugacccucccccgggcccgccgggccguggccgcgaucugggucgccuccgugguguucagcacccuguucaucgccuacuacgaccacgucgccgugcugcucugccugguggucuucuuccuggccaugcucgugcugauggcggugcuguacguccacaugcucgccugggccugccagcacgcccagggcaucgcccgccugcacaagcggcagcgccccgugcaccagggguucggccugaagggggcggucacccucaccauccugcugggcaucuucuuccucugcuggggcccguucuuccugcaccugacgcucaucgugcugugccccgagcacccgaccugcgggugcaucuucaagaacuucaaccuguuccucgcccugaucaucugcaacgccaucaucgacccccugaucuacgccuuccacucccaggagcugcggcgcacccucaaggaggugcugaccugcagcugguga

SEQ ID NO: 2557 - RNA, 954 nt, Artificial Sequence
  derived and/or modified sequence opt2 from MC1_R__Homo_sapiens__AAQ62972
auggccguccagggcucccagcgccgccuccucggcucccucaacuccacccccaccgccaucccccagcucggccucgccgccaaccagaccggcgcccgcugccucgaggucuccaucuccgacggccucuuccucucccucggccucgucucccucgucgagaacgcccucgucgucgccaccaucgccaagaaccgcaaccuccacucccccauguacugcuucaucugcugccucgcccucuccgaccuccucgucuccggcuccaacguccucgagaccgccgucauccuccuccucgaggccggcgcccucgucgcccgcgccgccguccuccagcagcucgacaacgucaucgacgucaucaccugcuccuccaugcucuccucccucugcuuccucggcgccaucgccgucgaccgcuacaucuccaucuucuacgcccuccgcuaccacuccaucgucacccucccccgcgcccgccgcgccgucgccgccaucugggucgccuccgucgucuucuccacccucuucaucgccuacuacgaccacgucgccguccuccucugccucgucgucuucuuccucgccaugcucguccucauggccguccucuacguccacaugcucgccugggccugccagcacgcccagggcaucgcccgccuccacaagcgccagcgccccguccaccagggcuucggccucaagggcgccgucacccucaccauccuccucggcaucuucuuccucugcuggggccccuucuuccuccaccucacccucaucguccucugccccgagcaccccaccugcggcugcaucuucaagaacuucaaccucuuccucgcccucaucaucugcaacgccaucaucgacccccucaucuacgccuuccacucccaggagcuccgccgcacccucaaggagguccucaccugcuccugguga

SEQ ID NO: 2558 - RNA, 954 nt, Artificial Sequence
  derived and/or modified sequence opt3 from MC1_R__Homo_sapiens__AAQ62972
auggccgugcagggcagccaaagaaggcugcucgggucccuuaacucuacccccacagcuaucccucagcugggauuggcagccaaucagacuggugcgcggugcuuagaggucucaauuagugacggccuguuccuaagccucgggcugguuucccuuguggaaaacgcucugguaguggccacgauagcaaagaaucgcaacuugcacucuccaauguacuguuuuaucugcugucucgcccugucggaucugcucgucucaggaagcaauguguuagagaccgcuguuauucugcuuuuggaagcaggcgcccugguggcucgagccgcgguccuacagcaacucgacaacgugaucgauguaauuacaugcaguuccaugcugucuagccuuuguuuccugggugcaaucgccguugaccguuauauauccaucuuuuacgcuuugagauaucauucaauugugacucucccgagggcccggcgcgcagucgcugccaucuggguggcgaguguggucuucagcacccuguuuauugccuacuaugaucacguugcaguguuacugugccucguaguguucuuucuugcuaugcuggucuugauggccgugcuauacguucauaugcuggcuugggccugucagcacgcacaggggaucgccagacuccauaaaaggcagcggcccgugcaccaaggauucggccugaagggcgcugucacacuuaccauacuguuggggaucuuuuuccucugcuggggaccauuuuuccugcacuuaacucugauugugcuauguccugagcaucccacaugcgguuguauuuuuaaaaauuucaaccucuuccuggcgcuuaucaucugcaaugcaauuauagacccuuugaucuaugccuuucacucucaggaacugcgccgaacccucaaggagguacugacgugcuccugguga

SEQ ID NO: 2559 - RNA, 954 nt, Artificial Sequence
  derived and/or modified sequence opt4 from MC1_R__Homo_sapiens__AAQ62972
auggccgugcagggcagccagagaagacugcugggcagccugaacagcacccccaccgccaucccccagcugggccuggccgccaaccagaccggcgccagaugccuggaggugagcaucagcgacggccuguuccugagccugggccuggugagccugguggagaacgcccuggugguggccaccaucgccaagaacagaaaccugcacagccccauguacugcuucaucugcugccuggcccugagcgaccugcuggugagcggcagcaacgugcuggagaccgccgugauccugcugcuggaggccggcgcccugguggccagagccgccgugcugcagcagcuggacaacgugaucgacgugaucaccugcagcagcaugcugagcagccugugcuuccugggcgccaucgccguggacagauacaucagcaucuucuacgcccugagauaccacagcaucgugacccugcccagagccagaagagccguggccgccaucuggguggccagcgugguguucagcacccuguucaucgccuacuacgaccacguggccgugcugcugugccuggugguguucuuccuggccaugcuggugcugauggccgugcuguacgugcacaugcuggccugggccugccagcacgcccagggcaucgccagacugcacaagagacagagacccgugcaccagggcuucggccugaagggcgccgugacccugaccauccugcugggcaucuucuuccugugcuggggccccuucuuccugcaccugacccugaucgugcugugccccgagcaccccaccugcggcugcaucuucaagaacuucaaccuguuccuggcccugaucaucugcaacgccaucaucgacccccugaucuacgccuuccacagccaggagcugagaagaacccugaaggaggugcugaccugcagcugguga

SEQ ID NO: 2560 - RNA, 954 nt, Artificial Sequence
  derived and/or modified sequence opt5 from MC1_R__Homo_sapiens__AAQ62972
auggccgugcagggcagccaaagacggcugcucgggucccugaacucuacccccacagcuaucccucagcuuggacuggccgcgaaucagacgggcgcucgcugccucgaggucagcauuuccgacgggcuguuccuuucucugggacucguuagccugguggaaaacgcccugguggucgccaccaucgcuaagaauagaaaccuccacuccccgauguacuguuuuauuugcugucuggcccuuucugaucugcucgugagcggcuccaauguucuggagacagcugugauccuucugcucgaagccggggcgcuggucgcccgggcugccgugcugcagcaacucgacaacguuauugaugugauuaccugcagcucuaugcuguccagccuuuguuuccugggagcuaucgccgucgaccgcuauaucucuaucuuuuacgcgcucagauaucauuccauugugacacugccccgggcccgcagagcuguggccgcuaucugggucgccagcguuguguucucuacccuuuuuauugccuacuaugaucacguggcuguccugcucugccuggugguuuucuuucuggcgaugcucgugcugauggccguccuuuacgugcauaugcuggcuugggccugucagcacgcccagggcaucgcucggcuccauaaacgccagagaccuguucaccaaggcuucgggcugaagggagccgugacacuuaccauucugcucggcaucuuuuuccugugcugggggcccuuuuuccugcaccucacgcugaucguccuuuguccugagcauccuaccugcggauguauuuuuaaaaauuucaaccuguuccucgcgcugaucauuugcaaugcuaucauugacccccugaucuaugccuuucacucccaggaacuucggcgcacacucaaggaggugcugaccugcagcugguga

SEQ ID NO: 2561 - protein, 317 aa, Artificial Sequence [sequence omitted]

SEQ ID NO: 2562 - RNA, 954 nt, Artificial Sequence
  MC1_R__Homo_sapiens__AAQ62971
auggcugugcagggaucccagagaagacuucugggcucccucaacuccacccccacagccaucccccagcuggggcuggcugccaaccagacaggagcccggugccuggagguguccaucucugacgggcucuuccucagccuggggcuggugagcuugguggagaacgcgcuggugguggccaccaucgccaagaaccggaaccugcacucacccauguacugcuucaucugcugccuggccuugucggaccugcuggugagcgggagcaacgugcuggagacggccgucauccuccugcuggaggccggugcacugguggcccgggcugcggugcugcagcagcuggacaaugucauugacgugaucaccugcagcuccaugcuguccagccucugcuuccugggcgccaucgccguggaccgcuacaucuccaucuucuacgcacugcgcuaccacagcaucgugacccugccgcaggcgcggcgagccguugcggccaucuggguggccagugucgucuucagcacgcucuucaucgccuacuacgaccacguggccguccugcugugccucguggucuucuuccuggcuaugcuggugcucauggccgugcuguacguccacaugcuggcccgggccugccagcacgcccagggcaucgcccggcuccacaagaggcagcgcccgguccaccagggcuuuggccuuaaaggcgcugucacccucaccauccugcugggcauuuucuuccucugcuggggccccuucuuccugcaucucacacucaucguccucugccccgagcaccccacgugcggcugcaucuucaagaacuucaaccucuuucucgcccucaucaucugcaaugccaucaucgacccccucaucuacgccuuccacagccaggagcuccgcaggacgcucaaggaggugcugacaugcuccugguga

SEQ ID NO: 2563 - RNA, 954 nt, Artificial Sequence
  derived and/or modified sequence opt1 from MC1_R__Homo_sapiens__AAQ62971
auggccgugcagggcagccagcgccggcugcucgggucccugaacagcacccccaccgccaucccccagcugggccucgcggccaaccagacgggggcccgcugccuggaggucuccaucagcgacggccuguuccucucccuggggcuggugagccucguggagaacgcccuggucguggccaccaucgcgaagaaccggaaccugcacucccccauguacugcuucaucugcugccucgcccugagcgaccugcucguguccggcagcaacguccuggagaccgccgugauccugcuccuggaggccggcgcgcugguggcccgcgccgccguccuccagcagcuggacaacgugaucgacgugaucacgugcuccagcaugcuguccagccucugcuuccugggggccaucgcggucgaccgguacaucuccaucuucuacgcccugcgcuaccacagcaucgugacccucccccaggcccggcgcgccguggccgcgaucugggucgccuccgugguguucagcacccuguucaucgccuacuacgaccacgucgccgugcugcucugccugguggucuucuuccuggccaugcucgugcugauggcggugcuguacguccacaugcucgcccgggccugccagcacgcccagggcaucgcccgccugcacaagcggcagcgccccgugcaccagggguucggccugaagggggcggucacccucaccauccugcugggcaucuucuuccucugcuggggcccguucuuccugcaccugacgcucaucgugcugugccccgagcacccgaccugcgggugcaucuucaagaacuucaaccuguuccucgcccugaucaucugcaacgccaucaucgacccccugaucuacgccuuccacucccaggagcugcggcgcacccucaaggaggugcugaccugcagcugguga

SEQ ID NO: 2564 - RNA, 954 nt, Artificial Sequence
  derived and/or modified sequence opt2 from MC1_R__Homo_sapiens__AAQ62971
auggccguccagggcucccagcgccgccuccucggcucccucaacuccacccccaccgccaucccccagcucggccucgccgccaaccagaccggcgcccgcugccucgaggucuccaucuccgacggccucuuccucucccucggccucgucucccucgucgagaacgcccucgucgucgccaccaucgccaagaaccgcaaccuccacucccccauguacugcuucaucugcugccucgcccucuccgaccuccucgucuccggcuccaacguccucgagaccgccgucauccuccuccucgaggccggcgcccucgucgcccgcgccgccguccuccagcagcucgacaacgucaucgacgucaucaccugcuccuccaugcucuccucccucugcuuccucggcgccaucgccgucgaccgcuacaucuccaucuucuacgcccuccgcuaccacuccaucgucacccucccccaggcccgccgcgccgucgccgccaucugggucgccuccgucgucuucuccacccucuucaucgccuacuacgaccacgucgccguccuccucugccucgucgucuucuuccucgccaugcucguccucauggccguccucuacguccacaugcucgcccgcgccugccagcacgcccagggcaucgcccgccuccacaagcgccagcgccccguccaccagggcuucggccucaagggcgccgucacccucaccauccuccucggcaucuucuuccucugcuggggccccuucuuccuccaccucacccucaucguccucugccccgagcaccccaccugcggcugcaucuucaagaacuucaaccucuuccucgcccucaucaucugcaacgccaucaucgacccccucaucuacgccuuccacucccaggagcuccgccgcacccucaaggagguccucaccugcuccugguga

SEQ ID NO: 2565 - RNA, 954 nt, Artificial Sequence
  derived and/or modified sequence opt3 from MC1_R__Homo_sapiens__AAQ62971
auggccgugcagggcagccaaagaaggcugcucgggucccuuaacucuacccccacagcuaucccucagcugggauuggcagccaaucagacuggugcgcggugcuuagaggucucaauuagugacggccuguuccuaagccucgggcugguuucccuuguggaaaacgcucugguaguggccacgauagcaaagaaucgcaacuugcacucuccaauguacuguuuuaucugcugucucgcccugucggaucugcucgucucaggaagcaauguguuagagaccgcuguuauucugcuuuuggaagcaggcgcccugguggcucgagccgcgguccuacagcaacucgacaacgugaucgauguaauuacaugcaguuccaugcugucuagccuuuguuuccugggugcaaucgccguugaccguuauauauccaucuuuuacgcuuugagauaucauucaauugugacucucccgcaggccaggcgggcagucgcugccaucuggguggcgaguguggucuucagcacccuguuuauugccuacuaugaucacguugcaguguuacugugccucguaguguucuuucuugcuaugcuggucuugauggccgugcuauacguucauaugcuggcucgcgccugucagcacgcacaggggaucgccagacuccauaaaaggcaacggcccgugcaccagggauucggccugaagggcgcugucacacuuaccauacuguuggggaucuuuuuccucugcuggggaccauuuuuccugcacuuaacucugauugugcuauguccugagcaucccacaugcgguuguauuuuuaaaaauuucaaccucuuccuggcgcuuaucaucugcaaugcaauuauagacccuuugaucuaugccuuucacucucaggaacugcgccgaacccucaaggagguacugacgugcuccugguga

SEQ ID NO: 2566 - RNA, 954 nt, Artificial Sequence
  derived and/or modified sequence opt4 from MC1_R__Homo_sapiens__AAQ62971
auggccgugcagggcagccagagaagacugcugggcagccugaacagcacccccaccgccaucccccagcugggccuggccgccaaccagaccggcgccagaugccuggaggugagcaucagcgacggccuguuccugagccugggccuggugagccugguggagaacgcccuggugguggccaccaucgccaagaacagaaaccugcacagccccauguacugcuucaucugcugccuggcccugagcgaccugcuggugagcggcagcaacgugcuggagaccgccgugauccugcugcuggaggccggcgcccugguggccagagccgccgugcugcagcagcuggacaacgugaucgacgugaucaccugcagcagcaugcugagcagccugugcuuccugggcgccaucgccguggacagauacaucagcaucuucuacgcccugagauaccacagcaucgugacccugccccaggccagaagagccguggccgccaucuggguggccagcgugguguucagcacccuguucaucgccuacuacgaccacguggccgugcugcugugccuggugguguucuuccuggccaugcuggugcugauggccgugcuguacgugcacaugcuggccagagccugccagcacgcccagggcaucgccagacugcacaagagacagagacccgugcaccagggcuucggccugaagggcgccgugacccugaccauccugcugggcaucuucuuccugugcuggggccccuucuuccugcaccugacccugaucgugcugugccccgagcaccccaccugcggcugcaucuucaagaacuucaaccuguuccuggcccugaucaucugcaacgccaucaucgacccccugaucuacgccuuccacagccaggagcugagaagaacccugaaggaggugcugaccugcagcugguga

SEQ ID NO: 2567 - RNA, 954 nt, Artificial Sequence
  derived and/or modified sequence opt5 from MC1_R__Homo_sapiens__AAQ62971
auggccgugcagggcagccaaagacggcugcucgggucccugaacucuacccccacagcuaucccucagcuuggacuggccgcgaaucagacgggcgcucgcugccucgaggucagcauuuccgacgggcuguuccuuucucugggacucguuagccugguggaaaacgcccugguggucgccaccaucgcuaagaauagaaaccuccacuccccgauguacuguuuuauuugcugucuggcccuuucugaucugcucgugagcggcuccaauguucuggagacagcugugauccuucugcucgaagccggggcgcuggucgcccgggcugccgugcugcagcaacucgacaacguuauugaugugauuaccugcagcucuaugcuguccagccuuuguuuccugggagcuaucgccgucgaccgcuauaucucuaucuuuuacgcgcucagauaucauuccauugugacacugccccaggcccggcgcgcuguggccgcuaucugggucgccagcguuguguucucuacccuuuuuauugccuacuaugaucacguggcuguccugcucugccuggugguuuucuuucuggcgaugcucgugcugauggccguccuuuacgugcauaugcuggcuagagccugucagcacgcccagggcaucgcucggcuccauaaacgccaaagaccuguucaccagggcuucgggcugaagggagccgugacacuuaccauucugcucggcaucuuuuuccugugcugggggcccuuuuuccugcaccucacgcugaucguccuuuguccugagcauccuaccugcggauguauuuuuaaaaauuucaaccuguuccucgcgcugaucauuugcaaugcuaucauugacccccugaucuaugccuuucacucccaggaacuucggcgcacacucaaggaggugcugaccugcagcugguga

SEQ ID NO: 2568 - protein, 317 aa, Artificial Sequence [sequence omitted]

SEQ ID NO: 2569 - RNA, 954 nt, Artificial Sequence
  MC1_R__Homo_sapiens__AAQ62970
auggcugugcagggaucccagagaagacuucugggcucccucaacuccacccccacagccaucccccagcuggggcuggcugccaaccagacaggagcccggugccuggagguguccaucucugacgggcucuuccucagccuggggcuggugagcuugguggagaacgcgcuggugguggccaccaucgccaagaaccggaaccugcacucacccauguacugcuucaucugcugccuggccuuguuggaccugcuggugagcgggagcaacgugcuggagacggccgucauccuccugcuggaggccggugcacugguggcccgggcugcggugcugcagcagcuggacaaugucauugacgugaucaccugcagcuccaugcuguccagccucugcuuccugggcgccaucgccguggaccgcuacaucuccaucuucuacgcacugcgcuaccacagcaucgugacccugccgcgggcgcggcgagccguugcggccaucuggguggccagugucgucuucagcacgcucuucaucgccuacuacgaccacguggccguccugcugugccucguggucuucuuccuggcuaugcuggugcucauggccgugcuguacguccacaugcuggcccgggccugccagcacgcccagggcaucgcccggcuccacaagaggcagcgcccgguccaccagggcuuuggccuuaaaggcgcugucacccucaccauccugcugggcauuuucuuccucugcuggggccccuucuuccugcaucucacacucaucguccucugccccgagcaccccacgugcggcugcaucuucaagaacuucaaccucuuucucgcccucaucaucugcaaugccaucaucgacccccucaucuacgccuuccacagccaggagcuccgcaggacgcucaaggaggugcugacaugcuccugguga

SEQ ID NO: 2570 - RNA, 954 nt, Artificial Sequence
  derived and/or modified sequence opt1 from MC1_R__Homo_sapiens__AAQ62970
auggccgugcagggcagccagcgccggcugcucgggucccugaacagcacccccaccgccaucccccagcugggccucgcggccaaccagacgggggcccgcugccuggaggucuccaucagcgacggccuguuccucucccuggggcuggugagccucguggagaacgcccuggucguggccaccaucgcgaagaaccggaaccugcacucccccauguacugcuucaucugcugccucgcccugcuggaccuccuggugagcggcuccaacguccuggagaccgccgugauccuccugcuggaggccggcgcgcucguggcccgcgccgccguccugcagcagcuggacaacgugaucgacgugaucacgugcagcuccaugcucagcucccugugcuuccugggggccaucgcggucgaccgguacaucagcaucuucuacgcccuccgcuaccacuccaucgugacccugccccgggcccgccgggccguggccgcgaucugggucgccagcgugguguucuccacccuguucaucgccuacuacgaccacgucgccgugcuccugugccugguggucuucuuccucgccaugcuggugcugauggcggugcucuacguccacaugcuggcccgcgccugccagcacgcccagggcaucgcccggcugcacaagcgccagcggcccgugcaccagggguucggccucaagggggcggucacccugaccauccugcucggcaucuucuuccugugcuggggcccguucuuccugcaccucacgcugaucgugcugugccccgagcacccgaccugcgggugcaucuucaagaacuucaaccucuuccuggcccugaucaucugcaacgccaucaucgacccccugaucuacgccuuccacagccaggagcuccgccggacccugaaggaggugcugaccugcuccugguga

SEQ ID NO: 2571 - RNA, 954 nt, Artificial Sequence
  derived and/or modified sequence opt2 from MC1_R__Homo_sapiens__AAQ62970
auggccguccagggcucccagcgccgccuccucggcucccucaacuccacccccaccgccaucccccagcucggccucgccgccaaccagaccggcgcccgcugccucgaggucuccaucuccgacggccucuuccucucccucggccucgucucccucgucgagaacgcccucgucgucgccaccaucgccaagaaccgcaaccuccacucccccauguacugcuucaucugcugccucgcccuccucgaccuccucgucuccggcuccaacguccucgagaccgccgucauccuccuccucgaggccggcgcccucgucgcccgcgccgccguccuccagcagcucgacaacgucaucgacgucaucaccugcuccuccaugcucuccucccucugcuuccucggcgccaucgccgucgaccgcuacaucuccaucuucuacgcccuccgcuaccacuccaucgucacccucccccgcgcccgccgcgccgucgccgccaucugggucgccuccgucgucuucuccacccucuucaucgccuacuacgaccacgucgccguccuccucugccucgucgucuucuuccucgccaugcucguccucauggccguccucuacguccacaugcucgcccgcgccugccagcacgcccagggcaucgcccgccuccacaagcgccagcgccccguccaccagggcuucggccucaagggcgccgucacccucaccauccuccucggcaucuucuuccucugcuggggccccuucuuccuccaccucacccucaucguccucugccccgagcaccccaccugcggcugcaucuucaagaacuucaaccucuuccucgcccucaucaucugcaacgccaucaucgacccccucaucuacgccuuccacucccaggagcuccgccgcacccucaaggagguccucaccugcuccugguga

SEQ ID NO: 2572 - RNA, 954 nt, Artificial Sequence
  derived and/or modified sequence opt3 from MC1_R__Homo_sapiens__AAQ62970
auggccgugcagggcagccaaagaaggcugcucgggucccuuaacucuacccccacagcuaucccucagcugggauuggcagccaaucagacuggugcgcggugcuuagaggucucaauuagugacggccuguuccuaagccucgggcugguuucccuuguggaaaacgcucugguaguggccacgauagcaaagaaucgcaacuugcacucuccaauguacuguuuuaucugcugucucgcccugcuggaucucuuagucucgggaucaaaugugcuggagaccgcuguuauucuuuugcuggaagcaggcgcccuaguggcucgagccgcgguccuccagcaacuggacaacgugaucgauguaauuacaugcagcaguaugcuuuccucucuguguuucuugggugcaaucgccguugaccguuauauaagcaucuuuuacgcucucagauaucauuccauugugacucugccgagggcccggcgcgcagucgcugccaucuggguggcgucaguggucuucaguaccuuauuuauugccuacuaugaucacguugcagugcugcucugccuuguaguguucuuucuggcuauguugguccuaauggccgugcuguacguucauaugcucgcuagagccugucagcacgcacaggggaucgccaggcugcauaaacggcagcgccccgugcaccaaggauucggccuuaagggcgcugucacacugaccauauugcucgggaucuuuuuccugugcuggggaccauuuuucuuacaccugacucuaauugugcucuguccugagcaucccacaugcgguuguauuuuuaaaaauuucaaccuguuccuugcguugaucaucugcaaugcaauuauagacccucugaucuaugccuuucacagccaggaacuccgaagaacccugaaggagguacuuacgugcucuugguga

SEQ ID NO: 2573 - RNA, 954 nt, Artificial Sequence
  derived and/or modified sequence opt4 from MC1_R__Homo_sapiens__AAQ62970
auggccgugcagggcagccagagaagacugcugggcagccugaacagcacccccaccgccaucccccagcugggccuggccgccaaccagaccggcgccagaugccuggaggugagcaucagcgacggccuguuccugagccugggccuggugagccugguggagaacgcccuggugguggccaccaucgccaagaacagaaaccugcacagccccauguacugcuucaucugcugccuggcccugcuggaccugcuggugagcggcagcaacgugcuggagaccgccgugauccugcugcuggaggccggcgcccugguggccagagccgccgugcugcagcagcuggacaacgugaucgacgugaucaccugcagcagcaugcugagcagccugugcuuccugggcgccaucgccguggacagauacaucagcaucuucuacgcccugagauaccacagcaucgugacccugcccagagccagaagagccguggccgccaucuggguggccagcgugguguucagcacccuguucaucgccuacuacgaccacguggccgugcugcugugccuggugguguucuuccuggccaugcuggugcugauggccgugcuguacgugcacaugcuggccagagccugccagcacgcccagggcaucgccagacugcacaagagacagagacccgugcaccagggcuucggccugaagggcgccgugacccugaccauccugcugggcaucuucuuccugugcuggggccccuucuuccugcaccugacccugaucgugcugugccccgagcaccccaccugcggcugcaucuucaagaacuucaaccuguuccuggcccugaucaucugcaacgccaucaucgacccccugaucuacgccuuccacagccaggagcugagaagaacccugaaggaggugcugaccugcagcugguga

SEQ ID NO: 2574 - RNA, 954 nt, Artificial Sequence
  derived and/or modified sequence opt5 from MC1_R__Homo_sapiens__AAQ62970
auggccgugcagggcagccaaagacggcugcucgggucccugaacucuacccccacagcuaucccucagcuuggacuggccgcgaaucagacgggcgcucgcugccucgaggucagcauuuccgacgggcuguuccuuucucugggacucguuagccugguggaaaacgcccugguggucgccaccaucgcuaagaauagaaaccuccacuccccgauguacuguuuuauuugcugucuggcccuucuggaucuccuggugucuggcagcaauguucuugagacagcugugauccugcuccuggaagccggggcgcuggucgcccgggcugccgugcuccagcaacuggacaacguuauugaugugauuaccugcuccagcaugcuuucuucccuguguuuccucggagcuaucgccgucgaccgcuauaucagcaucuuuuacgcgcugagauaucauucuauugugacacuuccccgggcccgcagagcuguggccgcuaucugggucgccuccguuguguucagcacccuguuuauugccuacuaugaucacguggcuguccuccugugccuggugguuuucuuucucgcgaugcuggugcuuauggccguccuguacgugcauaugcucgcucgggccugucagcacgcccagggcaucgcucgccugcauaaaagacagcggccuguucaccaaggcuucgggcuuaagggagccgugacacugaccauucuccugggcaucuuuuuccugugcugggggcccuuuuuccuccaccugacgcuuaucguccuguguccugagcauccuaccugcggauguauuuuuaaaaauuucaaccucuuccuggcgcugaucauuugcaaugcuaucauugacccccuuaucuaugccuuucacucucaggaacuccgcagaacacugaaggaggugcugaccugcuccugguga

SEQ ID NO: 2575 - protein, 317 aa, Artificial Sequence [sequence omitted]

SEQ ID NO: 2576 - RNA, 954 nt, Artificial Sequence
  MC1_R__Homo_sapiens__AAQ62969
auggcugugcagggaucccagagaagacuucugggcucccucaacuccacccccacagccaucccccagcuggggcuggcugccaaccagacaggagcccggugccuggagguguccaucucugacgggcuccuccucagccuggggcuggugagcuugguggagaacgcgcuggugguggccaccaucgccaagaaccggaaccugcacucacccauguacugcuucaucugcugccuggccuugucggaccugcuggugagcgggagcaacgugcuggagacggccgucauccuccugcuggaggccggugcacugguggcccgggcugcggugcugcagcagcuggacaaugucauugacgugaucaccugcagcuccaugcuguccagccucugcuuccugggcgccaucgccguggaccgcuacaucuccaucuucuacgcacugcgcuaccacagcaucgugacccugccgcgggcgcggcgagccguugcggccaucuggguggccagugucgucuucagcacgcucuucaucgccuacuacgaccacguggccguccugcugugccucguggucuucuuccuggcuaugcuggugcucauggccgugcuguacguccacaugcuggcccgggccugccagcacgcccagggcaucgcccggcuccacaagaggcagcgcccgguccaccagggcuuuggccuuaaaggcgcugucacccucaccauccugcugggcauuuucuuccucugcuggggccccuucuuccugcaucucacacucaucguccucugccccgagcaccccacgugcggcugcaucuucaagaacuucaaccucuuucucgcccucaucaucugcaaugccaucaucgacccccucaucuacgccuuccacagccaggagcuccgcaggacgcucaaggaggugcugacaugcuccugguga

SEQ ID NO: 2577 - RNA, 954 nt, Artificial Sequence
  derived and/or modified sequence opt1 from MC1_R__Homo_sapiens__AAQ62969
auggccgugcagggcagccagcgccggcugcucgggucccugaacagcacccccaccgccaucccccagcugggccucgcggccaaccagacgggggcccgcugccuggaggucuccaucagcgacggccugcuccugucccuggggcucgugagccugguggagaacgcccuggucguggccaccaucgcgaagaaccggaaccuccacucccccauguacugcuucaucugcugccuggcccugagcgaccuccugguguccggcagcaacguccuggagaccgccgugauccuccugcuggaggccggcgcgcucguggcccgcgccgccguccugcagcagcuggacaacgugaucgacgugaucacgugcuccagcaugcucuccagccugugcuuccugggggccaucgcggucgaccgguacaucuccaucuucuacgcccuccgcuaccacagcaucgugacccugccccgggcccgccgggccguggccgcgaucugggucgccuccgugguguucagcacccuguucaucgccuacuacgaccacgucgccgugcuccugugccugguggucuucuuccucgccaugcuggugcugauggcggugcucuacguccacaugcuggcccgcgccugccagcacgcccagggcaucgcccggcugcacaagcgccagcggcccgugcaccagggguucggccucaagggggcggucacccugaccauccugcucggcaucuucuuccugugcuggggcccguucuuccugcaccucacgcugaucgugcugugccccgagcacccgaccugcgggugcaucuucaagaacuucaaccucuuccuggcccugaucaucugcaacgccaucaucgacccccugaucuacgccuuccacucccaggagcuccgccggacccugaaggaggugcugaccugcagcugguga

SEQ ID NO: 2578 - RNA, 954 nt, Artificial Sequence
  derived and/or modified sequence opt2 from MC1_R__Homo_sapiens__AAQ62969
auggccguccagggcucccagcgccgccuccucggcucccucaacuccacccccaccgccaucccccagcucggccucgccgccaaccagaccggcgcccgcugccucgaggucuccaucuccgacggccuccuccucucccucggccucgucucccucgucgagaacgcccucgucgucgccaccaucgccaagaaccgcaaccuccacucccccauguacugcuucaucugcugccucgcccucuccgaccuccucgucuccggcuccaacguccucgagaccgccgucauccuccuccucgaggccggcgcccucgucgcccgcgccgccguccuccagcagcucgacaacgucaucgacgucaucaccugcuccuccaugcucuccucccucugcuuccucggcgccaucgccgucgaccgcuacaucuccaucuucuacgcccuccgcuaccacuccaucgucacccucccccgcgcccgccgcgccgucgccgccaucugggucgccuccgucgucuucuccacccucuucaucgccuacuacgaccacgucgccguccuccucugccucgucgucuucuuccucgccaugcucguccucauggccguccucuacguccacaugcucgcccgcgccugccagcacgcccagggcaucgcccgccuccacaagcgccagcgccccguccaccagggcuucggccucaagggcgccgucacccucaccauccuccucggcaucuucuuccucugcuggggccccuucuuccuccaccucacccucaucguccucugccccgagcaccccaccugcggcugcaucuucaagaacuucaaccucuuccucgcccucaucaucugcaacgccaucaucgacccccucaucuacgccuuccacucccaggagcuccgccgcacccucaaggagguccucaccugcuccugguga

SEQ ID NO: 2579 - RNA, 954 nt, Artificial Sequence
  derived and/or modified sequence opt3 from MC1_R__Homo_sapiens__AAQ62969
auggccgugcagggcagccaaagaaggcugcucgggucccuuaacucuacccccacagcuaucccucagcugggauuggcagccaaucagacuggugcgcggugcuuagaggucucaauuagugacggccugcuacucagccuggggcuuguuucccugguggaaaacgcuuugguaguggccacgauagcaaagaaucgcaaccuccacucuccaauguacuguuucaucugcugucuggcccugucggaucucuuagucucaggaagcaaugugcuggagaccgcuguuauucuuuugcuggaagcaggcgcccuaguggcucgagccgcgguccuccagcaacuggacaacgugaucgauguaauuacaugcaguuccaugcuuucuagccugugcuuuuugggugcaaucgccguugaccguuauauauccaucuucuacgcucucagauaucauucaauugugacucugccgagggcccggcgcgcagucgcugccaucuggguggcgaguguggucuuuagcaccuuauucauugccuacuaugaucacguugcagugcugcucugucuuguaguguuuuuccuggcuauguugguccuaauggccgugcuguacguucauaugcucgcuagagccugucagcacgcacaggggaucgccaggcugcauaaacggcagcgccccgugcaccaaggauuuggccuuaagggcgcugucacacugaccauauugcucgggauuuucuuucugugcuggggaccuuucuuuuuacaccugacucuaaucgugcucuguccagagcaucccacaugcgguuguauuuucaaaaauuuuaaccuguuccuugcguugaucaucugcaaugcaauuauagacccucugaucuaugccuuccacucucaggaacuccgaagaacccugaaggagguacuuacgugcuccugguga

SEQ ID NO: 2580 - RNA, 954 nt, Artificial Sequence
  derived and/or modified sequence opt4 from MC1_R__Homo_sapiens__AAQ62969
auggccgugcagggcagccagagaagacugcugggcagccugaacagcacccccaccgccaucccccagcugggccuggccgccaaccagaccggcgccagaugccuggaggugagcaucagcgacggccugcugcugagccugggccuggugagccugguggagaacgcccuggugguggccaccaucgccaagaacagaaaccugcacagccccauguacugcuucaucugcugccuggcccugagcgaccugcuggugagcggcagcaacgugcuggagaccgccgugauccugcugcuggaggccggcgcccugguggccagagccgccgugcugcagcagcuggacaacgugaucgacgugaucaccugcagcagcaugcugagcagccugugcuuccugggcgccaucgccguggacagauacaucagcaucuucuacgcccugagauaccacagcaucgugacccugcccagagccagaagagccguggccgccaucuggguggccagcgugguguucagcacccuguucaucgccuacuacgaccacguggccgugcugcugugccuggugguguucuuccuggccaugcuggugcugauggccgugcuguacgugcacaugcuggccagagccugccagcacgcccagggcaucgccagacugcacaagagacagagacccgugcaccagggcuucggccugaagggcgccgugacccugaccauccugcugggcaucuucuuccugugcuggggccccuucuuccugcaccugacccugaucgugcugugccccgagcaccccaccugcggcugcaucuucaagaacuucaaccuguuccuggcccugaucaucugcaacgccaucaucgacccccugaucuacgccuuccacagccaggagcugagaagaacccugaaggaggugcugaccugcagcugguga

SEQ ID NO: 2581 - RNA, 954 nt, Artificial Sequence
  derived and/or modified sequence opt5 from MC1_R__Homo_sapiens__AAQ62969
auggccgugcagggcagccaaagacggcugcucgggucccugaacucuacccccacagcuaucccucagcuuggacuggccgcgaaucagacgggcgcucgcugccucgaggucagcauuuccgacgggcugcuucugucucucggacugguuagccugguggaaaacgcccucguggucgccaccaucgcuaagaauagaaaccugcacuccccgauguacuguuucauuugcugucuugcccugucugaucuccuggugagcggcuccaauguucuugagacagcugugauccugcuccuggaagccggggcgcuggucgcccgggcugccgugcuccagcaacuggacaacguuauugaugugauuaccugcagcucuaugcuuuccagccuguguuuucucggagcuaucgccgucgaccgcuauaucucuaucuucuacgcgcugagauaucauuccauugugacacuuccccgggcccgcagagcuguggccgcuaucugggucgccagcguuguguuuucuacccuguucauugccuacuaugaucacguggcuguccuccugugccuggugguguuuuuccucgcgaugcugguucuuauggccguccuguacgugcauaugcucgcucgggccugucagcacgcccagggcaucgcucgccugcauaaaagacagcggccuguucaccaaggcuuugggcuuaagggagccgugacacugaccauucuccugggcaucuucuuucugugcugggggcccuucuuucuccaccugacgcuuaucguccuguguccugagcauccuaccugcggauguauuuucaaaaauuuuaaccucuuccuggcgcugaucauuugcaaugcuaucauugacccccuuaucuaugccuuccacucccaggaacuccgcagaacacugaaggaggugcugaccugcagcugguga

SEQ ID NO: 2582 - protein, 317 aa, Artificial Sequence [sequence omitted]

SEQ ID NO: 2583 - RNA, 954 nt, Artificial Sequence
  MC1_R__Homo_sapiens__AAO21073
auggcugugcagggaucccagagaagacuucugggcucccucaacuccacccccacagccaucccccagcuggggcuggcugccaaccagacaggagcccggugccuggagguguccaucucugacgggcucuuccucagccuggggcuggugagcuugguggagaacgcgcuggugguggccaccaucgccaagaaccggaaccugcacucacccauguacugcuucaucugcugccuggccuugucggaccugcuggugagcgggagcaacgugcgggagacggccgucauccuccugcuggaggccggugcacugguggcccgggcugcggugcugcagcagcuggacaaugucauugacgugaucaccugcagcuccaugcuguccagccucugcuuccugggcgccaucgccguggaccgcuacaucuccaucuucuacgcacugcgcuaccacagcaucgugacccugccgcgggcgcggcgagccguugcggccaucuggguggccagugucgucuucagcacgcucuucaucgccuacuacgaccacguggccguccugcugugccucguggucuucuuccuggcuaugcuggugcucauggccgugcuguacguccacaugcuggcccgggccugccagcacgcccagggcaucgcccggcuccacaagaggcagcgcccgguccaccagggcuuuggccuuaaaggcgcugucacccucaccauccugcugggcauuuucuuccucugcuggggccccuucuuccugcaucucacacucaucguccucugccccgagcaccccacgugcggcugcaucuucaagaacuucaaccucuuucucgcccucaucaucugcaaugccaucaucgacccccucaucuacgccuuccacagccaggagcuccgcaggacgcucaaggaggugcugacaugcuccugguga

SEQ ID NO: 2584 - RNA, 954 nt, Artificial Sequence
  derived and/or modified sequence opt1 from MC1_R__Homo_sapiens__AAO21073
auggccgugcagggcagccagcgccggcuccucgggucccugaacagcacccccaccgccaucccccagcugggccucgcggccaaccagacgggggcccgcugccuggaggucuccaucagcgacggccuguuccucucccuggggcuggugagccucguggagaacgcccuggucguggccaccaucgcgaagaaccggaaccugcacucccccauguacugcuucaucugcugccucgcccugagcgaccugcucguguccggcagcaacguccgcgagaccgccgugauccugcugcucgaggccggcgcgcugguggcccgggccgccguccugcagcagcucgacaacgugaucgacgugaucacgugcuccagcaugcuguccagccugugcuuccucggggccaucgcggucgaccgcuacaucuccaucuucuacgcccugcgguaccacagcaucgugacccugccccgcgcccggcgcgccguggccgcgaucugggucgccuccgugguguucagcacccucuucaucgccuacuacgaccacgucgccgugcugcugugccucguggucuucuuccuggccaugcuggugcucauggcggugcuguacguccacaugcuggcccgggccugccagcacgcccagggcaucgcccgccuccacaagcggcagcgccccgugcaccagggguucggccugaagggggcggucacccugaccauccuccugggcaucuucuuccugugcuggggcccguucuuccuccaccugacgcugaucgugcucugccccgagcacccgaccugcgggugcaucuucaagaacuucaaccuguuccuggcccucaucaucugcaacgccaucaucgacccccugaucuacgccuuccacucccaggagcugcggcgcacccugaaggaggugcugaccugcagcugguga

SEQ ID NO: 2585 - RNA, 954 nt, Artificial Sequence
  derived and/or modified sequence opt2 from MC1_R__Homo_sapiens__AAO21073
auggccguccagggcucccagcgccgccuccucggcucccucaacuccacccccaccgccaucccccagcucggccucgccgccaaccagaccggcgcccgcugccucgaggucuccaucuccgacggccucuuccucucccucggccucgucucccucgucgagaacgcccucgucgucgccaccaucgccaagaaccgcaaccuccacucccccauguacugcuucaucugcugccucgcccucuccgaccuccucgucuccggcuccaacguccgcgagaccgccgucauccuccuccucgaggccggcgcccucgucgcccgcgccgccguccuccagcagcucgacaacgucaucgacgucaucaccugcuccuccaugcucuccucccucugcuuccucggcgccaucgccgucgaccgcuacaucuccaucuucuacgcccuccgcuaccacuccaucgucacccucccccgcgcccgccgcgccgucgccgccaucugggucgccuccgucgucuucuccacccucuucaucgccuacuacgaccacgucgccguccuccucugccucgucgucuucuuccucgccaugcucguccucauggccguccucuacguccacaugcucgcccgcgccugccagcacgcccagggcaucgcccgccuccacaagcgccagcgccccguccaccagggcuucggccucaagggcgccgucacccucaccauccuccucggcaucuucuuccucugcuggggccccuucuuccuccaccucacccucaucguccucugccccgagcaccccaccugcggcugcaucuucaagaacuucaaccucuuccucgcccucaucaucugcaacgccaucaucgacccccucaucuacgccuuccacucccaggagcuccgccgcacccucaaggagguccucaccugcuccugguga

SEQ ID NO: 2586 - RNA, 954 nt, Artificial Sequence
  derived and/or modified sequence opt3 from MC1_R__Homo_sapiens__AAO21073
auggccgugcagggcagccaaagaaggcugcucgggucccuuaacucuacccccacagcuaucccucagcugggauuggcagccaaucagacuggugcgcggugcuuagaggucucaauuagugacggccuguuccuaagccucgggcugguuucccuuguggaaaacgcucugguaguggccacgauagcaaagaaucgcaacuugcacucuccaauguacuguuuuaucugcugucucgcccugucggaucugcucgucucaggaagcaaugugcgagagaccgcuguuauuuuacugcuugaagcaggcgccuugguggcucgugccgcgguccugcagcaacuagacaacgugaucgauguaauuacaugcaguuccaugcucucuagccuguguuuccuuggugcaaucgccguugacagauauauauccaucuuuuacgcucugagguaucauucaauugugacuuugccgcgggcccgcagagcagucgcugccaucuggguggcgaguguggucuucagcacccucuuuauugccuacuaugaucacguugcagugcuguuaugccugguaguguucuuucucgcuaugcuuguccugauggccguguuguacguucauaugcuagcuagggccugucagcacgcacaggggaucgcccggcugcauaaacgccagcgacccgugcaccaaggauucggccucaagggcgcugucacacugaccauacuucuggggaucuuuuucuugugcuggggaccauuuuuccuccaccugacuuuaauugugcuguguccugagcaucccacaugcgguuguauuuuuaaaaauuucaaccuauuccucgcgcugaucaucugcaaugcaauuauagacccucuuaucuaugccuuucacucucaggaauugagaaggacccugaaggagguacucacgugcuccugguga

SEQ ID NO: 2587 - RNA, 954 nt, Artificial Sequence
  derived and/or modified sequence opt4 from MC1_R__Homo_sapiens__AAO21073
auggccgugcagggcagccagagaagacugcugggcagccugaacagcacccccaccgccaucccccagcugggccuggccgccaaccagaccggcgccagaugccuggaggugagcaucagcgacggccuguuccugagccugggccuggugagccugguggagaacgcccuggugguggccaccaucgccaagaacagaaaccugcacagccccauguacugcuucaucugcugccuggcccugagcgaccugcuggugagcggcagcaacgugagagagaccgccgugauccugcugcuggaggccggcgcccugguggccagagccgccgugcugcagcagcuggacaacgugaucgacgugaucaccugcagcagcaugcugagcagccugugcuuccugggcgccaucgccguggacagauacaucagcaucuucuacgcccugagauaccacagcaucgugacccugcccagagccagaagagccguggccgccaucuggguggccagcgugguguucagcacccuguucaucgccuacuacgaccacguggccgugcugcugugccuggugguguucuuccuggccaugcuggugcugauggccgugcuguacgugcacaugcuggccagagccugccagcacgcccagggcaucgccagacugcacaagagacagagacccgugcaccagggcuucggccugaagggcgccgugacccugaccauccugcugggcaucuucuuccugugcuggggccccuucuuccugcaccugacccugaucgugcugugccccgagcaccccaccugcggcugcaucuucaagaacuucaaccuguuccuggcccugaucaucugcaacgccaucaucgacccccugaucuacgccuuccacagccaggagcugagaagaacccugaaggaggugcugaccugcagcugguga

SEQ ID NO: 2588 - RNA, 954 nt, Artificial Sequence
  derived and/or modified sequence opt5 from MC1_R__Homo_sapiens__AAO21073
auggccgugcagggcagccaaagacggcuccucgggucccugaacucuacccccacagcuaucccucagcuuggacuggccgcgaaucagacgggcgcucgcugccucgaggucagcauuuccgacgggcuguuccuuucucugggacucguuagccugguggaaaacgcccugguggucgccaccaucgcuaagaauagaaaccuccacuccccgauguacuguuuuauuugcugucuggcccuuucugaucugcucgugagcggcuccaauguucgggagacagcugugauccugcuucuggaagccggggcgcucgucgcccgcgcugccgugcugcagcaacuggacaacguuauugaugugauuaccugcagcucuaugcucuccagccuguguuuccuuggagcuaucgccgucgacagauauaucucuaucuuuuacgcgcugcgguaucauuccauugugacacucccccgcgccagacgggcuguggccgcuaucugggucgccagcguuguguucucuacccuguuuauugccuacuaugaucacguggcuguccuucugugccucgugguuuucuuucuggcgaugcuggugcucauggccguccuguacgugcauaugcuugcucgcgccugucagcacgcccagggcaucgcuagacugcauaaacggcagcgcccuguucaccaaggcuucgggcucaagggagccgugacacugaccauucuucugggcaucuuuuuccucugcugggggcccuuuuuccugcaccugacgcucaucguccuguguccugagcauccuaccugcggauguauuuuuaaaaauuucaaccuuuuccuggcgcucaucauuugcaaugcuaucauugacccccugaucuaugccuuucacucccaggaacugagacggacacuuaaggaggugcugaccugcagcugguga

SEQ ID NO: 2589 - protein, 317 aa, Artificial Sequence [sequence omitted]

SEQ ID NO: 2590 - RNA, 954 nt, Artificial Sequence
  MC1_R__Homo_sapiens__AHC09567
auggcugugcagggaucccagagaagacuucugggcucccucaacuccacccccacagccaucccccagcuggggcuggcugccaaccagacaggagcccggugccuggagguguccaucucugacgggcucuuccucagccuggggcuggugagcuugguggagaacgcgcuggugguggccaccaucgccaagaaccggaaccugcacucacccauguacugcuucaucugcugccuggccuugccggaccugcuggugagcgggagcaacgugcuggagacggccgucauccuccugcuggaggccggugcacugguggcccgggcugcggugcugcagcagcuggacaaugucauugacgugaucaccugcagcuccaugcuguccagccucugcuuccugggcgccaucgccguggaccgcuacaucuccaucuucuacgcacugcgcuaccacagcaucgugacccugccgcgggcgcggcgagccguugcggccaucuggguggccagugucgucuucagcacgcucuucaucgccuacuacgaccacguggccguccugcugugccucguggucuucuuccuggcuaugcuggugcucauggccgugcuguacguccacaugcuggcccgggccugccagcacgcccagggcaucgcccggcuccacaagaggcagcgcccgguccaccagggcuuuggccuuaaaggcgcugucacccucaccauccugcugggcauuuucuuccucugcuggggccccuucuuccugcaucucacacucaucguccucugccccgagcaccccacgugcggcugcaucuucaagaacuucaaccucuuucucgcccucaucaucugcaaugccaucaucgacccccucaucuacgccuuccacagccaggagcuccgcaggacgcucaaggaggugcugacaugcuccugguga

SEQ ID NO: 2591 - RNA, 954 nt, Artificial Sequence
  derived and/or modified sequence opt1 from MC1_R__Homo_sapiens__AHC09567
auggccgugcagggcagccagcgccggcugcucgggucccugaacagcacccccaccgccaucccgcagcugggccucgcggccaaccagacgggggcccgcugccuggaggucuccaucagcgacggccuguuccucucccuggggcuggugagccucguggagaacgcccuggucguggccaccaucgcgaagaaccggaaccugcacucccccauguacugcuucaucugcugccucgcccugcccgaccugcucgugagcggcuccaacguccuggagaccgccgugauccugcuccuggaggccggcgcgcugguggcccgcgccgccguccuccagcagcuggacaacgugaucgacgugaucacgugcagcuccaugcugagcucccucugcuuccugggggccaucgcggucgaccgguacaucagcaucuucuacgcccugcgcuaccacuccaucgugacccucccccgggcccgccgggccguggccgcgaucugggucgccagcgugguguucuccacccuguucaucgccuacuacgaccacgucgccgugcugcucugccugguggucuucuuccuggccaugcucgugcugauggcggugcuguacguccacaugcucgcccgcgccugccagcacgcccagggcaucgcccggcugcacaagcgccagcggccggugcaccagggguucggccugaagggggcggucacccucaccauccugcugggcaucuucuuccucugcuggggccccuucuuccugcaccugacgcucaucgugcugugccccgagcacccgaccugcgggugcaucuucaagaacuucaaccuguuccucgcccugaucaucugcaacgccaucaucgacccccugaucuacgccuuccacagccaggagcugcgccggacccucaaggaggugcugaccugcuccugguga

SEQ ID NO: 2592 - RNA, 954 nt, Artificial Sequence
  derived and/or modified sequence opt2 from MC1_R__Homo_sapiens__AHC09567
auggccguccagggcucccagcgccgccuccucggcucccucaacuccacccccaccgccaucccccagcucggccucgccgccaaccagaccggcgcccgcugccucgaggucuccaucuccgacggccucuuccucucccucggccucgucucccucgucgagaacgcccucgucgucgccaccaucgccaagaaccgcaaccuccacucccccauguacugcuucaucugcugccucgcccuccccgaccuccucgucuccggcuccaacguccucgagaccgccgucauccuccuccucgaggccggcgcccucgucgcccgcgccgccguccuccagcagcucgacaacgucaucgacgucaucaccugcuccuccaugcucuccucccucugcuuccucggcgccaucgccgucgaccgcuacaucuccaucuucuacgcccuccgcuaccacuccaucgucacccucccccgcgcccgccgcgccgucgccgccaucugggucgccuccgucgucuucuccacccucuucaucgccuacuacgaccacgucgccguccuccucugccucgucgucuucuuccucgccaugcucguccucauggccguccucuacguccacaugcucgcccgcgccugccagcacgcccagggcaucgcccgccuccacaagcgccagcgccccguccaccagggcuucggccucaagggcgccgucacccucaccauccuccucggcaucuucuuccucugcuggggccccuucuuccuccaccucacccucaucguccucugccccgagcaccccaccugcggcugcaucuucaagaacuucaaccucuuccucgcccucaucaucugcaacgccaucaucgacccccucaucuacgccuuccacucccaggagcuccgccgcacccucaaggagguccucaccugcuccugguga

SEQ ID NO: 2593 - RNA, 954 nt, Artificial Sequence
  derived and/or modified sequence opt3 from MC1_R__Homo_sapiens__AHC09567
auggccgugcagggcagccaaagaaggcugcucgggucccuuaacucuacccccacagcuaucccucagcugggauuggcagccaaucagacuggugcgcggugcuuagaggucucaauuagugacggccuguuccuaagccucgggcugguuucccuuguggaaaacgcucugguaguggccacgauagcaaagaaucgcaacuugcacucuccaauguacuguuuuaucugcugucucgcccugccggaucugcucgucucgggaucaaauguguuagagaccgcuguuauucugcuuuuggaagcaggcgcccugguggcucgagccgcgguccuacagcaacucgacaacgugaucgauguaauuacaugcagcaguaugcuguccucucuuuguuuccugggugcaaucgccguugaccguuauauaagcaucuuuuacgcuuugagauaucauuccauugugacucuccccagggcccggcgcgcagucgcugccaucuggguggcgucaguggucuucaguacccuguuuauugccuacuaugaucacguugcaguguuacugugccucguaguguucuuucuugcuaugcuggucuugauggccgugcuauacguucauaugcuggcuagagccugucagcacgcacaggggaucgccaggcuccauaaacggcagcgcccugugcaccaaggauucggccugaagggcgcugucacacuuaccauacuguuggggaucuuuuuccucugcuggggaccauuuuuccugcacuuaacucugauugugcuaugucccgagcauccuacaugcgguuguauuuuuaaaaauuucaaccucuuccuggcgcuuaucaucugcaaugcaauuauagacccauugaucuaugccuuucacagccaggaacugcgaagaacccucaaggagguacugacgugcucuugguga

SEQ ID NO: 2594 - RNA, 954 nt, Artificial Sequence
  derived and/or modified sequence opt4 from MC1_R__Homo_sapiens__AHC09567
auggccgugcagggcagccagagaagacugcugggcagccugaacagcacccccaccgccaucccccagcugggccuggccgccaaccagaccggcgccagaugccuggaggugagcaucagcgacggccuguuccugagccugggccuggugagccugguggagaacgcccuggugguggccaccaucgccaagaacagaaaccugcacagccccauguacugcuucaucugcugccuggcccugcccgaccugcuggugagcggcagcaacgugcuggagaccgccgugauccugcugcuggaggccggcgcccugguggccagagccgccgugcugcagcagcuggacaacgugaucgacgugaucaccugcagcagcaugcugagcagccugugcuuccugggcgccaucgccguggacagauacaucagcaucuucuacgcccugagauaccacagcaucgugacccugcccagagccagaagagccguggccgccaucuggguggccagcgugguguucagcacccuguucaucgccuacuacgaccacguggccgugcugcugugccuggugguguucuuccuggccaugcuggugcugauggccgugcuguacgugcacaugcuggccagagccugccagcacgcccagggcaucgccagacugcacaagagacagagacccgugcaccagggcuucggccugaagggcgccgugacccugaccauccugcugggcaucuucuuccugugcuggggccccuucuuccugcaccugacccugaucgugcugugccccgagcaccccaccugcggcugcaucuucaagaacuucaaccuguuccuggcccugaucaucugcaacgccaucaucgacccccugaucuacgccuuccacagccaggagcugagaagaacccugaaggaggugcugaccugcagcugguga

SEQ ID NO: 2595 - RNA, 954 nt, Artificial Sequence
  derived and/or modified sequence opt5 from MC1_R__Homo_sapiens__AHC09567
auggccgugcagggcagccaaagacggcugcucgggucccugaacucuacccccacagcuaucccucagcuuggacuggccgcgaaucagacgggcgcucgcugccucgaggucagcauuuccgacgggcuguuccuuucucugggacucguuagccugguggaaaacgcccugguggucgccaccaucgcuaagaauagaaaccuccacuccccgauguacuguuuuauuugcugucuggcccuucccgaucugcucgugucuggcagcaauguucuggagacagcugugauccuucugcucgaagccggggcgcuggucgcccgggcugccgugcugcagcaacucgacaacguuauugaugugauuaccugcuccagcaugcugucuucccuuuguuuccugggagcuaucgccgucgaccgcuauaucagcaucuuuuacgcgcucagauaucauucuauugugacacugccucgggcccgcagagcuguggccgcuaucugggucgccuccguuguguucagcacccuuuuuauugccuacuaugaucacguggcuguccugcucugccuggugguuuucuuucuggcgaugcucgugcugauggccguccuuuacgugcauaugcuggcucgggccugucagcacgcccagggcaucgcucgccuccauaaaagacagcggcccguucaccaaggcuucgggcugaagggagccgugacacuuaccauucugcucggcaucuuuuuccugugcugggggcccuuuuuccugcaccucacgcugaucguccuuuguccugagcauccuaccugcggauguauuuuuaaaaauuucaaccuguuccucgcgcugaucauuugcaaugcuaucauugacccgcugaucuaugccuuucacucucaggaacuucgcagaacacucaaggaggugcugaccugcuccugguga

SEQ ID NO: 2596 - protein, 317 aa, Artificial Sequence [sequence omitted]

SEQ ID NO: 2597 - RNA, 954 nt, Artificial Sequence
  MC1_R__Homo_sapiens__AHC09812
auggcugugcagggaucccagagaagacuucugggcucccucaacuccacccccacagccaucccccagcuggggcuggcugccaaccagacaggagcccggugccuggagguguccaucucugacgggcucuuccucagccuggggcuggugagcuugguggagaacgcgcuggugguggccaccaucgccaagaaccggaaccugcacucacccauguacugcuucaucugcugccuggccuugucggaccugcuggugagcgggagcaacgugcuggagacggccgucauccuccugcuggaggccggugcacugguggcccgggcugcggugcugcagcagcuggacaaugucauugacgugaucaccugcagcuccaugcuguccagccucugcuuccugggcgccaucgccguggaccgcuacaucuccaucuucuacgcacugcgcuaccacagcaucgugacccugccgcgggcgcggcgagccguugcggccaucuggguggccagugucgucuucagcacgcucuucaucgccuacuacgaccacguggccguccugcugugccucauggucuucuuccuggcuaugcuggugcucauggccgugcuguacguccacaugcuggcccgggccugccagcacgcccagggcaucgcccggcuccacaagaggcagcgcccgguccaccagggcuuuggccuuaaaggcgcugucacccucaccauccugcugggcauuuucuuccucugcuggggccccuucuuccugcaucucacacucaucguccucugccccgagcaccccacgugcggcugcaucuucaagaacuucaaccucuuucucgcccucaucaucugcaaugccaucaucgacccccucaucuacgccuuccacagccaggagcuccgcaggacgcucaaggaggugcugacaugcuccugguga

SEQ ID NO: 2598 - RNA, 954 nt, Artificial Sequence
  derived and/or modified sequence opt1 from MC1_R__Homo_sapiens__AHC09812
auggccgugcagggcagccagcgccggcugcucgggucccugaacagcacccccaccgccaucccccagcugggccucgcggccaaccagacgggggcccgcugccuggaggucuccaucagcgacggccuguuccucucccuggggcuggugagccucguggagaacgcccuggucguggccaccaucgcgaagaaccggaaccugcacucccccauguacugcuucaucugcugccucgcccugagcgaccugcucguguccggcagcaacguccuggagaccgccgugauccugcuccuggaggccggcgcgcugguggcccgcgccgccguccuccagcagcuggacaacgugaucgacgugaucacgugcuccagcaugcuguccagccucugcuuccugggggccaucgcggucgaccgguacaucuccaucuucuacgcccugcgcuaccacagcaucgugacccucccccgggcccgccgggccguggccgcgaucugggucgccuccgugguguucagcacccuguucaucgccuacuacgaccacgucgccgugcugcucugccugaugguguucuuccuggccaugcucguccugauggcggugcuguacgugcacaugcucgcccgcgccugccagcacgcccagggcaucgcccggcugcacaagcgccagcggcccguccaccagggguucggccugaagggggcggugacccucaccauccugcugggcaucuucuuccucugcuggggcccguucuuccugcaccugacgcucaucguccugugccccgagcacccgaccugcgggugcaucuucaagaacuucaaccuguuccucgcccugaucaucugcaacgccaucaucgacccccugaucuacgccuuccacucccaggagcugcgccggacccucaaggaggugcugaccugcagcugguga

SEQ ID NO: 2599 - RNA, 954 nt, Artificial Sequence
  derived and/or modified sequence opt2 from MC1_R__Homo_sapiens__AHC09812
auggccguccagggcucccagcgccgccuccucggcucccucaacuccacccccaccgccaucccccagcucggccucgccgccaaccagaccggcgcccgcugccucgaggucuccaucuccgacggccucuuccucucccucggccucgucucccucgucgagaacgcccucgucgucgccaccaucgccaagaaccgcaaccuccacucccccauguacugcuucaucugcugccucgcccucuccgaccuccucgucuccggcuccaacguccucgagaccgccgucauccuccuccucgaggccggcgcccucgucgcccgcgccgccguccuccagcagcucgacaacgucaucgacgucaucaccugcuccuccaugcucuccucccucugcuuccucggcgccaucgccgucgaccgcuacaucuccaucuucuacgcccuccgcuaccacuccaucgucacccucccccgcgcccgccgcgccgucgccgccaucugggucgccuccgucgucuucuccacccucuucaucgccuacuacgaccacgucgccguccuccucugccucauggucuucuuccucgccaugcucguccucauggccguccucuacguccacaugcucgcccgcgccugccagcacgcccagggcaucgcccgccuccacaagcgccagcgccccguccaccagggcuucggccucaagggcgccgucacccucaccauccuccucggcaucuucuuccucugcuggggccccuucuuccuccaccucacccucaucguccucugccccgagcaccccaccugcggcugcaucuucaagaacuucaaccucuuccucgcccucaucaucugcaacgccaucaucgacccccucaucuacgccuuccacucccaggagcuccgccgcacccucaaggagguccucaccugcuccugguga

SEQ ID NO: 2600 - RNA, 954 nt, Artificial Sequence
  derived and/or modified sequence opt3 from MC1_R__Homo_sapiens__AHC09812
auggccgugcagggcagccaaagaaggcugcucgggucccuuaacucuacccccacagcuaucccucagcugggauuggcagccaaucagacuggugcgcggugcuuagaggucucaauuagugacggccuguuccuaagccucgggcugguuucccuuguggaaaacgcucugguaguggccacgauagcaaagaaucgcaacuugcacucuccaauguacuguuuuaucugcugucucgcccugucggaucugcucgucucaggaagcaauguguuagagaccgcuguuauucugcuuuuggaagcaggcgcccugguggcucgagccgcgguccuacagcaacucgacaacgugaucgauguaauuacaugcaguuccaugcugucuagccuuuguuuccugggugcaaucgccguugaccguuauauauccaucuuuuacgcuuugagauaucauucaauugugacucucccgagggcccggcgcgcagucgcugccaucuggguggcgaguguggucuucagcacccuguuuauugccuacuaugaucacguugcaguguuacugugccucaugguauucuuucuugcuaugcugguguugauggccguccuauacgugcauaugcuggcuagagccugucagcacgcacaggggaucgccaggcuccauaaacggcagcgccccguucaccaaggauucggccugaagggcgcugugacacuuaccauacuguuggggaucuuuuuccucugcuggggaccauuuuuccugcacuuaacucugauuguccuauguccugagcaucccacaugcgguuguauuuuuaaaaauuucaaccucuuccuggcgcuuaucaucugcaaugcaauuauagacccuuugaucuaugccuuucacucucaggaacugcgaagaacccucaaggaggugcugacgugcuccugguga

SEQ ID NO: 2601 - RNA, 954 nt, Artificial Sequence
  derived and/or modified sequence opt4 from MC1_R__Homo_sapiens__AHC09812
auggccgugcagggcagccagagaagacugcugggcagccugaacagcacccccaccgccaucccccagcugggccuggccgccaaccagaccggcgccagaugccuggaggugagcaucagcgacggccuguuccugagccugggccuggugagccugguggagaacgcccuggugguggccaccaucgccaagaacagaaaccugcacagccccauguacugcuucaucugcugccuggcccugagcgaccugcuggugagcggcagcaacgugcuggagaccgccgugauccugcugcuggaggccggcgcccugguggccagagccgccgugcugcagcagcuggacaacgugaucgacgugaucaccugcagcagcaugcugagcagccugugcuuccugggcgccaucgccguggacagauacaucagcaucuucuacgcccugagauaccacagcaucgugacccugcccagagccagaagagccguggccgccaucuggguggccagcgugguguucagcacccuguucaucgccuacuacgaccacguggccgugcugcugugccugaugguguucuuccuggccaugcuggugcugauggccgugcuguacgugcacaugcuggccagagccugccagcacgcccagggcaucgccagacugcacaagagacagagacccgugcaccagggcuucggccugaagggcgccgugacccugaccauccugcugggcaucuucuuccugugcuggggccccuucuuccugcaccugacccugaucgugcugugccccgagcaccccaccugcggcugcaucuucaagaacuucaaccuguuccuggcccugaucaucugcaacgccaucaucgacccccugaucuacgccuuccacagccaggagcugagaagaacccugaaggaggugcugaccugcagcugguga

SEQ ID NO: 2602 - RNA, 954 nt, Artificial Sequence
  derived and/or modified sequence opt5 from MC1_R__Homo_sapiens__AHC09812
auggccgugcagggcagccaaagacggcugcucgggucccugaacucuacccccacagcuaucccucagcuuggacuggccgcgaaucagacgggcgcucgcugccucgaggucagcauuuccgacgggcuguuccuuucucugggacucguuagccugguggaaaacgcccugguggucgccaccaucgcuaagaauagaaaccuccacuccccgauguacuguuuuauuugcugucuggcccuuucugaucugcucgugagcggcuccaauguucuggagacagcugugauccuucugcucgaagccggggcgcuggucgcccgggcugccgugcugcagcaacucgacaacguuauugaugugauuaccugcagcucuaugcuguccagccuuuguuuccugggagcuaucgccgucgaccgcuauaucucuaucuuuuacgcgcucagauaucauuccauugugacacugccccgggcccgcagagcuguggccgcuaucugggucgccagcguuguguucucuacccuuuuuauugccuacuaugaucacguggcuguccugcucugccugaugguguucuuucuggcgaugcucguucugauggccgugcuuuacguccauaugcuggcucgggccugucagcacgcccagggcaucgcucgccuccauaaaagacagcggccugugcaccaaggcuucgggcugaagggagccguuacacuuaccauucugcucggcaucuuuuuccugugcugggggcccuuuuuccugcaccucacgcugaucgugcuuuguccugagcauccuaccugcggauguauuuuuaaaaauuucaaccuguuccucgcgcugaucauuugcaaugcuaucauugacccccugaucuaugccuuucacucccaggaacuucgcagaacacucaaggagguccugaccugcagcugguga

SEQ ID NO: 2603 - protein, 317 aa, Artificial Sequence [sequence omitted]

SEQ ID NO: 2604 - RNA, 954 nt, Artificial Sequence
  MC1_R__Homo_sapiens__AHC10192
auggcugugcagggaucccagagaagacuucugggcucccucaacuccacccccacagccaucccccagcuggggcuggcugccaaccagacaggagcccggugccuggagguguccaucucugacgggcucuuccucagccuggggcuggugagcuugguggagaacgcgcuggugguggccaccaucgccaagaaccggaaccugcacucacccauguacugcuucaucugcugccuggccuugucggaccugcuggugagcgggagcaacgugcuggagacggccgucauccuccugcuggaggccggugcacugguggcccgggcugcggugcugcagcagcuggacaaugucauugacgugaucaccugcagcuccaugcuguccagccucugcuuccugggcgccaucgccguggaccgcuacaucuccaucuucuacgcacugcgcuaccacagcaucgugacccugccgcgggcgcggcgagccguugcggccaucuggguggccagugucgucuucagcacgcucuucaucgccuacuacgaccacguggccguccugcugugccucguggucuucuuccuggcuaugcuggugcucauggccgugcuguacguccacaugcuggcccgggccugccagcacgcccagggcaccgcccggcuccacaagaggcagcgcccgguccaccagggcuuuggccuuaaaggcgcugucacccucaccauccugcugggcauuuucuuccucugcuggggccccuucuuccugcaucucacacucaucguccucugccccgagcaccccacgugcggcugcaucuucaagaacuucaaccucuuucucgcccucaucaucugcaaugccaucaucgacccccucaucuacgccuuccacagccaggagcuccgcaggacgcucaaggaggugcugacaugcuccugguga

SEQ ID NO: 2605 - RNA, 954 nt, Artificial Sequence
  derived and/or modified sequence opt1 from MC1_R__Homo_sapiens__AHC10192
auggccgugcagggcagccagcgccggcugcucgggucccugaacagcacccccaccgccaucccccagcugggccucgcggccaaccagacgggggcccgcugccuggaggucuccaucagcgacggccuguuccucucccuggggcuggugagccucguggagaacgcccuggucguggccaccaucgcgaagaaccggaaccugcacucccccauguacugcuucaucugcugccucgcccugagcgaccugcucguguccggcagcaacguccuggagaccgccgugauccugcuccuggaggccggcgcgcugguggcccgcgccgccguccuccagcagcuggacaacgugaucgacgugaucacgugcuccagcaugcuguccagccucugcuuccugggggccaucgcggucgaccgguacaucuccaucuucuacgcccugcgcuaccacagcaucgugacccucccccgggcccgccgggccguggccgcgaucugggucgccuccgugguguucagcacccuguucaucgccuacuacgaccacgucgccgugcugcucugccugguggucuucuuccuggccaugcucgugcugauggcggugcuguacguccacaugcucgcccgcgccugccagcacgcccagggcaccgcccggcugcacaagcgccagcggcccgugcaccagggguucggccugaagggggcggucacccucacgauccugcugggcaucuucuuccucugcuggggcccguucuuccugcaccugacccucaucgugcugugccccgagcacccgaccugcgggugcaucuucaagaacuucaaccuguuccucgcccugaucaucugcaacgccaucaucgacccccugaucuacgccuuccacucccaggagcugcgccggacccucaaggaggugcugacgugcagcugguga

SEQ ID NO: 2606 - RNA, 954 nt, Artificial Sequence
  derived and/or modified sequence opt2 from MC1_R__Homo_sapiens__AHC10192
auggccguccagggcucccagcgccgccuccucggcucccucaacuccacccccaccgccaucccccagcucggccucgccgccaaccagaccggcgcccgcugccucgaggucuccaucuccgacggccucuuccucucccucggccucgucucccucgucgagaacgcccucgucgucgccaccaucgccaagaaccgcaaccuccacucccccauguacugcuucaucugcugccucgcccucuccgaccuccucgucuccggcuccaacguccucgagaccgccgucauccuccuccucgaggccggcgcccucgucgcccgcgccgccguccuccagcagcucgacaacgucaucgacgucaucaccugcuccuccaugcucuccucccucugcuuccucggcgccaucgccgucgaccgcuacaucuccaucuucuacgcccuccgcuaccacuccaucgucacccucccccgcgcccgccgcgccgucgccgccaucugggucgccuccgucgucuucuccacccucuucaucgccuacuacgaccacgucgccguccuccucugccucgucgucuucuuccucgccaugcucguccucauggccguccucuacguccacaugcucgcccgcgccugccagcacgcccagggcaccgcccgccuccacaagcgccagcgccccguccaccagggcuucggccucaagggcgccgucacccucaccauccuccucggcaucuucuuccucugcuggggccccuucuuccuccaccucacccucaucguccucugccccgagcaccccaccugcggcugcaucuucaagaacuucaaccucuuccucgcccucaucaucugcaacgccaucaucgacccccucaucuacgccuuccacucccaggagcuccgccgcacccucaaggagguccucaccugcuccugguga

SEQ ID NO: 2607 - RNA, 954 nt, Artificial Sequence
  derived and/or modified sequence opt3 from MC1_R__Homo_sapiens__AHC10192
auggccgugcagggcagccaaagaaggcugcucgggucccuuaacucuacccccacagcuaucccucagcugggauuggcagccaaucagacuggugcgcggugcuuagaggucucaauuagugacggccuguuccuaagccucgggcugguuucccuuguggaaaacgcucugguaguggccacgauagcaaagaaucgcaacuugcacucuccaauguacuguuuuaucugcugucucgcccugucggaucugcucgucucaggaagcaauguguuagagaccgcuguuauucugcuuuuggaagcaggcgcccugguggcucgagccgcgguccuacagcaacucgacaacgugaucgauguaauuacaugcaguuccaugcugucuagccuuuguuuccugggugcaaucgccguugaccguuauauauccaucuuuuacgcuuugagauaucauucaauugugacucucccgagggcccggcgcgcagucgcugccaucuggguggcgaguguggucuucagcacccuguuuauugccuacuaugaucacguugcaguguuacugugccucguaguguucuuucuugcuaugcuggucuugauggccgugcuauacguucauaugcuggcuagagccugucagcacgcacaggggacagccaggcuccauaaacggcagcgccccgugcaccaaggauucggccugaagggcgcugucacccuuacuauccuguuggggauauuuuuccucugcuggggacccuuuuuccugcacuuaacacugauugugcuauguccagagcauccuaccugcgguuguaucuuuaaaaauuucaaccucuuccuggcgcuuauuaucugcaaugcaaucauugacccuuugauauaugccuuucacucucaggaacugcgaagaacgcucaaggagguacugacuugcuccugguga

SEQ ID NO: 2608 - RNA, 954 nt, Artificial Sequence
  derived and/or modified sequence opt4 from MC1_R__Homo_sapiens__AHC10192
auggccgugcagggcagccagagaagacugcugggcagccugaacagcacccccaccgccaucccccagcugggccuggccgccaaccagaccggcgccagaugccuggaggugagcaucagcgacggccuguuccugagccugggccuggugagccugguggagaacgcccuggugguggccaccaucgccaagaacagaaaccugcacagccccauguacugcuucaucugcugccuggcccugagcgaccugcuggugagcggcagcaacgugcuggagaccgccgugauccugcugcuggaggccggcgcccugguggccagagccgccgugcugcagcagcuggacaacgugaucgacgugaucaccugcagcagcaugcugagcagccugugcuuccugggcgccaucgccguggacagauacaucagcaucuucuacgcccugagauaccacagcaucgugacccugcccagagccagaagagccguggccgccaucuggguggccagcgugguguucagcacccuguucaucgccuacuacgaccacguggccgugcugcugugccuggugguguucuuccuggccaugcuggugcugauggccgugcuguacgugcacaugcuggccagagccugccagcacgcccagggcaccgccagacugcacaagagacagagacccgugcaccagggcuucggccugaagggcgccgugacccugaccauccugcugggcaucuucuuccugugcuggggccccuucuuccugcaccugacccugaucgugcugugccccgagcaccccaccugcggcugcaucuucaagaacuucaaccuguuccuggcccugaucaucugcaacgccaucaucgacccccugaucuacgccuuccacagccaggagcugagaagaacccugaaggaggugcugaccugcagcugguga

SEQ ID NO: 2609 - RNA, 954 nt, Artificial Sequence
  derived and/or modified sequence opt5 from MC1_R__Homo_sapiens__AHC10192
auggccgugcagggcagccaaagacggcugcucgggucccugaacucuacccccacagcuaucccucagcuuggacuggccgcgaaucagacgggcgcucgcugccucgaggucagcauuuccgacgggcuguuccuuucucugggacucguuagccugguggaaaacgcccugguggucgccaccaucgcuaagaauagaaaccuccacuccccgauguacuguuuuauuugcugucuggcccuuucugaucugcucgugagcggcuccaauguucuggagacagcugugauccuucugcucgaagccggggcgcuggucgcccgggcugccgugcugcagcaacucgacaacguuauugaugugauuaccugcagcucuaugcuguccagccuuuguuuccugggagcuaucgccgucgaccgcuauauuucuaucuuuuacgcgcucagauaucauuccauugugacacugccccgggcccgcagagcuguggccgcuaucugggucgccagcguuguguucucuacccuuuuuauugccuacuaugaucacguggcuguccugcucugccuggugguuuucuuucuggcgaugcucgugcugauggccguccuuuacgugcauaugcuggcucgggccugucagcacgcccagggcacagcucgccuccauaaaagacagcggccuguucaccaaggcuucgggcugaagggagccgugacccuuacgauccugcucggcaucuuuuuccugugcugggggcccuuuuuccugcaccucacccugaucguccuuuguccugagcaucccacaugcggauguaucuuuaaaaauuucaaccuguuccucgcgcugauuaucugcaaugcuauuaucgacccucugauuuaugccuuucacucccaggaacuucgcagaacccucaaggaggugcugacaugcagcugguga

SEQ ID NO: 2610 - protein, 317 aa, Artificial Sequence
  MC1_R__Homo_sapiens__V9Q7F1
MAVQGSQRRLLGSLNSTPTAIPQLGLAANQTGARCLEVSISDGLFLSLGLVSLVENALVVATIAKNRNLHSPMYCFICCLALSDLLVSGSNVLETAVILLLEAGALVARAAVLQQLDNVIDVITCSSMLSSLCFLGAIAVDRYISIFYALRYHSTVTLPRARRAVAAIWVASVVFSTLFIAYYDHVAVLLCLVVFFLAMLVLMAVLYVHMLARACQHAQGIARLHKRQRPVHQGFGLKGAVTLTILLGIFFLCWGPFFLHLTLIVLCPEHPTCGCIFKNFNLFLALIICNAIIDPLIYAFHSQELRRTLKEVLTCSW

SEQ ID NO: 2611 - RNA, 954 nt, Artificial Sequence
  MC1_R__Homo_sapiens__AHC09641
auggcugugcagggaucccagagaagacuucugggcucccucaacuccacccccacagccaucccccagcuggggcuggcugccaaccagacaggagcccggugccuggagguguccaucucugacgggcucuuccucagccuggggcuggugagcuugguggagaacgcgcuggugguggccaccaucgccaagaaccggaaccugcacucacccauguacugcuucaucugcugccuggccuugucggaccugcuggugagcgggagcaacgugcuggagacggccgucauccuccugcuggaggccggugcacugguggcccgggcugcggugcugcagcagcuggacaaugucauugacgugaucaccugcagcuccaugcuguccagccucugcuuccugggcgccaucgccguggaccgcuacaucuccaucuucuacgcacugcgcuaccacagcaccgugacccugccgcgggcgcggcgagccguugcggccaucuggguggccagugucgucuucagcacgcucuucaucgccuacuacgaccacguggccguccugcugugccucguggucuucuuccuggcuaugcuggugcucauggccgugcuguacguccacaugcuggcccgggccugccagcacgcccagggcaucgcccggcuccacaagaggcagcgcccgguccaccagggcuuuggccuuaaaggcgcugucacccucaccauccugcugggcauuuucuuccucugcuggggccccuucuuccugcaucucacacucaucguccucugccccgagcaccccacgugcggcugcaucuucaagaacuucaaccucuuucucgcccucaucaucugcaaugccaucaucgacccccucaucuacgccuuccacagccaggagcuccgcaggacgcucaaggaggugcugacgugcuccugguga

SEQ ID NO: 2612 - RNA, 954 nt, Artificial Sequence
  derived and/or modified sequence opt1 from MC1_R__Homo_sapiens__AHC09641
auggccgugcagggcagccagcgccggcugcucgggucccugaacagcacccccaccgccaucccccagcugggccucgcggccaaccagacgggggcccgcugccuggaggucuccaucagcgacggccuguuccucucccuggggcuggugagccucguggagaacgcccuggucguggccaccaucgcgaagaaccggaaccugcacucccccauguacugcuucaucugcugccucgcccugagcgaccugcucguguccggcagcaacguccuggagaccgccgugauccugcuccuggaggccggcgcgcugguggcccgcgccgccguccuccagcagcuggacaacgugaucgacgugaucacgugcuccagcaugcuguccagccucugcuuccugggggccaucgcggucgaccgguacaucuccaucuucuacgcccugcgcuaccacagcaccgugacccucccccgggcccgccgggccguggccgcgaucugggucgccuccgugguguucagcacccuguucaucgccuacuacgaccacgucgccgugcugcucugccugguggucuucuuccuggccaugcucgugcugauggcggugcuguacguccacaugcucgcccgcgccugccagcacgcccagggcaucgcccggcugcacaagcgccagcggcccgugcaccagggguucggccugaagggggcggucacccucacgauccugcugggcaucuucuuccucugcuggggcccguucuuccugcaccugacccucaucgugcugugccccgagcacccgaccugcgggugcaucuucaagaacuucaaccuguuccucgcccugaucaucugcaacgccaucaucgacccccugaucuacgccuuccacucccaggagcugcgccggacccucaaggaggugcugacgugcagcugguga

SEQ ID NO: 2613 - RNA, 954 nt, Artificial Sequence
  derived and/or modified sequence opt2 from MC1_R__Homo_sapiens__AHC09641
auggccguccagggcucccagcgccgccuccucggcucccucaacuccacccccaccgccaucccccagcucggccucgccgccaaccagaccggcgcccgcugccucgaggucuccaucuccgacggccucuuccucucccucggccucgucucccucgucgagaacgcccucgucgucgccaccaucgccaagaaccgcaaccuccacucccccauguacugcuucaucugcugccucgcccucuccgaccuccucgucuccggcuccaacguccucgagaccgccgucauccuccuccucgaggccggcgcccucgucgcccgcgccgccguccuccagcagcucgacaacgucaucgacgucaucaccugcuccuccaugcucuccucccucugcuuccucggcgccaucgccgucgaccgcuacaucuccaucuucuacgcccuccgcuaccacuccaccgucacccucccccgcgcccgccgcgccgucgccgccaucugggucgccuccgucgucuucuccacccucuucaucgccuacuacgaccacgucgccguccuccucugccucgucgucuucuuccucgccaugcucguccucauggccguccucuacguccacaugcucgcccgcgccugccagcacgcccagggcaucgcccgccuccacaagcgccagcgccccguccaccagggcuucggccucaagggcgccgucacccucaccauccuccucggcaucuucuuccucugcuggggccccuucuuccuccaccucacccucaucguccucugccccgagcaccccaccugcggcugcaucuucaagaacuucaaccucuuccucgcccucaucaucugcaacgccaucaucgacccccucaucuacgccuuccacucccaggagcuccgccgcacccucaaggagguccucaccugcuccugguga

SEQ ID NO: 2614 - RNA, 954 nt, Artificial Sequence
  derived and/or modified sequence opt3 from MC1_R__Homo_sapiens__AHC09641
auggccgugcagggcagccaaagaaggcugcucgggucccuuaacucuacccccacagcuaucccucagcugggauuggcagccaaucagacuggugcgcggugcuuagaggucucaauuagugacggccuguuccuaagccucgggcugguuucccuuguggaaaacgcucugguaguggccacgauagcaaagaaucgcaacuugcacucuccaauguacuguuuuaucugcugucucgcccugucggaucugcucgucucaggaagcaauguguuagagaccgcuguuauucugcuuuuggaagcaggcgcccugguggcucgagccgcgguccuacagcaacucgacaacgugaucgauguaauuacaugcaguuccaugcugucuagccuuuguuuccugggugcaaucgccguugaccguuauauauccaucuuuuacgcuuugagauaucauucaacugugacccucccgagggcccggcgcgcagucgcugccauuuggguggcgaguguggucuucagcacacuguuuaucgccuacuaugaucacguugcaguguuacugugccucguaguguucuuucuugcuaugcuggucuugauggccgugcuauacguucauaugcuggcuagagccugucagcacgcacaggggauugccaggcuccauaaacggcagcgccccgugcaccaaggauucggccugaagggcgcugucacccuuacuauccuguuggggauauuuuuccucugcuggggacccuuuuuccugcacuuaacacugauugugcuauguccagagcauccuaccugcgguuguaucuuuaaaaauuucaaccucuuccuggcgcuuauuaucugcaaugcaaucauugacccuuugauauaugccuuucacucucaggaacugcgaagaacgcucaaggagguacugacuugcuccugguga

SEQ ID NO: 2615 - RNA, 954 nt, Artificial Sequence
  derived and/or modified sequence opt4 from MC1_R__Homo_sapiens__AHC09641
auggccgugcagggcagccagagaagacugcugggcagccugaacagcacccccaccgccaucccccagcugggccuggccgccaaccagaccggcgccagaugccuggaggugagcaucagcgacggccuguuccugagccugggccuggugagccugguggagaacgcccuggugguggccaccaucgccaagaacagaaaccugcacagccccauguacugcuucaucugcugccuggcccugagcgaccugcuggugagcggcagcaacgugcuggagaccgccgugauccugcugcuggaggccggcgcccugguggccagagccgccgugcugcagcagcuggacaacgugaucgacgugaucaccugcagcagcaugcugagcagccugugcuuccugggcgccaucgccguggacagauacaucagcaucuucuacgcccugagauaccacagcaccgugacccugcccagagccagaagagccguggccgccaucuggguggccagcgugguguucagcacccuguucaucgccuacuacgaccacguggccgugcugcugugccuggugguguucuuccuggccaugcuggugcugauggccgugcuguacgugcacaugcuggccagagccugccagcacgcccagggcaucgccagacugcacaagagacagagacccgugcaccagggcuucggccugaagggcgccgugacccugaccauccugcugggcaucuucuuccugugcuggggccccuucuuccugcaccugacccugaucgugcugugccccgagcaccccaccugcggcugcaucuucaagaacuucaaccuguuccuggcccugaucaucugcaacgccaucaucgacccccugaucuacgccuuccacagccaggagcugagaagaacccugaaggaggugcugaccugcagcugguga

SEQ ID NO: 2616 - RNA, 954 nt, Artificial Sequence
  derived and/or modified sequence opt5 from MC1_R__Homo_sapiens__AHC09641
auggccgugcagggcagccaaagacggcugcucgggucccugaacucuacccccacagcuaucccucagcuuggacuggccgcgaaucagacgggcgcucgcugccucgaggucagcauuuccgacgggcuguuccuuucucugggacucguuagccugguggaaaacgcccugguggucgccaccaucgcuaagaauagaaaccuccacuccccgauguacuguuuuauuugcugucuggcccuuucugaucugcucgugagcggcuccaauguucuggagacagcugugauccuucugcucgaagccggggcgcuggucgcccgggcugccgugcugcagcaacucgacaacguuauugaugugauuaccugcagcucuaugcuguccagccuuuguuuccugggagcuaucgccgucgaccgcuauauuucuaucuuuuacgcgcucagauaucauuccacagugacccugccccgggcccgcagagcuguggccgcuauuugggucgccagcguuguguucucuacacuuuuuaucgccuacuaugaucacguggcuguccugcucugccuggugguuuucuuucuggcgaugcucgugcugauggccguccuuuacgugcauaugcuggcucgggccugucagcacgcccagggcauugcucgccuccauaaaagacagcggccuguucaccaaggcuucgggcugaagggagccgugacccuuacgauccugcucggcaucuuuuuccugugcugggggcccuuuuuccugcaccucacccugaucguccuuuguccugagcaucccacaugcggauguaucuuuaaaaauuucaaccuguuccucgcgcugauuaucugcaaugcuauuaucgacccucugauuuaugccuuucacucccaggaacuucgcagaacccucaaggaggugcugacaugcagcugguga

SEQ ID NO: 2617 - protein, 317 aa, Artificial Sequence [sequence omitted]

SEQ ID NO: 2618 - RNA, 954 nt, Artificial Sequence
  MC1_R__Homo_sapiens__AHC10044
auggcugugcagggaucccagagaagacuucugggcucccucaacuccacccccacagccaucccccagcuggggcuggcugccaaccagacaggagcccgguaccuggagguguccaucucugacgggcucuuccucagccuggggcuggugagcuugguggagaacgcgcuggugguggccaccaucgccaagaaccggaaccugcacucacccauguacugcuucaucugcugccuggccuugucggaccugcuggugagcgggagcaacgugcuggagacggccgucauccuccugcuggaggccggugcacugguggcccgggcugcggugcugcagcagcuggacaaugucauugacgugaucaccugcagcuccaugcuguccagccucugcuuccugggcgccaucgccguggaccgcuacaucuccaucuucuacgcacugcgcuaccacagcaucgugacccugccgcgggcgcggcgagccguugcggccaucuggguggccagugucgucuucagcacgcucuucaucgccuacuacgaccacguggccguccugcugugccucguggucuucuuccuggcuaugcuggugcucauggccgugcuguacguccacaugcuggcccgggccugccagcacgcccagggcaucgcccggcuccacaagaggcagcgcccgguccaccagggcuuuggccuuaaaggcgcugucacccucaccauccugcugggcauuuucuuccucugcuggggccccuucuuccugcaucucacacucaucguccucugccccgagcaccccacgugcggcugcaucuucaagaacuucaaccucuuucucgcccucaucaucugcaaugccaucaucgacccccucaucuacgccuuccacagccaggagcuccgcaggacgcucaaggaggugcugacaugcuccugguga

SEQ ID NO: 2619 - RNA, 954 nt, Artificial Sequence
  derived and/or modified sequence opt1 from MC1_R__Homo_sapiens__AHC10044
auggccgugcagggcagccagcgccggcugcucgggucccugaacagcacccccaccgccaucccccagcugggccucgcggccaaccagacgggggcccgcuaccuggaggucuccaucagcgacggccuguuccucucccuggggcuggugagccucguggagaacgcccuggucguggccaccaucgcgaagaaccggaaccugcacucccccauguacugcuucaucugcugccucgcccugagcgaccugcucguguccggcagcaacguccuggagaccgccgugauccugcuccuggaggccggcgcgcugguggcccgcgccgccguccuccagcagcuggacaacgugaucgacgugaucacgugcuccagcaugcuguccagccucugcuuccugggggccaucgcggucgaccgguacaucuccaucuucuacgcccugcgcuaccacagcaucgugacccucccccgggcccgccgggccguggccgcgaucugggucgccuccgugguguucagcacccuguucaucgccuacuacgaccacgucgccgugcugcucugccugguggucuucuuccuggccaugcucgugcugauggcggugcuguacguccacaugcucgcccgcgccugccagcacgcccagggcaucgcccggcugcacaagcgccagcggcccgugcaccagggguucggccugaagggggcggucacccucaccauccugcugggcaucuucuuccucugcuggggcccguucuuccugcaccugacgcucaucgugcugugccccgagcacccgaccugcgggugcaucuucaagaacuucaaccuguuccucgcccugaucaucugcaacgccaucaucgacccccugaucuacgccuuccacucccaggagcugcgccggacccucaaggaggugcugaccugcagcugguga

SEQ ID NO: 2620 - RNA, 954 nt, Artificial Sequence
  derived and/or modified sequence opt2 from MC1_R__Homo_sapiens__AHC10044
auggccguccagggcucccagcgccgccuccucggcucccucaacuccacccccaccgccaucccccagcucggccucgccgccaaccagaccggcgcccgcuaccucgaggucuccaucuccgacggccucuuccucucccucggccucgucucccucgucgagaacgcccucgucgucgccaccaucgccaagaaccgcaaccuccacucccccauguacugcuucaucugcugccucgcccucuccgaccuccucgucuccggcuccaacguccucgagaccgccgucauccuccuccucgaggccggcgcccucgucgcccgcgccgccguccuccagcagcucgacaacgucaucgacgucaucaccugcuccuccaugcucuccucccucugcuuccucggcgccaucgccgucgaccgcuacaucuccaucuucuacgcccuccgcuaccacuccaucgucacccucccccgcgcccgccgcgccgucgccgccaucugggucgccuccgucgucuucuccacccucuucaucgccuacuacgaccacgucgccguccuccucugccucgucgucuucuuccucgccaugcucguccucauggccguccucuacguccacaugcucgcccgcgccugccagcacgcccagggcaucgcccgccuccacaagcgccagcgccccguccaccagggcuucggccucaagggcgccgucacccucaccauccuccucggcaucuucuuccucugcuggggccccuucuuccuccaccucacccucaucguccucugccccgagcaccccaccugcggcugcaucuucaagaacuucaaccucuuccucgcccucaucaucugcaacgccaucaucgacccccucaucuacgccuuccacucccaggagcuccgccgcacccucaaggagguccucaccugcuccugguga

SEQ ID NO: 2621 - RNA, 954 nt, Artificial Sequence
  derived and/or modified sequence opt3 from MC1_R__Homo_sapiens__AHC10044
auggccgugcagggcagccaaagaaggcugcucgggucccuuaacucuacccccacagcuaucccucagcugggauuggcagccaaucagacuggugcgcgguacuuagaggucucaauuagugacggccuguuccuaagccucgggcugguuucccuuguggaaaacgcucugguaguggccacgauagcaaagaaucgcaacuugcacucuccaauguauugcuuuaucuguugccucgcccugucggaucugcucgucucaggaagcaauguguuagagaccgcuguuauucugcuuuuggaagcaggcgcccugguggcucgagccgcgguccuacagcaacucgacaacgugaucgauguaauuacauguaguuccaugcugucuagccuuugcuuccugggugcaaucgccguugaccguuacauauccaucuuuuaugcuuugagauaccauucaauugugacucucccgagggcccggcgcgcagucgcugccaucuggguggcgaguguggucuucagcacccuguuuauugccuauuacgaucacguugcaguguuacugugucucguaguguucuuucuugcuaugcuggucuugauggccgugcuauauguucauaugcuggcuagagccugccagcacgcacaggggaucgccaggcuccauaaacggcagcgccccgugcaccaaggauucggccugaagggcgcugucacacuuaccauacuguuggggaucuuuuuccucuguuggggaccauuuuuccugcacuuaacucugauugugcuaugcccugagcaucccacaugugguugcauuuuuaaaaauuucaaccucuuccuggcgcuuaucaucuguaaugcaauuauagacccuuugaucuacgccuuucacucucaggaacugcgaagaacccucaaggagguacugacgugcuccugguga

SEQ ID NO: 2622 - RNA, 954 nt, Artificial Sequence
  derived and/or modified sequence opt4 from MC1_R__Homo_sapiens__AHC10044
auggccgugcagggcagccagagaagacugcugggcagccugaacagcacccccaccgccaucccccagcugggccuggccgccaaccagaccggcgccagauaccuggaggugagcaucagcgacggccuguuccugagccugggccuggugagccugguggagaacgcccuggugguggccaccaucgccaagaacagaaaccugcacagccccauguacugcuucaucugcugccuggcccugagcgaccugcuggugagcggcagcaacgugcuggagaccgccgugauccugcugcuggaggccggcgcccugguggccagagccgccgugcugcagcagcuggacaacgugaucgacgugaucaccugcagcagcaugcugagcagccugugcuuccugggcgccaucgccguggacagauacaucagcaucuucuacgcccugagauaccacagcaucgugacccugcccagagccagaagagccguggccgccaucuggguggccagcgugguguucagcacccuguucaucgccuacuacgaccacguggccgugcugcugugccuggugguguucuuccuggccaugcuggugcugauggccgugcuguacgugcacaugcuggccagagccugccagcacgcccagggcaucgccagacugcacaagagacagagacccgugcaccagggcuucggccugaagggcgccgugacccugaccauccugcugggcaucuucuuccugugcuggggccccuucuuccugcaccugacccugaucgugcugugccccgagcaccccaccugcggcugcaucuucaagaacuucaaccuguuccuggcccugaucaucugcaacgccaucaucgacccccugaucuacgccuuccacagccaggagcugagaagaacccugaaggaggugcugaccugcagcugguga

SEQ ID NO: 2623 - RNA, 954 nt, Artificial Sequence
  derived and/or modified sequence opt5 from MC1_R__Homo_sapiens__AHC10044
auggccgugcagggcagccaaagacggcugcucgggucccugaacucuacccccacagcuaucccucagcuuggacuggccgcgaaucagacgggcgcucgcuaccucgaggucagcauuuccgacgggcuguuccuuucucugggacucguuagccugguggaaaacgcccugguggucgccaccaucgcuaagaauagaaaccuccacuccccgauguauugcuuuauuuguugccuggcccuuucugaucugcucgugagcggcuccaauguucuggagacagcugugauccuucugcucgaagccggggcgcuggucgcccgggcugccgugcugcagcaacucgacaacguuauugaugugaucaccuguagcucuaugcuguccagccuuugcuuccugggagcuaucgccgucgaccgcuacauuucuaucuuuuaugcgcucagauaccauuccauugugacacugccccgggcccgcagagcuguggccgcuaucugggucgccagcguuguguucucuacccuuuuuauugccuauuacgaucacguggcuguccugcucugucuggugguuuucuuucuggcgaugcucgugcugauggccguccuuuaugugcauaugcuggcucgggccugccagcacgcccagggcaucgcucgccuccauaaaagacagcggccuguucaccaaggcuucgggcugaagggagccgugacacuuaccauucugcucggcaucuuuuuccuguguugggggcccuuuuuccugcaccucacgcugaucguccuuugcccugagcaucccaccuguggaugcauuuuuaaaaauuucaaccuguuccucgcgcugaucauuuguaaugcuaucauugacccucugaucuacgccuuucacucccaggaacuucgcagaacacucaaggaggugcugaccugcagcugguga

SEQ ID NO: 2624 - protein, 317 aa, Artificial Sequence [sequence omitted]

SEQ ID NO: 2625 - RNA, 954 nt, Artificial Sequence
  MC1_R__Homo_sapiens__AHC09532
auggcugugcagggaucccagagaagacuucugggcucccucaacuccacccccacagccaucccccagcuggggcuggcugccaaccagacaggagcccggugccuggagguguccaucucugacgggcucuuccucagccuggggcuggugagcuugguggagaacgcgcugguguuggccaccaucgccaagaaccggaaccugcacucacccauguacugcuucaucugcugccuggccuugucggaccugcuggugagcgggagcaacgugcuggagacggccgucauccuccugcuggaggccggugcacugguggcccgggcugcggugcugcagcagcuggacaaugucauugacgugaucaccugcagcuccaugcuguccagccucugcuuccugggcgccaucgccguggaccgcuacaucuccaucuucuacgcacugcgcuaccacagcaucgugacccugccgcgggcgcggcgagccguugcggccaucuggguggccagugucgucuucagcacgcucuucaucgccuacuacgaccacguggccguccugcugugccucguggucuucuuccuggcuaugcuggugcucauggccgugcuguacguccacaugcuggcccgggccugccagcacgcccagggcaucgcccggcuccacaagaggcagcgcccgguccaccagggcuuuggccuuaaaggcgcugucacccucaccauccugcugggcauuuucuuccucugcuggggccccuucuuccugcaucucacacucaucguccucugccccgagcaccccacgugcggcugcaucuucaagaacuucaaccucuuucucgcccucaucaucugcaaugccaucaucgacccccucaucuacgccuuccacagccaggagcuccgcaggacgcucaaggaggugcugacaugcuccugguga

SEQ ID NO: 2626 - RNA, 954 nt, Artificial Sequence
  derived and/or modified sequence opt1 from MC1_R__Homo_sapiens__AHC09532
auggccgugcagggcagccagcgccggcugcucgggucccugaacagcacccccaccgccaucccccagcugggccucgcggccaaccagacgggggcccgcugccuggaggucuccaucagcgacggccuguuccucucccuggggcuggugagccucguggagaacgcccugguccuggccaccaucgcgaagaaccggaaccuccacucccccauguacugcuucaucugcugccuggcccugagcgaccuccugguguccggcagcaacgugcuggagaccgccgucauccuccugcuggaggccggcgcgcucguggcccgcgccgccgugcugcagcagcuggacaacgucaucgacgugaucacgugcuccagcaugcucuccagccugugcuuccugggggccaucgcgguggaccgguacaucuccaucuucuacgcccuccgcuaccacagcaucgucacccugccccgggcccgccgggccguggccgcgaucuggguggccuccgucguguucagcacccuguucaucgccuacuacgaccacguggccguccuccugugccuggugguguucuuccucgccaugcugguccugauggcggugcucuacgugcacaugcuggcccgcgccugccagcacgcccagggcaucgcccggcugcacaagcgccagcggcccguccaccagggguucggccucaagggggcggugacccugaccauccugcucggcaucuucuuccugugcuggggcccguucuuccugcaccucacgcugaucguccugugccccgagcacccgaccugcgggugcaucuucaagaacuucaaccucuuccuggcccugaucaucugcaacgccaucaucgacccccugaucuacgccuuccacucccaggagcuccgccggacccugaaggaggugcugaccugcagcugguga

SEQ ID NO: 2627 - RNA, 954 nt, Artificial Sequence
  derived and/or modified sequence opt2 from MC1_R__Homo_sapiens__AHC09532
auggccguccagggcucccagcgccgccuccucggcucccucaacuccacccccaccgccaucccccagcucggccucgccgccaaccagaccggcgcccgcugccucgaggucuccaucuccgacggccucuuccucucccucggccucgucucccucgucgagaacgcccucguccucgccaccaucgccaagaaccgcaaccuccacucccccauguacugcuucaucugcugccucgcccucuccgaccuccucgucuccggcuccaacguccucgagaccgccgucauccuccuccucgaggccggcgcccucgucgcccgcgccgccguccuccagcagcucgacaacgucaucgacgucaucaccugcuccuccaugcucuccucccucugcuuccucggcgccaucgccgucgaccgcuacaucuccaucuucuacgcccuccgcuaccacuccaucgucacccucccccgcgcccgccgcgccgucgccgccaucugggucgccuccgucgucuucuccacccucuucaucgccuacuacgaccacgucgccguccuccucugccucgucgucuucuuccucgccaugcucguccucauggccguccucuacguccacaugcucgcccgcgccugccagcacgcccagggcaucgcccgccuccacaagcgccagcgccccguccaccagggcuucggccucaagggcgccgucacccucaccauccuccucggcaucuucuuccucugcuggggccccuucuuccuccaccucacccucaucguccucugccccgagcaccccaccugcggcugcaucuucaagaacuucaaccucuuccucgcccucaucaucugcaacgccaucaucgacccccucaucuacgccuuccacucccaggagcuccgccgcacccucaaggagguccucaccugcuccugguga

SEQ ID NO: 2628 - RNA, 954 nt, Artificial Sequence
  derived and/or modified sequence opt3 from MC1_R__Homo_sapiens__AHC09532
auggccgugcagggcagccaaagaaggcugcucgggucccuuaacucuacccccacagcuaucccucagcugggauuggcagccaaucagacuggugcgcggugcuuagaggucucaauuagugacggccuguuccuaagccucgggcugguuucccuuguggaaaacgcucugguauuggccacgauagcaaagaaucgcaaccuccacucuccaauguacuguuuuaucugcugucuggcccugucggaucucuuagugucaggaagcaauguccuggagaccgcugugauucuuuugcuggaagcaggcgcccuaguugcucgagccgcggugcuccagcaacuggacaacgucaucgaugugauuacaugcaguuccaugcuuucuagccuguguuucuugggugcaaucgccguagaccguuauauauccaucuuuuacgcucucagauaucauucaauuguuacucugccgagggcccggcgcgcaguggcugccaucugggucgcgagugugguguucagcaccuuauuuauugccuacuaugaucacgucgcaguucugcucugccuugugguauucuuucuggcuauguuggugcuaauggccguccuguacgugcauaugcucgcuagagccugucagcacgcacaggggaucgccaggcugcauaaacggcagcgccccguucaccaaggauucggccuuaagggcgcugugacacugaccauauugcucgggaucuuuuuccugugcuggggaccauuuuucuuacaccugacucuaauuguccucuguccugagcaucccacaugcgguuguauuuuuaaaaauuucaaccuguuccuugcguugaucaucugcaaugcaauuauagacccucugaucuaugccuuucacucucaggaacuccgaagaacccugaaggaggugcuuacgugcuccugguga

SEQ ID NO: 2629 - RNA, 954 nt, Artificial Sequence
  derived and/or modified sequence opt4 from MC1_R__Homo_sapiens__AHC09532
auggccgugcagggcagccagagaagacugcugggcagccugaacagcacccccaccgccaucccccagcugggccuggccgccaaccagaccggcgccagaugccuggaggugagcaucagcgacggccuguuccugagccugggccuggugagccugguggagaacgcccuggugcuggccaccaucgccaagaacagaaaccugcacagccccauguacugcuucaucugcugccuggcccugagcgaccugcuggugagcggcagcaacgugcuggagaccgccgugauccugcugcuggaggccggcgcccugguggccagagccgccgugcugcagcagcuggacaacgugaucgacgugaucaccugcagcagcaugcugagcagccugugcuuccugggcgccaucgccguggacagauacaucagcaucuucuacgcccugagauaccacagcaucgugacccugcccagagccagaagagccguggccgccaucuggguggccagcgugguguucagcacccuguucaucgccuacuacgaccacguggccgugcugcugugccuggugguguucuuccuggccaugcuggugcugauggccgugcuguacgugcacaugcuggccagagccugccagcacgcccagggcaucgccagacugcacaagagacagagacccgugcaccagggcuucggccugaagggcgccgugacccugaccauccugcugggcaucuucuuccugugcuggggccccuucuuccugcaccugacccugaucgugcugugccccgagcaccccaccugcggcugcaucuucaagaacuucaaccuguuccuggcccugaucaucugcaacgccaucaucgacccccugaucuacgccuuccacagccaggagcugagaagaacccugaaggaggugcugaccugcagcugguga

SEQ ID NO: 2630 - RNA, 954 nt, Artificial Sequence
  derived and/or modified sequence opt5 from MC1_R__Homo_sapiens__AHC09532
auggccgugcagggcagccaaagacggcugcucgggucccugaacucuacccccacagcuaucccucagcuuggacuggccgcgaaucagacgggcgcucgcugccucgaggucagcauuuccgacgggcuguuccuuucucugggacucguuagccugguggaaaacgcccuggugcucgccaccaucgcuaagaauagaaaccugcacuccccgauguacuguuuuauuugcugucuugcccugucugaucuccuggucagcggcuccaaugugcuugagacagcuguuauccugcuccuggaagccggggcgcugguggcccgggcugccguccuccagcaacuggacaacgugauugauguuauuaccugcagcucuaugcuuuccagccuguguuuccucggagcuaucgccguggaccgcuauaucucuaucuuuuacgcgcugagauaucauuccauugucacacuuccccgggcccgcagagcuguggccgcuaucuggguggccagcgucguuuucucuacccuguuuauugccuacuaugaucacguggcugugcuccugugccuggucguguucuuucucgcgaugcugguucuuauggccgugcuguacguccauaugcucgcucgggccugucagcacgcccagggcaucgcucgccugcauaaaagacagcggccugugcaccaaggcuucgggcuuaagggagccguuacacugaccauucuccugggcaucuuuuuccugugcugggggcccuuuuuccuccaccugacgcuuaucgugcuguguccugagcauccuaccugcggauguauuuuuaaaaauuucaaccucuuccuggcgcugaucauuugcaaugcuaucauugacccccuuaucuaugccuuucacucccaggaacuccgcagaacacugaaggagguccugaccugcagcugguga

SEQ ID NO: 2631 - protein, 317 aa, Artificial Sequence [sequence omitted]

SEQ ID NO: 2632 - RNA, 954 nt, Artificial Sequence
  MC1_R__Homo_sapiens__AHC11042
auggcugugcagggaucccagagaagacuucugggcucccucaacuccacccccacagccaucccccagcuggggcuggcugccaaccagacaggagcccggugccuggagguguccaucucugacgggcucuuccucagccuggggcuggugagcuugguggagaacgcgcuggugguggccaccaucgccaagaaccggaaccugcacucacccauguacugcuucaucugcugccugcccuugucggaccugcuggugagcgggagcaacgugcuggagacggccgucauccuccugcuggaggccggugcacugguggcccgggcugcggugcugcagcagcuggacaaugucauugacgugaucaccugcagcuccaugcuguccagccucugcuuccugggcgccaucgccguggaccgcuacaucuccaucuucuacgcacugcgcuaccacagcaucgugacccugccgcgggcgcggcgagccguugcggccaucuggguggccagugucgucuucagcacgcucuucaucgccuacuacgaccacguggccguccugcugugccucguggucuucuuccuggcuaugcuggugcucauggccgugcuguacguccacaugcuggcccgggccugccagcacgcccagggcaucgcccggcuccacaagaggcagcgcccgguccaccagggcuuuggccuuaaaggcgcugucacccucaccauccugcugggcauuuucuuccucugcuggggccccuucuuccugcaucucacacucaucguccucugccccgagcaccccacgugcggcugcaucuucaagaacuucaaccucuuucucgcccucaucaucugcaaugccaucaucgacccccucaucuacgccuuccacagccaggagcuccgcaggacgcucaaggaggugcugacaugcuccugguga

SEQ ID NO: 2633 - RNA, 954 nt, Artificial Sequence
  derived and/or modified sequence opt1 from MC1_R__Homo_sapiens__AHC11042
auggccgugcagggcagccagcgccggcugcucgggucccugaacagcacccccaccgccaucccgcagcugggccucgcggccaaccagacgggggcccgcugccuggaggucuccaucagcgacggccuguuccucucccuggggcuggugagccucguggagaacgcccuggucguggccaccaucgcgaagaaccggaaccugcacucccccauguacugcuucaucugcugccucccccugagcgaccugcucguguccggcagcaacguccuggagaccgccgugauccugcuccuggaggccggcgcccugguggcgcgcgccgccguccuccagcagcuggacaacgugaucgacgugaucacgugcuccagcaugcuguccagccucugcuuccugggggccaucgccgucgaccgguacaucuccaucuucuacgcgcugcgcuaccacagcaucgugacccucccccgggcccgccgggccguggccgccaucugggucgcguccgugguguucagcacccuguucaucgccuacuacgaccacgucgccgugcugcucugccugguggucuucuuccuggccaugcucgugcugauggccgugcuguacguccacaugcucgcgcgcgccugccagcacgcccagggcaucgcccggcugcacaagcgccagcggccggugcaccagggguucggccugaagggggccgucacccucaccauccugcugggcaucuucuuccucugcuggggccccuucuuccugcaccugacgcucaucgugcugugccccgagcacccgaccugcgggugcaucuucaagaacuucaaccuguuccucgcgcugaucaucugcaacgccaucaucgacccccugaucuacgccuuccacucccaggagcugcgccggacccucaaggaggugcugaccugcagcugguga

SEQ ID NO: 2634 - RNA, 954 nt, Artificial Sequence
  derived and/or modified sequence opt2 from MC1_R__Homo_sapiens__AHC11042
auggccguccagggcucccagcgccgccuccucggcucccucaacuccacccccaccgccaucccccagcucggccucgccgccaaccagaccggcgcccgcugccucgaggucuccaucuccgacggccucuuccucucccucggccucgucucccucgucgagaacgcccucgucgucgccaccaucgccaagaaccgcaaccuccacucccccauguacugcuucaucugcugccucccccucuccgaccuccucgucuccggcuccaacguccucgagaccgccgucauccuccuccucgaggccggcgcccucgucgcccgcgccgccguccuccagcagcucgacaacgucaucgacgucaucaccugcuccuccaugcucuccucccucugcuuccucggcgccaucgccgucgaccgcuacaucuccaucuucuacgcccuccgcuaccacuccaucgucacccucccccgcgcccgccgcgccgucgccgccaucugggucgccuccgucgucuucuccacccucuucaucgccuacuacgaccacgucgccguccuccucugccucgucgucuucuuccucgccaugcucguccucauggccguccucuacguccacaugcucgcccgcgccugccagcacgcccagggcaucgcccgccuccacaagcgccagcgccccguccaccagggcuucggccucaagggcgccgucacccucaccauccuccucggcaucuucuuccucugcuggggccccuucuuccuccaccucacccucaucguccucugccccgagcaccccaccugcggcugcaucuucaagaacuucaaccucuuccucgcccucaucaucugcaacgccaucaucgacccccucaucuacgccuuccacucccaggagcuccgccgcacccucaaggagguccucaccugcuccugguga

SEQ ID NO: 2635 - RNA, 954 nt, Artificial Sequence
  derived and/or modified sequence opt3 from MC1_R__Homo_sapiens__AHC11042
auggccgugcagggcagccaaagaaggcugcucgggucccuuaacucuacccccacagcuaucccucagcugggauuggcagccaaucagacuggugcgcggugcuuagaggucucaauuagugacggccuguuccuaagccucgggcugguuucccuuguggaaaacgcucugguaguggccacgauagcaaagaaucgcaacuugcacucuccaauguacuguuuuaucugcugucucccgcugucggaucugcucgucucaggaagcaauguguuagagaccgccguuauucugcuuuuggaagcuggcgcacugguggcccgagcugccguccuacagcaacucgacaacgugaucgauguaauuacaugcaguuccaugcugucuagccuuuguuuccugggugcgaucgcaguugaccguuauauauccaucuuuuacgccuugagauaucauucaauugugacucuccccagggcucggcgcgccgucgcagcuaucuggguggccaguguggucuucagcacccuguuuauugcguacuaugaucacguugccguguuacugugccucguaguguucuuucuugcaaugcuggucuugauggcugugcuauacguucauaugcuggccagagcuugucagcacgcccaggggaucgcaaggcuccauaaacggcagcgcccugugcaccaaggauucggccugaagggcgccgucacacuuaccauacuguuggggaucuuuuuccucugcuggggaccauuuuuccugcacuuaacucugauugugcuaugucccgagcauccuacaugcgguuguauuuuuaaaaauuucaaccucuuccuggcucuuaucaucugcaaugcgauuauagacccauugaucuaugcauuucacucucaggaacugcgaagaacccucaaggagguacugacgugcuccugguga

SEQ ID NO: 2636 - RNA, 954 nt, Artificial Sequence
  derived and/or modified sequence opt4 from MC1_R__Homo_sapiens__AHC11042
auggccgugcagggcagccagagaagacugcugggcagccugaacagcacccccaccgccaucccccagcugggccuggccgccaaccagaccggcgccagaugccuggaggugagcaucagcgacggccuguuccugagccugggccuggugagccugguggagaacgcccuggugguggccaccaucgccaagaacagaaaccugcacagccccauguacugcuucaucugcugccugccccugagcgaccugcuggugagcggcagcaacgugcuggagaccgccgugauccugcugcuggaggccggcgcccugguggccagagccgccgugcugcagcagcuggacaacgugaucgacgugaucaccugcagcagcaugcugagcagccugugcuuccugggcgccaucgccguggacagauacaucagcaucuucuacgcccugagauaccacagcaucgugacccugcccagagccagaagagccguggccgccaucuggguggccagcgugguguucagcacccuguucaucgccuacuacgaccacguggccgugcugcugugccuggugguguucuuccuggccaugcuggugcugauggccgugcuguacgugcacaugcuggccagagccugccagcacgcccagggcaucgccagacugcacaagagacagagacccgugcaccagggcuucggccugaagggcgccgugacccugaccauccugcugggcaucuucuuccugugcuggggccccuucuuccugcaccugacccugaucgugcugugccccgagcaccccaccugcggcugcaucuucaagaacuucaaccuguuccuggcccugaucaucugcaacgccaucaucgacccccugaucuacgccuuccacagccaggagcugagaagaacccugaaggaggugcugaccugcagcugguga

SEQ ID NO: 2637 - RNA, 954 nt, Artificial Sequence
  derived and/or modified sequence opt5 from MC1_R__Homo_sapiens__AHC11042
auggccgugcagggcagccaaagacggcugcucgggucccugaacucuacccccacagcuaucccucagcuuggacuggccgcgaaucagacgggcgcucgcugccucgaggucagcauuuccgacgggcuguuccuuucucugggacucguuagccugguggaaaacgcccugguggucgccaccaucgcuaagaauagaaaccuccacuccccgauguacuguuuuauuugcugucugccccuuucugaucugcucgugagcggcuccaauguucuggagacagccgugauccuucugcucgaagcuggggcccuggucgcgcgggccgcugugcugcagcaacucgacaacguuauugaugugauuaccugcagcucuaugcuguccagccuuuguuuccugggagccaucgcugucgaccgcuauaucucuaucuuuuacgcccucagauaucauuccauugugacacugccucgggcgcgcagagccguggcugccaucugggucgcuagcguuguguucucuacccuuuuuauugccuacuaugaucacguggccguccugcucugccuggugguuuucuuucuggcuaugcucgugcugauggcgguccuuuacgugcauaugcuggcccgggcuugucagcacgcccagggcaucgcccgccuccauaaaagacagcggcccguucaccaaggcuucgggcugaagggagcugugacacuuaccauucugcucggcaucuuuuuccugugcugggggcccuuuuuccugcaccucacgcugaucguccuuuguccugagcauccuaccugcggauguauuuuuaaaaauuucaaccuguuccucgcccugaucauuugcaaugcgaucauugacccgcugaucuaugcuuuucacucccaggaacuucgcagaacacucaaggaggugcugaccugcagcugguga

SEQ ID NO: 2638 - protein, 317 aa, Artificial Sequence [sequence omitted]

SEQ ID NO: 2639 - RNA, 954 nt, Artificial Sequence
  MC1_R__Homo_sapiens__AHC10733
auggcugugcagggaucccagagaagacuucugggcucccucaacuccacccccacagccaucccccagcuggggcuggcugccaaccagacaggagcccggugccuggagguguccaucucugacgggcucuuccucagccuggggcuggugagcuugguggagaacgcgcuggugguggccaccaucgccaagaaccggaaccugcacucacccauguacugcuucaucugcugccuggccuugucggaccugcuggugagcgggagcaacgugcuggagacggccgucauccuccugcuggaggccggugcacugguggcccgggcugcggugcugcagcagcuggacaaugucauugacgugaucaccugcagcuccaugcuguccagccucugcuuccugggcgccaucgccguggaccgcuacaucuccaucuucuacgcacugcgcuaccacagcaucgugacccugccgcgggcgcggcgagccguugcggccaucuggguggccagugucgucuucagcacgcucuucaucgccuacuacgaccacguggccguccugcugugccucguggucuucuuccuggcuaugcuggugcucauggccgugcuguacguccacaugcuggcccgggccugccagcacgcccagggcaucgcccggcuccacaagaggcagcgcccgguccaccagggcuuuggccuuaaaggcgcugucacccucaccauccugcugggcauuuucuuccucugcuggggccccuucuuccugcaucucacacucaucguccucugccccgagcaccccacgugcggcugcaucuucaagaacuucagccucuuucucgcccucaucaucugcaaugccaucaucgacccccucaucuacgccuuccacagccaggagcuccgcaggacgcucaaggaggugcugacaugcuccugguga

SEQ ID NO: 2640 - RNA, 954 nt, Artificial Sequence
  derived and/or modified sequence opt1 from MC1_R__Homo_sapiens__AHC10733
auggccgugcagggcagccagcgccggcugcucgggucccugaacagcacccccaccgccaucccccagcugggccucgcggccaaccagacgggggcccgcugccuggaggucuccaucagcgacggccuguuccucucccuggggcuggugagccucguggagaacgcccuggucguggccaccaucgcgaagaaccggaaccugcacucccccauguacugcuucaucugcugccucgcccugagcgaccugcucguguccggcagcaacguccuggagaccgccgugauccugcuccuggaggccggcgcgcugguggcccgcgccgccguccuccagcagcuggacaacgugaucgacgugaucacgugcuccagcaugcuguccagccucugcuuccugggggccaucgcggucgaccgguacaucuccaucuucuacgcccugcgcuaccacagcaucgugacccucccccgggcccgccgggccguggccgcgaucugggucgccuccgugguguucagcacccuguucaucgccuacuacgaccacgucgccgugcugcucugccugguggucuucuuccuggccaugcucgugcugauggcggugcuguacguccacaugcucgcccgcgccugccagcacgcccagggcaucgcccggcugcacaagcgccagcggcccgugcaccagggguucggccugaagggggcggucacccucaccauccugcugggcaucuucuuccucugcuggggcccguucuuccugcaccugacgcucaucgugcugugccccgagcacccgaccugcgggugcaucuucaagaacuucucccuguuccucgcccugaucaucugcaacgccaucaucgacccccugaucuacgccuuccacagccaggagcugcgccggacccucaaggaggugcugaccugcagcugguga

SEQ ID NO: 2641 - RNA, 954 nt, Artificial Sequence
  derived and/or modified sequence opt2 from MC1_R__Homo_sapiens__AHC10733
auggccguccagggcucccagcgccgccuccucggcucccucaacuccacccccaccgccaucccccagcucggccucgccgccaaccagaccggcgcccgcugccucgaggucuccaucuccgacggccucuuccucucccucggccucgucucccucgucgagaacgcccucgucgucgccaccaucgccaagaaccgcaaccuccacucccccauguacugcuucaucugcugccucgcccucuccgaccuccucgucuccggcuccaacguccucgagaccgccgucauccuccuccucgaggccggcgcccucgucgcccgcgccgccguccuccagcagcucgacaacgucaucgacgucaucaccugcuccuccaugcucuccucccucugcuuccucggcgccaucgccgucgaccgcuacaucuccaucuucuacgcccuccgcuaccacuccaucgucacccucccccgcgcccgccgcgccgucgccgccaucugggucgccuccgucgucuucuccacccucuucaucgccuacuacgaccacgucgccguccuccucugccucgucgucuucuuccucgccaugcucguccucauggccguccucuacguccacaugcucgcccgcgccugccagcacgcccagggcaucgcccgccuccacaagcgccagcgccccguccaccagggcuucggccucaagggcgccgucacccucaccauccuccucggcaucuucuuccucugcuggggccccuucuuccuccaccucacccucaucguccucugccccgagcaccccaccugcggcugcaucuucaagaacuucucccucuuccucgcccucaucaucugcaacgccaucaucgacccccucaucuacgccuuccacucccaggagcuccgccgcacccucaaggagguccucaccugcuccugguga

SEQ ID NO: 2642 - RNA, 954 nt, Artificial Sequence
  derived and/or modified sequence opt3 from MC1_R__Homo_sapiens__AHC10733
auggccgugcagggcagccaaagaaggcugcucgggucccuuaacucuacccccacagcuaucccucagcugggauuggcagccaaucagacuggugcgcggugcuuagaggucucaauuagugacggccuguuccuaagccucgggcugguuucccuuguggaaaacgcucugguaguggccacgauagcaaagaaucgcaacuugcacucuccaauguacuguuuuaucugcugucucgcccugucggaucugcucgucucaggaagcaauguguuagagaccgcuguuauucugcuuuuggaagcaggcgcccugguggcucgagccgcgguccuacagcaacucgacaacgugaucgauguaauuacaugcaguuccaugcugucuagccuuuguuuccugggugcaaucgccguugaccguuauauauccaucuuuuacgcuuugagauaucauucaauugugacucucccgagggcccggcgcgcagucgcugccaucuggguggcgaguguggucuucagcacccuguuuauugccuacuaugaucacguugcaguguuacugugccucguaguguucuuucuugcuaugcuggucuugauggccgugcuauacguucauaugcuggcuagagccugucagcacgcacaggggaucgccaggcuccauaaacggcagcgccccgugcaccaaggauucggccugaagggcgcugucacacuuaccauacuguuggggaucuuuuuccucugcuggggaccauuuuuccugcacuuaacucugauugugcuauguccugagcaucccacaugcgguuguauuuuuaaaaauuucucucucuuccuggcgcuuaucaucugcaacgcaauuauagacccuuugaucuaugccuuucacucccaggaacugcgaagaacccucaaggagguacugacgugcucaugguga

SEQ ID NO: 2643 - RNA, 954 nt, Artificial Sequence
  derived and/or modified sequence opt4 from MC1_R__Homo_sapiens__AHC10733
auggccgugcagggcagccagagaagacugcugggcagccugaacagcacccccaccgccaucccccagcugggccuggccgccaaccagaccggcgccagaugccuggaggugagcaucagcgacggccuguuccugagccugggccuggugagccugguggagaacgcccuggugguggccaccaucgccaagaacagaaaccugcacagccccauguacugcuucaucugcugccuggcccugagcgaccugcuggugagcggcagcaacgugcuggagaccgccgugauccugcugcuggaggccggcgcccugguggccagagccgccgugcugcagcagcuggacaacgugaucgacgugaucaccugcagcagcaugcugagcagccugugcuuccugggcgccaucgccguggacagauacaucagcaucuucuacgcccugagauaccacagcaucgugacccugcccagagccagaagagccguggccgccaucuggguggccagcgugguguucagcacccuguucaucgccuacuacgaccacguggccgugcugcugugccuggugguguucuuccuggccaugcuggugcugauggccgugcuguacgugcacaugcuggccagagccugccagcacgcccagggcaucgccagacugcacaagagacagagacccgugcaccagggcuucggccugaagggcgccgugacccugaccauccugcugggcaucuucuuccugugcuggggccccuucuuccugcaccugacccugaucgugcugugccccgagcaccccaccugcggcugcaucuucaagaacuucagccuguuccuggcccugaucaucugcaacgccaucaucgacccccugaucuacgccuuccacagccaggagcugagaagaacccugaaggaggugcugaccugcagcugguga

SEQ ID NO: 2644 - RNA, 954 nt, Artificial Sequence
  derived and/or modified sequence opt5 from MC1_R__Homo_sapiens__AHC10733
auggccgugcagggcagccaaagacggcugcucgggucccugaacucuacccccacagcuaucccucagcuuggacuggccgcgaaucagacgggcgcucgcugccucgaggucagcauuuccgacgggcuguuccuuucucugggacucguuagccugguggaaaacgcccugguggucgccaccaucgcuaagaauagaaaccuccacuccccgauguacuguuuuauuugcugucuggcccuuucugaucugcucgugagcggcuccaauguucuggagacagcugugauccuucugcucgaagccggggcgcuggucgcccgggcugccgugcugcagcaacucgacaacguuauugaugugauuaccugcagcucuaugcuguccagccuuuguuuccugggagcuaucgccgucgaccgcuauaucucuaucuuuuacgcgcucagauaucauuccauugugacacugccccgggcccgcagagcuguggccgcuaucugggucgccagcguuguguucucuacccuuuuuauugccuacuaugaucacguggcuguccugcucugccuggugguuuucuuucuggcgaugcucgugcugauggccguccuuuacgugcauaugcuggcucgggccugucagcacgcccagggcaucgcucgccuccauaaaagacagcggccuguucaccaaggcuucgggcugaagggagccgugacacuuaccauucugcucggcaucuuuuuccugugcugggggcccuuuuuccugcaccucacgcugaucguccuuuguccugagcauccuaccugcggauguauuuuuaaaaauuucucccuguuccucgcgcugaucauuugcaacgcuaucauugacccccugaucuaugccuuucacagccaggaacuucgcagaacacucaaggaggugcugaccugcuccugguga

SEQ ID NO: 2645 - protein, 317 aa, Artificial Sequence [sequence omitted]

SEQ ID NO: 2646 - RNA, 954 nt, Artificial Sequence
  MC1_R__Homo_sapiens__AHC10696
auggcugugcagggaucccagagaagacuucugggcucccucaacuccacccccacagccaucccccagcuggggcuggcugccaaccagacaggagcccggugccuggagguguccaucucugacgggcucuuccucagccuggggcuggugagcuugguggagaacgcgcuggugguggccaccaucgccaagaaccggaaccugcacucacccauguacugcuucaucugcugccuggccuugucggaccugcuggugagcgggagcaacgugcuggagacggccgucauccuccugcuggaggccggugcacugguggcccgggcugcggugcugcagcagcuggacaaugucauugacgugaucaccugcagcuccaugcuguccagccucugcuuccugggcgccaucgccguggaccgcuacaucuccaucuucuacgcacugcgcuaccacagcaucgugacccugccgcgggcgcggcgagccguugcggccaucuggguggccagugucgucuucagcacgcucuucaucgccuacuacgaccacguggccguccugcugugccucguggucuucuuccuggcuaugcuggugcucauggccgugcuguacguccacaugcuggcccgggccugccagcacgcccagggcaucgcccggcuccacaagaggcagcgcccgguccaccagggcuuuggccuuaaaggcgcugucacccucaccauccugcugggcauuuucuuccucugcuggggccccuucuuccugcaucucacacucaucguccucugccccgagcaccccacgugcggcugcaucuucaagaacuucaaccucuuucucgcccucaucaucugcaaugccaucaucgacccccucauccacgccuuccacagccaggagcuccgcaggacgcucaaggaggugcugacaugcuccugguga

SEQ ID NO: 2647 - RNA, 954 nt, Artificial Sequence
  derived and/or modified sequence opt1 from MC1_R__Homo_sapiens__AHC10696
auggccgugcagggcagccagcgccggcugcucgggucccugaacagcacccccaccgccaucccccagcugggccucgcggccaaccagacgggggcccgcugccuggaggucuccaucagcgacggccuguuccucucccuggggcuggugagccucguggagaacgcccuggucguggccaccaucgcgaagaaccggaaccugcacucccccauguacugcuucaucugcugccucgcccugagcgaccugcucguguccggcagcaacguccuggagaccgccgugauccugcuccuggaggccggcgcgcugguggcccgcgccgccguccuccagcagcuggacaacgugaucgacgugaucacgugcuccagcaugcuguccagccucugcuuccugggggccaucgcggucgaccgguacaucuccaucuucuacgcccugcgcuaccacagcaucgugacccucccccgggcccgccgggccguggccgcgaucugggucgccuccgugguguucagcacccuguucaucgccuacuacgaccacgucgccgugcugcucugccugguggucuucuuccuggccaugcucgugcugauggcggugcuguacguccacaugcucgcccgcgccugccagcacgcccagggcaucgcccggcugcacaagcgccagcggcccgugcaccagggguucggccugaagggggcggucacccucaccauccugcugggcaucuucuuccucugcuggggcccguucuuccugcaccugacgcucaucgugcugugccccgagcacccgaccugcgggugcaucuucaagaacuucaaccuguuccucgcccugaucaucugcaacgccaucaucgacccccugauccacgccuuccacucccaggagcugcgccggacccucaaggaggugcugaccugcagcugguga

SEQ ID NO: 2648 - RNA, 954 nt, Artificial Sequence
  derived and/or modified sequence opt2 from MC1_R__Homo_sapiens__AHC10696
auggccguccagggcucccagcgccgccuccucggcucccucaacuccacccccaccgccaucccccagcucggccucgccgccaaccagaccggcgcccgcugccucgaggucuccaucuccgacggccucuuccucucccucggccucgucucccucgucgagaacgcccucgucgucgccaccaucgccaagaaccgcaaccuccacucccccauguacugcuucaucugcugccucgcccucuccgaccuccucgucuccggcuccaacguccucgagaccgccgucauccuccuccucgaggccggcgcccucgucgcccgcgccgccguccuccagcagcucgacaacgucaucgacgucaucaccugcuccuccaugcucuccucccucugcuuccucggcgccaucgccgucgaccgcuacaucuccaucuucuacgcccuccgcuaccacuccaucgucacccucccccgcgcccgccgcgccgucgccgccaucugggucgccuccgucgucuucuccacccucuucaucgccuacuacgaccacgucgccguccuccucugccucgucgucuucuuccucgccaugcucguccucauggccguccucuacguccacaugcucgcccgcgccugccagcacgcccagggcaucgcccgccuccacaagcgccagcgccccguccaccagggcuucggccucaagggcgccgucacccucaccauccuccucggcaucuucuuccucugcuggggccccuucuuccuccaccucacccucaucguccucugccccgagcaccccaccugcggcugcaucuucaagaacuucaaccucuuccucgcccucaucaucugcaacgccaucaucgacccccucauccacgccuuccacucccaggagcuccgccgcacccucaaggagguccucaccugcuccugguga

SEQ ID NO: 2649 - RNA, 954 nt, Artificial Sequence
  derived and/or modified sequence opt3 from MC1_R__Homo_sapiens__AHC10696
auggccgugcagggcagccaaagaaggcugcucgggucccuuaacucuacccccacagcuaucccucagcugggauuggcagccaaucagacuggugcgcggugcuuagaggucucaauuagugacggccuguuccuaagccucgggcugguuucccuuguggaaaacgcucugguaguggccacgauagcaaagaaucgcaacuugcacucuccaauguacuguuuuaucugcugucucgcccugucggaucugcucgucucaggaagcaauguguuagagaccgcuguuauucugcuuuuggaagcaggcgcccugguggcucgagccgcgguccuacagcaacucgacaacgugaucgauguaauuacaugcaguuccaugcugucuagccuuuguuuccugggugcaaucgccguugaccguuauauauccaucuuuuacgcuuugagauaucauucaauugugacucucccgagggcccggcgcgcagucgcugccaucuggguggcgaguguggucuucagcacccuguuuauugccuacuaugaucacguugcaguguuacugugccucguaguguucuuucuugcuaugcuggucuugauggccgugcuauacguucauaugcuggcuagagccugucagcacgcacaggggaucgccaggcuccauaaacggcagcgccccgugcaccaaggauucggccugaagggcgcugucacacuuaccauacuguuggggaucuuuuuccucugcuggggaccauuuuuccugcacuuaacucugauugugcuauguccugagcaucccacaugcgguuguauuuuuaaaaauuucaaccucuuccuggcgcuuaucaucugcaaugcaauuauagacccuuugauccacgccuuucauucucaggaacugcgaagaacccucaaggagguacugacgugcuccugguga

SEQ ID NO: 2650 - RNA, 954 nt, Artificial Sequence
  derived and/or modified sequence opt4 from MC1_R__Homo_sapiens__AHC10696
auggccgugcagggcagccagagaagacugcugggcagccugaacagcacccccaccgccaucccccagcugggccuggccgccaaccagaccggcgccagaugccuggaggugagcaucagcgacggccuguuccugagccugggccuggugagccugguggagaacgcccuggugguggccaccaucgccaagaacagaaaccugcacagccccauguacugcuucaucugcugccuggcccugagcgaccugcuggugagcggcagcaacgugcuggagaccgccgugauccugcugcuggaggccggcgcccugguggccagagccgccgugcugcagcagcuggacaacgugaucgacgugaucaccugcagcagcaugcugagcagccugugcuuccugggcgccaucgccguggacagauacaucagcaucuucuacgcccugagauaccacagcaucgugacccugcccagagccagaagagccguggccgccaucuggguggccagcgugguguucagcacccuguucaucgccuacuacgaccacguggccgugcugcugugccuggugguguucuuccuggccaugcuggugcugauggccgugcuguacgugcacaugcuggccagagccugccagcacgcccagggcaucgccagacugcacaagagacagagacccgugcaccagggcuucggccugaagggcgccgugacccugaccauccugcugggcaucuucuuccugugcuggggccccuucuuccugcaccugacccugaucgugcugugccccgagcaccccaccugcggcugcaucuucaagaacuucaaccuguuccuggcccugaucaucugcaacgccaucaucgacccccugauccacgccuuccacagccaggagcugagaagaacccugaaggaggugcugaccugcagcugguga

SEQ ID NO: 2651 - RNA, 954 nt, Artificial Sequence
  derived and/or modified sequence opt5 from MC1_R__Homo_sapiens__AHC10696
auggccgugcagggcagccaaagacggcugcucgggucccugaacucuacccccacagcuaucccucagcuuggacuggccgcgaaucagacgggcgcucgcugccucgaggucagcauuuccgacgggcuguuccuuucucugggacucguuagccugguggaaaacgcccugguggucgccaccaucgcuaagaauagaaaccuccacuccccgauguacuguuuuauuugcugucuggcccuuucugaucugcucgugagcggcuccaauguucuggagacagcugugauccuucugcucgaagccggggcgcuggucgcccgggcugccgugcugcagcaacucgacaacguuauugaugugauuaccugcagcucuaugcuguccagccuuuguuuccugggagcuaucgccgucgaccgcuauaucucuaucuuuuacgcgcucagauaucauuccauugugacacugccccgggcccgcagagcuguggccgcuaucugggucgccagcguuguguucucuacccuuuuuauugccuacuaugaucacguggcuguccugcucugccuggugguuuucuuucuggcgaugcucgugcugauggccguccuuuacgugcauaugcuggcucgggccugucagcacgcccagggcaucgcucgccuccauaaaagacagcggccuguucaccaaggcuucgggcugaagggagccgugacacuuaccauucugcucggcaucuuuuuccugugcugggggcccuuuuuccugcaccucacgcugaucguccuuuguccugagcauccuaccugcggauguauuuuuaaaaauuucaaccuguuccucgcgcugaucauuugcaaugcuaucauugacccccugauccacgccuuucauucccaggaacuucgcagaacacucaaggaggugcugaccugcagcugguga

SEQ ID NO: 2652 - protein, 317 aa, Artificial Sequence [sequence omitted]

SEQ ID NO: 2653 - RNA, 954 nt, Artificial Sequence
  MC1_R__Homo_sapiens__AHC09527
auggcugugcagggaucccagagaagacuucugggcucccucaacuccacccccacagccaucccccagcuggggcuggcugccaaccagacaggagcccggugccuggagguguccaucucugacgggcucuuccucagccuggggcuggugagcuugguggagaacgcgcuggugguggccaccaucgccaagaaccggaaccugcacucacccauguacugcuucaucugcugccuggccuugucggaccugcuggugagcgggagcaacgugcuggagacggccgucauccuccugcuggaggccggugcacugguggcccgggcugcggugcugcagcagcuggacaaugucauugacgugaucaccugcagcuccaugcuguccagccucugcuuccugggcgccaucgccguggaccgcuacaucuccaucuucuacgcacugcgcuaccacagcaucgugacccugccgcgggcgcggcgagccguugcggccaucuggguggccagugucgucuucagcacgcucuucaucgccuacuacgaccacguggccguccugcugugccucguggucuucuuccuggcuaugcuggugcucauggccgugcuguacguccacaugcuggcccgggccugccagcacgcccagggcaucgcccggcuccacaagaggcagcgcccgguccaccagggcuuuggccuuaaaggcgcugucacccucaccauccugcugggcauuuucuuccucugcuggggccccuucuuccugcaucucacacucaucguccucugccccgagcaccccacgugcggcugcaucuucaagaacuucaaccucuuucucgcccucaucaucugcaaugccaucauccacccccucaucuacgccuuccacagccaggagcuccgcaggacgcucaaggaggugcugacaugcuccugguga

SEQ ID NO: 2654 - RNA, 954 nt, Artificial Sequence
  derived and/or modified sequence opt1 from MC1_R__Homo_sapiens__AHC09527
auggccgugcagggcagccagcgccggcugcucgggucccugaacagcacccccaccgccaucccccagcugggccucgcggccaaccagacgggggcccgcugccuggaggucuccaucagcgacggccuguuccucucccuggggcuggugagccucguggagaacgcccuggucguggccaccaucgcgaagaaccggaaccugcacucccccauguacugcuucaucugcugccucgcccugagcgaccugcucguguccggcagcaacguccuggagaccgccgugauccugcuccuggaggccggcgcgcugguggcccgcgccgccguccuccagcagcuggacaacgugaucgacgugaucacgugcuccagcaugcuguccagccucugcuuccugggggccaucgcggucgaccgguacaucuccaucuucuacgcccugcgcuaccacagcaucgugacccucccccgggcccgccgggccguggccgcgaucugggucgccuccgugguguucagcacccuguucaucgccuacuacgaccacgucgccgugcugcucugccugguggucuucuuccuggccaugcucgugcugauggcggugcuguacguccacaugcucgcccgcgccugccagcacgcccagggcaucgcccggcugcacaagcgccagcggcccgugcaccagggguucggccugaagggggcggucacccucaccauccugcugggcaucuucuuccucugcuggggcccguucuuccugcaccugacgcucaucgugcugugccccgagcacccgaccugcgggugcaucuucaagaacuucaaccuguuccucgcccugaucaucugcaacgccaucauccacccccugaucuacgccuuccacucccaggagcugcgccggacccucaaggaggugcugaccugcagcugguga

SEQ ID NO: 2655 - RNA, 954 nt, Artificial Sequence
  derived and/or modified sequence opt2 from MC1_R__Homo_sapiens__AHC09527
auggccguccagggcucccagcgccgccuccucggcucccucaacuccacccccaccgccaucccccagcucggccucgccgccaaccagaccggcgcccgcugccucgaggucuccaucuccgacggccucuuccucucccucggccucgucucccucgucgagaacgcccucgucgucgccaccaucgccaagaaccgcaaccuccacucccccauguacugcuucaucugcugccucgcccucuccgaccuccucgucuccggcuccaacguccucgagaccgccgucauccuccuccucgaggccggcgcccucgucgcccgcgccgccguccuccagcagcucgacaacgucaucgacgucaucaccugcuccuccaugcucuccucccucugcuuccucggcgccaucgccgucgaccgcuacaucuccaucuucuacgcccuccgcuaccacuccaucgucacccucccccgcgcccgccgcgccgucgccgccaucugggucgccuccgucgucuucuccacccucuucaucgccuacuacgaccacgucgccguccuccucugccucgucgucuucuuccucgccaugcucguccucauggccguccucuacguccacaugcucgcccgcgccugccagcacgcccagggcaucgcccgccuccacaagcgccagcgccccguccaccagggcuucggccucaagggcgccgucacccucaccauccuccucggcaucuucuuccucugcuggggccccuucuuccuccaccucacccucaucguccucugccccgagcaccccaccugcggcugcaucuucaagaacuucaaccucuuccucgcccucaucaucugcaacgccaucauccacccccucaucuacgccuuccacucccaggagcuccgccgcacccucaaggagguccucaccugcuccugguga

SEQ ID NO: 2656 - RNA, 954 nt, Artificial Sequence
  derived and/or modified sequence opt3 from MC1_R__Homo_sapiens__AHC09527
auggccgugcagggcagccaaagaaggcugcucgggucccuuaacucuacccccacagcuaucccucagcugggauuggcagccaaucagacuggugcgcggugcuuagaggucucaauuagugacggccuguuccuaagccucgggcugguuucccuuguggaaaacgcucugguaguggccacgauagcaaagaaucgcaacuugcacucuccaauguacuguuuuaucugcugucucgcccugucggaucugcucgucucaggaagcaauguguuagagaccgcuguuauucugcuuuuggaagcaggcgcccugguggcucgagccgcgguccuacagcaacucgacaacgugaucgauguaauuacaugcaguuccaugcugucuagccuuuguuuccugggugcaaucgccguugaccguuauauauccaucuuuuacgcuuugagauaucauucaauugugacucucccgagggcccggcgcgcagucgcugccaucuggguggcgaguguggucuucagcacccuguuuauugccuacuaugaucacguugcaguguuacugugccucguaguguucuuucuugcuaugcuggucuugauggccgugcuauacguucauaugcuggcuagagccugucagcacgcacaggggaucgccaggcuccauaaacggcagcgccccgugcaccaaggauucggccugaagggcgcugucacacuuaccauacuguuggggaucuuuuuccucugcuggggaccauuuuuccugcacuuaacucugauugugcuauguccugagcaucccacaugcgguuguauuuuuaaaaauuucaaccucuuccuggcgcuuaucaucugcaaugcaauuauacacccuuugaucuaugccuuucauucucaggaacugcgaagaacccucaaggagguacugacgugcuccugguga

SEQ ID NO: 2657 - RNA, 954 nt, Artificial Sequence
  derived and/or modified sequence opt4 from MC1_R__Homo_sapiens__AHC09527
auggccgugcagggcagccagagaagacugcugggcagccugaacagcacccccaccgccaucccccagcugggccuggccgccaaccagaccggcgccagaugccuggaggugagcaucagcgacggccuguuccugagccugggccuggugagccugguggagaacgcccuggugguggccaccaucgccaagaacagaaaccugcacagccccauguacugcuucaucugcugccuggcccugagcgaccugcuggugagcggcagcaacgugcuggagaccgccgugauccugcugcuggaggccggcgcccugguggccagagccgccgugcugcagcagcuggacaacgugaucgacgugaucaccugcagcagcaugcugagcagccugugcuuccugggcgccaucgccguggacagauacaucagcaucuucuacgcccugagauaccacagcaucgugacccugcccagagccagaagagccguggccgccaucuggguggccagcgugguguucagcacccuguucaucgccuacuacgaccacguggccgugcugcugugccuggugguguucuuccuggccaugcuggugcugauggccgugcuguacgugcacaugcuggccagagccugccagcacgcccagggcaucgccagacugcacaagagacagagacccgugcaccagggcuucggccugaagggcgccgugacccugaccauccugcugggcaucuucuuccugugcuggggccccuucuuccugcaccugacccugaucgugcugugccccgagcaccccaccugcggcugcaucuucaagaacuucaaccuguuccuggcccugaucaucugcaacgccaucauccacccccugaucuacgccuuccacagccaggagcugagaagaacccugaaggaggugcugaccugcagcugguga

SEQ ID NO: 2658 - RNA, 954 nt, Artificial Sequence
  derived and/or modified sequence opt5 from MC1_R__Homo_sapiens__AHC09527
auggccgugcagggcagccaaagacggcugcucgggucccugaacucuacccccacagcuaucccucagcuuggacuggccgcgaaucagacgggcgcucgcugccucgaggucagcauuuccgacgggcuguuccuuucucugggacucguuagccugguggaaaacgcccugguggucgccaccaucgcuaagaauagaaaccuccacuccccgauguacuguuuuauuugcugucuggcccuuucugaucugcucgugagcggcuccaauguucuggagacagcugugauccuucugcucgaagccggggcgcuggucgcccgggcugccgugcugcagcaacucgacaacguuauugaugugauuaccugcagcucuaugcuguccagccuuuguuuccugggagcuaucgccgucgaccgcuauaucucuaucuuuuacgcgcucagauaucauuccauugugacacugccccgggcccgcagagcuguggccgcuaucugggucgccagcguuguguucucuacccuuuuuauugccuacuaugaucacguggcuguccugcucugccuggugguuuucuuucuggcgaugcucgugcugauggccguccuuuacgugcauaugcuggcucgggccugucagcacgcccagggcaucgcucgccuccauaaaagacagcggccuguucaccaaggcuucgggcugaagggagccgugacacuuaccauucugcucggcaucuuuuuccugugcugggggcccuuuuuccugcaccucacgcugaucguccuuuguccugagcauccuaccugcggauguauuuuuaaaaauuucaaccuguuccucgcgcugaucauuugcaaugcuaucauucacccccugaucuaugccuuucauucccaggaacuucgcagaacacucaaggaggugcugaccugcagcugguga

SEQ ID NO: 2659 - protein, 317 aa, Artificial Sequence [sequence omitted]

SEQ ID NO: 2660 - RNA, 954 nt, Artificial Sequence
  MC1_R__Homo_sapiens__AHC10869
auggcugugcagggaucccagagaagacuucugggcucccucaacuccacccccacagccaucccccagcuggggcuggcugccaaccagacaggagcccggugccuggagguguccaucucugacgggcucuuccucagccuggggcuggugagcuugguggagaacgcgcuggugguggccaccaucgccaagaaccggaaccugcacucacccauguacugcuucaucugcugccuggccuugucggaccugcuggugagcgggagcaacgugcuggagacggccgucauccuccugcuggaggccggugcacugguggcccgggcugcggugcugcagcagcuggacaaugucauugacgugaucaccugcagcuccaugcuguccagccucugcuuccugggcgccaucgccguggaccgcuacaucuccaucuucuacgcacugcgcuaccacagcaucgugacccugccgcgggcgcggcgagccguugcggccaucuggguggccagugucgucuucagcacgcucuucaucgccuacuacgaccacguggccguccugcugugccucguggucuucuuccuggcuaugcuggugcucauggccgugcuguacguccacaugcuggcccgggccugccagcacgcccagggcaucgcccggcuccacaagaggcagcacccgguccaccagggcuuuggccuuaaaggcgcugucacccucaccauccugcugggcauuuucuuccucugcuggggccccuucuuccugcaucucacacucaucguccucugccccgagcaccccacgugcggcugcaucuucaagaacuucaaccucuuucucgcccucaucaucugcaaugccaucaucgacccccucaucuacgccuuccacagccaggagcuccgcaggacgcucaaggaggugcugacaugcuccugguga

SEQ ID NO: 2661 - RNA, 954 nt, Artificial Sequence
  derived and/or modified sequence opt1 from MC1_R__Homo_sapiens__AHC10869
auggccgugcagggcagccagcgccggcugcucgggucccugaacagcacccccaccgccaucccccagcugggccucgcggccaaccagacgggggcccgcugccuggaggucuccaucagcgacggccuguuccucucccuggggcuggugagccucguggagaacgcccuggucguggccaccaucgcgaagaaccggaaccugcacucccccauguacugcuucaucugcugccucgcccugagcgaccugcucguguccggcagcaacguccuggagaccgccgugauccugcuccuggaggccggcgcgcugguggcccgcgccgccguccuccagcagcuggacaacgugaucgacgugaucacgugcuccagcaugcuguccagccucugcuuccugggggccaucgcggucgaccgguacaucuccaucuucuacgcccugcgcuaccacagcaucgugacccucccccgggcccgccgggccguggccgcgaucugggucgccuccgugguguucagcacccuguucaucgccuacuacgaccacgucgccgugcugcucugccugguggucuucuuccuggccaugcucgugcugauggcggugcuguacguccacaugcucgcccgcgccugccagcacgcccagggcaucgcccggcugcacaagcgccagcaccccgugcaccagggguucggccugaagggggcggucacccucaccauccugcugggcaucuucuuccucugcuggggcccguucuuccugcaccugacgcucaucgugcugugccccgagcacccgaccugcgggugcaucuucaagaacuucaaccuguuccucgcccugaucaucugcaacgccaucaucgacccccugaucuacgccuuccacucccaggagcugcggcgcacccucaaggaggugcugaccugcagcugguga

SEQ ID NO: 2662 - RNA, 954 nt, Artificial Sequence
  derived and/or modified sequence opt2 from MC1_R__Homo_sapiens__AHC10869
auggccguccagggcucccagcgccgccuccucggcucccucaacuccacccccaccgccaucccccagcucggccucgccgccaaccagaccggcgcccgcugccucgaggucuccaucuccgacggccucuuccucucccucggccucgucucccucgucgagaacgcccucgucgucgccaccaucgccaagaaccgcaaccuccacucccccauguacugcuucaucugcugccucgcccucuccgaccuccucgucuccggcuccaacguccucgagaccgccgucauccuccuccucgaggccggcgcccucgucgcccgcgccgccguccuccagcagcucgacaacgucaucgacgucaucaccugcuccuccaugcucuccucccucugcuuccucggcgccaucgccgucgaccgcuacaucuccaucuucuacgcccuccgcuaccacuccaucgucacccucccccgcgcccgccgcgccgucgccgccaucugggucgccuccgucgucuucuccacccucuucaucgccuacuacgaccacgucgccguccuccucugccucgucgucuucuuccucgccaugcucguccucauggccguccucuacguccacaugcucgcccgcgccugccagcacgcccagggcaucgcccgccuccacaagcgccagcaccccguccaccagggcuucggccucaagggcgccgucacccucaccauccuccucggcaucuucuuccucugcuggggccccuucuuccuccaccucacccucaucguccucugccccgagcaccccaccugcggcugcaucuucaagaacuucaaccucuuccucgcccucaucaucugcaacgccaucaucgacccccucaucuacgccuuccacucccaggagcuccgccgcacccucaaggagguccucaccugcuccugguga

SEQ ID NO: 2663 - RNA, 954 nt, Artificial Sequence
  derived and/or modified sequence opt3 from MC1_R__Homo_sapiens__AHC10869
auggccgugcagggcagccaaagaaggcugcucgggucccuuaacucuacccccacagcuaucccucagcugggauuggcagccaaucagacuggugcgcggugcuuagaggucucaauuagugacggccuguuccuaagccucgggcugguuucccuuguggaaaacgcucugguaguggccacgauagcaaagaaucgcaacuugcacucuccaauguacuguuuuaucugcugucucgcccugucggaucugcucgucucaggaagcaauguguuagagaccgcuguuauucugcuuuuggaagcaggcgcccugguggcucgagccgcgguccuacagcaacucgacaacgugaucgauguaauuacaugcaguuccaugcugucuagccuuuguuuccugggugcaaucgccguugaccguuauauauccaucuuuuacgcuuugagauaucauucaauugugacucucccgagggcccggcgcgcagucgcugccaucuggguggcgaguguggucuucagcacccuguuuauugccuacuaugaucacguugcaguguuacugugccucguaguguucuuucuugcuaugcuggucuugauggccgugcuauacguucauaugcuggcuagagccugucagcacgcacaggggaucgccaggcuccauaaacggcagcaccccgugcaccaaggauucggccugaagggcgcugucacacuuaccauacuguuggggaucuuuuuccucugcuggggaccauuuuuccugcauuuaacucugauugugcuauguccugagcaccccacaugcgguuguauuuuuaaaaauuucaaccucuuccuggcgcuuaucaucugcaaugcaauuauagacccuuugaucuaugccuuucauucucaggaacugcgccgaacccucaaggagguacugacgugcuccugguga

SEQ ID NO: 2664 - RNA, 954 nt, Artificial Sequence
  derived and/or modified sequence opt4 from MC1_R__Homo_sapiens__AHC10869
auggccgugcagggcagccagagaagacugcugggcagccugaacagcacccccaccgccaucccccagcugggccuggccgccaaccagaccggcgccagaugccuggaggugagcaucagcgacggccuguuccugagccugggccuggugagccugguggagaacgcccuggugguggccaccaucgccaagaacagaaaccugcacagccccauguacugcuucaucugcugccuggcccugagcgaccugcuggugagcggcagcaacgugcuggagaccgccgugauccugcugcuggaggccggcgcccugguggccagagccgccgugcugcagcagcuggacaacgugaucgacgugaucaccugcagcagcaugcugagcagccugugcuuccugggcgccaucgccguggacagauacaucagcaucuucuacgcccugagauaccacagcaucgugacccugcccagagccagaagagccguggccgccaucuggguggccagcgugguguucagcacccuguucaucgccuacuacgaccacguggccgugcugcugugccuggugguguucuuccuggccaugcuggugcugauggccgugcuguacgugcacaugcuggccagagccugccagcacgcccagggcaucgccagacugcacaagagacagcaccccgugcaccagggcuucggccugaagggcgccgugacccugaccauccugcugggcaucuucuuccugugcuggggccccuucuuccugcaccugacccugaucgugcugugccccgagcaccccaccugcggcugcaucuucaagaacuucaaccuguuccuggcccugaucaucugcaacgccaucaucgacccccugaucuacgccuuccacagccaggagcugagaagaacccugaaggaggugcugaccugcagcugguga

SEQ ID NO: 2665 - RNA, 954 nt, Artificial Sequence
  derived and/or modified sequence opt5 from MC1_R__Homo_sapiens__AHC10869
auggccgugcagggcagccaaagacggcugcucgggucccugaacucuacccccacagcuaucccucagcuuggacuggccgcgaaucagacgggcgcucgcugccucgaggucagcauuuccgacgggcuguuccuuucucugggacucguuagccugguggaaaacgcccugguggucgccaccaucgcuaagaauagaaaccuccacuccccgauguacuguuuuauuugcugucuggcccuuucugaucugcucgugagcggcuccaauguucuggagacagcugugauccuucugcucgaagccggggcgcuggucgcccgggcugccgugcugcagcaacucgacaacguuauugaugugauuaccugcagcucuaugcuguccagccuuuguuuccugggagcuaucgccgucgaccgcuauaucucuaucuuuuacgcgcucagauaucauuccauugugacacugccccgggcccgcagagcuguggccgcuaucugggucgccagcguuguguucucuacccuuuuuauugccuacuaugaucacguggcuguccugcucugccuggugguuuucuuucuggcgaugcucgugcugauggccguccuuuacgugcauaugcuggcucgggccugucagcacgcccagggcaucgcucgccuccauaaaagacagcacccuguucaccaaggcuucgggcugaagggagccgugacacuuaccauucugcucggcaucuuuuuccugugcugggggcccuuuuuccugcaucucacgcugaucguccuuuguccugagcacccuaccugcggauguauuuuuaaaaauuucaaccuguuccucgcgcugaucauuugcaaugcuaucauugacccccugaucuaugccuuucauucccaggaacuucggcgcacacucaaggaggugcugaccugcagcugguga

SEQ ID NO: 2666 - protein, 317 aa, Artificial Sequence [sequence omitted]

SEQ ID NO: 2667 - RNA, 954 nt, Artificial Sequence
  MC1_R__Homo_sapiens__AHC11615
auggcugugcagggaucccagagaagacuucugggcucccucaacuccacccccacagccaucccccagcuggggcuggcugccaaccagacaggagcccggugccuggagguguccaucucugacgggcucuuccucagccuggggcuggugagcuugguggagaacgcgcuggugguggccaccaucgccaagaaccggaaccugcacucacccauguacugcuucaucugcugccuggccuugucggaccugcuggugagcgggagcaacgugcuggagacggccgucauccuccugcuggaggccggugcacugguggcccgggcugcggugcugcagcagcuggacaaugucauugacgugaucaccugcagcuccaugcuguccagccucugcuuccugggcgccaucgccguggaccgcuacaucuccaucuucuacgcacugcgcuaccacagcaucgugacccugccgcgggcgcggcgagccguugcggccaucuggguggccagugucgucuucagcacgcucuucaucgccuacuacgaccacguggccguccugcugugccucguggucuucuuccuggcuaugcuggugcucauggccgugcuguacguccacaugcuggcccgggccugccagcacgcccagggcaucgcccggcuccacaagaggcagcgcccgguccaccagggcuuuggccuuaaaggcgcugucacccucaccauccugcugggcauuuucuuccucugcuggggccccuucuuccugcaucucacacucaucguccucugccccgagcaccccacgugcggcugcaucuucaagaacuucaaccucuuucucacccucaucaucugcaaugccaucaucgacccccucaucuacgccuuccacagccaggagcuccgcaggacgcucaaggaggugcugacaugcuccugguga

SEQ ID NO: 2668 - RNA, 954 nt, Artificial Sequence
  derived and/or modified sequence opt1 from MC1_R__Homo_sapiens__AHC11615
auggccgugcagggcagccagcgccggcugcucgggucccugaacagcacccccaccgccaucccccagcugggccucgcggccaaccagacgggggcccgcugccuggaggucuccaucagcgacggccuguuccucucccuggggcuggugagccucguggagaacgcccuggucguggccaccaucgcgaagaaccggaaccugcacucccccauguacugcuucaucugcugccucgcccugagcgaccugcucguguccggcagcaacguccuggagaccgccgugauccugcuccuggaggccggcgcgcugguggcccgcgccgccguccuccagcagcuggacaacgugaucgacgugaucacgugcuccagcaugcuguccagccucugcuuccugggggccaucgcggucgaccgguacaucuccaucuucuacgcccugcgcuaccacagcaucgugacccucccccgggcccgccgggccguggccgcgaucugggucgccuccgugguguucagcacccuguucaucgccuacuacgaccacgucgccgugcugcucugccugguggucuucuuccuggccaugcucgugcugauggcggugcuguacguccacaugcucgcccgcgccugccagcacgcccagggcaucgcccggcugcacaagcgccagcggcccgugcaccagggguucggccugaagggggcggucacccucaccauccugcugggcaucuucuuccucugcuggggcccguucuuccugcaccugacgcucaucgugcugugccccgagcacccgaccugcgggugcaucuucaagaacuucaaccuguuccucacccugaucaucugcaacgccaucaucgacccccugaucuacgccuuccacucccaggagcugcgccggacccucaaggaggugcugacgugcagcugguga

SEQ ID NO: 2669 - RNA, 954 nt, Artificial Sequence
  derived and/or modified sequence opt2 from MC1_R__Homo_sapiens__AHC11615
auggccguccagggcucccagcgccgccuccucggcucccucaacuccacccccaccgccaucccccagcucggccucgccgccaaccagaccggcgcccgcugccucgaggucuccaucuccgacggccucuuccucucccucggccucgucucccucgucgagaacgcccucgucgucgccaccaucgccaagaaccgcaaccuccacucccccauguacugcuucaucugcugccucgcccucuccgaccuccucgucuccggcuccaacguccucgagaccgccgucauccuccuccucgaggccggcgcccucgucgcccgcgccgccguccuccagcagcucgacaacgucaucgacgucaucaccugcuccuccaugcucuccucccucugcuuccucggcgccaucgccgucgaccgcuacaucuccaucuucuacgcccuccgcuaccacuccaucgucacccucccccgcgcccgccgcgccgucgccgccaucugggucgccuccgucgucuucuccacccucuucaucgccuacuacgaccacgucgccguccuccucugccucgucgucuucuuccucgccaugcucguccucauggccguccucuacguccacaugcucgcccgcgccugccagcacgcccagggcaucgcccgccuccacaagcgccagcgccccguccaccagggcuucggccucaagggcgccgucacccucaccauccuccucggcaucuucuuccucugcuggggccccuucuuccuccaccucacccucaucguccucugccccgagcaccccaccugcggcugcaucuucaagaacuucaaccucuuccucacccucaucaucugcaacgccaucaucgacccccucaucuacgccuuccacucccaggagcuccgccgcacccucaaggagguccucaccugcuccugguga

SEQ ID NO: 2670 - RNA, 954 nt, Artificial Sequence
  derived and/or modified sequence opt3 from MC1_R__Homo_sapiens__AHC11615
auggccgugcagggcagccaaagaaggcugcucgggucccuuaacucuacccccacagcuaucccucagcugggauuggcagccaaucagacuggugcgcggugcuuagaggucucaauuagugacggccuguuccuaagccucgggcugguuucccuuguggaaaacgcucugguaguggccacgauagcaaagaaucgcaacuugcacucuccaauguacuguuuuaucugcugucucgcccugucggaucugcucgucucaggaagcaauguguuagagaccgcuguuauucugcuuuuggaagcaggcgcccugguggcucgagccgcgguccuacagcaacucgacaacgugaucgauguaauuacaugcaguuccaugcugucuagccuuuguuuccugggugcaaucgccguugaccguuauauauccaucuuuuacgcuuugagauaucauucaauugugacucucccgagggcccggcgcgcagucgcugccaucuggguggcgaguguggucuucagcacccuguuuauugccuacuaugaucacguugcaguguuacugugccucguaguguucuuucuugcuaugcuggucuugauggccgugcuauacguucauaugcuggcuagagccugucagcacgcacaggggaucgccaggcuccauaaacggcagcgccccgugcaccaaggauucggccugaagggcgcugucacacuuaccauacuguuggggaucuuuuuccucugcuggggaccauuuuuccugcacuuaacucugauugugcuauguccugagcaucccacaugcgguuguauuuuuaaaaauuucaaccucuuccugacccuuaucaucugcaaugcgauuauagacccuuugaucuaugcauuucacucucaggaacugcgaagaacgcucaaggagguacugacuugcuccugguga

SEQ ID NO: 2671 - RNA, 954 nt, Artificial Sequence
  derived and/or modified sequence opt4 from MC1_R__Homo_sapiens__AHC11615
auggccgugcagggcagccagagaagacugcugggcagccugaacagcacccccaccgccaucccccagcugggccuggccgccaaccagaccggcgccagaugccuggaggugagcaucagcgacggccuguuccugagccugggccuggugagccugguggagaacgcccuggugguggccaccaucgccaagaacagaaaccugcacagccccauguacugcuucaucugcugccuggcccugagcgaccugcuggugagcggcagcaacgugcuggagaccgccgugauccugcugcuggaggccggcgcccugguggccagagccgccgugcugcagcagcuggacaacgugaucgacgugaucaccugcagcagcaugcugagcagccugugcuuccugggcgccaucgccguggacagauacaucagcaucuucuacgcccugagauaccacagcaucgugacccugcccagagccagaagagccguggccgccaucuggguggccagcgugguguucagcacccuguucaucgccuacuacgaccacguggccgugcugcugugccuggugguguucuuccuggccaugcuggugcugauggccgugcuguacgugcacaugcuggccagagccugccagcacgcccagggcaucgccagacugcacaagagacagagacccgugcaccagggcuucggccugaagggcgccgugacccugaccauccugcugggcaucuucuuccugugcuggggccccuucuuccugcaccugacccugaucgugcugugccccgagcaccccaccugcggcugcaucuucaagaacuucaaccuguuccugacccugaucaucugcaacgccaucaucgacccccugaucuacgccuuccacagccaggagcugagaagaacccugaaggaggugcugaccugcagcugguga

SEQ ID NO: 2672 - RNA, 954 nt, Artificial Sequence
  derived and/or modified sequence opt5 from MC1_R__Homo_sapiens__AHC11615
auggccgugcagggcagccaaagacggcugcucgggucccugaacucuacccccacagcuaucccucagcuuggacuggccgcgaaucagacgggcgcucgcugccucgaggucagcauuuccgacgggcuguuccuuucucugggacucguuagccugguggaaaacgcccugguggucgccaccaucgcuaagaauagaaaccuccacuccccgauguacuguuuuauuugcugucuggcccuuucugaucugcucgugagcggcuccaauguucuggagacagcugugauccuucugcucgaagccggggcgcuggucgcccgggcugccgugcugcagcaacucgacaacguuauugaugugauuaccugcagcucuaugcuguccagccuuuguuuccugggagcuaucgccgucgaccgcuauaucucuaucuuuuacgcgcucagauaucauuccauugugacacugccccgggcccgcagagcuguggccgcuaucugggucgccagcguuguguucucuacccuuuuuauugccuacuaugaucacguggcuguccugcucugccuggugguuuucuuucuggcgaugcucgugcugauggccguccuuuacgugcauaugcuggcucgggccugucagcacgcccagggcaucgcucgccuccauaaaagacagcggccuguucaccaaggcuucgggcugaagggagccgugacacuuaccauucugcucggcaucuuuuuccugugcugggggcccuuuuuccugcaccucacgcugaucguccuuuguccugagcauccuaccugcggauguauuuuuaaaaauuucaaccuguuccucacacugaucauuugcaaugcgaucauugacccccugaucuaugcuuuucacucccaggaacuucgcagaacccucaaggaggugcugacaugcagcugguga

SEQ ID NO: 2673 - protein, 317 aa, Artificial Sequence [sequence omitted]

SEQ ID NO: 2674 - RNA, 954 nt, Artificial Sequence
  MC1_R__Homo_sapiens__AHC09535
auggcugugcagggaucccagagaagacuucugggcucccucaacuccacccccacagccaucccccagcuggggcuggcugccaaccagacaggagcccggugccuggagguguccaucucugacgggcucuuccucagccuggggcuggugagcuugguggagaacgcgcuggugguggccaccaucgccaagaaccggaaccugcacucacccauguacugcuucaucugcugccuggccuugucggaccugcuggugagcgggagcaacgugcuggagacggccgucauccuccugcuggaggccggugcacugguggcccgggcugcggugcugcagcagcuggacaaugucauugacgugaucaccugcagcuccaugcuguccagccucugcuuccugggcgccaucgccguggaccacuacaucuccaucuucuacgcacugcgcuaccacagcaucgugacccugccgcgggcgcggcgagccguugcggccaucuggguggccagugucgucuucagcacgcucuucaucgccuacuacgaccacguggccguccugcugugccucguggucuucuuccuggcuaugcuggugcucauggccgugcuguacguccacaugcuggcccgggccugccagcacgcccagggcaucgcccggcuccacaagaggcagcgcccgguccaccagggcuuuggccuuaaaggcgcugucacccucaccauccugcugggcauuuucuuccucugcuggggccccuucuuccugcaucucacacucaucguccucugccccgagcaccccacgugcggcugcaucuucaagaacuucaaccucuuucucgcccucaucaucugcaaugccaucaucgacccccucaucuacgccuuccacagccaggagcuccgcaggacgcucaaggaggugcugacaugcuccugguga

SEQ ID NO: 2675 - RNA, 954 nt, Artificial Sequence
  derived and/or modified sequence opt1 from MC1_R__Homo_sapiens__AHC09535
auggccgugcagggcagccagcgccggcugcucgggucccugaacagcacccccaccgccaucccccagcugggccucgcggccaaccagacgggggcccgcugccuggaggucuccaucagcgacggccuguuccucucccuggggcuggugagccucguggagaacgcccuggucguggccaccaucgcgaagaaccggaaccugcacucccccauguacugcuucaucugcugccucgcccugagcgaccugcucguguccggcagcaacguccuggagaccgccgugauccugcuccuggaggccggcgcgcugguggcccgcgccgccguccuccagcagcuggacaacgugaucgacgugaucacgugcuccagcaugcuguccagccucugcuuccugggggccaucgcggucgaccacuacaucuccaucuucuacgcccugcgguaccacagcaucgugacccucccccgcgcccggcgcgccguggccgcgaucugggucgccuccgugguguucagcacccuguucaucgccuacuacgaccacgucgccgugcugcucugccugguggucuucuuccuggccaugcucgugcugauggcggugcuguacguccacaugcucgcccgggccugccagcacgcccagggcaucgcccgccugcacaagcggcagcgccccgugcaccagggguucggccugaagggggcggucacccucaccauccugcugggcaucuucuuccucugcuggggcccguucuuccugcaccugacgcucaucgugcugugccccgagcacccgaccugcgggugcaucuucaagaacuucaaccuguuccucgcccugaucaucugcaacgccaucaucgacccccugaucuacgccuuccacucccaggagcugcggcgcacccucaaggaggugcugaccugcagcugguga

SEQ ID NO: 2676 - RNA, 954 nt, Artificial Sequence
  derived and/or modified sequence opt2 from MC1_R__Homo_sapiens__AHC09535
auggccguccagggcucccagcgccgccuccucggcucccucaacuccacccccaccgccaucccccagcucggccucgccgccaaccagaccggcgcccgcugccucgaggucuccaucuccgacggccucuuccucucccucggccucgucucccucgucgagaacgcccucgucgucgccaccaucgccaagaaccgcaaccuccacucccccauguacugcuucaucugcugccucgcccucuccgaccuccucgucuccggcuccaacguccucgagaccgccgucauccuccuccucgaggccggcgcccucgucgcccgcgccgccguccuccagcagcucgacaacgucaucgacgucaucaccugcuccuccaugcucuccucccucugcuuccucggcgccaucgccgucgaccacuacaucuccaucuucuacgcccuccgcuaccacuccaucgucacccucccccgcgcccgccgcgccgucgccgccaucugggucgccuccgucgucuucuccacccucuucaucgccuacuacgaccacgucgccguccuccucugccucgucgucuucuuccucgccaugcucguccucauggccguccucuacguccacaugcucgcccgcgccugccagcacgcccagggcaucgcccgccuccacaagcgccagcgccccguccaccagggcuucggccucaagggcgccgucacccucaccauccuccucggcaucuucuuccucugcuggggccccuucuuccuccaccucacccucaucguccucugccccgagcaccccaccugcggcugcaucuucaagaacuucaaccucuuccucgcccucaucaucugcaacgccaucaucgacccccucaucuacgccuuccacucccaggagcuccgccgcacccucaaggagguccucaccugcuccugguga

SEQ ID NO: 2677 - RNA, 954 nt, Artificial Sequence
  derived and/or modified sequence opt3 from MC1_R__Homo_sapiens__AHC09535
auggccgugcagggcagccaaagaaggcugcucgggucccuuaacucuacccccacagcuaucccucagcugggauuggcagccaaucagacuggugcgcggugcuuagaggucucaauuagugacggccuguuccuaagccucgggcugguuucccuuguggaaaacgcucugguaguggccacgauagcaaagaaucgcaacuugcacucuccaauguacuguuuuaucugcugucucgcccugucggaucugcucgucucaggaagcaauguguuagagaccgcuguuauucugcuuuuggaagcaggcgcccugguggcucgagccgcgguccuacagcaacucgacaacgugaucgauguaauuacaugcaguuccaugcugucuagccuuuguuuccugggugcaaucgccguugaccauuauauauccaucuuuuacgcuuugcguuaucacucaauugugacucucccgagagccaggcgggcagucgcugccaucuggguggcgaguguggucuucagcacccuguuuauugccuacuaugaucauguugcaguguuacugugccucguaguguucuuucuugcuaugcuggucuugauggccgugcuauacguucacaugcuggcucgcgccugucagcaugcacaggggaucgccagacuccacaaaaggcagcggcccgugcaccaaggauucggccugaagggcgcugucacacuuaccauacuguuggggaucuuuuuccucugcuggggaccauuuuuccugcauuuaacucugauugugcuauguccugagcaccccacaugcgguuguauuuuuaaaaauuucaaccucuuccuggcgcuuaucaucugcaaugcaauuauagacccuuugaucuaugccuuucauucucaggaacugcgccgaacccucaaggagguacugacgugcuccugguga

SEQ ID NO: 2678 - RNA, 954 nt, Artificial Sequence
  derived and/or modified sequence opt4 from MC1_R__Homo_sapiens__AHC09535
auggccgugcagggcagccagagaagacugcugggcagccugaacagcacccccaccgccaucccccagcugggccuggccgccaaccagaccggcgccagaugccuggaggugagcaucagcgacggccuguuccugagccugggccuggugagccugguggagaacgcccuggugguggccaccaucgccaagaacagaaaccugcacagccccauguacugcuucaucugcugccuggcccugagcgaccugcuggugagcggcagcaacgugcuggagaccgccgugauccugcugcuggaggccggcgcccugguggccagagccgccgugcugcagcagcuggacaacgugaucgacgugaucaccugcagcagcaugcugagcagccugugcuuccugggcgccaucgccguggaccacuacaucagcaucuucuacgcccugagauaccacagcaucgugacccugcccagagccagaagagccguggccgccaucuggguggccagcgugguguucagcacccuguucaucgccuacuacgaccacguggccgugcugcugugccuggugguguucuuccuggccaugcuggugcugauggccgugcuguacgugcacaugcuggccagagccugccagcacgcccagggcaucgccagacugcacaagagacagagacccgugcaccagggcuucggccugaagggcgccgugacccugaccauccugcugggcaucuucuuccugugcuggggccccuucuuccugcaccugacccugaucgugcugugccccgagcaccccaccugcggcugcaucuucaagaacuucaaccuguuccuggcccugaucaucugcaacgccaucaucgacccccugaucuacgccuuccacagccaggagcugagaagaacccugaaggaggugcugaccugcagcugguga

SEQ ID NO: 2679 - RNA, 954 nt, Artificial Sequence
  derived and/or modified sequence opt5 from MC1_R__Homo_sapiens__AHC09535
auggccgugcagggcagccaaagacggcugcucgggucccugaacucuacccccacagcuaucccucagcuuggacuggccgcgaaucagacgggcgcucgcugccucgaggucagcauuuccgacgggcuguuccuuucucugggacucguuagccugguggaaaacgcccugguggucgccaccaucgcuaagaauagaaaccuccacuccccgauguacuguuuuauuugcugucuggcccuuucugaucugcucgugagcggcuccaauguucuggagacagcugugauccuucugcucgaagccggggcgcuggucgcccgggcugccgugcugcagcaacucgacaacguuauugaugugauuaccugcagcucuaugcuguccagccuuuguuuccugggagcuaucgccgucgaccauuauaucucuaucuuuuacgcgcuccgcuaucacuccauugugacacugcccagagcccggcgcgcuguggccgcuaucugggucgccagcguuguguucucuacccuuuuuauugccuacuaugaucauguggcuguccugcucugccuggugguuuucuuucuggcgaugcucgugcugauggccguccuuuacgugcacaugcuggcuagagccugucagcaugcccagggcaucgcucggcuccacaaacgccagagaccuguucaccaaggcuucgggcugaagggagccgugacacuuaccauucugcucggcaucuuuuuccugugcugggggcccuuuuuccugcaucucacgcugaucguccuuuguccugagcacccuaccugcggauguauuuuuaaaaauuucaaccuguuccucgcgcugaucauuugcaaugcuaucauugacccccugaucuaugccuuucauucccaggaacuucggcgcacacucaaggaggugcugaccugcagcugguga

SEQ ID NO: 2680 - protein, 317 aa, Artificial Sequence [sequence omitted]

SEQ ID NO: 2681 - RNA, 954 nt, Artificial Sequence
  MC1_R__Homo_sapiens__AHC11840
auggcugugcagggaucccagagaagacuucugggcucccucaacuccacccccacagccaucccccagcuggggcuggcugccaaccagacaggagcccggugccuggagguguccaucucugacgggcucuuccucagccuggggcuggugagcuugguggagaacgcgcuggugguggccaccaucgccaagaaccggaaccugcacucacccauguacugcuucaucugcugccuggccuugucggaccugcuggugagcgggagcaacgugcuggagacggccgucauccuccugcuggaggccggugcacugguggcccgggcugcggugcugcagcagcuggacaaugucauugacgugaucaccugcagcuccaugcuguccagccucugcuuccugggcgccaucgccguggaccgcuacaucuccaucuucuacgcacugcgcuaccacagcaucgugacccugccgcgggcgcggcgagccguugcggccaucuggguggccagugucgucuucagcacgcucuucaucgccuacuacgaccacguggccguccugcugugccucguggucuucuuccuggcuaugcuggugcucauggccgugcuguacguccacaugcuggcccgggccugccagcacgcccagggcaucgcccggcuccacaagaggcagcgcccgguccaccagggcuuuggccuuaaaggcgcugucacccucaccauccugcugggcauuuucuuccucugcuggggccccuucuuccugcaucucacacucaucguccucugccccgagcaccccacgugcggcugcaucuucaagaacuucaaccucuuucucgcccucaucaucugcaaugccaucaucgacccccucaucuacgccuuccacaaccaggagcuccgcaggacgcucaaggaggugcugacaugcuccugguga

SEQ ID NO: 2682 - RNA, 954 nt, Artificial Sequence
  derived and/or modified sequence opt1 from MC1_R__Homo_sapiens__AHC11840
auggccgugcagggcagccagcgccggcugcucgggucccugaacagcacccccaccgccaucccccagcugggccucgcggccaaccagacgggggcccgcugccuggaggucuccaucagcgacggccuguuccucucccuggggcuggugagccucguggagaacgcccuggucguggccaccaucgcgaagaaccggaaccugcacucccccauguacugcuucaucugcugccucgcccugagcgaccugcucguguccggcagcaacguccuggagaccgccgugauccugcuccuggaggccggcgcgcugguggcccgcgccgccguccuccagcagcuggacaacgugaucgacgugaucacgugcuccagcaugcuguccagccucugcuuccugggggccaucgcggucgaccgguacaucuccaucuucuacgcccugcgcuaccacagcaucgugacccucccccgggcccgccgggccguggccgcgaucugggucgccuccgugguguucagcacccuguucaucgccuacuacgaccacgucgccgugcugcucugccugguggucuucuuccuggccaugcucgugcugauggcggugcuguacguccacaugcucgcccgcgccugccagcacgcccagggcaucgcccggcugcacaagcgccagcggcccgugcaccagggguucggccugaagggggcggucacccucaccauccugcugggcaucuucuuccucugcuggggcccguucuuccugcaccugacgcucaucgugcugugccccgagcacccgaccugcgggugcaucuucaagaacuucaaccuguuccucgcccugaucaucugcaacgccaucaucgacccccugaucuacgccuuccacaaccaggagcugcgccggacccucaaggaggugcugaccugcuccugguga

SEQ ID NO: 2683 - RNA, 954 nt, Artificial Sequence
  derived and/or modified sequence opt2 from MC1_R__Homo_sapiens__AHC11840
auggccguccagggcucccagcgccgccuccucggcucccucaacuccacccccaccgccaucccccagcucggccucgccgccaaccagaccggcgcccgcugccucgaggucuccaucuccgacggccucuuccucucccucggccucgucucccucgucgagaacgcccucgucgucgccaccaucgccaagaaccgcaaccuccacucccccauguacugcuucaucugcugccucgcccucuccgaccuccucgucuccggcuccaacguccucgagaccgccgucauccuccuccucgaggccggcgcccucgucgcccgcgccgccguccuccagcagcucgacaacgucaucgacgucaucaccugcuccuccaugcucuccucccucugcuuccucggcgccaucgccgucgaccgcuacaucuccaucuucuacgcccuccgcuaccacuccaucgucacccucccccgcgcccgccgcgccgucgccgccaucugggucgccuccgucgucuucuccacccucuucaucgccuacuacgaccacgucgccguccuccucugccucgucgucuucuuccucgccaugcucguccucauggccguccucuacguccacaugcucgcccgcgccugccagcacgcccagggcaucgcccgccuccacaagcgccagcgccccguccaccagggcuucggccucaagggcgccgucacccucaccauccuccucggcaucuucuuccucugcuggggccccuucuuccuccaccucacccucaucguccucugccccgagcaccccaccugcggcugcaucuucaagaacuucaaccucuuccucgcccucaucaucugcaacgccaucaucgacccccucaucuacgccuuccacaaccaggagcuccgccgcacccucaaggagguccucaccugcuccugguga

SEQ ID NO: 2684 - RNA, 954 nt, Artificial Sequence
  derived and/or modified sequence opt3 from MC1_R__Homo_sapiens__AHC11840
auggccgugcagggcagccaaagaaggcugcucgggucccuuaacucuacccccacagcuaucccucagcugggauuggcagccaaucagacuggugcgcggugcuuagaggucucaauuagugacggccuguuccuaagccucgggcugguuucccuuguggaaaacgcucugguaguggccacgauagcaaagaaucgcaacuugcacucuccaauguacuguuuuaucugcugucucgcccugucggaucugcucgucucaggaagcaauguguuagagaccgcuguuauucugcuuuuggaagcaggcgcccugguggcucgagccgcgguccuacagcaacucgacaacgugaucgauguaauuacaugcaguuccaugcugucuagccuuuguuuccugggugcaaucgccguugaccguuauauauccaucuuuuacgcuuugagauaucauucaauugugacucucccgagggcccggcgcgcagucgcugccaucuggguggcgaguguggucuucagcacccuguuuauugccuacuaugaucacguugcaguguuacugugccucguaguguucuuucuugcuaugcuggucuugauggccgugcuauacguucauaugcuggcuagagccugucagcacgcacaggggaucgccaggcuccauaaacggcagcgccccgugcaccaaggauucggccugaagggcgcugucacacuuaccauacuguuggggaucuuuuuccucugcuggggaccauuuuuccugcacuuaacucugauugugcuauguccugagcaucccacaugcgguuguauuuuuaaaaauuucaaccucuuccuggcgcuuaucaucugcaaugcaauuauagacccuuugaucuaugccuuucacaaccaggaacugcgaagaacccucaaggagguacugacgugcucuugguga

SEQ ID NO: 2685 - RNA, 954 nt, Artificial Sequence
  derived and/or modified sequence opt4 from MC1_R__Homo_sapiens__AHC11840
auggccgugcagggcagccagagaagacugcugggcagccugaacagcacccccaccgccaucccccagcugggccuggccgccaaccagaccggcgccagaugccuggaggugagcaucagcgacggccuguuccugagccugggccuggugagccugguggagaacgcccuggugguggccaccaucgccaagaacagaaaccugcacagccccauguacugcuucaucugcugccuggcccugagcgaccugcuggugagcggcagcaacgugcuggagaccgccgugauccugcugcuggaggccggcgcccugguggccagagccgccgugcugcagcagcuggacaacgugaucgacgugaucaccugcagcagcaugcugagcagccugugcuuccugggcgccaucgccguggacagauacaucagcaucuucuacgcccugagauaccacagcaucgugacccugcccagagccagaagagccguggccgccaucuggguggccagcgugguguucagcacccuguucaucgccuacuacgaccacguggccgugcugcugugccuggugguguucuuccuggccaugcuggugcugauggccgugcuguacgugcacaugcuggccagagccugccagcacgcccagggcaucgccagacugcacaagagacagagacccgugcaccagggcuucggccugaagggcgccgugacccugaccauccugcugggcaucuucuuccugugcuggggccccuucuuccugcaccugacccugaucgugcugugccccgagcaccccaccugcggcugcaucuucaagaacuucaaccuguuccuggcccugaucaucugcaacgccaucaucgacccccugaucuacgccuuccacaaccaggagcugagaagaacccugaaggaggugcugaccugcagcugguga

SEQ ID NO: 2686 - RNA, 954 nt, Artificial Sequence
  derived and/or modified sequence opt5 from MC1_R__Homo_sapiens__AHC11840
auggccgugcagggcagccaaagacggcugcucgggucccugaacucuacccccacagcuaucccucagcuuggacuggccgcgaaucagacgggcgcucgcugccucgaggucagcauuuccgacgggcuguuccuuucucugggacucguuagccugguggaaaacgcccugguggucgccaccaucgcuaagaauagaaaccuccacuccccgauguacuguuuuauuugcugucuggcccuuucugaucugcucgugagcggcuccaauguucuggagacagcugugauccuucugcucgaagccggggcgcuggucgcccgggcugccgugcugcagcaacucgacaacguuauugaugugauuaccugcagcucuaugcuguccagccuuuguuuccugggagcuaucgccgucgaccgcuauaucucuaucuuuuacgcgcucagauaucauuccauugugacacugccccgggcccgcagagcuguggccgcuaucugggucgccagcguuguguucucuacccuuuuuauugccuacuaugaucacguggcuguccugcucugccuggugguuuucuuucuggcgaugcucgugcugauggccguccuuuacgugcauaugcuggcucgggccugucagcacgcccagggcaucgcucgccuccauaaaagacagcggccuguucaccaaggcuucgggcugaagggagccgugacacuuaccauucugcucggcaucuuuuuccugugcugggggcccuuuuuccugcaccucacgcugaucguccuuuguccugagcauccuaccugcggauguauuuuuaaaaauuucaaccuguuccucgcgcugaucauuugcaaugcuaucauugacccccugaucuaugccuuucacaaccaggaacuucgcagaacacucaaggaggugcugaccugcuccugguga

SEQ ID NO: 2687 - protein, 317 aa, Artificial Sequence [sequence omitted]

SEQ ID NO: 2688 - RNA, 954 nt, Artificial Sequence
  MC1_R__Homo_sapiens__AHC09665
auggcugugcagggaucccagagaagacuucugggcucccucaacuccacccccacagccaucccccagcuggggcuggcugccaaccagacaggagcccggugccuggagguguccaucucugacgggcucuuccucagccuggggcuggugagcuugguggagaacgcgcuggugguggccaccaucgccaagaaccggaaccugcacucacccauguacugcuucaucugcugccuggccuugucggaccugcuggugagcgggagcaacgugcuggagacggccgucauccuccugcuggaggccggugcacugguggcccgggcugcggugcugcagcagcuggacaaugucauugacaugaucaccugcagcuccaugcuguccagccucugcuuccugggcgccaucgccguggaccgcuacaucuccaucuucuacgcacugcgcuaccacagcaucgugacccugccgcgggcgcggcgagccguugcggccaucuggguggccagugucgucuucagcacgcucuucaucgccuacuacgaccacguggccguccugcugugccucguggucuucuuccuggcuaugcuggugcucauggccgugcuguacguccacaugcuggcccgggccugccagcacgcccagggcaucgcccggcuccacaagaggcagcgcccgguccaccagggcuuuggccuuaaaggcgcugucacccucaccauccugcugggcauuuucuuccucugcuggggccccuucuuccugcaucucacacucaucguccucugccccgagcaccccacgugcggcugcaucuucaagaacuucaaccucuuucucgcccucaucaucugcaaugccaucaucgacccccucaucuacgccuuccacagccaggagcuccgcaggacgcucaaggaggugcugacaugcuccugguga

SEQ ID NO: 2689 - RNA, 954 nt, Artificial Sequence
  derived and/or modified sequence opt1 from MC1_R__Homo_sapiens__AHC09665
auggccgugcagggcagccagcgccggcugcucgggucccugaacagcacccccaccgccaucccccagcugggccucgcggccaaccagacgggggcccgcugccuggaggucuccaucagcgacggccuguuccucucccuggggcuggugagccucguggagaacgcccuggucguggccaccaucgcgaagaaccggaaccugcacucccccauguacugcuucaucugcugccucgcccugagcgaccugcucguguccggcagcaacguccuggagaccgccgugauccugcuccuggaggccggcgcgcugguggcccgcgccgccguccuccagcagcuggacaacgugaucgacaugaucacgugcuccagcaugcuguccagccucugcuuccugggggccaucgcgguggaccgguacaucuccaucuucuacgcccugcgcuaccacagcaucgucacccucccccgggcccgccgggccguggccgcgaucuggguggccuccgucguguucagcacccuguucaucgccuacuacgaccacguggccguccugcucugccuggugguguucuuccuggccaugcucguccugauggcggugcuguacgugcacaugcucgcccgcgccugccagcacgcccagggcaucgcccggcugcacaagcgccagcggcccguccaccagggguucggccugaagggggcggugacccucaccauccugcugggcaucuucuuccucugcuggggcccguucuuccugcaccugacgcucaucguccugugccccgagcacccgaccugcgggugcaucuucaagaacuucaaccuguuccucgcccugaucaucugcaacgccaucaucgacccccugaucuacgccuuccacucccaggagcugcgccggacccucaaggaggugcugaccugcagcugguga

SEQ ID NO: 2690 - RNA, 954 nt, Artificial Sequence
  derived and/or modified sequence opt2 from MC1_R__Homo_sapiens__AHC09665
auggccguccagggcucccagcgccgccuccucggcucccucaacuccacccccaccgccaucccccagcucggccucgccgccaaccagaccggcgcccgcugccucgaggucuccaucuccgacggccucuuccucucccucggccucgucucccucgucgagaacgcccucgucgucgccaccaucgccaagaaccgcaaccuccacucccccauguacugcuucaucugcugccucgcccucuccgaccuccucgucuccggcuccaacguccucgagaccgccgucauccuccuccucgaggccggcgcccucgucgcccgcgccgccguccuccagcagcucgacaacgucaucgacaugaucaccugcuccuccaugcucuccucccucugcuuccucggcgccaucgccgucgaccgcuacaucuccaucuucuacgcccuccgcuaccacuccaucgucacccucccccgcgcccgccgcgccgucgccgccaucugggucgccuccgucgucuucuccacccucuucaucgccuacuacgaccacgucgccguccuccucugccucgucgucuucuuccucgccaugcucguccucauggccguccucuacguccacaugcucgcccgcgccugccagcacgcccagggcaucgcccgccuccacaagcgccagcgccccguccaccagggcuucggccucaagggcgccgucacccucaccauccuccucggcaucuucuuccucugcuggggccccuucuuccuccaccucacccucaucguccucugccccgagcaccccaccugcggcugcaucuucaagaacuucaaccucuuccucgcccucaucaucugcaacgccaucaucgacccccucaucuacgccuuccacucccaggagcuccgccgcacccucaaggagguccucaccugcuccugguga

SEQ ID NO: 2691 - RNA, 954 nt, Artificial Sequence
  derived and/or modified sequence opt3 from MC1_R__Homo_sapiens__AHC09665
auggccgugcagggcagccaaagaaggcugcucgggucccuuaacucuacccccacagcuaucccucagcugggauuggcagccaaucagacuggugcgcggugcuuagaggucucaauuagugacggccuguuccuaagccucgggcugguuucccuuguggaaaacgcucugguaguggccacgauagcaaagaaucgcaacuugcacucuccaauguacuguuuuaucugcugucucgcccugucggaucugcucgucucaggaagcaauguguuagagaccgcuguuauucugcuuuuggaagcaggcgcccugguggcucgagccgcgguccuacagcaacucgacaacgugaucgauaugauuacaugcaguuccaugcugucuagccuuuguuuccugggugcaaucgccguagaccguuauauauccaucuuuuacgcuuugagauaucauucaauuguuacucucccgagggcccggcgcgcaguggcugccaucugggucgcgagugugguguucagcacccuguuuauugccuacuaugaucacgucgcaguuuuacugugccucgugguauucuuucuugcuaugcugguguugauggccguccuauacgugcauaugcuggcuagagccugucagcacgcacaggggaucgccaggcuccauaaacggcagcgccccguucaccaaggauucggccugaagggcgcugugacacuuaccauacuguuggggaucuuuuuccucugcuggggaccauuuuuccugcacuuaacucugauuguccuauguccugagcaucccacaugcgguuguauuuuuaaaaauuucaaccucuuccuggcgcuuaucaucugcaaugcaauuauagacccuuugaucuaugccuuucacucucaggaacugcgaagaacccucaaggaggugcugacgugcuccugguga

SEQ ID NO: 2692 - RNA, 954 nt, Artificial Sequence
  derived and/or modified sequence opt4 from MC1_R__Homo_sapiens__AHC09665
auggccgugcagggcagccagagaagacugcugggcagccugaacagcacccccaccgccaucccccagcugggccuggccgccaaccagaccggcgccagaugccuggaggugagcaucagcgacggccuguuccugagccugggccuggugagccugguggagaacgcccuggugguggccaccaucgccaagaacagaaaccugcacagccccauguacugcuucaucugcugccuggcccugagcgaccugcuggugagcggcagcaacgugcuggagaccgccgugauccugcugcuggaggccggcgcccugguggccagagccgccgugcugcagcagcuggacaacgugaucgacaugaucaccugcagcagcaugcugagcagccugugcuuccugggcgccaucgccguggacagauacaucagcaucuucuacgcccugagauaccacagcaucgugacccugcccagagccagaagagccguggccgccaucuggguggccagcgugguguucagcacccuguucaucgccuacuacgaccacguggccgugcugcugugccuggugguguucuuccuggccaugcuggugcugauggccgugcuguacgugcacaugcuggccagagccugccagcacgcccagggcaucgccagacugcacaagagacagagacccgugcaccagggcuucggccugaagggcgccgugacccugaccauccugcugggcaucuucuuccugugcuggggccccuucuuccugcaccugacccugaucgugcugugccccgagcaccccaccugcggcugcaucuucaagaacuucaaccuguuccuggcccugaucaucugcaacgccaucaucgacccccugaucuacgccuuccacagccaggagcugagaagaacccugaaggaggugcugaccugcagcugguga

SEQ ID NO: 2693 - RNA, 954 nt, Artificial Sequence
  derived and/or modified sequence opt5 from MC1_R__Homo_sapiens__AHC09665
auggccgugcagggcagccaaagacggcugcucgggucccugaacucuacccccacagcuaucccucagcuuggacuggccgcgaaucagacgggcgcucgcugccucgaggucagcauuuccgacgggcuguuccuuucucugggacucguuagccugguggaaaacgcccugguggucgccaccaucgcuaagaauagaaaccuccacuccccgauguacuguuuuauuugcugucuggcccuuucugaucugcucgugagcggcuccaauguucuggagacagcugugauccuucugcucgaagccggggcgcuggucgcccgggcugccgugcugcagcaacucgacaacguuauugauaugauuaccugcagcucuaugcuguccagccuuuguuuccugggagcuaucgccguggaccgcuauaucucuaucuuuuacgcgcucagauaucauuccauugucacacugccccgggcccgcagagcuguggccgcuaucuggguggccagcgucguuuucucuacccuuuuuauugccuacuaugaucacguggcugugcugcucugccuggucguguucuuucuggcgaugcucguucugauggccgugcuuuacguccauaugcuggcucgggccugucagcacgcccagggcaucgcucgccuccauaaaagacagcggccugugcaccaaggcuucgggcugaagggagccguuacacuuaccauucugcucggcaucuuuuuccugugcugggggcccuuuuuccugcaccucacgcugaucgugcuuuguccugagcauccuaccugcggauguauuuuuaaaaauuucaaccuguuccucgcgcugaucauuugcaaugcuaucauugacccccugaucuaugccuuucacucccaggaacuucgcagaacacucaaggagguccugaccugcagcugguga

SEQ ID NO: 2694 - protein, 317 aa, Artificial Sequence [sequence omitted]

SEQ ID NO: 2695 - RNA, 954 nt, Artificial Sequence
  MC1_R__Homo_sapiens__AHC11324
auggcugugcagggaucccagagaagacuucugggcucccucaacuccacccccacagccaucccccagcuggggcuggcugccaaccagacaggagcccggugccuggagguguccaucucugacgggcucuuccucagccuggggcuggugagcuugguggagaacgcgcuggugguggccaccaucgccaagaaccggaaccugcacucacccauguacugcuucaucugcugccuggccuugucggaccugcuggugagcgggagcaacgugcuggagacggccgucauccuccugcuggaggccggugcacugguggcccgggcugcggugcugcagcagcuggacaaugucauugacgugaucaccugcagcuccaugcuguccagccucugcuuccugggcgccaucgccguggaccgcuacaucuccaucuucuacgcacugcgcuaccacagcaucgugacccugccgcgggcgcggcgagccguugcggccaucuggguggccagugucgucuucagcacgcucuucaucgccuacuacgaccacguggccguccugcugugccucguggucuucuuccuggcuaugcuggugcucauggccgugcuguacguccacaugcuggcccgggccugccagcacgcccagggcaucgcccggcuccacaagaggcagcgcccgguccaccagggcuuuggccuuaaaggcgcugucacccucaccauccugcugggcauuuucuuccucugcuggggccccuucuuccugcaucucacacucaucguccucugccccgagcaccccacgugcggcugcaucuucaagaacuucaaccucuuucucgcccucaucauccgcaaugccaucaucgacccccucaucuacgccuuccacagccaggagcuccgcaggacgcucaaggaggugcugacaugcuccugguga

SEQ ID NO: 2696 - RNA, 954 nt, Artificial Sequence
  derived and/or modified sequence opt1 from MC1_R__Homo_sapiens__AHC11324
auggccgugcagggcagccagcgccggcugcucgggucccugaacagcacccccaccgccaucccccagcugggccucgcggccaaccagacgggggcccgcugccuggaggucuccaucagcgacggccuguuccucucccuggggcuggugagccucguggagaacgcccuggucguggccaccaucgcgaagaaccggaaccugcacucccccauguacugcuucaucugcugccucgcccugagcgaccugcucguguccggcagcaacguccuggagaccgccgugauccugcuccuggaggccggcgcgcugguggcccgcgccgccguccuccagcagcuggacaacgugaucgacgugaucacgugcuccagcaugcuguccagccucugcuuccugggggccaucgcggucgaccgguacaucuccaucuucuacgcccugcgcuaccacagcaucgugacccucccccgggcccgccgggccguggccgcgaucugggucgccuccgugguguucagcacccuguucaucgccuacuacgaccacgucgccgugcugcucugccugguggucuucuuccuggccaugcucgugcugauggcggugcuguacguccacaugcucgcccgcgccugccagcacgcccagggcaucgcccggcugcacaagcgccagcggcccgugcaccagggguucggccugaagggggcggucacccucaccauccugcugggcaucuucuuccucugcuggggcccguucuuccugcaccugacgcucaucgugcugugccccgagcacccgaccugcgggugcaucuucaagaacuucaaccuguuccucgcccugaucauccgcaacgccaucaucgacccccugaucuacgccuuccacucccaggagcugcggcgcacccucaaggaggugcugaccugcagcugguga

SEQ ID NO: 2697 - RNA, 954 nt, Artificial Sequence
  derived and/or modified sequence opt2 from MC1_R__Homo_sapiens__AHC11324
auggccguccagggcucccagcgccgccuccucggcucccucaacuccacccccaccgccaucccccagcucggccucgccgccaaccagaccggcgcccgcugccucgaggucuccaucuccgacggccucuuccucucccucggccucgucucccucgucgagaacgcccucgucgucgccaccaucgccaagaaccgcaaccuccacucccccauguacugcuucaucugcugccucgcccucuccgaccuccucgucuccggcuccaacguccucgagaccgccgucauccuccuccucgaggccggcgcccucgucgcccgcgccgccguccuccagcagcucgacaacgucaucgacgucaucaccugcuccuccaugcucuccucccucugcuuccucggcgccaucgccgucgaccgcuacaucuccaucuucuacgcccuccgcuaccacuccaucgucacccucccccgcgcccgccgcgccgucgccgccaucugggucgccuccgucgucuucuccacccucuucaucgccuacuacgaccacgucgccguccuccucugccucgucgucuucuuccucgccaugcucguccucauggccguccucuacguccacaugcucgcccgcgccugccagcacgcccagggcaucgcccgccuccacaagcgccagcgccccguccaccagggcuucggccucaagggcgccgucacccucaccauccuccucggcaucuucuuccucugcuggggccccuucuuccuccaccucacccucaucguccucugccccgagcaccccaccugcggcugcaucuucaagaacuucaaccucuuccucgcccucaucauccgcaacgccaucaucgacccccucaucuacgccuuccacucccaggagcuccgccgcacccucaaggagguccucaccugcuccugguga

SEQ ID NO: 2698 - RNA, 954 nt, Artificial Sequence
  derived and/or modified sequence opt3 from MC1_R__Homo_sapiens__AHC11324
auggccgugcagggcagccaaagaaggcugcucgggucccuuaacucuacccccacagcuaucccucagcugggauuggcagccaaucagacuggugcgcggugcuuagaggucucaauuagugacggccuguuccuaagccucgggcugguuucccuuguggaaaacgcucugguaguggccacgauagcaaagaaucgcaacuugcacucuccaauguacuguuuuaucugcugucucgcccugucggaucugcucgucucaggaagcaauguguuagagaccgcuguuauucugcuuuuggaagcaggcgcccugguggcucgagccgcgguccuacagcaacucgacaacgugaucgauguaauuacaugcaguuccaugcugucuagccuuuguuuccugggugcaaucgccguugaccguuauauauccaucuuuuacgcuuugagauaucauucaauugugacucucccgagggcccggcgcgcagucgcugccaucuggguggcgaguguggucuucagcacccuguuuauugccuacuaugaucacguugcaguguuacugugccucguaguguucuuucuugcuaugcuggucuugauggccgugcuauacguucauaugcuggcuagagccugucagcacgcacaggggaucgccaggcuccauaaacggcagcgccccgugcaccaaggauucggccugaagggcgcugucacacuuaccauacuguuggggaucuuuuuccucugcuggggaccauuuuuccugcacuuaacucugauugugcuauguccugagcaucccacaugcgguuguauuuuuaaaaauuucaaccucuuccuggcgcuuaucauccgaaaugcaauuauagacccuuugaucuaugccuuucacucucaggaacugagaaggacccucaaggagguacugacgugcuccugguga

SEQ ID NO: 2699 - RNA, 954 nt, Artificial Sequence
  derived and/or modified sequence opt4 from MC1_R__Homo_sapiens__AHC11324
auggccgugcagggcagccagagaagacugcugggcagccugaacagcacccccaccgccaucccccagcugggccuggccgccaaccagaccggcgccagaugccuggaggugagcaucagcgacggccuguuccugagccugggccuggugagccugguggagaacgcccuggugguggccaccaucgccaagaacagaaaccugcacagccccauguacugcuucaucugcugccuggcccugagcgaccugcuggugagcggcagcaacgugcuggagaccgccgugauccugcugcuggaggccggcgcccugguggccagagccgccgugcugcagcagcuggacaacgugaucgacgugaucaccugcagcagcaugcugagcagccugugcuuccugggcgccaucgccguggacagauacaucagcaucuucuacgcccugagauaccacagcaucgugacccugcccagagccagaagagccguggccgccaucuggguggccagcgugguguucagcacccuguucaucgccuacuacgaccacguggccgugcugcugugccuggugguguucuuccuggccaugcuggugcugauggccgugcuguacgugcacaugcuggccagagccugccagcacgcccagggcaucgccagacugcacaagagacagagacccgugcaccagggcuucggccugaagggcgccgugacccugaccauccugcugggcaucuucuuccugugcuggggccccuucuuccugcaccugacccugaucgugcugugccccgagcaccccaccugcggcugcaucuucaagaacuucaaccuguuccuggcccugaucaucagaaacgccaucaucgacccccugaucuacgccuuccacagccaggagcugagaagaacccugaaggaggugcugaccugcagcugguga

SEQ ID NO: 2700 - RNA, 954 nt, Artificial Sequence
  derived and/or modified sequence opt5 from MC1_R__Homo_sapiens__AHC11324
auggccgugcagggcagccaaagacggcugcucgggucccugaacucuacccccacagcuaucccucagcuuggacuggccgcgaaucagacgggcgcucgcugccucgaggucagcauuuccgacgggcuguuccuuucucugggacucguuagccugguggaaaacgcccugguggucgccaccaucgcuaagaauagaaaccuccacuccccgauguacuguuuuauuugcugucuggcccuuucugaucugcucgugagcggcuccaauguucuggagacagcugugauccuucugcucgaagccggggcgcuggucgcccgggcugccgugcugcagcaacucgacaacguuauugaugugauuaccugcagcucuaugcuguccagccuuuguuuccugggagcuaucgccgucgaccgcuauaucucuaucuuuuacgcgcucagauaucauuccauugugacacugccccgggcccgcagagcuguggccgcuaucugggucgccagcguuguguucucuacccuuuuuauugccuacuaugaucacguggcuguccugcucugccuggugguuuucuuucuggcgaugcucgugcugauggccguccuuuacgugcauaugcuggcucgggccugucagcacgcccagggcaucgcucgccuccauaaaagacagcggccuguucaccaaggcuucgggcugaagggagccgugacacuuaccauucugcucggcaucuuuuuccugugcugggggcccuuuuuccugcaccucacgcugaucguccuuuguccugagcauccuaccugcggauguauuuuuaaaaauuucaaccuguuccucgcgcugaucauucgcaaugcuaucauugacccccugaucuaugccuuucacucccaggaacuuagacggacacucaaggaggugcugaccugcagcugguga

SEQ ID NO: 2701 - protein, 317 aa, Artificial Sequence [sequence omitted]

SEQ ID NO: 2702 - RNA, 954 nt, Artificial Sequence
  MC1_R__Homo_sapiens__AHC09521
auggcugugcagggaucccagagaagacuucugggcucccucaacuccacccccacagccaucccccagcuggggcuggcugccaaccagacaggagcccggugccuggagguguccaucucugacgggcucuuccucagccuggggcuggugagcuugguggagaacgcgcuggugguggccaccaucgccaagaaccggaaccugcacucacccauguacugcuucaucugcugccuggccuugucggaccugcuggugagcgggagcaacgugcuggagacggccgucauccuccugcuggaggccggugcacugguggcccgggcugcggugcugcagcagcuggacaaugucauugacgugaucaccugcagcuccaugcuguccagccucugcuuccugggcgccaucgccguggaccgcuacaucuccaucuucuacgcacugcgcuaccacagcaucgugacccugccgugggcgcggcgagccguugcggccaucuggguggccagugucgucuucagcacgcucuucaucgccuacuacgaccacguggccguccugcugugccucguggucuucuuccuggcuaugcuggugcucauggccgugcuguacguccacaugcuggcccgggccugccagcacgcccagggcaucgcccggcuccacaagaggcagcgcccgguccaccagggcuuuggccuuaaaggcgcugucacccucaccauccugcugggcauuuucuuccucugcuggggccccuucuuccugcaucucacacucaucguccucugccccgagcaccccacgugcggcugcaucuucaagaacuucaaccucuuucucgcccucaucaucugcaaugccaucaucgacccccucaucuacgccuuccacagccaggagcuccgcaggacgcucaaggaggugcugacaugcuccugguga

SEQ ID NO: 2703 - RNA, 954 nt, Artificial Sequence
  derived and/or modified sequence opt1 from MC1_R__Homo_sapiens__AHC09521
auggccgugcagggcagccagcgccggcugcucgggucccugaacagcacccccaccgccaucccccagcugggccucgcggccaaccagacgggggcccgcugccuggaggucuccaucagcgacggccuguuccucucccuggggcuggugagccucguggagaacgcccuggucguggccaccaucgcgaagaaccggaaccugcacucccccauguacugcuucaucugcugccucgcccugagcgaccugcucguguccggcagcaacguccuggagaccgccgugauccugcuccuggaggccggcgcgcugguggcccgcgccgccguccuccagcagcuggacaacgugaucgacgugaucacgugcuccagcaugcuguccagccucugcuuccugggggccaucgcggucgaccgguacaucuccaucuucuacgcccugcgcuaccacagcaucgugacccuccccugggcccggcgcgccguggccgcgaucugggucgccuccgugguguucagcacccuguucaucgccuacuacgaccacgucgccgugcugcucugccugguggucuucuuccuggccaugcucgugcugauggcggugcuguacguccacaugcucgcccgggccugccagcacgcccagggcaucgcccgccugcacaagcggcagcgccccgugcaccagggguucggccugaagggggcggucacccucaccauccugcugggcaucuucuuccucugcuggggcccguucuuccugcaccugacgcucaucgugcugugccccgagcacccgaccugcgggugcaucuucaagaacuucaaccuguuccucgcccugaucaucugcaacgccaucaucgacccccugaucuacgccuuccacucccaggagcugcggcgcacccucaaggaggugcugaccugcagcugguga

SEQ ID NO: 2704 - RNA, 954 nt, Artificial Sequence
  derived and/or modified sequence opt2 from MC1_R__Homo_sapiens__AHC09521
auggccguccagggcucccagcgccgccuccucggcucccucaacuccacccccaccgccaucccccagcucggccucgccgccaaccagaccggcgcccgcugccucgaggucuccaucuccgacggccucuuccucucccucggccucgucucccucgucgagaacgcccucgucgucgccaccaucgccaagaaccgcaaccuccacucccccauguacugcuucaucugcugccucgcccucuccgaccuccucgucuccggcuccaacguccucgagaccgccgucauccuccuccucgaggccggcgcccucgucgcccgcgccgccguccuccagcagcucgacaacgucaucgacgucaucaccugcuccuccaugcucuccucccucugcuuccucggcgccaucgccgucgaccgcuacaucuccaucuucuacgcccuccgcuaccacuccaucgucacccuccccugggcccgccgcgccgucgccgccaucugggucgccuccgucgucuucuccacccucuucaucgccuacuacgaccacgucgccguccuccucugccucgucgucuucuuccucgccaugcucguccucauggccguccucuacguccacaugcucgcccgcgccugccagcacgcccagggcaucgcccgccuccacaagcgccagcgccccguccaccagggcuucggccucaagggcgccgucacccucaccauccuccucggcaucuucuuccucugcuggggccccuucuuccuccaccucacccucaucguccucugccccgagcaccccaccugcggcugcaucuucaagaacuucaaccucuuccucgcccucaucaucugcaacgccaucaucgacccccucaucuacgccuuccacucccaggagcuccgccgcacccucaaggagguccucaccugcuccugguga

SEQ ID NO: 2705 - RNA, 954 nt, Artificial Sequence
  derived and/or modified sequence opt3 from MC1_R__Homo_sapiens__AHC09521
auggccgugcagggcagccaaagaaggcugcucgggucccuuaacucuacccccacagcuaucccucagcugggauuggcagccaaucagacuggugcgcggugcuuagaggucucaauuagugacggccuguuccuaagccucgggcugguuucccuuguggaaaacgcucugguaguggccacgauagcaaagaaucgcaacuugcacucuccaauguacuguuuuaucugcugucucgcccugucggaucugcucgucucaggaagcaauguguuagagaccgcuguuauucugcuuuuggaagcaggcgcccugguggcucgagccgcgguccuacagcaacucgacaacgugaucgauguaauuacaugcaguuccaugcugucuagccuuuguuuccugggugcaaucgccguugaccguuauauauccaucuuuuacgcuuugagauaucauucaauugugacucucccgugggccaggcgggcagucgcugccaucuggguggcgaguguggucuucagcacccuguuuauugccuacuaugaucacguugcaguguuacugugccucguaguguucuuucuugcuaugcuggucuugauggccgugcuauacguucauaugcuggcucgcgccugucagcacgcacaggggaucgccagacuccauaaaaggcagcggcccgugcaccaaggauucggccugaagggcgcugucacacuuaccauacuguuggggaucuuuuuccucugcuggggaccauuuuuccugcacuuaacucugauugugcuauguccugagcaucccacaugcgguuguauuuuuaaaaauuucaaccucuuccuggcgcuuaucaucugcaaugcaauuauagacccuuugaucuaugccuuucacucucaggaacugcgccgaacccucaaggagguacugacgugcuccugguga

SEQ ID NO: 2706 - RNA, 954 nt, Artificial Sequence
  derived and/or modified sequence opt4 from MC1_R__Homo_sapiens__AHC09521
auggccgugcagggcagccagagaagacugcugggcagccugaacagcacccccaccgccaucccccagcugggccuggccgccaaccagaccggcgccagaugccuggaggugagcaucagcgacggccuguuccugagccugggccuggugagccugguggagaacgcccuggugguggccaccaucgccaagaacagaaaccugcacagccccauguacugcuucaucugcugccuggcccugagcgaccugcuggugagcggcagcaacgugcuggagaccgccgugauccugcugcuggaggccggcgcccugguggccagagccgccgugcugcagcagcuggacaacgugaucgacgugaucaccugcagcagcaugcugagcagccugugcuuccugggcgccaucgccguggacagauacaucagcaucuucuacgcccugagauaccacagcaucgugacccugcccugggccagaagagccguggccgccaucuggguggccagcgugguguucagcacccuguucaucgccuacuacgaccacguggccgugcugcugugccuggugguguucuuccuggccaugcuggugcugauggccgugcuguacgugcacaugcuggccagagccugccagcacgcccagggcaucgccagacugcacaagagacagagacccgugcaccagggcuucggccugaagggcgccgugacccugaccauccugcugggcaucuucuuccugugcuggggccccuucuuccugcaccugacccugaucgugcugugccccgagcaccccaccugcggcugcaucuucaagaacuucaaccuguuccuggcccugaucaucugcaacgccaucaucgacccccugaucuacgccuuccacagccaggagcugagaagaacccugaaggaggugcugaccugcagcugguga

SEQ ID NO: 2707 - RNA, 954 nt, Artificial Sequence
  derived and/or modified sequence opt5 from MC1_R__Homo_sapiens__AHC09521
auggccgugcagggcagccaaagacggcugcucgggucccugaacucuacccccacagcuaucccucagcuuggacuggccgcgaaucagacgggcgcucgcugccucgaggucagcauuuccgacgggcuguuccuuucucugggacucguuagccugguggaaaacgcccugguggucgccaccaucgcuaagaauagaaaccuccacuccccgauguacuguuuuauuugcugucuggcccuuucugaucugcucgugagcggcuccaauguucuggagacagcugugauccuucugcucgaagccggggcgcuggucgcccgggcugccgugcugcagcaacucgacaacguuauugaugugauuaccugcagcucuaugcuguccagccuuuguuuccugggagcuaucgccgucgaccgcuauaucucuaucuuuuacgcgcucagauaucauuccauugugacacugcccugggcccggcgcgcuguggccgcuaucugggucgccagcguuguguucucuacccuuuuuauugccuacuaugaucacguggcuguccugcucugccuggugguuuucuuucuggcgaugcucgugcugauggccguccuuuacgugcauaugcuggcuagagccugucagcacgcccagggcaucgcucggcuccauaaacgccagagaccuguucaccaaggcuucgggcugaagggagccgugacacuuaccauucugcucggcaucuuuuuccugugcugggggcccuuuuuccugcaccucacgcugaucguccuuuguccugagcauccuaccugcggauguauuuuuaaaaauuucaaccuguuccucgcgcugaucauuugcaaugcuaucauugacccccugaucuaugccuuucacucccaggaacuucggcgcacacucaaggaggugcugaccugcagcugguga

SEQ ID NO: 2708 - protein, 317 aa, Artificial Sequence [sequence omitted]

SEQ ID NO: 2709 - RNA, 954 nt, Artificial Sequence
  MC1_R__Homo_sapiens__AHC11794
auggcugugcagggaucccagagaagacuucugggcucccucaacuccacccccacagccaucccccagcuggggcuggcugccaaccagacaggagcccggugccuggagguguccaucucugacgggcucuuccucagccuggggcuggugagcuugguggagaacgcgcuggugguggccaccaucgccaagaaccggaaccugcacucacccauguacugcuucaucugcugccuggccuugucggaccugcuggugagcgggagcaacgugcuggagacggccgucauccuccugcuggaggccggugcacugguggcccgggcugcggugcugcagcagcuggacaaugucauugacgugaucaccugcagcuccaugcuguccagccucugcuuccugggcgccaucgccguggaccgcuacaucuccaucuucuacgcacugcgcuaccacagcaucgugacccugccgcgggcgcggcgagccguugcggccaucuggguggccagugucgucuucagcacgcucuucaucgccuacuacgaccacguggccguccugcugugccucguggucuucuuccuggcuaugcuggugcucauggccgugcuguacguccacaugcuggcccgggccugccagcacgcccagggcaucgcccggcuccacaagaggcagcgcccgguccaccagggcuuuggccuuaaaggcgcugucacccucaccauccugcugggcauuuucuuccucugcuggggccccuucuuccugcaucucacacucaucguccucugccccgagcaccccgagugcggcugcaucuucaagaacuucaaccucuuucucgcccucaucaucugcaaugccaucaucgacccccucaucuacgccuuccacagccaggagcuccgcaggacgcucaaggaggugcugacaugcuccugguga

SEQ ID NO: 2710 - RNA, 954 nt, Artificial Sequence
  derived and/or modified sequence opt1 from MC1_R__Homo_sapiens__AHC11794
auggccgugcagggcagccagcgccggcugcucgggucccugaacagcacccccaccgccaucccgcagcugggccucgcggccaaccagacgggggcccgcugccuggaggucuccaucagcgacggccuguuccucucccuggggcuggugagccucguggagaacgcccuggucguggccaccaucgcgaagaaccggaaccugcacucccccauguacugcuucaucugcugccucgcccugagcgaccugcucguguccggcagcaacguccuggagaccgccgugauccugcuccuggaggccggcgcgcugguggcccgcgccgccguccuccagcagcuggacaacgugaucgacgugaucacgugcuccagcaugcuguccagccucugcuuccugggggccaucgcggucgaccgguacaucuccaucuucuacgcccugcgcuaccacagcaucgugacccucccccgggcccgccgggccguggccgcgaucugggucgccuccgugguguucagcacccuguucaucgccuacuacgaccacgucgccgugcugcucugccugguggucuucuuccuggccaugcucgugcugauggcggugcuguacguccacaugcucgcccgcgccugccagcacgcccagggcaucgcccggcugcacaagcgccagcggcccgugcaccagggguucggccugaagggggcggucacccucaccauccugcugggcaucuucuuccucugcuggggcccguucuuccugcaccugacgcucaucgugcugugccccgagcaccccgagugcgggugcaucuucaagaacuucaaccuguuccucgcccugaucaucugcaacgccaucaucgacccccugaucuacgccuuccacucccaggagcugcgccggacccucaaggaggugcugaccugcagcugguga

SEQ ID NO: 2711 - RNA, 954 nt, Artificial Sequence
  derived and/or modified sequence opt2 from MC1_R__Homo_sapiens__AHC11794
auggccguccagggcucccagcgccgccuccucggcucccucaacuccacccccaccgccaucccccagcucggccucgccgccaaccagaccggcgcccgcugccucgaggucuccaucuccgacggccucuuccucucccucggccucgucucccucgucgagaacgcccucgucgucgccaccaucgccaagaaccgcaaccuccacucccccauguacugcuucaucugcugccucgcccucuccgaccuccucgucuccggcuccaacguccucgagaccgccgucauccuccuccucgaggccggcgcccucgucgcccgcgccgccguccuccagcagcucgacaacgucaucgacgucaucaccugcuccuccaugcucuccucccucugcuuccucggcgccaucgccgucgaccgcuacaucuccaucuucuacgcccuccgcuaccacuccaucgucacccucccccgcgcccgccgcgccgucgccgccaucugggucgccuccgucgucuucuccacccucuucaucgccuacuacgaccacgucgccguccuccucugccucgucgucuucuuccucgccaugcucguccucauggccguccucuacguccacaugcucgcccgcgccugccagcacgcccagggcaucgcccgccuccacaagcgccagcgccccguccaccagggcuucggccucaagggcgccgucacccucaccauccuccucggcaucuucuuccucugcuggggccccuucuuccuccaccucacccucaucguccucugccccgagcaccccgagugcggcugcaucuucaagaacuucaaccucuuccucgcccucaucaucugcaacgccaucaucgacccccucaucuacgccuuccacucccaggagcuccgccgcacccucaaggagguccucaccugcuccugguga

SEQ ID NO: 2712 - RNA, 954 nt, Artificial Sequence
  derived and/or modified sequence opt3 from MC1_R__Homo_sapiens__AHC11794
auggccgugcagggcagccaaagaaggcugcucgggucccuuaacucuacccccacagcuaucccucagcugggauuggcagccaaucagacuggugcgcggugcuuagaggucucaauuagugacggccuguuccuaagccucgggcugguuucccuuguggaaaacgcucugguaguggccacgauagcaaagaaucgcaacuugcacucuccaauguacuguuuuaucugcugucucgcccugucggaucugcucgucucaggaagcaauguguuagagaccgcuguuauucugcuuuuggaagcaggcgcccugguggcucgagccgcgguccuacagcaacucgacaacgugaucgauguaauuacaugcaguuccaugcugucuagccuuuguuuccugggugcaaucgccguugaccguuauauauccaucuuuuacgcuuugagauaucauucaauugugacucucccgagggcccggcgcgcagucgcugccaucuggguggcgaguguggucuucagcacccuguuuauugccuacuaugaucacguugcaguguuacugugccucguaguguucuuucuugcuaugcuggucuugauggccgugcuauacguucauaugcuggcuagagccugucagcacgcacaggggaucgccaggcuccauaaacggcagcgccccgugcaccaaggauucggccugaagggcgcugucacacuuaccauacuguuggggaucuuuuuccucugcuggggaccauuuuuccugcacuuaacucugauugugcuauguccugagcaucccgaaugcgguuguauuuuuaaaaauuucaaccucuuccuggcgcuuaucaucugcaaugcaauuauagacccuuugaucuaugccuuucacucucaggagcugcgaagaacacucaaggagguacugaccugcuccugguga

SEQ ID NO: 2713 - RNA, 954 nt, Artificial Sequence
  derived and/or modified sequence opt4 from MC1_R__Homo_sapiens__AHC11794
auggccgugcagggcagccagagaagacugcugggcagccugaacagcacccccaccgccaucccccagcugggccuggccgccaaccagaccggcgccagaugccuggaggugagcaucagcgacggccuguuccugagccugggccuggugagccugguggagaacgcccuggugguggccaccaucgccaagaacagaaaccugcacagccccauguacugcuucaucugcugccuggcccugagcgaccugcuggugagcggcagcaacgugcuggagaccgccgugauccugcugcuggaggccggcgcccugguggccagagccgccgugcugcagcagcuggacaacgugaucgacgugaucaccugcagcagcaugcugagcagccugugcuuccugggcgccaucgccguggacagauacaucagcaucuucuacgcccugagauaccacagcaucgugacccugcccagagccagaagagccguggccgccaucuggguggccagcgugguguucagcacccuguucaucgccuacuacgaccacguggccgugcugcugugccuggugguguucuuccuggccaugcuggugcugauggccgugcuguacgugcacaugcuggccagagccugccagcacgcccagggcaucgccagacugcacaagagacagagacccgugcaccagggcuucggccugaagggcgccgugacccugaccauccugcugggcaucuucuuccugugcuggggccccuucuuccugcaccugacccugaucgugcugugccccgagcaccccgagugcggcugcaucuucaagaacuucaaccuguuccuggcccugaucaucugcaacgccaucaucgacccccugaucuacgccuuccacagccaggagcugagaagaacccugaaggaggugcugaccugcagcugguga

SEQ ID NO: 2714 - RNA, 954 nt, Artificial Sequence
  derived and/or modified sequence opt5 from MC1_R__Homo_sapiens__AHC11794
auggccgugcagggcagccaaagacggcugcucgggucccugaacucuacccccacagcuaucccucagcuuggacuggccgcgaaucagacgggcgcucgcugccucgaggucagcauuuccgacgggcuguuccuuucucugggacucguuagccugguggaaaacgcccugguggucgccaccaucgcuaagaauagaaaccuccacuccccgauguacuguuuuauuugcugucuggcccuuucugaucugcucgugagcggcuccaauguucuggagacagcugugauccuucugcucgaagccggggcgcuggucgcccgggcugccgugcugcagcaacucgacaacguuauugaugugauuaccugcagcucuaugcuguccagccuuuguuuccugggagcuaucgccgucgaccgcuauaucucuaucuuuuacgcgcucagauaucauuccauugugacacugccccgggcccgcagagcuguggccgcuaucugggucgccagcguuguguucucuacccuuuuuauugccuacuaugaucacguggcuguccugcucugccuggugguuuucuuucuggcgaugcucgugcugauggccguccuuuacgugcauaugcuggcucgggccugucagcacgcccagggcaucgcucgccuccauaaaagacagcggccuguucaccaaggcuucgggcugaagggagccgugacacuuaccauucugcucggcaucuuuuuccugugcugggggcccuuuuuccugcaccucacgcugaucguccuuuguccugagcaucccgaaugcggauguauuuuuaaaaauuucaaccuguuccucgcgcugaucauuugcaaugcuaucauugacccucugaucuaugccuuucacucccaggagcuucgcagaacccucaaggaggugcugacaugcagcugguga

SEQ ID NO: 2715 - protein, 317 aa, Artificial Sequence [sequence omitted]

SEQ ID NO: 2716 - RNA, 954 nt, Artificial Sequence
  MC1_R__Homo_sapiens__AHC10874
auggcugugcagggaucccagagaagacuucugggcucccucaacuccacccccacagccaucccccagcuggggcuggcugccaaccagacaggagcccggugccuggagguguccaucucugacgggcucuuccucagccuggggcuggugagcuugguggagaacgcgcuggugguggccaccaucgccaagaaccggaaccugcacucacccauguacugcuucaucugcugccuggccuugucggaacugcuggugagcgggagcaacgugcuggagacggccgucauccuccugcuggaggccggugcacugguggcccgggcugcggugcugcagcagcuggacaaugucauugacgugaucaccugcagcuccaugcuguccagccucugcuuccugggcgccaucgccguggaccgcuacaucuccaucuucuacgcacugcgcuaccacagcaucgugacccugccgcgggcgcggcgagccguugcggccaucuggguggccagugucgucuucagcacgcucuucaucgccuacuacgaccacguggccguccugcugugccucguggucuucuuccuggcuaugcuggugcucauggccgugcuguacguccacaugcuggcccgggccugccagcacgcccagggcaucgcccggcuccacaagaggcagcgcccgguccaccagggcuuuggccuuaaaggcgcugucacccucaccauccugcugggcauuuucuuccucugcuggggccccuucuuccugcaucucacacucaucguccucugccccgagcaccccacgugcggcugcaucuucaagaacuucaaccucuuucucgcccucaucaucugcaaugccaucaucgacccccucaucuacgccuuccacagccaggagcuccgcaggacgcucaaggaggugcugacaugcuccugguga

SEQ ID NO: 2717 - RNA, 954 nt, Artificial Sequence
  derived and/or modified sequence opt1 from MC1_R__Homo_sapiens__AHC10874
auggccgugcagggcagccagcgccggcugcucgggucccugaacagcacccccaccgccaucccccagcugggccucgcggccaaccagacgggggcccgcugccuggaggucuccaucagcgacggccuguuccucucccuggggcuggugagccucguggagaacgcccuggucguggccaccaucgcgaagaaccggaaccugcacucccccauguacugcuucaucugcugccucgcccugagcgagcugcucguguccggcagcaacguccuggagaccgccgugauccugcuccuggaggccggcgcgcugguggcccgcgccgccguccuccagcagcuggacaacgugaucgacgugaucacgugcuccagcaugcuguccagccucugcuuccugggggccaucgcggucgaccgguacaucuccaucuucuacgcccugcgcuaccacagcaucgugacccucccccgggcccgccgggccguggccgcgaucugggucgccuccgugguguucagcacccuguucaucgccuacuacgaccacgucgccgugcugcucugccugguggucuucuuccuggccaugcucgugcugauggcggugcuguacguccacaugcucgcccgcgccugccagcacgcccagggcaucgcccggcugcacaagcgccagcggcccgugcaccagggguucggccugaagggggcggucacccucaccauccugcugggcaucuucuuccucugcuggggcccguucuuccugcaccugacgcucaucgugcugugccccgagcacccgaccugcgggugcaucuucaagaacuucaaccuguuccucgcccugaucaucugcaacgccaucaucgacccccugaucuacgccuuccacucccaggagcugcgccggacccucaaggaggugcugaccugcagcugguga

SEQ ID NO: 2718 - RNA, 954 nt, Artificial Sequence
  derived and/or modified sequence opt2 from MC1_R__Homo_sapiens__AHC10874
auggccguccagggcucccagcgccgccuccucggcucccucaacuccacccccaccgccaucccccagcucggccucgccgccaaccagaccggcgcccgcugccucgaggucuccaucuccgacggccucuuccucucccucggccucgucucccucgucgagaacgcccucgucgucgccaccaucgccaagaaccgcaaccuccacucccccauguacugcuucaucugcugccucgcccucuccgagcuccucgucuccggcuccaacguccucgagaccgccgucauccuccuccucgaggccggcgcccucgucgcccgcgccgccguccuccagcagcucgacaacgucaucgacgucaucaccugcuccuccaugcucuccucccucugcuuccucggcgccaucgccgucgaccgcuacaucuccaucuucuacgcccuccgcuaccacuccaucgucacccucccccgcgcccgccgcgccgucgccgccaucugggucgccuccgucgucuucuccacccucuucaucgccuacuacgaccacgucgccguccuccucugccucgucgucuucuuccucgccaugcucguccucauggccguccucuacguccacaugcucgcccgcgccugccagcacgcccagggcaucgcccgccuccacaagcgccagcgccccguccaccagggcuucggccucaagggcgccgucacccucaccauccuccucggcaucuucuuccucugcuggggccccuucuuccuccaccucacccucaucguccucugccccgagcaccccaccugcggcugcaucuucaagaacuucaaccucuuccucgcccucaucaucugcaacgccaucaucgacccccucaucuacgccuuccacucccaggagcuccgccgcacccucaaggagguccucaccugcuccugguga

SEQ ID NO: 2719 - RNA, 954 nt, Artificial Sequence
  derived and/or modified sequence opt3 from MC1_R__Homo_sapiens__AHC10874
auggccgugcagggcagccaaagaaggcugcucgggucccuuaacucuacccccacagcuaucccucagcugggauuggcagccaaucagacuggugcgcggugcuuagaggucucaauuagugacggccuguuccuaagccucgggcugguuucccuuguggaaaacgcucugguaguggccacgauagcaaagaaucgcaacuugcacucuccaauguacuguuuuaucugcugucucgcccugucggagcugcucgucucaggaagcaauguguuagaaaccgcuguuauucugcuuuuggaggcaggcgcccugguggcucgagccgcgguccuacagcaacucgauaacgugaucgacguaauuacaugcaguuccaugcugucuagccuuuguuuccugggugcaaucgccguugaucguuauauauccaucuuuuacgcuuugagauaucauucaauugugacucucccgagggcccggcgcgcagucgcugccaucuggguggcgaguguggucuucagcacccuguuuauugccuacuaugaccacguugcaguguuacugugccucguaguguucuuucuugcuaugcuggucuugauggccgugcuauacguucauaugcuggcuagagccugucagcacgcacaggggaucgccaggcuccauaaacggcagcgccccgugcaccaaggauucggccugaagggcgcugucacacuuaccauacuguuggggaucuuuuuccucugcuggggaccauuuuuccugcacuuaacucugauugugcuauguccugaacaucccacaugcgguuguauuuuuaaaaauuucaaccucuuccuggcgcuuaucaucugcaaugcaauuauagauccuuugaucuaugccuuucacucucaggagcugcgaagaacccucaaggagguacugacgugcuccugguga

SEQ ID NO: 2720 - RNA, 954 nt, Artificial Sequence
  derived and/or modified sequence opt4 from MC1_R__Homo_sapiens__AHC10874
auggccgugcagggcagccagagaagacugcugggcagccugaacagcacccccaccgccaucccccagcugggccuggccgccaaccagaccggcgccagaugccuggaggugagcaucagcgacggccuguuccugagccugggccuggugagccugguggagaacgcccuggugguggccaccaucgccaagaacagaaaccugcacagccccauguacugcuucaucugcugccuggcccugagcgagcugcuggugagcggcagcaacgugcuggagaccgccgugauccugcugcuggaggccggcgcccugguggccagagccgccgugcugcagcagcuggacaacgugaucgacgugaucaccugcagcagcaugcugagcagccugugcuuccugggcgccaucgccguggacagauacaucagcaucuucuacgcccugagauaccacagcaucgugacccugcccagagccagaagagccguggccgccaucuggguggccagcgugguguucagcacccuguucaucgccuacuacgaccacguggccgugcugcugugccuggugguguucuuccuggccaugcuggugcugauggccgugcuguacgugcacaugcuggccagagccugccagcacgcccagggcaucgccagacugcacaagagacagagacccgugcaccagggcuucggccugaagggcgccgugacccugaccauccugcugggcaucuucuuccugugcuggggccccuucuuccugcaccugacccugaucgugcugugccccgagcaccccaccugcggcugcaucuucaagaacuucaaccuguuccuggcccugaucaucugcaacgccaucaucgacccccugaucuacgccuuccacagccaggagcugagaagaacccugaaggaggugcugaccugcagcugguga

SEQ ID NO: 2721 - RNA, 954 nt, Artificial Sequence
  derived and/or modified sequence opt5 from MC1_R__Homo_sapiens__AHC10874
auggccgugcagggcagccaaagacggcugcucgggucccugaacucuacccccacagcuaucccucagcuuggacuggccgcgaaucagacgggcgcucgcugccucgaggucagcauuuccgacgggcuguuccuuucucugggacucguuagccugguggaaaacgcccugguggucgccaccaucgcuaagaauagaaaccuccacuccccgauguacuguuuuauuugcugucuggcccuuucugagcugcucgugagcggcuccaauguucuggaaacagcugugauccuucugcucgaggccggggcgcuggucgcccgggcugccgugcugcagcaacucgauaacguuauugacgugauuaccugcagcucuaugcuguccagccuuuguuuccugggagcuaucgccgucgaucgcuauaucucuaucuuuuacgcgcucagauaucauuccauugugacacugccccgggcccgcagagcuguggccgcuaucugggucgccagcguuguguucucuacccuuuuuauugccuacuaugaccacguggcuguccugcucugccuggugguuuucuuucuggcgaugcucgugcugauggccguccuuuacgugcauaugcuggcucgggccugucagcacgcccagggcaucgcucgccuccauaaaagacagcggccuguucaccaaggcuucgggcugaagggagccgugacacuuaccauucugcucggcaucuuuuuccugugcugggggcccuuuuuccugcaccucacgcugaucguccuuuguccugaacauccuaccugcggauguauuuuuaaaaauuucaaccuguuccucgcgcugaucauuugcaaugcuaucauugauccccugaucuaugccuuucacucccaggagcuucgcagaacacucaaggaggugcugaccugcagcugguga

SEQ ID NO: 2722 - protein, 317 aa, Artificial Sequence [sequence omitted]

SEQ ID NO: 2723 - RNA, 954 nt, Artificial Sequence
  MC1_R__Homo_sapiens__AHC09597
auggcugugcagggaucccagagaagacuucugggcucccucaacuccacccccacagccaucccccagcuggggcuggcugccaaccagacaggagcccggugccuggagguguccaucucugacgggcucuuccucagccuggggcuggugagcuugguggagaacgcgcuggugguggccaccaucgccaagaaccggaaccugcacucacccauguacugcuucaucugcugccuggccuugucggaccugcuggugagcgggagcaacgugcuggagacggccgucauccuccugcuggaggccggugcacugguggcccgggcugcggugcugcagcagcuggacaaugucauugacgugaucaccugcagcuccaugcuguccagccucugcuuccugggcgccaucgccguggaccgcuacaucuccaucuucuacgcacugugcuaccacagcaucgugacccugccgcgggcgcggcgagccguugcggccaucuggguggccagugucgucuucagcacgcucuucaucgccuacuacgaccacguggccguccugcugugccucguggucuucuuccuggcuaugcuggugcucauggccgugcuguacguccacaugcuggcccgggccugccagcacgcccagggcaucgcccggcuccacaagaggcagcgcccgguccaccagggcuuuggccuuaaaggcgcugucacccucaccauccugcugggcauuuucuuccucugcuggggccccuucuuccugcaucucacacucaucguccucugccccgagcaccccacgugcggcugcaucuucaagaacuucaaccucuuucucgcccucaucaucugcaaugccaucaucgacccccucaucuacgccuuccacagccaggagcuccgcaggacgcucaaggaggugcugacaugcuccugguga

SEQ ID NO: 2724 - RNA, 954 nt, Artificial Sequence
  derived and/or modified sequence opt1 from MC1_R__Homo_sapiens__AHC09597
auggccgugcagggcagccagcgccggcugcucgggucccugaacagcacccccaccgccaucccccagcugggccucgcggccaaccagacgggggcccgcugccuggaggucuccaucagcgacggccuguuccucucccuggggcuggugagccucguggagaacgcccuggucguggccaccaucgcgaagaaccggaaccugcacucccccauguacugcuucaucugcugccucgcccugagcgaccugcucguguccggcagcaacguccuggagaccgccgugauccugcuccuggaggccggcgcgcugguggcccgcgccgccguccuccagcagcuggacaacgugaucgacgugaucacgugcuccagcaugcuguccagccucugcuuccugggggccaucgcggucgaccgguacaucuccaucuucuacgcccugugcuaccacagcaucgugacccucccccgcgcccggcgcgccguggccgcgaucugggucgccuccgugguguucagcacccuguucaucgccuacuacgaccacgucgccgugcugcucugccugguggucuucuuccuggccaugcucgugcugauggcggugcuguacguccacaugcucgcccgggccugccagcacgcccagggcaucgcccgccugcacaagcggcagcgccccgugcaccagggguucggccugaagggggcggucacccucaccauccugcugggcaucuucuuccucugcuggggcccguucuuccugcaccugacgcucaucgugcugugccccgagcacccgaccugcgggugcaucuucaagaacuucaaccuguuccucgcccugaucaucugcaacgccaucaucgacccccugaucuacgccuuccacucccaggagcugcggcgcacccucaaggaggugcugaccugcagcugguga

SEQ ID NO: 2725 - RNA, 954 nt, Artificial Sequence
  derived and/or modified sequence opt2 from MC1_R__Homo_sapiens__AHC09597
auggccguccagggcucccagcgccgccuccucggcucccucaacuccacccccaccgccaucccccagcucggccucgccgccaaccagaccggcgcccgcugccucgaggucuccaucuccgacggccucuuccucucccucggccucgucucccucgucgagaacgcccucgucgucgccaccaucgccaagaaccgcaaccuccacucccccauguacugcuucaucugcugccucgcccucuccgaccuccucgucuccggcuccaacguccucgagaccgccgucauccuccuccucgaggccggcgcccucgucgcccgcgccgccguccuccagcagcucgacaacgucaucgacgucaucaccugcuccuccaugcucuccucccucugcuuccucggcgccaucgccgucgaccgcuacaucuccaucuucuacgcccucugcuaccacuccaucgucacccucccccgcgcccgccgcgccgucgccgccaucugggucgccuccgucgucuucuccacccucuucaucgccuacuacgaccacgucgccguccuccucugccucgucgucuucuuccucgccaugcucguccucauggccguccucuacguccacaugcucgcccgcgccugccagcacgcccagggcaucgcccgccuccacaagcgccagcgccccguccaccagggcuucggccucaagggcgccgucacccucaccauccuccucggcaucuucuuccucugcuggggccccuucuuccuccaccucacccucaucguccucugccccgagcaccccaccugcggcugcaucuucaagaacuucaaccucuuccucgcccucaucaucugcaacgccaucaucgacccccucaucuacgccuuccacucccaggagcuccgccgcacccucaaggagguccucaccugcuccugguga

SEQ ID NO: 2726 - RNA, 954 nt, Artificial Sequence
  derived and/or modified sequence opt3 from MC1_R__Homo_sapiens__AHC09597
auggccgugcagggcagccaaagaaggcugcucgggucccuuaacucuacccccacagcuaucccucagcugggauuggcagccaaucagacuggugcgcggugcuuagaggucucaauuagugacggccuguuccuaagccucgggcugguuucccuuguggaaaacgcucugguaguggccacgauagcaaagaaucgcaacuugcacucuccaauguacuguuuuaucugcugucucgcccugucggaucugcucgucucaggaagcaauguguuagagaccgcuguuauucugcuuuuggaagcaggcgcccugguggcucgagccgcgguccuacagcaacucgacaacgugaucgauguaauuacaugcaguuccaugcugucuagccuuuguuuccugggugcaaucgccguugaccguuauauauccaucuuuuacgcuuugugcuaucauucaauugugacucucccgagagccaggcgggcagucgcugccaucuggguggcgaguguggucuucagcacccuguuuauugccuacuaugaucacguugcaguguuacugugucucguaguguucuuucuugcuaugcuggucuugauggccgugcuauacguucauaugcuggcucgcgccugccagcacgcacaggggaucgccagacuccauaaaaggcagcggcccgugcaccaaggauucggccugaagggcgcugucacacuuaccauacuguuggggaucuuuuuccucuguuggggaccauuuuuccugcacuuaacucugauugugcuaugcccugagcaucccacaugugguugcauuuuuaaaaauuucaaccucuuccuggcgcuuaucaucugcaaugcaauuauagacccuuugaucuaugccuuucacucucaggaacugcgccgaacccucaaggagguacugacguguuccugguga

SEQ ID NO: 2727 - RNA, 954 nt, Artificial Sequence
  derived and/or modified sequence opt4 from MC1_R__Homo_sapiens__AHC09597
auggccgugcagggcagccagagaagacugcugggcagccugaacagcacccccaccgccaucccccagcugggccuggccgccaaccagaccggcgccagaugccuggaggugagcaucagcgacggccuguuccugagccugggccuggugagccugguggagaacgcccuggugguggccaccaucgccaagaacagaaaccugcacagccccauguacugcuucaucugcugccuggcccugagcgaccugcuggugagcggcagcaacgugcuggagaccgccgugauccugcugcuggaggccggcgcccugguggccagagccgccgugcugcagcagcuggacaacgugaucgacgugaucaccugcagcagcaugcugagcagccugugcuuccugggcgccaucgccguggacagauacaucagcaucuucuacgcccugugcuaccacagcaucgugacccugcccagagccagaagagccguggccgccaucuggguggccagcgugguguucagcacccuguucaucgccuacuacgaccacguggccgugcugcugugccuggugguguucuuccuggccaugcuggugcugauggccgugcuguacgugcacaugcuggccagagccugccagcacgcccagggcaucgccagacugcacaagagacagagacccgugcaccagggcuucggccugaagggcgccgugacccugaccauccugcugggcaucuucuuccugugcuggggccccuucuuccugcaccugacccugaucgugcugugccccgagcaccccaccugcggcugcaucuucaagaacuucaaccuguuccuggcccugaucaucugcaacgccaucaucgacccccugaucuacgccuuccacagccaggagcugagaagaacccugaaggaggugcugaccugcagcugguga

SEQ ID NO: 2728 - RNA, 954 nt, Artificial Sequence
  derived and/or modified sequence opt5 from MC1_R__Homo_sapiens__AHC09597
auggccgugcagggcagccaaagacggcugcucgggucccugaacucuacccccacagcuaucccucagcuuggacuggccgcgaaucagacgggcgcucgcugccucgaggucagcauuuccgacgggcuguuccuuucucugggacucguuagccugguggaaaacgcccugguggucgccaccaucgcuaagaauagaaaccuccacuccccgauguacuguuuuauuugcugucuggcccuuucugaucugcucgugagcggcuccaauguucuggagacagcugugauccuucugcucgaagccggggcgcuggucgcccgggcugccgugcugcagcaacucgacaacguuauugaugugauuaccugcagcucuaugcuguccagccuuuguuuccugggagcuaucgccgucgaccgcuauaucucuaucuuuuacgcgcucugcuaucauuccauugugacacugcccagagcccggcgcgcuguggccgcuaucugggucgccagcguuguguucucuacccuuuuuauugccuacuaugaucacguggcuguccugcucugucuggugguuuucuuucuggcgaugcucgugcugauggccguccuuuacgugcauaugcuggcuagagccugccagcacgcccagggcaucgcucggcuccauaaacgccagagaccuguucaccaaggcuucgggcugaagggagccgugacacuuaccauucugcucggcaucuuuuuccuguguugggggcccuuuuuccugcaccucacgcugaucguccuuugcccugagcaucccaccuguggaugcauuuuuaaaaauuucaaccuguuccucgcgcugaucauuugcaaugcuaucauugacccucugaucuaugccuuucacucccaggaacuucggcgcacacucaaggaggugcugaccuguagcugguga

SEQ ID NO: 2729 - protein, 630 aa, Artificial Sequence
  mesothelin__Homo_sapiens__Q13421
MALPTARPLLGSCGTPALGSLLFLLFSLGWVQPSRTLAGETGQEAAPLDGVLANPPNISSLSPRQLLGFPCAEVSGLSTERVRELAVALAQKNVKLSTEQLRCLAHRLSEPPEDLDALPLDLLLFLNPDAFSGPQACTRFFSRITKANVDLLPRGAPERQRLLPAALACWGVRGSLLSEADVRALGGLACDLPGRFVAESAEVLLPRLVSCPGPLDQDQQEAARAALQGGGPPYGPPSTWSVSTMDALRGLLPVLGQPIIRSIPQGIVAAWRQRSSRDPSWRQPERTILRPRFRREVEKTACPSGKKAREIDESLIFYKKWELEACVDAALLATQMDRVNAIPFTYEQLDVLKHKLDELYPQGYPESVIQHLGYLFLKMSPEDIRKWNVTSLETLKALLEVNKGHEMSPQAPRRPLPQVATLIDRFVKGRGQLDKDTLDTLTAFYPGYLCSLSPEELSSVPPSSIWAVRPQDLDTCDPRQLDVLYPKARLAFQNMNGSEYFVKIQSFLGGAPTEDLKALSQQNVSMDLATFMKLRTDAVLPLTVAEVQKLLGPHVEGLKAEERHRPVRDWILRQRQDDLDTLGLGLQGGIPNGYLVLDLSMQEALSGTPCLLGPGPVLTVLALLLASTLA

SEQ ID NO: 2730 - RNA, 1893 nt, Artificial Sequence
  mesothelin__Homo_sapiens__EAW85719
auggccuugccaacggcucgaccccuguugggguccugugggacccccgcccucggcagccuccuguuccugcucuucagccucggaugggugcagcccucgaggacccuggcuggagagacagggcaggaggcugcgccccuggacggaguccuggccaacccaccuaacauuuccagccucuccccucgccaacuccuuggcuucccgugugcggagguguccggccugagcacggagcguguccgggagcuggcuguggccuuggcacagaagaaugucaagcucucaacagagcagcugcgcugucuggcucaccggcucucugagccccccgaggaccuggacgcccucccauuggaccugcugcuauuccucaacccagaugcguucucggggccccaggccugcacccguuucuucucccgcaucacgaaggccaauguggaccugcucccgaggggggcucccgagcgacagcggcugcugccugcggcucuggccugcuggggugugcgggggucucugcugagcgaggcugaugugcgggcucugggaggccuggcuugcgaccugccugggcgcuuuguggccgagucggccgaagugcugcuaccccggcuggugagcugcccgggaccccuggaccaggaccagcaggaggcagccagggcggcucugcagggcgggggaccccccuacggccccccgucgacauggucugucuccacgauggacgcucugcggggccugcugcccgugcugggccagcccaucauccgcagcaucccgcagggcaucguggccgcguggcggcaacgcuccucucgggacccauccuggcggcagccugaacggaccauccuccggccgcgguuccggcgggaaguggagaagacagccuguccuucaggcaagaaggcccgcgagauagacgagagccucaucuucuacaagaagugggagcuggaagccugcguggaugcggcccugcuggccacccagauggaccgcgugaacgccauccccuucaccuacgagcagcuggacguccuaaagcauaaacuggaugagcucuacccacaagguuaccccgagucugugauccagcaccugggcuaccucuuccucaagaugagcccugaggacauucgcaaguggaaugugacgucccuggagacccugaaggcuuugcuugaagucaacaaagggcacgaaaugaguccucaggcuccucggcggccccucccacagguggccacccugaucgaccgcuuugugaagggaaggggccagcuagacaaagacacccuagacacccugaccgccuucuacccuggguaccugugcucccucagccccgaggagcugagcuccgugccccccagcagcaucugggcggucaggccccaggaccuggacacgugugacccaaggcagcuggacguccucuaucccaaggcccgccuugcuuuccagaacaugaacggguccgaauacuucgugaagauccaguccuuccuggguggggcccccacggaggauuugaaggcgcucagucagcagaaugugagcauggacuuggccacguucaugaagcugcggacggaugcggugcugccguugacuguggcugaggugcagaaacuucugggaccccacguggagggccugaaggcggaggagcggcaccgcccggugcgggacuggauccuacggcagcggcaggacgaccuggacacgcuggggcuggggcuacagggcggcauccccaacggcuaccugguccuagaccucagcaugcaagaggcccucucggggacgcccugccuccuaggaccuggaccuguucucaccguccuggcacugcuccuagccuccacccuggccuga

SEQ ID NO: 2731 - RNA, 1893 nt, Artificial Sequence
  derived and/or modified sequence opt1 from mesothelin__Homo_sapiens__EAW85719
auggcccugcccaccgcccgcccgcuccugggcagcugcgggacccccgcgcugggcucccuccuguuccuccuguucagccuggggugggugcagcccucccggacgcuggccggcgagaccgggcaggaggccgcgccccucgacggcguccuggccaacccgcccaacaucagcucccugagcccccgccagcuccugggcuuccccugcgccgagguguccgggcugagcaccgagcgggugcgcgagcucgccgucgcccuggcccagaagaacgugaagcuguccaccgagcagcuccggugccuggcgcaccgccugagcgagccgcccgaggaccucgacgcccugccccuggaccuccugcuguuccucaaccccgacgccuucuccggcccgcaggccugcacgcgguucuucagccgcaucaccaaggccaacguggaccugcugccccgcggggcgcccgagcggcagcggcuccugcccgccgcccuggccugcuggggcguccgcgggucccuccugagcgaggccgacgugcgggcgcugggcggccucgccugcgaccugccggggcgcuucguggccgaguccgccgagguccugcucccccggcuggugagcugccccggcccccuggaccaggaccagcaggaggccgcgcgcgccgcccuccagggcgggggcccgcccuacgggccgcccuccaccuggagcguguccaccauggacgcccugcggggccugcuccccguccuggggcagcccaucauccgcagcaucccccagggcaucguggccgcguggcggcagcgcagcucccgggaccccagcuggcgccagccggagcgcacgauccugcggccccgcuuccggcgcgagguggagaagaccgccugccccuccgggaagaaggcccgggagaucgacgagagccucaucuucuacaagaagugggagcuggaggccugcgucgacgcggcccugcuggccacccagauggaccgcgugaacgccaucccguucaccuacgagcagcucgacgugcugaagcacaagcuggacgagcucuacccccagggcuaccccgaguccgucauccagcaccugggcuaccuguuccucaagaugagccccgaggacauccggaaguggaacgugacgucccuggagacccugaaggcccuccuggaggugaacaaggggcacgagaugagcccgcaggcgccccgccggccccugccccaggucgccacccucaucgaccgcuucgugaagggccgggggcagcuggacaaggacacccuggacacgcucaccgccuucuacccgggcuaccugugcucccugagccccgaggagcucuccagcgugccgcccuccagcaucugggccguccgcccccaggaccuggacacgugcgacccccggcagcuggacgugcucuaccccaaggcccgccuggcguuccagaacaugaacggguccgaguacuucgucaagauccagagcuuccugggcggcgcccccaccgaggaccucaaggcccugucccagcagaacgugagcauggaccuggccaccuucaugaagcuccggaccgacgccgugcugccgcugaccgucgcggaggugcagaagcuccuggggccccacguggagggccugaaggccgaggagcgccaccggcccguccgcgacuggauccuccggcagcgccaggacgaccuggacacccuggggcucggccugcagggcgggauccccaacggcuaccuggugcucgaccuguccaugcaggaggcccugagcgggacgccgugccuccugggccccgggcccgugcugaccguccucgcccugcugcucgcgagcacccuggccuga

SEQ ID NO: 2732 - RNA, 1893 nt, Artificial Sequence
  derived and/or modified sequence opt2 from mesothelin__Homo_sapiens__EAW85719
auggcccuccccaccgcccgcccccuccucggcuccugcggcacccccgcccucggcucccuccucuuccuccucuucucccucggcuggguccagcccucccgcacccucgccggcgagaccggccaggaggccgccccccucgacggcguccucgccaacccccccaacaucuccucccucuccccccgccagcuccucggcuuccccugcgccgaggucuccggccucuccaccgagcgcguccgcgagcucgccgucgcccucgcccagaagaacgucaagcucuccaccgagcagcuccgcugccucgcccaccgccucuccgagccccccgaggaccucgacgcccucccccucgaccuccuccucuuccucaaccccgacgccuucuccggcccccaggccugcacccgcuucuucucccgcaucaccaaggccaacgucgaccuccucccccgcggcgcccccgagcgccagcgccuccuccccgccgcccucgccugcuggggcguccgcggcucccuccucuccgaggccgacguccgcgcccucggcggccucgccugcgaccuccccggccgcuucgucgccgaguccgccgagguccuccucccccgccucgucuccugccccggcccccucgaccaggaccagcaggaggccgcccgcgccgcccuccagggcggcggcccccccuacggcccccccuccaccugguccgucuccaccauggacgcccuccgcggccuccuccccguccucggccagcccaucauccgcuccaucccccagggcaucgucgccgccuggcgccagcgcuccucccgcgaccccuccuggcgccagcccgagcgcaccauccuccgcccccgcuuccgccgcgaggucgagaagaccgccugccccuccggcaagaaggcccgcgagaucgacgagucccucaucuucuacaagaagugggagcucgaggccugcgucgacgccgcccuccucgccacccagauggaccgcgucaacgccauccccuucaccuacgagcagcucgacguccucaagcacaagcucgacgagcucuacccccagggcuaccccgaguccgucauccagcaccucggcuaccucuuccucaagaugucccccgaggacauccgcaaguggaacgucaccucccucgagacccucaaggcccuccucgaggucaacaagggccacgagauguccccccaggccccccgccgcccccucccccaggucgccacccucaucgaccgcuucgucaagggccgcggccagcucgacaaggacacccucgacacccucaccgccuucuaccccggcuaccucugcucccucucccccgaggagcucuccuccgucccccccuccuccaucugggccguccgcccccaggaccucgacaccugcgacccccgccagcucgacguccucuaccccaaggcccgccucgccuuccagaacaugaacggcuccgaguacuucgucaagauccaguccuuccucggcggcgcccccaccgaggaccucaaggcccucucccagcagaacgucuccauggaccucgccaccuucaugaagcuccgcaccgacgccguccucccccucaccgucgccgagguccagaagcuccucggcccccacgucgagggccucaaggccgaggagcgccaccgccccguccgcgacuggauccuccgccagcgccaggacgaccucgacacccucggccucggccuccagggcggcauccccaacggcuaccucguccucgaccucuccaugcaggaggcccucuccggcacccccugccuccucggccccggccccguccucaccguccucgcccuccuccucgccuccacccucgccuga

SEQ ID NO: 2733 - RNA, 1893 nt, Artificial Sequence
  derived and/or modified sequence opt3 from mesothelin__Homo_sapiens__EAW85719
auggcccugcccaccgcuagaccucuccuuggcagcugcgggacaccagcacugggauccuuguuauuccugcuauuuucucucgguugggugcagccgucaaggacucuggccggcgagacggggcaagaagcggcuccccuugacggaguccuggccaacccuccaaauaucaguagcuugucuccccggcagcuccugggcuucccuugugcagagguuuccggucugucgaccgaacgcgugcgagagcucgccguagcuuuagcacagaagaacgugaaacugucaacagaacagcuucguugcuuggcccacagacugagcgagccacccgaggaucuagacgcucucccucuggaucuucuguuguuucucaauccagacgccuucagugggccgcaagcguguacuagguuuuucucccggauuaccaaggcaaacgucgaucuguuaccccgcggagccccugaaagacagaggcugcucccagcugcccuugcaugcuggggcgugcggggcucucuguugagcgaggcugacguucgcgcccuagggggacuggcgugugaucuccccggucgauuuguggccgaauccgcagagguccugcuuccuagacuggugucaugcccaggccccuuggaccaggaucagcaagaggcugccagggcugcccuccaagggggaggcccgccuuacggucccccaaguacauggagcguaucuaccauggacgcacugcggggguuacugccuguucuaggacagcccauaauccguuccauuccacagggcaucguggccgcuuggcgccagagaucaagcagggaucccaguuggcggcagccugaacgaacuauucuccgcccaagauucaggcgggaggucgaaaagacagcguguccgucuggcaagaaagcacgcgagaucgacgaaucccugauauuuuauaagaagugggagcuugaggccugcguggaugcugccuugcuggcaacccagauggacagagugaaugccauccccuucacguacgaacaacucgacguccugaaacauaaacuugaugagcuguauccucagggguacccagaaagcguuauucagcacuugggauaucucuuucugaaaaugucgcccgaggacaucaggaaguggaacgugacuucuuuagaaacccugaaagcucuacucgagguaaauaagggucaugagauguccccucaggccccacgucggccccugccgcaaguggcaacacuuauugaucgauucgucaagggcagagggcaguuggacaaagauacucuggacacccucacagcguuuuacccuggauaucuguguucauuaaguccagaggaacugagcuccgugcccccuucuagcaucugggcuguuaggccccaggaucuugauaccugcgacccacgccaguuggacgugcucuacccuaaggcccggcuggcauuccaaaacaugaauggcucagaauacuucgucaaaauacagaguuuucuagguggggcccccacggaggaucugaaggcucucucccagcagaacgugagcauggaccuggccacuuucaugaaacuuagaacagacgcaguauugccacugaccguugcugaagugcaaaaguuacucggcccgcacgucgagggacugaaagccgaggaaaggcaucgcccugugcgagauuggauucuucggcagcgucaggacgaucuggacacuuugggccucgggcugcagggagguauccccaauggcuaucuaguccuggaucucucuaugcaagaggcgcugucagggacaccaugucuuuugggacccggcccugugcugaccguuuuagcccuccugcuugcuaguacgcuggcauga

SEQ ID NO: 2734 - RNA, 1893 nt, Artificial Sequence
  derived and/or modified sequence opt4 from mesothelin__Homo_sapiens__EAW85719
auggcccugcccaccgccagaccccugcugggcagcugcggcacccccgcccugggcagccugcuguuccugcuguucagccugggcugggugcagcccagcagaacccuggccggcgagaccggccaggaggccgccccccuggacggcgugcuggccaacccccccaacaucagcagccugagccccagacagcugcugggcuuccccugcgccgaggugagcggccugagcaccgagagagugagagagcuggccguggcccuggcccagaagaacgugaagcugagcaccgagcagcugagaugccuggcccacagacugagcgagccccccgaggaccuggacgcccugccccuggaccugcugcuguuccugaaccccgacgccuucagcggcccccaggccugcaccagauucuucagcagaaucaccaaggccaacguggaccugcugcccagaggcgcccccgagagacagagacugcugcccgccgcccuggccugcuggggcgugagaggcagccugcugagcgaggccgacgugagagcccugggcggccuggccugcgaccugcccggcagauucguggccgagagcgccgaggugcugcugcccagacuggugagcugccccggcccccuggaccaggaccagcaggaggccgccagagccgcccugcagggcggcggcccccccuacggcccccccagcaccuggagcgugagcaccauggacgcccugagaggccugcugcccgugcugggccagcccaucaucagaagcaucccccagggcaucguggccgccuggagacagagaagcagcagagaccccagcuggagacagcccgagagaaccauccugagacccagauucagaagagagguggagaagaccgccugccccagcggcaagaaggccagagagaucgacgagagccugaucuucuacaagaagugggagcuggaggccugcguggacgccgcccugcuggccacccagauggacagagugaacgccauccccuucaccuacgagcagcuggacgugcugaagcacaagcuggacgagcuguacccccagggcuaccccgagagcgugauccagcaccugggcuaccuguuccugaagaugagccccgaggacaucagaaaguggaacgugaccagccuggagacccugaaggcccugcuggaggugaacaagggccacgagaugagcccccaggcccccagaagaccccugccccagguggccacccugaucgacagauucgugaagggcagaggccagcuggacaaggacacccuggacacccugaccgccuucuaccccggcuaccugugcagccugagccccgaggagcugagcagcgugccccccagcagcaucugggccgugagaccccaggaccuggacaccugcgaccccagacagcuggacgugcuguaccccaaggccagacuggccuuccagaacaugaacggcagcgaguacuucgugaagauccagagcuuccugggcggcgcccccaccgaggaccugaaggcccugagccagcagaacgugagcauggaccuggccaccuucaugaagcugagaaccgacgccgugcugccccugaccguggccgaggugcagaagcugcugggcccccacguggagggccugaaggccgaggagagacacagacccgugagagacuggauccugagacagagacaggacgaccuggacacccugggccugggccugcagggcggcauccccaacggcuaccuggugcuggaccugagcaugcaggaggcccugagcggcacccccugccugcugggccccggccccgugcugaccgugcuggcccugcugcuggccagcacccuggccuga

SEQ ID NO: 2735 - RNA, 1893 nt, Artificial Sequence
  derived and/or modified sequence opt5 from mesothelin__Homo_sapiens__EAW85719
auggcccugcccaccgcuagaccucuccugggcagcugcgggacaccggcccuuggaucccuucucuuccugcuguuuucucugggcugggugcagcccagccggacgcucgcgggggagaccggacaagaagcugccccucuggacggcguccuggccaaucccccuaacaucuccucucucagcccccgccagcugcuuggguucccuugugcugagguuuccggacugucuacagaaagagugcgggagcucgccguggcucuggcccagaagaacgucaaacuuagcaccgaacagcugcgcugccucgcgcacagacuguccgagccgcccgaggaucuggacgcccucccucuggaucuucugcucuuucugaaucccgacgcuuucagcggcccucaagccuguacacgguuuuucucucgcauuaccaaggcuaacguggaucuucugcccagaggcgccccggaacggcagcgccuccugccugcggcccuggcuugcuggggcguuagaggaucccuccugagcgaggccgacgugcgggcucuuggcgggcuggccugugaucuccccggacgcuuugucgccgaaucugcugaggugcugcuuccuagacugguuuccugccccggcccccucgaccaggaucagcaagaggcggcccgggcugcccugcaagggggaggcccuccguacgggcccccuagcacauggucuguguccaccauggacgcccugcgcgggcuccugcccguccuuggacagccuaucauuagaagcaucccccagggcauuguggcugccuggcggcagagauccucucgcgauccgagcuggcggcagccugaaagaacgauccugcgcccccgguucagacgcgagguggagaaaaccgcguguccuuccgggaagaaagcucgggagaucgacgaaagccucaucuuuuauaagaagugggagcuggaggccugcgucgaugccgcucugcuugccacacagauggacagaguuaaugcuauucccuucaccuacgaacaacucgacgugcugaaacauaagcuggaugagcucuauccucagggauaccccgaaucugugauucagcaccugggcuaucuuuuucugaaaauguccccggaggacauccgcaaguggaacgucacaagccucgaaacccugaaagcccugcuugaggugaauaaggggcaugagaugucuccucaggcgccccggagaccccucccucaaguugccacgcugauugaucgcuucgugaagggacggggccagcuggacaaagauacacucgacacccugacagcuuuuuacccgggcuaucuuuguagccugucccccgaagaacucucuagcgucccucccuccagcaucugggccgugagaccucaggaucuggauaccugcgacccccggcagcuggacguucuuuacccuaaggcucgccucgccuuccaaaacaugaaugggucugaauacuucgugaaaauucaguccuuucugggaggcgcgcccaccgaggaucugaaggcccucagccagcagaacgucucuauggaccuggcuacauucaugaaacuuagaacggacgccgugcugccgcucaccgucgcugaagugcaaaagcugcuggggccucacguugagggacuuaaagccgaggaacggcauagacccgugcgcgauuggauccuccggcagagacaggacgaucuggacacacugggccucgggcugcagggcggaaucccuaauggcuaucuuguccuggaucucuccaugcaagaggcccugagcgggacccccugucugcuuggaccgggcccugugcugacaguucucgcucugcuccuggcguccacccuugccuga

SEQ ID NO: 2736 - protein, 504 aa, Artificial Sequence
  MITF__Homo_sapiens__O75030-8
MEALRVQMFMPCSFESLYLSSAEHPGASKPPISSSSMTSRILLRQQLMREQMQEQERREQQQKLQAAQFMQQRVPVSQTPAINVSVPTTLPSATQVPMEVLKVQTHLENPTKYHIQQAQRQQVKQYLSTTLANKHANQVLSLPCPNQPGDHVMPPVPGSSAPNSPMAMLTLNSNCEKEGFYKFEEQNRAESECPGMNTHSRASCMQMDDVIDDIISLESSYNEEILGLMDPALQMANTLPVSGNLIDLYGNQGLPPPGLTISNSCPANLPNIKRELTESEARALAKERQKKDNHNLIERRRRFNINDRIKELGTLIPKSNDPDMRWNKGTILKASVDYIRKLQREQQRAKELENRQKKLEHANRHLLLRIQELEMQARAHGLSLIPSTGLCSPDLVNRIIKQEPVLENCSQDLLQHHADLTCTTTLDLTDGTITFNNNLGTGTEANQAYSVPTKMGSKLEDILMDDTLSPVGVTDPLLSSVSPGASKTSSRRSSMSMEETEHTC

SEQ ID NO: 2737 - RNA, 1515 nt, Artificial Sequence
  MITF__Homo_sapiens__CCDS46865.1
auggaggcgcuuagaguucagauguucaugccaugcuccuuugaaagcuuguaucucaguuccgccgagcauccuggggccuccaagccuccgauaagcuccuccaguaugacaucacgcaucuugcuacgccagcaacucaugcgugagcagaugcaggagcaggagcgcagggagcagcagcagaagcugcaggcggcccaguucaugcaacagagagugcccgugagucagacaccagccauaaacgucagugugcccaccacccuucccucugccacgcaggugccgauggaaguccuuaaggugcagacccaccucgaaaaccccaccaaguaccacauacagcaagcccaacggcagcagguaaagcaguaccuuucuaccacuuuagcaaauaaacaugccaaccaaguccugagcuugccauguccaaaccagccuggcgaucaugucaugccaccggugccggggagcagcgcacccaacagccccauggcuaugcuuacgcuuaacuccaacugugaaaaagagggauuuuauaaguuugaagagcaaaacagggcagagagcgagugcccaggcaugaacacacauucacgagcguccuguaugcagauggaugauguaaucgaugacaucauuagccuagaaucaaguuauaaugaggaaaucuugggcuugauggauccugcuuugcaaauggcaaauacguugccugucucgggaaacuugauugaucuuuauggaaaccaaggucugcccccaccaggccucaccaucagcaacuccuguccagccaaccuucccaacauaaaaagggagcucacagagucugaagcaagagcacuggccaaagagaggcagaaaaaggacaaucacaaccugauugaacgaagaagaagauuuaacauaaaugaccgcauuaaagaacuagguacuuugauucccaagucaaaugauccagacaugcgcuggaacaagggaaccaucuuaaaagcauccguggacuauauccgaaaguugcaacgagaacagcaacgcgcaaaagaacuugaaaaccgacagaagaaacuggagcacgccaaccggcauuuguugcucagaauacaggaacuugaaaugcaggcucgagcucauggacuuucccuuauuccauccacgggucucugcucuccagauuuggugaaucggaucaucaagcaagaacccguucuugagaacugcagccaagaccuccuucagcaucaugcagaccuaaccuguacaacaacucucgaucucacggauggcaccaucaccuucaacaacaaccucggaacugggacugaggccaaccaagccuauaguguccccacaaaaaugggauccaaacuggaagacauccugauggacgacacccuuucucccgucggugucacugauccacuccuuuccucagugucccccggagcuuccaaaacaagcagccggaggagcaguaugagcauggaagagacggagcacacuuguuag

SEQ ID NO: 2738 - RNA, 1515 nt, Artificial Sequence
  derived and/or modified sequence opt1 from MITF__Homo_sapiens__CCDS46865.1
auggaggcccugcgcgugcagauguucaugcccugcagcuucgagucccucuaccugagcuccgccgagcacccgggcgcgagcaagccgcccaucuccagcuccagcaugaccucccggauccugcuccgccagcagcugaugcgggagcagaugcaggagcaggagcgccgggagcagcagcagaagcugcaggccgcccaguucaugcagcagcgcguccccgugagccagacccccgccaucaacguguccguccccaccacccuccccagcgccacccaggugcccauggaggugcugaagguccagacccaccuggagaacccgacgaaguaccacauccagcaggcgcagcggcagcaggucaagcaguaccucuccaccacccuggccaacaagcacgccaaccaggugcugagccuccccugccccaaccagcccggggaccacgugaugccgcccgugcccggcuccagcgcccccaacuccccgauggcgaugcugacccugaacagcaacugcgagaaggagggguucuacaaguucgaggagcagaaccgcgccgaguccgagugccccggcaugaacacgcacagccgggccagcugcaugcagauggacgacgugaucgacgacaucaucucccucgagagcuccuacaacgaggagauccuggggcugauggaccccgcccuccagauggccaacacccugcccgucagcggcaaccugaucgaccucuacggcaaccaggggcugccgccgcccggccugaccaucuccaacagcugccccgcgaaccuccccaacaucaagcgcgagcugaccgaguccgaggcccgggcccuggccaaggagcgccagaagaaggacaaccacaaccucaucgagcggcgccggcgcuucaacaucaacgaccggaucaaggagcuggggacgcugauccccaagagcaacgaccccgacaugcgcuggaacaagggcaccauccucaaggccuccguggacuacauccggaagcugcagcgcgagcagcagcgggcgaaggagcuggagaaccgccagaagaagcucgagcacgccaaccgccaccuccugcuccggauccaggagcuggagaugcaggcccgcgcccacgggcugagccucauccccuccaccggccugugcagcccggaccuggugaaccggaucaucaagcaggagcccguccucgagaacugcucccaggaccugcugcagcaccacgccgaccugaccugcacgaccacccuggaccugaccgacggcacgaucaccuucaacaacaaccucgggaccggcaccgaggcgaaccaggccuacagcgugcccacgaagaugggguccaagcuggaggacauccugauggacgacacccugagcccggugggcgucaccgacccccuccuguccagcgugucccccggcgccagcaagaccagcucccgccggagcuccaugagcauggaggagacggagcacacgugcuga

SEQ ID NO: 2739 - RNA, 1515 nt, Artificial Sequence
  derived and/or modified sequence opt2 from MITF__Homo_sapiens__CCDS46865.1
auggaggcccuccgcguccagauguucaugcccugcuccuucgagucccucuaccucuccuccgccgagcaccccggcgccuccaagccccccaucuccuccuccuccaugaccucccgcauccuccuccgccagcagcucaugcgcgagcagaugcaggagcaggagcgccgcgagcagcagcagaagcuccaggccgcccaguucaugcagcagcgcguccccgucucccagacccccgccaucaacgucuccguccccaccacccuccccuccgccacccagguccccauggagguccucaagguccagacccaccucgagaaccccaccaaguaccacauccagcaggcccagcgccagcaggucaagcaguaccucuccaccacccucgccaacaagcacgccaaccagguccucucccuccccugccccaaccagcccggcgaccacgucaugccccccguccccggcuccuccgcccccaacucccccauggccaugcucacccucaacuccaacugcgagaaggagggcuucuacaaguucgaggagcagaaccgcgccgaguccgagugccccggcaugaacacccacucccgcgccuccugcaugcagauggacgacgucaucgacgacaucaucucccucgaguccuccuacaacgaggagauccucggccucauggaccccgcccuccagauggccaacacccuccccgucuccggcaaccucaucgaccucuacggcaaccagggccuccccccccccggccucaccaucuccaacuccugccccgccaaccuccccaacaucaagcgcgagcucaccgaguccgaggcccgcgcccucgccaaggagcgccagaagaaggacaaccacaaccucaucgagcgccgccgccgcuucaacaucaacgaccgcaucaaggagcucggcacccucauccccaaguccaacgaccccgacaugcgcuggaacaagggcaccauccucaaggccuccgucgacuacauccgcaagcuccagcgcgagcagcagcgcgccaaggagcucgagaaccgccagaagaagcucgagcacgccaaccgccaccuccuccuccgcauccaggagcucgagaugcaggcccgcgcccacggccucucccucauccccuccaccggccucugcucccccgaccucgucaaccgcaucaucaagcaggagcccguccucgagaacugcucccaggaccuccuccagcaccacgccgaccucaccugcaccaccacccucgaccucaccgacggcaccaucaccuucaacaacaaccucggcaccggcaccgaggccaaccaggccuacuccguccccaccaagaugggcuccaagcucgaggacauccucauggacgacacccucucccccgucggcgucaccgacccccuccucuccuccgucucccccggcgccuccaagaccuccucccgccgcuccuccauguccauggaggagaccgagcacaccugcuga

SEQ ID NO: 2740 - RNA, 1515 nt, Artificial Sequence
  derived and/or modified sequence opt3 from MITF__Homo_sapiens__CCDS46865.1
auggaggcccugagagugcagauguucaugcccugcagcuuugaaucccucuaccuuucuucagcugagcacccuggcgcaaguaagccaccgaucagcuccucuucgaugaccucaaggauucuguugcggcaacaguuaaugcgcgaacagaugcaggagcaagaacgacgugagcagcagcagaaacugcaagccgcgcaguucaugcagcagagaguccccguuagccaaacuccugcuauaaacgugaguguaccaacaacgcuacccuccgccacccaggugccuauggagguccucaaggugcagacacaucuggaaaauccaacuaaauaucacauccaacaggcacagaggcagcaaguuaagcaguaccuuucuaccacacuggccaacaaacaugcuaaucagguguugagccuccccuguccuaaccagccaggggaccacgucaugccgcccgugccuggauccucagcaccaaauagucccauggccaugcugacccugaacagcaauugcgagaaggaagguuuuuauaaguucgaggagcaaaaccgggcugaaucugaguguccuggcaugaauacucauucccgcgccucaugcaugcagauggaugacguaauugaugacaucauuagccucgaaaguucuuacaacgaggaaaucuuagggcugauggauccagcgcuucagauggcaaauacauugcccguuuccggaaaccugauagaccuauauggcaaucagggucucccgccucccgggcugaccaucagcaacucguguccagccaaucuuccuaacauuaaaagagagcugacggagucugaagcuagggccuuggcaaaggagcggcagaaaaaggauaaccacaaucucaucgaacgccgaagaagguuuaacauuaaugaccggaucaaagagcugggaacuuuaauacccaaguccaacgauccagacaugcguuggaauaagggcaccauucugaaggcuucaguggauuacauccgcaagcuccaaagagaacagcagagggccaaagagcuugagaaccggcaaaagaaacuggaacacgcgaaucgacauuugcuacugcgcauucaggagcucgaaaugcaggccagagcacacggccugagucuuauccccagcacagggcugugcuccccugacuuggucaacaggaucauuaagcaagagccagugcucgaaaauuguucucaggaucuguuacagcaucacgcugaccugacuugcaccacaacccuagaccucacggauggaacuauaacauucaacaauaaccuggguaccggcacugaggccaaucaggcuuauagcgugccgacaaaaauggggucaaaacuugaggacaucuugauggaugacacccugagucccgucggaguuacggauccucuccuguccagcgugucuccaggcgccucaaagaccaguagccggcgcuccucuaugucgauggaagagacagaacacacuuguuga

SEQ ID NO: 2741 - RNA, 1515 nt, Artificial Sequence
  derived and/or modified sequence opt4 from MITF__Homo_sapiens__CCDS46865.1
auggaggcccugagagugcagauguucaugcccugcagcuucgagagccuguaccugagcagcgccgagcaccccggcgccagcaagccccccaucagcagcagcagcaugaccagcagaauccugcugagacagcagcugaugagagagcagaugcaggagcaggagagaagagagcagcagcagaagcugcaggccgcccaguucaugcagcagagagugcccgugagccagacccccgccaucaacgugagcgugcccaccacccugcccagcgccacccaggugcccauggaggugcugaaggugcagacccaccuggagaaccccaccaaguaccacauccagcaggcccagagacagcaggugaagcaguaccugagcaccacccuggccaacaagcacgccaaccaggugcugagccugcccugccccaaccagcccggcgaccacgugaugccccccgugcccggcagcagcgcccccaacagccccauggccaugcugacccugaacagcaacugcgagaaggagggcuucuacaaguucgaggagcagaacagagccgagagcgagugccccggcaugaacacccacagcagagccagcugcaugcagauggacgacgugaucgacgacaucaucagccuggagagcagcuacaacgaggagauccugggccugauggaccccgcccugcagauggccaacacccugcccgugagcggcaaccugaucgaccuguacggcaaccagggccugcccccccccggccugaccaucagcaacagcugccccgccaaccugcccaacaucaagagagagcugaccgagagcgaggccagagcccuggccaaggagagacagaagaaggacaaccacaaccugaucgagagaagaagaagauucaacaucaacgacagaaucaaggagcugggcacccugauccccaagagcaacgaccccgacaugagauggaacaagggcaccauccugaaggccagcguggacuacaucagaaagcugcagagagagcagcagagagccaaggagcuggagaacagacagaagaagcuggagcacgccaacagacaccugcugcugagaauccaggagcuggagaugcaggccagagcccacggccugagccugauccccagcaccggccugugcagccccgaccuggugaacagaaucaucaagcaggagcccgugcuggagaacugcagccaggaccugcugcagcaccacgccgaccugaccugcaccaccacccuggaccugaccgacggcaccaucaccuucaacaacaaccugggcaccggcaccgaggccaaccaggccuacagcgugcccaccaagaugggcagcaagcuggaggacauccugauggacgacacccugagccccgugggcgugaccgacccccugcugagcagcgugagccccggcgccagcaagaccagcagcagaagaagcagcaugagcauggaggagaccgagcacaccugcuga

SEQ ID NO: 2742 - RNA, 1515 nt, Artificial Sequence
  derived and/or modified sequence opt5 from MITF__Homo_sapiens__CCDS46865.1
auggaggcccugagagugcagauguucaugcccugcagcuuugaaucccucuaccugucuagcgcugagcacccuggcgccuccaagccgcccaucucuagcuccucuaugaccagccggauucuucugcgccaacagcucaugagagaacagaugcaggagcaagaacggcgcgagcagcagcagaaacugcaagcggcucaguucaugcagcagagagucccuguuucccaaacacccgccaucaacgugagcgugccuacgacccuucccucugccacacaggucccuauggaggugcugaagguucagacccaucucgaaaauccgacaaaauaucacauucaacaggcucagcggcagcaagugaagcaguaccuguccaccacacuggccaacaaacaugcuaaucagguccucagccugcccuguccuaaccagcccggggaccacgugaugccucccguuccgggaucuuccgccccuaauagccccauggcgaugcuuacccugaacucuaauugcgagaaggaaggcuuuuauaaguucgaggagcaaaaccgcgccgaauccgaguguccugggaugaauacgcauagcagagcuuccugcaugcagauggaugacgugaucgaugacauuaucucucucgaaagcuccuacaacgaggaaauccugggacuuauggaucccgcccugcagauggcuaauacccuccccgucagcggcaaccugauugaccuguaugggaaucagggacucccuccgcccggccugacaaucucuaacuccuguccugccaaucuucccaacauuaaacgggagcugaccgagagcgaagcgcgcgcccucgcuaaggagagacagaaaaaggauaaccacaaucugaucgaacggcgcagacgguuuaacauuaaugaccgcaucaaagagcuuggcacacugauuccuaagucuaacgaucccgacaugagauggaauaaggggaccauccucaaagccagcguggauuacauccggaagcugcaaagagaacagcagcgcgcuaaagagcuggagaaccggcaaaagaaacucgaacacgccaauagacaucugcuucugcgcauucaggagcucgaaaugcaggcccgggcucacggacugucccuuaucccgucuacgggccugugcagcccugaccucgugaacagaauuaucaagcaagagcccguccuggaaaauuguucccaggaucugcuccagcaucacgcggaccugacaugcaccacaacccuugaccugaccgaugggacaauuacguucaacaauaaccucggaaccggcacagaggccaaucaggcuuauagcguuccuaccaaaauggggucuaagcuggaggacauccugauggaugacacacuuucccccgugggagugaccgauccucuccugagcucugucucccccggcgccagcaagacguccucucgccggagcuccaugucuauggaagagacagaacacaccuguuga

SEQ ID NO: 2743 - protein, 419 aa, Artificial Sequence
  MITF__Homo_sapiens__O75030-9
MLEMLEYNHYQVQTHLENPTKYHIQQAQRQQVKQYLSTTLANKHANQVLSLPCPNQPGDHVMPPVPGSSAPNSPMAMLTLNSNCEKEGFYKFEEQNRAESECPGMNTHSRASCMQMDDVIDDIISLESSYNEEILGLMDPALQMANTLPVSGNLIDLYGNQGLPPPGLTISNSCPANLPNIKRELTACIFPTESEARALAKERQKKDNHNLIERRRRFNINDRIKELGTLIPKSNDPDMRWNKGTILKASVDYIRKLQREQQRAKELENRQKKLEHANRHLLLRIQELEMQARAHGLSLIPSTGLCSPDLVNRIIKQEPVLENCSQDLLQHHADLTCTTTLDLTDGTITFNNNLGTGTEANQAYSVPTKMGSKLEDILMDDTLSPVGVTDPLLSSVSPGASKTSSRRSSMSMEETEHTC

SEQ ID NO: 2744 - RNA, 1260 nt, Artificial Sequence
  MITF__Homo_sapiens__CCDS2913.1
augcuggaaaugcuagaauauaaucacuaucaggugcagacccaccucgaaaaccccaccaaguaccacauacagcaagcccaacggcagcagguaaagcaguaccuuucuaccacuuuagcaaauaaacaugccaaccaaguccugagcuugccauguccaaaccagccuggcgaucaugucaugccaccggugccggggagcagcgcacccaacagccccauggcuaugcuuacgcuuaacuccaacugugaaaaagagggauuuuauaaguuugaagagcaaaacagggcagagagcgagugcccaggcaugaacacacauucacgagcguccuguaugcagauggaugauguaaucgaugacaucauuagccuagaaucaaguuauaaugaggaaaucuugggcuugauggauccugcuuugcaaauggcaaauacguugccugucucgggaaacuugauugaucuuuauggaaaccaaggucugcccccaccaggccucaccaucagcaacuccuguccagccaaccuucccaacauaaaaagggagcucacagcguguauuuuucccacagagucugaagcaagagcacuggccaaagagaggcagaaaaaggacaaucacaaccugauugaacgaagaagaagauuuaacauaaaugaccgcauuaaagaacuagguacuuugauucccaagucaaaugauccagacaugcgcuggaacaagggaaccaucuuaaaagcauccguggacuauauccgaaaguugcaacgagaacagcaacgcgcaaaagaacuugaaaaccgacagaagaaacuggagcacgccaaccggcauuuguugcucagaauacaggaacuugaaaugcaggcucgagcucauggacuuucccuuauuccauccacgggucucugcucuccagauuuggugaaucggaucaucaagcaagaacccguucuugagaacugcagccaagaccuccuucagcaucaugcagaccuaaccuguacaacaacucucgaucucacggauggcaccaucaccuucaacaacaaccucggaacugggacugaggccaaccaagccuauaguguccccacaaaaaugggauccaaacuggaagacauccugauggacgacacccuuucucccgucggugucacugauccacuccuuuccucagugucccccggagcuuccaaaacaagcagccggaggagcaguaugagcauggaagagacggagcacacuuguuag

SEQ ID NO: 2745 - RNA, 1260 nt, Artificial Sequence
  derived and/or modified sequence opt1 from MITF__Homo_sapiens__CCDS2913.1
augcuggagaugcucgaguacaaccacuaccaggugcagacccaccuggagaaccccaccaaguaccacauccagcaggcccagcgccagcaggucaagcaguaccugagcaccacccucgccaacaagcacgcgaaccaggugcugucccugccgugccccaaccagcccggcgaccacgugaugcccccgguccccgggagcuccgcccccaacagccccauggccaugcucacccugaacuccaacugcgagaaggagggcuucuacaaguucgaggagcagaaccgggccgagagcgagugcccggggaugaacacccacucccgcgccagcugcaugcagauggacgacgugaucgacgacaucaucucccuggagagcuccuacaacgaggagauccucggccugauggaccccgcgcugcagauggccaacacgcuccccgugagcgggaaccugaucgaccuguacggcaaccagggccugcccccgcccgggcucaccaucuccaacagcugccccgccaaccugcccaacaucaagcgggagcucaccgccugcaucuucccgaccgaguccgaggcgcgcgcccuggccaaggagcggcagaagaaggacaaccacaaccugaucgagcgccggcgccgguucaacaucaacgaccgcaucaaggagcucggcacgcugauccccaagagcaacgaccccgacaugcgguggaacaaggggaccauccugaaggccuccgucgacuacauccgcaagcuccagcgggagcagcagcgcgccaaggagcuggagaaccggcagaagaagcuggagcacgcgaaccgccaccuccugcugcggauccaggagcucgagaugcaggcccgcgcccacggccugagccugauccccuccaccgggcucugcagcccggaccuggugaaccggaucaucaagcaggagcccgugcuggagaacugcagccaggaccuccugcagcaccacgccgaccugaccugcacgaccacccucgaccugaccgacggcacgaucaccuucaacaacaaccugggcaccgggaccgaggccaaccaggcguacuccguccccacgaagaugggcagcaagcucgaggacauccugauggacgacacccugucccccgugggggugaccgacccgcuccugagcuccgucagccccggcgccuccaagaccagcucccgccggagcuccaugagcauggaggagacggagcacacgugcuga

SEQ ID NO: 2746 - RNA, 1260 nt, Artificial Sequence
  derived and/or modified sequence opt2 from MITF__Homo_sapiens__CCDS2913.1
augcucgagaugcucgaguacaaccacuaccagguccagacccaccucgagaaccccaccaaguaccacauccagcaggcccagcgccagcaggucaagcaguaccucuccaccacccucgccaacaagcacgccaaccagguccucucccuccccugccccaaccagcccggcgaccacgucaugccccccguccccggcuccuccgcccccaacucccccauggccaugcucacccucaacuccaacugcgagaaggagggcuucuacaaguucgaggagcagaaccgcgccgaguccgagugccccggcaugaacacccacucccgcgccuccugcaugcagauggacgacgucaucgacgacaucaucucccucgaguccuccuacaacgaggagauccucggccucauggaccccgcccuccagauggccaacacccuccccgucuccggcaaccucaucgaccucuacggcaaccagggccuccccccccccggccucaccaucuccaacuccugccccgccaaccuccccaacaucaagcgcgagcucaccgccugcaucuuccccaccgaguccgaggcccgcgcccucgccaaggagcgccagaagaaggacaaccacaaccucaucgagcgccgccgccgcuucaacaucaacgaccgcaucaaggagcucggcacccucauccccaaguccaacgaccccgacaugcgcuggaacaagggcaccauccucaaggccuccgucgacuacauccgcaagcuccagcgcgagcagcagcgcgccaaggagcucgagaaccgccagaagaagcucgagcacgccaaccgccaccuccuccuccgcauccaggagcucgagaugcaggcccgcgcccacggccucucccucauccccuccaccggccucugcucccccgaccucgucaaccgcaucaucaagcaggagcccguccucgagaacugcucccaggaccuccuccagcaccacgccgaccucaccugcaccaccacccucgaccucaccgacggcaccaucaccuucaacaacaaccucggcaccggcaccgaggccaaccaggccuacuccguccccaccaagaugggcuccaagcucgaggacauccucauggacgacacccucucccccgucggcgucaccgacccccuccucuccuccgucucccccggcgccuccaagaccuccucccgccgcuccuccauguccauggaggagaccgagcacaccugcuga

SEQ ID NO: 2747 - RNA, 1260 nt, Artificial Sequence
  derived and/or modified sequence opt3 from MITF__Homo_sapiens__CCDS2913.1
augcuggagaugcucgaauacaaccacuaucaggugcaaacccaucuugagaaucccacaaaguaccacauccagcaggcccagagacaacaggucaaacaguaucugagcacuacguuggcuaacaagcaugcaaaucagguuuuaucccugccuugcccaaaccaaccgggcgaccacgugaugcccccuguaccagggucuucagcccccaauaguccuauggcgaugcuaacccucaacagcaauugugaaaaagagggauucuacaaguuugaggaacagaacagggcugaguccgaaugcccagguaugaauacacauucucgggccucguguaugcagauggaugacgugauugaugacauaaucucacuggagagcaguuauaacgaagagauucuuggccugauggaucccgcauugcagauggccaauacucucccugucuccgggaaccugaucgaccuguacggaaaucaaggccucccaccgcccgguuuaaccauuucuaacagcugcccugcuaaucugccaaacaucaaacgcgagcuuacagcauguauauuccccaccgaauccgaggcccgagcuuuggccaaggaacgucagaagaaagauaaccacaaucugaucgagagaaggcggcgcuuuaacauuaaugacagaaucaaggaacuagggacucucauuccuaaaucaaacgauccagacaugagguggaauaagggaacaauccugaaagcgaguguggauuauauacggaaacuucagcgcgagcaacagcgagcaaaggagcuggaaaacagacagaagaaguuggagcacgccaauaggcaucuccuguuacggauucaggaacuggagaugcaagcucgugcccacggccucagccuuauccccucuaccggccugugcuccccggacuugguuaaccgcauuaucaaacaggaaccugugcuagagaauuguucacaggaucugcuccagcaucacgcagaccugacgugcacuaccacacuugaccugacugaugggaccaucacauucaacaauaacuugggaaccgguacggaggcuaaucaagccuacagcguccccacuaagaugggcaguaaacucgaagacauucugauggaugacacauuaucuccaguggggguaaccgauccucugcuauccagcguuucgcccggagcgucuaagacuuccucaagaaggaguagcauguccauggaggaaacagagcacaccuguuga

SEQ ID NO: 2748 - RNA, 1260 nt, Artificial Sequence
  derived and/or modified sequence opt4 from MITF__Homo_sapiens__CCDS2913.1
augcuggagaugcuggaguacaaccacuaccaggugcagacccaccuggagaaccccaccaaguaccacauccagcaggcccagagacagcaggugaagcaguaccugagcaccacccuggccaacaagcacgccaaccaggugcugagccugcccugccccaaccagcccggcgaccacgugaugccccccgugcccggcagcagcgcccccaacagccccauggccaugcugacccugaacagcaacugcgagaaggagggcuucuacaaguucgaggagcagaacagagccgagagcgagugccccggcaugaacacccacagcagagccagcugcaugcagauggacgacgugaucgacgacaucaucagccuggagagcagcuacaacgaggagauccugggccugauggaccccgcccugcagauggccaacacccugcccgugagcggcaaccugaucgaccuguacggcaaccagggccugcccccccccggccugaccaucagcaacagcugccccgccaaccugcccaacaucaagagagagcugaccgccugcaucuuccccaccgagagcgaggccagagcccuggccaaggagagacagaagaaggacaaccacaaccugaucgagagaagaagaagauucaacaucaacgacagaaucaaggagcugggcacccugauccccaagagcaacgaccccgacaugagauggaacaagggcaccauccugaaggccagcguggacuacaucagaaagcugcagagagagcagcagagagccaaggagcuggagaacagacagaagaagcuggagcacgccaacagacaccugcugcugagaauccaggagcuggagaugcaggccagagcccacggccugagccugauccccagcaccggccugugcagccccgaccuggugaacagaaucaucaagcaggagcccgugcuggagaacugcagccaggaccugcugcagcaccacgccgaccugaccugcaccaccacccuggaccugaccgacggcaccaucaccuucaacaacaaccugggcaccggcaccgaggccaaccaggccuacagcgugcccaccaagaugggcagcaagcuggaggacauccugauggacgacacccugagccccgugggcgugaccgacccccugcugagcagcgugagccccggcgccagcaagaccagcagcagaagaagcagcaugagcauggaggagaccgagcacaccugcuga

SEQ ID NO: 2749 - RNA, 1260 nt, Artificial Sequence
  derived and/or modified sequence opt5 from MITF__Homo_sapiens__CCDS2913.1
augcuggagaugcucgaauacaaccacuaucaagugcaaacccaucuggagaaucccacaaaguaccacauccagcaggcccagagacaacaggucaaacaguaucuuagcacgacccuggcuaacaagcaugccaaucagguucucucccugccuugcccgaaccaacccggcgaccacgugaugccucccgugccugggucuagcgcgcccaauuccccuauggcuaugcuuacacugaacucuaauugugaaaaagagggauucuacaaguuugaggaacagaaccgggccgagagcgaaugcccgggcaugaauacccauucccgcgccucuuguaugcagauggaugacgucauugaugacaucauuagccucgaguccagcuauaacgaagagauccuggggcugauggaucccgcucuccagauggccaauacacugccugugucuggaaaccuuauugaccuguacggcaaucaagggcuucccccucccggacugaccaucuccaacagcugcccggcuaaucuuccuaacaucaaaagagagcugacagccuguauuuuccccaccgaaucugaggcgcgggcccucgcuaaggaacgccagaagaaagauaaccacaaucugaucgagagacggcgcagauuuaacauuaaugaccggaucaaggaacugggcacgcucauuccuaaauccaacgaucccgacaugcgcuggaauaagggcaccauccugaaagccagcguugauuauauuagaaagcuccagcgggagcaacagcgcgcuaaggagcuggaaaacagacagaaaaagcucgagcacgccaaucggcaucugcuucugcgcauccaggaacucgagaugcaagcgagagcccacgggcugucucugauccccuccacaggacucugcagcccugaccuggugaaccggauuaucaaacaggaaccgguccuugagaauuguucccaggaucugcuccagcaucacgcugaccugaccugcacaaccacgcuugaccugacagauggcaccauuacauucaacaauaaccucgggaccggaaccgaggccaaucaggcuuacucugugcccacaaagaugggcagcaaacuggaagacauccugauggaugacacgcucuccccuguuggggugaccgauccccugcuuagcucugucuccccuggagccagcaagacaucuagcagacgcuccucuaugagcauggaggaaaccgagcacacauguuga

SEQ ID NO: 2750 - protein, 526 aa, Artificial Sequence
  MITF__Homo_sapiens__O75030
MQSESGIVPDFEVGEEFHEEPKTYYELKSQPLKSSSSAEHPGASKPPISSSSMTSRILLRQQLMREQMQEQERREQQQKLQAAQFMQQRVPVSQTPAINVSVPTTLPSATQVPMEVLKVQTHLENPTKYHIQQAQRQQVKQYLSTTLANKHANQVLSLPCPNQPGDHVMPPVPGSSAPNSPMAMLTLNSNCEKEGFYKFEEQNRAESECPGMNTHSRASCMQMDDVIDDIISLESSYNEEILGLMDPALQMANTLPVSGNLIDLYGNQGLPPPGLTISNSCPANLPNIKRELTACIFPTESEARALAKERQKKDNHNLIERRRRFNINDRIKELGTLIPKSNDPDMRWNKGTILKASVDYIRKLQREQQRAKELENRQKKLEHANRHLLLRIQELEMQARAHGLSLIPSTGLCSPDLVNRIIKQEPVLENCSQDLLQHHADLTCTTTLDLTDGTITFNNNLGTGTEANQAYSVPTKMGSKLEDILMDDTLSPVGVTDPLLSSVSPGASKTSSRRSSMSMEETEHTC

SEQ ID NO: 2751 - RNA, 1581 nt, Artificial Sequence
  MITF__Homo_sapiens__XM_005264754
augcaguccgaaucggggaucgugccggauuucgaagucggggaggaguuucaugaagagcccaaaaccuauuacgaacucaaaagucaaccgcugaagagcagcaguuccgccgagcauccuggggccuccaagccuccgauaagcuccuccaguaugacaucacgcaucuugcuacgccagcaacucaugcgugagcagaugcaggagcaggagcgcagggagcagcagcagaagcugcaggcggcccaguucaugcaacagagagugcccgugagucagacaccagccauaaacgucagugugcccaccacccuucccucugccacgcaggugccgauggaaguccuuaaggugcagacccaccucgaaaaccccaccaaguaccacauacagcaagcccaacggcagcagguaaagcaguaccuuucuaccacuuuagcaaauaaacaugccaaccaaguccugagcuugccauguccaaaccagccuggcgaucaugucaugccaccggugccggggagcagcgcacccaacagccccauggcuaugcuuacgcuuaacuccaacugugaaaaagagggauuuuauaaguuugaagagcaaaacagggcagagagcgagugcccaggcaugaacacacauucacgagcguccuguaugcagauggaugauguaaucgaugacaucauuagccuagaaucaaguuauaaugaggaaaucuugggcuugauggauccugcuuugcaaauggcaaauacguugccugucucgggaaacuugauugaucuuuauggaaaccaaggucugcccccaccaggccucaccaucagcaacuccuguccagccaaccuucccaacauaaaaagggagcucacagcguguauuuuucccacagagucugaagcaagagcacuggccaaagagaggcagaaaaaggacaaucacaaccugauugaacgaagaagaagauuuaacauaaaugaccgcauuaaagaacuagguacuuugauucccaagucaaaugauccagacaugcgcuggaacaagggaaccaucuuaaaagcauccguggacuauauccgaaaguugcaacgagaacagcaacgcgcaaaagaacuugaaaaccgacagaagaaacuggagcacgccaaccggcauuuguugcucagaauacaggaacuugaaaugcaggcucgagcucauggacuuucccuuauuccauccacgggucucugcucuccagauuuggugaaucggaucaucaagcaagaacccguucuugagaacugcagccaagaccuccuucagcaucaugcagaccuaaccuguacaacaacucucgaucucacggauggcaccaucaccuucaacaacaaccucggaacugggacugaggccaaccaagccuauaguguccccacaaaaaugggauccaaacuggaagacauccugauggacgacacccuuucucccgucggugucacugauccacuccuuuccucagugucccccggagcuuccaaaacaagcagccggaggagcaguaugagcauggaagagacggagcacacuuguuag

SEQ ID NO: 2752 - RNA, 1581 nt, Artificial Sequence
  derived and/or modified sequence opt1 from MITF__Homo_sapiens__XM_005264754
augcagagcgaguccggcaucgugcccgacuucgaggucggggaggaguuccacgaggagccgaagaccuacuacgagcucaagagccagccccucaaguccagcuccagcgccgagcaccccggcgccuccaagcccccgaucagcuccagcuccaugaccagccgcauccugcugcggcagcagcucaugcgcgagcagaugcaggagcaggagcggcgcgagcagcagcagaagcugcaggcggcccaguucaugcagcagcgggugcccgugucccagacccccgccaucaacgucagcgugcccaccacccugccguccgccacccaggugcccauggagguccucaaggugcagacgcaccuggagaaccccaccaaguaccacauccagcaggcccagcgccagcaggucaagcaguaccugagcaccacccucgcgaacaagcacgccaaccaggugcugucccugcccugcccgaaccagcccggggaccacgugaugccgcccgugcccggcagcuccgcccccaacagccccauggccaugcucacgcugaacagcaacugcgagaaggagggguucuacaaguucgaggagcagaaccgggcggaguccgagugccccggcaugaacacccacagccgcgccuccugcaugcagauggacgacgucaucgacgacaucaucagccuggaguccagcuacaacgaggagauccucggccugauggacccggcccugcagauggccaacacccuccccguguccgggaaccugaucgaccuguacggcaaccaggggcugcccccgcccggccugaccaucagcaacuccugccccgccaaccugcccaacaucaagcgggagcucacggcgugcaucuuccccaccgagagcgaggcccgcgcccuggccaaggagcggcagaagaaggacaaccacaaccugaucgagcgccggcgccgguucaacaucaacgaccgcaucaaggagcucgggacccugaucccgaaguccaacgaccccgacaugcgguggaacaagggcaccauccugaaggccagcguggacuacauccgcaagcuccagcgggagcagcagcgcgcgaaggagcuggagaaccggcagaagaagcuggagcacgccaaccgccaccuccugcugcgcauccaggagcucgagaugcaggcccgggcccacggccugucccugauccccagcacggggcucugcuccccggaccuggucaaccgcaucaucaagcaggagcccgugcuggagaacugcagccaggaccuccugcagcaccacgccgaccugaccugcaccaccacgcucgaccugaccgacggcaccaucaccuucaacaacaaccuggggacgggcaccgaggcgaaccaggccuacuccgugcccaccaagaugggcagcaagcucgaggacauccugauggacgacacccugucccccgucggggugacggacccgcugcucagcagcgugucccccggcgccagcaagaccuccagccggcgcuccagcauguccauggaggagaccgagcacacgugcuga

SEQ ID NO: 2753 - RNA, 1581 nt, Artificial Sequence
  derived and/or modified sequence opt2 from MITF__Homo_sapiens__XM_005264754
augcaguccgaguccggcaucguccccgacuucgaggucggcgaggaguuccacgaggagcccaagaccuacuacgagcucaagucccagccccucaaguccuccuccuccgccgagcaccccggcgccuccaagccccccaucuccuccuccuccaugaccucccgcauccuccuccgccagcagcucaugcgcgagcagaugcaggagcaggagcgccgcgagcagcagcagaagcuccaggccgcccaguucaugcagcagcgcguccccgucucccagacccccgccaucaacgucuccguccccaccacccuccccuccgccacccagguccccauggagguccucaagguccagacccaccucgagaaccccaccaaguaccacauccagcaggcccagcgccagcaggucaagcaguaccucuccaccacccucgccaacaagcacgccaaccagguccucucccuccccugccccaaccagcccggcgaccacgucaugccccccguccccggcuccuccgcccccaacucccccauggccaugcucacccucaacuccaacugcgagaaggagggcuucuacaaguucgaggagcagaaccgcgccgaguccgagugccccggcaugaacacccacucccgcgccuccugcaugcagauggacgacgucaucgacgacaucaucucccucgaguccuccuacaacgaggagauccucggccucauggaccccgcccuccagauggccaacacccuccccgucuccggcaaccucaucgaccucuacggcaaccagggccuccccccccccggccucaccaucuccaacuccugccccgccaaccuccccaacaucaagcgcgagcucaccgccugcaucuuccccaccgaguccgaggcccgcgcccucgccaaggagcgccagaagaaggacaaccacaaccucaucgagcgccgccgccgcuucaacaucaacgaccgcaucaaggagcucggcacccucauccccaaguccaacgaccccgacaugcgcuggaacaagggcaccauccucaaggccuccgucgacuacauccgcaagcuccagcgcgagcagcagcgcgccaaggagcucgagaaccgccagaagaagcucgagcacgccaaccgccaccuccuccuccgcauccaggagcucgagaugcaggcccgcgcccacggccucucccucauccccuccaccggccucugcucccccgaccucgucaaccgcaucaucaagcaggagcccguccucgagaacugcucccaggaccuccuccagcaccacgccgaccucaccugcaccaccacccucgaccucaccgacggcaccaucaccuucaacaacaaccucggcaccggcaccgaggccaaccaggccuacuccguccccaccaagaugggcuccaagcucgaggacauccucauggacgacacccucucccccgucggcgucaccgacccccuccucuccuccgucucccccggcgccuccaagaccuccucccgccgcuccuccauguccauggaggagaccgagcacaccugcuga

SEQ ID NO: 2754 - RNA, 1581 nt, Artificial Sequence
  derived and/or modified sequence opt3 from MITF__Homo_sapiens__XM_005264754
augcaaagcgaguccggcaucgugcccgacuucgaagucggggaggaauuucacgaggaaccuaagaccuacuaugagcugaaaucucaaccacucaagucaaguagcuccgccgagcauccgggagcuucuaaacccccuauuucgucaagcaguaugacauccagaauacuucugaggcagcaguugaugcgggaacagaugcaagagcaggaacgccgagagcagcagcaaaaguuacaggcagcccaguucaugcagcaacguguuccagugucucagacucccgcgaucaacguaagcgugccuacgacccugccauccgcuacacagguccccauggaggugcuaaaaguucaaacucaccucgaaaauccuaccaaguaccauauucagcaggcccagagacaacaggugaagcaguaucugucaacaacccuugcaaacaaacacgccaaucagguccugaguuugccaugcccgaaccaacccggugaucaugugaugccuccaguacccggcagcucugcuccuaauuccccaauggcaaugcucacucugaacucaaauugugagaaggaaggguuuuacaaauucgaggaacagaacagggccgagagcgagugccccggaaugaauacacacagucgggcuucuuguaugcagauggacgauguuaucgacgauauuaucucccuggaaagcucguauaacgaggaaauacucggcuuaauggacccggcccugcagauggcgaauacccuuccugugucugguaacuugaucgaucuguacgggaaucaaggacuacccccaccuggccucacgauuuccaacucaugccccgcaaaucugccaaacaucaagcgcgagcuuacugccuguauuuuucccaccgaaagugaggcuagagcccuggcaaaagagaggcagaagaaggacaaccacaauuugaucgaacggcgccgaagauucaacauaaaugauaggauuaaagagcucggcacacugaucccuaagagcaacgacccagauaugcgguggaauaaagggacuauuuuaaaggcuuccgucgacuauauccguaaacugcagcgcgaacagcaaagagccaaggagcucgaaaacaggcagaaaaagcuggagcaugcgaaucggcaccuuuugcuacgaauccaggagcuggaaaugcaagcccgcgcacauggacucucucugauuccgagcaccggucuuugcucacccgaucuggugaacagaauaaucaagcaggagccuguguuggaaaauuguagucaggaccuccugcagcaccacgcugacuuaacaugcaccacgacucuggaucuaacagacggcaccauuacuuuuaacaauaaccucgggacaggaaccgaggccaaucaggcuuacuccgucccaacgaaaaugggcagcaagcuggaggauauccuuauggacgauaccuugucucccguuggugugacagacccucugcucucaaguguaagcccaggggccuccaaaacuucuucgaggcggagcuccaugucaauggaagagaccgaacauacauguuga

SEQ ID NO: 2755 - RNA, 1581 nt, Artificial Sequence
  derived and/or modified sequence opt4 from MITF__Homo_sapiens__XM_005264754
augcagagcgagagcggcaucgugcccgacuucgaggugggcgaggaguuccacgaggagcccaagaccuacuacgagcugaagagccagccccugaagagcagcagcagcgccgagcaccccggcgccagcaagccccccaucagcagcagcagcaugaccagcagaauccugcugagacagcagcugaugagagagcagaugcaggagcaggagagaagagagcagcagcagaagcugcaggccgcccaguucaugcagcagagagugcccgugagccagacccccgccaucaacgugagcgugcccaccacccugcccagcgccacccaggugcccauggaggugcugaaggugcagacccaccuggagaaccccaccaaguaccacauccagcaggcccagagacagcaggugaagcaguaccugagcaccacccuggccaacaagcacgccaaccaggugcugagccugcccugccccaaccagcccggcgaccacgugaugccccccgugcccggcagcagcgcccccaacagccccauggccaugcugacccugaacagcaacugcgagaaggagggcuucuacaaguucgaggagcagaacagagccgagagcgagugccccggcaugaacacccacagcagagccagcugcaugcagauggacgacgugaucgacgacaucaucagccuggagagcagcuacaacgaggagauccugggccugauggaccccgcccugcagauggccaacacccugcccgugagcggcaaccugaucgaccuguacggcaaccagggccugcccccccccggccugaccaucagcaacagcugccccgccaaccugcccaacaucaagagagagcugaccgccugcaucuuccccaccgagagcgaggccagagcccuggccaaggagagacagaagaaggacaaccacaaccugaucgagagaagaagaagauucaacaucaacgacagaaucaaggagcugggcacccugauccccaagagcaacgaccccgacaugagauggaacaagggcaccauccugaaggccagcguggacuacaucagaaagcugcagagagagcagcagagagccaaggagcuggagaacagacagaagaagcuggagcacgccaacagacaccugcugcugagaauccaggagcuggagaugcaggccagagcccacggccugagccugauccccagcaccggccugugcagccccgaccuggugaacagaaucaucaagcaggagcccgugcuggagaacugcagccaggaccugcugcagcaccacgccgaccugaccugcaccaccacccuggaccugaccgacggcaccaucaccuucaacaacaaccugggcaccggcaccgaggccaaccaggccuacagcgugcccaccaagaugggcagcaagcuggaggacauccugauggacgacacccugagccccgugggcgugaccgacccccugcugagcagcgugagccccggcgccagcaagaccagcagcagaagaagcagcaugagcauggaggagaccgagcacaccugcuga

SEQ ID NO: 2756 - RNA, 1581 nt, Artificial Sequence
  derived and/or modified sequence opt5 from MITF__Homo_sapiens__XM_005264754
augcaaagcgaguccggcaucgugcccgacuucgaagucggggaggaauuucacgaggaaccuaagaccuacuaugagcugaaaucucaaccgcucaagagcuccucuagcgccgagcaucccggagcuuccaaaccucccauuucuagcuccagcaugacaucuagaauccugcuucggcagcagcugaugcgcgaacagaugcaagagcaggaaagacgggagcagcagcaaaagcuccaggccgcgcaguucaugcagcaacgcguuccugugucccagacgcccgcuauuaacgugagcgucccuaccacacugccgucugccacccaggugcccauggagguucuuaaagugcaaacacaccuggaaaauccuaccaaguaccauauccagcaggcccagagacaacaggucaagcaguaucucuccacaacccuggcuaacaaacacgccaaucaggugcugagccuccccugcccuaaccaacccggcgaucauguuaugccgccugugcccgggucuuccgcuccuaauagccccauggccaugcugacgcuuaacuccaauugugagaaggaaggauuuuacaaauucgaggaacagaaccgggcggagucugagugccccggcaugaauacccacagccgcgccuccuguaugcagauggacgaugucauugacgauaucaucagccuggaaucuuccuauaacgaggaaauucucgggcugauggacccugcccuucagauggcuaauacacugccggugagcggaaaccucaucgaucuguacggcaaucaaggccugcccccucccgggcucaccauuucuaacagcugcccugcuaaucugcccaacaucaagagagagcuuacagccuguauuuuuccgaccgaauccgaggcgcgggcccuggcuaaagagcgccagaagaaggacaaccacaaucucaucgaaagacggcgcagauucaacauuaaugaucggaucaaagagcugggaacgcuuaucccuaagucuaacgaccccgauaugcgcuggaauaaaggcacaauucugaaggccagcguggacuauaucagaaaacuccagcgggaacagcaaagagcuaaggagcuggaaaaccgccagaaaaagcuggagcaugccaaucggcaccuccugcuucgcauucaggagcuggaaaugcaagccagagcucaugggcucucccugaucccuagcaccggacuuugcucucccgaucuggucaaccggauuaucaagcaggagccuguucucgaaaauuguucccaggaccugcugcagcaccacgcggaccucacaugcaccaccacacuggaucuuacggacggcaccaucacauuuaacaauaaccuggggaccggaacagaggccaaucaggcuuacagcgugcccaccaaaaugggcucuaagcucgaggauauucugauggacgauacgcuguccccggugggcgucacagacccucuucucagcuccgugucucccggggccagcaaaaccuccucuagacgcagcuccaugagcauggaagagaccgaacauacauguuga

SEQ ID NO: 2757 - protein, 354 aa, Artificial Sequence [sequence omitted]

SEQ ID NO: 2758 - RNA, 1065 nt, Artificial Sequence
  MMP1_1__Homo_sapiens__BAG52140
auggcuccggccgccuggcuccgcagcgcggccgcgcgcgcccuccugcccccgaugcugcugcugcugcuccagccgccgccgcugcuggcccgggcucugccgccggacguccaccaccuccaugccgagaggagggggccacagcccuggcaugcagcccugcccaguagcccggcaccugccccugccacgcaggaagccccccggccugccagcagccucaggccuccccgcuguggcgugcccgacccaucugaugggcugagugcccgcaaccgacagaagaggauccuucgguucccauggcaguuggugcaggagcaggugcggcagacgauggcagaggcccuaaagguauggagcgaugugacgccacucaccuuuacugaggugcacgagggccgugcugacaucaugaucgacuucgccagguacuggcauggggacgaccugccguuugaugggccugggggcauccuggcccaugccuucuuccccaagacucaccgagaaggggauguccacuucgacuaugaugagaccuggacuaucggggaugaccagggcacagaccugcugcagguggcagcccaugaauuuggccacgugcuggggcugcagcacacaacagcagccaaggcccugauguccgccuucuacaccuuucgcuacccacugagucucagcccagaugacugcaggggcguucaacaccuauauggccagcccuggcccacugucaccuccaggaccccagcccugggcccccaggcugggauagacaccaaugagauugcaccgcuggagccagacgccccgccagaugccugugaggccuccuuugacgcggucuccaccauccgaggcgagcucuuuuucuucaaagcgggcuuuguguggcgccuccgugggggccagcugcagcccggcuacccagcauuggccucucgccacuggcagggacugcccagcccuguggacgcugccuucgaggaugcccagggccacauuugguucuuccaagggacuacuggcguuuccaccccagcacccggcguguag

SEQ ID NO: 2759 - RNA, 1065 nt, Artificial Sequence
  derived and/or modified sequence opt1 from MMP1_1__Homo_sapiens__BAG52140
auggcccccgccgcguggcugcgcagcgccgccgcccgggcccuccugccgcccaugcugcuccugcugcuccagccccccccgcugcuggcgcgcgcccucccccccgacgugcaccaccugcacgccgagcggcgcggcccccagccguggcacgccgcgcugcccuccagccccgcccccgccccggccacccaggaggccccccggcccgcguccagccuccgccccccgcggugcgggguccccgaccccuccgacggccugagcgcccgcaaccggcagaagcgcauccugcgguuccccuggcagcucgugcaggagcaggugcgccagaccauggccgaggcccugaaggucugguccgacgugacgccgcugaccuucaccgaggugcacgaggggcgggccgacaucaugaucgacuucgcgcgcuacuggcacggcgacgaccuccccuucgacgggcccggcggcauccuggcccacgccuucuuccccaagacccaccgggagggggacguccacuucgacuacgacgagacguggaccaucggcgacgaccaggggaccgaccugcuccagguggccgcccacgaguucggccacgugcuggggcugcagcacaccacggcggccaaggcccucaugagcgccuucuacaccuuccgcuacccgcugucccugagccccgacgacugccggggcguccagcaccucuacggccagcccuggcccaccgugaccucccgcacgccggcccuggggccccaggcgggcaucgacaccaacgagaucgccccccuggagccggacgccccccccgacgccugcgaggcgagcuucgacgccguguccaccauccggggggagcucuucuucuucaaggccggcuucgucuggcgccugcggggcgggcagcugcagcccggcuacccggcccucgccagccgccacuggcaggggcugcccucccccguggacgcggccuucgaggacgcccagggccacaucugguucuuccaggggaccacgggcgugagcacccccgccccgggcgucuga

SEQ ID NO: 2760 - RNA, 1065 nt, Artificial Sequence
  derived and/or modified sequence opt2 from MMP1_1__Homo_sapiens__BAG52140
auggcccccgccgccuggcuccgcuccgccgccgcccgcgcccuccucccccccaugcuccuccuccuccuccagccccccccccuccucgcccgcgcccucccccccgacguccaccaccuccacgccgagcgccgcggcccccagcccuggcacgccgcccuccccuccucccccgcccccgcccccgccacccaggaggccccccgccccgccuccucccuccgccccccccgcugcggcguccccgaccccuccgacggccucuccgcccgcaaccgccagaagcgcauccuccgcuuccccuggcagcucguccaggagcagguccgccagaccauggccgaggcccucaaggucugguccgacgucaccccccucaccuucaccgagguccacgagggccgcgccgacaucaugaucgacuucgcccgcuacuggcacggcgacgaccuccccuucgacggccccggcggcauccucgcccacgccuucuuccccaagacccaccgcgagggcgacguccacuucgacuacgacgagaccuggaccaucggcgacgaccagggcaccgaccuccuccaggucgccgcccacgaguucggccacguccucggccuccagcacaccaccgccgccaaggcccucauguccgccuucuacaccuuccgcuacccccucucccucucccccgacgacugccgcggcguccagcaccucuacggccagcccuggcccaccgucaccucccgcacccccgcccucggcccccaggccggcaucgacaccaacgagaucgccccccucgagcccgacgccccccccgacgccugcgaggccuccuucgacgccgucuccaccauccgcggcgagcucuucuucuucaaggccggcuucgucuggcgccuccgcggcggccagcuccagcccggcuaccccgcccucgccucccgccacuggcagggccuccccucccccgucgacgccgccuucgaggacgcccagggccacaucugguucuuccagggcaccaccggcgucuccacccccgcccccggcgucuga

SEQ ID NO: 2761 - RNA, 1065 nt, Artificial Sequence
  derived and/or modified sequence opt3 from MMP1_1__Homo_sapiens__BAG52140
auggcccccgcugcauggcugagaagcgccgcggcuagggcccuccuuccuccaaugcuguuguuacugcuacagccgcccccucuccuggcacgggcccuuccacccgacgugcaccaucugcacgcugagcgccgaggcccucaaccauggcaugcagccuugcccuccucuccugcuccagccccggcgacccaggaagcaccccguccugccucaagucucagaccacccaggugcggggucccugauccaagcgacggacuguccgcucggaaccgccagaagagaauccugagguuccccuggcagcucguucaagaacaggugcggcagacaauggccgaggcauuaaaaguauggucugaugugacuccgcugacguuuaccgagguccacgaaggucgcgcugacauuaugauagauuucgcccgauacuggcauggcgacgaucuuccuuuugacgggcccggaggcaucuuggcgcacgccuucuuuccaaagacacacagagagggugaugugcauuucgacuaugaugagacuuggaccauuggggacgaucagggaacagaccugcuacaaguugcagcucacgaauuuggccaugugcucggccugcagcacaccacugccgcuaaagcccuuaugucggcauucuacacauuuagguauccucugucauugagccccgacgauugucgugggguccagcaccucuacggacagccauggcccaccgugacgagucggacuccugcccuggguccacaagcuggcaucgacaccaaugagauugcgccguuagaacccgaugcaccuccagacgccugcgaggcuuccuucgaugccguaucuacaauccgcggggagcuguuuuucuuuaaggcaggauucguuuggagacucaggggcggucagcuucagcccggguauccugcccuggcuagccggcauuggcaaggauugccaucccccguggacgccgcauucgaagaugcgcagggccacauaugguuuuuccagggcacuaccggggucucaacaccggcuccuggaguguga

SEQ ID NO: 2762 - RNA, 1065 nt, Artificial Sequence
  derived and/or modified sequence opt4 from MMP1_1__Homo_sapiens__BAG52140
auggcccccgccgccuggcugagaagcgccgccgccagagcccugcugccccccaugcugcugcugcugcugcagccccccccccugcuggccagagcccugccccccgacgugcaccaccugcacgccgagagaagaggcccccagcccuggcacgccgcccugcccagcagccccgcccccgcccccgccacccaggaggcccccagacccgccagcagccugagaccccccagaugcggcgugcccgaccccagcgacggccugagcgccagaaacagacagaagagaauccugagauuccccuggcagcuggugcaggagcaggugagacagaccauggccgaggcccugaagguguggagcgacgugaccccccugaccuucaccgaggugcacgagggcagagccgacaucaugaucgacuucgccagauacuggcacggcgacgaccugcccuucgacggccccggcggcauccuggcccacgccuucuuccccaagacccacagagagggcgacgugcacuucgacuacgacgagaccuggaccaucggcgacgaccagggcaccgaccugcugcagguggccgcccacgaguucggccacgugcugggccugcagcacaccaccgccgccaaggcccugaugagcgccuucuacaccuucagauacccccugagccugagccccgacgacugcagaggcgugcagcaccuguacggccagcccuggcccaccgugaccagcagaacccccgcccugggcccccaggccggcaucgacaccaacgagaucgccccccuggagcccgacgccccccccgacgccugcgaggccagcuucgacgccgugagcaccaucagaggcgagcuguucuucuucaaggccggcuucguguggagacugagaggcggccagcugcagcccggcuaccccgcccuggccagcagacacuggcagggccugcccagccccguggacgccgccuucgaggacgcccagggccacaucugguucuuccagggcaccaccggcgugagcacccccgcccccggcguguga

SEQ ID NO: 2763 - RNA, 1065 nt, Artificial Sequence
  derived and/or modified sequence opt5 from MMP1_1__Homo_sapiens__BAG52140
auggcccccgcugccuggcugagaagcgcggcugcccgggcccuccugccuccgaugcuucugcuccugcuucagcccccuccccugcucgcucgcgcccugccucccgacgugcaccaucugcacgcugagagacggggcccucaaccguggcaugccgcgcuccccuccucuccugcccccgcuccugccacacaggaagcuccccgcccggccagcucccugagaccuccccggugcggggucccugaucccucugacggacuuagcgcgcgcaacagacagaagcggauccugcgcuuccccuggcagcucguucaagaacaggugagacagacaauggccgaggcucugaaagugugguccgaugucacgccucuuaccuuuacagaggugcacgaaggccgggccgacauuaugaucgauuucgcucgcuacuggcauggggacgaucugccguuugacggacccggcgggauucucgcccacgccuucuuuccuaagacccacagagagggagauguucauuucgacuaugaugagacauggaccaucggcgacgaucagggcacagaccugcugcaaguggcugcgcacgaauuugggcauguccucggacugcagcacaccacggccgcuaaagcccuuaugucugccuucuacaccuuucgguauccccugagccucuccccugacgauugucgcggcgugcagcaccuguacgggcagcccuggccgacaguuaccagcagaaccccugcucuuggaccccaagccggcauugacacaaaugagaucgcgccucuggaacccgaugcuccucccgacgccugcgaggccucuuucgaugcuguguccacgaucagaggggagcucuuuuucuuuaaggccggauucgucuggcggcugcgcggcggccagcugcagccgggguauccugcucucgccagccggcauuggcaaggacugcccucucccguggacgcggccuucgaagaugcucagggccacauuugguuuuuccaggggacaaccggaguguccaccccugccccgggcgucuga

SEQ ID NO: 2764 - protein, 267 aa, Artificial Sequence
  MMP7__Homo_sapiens__P09237
MRLTVLCAVCLLPGSLALPLPQEAGGMSELQWEQAQDYLKRFYLYDSETKNANSLEAKLKEMQKFFGLPITGMLNSRVIEIMQKPRCGVPDVAEYSLFPNSPKWTSKVVTYRIVSYTRDLPHITVDRLVSKALNMWGKEIPLHFRKVVWGTADIMIGFARGAHGDSYPFDGPGNTLAHAFAPGTGLGGDAHFDEDERWTDGSSLGINFLYAATHELGHSLGMGHSSDPNAVMYPTYGNGDPQNFKLSQDDIKGIQKLYGKRSNSRKK

SEQ ID NO: 2765 - RNA, 804 nt, Artificial Sequence
  MMP7__Homo_sapiens__AAV40839
augcgacucaccgugcugugugcugugugccugcugccuggcagccuggcccugccgcugccucaggaggcgggaggcaugagugagcuacagugggaacaggcucaggacuaucucaagagauuuuaucucuaugacucagaaacaaaaaaugccaacaguuuagaagccaaacucaaggagaugcaaaaauucuuuggccuaccuauaacuggaauguuaaacucccgcgucauagaaauaaugcagaagcccagauguggagugccagauguugcagaauacucacuauuuccaaauagcccaaaauggacuuccaaaguggucaccuacaggaucguaucauauacucgagacuuaccgcauauuacaguggaucgauuagugucaaaggcuuuaaacauguggggcaaagagaucccccugcauuucaggaaaguuguauggggaacugcugacaucaugauuggcuuugcgcgaggagcucauggggacuccuacccauuugaugggccaggaaacacgcuggcucaugccuuugcgccugggacaggucucggaggagaugcucacuucgaugaggaugaacgcuggacggaugguagcagucuagggauuaacuuccuguaugcugcaacucaugaacuuggccauucuuuggguaugggacauuccucugauccuaaugcagugauguauccaaccuauggaaauggagauccccaaaauuuuaaacuuucccaggaugauauuaaaggcauucagaaacuauauggaaagagaaguaauucaagaaagaaauag

SEQ ID NO: 2766 - RNA, 804 nt, Artificial Sequence
  derived and/or modified sequence opt1 from MMP7__Homo_sapiens__AAV40839
augcgccugaccgugcucugcgccgucugccugcugcccggcagccucgcccugccgcugccccaggaggccgggggcauguccgagcuccagugggagcaggcgcaggacuaccugaagcgguucuaccuguacgacagcgagaccaagaacgccaacucccucgaggccaagcugaaggagaugcagaaguucuucgggcugcccaucacgggcaugcucaacagccgcgugaucgagaucaugcagaagccccggugcggggugccggacgucgccgaguacucccuguuccccaacagccccaaguggaccuccaagguggugaccuaccgcaucgucagcuacacccgggaccugccccacaucacgguggaccgccucguguccaaggcgcugaacauguggggcaaggagaucccgcugcacuuccggaaggucguguggggcaccgccgacaucaugaucggguucgcccgcggcgcccacggggacagcuaccccuucgacggccccgggaacacccucgcgcacgccuucgcccccggcaccggccucgggggcgacgcccacuucgacgaggacgagcgguggacggacggguccagccugggcaucaacuuccuguacgccgcgacccacgagcugggccacucccuggggaugggccacagcuccgacccgaacgccgugauguaccccaccuacgggaacggcgacccccagaacuucaagcucagccaggacgacaucaaggggauccagaagcuguacggcaagcgcuccaacagccggaagaaguga

SEQ ID NO: 2767 - RNA, 804 nt, Artificial Sequence
  derived and/or modified sequence opt2 from MMP7__Homo_sapiens__AAV40839
augcgccucaccguccucugcgccgucugccuccuccccggcucccucgcccucccccucccccaggaggccggcggcauguccgagcuccagugggagcaggcccaggacuaccucaagcgcuucuaccucuacgacuccgagaccaagaacgccaacucccucgaggccaagcucaaggagaugcagaaguucuucggccuccccaucaccggcaugcucaacucccgcgucaucgagaucaugcagaagccccgcugcggcguccccgacgucgccgaguacucccucuuccccaacucccccaaguggaccuccaaggucgucaccuaccgcaucgucuccuacacccgcgaccucccccacaucaccgucgaccgccucgucuccaaggcccucaacauguggggcaaggagaucccccuccacuuccgcaaggucgucuggggcaccgccgacaucaugaucggcuucgcccgcggcgcccacggcgacuccuaccccuucgacggccccggcaacacccucgcccacgccuucgcccccggcaccggccucggcggcgacgcccacuucgacgaggacgagcgcuggaccgacggcuccucccucggcaucaacuuccucuacgccgccacccacgagcucggccacucccucggcaugggccacuccuccgaccccaacgccgucauguaccccaccuacggcaacggcgacccccagaacuucaagcucucccaggacgacaucaagggcauccagaagcucuacggcaagcgcuccaacucccgcaagaaguga

SEQ ID NO: 2768 - RNA, 804 nt, Artificial Sequence
  derived and/or modified sequence opt3 from MMP7__Homo_sapiens__AAV40839
augagacugaccgugcucugcgccgucugucuucugcccggcagcuuggcuuuaccucugccacaggaggcagggggaauguccgaacuacaaugggagcaggcccaggacuaccucaagagguucuaucuguacgauucugaaacaaagaacgcuaauucacuugaggcgaagcugaaagaaaugcagaaguuuuucgguuugccgaucacuggcaugcucaacagucggguuauugagauaaugcaaaaaccccgcugcggggugccugacguagccgaguauagccuguuuccaaauucccccaaguggacgucuaagguggucaccuaccgaaucgugucguauacacgugaucugccucacauuacuguugacagacucgugucaaaagcauuaaacauguggggaaaggaaaucccacugcauuucaggaaagucguguggggcaccgccgauauuaugaucgguuuugcucgcggggcacacggagacagcuaccccuucgauggcccuggcaauacacuugcccaugcuuuugccccagggaccggauuggguggcgacgcgcacuucgaugaggacgaacgguggacugaugggaguucccugggaauaaacuuucuauaugcagccacacaugagcucggccacucucuggguauggggcacagcuccgacccgaaugcuguaauguaccccaccuacggaaacggcgauccucagaauuucaaacuuucacaggacgacaucaaaggcauucagaagcuguaugggaagagaaguaacagcaggaaaaaguga

SEQ ID NO: 2769 - RNA, 804 nt, Artificial Sequence
  derived and/or modified sequence opt4 from MMP7__Homo_sapiens__AAV40839
augagacugaccgugcugugcgccgugugccugcugcccggcagccuggcccugccccugccccaggaggccggcggcaugagcgagcugcagugggagcaggcccaggacuaccugaagagauucuaccuguacgacagcgagaccaagaacgccaacagccuggaggccaagcugaaggagaugcagaaguucuucggccugcccaucaccggcaugcugaacagcagagugaucgagaucaugcagaagcccagaugcggcgugcccgacguggccgaguacagccuguuccccaacagccccaaguggaccagcaagguggugaccuacagaaucgugagcuacaccagagaccugccccacaucaccguggacagacuggugagcaaggcccugaacauguggggcaaggagaucccccugcacuucagaaaggugguguggggcaccgccgacaucaugaucggcuucgccagaggcgcccacggcgacagcuaccccuucgacggccccggcaacacccuggcccacgccuucgcccccggcaccggccugggcggcgacgcccacuucgacgaggacgagagauggaccgacggcagcagccugggcaucaacuuccuguacgccgccacccacgagcugggccacagccugggcaugggccacagcagcgaccccaacgccgugauguaccccaccuacggcaacggcgacccccagaacuucaagcugagccaggacgacaucaagggcauccagaagcuguacggcaagagaagcaacagcagaaagaaguga

SEQ ID NO: 2770 - RNA, 804 nt, Artificial Sequence
  derived and/or modified sequence opt5 from MMP7__Homo_sapiens__AAV40839
augagacugaccgugcucugcgccgucugucugcuucccggcagccuggcucucccucugccgcaggaggccgggggaauguccgaacuucaaugggagcaggcgcaggacuaccugaagcgguucuaucucuacgauucugaaacaaagaacgcuaauagccuggaggccaagcugaaagaaaugcagaaguuuuucggccuccccaucacggggaugcugaacucccgcguuauugagaucaugcaaaaaccuagaugcggagugcccgacguggccgaguauucucuuuuuccuaauagccccaaguggaccuccaaggucgugacauaccggauuguuucuuauacccgcgaucugccucacaucacaguggacagacucgucagcaaagcucugaacauguggggcaaggaaauuccgcuucauuuccggaaagugguuugggggaccgccgauaucaugaucggauuugcucgcggcgcccacggcgacuccuaccccuucgaugggccuggaaauacacuggcgcaugccuuugcucccggcaccgggcucggaggcgacgcccacuucgaugaggacgaaagauggacggaugggagcucucugggaauuaacuuucuguaugcugccacccaugagcucggccacucccugggcauggggcacagcucugacccuaaugcggugauguaccccacauacggaaacggcgauccgcagaauuucaaacuuucccaggacgacaucaaagggauucagaagcuguauggaaagcggagcaacucucgcaaaaaguga

SEQ ID NO: 2771 - protein, 1255 aa, Artificial Sequence
  MUC-1__Homo_sapiens__AAA60019
MTPGTQSPFFLLLLLTVLTVVTGSGHASSTPGGEKETSATQRSSVPSSTEKNAVSMTSSVLSSHSPGSGSSTTQGQDVTLAPATEPASGSAATWGQDVTSVPVTRPALGSTTPPAHDVTSAPDNKPAPGSTAPPAHGVTSAPDTRPAPGSTAPPAHGVTSAPDTRPAPGSTAPPAHGVTSAPDTRPAPGSTAPPAHGVTSAPDTRPAPGSTAPPAHGVTSAPDTRPAPGSTAPPAHGVTSAPDTRPAPGSTAPPAHGVTSAPDTRPAPGSTAPPAHGVTSAPDTRPAPGSTAPPAHGVTSAPDTRPAPGSTAPPAHGVTSAPDTRPAPGSTAPPAHGVTSAPDTRPAPGSTAPPAHGVTSAPDTRPAPGSTAPPAHGVTSAPDTRPAPGSTAPPAHGVTSAPDTRPAPGSTAPPAHGVTSAPDTRPAPGSTAPPAHGVTSAPDTRPAPGSTAPPAHGVTSAPDTRPAPGSTAPPAHGVTSAPDTRPAPGSTAPPAHGVTSAPDTRPAPGSTAPPAHGVTSAPDTRPAPGSTAPPAHGVTSAPDTRPAPGSTAPPAHGVTSAPDTRPAPGSTAPPAHGVTSAPDTRPAPGSTAPPAHGVTSAPDTRPAPGSTAPPAHGVTSAPDTRPAPGSTAPPAHGVTSAPDTRPAPGSTAPPAHGVTSAPDTRPAPGSTAPPAHGVTSAPDTRPAPGSTAPPAHGVTSAPDTRPAPGSTAPPAHGVTSAPDTRPAPGSTAPPAHGVTSAPDTRPAPGSTAPPAHGVTSAPDTRPAPGSTAPPAHGVTSAPDTRPAPGSTAPPAHGVTSAPDTRPAPGSTAPPAHGVTSAPDTRPAPGSTAPPAHGVTSAPDTRPAPGSTAPPAHGVTSAPDTRPAPGSTAPPAHGVTSAPDTRPAPGSTAPPAHGVTSAPDTRPAPGSTAPPAHGVTSAPDTRPAPGSTAPPAHGVTSAPDNRPALGSTAPPVHNVTSASGSASGSASTLVHNGTSARATTTPASKSTPFSIPSHHSDTPTTLASHSTKTDASSTHHSSVPPLTSSNHSTSPQLSTGVSFFFLSFHISNLQFNSSLEDPSTDYYQELQRDISEMFLQIYKQGGFLGLSNIKFRPGSVVVQLTLAFREGTINVHDVETQFNQYKTEAASRYNLTISDVSVSDVPFPFSAQSGAGVPGWGIALLVLVCVLVALAIVYLIALAVCQCRRKNYGQLDIFPARDTYHPMSEYPTYHTHGRYVPPSSTDRSPYEKVSAGNGGSSLSYTNPAVAAASANL

SEQ ID NO: 2772 - RNA, 3768 nt, Artificial Sequence
  MUC-1__Homo_sapiens__J05582.1
augacaccgggcacccagucuccuuucuuccugcugcugcuccucacagugcuuacaguuguuacagguucuggucaugcaagcucuaccccagguggagaaaaggagacuucggcuacccagagaaguucagugcccagcucuacugagaagaaugcugugaguaugaccagcagcguacucuccagccacagccccgguucaggcuccuccaccacucagggacaggaugucacucuggccccggccacggaaccagcuucagguucagcugccaccuggggacaggaugucaccucggucccagucaccaggccagcccugggcuccaccaccccgccagcccacgaugucaccucagccccggacaacaagccagccccgggcuccaccgcccccccagcccacggugucaccucggccccggacaccaggccggccccgggcuccaccgcccccccagcccacggugucaccucggccccggacaccaggccggccccgggcuccaccgcccccccagcccacggugucaccucggccccggacaccaggccggccccgggcuccaccgcccccccagcccacggugucaccucggccccggacaccaggccggccccgggcuccaccgcccccccagcccacggugucaccucggccccggacaccaggccggccccgggcuccaccgcccccccagcccacggugucaccucggccccggacaccaggccggccccgggcuccaccgcccccccagcccacggugucaccucggccccggacaccaggccggccccgggcuccaccgcccccccagcccacggugucaccucggccccggacaccaggccggccccgggcuccaccgcccccccagcccacggugucaccucggccccggacaccaggccggccccgggcuccaccgcccccccagcccacggugucaccucggccccggacaccaggccggccccgggcuccaccgcccccccagcccacggugucaccucggccccggacaccaggccggccccgggcuccaccgcccccccagcccacggugucaccucggccccggacaccaggccggccccgggcuccaccgcccccccagcccacggugucaccucggccccggacaccaggccggccccgggcuccaccgcccccccagcccacggugucaccucggccccggacaccaggccggccccgggcuccaccgcccccccagcccacggugucaccucggccccggacaccaggccggccccgggcuccaccgcccccccagcccacggugucaccucggccccggacaccaggccggccccgggcuccaccgcccccccagcccacggugucaccucggccccggacaccaggccggccccgggcuccaccgcccccccagcccacggugucaccucggccccggacaccaggccggccccgggcuccaccgcccccccagcccacggugucaccucggccccggacaccaggccggccccgggcuccaccgcccccccagcccacggugucaccucggccccggacaccaggccggccccgggcuccaccgcccccccagcccacggugucaccucggccccggacaccaggccggccccgggcuccaccgcccccccagcccacggugucaccucggccccggacaccaggccggccccgggcuccaccgcccccccagcccacggugucaccucggccccggacaccaggccggccccgggcuccaccgcccccccagcccacggugucaccucggccccggacaccaggccggccccgggcuccaccgcccccccagcccacggugucaccucggccccggacaccaggccggccccgggcuccaccgcccccccagcccacggugucaccucggccccggacaccaggccggccccgggcuccaccgcccccccagcccacggugucaccucggccccggacaccaggccggccccgggcuccaccgcccccccagcccacggugucaccucggccccggacaccaggccggccccgggcuccaccgcccccccagcccacggugucaccucggccccggacaccaggccggccccgggcuccaccgcccccccagcccacggugucaccucggccccggacaccaggccggccccgggcuccaccgcccccccagcccacggugucaccucggccccggacaccaggccggccccgggcuccaccgcccccccagcccacggugucaccucggccccggacaccaggccggccccgggcuccaccgcccccccagcccacggugucaccucggccccggacaccaggccggccccgggcuccaccgcccccccagcccacggugucaccucggccccggacaccaggccggccccgggcuccaccgcccccccagcccacggugucaccucggccccggacaccaggccggccccgggcuccaccgcccccccagcccacggugucaccucggccccggacaccaggccggccccgggcuccaccgcccccccagcccacggugucaccucggccccggacaccaggccggccccgggcuccaccgcccccccagcccacggugucaccucggccccggacaccaggccggccccgggcuccaccgcccccccagcccacggugucaccucggccccggacaccaggccggccccgggcuccaccgcccccccagcccacggugucaccucggccccggacaccaggccggccccgggcuccaccgcccccccagcccauggugucaccucggccccggacaacaggcccgccuugggcuccaccgccccuccaguccacaaugucaccucggccucaggcucugcaucaggcucagcuucuacucuggugcacaacggcaccucugccagggcuaccacaaccccagccagcaagagcacuccauucucaauucccagccaccacucugauacuccuaccacccuugccagccauagcaccaagacugaugccaguagcacucaccauagcucgguaccuccucucaccuccuccaaucacagcacuucuccccaguugucuacuggggucucuuucuuuuuccugucuuuucacauuucaaaccuccaguuuaauuccucucuggaagaucccagcaccgacuacuaccaagagcugcagagagacauuucugaaauguuuuugcagauuuauaaacaaggggguuuucugggccucuccaauauuaaguucaggccaggaucuguggugguacaauugacucuggccuuccgagaagguaccaucaauguccacgacguggagacacaguucaaucaguauaaaacggaagcagccucucgauauaaccugacgaucucagacgucagcgugagugaugugccauuuccuuucucugcccagucuggggcuggggugccaggcuggggcaucgcgcugcuggugcuggucuguguucugguugcgcuggccauugucuaucucauugccuuggcugucugucagugccgccgaaagaacuacgggcagcuggacaucuuuccagcccgggauaccuaccauccuaugagcgaguaccccaccuaccacacccaugggcgcuaugugcccccuagcaguaccgaucguagccccuaugagaagguuucugcagguaacgguggcagcagccucucuuacacaaacccagcaguggcagccgcuucugccaacuuguag

SEQ ID NO: 2773 - RNA, 3768 nt, Artificial Sequence
  derived and/or modified sequence opt1 from MUC-1__Homo_sapiens__J05582.1
augacccccggcacccagagcccguucuuccugcuccugcugcucacggugcugaccgucgugaccggguccggccacgccagcuccacccccgggggcgagaaggagacgagcgccacccagcgcuccagcgugcccuccagcaccgagaagaacgcggucuccaugaccagcuccgugcugagcucccacagccccggguccggcagcuccacgacccagggccaggacgugacccucgccccggccaccgagcccgccagcggguccgccgcgacguggggccaggacgucaccagcgugcccgugacccggcccgcccuggggagcaccacgccgcccgcccacgacgucaccuccgcccccgacaacaagcccgcgccgggcagcaccgccccgcccgcccacggggugaccuccgcccccgacacgcgccccgcccccggcagcaccgcgccgcccgcccacggcgugaccuccgcccccgacacccggcccgcccccgggagcacggcgcccccggcccacggcgucaccuccgcccccgacacccgccccgcccccgggagcaccgccccgcccgcccacggcgugacguccgcgcccgacacccggccggcccccggcagcaccgccccgcccgcccacggggugaccuccgcccccgacacgcgccccgcgcccggcagcaccgcgcccccggcccacggggucaccuccgcccccgacacccggcccgcccccggcagcacggccccgcccgcccacggggugaccuccgcccccgacacccgccccgccccgggcagcaccgcgccgcccgcccacggcgugaccuccgcccccgacacgcggcccgcccccgggagcaccgccccgcccgcgcacggcgucaccuccgcccccgacacccgccccgcccccgggagcacggccccgcccgcccacggcgugaccagcgcgcccgacacccggcccgccccgggguccaccgccccgcccgcccacggcgugacgagcgcgcccgacacccgccccgcccccggcuccaccgccccgcccgcccacggggucaccagcgcccccgacacgcggcccgcgcccggcuccaccgcgcccccggcccacggggugaccagcgcccccgacacccgccccgcccccggcuccacggccccgcccgcccacggggugaccagcgcccccgacacccggcccgccccgggcuccaccgccccgcccgcgcacggcgucacgagcgcccccgacacccgccccgcccccggguccaccgcgcccccggcccacggcgugaccagcgcccccgacacgcggcccgcccccggguccaccgccccgcccgcccacggcgucaccagcgcgcccgacacccgccccgccccgggcuccacggccccgcccgcccacggggugaccagcgcccccgacacccggcccgcgcccggcuccaccgccccgcccgcccacggggugacgagcgcccccgacacccgccccgcccccggcagcaccgcgcccccggcccacggggucaccuccgcccccgacacgcggcccgcccccggcagcaccgccccgcccgcgcacggcgugaccuccgcccccgacacccgccccgccccggggagcaccgccccgcccgcgcacggcgugacguccgcccccgacacccgccccgcccccgggagcaccgcgcccccggcccacggcgucaccuccgcccccgacacgcggcccgcccccgggagcaccgccccgcccgcccacggcgugaccuccgcccccgacacccgccccgcgccgggcagcacggccccgcccgcccacggggugaccuccgcccccgacacccggcccgcccccggcagcaccgcgccgcccgcccacggggucacguccgcccccgacacccgccccgcccccggcagcaccgcgcccccggcccacggggugaccuccgcccccgacacgcggcccgccccgggcagcaccgccccgcccgcgcacggcgugaccuccgcccccgacacccgccccgcccccgggagcacggccccgcccgcccacggcgucaccuccgcgcccgacacccggcccgcccccgggagcaccgcgcccccggcccacggcgugacgagcgcccccgacacccgccccgcccccggguccaccgccccgcccgcccacggcgugaccagcgcccccgacacgcggcccgcgccgggcuccaccgccccgcccgcccacggggucaccagcgcccccgacacccgccccgcccccggcuccacggcgccgcccgcccacggggugaccagcgcccccgacacccggcccgcccccggcuccaccgccccgcccgcgcacggcgugacgagcgcccccgacacccgccccgccccgggguccaccgccccgcccgcccacggcgucaccagcgcgcccgacacccggcccgcccccggguccacggccccgcccgcccacggcgugaccagcgcccccgacacccgccccgcgcccggguccaccgcgcccccggcccacggcgugacgagcgcccccgacacccggcccgcccccggcuccaccgccccgcccgcccacggggucaccagcgcccccgacacgcgccccgccccgggcuccaccgcgccgcccgcccacggggugaccagcgcccccgacacccggcccgcccccggcuccacggcgcccccggcccacggggugaccagcgcccccgacacccgccccgcccccggcagcaccgccccgcccgcccacggcgucacguccgcgcccgacaaccggcccgcccuggggagcaccgccccgcccgugcacaacgugaccuccgccagcggcuccgcgagcggguccgccagcacccucguccacaacggcacguccgcccgcgccaccaccacccccgccagcaaguccacgcccuucagcaucccgucccaccacagcgacacccccaccacccuggcgucccacagcacgaagaccgacgccuccagcacccaccacuccagcgugccgccccugaccagcuccaaccacagcacgagcccccagcucuccaccgggguguccuucuucuuccugagcuuccacaucuccaaccugcaguucaacagcucccucgaggaccccagcaccgacuacuaccaggagcugcagcgcgacaucuccgagauguuccugcagaucuacaagcagggcggcuuccucgggcugagcaacaucaaguuccggcccggcuccgucguggugcagcugacccucgccuuccgcgaggggacgaucaacguccacgacguggagacccaguucaaccaguacaagaccgaggccgccagccgguacaaccugaccaucuccgacgugagcgucuccgacgugcccuucccguucagcgcgcaguccggcgccggcgugcccggguggggcaucgcccugcucguccuggugugcgugcuggucgcccucgccaucguguaccugaucgcgcuggccgugugccagugccgccggaagaacuacgggcagcucgacaucuuccccgcccgcgacacguaccaccccaugagcgaguacccgaccuaccacacccacggccgguacgucccgcccagcuccaccgaccgcagccccuacgagaagguguccgccgggaacggcggcagcucccugagcuacaccaaccccgcgguggccgccgccuccgccaaccuguga

SEQ ID NO: 2774 - RNA, 3768 nt, Artificial Sequence
  derived and/or modified sequence opt2 from MUC-1__Homo_sapiens__J05582.1
augacccccggcacccagucccccuucuuccuccuccuccuccucaccguccucaccgucgucaccggcuccggccacgccuccuccacccccggcggcgagaaggagaccuccgccacccagcgcuccuccguccccuccuccaccgagaagaacgccgucuccaugaccuccuccguccucuccucccacucccccggcuccggcuccuccaccacccagggccaggacgucacccucgcccccgccaccgagcccgccuccggcuccgccgccaccuggggccaggacgucaccuccguccccgucacccgccccgcccucggcuccaccaccccccccgcccacgacgucaccuccgcccccgacaacaagcccgcccccggcuccaccgccccccccgcccacggcgucaccuccgcccccgacacccgccccgcccccggcuccaccgccccccccgcccacggcgucaccuccgcccccgacacccgccccgcccccggcuccaccgccccccccgcccacggcgucaccuccgcccccgacacccgccccgcccccggcuccaccgccccccccgcccacggcgucaccuccgcccccgacacccgccccgcccccggcuccaccgccccccccgcccacggcgucaccuccgcccccgacacccgccccgcccccggcuccaccgccccccccgcccacggcgucaccuccgcccccgacacccgccccgcccccggcuccaccgccccccccgcccacggcgucaccuccgcccccgacacccgccccgcccccggcuccaccgccccccccgcccacggcgucaccuccgcccccgacacccgccccgcccccggcuccaccgccccccccgcccacggcgucaccuccgcccccgacacccgccccgcccccggcuccaccgccccccccgcccacggcgucaccuccgcccccgacacccgccccgcccccggcuccaccgccccccccgcccacggcgucaccuccgcccccgacacccgccccgcccccggcuccaccgccccccccgcccacggcgucaccuccgcccccgacacccgccccgcccccggcuccaccgccccccccgcccacggcgucaccuccgcccccgacacccgccccgcccccggcuccaccgccccccccgcccacggcgucaccuccgcccccgacacccgccccgcccccggcuccaccgccccccccgcccacggcgucaccuccgcccccgacacccgccccgcccccggcuccaccgccccccccgcccacggcgucaccuccgcccccgacacccgccccgcccccggcuccaccgccccccccgcccacggcgucaccuccgcccccgacacccgccccgcccccggcuccaccgccccccccgcccacggcgucaccuccgcccccgacacccgccccgcccccggcuccaccgccccccccgcccacggcgucaccuccgcccccgacacccgccccgcccccggcuccaccgccccccccgcccacggcgucaccuccgcccccgacacccgccccgcccccggcuccaccgccccccccgcccacggcgucaccuccgcccccgacacccgccccgcccccggcuccaccgccccccccgcccacggcgucaccuccgcccccgacacccgccccgcccccggcuccaccgccccccccgcccacggcgucaccuccgcccccgacacccgccccgcccccggcuccaccgccccccccgcccacggcgucaccuccgcccccgacacccgccccgcccccggcuccaccgccccccccgcccacggcgucaccuccgcccccgacacccgccccgcccccggcuccaccgccccccccgcccacggcgucaccuccgcccccgacacccgccccgcccccggcuccaccgccccccccgcccacggcgucaccuccgcccccgacacccgccccgcccccggcuccaccgccccccccgcccacggcgucaccuccgcccccgacacccgccccgcccccggcuccaccgccccccccgcccacggcgucaccuccgcccccgacacccgccccgcccccggcuccaccgccccccccgcccacggcgucaccuccgcccccgacacccgccccgcccccggcuccaccgccccccccgcccacggcgucaccuccgcccccgacacccgccccgcccccggcuccaccgccccccccgcccacggcgucaccuccgcccccgacacccgccccgcccccggcuccaccgccccccccgcccacggcgucaccuccgcccccgacacccgccccgcccccggcuccaccgccccccccgcccacggcgucaccuccgcccccgacacccgccccgcccccggcuccaccgccccccccgcccacggcgucaccuccgcccccgacacccgccccgcccccggcuccaccgccccccccgcccacggcgucaccuccgcccccgacacccgccccgcccccggcuccaccgccccccccgcccacggcgucaccuccgcccccgacacccgccccgcccccggcuccaccgccccccccgcccacggcgucaccuccgcccccgacacccgccccgcccccggcuccaccgccccccccgcccacggcgucaccuccgcccccgacacccgccccgcccccggcuccaccgccccccccgcccacggcgucaccuccgcccccgacacccgccccgcccccggcuccaccgccccccccgcccacggcgucaccuccgcccccgacaaccgccccgcccucggcuccaccgccccccccguccacaacgucaccuccgccuccggcuccgccuccggcuccgccuccacccucguccacaacggcaccuccgcccgcgccaccaccacccccgccuccaaguccacccccuucuccauccccucccaccacuccgacacccccaccacccucgccucccacuccaccaagaccgacgccuccuccacccaccacuccuccguccccccccucaccuccuccaaccacuccaccuccccccagcucuccaccggcgucuccuucuucuuccucuccuuccacaucuccaaccuccaguucaacuccucccucgaggaccccuccaccgacuacuaccaggagcuccagcgcgacaucuccgagauguuccuccagaucuacaagcagggcggcuuccucggccucuccaacaucaaguuccgccccggcuccgucgucguccagcucacccucgccuuccgcgagggcaccaucaacguccacgacgucgagacccaguucaaccaguacaagaccgaggccgccucccgcuacaaccucaccaucuccgacgucuccgucuccgacguccccuuccccuucuccgcccaguccggcgccggcguccccggcuggggcaucgcccuccucguccucgucugcguccucgucgcccucgccaucgucuaccucaucgcccucgccgucugccagugccgccgcaagaacuacggccagcucgacaucuuccccgcccgcgacaccuaccaccccauguccgaguaccccaccuaccacacccacggccgcuacgucccccccuccuccaccgaccgcucccccuacgagaaggucuccgccggcaacggcggcuccucccucuccuacaccaaccccgccgucgccgccgccuccgccaaccucuga

SEQ ID NO: 2775 - RNA, 3768 nt, Artificial Sequence
  derived and/or modified sequence opt3 from MUC-1__Homo_sapiens__J05582.1
augacccccggcacacagagcccuuucuuucugcuccuucuguugacuguguuaacggucguuaccggguccggacacgccucuucaacaccagguggcgagaaggaaaccagugcuacucaaagaagcuccgugccgucuucgacagagaaaaacgcaguaucaaugaccagcagugugcuguccucucauagccccggguccggaucaaguacuacacagggccaggacgucacccuagccccugcgacggaaccagcuagcgguucugccgcaacuugggggcaggaugugaccuccguucccgugacaaggccugcccucggaucaacuaccccacccgcucacgacgucacaagcgcaccugauaauaagccagccccgggcaguaccgcucccccugcccauggcgugacgucugcgccagacacucggcccgcaccuggguccacagccccacccgcucacggaguaaccagcgccccggauacucgcccugcacccgguucgacagcuccaccagcccauggcguuaccucugcgcccgacacgcgaccagcccccggguccaccgcaccuccagcucacggagugacaucagccccggauacucgucccgcuccuggcaguaccgccccacccgcacacggugucacaagcgccccugacacuagaccagcucccggguccaccgcgccgccugcacauggagugacaucugccccagauaccaggcccgcuccuggcagcacugccccaccagcacacggcgugacgucagccccugacacacggcccgcuccagggaguaccgccccgccugcacauggagucacuuccgcgcccgauacccgcccagcucccgguagcacagccccuccagcacacggcguuaccucugcccccgacacuagaccugcuccggggucaacagccccacccgcacacggagugacgagugcuccugauaccaggccagcccccggcagcacugcgccuccggcccaugguguaacauccgcucccgacacccggccagcaccugggucuacagcucccccagcccacggcgugacuucggccccugacacccgccccgcaccaggaagcacggcgccgccugcccauggcgucaccuccgcucccgauacacgaccagcccccgggucaacugcaccuccagcucacggagugaccagugcccccgacacaagaccugcaccggguucuacugccccacccgcucauggcguuaccagcgcgccugauacgaggcccgccccaggguccacagcaccucccgcucacggagugaccucagccccagacacucggccugccccgggcagcacagcucccccagcacacggugucaccucugccccugauacucgucccgcgccaggguccaccgcuccucccgcccauggcgugacaagugcaccggacacgcgcccagccccuggaagcaccgcucccccagcacacggcguaacuucugcccccgauacaagaccugcgccgggguccaccgcucccccagcccauggaguuacaucagcaccugacacuaggcccgccccugguaguaccgcuccacccgcccacggcgugacgagcgcaccugauacacggccagcucccgggucgaccgccccgccugcgcacggagucacuuccgccccagacacccgacccgcaccuggcucuacagcuccacccgcccauggugugacuagcgcuccggauacccgcccugcacccgggucaacagccccuccugcccacggcgucacgagugcucccgacaccagaccagcgcccggauccacugcaccuccagcccauggcgugacaucugcuccggacaccaggcccgccccugggagcacugcaccacccgcccacggaguuacauccgcuccugauacccggccagcgcccggcucaacggccccuccggcacauggugugacuagcgcuccagacacccgccccgccccugggaguacagcacccccagcccacggaguaaccucugcuccugauacuagacccgccccaggcuccacagcgccgccugcacacggugucaccagcgcccccgacacaaggccagcucccggcucgacugccccuccagcucauggggugaccucagcacccgauacgcguccugccccgggaucuacagcuccacccgcccacggcguuaccagugcaccugacacucggccagcgcccggguccaccgccccucccgcucauggagugacaagcgccccagauacucgaccggcaccuggcucuaccgcucccccagcccacggugucacgagcgcaccugacacaagacccgccccaggguccaccgcuccucccgcgcauggagugacuucagccccggauacaaggccagcaccuggcaguaccgcucccccagcccacgguguaacuagcgcccccgacacacgcccugcaccgggcucuaccgcuccacccgcccacggggugacguccgcgccugauacucggcccgcuccaggaucaaccgccccucccgcacauggcguuacaagugccccagacaccagaccugcuccggggagcacagcacccccagcccacggagucacuuccgcgccugauaccaggcccgcuccaggcucuacggccccucccgcacauggugugacaucggccccggacacucgcccagcuccugggagcaccgcacccccagcccacggagugacaucagcucccgacacccgaccugcccccggcuccacugcgcccccugcccacggugucaccagugcaccggauaaccggcccgcucugggcucuacagccccaccuguucauaaugugacgagcgcauccgggucagcuucuggaagcgccaguacucuugugcacaacggcaccuccgcccgugcgacaaccacucccgcuagcaaaucuacaccauucucaaucccuucccaucacagugacacccccacgacucuggcaagccauucgacaaagaccgaugccucuuccacccaccacagcucaguaccgccuuugacaaguucuaaucauuccacuagcccacaacucucaaccggggucagcuuuuucuuucugaguuuccacauuuccaaccugcaguuuaauucuagccucgaggaccccuccacagauuacuaucaggaauuacagagagacauaucagagauguuccugcaaaucuacaaacagggaggcuuucuugguuugucuaacauuaaguucaggccugggagugugguugugcagcugacucuagcuuuucgcgagggaacgaucaauguccaugauguggaaacccaguucaaccaauauaagacagaggccgcaucgcgguacaaucucacuauuagcgacguuuccgugucugauguaccauuucccuucucagcccagagcggcgcuggcgucccuggguggggaaucgcgcugcuugugcuggugugcgucuugguugcccucgcaauaguguaucugaucgcuuuagccguaugucagugcagaaggaaaaacuacggucaacuggacauuuucccagcacgagauaccuaucaccccauguccgaauacccgacauaccacacccauggccgcuaugugccucccaguucuacugaccggagcccauacgagaaggucucagccgggaauggaggcuccagucucagcuauacgaaccccgcuguggccgcggcaucugccaaucuuuga

SEQ ID NO: 2776 - RNA, 3768 nt, Artificial Sequence
  derived and/or modified sequence opt4 from MUC-1__Homo_sapiens__J05582.1
augacccccggcacccagagccccuucuuccugcugcugcugcugaccgugcugaccguggugaccggcagcggccacgccagcagcacccccggcggcgagaaggagaccagcgccacccagagaagcagcgugcccagcagcaccgagaagaacgccgugagcaugaccagcagcgugcugagcagccacagccccggcagcggcagcagcaccacccagggccaggacgugacccuggcccccgccaccgagcccgccagcggcagcgccgccaccuggggccaggacgugaccagcgugcccgugaccagacccgcccugggcagcaccaccccccccgcccacgacgugaccagcgcccccgacaacaagcccgcccccggcagcaccgccccccccgcccacggcgugaccagcgcccccgacaccagacccgcccccggcagcaccgccccccccgcccacggcgugaccagcgcccccgacaccagacccgcccccggcagcaccgccccccccgcccacggcgugaccagcgcccccgacaccagacccgcccccggcagcaccgccccccccgcccacggcgugaccagcgcccccgacaccagacccgcccccggcagcaccgccccccccgcccacggcgugaccagcgcccccgacaccagacccgcccccggcagcaccgccccccccgcccacggcgugaccagcgcccccgacaccagacccgcccccggcagcaccgccccccccgcccacggcgugaccagcgcccccgacaccagacccgcccccggcagcaccgccccccccgcccacggcgugaccagcgcccccgacaccagacccgcccccggcagcaccgccccccccgcccacggcgugaccagcgcccccgacaccagacccgcccccggcagcaccgccccccccgcccacggcgugaccagcgcccccgacaccagacccgcccccggcagcaccgccccccccgcccacggcgugaccagcgcccccgacaccagacccgcccccggcagcaccgccccccccgcccacggcgugaccagcgcccccgacaccagacccgcccccggcagcaccgccccccccgcccacggcgugaccagcgcccccgacaccagacccgcccccggcagcaccgccccccccgcccacggcgugaccagcgcccccgacaccagacccgcccccggcagcaccgccccccccgcccacggcgugaccagcgcccccgacaccagacccgcccccggcagcaccgccccccccgcccacggcgugaccagcgcccccgacaccagacccgcccccggcagcaccgccccccccgcccacggcgugaccagcgcccccgacaccagacccgcccccggcagcaccgccccccccgcccacggcgugaccagcgcccccgacaccagacccgcccccggcagcaccgccccccccgcccacggcgugaccagcgcccccgacaccagacccgcccccggcagcaccgccccccccgcccacggcgugaccagcgcccccgacaccagacccgcccccggcagcaccgccccccccgcccacggcgugaccagcgcccccgacaccagacccgcccccggcagcaccgccccccccgcccacggcgugaccagcgcccccgacaccagacccgcccccggcagcaccgccccccccgcccacggcgugaccagcgcccccgacaccagacccgcccccggcagcaccgccccccccgcccacggcgugaccagcgcccccgacaccagacccgcccccggcagcaccgccccccccgcccacggcgugaccagcgcccccgacaccagacccgcccccggcagcaccgccccccccgcccacggcgugaccagcgcccccgacaccagacccgcccccggcagcaccgccccccccgcccacggcgugaccagcgcccccgacaccagacccgcccccggcagcaccgccccccccgcccacggcgugaccagcgcccccgacaccagacccgcccccggcagcaccgccccccccgcccacggcgugaccagcgcccccgacaccagacccgcccccggcagcaccgccccccccgcccacggcgugaccagcgcccccgacaccagacccgcccccggcagcaccgccccccccgcccacggcgugaccagcgcccccgacaccagacccgcccccggcagcaccgccccccccgcccacggcgugaccagcgcccccgacaccagacccgcccccggcagcaccgccccccccgcccacggcgugaccagcgcccccgacaccagacccgcccccggcagcaccgccccccccgcccacggcgugaccagcgcccccgacaccagacccgcccccggcagcaccgccccccccgcccacggcgugaccagcgcccccgacaccagacccgcccccggcagcaccgccccccccgcccacggcgugaccagcgcccccgacaccagacccgcccccggcagcaccgccccccccgcccacggcgugaccagcgcccccgacaccagacccgcccccggcagcaccgccccccccgcccacggcgugaccagcgcccccgacaccagacccgcccccggcagcaccgccccccccgcccacggcgugaccagcgcccccgacaccagacccgcccccggcagcaccgccccccccgcccacggcgugaccagcgcccccgacaccagacccgcccccggcagcaccgccccccccgcccacggcgugaccagcgcccccgacaacagacccgcccugggcagcaccgccccccccgugcacaacgugaccagcgccagcggcagcgccagcggcagcgccagcacccuggugcacaacggcaccagcgccagagccaccaccacccccgccagcaagagcacccccuucagcauccccagccaccacagcgacacccccaccacccuggccagccacagcaccaagaccgacgccagcagcacccaccacagcagcgugcccccccugaccagcagcaaccacagcaccagcccccagcugagcaccggcgugagcuucuucuuccugagcuuccacaucagcaaccugcaguucaacagcagccuggaggaccccagcaccgacuacuaccaggagcugcagagagacaucagcgagauguuccugcagaucuacaagcagggcggcuuccugggccugagcaacaucaaguucagacccggcagcgugguggugcagcugacccuggccuucagagagggcaccaucaacgugcacgacguggagacccaguucaaccaguacaagaccgaggccgccagcagauacaaccugaccaucagcgacgugagcgugagcgacgugcccuuccccuucagcgcccagagcggcgccggcgugcccggcuggggcaucgcccugcuggugcuggugugcgugcugguggcccuggccaucguguaccugaucgcccuggccgugugccagugcagaagaaagaacuacggccagcuggacaucuuccccgccagagacaccuaccaccccaugagcgaguaccccaccuaccacacccacggcagauacgugccccccagcagcaccgacagaagccccuacgagaaggugagcgccggcaacggcggcagcagccugagcuacaccaaccccgccguggccgccgccagcgccaaccuguga

SEQ ID NO: 2777 - RNA, 3768 nt, Artificial Sequence
  derived and/or modified sequence opt5 from MUC-1__Homo_sapiens__J05582.1
augacccccggcacacagagcccuuucuuucugcuccugcuucugacggugcucaccgucguuacaggguccggacacgccucuagcaccccgggcggggagaaggaaacauccgcuacccaaagaucuagcgugcccuccucuacagagaaaaacgccgugagcaugaccuccagcguccugucuucccauagcccuggaucuggcuccagcacgacccaggggcaggacgugacacuugcgcccgcuaccgaaccugccucuggauccgccgcuacauggggccaggauguuaccagcgugcccgucacgcggccugcccugggcuccacaaccccgcccgcucacgacgugacaucugccccugauaauaagcccgcgccugggagcaccgcucccccggcccauggaguuaccuccgccccugacacacgccccgcuccuggcagcacggccccucccgcgcacggggugaccucugcccccgauacaagaccggcucccggauccaccgccccucccgcucauggcgucacaagcgccccugacacccggcccgccccggggucuacggcuccucccgcgcacggagugacaagcgccccugauacccgccccgcuccuggcuccaccgcucccccggcccacggcgugacaucugccccugacaccagacccgcccccgggagcacagcgccuccggcucauggagucacguccgcccccgauacccggccugcccccggcagcacagcuccucccgcccacgggguuaccucugcuccugacacacgccccgccccgggauccaccgcgccucccgcccauggcgugacgagcgcuccugauaccagacccgccccggggucuacagcuccucccgcccacggagugaccuccgcgccugacacacggcccgcccccggcagcaccgcuccuccggcccacggcgucacguccgcucccgauacacgcccugcccccgggucuaccgccccucccgcucauggagugacaagcgcgccugacaccagaccggcccccggcuccaccgcuccucccgcccacgggguuacaucugccccugacacgcggcccgcuccgggaagcaccgccccucccgcgcauggcgugacauccgcucccgauacccgcccugcccccgggagcacagccccuccggcucacggcgucaccucugcccccgacacgagaccugcgcccggauccacagcuccucccgcccauggcgugaccagcgccccggauacccggccugcucccgggucuacagccccucccgcucacggaguuaccuccgccccugacacacgccccgcgccgggcagcacggccccucccgcucacggggugaccucugcccccgauacaagaccugcuccgggaagcaccgcucccccugcccauggcgucacauccgcccccgacacccggccugcgcccgggagcacggccccuccggcucacggcgugaccucugcccccgauacaagaccugcccccggauccaccgcuccucccgcccauggcgucacaagcgcgccggacacccgcccugcucccggguccacagcucccccugcccacggagugaccucugcccccgauacgcggccugccccgggcagcacagcgcccccugcucacgggguuaccuccgcccccgacaccagaccugcccccggaucuacagcuccgccugcccauggcgugaccagcgcucccgauacgcgcccugcccccggguccacagcgccucccgcccacggcgucaccucugcuccggacacacggccugcccccggaagcaccgcucccccugcccauggcgugacauccgccccggacaccagacccgcuccugggagcacggcgcccccugcccacggaguuaccucugcucccgauacacgcccugcccccggcuccaccgccccgccugcucauggggugacaagcgcccccgacacccggccugcgcccggaucuacggcuccgccugcccacggcgucacauccgcccccgauaccagacccgcuccugggagcacagcgcccccugcccacggcgugaccucugccccggacacccgccccgcuccuggauccacagcucccccugcccauggcgugacgagcgcccccgauacccggccugcuccgggguccacagcgcccccugcccacggaguuaccagcgcccccgacacaagaccugcucccggcucuaccgccccgccugcucauggggucacgagcgcccccgauacacgccccgccccuggauccaccgcucccccugcgcacggcgugaccucugccccggacacacggcccgcuccuggcagcaccgcucccccugcccauggggugacauccgcccccgauacgagaccggccccuggaucuaccgcgcccccugcccacggcgucacaagcgcucccgacacccggccggccccuggguccacagcuccucccgcccacggagugaccucugcgcccgauacgcgccccgccccuggcagcaccgcuccgcccgcccaugggguuacauccgcuccugacaccagacccgccccuggaagcacagcucccccugcccacggcgugaccucugcgccggauacacggcccgccccuggcuccacggcucccccugcccauggggucaccagcgcucccgacacaagaccggccccuggaucuaccgccccucccgcgcacggcgugaccuccgcucccgacacacgccccgccccugggagcacggcuccgcccgcccacggaguuaccuccgccccugauaaccggcccgcucucggcucuacagccccucccgugcauaaugucaccagcgcguccgggagcgccucuggauccgcuagcacacuggugcacaacggcaccucugccagagcuacgacaaccccggccagcaaauccaccccuuucucuauccccagccaucacuccgacacaccuaccacacuggcgucucauagcaccaagacggaugccuccagcacacaccacucuuccguucccccucucaccagcuccaaucauucuacaagcccccaacuguccaccggcgugagcuuuuucuuucuuucuuuccacauuuccaaccugcaguuuaauagcucucucgaggacccguccacggauuacuaucaggaacugcagcgcgacaucagcgagauguuccuucaaauuuacaaacaagggggauuucugggccucucuaacaucaaguucagacccggguccgucguggugcagcugacccuggcuuuucgggagggaacaauuaauguccaugauguugaaacccaguucaaccaguauaagacagaggccgcuagccgcuacaaucucaccaucucugacgugagcguguccgaugucccuuuucccuucucugcccagagcggcgcuggggugccuggauggggcaucgcccugcuuguucuggugugcguccucguggcgcuggccauuguuuaucuuaucgcucuggccgugugucagugcagacggaaaaacuacggccaacucgacauuuucccggcucgcgauacauaucaccccauguccgaauacccuaccuaccacacgcaugggagauaugugcccccuagcuccacagaccggucucccuacgagaaggucagcgccggaaauggcggguccucucugagcuauaccaacccugccguugcggcugccuccgccaaucuguga

SEQ ID NO: 2778 - protein, 711 aa, Artificial Sequence
  MUM-1/m__Homo_sapiens__NP_116242
MMADAKYVLCRWEKRLWPAKVLARTATSTKNKRRKEYFLAVQILSLEEKIKVKSTEVEILEKSQIEAIASSLASQNEVPAAPLEELAYRRSLRVALDVLSEGSIWSQESSAGTGRADRSLRGKPMEHVSSPCDSNSSSLPRGDVLGSSRPHRRRPCVQQSLSSSFTCEKDPECKVDHKKGLRKSENPRGPLVLPAGGGAQDESGSRIHHKNWTLASKRGGNSAQKASLCLNGSSLSEDDTERDMGSKGGSWAAPSLPSGVREDDPCANAEGHDPGLPLGSLTAPPAPEPSACSEPGECPAKKRPRLDGSQRPPAVQLEPMAAGAAPSPGPGPGPRESVTPRSTARLGPPPSHASADATRCLPCPDSQKLEKECQSSEESMGSNSMRSILEEDEEDEEPPRVLLYHEPRSFEVGMLVWHKHKKYPFWPAVVKSVRQRDKKASVLYIEGHMNPKMKGFTVSLKSLKHFDCKEKQTLLNQAREDFNQDIGWCVSLITDYRVRLGCGSFAGSFLEYYAADISYPVRKSIQQDVLGTKLPQLSKGSPEEPVVGCPLGQRQPCRKMLPDRSRAARDRANQKLVEYIVKAKGAESHLRAILKSRKPSRWLQTFLSSSQYVTCVETYLEDEGQLDLVVKYLQGVYQEVGAKVLQRTNGDRIRFILDVLLPEAIICAISAVDEVDYKTAEEKYIKGPSLSYREKEIFDNQLLEERNRRRR

SEQ ID NO: 2779 - RNA, 2136 nt, Artificial Sequence
  MUM-1/m__Homo_sapiens__NM_032853
augauggcggaugccaaguauguccucugccgaugggaaaagcgauuauggccugcgaagguuuuggcccgaaccgcgacuucaacaaaaaauaagagaagaaaggaauauuuucuagcugugcaaauccucucucuagaggaaaaaauuaaggugaaaagcacugaaguugagauccuagagaagucucaaauugaagccauugcuuccucguuagccucacagaaugagguuccugcggcaccccuggaagaacuggccuacagacggucgcuucgcguggcucuggacguucugagcgagggcucgauuuggagucaagaaagcucugcagggacagguagagcugaccggucucugcgagggaagcccauggagcaugucuccucgcccugugauucgaacuccucaucucuuccccgcggagacguguugggcaguuccagaccucacaggaggaggccaugugugcaacaaagccugucaaguucguucacuugugaaaaggaccccgagugcaaaguggaccacaagaaggggcucaggaaaagugaaaacccaagaggcccguugguccucccagcuggagguggugcccaagaugagaguggguccagaauccaccacaaaaauuggacucuugcaaguaagaggggaggaaacucagcgcagaaggcuagcuugugccugaauggaucuucccuuucagaggacgacacggagagagacauggggagcaaaggaggcagcugggcagccccguccuugcccuccggggucagggaggacgaucccugugccaacgcugagggacacgaccccggucugccguugggcagccucacugcgcccccagccccugagcccucggccugcucagagccuggagaaugcccugcgaaaaagaggccgcgccuggauggcagccaaaggccgccugccgugcagcuggagcccauggcagcaggggccgcaccaucccccgggccggggccagggcccagagagucugugaccccgcgcagcaccgccaggcugggcccgccucccucccacgccucugcggaugcaaccagaugucuuccuugcccggauucccagaagcuggagaaagagugccagucuuccgaagaguccauggggucuaauuccaugcguucuauccuggaggaagacgaggaagacgaggagccaccaagaguccuuuuauaccacgaaccacguucguuugaaguaggaaugcuagucuggcauaaacauaaaaaauaccccuucuggccagcaguggucaaaagcgucaggcagagagauaagaaagcaagugugcuauacaucgaaggacacaugaacccgaaaaugaaagguuucacagugucucuuaaaaguuuaaagcacuuugauuguaaagagaaacagacgcuucugaaucaagccagggaggacuucaaccaggacaucggcuggugugucucccucaucaccgacuacaggguccgguuaggcugcgggucuuuugcuggcucuuuccuggaauauuacgcggcugauauaagcuauccuguccgaaaauccauccagcaggacgucuuggggaccaagcuuccucaacugagcaaggggagccccgaggagcccgugguggggugcccccuggggcagaggcagcccugccggaaaaugcuccccgaccgcucgcgggccgcccgggaccgggccaaccagaagcugguggaguacauugugaaggccaagggcgcggagagccaccugcgggccauccuaaagagcaggaagccaucucgcuggcugcagaccuuccugagcuccagccaguacgugaccuguguggagaccuaccuggaggaugaggggcagcuggaccugguggugaaguaccugcagggcgucuaccaggaggugggggccaaggugcuccagcgcaccaacggcgaccggauccgguucauucuggacgugcuucugcccgaggccaucaucugugcgaucucugcgguggacgagguggacuacaagacggcugaggagaaguacaucaaggggccuucgcugagcuaccgggaaaaagaaauauuugacaaccagcuccuugaagagcggaaccggcgccgucgguga

SEQ ID NO: 2780 - RNA, 2136 nt, Artificial Sequence
  derived and/or modified sequence opt1 from MUM-1/m__Homo_sapiens__NM_032853
augauggccgacgccaaguacgugcugugccgcugggagaagcggcucuggcccgcgaagguccuggcccgcaccgccaccagcacgaagaacaagcggcgcaaggaguacuuccuggccgugcagauccucucccuggaggagaagaucaaggucaagagcaccgagguggagauccuggagaagucccagaucgaggccaucgcgagcucccucgccagccagaacgaggugccggccgcgccccuggaggagcuggccuaccggcgcucccuccggguggcccuggacguccugagcgagggcuccaucuggagccaggaguccagcgccgggaccggccgcgccgaccggucccuccgcgggaagcccauggagcacgugagcucccccugcgacagcaacuccagcucccugccgcggggcgacgugcuggggagcagccgcccccaccggcgccggcccugcguccagcagucccucagcuccagcuucacgugcgagaaggaccccgagugcaagguggaccacaagaagggccugcgcaaguccgagaacccgcggggcccccuggugcuccccgccgggggcggggcgcaggacgagagcggcucccgcauccaccacaagaacuggacccuggccagcaagcggggcggcaacuccgcccagaaggccagccugugccucaacggcuccagccuguccgaggacgacaccgagcgcgacauggggagcaagggcggguccugggccgcgcccagccugccguccggcguccgggaggacgaccccugcgccaacgccgagggccacgaccccgggcucccccugggcagccugaccgccccgcccgcccccgagcccuccgcgugcagcgagccgggggagugccccgccaagaagcgcccccgccucgacggcagccagcggcccccggccgugcagcuggagcccauggccgccggggcggcccccucccccggcccgggccccgggccccgcgagagcgugaccccgcgguccacggcccgccuggggcccccgcccagccacgccuccgcggacgccacccggugccuccccugccccgacagccagaagcuggagaaggagugccaguccagcgaggaguccauggggagcaacuccaugcgcagcauccuggaggaggacgaggaggacgaggagccgccccggguccuccuguaccacgagccccgcuccuucgaggugggcaugcugguguggcacaagcacaagaaguaccccuucuggcccgccgucgucaagagcgugcggcagcgcgacaagaaggccuccgugcucuacaucgaggggcacaugaaccccaagaugaagggcuucaccgugagccugaagucccugaagcacuucgacugcaaggagaagcagacccuccugaaccaggcccgggaggacuucaaccaggacaucggcuggugcgugagccugaucacggacuaccgcguccggcucgggugcggcagcuucgcgggguccuuccuggaguacuacgccgccgacaucagcuacccggugcgcaaguccauccagcaggacguccugggcaccaagcucccccagcugagcaaggggucccccgaggagcccguggugggcugcccgcugggccagcggcagcccugccgcaagaugcuccccgaccggagccgcgccgcccgggaccgcgcgaaccagaagcuggucgaguacaucgugaaggccaagggggccgagucccaccuccgcgccauccucaagagccggaagcccucccgcuggcugcagaccuuccugagcuccagccaguacgugaccugcgucgagacguaccuggaggacgagggccagcuggaccugguggugaaguaccugcagggggucuaccaggaggugggcgccaaggugcuccagcggaccaacggcgaccgcauccgguucauccuggacguccugcucccggaggcgaucaucugcgccaucuccgccguggacgagguggacuacaagaccgccgaggagaaguacaucaaggggcccagccuguccuaccgcgagaaggagaucuucgacaaccagcugcucgaggagcggaaccgccggcgccgguga

SEQ ID NO: 2781 - RNA, 2136 nt, Artificial Sequence
  derived and/or modified sequence opt2 from MUM-1/m__Homo_sapiens__NM_032853
augauggccgacgccaaguacguccucugccgcugggagaagcgccucuggcccgccaagguccucgcccgcaccgccaccuccaccaagaacaagcgccgcaaggaguacuuccucgccguccagauccucucccucgaggagaagaucaaggucaaguccaccgaggucgagauccucgagaagucccagaucgaggccaucgccuccucccucgccucccagaacgagguccccgccgccccccucgaggagcucgccuaccgccgcucccuccgcgucgcccucgacguccucuccgagggcuccaucuggucccaggaguccuccgccggcaccggccgcgccgaccgcucccuccgcggcaagcccauggagcacgucuccucccccugcgacuccaacuccuccucccucccccgcggcgacguccucggcuccucccgcccccaccgccgccgccccugcguccagcagucccucuccuccuccuucaccugcgagaaggaccccgagugcaaggucgaccacaagaagggccuccgcaaguccgagaacccccgcggcccccucguccuccccgccggcggcggcgcccaggacgaguccggcucccgcauccaccacaagaacuggacccucgccuccaagcgcggcggcaacuccgcccagaaggccucccucugccucaacggcuccucccucuccgaggacgacaccgagcgcgacaugggcuccaagggcggcuccugggccgcccccucccuccccuccggcguccgcgaggacgaccccugcgccaacgccgagggccacgaccccggccucccccucggcucccucaccgccccccccgcccccgagcccuccgccugcuccgagcccggcgagugccccgccaagaagcgcccccgccucgacggcucccagcgcccccccgccguccagcucgagcccauggccgccggcgccgcccccucccccggccccggccccggcccccgcgaguccgucaccccccgcuccaccgcccgccucggccccccccccucccacgccuccgccgacgccacccgcugccuccccugccccgacucccagaagcucgagaaggagugccaguccuccgaggaguccaugggcuccaacuccaugcgcuccauccucgaggaggacgaggaggacgaggagcccccccgcguccuccucuaccacgagccccgcuccuucgaggucggcaugcucgucuggcacaagcacaagaaguaccccuucuggcccgccgucgucaaguccguccgccagcgcgacaagaaggccuccguccucuacaucgagggccacaugaaccccaagaugaagggcuucaccgucucccucaagucccucaagcacuucgacugcaaggagaagcagacccuccucaaccaggcccgcgaggacuucaaccaggacaucggcuggugcgucucccucaucaccgacuaccgcguccgccucggcugcggcuccuucgccggcuccuuccucgaguacuacgccgccgacaucuccuaccccguccgcaaguccauccagcaggacguccucggcaccaagcucccccagcucuccaagggcucccccgaggagcccgucgucggcugcccccucggccagcgccagcccugccgcaagaugcuccccgaccgcucccgcgccgcccgcgaccgcgccaaccagaagcucgucgaguacaucgucaaggccaagggcgccgagucccaccuccgcgccauccucaagucccgcaagcccucccgcuggcuccagaccuuccucuccuccucccaguacgucaccugcgucgagaccuaccucgaggacgagggccagcucgaccucgucgucaaguaccuccagggcgucuaccaggaggucggcgccaagguccuccagcgcaccaacggcgaccgcauccgcuucauccucgacguccuccuccccgaggccaucaucugcgccaucuccgccgucgacgaggucgacuacaagaccgccgaggagaaguacaucaagggccccucccucuccuaccgcgagaaggagaucuucgacaaccagcuccucgaggagcgcaaccgccgccgccgcuga

SEQ ID NO: 2782 - RNA, 2136 nt, Artificial Sequence
  derived and/or modified sequence opt3 from MUM-1/m__Homo_sapiens__NM_032853
augauggccgacgcuaaguacgugcugugcagaugggagaaaaggcucuggcccgcaaagguccuugcccggaccgcgacaagcacuaaaaacaagcgccgaaaagaauauuuccuggcuguucagaucuuguccuuagaggaaaagauuaaggugaaaucuacggagguagaaauacuggagaagucacaaaucgaggccauugcaaguagccuagccucccagaaugaagugccugcugcaccacucgaggaacuggccuaccguagaucucuuagggucgcucuggauguguugucggagggcucaaucuggagccaggagaguuccgccgggaccggacgggcggaccgcucucucagagguaaaccgauggaacacguuagcucccccugugauucaaacaguagcucucugccuaggggcgacgugcugggguccucacggccacaucgccgaagacccugcguccagcaaagccucaguucuuccuuuacaugugagaaggauccugaaugcaaaguggaccacaagaagggauuaaggaaaagcgagaauccacggggcccccugguacuuccugccggugggggagcacaggaugaaucgggcucucguauucaucacaagaacuggacuuuggcuuccaaacgcggcgggaauagcgcccagaaggcaagucugugucuaaacggaagcucccucucugaggacgauaccgagagagacauggguagcaaaggcgggucaugggcugccccaagucugccguccggaguuagggaagaugaccccugcgcgaaugccgagggccaugauccuggucuuccacuggggagcuugacagcacccccugcuccagaacccucugccuguucagagccgggagaaugcccugcuaagaaacggccccgacucgacggcagucagcgcccuccagccgugcaacuggagcccauggcagccggcgcugcgccaagccccgggccuggaccagguccgagagaguccgucacccccaggucuacugcacgguuaggcccuccacccucgcacgccagcgcugacgccacacgcugucugccuugcccagauucccagaagcucgaaaaggagugucagucaagugaagagucuauggggagcaacuccaugagaucaauccuugaagaggacgaggaagaugaggaacccccgagggugcuguuguaucacgagccucguagcuucgaggugggaaugcuagucuggcauaaacacaagaaauacccauuuuggcccgcaguugugaagucuguacggcagcgagacaaaaaggccuccgugcuguauauagaaggccauaugaauccuaagaugaaagguuucaccgucagucucaagagccugaaacacuuugauugcaaggagaaacaaacgcuucugaaccaggcuagagaagacuucaaucaggauaucggguggugcgugucuuugauuacugacuacaggguucgccucggcuguggauccuuugccggcucauuccuggaguauuacgcagcggauaucaguuaccccgugcggaagucaauucaacaggacgucuuagggaccaagcugccacagcuaucgaaaggauccccugaagaacccgugguagguugcccacucggccagagacaaccguguaggaagaugcugccugaucgcucucgagcugcccgggaccgugcaaaccagaaacuuguugaguauaucgugaaggccaaaggggcugaaagccacuugagagccauacugaagucaaggaagcccagucgcuggcuccagacauuucuguccucuagccaguacgucacuugcguggagaccuaucuugaagacgagggacaacuggauuuggucgugaaauaccuccagggcguuuaucaggaagugggugcaaagguacugcagcggacaaauggggacagaauuagguucaucuuagauguccugcuaccagaggcuauuaucugugccaucuccgcgguggacgagguugauuacaaaaccgccgaagagaaguauauuaaaggccccucacucagcuaccgagaaaaggagauauuugacaaccaacugcuugaggagcgcaaucggagaaggcguuga

SEQ ID NO: 2783 - RNA, 2136 nt, Artificial Sequence
  derived and/or modified sequence opt4 from MUM-1/m__Homo_sapiens__NM_032853
augauggccgacgccaaguacgugcugugcagaugggagaagagacuguggcccgccaaggugcuggccagaaccgccaccagcaccaagaacaagagaagaaaggaguacuuccuggccgugcagauccugagccuggaggagaagaucaaggugaagagcaccgagguggagauccuggagaagagccagaucgaggccaucgccagcagccuggccagccagaacgaggugcccgccgccccccuggaggagcuggccuacagaagaagccugagaguggcccuggacgugcugagcgagggcagcaucuggagccaggagagcagcgccggcaccggcagagccgacagaagccugagaggcaagcccauggagcacgugagcagccccugcgacagcaacagcagcagccugcccagaggcgacgugcugggcagcagcagaccccacagaagaagacccugcgugcagcagagccugagcagcagcuucaccugcgagaaggaccccgagugcaagguggaccacaagaagggccugagaaagagcgagaaccccagaggcccccuggugcugcccgccggcggcggcgcccaggacgagagcggcagcagaauccaccacaagaacuggacccuggccagcaagagaggcggcaacagcgcccagaaggccagccugugccugaacggcagcagccugagcgaggacgacaccgagagagacaugggcagcaagggcggcagcugggccgcccccagccugcccagcggcgugagagaggacgaccccugcgccaacgccgagggccacgaccccggccugccccugggcagccugaccgccccccccgcccccgagcccagcgccugcagcgagcccggcgagugccccgccaagaagagacccagacuggacggcagccagagaccccccgccgugcagcuggagcccauggccgccggcgccgcccccagccccggccccggccccggccccagagagagcgugacccccagaagcaccgccagacugggccccccccccagccacgccagcgccgacgccaccagaugccugcccugccccgacagccagaagcuggagaaggagugccagagcagcgaggagagcaugggcagcaacagcaugagaagcauccuggaggaggacgaggaggacgaggagccccccagagugcugcuguaccacgagcccagaagcuucgaggugggcaugcugguguggcacaagcacaagaaguaccccuucuggcccgccguggugaagagcgugagacagagagacaagaaggccagcgugcuguacaucgagggccacaugaaccccaagaugaagggcuucaccgugagccugaagagccugaagcacuucgacugcaaggagaagcagacccugcugaaccaggccagagaggacuucaaccaggacaucggcuggugcgugagccugaucaccgacuacagagugagacugggcugcggcagcuucgccggcagcuuccuggaguacuacgccgccgacaucagcuaccccgugagaaagagcauccagcaggacgugcugggcaccaagcugccccagcugagcaagggcagccccgaggagcccguggugggcugcccccugggccagagacagcccugcagaaagaugcugcccgacagaagcagagccgccagagacagagccaaccagaagcugguggaguacaucgugaaggccaagggcgccgagagccaccugagagccauccugaagagcagaaagcccagcagauggcugcagaccuuccugagcagcagccaguacgugaccugcguggagaccuaccuggaggacgagggccagcuggaccugguggugaaguaccugcagggcguguaccaggaggugggcgccaaggugcugcagagaaccaacggcgacagaaucagauucauccuggacgugcugcugcccgaggccaucaucugcgccaucagcgccguggacgagguggacuacaagaccgccgaggagaaguacaucaagggccccagccugagcuacagagagaaggagaucuucgacaaccagcugcuggaggagagaaacagaagaagaagauga

SEQ ID NO: 2784 - RNA, 2136 nt, Artificial Sequence
  derived and/or modified sequence opt5 from MUM-1/m__Homo_sapiens__NM_032853
augauggccgacgcuaaguacgugcugugcagaugggagaaacggcucuggcccgccaagguccuggcgcgcaccgcuacaagcacgaaaaacaagagacggaaagaauauuuccuugccguucagauccugucccucgaggaaaagauuaaggugaaaucuaccgagguggaaauccuggaaaagagccaaauugaggccaucgcuuccucucuugccagccagaaugaagucccugcugccccgcuggaggaacucgcguaccgcagaucccugcggguggcccuggauguucucucugagggcagcauuuggucccaggagagcucugcugggacaggacgcgccgacagaucccugcggggcaaacccauggaacacgugagcucuccuugugauuccaacucuagcucccuuccccgcggggacguccugggaagcuccagaccucaccggcgcagacccugcgugcagcaaucucucagcuccagcuuuaccugugagaaggauccugaaugcaaaguugaccacaagaagggccugcggaaaucugagaauccgcgcgggccccuugugcugccugcuggaggcggcgcccaggaugaauccgggagcagaauccaucacaagaacuggacacucgcgucuaaacggggaggcaauagcgcccagaaggcuucccugugucugaacgggucuagccucuccgaggacgauaccgagagagacaugggaagcaaaggcgggucuugggccgcucccucccugccuagcggaguccgcgaagaugaccccugcgccaaugccgagggccaugauccgggccuuccucuggggucucucacagcucccccugcgcccgaacccuccgccuguagcgagccuggagaaugcccggcuaagaaacggcccagacuggacggcucccagcgcccucccgccgugcaacuugagccuauggccgcuggggccgcgcccucuccgggaccuggccccgggccucgggagagcgugacccccagauccacggcucgccugggaccucccccgucucacgccagcgccgacgcuacccggugucucccuugccccgauucccagaagcuggaaaaggagugucagagcucugaagaguccaugggcagcaacucuaugagauccauccuggaagaggacgaggaagaugaggaacccccucgcguccuccuguaucacgagccgcggagcuucgagguuggcaugcuuguguggcauaaacacaagaaauaccccuuuuggccugccguggucaagucugugagacagcgcgacaaaaaggcuagcguucuguauauugaagggcauaugaaucccaagaugaaaggauucacagugucccucaagagccugaaacacuuugauugcaaggagaaacaaacccuucugaaccaggcccgggaagacuucaaucaggauaucggcuggugcgucucucucauuacagacuacagagugcggcugggguguggauccuuugcgggcagcuuccuggaguauuacgccgcugauaucuccuacccuguucgcaagucuauucaacaggacgugcucgggaccaagcugccccagcuuagcaaaggcuccccugaggagcccgucgugggaugcccgcugggccagagacaaccuugucggaagaugcuccccgauagaucucgcgccgcucgggacagagccaaccagaaacuggucgaguauaucgugaaggcgaaaggggccgaaagccaucugcgcgcuauucuuaaguccagaaagccuucucgguggcuccagacguuucugagcuccagccaguacguuacaugcguggagaccuaucuggaagacgagggacaacucgaucuggucgugaaauaccuucagggcguuuaucaggaagugggggccaagguccugcagcgcacaaauggagacagaauccgguucauccucgaugugcugcugcccgaggcuauuaucugugccauuucugccguggacgagguugauuacaaaaccgcugaagagaaguauaucaaaggcccgucccuuagcuaccgcgaaaaggagauuuuugacaaccaacuccuggaagagagaaaucggcgcagacgguga

SEQ ID NO: 2785 - protein, 145 aa, Artificial Sequence
  MUM-2/m__Homo_sapiens__Q9Y5R8
MTVHNLYLFDRNGVCLHYSEWHRKKQAGIPKEEEYKLMYGMLFSIRSFVSKMSPLDMKDGFLAFQTSRYKLHYYETPTGIKVVMNTDLGVGPIRDVLHHIYSALYVELVVKNPLCPLGQTVQSELFRSRLDSYVRSLPFFSARAG

SEQ ID NO: 2786 - RNA, 438 nt, Artificial Sequence
  MUM-2/m__Homo_sapiens__AAD44697
augacuguccacaaccuguaccuguuugaccggaauggagugugucugcacuacagcgaauggcaccgcaagaagcaagcagggauucccaaggaggaggaguauaagcugauguacgggaugcucuucucuauccgcucguuugucagcaagauguccccgcuagacaugaaggauggcuuccuggccuuccaaacuagccguuacaaacuccauuacuacgagacgcccacugggaucaaaguugucaugaauacugacuugggcgugggacccauccgagaugugcugcaccacaucuacagugcgcuguauguggagcugguggugaagaauccccugugcccgcugggccaaacugugcaaagugagcucuuucgcucccgacuggacuccuauguucgcucucugcccuucuucuccgcccgggcuggcuga

SEQ ID NO: 2787 - RNA, 438 nt, Artificial Sequence
  derived and/or modified sequence opt1 from MUM-2/m__Homo_sapiens__AAD44697
augaccgugcacaaccuguaccucuucgaccgcaacggcgucugccugcacuacagcgaguggcaccggaagaagcaggccgggauccccaaggaggaggaguacaagcugauguacggcaugcuguucuccauccgcagcuucguguccaagaugagcccgcucgacaugaaggacggguuccuggccuuccagaccucccgguacaagcuccacuacuacgagacgcccaccggcaucaagguggucaugaacaccgaccugggggugggccccauccgcgacgugcugcaccacaucuacagcgcgcucuacgucgagcugguggugaagaacccccugugcccgcucggccagaccguccaguccgagcuguuccggagccgccuggacuccuacgugcggagccuccccuucuucuccgcccgcgccggguga

SEQ ID NO: 2788 - RNA, 438 nt, Artificial Sequence
  derived and/or modified sequence opt2 from MUM-2/m__Homo_sapiens__AAD44697
augaccguccacaaccucuaccucuucgaccgcaacggcgucugccuccacuacuccgaguggcaccgcaagaagcaggccggcauccccaaggaggaggaguacaagcucauguacggcaugcucuucuccauccgcuccuucgucuccaagauguccccccucgacaugaaggacggcuuccucgccuuccagaccucccgcuacaagcuccacuacuacgagacccccaccggcaucaaggucgucaugaacaccgaccucggcgucggccccauccgcgacguccuccaccacaucuacuccgcccucuacgucgagcucgucgucaagaacccccucugcccccucggccagaccguccaguccgagcucuuccgcucccgccucgacuccuacguccgcucccuccccuucuucuccgcccgcgccggcuga

SEQ ID NO: 2789 - RNA, 438 nt, Artificial Sequence
  derived and/or modified sequence opt3 from MUM-2/m__Homo_sapiens__AAD44697
augaccgugcacaaccuguaccucuucgacagaaauggcgucugccuucauuauagcgaguggcacaggaagaaacaggccgggauccccaaggaagaggaauacaaacugauguauggaauguuguuuuccauucggucuuucguuucaaagaugaguccuuuagauaugaaagacgguuuucuggcuuuccaaacaagccgcuacaagcuacauuauuacgagacuccaacgggcauaaaggugguaaugaacaccgaucucggggugggaccgauccgagacguccugcaccauauuuauuccgcacuuuacguggaacugguugugaaaaaucccuuguguccucucggccagacaguccagucugagcuguuucguucgagacuggauucauacgugaggagccucccauucuuuagugcccgggcggguuga

SEQ ID NO: 2790 - RNA, 438 nt, Artificial Sequence
  derived and/or modified sequence opt4 from MUM-2/m__Homo_sapiens__AAD44697
augaccgugcacaaccuguaccuguucgacagaaacggcgugugccugcacuacagcgaguggcacagaaagaagcaggccggcauccccaaggaggaggaguacaagcugauguacggcaugcuguucagcaucagaagcuucgugagcaagaugagcccccuggacaugaaggacggcuuccuggccuuccagaccagcagauacaagcugcacuacuacgagacccccaccggcaucaagguggugaugaacaccgaccugggcgugggccccaucagagacgugcugcaccacaucuacagcgcccuguacguggagcugguggugaagaacccccugugcccccugggccagaccgugcagagcgagcuguucagaagcagacuggacagcuacgugagaagccugcccuucuucagcgccagagccggcuga

SEQ ID NO: 2791 - RNA, 438 nt, Artificial Sequence
  derived and/or modified sequence opt5 from MUM-2/m__Homo_sapiens__AAD44697
augaccgugcacaaccuguaccucuucgacagaaauggcgucugccugcauuauagcgaguggcaccggaagaaacaggccgggauccccaaggaagaggaauacaaacuuauguauggaaugcuguuuuccauucgcucuuucguuagcaagauguccccucucgauaugaaagacggcuuucuggcuuuccaaacaucuagauacaaacuucauuauuacgagacgccgaccgggaucaagguggugaugaacacagaucugggagucggccccauucgggacgugcuccaccauaucuauagcgcccuguacguugaacugguggucaagaauccucucuguccccuggggcagaccgugcaguccgagcuuuuucgcucuagacuggauagcuacguucggucccucccuuucuuuagcgcgcgcgcuggauga

SEQ ID NO: 2792 - protein, 1043 aa, Artificial Sequence
  MYO1A__Homo_sapiens__Q9UBC5
MPLLEGSVGVEDLVLLEPLVEESLLKNLQLRYENKEIYTYIGNVVISVNPYQQLPIYGPEFIAKYQDYTFYELKPHIYALANVAYQSLRDRDRDQCILITGESGSGKTEASKLVMSYVAAVCGKGEQVNSVKEQLLQSNPVLEAFGNAKTIRNNNSSRFGKYMDIEFDFKGSPLGGVITNYLLEKSRLVKQLKGERNFHIFYQLLAGADEQLLKALKLERDTTGYAYLNHEVSRVDGMDDASSFRAVQSAMAVIGFSEEEIRQVLEVTSMVLKLGNVLVADEFQASGIPASGIRDGRGVREIGEMVGLNSEEVERALCSRTMETAKEKVVTALNVMQAQYARDALAKNIYSRLFDWIVNRINESIKVGIGEKKKVMGVLDIYGFEILEDNSFEQFVINYCNEKLQQVFIEMTLKEEQEEYKREGIPWTKVDYFDNGIICKLIEHNQRGILAMLDEECLRPGVVSDSTFLAKLNQLFSKHGHYESKVTQNAQRQYDHTMGLSCFRICHYAGKVTYNVTSFIDKNNDLLFRDLLQAMWKAQHPLLRSLFPEGNPKQASLKRPPTAGAQFKSSVAILMKNLYSKSPNYIRCIKPNEHQQRGQFSSDLVATQARYLGLLENVRVRRAGYAHRQGYGPFLERYRLLSRSTWPHWNGGDREGVEKVLGELSMSSGELAFGKTKIFIRSPKTLFYLEEQRRLRLQQLATLIQKIYRGWRCRTHYQLMRKSQILISSWFRGNMQKKCYGKIKASVLLIQAFVRGWKARKNYRKYFRSEAALTLADFIYKSMVQKFLLGLKNNLPSTNVLDKTWPAAPYKCLSTANQELQQLFYQWKCKRFRDQLSPKQVEILREKLCASELFKGKKASYPQSVPIPFCGDYIGLQGNPKLQKLKGGEEGPVLMAEAVKKVNRGNGKTSSRILLLTKGHVILTDTKKSQAKIVIGLDNVAGVSVTSLKDGLFSLHLSEMSSVGSKGDFLLVSEHVIELLTKMYRAVLDATQRQLTVTVTEKFSVRFKENSVAVKVVQGPAGGDNSKLRYKKKGSHCLEVTVQ

SEQ ID NO: 2793 - RNA, 3132 nt, Artificial Sequence
  MYO1A__Homo_sapiens__AAC78645
augccucuccuggaagguucuguggggguggaggaucuuguccuccuggaacccuugguggaggagucacugcucaagaaucuucagcuucgcuaugaaaacaaggagauuuauaccuacauugggaauguggugaucucagugaaucccuaucaacagcuucccaucuaugggccagaguucauugccaaauaucaagacuauacuuucuaugagcugaagccccauaucuacgcauuggcaaauguggcguaccagucacugagggacagggaccgagaccaguguauccucaucacaggcgagaguggaucagggaagacugaggccagcaagcuggugaugucuuauguggcugccgucugugggaaaggagagcaggugaacucugugaaggagcagcugcuacagucuaacccagugcuggaggcuuuuggcaaugccaagaccauucgcaacaacaauuccucccgauuuggaaaauacauggauauugaauuugacuucaagggauccccccucgguggugucaucacaaacuaucugcuugagaaaucccgauuagugaagcagcucaaaggagaaaggaacuuccacaucuucuaucagcugcuggcuggagcagaugaacagcugcugaaggcccugaagcuugagcgggauacaacuggcuaugccuaucugaaucaugaaguauccagaguggauggcauggacgacgccuccagcuucagggcuguacagagugcaauggcagugauuggguucucggaggaggagauucgacaagugcuagaggugacauccauggugcuaaagcuggggaacguguugguggcugaugaguuccaggccagugggauaccagcaaguggcauccgugaugggagagguguucgggagauuggggagauggugggcuugaauucagaagaaguagagagagcuuugugcucgaggaccauggaaacagccaaggaaaagguggucacugcacugaauguuaugcaggcucaguaugcucgggacgcccuggcuaagaacaucuacagccgccucuuugacuggauagugaaucgaaucaaugagagcaucaaggugggcaucggggaaaagaagaagguaaugggaguccuugauaucuacgguuuugagauauuagaggauaauagcuuugagcaauuugugaucaacuacugcaaugagaagcugcagcagguguucauagagaugacccugaaagaagagcaagaggaauauaagagagaaggcauaccguggacaaagguggacuacuuugauaauggcaucauuuguaagcucauugagcauaaucagcgagguauccuggccauguuggaugaggagugccugcggccugggguggucagugacuccacuuuccuagcaaagcugaaccagcucuucuccaagcauggccacuacgagagcaaagucacccagaaugcccagcgucaguaugaccacaccaugggccucagcugcuuccgcaucugccacuaugcgggcaaggugacauacaacgugaccagcuuuauugacaagaauaaugaccuacucuuccgagaccuguugcaggccauguggaaggcccagcacccccuccuucgguccuuguuuccugagggcaauccuaagcaggcaucucucaaacgccccccgacugcuggggcccaguucaagaguucuguggccauccucaugaagaaucuguauuccaagagccccaacuacaucaggugcauaaagcccaaugagcaucagcagcgaggucaguucucuucagaccugguggcaacccaggcucgguaccugggacugcuggagaacguacgggugcgacgggcaggcuaugcccaccgccaggguuaugggcccuuccuggaaagguaccgauugcugagccggagcaccuggccucacuggaaugggggagaccgggaagguguugagaagguccugggggagcugagcauguccucgggggagcuggccuuuggcaagacaaagaucuucauuagaagccccaagacucuuuucuaccucgaagaacagaggcgccugagacuccagcagcuggccacacucauacagaagauuuaccgaggcuggcgcugccgcacccacuaccaacugaugcgaaagagucagauccucaucuccucuugguuucggggaaacaugcaaaagaaaugcuaugggaagauaaaggcauccguguuauugauccaggcuuuugugagaggguggaaggcccgaaagaauuaucgcaaauauuuccggucagaggcugcccucaccuuggcagauuucaucuacaagagcaugguacagaaauuccuacuggggcugaagaacaauuugccauccacaaacgucuuagacaagacauggccagccgcccccuacaagugccucagcacagcaaaucaggagcugcagcagcucuucuaccaguggaagugcaagagguuccgggaucagcuguccccgaagcagguagagauccugagggaaaagcucugugccagugaacuguucaagggcaagaaggcuucauauccccagaguguccccauuccauucuguggugacuacauugggcugcaagggaaccccaagcugcagaagcugaaaggcggggaggaggggccuguucugauggcagaggccgugaagaaggucaaucguggcaauggcaagacuucuucucggauucuccuccugaccaagggccaugugauucucacagacaccaagaagucccaggccaaaauugucauugggcuagacaauguggcuggggugucagucaccagccucaaggaugggcucuuuagcuugcaucugagugagaugucaucggugggcuccaagggggacuuccugcuggucagcgagcaugugauugaacugcugaccaaaauguaccgggcugugcuggaugccacgcagaggcagcuuacagucaccgugacugagaaguucucagugagguucaaggagaacaguguggcugucaaggucguccagggcccugcagguggugacaacagcaagcuacgcuacaaaaaaaaggggagucauugcuuggaggugacugugcaguga

SEQ ID NO: 2794 - RNA, 3132 nt, Artificial Sequence
  derived and/or modified sequence opt1 from MYO1A__Homo_sapiens__AAC78645
augccccugcucgagggcagcgugggggucgaggaccuggugcugcucgagccgcugguggaggagucccugcucaagaaccugcagcugcgcuacgagaacaaggagaucuacaccuacaucggcaacgucgugaucagcgugaaccccuaccagcagcuccccaucuacgggcccgaguucaucgccaaguaccaggacuacaccuucuacgagcugaagccgcacaucuacgcccuggcgaacgucgccuaccagucccuccgggaccgcgaccgggaccagugcauccugaucacgggcgagagcggguccggcaagaccgaggccagcaagcuggugauguccuacguggccgccgucugcggcaagggggagcaggucaacagcgugaaggagcagcuccugcaguccaaccccgugcuggaggcguucggcaacgccaagaccauccgcaacaacaacagcucccgguucgggaaguacauggacaucgaguucgacuucaagggcagcccccucgggggcgugaucaccaacuaccugcuggagaagucccgccucgugaagcagcugaagggcgagcggaacuuccacaucuucuaccagcugcucgccggggccgacgagcagcugcugaaggcgcucaagcuggagcgcgacacgaccggcuacgccuaccugaaccacgaggucagccggguggacgggauggacgacgccuccagcuuccgcgccgugcaguccgccauggcggucaucggcuucagcgaggaggagauccgccaggugcucgaggugaccuccaugguccugaagcugggcaacgugcucguggccgacgaguuccaggccagcgggauccccgccagcggcauccgggacgggcggggcguccgcgagaucggggagauggugggccugaacuccgaggaggucgagcgggcccugugcagccgcaccauggagacggcgaaggagaagguggugaccgcccucaacgucaugcaggcccaguacgcccgggacgcccuggcgaagaacaucuacucccgccuguucgacuggaucgugaaccggaucaacgagagcaucaaggugggcaucggggagaagaagaaggucaugggcgugcucgacaucuacggguucgagauccuggaggacaacuccuucgagcaguucgugaucaacuacugcaacgagaagcugcagcaggucuucaucgagaugacccucaaggaggagcaggaggaguacaagcgcgagggcaucccguggaccaagguggacuacuucgacaacgggaucaucugcaagcugaucgagcacaaccagcggggcauccuggccaugcucgacgaggagugccugcgccccggcguggucagcgacuccacguuccuggccaagcucaaccagcuguucagcaagcacgggcacuacgaguccaaggugacccagaacgcccagcgccaguacgaccacaccaugggccugagcugcuuccggaucugccacuacgccgggaaggugaccuacaacgucacguccuucaucgacaagaacaacgaccuccucuuccgcgaccugcugcaggcgauguggaaggcccagcacccccuccugcggagccuguuccccgagggcaacccgaagcaggccucccucaagcgcccgcccaccgccggggcgcaguucaagagcuccguggccauccugaugaagaaccuguacagcaagucccccaacuacauccggugcaucaagcccaacgagcaccagcagcgcggccaguucagcuccgaccucguggccacccaggcccgguaccugggccugcucgagaacguccgcgugcggcgcgccggguacgcgcaccggcagggcuacgggcccuuccuggagcgcuaccggcugcucagccgcagcaccuggccccacuggaacggcggcgaccgggaggggguggagaagguccugggcgagcuguccaugagcuccggggagcucgccuucggcaagacgaagaucuucauccgcagccccaagacccuguucuaccuggaggagcagcggcgccuccggcugcagcagcuggccacccucauccagaagaucuaccgcggguggcgcugccggacccacuaccagcugaugcgcaagucccagauccugaucagcuccugguuccggggcaacaugcagaagaagugcuacggcaagaucaaggccagcgugcuccugauccaggccuucgugcgcggguggaaggcgcggaagaacuaccgcaaguacuuccgguccgaggccgcccugacgcucgccgacuucaucuacaagagcaugguccagaaguuccugcugggccucaagaacaaccugccguccaccaacgugcuggacaagaccuggcccgccgcgcccuacaagugccucagcaccgccaaccaggagcugcagcagcuguucuaccaguggaagugcaagcgcuuccgggaccagcucucccccaagcaggucgagauccugcgcgagaagcugugcgccagcgagcuguucaaggggaagaaggccuccuacccgcagagcgugcccauccccuucugcggcgacuacaucgggcugcagggcaaccccaagcugcagaagcucaagggcggggaggagggcccggugcugauggcggaggccgugaagaaggucaaccgggggaacggcaagacguccagccgcauccugcuccugaccaaggggcacgugauccugaccgacaccaagaagucccaggccaagaucgugaucggccucgacaacgucgccggcgugagcgugacgagccugaaggacgggcuguucucccuccaccugagcgagauguccagcgucggcuccaagggggacuuccugcucgugagcgagcacgugaucgagcugcugaccaagauguaccgggccguccucgacgcgacccagcgccagcugaccgugacggugaccgagaaguucuccguccgguucaaggagaacagcguggccgugaaggucgugcagggccccgccgggggcgacaacuccaagcugcgcuacaagaagaagggcagccacugccucgaggugaccguccaguga

SEQ ID NO: 2795 - RNA, 3132 nt, Artificial Sequence
  derived and/or modified sequence opt2 from MYO1A__Homo_sapiens__AAC78645
augccccuccucgagggcuccgucggcgucgaggaccucguccuccucgagccccucgucgaggagucccuccucaagaaccuccagcuccgcuacgagaacaaggagaucuacaccuacaucggcaacgucgucaucuccgucaaccccuaccagcagcuccccaucuacggccccgaguucaucgccaaguaccaggacuacaccuucuacgagcucaagccccacaucuacgcccucgccaacgucgccuaccagucccuccgcgaccgcgaccgcgaccagugcauccucaucaccggcgaguccggcuccggcaagaccgaggccuccaagcucgucauguccuacgucgccgccgucugcggcaagggcgagcaggucaacuccgucaaggagcagcuccuccaguccaaccccguccucgaggccuucggcaacgccaagaccauccgcaacaacaacuccucccgcuucggcaaguacauggacaucgaguucgacuucaagggcuccccccucggcggcgucaucaccaacuaccuccucgagaagucccgccucgucaagcagcucaagggcgagcgcaacuuccacaucuucuaccagcuccucgccggcgccgacgagcagcuccucaaggcccucaagcucgagcgcgacaccaccggcuacgccuaccucaaccacgaggucucccgcgucgacggcauggacgacgccuccuccuuccgcgccguccaguccgccauggccgucaucggcuucuccgaggaggagauccgccagguccucgaggucaccuccaugguccucaagcucggcaacguccucgucgccgacgaguuccaggccuccggcauccccgccuccggcauccgcgacggccgcggcguccgcgagaucggcgagauggucggccucaacuccgaggaggucgagcgcgcccucugcucccgcaccauggagaccgccaaggagaaggucgucaccgcccucaacgucaugcaggcccaguacgcccgcgacgcccucgccaagaacaucuacucccgccucuucgacuggaucgucaaccgcaucaacgaguccaucaaggucggcaucggcgagaagaagaaggucaugggcguccucgacaucuacggcuucgagauccucgaggacaacuccuucgagcaguucgucaucaacuacugcaacgagaagcuccagcaggucuucaucgagaugacccucaaggaggagcaggaggaguacaagcgcgagggcauccccuggaccaaggucgacuacuucgacaacggcaucaucugcaagcucaucgagcacaaccagcgcggcauccucgccaugcucgacgaggagugccuccgccccggcgucgucuccgacuccaccuuccucgccaagcucaaccagcucuucuccaagcacggccacuacgaguccaaggucacccagaacgcccagcgccaguacgaccacaccaugggccucuccugcuuccgcaucugccacuacgccggcaaggucaccuacaacgucaccuccuucaucgacaagaacaacgaccuccucuuccgcgaccuccuccaggccauguggaaggcccagcacccccuccuccgcucccucuuccccgagggcaaccccaagcaggccucccucaagcgcccccccaccgccggcgcccaguucaaguccuccgucgccauccucaugaagaaccucuacuccaagucccccaacuacauccgcugcaucaagcccaacgagcaccagcagcgcggccaguucuccuccgaccucgucgccacccaggcccgcuaccucggccuccucgagaacguccgcguccgccgcgccggcuacgcccaccgccagggcuacggccccuuccucgagcgcuaccgccuccucucccgcuccaccuggccccacuggaacggcggcgaccgcgagggcgucgagaagguccucggcgagcucuccauguccuccggcgagcucgccuucggcaagaccaagaucuucauccgcucccccaagacccucuucuaccucgaggagcagcgccgccuccgccuccagcagcucgccacccucauccagaagaucuaccgcggcuggcgcugccgcacccacuaccagcucaugcgcaagucccagauccucaucuccuccugguuccgcggcaacaugcagaagaagugcuacggcaagaucaaggccuccguccuccucauccaggccuucguccgcggcuggaaggcccgcaagaacuaccgcaaguacuuccgcuccgaggccgcccucacccucgccgacuucaucuacaaguccaugguccagaaguuccuccucggccucaagaacaaccuccccuccaccaacguccucgacaagaccuggcccgccgcccccuacaagugccucuccaccgccaaccaggagcuccagcagcucuucuaccaguggaagugcaagcgcuuccgcgaccagcucucccccaagcaggucgagauccuccgcgagaagcucugcgccuccgagcucuucaagggcaagaaggccuccuacccccaguccguccccauccccuucugcggcgacuacaucggccuccagggcaaccccaagcuccagaagcucaagggcggcgaggagggccccguccucauggccgaggccgucaagaaggucaaccgcggcaacggcaagaccuccucccgcauccuccuccucaccaagggccacgucauccucaccgacaccaagaagucccaggccaagaucgucaucggccucgacaacgucgccggcgucuccgucaccucccucaaggacggccucuucucccuccaccucuccgagauguccuccgucggcuccaagggcgacuuccuccucgucuccgagcacgucaucgagcuccucaccaagauguaccgcgccguccucgacgccacccagcgccagcucaccgucaccgucaccgagaaguucuccguccgcuucaaggagaacuccgucgccgucaaggucguccagggccccgccggcggcgacaacuccaagcuccgcuacaagaagaagggcucccacugccucgaggucaccguccaguga

SEQ ID NO: 2796 - RNA, 3132 nt, Artificial Sequence
  derived and/or modified sequence opt3 from MYO1A__Homo_sapiens__AAC78645
augccccugcucgagggcagcgugggggucgaagaccuuguucuguuggagccuuuaguggaagagucccugcuaaagaaccuccagcugagauacgaaaauaaagagaucuauaccuacauuggaaacguagugauaucugucaauccauaucaacagcuuccgaucuacggucccgaguucauugccaaguaucaggauuacacauuuuaugaacugaaaccucacaucuacgcuuuggcaaacguggccuaccagucacucagggaccgggaucgcgaccaaugcauucugaucacuggcgagagugggagcggaaagacggaagcguccaaacugguuaugucuuauguggcugccgucuguggcaagggugagcagguaaauucggugaaggagcagcucuuacagucaaacccaguucuggaagcauucgggaaugccaaaaccauacgaaacaauaacagcagucguuuuggaaaguacauggauaucgaguucgacuuuaaaggcaguccccuuggcggggugauuacaaauuauuugcuggaaaagucuaggcuagucaaacaacucaagggagagagaaacuuccauaucuuuuaccagcugcuugcuggugcagaugaacagcuguugaaggcccucaaacuggagcgggacacuaccggcuaugcuuacuuaaaucacgaggugagccgcguggaugggauggacgaugccuccucauucagagcgguccagagugcaauggccguuauuggauuuagcgaagaggaaaucaggcaagugcuggagguaacaucuauggugcucaaacuuggcaacguccugguggcugacgaguuccaggccuccgguauaccugcaucagggauucgggauggacgcggcguucgagaaaucggcgagauggugggguugaauagcgaagaggucgaaagagcucuaugcaguaggaccauggagacugccaaggaaaaggugguaacagcgcugaacguuaugcaggcccaauaugcacgggacgcucucgccaaaaacauuuacucucgucuguuugacuggaucgugaaucgcaucaacgaguccauuaaggucggaauaggugagaaaaagaaggugaugggcguccuugauaucuacggguucgaaauucuggaggacaauagcuuugaacaguucgugaucaacuauuguaaugagaaauugcagcagguuuucauagagaugacccucaaggaggaacaagaagaguacaaaagagaaggcauuccauggacgaagguggauuauuuugacaacggaaucaucugcaaacugauugagcauaaucagagggguaucuuagcuaugcuggaugaggaaugucuacggcccgggguagucucggacucuacuuuccucgccaagcugaaccagcuguuuuccaagcacggccauuacgagucaaaagugacccagaaugcacaacgacaguaugaucacacaaugggauugaguugcuuccgcauuugucacuacgccggcaagguuacuuauaacgugaccagcuuuauagacaaaaauaacgaucuucucuucagagaccugcuucaggcuauguggaaggcgcagcauccucuguugaggucccucuuuccagaagggaauccgaaacaagcaucucugaagcggcccccuacagccggagcucaguucaagagcucagucgccaucuuaaugaaaaaccuguacaguaaguccccaaauuacauucgcugcaucaaacccaacgagcaccagcagagaggucaauuuagcucugaucuaguggcaacccaggccagguaucucggccugcuugaaaacguacgugugcggcgagcuggguacgcccauagacagggauauggcccuuucuuggagagguaccgccugcucucacggaguacguggccacacuggaaugguggggacagagagggcguugaaaagguccugggagaguuaagcauguccucuggcgaacuggcauuugggaaaacuaagaucuucauuaggucgcccaagacauuguuuuaucuugaggaacaacgccgacuccggcugcagcagcuagcgacccugauacagaaaaucuaccguggauggagauguaggacucacuaucaacucaugcgcaagagccagauucugaucuccucaugguuccgggguaacaugcagaaaaagugcuacggcaaaauuaaggcuagugugcuuuugauccaggccuucgugagaggguggaaagcaaggaagaauuaccgaaaguauuuucgcucugaggccgcucugacauuagccgacuucauauacaaaagcaugguccaaaaguuucuccugggacuuaaaaacaaucugccguccaccaacguuuuggauaagacguggccugcagcucccuauaaaugucucucaaccgccaaucaggagcugcagcagcuauucuaccaauggaagugcaagcgguuuagagaccagcugagcccaaaacagguggaaauccucagggagaagcugugcgcgucugaacuuuucaaaggcaagaaagccuccuauccucaaagugugcccauuccauuuuguggugauuacaucggguugcagggcaaccccaagcugcagaaguuaaaaggaggcgaggaggggccuguacucauggcugaagcagucaagaaagugaaucguggaaacggcaagacaagcucucgcauucugcuucugacuaaaggucauguuauccuaaccgacacaaagaagucccaggccaaaauagugauugggcucgauaaugucgcuggagugucaguuacuucccugaaggacggcuuguucagccugcacuuaucggagauguccucuguggguagcaaaggcgauuuucuccugguaucagaacaugucaucgagcuucugaccaagauguaucgggccguguuggacgcaacacaaagacagcucaccgugacugucacggaaaaauucaguguuagguuuaaggagaacuccguggcgguaaaagugguccaggggccagccggaggcgauaauucuaagcugcgauacaagaaaaaggggagccacugccuagaggugacaguucaguga

SEQ ID NO: 2797 - RNA, 3132 nt, Artificial Sequence
  derived and/or modified sequence opt4 from MYO1A__Homo_sapiens__AAC78645
augccccugcuggagggcagcgugggcguggaggaccuggugcugcuggagccccugguggaggagagccugcugaagaaccugcagcugagauacgagaacaaggagaucuacaccuacaucggcaacguggugaucagcgugaaccccuaccagcagcugcccaucuacggccccgaguucaucgccaaguaccaggacuacaccuucuacgagcugaagccccacaucuacgcccuggccaacguggccuaccagagccugagagacagagacagagaccagugcauccugaucaccggcgagagcggcagcggcaagaccgaggccagcaagcuggugaugagcuacguggccgccgugugcggcaagggcgagcaggugaacagcgugaaggagcagcugcugcagagcaaccccgugcuggaggccuucggcaacgccaagaccaucagaaacaacaacagcagcagauucggcaaguacauggacaucgaguucgacuucaagggcagcccccugggcggcgugaucaccaacuaccugcuggagaagagcagacuggugaagcagcugaagggcgagagaaacuuccacaucuucuaccagcugcuggccggcgccgacgagcagcugcugaaggcccugaagcuggagagagacaccaccggcuacgccuaccugaaccacgaggugagcagaguggacggcauggacgacgccagcagcuucagagccgugcagagcgccauggccgugaucggcuucagcgaggaggagaucagacaggugcuggaggugaccagcauggugcugaagcugggcaacgugcugguggccgacgaguuccaggccagcggcauccccgccagcggcaucagagacggcagaggcgugagagagaucggcgagauggugggccugaacagcgaggagguggagagagcccugugcagcagaaccauggagaccgccaaggagaagguggugaccgcccugaacgugaugcaggcccaguacgccagagacgcccuggccaagaacaucuacagcagacuguucgacuggaucgugaacagaaucaacgagagcaucaaggugggcaucggcgagaagaagaaggugaugggcgugcuggacaucuacggcuucgagauccuggaggacaacagcuucgagcaguucgugaucaacuacugcaacgagaagcugcagcagguguucaucgagaugacccugaaggaggagcaggaggaguacaagagagagggcauccccuggaccaagguggacuacuucgacaacggcaucaucugcaagcugaucgagcacaaccagagaggcauccuggccaugcuggacgaggagugccugagacccggcguggugagcgacagcaccuuccuggccaagcugaaccagcuguucagcaagcacggccacuacgagagcaaggugacccagaacgcccagagacaguacgaccacaccaugggccugagcugcuucagaaucugccacuacgccggcaaggugaccuacaacgugaccagcuucaucgacaagaacaacgaccugcuguucagagaccugcugcaggccauguggaaggcccagcacccccugcugagaagccuguuccccgagggcaaccccaagcaggccagccugaagagaccccccaccgccggcgcccaguucaagagcagcguggccauccugaugaagaaccuguacagcaagagccccaacuacaucagaugcaucaagcccaacgagcaccagcagagaggccaguucagcagcgaccugguggccacccaggccagauaccugggccugcuggagaacgugagagugagaagagccggcuacgcccacagacagggcuacggccccuuccuggagagauacagacugcugagcagaagcaccuggccccacuggaacggcggcgacagagagggcguggagaaggugcugggcgagcugagcaugagcagcggcgagcuggccuucggcaagaccaagaucuucaucagaagccccaagacccuguucuaccuggaggagcagagaagacugagacugcagcagcuggccacccugauccagaagaucuacagaggcuggagaugcagaacccacuaccagcugaugagaaagagccagauccugaucagcagcugguucagaggcaacaugcagaagaagugcuacggcaagaucaaggccagcgugcugcugauccaggccuucgugagaggcuggaaggccagaaagaacuacagaaaguacuucagaagcgaggccgcccugacccuggccgacuucaucuacaagagcauggugcagaaguuccugcugggccugaagaacaaccugcccagcaccaacgugcuggacaagaccuggcccgccgcccccuacaagugccugagcaccgccaaccaggagcugcagcagcuguucuaccaguggaagugcaagagauucagagaccagcugagccccaagcagguggagauccugagagagaagcugugcgccagcgagcuguucaagggcaagaaggccagcuacccccagagcgugcccauccccuucugcggcgacuacaucggccugcagggcaaccccaagcugcagaagcugaagggcggcgaggagggccccgugcugauggccgaggccgugaagaaggugaacagaggcaacggcaagaccagcagcagaauccugcugcugaccaagggccacgugauccugaccgacaccaagaagagccaggccaagaucgugaucggccuggacaacguggccggcgugagcgugaccagccugaaggacggccuguucagccugcaccugagcgagaugagcagcgugggcagcaagggcgacuuccugcuggugagcgagcacgugaucgagcugcugaccaagauguacagagccgugcuggacgccacccagagacagcugaccgugaccgugaccgagaaguucagcgugagauucaaggagaacagcguggccgugaagguggugcagggccccgccggcggcgacaacagcaagcugagauacaagaagaagggcagccacugccuggaggugaccgugcaguga

SEQ ID NO: 2798 - RNA, 3132 nt, Artificial Sequence
  derived and/or modified sequence opt5 from MYO1A__Homo_sapiens__AAC78645
augccccugcucgagggcagcgugggggucgaagaccugguucuucuggagccucucguggaagagucccugcuuaagaaccugcagcucagauacgaaaauaaagagaucuauaccuacauuggaaacguggucaucucugugaauccguaucaacagcugcccauuuacggcccugaguucaucgccaaguaucaggauuacacauuuuaugaacugaaaccccacauuuacgcucucgccaacguugcguaccagagccugcgggaccgcgauagagaccaaugcauccuuaucacgggggaguccggaucuggcaagaccgaagcuagcaaacuggugauguccuaugucgccgccgugugugggaagggagagcagguuaauucugugaaggagcagcuccugcagagcaacccuguccuugaagcguucggcaaugccaaaacaauucggaacaauaacuccagccgcuuuggcaaguacauggauaucgaguucgacuuuaaagggucuccccugggaggcgugauuaccaauuaucuccuggaaaaguccagacuggugaaacaacucaagggggagcggaacuuccauaucuuuuaccagcugcuugcuggagccgaugaacagcugcucaaggcgcugaaacuugagcgcgacacaaccggcuaugccuaccugaaucacgaggucagcagaguugaugggauggacgaugcuucuuccuuccgggccgugcagagcgcuauggccgugauuggauuuucugaagaggaaauccgccaaguccucgaggugacauccaugguucugaagcugggcaacgugcucgucgcggacgaguuccaggccagcggcauuccugcuuccgggaucagagauggacggggcgugcgcgagaucggggagaugguuggacuuaauucugaagagguggaaagagcccugugcagccggaccauggagacggcuaaagaaaaggucgugaccgcccugaacgucaugcaggcccaauaugcucgcgacgcgcucgccaaaaacauuuacuccagacuguuugacuggaucgugaaucggauuaacgagagcaucaagguuggcauuggggagaaaaagaaggugaugggaguccuugauaucuacggcuucgaaauccuggaggacaauucuuuugaacaguucgugauuaacuauuguaaugagaaacuccagcagguuuucaucgagaugacacugaaggaagaacaagaagaguacaaaagagaaggcauuccguggaccaagguggauuauuuugacaacgggaucauuugcaaacugaucgagcauaaucagcgcggaauccucgcuaugcuggaugaggaaugucuucggcccggcgucguguccgacagcacauuccuggccaagcucaaccagcuguuuucuaagcacgggcauuacgagagcaaagugacccagaaugcccaaagacaguaugaucacacgaugggacuguccugcuuccgcauuugucacuacgcuggcaagguuacauauaacgucaccucuuuuaucgacaaaaauaacgaucuucucuuccgggaccugcugcaggccauguggaaggcgcagcauccucuccugagaagccuuuuucccgaagggaauccuaaacaggcuucccugaagcggcccccgacagccggcgcccaauucaagagcucuguggcuauucucaugaaaaaccuguacuccaagagcccuaauuacauccggugcauuaaacccaacgagcaccagcagagaggacaauuuucuuccgaucugguggccacccaggcucgcuaucuuggccuccuggaaaacguccgggugagacgcgccggguacgcgcaucggcagggauauggcccuuuccuggagagauaccggcuccugagccgcuccaccuggccccacuggaaugggggagacagagagggcguugaaaaggugcuuggggagcugucuaugagcuccggcgaacucgccuuuggaaaaacaaagaucuucauucggucucccaagacgcuguuuuaucuggaggaacaaagacgccuucggcuccagcagcuggcuacccugauccagaaaaucuacagaggcuggcgcuguagaacacacuaucaacucaugcgcaagagccagauucugaucuccagcugguuccgcgggaacaugcagaaaaagugcuacggaaaaauuaaggccucuguccuucugauccaggcuuucgugagaggcuggaaagcccggaagaauuaccgcaaguauuuuagauccgaggcggcccucacccuggcugacuucauuuacaaaagcaugguucaaaaguuucugcuugggcucaaaaacaaucugccuucuacaaacgugcuggauaagaccuggccggccgcucccuauaaaugucucuccacggccaaucaggagcugcagcagcuuuucuaccaauggaagugcaagcgguuucgcgaccagcugagcccuaaacaggucgaaauccucagagagaagcugugcgccucugaacuguucaaaggaaagaaagcuagcuauccccaauccgugccuauccccuuuuguggcgauuacauugggcuucagggcaacccgaagcugcagaagcucaaaggaggcgaggaggggccuguucugauggcggaagccgugaagaaagucaaucggggaaacggcaagacaagcucucgcauccuccugcuuaccaaagggcaugugauucugaccgacacaaagaagucccaggcuaaaaucgugauuggacucgauaaugucgccggcguuagcgugaccucccugaaggacgggcuguucucucuucaccugagcgagauguccucugugggcagcaaaggagauuuucuccuggucuccgaacaugugaucgagcuccugacaaagauguauagagccguucuugacgcuacgcaacggcagcugaccgugacagucaccgaaaaauucucugugagauuuaaggagaacagcguugccgugaaagucgugcagggccccgcugggggagauaauuccaagcuccgcuacaagaaaaagggcagccacugccuggagguuacagugcaguga

SEQ ID NO: 2799 - protein, 1136 aa, Artificial Sequence
  MYO1B__Homo_sapiens__O43795
MAKMEVKTSLLDNMIGVGDMVLLEPLNEETFINNLKKRFDHSEIYTYIGSVVISVNPYRSLPIYSPEKVEEYRNRNFYELSPHIFALSDEAYRSLRDQDKDQCILITGESGAGKTEASKLVMSYVAAVCGKGAEVNQVKEQLLQSNPVLEAFGNAKTVRNDNSSRFGKYMDIEFDFKGDPLGGVISNYLLEKSRVVKQPRGERNFHVFYQLLSGASEELLNKLKLERDFSRYNYLSLDSAKVNGVDDAANFRTVRNAMQIVGFMDHEAESVLAVVAAVLKLGNIEFKPESRVNGLDESKIKDKNELKEICELTGIDQSVLERAFSFRTVEAKQEKVSTTLNVAQAYYARDALAKNLYSRLFSWLVNRINESIKAQTKVRKKVMGVLDIYGFEIFEDNSFEQFIINYCNEKLQQIFIELTLKEEQEEYIREDIEWTHIDYFNNAIICDLIENNTNGILAMLDEECLRPGTVTDETFLEKLNQVCATHQHFESRMSKCSRFLNDTSLPHSCFRIQHYAGKVLYQVEGFVDKNNDLLYRDLSQAMWKASHALIKSLFPEGNPAKINLKRPPTAGSQFKASVATLMKNLQTKNPNYIRCIKPNDKKAAHIFNEALVCHQIRYLGLLENVRVRRAGYAFRQAYEPCLERYKMLCKQTWPHWKGPARSGVEVLFNELEIPVEEYSFGRSKIFIRNPRTLFKLEDLRKQRLEDLATLIQKIYRGWKCRTHFLLMKKSQIVIAAWYRRYAQQKRYQQTKSSALVIQSYIRGWKARKILRELKHQKRCKEAVTTIAAYWHGTQARRELRRLKEEARNKHAIAVIWAYWLGSKARRELKRLKEEARRKHAVAVIWAYWLGLKVRREYRKFFRANAGKKIYEFTLQRIVQKYFLEMKNKMPSLSPIDKNWPSRPYLFLDSTHKELKRIFHLWRCKKYRDQFTDQQKLIYEEKLEASELFKDKKALYPSSVGQPFQGAYLEINKNPKYKKLKDAIEEKIIIAEVVNKINRANGKSTSRIFLLTNNNLLLADQKSGQIKSEVPLVDVTKVSMSSQNDGFFAVHLKEGSEAASKGDFLFSSDHLIEMATKLYRTTLSQTKQKLNIEISDEFLVQFRQDKVCVKFIQGNQKNGSVPTCKRKNNRLLEVAVP

SEQ ID NO: 2800 - RNA, 3411 nt, Artificial Sequence
  MYO1B__Homo_sapiens__AAH53558
auggccaaaauggaggugaaaaccucacuucuggacaauaugauuggaguuggggauaugguucuuuuagaaccucucaaugaggagaccuucaucaacaaccucaagaagcgcuuugaccacagugaaauauacacuuacauuggaagugugguuauaucuguuaacccauaucggucuuuacccauuuauucaccagagaaaguggaagaauacaggaacagaaauuuuuaugaacugagcccucacaucuuugcccuuucggaugaagcauacagaucccuacgagaucaagauaaggaccaauguauucucauuacuggggaaaguggagcaggaaaaacagaggccaguaagcuugucauguccuauguggcagcuguuuguggaaaaggagcagaaguuaaucaaguuaaagaacagcuuuuacaguccaacccgguccuggaagcuuuuggaaaugccaaaacuguaaggaaugacaacuccucuagauuuggcaaauauauggauauugaauuugacuuuaaaggcgauccacuaggaggaguaauaaguaacuaucuuuuagagaaaucucggguuguuaaacagccaagaggugaaagaaacuuccauguguucuaucagcugcucucuggugccucugaagagcuccucaauaaacuuaagcuugagagggauuucagcagguauaacuaccugagucuggauucggccaaagugaauggaguggaugaugcagcaaauuuuagaaccgugcggaaugccaugcagauugugggcuuuauggaucaugaagcugagucugucuuggcggugguggcagcaguguugaaacuggggaacauugaguucaagcccgaaucucgagugaauggucuagaugaaagcaaaaucaaagauaaaaaugaguuaaaagaaauuugugaauugaccggcauugaucaaucaguucuagaacgagcauucaguuuccgaacaguugaggccaaacaggagaaaguuucaacuacacugaauguggcucaggcuuauuaugcccgugaugcucuggcuaaaaaccucuacagcagguuguuuucaugguugguaaaucgaaucaaugaaagcauuaaggcacaaacaaaagugagaaagaaggucauggguguucuggacauuuauggcuuugagauuuucgaggacaacagcuuugagcaguucauuauuaauuauuguaacgaaaagcugcaacaaaucuucauugaacuuacucuuaaagaagagcaggaggaguauauacgggaggauauagaauggacucacauugacuacuucaauaaugcuaucauuugugaccuaauagaaaauaacacaaauggaauccuggccaugcuggaugaagagugccucagaccuggcacagucacugaugagaccuucuuagaaaagcugaaccaaguaugugccacccaccagcauuuugaaagcaggaugagcaagugcucucgguuccucaaugacacgucucugccucacagcugcuucaggauccagcauuaugcuggaaaggugcuguaccagguggaaggauucguugacaaaaacaaugaccuucucuaucgagaccugucccaagccauguggaaggccagccaugcccucaucaagucuuuguuccccgaagggaaucccgccaagaucaaccugaaaaggccuccuacagcaggcucacaguucaaggcauccguggccacucugaugaaaaaccuacagaccaagaacccaaacuauauuagguguaucaaaccgaaugauaaaaaagcagcacacaucuucaacgaggcucuagugugucaucagaucagguaccuggggcuuuuggagaacguccgagugcggagggcaggcuacgccuucaggcaggccuaugaaccuugccuagaaagauacaaaaugcuuuguaaacaaacauggccucauuggaaaggaccagccaggucugguguggagguccuauuuaaugaauuagaaauucccguggaagaauacuccuuugguagaucaaagauauucauccgaaacccaagaacauuauucaaauuagaagaccugaggaagcaacgccuggaggacuuggccacucucauucagaagauauaucggggguggaaaugccgcacacacuuccugcuaaugaaaaaaagccaaauugugauugccgccugguacaggagauaugcgcaacaaaagagguaccagcagacaaagaguuccgccuuaguaauucagucuuauauccgggguuggaaggcucgaaaaauucugcgggaacugaagcaucaaaagcgcuguaaggaagcagucacgaccauugcugcauauuggcaugggacccaggcacgaagggaacugagacggcugaaggaggaggcuaggaauaaacaugcuauugcaguuauuugggcuuacuggcuuggaucuaaggcucgaagggaauugaaacgcuugaaggaggaggcuaggcguaagcaugcaguugcugucauuugggcuuacuggcuuggacugaagguacguagagaauacaggaaauucuucagagccaaugcuggaaagaaaaucuaugaguuuacgcuucagagaauugugcaaaaauacuucuuggaaaugaaaaauaagaugccuuccuuaucuccaauagacaagaauuggcccucaagaccuuacuuauucuuggauucuacucacaaggagcuaaaaaggauuuuccacuuguggagguguaaaaaauacagggaccaauucacagaccagcagaaacuuauuuaugaagagaaacuagaagccagugaacucuucaaagacaagaaggcuuuauacccaucuaguguugggcaaccauuccaaggggcuuaccuggaaaucaacaagaaccccaaguauaagaaacucaaagaugccauugaagaaaagaucaucauugcugaagucgugaacaaaauuaaccgugcuaaugggaagaguacaucucggauuuuccucuuaacaaacaauaaucuccuucuugcugaccaaaagucuggacaaaucaagucagagguuccacugguggaugugaccaagguaucaaugagcucacaaaaugauggcuucuucgccguccaccucaaagagggcucagaagcagcuaguaaaggagacuuucucuucagcagugaucaccugauugaaauggccaccaagcucuaucgcacaacucucagccaaaccaaacagaagcucaauauugagauuuccgaugaguuccugguacaguucagacaggacaaaguaugugugaaguuuauucagggaaaccagaaaaaugggagugucccaacauguaaacgaaaaaacaaccgucuccuugaaguugcugucccuuaa

SEQ ID NO: 2801 - RNA, 3411 nt, Artificial Sequence
  derived and/or modified sequence opt1 from MYO1B__Homo_sapiens__AAH53558
auggccaagauggaggugaagaccagccugcucgacaacaugaucggcgucggggacauggugcugcuggagccccucaacgaggagaccuucaucaacaaccugaagaagcgcuucgaccacuccgagaucuacacguacaucggcagcguggucaucuccgugaaccccuaccggagccugcccaucuacucccccgagaagguggaggaguaccgcaaccggaacuucuacgagcucagcccccacaucuucgcccuguccgacgaggcguaccgcagccugcgggaccaggacaaggaccagugcauccucaucaccggggaguccggcgccgggaagaccgaggccagcaagcuggucauguccuacguggccgccgugugcggcaagggcgcggaggucaaccaggugaaggagcagcugcuccagagcaacccggugcuggaggccuucgggaacgccaagaccguccgcaacgacaacuccagccgguucggcaaguacauggacaucgaguucgacuucaagggggacccccugggcggggugaucuccaacuaccuccuggagaagucccgcguggucaagcagccccggggcgagcgcaacuuccacguguucuaccagcugcucagcggcgccagcgaggagcugcugaacaagcucaagcuggagcgggacuucucccgcuacaacuaccugagccucgacagcgcgaaggugaacggggucgacgacgccgccaacuuccggacggugcgcaacgccaugcagaucgugggcuucauggaccacgaggccgaguccguccuggcggugguggccgccguccugaagcucgggaacaucgaguucaagcccgagagccgggugaacggccuggacgaguccaagaucaaggacaagaacgagcugaaggagaucugcgagcucaccggcaucgaccagagcguccuggagcgcgccuucuccuuccggaccguggaggccaagcaggagaaggugagcaccacgcugaacgucgcgcaggccuacuacgcccgcgacgcccucgccaagaaccuguacucccggcuguucagcuggcucgugaaccgcaucaacgaguccaucaaggcgcagaccaaggugcggaagaaggucaugggggugcuggacaucuacggcuucgagaucuucgaggacaacagcuucgagcaguucaucaucaacuacugcaacgagaagcugcagcagaucuucaucgagcucacccugaaggaggagcaggaggaguacauccgcgaggacaucgaguggacccacaucgacuacuucaacaacgccaucaucugcgaccugaucgagaacaacacgaacgggauccucgccaugcuggacgaggagugccugcgcccgggcaccgugaccgacgagaccuuccucgagaagcugaaccaggucugcgccacgcaccagcacuucgagucccggaugagcaagugcucccgcuuccugaacgacaccagccucccccacuccugcuuccggauccagcacuacgccgggaaggugcuguaccagguggagggcuucgucgacaagaacaacgaccugcuguaccgcgaccucagccaggcgauguggaaggccucccacgcccugaucaagagccuguuccccgagggcaaccccgccaagaucaaccucaagcggccgcccaccgcggggucccaguucaaggccagcguggccacccugaugaagaaccugcagacgaagaaccccaacuacauccgcugcaucaagcccaacgacaagaaggccgcccacaucuucaacgaggcgcucgugugccaccagauccgguaccugggccugcucgagaacguccgcgugcggcgcgccggguacgccuuccggcaggccuacgagccgugccuggagcgcuacaagaugcugugcaagcagaccuggccccacuggaagggccccgcccggagcgggguggagguccucuucaacgagcuggagauccccguggaggaguacuccuucggccgcagcaagaucuucauccggaacccgcgcacccuguucaagcucgaggaccugcggaagcagcgccuggaggaccucgcgacccugauccagaagaucuaccggggcuggaagugccgcacgcacuuccugcucaugaagaagucccagaucgugaucgccgccugguaccgccgguacgcccagcagaagcgcuaccagcagaccaagagcuccgcccuggucauccagagcuacauccggggguggaaggcgcgcaagauccugcgggagcucaagcaccagaagcgcugcaaggaggccgugaccaccaucgccgccuacuggcacggcacgcaggcgcggcgcgagcugcggcgccugaaggaggaggcccggaacaagcacgccaucgccgugaucugggccuacuggcucggguccaaggcgcgccgggagcugaagcgccugaaggaggaggcccggcgcaagcacgccgucgccgugaucugggccuacuggcucggccugaaggugcggcgcgaguaccggaaguucuuccgcgcgaacgccgggaagaagaucuacgaguucacccugcagcggaucguccagaaguacuuccucgagaugaagaacaagaugcccagccugucccccaucgacaagaacuggcccagccgcccguaccuguuccucgacuccacccacaaggagcugaagcgcaucuuccaccuguggcggugcaagaaguaccgcgaccaguucaccgaccagcagaagcucaucuacgaggagaagcuggaggccagcgagcuguucaaggacaagaaggcccucuaccccuccagcgugggccagcccuuccagggcgccuaccuggagaucaacaagaaccccaaguacaagaagcugaaggacgcgaucgaggagaagaucaucaucgccgagguggucaacaagaucaaccgggccaacgggaaguccacgagccgcaucuuccuccugaccaacaacaaccugcuccuggccgaccagaaguccggccagaucaagagcgaggugccgcugguggacgucaccaaggugagcauguccagccagaacgacggguucuucgcggugcaccucaaggagggcuccgaggccgccagcaagggcgacuuccuguucuccagcgaccaccugaucgagauggccaccaagcucuaccggacgacccugucccagaccaagcagaagcugaacaucgagaucagcgacgaguuccucguccaguuccgccaggacaaggugugcgugaaguucauccaggggaaccagaagaacggcuccgucccgaccugcaagcggaagaacaaccgccugcuggagguggccgugcccuga

SEQ ID NO: 2802 - RNA, 3411 nt, Artificial Sequence
  derived and/or modified sequence opt2 from MYO1B__Homo_sapiens__AAH53558
auggccaagauggaggucaagaccucccuccucgacaacaugaucggcgucggcgacaugguccuccucgagccccucaacgaggagaccuucaucaacaaccucaagaagcgcuucgaccacuccgagaucuacaccuacaucggcuccgucgucaucuccgucaaccccuaccgcucccuccccaucuacucccccgagaaggucgaggaguaccgcaaccgcaacuucuacgagcucuccccccacaucuucgcccucuccgacgaggccuaccgcucccuccgcgaccaggacaaggaccagugcauccucaucaccggcgaguccggcgccggcaagaccgaggccuccaagcucgucauguccuacgucgccgccgucugcggcaagggcgccgaggucaaccaggucaaggagcagcuccuccaguccaaccccguccucgaggccuucggcaacgccaagaccguccgcaacgacaacuccucccgcuucggcaaguacauggacaucgaguucgacuucaagggcgacccccucggcggcgucaucuccaacuaccuccucgagaagucccgcgucgucaagcagccccgcggcgagcgcaacuuccacgucuucuaccagcuccucuccggcgccuccgaggagcuccucaacaagcucaagcucgagcgcgacuucucccgcuacaacuaccucucccucgacuccgccaaggucaacggcgucgacgacgccgccaacuuccgcaccguccgcaacgccaugcagaucgucggcuucauggaccacgaggccgaguccguccucgccgucgucgccgccguccucaagcucggcaacaucgaguucaagcccgagucccgcgucaacggccucgacgaguccaagaucaaggacaagaacgagcucaaggagaucugcgagcucaccggcaucgaccaguccguccucgagcgcgccuucuccuuccgcaccgucgaggccaagcaggagaaggucuccaccacccucaacgucgcccaggccuacuacgcccgcgacgcccucgccaagaaccucuacucccgccucuucuccuggcucgucaaccgcaucaacgaguccaucaaggcccagaccaagguccgcaagaaggucaugggcguccucgacaucuacggcuucgagaucuucgaggacaacuccuucgagcaguucaucaucaacuacugcaacgagaagcuccagcagaucuucaucgagcucacccucaaggaggagcaggaggaguacauccgcgaggacaucgaguggacccacaucgacuacuucaacaacgccaucaucugcgaccucaucgagaacaacaccaacggcauccucgccaugcucgacgaggagugccuccgccccggcaccgucaccgacgagaccuuccucgagaagcucaaccaggucugcgccacccaccagcacuucgagucccgcauguccaagugcucccgcuuccucaacgacaccucccucccccacuccugcuuccgcauccagcacuacgccggcaagguccucuaccaggucgagggcuucgucgacaagaacaacgaccuccucuaccgcgaccucucccaggccauguggaaggccucccacgcccucaucaagucccucuuccccgagggcaaccccgccaagaucaaccucaagcgcccccccaccgccggcucccaguucaaggccuccgucgccacccucaugaagaaccuccagaccaagaaccccaacuacauccgcugcaucaagcccaacgacaagaaggccgcccacaucuucaacgaggcccucgucugccaccagauccgcuaccucggccuccucgagaacguccgcguccgccgcgccggcuacgccuuccgccaggccuacgagcccugccucgagcgcuacaagaugcucugcaagcagaccuggccccacuggaagggccccgcccgcuccggcgucgagguccucuucaacgagcucgagauccccgucgaggaguacuccuucggccgcuccaagaucuucauccgcaacccccgcacccucuucaagcucgaggaccuccgcaagcagcgccucgaggaccucgccacccucauccagaagaucuaccgcggcuggaagugccgcacccacuuccuccucaugaagaagucccagaucgucaucgccgccugguaccgccgcuacgcccagcagaagcgcuaccagcagaccaaguccuccgcccucgucauccaguccuacauccgcggcuggaaggcccgcaagauccuccgcgagcucaagcaccagaagcgcugcaaggaggccgucaccaccaucgccgccuacuggcacggcacccaggcccgccgcgagcuccgccgccucaaggaggaggcccgcaacaagcacgccaucgccgucaucugggccuacuggcucggcuccaaggcccgccgcgagcucaagcgccucaaggaggaggcccgccgcaagcacgccgucgccgucaucugggccuacuggcucggccucaagguccgccgcgaguaccgcaaguucuuccgcgccaacgccggcaagaagaucuacgaguucacccuccagcgcaucguccagaaguacuuccucgagaugaagaacaagaugcccucccucucccccaucgacaagaacuggcccucccgccccuaccucuuccucgacuccacccacaaggagcucaagcgcaucuuccaccucuggcgcugcaagaaguaccgcgaccaguucaccgaccagcagaagcucaucuacgaggagaagcucgaggccuccgagcucuucaaggacaagaaggcccucuaccccuccuccgucggccagcccuuccagggcgccuaccucgagaucaacaagaaccccaaguacaagaagcucaaggacgccaucgaggagaagaucaucaucgccgaggucgucaacaagaucaaccgcgccaacggcaaguccaccucccgcaucuuccuccucaccaacaacaaccuccuccucgccgaccagaaguccggccagaucaaguccgaggucccccucgucgacgucaccaaggucuccauguccucccagaacgacggcuucuucgccguccaccucaaggagggcuccgaggccgccuccaagggcgacuuccucuucuccuccgaccaccucaucgagauggccaccaagcucuaccgcaccacccucucccagaccaagcagaagcucaacaucgagaucuccgacgaguuccucguccaguuccgccaggacaaggucugcgucaaguucauccagggcaaccagaagaacggcuccguccccaccugcaagcgcaagaacaaccgccuccucgaggucgccguccccuga

SEQ ID NO: 2803 - RNA, 3411 nt, Artificial Sequence
  derived and/or modified sequence opt3 from MYO1B__Homo_sapiens__AAH53558
auggccaagauggaggugaaaaccagccugcucgacaacaugaucggcgucggggauaugguucuucuggaacccuugaaugaggaaacauucauuaacaauuuaaagaaaagauuugaccacuccgagauauacacuuauaucggaucugugguaauuucagugaacccuuacaggagucugccaaucuauagcccggaaaaggucgaggaguaccggaaucgcaacuucuaugaacuaaguccccauauuuuugcucucucugaugaggcauaccgaucgcugcgugaccaggauaaagaccaaugcauccuuauaacgggugaaucaggcgccgggaagaccgaggcgagcaagcuggugaugaguuauguugcugccguguguggaaaaggcgcagaggucaaucaggugaaggaacaguugcuccaguccaacccuguacuggaggccuucgguaaugcuaaaacaguuagaaacgauaauucuagcagguuugggaaguacauggacaucgaguucgauuuuaaaggagacccacugggcggcgugauuuccaacuaccucuuagaaaagucacgggucgugaagcaaccccgcggggaaagaaauuuccacguguuuuaucagcugcuuaguggagcaagcgaggaguugcugaacaaacuaaagcucgaaagggauuucucucgguacaauuaucugucccuugacucagccaaagucaacgguguugaugacgcugccaacuuucgcacugugcgaaaugcgaugcagaucguaggcuucauggaccaugaggcagaaagcgugcuggccgucguggcugccguuuugaagcucgggaacauugaguuuaaaccugaaaguagagugaauggacuggaugagucuaagaucaaagacaagaacgaguuaaaggaaauaugcgagcugaccggcauugaucaguccguccucgaaagggcauucagcuuccggacaguggaggcuaaacaagaaaagguaucgaccacucuuaauguugcccaggcguacuaugcccgugacgcacuggcuaaaaacuuguacucucgccuauuuuccuggcuggugaauagaaucaacgagucaauuaaggcccagacaaaagucaggaagaaggugauggguguccucgauaucuauggguucgagaucuuugaagacaauaguuucgagcaguuuauuauaaacuacuguaaugaaaaacugcaacagaucuucauugagcuuacccugaaggaggaacaggaggaauacauccgggaggauauagaauggacgcacauugacuauuuuaacaaugcuaucaucugcgauuugauugagaacaauacuaacggaauccucgccaugcuggacgaggaauguuuacgaccaggcaccgugacagaugagacuuuccuggaaaaacuaaaccaaguuugcgcaacccaucagcacuuugagagccgcauguccaaguguucuagauuccucaaugacacaagccugccccacucaugcuuuaggauucagcauuacgccggcaaagugcuuuaucagguagaaggguucgucgacaagaacaaugauuugcuguaccgggaccucagucaagcuauguggaaggcgucccacgcacugauaaaaagccuuuuuccugagggaaacccagccaagaucaaucugaaacgcccgcccaccgcugguucucaguucaaggccucaguggcaacguugaugaaaaaccuccagacuaagaauccuaacuauauuagauguaucaagccaaaugauaaaaaggccgcucauaucuucaacgaggcccugguuugccaccagauuagguacuuaggccugcuagaaaaugugcguguccggcgagcaggguaugcguuuagacaggcuuacgagcccugucucgaaagguacaaaaugcugugcaagcaaacauggccucacuggaaaggaccagcccgcaguggcguggagguacuuuucaacgaauuggagauacccguggaggaauauagcuuuggucgguccaagaucuucauuagaaauccgaggacccuguuuaaacucgaggaccugcgcaagcagcgauuagaagaucuggcaacucuuauccagaagauuuaccggggguggaaaugccguacacauuucuugcucaugaagaaaucucaaaucguuauagccgcuugguauagaagguacgcccagcagaagcgcuaucagcaaaccaaaucgagcgcacuggucauccaguccuacauucggggcuggaaggcuagaaagauccuaagggagcugaaacaccagaagcgauguaaagaggccgugacgaccauugcggccuauuggcauggaacacaagcucgccgggaacucagaaggcugaaggaggaagcacguaacaaacacgccaucgcugugauaugggccuacuggcuuggcucaaaggcacgccgggaguugaagagacugaaagaagaggcgaggcgaaagcaugccgucgcuguuauuugggccuacugguuagggcucaaagugcggcgcgaguauagaaaguuuuucagggcaaaugcugguaaaaagaucuacgaauuuacucugcagcggauugugcagaaguauuuccuugagaugaaaaacaagaugccuagucugucucccaucgacaaaaacuggccaagccgaccuuacuuguuucucgauuccacccacaaggaacugaaaagaauauuccaccuauggcgcugcaagaaauauagggaccaguuuacagaucaacagaagcugaucuacgaggaaaagcucgaggccucagagcuguucaaagacaagaaagcacuuuaucccagcucuguaggacagccauuccagggcgccuacuuggaaauuaauaagaaccccaaauacaagaagcugaaagaugcuaucgaggaaaagauuaucauagcggaggucgugaauaaaauuaaccgugccaaugggaaguccacuucccggaucuuuuuacucaccaacaauaaccugcuucuggcagaccagaaaagcggacaaaucaagucugaaguuccucuaguggaugucacaaagguguccaugucaagucagaaugacggcuucuuugcuguucaucucaaagaggguagcgaggccgccucgaagggggacuuccuguuuuccucugaucacuugauugaaauggcuaccaaacuguauagaacuacguuaagccagacaaagcaaaaacucaacaucgagauuucagacgaguuccuggugcaguuuaggcaggauaagguaugugucaaguucauacaaggcaaucagaaaaacggaagugugccaaccugcaagcgcaaaaauaaccgacuucuggaaguggcagucccguga

SEQ ID NO: 2804 - RNA, 3411 nt, Artificial Sequence
  derived and/or modified sequence opt4 from MYO1B__Homo_sapiens__AAH53558
auggccaagauggaggugaagaccagccugcuggacaacaugaucggcgugggcgacauggugcugcuggagccccugaacgaggagaccuucaucaacaaccugaagaagagauucgaccacagcgagaucuacaccuacaucggcagcguggugaucagcgugaaccccuacagaagccugcccaucuacagccccgagaagguggaggaguacagaaacagaaacuucuacgagcugagcccccacaucuucgcccugagcgacgaggccuacagaagccugagagaccaggacaaggaccagugcauccugaucaccggcgagagcggcgccggcaagaccgaggccagcaagcuggugaugagcuacguggccgccgugugcggcaagggcgccgaggugaaccaggugaaggagcagcugcugcagagcaaccccgugcuggaggccuucggcaacgccaagaccgugagaaacgacaacagcagcagauucggcaaguacauggacaucgaguucgacuucaagggcgacccccugggcggcgugaucagcaacuaccugcuggagaagagcagaguggugaagcagcccagaggcgagagaaacuuccacguguucuaccagcugcugagcggcgccagcgaggagcugcugaacaagcugaagcuggagagagacuucagcagauacaacuaccugagccuggacagcgccaaggugaacggcguggacgacgccgccaacuucagaaccgugagaaacgccaugcagaucgugggcuucauggaccacgaggccgagagcgugcuggccgugguggccgccgugcugaagcugggcaacaucgaguucaagcccgagagcagagugaacggccuggacgagagcaagaucaaggacaagaacgagcugaaggagaucugcgagcugaccggcaucgaccagagcgugcuggagagagccuucagcuucagaaccguggaggccaagcaggagaaggugagcaccacccugaacguggcccaggccuacuacgccagagacgcccuggccaagaaccuguacagcagacuguucagcuggcuggugaacagaaucaacgagagcaucaaggcccagaccaaggugagaaagaaggugaugggcgugcuggacaucuacggcuucgagaucuucgaggacaacagcuucgagcaguucaucaucaacuacugcaacgagaagcugcagcagaucuucaucgagcugacccugaaggaggagcaggaggaguacaucagagaggacaucgaguggacccacaucgacuacuucaacaacgccaucaucugcgaccugaucgagaacaacaccaacggcauccuggccaugcuggacgaggagugccugagacccggcaccgugaccgacgagaccuuccuggagaagcugaaccaggugugcgccacccaccagcacuucgagagcagaaugagcaagugcagcagauuccugaacgacaccagccugccccacagcugcuucagaauccagcacuacgccggcaaggugcuguaccagguggagggcuucguggacaagaacaacgaccugcuguacagagaccugagccaggccauguggaaggccagccacgcccugaucaagagccuguuccccgagggcaaccccgccaagaucaaccugaagagaccccccaccgccggcagccaguucaaggccagcguggccacccugaugaagaaccugcagaccaagaaccccaacuacaucagaugcaucaagcccaacgacaagaaggccgcccacaucuucaacgaggcccuggugugccaccagaucagauaccugggccugcuggagaacgugagagugagaagagccggcuacgccuucagacaggccuacgagcccugccuggagagauacaagaugcugugcaagcagaccuggccccacuggaagggccccgccagaagcggcguggaggugcuguucaacgagcuggagauccccguggaggaguacagcuucggcagaagcaagaucuucaucagaaaccccagaacccuguucaagcuggaggaccugagaaagcagagacuggaggaccuggccacccugauccagaagaucuacagaggcuggaagugcagaacccacuuccugcugaugaagaagagccagaucgugaucgccgccugguacagaagauacgcccagcagaagagauaccagcagaccaagagcagcgcccuggugauccagagcuacaucagaggcuggaaggccagaaagauccugagagagcugaagcaccagaagagaugcaaggaggccgugaccaccaucgccgccuacuggcacggcacccaggccagaagagagcugagaagacugaaggaggaggccagaaacaagcacgccaucgccgugaucugggccuacuggcugggcagcaaggccagaagagagcugaagagacugaaggaggaggccagaagaaagcacgccguggccgugaucugggccuacuggcugggccugaaggugagaagagaguacagaaaguucuucagagccaacgccggcaagaagaucuacgaguucacccugcagagaaucgugcagaaguacuuccuggagaugaagaacaagaugcccagccugagccccaucgacaagaacuggcccagcagacccuaccuguuccuggacagcacccacaaggagcugaagagaaucuuccaccuguggagaugcaagaaguacagagaccaguucaccgaccagcagaagcugaucuacgaggagaagcuggaggccagcgagcuguucaaggacaagaaggcccuguaccccagcagcgugggccagcccuuccagggcgccuaccuggagaucaacaagaaccccaaguacaagaagcugaaggacgccaucgaggagaagaucaucaucgccgagguggugaacaagaucaacagagccaacggcaagagcaccagcagaaucuuccugcugaccaacaacaaccugcugcuggccgaccagaagagcggccagaucaagagcgaggugccccugguggacgugaccaaggugagcaugagcagccagaacgacggcuucuucgccgugcaccugaaggagggcagcgaggccgccagcaagggcgacuuccuguucagcagcgaccaccugaucgagauggccaccaagcuguacagaaccacccugagccagaccaagcagaagcugaacaucgagaucagcgacgaguuccuggugcaguucagacaggacaaggugugcgugaaguucauccagggcaaccagaagaacggcagcgugcccaccugcaagagaaagaacaacagacugcuggagguggccgugcccuga

SEQ ID NO: 2805 - RNA, 3411 nt, Artificial Sequence
  derived and/or modified sequence opt5 from MYO1B__Homo_sapiens__AAH53558
auggccaagauggaggugaaaaccagccugcucgacaacaugaucggcgucggggauaugguucugcuugaaccccugaaugaggaaacauucauuaacaaucucaagaaaagauuugaccacuccgagaucuacacguauauuggaucuguggugaucagcgucaacccuuaccggucccugccgauuuauucucccgaaaagguggaggaguaccgcaauagaaacuucuaugaacuuagcccucauaucuuugcucuguccgaugaggccuaccggucucuccgcgaccaggauaaagaccaaugcauccugauuaccggcgaaagcggggcgggaaagacagaggcuuccaagcugguuaugagcuauguggccgccgucuguggcaaaggggcugaggugaaucagguuaaggaacagcuccugcagucuaaccccgugcuugaggccuucggaaaugcuaaaaccgucagaaacgauaauuccagccgguuuggcaaguacauggacaucgaauuugauuuuaaaggcgacccucuugggggagugauuucuaacuaccuccuggagaagucccgcguggucaagcaacccagaggcgaacggaauuuccacguuuucuaucagcuucugagcggggccucugaggagcuccugaacaaacugaagcucgaacgcgauuucuccagauacaauuaucugagccuugacuccgcgaaagugaacggaguggaugacgccgcuaacuuucggacaguccgcaaugccaugcagaucgugggcuucauggaccaugaggcugaaucuguucuggccguggucgcggccgugcucaagcuggggaacauugaguuuaaaccugaaagcagaguuaauggacuugaugaguccaagaucaaagacaagaacgagcugaaggaaauuugcgagcucaccggcaucgaucagagcgugcuggaacgggcuuucucuuuccgcacagucgaggccaaacaagaaaagguguccaccacgcugaaugucgcucaggccuacuaugccagagacgcucucgcgaaaaaccuguacagccggcuguuuucuuggcuggugaauagaaucaacgagagcauuaaggcccagaccaaaguucgcaagaaggugaugggcguccucgauaucuauggguucgagauuuuugaagacaauuccuucgagcaguuuaucauuaacuacuguaaugaaaaacugcaacagaucuucaucgagcuuacacugaaggaggaacaggaggaauacauucgggaggauaucgaauggacccacauugacuauuuuaacaaugcuaucauuugcgaucucaucgagaacaauacaaacggaauccuggccaugcuggacgaggaaugucucagaccgggcaccgugacggaugagacauuccuggaaaaacuuaaccaaguuugcgccacccaucagcacuuugagucucgcaugagcaaguguucccgguuccugaaugacacaagccucccccacucuugcuuucgcauucagcauuacgcugggaaagugcuguaucaggucgaaggauucguggacaagaacaaugaucugcuuuacagagaccucucccaagccauguggaaggcgagccacgcucugaucaaaucucuguuuccugagggcaaccccgccaagauuaaucucaaacggccucccaccgccgggucccaguucaaggcuagcguggccacccugaugaaaaaccuucagacaaagaauccgaacuauaucagauguauuaagccuaaugauaaaaaggcugcccauaucuucaacgaggcgcugguuugccaccagauucgcuaccucggacugcuggaaaauguccgggugagacgcgccggcuaugcuuuucggcaagccuacgagcccugucuugaaagauacaaaaugcucugcaagcagacguggccucacuggaaaggccccgcucgguccgggguggagguccuguucaacgaacuggagauccccguggaggaauauucuuuuggacgcagcaagaucuucauuagaaauccucggacccucuuuaaacuggaggaccuuagaaagcagcgccuggaagaucucgccacacugauccagaagauuuaccggggcuggaaaugcagaacccauuuccugcuuaugaagaaaucccaaaucguuauugcggccugguaucgcagauacgcucagcagaagcgguaucagcaaacaaaaucuagcgcccucgugauccaguccuacauccgcggguggaaggcuagaaagauucugcgggagcugaaacaccagaagcgcuguaaagaggccgucaccacgaucgccgcuuauuggcauggaacacaagcgagacgggaacuccgcagacugaaggaggaagcccggaacaaacacgcuauugccgugaucugggccuacuggcuuggcagcaaggcucgcagagagcugaagcggcucaaagaagaggccagacgcaagcaugcgguugcugugauuugggccuacuggcuggggcugaaaguccggagagaguaucgcaaguuuuuccgggccaaugcuggcaaaaagaucuacgaauuuacccuucagagaaucgugcagaaguauuuccucgagaugaaaaacaagaugccgucucugucccccauugacaaaaacuggccuagccgccccuaccuguuucucgauucuacccacaaggaacugaaacggaucuuccaccuuuggagaugcaagaaauaucgcgaccaguuuacagaucaacagaagcugauuuacgaggaaaagcucgaggccuccgagcuguucaaagacaagaaagcgcuguauccuagcucuguuggacagcccuuccagggcgcuuaccuugaaaucaauaagaacccgaaauacaagaagcugaaagaugccauugaggaaaagaucaucauugccgagguggucaauaaaaucaaccgggcuaauggaaagagcaccuccagaauuuuucuccugacaaacaauaaccuccugcuugccgaccagaaaagcgggcaaaucaagucugaagugccucugguggaugucacgaagguuuccaugagcucccagaaugacggcuucuuugcugugcaucucaaagaggggucugaggccgcgagcaagggagacuuccuguuuuccucugaucaccugauugaaauggccaccaaacuuuaucggacaacccugagccagacaaagcaaaaacucaacaucgagauuuccgacgaguuccuggugcaguuucgccaggauaaggucugugugaaguucauccaaggcaaucagaaaaacgggucuguuccuaccugcaagcggaaaaauaacagacuccuggaaguggcuguccccuga

SEQ ID NO: 2806 - protein, 1063 aa, Artificial Sequence
  MYO1C__Homo_sapiens__O00159
MALQVELVPTGEIIRVVHPHRPCKLALGSDGVRVTMESALTARDRVGVQDFVLLENFTSEAAFIENLRRRFRENLIYTYIGPVLVSVNPYRDLQIYSRQHMERYRGVSFYEVPPHLFAVADTVYRALRTERRDQAVMISGESGAGKTEATKRLLQFYAETCPAPERGGAVRDRLLQSNPVLEAFGNAKTLRNDNSSRFGKYMDVQFDFKGAPVGGHILSYLLEKSRVVHQNHGERNFHIFYQLLEGGEEETLRRLGLERNPQSYLYLVKGQCAKVSSINDKSDWKVVRKALTVIDFTEDEVEDLLSIVASVLHLGNIHFAANEESNAQVTTENQLKYLTRLLSVEGSTLREALTHRKIIAKGEELLSPLNLEQAAYARDALAKAVYSRTFTWLVGKINRSLASKDVESPSWRSTTVLGLLDIYGFEVFQHNSFEQFCINYCNEKLQQLFIELTLKSEQEEYEAEGIAWEPVQYFNNKIICDLVEEKFKGIISILDEECLRPGEATDLTFLEKLEDTVKHHPHFLTHKLADQRTRKSLGRGEFRLLHYAGEVTYSVTGFLDKNNDLLFRNLKETMCSSKNPIMSQCFDRSELSDKKRPETVATQFKMSLLQLVEILQSKEPAYVRCIKPNDAKQPGRFDEVLIRHQVKYLGLLENLRVRRAGFAYRRKYEAFLQRYKSLCPETWPTWAGRPQDGVAVLVRHLGYKPEEYKMGRTKIFIRFPKTLFATEDALEVRRQSLATKIQAAWRGFHWRQKFLRVKRSAICIQSWWRGTLGRRKAAKRKWAAQTIRRLIRGFVLRHAPRCPENAFFLDHVRTSFLLNLRRQLPQNVLDTSWPTPPPALREASELLRELCIKNMVWKYCRSISPEWKQQLQQKAVASEIFKGKKDNYPQSVPRLFISTRLGTDEISPRVLQALGSEPIQYAVPVVKYDRKGYKPRSRQLLLTPNAVVIVEDAKVKQRIDYANLTGISVSSLSDSLFVLHVQRADNKQKGDVVLQSDHVIETLTKTALSANRVNSININQGSITFAGGPGRDGTIDFTPGSELLITKAKNGHLAVVAPRLNSR

SEQ ID NO: 2807 - RNA, 3192 nt, Artificial Sequence
  MYO1C__Homo_sapiens__CCDS42226.1
auggcgcugcaaguggagcugguacccaccggggagaucauccgcgugguucauccccacaggcccugcaagcuugcccugggcagugacgggguucgggugaccauggagagugcgcucaccgcccgugaccgggugggggugcaggauuucgugcugcuggagaacuucaccagcgaggccgccuucaucgagaaccugcggcggcgauuucgggagaaucucaucuacaccuacauuggccccguccuggucucugucaaucccuaccgggaccugcagaucuacagccggcagcauauggagcguuaccguggcgucagcuucuaugaagugcccccucaccuguuugccguggcggacacuguguaccgagcacugcgcacggagcgucgggaccaggcugugaugaucucuggggagagcggggcaggcaagaccgaggccaccaagaggcugcugcaguucuaugcagagaccugcccagcccccgagcgcggaggugccgugcgggaccggcugcuacagagcaacccggugcuggaggccuuuggaaaugccaagacccuccggaacgauaacuccagcagguucgggaaguacauggaugugcaguuugacuucaagggugcccccguggguggccacauccucaguuaccuccuggaaaagucacgaguggugcaccagaaucauggggagcggaacuuccacaucuucuaccagcugcuggaggggggcgaggaggagacucuucgcaggcugggcuuggaacggaacccccagagcuaccuguaccuggugaagggccagugugccaaagucuccuccaucaacgacaagagugacuggaaggucgucaggaaggcucugacagucauugauuucaccgaggaugaaguggaggaccugcugagcaucguggccagcguccuucauuugggcaacauccacuuugcugccaacgaggagagcaaugcccaggucaccaccgagaaccagcucaaguaucugaccaggcuccucagcguggaaggcucgacgcugcgagaagcccugacacacaggaagaucaucgccaagggggaggagcuccugagcccgcugaaccuggagcaggccgcguacgcacgagacgcccucgccaaggcuguguacagccgcacuuuuaccuggcucgucgggaagaucaacaggucgcuggccuccaaggacguggagagccccagcuggcggagcaccacgguucucgggcuccuggauauuuauggcuuugaaguguuucagcauaacagcuuugagcaguucugcaucaauuacugcaacgagaagcugcagcagcucuucaucgagcucacgcucaagucggagcaggaggaguacgaggcagagggcaucgcgugggagcccguccaguauuucaacaacaaaaucaucugugaucugguggaggagaaguuuaagggcaucaucucgauuuuggaugaggagugucugcgccccggggaggccacagaccugaccuuccuggagaagcuggaggauacugucaagcaccauccacacuuccugacgcacaagcuggcugaccagcggaccaggaaaucucugggccgaggggaauuccgccuucugcacuaugcgggggaggugaccuacagcgugaccggguuucuggacaaaaacaaugaccuucucuuccggaaccuuaaggagaccauguguagcucaaagaaucccauuaugagccagugcuuugaccggagcgagcucagugacaagaagcggccagagacggucgccacccaguucaagaugagccuccugcagcugguggagauccugcagucuaaggagcccgccuacguccgcugcaucaaacccaaugaugccaaacagcccggccgcuuugacgaggugcugauccgccaccaggugaaguaccuggggcuguuggaaaaccugcgcgugcgcagagccggcuuugccuaucgccgcaaauacgaagcuuuccugcaaagguacaagucacugugcccagagacguggcccacgugggcaggacggccgcaggaugggguggcugugcugguccgacaccugggcuacaagccagaagaguacaagaugggcaggaccaagaucuucauccgcuuccccaagacccuguuugccacagaggaugcccuggagguccggcggcagagccuggccacaaagauccaagcugccuggaggggcuuucacuggcggcagaaauuccuccgggugaagagaucagccaucugcauccagucgugguggcguggaacacugggccggaggaaggcagccaagaggaagugggcggcacagaccauccggcggcucauccgaggcuucguccugcgccacgccccccgcugccccgagaacgccuucuuccuggaccaugugcgcaccucuuuuuugcuaaaccugaggcggcagcugccccagaauguccuggacaccucguggcccacgcccccaccugcccugcgugaggccucagagcuucugcgggaguugugcauaaagaacaugguguggaaauacugccggaguaucagcccugaguggaagcagcagcugcagcagaaggccguggcuagugagaucuucaagggcaagaaggauaauuacccucagaguguacccaggcucuucaucagcacucggcuugguacagaugagaucagcccccgagugcugcaggccuugggcucugagcccauucaguaugcggugccuguugugaaauacgaccgcaagggcuacaagccucgcucccggcagcugcugcucacgcccaacgccgucgucaucguggaggacgccaaagucaagcagaggauugauuacgccaaccugaccggaaucucugucagcagccugagcgacagucuuuuugugcuucauguacagcgugcggacaauaagcaaaagggagauguggugcugcagagugaccacgugauugagacgcugaccaagacagcccucagugccaaccgcgugaacagcaucaacaucaaccagggcagcaucacguuugcagggggccccggcagggauggcaccauugacuucacacccggcucggagcugcucaucaccaaggccaagaacgggcaccuggcuguggucgccccacggcugaauucucgguga

SEQ ID NO: 2808 - RNA, 3192 nt, Artificial Sequence
  derived and/or modified sequence opt1 from MYO1C__Homo_sapiens__CCDS42226.1
auggcccuccagguggagcucguccccaccggcgagaucauccgcguggugcacccgcaccggcccugcaagcuggcccuggggagcgacggcguccgcgugaccauggaguccgcgcucacggcccgggaccgcguggggguccaggacuucgugcugcuggagaacuucaccagcgaggccgccuucaucgagaaccuccggcgccgguuccgcgagaaccugaucuacaccuacaucggccccgugcuggucuccgugaaccccuaccgggaccuccagaucuacagccgccagcacauggagcgguaccgcgggguguccuucuacgaggucccgccccaccuguucgccguggcggacaccguguaccgggcccugcgcacggagcggcgcgaccaggccgucaugaucagcggcgaguccggcgccgggaagaccgaggcgaccaagcggcuccugcaguucuacgccgagaccugccccgcccccgagcgcggcggggccgugcgggaccgccugcuccagagcaacccggugcuggaggccuucggcaacgcgaagacgcugcggaacgacaacuccagccgcuucgggaaguacauggacguccaguucgacuucaagggcgcccccgugggcgggcacauccucuccuaccugcuggagaagucccgcgugguccaccagaaccacggcgagcggaacuuccacaucuucuaccagcuccuggagggcggggaggaggagacccugcgccggcucggccuggagcgcaacccccaguccuaccuguaccucgugaaggggcagugcgccaaggugagcuccaucaacgacaagagcgacuggaaggucgugcggaaggcccugaccgucaucgacuucaccgaggacgagguggaggaccugcucuccaucguggccagcguccugcaccugggcaacauccacuucgcggccaacgaggaguccaacgcccaggugacgaccgagaaccagcucaaguaccugacccgccugcucagcguggaggggagcacccugcgggaggcccugacgcaccgcaagaucaucgccaagggcgaggagcuccugagcccccugaaccucgagcaggcggccuacgcccgggacgcccuggccaaggcggucuacagccgcaccuucaccuggcugguggggaagaucaaccggucccucgccagcaaggacguggaguccccgagcuggcgcuccaccacgguccugggccugcucgacaucuacggcuucgagguguuccagcacaacagcuucgagcaguucugcaucaacuacugcaacgagaagcugcagcagcuguucaucgagcugacccucaaguccgagcaggaggaguacgaggccgaggggaucgccugggagcccgugcaguacuucaacaacaagaucaucugcgaccuggucgaggagaaguucaagggcaucaucagcauccuggacgaggagugccuccggcccggggaggcgaccgaccugaccuuccuggagaagcucgaggacacggugaagcaccacccccacuuccugacccacaagcuggccgaccagcgcacccggaagucccucggccgcggggaguuccggcugcugcacuacgccggcgaggugaccuacagcgucacgggcuuccucgacaagaacaacgaccugcuguuccgcaaccucaaggagaccaugugcuccagcaagaacccgaucaugucccagugcuucgaccggagcgagcuguccgacaagaagcgccccgagaccguggccacccaguucaagaugagccugcuccagcugguggagauccugcaguccaaggagcccgccuacguccgcugcaucaagcccaacgacgcgaagcagccggggcgguucgacgaggugcucauccgccaccaggugaaguaccugggccugcucgagaaccugcggguccgccgggccggguucgccuaccgccggaaguacgaggccuuccugcagcgcuacaagagccucugccccgagacguggcccaccugggccggccggccccaggacgggguggcggugcugguccgccaccugggcuacaagccggaggaguacaagaugggccggaccaagaucuucauccgcuuccccaagacccucuucgccacggaggacgcccuggaggugcggcgccagagccuggccaccaagauccaggccgcguggcggggguuccacuggcgccagaaguuccuccgggugaagcgcuccgccaucugcauccagagcugguggcggggcacccuggggcgccggaaggccgccaagcgcaagugggcggcccagaccauccgccggcugauccgcggcuucguccuccggcacgcgccccgcugccccgagaacgccuucuuccuggaccacgugcggaccuccuuccugcucaaccugcgccggcagcugccgcagaacgugcucgacacgagcuggcccacgcccccgcccgcccugcgcgaggccuccgagcugcuccgggagcugugcaucaagaacauggucuggaaguacugccgcagcaucucccccgaguggaagcagcagcugcagcagaaggccguggccagcgagaucuucaagggcaagaaggacaacuacccccaguccgugccgcggcuguucaucagcacccgccuggggaccgacgagaucagcccccggguccugcaggcccucggcuccgagcccauccaguacgccgugcccguggucaaguacgaccgcaagggguacaagccgcggucccgccagcugcugcucacccccaacgcgguggugaucgucgaggacgccaaggugaagcagcggaucgacuacgccaaccugaccggcaucagcguguccagccuguccgacagccucuucguccugcacgugcagcgcgccgacaacaagcagaagggggacgugguccugcagagcgaccacgugaucgagacccucaccaagacggcccuguccgcgaaccgggugaacagcaucaacaucaaccagggcuccaucaccuucgccggcgggcccggccgcgacgggaccaucgacuucacccccggcagcgagcugcucaucacgaaggccaagaacgggcaccuggccgucguggcgccgcgccugaacucccgguga

SEQ ID NO: 2809 - RNA, 3192 nt, Artificial Sequence
  derived and/or modified sequence opt2 from MYO1C__Homo_sapiens__CCDS42226.1
auggcccuccaggucgagcucguccccaccggcgagaucauccgcgucguccacccccaccgccccugcaagcucgcccucggcuccgacggcguccgcgucaccauggaguccgcccucaccgcccgcgaccgcgucggcguccaggacuucguccuccucgagaacuucaccuccgaggccgccuucaucgagaaccuccgccgccgcuuccgcgagaaccucaucuacaccuacaucggccccguccucgucuccgucaaccccuaccgcgaccuccagaucuacucccgccagcacauggagcgcuaccgcggcgucuccuucuacgagguccccccccaccucuucgccgucgccgacaccgucuaccgcgcccuccgcaccgagcgccgcgaccaggccgucaugaucuccggcgaguccggcgccggcaagaccgaggccaccaagcgccuccuccaguucuacgccgagaccugccccgcccccgagcgcggcggcgccguccgcgaccgccuccuccaguccaaccccguccucgaggccuucggcaacgccaagacccuccgcaacgacaacuccucccgcuucggcaaguacauggacguccaguucgacuucaagggcgcccccgucggcggccacauccucuccuaccuccucgagaagucccgcgucguccaccagaaccacggcgagcgcaacuuccacaucuucuaccagcuccucgagggcggcgaggaggagacccuccgccgccucggccucgagcgcaacccccaguccuaccucuaccucgucaagggccagugcgccaaggucuccuccaucaacgacaaguccgacuggaaggucguccgcaaggcccucaccgucaucgacuucaccgaggacgaggucgaggaccuccucuccaucgucgccuccguccuccaccucggcaacauccacuucgccgccaacgaggaguccaacgcccaggucaccaccgagaaccagcucaaguaccucacccgccuccucuccgucgagggcuccacccuccgcgaggcccucacccaccgcaagaucaucgccaagggcgaggagcuccucuccccccucaaccucgagcaggccgccuacgcccgcgacgcccucgccaaggccgucuacucccgcaccuucaccuggcucgucggcaagaucaaccgcucccucgccuccaaggacgucgagucccccuccuggcgcuccaccaccguccucggccuccucgacaucuacggcuucgaggucuuccagcacaacuccuucgagcaguucugcaucaacuacugcaacgagaagcuccagcagcucuucaucgagcucacccucaaguccgagcaggaggaguacgaggccgagggcaucgccugggagcccguccaguacuucaacaacaagaucaucugcgaccucgucgaggagaaguucaagggcaucaucuccauccucgacgaggagugccuccgccccggcgaggccaccgaccucaccuuccucgagaagcucgaggacaccgucaagcaccacccccacuuccucacccacaagcucgccgaccagcgcacccgcaagucccucggccgcggcgaguuccgccuccuccacuacgccggcgaggucaccuacuccgucaccggcuuccucgacaagaacaacgaccuccucuuccgcaaccucaaggagaccaugugcuccuccaagaaccccaucaugucccagugcuucgaccgcuccgagcucuccgacaagaagcgccccgagaccgucgccacccaguucaagaugucccuccuccagcucgucgagauccuccaguccaaggagcccgccuacguccgcugcaucaagcccaacgacgccaagcagcccggccgcuucgacgagguccucauccgccaccaggucaaguaccucggccuccucgagaaccuccgcguccgccgcgccggcuucgccuaccgccgcaaguacgaggccuuccuccagcgcuacaagucccucugccccgagaccuggcccaccugggccggccgcccccaggacggcgucgccguccucguccgccaccucggcuacaagcccgaggaguacaagaugggccgcaccaagaucuucauccgcuuccccaagacccucuucgccaccgaggacgcccucgagguccgccgccagucccucgccaccaagauccaggccgccuggcgcggcuuccacuggcgccagaaguuccuccgcgucaagcgcuccgccaucugcauccaguccugguggcgcggcacccucggccgccgcaaggccgccaagcgcaagugggccgcccagaccauccgccgccucauccgcggcuucguccuccgccacgccccccgcugccccgagaacgccuucuuccucgaccacguccgcaccuccuuccuccucaaccuccgccgccagcucccccagaacguccucgacaccuccuggcccacccccccccccgcccuccgcgaggccuccgagcuccuccgcgagcucugcaucaagaacauggucuggaaguacugccgcuccaucucccccgaguggaagcagcagcuccagcagaaggccgucgccuccgagaucuucaagggcaagaaggacaacuacccccaguccgucccccgccucuucaucuccacccgccucggcaccgacgagaucuccccccgcguccuccaggcccucggcuccgagcccauccaguacgccguccccgucgucaaguacgaccgcaagggcuacaagccccgcucccgccagcuccuccucacccccaacgccgucgucaucgucgaggacgccaaggucaagcagcgcaucgacuacgccaaccucaccggcaucuccgucuccucccucuccgacucccucuucguccuccacguccagcgcgccgacaacaagcagaagggcgacgucguccuccaguccgaccacgucaucgagacccucaccaagaccgcccucuccgccaaccgcgucaacuccaucaacaucaaccagggcuccaucaccuucgccggcggccccggccgcgacggcaccaucgacuucacccccggcuccgagcuccucaucaccaaggccaagaacggccaccucgccgucgucgccccccgccucaacucccgcuga

SEQ ID NO: 2810 - RNA, 3192 nt, Artificial Sequence
  derived and/or modified sequence opt3 from MYO1C__Homo_sapiens__CCDS42226.1
auggcccuucagguggagcucguccccaccggcgaaaucauuagaguugugcacccucauaggccaugcaagcuggcucuggggagcgacggaguacgggugacaauggaguccgcauugacugcccgcgaucgagucggugugcaagacuucguuuuacuggaaaacuuuacgucugaggcggcuuucauagaaaaucuacguagaagguuucgggagaaccucaucuacaccuauauuggcccggugcuggucucagugaaucccuaccgcgaucuucagaucuauaguagacagcacauggagagguaccgcgggguuagcuucuaugaaguaccuccacaucuguuugccguggcagacacagucuaccgggccuugcgaacugagagaagggaucaggcugugaugauuuccggagaaucuggcgcagguaaaaccgaggccacaaagcggcuccugcaauucuaugcugagaccugucccgccccugaacgugggggagcggugcgcgacagacugcuccagucgaacccagucuuagaggcauuuggcaaugccaaaacucugaggaacgauaauucaagccgguucggcaaguacauggacguucaguuugauuucaaaggggcucccgugggaggucacauccuuaguuacuugcuggaaaagucccgaguagugcaucagaaccacggcgagcgcaauuuucacauauucuaucaacuacucgaagggggagaggaggaaacacugagaaggcuuggccuggagcggaacccucagucuuacuuguaucucgucaagggucagugcgccaaagugagcuccaucaaugacaagucagauuggaaaguugugcgcaaggcacugaccgucauugacuuuacggaagaugagguggaagacuuacugaguaucguagcuagcguucuccaucuugggaacauucacuucgccgcgaaugaggagucuaacgcccaggugacuaccgaaaaucaacugaaauacuugacaagacuacuguccgucgagggaucaacucucagggaagcacugacccaucguaagaucauagcuaagggcgaggaacuucugagcccauugaaccucgagcaggccgcuuaugcccgggacgcacuggccaaagcuguguacagucgaacauucaccugguuagucggcaagauuaacagaucucuggcguccaaagauguggagagcccgucguggaggucuacgacuguucuagggcuccuggacaucuauggauuugaaguguuccagcacaauuccuuugagcaauucuguauuaacuacugcaaugaaaaacuucagcaguuguuuaucgagcugacacucaagucagagcaggaagaguacgaagcagaggguaucgccugggaacccguacaauauuucaacaauaagauuauaugugaucuggucgaggagaaauuuaagggcaucauuaguauccuugacgaagagugccugcgcccuggggaagcuaccgauuugacuuuccucgagaagcuggaagacacagugaaacaccauccacacuuuuuaacccauaagcuggccgaucagcggacgagaaaaagccuaggaaggggcgaguuccgccuccugcacuacgcuggugagguuaccuauuccgugacaggguuucuugacaagaacaaugauuugcuguuccgaaaccucaaagaaacuauguguucuagcaagaaucccauaaugucacagugcuuugaccggagugagcuguccgauaagaaacguccugaaaccgucgccacacaguucaagaugagcuuacugcaacuuguggagauuuugcagucuaaagaaccagcuuacguaagauguaucaagcccaacgacgccaaacagccgggcagguucgacgaggugcucauccgccaucagguuaaguaucugggacuacuggagaaucuccgggucagaagggcaggcuuugcguaccgacgcaaguaugaggcuuuccugcaacgguacaaaucacuuugcccugaaacuuggcccaccugggccgggagaccacaggauggaguggcaguguuggucaggcaccuggguuacaagccugaagaguauaaaaugggccguacaaagauuuuuauccgcuuccccaaaaccuuauuugccacugaggacgcucucgaaguucggagacagagucuggccacgaagauucaggcagcuuggaggggguuccacuggcgacaaaaguuucuucgggugaaacgcagcgccauauguauccaguccugguggagaggaacacugggcaggcggaaggcggccaaacgaaagugggcugcacagaccauuagacgcuugaucagggguuucgugcuccgucaugccccacggugccccgagaacgcauuuuuccuggaucacguaagaacuucuuuucuacugaaucucaggcgccaacugccucagaacguccuugacaccucguggccaacaccgcccccugccuugcgagaagcaagcgagcuguuaagagaacucugcaucaaaaauaugguguggaaguacugucgguccauuucaccagaguggaaacagcagcugcaacagaaggcgguugccagugagauauucaaggggaaaaaggauaacuauccccagucugugccuaggcuuuuuaucagcacccgccugggcacugacgaaauuuccccacguguccuacaggcucucggaucagagcccauccaauacgccgugccgguugugaaauaugauagaaagggcuacaaaccucggagcaggcagcuguugcugacaccaaacgcaguagucauuguggaagacgcuaaggugaagcagcgcaucgauuaugccaauuuaacggggauaucugucuccagucucagcgacucucuguucguucuucaugugcagcgagcagauaacaaacaaaagggagacguagugcugcaguccgaucacgucaucgagaccuugacuaaaacagcccucucagcuaauagagugaacaguauuaauaucaaccaggguagcauuaccuucgcgggcgggcccggacgggacggcacaaucgacuuuacuccugguucggaacugcuaauaaccaaggccaaaaaugggcaccuggcaguuguggcucccaggcuuaacucccgcuga

SEQ ID NO: 2811 - RNA, 3192 nt, Artificial Sequence
  derived and/or modified sequence opt4 from MYO1C__Homo_sapiens__CCDS42226.1
auggcccugcagguggagcuggugcccaccggcgagaucaucagaguggugcacccccacagacccugcaagcuggcccugggcagcgacggcgugagagugaccauggagagcgcccugaccgccagagacagagugggcgugcaggacuucgugcugcuggagaacuucaccagcgaggccgccuucaucgagaaccugagaagaagauucagagagaaccugaucuacaccuacaucggccccgugcuggugagcgugaaccccuacagagaccugcagaucuacagcagacagcacauggagagauacagaggcgugagcuucuacgaggugcccccccaccuguucgccguggccgacaccguguacagagcccugagaaccgagagaagagaccaggccgugaugaucagcggcgagagcggcgccggcaagaccgaggccaccaagagacugcugcaguucuacgccgagaccugccccgcccccgagagaggcggcgccgugagagacagacugcugcagagcaaccccgugcuggaggccuucggcaacgccaagacccugagaaacgacaacagcagcagauucggcaaguacauggacgugcaguucgacuucaagggcgcccccgugggcggccacauccugagcuaccugcuggagaagagcagaguggugcaccagaaccacggcgagagaaacuuccacaucuucuaccagcugcuggagggcggcgaggaggagacccugagaagacugggccuggagagaaacccccagagcuaccuguaccuggugaagggccagugcgccaaggugagcagcaucaacgacaagagcgacuggaagguggugagaaaggcccugaccgugaucgacuucaccgaggacgagguggaggaccugcugagcaucguggccagcgugcugcaccugggcaacauccacuucgccgccaacgaggagagcaacgcccaggugaccaccgagaaccagcugaaguaccugaccagacugcugagcguggagggcagcacccugagagaggcccugacccacagaaagaucaucgccaagggcgaggagcugcugagcccccugaaccuggagcaggccgccuacgccagagacgcccuggccaaggccguguacagcagaaccuucaccuggcuggugggcaagaucaacagaagccuggccagcaaggacguggagagccccagcuggagaagcaccaccgugcugggccugcuggacaucuacggcuucgagguguuccagcacaacagcuucgagcaguucugcaucaacuacugcaacgagaagcugcagcagcuguucaucgagcugacccugaagagcgagcaggaggaguacgaggccgagggcaucgccugggagcccgugcaguacuucaacaacaagaucaucugcgaccugguggaggagaaguucaagggcaucaucagcauccuggacgaggagugccugagacccggcgaggccaccgaccugaccuuccuggagaagcuggaggacaccgugaagcaccacccccacuuccugacccacaagcuggccgaccagagaaccagaaagagccugggcagaggcgaguucagacugcugcacuacgccggcgaggugaccuacagcgugaccggcuuccuggacaagaacaacgaccugcuguucagaaaccugaaggagaccaugugcagcagcaagaaccccaucaugagccagugcuucgacagaagcgagcugagcgacaagaagagacccgagaccguggccacccaguucaagaugagccugcugcagcugguggagauccugcagagcaaggagcccgccuacgugagaugcaucaagcccaacgacgccaagcagcccggcagauucgacgaggugcugaucagacaccaggugaaguaccugggccugcuggagaaccugagagugagaagagccggcuucgccuacagaagaaaguacgaggccuuccugcagagauacaagagccugugccccgagaccuggcccaccugggccggcagaccccaggacggcguggccgugcuggugagacaccugggcuacaagcccgaggaguacaagaugggcagaaccaagaucuucaucagauuccccaagacccuguucgccaccgaggacgcccuggaggugagaagacagagccuggccaccaagauccaggccgccuggagaggcuuccacuggagacagaaguuccugagagugaagagaagcgccaucugcauccagagcugguggagaggcacccugggcagaagaaaggccgccaagagaaagugggccgcccagaccaucagaagacugaucagaggcuucgugcugagacacgcccccagaugccccgagaacgccuucuuccuggaccacgugagaaccagcuuccugcugaaccugagaagacagcugccccagaacgugcuggacaccagcuggcccacccccccccccgcccugagagaggccagcgagcugcugagagagcugugcaucaagaacaugguguggaaguacugcagaagcaucagccccgaguggaagcagcagcugcagcagaaggccguggccagcgagaucuucaagggcaagaaggacaacuacccccagagcgugcccagacuguucaucagcaccagacugggcaccgacgagaucagccccagagugcugcaggcccugggcagcgagcccauccaguacgccgugcccguggugaaguacgacagaaagggcuacaagcccagaagcagacagcugcugcugacccccaacgccguggugaucguggaggacgccaaggugaagcagagaaucgacuacgccaaccugaccggcaucagcgugagcagccugagcgacagccuguucgugcugcacgugcagagagccgacaacaagcagaagggcgacguggugcugcagagcgaccacgugaucgagacccugaccaagaccgcccugagcgccaacagagugaacagcaucaacaucaaccagggcagcaucaccuucgccggcggccccggcagagacggcaccaucgacuucacccccggcagcgagcugcugaucaccaaggccaagaacggccaccuggccgugguggcccccagacugaacagcagauga

SEQ ID NO: 2812 - RNA, 3192 nt, Artificial Sequence
  derived and/or modified sequence opt5 from MYO1C__Homo_sapiens__CCDS42226.1
auggcccuccagguggagcucguccccaccggcgaaaucauuagaguugugcacccucaucggccgugcaagcuggcucuugggagcgacggagugcgcgucacaauggaguccgcccugacggcgagagaucgggugggcguucaagacuucgugcuccuggaaaacuuuaccucugaggcugccuucaucgaaaaucuucgcagacgguuucgcgagaaccugauuuacacauauaucgggcccguccucgugagcguuaauccuuacagagaucugcagauuuauucccggcagcacauggagcgcuacagaggagugucuuucuaugaagugcccccucaucuguuugccgucgcugacaccguguaccgggcccuccgcacagagagacgggaucaggcugucaugaucagcggcgaauccggggccggaaaaaccgaggcgacaaagcgccugcuucaauucuaugccgagaccugucccgcuccugaaagaggcggcgccguucgggacagacugcuccagucuaacccggugcuggaggcuuuugggaaugccaaaacgcuucgcaacgauaauagcucccgguucggaaaguacauggacgugcaguuugauuucaaaggcgcgcccgucgggggacacauccugagcuaccuccuggaaaagucuagagugguucaucagaaccacggcgagcgcaauuuucacauuuucuaucaacugcucgaagggggagaggaggaaacccugcggagacuuggccuggagcgcaacccucaguccuaccucuaucuggugaagggccagugcgccaaagucagcucuaucaaugacaaguccgauuggaaagugguucggaaggcucuuacagugauugacuuuaccgaagaugaggucgaagaccugcucagcaucguggccucuguccugcaucuggggaacauucacuucgcugccaaugaggaguccaacgcccaggugacaaccgaaaaucaacucaaauaccugacgagacuucugagcguugagggauccacacuccgcgaagcucugacccaucggaagaucauugcgaagggcgaggaacuucugucuccccucaaccuggagcaggccgcuuaugccagagacgcccuggcuaaagccguguacagccgcacauucaccuggcucgucgggaagaucaaccggucccuggcgagcaaagauguggagucuccuuccuggagaagcaccacaguucuuggacugcucgacaucuauggcuuugaaguguuccagcacaauucuuuugagcaauucuguauuaacuacugcaaugaaaagcugcagcagcuguuuaucgagcuuacgcucaaaagcgagcaggaagaguacgaagcugaggggauugccugggaacccguccaauauuucaacaauaagaucauuugugaucugguggaggagaaauuuaagggaaucaucuccauucuggacgaagagugccuccggccgggcgaagccaccgaucugacauuccuugagaagcuggaagacaccgugaaacaccauccucacuuucucacacauaagcuggcugaucagcgcaccagaaaaucucugggccggggagaguucagacuucuccacuacgccggagagguuacguauagcgucacaggcuuucuggacaagaacaaugaucugcuguuccgcaaccugaaagaaaccauguguuccagcaagaaucccaucaugucucagugcuuugaccgguccgagcuuagcgauaagaaaagaccugaaaccguggcuacacaguucaagaugucucugcuccaacugguggagauucugcaguccaaagaacccgccuacguccgcuguaucaagcccaacgacgcgaaacagccugggagauucgacgaggugcuuauucggcaucagguuaaguaucucggacugcuggagaaucuccgcgugagacgggccggcuuugcuuaccgcagaaaguaugaagccuuccugcaacgguacaaaagccuuugcccggagaccuggcccacaugggcugggcgcccucaggauggcgucgccgugcugguuagacaccucggauacaagcccgaagaguauaaaaugggccggacgaagaucuuuauccgcuucccuaaaacccuguuugcgacagaggacgcccuggaagugagacggcagucccuugcuaccaagauucaggccgcuuggagaggguuccacuggcgccaaaaguuucuccgggucaaaagaucugccaucuguauucagagcugguggcgcggaacacugggccggagaaaggccgcuaaacgcaagugggcggcccagaccauccggagacugauucgcggguucgugcuccggcaugcucccagaugcccggagaacgccuuuuuccuggaucacguucggacguccuuucuucugaaucuccgcagacaacugccucagaacgugcuggacaccucuuggcccacaccucccccugcccuucgggaagcuagcgagcugcuccgcgaacugugcaucaaaaauauggucuggaaguacuguagauccauuagccccgaguggaaacagcagcuccaacagaaggccguggcgucugagaucuucaaggggaaaaaggauaacuauccgcaguccgugccucggcuguuuaucagcaccagacuuggcacagacgaaauuucuccccgcguccugcaggcucucggguccgagcccauccaauacgccguuccuguggugaaauaugaucggaagggcuacaaaccgagaagccgccagcugcugcuuacccccaacgccgucgugauuguugaagacgcuaaggugaagcagcggaucgauuaugccaaucugacgggaauuucugucagcucccucagcgacucucuguucgugcuccauguucagagagcggauaacaaacaaaagggcgacgugguccugcaguccgaucacgugaucgagacacuuaccaaaacagcucugagcgccaaucgcguuaacuccaucaauauuaaccaggggucuaucaccuucgccggaggcccugggcgggacggaaccauugacuuuacacccggcagcgaacuccugaucacgaaggcuaaaaaugggcaccuggccguggucgcuccuagacuuaacucccgcuga

SEQ ID NO: 2813 - protein, 1006 aa, Artificial Sequence
  MYO1D__Homo_sapiens__O94832
MAEQESLEFGKADFVLMDTVSMPEFMANLRLRFEKGRIYTFIGEVVVSVNPYKLLNIYGRDTIEQYKGRELYERPPHLFAIADAAYKAMKRRSKDTCIVISGESGAGKTEASKYIMQYIAAITNPSQRAEVERVKNMLLKSNCVLEAFGNAKTNRNDNSSRFGKYMDINFDFKGDPIGGHINNYLLEKSRVIVQQPGERSFHSFYQLLQGGSEQMLRSLHLQKSLSSYNYIHVGAQLKSSINDAAEFRVVADAMKVIGFKPEEIQTVYKILAAILHLGNLKFVVDGDTPLIENGKVVSIIAELLSTKTDMVEKALLYRTVATGRDIIDKQHTEQEASYGRDAFAKAIYERLFCWIVTRINDIIEVKNYDTTIHGKNTVIGVLDIYGFEIFDNNSFEQFCINYCNEKLQQLFIQLVLKQEQEEYQREGIPWKHIDYFNNQIIVDLVEQQHKGIIAILDDACMNVGKVTDEMFLEALNSKLGKHAHFSSRKLCASDKILEFDRDFRIRHYAGDVVYSVIGFIDKNKDTLFQDFKRLMYNSSNPVLKNMWPEGKLSITEVTKRPLTAATLFKNSMIALVDNLASKEPYYVRCIKPNDKKSPQIFDDERCRHQVEYLGLLENVRVRRAGFAFRQTYEKFLHRYKMISEFTWPNHDLPSDKEAVKKLIERCGFQDDVAYGKTKIFIRTPRTLFTLEELRAQMLIRIVLFLQKVWRGTLARMRYKRTKAALTIIRYYRRYKVKSYIHEVARRFHGVKTMRDYGKHVKWPSPPKVLRRFEEALQTIFNRWRASQLIKSIPASDLPQVRAKVAAVEMLKGQRADLGLQRAWEGNYLASKPDTPQTSGTFVPVANELKRKDKYMNVLFSCHVRKVNRFSKVEDRAIFVTDRHLYKMDPTKQYKVMKTIPLYNLTGLSVSNGKDQLVVFHTKDNKDLIVCLFSKQPTHESRIGELVGVLVNHFKSEKRHLQVNVTNPVQCSLHGKKCTVSVETRLNQPQPDFTKNRSGFILSVPGN

SEQ ID NO: 2814 - RNA, 3021 nt, Artificial Sequence
  MYO1D__Homo_sapiens__AAI46764
auggcggagcaggagagccuggaauucggcaaggcagacuucgugcugauggacaccgucuccaugcccgaguucauggccaaccucaggcucagauuugaaaaagggcgcaucuauacguucauuggagaagucgucguuucugugaacccuuacaaguuguugaacaucuauggaagagacacaauugagcaguauaaaggccgugagcuguaugagagaccgccucaccuuuuugcuauugcggaugcugcuuacaaggcuaugaagaggcgaucaaaagacacuuguauugugauaucaggggaaaguggagcugguaaaacggaagccaguaaguacauuaugcaguauauugcggccaucaccaaccccagucagagagcagagguugaaagagugaagaauauguugcuuaaguccaacuguguuuuggaagcuuuuggaaaugccaaaaccaaccguaaugacaacucaagcagguuuggaaaauacauggauaucaacuuugacuucaagggugacccuauuggugggcauaucaauaacuacuuacuagaaaagucucgagugauugugcaacagccaggagaaagaagcuuucauucuuucuaucagcuacuccaaggagguucagaacaaaugcuacgcucucuacaucuccagaaaucccuuucauccuacaacuauauucaugugggagcucaauuaaagucuucuaucaaugaugcugccgaauucagaguuguugcugaugccaugaaagucauuggcuucaaaccugaggagauccaaacaguguauaagauuuuggcugcuauucugcacuugggaaauuuaaaauuuguaguagauggugacacgccucuuauugagaauggcaaaguaguaucuaucauagcagaauugcucucuacuaagacagauaugguugagaaagcccuucuuuaccggacuguggccacaggccgugacaucauugacaagcagcacacagaacaagaggccagcuacggcagagacgccuuugccaaggcaauauaugagcgccuuuuuuguuggaucguuacucgcaucaaugauauuauugaggucaagaacuaugacaccacaauccaugggaaaaacacuguuauuggugucuuggauaucuauggcuuugaaaucuucgacaacaacaguuuugaacaauucuguaucaauuacugcaaugagaaacugcagcagcuauuuauucagcugguucugaagcaagaacaagaggaauaccagcgggaagggauccccuggaaacauauugacuacuucaacaaucagaucauuguugaccucguggagcaacagcacaaagggaucauugcaauccuugaugaugcuugcaugaaugucggcaaagucaccgaugaaauguuucuugaagcacuuaacaguaaauugggcaaacacgcccauuuuuccagccgaaagcucugugccucagacaaaauucuggaguuugaucgagauuuucgaauucgacauuaugcaggcgauguagucuauucugucauugguuuuauugacaaaaauaaagauacuuuauuucaagauuucaagcgccuuauguauaacaguucaaauccugugcucaagaauauguggccugaaggcaaacugagcauuacagaggugaccaagcgaccucugacugcugcuaccuuguuuaagaauucuaugauugcucuaguagacaaccuugcaucaaaggaaccauauuacguucguugcaucaaacccaaugacaagaaaucuccacagauauuugaugaugaacgcugccggcaccaaguagaauaucuuggacuacuggaaaaugugagagugcgucgggcaggauuugccuuccgccagacauacgagaaguuucuucacagguauaagaugaucucugaauucaccuggcccaaccaugaccuuccuucagacaaagaggcugucaagaaacuaauugaacggugugguuuucaggaugauguagcuuaugggaagaccaaaauuuucauucgaacaccccgaacauuguuuaccuuggaagaacuccgugcccagaugcucauaaggauuguccucuuucuacaaaagguguggcggggcacccuggcccgcaugcgguacaaaagaaccaaggcagcucugacaauaaucagguacuaccggcgcuacaaagugaagucguacauccacgagguggccagacgcuuccauggcgucaagaccaugcgagacuacgggaagcacgugaaguggccaagcccuccuaaaguucuucgccguuuugaggaggcccugcagacgauuuucaauagauggagagcaucccagcucaucaagagcauuccggccucagaccugccccaggucagggcaaagguugcagccguggaaauguugaagggucaaagggcugaccucgggcuccagagggccugggagggcaacuaucuugcuucaaagccagauacaccucagaccucaggcacuuuugucccuguugcuaaugaauugaaacggaaggacaaauacaugaauguccucuuuuccugucacguccguaagguaaaucgauuuaguaagguggaagacagagcaauuuuugucacugaccgucaccuguauaaaauggaucccacuaaacaguacaaggugaugaagacuaucccucuauacaauuugacuggucugagugucuccaauggaaaggaccaacuuguaguguuccauacgaaagacaacaaagaccucauugucugccucuucagcaaacagccaacccaugagagucgaauuggagaacuuguuggagugcuggugaaucauuucaagagugagaagcgccaccuucaagugaacgucaccaacccaguacagugcagccugcacgggaagaagugcaccgucuccguggagacgcggcucaaccagccccagcccgacuucaccaagaaucgcucgggcuucauccucagcgugcccgggaacuga

SEQ ID NO: 2815 - RNA, 3021 nt, Artificial Sequence
  derived and/or modified sequence opt1 from MYO1D__Homo_sapiens__AAI46764
auggccgagcaggagagccuggaguucggcaaggccgacuucgugcucauggacaccgucuccaugcccgaguucauggcgaaccugcgccugcgguucgagaaggggcgcaucuacaccuucaucggcgaggugguggucagcgugaacccguacaagcuccugaacaucuacgggcgggacacgaucgagcaguacaagggccgcgagcuguacgagcggccgccccaccucuucgccaucgccgacgccgccuacaaggcgaugaagcgccgguccaaggacacgugcaucgugaucagcggggaguccggcgccggcaagaccgaggccagcaaguacaucaugcaguacaucgccgcgaucaccaaccccucccagcgcgccgaggucgagcgggugaagaacaugcugcucaagagcaacugcgugcuggaggccuucgggaacgccaagaccaaccgcaacgacaacuccagccgguucggcaaguacauggacaucaacuucgacuucaagggggaccccaucggcgggcacaucaacaacuaccugcuggagaagucccgcgucaucgugcagcagcccggcgagcggagcuuccacuccuucuaccagcuccugcagggcgggagcgagcagaugcugcgcucccuccaccuccagaagucccugagcagcuacaacuacauccacgugggcgcccagcugaaguccagcaucaacgacgcggccgaguuccgggucguggccgacgccaugaaggugaucggguucaagcccgaggagauccagaccgucuacaagauccuggccgcgauccugcaccucggcaaccugaaguucgugguggacggcgacacgccccugaucgagaacgggaaggucgugagcaucaucgccgagcuccuguccaccaagaccgacaugguggagaaggcccugcucuaccgcaccgucgccaccggccgggacaucaucgacaagcagcacaccgagcaggaggccagcuacgggcgcgacgcguucgccaaggccaucuacgagcggcuguucugcuggaucgugacgcgcaucaacgacaucaucgaggugaagaacuacgacaccaccauccacggcaagaacaccgucaucggggugcuggacaucuacggcuucgagaucuucgacaacaacuccuucgagcaguucugcaucaacuacugcaacgagaagcuccagcagcuguucauccagcugguccucaagcaggagcaggaggaguaccagcgggagggcaucccguggaagcacaucgacuacuucaacaaccagaucaucguggaccugguggagcagcagcacaaggggaucaucgccauccuggacgacgccugcaugaacgucggcaaggugacggacgagauguuccucgaggcgcugaacagcaagcuggggaagcacgcccacuucuccagccgcaagcucugcgccuccgacaagauccuggaguucgaccgcgacuuccggauccgccacuacgccggcgacguggucuacagcgugaucggguucaucgacaagaacaaggacacccuguuccaggacuucaagcggcucauguacaacuccagcaaccccgugcugaagaacauguggcccgagggcaagcuguccaucaccgaggucaccaagcgcccccucacggcggccacccuguucaagaacagcaugaucgcccugguggacaaccucgccuccaaggagccguacuacgugcggugcaucaagcccaacgacaagaaguccccgcagaucuucgacgacgagcgcugccggcaccaggucgaguaccugggccugcuggagaacgugcgcgugcggcgcgccggguucgcguuccggcagaccuacgagaaguuccuccaccgcuacaagaugaucagcgaguucaccuggcccaaccacgaccugcccagcgacaaggaggccgucaagaagcugaucgagcggugcggcuuccaggacgacguggccuacgggaagacgaagaucuucauccgcacgccccggacccucuucacccuggaggagcugcgcgcccagaugcucauccggaucgugcuguuccugcagaaggucuggcgcggcacccucgcccggaugcgcuacaagcgcaccaaggcggcccugaccaucauccgguacuaccgccgguacaaggugaaguccuacauccacgagguggcccgccgguuccacggggucaagaccaugcgcgacuacggcaagcacgugaaguggcccagcccgcccaaggugcugcggcgcuucgaggaggcccuccagacgaucuucaaccgguggcgcgccucccagcugaucaagagcauccccgcgagcgaccugccccagguccgggccaagguggccgccguggagaugcucaagggccagcgcgcggaccuggggcugcagcgggccugggagggcaacuaccucgccuccaagcccgacaccccgcagaccagcgggaccuucguccccguggccaacgagcugaagcgcaaggacaaguacaugaacgugcuguucuccugccacguccggaaggugaaccgcuucagcaagguggaggaccgggccaucuucgucacggaccgccaccucuacaagauggaccccaccaagcaguacaaggugaugaagaccaucccccuguacaaccugaccggccucuccgugagcaacggcaaggaccagcuggucguguuccacaccaaggacaacaaggaccugaucgugugccucuucuccaagcagccgacgcacgagagccggaucggggagcuggucggcgugcuggugaaccacuucaaguccgagaagcgccaccuccaggucaacgugaccaaccccgugcagugcagccugcacgggaagaagugcaccgucuccguggagacccggcugaaccagccccagccggacuucacgaagaaccgcagcggcuucauccucuccgugcccgggaacuga

SEQ ID NO: 2816 - RNA, 3021 nt, Artificial Sequence
  derived and/or modified sequence opt2 from MYO1D__Homo_sapiens__AAI46764
auggccgagcaggagucccucgaguucggcaaggccgacuucguccucauggacaccgucuccaugcccgaguucauggccaaccuccgccuccgcuucgagaagggccgcaucuacaccuucaucggcgaggucgucgucuccgucaaccccuacaagcuccucaacaucuacggccgcgacaccaucgagcaguacaagggccgcgagcucuacgagcgccccccccaccucuucgccaucgccgacgccgccuacaaggccaugaagcgccgcuccaaggacaccugcaucgucaucuccggcgaguccggcgccggcaagaccgaggccuccaaguacaucaugcaguacaucgccgccaucaccaaccccucccagcgcgccgaggucgagcgcgucaagaacaugcuccucaaguccaacugcguccucgaggccuucggcaacgccaagaccaaccgcaacgacaacuccucccgcuucggcaaguacauggacaucaacuucgacuucaagggcgaccccaucggcggccacaucaacaacuaccuccucgagaagucccgcgucaucguccagcagcccggcgagcgcuccuuccacuccuucuaccagcuccuccagggcggcuccgagcagaugcuccgcucccuccaccuccagaagucccucuccuccuacaacuacauccacgucggcgcccagcucaaguccuccaucaacgacgccgccgaguuccgcgucgucgccgacgccaugaaggucaucggcuucaagcccgaggagauccagaccgucuacaagauccucgccgccauccuccaccucggcaaccucaaguucgucgucgacggcgacaccccccucaucgagaacggcaaggucgucuccaucaucgccgagcuccucuccaccaagaccgacauggucgagaaggcccuccucuaccgcaccgucgccaccggccgcgacaucaucgacaagcagcacaccgagcaggaggccuccuacggccgcgacgccuucgccaaggccaucuacgagcgccucuucugcuggaucgucacccgcaucaacgacaucaucgaggucaagaacuacgacaccaccauccacggcaagaacaccgucaucggcguccucgacaucuacggcuucgagaucuucgacaacaacuccuucgagcaguucugcaucaacuacugcaacgagaagcuccagcagcucuucauccagcucguccucaagcaggagcaggaggaguaccagcgcgagggcauccccuggaagcacaucgacuacuucaacaaccagaucaucgucgaccucgucgagcagcagcacaagggcaucaucgccauccucgacgacgccugcaugaacgucggcaaggucaccgacgagauguuccucgaggcccucaacuccaagcucggcaagcacgcccacuucuccucccgcaagcucugcgccuccgacaagauccucgaguucgaccgcgacuuccgcauccgccacuacgccggcgacgucgucuacuccgucaucggcuucaucgacaagaacaaggacacccucuuccaggacuucaagcgccucauguacaacuccuccaaccccguccucaagaacauguggcccgagggcaagcucuccaucaccgaggucaccaagcgcccccucaccgccgccacccucuucaagaacuccaugaucgcccucgucgacaaccucgccuccaaggagcccuacuacguccgcugcaucaagcccaacgacaagaaguccccccagaucuucgacgacgagcgcugccgccaccaggucgaguaccucggccuccucgagaacguccgcguccgccgcgccggcuucgccuuccgccagaccuacgagaaguuccuccaccgcuacaagaugaucuccgaguucaccuggcccaaccacgaccuccccuccgacaaggaggccgucaagaagcucaucgagcgcugcggcuuccaggacgacgucgccuacggcaagaccaagaucuucauccgcaccccccgcacccucuucacccucgaggagcuccgcgcccagaugcucauccgcaucguccucuuccuccagaaggucuggcgcggcacccucgcccgcaugcgcuacaagcgcaccaaggccgcccucaccaucauccgcuacuaccgccgcuacaaggucaaguccuacauccacgaggucgcccgccgcuuccacggcgucaagaccaugcgcgacuacggcaagcacgucaaguggcccuccccccccaagguccuccgccgcuucgaggaggcccuccagaccaucuucaaccgcuggcgcgccucccagcucaucaaguccauccccgccuccgaccucccccagguccgcgccaaggucgccgccgucgagaugcucaagggccagcgcgccgaccucggccuccagcgcgccugggagggcaacuaccucgccuccaagcccgacaccccccagaccuccggcaccuucguccccgucgccaacgagcucaagcgcaaggacaaguacaugaacguccucuucuccugccacguccgcaaggucaaccgcuucuccaaggucgaggaccgcgccaucuucgucaccgaccgccaccucuacaagauggaccccaccaagcaguacaaggucaugaagaccaucccccucuacaaccucaccggccucuccgucuccaacggcaaggaccagcucgucgucuuccacaccaaggacaacaaggaccucaucgucugccucuucuccaagcagcccacccacgagucccgcaucggcgagcucgucggcguccucgucaaccacuucaaguccgagaagcgccaccuccaggucaacgucaccaaccccguccagugcucccuccacggcaagaagugcaccgucuccgucgagacccgccucaaccagccccagcccgacuucaccaagaaccgcuccggcuucauccucuccguccccggcaacuga

SEQ ID NO: 2817 - RNA, 3021 nt, Artificial Sequence
  derived and/or modified sequence opt3 from MYO1D__Homo_sapiens__AAI46764
auggccgagcaggaaagccuggaguucggcaaggcugacuuugugcucauggauaccgucuccaugcccgaguucauggcaaaccuuagacugagguuugagaaagggcggaucuacacauucauuggagaaguugugguaucugugaauccuuauaaguuguuaaacauauacggucgcgacacuaucgagcaauauaaaggccgagagcuguacgaacguccaccgcaccuauuugccauugcggaugcugccuauaaggcaaugaaaagaaggucaaaggacacgugcaucgucauuaguggggagagcggagccggcaagaccgaggcuuccaaauacaucaugcaguauauagcagccaucacaaaucccucucagcgggcugaaguggagcgcguuaagaacaugcuccugaaaucgaauugugugcuugaagccuucgguaacgcgaagacuaauagaaacgauaauucaagcagguuugggaaauacauggacauuaacuucgauuuuaagggagacccuaucggcggccauauuaauaacuaccuguuggagaagagucgggucaucgugcagcaaccaggggaacgcuccuuccacucuuuuuaucagcuccugcagggagguagcgagcagaugcugcgaucccuccauuuacaaaaaucacugaguagcuacaauuauauacacguaggcgcacagcuuaagucuuccauuaacgaugccgcugaguucagaguuguggccgacgcaaugaaagucaucggguuuaagcccgaagagauucagaccguguacaaaaucuuggcugccauccugcaucuaggaaaucucaaguucguggucgauggcgacacaccucugauugaaaacgguaaaguugugucaauaaucgcggagcuucugagcaccaagacugauaugguagaaaaggccuugcucuauaggacaguggcaaccgggcgggacauuaucgacaaacagcacacggagcaagaagcuaguuacggacgugaugccuucgcuaaggccauauaugagcgccuguuuugcuggauugucacuagaaucaacgacaucauugaggugaaaaauuacgauaccacaauccacggcaagaacacuguuauuggcguguuagacauauacggguucgaaaucuuugauaauaacucuuucgagcaguuuuguauuaauuauugcaacgaaaaacugcagcaacucuucauccagcuuguccugaagcaggagcaggaagaguaccaaagggagggaaucccauggaagcauauugacuauuuuaauaaccagauaaucguggauuugguagaacagcagcacaaagguauuaucgcaauucuagacgaugccuguaugaauguuggcaaggugaccgacgagauguuccuggaagcucucaacuccaaacuggggaagcaugcgcacuuuagcucgcggaaacuuugcgcaucugauaagauccuggaguucgaccgagacuuucgcauaagacacuacgccggagaugucguguauuccgucaucggcuucauugacaagaauaaagauacauuguuucaagacuucaagaggcucauguacaacucaaguaaucccgugcugaaaaacauguggccugaggguaaguuaagcaucaccgaaguuacgaaacggccacugacugcugccacacuauucaaaaauuccaugauugcacucguggauaaccuggccucuaaggagccguauuacguacgcuguaucaagcccaacgacaagaaaagcccucagauauuugaugacgaaagaugcaggcaucaggucgaguaccuuggguugcuggaaaaugugcguguucggcgagcuggcuucgccuuuagacagaccuaugagaaguuccuccacagguacaaaaugauuucagaguuuacuuggccaaaccaugaucugcccagugacaaggaagcagugaaaaagcugaucgagcgcuguggauuccaagaugacgucgcguauggcaagacaaaaauuuuuauccggaccccuagaacgcuuuucaccuuggaagaacucagggcucagaugcugauacgcaucguguuauuucugcagaagguauggcgagggacacuagcccggaugcguuacaaaagaacuaaggcagcccucaccauuaucagguauuaccgccgguauaaagugaaguccuacauucacgaaguugcuagaagguuccauggagucaagacaaugcgagauuacgguaaacacgugaaguggccaucacccccgaaagugcugcgccgguuugaggaggcccuucagacuaucuucaauagauggagggcaucucaauugauaaagucaauuccugcuagugaccugccccagguccgugccaaaguugcggccguggaaaugcucaagggccagcgcgcugaccugggguuacaacgggcaugggagggaaacuaucuggccagcaagccagauaccccucagacauccggcaccuuugugcccguagcuaaugaacuuaaaagaaaggacaaauacaugaacgucuuguucucuugccacgugaggaagguuaaucgauucucgaaaguggaggaucgggccaucuuugucacugaccgccaucucuauaagauggauccaacgaagcaguacaaagugaugaagacaaucccccuguauaaccuaaccggucugagcguuuccaaugggaaagaccagcucgugguauuccacacuaaggauaacaaagaccugauugucugucuuuuuagcaagcaaccuacccaugaaaguagaaucggcgaguuggugggagugcuggucaaucacuucaaaucugagaagaggcacuuacagguuaacgugacaaauccaguacagugcagccuccauggcaagaaaugcaccguguccgucgaaacucggcugaaccagccgcaacccgauuuuacaaagaaucgaucaggguucauucuuagcgugccuggaaacuga

SEQ ID NO: 2818 - RNA, 3021 nt, Artificial Sequence
  derived and/or modified sequence opt4 from MYO1D__Homo_sapiens__AAI46764
auggccgagcaggagagccuggaguucggcaaggccgacuucgugcugauggacaccgugagcaugcccgaguucauggccaaccugagacugagauucgagaagggcagaaucuacaccuucaucggcgaggugguggugagcgugaaccccuacaagcugcugaacaucuacggcagagacaccaucgagcaguacaagggcagagagcuguacgagagacccccccaccuguucgccaucgccgacgccgccuacaaggccaugaagagaagaagcaaggacaccugcaucgugaucagcggcgagagcggcgccggcaagaccgaggccagcaaguacaucaugcaguacaucgccgccaucaccaaccccagccagagagccgagguggagagagugaagaacaugcugcugaagagcaacugcgugcuggaggccuucggcaacgccaagaccaacagaaacgacaacagcagcagauucggcaaguacauggacaucaacuucgacuucaagggcgaccccaucggcggccacaucaacaacuaccugcuggagaagagcagagugaucgugcagcagcccggcgagagaagcuuccacagcuucuaccagcugcugcagggcggcagcgagcagaugcugagaagccugcaccugcagaagagccugagcagcuacaacuacauccacgugggcgcccagcugaagagcagcaucaacgacgccgccgaguucagagugguggccgacgccaugaaggugaucggcuucaagcccgaggagauccagaccguguacaagauccuggccgccauccugcaccugggcaaccugaaguucgugguggacggcgacaccccccugaucgagaacggcaagguggugagcaucaucgccgagcugcugagcaccaagaccgacaugguggagaaggcccugcuguacagaaccguggccaccggcagagacaucaucgacaagcagcacaccgagcaggaggccagcuacggcagagacgccuucgccaaggccaucuacgagagacuguucugcuggaucgugaccagaaucaacgacaucaucgaggugaagaacuacgacaccaccauccacggcaagaacaccgugaucggcgugcuggacaucuacggcuucgagaucuucgacaacaacagcuucgagcaguucugcaucaacuacugcaacgagaagcugcagcagcuguucauccagcuggugcugaagcaggagcaggaggaguaccagagagagggcauccccuggaagcacaucgacuacuucaacaaccagaucaucguggaccugguggagcagcagcacaagggcaucaucgccauccuggacgacgccugcaugaacgugggcaaggugaccgacgagauguuccuggaggcccugaacagcaagcugggcaagcacgcccacuucagcagcagaaagcugugcgccagcgacaagauccuggaguucgacagagacuucagaaucagacacuacgccggcgacgugguguacagcgugaucggcuucaucgacaagaacaaggacacccuguuccaggacuucaagagacugauguacaacagcagcaaccccgugcugaagaacauguggcccgagggcaagcugagcaucaccgaggugaccaagagaccccugaccgccgccacccuguucaagaacagcaugaucgcccugguggacaaccuggccagcaaggagcccuacuacgugagaugcaucaagcccaacgacaagaagagcccccagaucuucgacgacgagagaugcagacaccagguggaguaccugggccugcuggagaacgugagagugagaagagccggcuucgccuucagacagaccuacgagaaguuccugcacagauacaagaugaucagcgaguucaccuggcccaaccacgaccugcccagcgacaaggaggccgugaagaagcugaucgagagaugcggcuuccaggacgacguggccuacggcaagaccaagaucuucaucagaacccccagaacccuguucacccuggaggagcugagagcccagaugcugaucagaaucgugcuguuccugcagaagguguggagaggcacccuggccagaaugagauacaagagaaccaaggccgcccugaccaucaucagauacuacagaagauacaaggugaagagcuacauccacgagguggccagaagauuccacggcgugaagaccaugagagacuacggcaagcacgugaaguggcccagcccccccaaggugcugagaagauucgaggaggcccugcagaccaucuucaacagauggagagccagccagcugaucaagagcauccccgccagcgaccugccccaggugagagccaagguggccgccguggagaugcugaagggccagagagccgaccugggccugcagagagccugggagggcaacuaccuggccagcaagcccgacaccccccagaccagcggcaccuucgugcccguggccaacgagcugaagagaaaggacaaguacaugaacgugcuguucagcugccacgugagaaaggugaacagauucagcaagguggaggacagagccaucuucgugaccgacagacaccuguacaagauggaccccaccaagcaguacaaggugaugaagaccaucccccuguacaaccugaccggccugagcgugagcaacggcaaggaccagcuggugguguuccacaccaaggacaacaaggaccugaucgugugccuguucagcaagcagcccacccacgagagcagaaucggcgagcuggugggcgugcuggugaaccacuucaagagcgagaagagacaccugcaggugaacgugaccaaccccgugcagugcagccugcacggcaagaagugcaccgugagcguggagaccagacugaaccagccccagcccgacuucaccaagaacagaagcggcuucauccugagcgugcccggcaacuga

SEQ ID NO: 2819 - RNA, 3021 nt, Artificial Sequence
  derived and/or modified sequence opt5 from MYO1D__Homo_sapiens__AAI46764
auggccgagcaggaaagccuggaguucggcaaggcugacuuugugcucauggauaccgucuccaugcccgaguucauggccaaccugagacuucgguuugagaaagggcgcaucuacacauucauuggagaaguuguggugucugucaauccuuauaagcugcucaacaucuacggcagagacacgauugagcaauauaaagggcgggagcuguacgaacgcccgccccaccuuuuugcgaucgcugaugccgccuauaaggcuaugaaaagacggagcaaggauaccugcauugugaucuccggagagucuggcgccgggaagacagaagcuagcaaauacaucaugcaguauauugccgcgaucaccaauccuucccagcgcgccgagguugagagagugaagaacaugcugcucaaaucuaauuguguccuggaggcuuucggaaacgccaagacaaaucggaacgacaauagcucccgcuuuggcaaauacauggacauuaacuucgauuuuaagggcgaccccaucgggggacauauuaauaacuaccugcucgaaaagagcagagugaucguucagcaaccuggcgaacggucuuuccacuccuuuuaucagcugcuucaagggggaagcgagcagaugcugcgcucucuccaucugcagaaaucccuuagcucuuacaauuauauucacgugggcgcucagcugaaguccagcaucaacgaugccgcggaguucagagucguggccgacgcuaugaaagugaucggguuuaagcccgaagagauucagaccgucuacaaaauccucgccgcuauucugcaucugggaaaucucaaguucguuguggauggcgacacaccucugaucgaaaacggcaaaguggucuccauuaucgccgagcuucugucuaccaagacggauaugguggaaaaggcccuccuguaucggaccguugcuacagggcgcgacaucauugacaaacagcacaccgagcaagaagcgagcuacggaagagaugccuucgcuaaggccaucuaugagcggcuguuuugcuggauugugacaagaaucaacgacauuaucgaggucaaaaauuacgauaccacgauccacggcaagaacacagugauugggguucuggacaucuacggauucgaaauuuuugauaauaacuccuucgagcaguuuuguaucaauuauugcaacgaaaaacuccagcaacuguucauucagcuggugcucaagcaggagcaggaagaguaccaacgcgagggcaucccguggaagcauauugacuauuuuaauaaccagaucaucgucgaucugguggaacagcagcacaaagggauuaucgccauucuugacgaugcuuguaugaaugucggaaaggugaccgacgagauguuccuggaagcccucaacagcaaacugggcaagcaugcgcacuuuucuucccggaaacuuugcgcuagcgauaagauccuggaguucgacagagacuuucgcauucggcacuacgccggcgauguuguguauucugucaucggguucaucgacaagaauaaagauacacucuuucaagacuucaagagacugauguacaacagcuccaaucccgugcugaaaaacauguggccugagggaaagcucucuauuaccgaaguuaccaaacgcccccugacagccgcuacgcuuuucaagaauagcaugaucgcccugguggauaaccucgcuuccaaggagccuuauuacguccgguguauuaaacccaacgacaagaaaagcccgcagaucuuugaugacgaaagaugccgccaucagguggaguaccugggccugcuugaaaaugugcggguuagacgcgccggguucgcguuucggcagaccuaugagaaguuccuccacagauacaaaaugauuucugaguuuacauggccuaaccaugaucugcccuccgacaaggaagccgucaaaaagcugaucgagcgguguggauuccaagaugacguggcuuauggcaagaccaaaaucuuuauucgcacaccuagaacccucuucacgcuggaagaacuucgggcccagaugcugaucagaauugugcucuuucugcagaaggucuggcgcgggacacuggcucggaugagauacaaacgcaccaaggccgcgcuuaccaucauuagauauuaccggcgcuauaaaguuaagagcuacauccacgaaguggccagacgguuccauggcgugaagacaaugcgcgauuacggaaaacacgucaaguggcccucucccccuaaagugcucagacgguuugaggaggcucugcagaccaucuucaaucgcuggagagccucccaacugauuaagagcaucccggcuuccgaccucccccagguucgggccaaaguggccgcugucgaaaugcugaagggccagcgcgcggaccuugggcugcaaagagccugggagggaaacuaucucgcuucuaagccugauacaccccagacgagcggcaccuuugugccuguugccaaugaacugaaacggaaggacaaauacaugaacgugcuguucuccugccacgucagaaaggugaaucgcuucucuaaaguggaggaucgggccauuuuugucacagacagacaucuuuauaagauggaucccaccaagcaguacaaaguuaugaagacaaucccgcucuauaaccugaccgggcugagcguguccaauggaaaagaccagcucguggucuuccacacgaaggauaacaaagaccugauugugugucuuuuuagcaagcaaccuacccaugaaucucgcaucggcgagcugguuggggugcucgucaaucacuucaaauccgagaagcggcaccuucaggugaacguuacaaaucccgugcagugcagccugcauggcaagaaaugcaccgucucuguggaaacaagacuuaaccagccucaacccgauuuuaccaagaaucgcuccggauucauucucagcguuccuggcaacuga

SEQ ID NO: 2820 - protein, 1108 aa, Artificial Sequence
  MYO1E__Homo_sapiens__Q12965
MGSKGVYQYHWQSHNVKHSGVDDMVLLSKITENSIVENLKKRYMDDYIFTYIGSVLISVNPFKQMPYFGEKEIEMYQGAAQYENPPHIYALADNMYRNMIIDRENQCVIISGESGAGKTVAAKYIMSYISRVSGGGTKVQHVKDIILQSNPLLEAFGNAKTVRNNNSSRFGKYFEIQFSPGGEPDGGKISNFLLEKSRVVMRNPGERSFHIFYQLIEGASAEQKHSLGITSMDYYYYLSLSGSYKVDDIDDRREFQETLHAMNVIGIFAEEQTLVLQIVAGILHLGNISFKEVGNYAAVESEEFLAFPAYLLGINQDRLKEKLTSRQMDSKWGGKSESIHVTLNVEQACYTRDALAKALHARVFDFLVDSINKAMEKDHEEYNIGVLDIYGFEIFQKNGFEQFCINFVNEKLQQIFIELTLKAEQEEYVQEGIRWTPIEYFNNKIVCDLIENKVNPPGIMSILDDVCATMHAVGEGADQTLLQKLQMQIGSHEHFNSWNQGFIIHHYAGKVSYDMDGFCERNRDVLFMDLIELMQSSELPFIKSLFPENLQADKKGRPTTAGSKIKKQANDLVSTLMKCTPHYIRCIKPNETKKPRDWEESRVKHQVEYLGLKENIRVRRAGYAYRRIFQKFLQRYAILTKATWPSWQGEEKQGVLHLLQSVNMDSDQFQLGRSKVFIKAPESLFLLEEMRERKYDGYARVIQKSWRKFVARKKYVQMREEASDLLLNKKERRRNSINRNFIGDYIGMEEHPELQQFVGKREKIDFADTVTKYDRRFKGVKRDLLLTPKCLYLIGREKVKQGPDKGLVKEVLKRKIEIERILSVSLSTMQDDIFILHEQEYDSLLESVFKTEFLSLLAKRYEEKTQKQLPLKFSNTLELKLKKENWGPWSAGGSRQVQFHQGFGDLAVLKPSNKVLQVSIGPGLPKNSRPTRRNTTQNTGYSSGTQNANYPVRAAPPPPGYHQNGVIRNQYVPYPHAPGSQRSNQKSLYTSMARPPLPRQQSTSSDRVSQTPESLDFLKVPDQGAAGVRRQTTSRPPPAGGRPKPQPKPKPQVPQCKALYAYDAQDTDELSFNANDIIDIIKEDPSGWWTGRLRGKQGLFPNNYVTKI

SEQ ID NO: 2821 - RNA, 3327 nt, Artificial Sequence
  MYO1E__Homo_sapiens__CCDS32254.1
augggaagcaaaggugucuaccaguaccacuggcaaagccacaaugucaagcacagugguguggacgacauggugcuacuguccaagaucacagagaacuccaucguggagaaucugaagaagagauacauggaugacuacauuuuuacauauauaggaucuguauuaaucucagucaacccuuucaagcagaugccauauuuuggggaaaaggaaauugaaauguaccaaggagcggcacaguaugaaaacccaccacauaucuaugcccuugcagauaauauguacagaaacaugaucauugacagagagaaccagugcgucauuaucaguggugaaaguggugcuggaaaaacaguggcugccaaauauaucaugagcuacaucuccagagugucuggaggagggaccaaaguccagcacgugaaggacauuauccugcaguccaacccgcugcuggaggccuucgggaacgccaagaccguccggaacaacaacuccagccgauuuggaaaauacuuugaaauccaguucaguccagguggggaaccagaugguggaaagaucuccaacuuccuucuggaaaaaucuaggguggugaugaggaacccaggagagcggaguuuucacauauuuuaccagcucaucgagggcgccucugcagagcagaaacacagccuuggcaucaccagcauggacuauuauuacuaccugagccucucgggcucauacaagguugaugacauugacgacaggcgggaguuucaggaaacucugcacgccaugaaugugauugggaucuuugcagaagagcaaacgcugguguugcagauaguggcggguauucuccaccugggaaacaucagcuucaaagaaguuggcaacuacgcggcuguggagagugaagaguuuuuagcuuuuccugcauaucugcuagggauaaaccaggaccgguugaaagaaaagcuaacaagccggcagauggauagcaaguggggaggcaaauccgaauccauccacgugacccucaacguagagcaggccuguuacacccgggaugcgcucgccaaggcccugcacgcccgggucuuugauuucuugguagauuccaucaauaaagccauggagaaagaccaugaagaauacaacauuggcguccuagacaucuauggcuuugaaauauuccagaaaaauggcuuugaacaguuuuguaucaauuuuguuaaugaaaaacugcagcagauuuuuauugaacugacauuaaaggcagaacaggaagaauauguucaagagggaauaagauggacacccauugaguacuuuaauaauaaaaucguaugugaccucauagagaacaaagugaacccuccuggcaucaugagcauccuggaugacgugugcgccacgaugcaugcggugggugagggggcagaucagacgcugcuccagaaacuucagaugcagauugggagucaugagcacuucaacaguuggaaccaaggcuucaucauucaucauuaugcugggaagguauccuaugacauggauggcuuuugugaaaggaaccgggaugugcuuuuuauggaucucaucgagcuuaugcagagcagcgagcugccuuucauaaagucuuuauuuccggaaaaucugcaggcugacaagaaagggcgcccaacuacugccggaagcaaaauaaagaaacaagccaaugaccuugugagcacccugaugaaauguacgccccacuacauucgcugcaucaagccaaacgaaaccaagaagcccagagacugggaggaaagcaggguaaagcaucaagucgaauauuugggucugaaagagaacauucgagugagaagagcuggcuaugccuaucggcgcaucuuccaaaaauuccuacagagguaugccauucugaccaaagccaccuggccuucuuggcagggagaggagaagcaaggcguccugcaccugcugcagucggucaacauggacagcgaccaguuccagcuggggaggaguaaaguguucaucaaagcccccgagucucuauuucuuuuagaagagaugagagagagaaaguaugauggguaugcucgagugauacagaaaucauggaggaaauucguggcccggaagaaauacguucaaaugagagaagaagccucagaccucuuauugaacaagaaggagagaaggagaaacaguauuaacaggaacuuuauaggggauuauauugggauggaagagcacccagaacuccagcaguucgugggcaagagggagaagauugauuucgcagacacagucaccaaguaugacaggagguucaaggguguaaagcgagaccugcuccuuaccccaaagugcuuguacuuaaucggacgagaaaaagucaaacagggcccagacaagggccuggugaaagaaguccugaagcggaaaaucgagauagaacggaucuugucugugucccucaguacuaugcaggaugacauuuuuauucuccaugagcaagaguaugacaguuugcuugaaucugucuucaaaacugaauuccuaagccucuuagcaaagcguuacgaggagaagacccagaagcaacuaccucugaaauucagcaauacgcuugaacugaaguugaaaaaggaaaacuggggccccuggagugcagggggcucccggcaagugcaguuccaccaaggguuuggggaccuggcuguccucaagcccaguaacaaagugcugcaggucagcaucggaccuggacugcccaagaacucccguccuaccagaaggaacacuacccaaaauacagguuauuccagugggacucaaaaugccaacuacccagugagagcugccccuccucccccaggauaccaucagaacggagucaucagaaaccaguaugugccauauccccaugcuccuggaagccagagguccaaucagaaaagccuguacaccuccauggcccgcccgcccuugccucggcagcagucuaccaguucagaccgagugucacagacgccagagagccuggauuuccucaaggucccggaccagggagcugcaggggucaggagacaaacaaccagucggccucccccagcagggggcagacccaagccccagcccaagcccaagccucaggugccacagugcaaggcuuuguaugccuaugacgcucaggacacagacgaacucagcuuuaaugccaaugacauuauugauauuaucaaagaagauccuucuggcugguggacgggucgacuacgaggcaagcagggccuguuccccaacaacuaugugaccaagaucuga

SEQ ID NO: 2822 - RNA, 3327 nt, Artificial Sequence
  derived and/or modified sequence opt1 from MYO1E__Homo_sapiens__CCDS32254.1
augggcagcaaggggguguaccaguaccacuggcagucccacaacgucaagcacagcggcguggacgacauggugcugcucuccaagaucaccgagaacagcaucgucgagaaccugaagaagcgcuacauggacgacuacaucuucaccuacaucggguccgugcugaucagcgugaaccccuucaagcagaugccguacuucggcgagaaggagaucgagauguaccagggggccgcccaguacgagaaccccccccacaucuacgcgcucgccgacaacauguaccggaacaugaucaucgaccgcgagaaccagugcgucaucaucuccggcgagagcggcgccgggaagacgguggccgccaaguacaucauguccuacaucagccggguguccggcgggggcaccaagguccagcacgugaaggacaucauccugcagagcaacccccugcucgaggcguucgggaacgccaagaccgugcgcaacaacaacuccagccgguucggcaaguacuucgagauccaguucuccccgggcggggagcccgacggcgggaagaucagcaacuuccugcuggagaagucccgcgucgugaugcggaaccccggcgagcgcagcuuccacaucuucuaccagcucaucgagggcgccuccgccgagcagaagcacagccuggggaucaccagcauggacuacuacuacuaccugucccucagcggcuccuacaagguggacgacaucgacgaccggcgcgaguuccaggagacgcugcacgcgaugaacgucaucgggaucuucgccgaggagcagacccuggugcuccagaucguggccggcauccugcaccuggggaacaucagcuucaaggaggucggcaacuacgccgccguggaguccgaggaguuccucgcguuccccgccuaccugcugggcaucaaccaggaccggcucaaggagaagcugaccagccgccagauggacuccaagugggggggcaagagcgaguccauccacgugacccugaacgucgagcaggccugcuacacgcgggacgcccucgccaaggcgcugcacgcccgcguguucgacuuccugguggacagcaucaacaaggccauggagaaggaccacgaggaguacaacaucgggguccucgacaucuacggcuucgagaucuuccagaagaacggguucgagcaguucugcaucaacuucgugaacgagaagcugcagcagaucuucaucgagcugacccucaaggccgagcaggaggaguacguccaggagggcauccgguggaccccgaucgaguacuucaacaacaagaucgugugcgaccugaucgagaacaaggugaacccccccggcaucauguccauccuggacgacgucugcgccaccaugcacgcggugggggagggcgccgaccagacgcuccugcagaagcugcagaugcagaucgggagccacgagcacuucaacuccuggaaccagggcuucaucauccaccacuacgccgggaaggugagcuacgacauggacggcuucugcgagcgcaaccgggacguccucuucauggaccugaucgagcugaugcaguccagcgagcuccccuucaucaagucccuguucccggagaaccugcaggccgacaagaagggccgccccaccaccgccgggagcaagaucaagaagcaggcgaacgaccucguguccacccugaugaagugcacgccccacuacauccggugcaucaagcccaacgagaccaagaagccgcgcgacugggaggagagccgggugaagcaccaggucgaguaccugggccucaaggagaacauccgcgugcgccgggccggguacgccuaccgccggaucuuccagaaguuccugcagcgcuacgccauccugaccaaggcgaccuggcccagcuggcagggcgaggagaagcagggcgugcuccaccugcugcaguccgucaacauggacagcgaccaguuccagcuggggcgguccaagguguucaucaaggcccccgagagccucuuccugcuggaggagaugcgcgagcggaaguacgacggcuacgcccgcgugauccagaaguccuggcggaaguucgucgcccgcaagaaguacgugcagaugcgggaggaggccagcgaccuccugcugaacaagaaggagcgccggcgcaacuccaucaaccggaacuucaucggggacuacaucggcauggaggagcaccccgagcuccagcaguucguggggaagcgcgagaagaucgacuucgcggacacggucaccaaguacgaccggcgcuucaagggcgugaagcgggaccugcugcucaccccgaagugccuguaccugaucggccgcgagaaggugaagcaggggcccgacaagggccucgucaaggaggugcugaagcgcaagaucgagaucgagcggauccugagcgugucccucagcaccaugcaggacgacaucuucauccugcacgagcaggaguacgacucccugcucgagagcgucuucaagacggaguuccugucccugcucgccaagcgcuacgaggagaagacccagaagcagcugccccugaaguucagcaacacccucgagcugaagcugaagaaggagaacugggggcccugguccgccggcgggagccggcaggugcaguuccaccagggcuucggcgaccucgccgugcugaagccguccaacaagguccugcaggugagcaucgggcccggccuccccaagaacagccgccccacccggcgcaacacgacccagaacaccggguacuccagcggcacccagaacgccaacuacccggugcgggcggccccccccccgcccggguaccaccagaacggcgucauccgcaaccaguacgugcccuacccccacgccccgggcucccagcggagcaaccagaagucccuguacacgagcauggcccgccccccccugccccggcagcaguccaccagcuccgaccgcgugagccagaccccggagucccucgacuuccugaagguccccgaccagggggccgcgggcgugcggcgccagaccacgagccggccccccccggccgggggccgccccaagccccagcccaagccgaagccccaggugccccagugcaaggcccuguacgccuacgacgcgcaggacaccgacgagcucuccuucaacgccaacgacaucaucgacaucaucaaggaggaccccagcgggugguggaccggccggcugcgcggcaagcaggggcuguucccgaacaacuacgucaccaagaucuga

SEQ ID NO: 2823 - RNA, 3327 nt, Artificial Sequence
  derived and/or modified sequence opt2 from MYO1E__Homo_sapiens__CCDS32254.1
augggcuccaagggcgucuaccaguaccacuggcagucccacaacgucaagcacuccggcgucgacgacaugguccuccucuccaagaucaccgagaacuccaucgucgagaaccucaagaagcgcuacauggacgacuacaucuucaccuacaucggcuccguccucaucuccgucaaccccuucaagcagaugcccuacuucggcgagaaggagaucgagauguaccagggcgccgcccaguacgagaaccccccccacaucuacgcccucgccgacaacauguaccgcaacaugaucaucgaccgcgagaaccagugcgucaucaucuccggcgaguccggcgccggcaagaccgucgccgccaaguacaucauguccuacaucucccgcgucuccggcggcggcaccaagguccagcacgucaaggacaucauccuccaguccaacccccuccucgaggccuucggcaacgccaagaccguccgcaacaacaacuccucccgcuucggcaaguacuucgagauccaguucucccccggcggcgagcccgacggcggcaagaucuccaacuuccuccucgagaagucccgcgucgucaugcgcaaccccggcgagcgcuccuuccacaucuucuaccagcucaucgagggcgccuccgccgagcagaagcacucccucggcaucaccuccauggacuacuacuacuaccucucccucuccggcuccuacaaggucgacgacaucgacgaccgccgcgaguuccaggagacccuccacgccaugaacgucaucggcaucuucgccgaggagcagacccucguccuccagaucgucgccggcauccuccaccucggcaacaucuccuucaaggaggucggcaacuacgccgccgucgaguccgaggaguuccucgccuuccccgccuaccuccucggcaucaaccaggaccgccucaaggagaagcucaccucccgccagauggacuccaaguggggcggcaaguccgaguccauccacgucacccucaacgucgagcaggccugcuacacccgcgacgcccucgccaaggcccuccacgcccgcgucuucgacuuccucgucgacuccaucaacaaggccauggagaaggaccacgaggaguacaacaucggcguccucgacaucuacggcuucgagaucuuccagaagaacggcuucgagcaguucugcaucaacuucgucaacgagaagcuccagcagaucuucaucgagcucacccucaaggccgagcaggaggaguacguccaggagggcauccgcuggacccccaucgaguacuucaacaacaagaucgucugcgaccucaucgagaacaaggucaacccccccggcaucauguccauccucgacgacgucugcgccaccaugcacgccgucggcgagggcgccgaccagacccuccuccagaagcuccagaugcagaucggcucccacgagcacuucaacuccuggaaccagggcuucaucauccaccacuacgccggcaaggucuccuacgacauggacggcuucugcgagcgcaaccgcgacguccucuucauggaccucaucgagcucaugcaguccuccgagcuccccuucaucaagucccucuuccccgagaaccuccaggccgacaagaagggccgccccaccaccgccggcuccaagaucaagaagcaggccaacgaccucgucuccacccucaugaagugcaccccccacuacauccgcugcaucaagcccaacgagaccaagaagccccgcgacugggaggagucccgcgucaagcaccaggucgaguaccucggccucaaggagaacauccgcguccgccgcgccggcuacgccuaccgccgcaucuuccagaaguuccuccagcgcuacgccauccucaccaaggccaccuggcccuccuggcagggcgaggagaagcagggcguccuccaccuccuccaguccgucaacauggacuccgaccaguuccagcucggccgcuccaaggucuucaucaaggcccccgagucccucuuccuccucgaggagaugcgcgagcgcaaguacgacggcuacgcccgcgucauccagaaguccuggcgcaaguucgucgcccgcaagaaguacguccagaugcgcgaggaggccuccgaccuccuccucaacaagaaggagcgccgccgcaacuccaucaaccgcaacuucaucggcgacuacaucggcauggaggagcaccccgagcuccagcaguucgucggcaagcgcgagaagaucgacuucgccgacaccgucaccaaguacgaccgccgcuucaagggcgucaagcgcgaccuccuccucacccccaagugccucuaccucaucggccgcgagaaggucaagcagggccccgacaagggccucgucaaggagguccucaagcgcaagaucgagaucgagcgcauccucuccgucucccucuccaccaugcaggacgacaucuucauccuccacgagcaggaguacgacucccuccucgaguccgucuucaagaccgaguuccucucccuccucgccaagcgcuacgaggagaagacccagaagcagcucccccucaaguucuccaacacccucgagcucaagcucaagaaggagaacuggggccccugguccgccggcggcucccgccagguccaguuccaccagggcuucggcgaccucgccguccucaagcccuccaacaagguccuccaggucuccaucggccccggccuccccaagaacucccgccccacccgccgcaacaccacccagaacaccggcuacuccuccggcacccagaacgccaacuaccccguccgcgccgccccccccccccccggcuaccaccagaacggcgucauccgcaaccaguacguccccuacccccacgcccccggcucccagcgcuccaaccagaagucccucuacaccuccauggcccgccccccccucccccgccagcaguccaccuccuccgaccgcgucucccagacccccgagucccucgacuuccucaagguccccgaccagggcgccgccggcguccgccgccagaccaccucccgccccccccccgccggcggccgccccaagccccagcccaagcccaagccccaggucccccagugcaaggcccucuacgccuacgacgcccaggacaccgacgagcucuccuucaacgccaacgacaucaucgacaucaucaaggaggaccccuccggcugguggaccggccgccuccgcggcaagcagggccucuuccccaacaacuacgucaccaagaucuga

SEQ ID NO: 2824 - RNA, 3327 nt, Artificial Sequence
  derived and/or modified sequence opt3 from MYO1E__Homo_sapiens__CCDS32254.1
augggcagcaaggggguguaccaguaucacuggcaaucccauaacgucaaacacucuggaguugacgauauggugcugcucucaaagaucaccgagaauaguauuguagaaaaccuuaaaaagagauacauggacgauuauauauucacauacaucgguagcgugcugauuuccgucaaucccuuuaaacagaugccuuauuucggcgagaaggaaaucgagauguaccagggggccgcucaguaugaaaacccaccgcauauuuacgcauuggccgacaauauguacaggaacaugaucauagaucgggagaaucaaugcgugaucauuucuggagagucgggcgcggguaagacuguugcugccaaauauaucaugucauacauuagccgcgugagugggggaggcacgaagguccagcacgugaaagacaucauauuacaguccaacccccugcuagaagcauuuggcaaugccaagaccguacgaaacaauaacucuagccguuucgggaaauauuuugagauucaguucuccccuggaggugaaccagauggcgggaagaucucaaauuuucuccuggagaagaguagaguugugaugaggaaccccggagagcggagcuuccauauuuucuaccaacuuaucgaaggcgcuucugcagagcagaaacacucccuggguaucacaucaauggacuauuacuauuacuugagccucagugggucuuacaaggucgaugacauugaugaccgcagagaauuucaggagacucugcacgccaugaaugugauaggaaucuuugcugaggaacagacccuggugcuccaaauugucgccggcaucuuacaucugggcaacauauccuucaaagagguugggaacuaugcggcaguggaaagcgaggaauuucuugccuucccugcuuacuugcugggaauuaaucaggauaggcuaaaggagaaacucacaucgcggcagauggacucuaagugggguggcaaauccgaaucaauccacguaacccugaacguggagcaagccuguuauacucgcgacgcacuugcuaaggcccugcaugcgcgagucuucgauuuucucguggacaguaucaauaaggccauggagaaagaucacgaagaguacaacauugggguucucgacaucuauggauucgaaauuuuucagaagaauggcuucgagcaguuuugcauaaacuucgugaaugaaaaacugcagcaaaucuuuauugaguuaacacugaaggcagagcaggaagaguacguccaggaagguaucagauggaccccaaucgaguauuucaacaauaaaauugugugugaucucauagagaacaagguaaaucccccugggaucaugagcauucuugacgauguuugcgcuacgaugcacgccgugggcgaaggagcugaccagacucuguugcaaaagcuacagaugcagaucggcucccaugagcacuuuaacucuuggaaucagggguucauuauccaucacuacgccggaaaagucagcuacgauauggacgguuuuugugaaaggaaccgggaugugcuguucauggaccucauagagcugaugcaaucaagugaacuuccauuuaucaagucccuguucccggagaauuugcaggcagacaaaaagggccgucccaccacagccgggagcaaaauuaagaagcaggcuaacgaucucgucucuacucugaugaaaugcaccccucauuauauccgcuguauuaagccaaacgagaccaaaaagcccagagacugggaagagucaagggugaaacaccagguugaauacuuaggacugaaggagaauauccgggugcgacgcgcgggcuaugcauacagaaggauauuccaaaaguuucuacagcgguaugccauucucacaaaagcuacguggccuaguuggcagggugaagagaagcaagggguacugcaccuuuugcagagcgucaacauggauuccgaccaguuccagcugggccgcucuaaaguguuuaucaaggccccagagucguuguuccugcuugaagagaugagagaaaggaaauacgauggauaugcacguguuauucaaaagagcuggcggaaauuuguggcccgaaagaaguacguccagaugagagaggaggcuuccgaccuguugcucaauaaaaaggaaaggcgccggaacucaaucaauagaaacuucauaggcgauuacaucgggauggaggaacaucccgagcugcagcaguuugugggaaaaagggaaaagauugacuucgccgauacuguaacaaaauaugaccgccgauuuaagggugugaagcgggauuuacugcuaaccccgaaaugccucuaccugaucggccgugagaagguuaaacaagggccugacaagggacuugucaaagagguguugaagagaaagauugaaaucgagaggauacugagugugucucucagcacuaugcaggaugacauuuucauccugcacgaacaggaguaugacuccuuacuggaaucagucuuuaaaacagaguuccuuagcuugcucgcaaagcgcuacgaggagaaaacccagaagcaacugccccuaaaauuuucuaauacgcuggaacucaagcugaagaaagaaaacuggggcccaugguccgcgggugggagucggcagguucaguuccaucaaggcuucggagaucuugcuguguugaagccuagcaauaaagugcugcagguaucuaucggccccggguuaccaaagaacuccagacccaccaggcgaaauacaacucagaacaccggauauucaaguggcacacagaaugccaacuacccuguccgcgcagccccaccgcccccugguuaucaccaaaauggggugauucggaaccaguacguuccauacccccacgcuccuggaagccagagaucgaaccagaaaucccucuauacuucuauggccaggccaccccugccgcgucaacagagcaccucaagugaccgcgugucccagacaccugagucucuugauuuucugaaggucccagaccagggcgcagcuggugugcggagacaaaccacuagcaggcccccucccgccggcgggcgaccaaaaccucagcccaagccaaagccgcagguuccucaguguaaagcguuguacgccuaugaugcucaagacacggaugaacucuccuucaaugcaaacgacaucauugauauaaucaaggaggaccccucaggaugguggacaggccggcugcgcgggaaacagggacuauuuccaaauaacuacgugaccaagauuuga

SEQ ID NO: 2825 - RNA, 3327 nt, Artificial Sequence
  derived and/or modified sequence opt4 from MYO1E__Homo_sapiens__CCDS32254.1
augggcagcaagggcguguaccaguaccacuggcagagccacaacgugaagcacagcggcguggacgacauggugcugcugagcaagaucaccgagaacagcaucguggagaaccugaagaagagauacauggacgacuacaucuucaccuacaucggcagcgugcugaucagcgugaaccccuucaagcagaugcccuacuucggcgagaaggagaucgagauguaccagggcgccgcccaguacgagaaccccccccacaucuacgcccuggccgacaacauguacagaaacaugaucaucgacagagagaaccagugcgugaucaucagcggcgagagcggcgccggcaagaccguggccgccaaguacaucaugagcuacaucagcagagugagcggcggcggcaccaaggugcagcacgugaaggacaucauccugcagagcaacccccugcuggaggccuucggcaacgccaagaccgugagaaacaacaacagcagcagauucggcaaguacuucgagauccaguucagccccggcggcgagcccgacggcggcaagaucagcaacuuccugcuggagaagagcagaguggugaugagaaaccccggcgagagaagcuuccacaucuucuaccagcugaucgagggcgccagcgccgagcagaagcacagccugggcaucaccagcauggacuacuacuacuaccugagccugagcggcagcuacaagguggacgacaucgacgacagaagagaguuccaggagacccugcacgccaugaacgugaucggcaucuucgccgaggagcagacccuggugcugcagaucguggccggcauccugcaccugggcaacaucagcuucaaggaggugggcaacuacgccgccguggagagcgaggaguuccuggccuuccccgccuaccugcugggcaucaaccaggacagacugaaggagaagcugaccagcagacagauggacagcaaguggggcggcaagagcgagagcauccacgugacccugaacguggagcaggccugcuacaccagagacgcccuggccaaggcccugcacgccagaguguucgacuuccugguggacagcaucaacaaggccauggagaaggaccacgaggaguacaacaucggcgugcuggacaucuacggcuucgagaucuuccagaagaacggcuucgagcaguucugcaucaacuucgugaacgagaagcugcagcagaucuucaucgagcugacccugaaggccgagcaggaggaguacgugcaggagggcaucagauggacccccaucgaguacuucaacaacaagaucgugugcgaccugaucgagaacaaggugaacccccccggcaucaugagcauccuggacgacgugugcgccaccaugcacgccgugggcgagggcgccgaccagacccugcugcagaagcugcagaugcagaucggcagccacgagcacuucaacagcuggaaccagggcuucaucauccaccacuacgccggcaaggugagcuacgacauggacggcuucugcgagagaaacagagacgugcuguucauggaccugaucgagcugaugcagagcagcgagcugcccuucaucaagagccuguuccccgagaaccugcaggccgacaagaagggcagacccaccaccgccggcagcaagaucaagaagcaggccaacgaccuggugagcacccugaugaagugcaccccccacuacaucagaugcaucaagcccaacgagaccaagaagcccagagacugggaggagagcagagugaagcaccagguggaguaccugggccugaaggagaacaucagagugagaagagccggcuacgccuacagaagaaucuuccagaaguuccugcagagauacgccauccugaccaaggccaccuggcccagcuggcagggcgaggagaagcagggcgugcugcaccugcugcagagcgugaacauggacagcgaccaguuccagcugggcagaagcaagguguucaucaaggcccccgagagccuguuccugcuggaggagaugagagagagaaaguacgacggcuacgccagagugauccagaagagcuggagaaaguucguggccagaaagaaguacgugcagaugagagaggaggccagcgaccugcugcugaacaagaaggagagaagaagaaacagcaucaacagaaacuucaucggcgacuacaucggcauggaggagcaccccgagcugcagcaguucgugggcaagagagagaagaucgacuucgccgacaccgugaccaaguacgacagaagauucaagggcgugaagagagaccugcugcugacccccaagugccuguaccugaucggcagagagaaggugaagcagggccccgacaagggccuggugaaggaggugcugaagagaaagaucgagaucgagagaauccugagcgugagccugagcaccaugcaggacgacaucuucauccugcacgagcaggaguacgacagccugcuggagagcguguucaagaccgaguuccugagccugcuggccaagagauacgaggagaagacccagaagcagcugccccugaaguucagcaacacccuggagcugaagcugaagaaggagaacuggggccccuggagcgccggcggcagcagacaggugcaguuccaccagggcuucggcgaccuggccgugcugaagcccagcaacaaggugcugcaggugagcaucggccccggccugcccaagaacagcagacccaccagaagaaacaccacccagaacaccggcuacagcagcggcacccagaacgccaacuaccccgugagagccgccccccccccccccggcuaccaccagaacggcgugaucagaaaccaguacgugcccuacccccacgcccccggcagccagagaagcaaccagaagagccuguacaccagcauggccagacccccccugcccagacagcagagcaccagcagcgacagagugagccagacccccgagagccuggacuuccugaaggugcccgaccagggcgccgccggcgugagaagacagaccaccagcagacccccccccgccggcggcagacccaagccccagcccaagcccaagccccaggugccccagugcaaggcccuguacgccuacgacgcccaggacaccgacgagcugagcuucaacgccaacgacaucaucgacaucaucaaggaggaccccagcggcugguggaccggcagacugagaggcaagcagggccuguuccccaacaacuacgugaccaagaucuga

SEQ ID NO: 2826 - RNA, 3327 nt, Artificial Sequence
  derived and/or modified sequence opt5 from MYO1E__Homo_sapiens__CCDS32254.1
augggcagcaaggggguguaccaguaucacuggcaaucccauaacgucaaacacucuggaguugacgauauggugcugcucagcaagaucaccgaaaauuccauuguggaaaaccugaaaaagagauacauggacgauuauaucuucacauacauuggcucuguccuuaucagcgugaaucccuuuaaacagaugccuuauuucggggagaaggaaauugagauguaccagggagccgcucaguaugaaaacccgccccauaucuacgcccuggcggacaauauguaccggaacaugaucauugaucgcgagaaucaaugcguuaucauuuccggcgagucuggggcuggaaagacgguggccgccaaauauaucaugagcuacauuuccagagucagcggcggcgggaccaaggugcagcacguuaaagacaucauucuccagucuaacccucugcuugaggcuuuuggaaaugccaagacagugcggaacaauaacuccagccgcuucggcaaauauuuugagauccaguucucucccgggggagaaccugauggcgggaagaucuccaauuuucugcucgaaaagagcagagucgugaugcggaaccccggagagcgcucuuuccauaucuuuuaccaacugauugaaggcgcuuccgccgagcagaaacacagccugggcauuaccuccauggacuauuacuauuaccucucucugagcggguccuacaagguggaugacaucgaugacagacgggaguuccaggagacacuucacgcgaugaaugucauuggaaucuuugccgaggaacagacccugguucuccaaaucguggcuggcauucugcaucuugggaacaucagcuucaaagaggugggaaacuaugccgcugucgaaucugaggaauuucuggccuucccugcguaccuccugggcauuaaucaggaucgccugaaggagaaacucacauccagacagauggacagcaaguggggagggaaaucugaaagcauccacgugacccugaacguugagcaagccuguuauacgcgggacgcucuugccaaggcucugcaugcccgcguguucgauuuucucgucgacuccauuaauaaggccauggagaaagaucacgaagaguacaacaucggcgugcuggacaucuauggcuucgaaauuuuucagaagaauggguucgagcaguuuugcaucaacuucguuaaugaaaaacuucagcaaauuuuuaucgagcugacccucaaggcugagcaggaagaguacgugcaggaaggaauuagauggacaccgaucgaguauuucaacaauaaaauugucugugaucugaucgagaacaaggugaaucccccuggcaucaugucuauucuggacgaugucugcgcgaccaugcacgccgugggggaaggagcugaccagacacuccugcaaaaacuucagaugcagaucggcagccaugagcacuuuaacuccuggaaucagggguucauuauccaucacuacgccggcaaaguuagcuacgauauggacggauuuugugaacggaaccgcgaugugcuguucauggaccucauugagcugaugcaaucuuccgaacuucccuuuaucaagagccuguucccugagaaucuccaggccgacaaaaagggcagacccaccacggcugggucuaaaaucaagaagcaggccaacgaucuggucuccacacugaugaaaugcaccccgcauuauauucgguguaucaagccuaacgagacaaagaagcccagagacugggaagagagccgcgugaaacaccagguugaauaccucggacugaaggagaauauucgggugagacgcgcgggcuaugcuuaccggagaaucuuccaaaaguuucuucagcgcuaugccauucugaccaaagccaccuggccuuccuggcagggggaagagaagcaaggaguccuccaucugcugcagucugugaacauggauagcgaccaguuccagcuuggccgguccaaaguguuuaucaaggcucccgagucucucuuccugcuggaagagaugagagaacgcaaauacgauggguaugcccggguuauccaaaagagcuggagaaaauuugucgcucgcaagaaguacgugcagaugcgggaggaagccuccgaccuccugcuuaauaaaaaggagagacggcgcaacagcauuaauagaaacuucaucggcgauuacauuggaauggaggaacaccccgagcugcagcaguuugugggcaaacgggaaaagaucgacuucgcggauacagucacgaaauaugacagacgcuuuaagggggugaagcgggaucuccugcugaccccuaaaugccuuuaccucauuggaagagagaagguuaaacaaggcccggacaaggggcuggugaaagagguccugaagcgcaagaucgaaaucgagcggauucucucugugucccugagcacaaugcaggaugacaucuucauucuucacgaacaggaguaugacucucugcucgaauccguuuuuaaaaccgaguuccugagccugcuugccaagagauacgaggagaaaacacagaagcaacucccccugaaauuuucuaauacccuggaacucaagcugaagaaagaaaacuggggaccuuggagcgcuggcgggucccgccaggugcaguuccaucaaggcuucggagaucuugccguccugaagcccagcaauaaagugcuccagguuucuaucggcccugggcugcccaagaacuccagaccgacgcggcgcaauacaacccagaacaccggauauagcuccggcacacagaaugcuaacuacccugugagagccgcgcccccucccccuggguaucaccaaaauggagucauucggaaccaguacgugcccuacccgcacgccccuggcucucagcgcagcaaccagaaaucccuguauaccucuauggcuagaccuccccuuccccggcaacagagcacauccucugaccgcgugagccagacgccggagucccucgauuuucugaagguccccgaccagggggccgcuggcguuagacggcaaaccacaagcagaccucccccugccggaggccgccccaaaccucagcccaagccgaagccucaggugccccaguguaaagcccuguacgcuuaugaugcgcaagacaccgaugaacucucuuucaaugccaacgacaucauugauaucaucaaggaggacccuuccgggugguggacaggacggcugagaggcaaacaggggcuuuuucccaauaacuacgugaccaagauuuga

SEQ ID NO: 2827 - protein, 1098 aa, Artificial Sequence
  MYO1F__Homo_sapiens__O00160
MGSKERFHWQSHNVKQSGVDDMVLLPQITEDAIAANLRKRFMDDYIFTYIGSVLISVNPFKQMPYFTDREIDLYQGAAQYENPPHIYALTDNMYRNMLIDCENQCVIISGESGAGKTVAAKYIMGYISKVSGGGEKVQHVKDIILQSNPLLEAFGNAKTVRNNNSSRFGKYFEIQFSRGGEPDGGKISNFLLEKSRVVMQNENERNFHIYYQLLEGASQEQRQNLGLMTPDYYYYLNQSDTYQVDGTDDRSDFGETLSAMQVIGIPPSIQQLVLQLVAGILHLGNISFCEDGNYARVESVDLLAFPAYLLGIDSGRLQEKLTSRKMDSRWGGRSESINVTLNVEQAAYTRDALAKGLYARLFDFLVEAINRAMQKPQEEYSIGVLDIYGFEIFQKNGFEQFCINFVNEKLQQIFIELTLKAEQEEYVQEGIRWTPIQYFNNKVVCDLIENKLSPPGIMSVLDDVCATMHATGGGADQTLLQKLQAAVGTHEHFNSWSAGFVIHHYAGKVSYDVSGFCERNRDVLFSDLIELMQTSEQAFLRMLFPEKLDGDKKGRPSTAGSKIKKQANDLVATLMRCTPHYIRCIKPNETKRPRDWEENRVKHQVEYLGLKENIRVRRAGFAYRRQFAKFLQRYAILTPETWPRWRGDERQGVQHLLRAVNMEPDQYQMGSTKVFVKNPESLFLLEEVRERKFDGFARTIQKAWRRHVAVRKYEEMREEASNILLNKKERRRNSINRNFVGDYLGLEERPELRQFLGKRERVDFADSVTKYDRRFKPIKRDLILTPKCVYVIGREKVKKGPEKGQVCEVLKKKVDIQALRGVSLSTRQDDFFILQEDAADSFLESVFKTEFVSLLCKRFEEATRRPLPLTFSDTLQFRVKKEGWGGGGTRSVTFSRGFGDLAVLKVGGRTLTVSVGDGLPKSSKPTRKGMAKGKPRRSSQAPTRAAPAPPRGMDRNGVPPSARGGPLPLEIMSGGGTHRPPRGPPSTSLGASRRPRARPPSEHNTEFLNVPDQGMAGMQRKRSVGQRPVPGVGRPKPQPRTHGPRCRALYQYVGQDVDELSFNVNEVIEILMEDPSGWWKGRLHGQEGLFPGNYVEKI

SEQ ID NO: 2828 - RNA, 3297 nt, Artificial Sequence
  MYO1F__Homo_sapiens__AAH28071
augggcagcaaggagcgcuuccacuggcagagccacaacgugaagcagagcggcguggaugacauggugcuucuuccccagaucaccgaagacgccauugccgccaaccuccggaagcgcuucauggacgacuacaucuucaccuacaucggcucugugcucaucucuguaaaccccuucaagcagaugcccuacuucaccgaccgugagaucgaccucuaucagggcgcggcccaguaugagaaucccccgcacaucuacgcccucacggacaacauguaccggaacaugcuuaucgacugugagaaccagugugucaucauuaguggagagaguggagcugggaagacaguggcagccaaauauaucaugggcuacaucuccaaggugucuggcggaggcgagaagguccagcacgucaaagauaucauccugcaguccaacccgcugcucgaggccuucggcaacgccaagacugugcgcaacaacaauuccagccgcuuuggcaaguacuuugagauccaguucagccgagguggggagccagaugggggcaagaucuccaacuucuugcuggagaagucccgcguggucaugcaaaaugaaaaugagaggaacuuccacaucuacuaccagcugcuggaaggggccucccaggagcaaaggcagaaccugggccucaugacaccggacuacuauuacuaccucaaccaaucggacaccuaccagguggacggcacggacgacagaagcgacuuuggugagacucugagugcuaugcagguuauugggaucccgcccagcauccagcagcugguccugcagcucguggcggggaucuugcaccuggggaacaucaguuucugugaagacgggaauuacgcccgaguggagaguguggaccuccuggccuuucccgccuaccugcugggcauugacagcgggcgacugcaggagaagcugaccagccgcaagauggacagccgcuggggcgggcgcagcgaguccaucaaugugacccucaacguggagcaggcagccuacacccgugaugcccuggccaaggggcucuaugcccgccucuucgacuuccucguggaggccaucaaccgugcuaugcagaaaccccaggaagaguacagcaucggugugcuggacauuuacggcuucgagaucuuccagaaaaauggcuucgagcaguuuugcaucaacuucgucaaugagaagcugcagcaaaucuuuaucgaacuuacccugaaggccgagcaggaggaguaugugcaggaaggcauccgcuggacuccaauccaguacuucaacaacaaggucgucugugaccucaucgaaaacaagcugagccccccaggcaucaugagcgucuuggacgacgugugcgccaccaugcacgccacgggcgggggagcagaccagacacugcugcagaagcugcaggcggcuguggggacccacgagcauuucaacagcuggagcgccggcuucgucauccaccacuacgcuggcaaggucuccuacgacgucagcggcuucugcgagaggaaccgagacguucucuucuccgaccucauagagcugaugcagaccagugagcaggccuuccuccggaugcucuuccccgagaagcuggauggagacaagaaggggcgccccagcaccgccggcuccaagaucaagaaacaagccaacgaccugguggccacacugaugaggugcacaccccacuacauccgcugcaucaaacccaacgagaccaagaggccccgagacugggaggagaacagagucaagcaccagguggaauaccugggccugaaggagaacaucagggugcgcagagccggcuucgccuaccgccgccaguucgccaaauuccugcagagguaugccauucugacccccgagacguggccgcgguggcguggggacgaacgccagggcguccagcaccugcuucgggcggucaacauggagcccgaccaguaccagauggggagcaccaaggucuuugucaagaacccagagucgcuuuuccuccuggaggaggugcgagagcgaaaguucgauggcuuugcccgaaccauccagaaggccuggcggcgccacguggcuguccggaaguacgaggagaugcgggaggaagcuuccaacauccugcugaacaagaaggagcggaggcgcaacagcaucaaucggaacuucgucggggacuaccuggggcuggaggagcggcccgagcugcgucaguuccugggcaagagggagcggguggacuucgccgauucggucaccaaguacgaccgccgcuucaagcccaucaagcgggacuugauccugacgcccaaguguguguaugugauugggcgagagaaagugaagaagggaccugagaagggccaggugugugaagucuugaagaagaaaguggacauccaggcucugcggggagucucccucagcacgcgacaggacgacuucuucauccuccaagaggaugccgccgacagcuuccuggagagcgucuucaagaccgaguuugucagccuucugugcaagcgcuucgaggaggcgacgcggaggccccugccccucaccuucagcgacacacuacaguuucgggugaagaaggagggcuggggcgguggcggcacccgcagcgucaccuucucccgcggcuucggcgacuuggcagugcucaagguuggcggucggacccucacggucagcgugggcgaugggcugcccaagagcuccaagccuacgcggaagggaauggccaagggaaaaccucggaggucgucccaagccccuacccgggcggccccugcgccccccagaggcauggaucgcaauggggugccccccucugccagagggggcccccugccccuggagaucaugucuggagggggcacccacaggccuccccggggcccuccguccacaucccugggagccagcagacgaccccgggcacguccgcccucagagcacaacacagaauuccucaacgugccugaccagggcauggccggcaugcagaggaagcgcagcguggggcaacggccagugccuggugugggccgacccaagccccagccucggacacauggucccaggugccgggcccuauaccaguacgugggccaagauguggacgagcugagcuucaacgugaacgaggucauugagauccucauggaagaucccucgggcugguggaagggccggcuucacggccaggagggccuuuucccaggaaacuacguggagaagaucuga

SEQ ID NO: 2829 - RNA, 3297 nt, Artificial Sequence
  derived and/or modified sequence opt1 from MYO1F__Homo_sapiens__AAH28071
augggcagcaaggagcgcuuccacuggcagucccacaacgugaagcagagcggggucgacgacauggugcugcucccccagaucaccgaggacgccaucgccgcgaaccugcggaagcgcuucauggacgacuacaucuucaccuacaucggcuccgugcugaucagcgucaacccguucaagcagaugcccuacuucacggaccgggagaucgaccucuaccagggggccgcccaguacgagaacccgccccacaucuacgcccugaccgacaacauguaccgcaacaugcugaucgacugcgagaaccagugcgugaucaucuccggcgagagcggggccggcaagaccguggcggccaaguacaucaugggcuacaucuccaaggucagcgggggcggggagaaggugcagcacgugaaggacaucauccuccaguccaacccccugcuggaggccuucggcaacgccaagaccguccggaacaacaacagcucccgcuucgggaaguacuucgagauccaguucagccggggcggcgagcccgacgggggcaagaucuccaacuuccuccuggagaagucccgcguggugaugcagaacgagaacgagcggaacuuccacaucuacuaccagcugcucgagggggcgucccaggagcagcgccagaaccugggccugaugacgcccgacuacuacuacuaccucaaccagagcgacaccuaccaggucgacggcaccgacgaccgguccgacuucggggagacccugagcgccaugcaggucaucggcaucccgcccuccauccagcagcuggugcuccagcuggucgccgggauccugcaccucggcaacaucagcuucugcgaggacgggaacuacgcccgcguggagagcguggaccugcuggccuuccccgcguaccuccugggcaucgacuccggccggcugcaggagaagcucacgagccgcaagauggacucccgguggggcgggcgcagcgaguccaucaacgucacccugaacguggagcaggccgccuacacccgggacgcccuggccaaggggcucuacgcgcgccuguucgacuuccugguggaggccaucaaccgggccaugcagaagccccaggaggaguacagcaucggcgugcucgacaucuacggguucgagaucuuccagaagaacggcuucgagcaguucugcaucaacuucgugaacgagaagcugcagcagaucuucaucgagcugacccucaaggccgagcaggaggaguacgugcaggagggcauccgcuggacgcccauccaguacuucaacaacaaggucgugugcgaccugaucgagaacaagcugagcccgcccgggaucaugagcguccucgacgacgugugcgccaccaugcacgcgaccggcgggggcgccgaccagacccugcugcagaagcuccaggccgccguggggacgcacgagcacuucaacuccuggagcgccggcuucgucauccaccacuacgcgggcaagguguccuacgacgugagcggguucugcgagcggaaccgcgacguccuguucuccgaccugaucgagcucaugcagaccagcgagcaggccuuccugcgcaugcuguuccccgagaagcucgacggcgacaagaaggggcggcccuccaccgccggcagcaagaucaagaagcaggccaacgaccugguggcgacccugaugcgcugcacgccgcacuacauccggugcaucaagcccaacgagaccaagcgcccccgggacugggaggagaaccgcgugaagcaccaggucgaguaccugggccucaaggagaacauccgggugcgccgggccggguucgccuaccgccggcaguucgccaaguuccugcagcgcuacgccauccugacccccgagaccuggccgcgguggcgcggcgacgagcggcagggggugcagcaccuccugcgcgcggucaacauggagcccgaccaguaccagaugggcuccacgaagguguucgugaagaaccccgagagccuguuccuccuggaggagguccgggagcgcaaguucgacggguucgcccggaccauccagaaggccuggcgccgccacguggccgugcggaaguacgaggagaugcgcgaggaggccuccaacauccugcucaacaagaaggagcggcgccggaacagcaucaaccgcaacuucgucggcgacuaccugggccuggaggagcggcccgagcuccgccaguuccuggggaagcgggagcgcguggacuucgcggacagcgugaccaaguacgaccggcgcuucaagccgaucaagcgggaccugauccucacccccaagugcgucuacgugaucggccgcgagaaggugaagaaggggcccgagaagggccaggucugcgaggugcugaagaagaagguggacauccaggcccugcgcggggucucccucagcacgcggcaggacgacuucuucauccugcaggaggacgccgccgacuccuuccuggagagcguguucaagaccgaguucgugucccuccugugcaagcgguucgaggaggccacccgccggccccugccgcucaccuucagcgacacgcugcaguuccgcgucaagaaggagggcuggggcgggggcgggacccgguccgugaccuucagccgcggcuucggggaccuggcggugcucaaggucggcggccgcacccugacgguguccgugggggacggccugcccaagagcuccaagcccacccggaaggggauggccaagggcaagccgcgccggagcucccaggcccccacccgcgccgcgcccgcgcccccgcgggggauggaccgcaacggcgucccgcccagcgcccggggcgggccccucccccuggagaucauguccggcgggggcacccaccgcccgccccggggcccgcccagcaccucccugggggccagccgccggccccgcgcccggccgcccagcgagcacaacacggaguuccucaacgugcccgaccagggcauggccgggaugcagcgcaagcgguccgugggccagcgccccguccccggggugggccggcccaagccccagccccgcacccacggcccccggugccgcgcccuguaccaguacguggggcaggacgucgacgagcugagcuucaacgugaacgaggugaucgagauccucauggaggaccccuccggcugguggaaggggcgccugcacggccaggaggggcuguucccgggcaacuacgucgagaagaucuga

SEQ ID NO: 2830 - RNA, 3297 nt, Artificial Sequence
  derived and/or modified sequence opt2 from MYO1F__Homo_sapiens__AAH28071
augggcuccaaggagcgcuuccacuggcagucccacaacgucaagcaguccggcgucgacgacaugguccuccucccccagaucaccgaggacgccaucgccgccaaccuccgcaagcgcuucauggacgacuacaucuucaccuacaucggcuccguccucaucuccgucaaccccuucaagcagaugcccuacuucaccgaccgcgagaucgaccucuaccagggcgccgcccaguacgagaaccccccccacaucuacgcccucaccgacaacauguaccgcaacaugcucaucgacugcgagaaccagugcgucaucaucuccggcgaguccggcgccggcaagaccgucgccgccaaguacaucaugggcuacaucuccaaggucuccggcggcggcgagaagguccagcacgucaaggacaucauccuccaguccaacccccuccucgaggccuucggcaacgccaagaccguccgcaacaacaacuccucccgcuucggcaaguacuucgagauccaguucucccgcggcggcgagcccgacggcggcaagaucuccaacuuccuccucgagaagucccgcgucgucaugcagaacgagaacgagcgcaacuuccacaucuacuaccagcuccucgagggcgccucccaggagcagcgccagaaccucggccucaugacccccgacuacuacuacuaccucaaccaguccgacaccuaccaggucgacggcaccgacgaccgcuccgacuucggcgagacccucuccgccaugcaggucaucggcaucccccccuccauccagcagcucguccuccagcucgucgccggcauccuccaccucggcaacaucuccuucugcgaggacggcaacuacgcccgcgucgaguccgucgaccuccucgccuuccccgccuaccuccucggcaucgacuccggccgccuccaggagaagcucaccucccgcaagauggacucccgcuggggcggccgcuccgaguccaucaacgucacccucaacgucgagcaggccgccuacacccgcgacgcccucgccaagggccucuacgcccgccucuucgacuuccucgucgaggccaucaaccgcgccaugcagaagccccaggaggaguacuccaucggcguccucgacaucuacggcuucgagaucuuccagaagaacggcuucgagcaguucugcaucaacuucgucaacgagaagcuccagcagaucuucaucgagcucacccucaaggccgagcaggaggaguacguccaggagggcauccgcuggacccccauccaguacuucaacaacaaggucgucugcgaccucaucgagaacaagcucuccccccccggcaucauguccguccucgacgacgucugcgccaccaugcacgccaccggcggcggcgccgaccagacccuccuccagaagcuccaggccgccgucggcacccacgagcacuucaacuccugguccgccggcuucgucauccaccacuacgccggcaaggucuccuacgacgucuccggcuucugcgagcgcaaccgcgacguccucuucuccgaccucaucgagcucaugcagaccuccgagcaggccuuccuccgcaugcucuuccccgagaagcucgacggcgacaagaagggccgccccuccaccgccggcuccaagaucaagaagcaggccaacgaccucgucgccacccucaugcgcugcaccccccacuacauccgcugcaucaagcccaacgagaccaagcgcccccgcgacugggaggagaaccgcgucaagcaccaggucgaguaccucggccucaaggagaacauccgcguccgccgcgccggcuucgccuaccgccgccaguucgccaaguuccuccagcgcuacgccauccucacccccgagaccuggccccgcuggcgcggcgacgagcgccagggcguccagcaccuccuccgcgccgucaacauggagcccgaccaguaccagaugggcuccaccaaggucuucgucaagaaccccgagucccucuuccuccucgaggagguccgcgagcgcaaguucgacggcuucgcccgcaccauccagaaggccuggcgccgccacgucgccguccgcaaguacgaggagaugcgcgaggaggccuccaacauccuccucaacaagaaggagcgccgccgcaacuccaucaaccgcaacuucgucggcgacuaccucggccucgaggagcgccccgagcuccgccaguuccucggcaagcgcgagcgcgucgacuucgccgacuccgucaccaaguacgaccgccgcuucaagcccaucaagcgcgaccucauccucacccccaagugcgucuacgucaucggccgcgagaaggucaagaagggccccgagaagggccaggucugcgagguccucaagaagaaggucgacauccaggcccuccgcggcgucucccucuccacccgccaggacgacuucuucauccuccaggaggacgccgccgacuccuuccucgaguccgucuucaagaccgaguucgucucccuccucugcaagcgcuucgaggaggccacccgccgcccccucccccucaccuucuccgacacccuccaguuccgcgucaagaaggagggcuggggcggcggcggcacccgcuccgucaccuucucccgcggcuucggcgaccucgccguccucaaggucggcggccgcacccucaccgucuccgucggcgacggccuccccaaguccuccaagcccacccgcaagggcauggccaagggcaagccccgccgcuccucccaggcccccacccgcgccgcccccgcccccccccgcggcauggaccgcaacggcgucccccccuccgcccgcggcggcccccucccccucgagaucauguccggcggcggcacccaccgccccccccgcggcccccccuccaccucccucggcgccucccgccgcccccgcgcccgcccccccuccgagcacaacaccgaguuccucaacguccccgaccagggcauggccggcaugcagcgcaagcgcuccgucggccagcgccccguccccggcgucggccgccccaagccccagccccgcacccacggcccccgcugccgcgcccucuaccaguacgucggccaggacgucgacgagcucuccuucaacgucaacgaggucaucgagauccucauggaggaccccuccggcugguggaagggccgccuccacggccaggagggccucuuccccggcaacuacgucgagaagaucuga

SEQ ID NO: 2831 - RNA, 3297 nt, Artificial Sequence
  derived and/or modified sequence opt3 from MYO1F__Homo_sapiens__AAH28071
augggcagcaaggagagauuccacuggcagucccauaacgugaaacaaucuggggucgacgauaugguucugcucccccagaucaccgaagacgccauugcugcaaaucuuaggaagcgguuuauggaugacuacauauucacauauaucggaucagugcugauuaguguaaacccuuuuaaacagaugccauacuucacugaucgcgagaucgacuuguaucagggugccgcgcaauacgaaaauccgccccacauuuaugcuuuaacggauaacauguaccgaaauaugcugaucgacugcgagaaccagugugugauaaucagcggcgaauccggggccggaaagaccgucgcagccaaauauauuaugggcuacaucucuaaggugucgggugggggagagaagguucagcaugugaaagauauuauccuacagucaaauccucuccuggaggcuuuuggcaacgcaaagacaguccguaauaacaauagcaguagauucggcaaauacuuugaaauacaauucuccaggggaggagagccagacgguggcaagauuucuaacuuucuucuggagaaaagccgggugguaaugcagaaugaaaacgagcgcaauuuccacaucuauuaccaguugcucgaaggggccucccaggagcaaagacagaaccugggacugaugacucccgauuauuacuauuaccucaaccagucagacaccuaucaaguugauggcacagacgacaggagugauuuuggugaaaccuuaagcgcuaugcaagugauugggaucccuccaucuauccagcagcugguccuucaguugguggccgggauucugcaucuaggcaauauauccuucugcgaggacggcaacuacgcgcggguggaaucagucgaucuccuggcauuucccgccuaccuucuggggaucgacagcggacgcuugcaggagaagcucacuucacgaaagauggauucuagaugggguggcagguccgagagcauuaauguuacacugaacguggaacaggcugccuauacccgggacgcauuagcuaaagggcuguacgcccgucucuucgauuuccuuguagaggcgaucaaucgcgccaugcagaagccucaagaagaguauucgauaggagugcuggacauuuacggcuuugaaaucuuccagaaaaacgguuuugagcaguucuguaucaauuuugucaacgagaaguugcagcaaauuuucaucgaacuaacgcugaaagcagagcaggaagaguaugugcaggaagggauuagauggacuccaauacaguacuuuaauaacaagguugugugcgaucucaucgagaauaaacugucuccgcccggcauuauguccguccuugacgaugugugugcuaccaugcacgccacaggaggcggggcugaccaaacucuguugcagaagcuccaggccgcaguaggaacccacgagcauuucaacucauggagugccgguuuuguuauccaccauuaugcuggcaaggugagcuacgacgucuccggguucugcgaaaggaaucgggaugugcuguuuucugacuuaaucgagcugaugcaaacaagcgaacaggcguuccuacgaaugcucuuuccugagaaacuggauggagacaagaaaggccgcccaucaaccgcagguaguaagauuaaaaagcaggccaacgaucuugucgcuacguugaugagauguacuccccacuacauaaggugcaucaagccuaaugagacaaaacggccacgcgacugggaagagaacagagugaagcaccagguugaauaucuggggcucaaagagaacauuagggugcgucgggccggcuucgcauaccgaagacaauucgccaaguuucugcagagguaugcuauccuuacccccgaaacuuggccgcgcuggcggggagaugagagacagggcguacagcaucuguugagggccgucaauauggagccugaccaauaccagaugggguccacaaaaguguucguuaagaaccccgaaagccucuuucuguuagaggaagugcgcgagcgaaaguucgauggauuugcacggaccauucagaaagcguggcguagacacgucgcugugaggaaguaugaagagaugcgcgaggaagccucuaauauccugcuaaacaaaaaggagcggagaaggaauaguauaaaccgaaauuucguaggugacuaccucggccuggaggaacgcccagaacuucggcaguuuuuggggaaaagagagaggguggauuucgcagacaguguuacgaaguaugaucgucgcuuuaagccuaucaaacgggaccugauucucacccccaagugugucuacgugaucggaagagagaaagugaagaaaggcccagaaaagggucaagucugcgagguucugaaaaagaagguggacauucaggccuuacgaggggugagccuguccacaaggcaggaugacuucuuuauccuucaagaagaugcugccgacucuuucuuggagucgguauuuaaaacugaguucgucagccuccuguguaagcgguucgaagaggcaacccgcagaccccuaccucugacauuuuccgauacucuccaguucagggugaaaaaggaaggcuggggaggcgggggaacccggucaguuacauuuagucgaggcuucggugaccuggcugugcuuaaagucgggggaagaaccuugacugugucuguuggcgauggucugccaaagagcuccaagccgacgcgcaaaggcauggccaaggggaaacccaggcguucaagccaggcgccuacacgggccgcuccagcacccccuagaggaauggacaggaacggcgugccacccucugcccgcgggggaccguuaccucucgagauaauguccggcggugggacccaucgaccacccagaggaccucccaguacuagccugggcgcuucucggaggccacgcgcccguccucccuccgaacacaauaccgaguuucuuaacguaccagaucaggguauggcaggcaugcaaagaaagcggucagucgggcagaggccggugccuggagugggccgccccaaaccacagccccgaacacaugggccuagaugccgggcgcuguaccaguaugucggacaagacguugaugaguugaguuucaaugugaacgaaguaauugagauccucauggaagacccaagcggcugguggaaggguaggcugcacgggcaggagggacuauuucccggcaauuacguggaaaagauuuga

SEQ ID NO: 2832 - RNA, 3297 nt, Artificial Sequence
  derived and/or modified sequence opt4 from MYO1F__Homo_sapiens__AAH28071
augggcagcaaggagagauuccacuggcagagccacaacgugaagcagagcggcguggacgacauggugcugcugccccagaucaccgaggacgccaucgccgccaaccugagaaagagauucauggacgacuacaucuucaccuacaucggcagcgugcugaucagcgugaaccccuucaagcagaugcccuacuucaccgacagagagaucgaccuguaccagggcgccgcccaguacgagaaccccccccacaucuacgcccugaccgacaacauguacagaaacaugcugaucgacugcgagaaccagugcgugaucaucagcggcgagagcggcgccggcaagaccguggccgccaaguacaucaugggcuacaucagcaaggugagcggcggcggcgagaaggugcagcacgugaaggacaucauccugcagagcaacccccugcuggaggccuucggcaacgccaagaccgugagaaacaacaacagcagcagauucggcaaguacuucgagauccaguucagcagaggcggcgagcccgacggcggcaagaucagcaacuuccugcuggagaagagcagaguggugaugcagaacgagaacgagagaaacuuccacaucuacuaccagcugcuggagggcgccagccaggagcagagacagaaccugggccugaugacccccgacuacuacuacuaccugaaccagagcgacaccuaccagguggacggcaccgacgacagaagcgacuucggcgagacccugagcgccaugcaggugaucggcaucccccccagcauccagcagcuggugcugcagcugguggccggcauccugcaccugggcaacaucagcuucugcgaggacggcaacuacgccagaguggagagcguggaccugcuggccuuccccgccuaccugcugggcaucgacagcggcagacugcaggagaagcugaccagcagaaagauggacagcagauggggcggcagaagcgagagcaucaacgugacccugaacguggagcaggccgccuacaccagagacgcccuggccaagggccuguacgccagacuguucgacuuccugguggaggccaucaacagagccaugcagaagccccaggaggaguacagcaucggcgugcuggacaucuacggcuucgagaucuuccagaagaacggcuucgagcaguucugcaucaacuucgugaacgagaagcugcagcagaucuucaucgagcugacccugaaggccgagcaggaggaguacgugcaggagggcaucagauggacccccauccaguacuucaacaacaagguggugugcgaccugaucgagaacaagcugagcccccccggcaucaugagcgugcuggacgacgugugcgccaccaugcacgccaccggcggcggcgccgaccagacccugcugcagaagcugcaggccgccgugggcacccacgagcacuucaacagcuggagcgccggcuucgugauccaccacuacgccggcaaggugagcuacgacgugagcggcuucugcgagagaaacagagacgugcuguucagcgaccugaucgagcugaugcagaccagcgagcaggccuuccugagaaugcuguuccccgagaagcuggacggcgacaagaagggcagacccagcaccgccggcagcaagaucaagaagcaggccaacgaccugguggccacccugaugagaugcaccccccacuacaucagaugcaucaagcccaacgagaccaagagacccagagacugggaggagaacagagugaagcaccagguggaguaccugggccugaaggagaacaucagagugagaagagccggcuucgccuacagaagacaguucgccaaguuccugcagagauacgccauccugacccccgagaccuggcccagauggagaggcgacgagagacagggcgugcagcaccugcugagagccgugaacauggagcccgaccaguaccagaugggcagcaccaagguguucgugaagaaccccgagagccuguuccugcuggaggaggugagagagagaaaguucgacggcuucgccagaaccauccagaaggccuggagaagacacguggccgugagaaaguacgaggagaugagagaggaggccagcaacauccugcugaacaagaaggagagaagaagaaacagcaucaacagaaacuucgugggcgacuaccugggccuggaggagagacccgagcugagacaguuccugggcaagagagagagaguggacuucgccgacagcgugaccaaguacgacagaagauucaagcccaucaagagagaccugauccugacccccaagugcguguacgugaucggcagagagaaggugaagaagggccccgagaagggccaggugugcgaggugcugaagaagaagguggacauccaggcccugagaggcgugagccugagcaccagacaggacgacuucuucauccugcaggaggacgccgccgacagcuuccuggagagcguguucaagaccgaguucgugagccugcugugcaagagauucgaggaggccaccagaagaccccugccccugaccuucagcgacacccugcaguucagagugaagaaggagggcuggggcggcggcggcaccagaagcgugaccuucagcagaggcuucggcgaccuggccgugcugaaggugggcggcagaacccugaccgugagcgugggcgacggccugcccaagagcagcaagcccaccagaaagggcauggccaagggcaagcccagaagaagcagccaggcccccaccagagccgcccccgccccccccagaggcauggacagaaacggcgugccccccagcgccagaggcggcccccugccccuggagaucaugagcggcggcggcacccacagaccccccagaggcccccccagcaccagccugggcgccagcagaagacccagagccagaccccccagcgagcacaacaccgaguuccugaacgugcccgaccagggcauggccggcaugcagagaaagagaagcgugggccagagacccgugcccggcgugggcagacccaagccccagcccagaacccacggccccagaugcagagcccuguaccaguacgugggccaggacguggacgagcugagcuucaacgugaacgaggugaucgagauccugauggaggaccccagcggcugguggaagggcagacugcacggccaggagggccuguuccccggcaacuacguggagaagaucuga

SEQ ID NO: 2833 - RNA, 3297 nt, Artificial Sequence
  derived and/or modified sequence opt5 from MYO1F__Homo_sapiens__AAH28071
augggcagcaaggagagauuccacuggcagucccauaacgugaaacaaucuggggucgacgauaugguucugcucccccagaucaccgaagacgccauugcugccaaucugcggaagcgcuuuauggaugacuacaucuucacauauauuggaagcgugcuuaucuccgugaacccuuuuaaacagaugccguacuucacggauagagagauugaccuguaucagggcgcggcucaauacgaaaaucccccucacaucuaugcccucaccgauaacauguaccggaauaugcugaucgacugcgagaaccagugugucauuaucucuggggaaagcggagccggcaagacaguggcugccaaauauauuaugggguacaucuccaagguuucuggaggcggcgagaaggugcagcaugucaaagauauuauccuucagagcaauccccugcucgaggcuuuugggaacgccaagaccgugcgcaauaacaauuccagcagauucggaaaauacuuugaaauucaauucucucggggcggggagccugacggaggcaagaucuccaacuuucugcuggaaaaaucccgcguugugaugcagaaugagaacgagagaaauuuccacaucuauuaccagcuccuggaaggggcgucucaggagcaacggcagaaccuuggacugaugacacccgauuauuacuauuaccucaaccaguccgacaccuaucaagucgauggcacagacgaccgcagcgauuuuggcgaaacccugucugccaugcaagugauugggaucccuccguccauucagcagcuugugcugcagcucgucgcuggaauccugcaucugggcaauauuagcuucugcgaggacgggaacuacgccagaguugaauccguggaucuccuggcuuuucccgccuaccuucugggaaucgacucuggccggcuccaggagaagcugacgagccgcaagauggauuccagauggggagggcggagcgagucuaucaaugugacccuuaacgucgaacaggcggccuauacacgcgacgcucuggccaaaggccucuacgcuagacuguucgauuuccugguggaggccauuaaucgggccaugcagaagccucaagaagaguauuccaucggcguucucgacauuuacggguuugaaaucuuccagaaaaacggauuugagcaguucuguauuaauuuugugaacgagaagcugcagcaaaucuucaucgaacuuacccugaaagcugagcaggaagaguauguccaggaaggcauuagauggacacccauccaguacuuuaauaacaaggugguuugcgaucucauugagaauaaacugagcccucccgggaucaugucugugcuugacgaugucugugcgaccaugcacgccacgggaggcggggcugaccaaacacugcuccagaagcugcaggccgccgugggcacccacgagcauuucaacagcugguccgcuggauuugucauucaccauuaugccggcaaggugucuuacgacguuagcggguucugcgaacgcaaucgggaugugcuguuuuccgaccucaucgagcugaugcaaacaagcgaacaggcguuccuuagaaugcuguuuccggagaaacucgauggagacaagaaaggccgcccuucuaccgcuggguccaagauuaaaaagcaggccaacgaucuggucgccacccugaugcgguguacaccccacuacaucagaugcaucaagccuaaugagacgaaacgcccccgggacugggaagagaacagagugaagcaccagguugaauaucuuggacucaaagagaacauucgcgugcggagagcuggcuucgccuaccgccggcaauucgcuaaguuucugcagagauaugccauccugacccccgaaacauggccucgguggcgcggggaugagagacagggcguccagcaucuccugcgggcggugaauauggagccggaccaauaccagaugggaagcaccaaaguguucguuaagaaccccgaaucucuuuuucugcucgaggaagucagagagcgcaaguucgauggcuuugcccggacaauucagaaggcuuggagacgccacguggccgugagaaaauaugaagagaugcgggaggaagcuagcaauauccugcugaacaaaaaggagcgcagacggaauagcauuaaccgcaauuucgucggggacuaccuuggacucgaagagagaccugaacugcggcaguuucugggcaaacgcgagagaguggauuucgccgacuccguuaccaaguaugaucggcgcuuuaagcccaucaaaagagaccucauccugacgccuaaguguguguacgucauugggcgggagaaagugaagaaaggacccgaaaagggccaaguuugcgaggugcuuaaaaagaaggucgacauccaggcgcugagaggggugucucucagcacacgccaggaugacuucuuuauucugcaagaagaugccgcugacuccuuccuggagucuguuuuuaaaaccgaguucgugagccuucucuguaagcgguucgaagaggccaccagacgcccgcugccucugacauuuuccgauacccuccaguuccgggucaaaaaggaaggcuggggaggcgggggaacaagaagcgugacguuuucucgcggcuucggggaccuggcugugcuuaaagucggaggccggacccugacaguuuccgugggggauggccuccccaagagcucuaagccuaccagaaaaggaauggccaagggcaaaccccgccgguccagccaggccccuacaagagcugcgcccgccccgccucgggggauggaccgcaacggagugccucccucugcuagaggcgggccccugccgcuggagaucaugagcggaggcggcacccaucggcccccucgcgggcccccuuccacgagccuuggagccucuagacggcccagagcccgcccucccuccgaacacaauaccgaguuucucaacgucccggaucagggcauggcugggaugcaacggaagagaagcgugggacagcgcccuguucccggcguggggcggccuaaaccccagccgagaacacauggaccucgcugccgggcccuguaccaguaugucggccaagacguggaugagcuguccuucaauguuaacgaagugauugagauccucauggaagaccccucuggcugguggaaggggagacugcacggacaggagggccuuuuuccugggaauuacgucgaaaagaucuga

SEQ ID NO: 2834 - protein, 1018 aa, Artificial Sequence
  MYO1G__Homo_sapiens__B0I1T2
MEDEEGPEYGKPDFVLLDQVTMEDFMRNLQLRFEKGRIYTYIGEVLVSVNPYQELPLYGPEAIARYQGRELYERPPHLYAVANAAYKAMKHRSRDTCIVISGESGAGKTEASKHIMQYIAAVTNPSQRAEVERVKDVLLKSTCVLEAFGNARTNRNHNSSRFGKYMDINFDFKGDPIGGHIHSYLLEKSRVLKQHVGERNFHAFYQLLRGSEDKQLHELHLERNPAVYNFTHQGAGLNMTVHSALDSDEQSHQAVTEAMRVIGFSPEEVESVHRILAAILHLGNIEFVETEEGGLQKEGLAVAEEALVDHVAELTATPRDLVLRSLLARTVASGGRELIEKGHTAAEASYARDACAKAVYQRLFEWVVNRINSVMEPRGRDPRRDGKDTVIGVLDIYGFEVFPVNSFEQFCINYCNEKLQQLFIQLILKQEQEEYEREGITWQSVEYFNNATIVDLVERPHRGILAVLDEACSSAGTITDRIFLQTLDMHHRHHLHYTSRQLCPTDKTMEFGRDFRIKHYAGDVTYSVEGFIDKNRDFLFQDFKRLLYNSTDPTLRAMWPDGQQDITEVTKRPLTAGTLFKNSMVALVENLASKEPFYVRCIKPNEDKVAGKLDENHCRHQVAYLGLLENVRVRRAGFASRQPYSRFLLRYKMTCEYTWPNHLLGSDKAAVSALLEQHGLQGDVAFGHSKLFIRSPRTLVTLEQSRARLIPIIVLLLQKAWRGTLARWRCRRLRAIYTIMRWFRRHKVRAHLAELQRRFQAARQPPLYGRDLVWPLPPAVLQPFQDTCHALFCRWRARQLVKNIPPSDMPQIKAKVAAMGALQGLRQDWGCRRAWARDYLSSATDNPTASSLFAQRLKTLQDKDGFGAVLFSSHVRKVNRFHKIRNRALLLTDQHLYKLDPDRQYRVMRAVPLEAVTGLSVTSGGDQLVVLHARGQDDLVVCLHRSRPPLDNRVGELVGVLAAHCQGEGRTLEVRVSDCIPLSHRGVRRLISVEPRPEQPEPDFRCARGSFTLLWPSR

SEQ ID NO: 2835 - RNA, 3057 nt, Artificial Sequence
  MYO1G__Homo_sapiens__CCDS34629.1
auggaggacgaggaaggcccugaguauggcaaaccugacuuugugcuuuuggaccaagugaccauggaggacuucaugaggaaccugcagcucagguucgagaagggccgcaucuacaccuacaucggugaggugcugguguccgugaaccccuaccaggagcugccccuguaugggccugaggccaucgccagguaccagggccgugagcucuaugagcggccaccccaucucuaugcuguggccaacgccgccuacaaggcaaugaagcaccgguccagggacaccugcaucgucaucucaggggagaguggggcagggaagacagaagccaguaagcacaucaugcaguacaucgcugcugucaccaauccaagccagagggcugagguggagagggucaaggacgugcugcucaaguccaccugugugcuggaggccuuuggcaaugcccgcaccaaccgcaaucacaacuccagccgcuuuggcaaguacauggacaucaacuuugacuucaagggggacccgaucggaggacacauccacagcuaccuacuggagaagucucggguccucaagcagcacgugggugaaagaaacuuccacgccuucuaccaauugcugagaggcagugaggacaagcagcugcaugaacugcacuuggagagaaacccugcuguauacaauuucacacaccagggagcaggacucaacaugacugugcacagugccuuggacagugaugagcagagccaccaggcagugaccgaggccaugagggucaucggcuucaguccugaagagguggagucugugcaucgcauccuggcugccauauugcaccugggaaacaucgaguuuguggagacggaggagggugggcugcagaaggagggccuggcaguggccgaggaggcacugguggaccauguggcugagcugacggccacaccccgggaccucgugcuccgcucccugcuggcucgcacaguugccucgggaggcagggaacucauagagaagggccacacugcagcugaggccagcuaugcccgggaugccugugccaaggcaguguaccagcggcuguuugaguggguggugaacaggaucaacagugucauggaaccccggggccgggauccucggcgugauggcaaggacacagucauuggcgugcuggacaucuauggcuucgagguguuucccgucaacaguuucgagcaguucugcaucaacuacugcaacgagaagcugcagcagcuauucauccagcucauccugaagcaggaacaggaagaguacgagcgcgagggcaucaccuggcagagcguugaguauuucaacaacgccaccauuguggaucugguggagcggccccaccguggcauccuggccgugcuggacgaggccugcagcucugcuggcaccaucacugaccgaaucuuccugcagacccuggacaugcaccaccgccaucaccuacacuacaccagccgccagcucugccccacagacaagaccauggaguuuggccgagacuuccggaucaagcacuaugcaggggacgucacguacuccguggaaggcuucaucgacaagaacagagauuuccucuuccaggacuucaagcggcugcuguacaacagcacggaccccacucuacgggccauguggccggacgggcagcaggacaucacagaggugaccaagcgcccccugacggcuggcacacucuucaagaacuccaugguggcccugguggagaaccuugccuccaaggagcccuucuacguccgcugcaucaagcccaaugaggacaagguagcugggaagcuggaugagaaccacugucgccaccaggucgcauaccuggggcugcuggagaaugugaggguccgcagggcuggcuucgcuucccgccagcccuacucucgauuccugcucagguacaagaugaccugugaauacacauggcccaaccaccugcugggcuccgacaaggcagccgugagcgcucuccuggagcagcacgggcugcagggggacguggccuuuggccacagcaagcuguucauccgcucaccccggacacuggucacacuggagcagagccgagcccgccucauccccaucauugugcugcuauugcagaaggcauggcggggcaccuuggcgagguggcgcugccggaggcugagggcuaucuacaccaucaugcgcugguuccggagacacaaggugcgggcucaccuggcugagcugcagcggcgauuccaggcugcaaggcagccgccacucuacgggcgugaccuuguguggccgcugcccccugcugugcugcagcccuuccaggacaccugccacgcacucuucugcagguggcgggcccggcagcuggugaagaacauccccccuucagacaugccccagaucaaggccaagguggccgccaugggggcccugcaagggcuucgucaggacuggggcugccgacgggccugggcccgagacuaccuguccucugccacugacaaucccacagcaucaagccuguuugcucagcgacuaaagacacuucaggacaaagauggcuucggggcugugcucuuuucaagccauguccgcaaggugaaccgcuuccacaagauccggaaccgggcccuccugcucacagaccagcaccucuacaagcuggacccugaccggcaguaccgggugaugcgggccgugccccuugaggcggugacggggcugagcgugaccagcggaggagaccagcugguggugcugcacgcccgcggccaggacgaccucguggugugccugcaccgcucccggccgccauuggacaaccgcguuggggagcuggugggcgugcuggccgcacacugccagggggagggccgcacccuggagguucgcgucuccgacugcaucccacuaagccaucgcgggguccggcgccucaucuccguggagcccaggccggagcagccagagcccgauuuccgcugcgcucgcggcuccuucacccugcucuggcccagccgcuga

SEQ ID NO: 2836 - RNA, 3057 nt, Artificial Sequence
  derived and/or modified sequence opt1 from MYO1G__Homo_sapiens__CCDS34629.1
auggaggacgaggagggccccgaguacgggaagccggacuucgugcugcucgaccaggucaccauggaggacuucaugcgcaaccugcagcugcgguucgagaagggccgcaucuacaccuacaucggggaggugcucgugagcgucaaccccuaccaggagcugccccuguacggccccgaggccaucgcccgguaccaggggcgcgagcucuacgagcggccgccccaccuguacgcgguggccaacgccgccuacaaggccaugaagcaccgcucccgggacacgugcaucgugaucagcggcgaguccggcgcggggaagaccgaggccagcaagcacaucaugcaguacaucgccgccgucaccaaccccucccagcgcgcggagguggagcgggugaaggacguccugcucaagagcaccugcgugcuggaggccuucggcaacgcccgcacgaaccggaaccacaacuccagccgcuucgggaaguacauggacaucaacuucgacuucaagggcgaccccaucgggggccacauccacuccuaccugcucgagaagagccgggugcugaagcagcacgucggcgagcgcaacuuccacgccuucuaccagcugcuccggggguccgaggacaagcagcugcacgagcugcaccucgagcgcaacccggccguguacaacuucacccaccagggcgcggggcugaacaugaccgugcacagcgcccuggacuccgacgagcagagccaccaggccgucaccgaggccaugcgggugaucggcuucucccccgaggagguggagagcguccaccgcauccucgccgcgauccugcaccugggcaacaucgaguucguggagacggaggaggggggccuccagaaggaggggcuggccguggccgaggaggcccuggucgaccacguggccgagcucaccgcgaccccccgggaccuggugcugcgcucccuccuggcccggaccgucgccagcggcgggcgcgagcugaucgagaagggccacacggccgccgaggcguccuacgcccgcgacgccugcgccaaggcgguguaccagcggcucuucgagugggucgugaaccgcaucaacagcgugauggagccccggggccgcgacccgcggcgcgacgggaaggacaccgucaucggcgugcuggacaucuacggguucgagguguuccccgucaacagcuucgagcaguucugcaucaacuacugcaacgagaagcugcagcagcucuucauccagcugauccugaagcaggagcaggaggaguacgagcgggagggcaucaccuggcaguccguggaguacuucaacaacgccaccaucguggaccucgucgagcgcccccaccgggggauccuggccgugcuggacgaggccugcagcuccgccggcacgaucaccgaccgcaucuuccuccagacccuggacaugcaccaccggcaccaccugcacuacaccagccgccagcucugccccacggacaagaccauggaguucggccgggacuuccgcaucaagcacuacgcgggggacgugaccuacuccgucgagggcuucaucgacaagaaccgggacuuccuguuccaggacuucaagcgccugcucuacaacagcaccgacccgacgcugcgggccauguggcccgacgggcagcaggacaucaccgaggugaccaagcgcccccugaccgccggcacgcuguucaagaacuccaugguggcccucgucgagaaccuggccagcaaggagcccuucuacgugcggugcaucaagccgaacgaggacaagguggcggggaagcuggacgagaaccacugccgccaccaggucgccuaccucggccugcuggagaacgugcgcgugcggcgcgccggcuucgccucccggcagcccuacagccgcuuccuccugcgguacaagaugaccugcgaguacaccuggcccaaccaccugcucggguccgacaaggccgcggucagcgcccugcuggagcagcacggccuccagggggacguggccuucggccacuccaagcuguucauccgcagcccccggacccuggugacgcucgagcagucccgcgcccggcugaucccgaucaucguccugcuccugcagaaggcguggcgcggcacccuggcccgguggcgcugccggcgccuccgggccaucuacaccaucaugcgcugguuccggcgccacaaggugcgggcccaccuggccgagcugcagcgccgguuccaggcggcccgccagcccccccucuacgggcgcgaccugguguggccccugccgcccgccguccuccagcccuuccaggacaccugccacgcccuguucugccgguggcgcgcccggcagcuggugaagaacaucccgcccagcgacaugccccagaucaaggcgaagguggccgccaugggcgcccuccaggggcugcgccaggacuggggcugccggcgcgccugggcgcgggacuaccuguccagcgccacggacaaccccaccgccuccagccucuucgcccagcgccugaagacccugcaggacaaggacggguucggcgcgguccucuucagcucccacgugcggaaggugaaccgcuuccacaagauccggaaccgcgcccugcugcucaccgaccagcaccuguacaagcuggacccggaccggcaguaccgcgucaugcgggccgugccccucgaggccgugaccggccugagcgucacguccgggggcgaccagcugguggugcuccacgcccgcgggcaggacgaccuggucgugugccugcaccggagccgccccccccucgacaaccgggugggcgagcuggucggggugcuggcggcccacugccagggcgagggccgcacccucgaggugcgcgucuccgacugcaucccgcugagccaccggggggugcgccggcugaucuccguggagccccgccccgagcagcccgagccggacuuccggugcgcccgcggcagcuucacccuccuguggcccucccgguga

SEQ ID NO: 2837 - RNA, 3057 nt, Artificial Sequence
  derived and/or modified sequence opt2 from MYO1G__Homo_sapiens__CCDS34629.1
auggaggacgaggagggccccgaguacggcaagcccgacuucguccuccucgaccaggucaccauggaggacuucaugcgcaaccuccagcuccgcuucgagaagggccgcaucuacaccuacaucggcgagguccucgucuccgucaaccccuaccaggagcucccccucuacggccccgaggccaucgcccgcuaccagggccgcgagcucuacgagcgccccccccaccucuacgccgucgccaacgccgccuacaaggccaugaagcaccgcucccgcgacaccugcaucgucaucuccggcgaguccggcgccggcaagaccgaggccuccaagcacaucaugcaguacaucgccgccgucaccaaccccucccagcgcgccgaggucgagcgcgucaaggacguccuccucaaguccaccugcguccucgaggccuucggcaacgcccgcaccaaccgcaaccacaacuccucccgcuucggcaaguacauggacaucaacuucgacuucaagggcgaccccaucggcggccacauccacuccuaccuccucgagaagucccgcguccucaagcagcacgucggcgagcgcaacuuccacgccuucuaccagcuccuccgcggcuccgaggacaagcagcuccacgagcuccaccucgagcgcaaccccgccgucuacaacuucacccaccagggcgccggccucaacaugaccguccacuccgcccucgacuccgacgagcagucccaccaggccgucaccgaggccaugcgcgucaucggcuucucccccgaggaggucgaguccguccaccgcauccucgccgccauccuccaccucggcaacaucgaguucgucgagaccgaggagggcggccuccagaaggagggccucgccgucgccgaggaggcccucgucgaccacgucgccgagcucaccgccaccccccgcgaccucguccuccgcucccuccucgcccgcaccgucgccuccggcggccgcgagcucaucgagaagggccacaccgccgccgaggccuccuacgcccgcgacgccugcgccaaggccgucuaccagcgccucuucgagugggucgucaaccgcaucaacuccgucauggagccccgcggccgcgacccccgccgcgacggcaaggacaccgucaucggcguccucgacaucuacggcuucgaggucuuccccgucaacuccuucgagcaguucugcaucaacuacugcaacgagaagcuccagcagcucuucauccagcucauccucaagcaggagcaggaggaguacgagcgcgagggcaucaccuggcaguccgucgaguacuucaacaacgccaccaucgucgaccucgucgagcgcccccaccgcggcauccucgccguccucgacgaggccugcuccuccgccggcaccaucaccgaccgcaucuuccuccagacccucgacaugcaccaccgccaccaccuccacuacaccucccgccagcucugccccaccgacaagaccauggaguucggccgcgacuuccgcaucaagcacuacgccggcgacgucaccuacuccgucgagggcuucaucgacaagaaccgcgacuuccucuuccaggacuucaagcgccuccucuacaacuccaccgaccccacccuccgcgccauguggcccgacggccagcaggacaucaccgaggucaccaagcgcccccucaccgccggcacccucuucaagaacuccauggucgcccucgucgagaaccucgccuccaaggagcccuucuacguccgcugcaucaagcccaacgaggacaaggucgccggcaagcucgacgagaaccacugccgccaccaggucgccuaccucggccuccucgagaacguccgcguccgccgcgccggcuucgccucccgccagcccuacucccgcuuccuccuccgcuacaagaugaccugcgaguacaccuggcccaaccaccuccucggcuccgacaaggccgccgucuccgcccuccucgagcagcacggccuccagggcgacgucgccuucggccacuccaagcucuucauccgcuccccccgcacccucgucacccucgagcagucccgcgcccgccucauccccaucaucguccuccuccuccagaaggccuggcgcggcacccucgcccgcuggcgcugccgccgccuccgcgccaucuacaccaucaugcgcugguuccgccgccacaagguccgcgcccaccucgccgagcuccagcgccgcuuccaggccgcccgccagcccccccucuacggccgcgaccucgucuggccccucccccccgccguccuccagcccuuccaggacaccugccacgcccucuucugccgcuggcgcgcccgccagcucgucaagaacaucccccccuccgacaugccccagaucaaggccaaggucgccgccaugggcgcccuccagggccuccgccaggacuggggcugccgccgcgccugggcccgcgacuaccucuccuccgccaccgacaaccccaccgccuccucccucuucgcccagcgccucaagacccuccaggacaaggacggcuucggcgccguccucuucuccucccacguccgcaaggucaaccgcuuccacaagauccgcaaccgcgcccuccuccucaccgaccagcaccucuacaagcucgaccccgaccgccaguaccgcgucaugcgcgccgucccccucgaggccgucaccggccucuccgucaccuccggcggcgaccagcucgucguccuccacgcccgcggccaggacgaccucgucgucugccuccaccgcucccgccccccccucgacaaccgcgucggcgagcucgucggcguccucgccgcccacugccagggcgagggccgcacccucgagguccgcgucuccgacugcaucccccucucccaccgcggcguccgccgccucaucuccgucgagccccgccccgagcagcccgagcccgacuuccgcugcgcccgcggcuccuucacccuccucuggcccucccgcuga

SEQ ID NO: 2838 - RNA, 3057 nt, Artificial Sequence
  derived and/or modified sequence opt3 from MYO1G__Homo_sapiens__CCDS34629.1
auggaggacgaagagggccccgaauacgggaagccugauuucgugcugcucgaccaggucaccauggaggauuuuaugagaaaccuucaacugagguucgaaaaaggacggaucuauacauacauuggugagguuuuggugagcguaaauccauaucaggaguuaccgcuguacggccccgaagccauagcucgcuaucaggggcgagagcuauacgaacguccuccacaccucuaugcaguggccaacgcggcuuacaaggccaugaaacauagauccagggacacuugcaucgucauuucuggagagucaggcgcagguaagacggaggccaguaaacacaucaugcaguacauugcugcagugaccaaucccagccaacgggccgaaguugagcgcgugaaggauguccugcuuaaguccacaugugugcuggaagccuuugggaacgcuagaacuaauaggaaccauaauucuucgcgguucggaaaauauauggacaucaacuuugauuucaagggcgacccuauaggcgggcacauccauucauacuugcucgagaaaagccgcguacugaagcagcacguuggagaacgaaauuuucacgcguucuaucagcugcucagagguagugaggauaaacaguuacaugagcugcaccuugaaaggaacccagcaguguacaauuuuacccaucaaggcgccggguugaacaugacaguccacuccgcucuggacucugaugagcagagccaccaggccgugaccgaagcaaugcgggugauuggauucucccccgaggaagucgagucaguucaucguauccuagcugccauucuccaccugggcaauaucgaguuuguggaaacugaggaaggugggcuucagaaggagggacuggcgguagccgaagaggcauugguggaccaugucgcugagcucacagccaccccucgcgaucugguguuaagaagucugcucgcuaggacgguugccagcggcggccgggaacuuauagagaaggggcacacugcagccgaggcuucuuaugcgcgagacgcaugcgccaaagcuguguaccaacgccuguucgaaugggucgugaacagaauuaauuccguaauggagccaaggggacgggacccgcgcagagaugguaaggacaccguuaucggcguguuggauauuuauggguuugaagucuuccccgugaacucauucgagcaguuuuguaucaacuacugcaaugaaaaacuacagcaacuguucauccagcucauucugaagcaggagcaggaagaguacgagagggaaggaauaacauggcaaagcgucgaguauuuuaacaaugccacuaucguggaccuuguugaacguccucaucggggcauucuggcaguguuggaugaggccuguaguucugcugguaccaucacagaccgaauauuccuccagacccuggauaugcaccacagacaucacuuacauuacacguccaggcagcugugcccaacugacaaaacaauggaauuugggcgcgauuuccggauuaagcacuaugccggcgacguaaccuacagcgucgagggauuuaucgauaaaaacagagacuuccuauuucaggacuucaagaggcuccuguauaauucgacugaucccacacuucgcgcaauguggccugacggccaacaggauaucaccgaggugacgaagcgaccauugaccgcggggacacuguuuaaaaacucuaugguugcucucguggaaaaucuggccuccaaggagcccuucuacguccgguguauuaaaccgaacgaagacaagguggcaggaaaacuugaugagaaucacugccgucaucagguagccuaucuggguuugcucgaaaacgugagaguuaggcgcgcuggcuuugccucacggcagccuuacaguagauuccuguuaagguacaagaugacuugugaguauaccuggcccaaucaccuccuagggagcgacaaggcagcugucuccgcccuccuggagcaacauggacuucagggcgauguggcguucggucacucuaaauuguuuauccgaagcccacgcacacuggugacucucgaacagucacgggccagacugauuccuauaaucgucuuacugcuucagaaggcuuggagggggaccuuggcacguuggcgcugccggagacucagggccauuuacacaaucaugcgaugguuccggcgccauaaaguuagagcucaccuggccgagcuacaaaggcgguuucaggcagcgcgacagcccccacuguauggcagagaccucguguggccccugccuccagccgugcuucaaccguuccaggauaccugucacgcuuuguuuugccgcuggagggcccgucagcugguaaagaacauucccccuagugacaugccacagaucaaagcaaaggucgcugccaugggagcauuacaaggccuccggcaggauugggggugcagaagggccugggcucgcgacuaccuguccagcgcgacugauaaucccacggccucuucacuuuucgcacagcgacugaagacauugcaggacaaagacggauuuggugcugugcuguucaguagccauguuagaaaggugaaccgguuucacaaaauaaggaaucgcgcccugcuacugaccgaucaacaucucuauaagcuggacccugaucgucaguacagagucaugcgggccgugccacuugaagcuguuacuggcuuguccgugaccucugggggagaccagcugguagucuuacacgcaaggggccaggaugaccucguggugugucugcaucgcucgcgacccccgcuugauaacagagucggugagcugguuggggugcuagccgcgcacugccaaggcgagggacggacacucgaaguaagggugagcgacuguaucccucugucccaccgcggcgucagaagguugauuucaguggagccacggcccgaacagccugagcccgauuuccguugcgcucgcgggaguuuuacccuguuauggccaucucgauga

SEQ ID NO: 2839 - RNA, 3057 nt, Artificial Sequence
  derived and/or modified sequence opt4 from MYO1G__Homo_sapiens__CCDS34629.1
auggaggacgaggagggccccgaguacggcaagcccgacuucgugcugcuggaccaggugaccauggaggacuucaugagaaaccugcagcugagauucgagaagggcagaaucuacaccuacaucggcgaggugcuggugagcgugaaccccuaccaggagcugccccuguacggccccgaggccaucgccagauaccagggcagagagcuguacgagagacccccccaccuguacgccguggccaacgccgccuacaaggccaugaagcacagaagcagagacaccugcaucgugaucagcggcgagagcggcgccggcaagaccgaggccagcaagcacaucaugcaguacaucgccgccgugaccaaccccagccagagagccgagguggagagagugaaggacgugcugcugaagagcaccugcgugcuggaggccuucggcaacgccagaaccaacagaaaccacaacagcagcagauucggcaaguacauggacaucaacuucgacuucaagggcgaccccaucggcggccacauccacagcuaccugcuggagaagagcagagugcugaagcagcacgugggcgagagaaacuuccacgccuucuaccagcugcugagaggcagcgaggacaagcagcugcacgagcugcaccuggagagaaaccccgccguguacaacuucacccaccagggcgccggccugaacaugaccgugcacagcgcccuggacagcgacgagcagagccaccaggccgugaccgaggccaugagagugaucggcuucagccccgaggagguggagagcgugcacagaauccuggccgccauccugcaccugggcaacaucgaguucguggagaccgaggagggcggccugcagaaggagggccuggccguggccgaggaggcccugguggaccacguggccgagcugaccgccacccccagagaccuggugcugagaagccugcuggccagaaccguggccagcggcggcagagagcugaucgagaagggccacaccgccgccgaggccagcuacgccagagacgccugcgccaaggccguguaccagagacuguucgaguggguggugaacagaaucaacagcgugauggagcccagaggcagagaccccagaagagacggcaaggacaccgugaucggcgugcuggacaucuacggcuucgagguguuccccgugaacagcuucgagcaguucugcaucaacuacugcaacgagaagcugcagcagcuguucauccagcugauccugaagcaggagcaggaggaguacgagagagagggcaucaccuggcagagcguggaguacuucaacaacgccaccaucguggaccugguggagagaccccacagaggcauccuggccgugcuggacgaggccugcagcagcgccggcaccaucaccgacagaaucuuccugcagacccuggacaugcaccacagacaccaccugcacuacaccagcagacagcugugccccaccgacaagaccauggaguucggcagagacuucagaaucaagcacuacgccggcgacgugaccuacagcguggagggcuucaucgacaagaacagagacuuccuguuccaggacuucaagagacugcuguacaacagcaccgaccccacccugagagccauguggcccgacggccagcaggacaucaccgaggugaccaagagaccccugaccgccggcacccuguucaagaacagcaugguggcccugguggagaaccuggccagcaaggagcccuucuacgugagaugcaucaagcccaacgaggacaagguggccggcaagcuggacgagaaccacugcagacaccagguggccuaccugggccugcuggagaacgugagagugagaagagccggcuucgccagcagacagcccuacagcagauuccugcugagauacaagaugaccugcgaguacaccuggcccaaccaccugcugggcagcgacaaggccgccgugagcgcccugcuggagcagcacggccugcagggcgacguggccuucggccacagcaagcuguucaucagaagccccagaacccuggugacccuggagcagagcagagccagacugauccccaucaucgugcugcugcugcagaaggccuggagaggcacccuggccagauggagaugcagaagacugagagccaucuacaccaucaugagaugguucagaagacacaaggugagagcccaccuggccgagcugcagagaagauuccaggccgccagacagcccccccuguacggcagagaccugguguggccccugccccccgccgugcugcagcccuuccaggacaccugccacgcccuguucugcagauggagagccagacagcuggugaagaacaucccccccagcgacaugccccagaucaaggccaagguggccgccaugggcgcccugcagggccugagacaggacuggggcugcagaagagccugggccagagacuaccugagcagcgccaccgacaaccccaccgccagcagccuguucgcccagagacugaagacccugcaggacaaggacggcuucggcgccgugcuguucagcagccacgugagaaaggugaacagauuccacaagaucagaaacagagcccugcugcugaccgaccagcaccuguacaagcuggaccccgacagacaguacagagugaugagagccgugccccuggaggccgugaccggccugagcgugaccagcggcggcgaccagcugguggugcugcacgccagaggccaggacgaccugguggugugccugcacagaagcagacccccccuggacaacagagugggcgagcuggugggcgugcuggccgcccacugccagggcgagggcagaacccuggaggugagagugagcgacugcaucccccugagccacagaggcgugagaagacugaucagcguggagcccagacccgagcagcccgagcccgacuucagaugcgccagaggcagcuucacccugcuguggcccagcagauga

SEQ ID NO: 2840 - RNA, 3057 nt, Artificial Sequence
  derived and/or modified sequence opt5 from MYO1G__Homo_sapiens__CCDS34629.1
auggaggacgaagagggccccgaauacgggaagccugauuucgugcugcucgaccaggucaccauggaggauuuuaugagaaaccugcaacuucgguucgaaaaaggacgcaucuauacauacauuggcgagguucuggugagcgugaauccguaucaggagcucccccuguacgggccugaagccaucgcuagauaucagggacgggagcuuuacgaaagacccccucaccuguaugccgucgcgaacgcugccuacaaggccaugaaacaucgcucccgggacacgugcauugugaucucuggcgagagcggggcuggaaagaccgaggccuccaaacacauuaugcaguacaucgcugccguuacaaaucccucucaacgcgcggaaguggagagagucaaggaugugcuccucaagagcaccuguguucuggaagccuuuggcaacgcucggacaaaucgcaaccauaauuccucuagauucggcaaauauauggacaucaacuuugauuucaagggggacccuauuggaggccacauccauagcuaccugcuggagaaaucccgggugcuuaagcagcacgucggggaacgcaauuuucacgccuucuaucagcugcucagaggaagcgaggauaaacagcugcaugagcuucaccuggaacggaacccggcuguguacaauuuuacccaucaaggcgccgggcucaacaugacagugcacucugcgcuggacuccgaugagcagagccaccaggccgucaccgaagcuaugcgcguuauuggauucucucccgaggaaguggaguccgugcauagaauccuggccgcuauucuccaccugggcaauaucgaguuugucgaaacggaggaaggcgggcuucagaaggagggacuggccguggccgaagaggcucucguugaccauguggcggagcugaccgccacaccucgggaucuuguccugagaagccuccuggcucgcaccguggccucuggcgggcgggaacugauugagaagggacacacagccgcugaagccuccuaugcgagagacgcuugcgccaaagccguuuaccaacgccucuucgaguggguggucaaccggaucaauagcgugauggagcccagaggccgcgacccucggagagaugggaaggacaccgucaucggagugcuggauauuuauggcuuugaaguuuuccccgugaacuccuucgagcaguuuuguaucaacuacugcaaugaaaaacuucagcaacuguucauucagcucauccugaagcaggagcaggaagaguacgagcgcgaaggcauuacguggcaaucugucgaguauuuuaacaaugcuacaaucguggaccuuguugaacggccgcauagagggauccuggccgugcucgaugaggcuuguagcuccgccggaaccauuacagaccgcaucuuccugcagacccuggauaugcaccaccggcaucaccuccauuacaccagcagacagcugugcccuacagacaaaacgauggaauuuggccgggauuuccgcauuaagcacuaugcgggggacgucaccuacucuguggagggauuuaucgauaaaaacagagacuuccuuuuucaggacuucaagcggcugcucuauaauuccacagaucccacccugagagccauguggccugacggccaacaggauauuacagaggugaccaagcgcccccugacggcugggacacuuuuuaaaaacagcaugguugcccucgucgaaaaucuggcuucuaaggagcccuucuacgugcgguguaucaaaccuaacgaagacaagguggccggcaaacuggaugagaaucacugcagacaucaggucgcguaucucggacugcuugaaaacgugcgcguuagacgggccggcuuugcuagccgccagccguacuccagauuccugcuccgguacaagaugaccugugaguauaccuggcccaaucaucugcuggggucugacaaggccgcugugagcgcccuucucgagcaacacggacugcagggcgaugucgccuucgggcacuccaaacuguuuauccgcagcccuagaacacucgugacccuggaacagucucgggcucgccuuauucccaucauuguucugcuccugcagaaggcguggagaggaacacuggcccgguggcgcugcagacggcuuagagcuaucuacacgauuaugcgcugguuccggagacauaaagugcgcgcccaccucgccgagcugcaacggagauuucaggcugcccgccagccuccccuguauggccgggaccucgucuggccgcugccucccgcggugcuucaaccuuuccaggauaccugucacgcucuguuuugcagauggcgcgcccggcagcucguuaagaacauucccccuuccgacaugccccagaucaaagccaagguggcugccaugggggcgcugcaaggccugagacaggauuggggaugccggcgcgcuugggccagagacuaccuuagcucugccacagauaauccgaccgcuuccagccucuucgcccagcggcugaagacacugcaggacaaagacggcuuuggggcuguccucuucuccucucaugugcgcaaggugaacagauuucacaaaauccggaauagagcccugcuucugaccgaucaacaucucuauaagcuggacccugaucgccaguaccgggucaugagagcgguuccccuggaagccgugacgggacuuagcgugaccuccggcggggaccagcuggucgugcuccacgcucgcggacaggaugaccugguugugugucuccaucggucuagacccccucuggauaaccgcgucggcgagcuuguggggguucuggccgcucacugccaaggcgagggacggacacucgaagugagagucagcgacuguaucccgcugucccaccgcggcgugagacggcugauuagcguugagccccgcccugaacagcccgagccugauuucagaugcgcccgggggucuuuuacccuucuguggcccucccgcuga

SEQ ID NO: 2841 - protein, 1022 aa, Artificial Sequence
  MYO1H__Homo_sapiens__NP_001094891
MEGALTARDKVGVQDFVLLDAYTSESAFVDNLRKRFSENLIYTYIGTLLVSVNPYQELGIYTVSQMELYQGVNFFELPPHVYAIADNAYRMMCAELNNHFILISGESGAGKTEASKKILEYFAVTCPMTQSLQIARDRLLFSNPVLEAFGNARTLRNDNSSRFGKYMDIQFDFQGIPVGGHIISYLIEKSRVVYQNEGERNFHIFYQLLAGGEEERLSYLGLERDPQLYKYLSQGHCAKESSISDKNDWKTVSNAFSVIDFTEADLENLFGIIASVLHLGNIGFEEDDQGCATIPDTHEIKWIAKLLGVHPSVLLEALTHRKIEAKTEEVICPLTLELSVYARDAMAKAVYGRTFTWLVNKINSSLVNKDFTRKTVIGLLDIYGFEVFDKNGFEQFCINYCNEKLQQLLIERTLKAEQAEYEMEGIEWEPIKYFNNKIICDLVEERHKGIISILDEECIRPGPATDLSFLEKLEEKVGKHAHFETRKLAGPKGRKRIGWMEFRLLHYAGEVTYCTKGFLEKNNDLLYRHLKEVLCKSKNIILRECFLLAELENRRRPPTVGTQFKNSLSSLLETLISKEPSYIRCIKPNDRKEPSKFDDFLIRHQIKYLGLMEHLRVRRAGFAYRRKYEHFLQRYKSLCPDTWPHWHGPPAEGVERLIKYIGYKPEEYKLGKTKIFIRFPRTLFATEDAFEFSKHQLVARIQATYKRCLGRREYVKKRQAAIKLEAHWRGALARKAIQRRKWAVRIIRKFIKGFISRNKPLCPDNEEFIVFVRKNYILNLRYHLPKTVLDKSWLRPPGILENASDLLRKMCVRNLVQKYCRGITAERKAMMQQKVVTSEIFRGRKDGYTESLNQPFVNSRIDEGDINPKVLQLISHEKIQYGVPVIKYDRKGFKARQRQLILTQKAAYVVELAKIKQKIEYSALKGVSTSNLSDGILVIHVSPEDSKQKGDAVLQCGHVFEAVTKLVMLVKKENIVNVVQGSLQFFISPGKEGTIVFDTGLEEQVYKNKNGQLTVVSVRRKS

SEQ ID NO: 2842 - RNA, 3069 nt, Artificial Sequence
  MYO1H__Homo_sapiens__CCDS53826.1
auggaaggggcgcugacugcccgggacaaggucgggguucaggauuuugugcuauuggacgcguacaccagcgaaucugccuuugucgacaaccuccgcaagcguuucagcgagaaccucauauacacauauauuggcacccuccuugugucugugaauccauaccaggagcucggaaucuacacugugagccagauggaacuuuaucaaggggucaauuucuuugaacugccaccacaugucuacgcuauagccgacaacgcuuaccgaaugaugugugcugaacuaaauaaccauuucauccucauuucuggagagaguggggcagggaaaacagaggccuccaagaaaauucucgaguauuuugcagugaccugcccaaugacccagucacuacaaauagcccgugacagacugcuguucuccaacccagugcuggaggcuuuuggaaaugccagaacgcuccggaaugacaacuccagcagauuugggaaauacauggauauacaauuugauuuucagggcauucccguaggugggcauaucaucaguuacuugauagagaagucccgaguugucuaccaaaacgaaggcgagcggaauuuccacaucuucuaccagcugcuggcagguggcgaagaggagcgccugucuuaccugggacucgagcgagacccccagcuguauaaauaccucucacagggucauugugccaaagagucauccauuagugacaagaaugacuggaaaacuguuuccaacgccuuuucugucauugauuuuacugaagcugaccucgagaaucucuuuggaauuauugccagugucuuacaccuggggaacauugguuuugaagaagacgaccaaggcugugccacuaucccagacacccaugagaucaaguggauagccaagcuccuggggguccacccaucaguccuucuggaagcucucacccacagaaaaauugaagccaaaacugaggaggugaucugcccguugacacuagaacucucugucuacgcuagagaugcaauggcaaaggcuguuuauggacgaacguuuacuuggcuggucaacaaaaucaauuccuccuuaguuaacaaggauuucaccaggaaaacuguaauuggauuacuggacaucuauggguuugaagucuuugacaagaaugguuuugaacaguucuguauaaauuacugcaaugagaaacuccagcaacuguuaauugagaggacucuaaaagcagaacaggcagaauaugaaauggaaggcauagagugggagccaauuaaauauuucaacaacaagaucaucugugauuugguagaagagagacauaaaggaaucauaucuauucuggaugaagaaugcauucggccugguccugcuacagacuugaguuuccuggagaaauuggaagagaaagugggcaaacaugcacacuucgaaacccguaagcuggcugguccaaagggccgaaagaggauuggcuggauggaguuccgacuccuccacuaugcaggagaggucacauacugcaccaagggauucuuggaaaaaaacaaugaucuucuuuacagacaucugaaagaagugcugugcaaguccaagaacauuauccugagggaaugcuuccugcuggccgaguuagaaaaccggaggaggcccccaacaguggggacucaguuuaaaaacagucugagcagccuucuagaaacccucaucucuaaggagcccuccuacauccguugcaucaagcccaacgacaggaaagaacccagcaaauuugaugacuuccucauaaggcaucagaucaaauaccuggggcugauggagcaccugcgggugagacgggcugguuuugcauaccgaaggaaauacgagcauuucuugcaaagguacaaguccuuaugcccagacaccuggccgcacuggcacgggccuccagcagagggcguggaacggcugaucaaguacaucggcuacaaacccgaggaauacaaguuaggcaaaaccaaaauauucauucguuuccccagaacucuguuugcuaccgaagaugccuuugaauuuaguaaacaucaacuaguugcaagaauccaagccacuuacaaacgcugccuaggaaggagagaauacgugaaaaaaagacaagcagccaucaaacuggaagcccacuggcguggggcccuggcucggaaggcaauccaaaggagaaagugggccgugcggauuaucagaaaguucauuaaaggauucaucagucgcaacaaaccccucuguccugacaacgaggaauuuaucguguuugugcggaagaauuacaucuugaaucuccgguaucaccuuccaaagacuguccuggacaagagcuggcugaggccuccuggcaucuuggaaaaugcaucagaucugcucaggaaaaugugcgugaggaaccuggugcagaaguacugccgcgggaucacagcugagcggaaagcaaugaugcagcaaaagguaguuacaagugaaaucuucaggggaaggaaagacggcuacacagaaaguuuaaaucaacccuuugucaacagucggauagaugaaggagacauuaauccgaaagugcuucagcuaauuagccaugagaaaauccaguauggugucccggucauuaaauaugacagaaaaggcuucaaagcacggcagcggcaacucauucuuacucagaaagcagcuuacgugguggaacuugccaaaaucaagcagaaaauagaguacucagcucucaaaggugucuccacuagcaaucugagugauggaaucuuagucauucauguuucaccagaggacagcaagcaaaagggggaugccguuuugcaguguggacacguguuugaagcaguuacuaaacucgucaugcugguuaagaaggagaacauugucaauguuguucaaggaaguuuacaguuuuuuauuaguccgggaaaagaaggcacaauaguuuucgacacuggacuggaagaacaagucuauaaaaauaaaaauggacaauuaacaguggugucaguccggaggaaguccuga

SEQ ID NO: 2843 - RNA, 3069 nt, Artificial Sequence
  derived and/or modified sequence opt1 from MYO1H__Homo_sapiens__CCDS53826.1
auggagggcgcccugaccgcccgcgacaagguggggguccaggacuucgugcuccuggacgcguacaccagcgaguccgccuucguggacaaccugcggaagcgcuucagcgagaaccucaucuacacguacaucggcacccugcuggucuccgugaaccccuaccaggagcucgggaucuacaccgugagccagauggagcuguaccagggcgucaacuucuucgagcugccgccccacguguacgccaucgccgacaacgccuaccggaugaugugcgcggagcucaacaaccacuucauccugaucuccggggagagcggcgccggcaagaccgaggccuccaagaagauccuggaguacuucgccgugacgugccccaugacccagagccuccagaucgcgcgcgaccggcugcuguucuccaaccccguccucgaggccuucgggaacgcccgcacccugcggaacgacaacagcucccgcuucggcaaguacauggacauccaguucgacuuccaggggaucccggugggcgggcacaucaucagcuaccugaucgagaagucccggguggucuaccagaacgagggcgagcgcaacuuccacaucuucuaccagcuccuggccggcggggaggaggagcggcugagcuaccucggccuggagcgcgacccccagcuguacaaguaccucucccaggggcacugcgccaaggagagcuccaucagcgacaagaacgacuggaagaccguguccaacgcguucagcgugaucgacuucacggaggccgaccuggagaaccuguucggcaucaucgccagcguccuccaccugggcaacaucggguucgaggaggacgaccagggcugcgccaccauccccgacacccacgagaucaaguggaucgccaagcugcucggggugcaccccuccgugcugcuggaggcgcucacccaccggaagaucgaggccaagacggaggaggucaucugcccgcugacccuggagcucagcguguacgcccgcgacgccauggccaaggcgguguacggccggaccuucaccuggcuggucaacaagaucaacuccagccuggugaacaaggacuucacgcgcaagaccgugaucgggcuccuggacaucuacggcuucgaggucuucgacaagaacggcuucgagcaguucugcaucaacuacugcaacgagaagcugcagcagcuccugaucgagcggacccugaaggccgagcaggccgaguacgagauggaggggaucgagugggagcccaucaaguacuucaacaacaagaucaucugcgaccucguggaggagcgccacaagggcaucaucuccauccuggacgaggagugcauccggcccgggcccgccaccgaccugagcuuccucgagaagcuggaggagaaggucggcaagcacgcccacuucgagacgcgcaagcuggcggggccgaagggccggaagcgcaucggcuggauggaguuccgccugcuccacuacgccggggaggugaccuacugcaccaagggcuuccuggagaagaacaacgaccugcucuaccggcaccugaaggaggugcugugcaaguccaagaacaucauccuccgcgagugcuuccugcuggccgagcucgagaaccggcgccggccgcccaccgucgggacgcaguucaagaacagccuguccagccugcucgagacccugaucuccaaggagcccagcuacauccgcugcaucaagcccaacgaccggaaggagcccuccaaguucgacgacuuccugauccgccaccagaucaaguaccucggccugauggagcaccuccgggugcgccgggccggguucgcguaccgccggaaguacgagcacuuccugcagcgcuacaagagccugugccccgacaccuggccccacuggcacggcccgcccgccgagggcguggagcggcugaucaaguacaucggguacaagcccgaggaguacaagcucggcaagaccaagaucuucauccgcuucccccggacgcuguucgccaccgaggacgccuucgaguucuccaagcaccagcuggucgcccgcauccaggcgaccuacaagcggugccucgggcgccgcgaguacgugaagaagcggcaggccgccaucaagcuggaggcccacuggcgcggcgcccuggcgcggaaggccauccagcgccggaagugggccgugcgcaucauccggaaguucaucaagggcuucaucagccgcaacaagccgcucugccccgacaacgaggaguucaucgucuucgugcggaagaacuacauccugaaccugcgcuaccaccuccccaagaccgugcuggacaaguccuggcugcggcccccggggauccucgagaacgccagcgaccugcugcgcaagaugugcguccggaaccucgugcagaaguacugccgcggcaucacggccgagcggaaggcgaugaugcagcagaagguggucaccuccgagaucuuccgcgggcggaaggacggcuacaccgagagccugaaccagcccuucgugaacagccgcaucgacgagggggacaucaaccccaaggugcugcagcucaucucccacgagaagauccaguacggcgucccggugaucaaguacgaccggaagggcuucaaggcccgccagcggcagcugauccugacccagaaggccgccuacguggucgagcucgcgaagaucaagcagaagaucgaguacagcgcccugaaggggguguccacgagcaaccuguccgacggcauccucgugauccacgucagccccgaggacuccaagcagaagggggacgccgugcugcagugcggccacguguucgaggccgucaccaagcuggugaugcucgugaagaaggagaacaucgucaacguggugcaggggagccugcaguucuucaucucccccggcaaggagggcaccaucgucuucgacaccgggcuggaggagcaggucuacaagaacaagaacggccagcucaccguggugagcgugcgccgcaaguccuga

SEQ ID NO: 2844 - RNA, 3069 nt, Artificial Sequence
  derived and/or modified sequence opt2 from MYO1H__Homo_sapiens__CCDS53826.1
auggagggcgcccucaccgcccgcgacaaggucggcguccaggacuucguccuccucgacgccuacaccuccgaguccgccuucgucgacaaccuccgcaagcgcuucuccgagaaccucaucuacaccuacaucggcacccuccucgucuccgucaaccccuaccaggagcucggcaucuacaccgucucccagauggagcucuaccagggcgucaacuucuucgagcuccccccccacgucuacgccaucgccgacaacgccuaccgcaugaugugcgccgagcucaacaaccacuucauccucaucuccggcgaguccggcgccggcaagaccgaggccuccaagaagauccucgaguacuucgccgucaccugccccaugacccagucccuccagaucgcccgcgaccgccuccucuucuccaaccccguccucgaggccuucggcaacgcccgcacccuccgcaacgacaacuccucccgcuucggcaaguacauggacauccaguucgacuuccagggcauccccgucggcggccacaucaucuccuaccucaucgagaagucccgcgucgucuaccagaacgagggcgagcgcaacuuccacaucuucuaccagcuccucgccggcggcgaggaggagcgccucuccuaccucggccucgagcgcgacccccagcucuacaaguaccucucccagggccacugcgccaaggaguccuccaucuccgacaagaacgacuggaagaccgucuccaacgccuucuccgucaucgacuucaccgaggccgaccucgagaaccucuucggcaucaucgccuccguccuccaccucggcaacaucggcuucgaggaggacgaccagggcugcgccaccauccccgacacccacgagaucaaguggaucgccaagcuccucggcguccaccccuccguccuccucgaggcccucacccaccgcaagaucgaggccaagaccgaggaggucaucugcccccucacccucgagcucuccgucuacgcccgcgacgccauggccaaggccgucuacggccgcaccuucaccuggcucgucaacaagaucaacuccucccucgucaacaaggacuucacccgcaagaccgucaucggccuccucgacaucuacggcuucgaggucuucgacaagaacggcuucgagcaguucugcaucaacuacugcaacgagaagcuccagcagcuccucaucgagcgcacccucaaggccgagcaggccgaguacgagauggagggcaucgagugggagcccaucaaguacuucaacaacaagaucaucugcgaccucgucgaggagcgccacaagggcaucaucuccauccucgacgaggagugcauccgccccggccccgccaccgaccucuccuuccucgagaagcucgaggagaaggucggcaagcacgcccacuucgagacccgcaagcucgccggccccaagggccgcaagcgcaucggcuggauggaguuccgccuccuccacuacgccggcgaggucaccuacugcaccaagggcuuccucgagaagaacaacgaccuccucuaccgccaccucaaggagguccucugcaaguccaagaacaucauccuccgcgagugcuuccuccucgccgagcucgagaaccgccgccgcccccccaccgucggcacccaguucaagaacucccucuccucccuccucgagacccucaucuccaaggagcccuccuacauccgcugcaucaagcccaacgaccgcaaggagcccuccaaguucgacgacuuccucauccgccaccagaucaaguaccucggccucauggagcaccuccgcguccgccgcgccggcuucgccuaccgccgcaaguacgagcacuuccuccagcgcuacaagucccucugccccgacaccuggccccacuggcacggcccccccgccgagggcgucgagcgccucaucaaguacaucggcuacaagcccgaggaguacaagcucggcaagaccaagaucuucauccgcuucccccgcacccucuucgccaccgaggacgccuucgaguucuccaagcaccagcucgucgcccgcauccaggccaccuacaagcgcugccucggccgccgcgaguacgucaagaagcgccaggccgccaucaagcucgaggcccacuggcgcggcgcccucgcccgcaaggccauccagcgccgcaagugggccguccgcaucauccgcaaguucaucaagggcuucaucucccgcaacaagccccucugccccgacaacgaggaguucaucgucuucguccgcaagaacuacauccucaaccuccgcuaccaccuccccaagaccguccucgacaaguccuggcuccgcccccccggcauccucgagaacgccuccgaccuccuccgcaagaugugcguccgcaaccucguccagaaguacugccgcggcaucaccgccgagcgcaaggccaugaugcagcagaaggucgucaccuccgagaucuuccgcggccgcaaggacggcuacaccgagucccucaaccagcccuucgucaacucccgcaucgacgagggcgacaucaaccccaagguccuccagcucaucucccacgagaagauccaguacggcguccccgucaucaaguacgaccgcaagggcuucaaggcccgccagcgccagcucauccucacccagaaggccgccuacgucgucgagcucgccaagaucaagcagaagaucgaguacuccgcccucaagggcgucuccaccuccaaccucuccgacggcauccucgucauccacgucucccccgaggacuccaagcagaagggcgacgccguccuccagugcggccacgucuucgaggccgucaccaagcucgucaugcucgucaagaaggagaacaucgucaacgucguccagggcucccuccaguucuucaucucccccggcaaggagggcaccaucgucuucgacaccggccucgaggagcaggucuacaagaacaagaacggccagcucaccgucgucuccguccgccgcaaguccuga

SEQ ID NO: 2845 - RNA, 3069 nt, Artificial Sequence
  derived and/or modified sequence opt3 from MYO1H__Homo_sapiens__CCDS53826.1
auggagggcgcccugaccgcuagagacaagguggggguccaggauuucguucuccuugacgcauacacaagcgaauccgccuuuguggauaaccugaggaaacgguucucugagaauuugaucuauacuuacauuggaacguuacugguaucagugaaccccuaucaagaacuagguauauacaccgucagucagauggagcucuaucagggcgugaacuuuuucgaacugccuccacacguuuacgcgaucgcugacaaugccuaucgcaugaugugcgcagagcuuaauaaccauuuuauucugaucagcggggaguccggagccggcaagacagaggcuucuaaaaagauuuuggaguacuucgcagugacuuguccgaugacccagucgcuccaaaucgcccgagaucgucugcuguuuucaaaucccguccucgaggcuuucgguaacgccagaacauuaaggaaugacaacagcagucgguuugggaaauacauggauauacaguucgacuuucagggaaucccugugggcggccacauuaucuccuaucugauugagaagucucgcguaguuuaccagaaugagggggaaagaaacuuccauaucuuuuaucaacuuuuggcgggaggugaggaagagaggcugagcuaccuaggccucgaacgggauccacagcuguauaaguaccuuucccaggggcacugcgcaaaagagucaaguauaagcgacaagaaugauuggaaaaccgugucuaacgccuucuccgucauugacuucacugaggcugaucuggaaaauuuguuuggaaucauugccucagugcuccaucugggcaacaucgguuucgaggaagacgaccaggggugugcaacaauccccgauacccacgagauuaaguggauagcuaaauuacugggagugcacccuagcguccuccuugaagcccugacgcaucgcaagaucgaggcgaagacugaggaaguuauuugcccauugacccuagagcugaguguguaugcccgagacgcaauggcuaaagccguauacggcagaacauuuacuuggcucgugaacaagaucaauucuucccuggucaacaaagauuucaccaggaagacagugauaggccuucuggacauuuacggguuugaaguuuucgauaaaaauggauuugagcaauucuguaucaacuauugcaaugaaaaguugcagcagcuccugaucgagcggaccuuaaaagcugagcaagccgaauacgagauggaagguauugagugggagcccaucaaguauuuuaacaauaagauuauaugugaccugguggaagaacgucacaaaggcaucauuagcauccuagaugaagagugcauccgcccugggccagcaacggaccucucguuccuggaaaaacuugaggagaaagucggaaagcaugcccacuuugaaacuagaaaauuggcuggcccgaaggguaggaagcggauuggguggauggaguuccgacugcuccacuacgcgggcgaagugacauauuguaccaaaggauuucuggagaagaacaaugaucuucuguaccgccauuugaaagaaguacucugcaagucuaaaaacauaauccugagagaguguuucuuacuggcagagcuagaaaauaggcggcgacccccuacuguuggcacacaguucaagaacucccucucaagucugcuugagaccuugauuagcaaggaaccauccuauaucagaugcauuaaacccaaugacaggaaggagccuucuaaauuugaugacuuccugauccgucaccagauaaaguaccucgggcugauggaacauuuacgggugcgcagagccggauuugcuuacaggcgcaaauaugagcacuuccugcagcgguacaagagccuuugcccagacacguggccccauuggcacgguccgccugccgagggcgucgaaagauugaucaaguauauuggguacaaacccgaggaauauaagcucggaaaaaccaagaucuuuauuagguucccacgcacacuguuugcaacugaggaugccuucgaguuuucaaaacaccagcuaguggcucgaauccaagccaccuacaagcggugucugggccguagagaauaugucaaaaagaggcaggcagcgauaaagcucgaggcucauuggcgcggugcccuggcacggaaagccauucagagaaggaagugggcugugcgaaucauucgcaaauucaucaagggguuuauaagucggaacaaaccucuuugccccgacaaugaagaguucaucguuuuugugagaaagaacuacauuuugaaccugagguaccacuuaccaaagacaguacucgauaaauccuggcugcgucccccuggcauccuugaaaaugccagcgaccuguugcgcaagauguguguccggaaccucgugcaaaaauauugcagaggaauuacugcagagaggaaggcuaugaugcagcagaaaguugugaccucugagaucuuccgaggccggaaggauggguacacagaaucacugaaucagccauucgucaacagucgcauagacgagggagauauuaauccgaaggugcuacaacugaucagccaugaaaagauccaguaugguguacccgugauuaaguacgacagaaaaggcuuuaaggccaggcagcggcagcucauccugacccaaaaagcggccuauguugucgagcuugcuaagauuaagcagaaaauagaauacuccgcauugaagggggugucuacuucgaaccugagcgauggaaucuuagugauucacgucuccccugaggacucaaaacagaagggcgaugccguucuccaauguggucacguguucgaggcugugacgaaacugguaaugcuugucaagaaagaaaauaucgugaacguugugcaggggagucugcaguuuuucauuucuccaggcaaggagggaacaaucgucuuugacaccggccuagaagaacagguguauaagaauaaaaacgggcaacucacuguugugagcguacgaagaaaguccuga

SEQ ID NO: 2846 - RNA, 3069 nt, Artificial Sequence
  derived and/or modified sequence opt4 from MYO1H__Homo_sapiens__CCDS53826.1
auggagggcgcccugaccgccagagacaaggugggcgugcaggacuucgugcugcuggacgccuacaccagcgagagcgccuucguggacaaccugagaaagagauucagcgagaaccugaucuacaccuacaucggcacccugcuggugagcgugaaccccuaccaggagcugggcaucuacaccgugagccagauggagcuguaccagggcgugaacuucuucgagcugcccccccacguguacgccaucgccgacaacgccuacagaaugaugugcgccgagcugaacaaccacuucauccugaucagcggcgagagcggcgccggcaagaccgaggccagcaagaagauccuggaguacuucgccgugaccugccccaugacccagagccugcagaucgccagagacagacugcuguucagcaaccccgugcuggaggccuucggcaacgccagaacccugagaaacgacaacagcagcagauucggcaaguacauggacauccaguucgacuuccagggcauccccgugggcggccacaucaucagcuaccugaucgagaagagcagagugguguaccagaacgagggcgagagaaacuuccacaucuucuaccagcugcuggccggcggcgaggaggagagacugagcuaccugggccuggagagagacccccagcuguacaaguaccugagccagggccacugcgccaaggagagcagcaucagcgacaagaacgacuggaagaccgugagcaacgccuucagcgugaucgacuucaccgaggccgaccuggagaaccuguucggcaucaucgccagcgugcugcaccugggcaacaucggcuucgaggaggacgaccagggcugcgccaccauccccgacacccacgagaucaaguggaucgccaagcugcugggcgugcaccccagcgugcugcuggaggcccugacccacagaaagaucgaggccaagaccgaggaggugaucugcccccugacccuggagcugagcguguacgccagagacgccauggccaaggccguguacggcagaaccuucaccuggcuggugaacaagaucaacagcagccuggugaacaaggacuucaccagaaagaccgugaucggccugcuggacaucuacggcuucgagguguucgacaagaacggcuucgagcaguucugcaucaacuacugcaacgagaagcugcagcagcugcugaucgagagaacccugaaggccgagcaggccgaguacgagauggagggcaucgagugggagcccaucaaguacuucaacaacaagaucaucugcgaccugguggaggagagacacaagggcaucaucagcauccuggacgaggagugcaucagacccggccccgccaccgaccugagcuuccuggagaagcuggaggagaaggugggcaagcacgcccacuucgagaccagaaagcuggccggccccaagggcagaaagagaaucggcuggauggaguucagacugcugcacuacgccggcgaggugaccuacugcaccaagggcuuccuggagaagaacaacgaccugcuguacagacaccugaaggaggugcugugcaagagcaagaacaucauccugagagagugcuuccugcuggccgagcuggagaacagaagaagaccccccaccgugggcacccaguucaagaacagccugagcagccugcuggagacccugaucagcaaggagcccagcuacaucagaugcaucaagcccaacgacagaaaggagcccagcaaguucgacgacuuccugaucagacaccagaucaaguaccugggccugauggagcaccugagagugagaagagccggcuucgccuacagaagaaaguacgagcacuuccugcagagauacaagagccugugccccgacaccuggccccacuggcacggcccccccgccgagggcguggagagacugaucaaguacaucggcuacaagcccgaggaguacaagcugggcaagaccaagaucuucaucagauuccccagaacccuguucgccaccgaggacgccuucgaguucagcaagcaccagcugguggccagaauccaggccaccuacaagagaugccugggcagaagagaguacgugaagaagagacaggccgccaucaagcuggaggcccacuggagaggcgcccuggccagaaaggccauccagagaagaaagugggccgugagaaucaucagaaaguucaucaagggcuucaucagcagaaacaagccccugugccccgacaacgaggaguucaucguguucgugagaaagaacuacauccugaaccugagauaccaccugcccaagaccgugcuggacaagagcuggcugagaccccccggcauccuggagaacgccagcgaccugcugagaaagaugugcgugagaaaccuggugcagaaguacugcagaggcaucaccgccgagagaaaggccaugaugcagcagaagguggugaccagcgagaucuucagaggcagaaaggacggcuacaccgagagccugaaccagcccuucgugaacagcagaaucgacgagggcgacaucaaccccaaggugcugcagcugaucagccacgagaagauccaguacggcgugcccgugaucaaguacgacagaaagggcuucaaggccagacagagacagcugauccugacccagaaggccgccuacgugguggagcuggccaagaucaagcagaagaucgaguacagcgcccugaagggcgugagcaccagcaaccugagcgacggcauccuggugauccacgugagccccgaggacagcaagcagaagggcgacgccgugcugcagugcggccacguguucgaggccgugaccaagcuggugaugcuggugaagaaggagaacaucgugaacguggugcagggcagccugcaguucuucaucagccccggcaaggagggcaccaucguguucgacaccggccuggaggagcagguguacaagaacaagaacggccagcugaccguggugagcgugagaagaaagagcuga

SEQ ID NO: 2847 - RNA, 3069 nt, Artificial Sequence
  derived and/or modified sequence opt5 from MYO1H__Homo_sapiens__CCDS53826.1
auggagggcgcccugaccgcuagagacaagguggggguccaggauuucguucuccuggacgccuacacaagcgaauccgcguuuguggauaaccuucggaaacgcuucucugagaaucugaucuauacguacauuggaacccuccuggugagcgucaaccccuaucaagaacuuggcaucuacacagugucccagauggagcuguaucaggggguuaacuuuuucgaacucccuccgcacguguacgcuauugccgacaaugccuauagaaugaugugcgcugagcugaauaaccauuuuauccugauuucuggagagagcggcgccgggaagaccgaggcuuccaaaaagauccucgaguacuucgccgucacaugucccaugacccagucucugcaaaucgcgcgggaucgccuucuguuuagcaauccugugcucgaagccuucggaaacgcuagaacacugcggaaugacaacuccagccgcuuuggcaaauacauggauauucaguucgacuuucagggcauccccguugggggacacauuaucucuuaucuuauugagaaguccagaguggucuaccagaaugagggcgaacggaacuuccauaucuuuuaucaacugcucgccgggggagaggaagaacgccugagcuaccugggccucgaaagagauccucagcuguauaaguaccuuucucaggggcacugcgcuaaagaguccagcauuucugacaagaaugauuggaaaaccguguccaacgccuucagcgugaucgacuucacggaggcggaucuggaaaaucucuuuggaaucauugccuccguccugcaucuuggcaacaucggcuucgaggaagacgaccaggggugugcuaccauucccgauacacacgagaucaaguggauugccaaacugcucggaguucacccuucugugcugcuggaagcucucacccaucggaagaucgaggccaagacagaggaagugaucugcccgcugacccuugagcugagcgucuaugcccgcgacgcuauggcgaaagccguguacggcagaacguuuacauggcucguuaacaagauuaauuccagccuggugaacaaagauuucacccggaagacagucaucgggcuucuggacauuuacggauuugaaguguucgauaaaaauggcuuugagcaauucuguaucaacuauugcaaugaaaagcuccagcagcugcugauugagcgcacccucaaagcugagcaagccgaauacgagauggaagggaucgagugggagcccaucaaguauuuuaacaauaagauuaucugugaccugguugaagagagacacaaaggaauuaucucuauucuugaugaagagugcauccggccuggccccgccaccgaccuguccuuccucgaaaagcuggaggagaaagugggcaagcaugcucacuuugaaacaagaaaacuggccgggccuaagggacgcaagcggauuggcuggauggaguucagacuucuccacuacgcgggggaagucacguauuguaccaaaggauuucuggagaagaacaaugaucugcucuaccgccaucugaaagaagugcuuugcaagagcaaaaacaucauccugcgggaguguuuccuccuggcugagcuggaaaauagacgccggcccccgacagucggcacccaguucaagaacucucuuagcucccuccuggagacacugauuucuaaggaaccuagcuauaucagaugcauuaaacccaaugaccgcaaggagccuuccaaauuugaugacuuccucauccggcaccagauuaaguaccuggggcuuauggaacaucugagagugcgccgggccggcuuugccuacagacggaaauaugagcacuuccuccagcgcuacaagagccugugccccgacaccuggccccauuggcacggaccuccggcugagggcguugaaagacugaucaaguauaucggguacaaacccgaggaauauaaacuuggaaaaacgaagauuuuuauccgguucccuagaacacucuuugccaccgaggaugcuuucgaguuuucuaaacaccaacugguggcccgcauucaggcgaccuacaagcggugucugggcagacgcgaauaugucaaaaagagacaggccgcuaucaagcucgaggcccauuggcgcggggcucuggcccggaaagcgauucagagacggaagugggccgugcgcaucaucagaaaauucauuaagggauuuaucucccggaacaaaccccuuugcccugacaaugaagaguucauuguuuuugugcgcaagaacuacauccugaaccucagauaccaucugcccaagacaguccuggauaaaagcuggcuucggccgccuggcauucucgaaaaugcuucugaccugcugcgcaagaugugugugagaaaccucgugcaaaaauauugccgggggaucaccgccgagagaaaggcuaugaugcagcagaaaguugucacauccgagaucuuccgcggccggaaggauggauacacggaaagccugaaucagcccuucgugaacuccagaauugacgagggcgauaucaauccuaaggugcuucaacugauuucucacgaaaagauccaguaugggguccccgugauuaaguacgaccgcaaaggauuuaaggcccggcagagacagcucauccugacccaaaaagccgcuuauguuguggagcuggcgaagauuaagcagaaaaucgaauacagcgcccuuaagggcgucuccacaucuaaccugagcgaugggauccucgugauucacguuuccccugaggacagcaaacagaagggagaugcugugcugcaauguggccacgucuucgaggccgugaccaaacucguuaugcuggugaagaaagaaaauaucgucaacguggugcaggggucucuucaguuuuucauuucccccggcaaggagggaacaaucgucuuugacaccggccuggaggaacagguuuauaagaauaaaaacgggcaacucacgguggugagcguccgccggaagucuuga

SEQ ID NO: 2848 - protein, 792 aa, Artificial Sequence
  NA17__Homo_sapiens__Q3V5L5
MITVNPDGKIMVRRCLVTLRPFRLFVLGIGFFTLCFLMTSLGGQFSARRLGDSPFTIRTEVMGGPESRGVLRKMSDLLELMVKRMDALARLENSSELHRAGGDLHFPADRMPPGAGLMERIQAIAQNVSDIAVKVDQILRHSLLLHSKVSEGRRDQCEAPSDPKFPDCSGKVEWMRARWTSDPCYAFFGVDGTECSFLIYLSEVEWFCPPLPWRNQTAAQRAPKPLPKVQAVFRSNLSHLLDLMGSGKESLIFMKKRTKRLTAQWALAAQRLAQKLGATQRDQKQILVHIGFLTEESGDVFSPRVLKGGPLGEMVQWADILTALYVLGHGLRVTVSLKELQSNLGVPPGRGSCPLTMPLPFDLIYTDYHGLQQMKRHMGLSFKKYRCRIRVIDTFGTEPAYNHEEYATLHGYRTNWGYWNLNPKQFMTMFPHTPDNSFMGFVSEELNETEKRLIKGGKASNMAVVYGKEASIWKLQGKEKFLGILNKYMEIHGTVYYESQRPPEVPAFVKNHGLLPQPEFQQLLRKAKLFIGFGFPYEGPAPLEAIANGCIFLQSRFSPPHSSLNHEFFRGKPTSREVFSQHPYAENFIGKPHVWTVDYNNSEEFEAAIKAIMRTQVDPYLPYEYTCEGMLERIHAYIQHQDFCRAPDPALPEAHAPQSPFVLAPNATHLEWARNTSLAPGAWPPAHALRAWLAVPGRACTDTCLDHGLICEPSFFPFLNSQDAFLKLQVPCDSTESEMNHLYPAFAQPGQECYLQKEPLLFSCAGSNTKYRRLCPCRDFRKGQVALCQGCL

SEQ ID NO: 2849 - RNA, 2379 nt, Artificial Sequence
  NA17__Homo_sapiens__BAC84969
augaucaccgucaaccccgaugggaagauaauggucagaagaugccuggucacccugagacccuuucggcuuuuuguccugggcaucggcuucuucacucucugcuuccugaugacgucucugggaggccaguucucggcccggcgccugggggacucgccauucaccauccgcacagaagugauggggggccccgagucccgcggcguccugcgcaagaugagcgaccugcuggagcugauggugaagcgcauggacgcacuggccaggcuggagaacagcagugagcugcaccgggccggcggcgaccugcacuuucccgcagacaggaugcccccuggggccggccucauggagcggauccaggcuauugcccagaacgucuccgacaucgcugugaagguggaccagauccugcgccacagucugcuccugcacagcaaggugucagaaggccggcgggaccagugugaggcacccagugaccccaaguucccugacugcucagggaagguggaguggaugcgugcccgcuggaccucugaccccugcuacgccuucuuugggguggacggcaccgagugcuccuuccucaucuaccucagugaggucgagugguucugccccccgcugcccuggaggaaccagacggcugcccagagggcacccaagccccuccccaaaguccaggcaguuuuccgaagcaaccugucccaccuucuggaccugaugggcagcgggaaggagucccugaucuucaugaagaagcggaccaagaggcucacagcccagugggcgcuggcugcccagcgccuggcacagaagcugggggccacccagagggaccagaagcagauccugguccacaucggcuuccugacggaggaguccggggacguguucagcccucggguccugaagggcgggccccuaggggagauggugcagugggcggacauucugacugcacucuauguccugggccauggccugcgggucacagucucccugaaggagcugcagaguaacuuagggguaccgccaggccggggaagcugcccgcucaccaugccccugcccuucgaccucaucuacaccgacuaccacggccugcagcagaugaagcggcacaugggacucuccuucaagaaguaccggugccgaaucagggucaucgacaccuucgggacggaaccugcguacaaccacgaggaguacgccacgcugcacggcuaccggaccaacuggggcuacuggaaccucaaccccaagcaguucaugaccauguuuccucauacccccgacaacuccuucaugggcuucguguccgaggagcucaacgagacggagaagcggcucaucaaaggcggcaaggccagcaacauggccgugguguacggcaaggaggcgagcaucuggaagcuccaggggaaggagaaguuccugggcauccugaacaaauacauggagauccauggcaccguguacuacgagagccagcggccccccgaggugccagccuuugugaagaaccacggccucuuaccgcagccugaguuucagcagcugcugcgcaaggccaaacucuucaucggguuuggcuuccccuacgagggccccgccccccuggaggccaucgccaaugguugcaucuuccugcagucccgcuucagcccgccccacagcucccucaaccacgaguucuuccgaggcaagcccaccuccagagagguguucucccagcaucccuacgcggagaacuucaucggcaagccccacguguggacagucgacuacaacaacucagaggaguuugaagcagccaucaaggccauuaugagaacucagguagaccccuaccuacccuaugaguacaccugcgaggggaugcuggagcggauccacgccuacauccagcaccaggacuucugcagagcuccagacccugcccuaccagaggcccacgccccgcagagccccuuuguccuggcccccaaugccacccaccucgagugggcucggaacaccagcuuggcuccuggggccuggccccccgcgcacgcccugcgggccuggcuggccgugccugggagggccugcaccgacaccugccuggaccacgggcuaaucugugagcccuccuucuuccccuuccugaacagccaggacgccuuccucaagcugcaggugcccugugacagcaccgagucggagaugaaccaccuguacccggcguucgcccagccuggccaggagugcuaccugcagaaggagccucugcucuucagcugcgccggcuccaacaccaaguaccgccggcucugccccugccgcgacuuccgcaagggccagguggccuugugccagggcugucuguga

SEQ ID NO: 2850 - RNA, 2379 nt, Artificial Sequence
  derived and/or modified sequence opt1 from NA17__Homo_sapiens__BAC84969
augaucaccgugaaccccgacggcaagaucaugguccgccggugccuggugacccuccgcccguuccggcuguucgugcuggggaucggcuucuucacgcucugcuuccugaugaccagccucgggggccaguucuccgcccgccggcugggggacagccccuucaccauccgcaccgaggucaugggcggccccgagucccgcggggugcugcgcaagaugagcgaccugcucgagcugauggugaagcggauggacgcccuggcgcgccucgagaacuccagcgagcugcaccgggccggcggggaccugcacuuccccgccgaccgcaugccgcccggcgccgggcucauggagcggauccaggccaucgcgcagaacgucuccgacaucgccgugaagguggaccagauccugcgccacagccugcuccugcacuccaaggucagcgagggccggcgcgaccagugcgaggcccccuccgaccccaaguucccggacugcagcggcaagguggaguggaugcgggcccgcuggacguccgaccccugcuacgcguucuucgggguggacggcaccgagugcagcuuccugaucuaccucuccgaggucgagugguucugcccgccccugcccuggcggaaccagaccgccgcccagcgcgcccccaagccccugcccaaggugcaggccguguuccggagcaaccucucccaccuccuggaccugauggggagcggcaaggagucccugaucuucaugaagaagcgcaccaagcgccugacggcgcagugggcccucgccgcccagcggcuggcccagaagcugggcgcgacccagcgcgaccagaagcagauccucguccacaucggguuccugaccgaggagagcggcgacguguucagcccgcgggugcugaagggcgggccccucggggagaugguccagugggccgacauccugaccgcccuguacgugcucggccacggccugcgcgugacggucucccugaaggagcuccagagcaaccugggggugccgcccggccggggguccugcccccugaccaugccccuccccuucgaccugaucuacaccgacuaccacggccugcagcagaugaagcgccacauggggcucagcuucaagaaguaccggugccgcauccgggugaucgacaccuucggcacggagcccgccuacaaccacgaggaguacgccacccugcacggcuaccgcaccaacuggggguacuggaaccugaacccgaagcaguucaugaccauguucccccacacgcccgacaacuccuucaugggcuucgucagcgaggagcugaacgagaccgagaagcggcucaucaagggcgggaaggcguccaacauggccguggucuacgggaaggaggccagcaucuggaagcugcagggcaaggagaaguuccugggcauccucaacaaguacauggagauccacgggaccguguacuacgagucccagcggcccccggaggugcccgccuucgucaagaaccacggccugcugccccagccggaguuccagcagcuccugcggaaggccaagcuguucaucggguucggcuuccccuacgagggccccgcgccccucgaggccaucgccaacgggugcaucuuccugcagagccgcuucuccccgccccacagcucccugaaccacgaguucuuccggggcaagcccaccagccgcgagguguucucccagcaccccuacgccgagaacuucaucgggaagccgcacguguggacggucgacuacaacaacagcgaggaguucgaggcggccaucaaggccaucaugcggacccagguggaccccuaccuccccuacgaguacacgugcgagggcaugcuggagcgcauccacgccuacauccagcaccaggacuucugccgggcccccgacccggcgcugcccgaggcccacgcgccccagucccccuucgugcucgccccgaacgccacccaccuggagugggcccgcaacaccagccuggcccccggggccuggccgcccgcccacgcccuccgcgcguggcuggccguccccggccgggccugcaccgacacgugccuggaccacggccucaucugcgagcccuccuucuuccccuuccugaacagccaggacgccuuccugaagcuccaggugcccugcgacagcaccgaguccgagaugaaccaccuguacccggcguucgcccagcccgggcaggagugcuaccugcagaaggagccccuccuguucagcugcgccggcuccaacaccaaguaccgccggcugugcccgugccgcgacuuccggaagggccagguggcccucugccaggggugccuguga

SEQ ID NO: 2851 - RNA, 2379 nt, Artificial Sequence
  derived and/or modified sequence opt2 from NA17__Homo_sapiens__BAC84969
augaucaccgucaaccccgacggcaagaucaugguccgccgcugccucgucacccuccgccccuuccgccucuucguccucggcaucggcuucuucacccucugcuuccucaugaccucccucggcggccaguucuccgcccgccgccucggcgacucccccuucaccauccgcaccgaggucaugggcggccccgagucccgcggcguccuccgcaagauguccgaccuccucgagcucauggucaagcgcauggacgcccucgcccgccucgagaacuccuccgagcuccaccgcgccggcggcgaccuccacuuccccgccgaccgcaugccccccggcgccggccucauggagcgcauccaggccaucgcccagaacgucuccgacaucgccgucaaggucgaccagauccuccgccacucccuccuccuccacuccaaggucuccgagggccgccgcgaccagugcgaggcccccuccgaccccaaguuccccgacugcuccggcaaggucgaguggaugcgcgcccgcuggaccuccgaccccugcuacgccuucuucggcgucgacggcaccgagugcuccuuccucaucuaccucuccgaggucgagugguucugccccccccuccccuggcgcaaccagaccgccgcccagcgcgcccccaagccccuccccaagguccaggccgucuuccgcuccaaccucucccaccuccucgaccucaugggcuccggcaaggagucccucaucuucaugaagaagcgcaccaagcgccucaccgcccagugggcccucgccgcccagcgccucgcccagaagcucggcgccacccagcgcgaccagaagcagauccucguccacaucggcuuccucaccgaggaguccggcgacgucuucuccccccgcguccucaagggcggcccccucggcgagaugguccagugggccgacauccucaccgcccucuacguccucggccacggccuccgcgucaccgucucccucaaggagcuccaguccaaccucggcgucccccccggccgcggcuccugcccccucaccaugccccuccccuucgaccucaucuacaccgacuaccacggccuccagcagaugaagcgccacaugggccucuccuucaagaaguaccgcugccgcauccgcgucaucgacaccuucggcaccgagcccgccuacaaccacgaggaguacgccacccuccacggcuaccgcaccaacuggggcuacuggaaccucaaccccaagcaguucaugaccauguucccccacacccccgacaacuccuucaugggcuucgucuccgaggagcucaacgagaccgagaagcgccucaucaagggcggcaaggccuccaacauggccgucgucuacggcaaggaggccuccaucuggaagcuccagggcaaggagaaguuccucggcauccucaacaaguacauggagauccacggcaccgucuacuacgagucccagcgcccccccgagguccccgccuucgucaagaaccacggccuccucccccagcccgaguuccagcagcuccuccgcaaggccaagcucuucaucggcuucggcuuccccuacgagggccccgccccccucgaggccaucgccaacggcugcaucuuccuccagucccgcuucucccccccccacuccucccucaaccacgaguucuuccgcggcaagcccaccucccgcgaggucuucucccagcaccccuacgccgagaacuucaucggcaagccccacgucuggaccgucgacuacaacaacuccgaggaguucgaggccgccaucaaggccaucaugcgcacccaggucgaccccuaccuccccuacgaguacaccugcgagggcaugcucgagcgcauccacgccuacauccagcaccaggacuucugccgcgcccccgaccccgcccuccccgaggcccacgccccccagucccccuucguccucgcccccaacgccacccaccucgagugggcccgcaacaccucccucgcccccggcgccuggccccccgcccacgcccuccgcgccuggcucgccguccccggccgcgccugcaccgacaccugccucgaccacggccucaucugcgagcccuccuucuuccccuuccucaacucccaggacgccuuccucaagcuccagguccccugcgacuccaccgaguccgagaugaaccaccucuaccccgccuucgcccagcccggccaggagugcuaccuccagaaggagccccuccucuucuccugcgccggcuccaacaccaaguaccgccgccucugccccugccgcgacuuccgcaagggccaggucgcccucugccagggcugccucuga

SEQ ID NO: 2852 - RNA, 2379 nt, Artificial Sequence
  derived and/or modified sequence opt3 from NA17__Homo_sapiens__BAC84969
augaucaccgugaaccccgacggcaagauuauggucagaaggugccugguuacacuccggccuuuccgccuuuuugugcuggggauaggauucuuuacuuuguguuucuuaaugacgagccuggguggccaguuuuccgcccgacgucuaggggauucuccauucaccaucagaacagagguaaugggaggcccggaaucaaggggugugcuccggaaaaugagugaccugcuugagcugauggucaagcgcauggaugcuuuggcaagacucgaaaauagcuccgagcugcacagggccgggggagaccugcauuuucccgcggaucggaugccuccaggcgcuggccucauggaacgcauucaagccaucgcacagaacgugucugacauugccguuaaaguggaucagaucuuacgacacucgcugcuuuugcauucaaaggucagcgaggggagaagggaccagugcgaggcucccagugauccuaaauucccagacuguuccggaaagguggaauggaugcgggcacguuggacuucugaucccugcuacgccuuuuucgguguagacggcaccgaguguagcuuucugauauaucuauccgaaguugagugguucugcccuccacucccguggcgcaaucaaacagcugcccagagagcgcccaagccucugccaaaagugcaggcagucuuuaggucaaaccuuagucaccuguuggaucucauggggagcggaaaggagucucugaucuucaugaaaaagcggaccaaacgauuaacugcccagugggcucuggccgcacaacgccucgcucagaagcugggcgccacacagagagaccagaagcaaauucuggugcauaucgguuucuugaccgaagaguccggggacguguuuucacccaggguccuaaaaggaggcccucugggcgaaaugguucagugggcggauauucucacggcccuguacgugcuugggcacggacugcggguaacugugagcuugaaggagcuccagaguaaucugggugucccacccggccgcgggucuuguccguuaaccaugccucugcccuucgaccuaaucuauacagauuaccacggacuccaacagaugaaaagacauaugggccuguccuuuaagaaauauaggugccguauacgggugauugacacuuucgguaccgaaccagcauacaaccacgaggaguaugcuacacuucauggguaccgaaccaauuggggcuacuggaacuugaauccuaagcaguuuaugacgauguucccccacacuccagauaacagcuuuaugggauucguuucggaggaacugaaugaaacagagaaaagacucaucaagggcgggaaggccucuaacauggcuguggucuauggaaaagaagccuccauuuggaagcugcaggguaaagagaaguuucuuggcauccugaauaaauacauggagauccacgggaccguguauuacgaaucacaaaggcccccugagguaccagcauucguuaagaaccauggauugcucccgcagcccgaauuucagcagcuguuacgcaaggccaaacuguucauuggcuuugguuucccuuaugaggggccagcuccccuagaagcgauagcaaauggcuguaucuuccuccaaagucgguuuagcccuccacacuccucucugaaccaugaguucuuuagaggaaagcccacuagcagggagguguucucacagcacccguacgccgaaaacuuuauuggcaaaccucaugucuggacaguggacuauaauaacagugaggaauuugaggcugccaucaaggcaauaaugcgcacccaggucgauccauaccuucccuacgaguauacgugcgaagggauguuggagcggauucacgccuacauccagcaccaagacuuuugucgagcuccugaucccgcccugccagaagcacaugcgccucagucccccuucgugcucgcuccaaaugccacccaccuggagugggcacguaacacaagccuggccccgggagcuuggccucccgcccaugcacugagagcuuggcuugccguuccagguagggcgugcacugauaccugcuuggaccacggccucaucugugaacccucuuucuucccuuuucuuaauucacaggacgccuuccuaaaauuacaggugccaugcgacaguacagagagcgagaugaaccaccucuaucccgcuuuugcacaaccugggcaggaauguuaccugcagaaggagccgcuuuuguucuccugcgccggaucuaauacuaaguaucgccggcuguguccaugcagagauuucaggaaaggccaaguagcuuuaugucaggguugccucuga

SEQ ID NO: 2853 - RNA, 2379 nt, Artificial Sequence
  derived and/or modified sequence opt4 from NA17__Homo_sapiens__BAC84969
augaucaccgugaaccccgacggcaagaucauggugagaagaugccuggugacccugagacccuucagacuguucgugcugggcaucggcuucuucacccugugcuuccugaugaccagccugggcggccaguucagcgccagaagacugggcgacagccccuucaccaucagaaccgaggugaugggcggccccgagagcagaggcgugcugagaaagaugagcgaccugcuggagcugauggugaagagaauggacgcccuggccagacuggagaacagcagcgagcugcacagagccggcggcgaccugcacuuccccgccgacagaaugccccccggcgccggccugauggagagaauccaggccaucgcccagaacgugagcgacaucgccgugaagguggaccagauccugagacacagccugcugcugcacagcaaggugagcgagggcagaagagaccagugcgaggcccccagcgaccccaaguuccccgacugcagcggcaagguggaguggaugagagccagauggaccagcgaccccugcuacgccuucuucggcguggacggcaccgagugcagcuuccugaucuaccugagcgagguggagugguucugccccccccugcccuggagaaaccagaccgccgcccagagagcccccaagccccugcccaaggugcaggccguguucagaagcaaccugagccaccugcuggaccugaugggcagcggcaaggagagccugaucuucaugaagaagagaaccaagagacugaccgcccagugggcccuggccgcccagagacuggcccagaagcugggcgccacccagagagaccagaagcagauccuggugcacaucggcuuccugaccgaggagagcggcgacguguucagccccagagugcugaagggcggcccccugggcgagauggugcagugggccgacauccugaccgcccuguacgugcugggccacggccugagagugaccgugagccugaaggagcugcagagcaaccugggcgugccccccggcagaggcagcugcccccugaccaugccccugcccuucgaccugaucuacaccgacuaccacggccugcagcagaugaagagacacaugggccugagcuucaagaaguacagaugcagaaucagagugaucgacaccuucggcaccgagcccgccuacaaccacgaggaguacgccacccugcacggcuacagaaccaacuggggcuacuggaaccugaaccccaagcaguucaugaccauguucccccacacccccgacaacagcuucaugggcuucgugagcgaggagcugaacgagaccgagaagagacugaucaagggcggcaaggccagcaacauggccgugguguacggcaaggaggccagcaucuggaagcugcagggcaaggagaaguuccugggcauccugaacaaguacauggagauccacggcaccguguacuacgagagccagagaccccccgaggugcccgccuucgugaagaaccacggccugcugccccagcccgaguuccagcagcugcugagaaaggccaagcuguucaucggcuucggcuuccccuacgagggccccgccccccuggaggccaucgccaacggcugcaucuuccugcagagcagauucagccccccccacagcagccugaaccacgaguucuucagaggcaagcccaccagcagagagguguucagccagcaccccuacgccgagaacuucaucggcaagccccacguguggaccguggacuacaacaacagcgaggaguucgaggccgccaucaaggccaucaugagaacccagguggaccccuaccugcccuacgaguacaccugcgagggcaugcuggagagaauccacgccuacauccagcaccaggacuucugcagagcccccgaccccgcccugcccgaggcccacgccccccagagccccuucgugcuggcccccaacgccacccaccuggagugggccagaaacaccagccuggcccccggcgccuggccccccgcccacgcccugagagccuggcuggccgugcccggcagagccugcaccgacaccugccuggaccacggccugaucugcgagcccagcuucuuccccuuccugaacagccaggacgccuuccugaagcugcaggugcccugcgacagcaccgagagcgagaugaaccaccuguaccccgccuucgcccagcccggccaggagugcuaccugcagaaggagccccugcuguucagcugcgccggcagcaacaccaaguacagaagacugugccccugcagagacuucagaaagggccagguggcccugugccagggcugccuguga

SEQ ID NO: 2854 - RNA, 2379 nt, Artificial Sequence
  derived and/or modified sequence opt5 from NA17__Homo_sapiens__BAC84969
augaucaccgugaaccccgacggcaagauuauggucagacggugccugguuacacuccgcccuuucagacuguuugugcuugggaucggauucuuuacgcuguguuuccucaugaccagccugggcgggcaguuuuccgcccggcgccuuggagauucuccguucacaauuagaaccgaggugaugggcgggcccgaaagccggggaguccugcgcaaaauguccgaccuccuggagcugauggugaagagaauggaugcucucgcccggcuggaaaauucuagcgagcuucaccgcgcgggcggcgaccugcauuuuccugcugauagaaugcccccuggggccggacucauggaacggauccaagccauugcucagaacguuuccgacaucgccgugaaagucgaucagauccugcgccacucucuucugcuccauagcaagguguccgagggcagacgggaccagugcgaggcucccagcgauccuaaauucccggacuguucugggaagguugaauggaugcgcgccagauggacauccgaucccugcuacgcguuuuucggaguggacggcaccgaguguagcuuucugauuuaucugucugaagucgagugguucugcccuccccucccuuggcggaaucaaacagccgcucagagagcccccaagccgcugccuaaagugcaggcuguguuucgcuccaaccuuagccaucugcucgaucugauggggucuggaaaggagucccuuaucuucaugaaaaagcggaccaaaagacugacggcccagugggcgcucgccgcucaacgccuggcccagaagcugggcgcuacccagcgggaccagaagcaaauucucguccacaucggcuuccugacagaagagagcggggacguuuucucccccagagugcuuaaaggaggcccucugggggaaauggugcagugggccgauauucucaccgcccuguacguccuuggacacggccugcgcgugacaguuucucucaaggagcugcagagcaaucugggggugccucccggacggggcuccuguccccucaccaugccgcugcccuucgaccuuaucuauacggauuaccacggccugcaacagaugaaaagacauauggggcucagcuuuaagaaauaucgcugccggauuagagucaucgacacauucggaaccgaaccugcuuacaaccacgaggaguaugcgacacugcauggcuaccgcaccaauuggggguacuggaaccugaaucccaagcaguuuaugaccauguucccucacacacccgauaacucuuuuaugggauucguguccgaggaacuuaaugaaacggagaaacggcucaucaagggcgggaaggccagcaacauggcuguuguguauggcaaagaagccucuauuuggaagcugcagggaaaagagaaguuucugggcauccucaauaaauacauggagauucacgggaccgucuauuacgaaagccaaagaccgccugaggugcccgccuucgucaagaaccauggacugcuuccucagcccgaauuucagcagcugcuccggaaggcuaaacuguucaucggcuuuggguucccuuaugagggacccgccccgcuggaagcgauugcuaauggcuguaucuuccuucaaucccgcuuuucuccuccccacagcucccucaaccaugaguucuuuagagggaagcccacaagccgggagguguucucucagcacccuuacgccgaaaacuuuaucggcaaaccgcauguuuggaccguggacuauaauaacuccgaggaauuugaggccgcuauuaaggccaucaugagaacacaggucgaucccuaccugccuuacgaguauaccugcgaaggaaugcuggagcgcauucacgcuuacauccagcaccaagacuuuugucgggcccccgauccugcgcuccccgaagcccaugcuccucagagccccuucgugcuggccccgaaugcuacgcaccuugagugggccagaaacacaucucuggcgccuggcgccuggcccccugcucaugcccuccgcgcuuggcuggccguucccgggagagccugcaccgauaccugccuggaccacggacuuauuugugaaccguccuuuuucccuuuucucaauagccaggacgcuuuccugaaacuccaggugcccugcgacuccacagagucugagaugaaccaccuguauccugcguuugcccaacccggccaggaauguuaccugcagaaggagccccuucuguucagcugcgcuggguccaauaccaaguaucggcgccucuguccuugcagagauuuccggaaaggacaagucgcccugugucagggcugccuguga

SEQ ID NO: 2855 - protein, 11 aa, Artificial Sequence
  NA88-A__Homo_sapiens__10790436
MTQGQHFLQKV

SEQ ID NO: 2856 - RNA, 36 nt, Artificial Sequence
  NA88-A__Homo_sapiens__AF164963.1
augacucaaggacagcacuuccugcagaaagucuag

SEQ ID NO: 2857 - RNA, 36 nt, Artificial Sequence
  derived and/or modified sequence opt1 from NA88-A__Homo_sapiens__AF164963.1
augacccagggccagcacuuccugcagaagguguga

SEQ ID NO: 2858 - RNA, 36 nt, Artificial Sequence
  derived and/or modified sequence opt2 from NA88-A__Homo_sapiens__AF164963.1
augacccagggccagcacuuccuccagaaggucuga

SEQ ID NO: 2859 - RNA, 36 nt, Artificial Sequence
  derived and/or modified sequence opt3 from NA88-A__Homo_sapiens__AF164963.1
augacccagggccaacacuuccugcagaagguguga

SEQ ID NO: 2860 - RNA, 36 nt, Artificial Sequence; identical to SEQ ID NO: 2857
  derived and/or modified sequence opt4 from NA88-A__Homo_sapiens__AF164963.1

SEQ ID NO: 2861 - RNA, 36 nt, Artificial Sequence; identical to SEQ ID NO: 2859
  derived and/or modified sequence opt5 from NA88-A__Homo_sapiens__AF164963.1

SEQ ID NO: 2862 - protein, 736 aa, Artificial Sequence
  Neo-PAP__Homo_sapiens__Q9BWT3
MKEMSANTVLDSQRQQKHYGITSPISLASPKEIDHIYTQKLIDAMKPFGVFEDEEELNHRLVVLGKLNNLVKEWISDVSESKNLPPSVVATVGGKIFTFGSYRLGVHTKGADIDALCVAPRHVERSDFFQSFFEKLKHQDGIRNLRAVEDAFVPVIKFEFDGIEIDLVFARLAIQTISDNLDLRDDSRLRSLDIRCIRSLNGCRVTDEILHLVPNKETFRLTLRAVKLWAKRRGIYSNMLGFLGGVSWAMLVARTCQLYPNAAASTLVHKFFLVFSKWEWPNPVLLKQPEESNLNLPVWDPRVNPSDRYHLMPIITPAYPQQNSTYNVSTSTRTVMVEEFKQGLAVTDEILQGKSDWSKLLEPPNFFQKYRHYIVLTASASTEENHLEWVGLVESKIRVLVGNLERNEFITLAHVNPQSFPGNKEHHKDNNYVSMWFLGIIFRRVENAESVNIDLTYDIQSFTDTVYRQANNINMLKEGMKIEATHVKKKQLHHYLPAEILQKKKKQSLSDVNRSSGGLQSKRLSLDSSCLDSSRDTDNGTPFNSPASKSDSPSVGETERNSAEPAAVIVEKPLSVPPAQGLSIPVIGAKVDSTVKTVSPPTVCTIPTVVGRNVIPRITTPHNPAQGQPHLNGMSNITKTVTPKRSHSPSIDGTPKRLKDVEKFIRLESTFKDPRTAEERKRKSVDAIGGESMPIPTIDTSRKKRLPSKELPDSSSPVPANNIRVIKNSIRLTLNR

SEQ ID NO: 2863 - RNA, 2211 nt, Artificial Sequence
  Neo-PAP__Homo_sapiens__AAI11702
augaaagagaugucugcaaacaccgugcuggacagccagcgucaacaaaagcauuauggaauuaccuccccaauuaguuuggcaucuccuaaagaaauugaucauauuuacacacagaaauuaauugacgccaugaaaccauuuggaguguuugaagaugaggaagaauugaaccacaggcuggugguucuugguaaauugaacaauuuaguaaaagaauggauuucugaugucagcgagaguaagaaccucccaccuucuguuguggcuacuguuggugguaaaauuuucacauuuggauccuauaggcuuggaguacacaccaaaggagcugacauugaugcacuuuguguagcuccaagacauguggaaagaucugauuuuuuucagucuuuuuuugaaaaauugaaacaucaagauggcauuagaaacuuaagagcuguagaagaugccuuuguaccuguuauaaaauuugaauuugaugguauugaaauugaucuagucuuugcaagacuggcaauacaaaccauaucagauaauuuagaucuaagagacgacucucgccugagaagccuugauauaagguguauucgcagcuuaaaugguuguagaguuacugaugaaauuuugcauuuagugccaaauaaagaaacuuuuagacucacccuaagagcugucaaauuaugggcaaaacgacgugguauuuauuccaacaugcuaggauuccuugguggugucuccugggcaaugcuaguugcaagaacuugccaauuguauccaaaugcagcagcaucuacuuuaguucauaaguucuuuuuaguuuuuuccaagugggaauggccaaauccugugcugcugaagcaaccagaagaaagcaauuugaauuugccugucugggauccucggguaaauccaucagauagguaucaucucaugcccauaaucaccccugccuacccacaacagaauucuacguauaauguguccacaucaacucgaacaguaaugguagaagaauuuaaacaaggucuugcagucacagaugaaauucuucaaggaaagucagauugguccaaacuacuugagccaccgaauuucuuucaaaaguauagacauuauauaguauugacugccagcgcaucaacagaagaaaaccaucuagaguggguuggauuaguagaaucuaaaauccguguacuuguuggaaacuuggaacggaaugaauuuauuacucuugcccaugugaauccccagucauucccagggaauaaggaacaucauaaagacaacaauuacguaucaaugugguuccuugggauaauuuuucggagaguagaaaaugcagaaagugucaacauagacuugacauaugauauacagucauuuacugauacaguguacagacaggcaaacaauauaaauaugcuaaaggagggaaugaaaauugaagcaacucauguaaagaaaaaacaacuucaccacuaccuuccugcagaaauucuucaaaagaagaaaaagcaaagucucucugaugucaaucgaagcucgggcggacuucaauccaaaagauugucucuggauagcaguugucuggauagcuccagagacacugauaauggaacaccuuuuaauucuccagcguccaagucugauagcccuucuguaggagaaacagaaaggaauagugcugagccugcugcuguaauuguggagaagccacugaguguaccaccagcccaaggacuuuccauuccagugauuggcgcaaaaguugacucuacaguaaaaacuguaucaccccccacuguguguaccauuccuaccguaguaggacgaaaugucauuccuagaaucacaacaccucacaacccugcccagggacaaccgcaucugaauggaaugucaaauauaacuaagacuguuacaccuaagagaucccauuccccauccauagaugggacuccuaagagguugaaagacguagaaaaguuuauucgacuugaaucaacauuuaaggacccccgcacugcugaagaaagaaaaagaaaaucaguggaugccauuggaggagaaucuaugccuauuccaacuauugauacaucacgcaaaaagagacuacccaguaaagaacuaccagauucaucaucuccaguuccagcaaacaacauccgugucaucaaaaauuccauucgacugacccuuaaucgguaa

SEQ ID NO: 2864 - RNA, 2211 nt, Artificial Sequence
  derived and/or modified sequence opt1 from Neo-PAP__Homo_sapiens__AAI11702
augaaggagaugagcgccaacaccgugcuggacucccagcgccagcagaagcacuacggcaucaccagccccaucucccucgccagcccgaaggagaucgaccacaucuacacgcagaagcugaucgacgcgaugaagcccuucggggucuucgaggacgaggaggagcugaaccaccggcucguggugcugggcaagcugaacaaccucgucaaggaguggaucuccgacgugagcgaguccaagaaccugccgcccagcguggucgccaccgucgggggcaagaucuucaccuucggguccuaccgccugggcgugcacaccaagggcgccgacaucgacgcccucugcgucgccccgcggcacguggagcgcagcgacuucuuccaguccuucuucgagaagcugaagcaccaggacgggauccggaaccugcgcgcgguggaggacgccuucguccccgugaucaaguucgaguucgacggcaucgagaucgaccucguguucgcccggcuggccauccagacgaucagcgacaaccuggaccuccgcgacgacucccggcugcgcagccuggacauccggugcauccgcucccucaacgggugccgggucaccgacgagauccugcaccuggugcccaacaaggagaccuuccgccucacccugcgggcggugaagcugugggccaagcgccggggcaucuacagcaacaugcucggguuccugggcggcgucuccugggccaugcugguggcccgcacgugccagcucuaccccaacgccgcggccagcacccuggugcacaaguucuuccuggucuucuccaagugggaguggccgaaccccgugcuccugaagcagcccgaggagagcaaccugaaccuccccgugugggacccgcgggucaaccccagcgaccgcuaccaccugaugcccaucaucacccccgccuacccgcagcagaacuccaccuacaacgugagcacguccacccggaccgucaugguggaggaguucaagcaggggcuggccgugaccgacgagauccuccagggcaagagcgacugguccaagcugcuggagccgcccaacuucuuccagaaguaccgccacuacaucguccucacggccagcgcguccaccgaggagaaccaccuggaguggguggggcugguggagagcaagauccgcguccucgugggcaaccuggagcggaacgaguucaucacccuggcccacgugaacccccaguccuuccccggcaacaaggagcaccacaaggacaacaacuacgucagcaugugguuccucgggaucaucuuccgccggguggagaacgccgaguccgugaacaucgaccugaccuacgacauccagagcuucacggacaccgucuaccgccaggccaacaacaucaacaugcugaaggagggcaugaagaucgaggccacccacgugaagaagaagcagcuccaccacuaccugcccgcggagauccugcagaagaagaagaagcagucccugagcgacgugaaccgguccagcgggggccuccaguccaagcgccugagccuggacuccagcugccucgacagcucccgggacaccgacaacgggacgcccuucaacagccccgccuccaagagcgacuccccgagcgucggcgagaccgagcgcaacuccgccgagcccgccgccgugaucguggagaagccccugagcgugcccccggcgcagggccuguccauccccgugaucggggccaagguggacagcaccgucaagaccguguccccgcccacggugugcaccauccccaccgucgugggccggaacgugaucccccgcaucaccacgccccacaaccccgcccaggggcagccccaccucaacggcaugagcaacaucaccaagaccgucacccccaagcggucccacagccccuccaucgacgggacgccgaagcgccugaaggacguggagaaguucauccggcuggagagcaccuucaaggacccccgcaccgccgaggagcggaagcgcaaguccguggacgcgaucggcggcgagagcaugcccauccccaccaucgacaccagccggaagaagcgccucccguccaaggagcugcccgacagcuccagccccguccccgccaacaacauccgggugaucaagaacuccauccgccugacgcucaaccgcuga

SEQ ID NO: 2865 - RNA, 2211 nt, Artificial Sequence
  derived and/or modified sequence opt2 from Neo-PAP__Homo_sapiens__AAI11702
augaaggagauguccgccaacaccguccucgacucccagcgccagcagaagcacuacggcaucaccucccccaucucccucgccucccccaaggagaucgaccacaucuacacccagaagcucaucgacgccaugaagcccuucggcgucuucgaggacgaggaggagcucaaccaccgccucgucguccucggcaagcucaacaaccucgucaaggaguggaucuccgacgucuccgaguccaagaaccucccccccuccgucgucgccaccgucggcggcaagaucuucaccuucggcuccuaccgccucggcguccacaccaagggcgccgacaucgacgcccucugcgucgccccccgccacgucgagcgcuccgacuucuuccaguccuucuucgagaagcucaagcaccaggacggcauccgcaaccuccgcgccgucgaggacgccuucguccccgucaucaaguucgaguucgacggcaucgagaucgaccucgucuucgcccgccucgccauccagaccaucuccgacaaccucgaccuccgcgacgacucccgccuccgcucccucgacauccgcugcauccgcucccucaacggcugccgcgucaccgacgagauccuccaccucguccccaacaaggagaccuuccgccucacccuccgcgccgucaagcucugggccaagcgccgcggcaucuacuccaacaugcucggcuuccucggcggcgucuccugggccaugcucgucgcccgcaccugccagcucuaccccaacgccgccgccuccacccucguccacaaguucuuccucgucuucuccaagugggaguggcccaaccccguccuccucaagcagcccgaggaguccaaccucaaccuccccgucugggacccccgcgucaaccccuccgaccgcuaccaccucaugcccaucaucacccccgccuacccccagcagaacuccaccuacaacgucuccaccuccacccgcaccgucauggucgaggaguucaagcagggccucgccgucaccgacgagauccuccagggcaaguccgacugguccaagcuccucgagccccccaacuucuuccagaaguaccgccacuacaucguccucaccgccuccgccuccaccgaggagaaccaccucgagugggucggccucgucgaguccaagauccgcguccucgucggcaaccucgagcgcaacgaguucaucacccucgcccacgucaacccccaguccuuccccggcaacaaggagcaccacaaggacaacaacuacgucuccaugugguuccucggcaucaucuuccgccgcgucgagaacgccgaguccgucaacaucgaccucaccuacgacauccaguccuucaccgacaccgucuaccgccaggccaacaacaucaacaugcucaaggagggcaugaagaucgaggccacccacgucaagaagaagcagcuccaccacuaccuccccgccgagauccuccagaagaagaagaagcagucccucuccgacgucaaccgcuccuccggcggccuccaguccaagcgccucucccucgacuccuccugccucgacuccucccgcgacaccgacaacggcacccccuucaacucccccgccuccaaguccgacucccccuccgucggcgagaccgagcgcaacuccgccgagcccgccgccgucaucgucgagaagccccucuccgucccccccgcccagggccucuccauccccgucaucggcgccaaggucgacuccaccgucaagaccgucuccccccccaccgucugcaccauccccaccgucgucggccgcaacgucaucccccgcaucaccaccccccacaaccccgcccagggccagccccaccucaacggcauguccaacaucaccaagaccgucacccccaagcgcucccacucccccuccaucgacggcacccccaagcgccucaaggacgucgagaaguucauccgccucgaguccaccuucaaggacccccgcaccgccgaggagcgcaagcgcaaguccgucgacgccaucggcggcgaguccaugcccauccccaccaucgacaccucccgcaagaagcgccuccccuccaaggagcuccccgacuccuccucccccguccccgccaacaacauccgcgucaucaagaacuccauccgccucacccucaaccgcuga

SEQ ID NO: 2866 - RNA, 2211 nt, Artificial Sequence
  derived and/or modified sequence opt3 from Neo-PAP__Homo_sapiens__AAI11702
augaaggagaugagcgccaacaccgugcuggacucccagagacaacagaaacacuacggcaucacaucucccauuucacucgcuaguccuaaggaaauagaucauaucuauacucagaaacuuauugacgcaaugaagccauucggggucuuugaggaugaagaggaacugaaucacagguugguuguguuaggaaaacugaacaaucuaguaaaggaguggaucagcgacguguccgagucuaagaaccucccgcccucggucguggccacgguugguggcaaaauuuucaccuuugggucauaccggcugggagugcauacaaagggcgcggauaucgacgcucuuugcgucgccccucgccacguggaacgaagcgauuucuuucagaguuucuuugagaaacugaagcaucaagacgguauacguaauuugagagcaguagaagaugccuucguuccagugaucaaauuugaguucgacgggauugagaucgaucucgucuuugcuaggcuggcaauucagacuaucuccgacaaccuggaucuccgggacgacucucgcuuaagaagccuggauauaagguguauucggucccuuaauggaugccgcgugaccgacgaaaucuugcaccuggugcccaacaaggagacauuccgacuaacccucagagccgucaagcugugggcuaaaaggcggggcauuuauucaaauaugcuuggcuuucugggagggguuaguugggccauguugguggcgcguacuugucagcucuacccuaacgcagccgcuagcacacugguacacaaguucuucuuaguguuuucuaaaugggaauggccaaaucccguccugcucaagcagccugaggaauccaaccuuaaucugccagugugggauccgcgcguuaaccccucagacagauaucauuugaugccuaucaucaccccagccuacccccaacagaauagcacguauaacgugaguacuucuaccaggacagucaugguggaggaguucaaacagggucuagcaguaacugaugaaauucugcagggcaaguccgacuggagcaaacuccuggagccuccaaacuuuuuccaaaaguaccggcacuacauaguucuuaccgcuucggccucuacagaagagaaucaucuggaaugggugggguuggucgaguccaagauccgagugcucgucggaaaccuggagcgcaaugaauuuauuaccuuagcgcacgugaacccccagucauucccgggcaauaaagagcaccauaaggauaacaauuauguuaguaugugguuucuggguaucauauucagaaggguggaaaacgccgagagcguaaauauugaccuaacguacgauauccaguccuuuacugacacagucuaucggcaagcaaacaauaucaacaugcucaaagaagggaugaagauugaggcuacccacgugaaaaagaagcagcugcaucacuaccuuccugccgagaucuugcagaaaaagaaaaagcagucucugagcgauguuaaucgcucaaguggaggccuccaauccaaaagacugagccuugacucuucaugccuggacaguagcagggauacugacaacggcacacccuucaauuccccagcuucuaagucggauagcccuuccgugggggaaaccgagcguaacucagccgaacccgcagccgucauuguggagaagccauugaguguacccccugcucagggacucucuauaccagugaucggugcgaaaguugacagcacggucaagaccguguccccgcccacaguguguacuauuccuaccgucguuggccggaacgugaucccacgaaucacaacuccccauaauccugcacaggggcagccacaccugaacggaaugucaaauauuaccaaaacagugacccccaagagaagccacucuccguccauagauggcacuccuaaaagguuaaaggacguagagaaguuuauccgccuggaaaguacguucaaagauccacggacagccgaggaaagaaagaggaaaagcgucgacgcuauugguggggagucuaugcccaucccuaccauugauacuucccgcaagaaacgacuacccucaaaggaacucccagacaguagcucgccugugcccgccaacaauauccggguuaucaaaaacuccauacgucugacccuuaauagauga

SEQ ID NO: 2867 - RNA, 2211 nt, Artificial Sequence
  derived and/or modified sequence opt4 from Neo-PAP__Homo_sapiens__AAI11702
augaaggagaugagcgccaacaccgugcuggacagccagagacagcagaagcacuacggcaucaccagccccaucagccuggccagccccaaggagaucgaccacaucuacacccagaagcugaucgacgccaugaagcccuucggcguguucgaggacgaggaggagcugaaccacagacugguggugcugggcaagcugaacaaccuggugaaggaguggaucagcgacgugagcgagagcaagaaccugccccccagcgugguggccaccgugggcggcaagaucuucaccuucggcagcuacagacugggcgugcacaccaagggcgccgacaucgacgcccugugcguggcccccagacacguggagagaagcgacuucuuccagagcuucuucgagaagcugaagcaccaggacggcaucagaaaccugagagccguggaggacgccuucgugcccgugaucaaguucgaguucgacggcaucgagaucgaccugguguucgccagacuggccauccagaccaucagcgacaaccuggaccugagagacgacagcagacugagaagccuggacaucagaugcaucagaagccugaacggcugcagagugaccgacgagauccugcaccuggugcccaacaaggagaccuucagacugacccugagagccgugaagcugugggccaagagaagaggcaucuacagcaacaugcugggcuuccugggcggcgugagcugggccaugcugguggccagaaccugccagcuguaccccaacgccgccgccagcacccuggugcacaaguucuuccugguguucagcaagugggaguggcccaaccccgugcugcugaagcagcccgaggagagcaaccugaaccugcccgugugggaccccagagugaaccccagcgacagauaccaccugaugcccaucaucacccccgccuacccccagcagaacagcaccuacaacgugagcaccagcaccagaaccgugaugguggaggaguucaagcagggccuggccgugaccgacgagauccugcagggcaagagcgacuggagcaagcugcuggagccccccaacuucuuccagaaguacagacacuacaucgugcugaccgccagcgccagcaccgaggagaaccaccuggagugggugggccugguggagagcaagaucagagugcuggugggcaaccuggagagaaacgaguucaucacccuggcccacgugaacccccagagcuuccccggcaacaaggagcaccacaaggacaacaacuacgugagcaugugguuccugggcaucaucuucagaagaguggagaacgccgagagcgugaacaucgaccugaccuacgacauccagagcuucaccgacaccguguacagacaggccaacaacaucaacaugcugaaggagggcaugaagaucgaggccacccacgugaagaagaagcagcugcaccacuaccugcccgccgagauccugcagaagaagaagaagcagagccugagcgacgugaacagaagcagcggcggccugcagagcaagagacugagccuggacagcagcugccuggacagcagcagagacaccgacaacggcacccccuucaacagccccgccagcaagagcgacagccccagcgugggcgagaccgagagaaacagcgccgagcccgccgccgugaucguggagaagccccugagcgugccccccgcccagggccugagcauccccgugaucggcgccaagguggacagcaccgugaagaccgugagcccccccaccgugugcaccauccccaccguggugggcagaaacgugauccccagaaucaccaccccccacaaccccgcccagggccagccccaccugaacggcaugagcaacaucaccaagaccgugacccccaagagaagccacagccccagcaucgacggcacccccaagagacugaaggacguggagaaguucaucagacuggagagcaccuucaaggaccccagaaccgccgaggagagaaagagaaagagcguggacgccaucggcggcgagagcaugcccauccccaccaucgacaccagcagaaagaagagacugcccagcaaggagcugcccgacagcagcagccccgugcccgccaacaacaucagagugaucaagaacagcaucagacugacccugaacagauga

SEQ ID NO: 2868 - RNA, 2211 nt, Artificial Sequence
  derived and/or modified sequence opt5 from Neo-PAP__Homo_sapiens__AAI11702
augaaggagaugagcgccaacaccgugcuggacucccagagacaacagaaacacuacggcaucacaucucccauuagccucgcuuccccuaaggaaaucgaucauauuuauacgcagaaacugaucgacgccaugaagccguucggggucuuugaggaugaagaggaacuuaaucaccggcugguugugcucggaaaacugaacaaucuugugaaggaguggauuucugacgucagcgaguccaagaaccugcccccuucugugguugcgaccgugggcgggaaaaucuucacauuuggaagcuaccgccucggcguccauaccaagggggcugauaucgacgcccugugcguggcccccagacacguugaacgguccgauuucuuucagagcuucuuugagaaacugaagcaucaagacggcauucgcaaucucagagcuguggaagaugccuucgucccugugaucaaauuugaguucgacggaauugagaucgaucugguguuugcucggcuugccauucagacaaucucugacaaccuggaucuccgcgacgacuccagacugcggagccuugauauucgcuguaucagaucucugaauggcugccgggucaccgacgaaauccuccaccugguucccaacaaggagacauuccgccugacccucagagcggugaagcugugggccaaacggcgcgggauuuauuccaauaugcuuggauuucugggcggggugagcugggcuaugcucgucgccagaacgugucagcuguacccuaacgcugccgcgucuacccuugugcacaaguucuuccugguguuuuccaaaugggaauggccgaaucccguucuccugaagcagccugaggaaagcaaccugaaucuccccgucugggauccucgggugaaccccuccgacagauaucaucugaugccgaucauuaccccugccuacccccaacaaaauucuacauauaacguuagcacauccacccgcacggugauggucgaggaguucaaacagggacuugcugugacagaugaaauccugcagggcaagagcgacuggucuaaacuccuggagccucccaacuuuuuccagaaguaccggcacuacauuguccuuaccgccuccgcuagcacagaagagaaucaucuggaauggguggggcucguugagucuaagaucagagugcuggucggaaaccuggagcgcaaugaauuuaucacccucgcccacgugaacccccagagcuucccuggcaauaaagagcaccauaaggauaacaauuauguuuccaugugguuucugggcauuaucuuccggagaguggaaaacgccgagucugucaauauugaccuuaccuacgauauccagagcuuuacagacacgguguaucgccaagcuaacaauauuaacaugcugaaagaagggaugaagaucgaggcgacccacgugaaaaagaagcagcuccaucacuaccugccggccgagauccugcagaaaaagaaaaagcagucccuuagcgauguuaaucggucuuccggaggccuccaaagcaaaagacugucucuggacuccagcugccucgacuccucucgcgauacagacaacgggacccccuucaauagcccugcuuccaagucugauagccccuccgucggagaaacagagcggaacagcgccgaaccugccgcugugauuguggagaagccccugucugucccgccugcccagggccuuuccauccccgugauuggggcgaaaguugacagcaccgugaagacggucucuccucccacaguguguaccaucccuaccguugugggaagaaacgucauuccccgcaucacaaccccgcauaauccugcucagggccagccccaccugaacggcauguccaauauuacaaaaacggugacccccaagcggagccacucuccuagcaucgaugggacaccgaaaagacucaaggacguugagaaguuuauccggcuggaauccaccuucaaagauccccgcacagccgaggaaagaaagcggaaaagcguggacgccauuggaggcgagucuaugccuauccccaccauugauacguccagaaagaaacgccugccuagcaaggaacuucccgacuccucuagcccuguccccgcuaacaauauccgggugauuaaaaacuccaucagacucacccugaaucgcuga

SEQ ID NO: 2869 - protein, 458 aa, Artificial Sequence
  NFYC/m__Homo_sapiens__Q13952
MSTEGGFGGTSSSDAQQSLQSFWPRVMEEIRNLTVKDFRVQELPLARIKKIMKLDEDVKMISAEAPVLFAKAAQIFITELTLRAWIHTEDNKRRTLQRNDIAMAITKFDQFDFLIDIVPRDELKPPKRQEEVRQSVTPAEPVQYYFTLAQQPTAVQVQGQQQGQQTTSSTTTIQPGQIIIAQPQQGQTTPVTMQVGEGQQVQIVQAQPQGQAQQAQSGTGQTMQVMQQIITNTGEIQQIPVQLNAGQLQYIRLAQPVSGTQVVQGQIQTLATNAQQGQRNASQGKPRRCLKETLQITQTEVQQGQQQFSQFTDGQRNSVQQARVSELTGEAEPREVKATGNSTPCTSSLPTTHPPSHRAGASCVCCSQPQQSSTSPPPSDALQWVVVEVSGTPNQLETHRELHAPLPGMTSLSPLHPSQQLYQIQQVTMPAGQDLAQPMFIQSANQPSDGQAPQVTGD

SEQ ID NO: 2870 - RNA, 1377 nt, Artificial Sequence
  NFYC/m__Homo_sapiens__AAG28389
auguccacagaaggaggauuuggugguacuagcagcagugaugcccagcaaagucuacagucguucuggccucgggucauggaagaaauccggaauuuaacagugaaagacuuccgagugcaggaacucccacuggcucguauuaagaagauuaugaaacuggaugaagaugugaagaugaucagugcagaagcgccuguacucuuugccaaggcagcccagauuuuuaucacagaguugacucuucgagccuggauucacacagaagauaacaagcgccggacucuacagagaaaugauaucgccauggcaauuacaaaauuugaucaguuugauuuucucaucgauauuguuccaagagaugaacugaaaccuccaaagcgucaggaggaggugcgccagucuguaacuccugccgagccaguccaguacuauuucacgcuggcucagcaacccaccgcuguccaaguccagggccagcagcaaggccagcagaccaccagcuccacgaccaccauccagccugggcagaucaucaucgcacagccucagcagggccagaccacaccugugacaaugcagguuggagaaggucagcaggugcagauuguccaggcucagccacagggucaagcccaacaggcccagaguggcacuggacagaccaugcaggugaugcagcagaucaucacuaacacaggagagauccagcagaucccggugcagcugaaugccggccagcugcaguauauccgcuuagcccagccuguaucaggcacucaaguugugcagggacagauccagacacuugccaccaaugcucaacaggggcaaagaaaugcaagucaggggaagccucgaaggugccugaaagaaaccuuacagauuacacagacagagguccagcaaggacagcagcaguucagccaguucacagauggacagaggaacagcgugcagcaagcucgagucucugagcuaacgggagaggcagagcccagagaagugaaagccacaggaaauucaacucccugcaccucuucccugcccaccacacacccccccucacaccgggcuggugccuccugugucugcugcucccaaccccagcagagcuccacuuccccuccuccuucugacgccuugcaguggguggugguugagguaucugggacccccaaccagcucgagacccauagggagcugcaugccccucucccagggaugaccucacucucuccucuccaccccucgcagcagcucuaccagauccagcaagucaccaugccugcgggccaggaccucgcccagcccauguucauccagucagccaaccagcccuccgacgggcaggccccccaggugaccggcgacuga

SEQ ID NO: 2871 - RNA, 1377 nt, Artificial Sequence
  derived and/or modified sequence opt1 from NFYC/m__Homo_sapiens__AAG28389
augagcaccgagggcggguucggcgggaccuccagcuccgacgcccagcagagccugcaguccuucuggccccgcgugauggaggagauccggaaccucacggucaaggacuuccgcgugcaggagcugccgcuggcccggaucaagaagaucaugaagcucgacgaggacgugaagaugaucagcgccgaggcccccguccuguucgccaaggccgcccagaucuucaucaccgagcugacccuccgcgcguggauccacaccgaggacaacaagcggcgcacgcugcagcggaacgacaucgccauggccaucaccaaguucgaccaguucgacuuccugaucgacaucgugccccgcgacgagcucaagcccccgaagcggcaggaggaggugcgccaguccgucacccccgccgagcccgugcaguacuacuucacccuggcgcagcagcccacggccgugcagguccagggccagcagcaggggcagcagaccaccagcuccaccacgaccauccagccgggccagaucaucaucgcccagccccagcagggccagaccacccccgugacgaugcaggucggggagggccagcagguccagaucgugcaggcccagccccaggggcaggcccagcaggcgcagagcggcaccgggcagaccaugcaggucaugcagcagaucaucaccaacacgggcgagauccagcagaucccggugcagcugaacgccggccagcuccaguacauccggcuggcccagcccguguccgggacccagguggugcagggccagauccagacccuggccaccaacgcccagcaggggcagcgcaacgcgagccagggcaagccccggcgcugccucaaggagacgcugcagaucacccagaccgaggugcagcagggccagcagcaguucucccaguucaccgacgggcagcggaacagcgugcagcaggcccgcgucuccgagcugacgggcgaggccgagccccgggaggugaaggccaccgggaacagcaccccgugcaccuccagccuccccacgacccacccgcccucccaccgcgccggcgcgagcugcgugugcugcagccagccccagcaguccagcaccuccccgccgcccagcgacgcccugcagugggucguggucgagguguccgggacccccaaccagcuggagacgcaccgggagcuccacgcgccccugcccggcaugaccagccugagcccccuccaccccucccagcagcuguaccagauccagcaggucaccaugcccgccggccaggaccuggcccagcccauguucauccaguccgccaaccagccgagcgacgggcaggcgccccaggugaccggcgacuga

SEQ ID NO: 2872 - RNA, 1377 nt, Artificial Sequence
  derived and/or modified sequence opt2 from NFYC/m__Homo_sapiens__AAG28389
auguccaccgagggcggcuucggcggcaccuccuccuccgacgcccagcagucccuccaguccuucuggccccgcgucauggaggagauccgcaaccucaccgucaaggacuuccgcguccaggagcucccccucgcccgcaucaagaagaucaugaagcucgacgaggacgucaagaugaucuccgccgaggcccccguccucuucgccaaggccgcccagaucuucaucaccgagcucacccuccgcgccuggauccacaccgaggacaacaagcgccgcacccuccagcgcaacgacaucgccauggccaucaccaaguucgaccaguucgacuuccucaucgacaucgucccccgcgacgagcucaagccccccaagcgccaggaggagguccgccaguccgucacccccgccgagcccguccaguacuacuucacccucgcccagcagcccaccgccguccagguccagggccagcagcagggccagcagaccaccuccuccaccaccaccauccagcccggccagaucaucaucgcccagccccagcagggccagaccacccccgucaccaugcaggucggcgagggccagcagguccagaucguccaggcccagccccagggccaggcccagcaggcccaguccggcaccggccagaccaugcaggucaugcagcagaucaucaccaacaccggcgagauccagcagauccccguccagcucaacgccggccagcuccaguacauccgccucgcccagcccgucuccggcacccaggucguccagggccagauccagacccucgccaccaacgcccagcagggccagcgcaacgccucccagggcaagccccgccgcugccucaaggagacccuccagaucacccagaccgagguccagcagggccagcagcaguucucccaguucaccgacggccagcgcaacuccguccagcaggcccgcgucuccgagcucaccggcgaggccgagccccgcgaggucaaggccaccggcaacuccacccccugcaccuccucccuccccaccacccacccccccucccaccgcgccggcgccuccugcgucugcugcucccagccccagcaguccuccaccucccccccccccuccgacgcccuccagugggucgucgucgaggucuccggcacccccaaccagcucgagacccaccgcgagcuccacgccccccuccccggcaugaccucccucuccccccuccaccccucccagcagcucuaccagauccagcaggucaccaugcccgccggccaggaccucgcccagcccauguucauccaguccgccaaccagcccuccgacggccaggccccccaggucaccggcgacuga

SEQ ID NO: 2873 - RNA, 1377 nt, Artificial Sequence
  derived and/or modified sequence opt3 from NFYC/m__Homo_sapiens__AAG28389
augagcaccgagggcggguucggagguacauccucuucagacgcccagcaaagucugcagagcuuuuggcccagagugauggaagagaucaggaaccucacugucaaggauuuccggguucaggaacuuccucuggcucgcauuaaaaagauaaugaaauuggacgaggaugugaagaugaucuccgcagaagccccaguauuauuugcgaaagcugcccagauuuucaucacggagcugacccuacgagcauggauucacacagaggacaauaagcguagaacucuccaaaggaacgauaucgccauggcuauaaccaaguuugaccaguucgauuuucugaucgacauugugccgcgggaugaacuuaaacccccuaagcgccaggaggaagucagacagucugugacaccagcagagcccguucaauacuauuucacccuggcccagcagccuacugcugugcagguccaaggccagcagcaagggcagcagacaaccucgucaacgacuaccauccagccaggacaaauuaucauagcccagccccagcagggccaaacaacuccugugaccaugcagguaggugaggggcagcagguucaaauugugcaggcgcagccacagggacaagcacagcaggcccaaagcggcacaggccagaccaugcaggucaugcagcaaaucauuacgaauacuggggaaauccagcagaucccggugcaguugaacgcuggacaacuccaguacauuaggcuggcccagcccgugagugguacacaggucguucaaggccagauacagacccuggcaacuaaugcucaacaggggcagcggaacgccucccagggaaaaccucgccgaugccucaaggagacauuacaaaucacccagacggaagugcagcagggccaacagcaguuuucucaguucaccgacggucaaagaaauagcguacagcaggcgaggguguccgagcugacaggggaagccgagccacgggaggucaaagcaacuggaaacucaacccccuguacaaguagccuuccuacuacccauccacccucucaccgugcuggcgccuccugcguguguugcucacagccgcaacagagcaguacaucuccucccccauccgaugcuuugcaguggguuguggucgaagugagcggcaccccuaaucaacuggagacucaucgcgaacuacacgcaccccucccagggaugacgucgcugucuccccuucauccuucccagcagcuguaucagauucaacagguaacaaugccagccggacaggacuuggcccagccgauguuuauccaaucagcuaaccagcccagugauggucaggcgccucagguuaccggcgacuga

SEQ ID NO: 2874 - RNA, 1377 nt, Artificial Sequence
  derived and/or modified sequence opt4 from NFYC/m__Homo_sapiens__AAG28389
augagcaccgagggcggcuucggcggcaccagcagcagcgacgcccagcagagccugcagagcuucuggcccagagugauggaggagaucagaaaccugaccgugaaggacuucagagugcaggagcugccccuggccagaaucaagaagaucaugaagcuggacgaggacgugaagaugaucagcgccgaggcccccgugcuguucgccaaggccgcccagaucuucaucaccgagcugacccugagagccuggauccacaccgaggacaacaagagaagaacccugcagagaaacgacaucgccauggccaucaccaaguucgaccaguucgacuuccugaucgacaucgugcccagagacgagcugaagccccccaagagacaggaggaggugagacagagcgugacccccgccgagcccgugcaguacuacuucacccuggcccagcagcccaccgccgugcaggugcagggccagcagcagggccagcagaccaccagcagcaccaccaccauccagcccggccagaucaucaucgcccagccccagcagggccagaccacccccgugaccaugcaggugggcgagggccagcaggugcagaucgugcaggcccagccccagggccaggcccagcaggcccagagcggcaccggccagaccaugcaggugaugcagcagaucaucaccaacaccggcgagauccagcagauccccgugcagcugaacgccggccagcugcaguacaucagacuggcccagcccgugagcggcacccagguggugcagggccagauccagacccuggccaccaacgcccagcagggccagagaaacgccagccagggcaagcccagaagaugccugaaggagacccugcagaucacccagaccgaggugcagcagggccagcagcaguucagccaguucaccgacggccagagaaacagcgugcagcaggccagagugagcgagcugaccggcgaggccgagcccagagaggugaaggccaccggcaacagcacccccugcaccagcagccugcccaccacccacccccccagccacagagccggcgccagcugcgugugcugcagccagccccagcagagcagcaccagccccccccccagcgacgcccugcaguggguggugguggaggugagcggcacccccaaccagcuggagacccacagagagcugcacgccccccugcccggcaugaccagccugagcccccugcaccccagccagcagcuguaccagauccagcaggugaccaugcccgccggccaggaccuggcccagcccauguucauccagagcgccaaccagcccagcgacggccaggccccccaggugaccggcgacuga

SEQ ID NO: 2875 - RNA, 1377 nt, Artificial Sequence
  derived and/or modified sequence opt5 from NFYC/m__Homo_sapiens__AAG28389
augagcaccgagggcggguucggaggcacauccucuagcgacgcccagcaaucccugcagucuuuuuggcccagagugauggaagagauccggaaccucacggucaaggauuuccgcguucaggaacugccucuugcuagaauuaaaaagaucaugaaacuggacgaggaugugaagaugauuagcgccgaagcgccggugcucuuugcuaaagccgcccagaucuucauuaccgagcugacacuucgggcuuggauccacaccgaggacaauaagcgcagaacacugcaacggaacgauaucgccauggcuauuaccaaguuugaccaguucgauuuucucaucgacauugucccccgcgaugaacugaaaccucccaagagacaggaggaagugcggcaguccguuacgccugccgagcccgugcaauacuauuucacccuggcgcagcagccuacggccguccaggugcaagggcagcagcaaggacagcagaccacaucuagcaccacaaccauccagccgggccaaauuaucauugcucagccccagcaggggcaaacgacaccuguuaccaugcaagugggagagggccagcagguccagaucgugcaggcccagccccagggccaagcucagcaggcccaauccgggacaggacagaccaugcaagugaugcagcagaucauuaccaauacaggcgaaauccagcagauuccuguccagcucaacgcggggcaacugcaguacauccgccuugcccagcccguuagcggaacacagguggugcaaggccagauucagacccuggcuacaaaugcccaacaggggcagagaaacgcuucucagggaaaaccgcggcgcugccucaaggagacccugcaaaucacacagaccgaaguccagcagggccaacagcaguuuucccaguucacggacggccaaagaaauagcgugcagcaggcccggguuucugagcuuacaggggaagccgagccucgcgaggugaaagcuaccggaaacuccacccccuguacaagcucucugccuaccacacauccucccucccacagagcgggcgccagcugcgucuguugcucccagccccaacagucuagcacguccccgcccccuagcgaugcucuccagugggugguuguggaagucucugggacccccaaucaacuggagacacaucgggaacugcacgccccucuccccggaaugaccucccugagcccgcuucauccuucucagcagcuguaucagauccaacaggugacaaugcccgccggccaggaccucgcucagccuauguuuauucaaagcgccaaccagcccuccgaugggcaggcgccucaggucaccggagacuga

SEQ ID NO: 2876 - protein, 933 aa, Artificial Sequence
  NGEP__Homo_sapiens__Q6IWH7
MRMAATAWAGLQGPPLPTLCPAVRTGLYCRDQAHAERWAMTSETSSGSHCARSRMLRRRAQEEDSTVLIDVSPPEAEKRGSYGSTAHASEPGGQQAAACRAGSPAKPRIADFVLVWEEDLKLDRQQDSAARDRTDMHRTWRETFLDNLRAAGLCVDQQDVQDGNTTVHYALLSASWAVLCYYAEDLRLKLPLQELPNQASNWSAGLLAWLGIPNVLLEVVPDVPPEYYSCRFRVNKLPRFLGSDNQDTFFTSTKRHQILFEILAKTPYGHEKKNLLGIHQLLAEGVLSAAFPLHDGPFKTPPEGPQAPRLNQRQVLFQHWARWGKWNKYQPLDHVRRYFGEKVALYFAWLGFYTGWLLPAAVVGTLVFLVGCFLVFSDIPTQELCGSKDSFEMCPLCLDCPFWLLSSACALAQAGRLFDHGGTVFFSLFMALWAVLLLEYWKRKSATLAYRWDCSDYEDTEERPRPQFAASAPMTAPNPITGEDEPYFPERSRARRMLAGSVVIVVMVAVVVMCLVSIILYRAIMAIVVSRSGNTLLAAWASRIASLTGSVVNLVFILILSKIYVSLAHVLTRWEMHRTQTKFEDAFTLKVFIFQFVNFYSSPVYIAFFKGRFVGYPGNYHTLFGVRNEECAAGGCLIELAQELLVIMVGKQVINNMQEVLIPKLKGWWQKFRLRSKKRKAGASAGASQGPWEDDYELVPCEGLFDEYLEMVLQFGFVTIFVAACPLAPLFALLNNWVEIRLDARKFVCEYRRPVAERAQDIGIWFHILAGLTHLAVISNAFLLAFSSDFLPRAYYRWTRAHDLRGFLNFTLARAPSSFAAAHNRTCRYRAFRDDDGHYSQTYWNLLAIRLAFVIVFEHVVFSVGRLLDLLVPDIPESVEIKVKREYYLAKQALAENEVLFGTNGTKDEQPEGSELSSHWTPFTVPKASQLQQ

SEQ ID NO: 2877 - RNA, 2802 nt, Artificial Sequence
  NGEP__Homo_sapiens__CCDS33423.1
augcgaauggcugccacugccugggcggggcuccaagggccaccccuccccacccucugucccgcagugaggacgggacucuacugccgagaccaggcucacgcugagaggugggccaugaccuccgagaccucuuccggaagccacugugccaggagcaggaugcugcggcgacgggcccaggaagaggacagcaccguccugaucgaugugagccccccugaggcagagaagaggggcucuuacgggagcacagcccacgccucggagccagguggacagcaagcggccgccugcagagcugggaguccugccaagccccggaucgcagacuucguccucguuugggaggaggaccugaagcuagacaggcagcaggacagugccgcccgggacagaacagacaugcacaggaccuggcgggagacuuuucuggauaaucuucgugcggcugggcuguguguagaccagcaggacguccaggacgggaacaccacagugcacuacgcccuccucagcgccuccugggcugugcucugcuacuacgccgaagaccugcgccugaagcugcccuugcaggaguuacccaaccaggccuccaacuggucggccggccugcuggcauggcugggcauccccaacguccugcuggagguugugccagacguaccccccgaguacuacuccugccgguucagagugaacaagcugccacgcuuccucgggagugacaaccaggacaccuucuucacaagcaccaagaggcaccaaauucuguuugagauccuggccaagaccccguauggccacgagaagaaaaaccugcuugggauccaccagcugcuggcagaggguguccucagugccgccuucccccugcaugacggccccuucaagacgcccccagagggcccgcaggcuccacgccucaaccagcgccaaguccuuuuccagcacugggcgcgcuggggcaaguggaacaaguaccagccccuggaccacgugcgcagguacuucggggagaagguggcccucuacuucgccuggcucggguuuuacacaggcuggcuccugccagcggcaguggugggcacacugguguuccuggugggcugcuuccugguguucucagacauacccacgcaggaacuguguggcagcaaggacagcuucgagaugugcccacuuugccucgacugcccuuucuggcugcucuccagcgccugugcccuggcccaggccggccggcuguucgaccacggcggcaccguguucuucagcuuguucauggcacugugggccgugcugcugcuggaguacuggaagcggaagagcgccacgcuggccuaccgcugggacugcucugacuacgaggacacugaggagaggccucggccccaguuugccgccucagcccccaugacagccccgaaccccaucacgggugaggacgagcccuacuucccugagaggagccgcgcgcgccgcaugcuggccggcucuguggugaucguggugaugguggccgugguggucaugugccucgugucuaucauccuguaccgugccaucauggccaucgugguguccaggucgggcaacacccuucucgcagccugggccucucgcaucgccagccucacggggucuguagugaaccucgucuucauccucauccucuccaagaucuauguaucccuggcccacguccugacacgaugggaaaugcaccgcacccagaccaaguucgaggacgccuucacccucaagguguucaucuuccaguucgucaacuucuacuccucacccgucuacauugccuucuucaagggcagguuugugggauacccaggcaacuaccacaccuuguuuggaguccgcaaugaggagugcgcggcuggaggcugccugaucgagcuggcacaggagcuccuggucaucauggugggcaagcaggucaucaacaacaugcaggagguccucaucccgaagcuaaagggcugguggcagaaguuccggcuucgcuccaagaagaggaaggcgggagcuucugcaggggcuagccaggggcccugggaggacgacuaugagcuugugcccugugagggucuguuugacgaguaccuggaaauggugcugcaguucggcuucgucaccaucuucguggccgccuguccgcucgcgccgcucuucgcccugcucaacaacuggguggagauccgcuuggacgcgcgcaaguucgucugcgaguaccggcgcccgguggccgagcgcgcccaggacaucggcaucugguuccacauccuggcgggccucacgcaccuggcggucaucagcaacgccuuccuccuggccuucucguccgacuuccugccgcgcgccuacuaccgguggacccgcgcccacgaccugcgcggcuuccucaacuucacgcuggcgcgagccccguccuccuucgccgccgcgcacaaccgcacgugcagguaucgggcuuuccgggaugacgauggacauuauucccagaccuacuggaaucuucuugccauccgccuggccuucgucauuguguuugagcaugugguuuucuccguuggccgccuccuggaccuccuggugccugacaucccagagucuguggagaucaaagugaagcgggaguacuaccuggcuaagcaggcacuggcugagaaugagguucuuuuuggaacgaacggaacaaaggaugagcagcccgagggcucagagcucagcucccacuggacacccuucacgguucccaaggccagccagcugcagcaguga

SEQ ID NO: 2878 - RNA, 2802 nt, Artificial Sequence
  derived and/or modified sequence opt1 from NGEP__Homo_sapiens__CCDS33423.1
augcgcauggccgccaccgcgugggccggccugcaggggcccccgcuccccacccugugccccgccgugcggacgggccuguacugccgcgaccaggcccacgccgagcggugggcgaugaccagcgagaccuccagcgggucccacugcgcccgcagccggaugcuccgccggcgcgcccaggaggaggacuccaccguccugaucgacgugagcccgcccgaggccgagaagcggggcuccuacgggagcacggcgcacgccuccgagcccggcggccagcaggccgccgccugccgcgcggggagccccgccaagccccggaucgccgacuucgugcuggucugggaggaggaccucaagcuggaccgccagcaggacuccgccgcccgggaccgcaccgacaugcaccggaccuggcgcgagaccuuccuggacaaccuccgggcggccggccugugcguggaccagcaggacgugcaggacgggaacacgaccguccacuacgcccugcucagcgccuccugggccgugcugugcuacuacgcggaggaccugcgccucaagcugccgcugcaggagcuccccaaccaggccagcaacugguccgccggccugcuggccuggcucgggauccccaacgugcugcuggaggucgugcccgacgugccgcccgaguacuacagcugccgguuccgcgucaacaagcucccccgguuccugggcuccgacaaccaggacaccuucuucaccagcacgaagcgccaccagauccuguucgagauccucgccaagacccccuacggccacgagaagaagaaccugcuggggauccaccagcuccuggcggagggcgugcuguccgccgccuucccgcuccacgacgggcccuucaagaccccgcccgagggcccccaggcgccccgccugaaccagcgccaggugcuguuccagcacugggcccgguggggcaaguggaacaaguaccagccccucgaccacguccggcgcuacuucggggagaagguggcccuguacuucgccuggcugggcuucuacaccggguggcuccugcccgccgccguggucggcacgcugguguuccucguggggugcuuccuggucuucagcgacaucccgacccaggagcugugcggcagcaaggacuccuucgagaugugcccccucugccuggacugccccuucuggcugcucagcuccgcgugcgcccuggcccaggccggccggcuguucgaccacgggggcaccguguucuucagccuguucauggcccucugggcggugcugcugcucgaguacuggaagcgcaaguccgccacccuggccuaccggugggacugcagcgacuacgaggacacggaggagcgcccccggccgcaguucgccgccuccgcgcccaugaccgcccccaacccgaucaccggggaggacgagcccuacuuccccgagcgcagccgggcccgccggaugcuggccggcuccgucgugaucgucgugaugguggcggucguggugaugugccucgucagcaucauccuguaccgcgccaucauggccaucguggugucccggagcgggaacacccugcucgccgccugggcgucccgcaucgccagccugacgggcuccgucgugaaccugguguucauccucauccugagcaagaucuacgucucccuggcccacgugcucacccggugggagaugcaccgcacccagaccaaguucgaggacgccuucacgcugaagguguucaucuuccaguucgucaacuucuacagcucccccguguacaucgccuucuucaagggccgguucgugggguacccgggcaacuaccacacccuguucgggguccgcaacgaggagugcgcggccggcgggugccucaucgagcuggcccaggagcugcucgugaucauggugggcaagcaggucaucaacaacaugcaggaggugcugauccccaagcugaagggcugguggcagaaguuccgccuccggagcaagaagcgcaaggccggggccagcgcgggcgccucccaggggcccugggaggacgacuacgagcuggugcccugcgagggccuguucgacgaguaccucgagaugguccugcaguucggcuucgugaccaucuucguggccgccugcccgcuggcgccccucuucgcccugcugaacaacugggucgagauccggcucgacgcccgcaaguucgugugcgaguaccggcgccccguggccgagcgggcccaggacaucgggaucugguuccacauccuggcgggccugacccaccucgccgucaucagcaacgccuuccugcuggccuucuccagcgacuuccucccccgcgccuacuaccgguggacgcgcgcgcacgaccugcggggguuccugaacuucacccucgcccgcgccccguccagcuucgccgccgcgcacaaccggaccugccgcuaccgggccuuccgcgacgacgacggccacuacucccagaccuacuggaaccugcuggccauccggcucgccuucgugaucguguucgagcacgucguguucagcguggggcgccugcuggaccuccugguccccgacauccccgaguccguggagaucaaggugaagcgggaguacuaccuggccaagcaggcgcucgccgagaacgagguccuguucggcacgaacggcaccaaggacgagcagcccgaggggagcgagcuguccagccacuggaccccguucaccgugcccaaggccucccagcuccagcaguga

SEQ ID NO: 2879 - RNA, 2802 nt, Artificial Sequence
  derived and/or modified sequence opt2 from NGEP__Homo_sapiens__CCDS33423.1
augcgcauggccgccaccgccugggccggccuccagggccccccccuccccacccucugccccgccguccgcaccggccucuacugccgcgaccaggcccacgccgagcgcugggccaugaccuccgagaccuccuccggcucccacugcgcccgcucccgcaugcuccgccgccgcgcccaggaggaggacuccaccguccucaucgacgucuccccccccgaggccgagaagcgcggcuccuacggcuccaccgcccacgccuccgagcccggcggccagcaggccgccgccugccgcgccggcucccccgccaagccccgcaucgccgacuucguccucgucugggaggaggaccucaagcucgaccgccagcaggacuccgccgcccgcgaccgcaccgacaugcaccgcaccuggcgcgagaccuuccucgacaaccuccgcgccgccggccucugcgucgaccagcaggacguccaggacggcaacaccaccguccacuacgcccuccucuccgccuccugggccguccucugcuacuacgccgaggaccuccgccucaagcucccccuccaggagcuccccaaccaggccuccaacugguccgccggccuccucgccuggcucggcauccccaacguccuccucgaggucguccccgacgucccccccgaguacuacuccugccgcuuccgcgucaacaagcucccccgcuuccucggcuccgacaaccaggacaccuucuucaccuccaccaagcgccaccagauccucuucgagauccucgccaagacccccuacggccacgagaagaagaaccuccucggcauccaccagcuccucgccgagggcguccucuccgccgccuucccccuccacgacggccccuucaagaccccccccgagggcccccaggccccccgccucaaccagcgccagguccucuuccagcacugggcccgcuggggcaaguggaacaaguaccagccccucgaccacguccgccgcuacuucggcgagaaggucgcccucuacuucgccuggcucggcuucuacaccggcuggcuccuccccgccgccgucgucggcacccucgucuuccucgucggcugcuuccucgucuucuccgacauccccacccaggagcucugcggcuccaaggacuccuucgagaugugcccccucugccucgacugccccuucuggcuccucuccuccgccugcgcccucgcccaggccggccgccucuucgaccacggcggcaccgucuucuucucccucuucauggcccucugggccguccuccuccucgaguacuggaagcgcaaguccgccacccucgccuaccgcugggacugcuccgacuacgaggacaccgaggagcgcccccgcccccaguucgccgccuccgcccccaugaccgcccccaaccccaucaccggcgaggacgagcccuacuuccccgagcgcucccgcgcccgccgcaugcucgccggcuccgucgucaucgucgucauggucgccgucgucgucaugugccucgucuccaucauccucuaccgcgccaucauggccaucgucgucucccgcuccggcaacacccuccucgccgccugggccucccgcaucgccucccucaccggcuccgucgucaaccucgucuucauccucauccucuccaagaucuacgucucccucgcccacguccucacccgcugggagaugcaccgcacccagaccaaguucgaggacgccuucacccucaaggucuucaucuuccaguucgucaacuucuacuccucccccgucuacaucgccuucuucaagggccgcuucgucggcuaccccggcaacuaccacacccucuucggcguccgcaacgaggagugcgccgccggcggcugccucaucgagcucgcccaggagcuccucgucaucauggucggcaagcaggucaucaacaacaugcaggagguccucauccccaagcucaagggcugguggcagaaguuccgccuccgcuccaagaagcgcaaggccggcgccuccgccggcgccucccagggccccugggaggacgacuacgagcucguccccugcgagggccucuucgacgaguaccucgagaugguccuccaguucggcuucgucaccaucuucgucgccgccugcccccucgccccccucuucgcccuccucaacaacugggucgagauccgccucgacgcccgcaaguucgucugcgaguaccgccgccccgucgccgagcgcgcccaggacaucggcaucugguuccacauccucgccggccucacccaccucgccgucaucuccaacgccuuccuccucgccuucuccuccgacuuccucccccgcgccuacuaccgcuggacccgcgcccacgaccuccgcggcuuccucaacuucacccucgcccgcgcccccuccuccuucgccgccgcccacaaccgcaccugccgcuaccgcgccuuccgcgacgacgacggccacuacucccagaccuacuggaaccuccucgccauccgccucgccuucgucaucgucuucgagcacgucgucuucuccgucggccgccuccucgaccuccucguccccgacauccccgaguccgucgagaucaaggucaagcgcgaguacuaccucgccaagcaggcccucgccgagaacgagguccucuucggcaccaacggcaccaaggacgagcagcccgagggcuccgagcucuccucccacuggacccccuucaccguccccaaggccucccagcuccagcaguga

SEQ ID NO: 2880 - RNA, 2802 nt, Artificial Sequence
  derived and/or modified sequence opt3 from NGEP__Homo_sapiens__CCDS33423.1
augagaauggccgcuaccgcaugggccggccugcaggggcccccucucccaacacuuugcccggcggugaggacuggacuguacugucgggaccaagcucacgccgagcgcugggcaaugacgagcgaaaccuccucugguucacauugcgcccgaagucguauguugagaaggcgggcucaggaggaagauagcacagucuuaaucgacguuucacccccugaggcagaaaagcgcggcucuuaugggucgacugcccacgcuucagagccaggaggccagcaggccgcggcauguagagccgguagccccgcuaaaccuaggauugccgauuucgugcugguaugggaggaagaccuaaagcucgaucggcaacaggacagugcagcucgcgaucgaaccgacaugcauagaacauggagggagaccuuucuggauaaccuucgggccgcggggcugugcguggaccagcaggauguccaagacggaaauacuacagugcacuacgccuugcucuccgcaucuugggcuguucuguguuauuacgccgaagaucugcgucucaaauuaccacugcaggagcuucccaaccaggcuagcaauugguccgccggcuugcuggcauggcuaggcauaccuaacgugcuccuggaggucgugccagacguaccgcccgaauauuacucaugccgcuucagaguuaauaaacuuccuagguuucuggggagugacaaccaggauaccuucuuuacgagcacuaagcggcaucaaaucuuguucgagauucucgccaagaccccauauggacacgaaaagaaaaaucuguuagguauccaccagcugcucgcugagggcgugcuuucugcggcauuuccccugcaugacgggccuuucaagacaccacccgaaggaccgcaggccccucgauugaaccaacgccagguccuauuucagcacugggcuagauggggcaaauggaauaaguaccagccccuggaucaugugaggcgguacuucggugagaaaguggcccucuauuuugcauggcugggguucuacacuggauggcuucugccagccgcugucguuggcaccuugguguuucucguaggcuguuuccugguguucuccgacauuccuacacaagaguuaugcgggucaaaggauagcuuugaaauguguccccugugccuagacuguccauucuggcuccugaguucugccugcgcacuugcgcaggcuggacgcuuguuugaucacgguggcaccgucuucuuuucccuguucauggcccucugggcagugcugcuucuggaguauuggaagagaaaaagcgccacguuggcuuacaggugggacugcucggauuaugaagacacugaggaacguccccggccucaguuugccgcaucugcuccaaugacagccccgaaccccaucaccggggaggaugagccuuacuucccagaacgauccagagcgaggcgcaugcucgccggaucaguugugauagucgugaugguagcuguuguggucaugugucuggugaguaucauuuuauaucgggcaaucauggccauugucgugagcagauccggcaauacucugcuagcugccugggcaucuaggaucgcgagccucacagguucaguugugaaccugguauuuauacuuauuuugaguaagaucuacgucucccuggcccacgugcucacccgcugggagaugcaucgaacgcagaccaaauucgaagacgcuuuuacacugaagguuuucauuuuucaauucgugaauuucuacagcucucccgucuauaucgccuuuuucaaagggcgguuugugggcuacccuggaaacuaucacacuuuauucggcguacguaaugaggaaugcgcagcugggggaugucugaucgagcuugcccaggaguugcucgugauuaugguugguaagcaggucauaaacaacaugcaggaagugcugaucccaaaacuaaagggcugguggcaaaaguuuagacugagguccaaaaagcgcaaagcaggggccagugcuggagcgagccagggccccugggaggacgauuacgaacucgugccgugcgagggucuguucgacgaguaucuugaaauggucuugcaguuuggguucguuaccauuuuuguggccgcauguccucuggcuccauuauucgcccuccugaauaacuggguggagauccggcuugaugccagaaaguuuguaugcgaauacaggcgacccgucgcugagcgcgcacaggacauaggcauuugguuccauauccuggccggauugacacaccucgcggugaucuccaaugcuuuucugcuagccuucucuucggauuuccugccucgggcauauuacagauggacuagggcccaugaccuccguggcuuucugaacuucacccuugcucgcgcacccagcuccuuugccgcggcucacaaucggacauguagauacagggccuuccgagaugacgaugggcacuauucacaaaccuacuggaacuugcuggcaauucgguuagccuuuguuaucguguucgaacaugucguguuuaguguuggacgccuccuggaccuucuggugccagauauuccugagucuguagagauaaaagucaagagagaauauuaccuagcuaagcaggcccucgcagagaaugaagugcuguucgguacuaacggcacgaaagacgagcagcccgaagggagcgaguuguccucacacuggacaccauuuaccgugccgaaggcuagccaacugcagcaguga

SEQ ID NO: 2881 - RNA, 2802 nt, Artificial Sequence
  derived and/or modified sequence opt4 from NGEP__Homo_sapiens__CCDS33423.1
augagaauggccgccaccgccugggccggccugcagggccccccccugcccacccugugccccgccgugagaaccggccuguacugcagagaccaggcccacgccgagagaugggccaugaccagcgagaccagcagcggcagccacugcgccagaagcagaaugcugagaagaagagcccaggaggaggacagcaccgugcugaucgacgugagcccccccgaggccgagaagagaggcagcuacggcagcaccgcccacgccagcgagcccggcggccagcaggccgccgccugcagagccggcagccccgccaagcccagaaucgccgacuucgugcuggugugggaggaggaccugaagcuggacagacagcaggacagcgccgccagagacagaaccgacaugcacagaaccuggagagagaccuuccuggacaaccugagagccgccggccugugcguggaccagcaggacgugcaggacggcaacaccaccgugcacuacgcccugcugagcgccagcugggccgugcugugcuacuacgccgaggaccugagacugaagcugccccugcaggagcugcccaaccaggccagcaacuggagcgccggccugcuggccuggcugggcauccccaacgugcugcuggagguggugcccgacgugccccccgaguacuacagcugcagauucagagugaacaagcugcccagauuccugggcagcgacaaccaggacaccuucuucaccagcaccaagagacaccagauccuguucgagauccuggccaagacccccuacggccacgagaagaagaaccugcugggcauccaccagcugcuggccgagggcgugcugagcgccgccuucccccugcacgacggccccuucaagaccccccccgagggcccccaggcccccagacugaaccagagacaggugcuguuccagcacugggccagauggggcaaguggaacaaguaccagccccuggaccacgugagaagauacuucggcgagaagguggcccuguacuucgccuggcugggcuucuacaccggcuggcugcugcccgccgccguggugggcacccugguguuccuggugggcugcuuccugguguucagcgacauccccacccaggagcugugcggcagcaaggacagcuucgagaugugcccccugugccuggacugccccuucuggcugcugagcagcgccugcgcccuggcccaggccggcagacuguucgaccacggcggcaccguguucuucagccuguucauggcccugugggccgugcugcugcuggaguacuggaagagaaagagcgccacccuggccuacagaugggacugcagcgacuacgaggacaccgaggagagacccagaccccaguucgccgccagcgcccccaugaccgcccccaaccccaucaccggcgaggacgagcccuacuuccccgagagaagcagagccagaagaaugcuggccggcagcguggugaucguggugaugguggccgugguggugaugugccuggugagcaucauccuguacagagccaucauggccaucguggugagcagaagcggcaacacccugcuggccgccugggccagcagaaucgccagccugaccggcagcguggugaaccugguguucauccugauccugagcaagaucuacgugagccuggcccacgugcugaccagaugggagaugcacagaacccagaccaaguucgaggacgccuucacccugaagguguucaucuuccaguucgugaacuucuacagcagccccguguacaucgccuucuucaagggcagauucgugggcuaccccggcaacuaccacacccuguucggcgugagaaacgaggagugcgccgccggcggcugccugaucgagcuggcccaggagcugcuggugaucauggugggcaagcaggugaucaacaacaugcaggaggugcugauccccaagcugaagggcugguggcagaaguucagacugagaagcaagaagagaaaggccggcgccagcgccggcgccagccagggccccugggaggacgacuacgagcuggugcccugcgagggccuguucgacgaguaccuggagauggugcugcaguucggcuucgugaccaucuucguggccgccugcccccuggccccccuguucgcccugcugaacaacuggguggagaucagacuggacgccagaaaguucgugugcgaguacagaagacccguggccgagagagcccaggacaucggcaucugguuccacauccuggccggccugacccaccuggccgugaucagcaacgccuuccugcuggccuucagcagcgacuuccugcccagagccuacuacagauggaccagagcccacgaccugagaggcuuccugaacuucacccuggccagagcccccagcagcuucgccgccgcccacaacagaaccugcagauacagagccuucagagacgacgacggccacuacagccagaccuacuggaaccugcuggccaucagacuggccuucgugaucguguucgagcacgugguguucagcgugggcagacugcuggaccugcuggugcccgacauccccgagagcguggagaucaaggugaagagagaguacuaccuggccaagcaggcccuggccgagaacgaggugcuguucggcaccaacggcaccaaggacgagcagcccgagggcagcgagcugagcagccacuggacccccuucaccgugcccaaggccagccagcugcagcaguga

SEQ ID NO: 2882 - RNA, 2802 nt, Artificial Sequence
  derived and/or modified sequence opt5 from NGEP__Homo_sapiens__CCDS33423.1
augagaauggccgcuaccgccugggcgggccugcaggggcccccucucccgacacugugccccgcugugcggacgggacuuuacugucgcgaccaagcccacgccgagagaugggcuaugaccagcgaaacauccucuggcagccauugcgcccggucccgcaugcugagacggcgcgcucaggaggaagauucuaccguccucaucgacguuagcccucccgaggccgaaaagagaggguccuauggaucuacagcgcacgccagcgagccuggcgggcagcaggcugccgcuugucgggccggaucccccgcgaaaccucgcauugccgauuucgugcuggugugggaggaagaccuuaagcuggauagacaacaggacagcgcugcccgggaucgcaccgacaugcauagaacauggcgggagaccuuucucgauaaccugcgcgcugccggccugugcgucgaccagcaggaugugcaagacggcaauacgaccguucacuacgcccuccugucugcuuccugggcggugcuuuguuauuacgccgaagaucugagacucaaacugccgcuucaggagcugcccaaccaggcuagcaauuggucugccgggcuccuggccuggcugggaaucccuaacguccuccuggaggugguucccgacgugccucccgaauauuacuccugccgguucagagucaauaaacuuccgcgcuuucugggcagcgacaaccaggauacauucuuuaccucuacaaagcggcaucaaauucucuucgagauccuggcuaagaccccuuaugggcacgaaaagaaaaaucuucugggcauucaccagcuccuggccgagggagugcuguccgcggcuuuuccccuccaugacgggccuuucaagacgccucccgaaggaccccaggccccgagacugaaccaacgccaggugcuuuuucagcacugggcccgguggggcaaauggaauaaguaccagccccuggaucaugucagacgcuacuucggcgagaaaguugcucucuauuuugccuggcugggguucuacacaggauggcuucugccugcugccguggugggcacccucgucuuucuggugggguguuuccugguuuucagcgacauccccacacaagagcucugcggauccaaggauucuuuugaaauguguccucugugccuugacugucccuucuggcugcucagcuccgcgugcgcccuggcucaggccggccggcuguuugaucacgggggaaccguguucuuuagccuuuucauggcucucugggccguccugcugcucgaguauuggaagagaaaaucugcgacccuggccuaccgcugggacugcuccgauuaugaagacacagaggaacggccgagaccucaguuugcugccagcgcucccaugacggccccuaaccccaucaccggcgaggaugagccuuacuuccccgaacgcucucgggccagacggaugcuugcuggcagcgugguuauuguggucaugguggcggucgugguuaugugucugguguccaucauucucuaucgcgccaucauggcuauugucgugucuagaagcgggaauacacugcuggccgccugggcuucccggaucgccagccuuaccggaucuguugugaaccucgucuuuauucugauccuguccaagaucuacgugagccucgcgcacgugcugacaagaugggagaugcaucgcacccagacgaaauucgaagacgcuuuuacacuuaagguuuucauuuuucaauucgucaauuucuacucuuccccgguguauaucgccuuuuucaaaggccgguuugugggguacccuggaaacuaucacacccuguucggcgucagaaaugaggaaugcgccgcugggggcugucucauugagcuggcccaggagcugcuugugaucaugguuggaaagcagguuauuaacaacaugcaggaaguccucauccccaaacugaagggcugguggcaaaaguuucgccugagaagcaaaaagcggaaagcgggggcuuccgccggagccucucagggccccugggaggacgauuacgaacucgugccuugcgaggggcuguucgacgaguaucuugaaaugguucugcaguuuggauucgugaccaucuuugucgcugccuguccgcucgcuccccuguucgcccugcuuaauaacuggguggagauucgccucgaugcgagaaaguuuguuugcgaauaccggcgcccuguggccgagagagcucaggacaucggcauuugguuccauauccuggccgggcugacacaccucgcugucauuagcaaugccuuucugcuugccuucuccucugauuuccugccccgggcuuauuaccgcuggaccagagcgcaugaccuccggggcuuucugaacuucacacuggcccgcgcuccuagcuccuuugccgccgcucacaauagaacgugucgguacagagccuuccgcgaugacgauggacacuauagccaaaccuacuggaaccuucuggcgauccggcucgcuuuugugaucguguucgaacaugucguguuuucugugggcagacugcucgaccugcuugugcccgauauuccugaguccgucgagaucaaagugaagcgcgaauauuaccuggccaagcaggcccucgcugagaaugaaguucuguucgggacaaacggaaccaaagacgagcagcccgaaggcagcgagcugucuucccacuggacaccguuuaccgugccuaaggccagccaacuucagcaguga

SEQ ID NO: 2883 - protein, 294 aa, Artificial Sequence
  NPM__Homo_sapiens__P06748
MEDSMDMDMSPLRPQNYLFGCELKADKDYHFKVDNDENEHQLSLRTVSLGAGAKDELHIVEAEAMNYEGSPIKVTLATLKMSVQPTVSLGGFEITPPVVLRLKCGSGPVHISGQHLVAVEEDAESEDEEEEDVKLLSISGKRSAPGGGSKVPQKKVKLAADEDDDDDDEEDDDEDDDDDDFDDEEAEEKAPVKKSIRDTPAKNAQKSNQNGKDSKPSSTPRSKGQESFKKQEKTPKTPKGPSSVEDIKAKMQASIEKGGSLPKVEAKFINYVKNCFRMTDQEAIQDLWQWRKSL

SEQ ID NO: 2884 - RNA, 885 nt, Artificial Sequence
  NPM__Homo_sapiens__AAA36380
auggaagauucgauggacauggacaugagcccccugaggccccagaacuaucuuuucgguugugaacuaaaggccgacaaagauuaucacuuuaagguggauaaugaugaaaaugagcaccaguuaucuuuaagaacggucaguuuaggggcuggugcaaaggaugaguugcacauuguugaagcagaggcaaugaauuacgaaggcaguccaauuaaaguaacacuggcaacuuugaaaaugucuguacagccaacgguuucccuugggggcuuugaaauaacaccaccaguggucuuaagguugaagugugguucagggccagugcauauuaguggacagcacuuaguagcuguggaggaagaugcagagucagaagaugaagaggaggaggaugugaaacucuuaaguauaucuggaaagcggucugccccuggaggugguagcaagguuccacagaaaaaaguaaaacuugcugcugaugaagaugaugacgaugaugaugaagaggaugaugaugaagaugaugaugaugaugauuuugaugaugaggaagcugaagaaaaagcgccagugaagaaaucuauacgagauacuccagccaaaaaugcacaaaagucaaaucagaauggaaaagacucaaaaccaucaucaacaccaagaucaaaaggacaagaauccuucaagaaacaggaaaaaacuccuaaaacaccaaaaggaccuaguucuguagaagacauuaaagcaaaaaugcaagcaaguauagaaaaaggugguucucuucccaaaguggaagccaaauucaucaauuaugugaagaauugcuuccggaugacugaccaagaggcuauucaagaucucuggcaguggaggaagucucuuuaa

SEQ ID NO: 2885 - RNA, 885 nt, Artificial Sequence
  derived and/or modified sequence opt1 from NPM__Homo_sapiens__AAA36380
auggaggacagcauggacauggacaugagcccccugcggccgcagaacuaccucuucggcugcgagcugaaggccgacaaggacuaccacuucaagguggacaacgacgagaacgagcaccagcugagccuccggaccgucucccugggggccggcgcgaaggacgagcugcacaucguggaggccgaggccaugaacuacgaggggagccccaucaaggugacccucgccacgcugaagauguccguccagcccaccgugagccugggcggguucgagaucaccccgcccgugguccuccgccugaagugcggcuccggccccgugcacaucagcgggcagcaccugguggccgucgaggaggacgcggaguccgaggacgaggaggaggaggacgugaagcuccugagcaucuccggcaagcggagcgcccccgggggcggguccaaggugccccagaagaaggucaagcuggccgccgacgaggacgacgacgacgacgacgaggaggacgacgacgaggacgacgacgacgacgacuucgacgacgaggaggcggaggagaaggccccggugaagaaguccauccgcgacacccccgccaagaacgcccagaaguccaaccagaacggcaaggacagcaagcccuccagcacgccccgguccaagggccaggagagcuucaagaagcaggagaagaccccgaagacccccaaggggcccagcuccguggaggacaucaaggccaagaugcaggcgagcaucgagaagggcgggucccuccccaaggucgaggccaaguucaucaacuacgugaagaacugcuuccgcaugaccgaccaggaggccauccaggaccuguggcaguggcgcaagagccuguga

SEQ ID NO: 2886 - RNA, 885 nt, Artificial Sequence
  derived and/or modified sequence opt2 from NPM__Homo_sapiens__AAA36380
auggaggacuccauggacauggacauguccccccuccgcccccagaacuaccucuucggcugcgagcucaaggccgacaaggacuaccacuucaaggucgacaacgacgagaacgagcaccagcucucccuccgcaccgucucccucggcgccggcgccaaggacgagcuccacaucgucgaggccgaggccaugaacuacgagggcucccccaucaaggucacccucgccacccucaagauguccguccagcccaccgucucccucggcggcuucgagaucaccccccccgucguccuccgccucaagugcggcuccggccccguccacaucuccggccagcaccucgucgccgucgaggaggacgccgaguccgaggacgaggaggaggaggacgucaagcuccucuccaucuccggcaagcgcuccgcccccggcggcggcuccaaggucccccagaagaaggucaagcucgccgccgacgaggacgacgacgacgacgacgaggaggacgacgacgaggacgacgacgacgacgacuucgacgacgaggaggccgaggagaaggcccccgucaagaaguccauccgcgacacccccgccaagaacgcccagaaguccaaccagaacggcaaggacuccaagcccuccuccaccccccgcuccaagggccaggaguccuucaagaagcaggagaagacccccaagacccccaagggccccuccuccgucgaggacaucaaggccaagaugcaggccuccaucgagaagggcggcucccuccccaaggucgaggccaaguucaucaacuacgucaagaacugcuuccgcaugaccgaccaggaggccauccaggaccucuggcaguggcgcaagucccucuga

SEQ ID NO: 2887 - RNA, 885 nt, Artificial Sequence
  derived and/or modified sequence opt3 from NPM__Homo_sapiens__AAA36380
auggaggacagcauggauauggacaugucuccccugagaccucagaacuaccucuucggcugcgaacuuaaggccgauaaagacuaucacuuuaagguggauaaugacgagaacgaacaucaacuguccuugaggaccgucucauuaggggcuggagcaaaagaugagcugcacaucguugaagccgaggcgaugaauuacgaggguaguccaauuaaggugacacuagcuacucucaaaaugagcguacagccgacggugucccugggcggguucgaaauaacacccccugucgugcuucggcugaaguguggaucuggcccaguucauaucucgggucagcacuugguggccgucgaggaagacgcagagucagaggaugaagaggaagaggacgugaagcuccugagcauuagugggaaacgcuccgcccccggaggcggcucuaagguaccucagaaaaagguuaaacuggcugcagaugaagacgaugacgacgaugacgaggaggaugacgaugaagacgaugacgaugacgauuuugacgacgaggaagccgaggaaaaggcuccagugaagaaaagcauccgagauacccccgccaagaacgcgcaaaaauccaaucagaacgggaaggacucaaaaccuaguagcacuccacguucuaagggacaggaguccuucaaaaagcaggagaagaccccgaaaacacccaaggguccuucaagcgucgaagauauuaaagcaaagaugcaagccaguaucgagaaaggcgggucucucccaaagguggaagcuaaguuuauaaauuaugugaaaaacugcuucagaaugaccgaccaggaggccauccaggauuuauggcaguggaggaagucccuguga

SEQ ID NO: 2888 - RNA, 885 nt, Artificial Sequence
  derived and/or modified sequence opt4 from NPM__Homo_sapiens__AAA36380
auggaggacagcauggacauggacaugagcccccugagaccccagaacuaccuguucggcugcgagcugaaggccgacaaggacuaccacuucaagguggacaacgacgagaacgagcaccagcugagccugagaaccgugagccugggcgccggcgccaaggacgagcugcacaucguggaggccgaggccaugaacuacgagggcagccccaucaaggugacccuggccacccugaagaugagcgugcagcccaccgugagccugggcggcuucgagaucaccccccccguggugcugagacugaagugcggcagcggccccgugcacaucagcggccagcaccugguggccguggaggaggacgccgagagcgaggacgaggaggaggaggacgugaagcugcugagcaucagcggcaagagaagcgcccccggcggcggcagcaaggugccccagaagaaggugaagcuggccgccgacgaggacgacgacgacgacgacgaggaggacgacgacgaggacgacgacgacgacgacuucgacgacgaggaggccgaggagaaggcccccgugaagaagagcaucagagacacccccgccaagaacgcccagaagagcaaccagaacggcaaggacagcaagcccagcagcacccccagaagcaagggccaggagagcuucaagaagcaggagaagacccccaagacccccaagggccccagcagcguggaggacaucaaggccaagaugcaggccagcaucgagaagggcggcagccugcccaagguggaggccaaguucaucaacuacgugaagaacugcuucagaaugaccgaccaggaggccauccaggaccuguggcaguggagaaagagccuguga

SEQ ID NO: 2889 - RNA, 885 nt, Artificial Sequence
  derived and/or modified sequence opt5 from NPM__Homo_sapiens__AAA36380
auggaggacagcauggauauggacaugagcccccugagaccucagaacuaccucuucggcugcgaacugaaggccgauaaagacuaucacuuuaagguggauaaugacgagaacgaacaucaacuuucucugcggaccgucagccucggggcuggagccaaagaugagcugcacaucguugaagcggaggcuaugaauuacgagggcuccccgauuaaggugacacuugccacgcugaaaaugucugugcagcccaccgucagccucgggggauucgaaaucacaccucccgugguucugcgccugaaguguggcuccgggccugugcauauuucuggacagcaccucgucgccguggaggaagacgcugagagcgaggaugaagaggaagaggacguuaagcugcuuuccaucagcggcaaaagaucugcccccggcgggggauccaaggugccucagaaaaaggucaaacuggcugccgaugaagacgaugacgacgaugacgaggaggaugacgaugaagacgaugacgaugacgauuuugacgacgaggaagcggaggaaaaggccccggugaagaaaagcauucgggauacccccgcuaagaacgcccaaaaaucuaaucagaacggcaaggacuccaaaccuagcucuacaccccgcuccaaggggcaggagagcuucaaaaagcaggagaagaccccuaaaacacccaagggaccguccucuguggaagauaucaaagcuaagaugcaagccagcaucgagaaaggcgggucccucccuaaggucgaagcgaaguuuauuaauuauguuaaaaacugcuucagaaugaccgaccaggaggccauccaggaucuguggcaguggcggaagucccuuuga

SEQ ID NO: 2890 - protein, 1304 aa, Artificial Sequence
  NRCAM__Homo_sapiens__Q92823
MQLKIMPKKKRLSAGRVPLILFLCQMISALEVPLDPKLLEDLVQPPTITQQSPKDYIIDPRENIVIQCEAKGKPPPSFSWTRNGTHFDIDKDPLVTMKPGTGTLIINIMSEGKAETYEGVYQCTARNERGAAVSNNIVVRPSRSPLWTKEKLEPITLQSGQSLVLPCRPPIGLPPPIIFWMDNSFQRLPQSERVSQGLNGDLYFSNVLPEDTREDYICYARFNHTQTIQQKQPISVKVISVDELNDTIAANLSDTEFYGAKSSRERPPTFLTPEGNASNKEELRGNVLSLECIAEGLPTPIIYWAKEDGMLPKNRTVYKNFEKTLQIIHVSEADSGNYQCIAKNALGAIHHTISVRVKAAPYWITAPQNLVLSPGEDGTLICRANGNPKPRISWLTNGVPIEIAPDDPSRKIDGDTIIFSNVQERSSAVYQCNASNEYGYLLANAFVNVLAEPPRILTPANTLYQVIANRPALLDCAFFGSPLPTIEWFKGAKGSALHEDIYVLHENGTLEIPVAQKDSTGTYTCVARNKLGMAKNEVHLEIKDPTWIVKQPEYAVVQRGSMVSFECKVKHDHTLSLTVLWLKDNRELPSDERFTVDKDHLVVADVSDDDSGTYTCVANTTLDSVSASAVLSVVAPTPTPAPVYDVPNPPFDLELTDQLDKSVQLSWTPGDDNNSPITKFIIEYEDAMHKPGLWHHQTEVSGTQTTAQLKLSPYVNYSFRVMAVNSIGKSLPSEASEQYLTKASEPDKNPTAVEGLGSEPDNLVITWKPLNGFESNGPGLQYKVSWRQKDGDDEWTSVVVANVSKYIVSGTPTFVPYLIKVQALNDMGFAPEPAVVMGHSGEDLPMVAPGNVRVNVVNSTLAEVHWDPVPLKSIRGHLQGYRIYYWKTQSSSKRNRRHIEKKILTFQGSKTHGMLPGLEPFSHYTLNVRVVNGKGEGPASPDRVFNTPEGVPSAPSSLKIVNPTLDSLTLEWDPPSHPNGILTEYTLKYQPINSTHELGPLVDLKIPANKTRWTLKNLNFSTRYKFYFYAQTSAGSGSQITEEAVTTVDEAGILPPDVGAGKVQAVNPRISNLTAAAAETYANISWEYEGPEHVNFYVEYGVAGSKEEWRKEIVNGSRSFFGLKGLMPGTAYKVRVGAVGDSGFVSSEDVFETGPAMASRQVDIATQGWFIGLMCAVALLILILLIVCFIRRNKGGKYPVKEKEDAHADPEIQPMKEDDGTFGEYSDAEDHKPLKKGSRTPSDRTVKKEDSDDSLVDYGEGVNGQFNEDGSFIGQYSGKKEKEPAEGNESSEAPSPVNAMNSFV

SEQ ID NO: 2891 - RNA, 3915 nt, Artificial Sequence
  NRCAM__Homo_sapiens__CCDS47686.1
augcagcuuaaaauaaugccgaaaaagaagcgcuuaucugcgggcagagugccccugauucucuuccugugccagaugauuagugcacuggaaguaccucuugauccaaaacuucuugaagacuugguacagccuccaaccaucacccaacagucuccaaaagauuacauuauugacccucgggagaauauuguaauccagugugaagccaaagggaaaccgcccccaagcuuuuccuggacccguaaugggacucauuuugacaucgauaaagacccucuggucaccaugaagccuggcacaggaacgcucauaauuaacaucaugagcgaagggaaagcugagaccuaugaaggagucuaucaguguacagcaaggaacgaacgcggagcugcaguuucuaauaacauuguuguccgcccauccagaucaccauuguggaccaaagaaaaacuugaaccaaucacacuucaaaguggucagucuuuaguacuucccugcagacccccaauuggauuaccaccaccuauaauauuuuggauggauaauuccuuucaaagacuuccacaaagugagagaguuucucaagguuugaauggggaccuuuauuuuuccaauguccucccagaggacacccgcgaagacuauaucuguuaugcuagauuuaaucauacucaaaccauacagcagaagcaaccuauuucugugaaggugauuucaguggaugaauugaaugacacuauagcugcuaauuugagugacacugaguuuuauggugcuaaaucaaguagagagaggccaccaacauuuuuaacuccagaaggcaaugcaaguaacaaagaggaauuaagaggaaaugugcuuucacuggagugcauugcagaaggacugccuaccccaauuauuuacugggcaaaggaagauggaaugcuacccaaaaacaggacaguuuauaagaacuuugagaaaaccuugcagaucauucauguuucagaagcagacucuggaaauuaccaauguauagcaaaaaacgcauuaggagccauccaccauaccauuucuguuagaguuaaagcggcuccauacuggaucacagccccucaaaaucuugugcuguccccaggagaggaugggaccuugaucugcagagcuaauggcaaccccaaacccagaauuagcugguuaacaaauggagucccaauagaaauugccccugaugaccccagcagaaaaauagauggcgauaccauuauuuuuucaaauguucaagaaagaucaagugcagucuaucagugcaaugccucuaaugaauauggauauuuacuggcaaacgcauuuguaaaugugcuggcugagccaccacgaauccucacaccugcaaacacacucuaccaggucauugcaaacaggccugcuuuacuagacugugccuucuuugggucuccucucccaaccaucgagugguuuaaaggagcuaaaggaagugcucuucaugaagauauuuauguuuuacaugaaaauggaacuuuggaaauuccuguggcccaaaaggacaguacaggaacuuauacguguguugcaaggaauaaauuagggauggcgaagaaugaaguucacuuagaaaucaaagauccuacauggaucguuaaacagcccgaauaugcaguugugcaaagagggagcaugguguccuuugaaugcaaagugaaacaugaucacaccuuaucccucacuguccuguggcugaaggacaacagggaacugcccagugaugaaagguucacuguugacaaggaucaucuagugguagcugaugucagugacgaugacagcgggaccuacacguguguggccaacaccacucuggacagcgucuccgccagcgcugugcuuagcguuguugcuccuacuccaacuccagcucccguuuacgaugucccaaauccucccuuugacuuagaacugacagaucaacuugacaaaaguguucagcugucauggaccccaggcgaugacaacaauagccccauuacaaaauucaucaucgaauaugaagaugcaaugcacaagccagggcuguggcaccaccaaacugaaguuucuggaacacagaccacagcccagcugaagcugucuccuuacgugaacuacuccuuccgcgugauggcagugaacagcauugggaagagcuugcccagcgaggcgucugagcaguauuugacgaaagccucagaaccagauaaaaaccccacagcuguggaaggacugggaucagagccugauaauuuggugauuacguggaagcccuugaaugguuucgaaucuaaugggccaggccuucaguacaaaguuagcuggcgccagaaagauggugaugaugaauggacaucugugguuguggcaaauguauccaaauauauugucucaggcacgccaaccuuuguuccauaccugaucaaaguucaggcccugaaugacaugggguuugcccccgagccagcuguagucaugggacauucuggagaagaccucccaaugguggcuccugggaacgugcgugugaauguggugaacaguaccuuagccgaggugcacugggacccaguaccucugaaaagcauccgaggacaccuacaaggcuaucggauuuacuauuggaagacccagaguucaucuaaaagaaacagacgucacauugagaaaaagauccucaccuuccaaggcagcaagacucauggcauguugccggggcuagagcccuuuagccacuacacacugaauguccgaguggucaaugggaaaggggagggcccagccagcccugacagagucuuuaauacuccagaaggaguccccagugcucccucgucuuugaagauugugaauccaacacuggacucucucacuuuggaaugggauccaccgagccacccgaauggcauuuugacagaguacaccuuaaaguaucagccaauuaacagcacacaugaauuaggcccucugguagauuugaaaauuccugccaacaagacacgguggacuuuaaaaaauuuaaauuucagcacucgauauaaguuuuauuucuaugcacaaacaucagcaggaucaggaagucaaauuacagaggaagcaguaacaacuguggaugaagcugguauucuuccaccugauguaggugcaggcaaaguucaagcaguaaaucccaggaucagcaaucuuacugcugcagcugcugagaccuaugccaauaucaguugggaauaugagggaccagagcaugugaacuuuuauguugaauaugguguagcaggcagcaaagaagaauggagaaaagaaauuguaaaugguucucggagcuucuuuggguuaaagggucuaaugccaggaacagcauacaaaguucgaguuggugcugugggggacucugguuuugugaguucagaggauguguuugagacaggcccagcgauggcaagccggcagguggauauugcaacucagggcugguucauuggucugaugugugcuguugcucuccuuaucuuaauuuugcugauuguuugcuucaucagaagaaacaagggugguaaauauccaguuaaagaaaaggaagaugcccaugcugacccugaaauccagccuaugaaggaagaugaugggacauuuggagaauacagugaugcagaagaccacaagccuuugaaaaaaggaagucgaacuccuucagacaggacugugaaaaaagaagauagugacgacagccuaguugacuauggagaagggguuaauggccaguucaaugaggauggcuccuuuauuggacaauacagugguaagaaagagaaagagccggcugaaggaaacgaaagcucagaggcaccuucuccugucaacgccaugaauuccuuuguuuaa

SEQ ID NO: 2892 - RNA, 3915 nt, Artificial Sequence
  derived and/or modified sequence opt1 from NRCAM__Homo_sapiens__CCDS47686.1
augcagcugaagaucaugcccaagaagaagcgccucagcgccggccgggugccgcugauccuguuccucugccagaugaucuccgcccuggaggucccccuggaccccaagcuccuggaggaccuggugcagcccccgaccaucacccagcagagccccaaggacuacaucaucgacccccgcgagaacaucgugauccagugcgaggcgaaggggaagcccccgcccuccuucagcuggacgcggaacggcacccacuucgacaucgacaaggacccccucgucaccaugaagcccgggaccggcacgcugaucaucaacaucauguccgaggggaaggccgagaccuacgagggcguguaccagugcaccgcccgcaacgagcggggcgccgccgugagcaacaacaucgucgugcgcccgucccggagcccccuguggaccaaggagaagcucgagcccaucacgcugcaguccgggcagagccuggugcuccccugccgcccgcccaucggccugcccccgcccaucaucuucuggauggacaacuccuuccagcggcugccccagagcgagcgcgucucccaggggcucaacggcgaccuguacuucagcaacgugcugcccgaggacacccgggaggacuacaucugcuacgcgcgcuucaaccacacccagaccauccagcagaagcagcccaucuccgugaaggucaucagcguggacgagcucaacgacacgaucgccgccaaccuguccgacaccgaguucuacggggccaagagcucccgggagcgcccgcccaccuuccugacccccgagggcaacgcgagcaacaaggaggagcuccggggcaacgugcugagccuggagugcaucgccgaggggcuccccacgccgaucaucuacugggccaaggaggacggcaugcugcccaagaaccgcaccgucuacaagaacuucgagaagacccugcagaucauccacguguccgaggccgacagcgggaacuaccagugcaucgccaagaacgcgcucggcgccauccaccacaccaucuccgugcgggucaaggccgcccccuacuggaucacggccccgcagaaccuggugcugagccccggcgaggacgggacccucaucugccgcgcgaacggcaaccccaagccccggaucuccuggcugaccaacggggugccgaucgagaucgcccccgacgaccccagccgcaagaucgacggcgacaccaucaucuucuccaacguccaggagcggagcuccgccguguaccagugcaacgccagcaacgaguacggguaccugcucgccaacgcguucgugaacguccuggccgagcccccgcgcauccugacgcccgccaacacccucuaccaggugaucgccaaccgccccgcccugcuggacugcgcguucuucggcagcccccucccgaccaucgagugguucaagggcgccaaggggagcgcccugcacgaggacaucuacguccugcacgagaacggcacccucgagauccccguggcccagaaggacuccacggggaccuacacgugcguggcgcggaacaagcugggcauggccaagaacgagguccaccuggagaucaaggaccccaccuggaucgugaagcagcccgaguacgccgugguccagcgcgggagcaugguguccuucgagugcaaggugaagcacgaccacacccucagccugaccguccuguggcugaaggacaaccgggagcucccguccgacgagcgcuucaccguggacaaggaccaccugguggucgccgacgugagcgacgacgacuccggcaccuacacgugcguggccaacaccacccuggacagcgucagcgcguccgccgugcucagcguggucgcccccacccccacccccgccccgguguacgacgugcccaacccgcccuucgaccuggagcugacggaccagcucgacaaguccguccagcugagcuggacccccggcgacgacaacaacucccccaucaccaaguucaucaucgaguacgaggacgccaugcacaagcccgggcuguggcaccaccagaccgaggugagcggcacgcagaccaccgcgcagcucaagcuguccccguacgugaacuacagcuuccgggucauggccgugaacuccaucgggaagucccugcccuccgaggccagcgagcaguaccucaccaaggccuccgagcccgacaagaaccccacggccguggagggccuggggagcgagccggacaaccuggucaucaccuggaagccccucaacggcuucgaguccaacggccccgggcugcaguacaaggugagcuggcgccagaaggacggcgacgacgaguggaccuccguggucguggcgaacgugagcaaguacaucgucagcgggacccccacguucgugccguaccugaucaaggugcaggcccucaacgacaugggcuucgcccccgagcccgccgucgugaugggccacuccggggaggaccugcccaugguggcgccgggcaacguccgggugaacguggucaacagcacccuggccgaggugcacugggaccccgugccccucaaguccauccgcgggcaccuccagggcuaccggaucuacuacuggaagacccagagcuccagcaagcgcaaccggcgccacaucgagaagaagauccugaccuuccagggguccaagacgcacggcaugcugcccggccuggagccguucagccacuacacccugaacguccggguggugaacgggaagggcgaggggcccgccucccccgaccgcgucuucaacacccccgagggcgugccgagcgcccccuccagccucaagaucgugaaccccacccuggacucccugacgcucgagugggacccgcccagccaccccaacgggauccugaccgaguacacccugaaguaccagcccaucaacuccacccacgagcucggcccccuggucgaccugaagaucccggccaacaagacgcgguggacccucaagaaccugaacuucagcacccgcuacaaguucuacuucuacgcgcagaccuccgccggcagcgggucccagaucacggaggaggccgugaccaccgucgacgaggccggcauccugccgcccgacgugggggccggcaaggugcaggcggucaacccccggaucagcaaccucaccgccgccgccgccgagacguacgcgaacaucagcugggaguacgaggggcccgagcacgugaacuucuacguggaguacggcgucgccggcuccaaggaggaguggcgcaaggagaucgugaacgggagccgguccuucuucggccugaaggggcugaugcccggcaccgccuacaaggugcgcgucggggccgugggcgacagcggcuucguguccagcgaggacgucuucgagaccgggcccgcgauggccucccgccagguggacaucgccacccagggcugguucaucgggcucaugugcgccguggcccugcugauccucauccugcugaucgucugcuucauccggcgcaacaagggcggcaaguacccggugaaggagaaggaggacgcgcacgccgaccccgagauccagcccaugaaggaggacgacgggacguucggcgaguacagcgacgccgaggaccacaagccccucaagaaggggucccggaccccgagcgaccgcaccgugaagaaggaggacuccgacgacagccuggucgacuacggcgagggggugaacggccaguucaacgaggacggcuccuucaucgggcaguacagcggcaagaaggagaaggagcccgccgaggggaacgaguccagcgaggcccccucccccgugaacgcgaugaacagcuucgucuga

SEQ ID NO: 2893 - RNA, 3915 nt, Artificial Sequence
  derived and/or modified sequence opt2 from NRCAM__Homo_sapiens__CCDS47686.1
augcagcucaagaucaugcccaagaagaagcgccucuccgccggccgcgucccccucauccucuuccucugccagaugaucuccgcccucgaggucccccucgaccccaagcuccucgaggaccucguccagccccccaccaucacccagcagucccccaaggacuacaucaucgacccccgcgagaacaucgucauccagugcgaggccaagggcaagcccccccccuccuucuccuggacccgcaacggcacccacuucgacaucgacaaggacccccucgucaccaugaagcccggcaccggcacccucaucaucaacaucauguccgagggcaaggccgagaccuacgagggcgucuaccagugcaccgcccgcaacgagcgcggcgccgccgucuccaacaacaucgucguccgccccucccgcuccccccucuggaccaaggagaagcucgagcccaucacccuccaguccggccagucccucguccuccccugccgcccccccaucggccuccccccccccaucaucuucuggauggacaacuccuuccagcgccucccccaguccgagcgcgucucccagggccucaacggcgaccucuacuucuccaacguccuccccgaggacacccgcgaggacuacaucugcuacgcccgcuucaaccacacccagaccauccagcagaagcagcccaucuccgucaaggucaucuccgucgacgagcucaacgacaccaucgccgccaaccucuccgacaccgaguucuacggcgccaaguccucccgcgagcgcccccccaccuuccucacccccgagggcaacgccuccaacaaggaggagcuccgcggcaacguccucucccucgagugcaucgccgagggccuccccacccccaucaucuacugggccaaggaggacggcaugcuccccaagaaccgcaccgucuacaagaacuucgagaagacccuccagaucauccacgucuccgaggccgacuccggcaacuaccagugcaucgccaagaacgcccucggcgccauccaccacaccaucuccguccgcgucaaggccgcccccuacuggaucaccgccccccagaaccucguccucucccccggcgaggacggcacccucaucugccgcgccaacggcaaccccaagccccgcaucuccuggcucaccaacggcguccccaucgagaucgcccccgacgaccccucccgcaagaucgacggcgacaccaucaucuucuccaacguccaggagcgcuccuccgccgucuaccagugcaacgccuccaacgaguacggcuaccuccucgccaacgccuucgucaacguccucgccgagcccccccgcauccucacccccgccaacacccucuaccaggucaucgccaaccgccccgcccuccucgacugcgccuucuucggcuccccccuccccaccaucgagugguucaagggcgccaagggcuccgcccuccacgaggacaucuacguccuccacgagaacggcacccucgagauccccgucgcccagaaggacuccaccggcaccuacaccugcgucgcccgcaacaagcucggcauggccaagaacgagguccaccucgagaucaaggaccccaccuggaucgucaagcagcccgaguacgccgucguccagcgcggcuccauggucuccuucgagugcaaggucaagcacgaccacacccucucccucaccguccucuggcucaaggacaaccgcgagcuccccuccgacgagcgcuucaccgucgacaaggaccaccucgucgucgccgacgucuccgacgacgacuccggcaccuacaccugcgucgccaacaccacccucgacuccgucuccgccuccgccguccucuccgucgucgcccccacccccacccccgcccccgucuacgacguccccaacccccccuucgaccucgagcucaccgaccagcucgacaaguccguccagcucuccuggacccccggcgacgacaacaacucccccaucaccaaguucaucaucgaguacgaggacgccaugcacaagcccggccucuggcaccaccagaccgaggucuccggcacccagaccaccgcccagcucaagcucucccccuacgucaacuacuccuuccgcgucauggccgucaacuccaucggcaagucccuccccuccgaggccuccgagcaguaccucaccaaggccuccgagcccgacaagaaccccaccgccgucgagggccucggcuccgagcccgacaaccucgucaucaccuggaagccccucaacggcuucgaguccaacggccccggccuccaguacaaggucuccuggcgccagaaggacggcgacgacgaguggaccuccgucgucgucgccaacgucuccaaguacaucgucuccggcacccccaccuucguccccuaccucaucaagguccaggcccucaacgacaugggcuucgcccccgagcccgccgucgucaugggccacuccggcgaggaccuccccauggucgcccccggcaacguccgcgucaacgucgucaacuccacccucgccgagguccacugggaccccgucccccucaaguccauccgcggccaccuccagggcuaccgcaucuacuacuggaagacccaguccuccuccaagcgcaaccgccgccacaucgagaagaagauccucaccuuccagggcuccaagacccacggcaugcuccccggccucgagcccuucucccacuacacccucaacguccgcgucgucaacggcaagggcgagggccccgccucccccgaccgcgucuucaacacccccgagggcguccccuccgcccccuccucccucaagaucgucaaccccacccucgacucccucacccucgagugggacccccccucccaccccaacggcauccucaccgaguacacccucaaguaccagcccaucaacuccacccacgagcucggcccccucgucgaccucaagauccccgccaacaagacccgcuggacccucaagaaccucaacuucuccacccgcuacaaguucuacuucuacgcccagaccuccgccggcuccggcucccagaucaccgaggaggccgucaccaccgucgacgaggccggcauccucccccccgacgucggcgccggcaagguccaggccgucaacccccgcaucuccaaccucaccgccgccgccgccgagaccuacgccaacaucuccugggaguacgagggccccgagcacgucaacuucuacgucgaguacggcgucgccggcuccaaggaggaguggcgcaaggagaucgucaacggcucccgcuccuucuucggccucaagggccucaugcccggcaccgccuacaagguccgcgucggcgccgucggcgacuccggcuucgucuccuccgaggacgucuucgagaccggccccgccauggccucccgccaggucgacaucgccacccagggcugguucaucggccucaugugcgccgucgcccuccucauccucauccuccucaucgucugcuucauccgccgcaacaagggcggcaaguaccccgucaaggagaaggaggacgcccacgccgaccccgagauccagcccaugaaggaggacgacggcaccuucggcgaguacuccgacgccgaggaccacaagccccucaagaagggcucccgcacccccuccgaccgcaccgucaagaaggaggacuccgacgacucccucgucgacuacggcgagggcgucaacggccaguucaacgaggacggcuccuucaucggccaguacuccggcaagaaggagaaggagcccgccgagggcaacgaguccuccgaggcccccucccccgucaacgccaugaacuccuucgucuga

SEQ ID NO: 2894 - RNA, 3915 nt, Artificial Sequence
  derived and/or modified sequence opt3 from NRCAM__Homo_sapiens__CCDS47686.1
augcagcugaagaucaugcccaaaaagaaaagacucagcgccggcagggugccucuuauucuguucuugugccaaaugauauccgcuuuagaggucccacuggacccgaagcuacucgaagaucugguucagcccccuaccaucacacagcagucuccaaaagacuacauuaucgauccccgggagaauauugugauccaaugugaagcaaaggggaagccuccacccucauuuaguuggacucgcaauggaacgcacuucgacauagauaaagacccucuuguaaccaugaagccagguacaggcacucugaucauuaacaucaugagcgaggggaaagccgaaaccuaugagggaguguaccagugcacagcgcgaaaugagcguggcgcugccgucuccaacaauauugugguuagaccgucuaggucgcccuuguggaccaaggaaaaacucgagccuaucacucugcagucaggucagagccuggugcucccaugucggcccccuauaggguuaccacccccgauuaucuuuuggauggauaacaguuuccaacgccugccucaguccgaaagagucucucagggacuuaauggcgacuuguauuuuagcaacgugcugcccgaggauacaagggaggacuacauuugcuaugcacgguucaaucauacccagacgauccaacagaagcagccaaucuccguaaagguuauuucaguggaugaacuaaacgacacuauagccgcuaaucucagugauaccgaguuuuacggcgcaaaaagcucucgcgaacgaccucccacauuccugacuccagaggggaacgccuccaauaaggaggaacuuagaggaaacguccugucauuggaguguaucgcugaaggucuccccaccccuauuaucuauugggccaaagaggacggcaugcugccaaagaauaggacaguguacaaaaacuuugaaaagaccuuacaaauaauucacgugagcgaggcggacagugggaacuaccagugcaucgcuaaaaaugcccugggagcuauccaucacacgauuucuguccggguuaaggccgcaccguauuggaucacugcuccccagaaccucgugcuuuccccuggcgaagaugguacacugauuugucgugccaaugggaacccaaagccccgcauaagcugguugaccaauggaguaccuaucgagauugcgccagacgaucccucgagaaaaaucgacggcgauacuaucauuuucucuaacgugcaggagagguccucagccgucuaccaaugcaaugcaaguaacgaauauggcuaccuacuggcuaaugccuuugugaacguucucgcugagccgccucggauacugacaccagccaauacccuuuaucaggugaucgcaaaccgacccgcccuguuggacugugcuuucuuugggagcccucuccccacgauugaaugguucaagggagcgaaagguuccgcacugcaugaggauaucuacgucuuacacgaaaauggcacccuggagauuccaguggcccagaaggacucuacagggacuuauaccugcguagcucgcaacaaacuaggaauggccaagaaugagguucaccucgaaaucaaggauccuacauggauagugaaacagcccgaguacgcagucgugcaaagaggcagcauggucucauucgaauguaaggugaaacaugaccacacucugagucuuaccguuuuguggcugaaggauaacagggagcucccauccgacgagcgguuuacaguggacaaagaucaucugguagucgccgacgugagcgaugacgauucugguaccuacacuugcguugcuaacacgacacuugacucagugagugccagcgcaguccuguccgugguagcgccgaccccuacucccgcuccaguguaugauguucccaauccuccauucgacuuggaacucaccgaucagcuggacaagucuguccaguuaucguggacacccggggaugacaacaauagcccuaucaccaaguuuauuaucgaguacgaagaugccaugcacaaaccgggccuguggcaccaucagacugagguguccggaacacaaacgaccgcacagcuaaagcucucaccauaugugaacuacaguuuccgcgucauggccguuaauucuauuggcaaaagccugcccuccgaagcaucagagcaguaucuuacuaaggccagcgagccugacaaaaacccaacagcaguggaaggguugggaucugagcccgacaaucuggugaucaccuggaagccucucaacgguuuugaauccaauggcccggggcugcaguacaagguaaguuggagacaaaaagauggagacgaugaguggacaagcgucgugguugcuaacgugucuaaguauauagucuccggcacucccaccuucgugccauacuuaauuaaaguucaggcccugaaugacauggguuuugcgccugaacccgccgugguaauggggcacucaggcgaggaucuuccaauggucgcuccuggaaacgugagggugaaugucguuaacaguacguuggcagaggugcauugggaccccguaccacucaagagcauccguggccaucugcagggguaccggauuuauuacuggaaaacccaaucguccucuaagcgaaauagaaggcacaucgaaaagaagauacuaacauuccagggaagcaagacucacgguaugcugccgggccucgagccuuuuucacacuauacccugaacgugcgcgucgugaacgggaaaggagaaggccccgccaguccagaucggguuuucaauacacccgagggugugccuuccgcuccaucuagccuuaagaucgucaaccccacuuuggacucccugaccuuagaaugggauccuccgucacauccaaaugggauucucacggaguacacacugaaauaucagcccaucaacagcacccacgagcuuggcccucugguggacuugaagauucccgccaauaaaacuagauggacacucaagaaccugaauuuuaguaccagguacaaguucuauuuuuacgcacagacuucugcgggauccggcagccaaaucaccgaagaggccguuacaacgguggaugaagcugggauacuaccaccugacgucggagccggcaaaguacaggcagugaacccccgcauuucgaaucugaccgcugccgcagccgagacuuacgcuaacaucucaugggaguaugaagguccagagcauguuaauuucuacguggaauauggggucgcgggaucuaaggaggaauggcgaaaagagaucgugaacggcagucgguccuucuuuggucucaagggccugaugccugggacagccuacaaaguacgugugggagcagucggcgauagcggguucguuucuagcgaggacguguuugaaaccggaccggcuauggccuccagacagguggacauugccacacagggcugguucaucggucuuaugugcgcugucgcauugcugauuuuaauacuccugaucguguguuuuauuaggcgcaauaaagggggaaaguaucccguuaaagagaaggaagaugcccacgcggacccagagauccaaccuaugaaagaagaugacggcacuuucggugaguacucagaugcugaggaccacaagccccuuaaaaagggcagucggaccccaagcgauagaacgguaaagaaagaagacucugaugacucccugguggauuauggggagggagucaacggccaguuuaaugaagacgggucauucauuggacaguacaguggcaagaaagagaaggaaccugccgaggguaacgagagcuccgaagcacccucuccggugaacgccaugaacucguuuguuuga

SEQ ID NO: 2895 - RNA, 3915 nt, Artificial Sequence
  derived and/or modified sequence opt4 from NRCAM__Homo_sapiens__CCDS47686.1
augcagcugaagaucaugcccaagaagaagagacugagcgccggcagagugccccugauccuguuccugugccagaugaucagcgcccuggaggugccccuggaccccaagcugcuggaggaccuggugcagccccccaccaucacccagcagagccccaaggacuacaucaucgaccccagagagaacaucgugauccagugcgaggccaagggcaagcccccccccagcuucagcuggaccagaaacggcacccacuucgacaucgacaaggacccccuggugaccaugaagcccggcaccggcacccugaucaucaacaucaugagcgagggcaaggccgagaccuacgagggcguguaccagugcaccgccagaaacgagagaggcgccgccgugagcaacaacaucguggugagacccagcagaagcccccuguggaccaaggagaagcuggagcccaucacccugcagagcggccagagccuggugcugcccugcagaccccccaucggccugcccccccccaucaucuucuggauggacaacagcuuccagagacugccccagagcgagagagugagccagggccugaacggcgaccuguacuucagcaacgugcugcccgaggacaccagagaggacuacaucugcuacgccagauucaaccacacccagaccauccagcagaagcagcccaucagcgugaaggugaucagcguggacgagcugaacgacaccaucgccgccaaccugagcgacaccgaguucuacggcgccaagagcagcagagagagaccccccaccuuccugacccccgagggcaacgccagcaacaaggaggagcugagaggcaacgugcugagccuggagugcaucgccgagggccugcccacccccaucaucuacugggccaaggaggacggcaugcugcccaagaacagaaccguguacaagaacuucgagaagacccugcagaucauccacgugagcgaggccgacagcggcaacuaccagugcaucgccaagaacgcccugggcgccauccaccacaccaucagcgugagagugaaggccgcccccuacuggaucaccgccccccagaaccuggugcugagccccggcgaggacggcacccugaucugcagagccaacggcaaccccaagcccagaaucagcuggcugaccaacggcgugcccaucgagaucgcccccgacgaccccagcagaaagaucgacggcgacaccaucaucuucagcaacgugcaggagagaagcagcgccguguaccagugcaacgccagcaacgaguacggcuaccugcuggccaacgccuucgugaacgugcuggccgagccccccagaauccugacccccgccaacacccuguaccaggugaucgccaacagacccgcccugcuggacugcgccuucuucggcagcccccugcccaccaucgagugguucaagggcgccaagggcagcgcccugcacgaggacaucuacgugcugcacgagaacggcacccuggagauccccguggcccagaaggacagcaccggcaccuacaccugcguggccagaaacaagcugggcauggccaagaacgaggugcaccuggagaucaaggaccccaccuggaucgugaagcagcccgaguacgccguggugcagagaggcagcauggugagcuucgagugcaaggugaagcacgaccacacccugagccugaccgugcuguggcugaaggacaacagagagcugcccagcgacgagagauucaccguggacaaggaccaccuggugguggccgacgugagcgacgacgacagcggcaccuacaccugcguggccaacaccacccuggacagcgugagcgccagcgccgugcugagcgugguggcccccacccccacccccgcccccguguacgacgugcccaacccccccuucgaccuggagcugaccgaccagcuggacaagagcgugcagcugagcuggacccccggcgacgacaacaacagccccaucaccaaguucaucaucgaguacgaggacgccaugcacaagcccggccuguggcaccaccagaccgaggugagcggcacccagaccaccgcccagcugaagcugagccccuacgugaacuacagcuucagagugauggccgugaacagcaucggcaagagccugcccagcgaggccagcgagcaguaccugaccaaggccagcgagcccgacaagaaccccaccgccguggagggccugggcagcgagcccgacaaccuggugaucaccuggaagccccugaacggcuucgagagcaacggccccggccugcaguacaaggugagcuggagacagaaggacggcgacgacgaguggaccagcguggugguggccaacgugagcaaguacaucgugagcggcacccccaccuucgugcccuaccugaucaaggugcaggcccugaacgacaugggcuucgcccccgagcccgccguggugaugggccacagcggcgaggaccugcccaugguggcccccggcaacgugagagugaacguggugaacagcacccuggccgaggugcacugggaccccgugccccugaagagcaucagaggccaccugcagggcuacagaaucuacuacuggaagacccagagcagcagcaagagaaacagaagacacaucgagaagaagauccugaccuuccagggcagcaagacccacggcaugcugcccggccuggagcccuucagccacuacacccugaacgugagaguggugaacggcaagggcgagggccccgccagccccgacagaguguucaacacccccgagggcgugcccagcgcccccagcagccugaagaucgugaaccccacccuggacagccugacccuggagugggacccccccagccaccccaacggcauccugaccgaguacacccugaaguaccagcccaucaacagcacccacgagcugggcccccugguggaccugaagauccccgccaacaagaccagauggacccugaagaaccugaacuucagcaccagauacaaguucuacuucuacgcccagaccagcgccggcagcggcagccagaucaccgaggaggccgugaccaccguggacgaggccggcauccugccccccgacgugggcgccggcaaggugcaggccgugaaccccagaaucagcaaccugaccgccgccgccgccgagaccuacgccaacaucagcugggaguacgagggccccgagcacgugaacuucuacguggaguacggcguggccggcagcaaggaggaguggagaaaggagaucgugaacggcagcagaagcuucuucggccugaagggccugaugcccggcaccgccuacaaggugagagugggcgccgugggcgacagcggcuucgugagcagcgaggacguguucgagaccggccccgccauggccagcagacagguggacaucgccacccagggcugguucaucggccugaugugcgccguggcccugcugauccugauccugcugaucgugugcuucaucagaagaaacaagggcggcaaguaccccgugaaggagaaggaggacgcccacgccgaccccgagauccagcccaugaaggaggacgacggcaccuucggcgaguacagcgacgccgaggaccacaagccccugaagaagggcagcagaacccccagcgacagaaccgugaagaaggaggacagcgacgacagccugguggacuacggcgagggcgugaacggccaguucaacgaggacggcagcuucaucggccaguacagcggcaagaaggagaaggagcccgccgagggcaacgagagcagcgaggcccccagccccgugaacgccaugaacagcuucguguga

SEQ ID NO: 2896 - RNA, 3915 nt, Artificial Sequence
  derived and/or modified sequence opt5 from NRCAM__Homo_sapiens__CCDS47686.1
augcagcugaagaucaugcccaaaaagaaaagacucagcgccggccgggugccucugauucuuuuccugugccaaaugaucuccgcucucgaggucccgcuggaccccaaacuucuggaagaucucguucagccucccaccauuacacagcagucuccuaaagacuacaucauugauccccgcgagaacaucgugauccaaugugaagccaaggggaagccuccgcccagcuuuuccuggacgagaaauggaacccacuucgacauugauaaagacccucuggugacaaugaagcccggcaccgggacacugaucauuaacaucaugucugagggaaaagcggaaaccuaugagggcgucuaccagugcacagcucggaaugagcgcggggccgccgugagcaacaauauuguugugagaccuucccggucuccccucuggaccaaggaaaaacuggagccgaucacgcuucagagcggacagucccugguccucccuuguagacccccuauuggccugcccccucccaucaucuuuuggauggauaacagcuuccaacgccuuccgcagucugaacgggugucccagggccugaauggggaccucuauuuuagcaacguucugcccgaggauacccgcgaggacuacauuugcuaugcuagauucaaucauacacagaccauccaacagaagcagccuauuucugugaaggucaucuccguggaugaacugaacgacacaauugccgcuaaucucagcgauaccgaguuuuacggagccaaaucuucccgggaaagacccccuacguuccugacacccgagggcaacgcgagcaauaaggaggaacuucgcgggaacgugcugucccucgaguguaucgccgaaggacugccgaccccuaucauuuauugggcuaaagaggacggcaugcuucccaagaaucggacagucuacaaaaacuuugaaaagacccugcaaaucauucacguuucugaggccgacagcgggaacuaccagugcaucgcuaaaaaugcccucggagcgauucaucacaccaucuccgugcgcgugaaggccgcuccuuauuggaucacagcuccccagaaccugguccugagcccuggcgaagauggcacgcucauuuguagagcuaaugggaaccccaagccgcggaucucuuggcugaccaauggagugccuauugagaucgcccccgacgaucccuccagaaaaauugacggcgauacaaucauuuucagcaacguucaggagcgcucuagcgccguguaccaaugcaaugcuuccaacgaauauggguaccuucuggcgaaugccuuugucaacgugcucgcugagccuccgcggauccugacccccgccaauacacuuuaucagguuaucgccaacagaccugcucugcucgacugugccuucuuuggaucuccccugccuaccauugaaugguucaagggcgcgaaagggagcgcucugcaugaggauaucuacgugcuccacgaaaauggaacgcuggagauucccgucgcccagaaggacuccacaggcaccuauaccugcguggcccgcaacaaacuuggcauggcuaagaaugagguccaccuggaaaucaaggauccuacauggauugugaaacagcccgaguacgccguugugcaacgggggagcauggucucuuucgaauguaaggugaaacaugaccacacccucucccugacaguucuguggcuuaaggauaacagagagcucccgagcgacgagcgcuuuacgguggacaaagaucaucuggucguggcugacgugucugaugacgauuccggaaccuacacaugcguugccaacaccacacuggacagcgucuccgcgucugccgugcucagcguggucgcuccuacccccacgccugcccccguguaugauguuccgaauccucccuucgaccuggaacuuaccgaucagcuggacaaguccgugcagcucucuuggacaccuggcgaugacaacaauagccccaucaccaaguuuaucauugaguacgaagaugcuaugcacaaacccgggcuguggcaccaucagacagaggucuccggaacccaaacgacagcccagcugaaacuuagcccuuaugugaacuacucuuuccggguuauggcggucaauuccaucggcaagagccucccgucugaagccuccgagcaguaucugaccaaggcuagcgagcccgacaaaaacccuacagccguggaagggcugggcucugagcccgacaaucucgugauuaccuggaagccucugaacggauuugaaagcaauggccccgggcuucaguacaagguuuccuggagacaaaaagauggagacgaugaguggaccagcguggucguggcuaacgugucuaaguauaucgucuccggcacaccuacguucguuccguaccugauuaaagugcaggcccucaaugacaugggguuugcccccgaaccugcuguggucaugggacacagcggcgaggaucugcccaugguggcgccugggaacguucgcgugaaugucgugaacuccacccuggccgagguucauugggaccccgugccgcuuaagucuauccggggccaccuccagggauacagaaucuauuacuggaaaacacaaagcuccucuaagcgcaaucggagacauauugaaaagaagauccugaccuuccagggcagcaagacacacgggaugcugccuggacucgagcccuuuucccacuauacccugaacguccgggugguuaacggcaaaggggaaggacccgcuucuccugaucgcguguucaauacgcccgagggcgucccuagcgccccguccagccuuaagauugugaaccccacacuggacucucucacccuggaaugggauccucccucccauccuaaugggauccugaccgaguacacacuuaaauaucagcccauuaacagcacccacgagcucggcccgcugguggaccugaagaucccugccaauaaaacaagauggacgcucaagaaccugaauuuuucuacccgguacaaguucuauuuuuacgcucagacauccgccggaagcggcucucaaaucaccgaagaggcggucacaaccguugaugaagcugggauucuucccccugacgugggagccggcaaagugcaggccgucaaccccagaaucuccaaucugacggcugccgcggcugagaccuacgccaacauuagcugggaguaugaagggccugagcaugugaauuucuacguugaauauggaguggccggcuccaaggaggaauggcgcaaagagaucgucaacgggagccggucuuucuuuggccucaagggacugaugcccggcacagcuuacaaagugagaguuggggccgugggagauagcggcuucgucuccucugaggacguguuugaaaccgggccggcuauggccagccgccaggucgacauugcgacacagggaugguucaucggccugaugugcgccguggcccuucugauucucauccugcucaucguuuguuuuauuagacggaauaagggcgggaaguauccugugaaagagaaggaagaugcccacgcugaccccgagauccaacccaugaaagaagaugacggaaccuucggcgaguacuccgaugccgaggaccacaagccucugaaaaaggggucucgcacaccgagcgauagaaccgucaagaaagaagacuccgaugacucucuuguggauuauggagagggcguuaacgggcaguuuaaugaagacggcagcuucauuggacaguacuccggcaagaaagagaaggaacccgccgaggggaacgagagcucugaagcuccuucccccgugaacgcgaugaauagcuuugucuga

SEQ ID NO: 2897 - protein, 434 aa, Artificial Sequence
  NSE__Homo_sapiens__P09104
MSIEKIWAREILDSRGNPTVEVDLYTAKGLFRAAVPSGASTGIYEALELRDGDKQRYLGKGVLKAVDHINSTIAPALISSGLSVVEQEKLDNLMLELDGTENKSKFGANAILGVSLAVCKAGAAERELPLYRHIAQLAGNSDLILPVPAFNVINGGSHAGNKLAMQEFMILPVGAESFRDAMRLGAEVYHTLKGVIKDKYGKDATNVGDEGGFAPNILENSEALELVKEAIDKAGYTEKIVIGMDVAASEFYRDGKYDLDFKSPTDPSRYITGDQLGALYQDFVRDYPVVSIEDPFDQDDWAAWSKFTANVGIQIVGDDLTVTNPKRIERAVEEKACNCLLLKVNQIGSVTEAIQACKLAQENGWGVMVSHRSGETEDTFIADLVVGLCTGQIKTGAPCRSERLAKYNQLMRIEEELGDEARFAGHNFRNPSVL

SEQ ID NO: 2898 - RNA, 1305 nt, Artificial Sequence
  NSE__Homo_sapiens__AAB51320
auguccauagagaagaucugggcccgggagauccuggacucccgcgggaaccccacaguggagguggaucucuauacugccaaaggucuuuuccgggcugcagugcccaguggagccucuacgggcaucuaugaggcccuggagcugagggauggagacaaacagcguuacuuaggcaaagguguccugaaggcaguggaccacaucaacuccaccaucgcgccagcccucaucagcucaggucucucugugguggagcaagagaaacuggacaaccugaugcuggaguuggaugggacugagaacaaauccaaguuuggggccaaugccauccugggugugucucuggccguguguaaggcaggggcagcugagcgggaacugccccuguaucgccacauugcucagcuggccgggaacucagaccucauccugccugugccggccuucaacgugaucaaugguggcucucaugcuggcaacaagcuggccaugcaggaguucaugauccucccagugggagcugagagcuuucgggaugccaugcgacuaggugcagaggucuaccauacacucaagggagucaucaaggacaaauacggcaaggaugccaccaaugugggggaugaagguggcuuugcccccaauauccuggagaacagugaagccuuggagcuggugaaggaagccaucgacaaggcuggcuacacggaaaagaucguuauuggcauggauguugcugccucagaguuuuaucgugauggcaaauaugacuuggacuucaagucucccacugauccuucccgauacaucacuggggaccagcugggggcacucuaccaggacuuugucagggacuauccuguggucuccauugaggacccauuugaccaggaugauugggcugccugguccaaguucacagccaauguagggauccagauugugggugaugaccugacagugaccaacccaaaacguauugagcgggcaguggaagaaaaggccugcaacugucugcugcucaaggucaaccagaucggcucggucacugaagccauccaagcgugcaagcuggcccaggagaauggcuggggggucauggugagucaucgcucaggagagacugaggacacauucauugcugaccuggugguggggcugugcacaggccagaucaagacuggugccccgugccguucugaacgucuggcuaaauacaaccagcucaugagaauugaggaagagcugggggaugaagcucgcuuugccggacauaacuuccguaaucccagugugcuguga

SEQ ID NO: 2899 - RNA, 1305 nt, Artificial Sequence
  derived and/or modified sequence opt1 from NSE__Homo_sapiens__AAB51320
augagcaucgagaagaucugggcccgcgagauccuggacucccggggcaaccccaccguggaggucgaccucuacaccgccaaggggcuguuccgcgcggccgugccgagcggcgccuccacggggaucuacgaggcccuggagcuccgggacggcgacaagcagcgcuaccuggggaagggcgugcugaaggccgucgaccacaucaacagcaccaucgcgcccgcccucaucuccagcggccuguccgugguggagcaggagaagcuggacaaccucaugcuggagcuggacgggaccgagaacaagagcaaguucggcgccaacgccauccucggggucucccuggcggugugcaaggccggcgccgccgagcgggagcugccccucuaccgccacaucgcccagcuggcggggaacagcgaccugauccuccccgugccggccuucaacgucaucaacggcggcucccacgccgggaacaagcuggccaugcaggaguucaugauccugcccgugggcgccgagagcuuccgggacgcgaugcgccucggggccgagguguaccacacccugaagggcgucaucaaggacaaguacggcaaggacgccacgaacgugggggacgagggcggguucgcccccaacauccuggagaacuccgaggcccucgagcuggugaaggaggcgaucgacaaggccggcuacaccgagaagaucgucaucgggauggacguggccgccagcgaguucuaccgggacggcaaguacgaccuggacuucaagucccccaccgacccgagccgcuacaucaccggcgaccagcucggggcccuguaccaggacuucgugcgggacuaccccgucguguccaucgaggaccccuucgaccaggacgacugggcggccuggagcaaguucacggccaacgugggcauccagaucgucggggacgaccugaccgugaccaaccccaagcgcaucgagcgggccguggaggagaaggcgugcaacugccuccugcugaaggucaaccagaucggcuccgugaccgaggccauccaggccugcaagcucgcccaggagaacggguggggcgucauggugagccaccgcagcggcgagacggaggacaccuucaucgccgaccugguggucgggcugugcaccggccagaucaagaccggggcgccgugccgguccgagcgccucgccaaguacaaccagcugaugcggaucgaggaggagcugggcgacgaggcccgcuucgccgggcacaacuuccggaaccccagcgugcucuga

SEQ ID NO: 2900 - RNA, 1305 nt, Artificial Sequence
  derived and/or modified sequence opt2 from NSE__Homo_sapiens__AAB51320
auguccaucgagaagaucugggcccgcgagauccucgacucccgcggcaaccccaccgucgaggucgaccucuacaccgccaagggccucuuccgcgccgccguccccuccggcgccuccaccggcaucuacgaggcccucgagcuccgcgacggcgacaagcagcgcuaccucggcaagggcguccucaaggccgucgaccacaucaacuccaccaucgcccccgcccucaucuccuccggccucuccgucgucgagcaggagaagcucgacaaccucaugcucgagcucgacggcaccgagaacaaguccaaguucggcgccaacgccauccucggcgucucccucgccgucugcaaggccggcgccgccgagcgcgagcucccccucuaccgccacaucgcccagcucgccggcaacuccgaccucauccuccccguccccgccuucaacgucaucaacggcggcucccacgccggcaacaagcucgccaugcaggaguucaugauccuccccgucggcgccgaguccuuccgcgacgccaugcgccucggcgccgaggucuaccacacccucaagggcgucaucaaggacaaguacggcaaggacgccaccaacgucggcgacgagggcggcuucgcccccaacauccucgagaacuccgaggcccucgagcucgucaaggaggccaucgacaaggccggcuacaccgagaagaucgucaucggcauggacgucgccgccuccgaguucuaccgcgacggcaaguacgaccucgacuucaagucccccaccgaccccucccgcuacaucaccggcgaccagcucggcgcccucuaccaggacuucguccgcgacuaccccgucgucuccaucgaggaccccuucgaccaggacgacugggccgccugguccaaguucaccgccaacgucggcauccagaucgucggcgacgaccucaccgucaccaaccccaagcgcaucgagcgcgccgucgaggagaaggccugcaacugccuccuccucaaggucaaccagaucggcuccgucaccgaggccauccaggccugcaagcucgcccaggagaacggcuggggcgucauggucucccaccgcuccggcgagaccgaggacaccuucaucgccgaccucgucgucggccucugcaccggccagaucaagaccggcgcccccugccgcuccgagcgccucgccaaguacaaccagcucaugcgcaucgaggaggagcucggcgacgaggcccgcuucgccggccacaacuuccgcaaccccuccguccucuga

SEQ ID NO: 2901 - RNA, 1305 nt, Artificial Sequence
  derived and/or modified sequence opt3 from NSE__Homo_sapiens__AAB51320
augagcaucgagaagauuugggccagagaaauacuggacuccaggggcaaccccaccguggaggucgaucucuacacagcuaaagggcuuuuccgggcagccguuccuucuggagcgucaacugguaucuaugaagcucuggaguugcgcgacggcgauaagcagcgauacuuagggaaaggagugcugaaggccguagaccacauuaauaguacgaucgcaccagcccuaauuagcuccggccucucuguggucgaacaagagaaacuggauaaccuuaugcuggaguuggacgguaccgaaaauaagucgaaguuuggggcuaacgcaauccucggagugucacuggccguuugcaaagcuggcgccgcggagcgugaacugccgcucuauagacauauagcacaguuagccggcaauagcgaucugauccuucccgugccugcuuucaacgucauuaaugggggaagucacgccgguaacaaguuggcaaugcaggaguuuaugauccugccagugggcgcugaguccuucagggacgccaugcggcuaggggcggaaguauaccauacacucaaaggaguuauuaaggauaaauauggcaaggacgccacuaaugugggugaugaagggggauuugcacccaacauccuggaaaauucugaggcucuugaacuggucaaggaggccauagacaaagcuggcuacaccgagaagauugugaucggcauggauguggccgcaagcgaguucuaucgcgacgggaaauacgacuuggauuuuaaguccccuacagacccaucaagauacauuaccggagaucagcucggugcccuguaucaagacuucgucagggauuaccccguugugaguaucgaggacccuuuugaucaggacgauugggcugcguggagcaaauucacugcaaacguaggcauccagauugugggggacgauuuaacagucaccaauccaaagcggauagaacgcgccguggaggaaaaggcuuguaacugccugcuccuuaaaguuaaucagaucggaucugugacggaggccauucaagcauguaagcuggcccaggagaacggcuggggugucauggugucccaccgaucaggggaaacugaggacaccuuuaucgcugacuugguaguuggccuaugcacaggacagauaaaaacuggcgccccguguagaagcgaaaggcuggcaaaguauaaccagcucaugcggauugaggaggaacugggggaugaggcgcguuucgcuggacauaauuuucgcaaccccagugugcuuuga

SEQ ID NO: 2902 - RNA, 1305 nt, Artificial Sequence
  derived and/or modified sequence opt4 from NSE__Homo_sapiens__AAB51320
augagcaucgagaagaucugggccagagagauccuggacagcagaggcaaccccaccguggagguggaccuguacaccgccaagggccuguucagagccgccgugcccagcggcgccagcaccggcaucuacgaggcccuggagcugagagacggcgacaagcagagauaccugggcaagggcgugcugaaggccguggaccacaucaacagcaccaucgcccccgcccugaucagcagcggccugagcgugguggagcaggagaagcuggacaaccugaugcuggagcuggacggcaccgagaacaagagcaaguucggcgccaacgccauccugggcgugagccuggccgugugcaaggccggcgccgccgagagagagcugccccuguacagacacaucgcccagcuggccggcaacagcgaccugauccugcccgugcccgccuucaacgugaucaacggcggcagccacgccggcaacaagcuggccaugcaggaguucaugauccugcccgugggcgccgagagcuucagagacgccaugagacugggcgccgagguguaccacacccugaagggcgugaucaaggacaaguacggcaaggacgccaccaacgugggcgacgagggcggcuucgcccccaacauccuggagaacagcgaggcccuggagcuggugaaggaggccaucgacaaggccggcuacaccgagaagaucgugaucggcauggacguggccgccagcgaguucuacagagacggcaaguacgaccuggacuucaagagccccaccgaccccagcagauacaucaccggcgaccagcugggcgcccuguaccaggacuucgugagagacuaccccguggugagcaucgaggaccccuucgaccaggacgacugggccgccuggagcaaguucaccgccaacgugggcauccagaucgugggcgacgaccugaccgugaccaaccccaagagaaucgagagagccguggaggagaaggccugcaacugccugcugcugaaggugaaccagaucggcagcgugaccgaggccauccaggccugcaagcuggcccaggagaacggcuggggcgugauggugagccacagaagcggcgagaccgaggacaccuucaucgccgaccugguggugggccugugcaccggccagaucaagaccggcgcccccugcagaagcgagagacuggccaaguacaaccagcugaugagaaucgaggaggagcugggcgacgaggccagauucgccggccacaacuucagaaaccccagcgugcuguga

SEQ ID NO: 2903 - RNA, 1305 nt, Artificial Sequence
  derived and/or modified sequence opt5 from NSE__Homo_sapiens__AAB51320
augagcaucgagaagauuugggccagagaaauccuggacucccggggcaaccccaccguggaggucgaucucuacacagcuaaagggcuguuccgcgccgcgguuccuucuggagcuagcacgggcauuuaugaagcccuugagcugagagacggggauaagcagcgguaccucggaaaaggcgugcugaaggccguggaccacaucaauuccaccauugcuccggcccuuaucucuagcgggcuguccgucguggaacaagagaaacucgauaaccugaugcuggagcucgacggaacagaaaauaagucuaaguuuggcgcuaacgccauccugggcguuagccuugcggugugcaaagccggggcugccgagcgcgaacugccccucuauagacauauugcucagcuggccggaaauuccgaucuuauccugccuguccccgcguucaacgugauuaauggcgggagccacgccggaaacaagcucgcuaugcaggaguuuaugauccugccuguuggcgccgagucuuuccgggacgcuaugcgccugggggccgaaguguaccauacccucaaaggagucauuaaggauaaauauggcaaggacgccacaaaugugggcgaugagggaggauuugcucccaacauccuggaaaauuccgaggcgcuugaacuggugaaggaggccauugacaaagcuggcuacaccgagaagaucgucaucgggauggauguugccgccagcgaguucuauagagacggaaaauacgaccucgauuuuaagucuccuacagacccgucccgguacauuaccggcgaucagcugggggcucuuuaucaagacuucgugcgcgauuaccccguggucagcaucgaggacccuuuugaucaggacgauugggccgcguggucuaaauucacggcuaacguggggauucagaucguuggcgacgaucugaccgugacaaaucccaagagaauugaacgggccgucgaggaaaaagccuguaacugccuccugcugaaggugaaucagaucggcuccguuaccgaggcuauccaagccuguaagcucgcucaggagaacggguggggagugauggucagccaccgcuccggcgaaacagaggacaccuuuauugccgaccugguggucgggcuuugcacgggacagaucaaaacaggcgcgccuuguagaucugaacggcuggccaaguauaaccagcucaugcgcauugaggaagaacugggggaugaggcuagauucgccggccauaauuuucggaaccccagcgugcuuuga

SEQ ID NO: 2904 - protein, 464 aa, Artificial Sequence
  NUF2__Homo_sapiens__Q9BZD4
METLSFPRYNVAEIVIHIRNKILTGADGKNLTKNDLYPNPKPEVLHMIYMRALQIVYGIRLEHFYMMPVNSEVMYPHLMEGFLPFSNLVTHLDSFLPICRVNDFETADILCPKAKRTSRFLSGIINFIHFREACRETYMEFLWQYKSSADKMQQLNAAHQEALMKLERLDSVPVEEQEEFKQLSDGIQELQQSLNQDFHQKTIVLQEGNSQKKSNISEKTKRLNELKLSVVSLKEIQESLKTKIVDSPEKLKNYKEKMKDTVQKLKNARQEVVEKYEIYGDSVDCLPSCQLEVQLYQKKIQDLSDNREKLASILKESLNLEDQIESDESELKKLKTEENSFKRLMIVKKEKLATAQFKINKKHEDVKQYKRTVIEDCNKVQEKRGAVYERVTTINQEIQKIKLGIQQLKDAAEREKLKSQEIFLNLKTALEKYHDGIEKAAEDSYAKIDEKTAELKRKMFKMST

SEQ ID NO: 2905 - RNA, 1395 nt, Artificial Sequence
  NUF2__Homo_sapiens__AAH08489
auggaaacuuugucuuuccccagauauaauguagcugagauugugauucauauucgcaauaagaucuuaacaggagcugaugguaaaaaccucaccaagaaugaucuuuauccaaauccaaagccugaagucuugcacaugaucuacaugagagccuuacaaauaguauauggaauucgacuggaacauuuuuacaugaugccagugaacucugaagucauguauccacauuuaauggaaggcuucuuaccauucagcaauuuaguuacucaucuggacucauuuuugccuaucugccgggugaaugacuuugagacugcugauauucuauguccaaaagcaaaacggacaagucgguuuuuaaguggcauuaucaacuuuauucacuucagagaagcaugccgugaaacguauauggaauuucuuuggcaauauaaauccucugcggacaaaaugcaacaguuaaacgccgcacaccaggaggcauuaaugaaacuggagagacuugauucuguuccaguugaagagcaagaagaguucaagcagcuuucagauggaauucaggagcuacaacaaucacuaaaucaggauuuucaucaaaaaacgauagugcugcaagagggaaauucccaaaagaagucaaauauuucagagaaaaccaagcguuugaaugaacuaaaauugucggugguuucuuugaaagaaauacaagagaguuugaaaacaaaaauuguggauucuccagagaaguuaaagaauuauaaagaaaaaaugaaagauacgguccagaagcuuaaaaaugccagacaagaagugguggagaaauaugaaaucuauggagacucaguugacugccugccuucaugucaguuggaagugcaguuauaucaaaagaaaauacaggaccuuucagauaauagggaaaaauuagccaguaucuuaaaggagagccugaacuuggaggaccaaauugagagugaugagucagaacugaagaaauugaagacugaagaaaauucguucaaaagacugaugauugugaagaaggaaaaacuugccacagcacaauucaaaauaaauaagaagcaugaagauguuaagcaauacaaacgcacaguaauugaggauugcaauaaaguucaagaaaaaagaggugcugucuaugaacgaguaaccacaauuaaucaagaaauccaaaaaauuaaacuuggaauucaacaacuaaaagaugcugcugaaagggagaaacugaagucccaggaaauauuucuaaacuugaaaacugcuuuggagaaauaccacgacgguauugaaaaggcagcagaggacuccuaugcuaagauagaugagaagacagcugaacugaagaggaagauguucaaaaugucaaccuga

SEQ ID NO: 2906 - RNA, 1395 nt, Artificial Sequence
  derived and/or modified sequence opt1 from NUF2__Homo_sapiens__AAH08489
auggagacccugagcuucccccgcuacaacguggccgagaucgucauccacauccggaacaagauccucaccggcgccgacgggaagaaccugacgaagaacgaccuguacccgaaccccaagcccgaggugcuccacaugaucuacaugcgcgcgcugcagaucguguacggcauccggcuggagcacuucuacaugaugcccgucaacuccgaggugauguacccgcaccucauggagggguuccugcccuucagcaaccuggugacccaccucgacuccuuccugcccaucugccgcgucaacgacuucgagaccgccgacauccugugccccaaggccaagcggaccagccgcuuccucuccggcaucaucaacuucauccacuuccgggaggccugccgcgagacguacauggaguuccuguggcaguacaagagcuccgccgacaagaugcagcagcugaacgcggcccaccaggaggcccucaugaagcuggagcggcuggacagcgugccgguggaggagcaggaggaguucaagcagcucuccgacgggauccaggagcugcagcagagccugaaccaggacuuccaccagaagaccaucguccuccaggagggcaacucccagaagaaguccaacaucagcgagaagaccaagcgccugaacgagcugaagcucagcguggugucccugaaggagauccaggagagccugaagaccaagaucgucgacucccccgagaagcucaagaacuacaaggagaagaugaaggacacggugcagaagcugaagaacgcccggcaggagguggucgagaaguacgagaucuacggcgacagcguggacugccugcccuccugccagcucgaggugcagcuguaccagaagaagauccaggaccugagcgacaaccgcgagaagcucgcgagcauccugaaggagucccugaaccucgaggaccagaucgagagcgacgaguccgagcugaagaagcugaagaccgaggagaacagcuucaagcggcucaugaucgucaagaaggagaagcuggccaccgcccaguucaagaucaacaagaagcacgaggacgugaagcaguacaagcgcaccgugaucgaggacugcaacaagguccaggagaagcgcggggccguguacgagcgggugacgaccaucaaccaggagauccagaagaucaagcugggcauccagcagcucaaggacgccgcggagcgggagaagcugaagucccaggagaucuuccugaaccucaagaccgcccuggagaaguaccacgacgggaucgagaaggccgccgaggacagcuacgccaagaucgacgagaagaccgcggagcugaagcgcaagauguucaagauguccacguga

SEQ ID NO: 2907 - RNA, 1395 nt, Artificial Sequence
  derived and/or modified sequence opt2 from NUF2__Homo_sapiens__AAH08489
auggagacccucuccuucccccgcuacaacgucgccgagaucgucauccacauccgcaacaagauccucaccggcgccgacggcaagaaccucaccaagaacgaccucuaccccaaccccaagcccgagguccuccacaugaucuacaugcgcgcccuccagaucgucuacggcauccgccucgagcacuucuacaugaugcccgucaacuccgaggucauguacccccaccucauggagggcuuccuccccuucuccaaccucgucacccaccucgacuccuuccuccccaucugccgcgucaacgacuucgagaccgccgacauccucugccccaaggccaagcgcaccucccgcuuccucuccggcaucaucaacuucauccacuuccgcgaggccugccgcgagaccuacauggaguuccucuggcaguacaaguccuccgccgacaagaugcagcagcucaacgccgcccaccaggaggcccucaugaagcucgagcgccucgacuccguccccgucgaggagcaggaggaguucaagcagcucuccgacggcauccaggagcuccagcagucccucaaccaggacuuccaccagaagaccaucguccuccaggagggcaacucccagaagaaguccaacaucuccgagaagaccaagcgccucaacgagcucaagcucuccgucgucucccucaaggagauccaggagucccucaagaccaagaucgucgacucccccgagaagcucaagaacuacaaggagaagaugaaggacaccguccagaagcucaagaacgcccgccaggaggucgucgagaaguacgagaucuacggcgacuccgucgacugccuccccuccugccagcucgagguccagcucuaccagaagaagauccaggaccucuccgacaaccgcgagaagcucgccuccauccucaaggagucccucaaccucgaggaccagaucgaguccgacgaguccgagcucaagaagcucaagaccgaggagaacuccuucaagcgccucaugaucgucaagaaggagaagcucgccaccgcccaguucaagaucaacaagaagcacgaggacgucaagcaguacaagcgcaccgucaucgaggacugcaacaagguccaggagaagcgcggcgccgucuacgagcgcgucaccaccaucaaccaggagauccagaagaucaagcucggcauccagcagcucaaggacgccgccgagcgcgagaagcucaagucccaggagaucuuccucaaccucaagaccgcccucgagaaguaccacgacggcaucgagaaggccgccgaggacuccuacgccaagaucgacgagaagaccgccgagcucaagcgcaagauguucaagauguccaccuga

SEQ ID NO: 2908 - RNA, 1395 nt, Artificial Sequence
  derived and/or modified sequence opt3 from NUF2__Homo_sapiens__AAH08489
auggagacccugagcuuccccagauacaacguggccgaaaucgucauucacauaaggaauaagauccucacaggcgcugacgggaaaaaccuuacuaagaaugaucuguauccuaacccaaaaccggagguuuugcauaugauuuacaugcgggcauuacagaucguguaugguauucgccuggaacacuuuuacaugaugcccguaaauuccgaggugauguauccucaucuaauggaaggauuccucccauuuucuaaccuggucacgcaccuugacucauuccugcccaucugccgagugaaugauuuugagaccgccgacauauuguguccuaaggcgaaacguacaaguagauuccucagcggcaucauuaacuuuauccauuucagggaggcuugccgggaaacuuacauggaguuucuguggcaauauaaguccucugccgauaagaugcagcagcugaaugcagcccaccaggaagcucucaugaaauuagagcgccuggacucgguuccaguggaggaacaagaggaguucaagcagcuuucagaugggauucaggaguugcagcaaagccugaaccaggacuuucaccagaaaaccaucguccuacaggaaggaaauagucaaaagaaauccaacauaucugagaagacaaagagacucaaugagcugaaacuuagcgugguaucccugaaggaaauucaggagucauugaaaaccaagaucguugauagucccgaaaaacucaagaacuacaaagagaagaugaaggacacugugcagaaacugaagaaugcaaggcaagaagucguggagaaauacgagauuuauggcgauagcguggacuguuuaccuucuugccagcuggaaguccagcucuaccagaagaaaauccaagaucuuuccgacaaccgggagaagcuggccucaaucuugaaggaaagccuaaaccuggaggaccagauugaaagugaugagucugagcucaaaaagcugaaaacagaagaaaauuccuucaagcgccuuaugauaguuaaaaaggaaaagcuggcuaccgcccaguuuaaaaucaacaagaaacaugaggacgugaagcaguauaaacgaacgguaauugaggauuguaauaaggugcaagaaaagagaggugcggucuacgagagggugacuaccaucaaccaggaaauacagaaaauuaaguuggggauccagcaacucaaagacgcagccgagcgggaaaagcugaaaagccaggagaucuucuuaaaucugaagacagcucuagagaaauaucacgauggaauugaaaaggccgcagaggacucguacgcuaagaucgaugagaaaacugccgaacucaagcguaaaauguucaagaugucuaccuga

SEQ ID NO: 2909 - RNA, 1395 nt, Artificial Sequence
  derived and/or modified sequence opt4 from NUF2__Homo_sapiens__AAH08489
auggagacccugagcuuccccagauacaacguggccgagaucgugauccacaucagaaacaagauccugaccggcgccgacggcaagaaccugaccaagaacgaccuguaccccaaccccaagcccgaggugcugcacaugaucuacaugagagcccugcagaucguguacggcaucagacuggagcacuucuacaugaugcccgugaacagcgaggugauguacccccaccugauggagggcuuccugcccuucagcaaccuggugacccaccuggacagcuuccugcccaucugcagagugaacgacuucgagaccgccgacauccugugccccaaggccaagagaaccagcagauuccugagcggcaucaucaacuucauccacuucagagaggccugcagagagaccuacauggaguuccuguggcaguacaagagcagcgccgacaagaugcagcagcugaacgccgcccaccaggaggcccugaugaagcuggagagacuggacagcgugcccguggaggagcaggaggaguucaagcagcugagcgacggcauccaggagcugcagcagagccugaaccaggacuuccaccagaagaccaucgugcugcaggagggcaacagccagaagaagagcaacaucagcgagaagaccaagagacugaacgagcugaagcugagcguggugagccugaaggagauccaggagagccugaagaccaagaucguggacagccccgagaagcugaagaacuacaaggagaagaugaaggacaccgugcagaagcugaagaacgccagacaggaggugguggagaaguacgagaucuacggcgacagcguggacugccugcccagcugccagcuggaggugcagcuguaccagaagaagauccaggaccugagcgacaacagagagaagcuggccagcauccugaaggagagccugaaccuggaggaccagaucgagagcgacgagagcgagcugaagaagcugaagaccgaggagaacagcuucaagagacugaugaucgugaagaaggagaagcuggccaccgcccaguucaagaucaacaagaagcacgaggacgugaagcaguacaagagaaccgugaucgaggacugcaacaaggugcaggagaagagaggcgccguguacgagagagugaccaccaucaaccaggagauccagaagaucaagcugggcauccagcagcugaaggacgccgccgagagagagaagcugaagagccaggagaucuuccugaaccugaagaccgcccuggagaaguaccacgacggcaucgagaaggccgccgaggacagcuacgccaagaucgacgagaagaccgccgagcugaagagaaagauguucaagaugagcaccuga

SEQ ID NO: 2910 - RNA, 1395 nt, Artificial Sequence
  derived and/or modified sequence opt5 from NUF2__Homo_sapiens__AAH08489
auggagacccugagcuuccccagauacaacguggccgaaaucgucauucacauccggaauaagauucucacaggcgcugacgggaaaaaccugacgaagaaugaucuuuauccuaacccgaaacccgagguucugcauaugaucuacaugcgcgcccuccagauuguguauggaaucagacuggaacacuuuuacaugaugccugucaauuccgaggugauguauccccaucuuauggaaggcuuccugccuuuuucuaaccucgugacccaccuggacagcuuccugcccaucugccggguuaaugauuuugagacagcggacauucucuguccuaaggcuaaacgcaccuccagauuccugucugggaucauuaacuuuauccauuuccgggaggccugccgcgaaacauacauggaguuucuuuggcaauauaagagcuccgccgauaagaugcagcagcugaaugcugcccaccaggaagcucucaugaaacuggagagacuugacucugugccggucgaggaacaagaggaguucaagcagcugagcgauggcauucaggaacuccagcaaucccugaaccaggacuuucaccagaaaaccaucgugcugcaggaaggaaauagccaaaagaaaucuaacauuuccgagaagacaaagcggcucaaugagcugaaacuuagcguugugucucugaaggaaauccaggagucccucaaaaccaagaucgucgauagccccgaaaaacugaagaacuacaaagagaagaugaaggacacggugcagaaacuuaagaaugcccgccaagaaguggucgagaaauacgagauuuauggggauucuguugacugucugccuuccugccagcucgaagugcagcuguaccagaagaaaauccaagaucugagcgacaacagagagaagcucgcguccauucugaaggaaucucuuaaccuggaggaccagaucgaaagcgaugaguccgagcucaaaaagcugaaaaccgaagagaauagcuucaagcggcuuaugauugugaaaaaggaaaagcuggccacagcucaguuuaaaaucaacaagaaacaugaggacgucaagcaguauaaacgcaccgugaucgaggauuguaauaagguucaagaaaagagaggagccguguacgagcgggucacaaccauuaaccaggaaauccagaaaauuaagcucggcauccagcaacugaaagacgcugccgagcgcgaaaagcugaaaucucaggagauuuuccucaaucugaagacggcgcuugagaaauaucacgauggcaucgaaaaggccgcugaggacuccuacgccaagaucgaugagaaaacagcugaacugaagagaaaaauguucaagaugagcaccuga

SEQ ID NO: 2911 - protein, 180 aa, Artificial Sequence
  NY-ESO-1__Homo_sapiens__P78358
MQAEGRGTGGSTGDADGPGGPGIPDGPGGNAGGPGEAGATGGRGPRGAGAARASGPGGGAPRGPHGGAASGLNGCCRCGARGPESRLLEFYLAMPFATPMEAELARRSLAQDAPPLPVPGVLLKEFTVSGNILTIRLTAADHRQLQLSISSCLQQLSLLMWITQCFLPVFLAQPPSGQRR

SEQ ID NO: 2912 - RNA, 543 nt, Artificial Sequence
  NY-ESO-1__Homo_sapiens__AAB49693
augcaggccgaaggccggggcacaggggguucgacgggcgaugcugauggcccaggaggcccuggcauuccugauggcccagggggcaaugcuggcggcccaggagaggcgggugccacgggcggcagagguccccggggcgcaggggcagcaagggccucggggccgggaggaggcgccccgcgggguccgcauggcggcgcggcuucagggcugaauggaugcugcagaugcggggccagggggccggagagccgccugcuugaguucuaccucgccaugccuuucgcgacacccauggaagcagagcuggcccgcaggagccuggcccaggaugccccaccgcuucccgugccaggggugcuucugaaggaguucacuguguccggcaacauacugacuauccgacugacugcugcagaccaccgccaacugcagcucuccaucagcuccugucuccagcagcuuucccuguugauguggaucacgcagugcuuucugcccguguuuuuggcucagccucccucagggcagaggcgcuaa

SEQ ID NO: 2913 - RNA, 543 nt, Artificial Sequence
  derived and/or modified sequence opt1 from NY-ESO-1__Homo_sapiens__AAB49693
augcaggccgagggccgcgggaccggcgggagcaccggcgacgccgacgggcccggcggcccggggauccccgacggccccgggggcaacgccgggggccccggcgaggccggggccacgggcgggcggggcccgcgcggcgccggggccgcgcgggccuccggccccgggggcggggcgccccgcggcccccacggcggggccgcgagcggccugaacgggugcugccggugcggcgcccgcgggccggagucccggcuccuggaguucuaccuggccaugcccuucgccacccccauggaggccgagcucgcgcgccggagccuggcccaggacgcgcccccgcugcccgugcccggcguccuccugaaggaguucaccguguccggcaacauccugaccauccgccucacggccgccgaccaccggcagcugcagcugagcaucuccagcugccuccagcagcugucccugcucauguggaucacccagugcuuccugcccguguuccuggcccagccgcccagcgggcagcgccgguga

SEQ ID NO: 2914 - RNA, 543 nt, Artificial Sequence
  derived and/or modified sequence opt2 from NY-ESO-1__Homo_sapiens__AAB49693
augcaggccgagggccgcggcaccggcggcuccaccggcgacgccgacggccccggcggccccggcauccccgacggccccggcggcaacgccggcggccccggcgaggccggcgccaccggcggccgcggcccccgcggcgccggcgccgcccgcgccuccggccccggcggcggcgccccccgcggcccccacggcggcgccgccuccggccucaacggcugcugccgcugcggcgcccgcggccccgagucccgccuccucgaguucuaccucgccaugcccuucgccacccccauggaggccgagcucgcccgccgcucccucgcccaggacgcccccccccuccccguccccggcguccuccucaaggaguucaccgucuccggcaacauccucaccauccgccucaccgccgccgaccaccgccagcuccagcucuccaucuccuccugccuccagcagcucucccuccucauguggaucacccagugcuuccuccccgucuuccucgcccagccccccuccggccagcgccgcuga

SEQ ID NO: 2915 - RNA, 543 nt, Artificial Sequence
  derived and/or modified sequence opt3 from NY-ESO-1__Homo_sapiens__AAB49693
augcaggccgagggcagagggaccggagguagcacaggcgacgcugaugggcccggaggcccugguaucccagacgggccgggaggcaacgcaggcgggcccggagaagccggugcgacuggcgggaggggaccucggggcgcuggugccgcacgcgccuccgggccaggaggcggcgcuccccgagggccucacggaggugcagccucuggccugaaugggugcugucguugcggagcuagaggcccagagucaaggcuccuugaguucuaccuggccaugcccuuugcgacgccuauggaagcagaauuggcccggcgcaguuuagcucaagaugccccaccgcugcccgugccugguguccuacucaaggaguucaccguuagcgggaacauucugacaauaagacuuacugcagcugaccauaggcagcugcaguuguccaucucuucgugucuccagcaacugucacugcucauguggauuacccagugcuuuuuaccaguguuccuggcccagcccccuagcggccagcggcgcuga

SEQ ID NO: 2916 - RNA, 543 nt, Artificial Sequence
  derived and/or modified sequence opt4 from NY-ESO-1__Homo_sapiens__AAB49693
augcaggccgagggcagaggcaccggcggcagcaccggcgacgccgacggccccggcggccccggcauccccgacggccccggcggcaacgccggcggccccggcgaggccggcgccaccggcggcagaggccccagaggcgccggcgccgccagagccagcggccccggcggcggcgcccccagaggcccccacggcggcgccgccagcggccugaacggcugcugcagaugcggcgccagaggccccgagagcagacugcuggaguucuaccuggccaugcccuucgccacccccauggaggccgagcuggccagaagaagccuggcccaggacgcccccccccugcccgugcccggcgugcugcugaaggaguucaccgugagcggcaacauccugaccaucagacugaccgccgccgaccacagacagcugcagcugagcaucagcagcugccugcagcagcugagccugcugauguggaucacccagugcuuccugcccguguuccuggcccagccccccagcggccagagaagauga

SEQ ID NO: 2917 - RNA, 543 nt, Artificial Sequence
  derived and/or modified sequence opt5 from NY-ESO-1__Homo_sapiens__AAB49693
augcaggccgagggcagagggaccggaggcagcacaggggacgcugauggacccggcgggccuggaaucccggacggccccggcgggaacgccggaggcccuggggaagcgggagcuacgggcgggcggggaccccgcggcgccggcgccgcuagagccuccgggccuggaggcggggcuccccggggaccucacggcggggccgcgucuggacugaauggcugcugucgcugcggcgccagagggccggagagccggcuccuggaguucuaccuugcuaugcccuuugccaccccuauggaagcugaacuggcccgcagaucccucgcgcaagaugcucccccucugcccgugccgggaguccuucugaaggaguucacaguuucuggcaacauucucaccauccggcugacagccgccgaccaucgccagcugcagcucagcauuuccucuugucugcagcaacuuagccugcucauguggaucacccagugcuuucugccuguguuccuugcucagcccccuuccgggcagagacgguga

SEQ ID NO: 2918 - protein, 404 aa, Artificial Sequence
  OA1__Homo_sapiens__P51810
MASPRLGTFCCPTRDAATQLVLSFQPRAFHALCLGSGGLRLALGLLQLLPGRRPAGPGSPATSPPASVRILRAAAACDLLGCLGMVIRSTVWLGFPNFVDSVSDMNHTEIWPAAFCVGSAMWIQLLYSACFWWLFCYAVDAYLVIRRSAGLSTILLYHIMAWGLATLLCVEGAAMLYYPSVSRCERGLDHAIPHYVTMYLPLLLVLVANPILFQKTVTAVASLLKGRQGIYTENERRMGAVIKIRFFKIMLVLIICWLSNIINESLLFYLEMQTDINGGSLKPVRTAAKTTWFIMGILNPAQGFLLSLAFYGWTGCSLGFQSPRKEIQWESLTTSAAEGAHPSPLMPHENPASGKVSQVGGQTSDEALSMLSEGSDASTIEIHTASESCNKNEGDPALPTHGDL

SEQ ID NO: 2919 - RNA, 1215 nt, Artificial Sequence
  OA1__Homo_sapiens__CCDS14134.2
auggccuccccgcgccuagggaccuucugcugccccacgcgggacgcagccacgcagcucgugcugagcuuccagccgcgggccuuccacgcgcucugccugggcagcggcgggcuccgcuuggcgcugggccuucugcagcugcugcccggccgccggcccgcgggccccgggucccccgcgacguccccgccggccucgguccgcauccugcgcgcugccgcugccugcgaccuucucggcugccuggguauggugauccgguccaccgugugguuaggauucccaaauuuuguugacagcgucucggauaugaaccacacggaaauuuggccugcugcuuucugcguggggagugcgauguggauccagcuguuguacagugccugcuucugguggcuguuuugcuaugcaguggaugcuuaucuggugauccggagaucggcaggacugagcaccauccugcuguaucacaucauggcguggggccuggccacccugcucuguguggagggagccgccaugcucuacuacccuuccguguccaggugugagcggggccuggaccacgccaucccccacuaugucaccauguaccugccccugcugcugguucucguggcgaaccccauccuguuccaaaagacagugacugcaguggccucuuuacuuaaaggaagacaaggcauuuacacggagaacgagaggaggaugggagccgugaucaagauccgauuuuucaaaaucaugcugguuuuaauuauuuguugguugucgaauaucaucaaugaaagccuuuuauucuaucuugagaugcaaacagauaucaauggagguucuuugaaaccugucagaacugcagccaagaccacaugguuuauuaugggaauccugaauccagcccagggauuucucuugucuuuggccuucuacggcuggacaggaugcagccuggguuuucagucucccaggaaggagauccagugggaaucacugaccaccucggcugcugagggggcucacccauccccacugaugccccaugaaaacccugcuuccgggaaggugucucaagugggugggcagacuucugacgaagcccugagcaugcugucugaagguucugaugccagcacaauugaaauucacacugcaagugaauccugcaacaaaaaugagggugacccugcucucccaacccauggagaccuauga

SEQ ID NO: 2920 - RNA, 1215 nt, Artificial Sequence
  derived and/or modified sequence opt1 from OA1__Homo_sapiens__CCDS14134.2
auggccagcccccgccugggcaccuucugcugcccgacccgggacgccgcgacgcagcucgugcuguccuuccagccccgcgccuuccacgcccugugccucgggagcggcgggcugcggcuggcccucggccugcugcagcuccugcccgggcgccggcccgccggcccgggcucccccgcgaccagcccgcccgccuccguccgcauccugcgggccgccgcggccugcgaccuccuggggugccugggcauggugauccgcagcaccguguggcucggguuccccaacuucgucgacuccgugagcgacaugaaccacaccgagaucuggcccgccgccuucugcgugggcuccgccauguggauccagcugcuguacagcgcgugcuucugguggcuguucugcuacgccgucgacgccuaccucgugauccggcgcuccgccgggcugagcacgauccuccuguaccacaucauggccuggggccuggcgacccuccugugcguggagggcgccgccaugcuguacuaccccuccgucagccggugcgagcgcgggcucgaccacgccaucccccacuacgugaccauguaccugccgcugcuccuggugcuggucgccaaccccauccucuuccagaagaccgugacggcgguggccucccugcugaagggccggcaggggaucuacaccgagaacgagcgccggaugggcgccgucaucaagauccgcuucuucaagaucaugcucgugcugaucaucugcuggcugagcaacaucaucaacgagucccuccuguucuaccuggagaugcagaccgacaucaacggcgggagccucaagcccgugcggaccgccgccaagacgaccugguucaucaugggcauccugaaccccgcgcagggguuccugcucucccuggccuucuacggcuggaccgggugcagccugggcuuccagagcccgcgcaaggagauccagugggagucccucaccacgagcgccgccgagggcgcgcaccccagcccccugaugccccacgagaacccggccuccgggaaggucucccaggugggcgggcagaccagcgacgaggcccuguccaugcugagcgagggcuccgacgccagcaccaucgagauccacaccgccuccgagagcugcaacaagaacgagggggaccccgcgcuccccacgcacggcgaccuguga

SEQ ID NO: 2921 - RNA, 1215 nt, Artificial Sequence
  derived and/or modified sequence opt2 from OA1__Homo_sapiens__CCDS14134.2
auggccuccccccgccucggcaccuucugcugccccacccgcgacgccgccacccagcucguccucuccuuccagccccgcgccuuccacgcccucugccucggcuccggcggccuccgccucgcccucggccuccuccagcuccuccccggccgccgccccgccggccccggcucccccgccaccuccccccccgccuccguccgcauccuccgcgccgccgccgccugcgaccuccucggcugccucggcauggucauccgcuccaccgucuggcucggcuuccccaacuucgucgacuccgucuccgacaugaaccacaccgagaucuggcccgccgccuucugcgucggcuccgccauguggauccagcuccucuacuccgccugcuucugguggcucuucugcuacgccgucgacgccuaccucgucauccgccgcuccgccggccucuccaccauccuccucuaccacaucauggccuggggccucgccacccuccucugcgucgagggcgccgccaugcucuacuaccccuccgucucccgcugcgagcgcggccucgaccacgccaucccccacuacgucaccauguaccucccccuccuccucguccucgucgccaaccccauccucuuccagaagaccgucaccgccgucgccucccuccucaagggccgccagggcaucuacaccgagaacgagcgccgcaugggcgccgucaucaagauccgcuucuucaagaucaugcucguccucaucaucugcuggcucuccaacaucaucaacgagucccuccucuucuaccucgagaugcagaccgacaucaacggcggcucccucaagcccguccgcaccgccgccaagaccaccugguucaucaugggcauccucaaccccgcccagggcuuccuccucucccucgccuucuacggcuggaccggcugcucccucggcuuccaguccccccgcaaggagauccagugggagucccucaccaccuccgccgccgagggcgcccaccccuccccccucaugccccacgagaaccccgccuccggcaaggucucccaggucggcggccagaccuccgacgaggcccucuccaugcucuccgagggcuccgacgccuccaccaucgagauccacaccgccuccgaguccugcaacaagaacgagggcgaccccgcccuccccacccacggcgaccucuga

SEQ ID NO: 2922 - RNA, 1215 nt, Artificial Sequence
  derived and/or modified sequence opt3 from OA1__Homo_sapiens__CCDS14134.2
auggccagccccagacugggcaccuucugcuguccuacaagggacgcugcaacucagcucgugcuuuccuuucaaccacgggccuuccacgcgcugugcuuggggucuggagguuuacgccuggcucuaggccuccugcagcuucugccggggcgacgucccgccggaccuggcucaccagcaacgagucccccugccagcgucagaaucuugagggcugcagccgcuugugaucuccuggguugccuggggaugguuauucgguccaccguguggcucggauuuccaaacuucguagacucugugucggauaugaaucauacagagauauggcccgccgcguuuugugucggcucagcaauguggauccaguuacuguacagcgccugcuucuggugguuguuuuguuaugcuguggacgccuaccuuguuauucgcagaagugcaggccuguccacuauccuacucuaucacauuauggcuugggggcuggccacccuucugugcguggaaggagcggccauguuguacuauccuucugucuccaggugugagcggggucucgaucaugcaaucccacacuacgugacaauguaucugccguuacugcucguacuuguugcuaaccccauacuguuccagaagaccgugacugccgucgcuagcuugcuaaaaggccgccaagggaucuacacagaaaaugagcgaagaaugggagccgugauuaagaucagguuuuucaaaauuaugcuggugcucaucauaugcuggcugucaaacauuaucaaugaaagucuucuguuuuacuuggagaugcagaccgacauuaacggcgguagccucaagccuguccggacggcagccaaaacuaccugguucaucauggggauccugaauccagcucagggauuuuuacugucucuagcguucuauggcuggacaggcuguucccucggguuccagucaccccguaaggagauucaaugggaaagccugacuaccagugcagccgagggagcucauccuucuccacuuaugccccacgaaaacccggccuccgguaagguuagccaggugggcgggcagacaucggaugaggcauugucuaugcuguccgagggaucagacgccaguaccauagaaauccacacggcuagcgaguccugcaauaaaaacgaaggcgauccugcccuccccacucauggugaccuguga

SEQ ID NO: 2923 - RNA, 1215 nt, Artificial Sequence
  derived and/or modified sequence opt4 from OA1__Homo_sapiens__CCDS14134.2
auggccagccccagacugggcaccuucugcugccccaccagagacgccgccacccagcuggugcugagcuuccagcccagagccuuccacgcccugugccugggcagcggcggccugagacuggcccugggccugcugcagcugcugcccggcagaagacccgccggccccggcagccccgccaccagcccccccgccagcgugagaauccugagagccgccgccgccugcgaccugcugggcugccugggcauggugaucagaagcaccguguggcugggcuuccccaacuucguggacagcgugagcgacaugaaccacaccgagaucuggcccgccgccuucugcgugggcagcgccauguggauccagcugcuguacagcgccugcuucugguggcuguucugcuacgccguggacgccuaccuggugaucagaagaagcgccggccugagcaccauccugcuguaccacaucauggccuggggccuggccacccugcugugcguggagggcgccgccaugcuguacuaccccagcgugagcagaugcgagagaggccuggaccacgccaucccccacuacgugaccauguaccugccccugcugcuggugcugguggccaaccccauccuguuccagaagaccgugaccgccguggccagccugcugaagggcagacagggcaucuacaccgagaacgagagaagaaugggcgccgugaucaagaucagauucuucaagaucaugcuggugcugaucaucugcuggcugagcaacaucaucaacgagagccugcuguucuaccuggagaugcagaccgacaucaacggcggcagccugaagcccgugagaaccgccgccaagaccaccugguucaucaugggcauccugaaccccgcccagggcuuccugcugagccuggccuucuacggcuggaccggcugcagccugggcuuccagagccccagaaaggagauccagugggagagccugaccaccagcgccgccgagggcgcccaccccagcccccugaugccccacgagaaccccgccagcggcaaggugagccaggugggcggccagaccagcgacgaggcccugagcaugcugagcgagggcagcgacgccagcaccaucgagauccacaccgccagcgagagcugcaacaagaacgagggcgaccccgcccugcccacccacggcgaccuguga

SEQ ID NO: 2924 - RNA, 1215 nt, Artificial Sequence
  derived and/or modified sequence opt5 from OA1__Homo_sapiens__CCDS14134.2
auggccagccccagacugggcaccuucugcuguccuacacgggacgcugccacgcagcucgugcuguccuuucaaccgcgcgcguuccacgcucuuugccuggggucuggaggccucagacuggcccuugggcugcuccagcugcugcccggacggcgcccugccggccccgggagcccugcuaccucucccccugccuccgucagaauccuccgggcugccgcggccugugaucugcuuggaugccugggcaugguuauucgcagcacaguguggcucggcuuuccgaacuucguggacuccgucucugauaugaaucauaccgagaucuggcccgcugccuuuuguguggggagcgcuauguggauucagcugcuuuacuccgccugcuucugguggcuguuuuguuaugcgguugacgccuaccucgugaucagacggagcgcuggacugucuacaauucugcucuaucacaucauggccuggggccuggcuacccuucugugcgucgaaggggccgccaugcucuacuauccuuccgugagccgcugugagagaggacuggaucaugcuaucccccacuacguuacaauguaucuuccucugcuccuggugcuggucgcgaaccccauucucuuccagaagaccgugacggccguggcuucucugcuuaaaggccggcaagggaucuacaccgaaaaugagcgcagaaugggagccgucauuaagauccgguuuuucaaaauuaugcugguucucaucauuugcuggcuguccaacaucaucaaugaaagccuucuguuuuaccucgagaugcagacagacauuaacggcggcucucugaagccggugcgcaccgccgcuaaaacaaccugguucaucauggggauucugaauccugcccagggauuucuccugucccuugcguucuauggcuggacgggguguagccugggauuccagucccccagaaaggagauccaaugggaaucucucacaaccagcgcugccgagggcgcccauccuagcccccugaugccccacgaaaacccugcuuccgggaaggugucucaggucggaggccagacauccgaugaggcccugagcaugcuuucugagggcagcgacgcuuccaccauugaaauccacaccgccucugagagcugcaauaaaaacgaaggggauccggcgcuccccacacauggagaccuguga

SEQ ID NO: 2925 - protein, 1046 aa, Artificial Sequence
  OGT__Homo_sapiens__O15294
MASSVGNVADSTEPTKRMLSFQGLAELAHREYQAGDFEAAERHCMQLWRQEPDNTGVLLLLSSIHFQCRRLDRSAHFSTLAIKQNPLLAEAYSNLGNVYKERGQLQEAIEHYRHALRLKPDFIDGYINLAAALVAAGDMEGAVQAYVSALQYNPDLYCVRSDLGNLLKALGRLEEAKACYLKAIETQPNFAVAWSNLGCVFNAQGEIWLAIHHFEKAVTLDPNFLDAYINLGNVLKEARIFDRAVAAYLRALSLSPNHAVVHGNLACVYYEQGLIDLAIDTYRRAIELQPHFPDAYCNLANALKEKGSVAEAEDCYNTALRLCPTHADSLNNLANIKREQGNIEEAVRLYRKALEVFPEFAAAHSNLASVLQQQGKLQEALMHYKEAIRISPTFADAYSNMGNTLKEMQDVQGALQCYTRAIQINPAFADAHSNLASIHKDSGNIPEAIASYRTALKLKPDFPDAYCNLAHCLQIVCDWTDYDERMKKLVSIVADQLEKNRLPSVHPHHSMLYPLSHGFRKAIAERHGNLCLDKINVLHKPPYEHPKDLKLSDGRLRVGYVSSDFGNHPTSHLMQSIPGMHNPDKFEVFCYALSPDDGTNFRVKVMAEANHFIDLSQIPCNGKAADRIHQDGIHILVNMNGYTKGARNELFALRPAPIQAMWLGYPGTSGALFMDYIITDQETSPAEVAEQYSEKLAYMPHTFFIGDHANMFPHLKKKAVIDFKSNGHIYDNRIVLNGIDLKAFLDSLPDVKIVKMKCPDGGDNADSSNTALNMPVIPMNTIAEAVIEMINRGQIQITINGFSISNGLATTQINNKAATGEEVPRTIIVTTRSQYGLPEDAIVYCNFNQLYKIDPSTLQMWANILKRVPNSVLWLLRFPAVGEPNIQQYAQNMGLPQNRIIFSPVAPKEEHVRRGQLADVCLDTPLCNGHTTGMDVLWAGTPMVTMPGETLASRVAASQLTCLGCLELIAKNRQEYEDIAVKLGTDLEYLKKVRGKVWKQRISSPLFNTKQYTMELERLYLQMWEHYAAGNKPDHMIKPVEVTESA

SEQ ID NO: 2926 - RNA, 3141 nt, Artificial Sequence
  OGT__Homo_sapiens__AAH38180
auggcgucuuccgugggcaacguggccgacagcacagaaccaacgaaacguaugcuuuccuuccaaggguuagcugaguuggcacaucgagaauaucaggcaggagauuuugaggcagcugagagacacugcaugcagcucuggagacaagagccagacaauacuggugugcuuuuauuacuuucaucuauacacuuccagugucgaaggcuggacagaucugcucacuuuagcacucuggcaauuaaacagaacccccuucuggcagaagcuuauucgaauuuggggaauguguacaaggaaagagggcaguugcaggaggcaauugagcauuaucgacaugcauugcgucucaaaccugauuucaucgaugguuauauuaaccuggcagccgccuugguagcagcgggugacauggaaggggcaguacaagcuuacgucucugcucuucaguacaauccugauuuguacuguguucgcagugaccuggggaaccugcucaaagcccugggucgcuuggaagaagccaaggcauguuauuugaaagcaauugagacgcaaccgaacuuugcaguagcuuggaguaaucuuggcuguguuuucaaugcacaaggggaaauuuggcuugcaauucaucacuuugaaaaggcugucacccuugacccaaacuuucuggaugcuuauaucaauuuaggaaaugucuugaaagaggcacgcauuuuugacagagcuguggcagcuuaucuucgugcccuaaguuugaguccaaaucacgcaguggugcacggcaaccuggcuuguguauacuaugagcaaggccugauagaucuggcaauagacaccuacaggcgggcuaucgaacuacaaccacauuucccugaugcuuacugcaaccuagccaaugcucucaaagagaagggcaguguugcugaagcagaagauuguuauaauacagcucuccgucugugucccacccaugcagacucucugaauaaccuagccaauaucaaacgagaacagggaaacauugaagaggcaguucgcuuguaucguaaagcauuagaagucuucccagaguuugcugcugcccauucaaauuuagcaaguguacugcagcagcagggaaaacugcaggaagcucugaugcauuauaaggaggcuauucgaaucaguccuaccuuugcugaugccuacucuaauaugggaaacacucuaaaggagaugcaggauguucagggagccuugcaguguuauacgcgugccauccaaauuaauccugcauuugcagaugcacauagcaaucuggcuuccauucauaaggauucagggaauauuccagaagccauagcuucuuaccgcacggcucugaaacuuaagccugauuuuccugaugcuuauuguaacuuggcucauugccugcagauugucugugauuggacagacuaugaugagcgaaugaagaaguuggucaguauuguggcugaccaguuagagaagaauagguugccuucugugcauccucaucauaguaugcuauauccucuuucucauggcuucaggaaggcuauugcugagaggcacggcaaccugugcuuagauaagauuaauguucuucauaaaccaccauaugaacauccaaaagacuugaagcucagugauggucggcugcguguaggauaugugaguuccgacuuugggaaucauccuacuucucaccuuaugcagucuauuccaggcaugcacaauccugauaaauuugagguguucuguuaugcccugagcccagacgauggcacaaacuuccgagugaaggugauggcagaagccaaucauuucauugaucuuucucagauuccaugcaauggaaaagcagcugaucgcauccaucaggauggaauucauauccuuguaaauaugaauggcuauacuaagggcgcucgaaaugagcuuuuugcucucaggccagcuccuauucaggcaauguggcugggauacccugggacgaguggugcgcuuuucauggauuauauuaucacugaucaggaaacuucgccagcugaaguugcugagcaguauuccgagaaauuggcuuauaugccccacacuuuuuuuauuggugaucaugcuaauauguucccucaccugaagaaaaaagcagucaucgauuuuaaguccaaugggcacauuuaugacaaucggauaguucugaauggcaucgaccucaaagcauuucuugauagucuaccagaugugaaaauugucaagaugaaguguccugauggaggagacaaugcagauagcaguaacacagcucuuaauaugccuguuauuccuaugaauacuauugcagaagcaguuauugaaaugauuaaccgaggacagauucaaauaacaauuaauggauucaguauuagcaauggacuggcaacuacucagaucaacaauaaggcugcaacuggagaggagguuccccguaccauuauuguaaccacccguucucaguacggguuaccagaagaugccaucguauacuguaacuuuaaucaguuguauaaaauugacccuucuacuuugcagaugugggcaaacauucugaagcguguucccaauaguguacucuggcuguugcguuuuccagcaguaggagaaccuaauauucaacaguaugcacaaaacaugggccugccccagaaccguaucauuuuuucaccuguugcuccuaaagaggaacacgucaggagaggccagcuggcugaugucugcuuggacacuccacucuguaaugggcacaccacagggauggauguccucugggcagggacccccauggugacuaugccaggagagacucuugcuucucgaguugcagcaucccagcucacuugcuuagguugucuugagcuuauugcuaaaaacagacaagaauaugaagacauagcugugaagcugggaacugaucuagaauaccugaagaaaguucguggcaaagucuggaagcaaagaauaucuagcccucuguucaacaccaaacaauacacaauggaacuagagcggcucuaucuacagaugugggagcauuaugcagcuggcaacaaaccugaccacaugauuaagccuguugaagucacugagucagcauaa

SEQ ID NO: 2927 - RNA, 3141 nt, Artificial Sequence
  derived and/or modified sequence opt1 from OGT__Homo_sapiens__AAH38180
auggccagcuccgugggcaacgucgccgacagcaccgagcccaccaagcgcaugcuguccuuccaggggcucgcggagcuggcccaccgggaguaccaggccggcgacuucgaggccgccgagcgccacugcaugcagcuguggcggcaggagccggacaacacgggggugcuccugcugcucagcuccauccacuuccagugccgccggcuggaccgcagcgcgcacuucuccacccuggccaucaagcagaacccccuccuggccgaggccuacagcaaccugggcaacguguacaaggagcgggggcagcuccaggaggcgaucgagcacuaccgccacgcccugcggcugaagcccgacuucaucgacggcuacaucaaccucgccgccgcccuggucgcggccggcgacauggagggggccgugcaggccuacguguccgcccugcaguacaaccccgaccucuacugcguccgcagcgaccugggcaaccugcucaaggcgcuggggcggcuggaggaggccaaggccugcuaccucaaggccaucgagacccagccgaacuucgccguggcgugguccaaccugggcugcguguucaacgcccagggggagaucuggcuggccauccaccacuucgagaaggccgucacccucgaccccaacuuccuggacgccuacaucaaccugggcaacgugcucaaggaggcgcgcaucuucgaccgggccguggccgccuaccugcgcgcgcugagccucucccccaaccacgccgucgugcacggcaaccuggccugcguguacuacgagcaggggcugaucgaccucgccaucgacacguaccggcgcgccaucgagcugcagccccacuucccggacgcguacugcaaccuggccaacgcccucaaggagaagggcagcgucgccgaggccgaggacugcuacaacaccgcgcugcggcugugccccacccacgccgacucccucaacaaccuggccaacaucaagcgcgagcaggggaacaucgaggaggccgugcggcuguaccgcaaggcccucgagguguuccccgaguucgcggccgcccacagcaaccuggccuccguccugcagcagcagggcaagcuccaggaggcgcugaugcacuacaaggaggccauccggaucagccccaccuucgccgacgccuacuccaacaugggcaacacgcugaaggagaugcaggacgugcagggggcccugcagugcuacacccgcgcgauccagaucaacccggccuucgccgacgcccacagcaaccucgccagcauccacaaggacuccggcaacauccccgaggcgaucgccagcuaccgcaccgcccugaagcugaagcccgacuuccccgacgccuacugcaaccucgcccacugccugcagaucgugugcgacuggaccgacuacgacgagcggaugaagaagcuggucuccaucguggcggaccagcucgagaagaaccgccugccgagcgugcacccccaccacuccaugcuguacccccucagccacggguuccggaaggccaucgccgagcgccacggcaaccugugccuggacaagaucaacguccuccacaagcccccguacgagcaccccaaggaccugaagcuguccgacgggcggcuccgcgugggcuacgucagcuccgacuucggcaaccaccccacgagccaccugaugcaguccauccccgggaugcacaacccggacaaguucgagguguucugcuacgcccugagccccgacgacggcaccaacuuccgggugaaggucauggcggaggccaaccacuucaucgaccucucccagauccccugcaacgggaaggccgccgaccgcauccaccaggacggcauccacauccuggugaacaugaacggguacaccaagggcgcccggaacgagcuguucgcgcuccgccccgccccgauccaggccauguggcugggcuaccccgggaccagcggcgcccuguucauggacuacaucaucacggaccaggagaccucccccgccgagguggcggagcaguacagcgagaagcucgccuacaugccgcacaccuucuucaucggggaccacgccaacauguucccccaccugaagaagaaggccgucaucgacuucaaguccaacggccacaucuacgacaaccggaucgugcugaacgggaucgaccucaaggccuuccuggacagccugcccgacgugaagaucgucaagaugaagugccccgacggcggcgacaacgcggacuccagcaacaccgcccucaacaugccggugauccccaugaacacgaucgccgaggccgugaucgagaugaucaaccgcgggcagauccagaucaccaucaacggcuucagcaucuccaacgggcuggccaccacccagaucaacaacaaggcggccacgggcgaggaggucccccggaccaucaucgugaccacccgcagccaguacggccugcccgaggacgccaucguguacugcaacuucaaccagcucuacaagaucgacccguccacgcugcagaugugggccaacauccugaagcggguccccaacagcgugcucuggcugcugcgcuuccccgcggugggggagcccaacauccagcaguacgcccagaacaugggccucccgcagaaccggaucaucuucucccccgucgcccccaaggaggagcacgugcgccgggggcagcuggccgacgugugccuggacacgccccucugcaacggccacaccaccgggauggacguccugugggccggcaccccgauggugaccaugcccggcgagacccuggcgagccgcguggccgccucccagcugaccugccucgggugccuggagcucaucgccaagaaccgccaggaguacgaggacaucgccgucaagcugggcacggaccuggaguaccucaagaaggugcgggggaagguguggaagcagcgcaucagcagcccccuguucaacaccaagcaguacaccauggagcuggagcggcucuaccugcagaugugggagcacuacgcggccggcaacaagcccgaccacaugaucaagccggucgaggugaccgaguccgccuga

SEQ ID NO: 2928 - RNA, 3141 nt, Artificial Sequence
  derived and/or modified sequence opt2 from OGT__Homo_sapiens__AAH38180
auggccuccuccgucggcaacgucgccgacuccaccgagcccaccaagcgcaugcucuccuuccagggccucgccgagcucgcccaccgcgaguaccaggccggcgacuucgaggccgccgagcgccacugcaugcagcucuggcgccaggagcccgacaacaccggcguccuccuccuccucuccuccauccacuuccagugccgccgccucgaccgcuccgcccacuucuccacccucgccaucaagcagaacccccuccucgccgaggccuacuccaaccucggcaacgucuacaaggagcgcggccagcuccaggaggccaucgagcacuaccgccacgcccuccgccucaagcccgacuucaucgacggcuacaucaaccucgccgccgcccucgucgccgccggcgacauggagggcgccguccaggccuacgucuccgcccuccaguacaaccccgaccucuacugcguccgcuccgaccucggcaaccuccucaaggcccucggccgccucgaggaggccaaggccugcuaccucaaggccaucgagacccagcccaacuucgccgucgccugguccaaccucggcugcgucuucaacgcccagggcgagaucuggcucgccauccaccacuucgagaaggccgucacccucgaccccaacuuccucgacgccuacaucaaccucggcaacguccucaaggaggcccgcaucuucgaccgcgccgucgccgccuaccuccgcgcccucucccucucccccaaccacgccgucguccacggcaaccucgccugcgucuacuacgagcagggccucaucgaccucgccaucgacaccuaccgccgcgccaucgagcuccagccccacuuccccgacgccuacugcaaccucgccaacgcccucaaggagaagggcuccgucgccgaggccgaggacugcuacaacaccgcccuccgccucugccccacccacgccgacucccucaacaaccucgccaacaucaagcgcgagcagggcaacaucgaggaggccguccgccucuaccgcaaggcccucgaggucuuccccgaguucgccgccgcccacuccaaccucgccuccguccuccagcagcagggcaagcuccaggaggcccucaugcacuacaaggaggccauccgcaucucccccaccuucgccgacgccuacuccaacaugggcaacacccucaaggagaugcaggacguccagggcgcccuccagugcuacacccgcgccauccagaucaaccccgccuucgccgacgcccacuccaaccucgccuccauccacaaggacuccggcaacauccccgaggccaucgccuccuaccgcaccgcccucaagcucaagcccgacuuccccgacgccuacugcaaccucgcccacugccuccagaucgucugcgacuggaccgacuacgacgagcgcaugaagaagcucgucuccaucgucgccgaccagcucgagaagaaccgccuccccuccguccacccccaccacuccaugcucuacccccucucccacggcuuccgcaaggccaucgccgagcgccacggcaaccucugccucgacaagaucaacguccuccacaagccccccuacgagcaccccaaggaccucaagcucuccgacggccgccuccgcgucggcuacgucuccuccgacuucggcaaccaccccaccucccaccucaugcaguccauccccggcaugcacaaccccgacaaguucgaggucuucugcuacgcccucucccccgacgacggcaccaacuuccgcgucaaggucauggccgaggccaaccacuucaucgaccucucccagauccccugcaacggcaaggccgccgaccgcauccaccaggacggcauccacauccucgucaacaugaacggcuacaccaagggcgcccgcaacgagcucuucgcccuccgccccgcccccauccaggccauguggcucggcuaccccggcaccuccggcgcccucuucauggacuacaucaucaccgaccaggagaccucccccgccgaggucgccgagcaguacuccgagaagcucgccuacaugccccacaccuucuucaucggcgaccacgccaacauguucccccaccucaagaagaaggccgucaucgacuucaaguccaacggccacaucuacgacaaccgcaucguccucaacggcaucgaccucaaggccuuccucgacucccuccccgacgucaagaucgucaagaugaagugccccgacggcggcgacaacgccgacuccuccaacaccgcccucaacaugcccgucauccccaugaacaccaucgccgaggccgucaucgagaugaucaaccgcggccagauccagaucaccaucaacggcuucuccaucuccaacggccucgccaccacccagaucaacaacaaggccgccaccggcgaggaggucccccgcaccaucaucgucaccacccgcucccaguacggccuccccgaggacgccaucgucuacugcaacuucaaccagcucuacaagaucgaccccuccacccuccagaugugggccaacauccucaagcgcguccccaacuccguccucuggcuccuccgcuuccccgccgucggcgagcccaacauccagcaguacgcccagaacaugggccucccccagaaccgcaucaucuucucccccgucgcccccaaggaggagcacguccgccgcggccagcucgccgacgucugccucgacaccccccucugcaacggccacaccaccggcauggacguccucugggccggcacccccauggucaccaugcccggcgagacccucgccucccgcgucgccgccucccagcucaccugccucggcugccucgagcucaucgccaagaaccgccaggaguacgaggacaucgccgucaagcucggcaccgaccucgaguaccucaagaagguccgcggcaaggucuggaagcagcgcaucuccuccccccucuucaacaccaagcaguacaccauggagcucgagcgccucuaccuccagaugugggagcacuacgccgccggcaacaagcccgaccacaugaucaagcccgucgaggucaccgaguccgccuga

SEQ ID NO: 2929 - RNA, 3141 nt, Artificial Sequence
  derived and/or modified sequence opt3 from OGT__Homo_sapiens__AAH38180
auggccagcuccgugggcaacgucgcugacucuaccgagcccacaaagagaaugcugucauuccaggggcucgcagaacuugcccacagggaguaccaagcgggagauuuugaagcugccgagcggcauugcaugcagcuguggcgccaggaaccugacaauacugguguuuuguuacugcuaaguagcauccacuuccagugucgacgucucgauagauccgcacauuuuucuacgcuggccauuaaacaaaacccacuucuggcugaggcauauucgaauuugggcaacguguacaaggagagggggcagcuccaggaagccauagagcacuaucggcaugcucugcgccugaaaccggacuucaucgauggauacauuaaucucgccgcggcauuaguagccgcuggcgacauggaaggugccgugcaggcauaugucucagcucugcaauacaaccccgaucuuuauugcgugagaagcgacuuggggaaucugcuaaaggcccucggaaggcuggaggaggcgaaagccuguuaccuuaaggcaaucgaaacccagccuaacuuugcuguugccuggaguaaucugggcugcguguucaacgcucagggcgagauuugguuggccauccaccacuuugaaaaggcagucacacucgauccaaauuuccuggacgccuacauaaacuuagggaaugugcugaaagaggcucggaucuuugaucgcgcgguagcagccuaucuccgagcucuuucccugucucccaaccaugccguugugcacggaaauuuggcaugugucuacuaugaacagggucuaauugaccuggccaucgauacuuacagaagggcuauugagcuccaaccucauuucccagacgccuauugcaaccuggcaaacgcgcuuaaggagaaaggcagcguggcugaagccgaggacuguuacaauaccgcacugcgguugugccccacacacgccgauucccucaacaaucuggcuaacaucaagcgugaacaggggaauauagaggaagccgugcgcuuauauagaaaagcacuggaggucuuuccugaguucgcugccgcgcacucaaaccuagccaguguucuccagcaacagggaaagcugcaggaagcucuuaugcauuacaaggaggcaauuaggaucagcccaaccuuugccgacgcuuacucuaauaugggcaacacuuugaaagaaaugcaggaugugcaaggugcccugcaguguuauacacgggcaauucagaucaauccggcguucgccgacgcucacuccaaccucgccucaauccauaaggauagcgggaauauucccgaggcaauagcuaguuaccgaaccgcccugaaacuuaagccugacuucccagaugcauauugcaaccuggcccacuguuugcagaucguaugcgacuggacggauuacgacgaacgcaugaaaaagcucgugucuauugucgcugaucaacuggagaaaaauagauuacccuccgugcauccucaccacagcaugcuguauccacuaucgcauggauuuaggaaggcgaucgccgagcggcacggcaaccucugccuggacaagauaaauguucuucauaaacccccguacgaacacccuaaggacuugaaacugucugauggccgccucagagugggguaugucuccucagacuucggaaaccaccccaccagucaucugaugcagagcauuccagguaugcacaacccugauaaguuugagguguucuguuacgcauuaucccccgacgauggcacuaauuuuaggguaaaaguuauggcugaagccaaccauuucaucgaccugucucagaucccaugcaaugggaaggccgcugaucguauucaccaggacggaauccauauucuugugaacaugaauggcuacacaaagggugcacggaacgaguuguuugcccuccgacccgcgccuauacaagcuauguggcugggguauccaggcacuagcggagcccuauucauggauuacaucauuaccgaccaggagacaucaccggcagaagucgccgagcaguauagugaaaaacuggcuuacaugccccacaccuuuuucaucggcgaucacgcaaauauguuuccucaucucaagaaaaaggccgugaucgacuucaaauccaacgggcacauuuaugauaauagaauaguccugaacggaaucgaccuuaaggcguuuuuggacagccugccagaugugaagauuguuaaaaugaagugucccgacgguggcgauaaugcugacucuucaaacacggccuuaaauaugccugugaucccaaugaacacuauugcagaggccguaaucgaaaugauaaauagggggcagauccaaauuacaaucaacggauucaguauuagcaacggccucgcuaccacucagaucaauaacaaagccgcaacaggugaggaggucccccgcaccauaauugugacgacccggucccaguacgggcugccggaagaugcuaucguuuauugcaauuucaaccaacuuuacaagauugacccuucuacacugcagaugugggccaauaucuugaaaagagugccaaacucgguccucuggcugcuaagguuucccgcggugggcgagccuaauauacagcaguacgcccaaaacaugggacugccccagaaucgcaucauuuucagcccaguagcaccuaaggaggaacaugugcgacggggccagcucgcugauguuugucuggacacuccccuuugcaacgggcacaccacaggaauggaugucuugugggccgguacuccaauggugaccaugccgggcgaaacacuggcuucccguguggcagccucacaguuaaccugucucgggugccuggagcuuaucgccaagaauagacaagaguaugaagacauugcugucaaacugggaacugaucuagaguaccucaagaaaguuaggggcaagguguggaaacagcgcaucaguucuccucuguuuaacacgaagcaguauacaauggaauuggagcggcuguacuuacagaugugggaacauuaugcggcagguaauaaacccgaccacaugauaaagccaguggagguaaccgagagcgccuga

SEQ ID NO: 2930 - RNA, 3141 nt, Artificial Sequence
  derived and/or modified sequence opt4 from OGT__Homo_sapiens__AAH38180
auggccagcagcgugggcaacguggccgacagcaccgagcccaccaagagaaugcugagcuuccagggccuggccgagcuggcccacagagaguaccaggccggcgacuucgaggccgccgagagacacugcaugcagcuguggagacaggagcccgacaacaccggcgugcugcugcugcugagcagcauccacuuccagugcagaagacuggacagaagcgcccacuucagcacccuggccaucaagcagaacccccugcuggccgaggccuacagcaaccugggcaacguguacaaggagagaggccagcugcaggaggccaucgagcacuacagacacgcccugagacugaagcccgacuucaucgacggcuacaucaaccuggccgccgcccugguggccgccggcgacauggagggcgccgugcaggccuacgugagcgcccugcaguacaaccccgaccuguacugcgugagaagcgaccugggcaaccugcugaaggcccugggcagacuggaggaggccaaggccugcuaccugaaggccaucgagacccagcccaacuucgccguggccuggagcaaccugggcugcguguucaacgcccagggcgagaucuggcuggccauccaccacuucgagaaggccgugacccuggaccccaacuuccuggacgccuacaucaaccugggcaacgugcugaaggaggccagaaucuucgacagagccguggccgccuaccugagagcccugagccugagccccaaccacgccguggugcacggcaaccuggccugcguguacuacgagcagggccugaucgaccuggccaucgacaccuacagaagagccaucgagcugcagccccacuuccccgacgccuacugcaaccuggccaacgcccugaaggagaagggcagcguggccgaggccgaggacugcuacaacaccgcccugagacugugccccacccacgccgacagccugaacaaccuggccaacaucaagagagagcagggcaacaucgaggaggccgugagacuguacagaaaggcccuggagguguuccccgaguucgccgccgcccacagcaaccuggccagcgugcugcagcagcagggcaagcugcaggaggcccugaugcacuacaaggaggccaucagaaucagccccaccuucgccgacgccuacagcaacaugggcaacacccugaaggagaugcaggacgugcagggcgcccugcagugcuacaccagagccauccagaucaaccccgccuucgccgacgcccacagcaaccuggccagcauccacaaggacagcggcaacauccccgaggccaucgccagcuacagaaccgcccugaagcugaagcccgacuuccccgacgccuacugcaaccuggcccacugccugcagaucgugugcgacuggaccgacuacgacgagagaaugaagaagcuggugagcaucguggccgaccagcuggagaagaacagacugcccagcgugcacccccaccacagcaugcuguacccccugagccacggcuucagaaaggccaucgccgagagacacggcaaccugugccuggacaagaucaacgugcugcacaagccccccuacgagcaccccaaggaccugaagcugagcgacggcagacugagagugggcuacgugagcagcgacuucggcaaccaccccaccagccaccugaugcagagcauccccggcaugcacaaccccgacaaguucgagguguucugcuacgcccugagccccgacgacggcaccaacuucagagugaaggugauggccgaggccaaccacuucaucgaccugagccagauccccugcaacggcaaggccgccgacagaauccaccaggacggcauccacauccuggugaacaugaacggcuacaccaagggcgccagaaacgagcuguucgcccugagacccgcccccauccaggccauguggcugggcuaccccggcaccagcggcgcccuguucauggacuacaucaucaccgaccaggagaccagccccgccgagguggccgagcaguacagcgagaagcuggccuacaugccccacaccuucuucaucggcgaccacgccaacauguucccccaccugaagaagaaggccgugaucgacuucaagagcaacggccacaucuacgacaacagaaucgugcugaacggcaucgaccugaaggccuuccuggacagccugcccgacgugaagaucgugaagaugaagugccccgacggcggcgacaacgccgacagcagcaacaccgcccugaacaugcccgugauccccaugaacaccaucgccgaggccgugaucgagaugaucaacagaggccagauccagaucaccaucaacggcuucagcaucagcaacggccuggccaccacccagaucaacaacaaggccgccaccggcgaggaggugcccagaaccaucaucgugaccaccagaagccaguacggccugcccgaggacgccaucguguacugcaacuucaaccagcuguacaagaucgaccccagcacccugcagaugugggccaacauccugaagagagugcccaacagcgugcuguggcugcugagauuccccgccgugggcgagcccaacauccagcaguacgcccagaacaugggccugccccagaacagaaucaucuucagccccguggcccccaaggaggagcacgugagaagaggccagcuggccgacgugugccuggacaccccccugugcaacggccacaccaccggcauggacgugcugugggccggcacccccauggugaccaugcccggcgagacccuggccagcagaguggccgccagccagcugaccugccugggcugccuggagcugaucgccaagaacagacaggaguacgaggacaucgccgugaagcugggcaccgaccuggaguaccugaagaaggugagaggcaagguguggaagcagagaaucagcagcccccuguucaacaccaagcaguacaccauggagcuggagagacuguaccugcagaugugggagcacuacgccgccggcaacaagcccgaccacaugaucaagcccguggaggugaccgagagcgccuga

SEQ ID NO: 2931 - RNA, 3141 nt, Artificial Sequence
  derived and/or modified sequence opt5 from OGT__Homo_sapiens__AAH38180
auggccagcuccgugggcaacgucgcugacucuaccgagcccacaaagagaaugcugagcuuccaggggcucgccgaacuggcgcaccgggaguaccaagcuggagauuuugaagccgccgagcgccauugcaugcagcuuuggagacaggaaccugacaauacgggcguucugcuccugcuuuccucuauccacuuccagugucggcgccuggauagaagcgcucauuuuuccacccucgccauuaaacaaaacccgcugcuggcugaggccuauucuaaucucgggaacguguacaaggagcggggacagcugcaggaagcgaucgagcacuaucgccaugcccuuagacugaaacccgacuucauugauggcuacaucaaucucgcugccgcucugguggccgcgggggacauggaaggagccguccaggcuuaugugagcgcccuucaauacaacccugaucuguauugcguucgguccgaccucggcaaucugcugaaggcucucggccgccuggaggaggccaaagccuguuaccuuaaggcuauugaaacacagcccaacuuugcgguggccuggagcaaucuggggugcgucuucaacgcucagggagagaucuggcucgccauccaccacuuugaaaaggccgugacccuggauccuaauuuccuugacgcuuacauuaaccugggcaauguucucaaagaggccagaaucuuugaucgggcgguggcugccuaucugcgcgcccugucucucucccccaaccaugcugucgugcacgggaaucuggccuguguguacuaugaacagggacuuauugaccuggcuaucgauacauacagacgggccauugagcuccaaccucauuucccggacgcguauugcaaccuggccaacgcucuuaaggagaaaggcagcgucgccgaagcugaggacuguuacaauaccgcccugcgccucugccccacacacgcggauucucugaacaaucuggccaacaucaagagagaacaggggaauauugaggaagcuguucggcucuauagaaaagcccuggagguguuuccugaguucgcugccgcccacuccaaccuugcuagcgugcugcagcaacagggaaagcuccaggaagcgcugaugcauuacaaggaggccauccgcaucucucccaccuuugcugacgccuacuccaauaugggcaacacgcugaaagaaaugcaggauguccaaggcgcccuucaguguuauacccgggcuauucagaucaauccugccuucgcggacgcucacagcaaccucgccuccauucauaaggauucugggaauauccccgaggccauugcuagcuacagaacagcccugaaacugaagccggacuucccugaugcguauugcaaccucgcucacugucugcagaucgugugcgacuggaccgauuacgacgaacgcaugaaaaagcugguuuccaucguggccgaucaacuugagaaaaaucggcuccccagcguccauccucaccacucuaugcuguauccccugucccauggauuuagaaaggccauugcugagcgccacggcaaccuuugccucgacaagaucaaugugcugcauaaacccccuuacgaacacccgaaggaccugaaacucagcgaugggcggcugagaguuggauaugugucuagcgacuucggcaaccaccccacaucccaucuuaugcagucuauuccugggaugcacaaccccgauaaguuugaggucuucuguuacgcccugagcccugacgauggaaccaauuuucgcgugaaagucauggcugaagccaaccauuucaucgaccucucccagauucccugcaauggcaaggcggccgaucggauccaccaggacggcauccauauucuggugaacaugaauggguacacgaagggagcuagaaacgagcuguuugcccuucgcccggcuccuauccaagccauguggcucggcuaucccgggacaagcggagcccuguucauggauuacauuaucaccgaccaggagacaucuccugcugaaguugcggagcaguauuccgaaaaacuggccuacaugccccacaccuuuuucauuggcgaucacgcuaauauguuuccucaucucaagaaaaaggccgugaucgacuucaaaagcaacgggcacauuuaugauaaucggaucguccugaacggcaucgaccuuaaggccuuucuggacucucuccccgaugugaagauuguuaaaaugaaguguccggacggaggcgauaaugcugacuccagcaacaccgcccugaauaugccugugauccccaugaacacaauugcggaggcugucaucgaaaugauuaauagagggcagauccaaaucacgauuaacggauucuccaucucuaacggccuggccaccacacagauuaauaacaaagccgcuaccggggaggaggugccccggacaaucauugugaccacgcgcagccaguacggacuuccugaagaugccaucguuuauugcaauuucaaccaacucuacaagaucgacccguccacacugcagaugugggcgaauauucugaaaagaguccccaacucugugcucuggcugcuucgguuuccugcugugggcgagcccaauauccagcaguacgcccaaaacauggggcugccucagaauagaauuaucuucagccccgucgccccuaaggaggaacaugugcgccggggccagcucgcugauguuugucuggacacaccccugugcaacggacacaccaccggcauggaugugcuuugggccgggaccccgauggucacaaugccuggagaaacgcuggcuuccagaguggccgcgagccagcucaccugucugggcugccucgagcugauugccaagaaucgccaagaguaugaagacaucgcuguuaaacuugggacagaucuggaguaccucaagaaagugagaggaaaggucuggaaacagcggaucucuagcccccuguuuaacaccaagcaguauacaauggaacuggagcgccuuuaccugcagaugugggaacauuaugccgcuggcaauaaaccugaccacaugauuaagcccguggagguuaccgaguccgccuga

SEQ ID NO: 2932 - protein, 146 aa, Artificial Sequence [sequence omitted]

SEQ ID NO: 2933 - RNA, 441 nt, Artificial Sequence
  OS-9__Homo_sapiens__BAG57972
auggcggcggaaacgcugcuguccaguuuguuaggacugcugcuucugggacuccuguuacccgcaagucugaccggcggugucgggagucugaaccuggaggagcugagugagaugcguuaugggaucgagauccugccguugccugucaugggagggcagagccaaucuucggacguggugauugucuccucuaaguacaaacagcgcuaugagugucgccugccaguuggagcuauucacuuccagcgugaaagggaggaggaaacaccugcuuaccaagggccugggaucccugaguuguugagcccaaugagagaugcucccugcuugcugaagacaaaggacugguggacauaugaauucuguuauggacgccacauccagcaauaccacauggaagauucagagaucaaaggccuccaagcagcaucgucuuaa

SEQ ID NO: 2934 - RNA, 441 nt, Artificial Sequence
  derived and/or modified sequence opt1 from OS-9__Homo_sapiens__BAG57972
auggccgccgagacccugcucagcucccugcugggccuccugcugcucgggcugcugcuccccgcgagccugaccggcggggugggcucccugaaccucgaggagcugagcgagaugcgcuacgggaucgagauccugccgcuccccgucaugggcggccagucccagagcuccgacguggugaucgucagcuccaaguacaagcagcgguacgagugccgccugcccgugggggccauccacuuccagcgggagcgcgaggaggagacgcccgccuaccagggcccggggauccccgagcugcucagccccaugcgggacgcccccugccugcugaagaccaaggacugguggaccuacgaguucugcuacggccgccacauccagcaguaccacauggaggacuccgagaucaaggggcuccaggccgcgagcuccuga

SEQ ID NO: 2935 - RNA, 441 nt, Artificial Sequence
  derived and/or modified sequence opt2 from OS-9__Homo_sapiens__BAG57972
auggccgccgagacccuccucuccucccuccucggccuccuccuccucggccuccuccuccccgccucccucaccggcggcgucggcucccucaaccucgaggagcucuccgagaugcgcuacggcaucgagauccucccccuccccgucaugggcggccagucccaguccuccgacgucgucaucgucuccuccaaguacaagcagcgcuacgagugccgccuccccgucggcgccauccacuuccagcgcgagcgcgaggaggagacccccgccuaccagggccccggcauccccgagcuccucucccccaugcgcgacgcccccugccuccucaagaccaaggacugguggaccuacgaguucugcuacggccgccacauccagcaguaccacauggaggacuccgagaucaagggccuccaggccgccuccuccuga

SEQ ID NO: 2936 - RNA, 441 nt, Artificial Sequence
  derived and/or modified sequence opt3 from OS-9__Homo_sapiens__BAG57972
auggccgcugagacccugcucagcucccuucugggcuuguuacugcuagggcuccugcuucccgcaucucugacaggaggugugggcucauugaaccucgaggaacugagugaaaugagauacgggaucgagauucugccucucccagucaugggaggccagagccaauccucugacguugugauaguaucgucaaaguauaaacagagguacgaaugccgguuaccggugggugccauccacuuccagcgcgagcgagaggaagagacucccgcguaucaggggccuggcauuccagaacugcuuagccccaugcgugaugcuccuuguuugcugaagacgaaagacugguggaccuacgaguuuugcuauggaagacauauccaacaguaccacauggaggauagugaaauuaagggccuacaggccgcauccucuuga

SEQ ID NO: 2937 - RNA, 441 nt, Artificial Sequence
  derived and/or modified sequence opt4 from OS-9__Homo_sapiens__BAG57972
auggccgccgagacccugcugagcagccugcugggccugcugcugcugggccugcugcugcccgccagccugaccggcggcgugggcagccugaaccuggaggagcugagcgagaugagauacggcaucgagauccugccccugcccgugaugggcggccagagccagagcagcgacguggugaucgugagcagcaaguacaagcagagauacgagugcagacugcccgugggcgccauccacuuccagagagagagagaggaggagacccccgccuaccagggccccggcauccccgagcugcugagccccaugagagacgcccccugccugcugaagaccaaggacugguggaccuacgaguucugcuacggcagacacauccagcaguaccacauggaggacagcgagaucaagggccugcaggccgccagcagcuga

SEQ ID NO: 2938 - RNA, 441 nt, Artificial Sequence
  derived and/or modified sequence opt5 from OS-9__Homo_sapiens__BAG57972
auggccgcugagacccugcucagcucccugcuuggccugcuccugcuugggcugcuccugcccgccucucugacaggaggcguggggagccucaaccuggaggaacuuuccgaaaugagauacggaaucgagauucugccucucccggucaugggcgggcagucucaaagcuccgacguugugaucgugucuagcaaguauaaacagcgguacgaaugccgccugcccgucggagcgauucacuuccagagagagcgggaggaagagacgccugcuuaucagggccccggcaucccugaacuucugucccccaugcgcgaugccccuugucuccugaagaccaaagacugguggacauacgaguuuugcuaugggagacauauucaacaguaccacauggaggauagcgaaaucaagggacugcaggccgcuucuuccuga

SEQ ID NO: 2939 - protein, 406 aa, Artificial Sequence
  OS-9__Homo_sapiens__B4E321
MAAETLLSSLLGLLLLGLLLPASLTGGVGSLNLEELSEMRYGIEILPLPVMGGQSQSSDVVIVSSKYKQRYECRLPAGAIHFQREREEETPAYQGPGIPELLSPMRDAPCLLKTKDWWTYEFCYGRHIQQYHMEDSASGAPNDFQNNVQVKVIRSPADLIRFIEELKGGTKKGKPNIGQEQPVDDAAEVPQREPEKERGDPERQREMEEEEDEDEDEDEDEDERQLLGEFEKELEGILLPSDRDRLRSEVKAGMERELENIIQETEKELDPDGLKKESERDRAMLALTSTLNKLIKRLEEKQSPELVKKHKKKRVVPKKPPPSPQPTGKIEIKIVRPWAEGTEEGARWLTDEDTRNLKEIFFNILVPGAEEAQKERQRQKELESNYRRVWGSPGGEGTGDLDEFDF

SEQ ID NO: 2940 - RNA, 1221 nt, Artificial Sequence
  OS-9__Homo_sapiens__BAG65333
auggcggcggaaacgcugcuguccaguuuguuaggacugcugcuucugggacuccuguuacccgcaagucugaccggcggugucgggagccugaaccuggaggagcugagugagaugcguuaugggaucgagauccugccguugccugucaugggagggcagagccaaucuucggacguggugauugucuccucuaaguacaaacagcgcuaugagugucgccugccagcuggagcuauucacuuccagcgugaaagggaggaggaaacaccugcuuaccaagggccugggaucccugaguuguugagcccaaugagagaugcucccugcuugcugaagacaaaggacugguggacauaugaauucuguuauggacgccacauccagcaauaccacauggaagauucagcuucuggugcucccaaugauuuucagaacaacgugcaggucaaagucauucgaagcccugcggauuugauucgauucauagaggagcugaaagguggaacaaaaaaggggaagccaaauauaggccaagagcagccuguggaugaugcugcagaagucccucagagggaaccagagaaggaaaggggugauccagaacggcagagagagauggaagaagaggaggaugaggaugaggaugaggaugaagaugaggaugaacggcaguuacugggagaauuugagaaggaacuggaagggauccugcuuccgucagaccgagaccggcuccguucggaggugaaggcuggcauggagcgggaacuggaaaacaucauccaggagacagagaaagagcuggacccagaugggcugaagaaggagucagagcgggaucgggcaaugcuggcucucacauccacucucaacaaacucaucaaaagacuggaggaaaaacagaguccagagcuggugaagaagcacaagaaaaagaggguuguccccaaaaagccucccccaucaccccaaccuacagggaaaauugagaucaaaauuguccgcccaugggcugaagggacugaagagggugcacguuggcugacugaugaggacacgagaaaccucaaggagaucuucuucaauaucuuggugccgggagcugaagaggcccagaaggaacgccagcggcagaaagagcuggagagcaauuaccgccggguguggggcucuccagguggggagggcacaggggaccuggacgaauuugacuucuga

SEQ ID NO: 2941 - RNA, 1221 nt, Artificial Sequence
  derived and/or modified sequence opt1 from OS-9__Homo_sapiens__BAG65333
auggccgccgagacccugcucagcucccugcugggccuccugcugcucgggcugcugcuccccgcgagccugaccggcggggugggcucccugaaccucgaggagcugagcgagaugcgcuacgggaucgagauccugccgcuccccgucaugggcggccagucccagagcuccgacguggugaucgucagcuccaaguacaagcagcgguacgagugccgccugcccgccggggccauccacuuccagcgggagcgcgaggaggagacgcccgccuaccagggcccggggauccccgagcugcucagccccaugcgggacgcccccugccugcugaagaccaaggacugguggaccuacgaguucugcuacggccgccacauccagcaguaccacauggaggacuccgcgagcggggccccgaacgacuuccagaacaacguccaggugaaggugauccggucccccgccgaccucauccgcuucaucgaggagcugaagggcggcaccaagaaggggaagcccaacaucggccaggagcagcccguggacgacgccgcggaggugccgcagcgggagcccgagaaggagcgcggggaccccgagcggcagcgcgagauggaggaggaggaggacgaggacgaggacgaggacgaggacgaggacgagcggcagcugcucggcgaguucgagaaggagcuggagggcauccugcuccccagcgaccgcgaccggcugcgcuccgaggucaaggccgggauggagcgggagcuggagaacaucauccaggagacggagaaggagcucgacccggacggccugaagaaggagagcgagcgcgaccgggccaugcuggcccucaccuccacccugaacaagcugaucaagcgccucgaggagaagcagagccccgagcuggugaagaagcacaagaagaagcgggugguccccaagaagcccccgcccagcccccagcccaccgggaagaucgagaucaagaucgugcgcccgugggccgagggcacggaggagggggcgcgcuggcugaccgacgaggacacccggaaccucaaggagaucuucuucaacauccuggugcccggcgccgaggaggcccagaaggagcgccagcggcagaaggagcuggaguccaacuaccgccgggucuggggcagccccgggggcgaggggaccggcgaccucgacgaguucgacuucuga

SEQ ID NO: 2942 - RNA, 1221 nt, Artificial Sequence
  derived and/or modified sequence opt2 from OS-9__Homo_sapiens__BAG65333
auggccgccgagacccuccucuccucccuccucggccuccuccuccucggccuccuccuccccgccucccucaccggcggcgucggcucccucaaccucgaggagcucuccgagaugcgcuacggcaucgagauccucccccuccccgucaugggcggccagucccaguccuccgacgucgucaucgucuccuccaaguacaagcagcgcuacgagugccgccuccccgccggcgccauccacuuccagcgcgagcgcgaggaggagacccccgccuaccagggccccggcauccccgagcuccucucccccaugcgcgacgcccccugccuccucaagaccaaggacugguggaccuacgaguucugcuacggccgccacauccagcaguaccacauggaggacuccgccuccggcgcccccaacgacuuccagaacaacguccaggucaaggucauccgcucccccgccgaccucauccgcuucaucgaggagcucaagggcggcaccaagaagggcaagcccaacaucggccaggagcagcccgucgacgacgccgccgaggucccccagcgcgagcccgagaaggagcgcggcgaccccgagcgccagcgcgagauggaggaggaggaggacgaggacgaggacgaggacgaggacgaggacgagcgccagcuccucggcgaguucgagaaggagcucgagggcauccuccuccccuccgaccgcgaccgccuccgcuccgaggucaaggccggcauggagcgcgagcucgagaacaucauccaggagaccgagaaggagcucgaccccgacggccucaagaaggaguccgagcgcgaccgcgccaugcucgcccucaccuccacccucaacaagcucaucaagcgccucgaggagaagcagucccccgagcucgucaagaagcacaagaagaagcgcgucguccccaagaagcccccccccuccccccagcccaccggcaagaucgagaucaagaucguccgccccugggccgagggcaccgaggagggcgcccgcuggcucaccgacgaggacacccgcaaccucaaggagaucuucuucaacauccucguccccggcgccgaggaggcccagaaggagcgccagcgccagaaggagcucgaguccaacuaccgccgcgucuggggcucccccggcggcgagggcaccggcgaccucgacgaguucgacuucuga

SEQ ID NO: 2943 - RNA, 1221 nt, Artificial Sequence
  derived and/or modified sequence opt3 from OS-9__Homo_sapiens__BAG65333
auggccgcugagacccugcucagcucccuucugggcuuguuacugcuagggcuccugcuucccgcaucucugacaggaggugugggcucauugaaccucgaagaacugagugaaaugagauacgggaucgagauucugccucucccagucaugggaggccagagccaauccucugacguugugauaguaucgucaaaguauaaacagagguacgaaugccgguuaccggccggugcgauccacuuccagcgcgagcgagaggaagagacucccgcuuaucaggggccuggcauuccagaacugcuuagccccaugcgugaugccccuuguuugcugaagacgaaagacugguggaccuacgaguuuugcuauggaagacauauccaacaguaccacauggaggauagugcauccggcgccccaaaugacuuccagaacaaugugcaggucaaggugauuaggucucccgcugaucuaauccgguuuauagaggagcucaaagggggaacaaagaaggguaaaccuaacaucggccaagaacagccaguugacgaugcagccgaggugccgcagcgcgaacccgagaaggagagaggggacccugaaaggcagcgggagauggaagaggaagaggaugaggacgaagaugaggacgaagaugaggacgaacgccaacugcuuggagaguucgagaaagaacuggagggcauuuugcucccaagcgaccgagauagacugagguccgaagucaaggcugguauggagcgggaguuagaaaauaucauucaggagacugaaaaagagcuggaccccgaugggcucaagaaggaaucagagcgugaccgcgccaugcuugcgcugaccaguacauugaacaaacuaaucaagagacuggaggaaaaacagagcccugagcucgugaagaaacauaagaaaaagaggguaguuccaaagaaacccccgccuucuccccaaccaaccggaaagauagaaauuaaaaucgugcggccuugggcagagggcacugaagagggcgcccgauggcugacagaugaggacacccgcaaucuuaaggaaaucuuuuucaacauucugguccccggggcugaggaagcccagaaagagagacagaggcagaaggaauuggaguccaauuaucggcgcguguggggaucaccagguggcgaggggacgggagaucucgacgaauuugauuucuga

SEQ ID NO: 2944 - RNA, 1221 nt, Artificial Sequence
  derived and/or modified sequence opt4 from OS-9__Homo_sapiens__BAG65333
auggccgccgagacccugcugagcagccugcugggccugcugcugcugggccugcugcugcccgccagccugaccggcggcgugggcagccugaaccuggaggagcugagcgagaugagauacggcaucgagauccugccccugcccgugaugggcggccagagccagagcagcgacguggugaucgugagcagcaaguacaagcagagauacgagugcagacugcccgccggcgccauccacuuccagagagagagagaggaggagacccccgccuaccagggccccggcauccccgagcugcugagccccaugagagacgcccccugccugcugaagaccaaggacugguggaccuacgaguucugcuacggcagacacauccagcaguaccacauggaggacagcgccagcggcgcccccaacgacuuccagaacaacgugcaggugaaggugaucagaagccccgccgaccugaucagauucaucgaggagcugaagggcggcaccaagaagggcaagcccaacaucggccaggagcagcccguggacgacgccgccgaggugccccagagagagcccgagaaggagagaggcgaccccgagagacagagagagauggaggaggaggaggacgaggacgaggacgaggacgaggacgaggacgagagacagcugcugggcgaguucgagaaggagcuggagggcauccugcugcccagcgacagagacagacugagaagcgaggugaaggccggcauggagagagagcuggagaacaucauccaggagaccgagaaggagcuggaccccgacggccugaagaaggagagcgagagagacagagccaugcuggcccugaccagcacccugaacaagcugaucaagagacuggaggagaagcagagccccgagcuggugaagaagcacaagaagaagagaguggugcccaagaagcccccccccagcccccagcccaccggcaagaucgagaucaagaucgugagacccugggccgagggcaccgaggagggcgccagauggcugaccgacgaggacaccagaaaccugaaggagaucuucuucaacauccuggugcccggcgccgaggaggcccagaaggagagacagagacagaaggagcuggagagcaacuacagaagaguguggggcagccccggcggcgagggcaccggcgaccuggacgaguucgacuucuga

SEQ ID NO: 2945 - RNA, 1221 nt, Artificial Sequence
  derived and/or modified sequence opt5 from OS-9__Homo_sapiens__BAG65333
auggccgcugagacccugcucagcucccugcuuggccugcuccugcuugggcugcuccugcccgccucucugacaggaggcguggggagccucaaccuggaagaacuuuccgaaaugagauacggaaucgagauucugccucucccggucaugggcgggcagucucaaagcuccgacguugugaucgugucuagcaaguauaaacagcgguacgaaugccgccugcccgcgggagcuauucacuuccagagagagcgggaggaagagacgccugccuaucagggccccggcaucccugaacuucugucccccaugcgcgaugccccuugucuccugaagaccaaagacugguggacauacgaguuuugcuaugggagacauauucaacaguaccacauggaggauagcgcuucuggagccccgaaugacuuccagaacaauguccaggugaagguuauccggucccccgcugaucugauccgcuuuauugaggagcucaaaggcgggaccaagaagggaaaaccuaacaucggccaagaacagcccguggacgaugccgcggaggucccucagagagaacccgagaaggagcgcggggacccggaacggcagagagagauggaagaggaagaggaugaggacgaagaugaggacgaagaugaggacgaacggcaacugcuuggagaguucgagaaagaacuggagggcauucuccugccuagcgaccgcgauagacuucggucugaagugaaggccggcauggagcgcgagcuggaaaauaucauucaggagacagaaaaagagcucgaccccgaugggcugaagaaggaauccgagagagaccgggcuaugcuggcccucaccagcacacugaacaaacuuaucaagagacuggaggaaaaacagucuccugagcucguuaagaaacauaagaaaaagcgcgugguccccaagaaacccccuccgagcccccaaccuaccggaaagauugaaaucaaaaucgugcggcccugggcugagggcacggaagagggggccagauggcugaccgaugaggacacacgcaaucuuaaggaaaucuuuuucaacauucuggugccuggagcggaggaagcccagaaagagcggcagagacagaaggaacucgaguccaauuaucgccgggucuggggcucccccgggggagagggcaccggcgaucuggacgaauuugauuucuga

SEQ ID NO: 2946 - protein, 740 aa, Artificial Sequence
  OS-9__Homo_sapiens__B7Z8E7
MAVETLLSSLLGLLLLGLLLPASLTGGVGSLNLEELSEMRYGIEILPLPVMGGQSQSSDVVIVSSKYKQRYECRLPAGAIHFQREREEETPAYQGPGIPELLSPMRDAPCLLKTKDWWTYEFCYGRHIQQYHMEDSEIKGEVLYLGYYQSAFDWDDETAKASKQHRLKRYHSQTYGNGSKCDLNGRPREAEVRFLCDEGAGISGDYIDRVDEPLSCSYVLTIRTPRLCPHPLLRPPPSAAPQAILCHPSLQPEEYMAYVQRQADSKQYGDKIIEELQDLGPQVWSETKSGVAPQKMAGRTLFHLFREIHFHFFPSPDLTVLTDWWGGGGVEKYHGPSSLGDRGGEGTPSYLLPSVSPLLSDQSLPVLCTLGASPTKDDSKDSDFWKMLNEPEDQAPGGEEVPAEEQDPSPEAADSASGAPNDFQNNVQVKVIRSPADLIRFIEELKGGTKKGKPNIGQEQPVDDAAEVPQREPEKERGDPERQREMEEEEDEDEDEDEDEDERQLLGEFEKELEGILLPSDRDRLRSEVKAGMERELENIIQETEKELDPDGLKKESERDRAMLALTSTLNKLIKRLEEKQSPELVKKHKKKRVVPKKPPPSPQPTEEDPEHRVRVRVTKLRLGGPNQDLTVLEMKRENPQLKQIEGLVKELLEREGLTAAGKIEIKIVRPWAEGTEEGARWLTDEDTRNLKEIFFNILVPGAEEAQKERQRQKELESNYRRVWGSPGGEGTGDLDEFDF

SEQ ID NO: 2947 - RNA, 2223 nt, Artificial Sequence
  OS-9__Homo_sapiens__BAH13933
auggcgguggaaacgcugcuguccaguuuguuaggacugcugcuucugggacuccuguuacccgcaagucugaccggcggugucgggagccugaaccuggaggagcugagugagaugcguuaugggaucgagauccugccguugccugucaugggagggcagagccaaucuucggacguggugauugucuccucuaaguacaaacagcgcuaugagugucgccugccagcuggagcuauucacuuccagcgugaaagggaggaggaaacaccugcuuaccaagggccugggaucccugaguuguugagcccaaugagagaugcucccugcuugcugaagacaaaggacugguggacauaugaauucuguuauggacgccacauccagcaauaccacauggaagauucagagaucaaaggugaaguccucuaucucggcuacuaccaaucagccuucgacugggaugaugaaacagccaaggccuccaagcagcaucgucuuaaacgcuaccacagccagaccuauggcaauggguccaagugcgaccuuaaugggaggccccgggaggccgagguucgguuccucugugacgagggugcagguaucucuggggacuacaucgaucgcguggacgagcccuuguccugcucuuaugugcugaccauucgcacuccucggcucugcccccacccucuccuccggcccccacccagugcugcaccgcaggccauccucugucacccuucccuacagccugaggaguacauggccuacguucagaggcaagccgacucaaagcaguauggagauaaaaucauagaggagcugcaagaucuaggcccccaaguguggagugagaccaagucugggguggcaccccaaaagauggcagguaggaccuuguuucaccuguuccgugaaauucacuuccauuucuucccuuccccugaucuuacuguccugacugacugguggggugggggggggguggaaaaguaccaugggcccuccucccuuggugauagaggaggggaagggaccccauccuauuugcucccuucugucucaccccuccugucagaucagucucucccuguucucuguacccuaggugcgagcccgaccaaggaugacaguaaggacucagauuucuggaagaugcuuaaugagccagaggaccaggccccaggaggggaggaggugccggcugaggagcaggacccaagcccugaggcagcagauucagcuucuggugcucccaaugauuuucagaacaacgugcaggucaaagucauucgaagcccugcggauuugauucgauucauagaggagcugaaagguggaacaaaaaaggggaagccaaauauaggccaagagcagccuguggaugaugcugcagaagucccucagagggaaccagagaaggaaaggggugauccagaacggcagagagagauggaagaagaggaggaugaggaugaggaugaggaugaagaugaggaugaacggcaguuacugggagaauuugagaaggaacuggaagggauccugcuuccgucagaccgagaccggcuccguucggaggugaaggcuggcauggagcgggaacuggagaacaucauccaggagacagagaaagagcuggacccagaugggcugaagaaggagucagagcgggaucgggcaaugcuggcucucacauccacucucaacaaacucaucaaaagacuggaggaaaaacagaguccagagcuggugaagaagcacaagaaaaagaggguuguccccaaaaagccucccccaucaccccaaccuacagaggaggauccugagcacagaguccggguccgggucaccaagcuccgucucggaggcccuaaucaggaucugacuguccucgagaugaaacgggaaaacccacagcugaaacaaaucgaggggcuggugaaggagcugcuggagagggagggacucacagcugcagggaaaauugagaucaaaauuguccgcccaugggcugaagggacugaagagggugcacguuggcugacugaugaggacacgagaaaccucaaggagaucuucuucaauaucuuggugccgggagcugaagaggcccagaaggaacgccagcggcagaaagagcuggagagcaauuaccgccggguguggggcucuccagguggggagggcacaggggaccuggacgaauuugacuucuga

SEQ ID NO: 2948 - RNA, 2223 nt, Artificial Sequence
  derived and/or modified sequence opt1 from OS-9__Homo_sapiens__BAH13933
auggccguggagacccugcucagcucccugcugggccuccugcugcucgggcugcugcuccccgccagccugaccggcggggucggcucccugaaccucgaggagcugagcgagaugcgcuacgggaucgagauccugccgcuccccgugaugggcggccagucccagagcuccgacguggucaucgugagcuccaaguacaagcagcgguacgagugccgccugcccgcgggggccauccacuuccagcgggagcgcgaggaggagacgcccgccuaccagggcccggggauccccgagcugcucagccccaugcgggacgcccccugccugcugaagaccaaggacugguggaccuacgaguucugcuacggccgccacauccagcaguaccacauggaggacuccgagaucaagggggaggugcucuaccugggcuacuaccagagcgccuucgacugggacgacgagaccgcgaaggccuccaagcagcaccggcugaagcgcuaccacagccagacguacggcaacggguccaagugcgaccucaacggccggccgcgcgaggccgagguccgguuccugugcgacgagggggccggcaucagcggcgacuacaucgaccgcguggacgagccccuguccugcagcuacgugcucaccauccggacgccccgccugugcccccacccgcugcuccggcccccgcccuccgcggccccgcaggccauccugugccaccccagccugcagcccgaggaguacauggccuacguccagcgccaggccgacagcaagcaguacggggacaagaucaucgaggagcuccaggaccugggcccccaggugugguccgagaccaagagcgggguggcgccgcagaagauggccggccggacccuguuccaccucuuccgcgagauccacuuccacuucuuccccucccccgaccugaccguccugaccgacugguggggcgggggcgggguggagaaguaccacggccccagcucccucggggaccggggcggggagggcaccccgagcuaccugcugcccuccgugagcccccuccuguccgaccagagccugcccguccucugcacgcugggcgccuccccgaccaaggacgacagcaaggacuccgacuucuggaagaugcugaacgagcccgaggaccaggcccccgggggcgaggaggugccggccgaggagcaggaccccagccccgaggcggccgacuccgccagcggggcccccaacgacuuccagaacaacgugcaggucaaggugauccgcuccccggccgaccucauccgguucaucgaggagcugaagggcgggaccaagaagggcaagcccaacaucggccaggagcagcccguggacgacgcggccgaggucccccagcgcgagccggagaaggagcgcggggaccccgagcggcagcgcgagauggaggaggaggaggacgaggacgaggacgaggacgaggacgaggacgagcggcagcugcugggcgaguucgagaaggagcucgaggggauccugcugcccagcgaccgcgaccggcuccgcuccgaggugaaggccggcauggagcgggagcuggagaacaucauccaggagaccgagaaggagcuggaccccgacggccucaagaaggagagcgagcgcgaccgggccaugcuggcccugacgagcacccucaacaagcugaucaagcgccuggaggagaagcaguccccggagcucgugaagaagcacaagaagaagcgggucgugcccaagaagcccccgcccagcccccagcccaccgaggaggaccccgagcaccgcguccgggugcgcgugaccaagcugcggcucgggggcccgaaccaggaccugacgguccuggagaugaagcgcgagaacccccagcugaagcagaucgaggggcucgugaaggagcugcuggagcgggagggccucaccgcggccgggaagaucgagaucaagaucgugcgccccugggccgagggcaccgaggagggcgcccgguggcugaccgacgaggacacgcgcaaccugaaggagaucuucuucaacauccucguccccggggcggaggaggcccagaaggagcgccagcggcagaaggagcuggaguccaacuaccgccggguguggggcagccccgggggcgaggggaccggcgaccuggacgaguucgacuucuga

SEQ ID NO: 2949 - RNA, 2223 nt, Artificial Sequence
  derived and/or modified sequence opt2 from OS-9__Homo_sapiens__BAH13933
auggccgucgagacccuccucuccucccuccucggccuccuccuccucggccuccuccuccccgccucccucaccggcggcgucggcucccucaaccucgaggagcucuccgagaugcgcuacggcaucgagauccucccccuccccgucaugggcggccagucccaguccuccgacgucgucaucgucuccuccaaguacaagcagcgcuacgagugccgccuccccgccggcgccauccacuuccagcgcgagcgcgaggaggagacccccgccuaccagggccccggcauccccgagcuccucucccccaugcgcgacgcccccugccuccucaagaccaaggacugguggaccuacgaguucugcuacggccgccacauccagcaguaccacauggaggacuccgagaucaagggcgagguccucuaccucggcuacuaccaguccgccuucgacugggacgacgagaccgccaaggccuccaagcagcaccgccucaagcgcuaccacucccagaccuacggcaacggcuccaagugcgaccucaacggccgcccccgcgaggccgagguccgcuuccucugcgacgagggcgccggcaucuccggcgacuacaucgaccgcgucgacgagccccucuccugcuccuacguccucaccauccgcaccccccgccucugcccccacccccuccuccgccccccccccuccgccgccccccaggccauccucugccaccccucccuccagcccgaggaguacauggccuacguccagcgccaggccgacuccaagcaguacggcgacaagaucaucgaggagcuccaggaccucggcccccaggucugguccgagaccaaguccggcgucgccccccagaagauggccggccgcacccucuuccaccucuuccgcgagauccacuuccacuucuuccccucccccgaccucaccguccucaccgacugguggggcggcggcggcgucgagaaguaccacggccccuccucccucggcgaccgcggcggcgagggcacccccuccuaccuccuccccuccgucuccccccuccucuccgaccagucccuccccguccucugcacccucggcgccucccccaccaaggacgacuccaaggacuccgacuucuggaagaugcucaacgagcccgaggaccaggcccccggcggcgaggagguccccgccgaggagcaggaccccucccccgaggccgccgacuccgccuccggcgcccccaacgacuuccagaacaacguccaggucaaggucauccgcucccccgccgaccucauccgcuucaucgaggagcucaagggcggcaccaagaagggcaagcccaacaucggccaggagcagcccgucgacgacgccgccgaggucccccagcgcgagcccgagaaggagcgcggcgaccccgagcgccagcgcgagauggaggaggaggaggacgaggacgaggacgaggacgaggacgaggacgagcgccagcuccucggcgaguucgagaaggagcucgagggcauccuccuccccuccgaccgcgaccgccuccgcuccgaggucaaggccggcauggagcgcgagcucgagaacaucauccaggagaccgagaaggagcucgaccccgacggccucaagaaggaguccgagcgcgaccgcgccaugcucgcccucaccuccacccucaacaagcucaucaagcgccucgaggagaagcagucccccgagcucgucaagaagcacaagaagaagcgcgucguccccaagaagcccccccccuccccccagcccaccgaggaggaccccgagcaccgcguccgcguccgcgucaccaagcuccgccucggcggccccaaccaggaccucaccguccucgagaugaagcgcgagaacccccagcucaagcagaucgagggccucgucaaggagcuccucgagcgcgagggccucaccgccgccggcaagaucgagaucaagaucguccgccccugggccgagggcaccgaggagggcgcccgcuggcucaccgacgaggacacccgcaaccucaaggagaucuucuucaacauccucguccccggcgccgaggaggcccagaaggagcgccagcgccagaaggagcucgaguccaacuaccgccgcgucuggggcucccccggcggcgagggcaccggcgaccucgacgaguucgacuucuga

SEQ ID NO: 2950 - RNA, 2223 nt, Artificial Sequence
  derived and/or modified sequence opt3 from OS-9__Homo_sapiens__BAH13933
auggccguggagacccugcucagcucccuucugggcuuguuacugcuagggcuccugcuucccgcuucucugacaggaggugucggcucauugaaccucgaagaacugagugaaaugagauacgggaucgagauucugccucucccaguuaugggaggccagagccaauccucugacgugguaauagugucgucaaaguauaaacagagguacgaaugccgguuaccggccggugcaauccacuuccagcgcgagcgagaggaagagacucccgcguaucaggggccuggcauuccagaacugcuuagccccaugcgugaugcuccuuguuugcugaagacgaaagacugguggaccuacgaguuuugcuauggaagacauauccaacaguaccacauggaggauagugaaauuaagggcgagguccuauaucucggguacuaccaguccgccuucgacugggaugacgaaacagcaaaagccucuaagcagcauaggcugaagcgguaucacagccaaacuuacggaaaugguuccaaaugugaucuuaacggccgcccaagagaggcugaagugagguuucugugcgacgagggggcaggaaucucaggcgauuauauagaccggguugaugagcccuugaguuguagcuacgugcucaccauccgcacaccucgacugugcccacauccguuacugagacccccuccaucugccgcuccccaggccauucucugucacccuucccuucagccagaagaguauauggcguacguccagaggcaagcagacucaaagcaguauggugauaaaaucauugaggagcugcaggacuuggggccccaaguguggagcgaaaccaagaguggaguagccccgcagaaaauggcuggccggacucuauuccaccuguuucgugagauccauuuccacuuuuucccuucucccgaccucacaguucugaccgauugguggggcgggggagguguggagaaguaccauggcccauccagccuuggggaccgcggaggcgaagguacgccuucguaccuguugcccucugucuccccacuccugucagaucagaguuuacccgugcugugcacucuaggggccagcccuaccaaggacgauuccaaagacucugauuuuuggaagaugcucaaugagccagaagaccaggcaccgggcggagaggaagugcccgcugaggagcaagauccuagcccagaagccgcggacucagccaguggcgcacccaacgauuuccagaauaacguccagguuaaagugauaagauccccugcugaccugauuagguuuaucgaggaacuuaaagggggaacaaagaaggguaaaccaaauauuggccaggagcaacccguagacgaugccgcugaggugccgcagcgggaaccugagaaggaacgaggggacccagagcgccagagagaaauggaggaggaagaggaugaagacgaggaugaagacgaggaugaggacgaaaggcaguugcugggagaguucgaaaaggagcucgaaggcauccugcuucccagcgaucgggaccgccugagaucugaggucaaagccgguauggagagggaauuggagaacaucauucaagaaacugagaaggagcucgauccugacgggcugaaaaaggaaucagagcgugaucgggcaauguuagcccugaccaguacacuaaauaaacucauaaagcgacuggaagagaagcagagccccgaacuugugaaaaagcacaaaaagaaaagaguugugccaaagaagccucccccauccccgcagccuaccgaggaggaccccgaacacaggguccgcgugcggguaacgaaauugagacugggcggaccaaaccaggaccucacuguucuggagaugaagagggaaaauccccaauuaaaacagaucgagggccuggugaaggaacuuuuggagcgcgaggggcucacagcugcgggaaaaauugaaaucaagauaguccgaccuugggcagaggguaccgaagagggcgcccgguggcugacugaugaagacacacguaaccuaaaggagauuuucuucaauauccuggugccaggggcugaggaagcccagaaagagagacaaaggcagaaggaacucgagucuaacuaucgccgggucuggggaucgcccggcggugaggggaccggcgaucuggacgaauuugauuuuuga

SEQ ID NO: 2951 - RNA, 2223 nt, Artificial Sequence
  derived and/or modified sequence opt4 from OS-9__Homo_sapiens__BAH13933
auggccguggagacccugcugagcagccugcugggccugcugcugcugggccugcugcugcccgccagccugaccggcggcgugggcagccugaaccuggaggagcugagcgagaugagauacggcaucgagauccugccccugcccgugaugggcggccagagccagagcagcgacguggugaucgugagcagcaaguacaagcagagauacgagugcagacugcccgccggcgccauccacuuccagagagagagagaggaggagacccccgccuaccagggccccggcauccccgagcugcugagccccaugagagacgcccccugccugcugaagaccaaggacugguggaccuacgaguucugcuacggcagacacauccagcaguaccacauggaggacagcgagaucaagggcgaggugcuguaccugggcuacuaccagagcgccuucgacugggacgacgagaccgccaaggccagcaagcagcacagacugaagagauaccacagccagaccuacggcaacggcagcaagugcgaccugaacggcagacccagagaggccgaggugagauuccugugcgacgagggcgccggcaucagcggcgacuacaucgacagaguggacgagccccugagcugcagcuacgugcugaccaucagaacccccagacugugcccccacccccugcugagacccccccccagcgccgccccccaggccauccugugccaccccagccugcagcccgaggaguacauggccuacgugcagagacaggccgacagcaagcaguacggcgacaagaucaucgaggagcugcaggaccugggcccccagguguggagcgagaccaagagcggcguggccccccagaagauggccggcagaacccuguuccaccuguucagagagauccacuuccacuucuuccccagccccgaccugaccgugcugaccgacugguggggcggcggcggcguggagaaguaccacggccccagcagccugggcgacagaggcggcgagggcacccccagcuaccugcugcccagcgugagcccccugcugagcgaccagagccugcccgugcugugcacccugggcgccagccccaccaaggacgacagcaaggacagcgacuucuggaagaugcugaacgagcccgaggaccaggcccccggcggcgaggaggugcccgccgaggagcaggaccccagccccgaggccgccgacagcgccagcggcgcccccaacgacuuccagaacaacgugcaggugaaggugaucagaagccccgccgaccugaucagauucaucgaggagcugaagggcggcaccaagaagggcaagcccaacaucggccaggagcagcccguggacgacgccgccgaggugccccagagagagcccgagaaggagagaggcgaccccgagagacagagagagauggaggaggaggaggacgaggacgaggacgaggacgaggacgaggacgagagacagcugcugggcgaguucgagaaggagcuggagggcauccugcugcccagcgacagagacagacugagaagcgaggugaaggccggcauggagagagagcuggagaacaucauccaggagaccgagaaggagcuggaccccgacggccugaagaaggagagcgagagagacagagccaugcuggcccugaccagcacccugaacaagcugaucaagagacuggaggagaagcagagccccgagcuggugaagaagcacaagaagaagagaguggugcccaagaagcccccccccagcccccagcccaccgaggaggaccccgagcacagagugagagugagagugaccaagcugagacugggcggccccaaccaggaccugaccgugcuggagaugaagagagagaacccccagcugaagcagaucgagggccuggugaaggagcugcuggagagagagggccugaccgccgccggcaagaucgagaucaagaucgugagacccugggccgagggcaccgaggagggcgccagauggcugaccgacgaggacaccagaaaccugaaggagaucuucuucaacauccuggugcccggcgccgaggaggcccagaaggagagacagagacagaaggagcuggagagcaacuacagaagaguguggggcagccccggcggcgagggcaccggcgaccuggacgaguucgacuucuga

SEQ ID NO: 2952 - RNA, 2223 nt, Artificial Sequence
  derived and/or modified sequence opt5 from OS-9__Homo_sapiens__BAH13933
auggccguggagacccugcucagcucccugcuuggccugcuccugcuugggcugcuccugcccgcuucucugacaggaggcgucgggagccucaaccuggaagaacuuuccgaaaugagauacggaaucgagauucugccucucccgguuaugggcgggcagucucaaagcuccgacguggugaucgucucuagcaaguauaaacagcgguacgaaugccgccugcccgccggagcgauucacuuccagagagagcgggaggaagagacgccugcuuaucagggccccggcaucccugaacuucugucccccaugcgcgaugccccuugucuccugaagaccaaagacugguggacauacgaguuuugcuaugggagacauauucaacaguaccacauggaggauagcgaaaucaagggagaggugcuguaucucggcuacuaccagucugccuucgacugggaugacgaaaccgcuaaagccuccaagcagcaucggcugaagcgcuaucacagccaaacauacgggaauggaucuaaaugugaucuuaacggcagaccgcgggaggcugaaguucgcuuucugugcgacgagggggccggaaucuccggcgauuauauugacagaguggaugagccccucagcuguucuuacguccugaccauccggacaccucgccuuugcccccauccucugcucagacccccgccuuccgcggcuccccaggccauucugugucacccuagccugcagcccgaagaguauauggccuacgugcagcggcaagcugacuccaagcaguauggcgauaaaaucauugaggagcuccaggaccuggggccccaaguuuggucugaaaccaagagcggaguggccccucagaaaauggcgggccgcacgcuuuuccaccuguuuagagagauccauuuccacuuuuucccgucccccgaccucaccguccugacagauugguggggagggggcgggguggagaaguaccauggaccuagcucucuuggcgaccggggcggggaaggaacccccuccuaccugcucccuagcgugucuccccugcugagcgaucagucccucccgguccugugcacacuuggcgccucuccuaccaaggacgauagcaaagacuccgauuuuuggaagaugcugaaugagcccgaagaccaggcuccugggggagaggaaguucccgccgaggagcaagauccuagccccgaagcugccgacucugccuccggcgcuccgaacgauuuccagaauaacguccaggugaaagugauuagaagcccugcggaccucauccgcuuuaucgaggaacugaaagggggcacgaagaagggaaaacccaauauuggccaggagcaacccguggacgaugccgcugagguuccucagcgggaaccggagaaggaaagaggggaccccgagcgccagcgggaaauggaggaggaagaggaugaagacgaggaugaagacgaggaugaggacgaaagacagcugcuuggagaguucgaaaaggagcucgaaggcauccugcugccuucugaucgcgaccggcucagauccgaggugaaagccgggauggagcgcgaacuggagaacauuauccaagaaacagagaaggagcuugaucccgacggacugaaaaaggaaagcgagcgggauagagccaugcucgcucugaccuccacacugaauaaacuuauuaagcgccucgaagagaagcagucuccugaacuggucaaaaagcacaaaaagaaacgggugguucccaagaagccucccccgagcccucagcccaccgaggaggacccugaacacagagugcggguccgcgugaccaaacugagacucggcgggcccaaccaggaccugacaguccuugagaugaagcgggaaaauccgcaacugaaacagaucgagggccucgugaaggaacugcuggagagagagggacuuacggccgcgggcaaaaucgaaauuaagaucguucgcccuugggcugaggggaccgaagagggagcccgguggcucacagaugaagacaccagaaaccugaaggagauuuucuucaauauccuggugcccggcgccgaggaagcucagaaagagcgccaaagacagaaggaacucgaguccaacuaucggcgcgucugggggucuccuggaggcgaggggacaggcgaucuggacgaauuugauuuuuga

SEQ ID NO: 2953 - protein, 667 aa, Artificial Sequence
  OS-9__Homo_sapiens__Q13438
MAAETLLSSLLGLLLLGLLLPASLTGGVGSLNLEELSEMRYGIEILPLPVMGGQSQSSDVVIVSSKYKQRYECRLPAGAIHFQREREEETPAYQGPGIPELLSPMRDAPCLLKTKDWWTYEFCYGRHIQQYHMEDSEIKGEVLYLGYYQSAFDWDDETAKASKQHRLKRYHSQTYGNGSKCDLNGRPREAEVRFLCDEGAGISGDYIDRVDEPLSCSYVLTIRTPRLCPHPLLRPPPSAAPQAILCHPSLQPEEYMAYVQRQADSKQYGDKIIEELQDLGPQVWSETKSGVAPQKMAGASPTKDDSKDSDFWKMLNEPEDQAPGGEEVPAEEQDPSPEAADSASGAPNDFQNNVQVKVIRSPADLIRFIEELKGGTKKGKPNIGQEQPVDDAAEVPQREPEKERGDPERQREMEEEEDEDEDEDEDEDERQLLGEFEKELEGILLPSDRDRLRSEVKAGMERELENIIQETEKELDPDGLKKESERDRAMLALTSTLNKLIKRLEEKQSPELVKKHKKKRVVPKKPPPSPQPTEEDPEHRVRVRVTKLRLGGPNQDLTVLEMKRENPQLKQIEGLVKELLEREGLTAAGKIEIKIVRPWAEGTEEGARWLTDEDTRNLKEIFFNILVPGAEEAQKERQRQKELESNYRRVWGSPGGEGTGDLDEFDF

SEQ ID NO: 2954 - RNA, 2004 nt, Artificial Sequence
  OS-9__Homo_sapiens__AAB06495
auggcggcggaaacgcugcuguccaguuuguuaggacugcugcuucugggacuccuguuacccgcaagucugaccggcggugucgggagccugaaccuggaggagcugagugagaugcguuaugggaucgagauccugccguugccugucaugggagggcagagccaaucuucggacguggugauugucuccucuaaguacaaacagcgcuaugagugucgccugccagcuggagcuauucacuuccagcgugaaagggaggaggaaacaccugcuuaccaagggccugggaucccugaguuguugagcccaaugagagaugcucccugcuugcugaagacaaaggacugguggacauaugaauucuguuauggacgccacauccagcaauaccacauggaagauucagagaucaaaggugaaguccucuaucucggcuacuaccaaucagccuucgacugggaugaugaaacagccaaggccuccaagcagcaucgucuuaaacgcuaccacagccagaccuauggcaauggguccaagugcgaccuuaaugggaggccccgggaggccgagguucgguuccucugugacgagggugcagguaucucuggggacuacaucgaucgcguggacgagcccuuguccugcucuuaugugcugaccauucgcacuccucggcucugcccccacccucuccuccggcccccacccagugcugcaccacaggccauccucugucacccuucccuacagccugaggaguacauggccuacguucagaggcaagccgacucaaagcaguauggagauaaaaucauagaggagcugcaagaucuaggcccccaaguguggagugagaccaagucugggguggcaccccaaaagauggcaggugcgagcccgaccaaggaugacaguaaggacucagauuucuggaagaugcuuaaugagccagaggaccaggccccaggaggggaggaggugccggcugaggagcaggacccaagcccugaggcagcagauucagcuucuggugcucccaaugauuuucagaacaacgugcaggucaaagucauucgaagcccugcggauuugauucgauucauagaggagcugaaagguggaacaaaaaaggggaagccaaauauaggccaagagcagccuguggaugaugcugcagaagucccucagagggaaccagagaaggaaaggggugauccagaacggcagagagagauggaagaagaggaggaugaggaugaggaugaggaugaagaugaggaugaacggcaguuacugggagaauuugagaaggaacuggaagggauccugcuuccgucagaccgagaccggcuccguucggaggugaaggcuggcauggagcgggaacuggagaacaucauccaggagacagagaaagagcuggacccagaugggcugaagaaggagucagagcgggaucgggcaaugcuggcucucacauccacucucaacaaacucaucaaaagacuggaggaaaaacagaguccagagcuggugaagaagcacaagaaaaagaggguuguccccaaaaagccucccccaucaccccaaccuacagaggaggauccugagcacagaguccggguccgggucaccaagcuccgucucggaggcccuaaucaggaucugacuguccucgagaugaaacgggaaaacccacagcugaaacaaaucgaggggcuggugaaggagcugcuggagagggagggacucacagcugcagggaaaauugagaucaaaauuguccgcccaugggcugaagggacugaagagggugcacguuggcugacugaugaggacacgagaaaccucaaggagaucuucuucaauaucuuggugccgggagcugaagaggcccagaaggaacgccagcggcagaaagagcuggagagcaauuaccgccggguguggggcucuccagguggggagggcacaggggaccuggacgaauuugacuucuga

SEQ ID NO: 2955 - RNA, 2004 nt, Artificial Sequence
  derived and/or modified sequence opt1 from OS-9__Homo_sapiens__AAB06495
auggccgccgagacccugcucagcucccugcugggccuccugcugcucgggcugcugcuccccgcgagccugaccggcggggugggcucccugaaccucgaggagcugagcgagaugcgcuacgggaucgagauccugccgcuccccgucaugggcggccagucccagagcuccgacguggugaucgucagcuccaaguacaagcagcgguacgagugccgccugcccgccggggccauccacuuccagcgggagcgcgaggaggagacgcccgccuaccagggcccggggauccccgagcugcucagccccaugcgggacgcccccugccugcugaagaccaaggacugguggaccuacgaguucugcuacggccgccacauccagcaguaccacauggaggacuccgagaucaagggggaggugcucuaccugggcuacuaccagagcgcguucgacugggacgacgagaccgccaaggccuccaagcagcaccggcugaagcgcuaccacagccagacguacggcaacggguccaagugcgaccucaacggccggccgcgcgaggccgaggugcgguuccugugcgacgagggggcgggcaucagcggcgacuacaucgaccgcgucgacgagccccuguccugcagcuacgugcucaccauccggacgccccgccugugcccccacccgcugcuccggcccccgcccuccgccgcgccccaggccauccugugccaccccagccugcagcccgaggaguacauggccuacgugcagcgccaggccgacagcaagcaguacggggacaagaucaucgaggagcuccaggaccugggcccccaggucugguccgagaccaagagcgggguggccccgcagaagauggccggcgccucccccaccaaggacgacagcaaggacuccgacuucuggaagaugcugaacgagcccgaggaccaggcccccgggggcgaggaggugccggcggaggagcaggaccccagccccgaggccgccgacuccgccagcggcgcccccaacgacuuccagaacaacguccaggugaaggugauccgguccccggcggaccucauccgcuucaucgaggagcugaagggcgggaccaagaaggggaagcccaacaucggccaggagcagcccgucgacgacgccgccgaggugccgcagcgggagcccgagaaggagcgcggggaccccgagcggcagcgcgagauggaggaggaggaggacgaggacgaggacgaggacgaggacgaggacgagcgccagcugcucggcgaguucgagaaggagcuggagggcauccugcuccccagcgaccgggaccgccugcgguccgaggugaaggccgggauggagcgcgagcuggagaacaucauccaggagaccgagaaggagcucgacccggacggccugaagaaggagagcgagcgggaccgcgccaugcuggcgcucaccuccacgcugaacaagcugaucaagcggcuggaggagaagcagagccccgagcucgucaagaagcacaagaagaagcgcguggugcccaagaagcccccgcccagcccccagcccaccgaggaggacccggagcaccggguccgcgugcgggugaccaagcugcgccucgggggccccaaccaggaccugaccguccuggagaugaagcgggagaacccccagcugaagcagaucgaggggcucgugaaggagcugcuggagcgcgagggccucacggccgccggcaagaucgagaucaagaucguccggcccugggccgaggggaccgaggagggcgcgcgcuggcugaccgacgaggacacccggaaccugaaggagaucuucuucaacauccucgugccgggggccgaggaggcccagaaggagcgccagcggcagaaggagcuggaguccaacuaccgccgcguguggggcucccccggcggggagggcacgggggaccuggacgaguucgacuucuga

SEQ ID NO: 2956 - RNA, 2004 nt, Artificial Sequence
  derived and/or modified sequence opt2 from OS-9__Homo_sapiens__AAB06495
auggccgccgagacccuccucuccucccuccucggccuccuccuccucggccuccuccuccccgccucccucaccggcggcgucggcucccucaaccucgaggagcucuccgagaugcgcuacggcaucgagauccucccccuccccgucaugggcggccagucccaguccuccgacgucgucaucgucuccuccaaguacaagcagcgcuacgagugccgccuccccgccggcgccauccacuuccagcgcgagcgcgaggaggagacccccgccuaccagggccccggcauccccgagcuccucucccccaugcgcgacgcccccugccuccucaagaccaaggacugguggaccuacgaguucugcuacggccgccacauccagcaguaccacauggaggacuccgagaucaagggcgagguccucuaccucggcuacuaccaguccgccuucgacugggacgacgagaccgccaaggccuccaagcagcaccgccucaagcgcuaccacucccagaccuacggcaacggcuccaagugcgaccucaacggccgcccccgcgaggccgagguccgcuuccucugcgacgagggcgccggcaucuccggcgacuacaucgaccgcgucgacgagccccucuccugcuccuacguccucaccauccgcaccccccgccucugcccccacccccuccuccgccccccccccuccgccgccccccaggccauccucugccaccccucccuccagcccgaggaguacauggccuacguccagcgccaggccgacuccaagcaguacggcgacaagaucaucgaggagcuccaggaccucggcccccaggucugguccgagaccaaguccggcgucgccccccagaagauggccggcgccucccccaccaaggacgacuccaaggacuccgacuucuggaagaugcucaacgagcccgaggaccaggcccccggcggcgaggagguccccgccgaggagcaggaccccucccccgaggccgccgacuccgccuccggcgcccccaacgacuuccagaacaacguccaggucaaggucauccgcucccccgccgaccucauccgcuucaucgaggagcucaagggcggcaccaagaagggcaagcccaacaucggccaggagcagcccgucgacgacgccgccgaggucccccagcgcgagcccgagaaggagcgcggcgaccccgagcgccagcgcgagauggaggaggaggaggacgaggacgaggacgaggacgaggacgaggacgagcgccagcuccucggcgaguucgagaaggagcucgagggcauccuccuccccuccgaccgcgaccgccuccgcuccgaggucaaggccggcauggagcgcgagcucgagaacaucauccaggagaccgagaaggagcucgaccccgacggccucaagaaggaguccgagcgcgaccgcgccaugcucgcccucaccuccacccucaacaagcucaucaagcgccucgaggagaagcagucccccgagcucgucaagaagcacaagaagaagcgcgucguccccaagaagcccccccccuccccccagcccaccgaggaggaccccgagcaccgcguccgcguccgcgucaccaagcuccgccucggcggccccaaccaggaccucaccguccucgagaugaagcgcgagaacccccagcucaagcagaucgagggccucgucaaggagcuccucgagcgcgagggccucaccgccgccggcaagaucgagaucaagaucguccgccccugggccgagggcaccgaggagggcgcccgcuggcucaccgacgaggacacccgcaaccucaaggagaucuucuucaacauccucguccccggcgccgaggaggcccagaaggagcgccagcgccagaaggagcucgaguccaacuaccgccgcgucuggggcucccccggcggcgagggcaccggcgaccucgacgaguucgacuucuga

SEQ ID NO: 2957 - RNA, 2004 nt, Artificial Sequence
  derived and/or modified sequence opt3 from OS-9__Homo_sapiens__AAB06495
auggccgcugagacccugcucagcucccuucugggcuuguuacugcuagggcuccugcuucccgcaucucugacaggaggugugggcucauugaaccucgaagaacugagugaaaugagauacgggaucgagauucugccucucccagucaugggaggccagagccaauccucugacguugugauaguaucgucaaaguauaaacagagguacgaaugccgguuaccggccggugcgauccacuuccagcgcgagcgagaggaagagacucccgcuuaucaggggccugggauuccagaacugcuuagccccaugcgugaugccccuuguuugcugaagacgaaagacugguggaccuacgaguuuugcuauggcagacauauccaacaguaccacauggaggauagugaaauuaagggcgaggugcuauaucucggguacuaccaguccgcauucgacugggaugacgaaacagccaaagccucuaagcagcauaggcugaagcgguaucacagccaaacuuacggaaaugguuccaaaugugaucuuaacggccgcccaagagaggcagaagucagguuucugugcgacgagggggccggaaucucaggcgauuauauagaccggguggaugagcccuugaguuguagcuacguucucaccauccgcacaccucgacugugcccacauccguuacugagacccccuccaucugcugcuccccaggcgauucucugucacccuucccuucagccagaagaguauauggcauacgugcagaggcaagccgacucaaagcaguauggugauaaaaucauugaagaacugcaggacuuggggccccaagucuggagcgaaaccaagaguggaguggcuccgcagaaaauggccggcgcaucuccuacuaaggacgauuccaaggacagcgauuucuggaaaaugcuaaaugagcccgaggaccaggcuccaggcggggaagagguaccugccgaggagcaggaucccucgccagaagcggccgacucugcauccggagcucccaacgauuuucaaaauaacguucaggugaaggucauccggaguccugccgaccugauacguuucauugaggagcucaaagguggcacaaagaaagggaagccaaauaucggacaggaacagccgguggaugacgcugccgaggugccccaacgcgaaccugagaaagagagaggcgauccagaaaggcagcgggagauggaagaggaagaggacgaggacgaagaugaggacgaagaugaggacgaacgacagcugcuuggugaguuugagaaggaacuggaggggauuuugcuccccucagaucgcgacagacugaggagcgaagucaaggcaggcauggagcgggaauuagagaacaucauccaggagaccgaaaaagagcuggauccugacggacuaaagaaagaauccgagcgcgauagagccaugcucgcucugacgucuacucuuaauaaguugauuaaaaggcuggaggaaaagcaaagcccagagcucguuaagaaacacaagaaaaagcgugugguacccaaaaagccgccuccaucaccccagccuaccgaagaggaccccgaacaucgggugcgagucagagugacaaagcugaggcuuggcgggccaaaccaggaucugacuguuuuggagaugaaacgcgagaauccucagcucaagcaaauagaaggacuggugaaagaguuacuggaacgggagggucuaaccgcggcaggcaagaucgaaauuaaaaucgucagacccugggccgaggggacagaggaaggagcuagguggcucaccgacgaggauacgcgcaaccugaaggaaauauucuuuaauauucuugugccaggcgccgaggaagcacagaaggagcgacagcggcaaaaagaguuggaaaguaacuaccguagaguaugggguuccccgggaggcgagggaacuggcgaccuggacgaguucgauuuuuga

SEQ ID NO: 2958 - RNA, 2004 nt, Artificial Sequence
  derived and/or modified sequence opt4 from OS-9__Homo_sapiens__AAB06495
auggccgccgagacccugcugagcagccugcugggccugcugcugcugggccugcugcugcccgccagccugaccggcggcgugggcagccugaaccuggaggagcugagcgagaugagauacggcaucgagauccugccccugcccgugaugggcggccagagccagagcagcgacguggugaucgugagcagcaaguacaagcagagauacgagugcagacugcccgccggcgccauccacuuccagagagagagagaggaggagacccccgccuaccagggccccggcauccccgagcugcugagccccaugagagacgcccccugccugcugaagaccaaggacugguggaccuacgaguucugcuacggcagacacauccagcaguaccacauggaggacagcgagaucaagggcgaggugcuguaccugggcuacuaccagagcgccuucgacugggacgacgagaccgccaaggccagcaagcagcacagacugaagagauaccacagccagaccuacggcaacggcagcaagugcgaccugaacggcagacccagagaggccgaggugagauuccugugcgacgagggcgccggcaucagcggcgacuacaucgacagaguggacgagccccugagcugcagcuacgugcugaccaucagaacccccagacugugcccccacccccugcugagacccccccccagcgccgccccccaggccauccugugccaccccagccugcagcccgaggaguacauggccuacgugcagagacaggccgacagcaagcaguacggcgacaagaucaucgaggagcugcaggaccugggcccccagguguggagcgagaccaagagcggcguggccccccagaagauggccggcgccagccccaccaaggacgacagcaaggacagcgacuucuggaagaugcugaacgagcccgaggaccaggcccccggcggcgaggaggugcccgccgaggagcaggaccccagccccgaggccgccgacagcgccagcggcgcccccaacgacuuccagaacaacgugcaggugaaggugaucagaagccccgccgaccugaucagauucaucgaggagcugaagggcggcaccaagaagggcaagcccaacaucggccaggagcagcccguggacgacgccgccgaggugccccagagagagcccgagaaggagagaggcgaccccgagagacagagagagauggaggaggaggaggacgaggacgaggacgaggacgaggacgaggacgagagacagcugcugggcgaguucgagaaggagcuggagggcauccugcugcccagcgacagagacagacugagaagcgaggugaaggccggcauggagagagagcuggagaacaucauccaggagaccgagaaggagcuggaccccgacggccugaagaaggagagcgagagagacagagccaugcuggcccugaccagcacccugaacaagcugaucaagagacuggaggagaagcagagccccgagcuggugaagaagcacaagaagaagagaguggugcccaagaagcccccccccagcccccagcccaccgaggaggaccccgagcacagagugagagugagagugaccaagcugagacugggcggccccaaccaggaccugaccgugcuggagaugaagagagagaacccccagcugaagcagaucgagggccuggugaaggagcugcuggagagagagggccugaccgccgccggcaagaucgagaucaagaucgugagacccugggccgagggcaccgaggagggcgccagauggcugaccgacgaggacaccagaaaccugaaggagaucuucuucaacauccuggugcccggcgccgaggaggcccagaaggagagacagagacagaaggagcuggagagcaacuacagaagaguguggggcagccccggcggcgagggcaccggcgaccuggacgaguucgacuucuga

SEQ ID NO: 2959 - RNA, 2004 nt, Artificial Sequence
  derived and/or modified sequence opt5 from OS-9__Homo_sapiens__AAB06495
auggccgcugagacccugcucagcucccugcuuggccugcuccugcuugggcugcuccugcccgccucucugacaggaggcguggggagccucaaccuggaagaacuuuccgaaaugagauacggaaucgagauucugccucucccggucaugggcgggcagucucaaagcuccgacguugugaucgugucuagcaaguauaaacagcgguacgaaugccgccugcccgcgggagcuauucacuuccagagagagcgggaggaagagacgccugccuaucagggccccggcaucccugaacuucugucccccaugcgcgaugccccuugucuccugaagaccaaagacugguggacauacgaguuuugcuaugggagacauauucaacaguaccacauggaggauagcgaaaucaagggagagguccuguaucucggcuacuaccagucugcuuucgacugggaugacgaaaccgccaaggcuuccaaacagcaucggcugaagcgcuaucacagccaaacauacgggaauggaucuaaaugugaucuuaacggcagaccgcgggaggccgaagugcgcuuucugugcgacgagggggcgggaaucuccggcgauuauauugacagaguugaugagccccucagcuguucuuacgugcugaccauccggacaccucgccuuugcccccauccucugcucagacccccgccuuccgccgcuccccaggccauucugugucacccuagccugcagcccgaagaguauauggcuuacguccagcggcaagccgacuccaagcaguauggcgauaaaaucauugaagaacuccaggaccuggggccccaaguguggucugaaaccaagagcggaguugcgccucagaaaauggccggcgcuuccccgacgaaggacgauagcaaggacucugauuucuggaaaaugcuuaaugagcccgaggaccaggccccugggggagaagaggugcccgcugaggagcaggauccuucccccgaagccgccgacagcgcuucuggcgcgccgaacgauuuucaaaauaacguccaggugaaggugauccgcagcccugccgaccugauuagauucaucgaggagcucaaagggggaaccaagaaaggcaagcccaauaucggccaggaacagccugucgaugacgcugccgagguuccccaacgggaaccugagaaagagagaggggaucccgaacgccagcgggagauggaagaggaagaggacgaggacgaagaugaggacgaagaugaggacgaaagacagcugcuuggagaguuugagaaggaacuggagggcauucuccugccguccgaucgcgaccggcugagaucugaagugaaggccgggauggagcgcgaacucgagaacaucauucaggagacagaaaaagagcuggauccugacggacuuaagaaagaaagcgagcgggauagagcuaugcuggcccucaccuccacacugaauaagcugaucaaacgccuugaggaaaagcaaagccccgagcucgugaagaaacacaagaaaaagcgggucgugcccaaaaagccuccgcccucuccucagcccaccgaagaggacccugaacauagaguucgcgugcgggucacgaagcugagacugggcgggcccaaccaggaucucacagugcuggagaugaaacgggagaauccucagcuuaagcaaauugaaggccugguuaaagagcuccuggaacgcgagggacugaccgcggcuggcaagaucgaaaucaaaauugugagacccugggccgaggggacagaggaaggagcccgguggcuuaccgacgaggauaccagaaaccucaaggaaaucuucuuuaauauucuggucccgggcgcugaggaagcccagaaggagcgccagcggcaaaaagagcuggaauccaacuacagacgcgugugggggagcccuggaggcgaggggacaggcgaccucgacgaguucgauuuuuga

SEQ ID NO: 2960 - protein, 100 aa, Artificial Sequence
  osteocalcin__Homo_sapiens__P02818
MRALTLLALLALAALCIAGQAGAKPSGAESSKGAAFVSKQEGSEVVKRPRRYLYQWLGAPVPYPDPLEPRREVCELNPDCDELADHIGFQEAYRRFYGPV

SEQ ID NO: 2961 - RNA, 303 nt, Artificial Sequence
  osteocalcin__Homo_sapiens__AAI13433
augagagcccucacacuccucgcccuauuggcccuggccgcacuuugcaucgcuggccaggcaggugcgaagcccagcggugcagaguccagcaaaggugcagccuuuguguccaagcaggagggcagcgagguagugaagagacccaggcgcuaccuguaucaauggcugggagccccaguccccuacccggauccccuggagcccaggagggaggugugugagcucaauccggacugugacgaguuggcugaccacaucggcuuucaggaggccuaucggcgcuucuacggcccggucuag

SEQ ID NO: 2962 - RNA, 303 nt, Artificial Sequence
  derived and/or modified sequence opt1 from osteocalcin__Homo_sapiens__AAI13433
augcgcgcccugacccuccuggcccugcucgcgcuggccgcccugugcaucgccggccaggccggggcgaagcccagcggcgccgaguccagcaagggggccgccuucguguccaagcaggagggcagcgaggucgugaagcggccgcgccgguaccucuaccaguggcugggggcgcccgugcccuaccccgacccgcuggagccccgccgggaggucugcgagcucaaccccgacugcgacgagcuggccgaccacaucggcuuccaggaggccuaccgccgguucuacggccccguguga

SEQ ID NO: 2963 - RNA, 303 nt, Artificial Sequence
  derived and/or modified sequence opt2 from osteocalcin__Homo_sapiens__AAI13433
augcgcgcccucacccuccucgcccuccucgcccucgccgcccucugcaucgccggccaggccggcgccaagcccuccggcgccgaguccuccaagggcgccgccuucgucuccaagcaggagggcuccgaggucgucaagcgcccccgccgcuaccucuaccaguggcucggcgcccccguccccuaccccgacccccucgagccccgccgcgaggucugcgagcucaaccccgacugcgacgagcucgccgaccacaucggcuuccaggaggccuaccgccgcuucuacggccccgucuga

SEQ ID NO: 2964 - RNA, 303 nt, Artificial Sequence
  derived and/or modified sequence opt3 from osteocalcin__Homo_sapiens__AAI13433
augagagcccugacccuccuugcucuguuggcauuagccgcgcugugcaucgcuggccaggccggggcaaagcccagcggagccgaguccucuaaaggugcugcauucgugucaaagcaagaaggcagugaggucguuaaaaggccucggcgcuaccuauaucaguggcucggggccccagugccguaccccgacccucuggaaccacgacgugagguaugugaacuuaaccccgauugcgacgagcuggcugaucacauuggauuucaggaggccuauagaagguucuacggcccuguguga

SEQ ID NO: 2965 - RNA, 303 nt, Artificial Sequence
  derived and/or modified sequence opt4 from osteocalcin__Homo_sapiens__AAI13433
augagagcccugacccugcuggcccugcuggcccuggccgcccugugcaucgccggccaggccggcgccaagcccagcggcgccgagagcagcaagggcgccgccuucgugagcaagcaggagggcagcgagguggugaagagacccagaagauaccuguaccaguggcugggcgcccccgugcccuaccccgacccccuggagcccagaagagaggugugcgagcugaaccccgacugcgacgagcuggccgaccacaucggcuuccaggaggccuacagaagauucuacggccccguguga

SEQ ID NO: 2966 - RNA, 303 nt, Artificial Sequence
  derived and/or modified sequence opt5 from osteocalcin__Homo_sapiens__AAI13433
augagagcccugacccuccuggcccuucuggcucucgcggcucugugcaucgccggccaggccggggcuaagcccagcggagccgaguccucuaaaggcgcugccuucgugagcaagcaagaaggguccgaggucguuaaacggccucgcagauaccuuuaucaguggcugggagcgccggugcccuacccugacccccucgaaccucggcgcgaggugugugaacugaaccccgauugcgacgagcuggccgaucacauuggcuuucaggaggcuuauagacgguucuacgggccugucuga

SEQ ID NO: 2967 - protein, 314 aa, Artificial Sequence
  osteopontin__Homo_sapiens__A0A024RDE2
MRIAVICFCLLGITCAIPVKQADSGSSEEKQLYNKYPDAVATWLNPDPSQKQNLLAPQNAVSSEETNDFKQETLPSKSNESHDHMDDMDDEDDDDHVDSQDSIDSNDSDDVDDTDDSHQSDESHHSDESDELVTDFPTDLPATEVFTPVVPTVDTYDGRGDSVVYGLRSKSKKFRRPDIQYPDATDEDITSHMESEELNGAYKAIPVAQDLNAPSDWDSRGKDSYETSQLDDQSAETHSHKQSRLYKRKANDESNEHSDVIDSQELSKVSREFHSHEFHSHEDMLVVDPKSKEEDKHLKFRISHELDSASSEVN

SEQ ID NO: 2968 - RNA, 945 nt, Artificial Sequence
  osteopontin__Homo_sapiens__EAX06008
augagaauugcagugauuugcuuuugccuccuaggcaucaccugugccauaccaguuaaacaggcugauucuggaaguucugaggaaaagcagcuuuacaacaaauacccagaugcuguggccacauggcuaaacccugacccaucucagaagcagaaucuccuagccccacagaaugcuguguccucugaagaaaccaaugacuuuaaacaagagacccuuccaaguaaguccaacgaaagccaugaccacauggaugauauggaugaugaagaugaugaugaccauguggacagccaggacuccauugacucgaacgacucugaugauguagaugacacugaugauucucaccagucugaugagucucaccauucugaugaaucugaugaacuggucacugauuuucccacggaccugccagcaaccgaaguuuucacuccaguuguccccacaguagacacauaugauggccgaggugauagugugguuuauggacugaggucaaaaucuaagaaguuucgcagaccugacauccaguacccugaugcuacagacgaggacaucaccucacacauggaaagcgaggaguugaauggugcauacaaggccauccccguugcccaggaccugaacgcgccuucugauugggacagccgugggaaggacaguuaugaaacgagucagcuggaugaccagagugcugaaacccacagccacaagcaguccagauuauauaagcggaaagccaaugaugagagcaaugagcauuccgaugugauugauagucaggaacuuuccaaagucagccgugaauuccacagccaugaauuucacagccaugaagauaugcugguuguagaccccaaaaguaaggaagaagauaaacaccugaaauuucguauuucucaugaauuagauagugcaucuucugaggucaauuaa

SEQ ID NO: 2969 - RNA, 945 nt, Artificial Sequence
  derived and/or modified sequence opt1 from osteopontin__Homo_sapiens__EAX06008
augcgcaucgccgugaucugcuucugccugcucggcaucacgugcgccauccccgucaagcaggcggacagcggguccagcgaggagaagcagcuguacaacaaguacccggacgccguggccaccuggcugaaccccgaccccucccagaagcagaaccuccuggcgccccagaacgccgugagcuccgaggagaccaacgacuucaagcaggagacccugccgagcaaguccaacgagagccacgaccacauggacgacauggacgacgaggacgacgacgaccacgucgacucccaggacagcaucgacuccaacgacagcgacgacguggacgacaccgacgacucccaccagagcgacgagucccaccacagcgacgaguccgacgagcucgugaccgacuuccccacggaccugcccgccaccgaggucuucacccccguggugccgaccgucgacacguacgacggccgcggggacagcgugguguacggccugcgguccaagagcaagaaguuccggcgccccgacauccaguaccccgacgccaccgacgaggacaucaccagccacauggaguccgaggagcucaacggggccuacaaggccauccccgucgcgcaggaccugaacgccccgagcgacugggacucccggggcaaggacagcuacgagaccucccagcuggacgaccagagcgccgagacgcacucccacaagcagagccgccucuacaagcggaaggccaacgacgaguccaacgagcacagcgacgugaucgacucccaggagcugagcaaggugucccgcgaguuccacagccacgaguuccacucccacgaggacaugcuggucguggaccccaagagcaaggaggaggacaagcaccucaaguuccggaucucccacgagcuggacagcgccuccagcgaggugaacuga

SEQ ID NO: 2970 - RNA, 945 nt, Artificial Sequence
  derived and/or modified sequence opt2 from osteopontin__Homo_sapiens__EAX06008
augcgcaucgccgucaucugcuucugccuccucggcaucaccugcgccauccccgucaagcaggccgacuccggcuccuccgaggagaagcagcucuacaacaaguaccccgacgccgucgccaccuggcucaaccccgaccccucccagaagcagaaccuccucgccccccagaacgccgucuccuccgaggagaccaacgacuucaagcaggagacccuccccuccaaguccaacgagucccacgaccacauggacgacauggacgacgaggacgacgacgaccacgucgacucccaggacuccaucgacuccaacgacuccgacgacgucgacgacaccgacgacucccaccaguccgacgagucccaccacuccgacgaguccgacgagcucgucaccgacuuccccaccgaccuccccgccaccgaggucuucacccccgucguccccaccgucgacaccuacgacggccgcggcgacuccgucgucuacggccuccgcuccaaguccaagaaguuccgccgccccgacauccaguaccccgacgccaccgacgaggacaucaccucccacauggaguccgaggagcucaacggcgccuacaaggccauccccgucgcccaggaccucaacgcccccuccgacugggacucccgcggcaaggacuccuacgagaccucccagcucgacgaccaguccgccgagacccacucccacaagcagucccgccucuacaagcgcaaggccaacgacgaguccaacgagcacuccgacgucaucgacucccaggagcucuccaaggucucccgcgaguuccacucccacgaguuccacucccacgaggacaugcucgucgucgaccccaaguccaaggaggaggacaagcaccucaaguuccgcaucucccacgagcucgacuccgccuccuccgaggucaacuga

SEQ ID NO: 2971 - RNA, 945 nt, Artificial Sequence
  derived and/or modified sequence opt3 from osteopontin__Homo_sapiens__EAX06008
augagaaucgccgugauuugcuucugucugcucggcauaaccugcgcuauccccgucaagcaggcagacagcggguccucugaggaaaaacaacuuuacaacaaguauccugaugccguugcgacauggcugaauccagacccgucacagaaacagaacuuguuagcuccccagaaugccgugaguagcgaggaaacuaacgauuuuaagcaagagacgcugccuuccaaaucuaaugaaucgcacgaccauauggaugacauggaugacgaggaugacgaugaccacguagauucacaggacagcauugacaguaacgauuccgacgauguggacgauaccgacgauucucaucagagcgacgagucccaccauucagaugaaagugacgagcuagucacagauuucccaacugaccuccccgcaaccgaaguguuuacaccuguugugccaaccgucgacacuuacgauggaaggggugacagcgugguauauggccugcggucuaaguccaagaaauuccgccgacccgauauccaguacccugacgccacagaugaggacauuaccucacacauggagagcgaggaacuuaauggggcuuauaaggcaaucccaguugcccaagaucugaacgcuccgagugacugggauucucguggaaaagacuccuacgaaacgagccaguuggaugaccagucggccgagacucacucucauaagcaguccagacucuauaaaaggaaggcgaaugaugaaucaaacgagcacagugacgugauagacagccaagagcuguccaaggucucucgggaauuucauagccacgaguuccacucacaugaagauaugcuggugguggaccccaaaaguaaggaggaagauaaacaccucaaguuucgcaucucccaugaguuagacagcgcaucuucagaggucaauuga

SEQ ID NO: 2972 - RNA, 945 nt, Artificial Sequence
  derived and/or modified sequence opt4 from osteopontin__Homo_sapiens__EAX06008
augagaaucgccgugaucugcuucugccugcugggcaucaccugcgccauccccgugaagcaggccgacagcggcagcagcgaggagaagcagcuguacaacaaguaccccgacgccguggccaccuggcugaaccccgaccccagccagaagcagaaccugcuggccccccagaacgccgugagcagcgaggagaccaacgacuucaagcaggagacccugcccagcaagagcaacgagagccacgaccacauggacgacauggacgacgaggacgacgacgaccacguggacagccaggacagcaucgacagcaacgacagcgacgacguggacgacaccgacgacagccaccagagcgacgagagccaccacagcgacgagagcgacgagcuggugaccgacuuccccaccgaccugcccgccaccgagguguucacccccguggugcccaccguggacaccuacgacggcagaggcgacagcgugguguacggccugagaagcaagagcaagaaguucagaagacccgacauccaguaccccgacgccaccgacgaggacaucaccagccacauggagagcgaggagcugaacggcgccuacaaggccauccccguggcccaggaccugaacgcccccagcgacugggacagcagaggcaaggacagcuacgagaccagccagcuggacgaccagagcgccgagacccacagccacaagcagagcagacuguacaagagaaaggccaacgacgagagcaacgagcacagcgacgugaucgacagccaggagcugagcaaggugagcagagaguuccacagccacgaguuccacagccacgaggacaugcuggugguggaccccaagagcaaggaggaggacaagcaccugaaguucagaaucagccacgagcuggacagcgccagcagcgaggugaacuga

SEQ ID NO: 2973 - RNA, 945 nt, Artificial Sequence
  derived and/or modified sequence opt5 from osteopontin__Homo_sapiens__EAX06008
augagaaucgccgugauuugcuucugucugcucggcauuaccugcgcuauccccgucaagcaggccgacagcggguccucugaggaaaaacaacuguacaacaaguauccugaugcgguugcuacauggcuuaauccggaccccagccagaaacagaaccugcucgccccucagaaugccguguccucugaggaaacgaacgauuuuaagcaagagacccugcccagcaaauccaaugaaucucacgaccauauggaugacauggaugacgaggaugacgaugaccacguggauagccaggacuccaucgacagcaacgauucugacgaugucgacgauacagacgauucccaucagagcgacgagucucaccauuccgaugaaagcgacgagcuugugaccgauuucccuacagaccugcccgcuaccgaaguuuuuacaccuguggucccgaccguggacacguacgauggacggggcgacucuguuguguaugggcuccgcuccaagagcaagaaauucagacggcccgauauucaguacccugacgccaccgaugaggacaucacaucccacauggagucugaggaacugaauggagcuuauaaggccauccccgucgcgcaagaucugaacgccccuagcgacugggauucccgcggcaaagacagcuacgaaaccucucagcucgaugaccaguccgcugagacacacagccauaagcagucuagacuguauaaacggaaggccaaugaugaaagcaacgagcacuccgacgugauugacucucaagagcuuagcaaggugucccgcgaauuucauagccacgaguuccacucucaugaagauaugcuggucguugaccccaaauccaaggaggaagauaaacaccucaaguuuagaaucagccaugagcuggacucugcuuccagcgaggugaauuga

SEQ ID NO: 2974 - protein, 300 aa, Artificial Sequence
  osteopontin__Homo_sapiens__A0A024RDE6
MRIAVICFCLLGITCAIPVKQADSGSSEEKQLYNKYPDAVATWLNPDPSQKQNLLAPQTLPSKSNESHDHMDDMDDEDDDDHVDSQDSIDSNDSDDVDDTDDSHQSDESHHSDESDELVTDFPTDLPATEVFTPVVPTVDTYDGRGDSVVYGLRSKSKKFRRPDIQYPDATDEDITSHMESEELNGAYKAIPVAQDLNAPSDWDSRGKDSYETSQLDDQSAETHSHKQSRLYKRKANDESNEHSDVIDSQELSKVSREFHSHEFHSHEDMLVVDPKSKEEDKHLKFRISHELDSASSEVN

SEQ ID NO: 2975 - RNA, 903 nt, Artificial Sequence
  osteopontin__Homo_sapiens__EAX06009
augagaauugcagugauuugcuuuugccuccuaggcaucaccugugccauaccaguuaaacaggcugauucuggaaguucugaggaaaagcagcuuuacaacaaauacccagaugcuguggccacauggcuaaacccugacccaucucagaagcagaaucuccuagccccacagacccuuccaaguaaguccaacgaaagccaugaccacauggaugauauggaugaugaagaugaugaugaccauguggacagccaggacuccauugacucgaacgacucugaugauguagaugacacugaugauucucaccagucugaugagucucaccauucugaugaaucugaugaacuggucacugauuuucccacggaccugccagcaaccgaaguuuucacuccaguuguccccacaguagacacauaugauggccgaggugauagugugguuuauggacugaggucaaaaucuaagaaguuucgcagaccugacauccaguacccugaugcuacagacgaggacaucaccucacacauggaaagcgaggaguugaauggugcauacaaggccauccccguugcccaggaccugaacgcgccuucugauugggacagccgugggaaggacaguuaugaaacgagucagcuggaugaccagagugcugaaacccacagccacaagcaguccagauuauauaagcggaaagccaaugaugagagcaaugagcauuccgaugugauugauagucaggaacuuuccaaagucagccgugaauuccacagccaugaauuucacagccaugaagauaugcugguuguagaccccaaaaguaaggaagaagauaaacaccugaaauuucguauuucucaugaauuagauagugcaucuucugaggucaauuaa

SEQ ID NO: 2976 - RNA, 903 nt, Artificial Sequence
  derived and/or modified sequence opt1 from osteopontin__Homo_sapiens__EAX06009
augcgcaucgccgugaucugcuucugccugcucggcaucacgugcgccauccccgucaagcaggcggacagcggguccagcgaggagaagcagcuguacaacaaguacccggacgccguggccaccuggcugaaccccgaccccucccagaagcagaaccuccuggcgccccagacccugccgagcaaguccaacgagagccacgaccacauggacgacauggacgacgaggacgacgacgaccacguggacucccaggacagcaucgacuccaacgacagcgacgacgucgacgacaccgacgacucccaccagagcgacgagucccaccacagcgacgaguccgacgagcucgugaccgacuuccccaccgaccugcccgccacggagguguucacccccgucgugccgaccguggacaccuacgacggccgcggggacagcgucguguacggccugcgguccaagagcaagaaguuccggcgccccgacauccaguaccccgacgccacggacgaggacaucaccucccacauggagagcgaggagcucaacggggccuacaaggccauccccguggcccaggaccugaacgcgccgagcgacugggacucccggggcaaggacagcuacgagaccucccagcuggacgaccagagcgccgagacccacucccacaagcagagccgccucuacaagcggaaggccaacgacgaguccaacgagcacagcgacgucaucgacucccaggagcugagcaaggugucccgcgaguuccacagccacgaguuccacucccacgaggacaugcugguggucgaccccaagagcaaggaggaggacaagcaccucaaguuccggaucucccacgagcuggacagcgccuccagcgaggugaacuga

SEQ ID NO: 2977 - RNA, 903 nt, Artificial Sequence
  derived and/or modified sequence opt2 from osteopontin__Homo_sapiens__EAX06009
augcgcaucgccgucaucugcuucugccuccucggcaucaccugcgccauccccgucaagcaggccgacuccggcuccuccgaggagaagcagcucuacaacaaguaccccgacgccgucgccaccuggcucaaccccgaccccucccagaagcagaaccuccucgccccccagacccuccccuccaaguccaacgagucccacgaccacauggacgacauggacgacgaggacgacgacgaccacgucgacucccaggacuccaucgacuccaacgacuccgacgacgucgacgacaccgacgacucccaccaguccgacgagucccaccacuccgacgaguccgacgagcucgucaccgacuuccccaccgaccuccccgccaccgaggucuucacccccgucguccccaccgucgacaccuacgacggccgcggcgacuccgucgucuacggccuccgcuccaaguccaagaaguuccgccgccccgacauccaguaccccgacgccaccgacgaggacaucaccucccacauggaguccgaggagcucaacggcgccuacaaggccauccccgucgcccaggaccucaacgcccccuccgacugggacucccgcggcaaggacuccuacgagaccucccagcucgacgaccaguccgccgagacccacucccacaagcagucccgccucuacaagcgcaaggccaacgacgaguccaacgagcacuccgacgucaucgacucccaggagcucuccaaggucucccgcgaguuccacucccacgaguuccacucccacgaggacaugcucgucgucgaccccaaguccaaggaggaggacaagcaccucaaguuccgcaucucccacgagcucgacuccgccuccuccgaggucaacuga

SEQ ID NO: 2978 - RNA, 903 nt, Artificial Sequence
  derived and/or modified sequence opt3 from osteopontin__Homo_sapiens__EAX06009
augagaaucgccgugauuugcuucugucugcucggcauaaccugcgcuauccccgucaagcaggcagacagcggguccucugaggaaaaacaacuuuacaacaaguauccugaugccguugcgacauggcugaauccagacccgucacagaaacagaacuuguuagcuccccagacucugccuaguaagagcaaugagucccacgaucauauggacgauauggacgaugaagacgaugacgaucacguggacucucaagauucgauugacucaaacgacagcgaugacguagaugacacggaugacagucaucaguccgaugagucucaccauagcgacgaauccgaugagcuagugaccgacuuuccaacagaucuccccgccacugaggucuucaccccugugguuccaacaguggacaccuacgacggaaggggugauucagucguguauggccugcggaguaaaagcaagaaguuucgccgacccgacauccaguacccugaugcaacugacgaagauauuacaucucacauggaguccgaagaacuuaauggggccuauaaagcuaucccaguagcacaggaccugaacgccccgucagauugggacagccguggaaaggauaguuacgagaccucucaauuggacgaucaguccgcugaaacgcacagccauaaacagucgagacucuauaagaggaaagccaaugacgagucuaacgaacacuccgauguuauagacucacaggagcugaguaaggugagccgggaguuccauucccacgaguuucacucucaugaggacaugcuggucguggaucccaagagcaaagaagaggacaagcaccucaaauuccgcaucucacaugaauuagauagugcguccagcgaggugaauuga

SEQ ID NO: 2979 - RNA, 903 nt, Artificial Sequence
  derived and/or modified sequence opt4 from osteopontin__Homo_sapiens__EAX06009
augagaaucgccgugaucugcuucugccugcugggcaucaccugcgccauccccgugaagcaggccgacagcggcagcagcgaggagaagcagcuguacaacaaguaccccgacgccguggccaccuggcugaaccccgaccccagccagaagcagaaccugcuggccccccagacccugcccagcaagagcaacgagagccacgaccacauggacgacauggacgacgaggacgacgacgaccacguggacagccaggacagcaucgacagcaacgacagcgacgacguggacgacaccgacgacagccaccagagcgacgagagccaccacagcgacgagagcgacgagcuggugaccgacuuccccaccgaccugcccgccaccgagguguucacccccguggugcccaccguggacaccuacgacggcagaggcgacagcgugguguacggccugagaagcaagagcaagaaguucagaagacccgacauccaguaccccgacgccaccgacgaggacaucaccagccacauggagagcgaggagcugaacggcgccuacaaggccauccccguggcccaggaccugaacgcccccagcgacugggacagcagaggcaaggacagcuacgagaccagccagcuggacgaccagagcgccgagacccacagccacaagcagagcagacuguacaagagaaaggccaacgacgagagcaacgagcacagcgacgugaucgacagccaggagcugagcaaggugagcagagaguuccacagccacgaguuccacagccacgaggacaugcuggugguggaccccaagagcaaggaggaggacaagcaccugaaguucagaaucagccacgagcuggacagcgccagcagcgaggugaacuga

SEQ ID NO: 2980 - RNA, 903 nt, Artificial Sequence
  derived and/or modified sequence opt5 from osteopontin__Homo_sapiens__EAX06009
augagaaucgccgugauuugcuucugucugcucggcauuaccugcgcuauccccgucaagcaggccgacagcggguccucugaggaaaaacaacuguacaacaaguauccugaugcgguugcuacauggcuuaauccggaccccagccagaaacagaaccugcucgccccucagacgcugcccuccaagucuaaugagagccacgaucauauggacgauauggacgaugaagacgaugacgaucacguggacucccaagauucuaucgacagcaacgacuccgaugacguggaugacaccgaugacagccaucagucugaugagucccaccauagcgacgaaucugaugagcuugucacagacuuuccuaccgaucugcccgccacagagguguucaccccuguugugccgacagucgacaccuacgacggacggggcgauuccgugguuuaugggcuccgcagcaaaucuaagaaguuuagacggcccgacauucaguacccugaugcuacggacgaagauaucaccucccacauggagagcgaagaacugaauggagccuauaaagcuauccccguggcccaggaccugaacgcgccuuccgauugggacucucgcggcaaggauagcuacgagacaucccaacucgacgaucagagcgccgaaacccacucucauaaacaguccagacuguauaagcggaaagcuaaugacgagagcaacgaacacucugaugucauugacagccaggagcuuuccaaggugucucgcgaguuccauagccacgaguuucacucccaugaggacaugcugguggucgaucccaagagcaaagaagaggacaagcaccucaaauucagaaucucucaugaacuggauuccgccagcucugagguuaauuga

SEQ ID NO: 2981 - protein, 287 aa, Artificial Sequence
  osteopontin__Homo_sapiens__A0A024RDJ0
MRIAVICFCLLGITCAIPVKQADSGSSEEKQNAVSSEETNDFKQETLPSKSNESHDHMDDMDDEDDDDHVDSQDSIDSNDSDDVDDTDDSHQSDESHHSDESDELVTDFPTDLPATEVFTPVVPTVDTYDGRGDSVVYGLRSKSKKFRRPDIQYPDATDEDITSHMESEELNGAYKAIPVAQDLNAPSDWDSRGKDSYETSQLDDQSAETHSHKQSRLYKRKANDESNEHSDVIDSQELSKVSREFHSHEFHSHEDMLVVDPKSKEEDKHLKFRISHELDSASSEVN

SEQ ID NO: 2982 - RNA, 864 nt, Artificial Sequence
  osteopontin__Homo_sapiens__EAX06010
augagaauugcagugauuugcuuuugccuccuaggcaucaccugugccauaccaguuaaacaggcugauucuggaaguucugaggaaaagcagaaugcuguguccucugaagaaaccaaugacuuuaaacaagagacccuuccaaguaaguccaacgaaagccaugaccacauggaugauauggaugaugaagaugaugaugaccauguggacagccaggacuccauugacucgaacgacucugaugauguagaugacacugaugauucucaccagucugaugagucucaccauucugaugaaucugaugaacuggucacugauuuucccacggaccugccagcaaccgaaguuuucacuccaguuguccccacaguagacacauaugauggccgaggugauagugugguuuauggacugaggucaaaaucuaagaaguuucgcagaccugacauccaguacccugaugcuacagacgaggacaucaccucacacauggaaagcgaggaguugaauggugcauacaaggccauccccguugcccaggaccugaacgcgccuucugauugggacagccgugggaaggacaguuaugaaacgagucagcuggaugaccagagugcugaaacccacagccacaagcaguccagauuauauaagcggaaagccaaugaugagagcaaugagcauuccgaugugauugauagucaggaacuuuccaaagucagccgugaauuccacagccaugaauuucacagccaugaagauaugcugguuguagaccccaaaaguaaggaagaagauaaacaccugaaauuucguauuucucaugaauuagauagugcaucuucugaggucaauuaa

SEQ ID NO: 2983 - RNA, 864 nt, Artificial Sequence
  derived and/or modified sequence opt1 from osteopontin__Homo_sapiens__EAX06010
augcgcaucgccgugaucugcuucugccugcucggcaucacgugcgccauccccgucaagcaggcggacagcggguccagcgaggagaagcagaacgccguguccagcgaggagaccaacgacuucaagcaggagacccugccguccaagagcaacgagucccacgaccacauggacgacauggacgacgaggacgacgacgaccacguggacagccaggacuccaucgacagcaacgacuccgacgacgucgacgacaccgacgacagccaccaguccgacgagagccaccacuccgacgagagcgacgagcuggugaccgacuuccccaccgaccuccccgccacggagguguucacccccgucgugccgaccguggacaccuacgacggccgcggggacuccgucguguacggccugcggagcaaguccaagaaguuccggcgccccgacauccaguaccccgacgccacggacgaggacaucaccagccacauggagagcgaggagcugaacggggccuacaaggcgauccccguggcccaggaccucaacgccccguccgacugggacagccggggcaaggacuccuacgagaccagccagcuggacgaccaguccgccgagacccacagccacaagcagucccgccuguacaagcggaaggcgaacgacgagagcaacgagcacuccgacgucaucgacagccaggagcucuccaaggugagccgcgaguuccacucccacgaguuccacagccacgaggacaugcugguggucgaccccaaguccaaggaggaggacaagcaccugaaguuccggaucagccacgagcucgacuccgccagcuccgaggugaacuga

SEQ ID NO: 2984 - RNA, 864 nt, Artificial Sequence
  derived and/or modified sequence opt2 from osteopontin__Homo_sapiens__EAX06010
augcgcaucgccgucaucugcuucugccuccucggcaucaccugcgccauccccgucaagcaggccgacuccggcuccuccgaggagaagcagaacgccgucuccuccgaggagaccaacgacuucaagcaggagacccuccccuccaaguccaacgagucccacgaccacauggacgacauggacgacgaggacgacgacgaccacgucgacucccaggacuccaucgacuccaacgacuccgacgacgucgacgacaccgacgacucccaccaguccgacgagucccaccacuccgacgaguccgacgagcucgucaccgacuuccccaccgaccuccccgccaccgaggucuucacccccgucguccccaccgucgacaccuacgacggccgcggcgacuccgucgucuacggccuccgcuccaaguccaagaaguuccgccgccccgacauccaguaccccgacgccaccgacgaggacaucaccucccacauggaguccgaggagcucaacggcgccuacaaggccauccccgucgcccaggaccucaacgcccccuccgacugggacucccgcggcaaggacuccuacgagaccucccagcucgacgaccaguccgccgagacccacucccacaagcagucccgccucuacaagcgcaaggccaacgacgaguccaacgagcacuccgacgucaucgacucccaggagcucuccaaggucucccgcgaguuccacucccacgaguuccacucccacgaggacaugcucgucgucgaccccaaguccaaggaggaggacaagcaccucaaguuccgcaucucccacgagcucgacuccgccuccuccgaggucaacuga

SEQ ID NO: 2985 - RNA, 864 nt, Artificial Sequence
  derived and/or modified sequence opt3 from osteopontin__Homo_sapiens__EAX06010
augagaaucgccgugauuugcuucugucugcucggcauaaccugcgcuauccccgucaagcaggcagacagcggguccucugaggaaaaacaaaacgccguuucaagugaggaaacaaaugauuuuaagcaggagacucuuccuagcaaauccaacgaaucucacgaccauauggaugacauggaugacgaggaugacgaugaccacguggauucgcaggacucaauugauagcaaugacagugacgauguagacgauacggacgauucccaucagucugacgagagccaccauuccgaugaaucagacgagcuggugaccgauuucccaacagacuugccggcgacugaagucuuuacccccgugguuccuacaguggauaccuacgacggaaggggugacagugucguguauggcuuacggagcaagucuaaaaaguuccgccgaccagauauccaauaccccgacgcuacugaugaggacauuacaucccacauggagucagaggaacugaacggggccuauaaggcaaucccuguagcccaggaucuaaaugcuccaagcgacugggauagucguggaaaagacucuuacgaaaccucccagcucgaugaccagagcgcagagacgcacucgcauaagcaaucuagacuguauaaaaggaaggccaacgaugaauccaaugagcacucagacguuauagauagucaggagcuuagcaaagugucccgggaauuucauucucacgaguuccacagccaugaagacaugcuggucguggaccccaagucaaaggaggaagauaaacacuugaaguuucgcaucagucaugagcucgacuccgcuagcucugaggugaacuga

SEQ ID NO: 2986 - RNA, 864 nt, Artificial Sequence
  derived and/or modified sequence opt4 from osteopontin__Homo_sapiens__EAX06010
augagaaucgccgugaucugcuucugccugcugggcaucaccugcgccauccccgugaagcaggccgacagcggcagcagcgaggagaagcagaacgccgugagcagcgaggagaccaacgacuucaagcaggagacccugcccagcaagagcaacgagagccacgaccacauggacgacauggacgacgaggacgacgacgaccacguggacagccaggacagcaucgacagcaacgacagcgacgacguggacgacaccgacgacagccaccagagcgacgagagccaccacagcgacgagagcgacgagcuggugaccgacuuccccaccgaccugcccgccaccgagguguucacccccguggugcccaccguggacaccuacgacggcagaggcgacagcgugguguacggccugagaagcaagagcaagaaguucagaagacccgacauccaguaccccgacgccaccgacgaggacaucaccagccacauggagagcgaggagcugaacggcgccuacaaggccauccccguggcccaggaccugaacgcccccagcgacugggacagcagaggcaaggacagcuacgagaccagccagcuggacgaccagagcgccgagacccacagccacaagcagagcagacuguacaagagaaaggccaacgacgagagcaacgagcacagcgacgugaucgacagccaggagcugagcaaggugagcagagaguuccacagccacgaguuccacagccacgaggacaugcuggugguggaccccaagagcaaggaggaggacaagcaccugaaguucagaaucagccacgagcuggacagcgccagcagcgaggugaacuga

SEQ ID NO: 2987 - RNA, 864 nt, Artificial Sequence
  derived and/or modified sequence opt5 from osteopontin__Homo_sapiens__EAX06010
augagaaucgccgugauuugcuucugucugcucggcauuaccugcgcuauccccgucaagcaggccgacagcggguccucugaggaaaaacaaaacgcgguuagcuccgaggaaacaaaugauuuuaagcaggagacgcugccuucuaaaagcaacgaaucccacgaccauauggaugacauggaugacgaggaugacgaugaccacguggauucucaggacagcaucgauuccaaugacagcgacgauguggacgauaccgacgauucucaucaguccgacgagagccaccauucugaugaauccgacgagcuugucacagauuucccgaccgaccugcccgcuacagaaguguuuaccccuguugugcccacagucgauaccuacgacggacggggcgacagcgugguuuaugggcuccgcucuaaguccaaaaaguucagacggccugauauucaauaccccgacgccacggaugaggacaucaccagccacauggaguccgaggaacugaacggagccuauaaggcuaucccuguggcccaggaucuuaaugcuccgucugacugggauagccgcggcaaagacuccuacgaaacaagccagcuggaugaccagucugccgagacccacucccauaagcaaagcagacucuauaaacggaaggcgaacgaugaaucuaaugagcacagcgacgucauugauucccaggagcugucuaaagugagccgcgaauuucauucccacgaguuccacagccaugaagacaugcugguggucgaccccaagucuaaggaggaagauaaacaccucaaguuuagaaucucccaugagcuggacagcgccucuuccgagguuaacuga

SEQ ID NO: 2988 - protein, 327 aa, Artificial Sequence
  osteopontin__Homo_sapiens__B7Z351
MGIVPRSLDKKAHRVQFQLNRIKAKIELPWGSLQLDCLMKTLKELYNKYPDAVATWLNPDPSQKQNLLAPQNAVSSEETNDFKQETLPSKSNESHDHMDDMDDEDDDDHVDSQDSIDSNDSDDVDDTDDSHQSDESHHSDESDELVTDFPTDLPATEVFTPVVPTVDTYDGRGDSVVYGLRSKSKKFRRPDIQYPDATDEDITSHMESEELNGAYKAIPVAQDLNAPSDWDSRGKDSYETSQLDDQSAETHSHKQSRLYKRKANDESNEHSDVIDSQELSKVSREFHSHEFHSHEDMLVVDPKSKEEDKHLKFRISHELDSASSEVN

SEQ ID NO: 2989 - RNA, 984 nt, Artificial Sequence
  osteopontin__Homo_sapiens__BAH12087
augggcauuguccccagaagcuuggacaaaaaggcacacagaguucaauuccaguugaacagaauaaaggccaaaauagagcugccuugggggucacugcaauuagacugcuugaugaagacauuaaaagaacuuuacaacaaauacccagaugcuguggccacauggcuaaacccugacccaucucagaagcagaaucuccuagccccacagaaugcuguguccucugaagaaaccaaugacuuuaaacaagagacccuuccaaguaaguccaacgaaagccaugaccacauggaugauauggaugaugaagaugaugaugaccauguggacagccaggacuccauugacucgaacgacucugaugauguagaugacacugaugauucucaccagucugaugagucucaccauucugaugaaucugaugaacuggucacugauuuucccacggaccugccagcaaccgaaguuuucacuccaguuguccccacaguagacacauaugauggccgaggugauagugugguuuauggacugaggucaaaaucuaagaaguuucgcagaccugacauccaguacccugaugcuacagacgaggacaucaccucacacauggaaagcgaggaguugaauggugcauacaaggccauccccguugcccaggaccugaacgcgccuucugauugggacagccgugggaaggacaguuaugaaacgagucagcuggaugaccagagugcugaaacccacagccacaagcaguccagauuauauaagcggaaagccaaugaugagagcaaugagcauuccgaugugauugauagucaggaacuuuccaaagucagccgugaauuccacagccaugaauuucacagccaugaagauaugcugguuguagaccccaaaaguaaggaagaagauaaacaccugaaauuucguauuucucaugaauuagauagugcaucuucugaggucaauuaa

SEQ ID NO: 2990 - RNA, 984 nt, Artificial Sequence
  derived and/or modified sequence opt1 from osteopontin__Homo_sapiens__BAH12087
augggcaucgugccccgcagccuggacaagaaggcccaccggguccaguuccagcucaaccgcaucaaggccaagaucgagcugccgugggggucccugcagcucgacugccugaugaagacccugaaggagcucuacaacaaguaccccgacgcgguggccaccuggcugaaccccgaccccagccagaagcagaaccugcucgccccgcagaacgccguguccagcgaggagacgaacgacuucaagcaggagacccugcccuccaagagcaacgagucccacgaccacauggacgacauggacgacgaggacgacgacgaccacgucgacagccaggacuccaucgacagcaacgacuccgacgacguggacgacaccgacgacagccaccaguccgacgagagccaccacuccgacgagagcgacgagcuggugaccgacuuccccacggaccuccccgccaccgaggucuucaccccgguggugcccaccgucgacacguacgacggccgcggggacuccgugguguacggccugcggagcaaguccaagaaguuccggcgccccgacauccaguaccccgacgcgaccgacgaggacaucaccagccacauggagagcgaggagcugaacggggccuacaaggccaucccggucgcccaggaccucaacgcgcccuccgacugggacagccggggcaaggacuccuacgagaccagccagcuggacgaccaguccgccgagacgcacagccacaagcagucccgccuguacaagcggaaggccaacgacgagagcaacgagcacuccgacgugaucgacagccaggagcucuccaaggugagccgcgaguuccacucccacgaguuccacagccacgaggacaugcuggucguggaccccaaguccaaggaggaggacaagcaccugaaguuccggaucagccacgagcucgacuccgccagcuccgaggugaacuga

SEQ ID NO: 2991 - RNA, 984 nt, Artificial Sequence
  derived and/or modified sequence opt2 from osteopontin__Homo_sapiens__BAH12087
augggcaucgucccccgcucccucgacaagaaggcccaccgcguccaguuccagcucaaccgcaucaaggccaagaucgagcuccccuggggcucccuccagcucgacugccucaugaagacccucaaggagcucuacaacaaguaccccgacgccgucgccaccuggcucaaccccgaccccucccagaagcagaaccuccucgccccccagaacgccgucuccuccgaggagaccaacgacuucaagcaggagacccuccccuccaaguccaacgagucccacgaccacauggacgacauggacgacgaggacgacgacgaccacgucgacucccaggacuccaucgacuccaacgacuccgacgacgucgacgacaccgacgacucccaccaguccgacgagucccaccacuccgacgaguccgacgagcucgucaccgacuuccccaccgaccuccccgccaccgaggucuucacccccgucguccccaccgucgacaccuacgacggccgcggcgacuccgucgucuacggccuccgcuccaaguccaagaaguuccgccgccccgacauccaguaccccgacgccaccgacgaggacaucaccucccacauggaguccgaggagcucaacggcgccuacaaggccauccccgucgcccaggaccucaacgcccccuccgacugggacucccgcggcaaggacuccuacgagaccucccagcucgacgaccaguccgccgagacccacucccacaagcagucccgccucuacaagcgcaaggccaacgacgaguccaacgagcacuccgacgucaucgacucccaggagcucuccaaggucucccgcgaguuccacucccacgaguuccacucccacgaggacaugcucgucgucgaccccaaguccaaggaggaggacaagcaccucaaguuccgcaucucccacgagcucgacuccgccuccuccgaggucaacuga

SEQ ID NO: 2992 - RNA, 984 nt, Artificial Sequence
  derived and/or modified sequence opt3 from osteopontin__Homo_sapiens__BAH12087
augggcaucgugcccagaagccuggacaagaaagcccacaggguccaguuccaacucaaccggauuaaggcuaaaauagagcuuccuugggggucccugcaguuggauugcuuaaugaagacccugaaagaacuauacaauaaguauccagacgcaguugccacauggcucaacccggaucccucucagaagcagaaucugcuugcgccucaaaacgcugugucaagugaggaaacuaaugacuuuaaacaggagacgcugccaagcaaguccaacgaaucucaugaucacauggacgauauggacgaugaggacgaugacgaucauguagacucgcaggacucaaucgauagcaaugacagugaugacguggaugacaccgaugacucccaccagucugaugagagccaucacuccgacgaaucagaugaguuggucacagacuuccccacugaccucccugccaccgaaguguuuacaccaguugugcccaccgucgauacuuacgacggacgcggugauagugugguauauggccugcgaagcaaaucuaagaaauuccguagaccugacauucaauacccagaugcaacagacgaggauaucaccucccacauggagucagaggaacugaacggggccuauaaggcuauuccgguugcacaggaccucaaugcccccagcgauugggacaguaggggaaaggauucuuacgaaacgucccaguuagacgaucagagcgcugagacucauucgcacaaacaaucucggcuguauaagcgcaaagccaacgacgaauccaaugagcauucagacgugaucgauagucaggagcuuagcaaggucuccagagaauuucacucucacgaguuccauagccacgaagacauguuggugguggauccuaaaucaaaggaggaagacaaacaucugaaguuuaggauaagucacgagcuagauuccgcgagcucugaggucaacuga

SEQ ID NO: 2993 - RNA, 984 nt, Artificial Sequence
  derived and/or modified sequence opt4 from osteopontin__Homo_sapiens__BAH12087
augggcaucgugcccagaagccuggacaagaaggcccacagagugcaguuccagcugaacagaaucaaggccaagaucgagcugcccuggggcagccugcagcuggacugccugaugaagacccugaaggagcuguacaacaaguaccccgacgccguggccaccuggcugaaccccgaccccagccagaagcagaaccugcuggccccccagaacgccgugagcagcgaggagaccaacgacuucaagcaggagacccugcccagcaagagcaacgagagccacgaccacauggacgacauggacgacgaggacgacgacgaccacguggacagccaggacagcaucgacagcaacgacagcgacgacguggacgacaccgacgacagccaccagagcgacgagagccaccacagcgacgagagcgacgagcuggugaccgacuuccccaccgaccugcccgccaccgagguguucacccccguggugcccaccguggacaccuacgacggcagaggcgacagcgugguguacggccugagaagcaagagcaagaaguucagaagacccgacauccaguaccccgacgccaccgacgaggacaucaccagccacauggagagcgaggagcugaacggcgccuacaaggccauccccguggcccaggaccugaacgcccccagcgacugggacagcagaggcaaggacagcuacgagaccagccagcuggacgaccagagcgccgagacccacagccacaagcagagcagacuguacaagagaaaggccaacgacgagagcaacgagcacagcgacgugaucgacagccaggagcugagcaaggugagcagagaguuccacagccacgaguuccacagccacgaggacaugcuggugguggaccccaagagcaaggaggaggacaagcaccugaaguucagaaucagccacgagcuggacagcgccagcagcgaggugaacuga

SEQ ID NO: 2994 - RNA, 984 nt, Artificial Sequence
  derived and/or modified sequence opt5 from osteopontin__Homo_sapiens__BAH12087
augggcaucgugcccagaagccuggacaagaaagcccaccggguccaguuccaacucaaccgcauuaaggcuaaaaucgagcugccuugggggucccuucagcuggauugccucaugaagacccugaaagaacuuuacaauaaguauccggacgccguugcgacauggcugaaccccgauccuucucagaagcagaaucuccuggcuccccaaaacgccgugagcuccgaggaaacgaaugacuuuaaacaggagacccugccuucuaagagcaacgaaucccaugaucacauggacgauauggacgaugaggacgaugacgaucauguggacucucaggacagcauugauuccaaugacagcgaugacgucgaugacacagaugacucucaccaguccgaugagagccaucacucugacgaauccgaugagcucgugaccgacuuccccacagaccugccugccaccgaaguuuuuacaccggugguccccaccguggauacguacgacggaagaggcgauagcguuguguaugggcuucggucuaaauccaagaaauuccgcagaccugacauccaauaccccgaugcuaccgacgaggauauuacaagccacauggaguccgaggaacugaacggagccuauaaggcuaucccugucgcccaggaccucaaugcgcccucugauugggacagccggggcaaggauuccuacgaaaccagccagcuggacgaucagucugccgagacacauucccacaaacaaagccgccuuuauaagagaaaagcuaacgacgaaucuaaugagcauagcgacgugaucgauucccaggagcugucuaaggugagccgggaauuucacucccacgaguuccauagccacgaagacaugcucgucguugauccgaaaucuaaggaggaagacaaacaucugaaguuucgcauuucccacgagcuggauagcgccucuuccgaggugaacuga

SEQ ID NO: 2995 - protein, 292 aa, Artificial Sequence
  osteopontin__Homo_sapiens__F2YQ21
MRIAVICFCLLGITCAIPVKQADSGSSEEKQLYNKYPDAVATWLNPDPSQKQNLLAPQNAVSSEETNDFKQETLPSKSNESHDHMDDMDDEDDDSHQSDESHHSDESDELVTDFPTDLPATEVFTPVVPTVDTYDGRGDSVVYGLRSKSKKFRRPDIQYPDATDEDITSHMESEELNGAYKAIPVAQDLNAPSDWDSRGKDSYETSQLDDQSAETHSHKQSRLYKRKANDESNEHSDVIDSQELSKVSREFHSHEFHSHEDMLVVDPKSKEEDKHLKFRISHELDSASSEVN

SEQ ID NO: 2996 - RNA, 879 nt, Artificial Sequence
  osteopontin__Homo_sapiens__AEA49030
augagaauugcagugauuugcuuuugccuccuaggcaucaccugugccauaccaguuaaacaggcugauucuggaaguucugaggaaaagcagcuuuacaacaaauacccagaugcuguggccacauggcuaaacccugacccaucucagaagcagaaucuccuagccccacagaaugcuguguccucugaagaaaccaaugacuuuaaacaagagacccuuccaaguaaguccaacgaaagccaugaccacauggaugauauggaugaugaagaugaugauucucaccagucugaugagucucaccauucugaugaaucugaugaacuggucacugauuuucccacggaccugccagcaaccgaaguuuucacuccaguuguccccacaguagacacauaugauggccgaggugauagugugguuuauggacugaggucaaaaucuaagaaguuucgcagaccugacauccaguacccugaugcuacagacgaggacaucaccucacacauggaaagcgaggaguugaauggugcauacaaggccauccccguugcccaggaccugaacgcgccuucugauugggacagccgugggaaggacaguuaugaaacgagucagcuggaugaccagagugcugaaacccacagccacaagcaguccagauuauauaagcggaaagcuaaugaugagagcaaugagcauuccgaugugauugauagucaggaacuuuccaaagucagccgugaauuccacagccaugaauuucacagccaugaagauaugcugguuguagaccccaaaaguaaggaagaagauaaacaccugaaauuucguauuucucaugaauuagauagugcaucuucugaggucaauuaa

SEQ ID NO: 2997 - RNA, 879 nt, Artificial Sequence
  derived and/or modified sequence opt1 from osteopontin__Homo_sapiens__AEA49030
augcgcaucgccgugaucugcuucugccugcucggcaucacgugcgccauccccgucaagcaggcggacagcggguccagcgaggagaagcagcuguacaacaaguacccggacgccguggccaccuggcugaaccccgaccccucccagaagcagaaccuccuggcgccccagaacgccgugagcuccgaggagaccaacgacuucaagcaggagacccugccgagcaaguccaacgagagccacgaccacauggacgacauggacgacgaggacgacgacucccaccagagcgacgagucccaccacagcgacgaguccgacgagcucgucaccgacuuccccaccgaccugcccgccacggagguguucacccccguggucccgaccguggacaccuacgacggccgcggggacagcguggucuacggccugcgguccaagagcaagaaguuccggcgccccgacauccaguaccccgacgccacggacgaggacaucaccucccacauggagagcgaggagcucaacggggccuacaaggccauccccguggcgcaggaccugaacgccccguccgacugggacagccggggcaaggacagcuacgagaccucccagcuggacgaccagagcgccgagacccacucccacaagcagagccgccucuacaagcggaaggccaacgacgaguccaacgagcacagcgacgugaucgacucccaggagcugagcaaggucucccgcgaguuccacagccacgaguuccacucccacgaggacaugcuggugguggaccccaagagcaaggaggaggacaagcaccucaaguuccggaucucccacgagcuggacagcgccuccagcgaggucaacuga

SEQ ID NO: 2998 - RNA, 879 nt, Artificial Sequence
  derived and/or modified sequence opt2 from osteopontin__Homo_sapiens__AEA49030
augcgcaucgccgucaucugcuucugccuccucggcaucaccugcgccauccccgucaagcaggccgacuccggcuccuccgaggagaagcagcucuacaacaaguaccccgacgccgucgccaccuggcucaaccccgaccccucccagaagcagaaccuccucgccccccagaacgccgucuccuccgaggagaccaacgacuucaagcaggagacccuccccuccaaguccaacgagucccacgaccacauggacgacauggacgacgaggacgacgacucccaccaguccgacgagucccaccacuccgacgaguccgacgagcucgucaccgacuuccccaccgaccuccccgccaccgaggucuucacccccgucguccccaccgucgacaccuacgacggccgcggcgacuccgucgucuacggccuccgcuccaaguccaagaaguuccgccgccccgacauccaguaccccgacgccaccgacgaggacaucaccucccacauggaguccgaggagcucaacggcgccuacaaggccauccccgucgcccaggaccucaacgcccccuccgacugggacucccgcggcaaggacuccuacgagaccucccagcucgacgaccaguccgccgagacccacucccacaagcagucccgccucuacaagcgcaaggccaacgacgaguccaacgagcacuccgacgucaucgacucccaggagcucuccaaggucucccgcgaguuccacucccacgaguuccacucccacgaggacaugcucgucgucgaccccaaguccaaggaggaggacaagcaccucaaguuccgcaucucccacgagcucgacuccgccuccuccgaggucaacuga

SEQ ID NO: 2999 - RNA, 879 nt, Artificial Sequence
  derived and/or modified sequence opt3 from osteopontin__Homo_sapiens__AEA49030
augagaaucgccgugauuugcuucugucugcucggcauaaccugcgcuauccccgucaagcaggcagacagcggguccucugaggaaaaacaacuuuacaacaaguauccugaugccguugcgacauggcugaauccagacccgucacagaaacagaacuuguuagcuccccagaaugccgugaguagcgaggaaacuaacgauuuuaagcaagagacgcugccuuccaaaucuaaugaaucgcacgaccauauggaugacauggaugacgaggaugacgauucacaccagagcgacgagagucaucacuccgaugaaucugacgagcuaguaaccgacuucccaacagaucuccccgcaacugaaguguuuaccccugucgugccaacaguugacaccuacgauggaaggggugacagcguggucuauggccugcgguccaagucaaagaaauuccgccgacccgauauucaguacccugacgccacugaugaggacaucacaagucauauggagagcgaggaacuuaacggggcuuauaaggcaauuccaguggcccaggaucugaaugcuccgucugacugggauucccguggaaaagacucauacgaaaccagccaauuggacgaucagagugccgagacgcacucucacaagcaguccagacucuauaaaaggaaggcgaacgacgaaagcaaugagcauucggauguaaucgacucucaggagcuguccaagguuucacgggaauuucacagucaugaguuccacagccacgaagauaugcugguggucgaccccaaauccaaggaggaagauaaacaucucaaguuucgcauaucucacgaguuagacagcgcaucaagugaggugaacuga

SEQ ID NO: 3000 - RNA, 879 nt, Artificial Sequence
  derived and/or modified sequence opt4 from osteopontin__Homo_sapiens__AEA49030
augagaaucgccgugaucugcuucugccugcugggcaucaccugcgccauccccgugaagcaggccgacagcggcagcagcgaggagaagcagcuguacaacaaguaccccgacgccguggccaccuggcugaaccccgaccccagccagaagcagaaccugcuggccccccagaacgccgugagcagcgaggagaccaacgacuucaagcaggagacccugcccagcaagagcaacgagagccacgaccacauggacgacauggacgacgaggacgacgacagccaccagagcgacgagagccaccacagcgacgagagcgacgagcuggugaccgacuuccccaccgaccugcccgccaccgagguguucacccccguggugcccaccguggacaccuacgacggcagaggcgacagcgugguguacggccugagaagcaagagcaagaaguucagaagacccgacauccaguaccccgacgccaccgacgaggacaucaccagccacauggagagcgaggagcugaacggcgccuacaaggccauccccguggcccaggaccugaacgcccccagcgacugggacagcagaggcaaggacagcuacgagaccagccagcuggacgaccagagcgccgagacccacagccacaagcagagcagacuguacaagagaaaggccaacgacgagagcaacgagcacagcgacgugaucgacagccaggagcugagcaaggugagcagagaguuccacagccacgaguuccacagccacgaggacaugcuggugguggaccccaagagcaaggaggaggacaagcaccugaaguucagaaucagccacgagcuggacagcgccagcagcgaggugaacuga

SEQ ID NO: 3001 - RNA, 879 nt, Artificial Sequence
  derived and/or modified sequence opt5 from osteopontin__Homo_sapiens__AEA49030
augagaaucgccgugauuugcuucugucugcucggcauuaccugcgcuauccccgucaagcaggccgacagcggguccucugaggaaaaacaacuguacaacaaguauccugaugcgguugcuacauggcuuaauccggaccccagccagaaacagaaccugcucgccccucagaaugccguguccucugaggaaacgaacgauuuuaagcaagagacccugcccagcaaauccaaugaaucucacgaccauauggaugacauggaugacgaggaugacgauagccaccaguccgacgagagccaucacucugaugaauccgacgagcuugugacagacuucccuaccgaucugcccgcuacagaagucuuuaccccugugguuccgacaguggacaccuacgauggacggggcgacagcgucguguaugggcuccgcucuaaguccaagaaauucagacggcccgauauccaguacccugacgccacggaugaggacauuaccagccauauggagucugaggaacugaacggagcuuauaaggccauccccguugcgcaggaucugaaugccccuuccgacugggauagccgcggcaaagacuccuacgaaacaucucaacucgacgaucagagcgcugagacccacucccacaagcagagcagacuguauaaacggaaggccaacgacgaaucuaaugagcauuccgaugugaucgacagccaggagcuuucuaaggucagccgcgaauuucacucccaugaguuccacucucacgaagauaugcuggugguggaccccaaaagcaaggaggaagauaaacaucucaaguuuagaauuucccacgagcuggacagcgcuucuuccgaggucaacuga

SEQ ID NO: 3002 - protein, 314 aa, Artificial Sequence; identical to SEQ ID NO: 2967
  osteopontin__Homo_sapiens__P10451

SEQ ID NO: 3003 - RNA, 945 nt, Artificial Sequence; identical to SEQ ID NO: 2968
  osteopontin__Homo_sapiens__AAA86886

SEQ ID NO: 3004 - RNA, 945 nt, Artificial Sequence; identical to SEQ ID NO: 2969
  derived and/or modified sequence opt1 from osteopontin__Homo_sapiens__AAA86886

SEQ ID NO: 3005 - RNA, 945 nt, Artificial Sequence; identical to SEQ ID NO: 2970
  derived and/or modified sequence opt2 from osteopontin__Homo_sapiens__AAA86886

SEQ ID NO: 3006 - RNA, 945 nt, Artificial Sequence; identical to SEQ ID NO: 2971
  derived and/or modified sequence opt3 from osteopontin__Homo_sapiens__AAA86886

SEQ ID NO: 3007 - RNA, 945 nt, Artificial Sequence; identical to SEQ ID NO: 2972
  derived and/or modified sequence opt4 from osteopontin__Homo_sapiens__AAA86886

SEQ ID NO: 3008 - RNA, 945 nt, Artificial Sequence; identical to SEQ ID NO: 2973
  derived and/or modified sequence opt5 from osteopontin__Homo_sapiens__AAA86886

SEQ ID NO: 3009 - protein, 393 aa, Artificial Sequence [sequence omitted]

SEQ ID NO: 3010 - RNA, 1182 nt, Artificial Sequence
  p53__Homo_sapiens__AAA59988
auggaggagccgcagucagauccuagcgucgagcccccucugagucaggaaacauuuucagaccuauggaaacuacuuccugaaaacaacguucugucccccuugccgucccaagcaauggaugauuugaugcuguccccggacgauauugaacaaugguucacugaagacccagguccagaugaagcucccagaaugccagaggcugcuccccccguggccccugcaccagcagcuccuacaccggcggccccugcaccagcccccuccuggccccugucaucuucugucccuucccagaaaaccuaccagggcagcuacgguuuccgucugggcuucuugcauucugggacagccaagucugugacuugcacguacuccccugcccucaacaagauguuuugccaacuggccaagaccugcccugugcagcuguggguugauuccacacccccgcccggcacccgcguccgcgccauggccaucuacaagcagucacagcacaugacggagguugugaggcgcugcccccaccaugagcgcugcucagauagcgauggucuggccccuccucagcaucuuauccgaguggaaggaaauuugcguguggaguauuuggaugacagaaacacuuuucgacauagugugguggugcccuaugagccgccugagguuggcucugacuguaccaccauccacuacaacuacauguguaacaguuccugcaugggcggcaugaaccggaggcccauccucaccaucaucacacuggaagacuccagugguaaucuacugggacggaacagcuuugaggugcguguuugugccuguccugggagagaccggcgcacagaggaagagaaucuccgcaagaaaggggagccucaccacgagcugcccccagggagcacuaagcgagcacugcccaacaacaccagcuccucuccccagccaaagaagaaaccacuggauggagaauauuucacccuucagauccgugggcgugagcgcuucgagauguuccgagagcugaaugaggccuuggaacucaaggaugcccaggcugggaaggagccaggggggagcagggcucacuccagccaccugaaguccaaaaagggucagucuaccucccgccauaaaaaacucauguucaagacagaagggccugacucagacuga

SEQ ID NO: 3011 - RNA, 1182 nt, Artificial Sequence
  derived and/or modified sequence opt1 from p53__Homo_sapiens__AAA59988
auggaggagccccagagcgacccguccguggagccgccccugagccaggagaccuucuccgaccucuggaagcugcugcccgagaacaacguccucagcccccugcccucccaggccauggacgaccugaugcucagccccgacgacaucgagcagugguucaccgaggaccccggcccggacgaggcgccccgcaugcccgaggccgcgcccccgguggcccccgcccccgccgcccccacgccggccgcccccgcccccgcgcccuccuggccgcugagcuccagcgugcccucccagaagaccuaccaggggagcuacggcuuccggcugggguuccuccacuccggcaccgccaagagcgugaccugcacguacucccccgcccugaacaagauguucugccagcuggccaagaccugccccguccagcucuggguggacagcaccccgccgcccgggacccgcguccgggccauggcgaucuacaagcagucccagcacaugacggagguggugcgccggugcccccaccacgagcgcugcagcgacuccgacggccuggccccgccccagcaccugauccgggucgagggcaaccuccgcguggaguaccuggacgaccggaacaccuuccgccacagcguggucgugcccuacgagccgcccgagguggggagcgacugcaccaccauccacuacaacuacaugugcaacuccagcugcaugggcgggaugaaccggcgccccauccugacgaucaucacccucgaggacuccagcggcaaccugcuggggcggaacuccuucgagguccgcgugugcgccugccccggccgggaccgccggaccgaggaggagaaccuccgcaagaagggcgagccccaccacgagcugccgcccgggagcaccaagcgggcccugcccaacaacacguccagcagcccccagcccaagaagaagccccucgacggcgaguacuucacccugcagauccgcgggcgggagcgcuucgagauguuccgcgagcugaacgaggcccucgagcugaaggacgcgcaggccggcaaggagcccggcgggucccgggcccacuccagccaccugaaguccaagaagggccagagcaccucccgccacaagaagcucauguucaagaccgaggggccggacagcgacuga

SEQ ID NO: 3012 - RNA, 1182 nt, Artificial Sequence
  derived and/or modified sequence opt2 from p53__Homo_sapiens__AAA59988
auggaggagccccaguccgaccccuccgucgagcccccccucucccaggagaccuucuccgaccucuggaagcuccuccccgagaacaacguccucuccccccuccccucccaggccauggacgaccucaugcucucccccgacgacaucgagcagugguucaccgaggaccccggccccgacgaggccccccgcaugcccgaggccgccccccccgucgcccccgcccccgccgcccccacccccgccgcccccgcccccgcccccuccuggccccucuccuccuccguccccucccagaagaccuaccagggcuccuacggcuuccgccucggcuuccuccacuccggcaccgccaaguccgucaccugcaccuacucccccgcccucaacaagauguucugccagcucgccaagaccugccccguccagcucugggucgacuccacccccccccccggcacccgcguccgcgccauggccaucuacaagcagucccagcacaugaccgaggucguccgccgcugcccccaccacgagcgcugcuccgacuccgacggccucgcccccccccagcaccucauccgcgucgagggcaaccuccgcgucgaguaccucgacgaccgcaacaccuuccgccacuccgucgucguccccuacgagccccccgaggucggcuccgacugcaccaccauccacuacaacuacaugugcaacuccuccugcaugggcggcaugaaccgccgccccauccucaccaucaucacccucgaggacuccuccggcaaccuccucggccgcaacuccuucgagguccgcgucugcgccugccccggccgcgaccgccgcaccgaggaggagaaccuccgcaagaagggcgagccccaccacgagcucccccccggcuccaccaagcgcgcccuccccaacaacaccuccuccuccccccagcccaagaagaagccccucgacggcgaguacuucacccuccagauccgcggccgcgagcgcuucgagauguuccgcgagcucaacgaggcccucgagcucaaggacgcccaggccggcaaggagcccggcggcucccgcgcccacuccucccaccucaaguccaagaagggccaguccaccucccgccacaagaagcucauguucaagaccgagggccccgacuccgacuga

SEQ ID NO: 3013 - RNA, 1182 nt, Artificial Sequence
  derived and/or modified sequence opt3 from p53__Homo_sapiens__AAA59988
auggaggaaccccagagcgacccuuccguggagccaccgcugucucaagaaaccuucucagaucucuggaaacuucugcccgagaacaaugucuugaguccuuuaccaagccaggccauggacgaucugaugcuaucccccgacgauaucgaacagugguuuacagaggacccuggcccagaugaggcucccagaaugccugaagcagccccaccgguugcgcccgcuccugccgcaccaacucccgccgcuccugcaccagcccccucuuggccgcucucgucaagcgugccuagucagaagacguaccaaggguccuauggauucaggcuggguuuucuucacucuggcaccgcuaagagcguaacaugcacuuacucccccgcccugaacaaaauguucugucaguuggcgaagaccugcccagugcagcucugggucgacucaacaccucccccagggacccgggugcgcgcaauggccauuuauaaacagagucaacauaugacugagguugugcgacguuguccccaccaugaaagaugcagcgauucugacggacuggcuccuccacagcaccugauaagggucgagggcaaucuccggguggaguacuuagaugaccgcaacacauuuagacauuccguaguugugccguaugaacccccugaggucgguucagauuguaccacgauccacuacaauuauaugugcaacagcaguuguaugggagggaugaauaggcggccaauucugacuaucauuacccuugaagacucuuccggcaacuugcugggccgcaauagcuucgaggugcgagugugcgccugucccgggagagacaggcggacagaagaggagaaccuacguaagaagggagaaccucaccaugagcucccacccgguucgacuaaacgcgcacugccgaauaacaccucuuccucaccucagccaaagaaaaagccccuugauggcgaauacuuuacacugcagaucagagggagggagcgguucgaaauguuucgagaguugaaugaggcucucgaacugaaagacgcccaagcgggaaaggagccuggcgguagucgcgcccacagcucccauuuaaagucuaaaaaggggcagagcaccucaagacacaaaaagcugauguucaaaacggaaggacccgauagugacuga

SEQ ID NO: 3014 - RNA, 1182 nt, Artificial Sequence
  derived and/or modified sequence opt4 from p53__Homo_sapiens__AAA59988
auggaggagccccagagcgaccccagcguggagcccccccugagccaggagaccuucagcgaccuguggaagcugcugcccgagaacaacgugcugagcccccugcccagccaggccauggacgaccugaugcugagccccgacgacaucgagcagugguucaccgaggaccccggccccgacgaggcccccagaaugcccgaggccgccccccccguggcccccgcccccgccgcccccacccccgccgcccccgcccccgcccccagcuggccccugagcagcagcgugcccagccagaagaccuaccagggcagcuacggcuucagacugggcuuccugcacagcggcaccgccaagagcgugaccugcaccuacagccccgcccugaacaagauguucugccagcuggccaagaccugccccgugcagcuguggguggacagcacccccccccccggcaccagagugagagccauggccaucuacaagcagagccagcacaugaccgagguggugagaagaugcccccaccacgagagaugcagcgacagcgacggccuggcccccccccagcaccugaucagaguggagggcaaccugagaguggaguaccuggacgacagaaacaccuucagacacagcgugguggugcccuacgagccccccgaggugggcagcgacugcaccaccauccacuacaacuacaugugcaacagcagcugcaugggcggcaugaacagaagacccauccugaccaucaucacccuggaggacagcagcggcaaccugcugggcagaaacagcuucgaggugagagugugcgccugccccggcagagacagaagaaccgaggaggagaaccugagaaagaagggcgagccccaccacgagcugccccccggcagcaccaagagagcccugcccaacaacaccagcagcagcccccagcccaagaagaagccccuggacggcgaguacuucacccugcagaucagaggcagagagagauucgagauguucagagagcugaacgaggcccuggagcugaaggacgcccaggccggcaaggagcccggcggcagcagagcccacagcagccaccugaagagcaagaagggccagagcaccagcagacacaagaagcugauguucaagaccgagggccccgacagcgacuga

SEQ ID NO: 3015 - RNA, 1182 nt, Artificial Sequence
  derived and/or modified sequence opt5 from p53__Homo_sapiens__AAA59988
auggaggaaccccagagcgacccuuccguggagccgccccugucucaagaaaccuucagcgaucucuggaagcugcuuccugagaacaauguccugucuccccucccuucccaggccauggacgaucugaugcuuagccccgacgauaucgaacagugguuuacagaggacccuggcccggaugaggcucccagaaugccugaagccgcgcccccuguugcucccgccccggccgcuccuacgcccgccgcuccugcccccgcgcccuccuggccucugucuagcuccgugccgagccagaaaaccuaccaagggucuuauggauuccggcucggcuuucugcacuccgggacagccaagagcgugaccugcacauacucucccgcucugaacaaaauguucugucagcucgccaagaccugcccuguccagcuguggguggacuccacacccccucccggaacccgcguuagagcuauggccauuuauaaacagagccaacauaugacggaggugguccggcgcuguccgcaccaugaaagaugcucugauuccgacggccuugcgccuccccagcaccugauccggguggaggggaaucuccgcguugaguaccuggaugacagaaacaccuuucggcauagcguggucgugccuuaugaacccccugaggugggauccgauuguacaaccauucacuacaauuauaugugcaacucuagcuguaugggcggcaugaaucgcagacccauccuuacaauuaucacccuggaagacuccagcgggaaccuccugggacgcaauucuuucgagguccggguuugcgccuguccgggcagagaccggcgcacggaagaggagaaccugagaaagaagggggaaccucaccaugagcucccucccggauccacaaaacgggcucugcccaauaacaccagcucuagcccgcagcccaagaaaaagccucuugauggcgaauacuuuacacugcagaucagagggcgcgagcgguucgaaauguuuagagagcucaaugaggcccuggaacuuaaagacgcucaagccggaaaggagcccggcggcucccgcgcccacucuagccaucugaaguccaaaaaggggcagagcaccucucggcacaaaaagcucauguucaaaaccgaaggaccugauuccgacuga

SEQ ID NO: 3016 - protein, 102 aa, Artificial Sequence
  PAGE-4__Homo_sapiens__O60829
MSARVRSRSRGRGDGQEAPDVVAFVAPGESQQEEPPTDNQDIEPGQEREGTPPIEERKVEGDCQEMDLEKTRSERGDGSDVKEKTPPNPKHAKTKEAGDGQP

SEQ ID NO: 3017 - RNA, 309 nt, Artificial Sequence
  PAGE-4__Homo_sapiens__AAF88037
augagugcacgagugagaucaagauccagaggaagaggagauggucaggaggcucccgaugugguugcauucguggcucccggugaaucucagcaagaggaaccaccaacugacaaucaggauauugaaccuggacaagagagagaaggaacaccuccgaucgaagaacguaaaguagaaggugauugccaggaaauggaucuggaaaagacucggagugagcguggagauggcucugauguaaaagagaagacuccaccuaauccuaagcaugcuaagacuaaagaagcaggagaugggcagccauaa

SEQ ID NO: 3018 - RNA, 309 nt, Artificial Sequence
  derived and/or modified sequence opt1 from PAGE-4__Homo_sapiens__AAF88037
augagcgcccgcgugcggucccgcagccggggccgcggggacggccaggaggcccccgacgucguggcguucguggcccccggggagucccagcaggaggagccgcccaccgacaaccaggacaucgagcccggccaggagcgggaggggaccccgcccaucgaggagcgcaaggucgagggcgacugccaggagauggaccuggagaagacgcggagcgagcgcggcgacggguccgacgugaaggagaagaccccgcccaaccccaagcacgccaagaccaaggaggccggcgacgggcagcccuga

SEQ ID NO: 3019 - RNA, 309 nt, Artificial Sequence
  derived and/or modified sequence opt2 from PAGE-4__Homo_sapiens__AAF88037
auguccgcccgcguccgcucccgcucccgcggccgcggcgacggccaggaggcccccgacgucgucgccuucgucgcccccggcgagucccagcaggaggagccccccaccgacaaccaggacaucgagcccggccaggagcgcgagggcaccccccccaucgaggagcgcaaggucgagggcgacugccaggagauggaccucgagaagacccgcuccgagcgcggcgacggcuccgacgucaaggagaagaccccccccaaccccaagcacgccaagaccaaggaggccggcgacggccagcccuga

SEQ ID NO: 3020 - RNA, 309 nt, Artificial Sequence
  derived and/or modified sequence opt3 from PAGE-4__Homo_sapiens__AAF88037
augagcgccagagugaggucccggucucgcggccgaggggacggacaggaggcucccgaugucguugcauucguggccccuggugaaucacaacaggaggaaccaccgaccgacaaccaggauaucgagcccggccaggaacgugaggggacaccuccaauugaggaaagaaagguagagggagacugccaagaaauggaucuggagaaaacuaggagugagcggggcgacgguagcgaugugaaggagaaaacgcccccuaauccaaagcacgcgaaaaccaaggaagcuggggacggacagcccuga

SEQ ID NO: 3021 - RNA, 309 nt, Artificial Sequence
  derived and/or modified sequence opt4 from PAGE-4__Homo_sapiens__AAF88037
augagcgccagagugagaagcagaagcagaggcagaggcgacggccaggaggcccccgacgugguggccuucguggcccccggcgagagccagcaggaggagccccccaccgacaaccaggacaucgagcccggccaggagagagagggcaccccccccaucgaggagagaaagguggagggcgacugccaggagauggaccuggagaagaccagaagcgagagaggcgacggcagcgacgugaaggagaagaccccccccaaccccaagcacgccaagaccaaggaggccggcgacggccagcccuga

SEQ ID NO: 3022 - RNA, 309 nt, Artificial Sequence
  derived and/or modified sequence opt5 from PAGE-4__Homo_sapiens__AAF88037
augagcgccagagugcggucccgcucuagaggccgcggggacggacaggaggcucccgaugucguugccuucguggcgccuggcgaaagccaacaggaggaaccgcccaccgacaaccaggauaucgagccugggcaggaacgggagggaacacccccuauugaggaaagaaagguggagggcgacugccaagaaauggaucuggagaaaacgcgguccgagcgcggggacggaucugaugucaaggagaaaacacccccuaauccgaagcacgcuaaaaccaaggaagccggcgacggccagcccuga

SEQ ID NO: 3023 - protein, 402 aa, Artificial Sequence [sequence omitted]

SEQ ID NO: 3024 - RNA, 1209 nt, Artificial Sequence
  PAI-1__Homo_sapiens__AAA60003
augcagaugucuccagcccucaccugccuaguccugggccuggcccuugucuuuggugaagggucugcugugcaccaucccccauccuacguggcccaccuggccucagacuucggggugaggguguuucagcagguggcgcaggccuccaaggaccgcaacgugguuuucucacccuaugggguggccucgguguuggccaugcuccagcugacaacaggaggagaaacccagcagcagauucaagcagcuaugggauucaagauugaugacaagggcauggcccccgcccuccggcaucuguacaaggagcucauggggccauggaacaaggaugagaucagcaccacagacgcgaucuucguccagcgggaucugaagcugguccagggcuucaugccccacuucuucaggcuguuccggagcacggucaagcaaguggacuuuucagagguggagagagccagauucaucaucaaugacugggugaagacacacacaaaagguaugaucagcaacuugcuugggaaaggagccguggaccagcugacacggcuggugcuggugaaugcccucuacuucaacggccaguggaagacucccuuccccgacuccagcacccaccgccgccucuuccacaaaucagacggcagcacugucucugugcccaugauggcucagaccaacaaguucaacuauacugaguucaccacgcccgauggccauuacuacgacauccuggaacugcccuaccacggggacacccucagcauguucauugcugccccuuaugaaaaagaggugccucucucugcccucaccaacauucugagugcccagcucaucagccacuggaaaggcaacaugaccaggcugccccgccuccugguucugcccaaguucucccuggagacugaagucgaccucaggaagccccuagagaaccugggaaugaccgacauguucagacaguuucaggcugacuucacgagucuuucagaccaagagccucuccacgucgcgcaggcgcugcagaaagugaagaucgaggugaacgagaguggcacgguggccuccucauccacagcugucauagucucagcccgcauggcccccgaggagaucaucauggacagacccuuccucuuugugguccggcacaaccccacaggaacaguccuuuucaugggccaagugauggaacccuga

SEQ ID NO: 3025 - RNA, 1209 nt, Artificial Sequence
  derived and/or modified sequence opt1 from PAI-1__Homo_sapiens__AAA60003
augcagaugagccccgcccugaccugccucgugcuggggcuggcccucgucuucggggagggcuccgcggugcaccacccgcccagcuacguggcccaccuggccuccgacuucgggguccgcguguuccagcaggucgcccaggccagcaaggaccggaacgugguguucucccccuacggcguggcgagcguccuggccaugcuccagcugaccaccgggggcgagacgcagcagcagauccaggccgccaugggcuucaagaucgacgacaaggggauggcgcccgcccugcgccaccucuacaaggagcugaugggcccguggaacaaggacgagaucuccaccaccgacgccaucuucgugcagcgggaccugaagcucgugcagggguucaugccccacuucuuccgccuguuccggagcacggucaagcaggucgacuucuccgagguggagcgcgcccgguucaucaucaacgacugggugaagacccacaccaagggcaugaucagcaaccugcucgggaagggcgccguggaccagcugacccgccuggugcucgucaacgcgcuguacuucaacggccaguggaagacgcccuuccccgacuccagcacccaccggcgccuguuccacaaguccgacgggagcaccguguccgugccgaugauggcccagaccaacaaguucaacuacacggaguucaccacccccgacggccacuacuacgacauccucgagcugcccuaccacggggacacccugagcauguucaucgccgcccccuacgagaaggaggucccgcucuccgcccugacgaacauccugagcgcgcagcucaucucccacuggaagggcaacaugacccggcugccccgccugcucgugcugcccaaguucagccuggagaccgagguggaccuccggaagccccuggagaaccugggcaugaccgacauguuccgccaguuccaggccgacuucacgagccucuccgaccaggagccgcugcacgucgcccaggcccugcagaaggugaagaucgaggucaacgagagcgggaccguggccuccagcuccaccgcggugaucgucagcgcccggauggcccccgaggagaucaucauggaccgccccuuccucuucguggugcggcacaaccccaccggcacgguccuguucaugggccaggugauggagccguga

SEQ ID NO: 3026 - RNA, 1209 nt, Artificial Sequence
  derived and/or modified sequence opt2 from PAI-1__Homo_sapiens__AAA60003
augcagaugucccccgcccucaccugccucguccucggccucgcccucgucuucggcgagggcuccgccguccaccacccccccuccuacgucgcccaccucgccuccgacuucggcguccgcgucuuccagcaggucgcccaggccuccaaggaccgcaacgucgucuucucccccuacggcgucgccuccguccucgccaugcuccagcucaccaccggcggcgagacccagcagcagauccaggccgccaugggcuucaagaucgacgacaagggcauggcccccgcccuccgccaccucuacaaggagcucaugggccccuggaacaaggacgagaucuccaccaccgacgccaucuucguccagcgcgaccucaagcucguccagggcuucaugccccacuucuuccgccucuuccgcuccaccgucaagcaggucgacuucuccgaggucgagcgcgcccgcuucaucaucaacgacugggucaagacccacaccaagggcaugaucuccaaccuccucggcaagggcgccgucgaccagcucacccgccucguccucgucaacgcccucuacuucaacggccaguggaagacccccuuccccgacuccuccacccaccgccgccucuuccacaaguccgacggcuccaccgucuccguccccaugauggcccagaccaacaaguucaacuacaccgaguucaccacccccgacggccacuacuacgacauccucgagcuccccuaccacggcgacacccucuccauguucaucgccgcccccuacgagaaggaggucccccucuccgcccucaccaacauccucuccgcccagcucaucucccacuggaagggcaacaugacccgccucccccgccuccucguccuccccaaguucucccucgagaccgaggucgaccuccgcaagccccucgagaaccucggcaugaccgacauguuccgccaguuccaggccgacuucaccucccucuccgaccaggagccccuccacgucgcccaggcccuccagaaggucaagaucgaggucaacgaguccggcaccgucgccuccuccuccaccgccgucaucgucuccgcccgcauggcccccgaggagaucaucauggaccgccccuuccucuucgucguccgccacaaccccaccggcaccguccucuucaugggccaggucauggagcccuga

SEQ ID NO: 3027 - RNA, 1209 nt, Artificial Sequence
  derived and/or modified sequence opt3 from PAI-1__Homo_sapiens__AAA60003
augcagaugagccccgcccugaccugccucgugcuuggccuggcuuuggucuucggggagggauccgcaguucaccauccuccaucuuacguggcccacuuagcgucagacuuugguguaagaguguuccaacaggucgcucaggccaguaaggauaggaacgugguuuuuagcccguauggcguggcauccguccuggccaugcuacagcucacaacugggggagaaacgcaacagcagauccaggcugcaaugggcuucaaaauugacgauaaggguauggcccccgcucugcggcaucuuuacaaagagcugauggggccuuggaauaaggacgaaauaucuaccacagaugccaucuuugugcaacgcgacuugaaacucguacagggauucaugccacacuuuuuccgacuguuucguucgacuguuaaacagguggauuucucagaggucgaaagagcgagguuuauuaucaacgacugggugaagacccauacaaagggcaugauuagcaaucugcucggcaagggggcaguggaucaguuaacccggcugguccuuguuaacgccuuguauuucaauggacaauggaaaacucccuuuccugacaguuccacacaccgcagacuguuccacaagucugaugguagcaccguguccguaccaaugauggcucagacgaacaaauucaauuacacugaguuuaccacacccgacggccauuauuacgauauccuagagcucccuuaucacggggacacucugucaauguucauagccgcaccauacgaaaaggaggugccgcuuagugcucugaccaacaucuugagcgcccagcucauuucucauuggaagggaaauaugacaaggcugccccgguuacugguccucccuaaauuuucccuugaaaccgagguggaccugcgcaagccauuggagaaccuaggcaugacggauauguuccgacaauuucaggcggacuucacuucacugagcgaucaggaaccccuccacguugcccaggcacugcaaaaagugaagaucgaggucaaugaaagugguacaguggcuucuuccagcaccgccguaauuguuucggcuagaauggccccugaggaaaucauaauggacaggccauuucuuuucgugguccggcacaaccccacugggacagugcuguuuaugggacaggucauggagccguga

SEQ ID NO: 3028 - RNA, 1209 nt, Artificial Sequence
  derived and/or modified sequence opt4 from PAI-1__Homo_sapiens__AAA60003
augcagaugagccccgcccugaccugccuggugcugggccuggcccugguguucggcgagggcagcgccgugcaccacccccccagcuacguggcccaccuggccagcgacuucggcgugagaguguuccagcagguggcccaggccagcaaggacagaaacgugguguucagccccuacggcguggccagcgugcuggccaugcugcagcugaccaccggcggcgagacccagcagcagauccaggccgccaugggcuucaagaucgacgacaagggcauggcccccgcccugagacaccuguacaaggagcugaugggccccuggaacaaggacgagaucagcaccaccgacgccaucuucgugcagagagaccugaagcuggugcagggcuucaugccccacuucuucagacuguucagaagcaccgugaagcagguggacuucagcgagguggagagagccagauucaucaucaacgacugggugaagacccacaccaagggcaugaucagcaaccugcugggcaagggcgccguggaccagcugaccagacuggugcuggugaacgcccuguacuucaacggccaguggaagacccccuuccccgacagcagcacccacagaagacuguuccacaagagcgacggcagcaccgugagcgugcccaugauggcccagaccaacaaguucaacuacaccgaguucaccacccccgacggccacuacuacgacauccuggagcugcccuaccacggcgacacccugagcauguucaucgccgcccccuacgagaaggaggugccccugagcgcccugaccaacauccugagcgcccagcugaucagccacuggaagggcaacaugaccagacugcccagacugcuggugcugcccaaguucagccuggagaccgagguggaccugagaaagccccuggagaaccugggcaugaccgacauguucagacaguuccaggccgacuucaccagccugagcgaccaggagccccugcacguggcccaggcccugcagaaggugaagaucgaggugaacgagagcggcaccguggccagcagcagcaccgccgugaucgugagcgccagaauggcccccgaggagaucaucauggacagacccuuccuguucguggugagacacaaccccaccggcaccgugcuguucaugggccaggugauggagcccuga

SEQ ID NO: 3029 - RNA, 1209 nt, Artificial Sequence
  derived and/or modified sequence opt5 from PAI-1__Homo_sapiens__AAA60003
augcagaugagccccgcccugaccugccucgugcugggccuugcucuggucuucggggagggauccgccguucaccauccuccgucuuacguggcgcaccucgcuagcgacuuuggcgugagagucuuccaacagguggcccaggccuccaaggaucggaacguuguguuuucucccuauggggucgcuagcgugcuggccaugcuucagcugacaacgggaggcgaaacccaacagcagauccaggcugccaugggguucaaaauugacgauaagggaauggcgccugcccuccgccaucuguacaaagagcugaugggccccuggaauaaggacgaaaucuccacaaccgaugcuauuuuuguucaaagagaccucaaacuggugcagggcuucaugccucacuuuuuccggcuuuuucgcucuacagucaaacagguggauuucagcgagguggaaagagcccgguuuaucauuaacgacugggucaagacccauacaaaggggaugaucuccaaucugcucggaaagggcgcuguugaucagcugacccgccuugugcuggugaacgcccucuauuucaaugggcaauggaaaacgcccuuuccugacagcucuacccacagacggcuguuccacaaguccgauggaagcacagucucugugccgaugauggcgcagaccaacaaauucaauuacacagaguuuaccacgcccgacggccauuauuacgauauccuggagcucccuuaucacggggacacacuguccauguucauugccgcucccuacgaaaaggagguuccucuuagcgcccugaccaacauccucucugcucagcugauuucccauuggaagggaaauaugacacgccuucccagacugcucgugcugccgaaauuuagccuggaaaccgaggucgaccuccggaagccucuggagaaccuuggcaugaccgauauguuccgccaauuucaggccgacuucacaucccugucugaucaggaaccccuccacguggcccaggcucugcaaaaaguuaagaucgaggugaaugaaagcggcacggucgcguccagcucuaccgccgugauugucuccgcuagaauggccccugaggaaaucauuauggaccggcccuuucuuuucgugguucgccacaaccccacagggaccgugcuguuuaugggacaggucauggagccuuga

SEQ ID NO: 3030 - protein, 415 aa, Artificial Sequence
  PAI-2__Homo_sapiens__P05120
MEDLCVANTLFALNLFKHLAKASPTQNLFLSPWSISSTMAMVYMGSRGSTEDQMAKVLQFNEVGANAVTPMTPENFTSCGFMQQIQKGSYPDAILQAQAADKIHSSFRSLSSAINASTGNYLLESVNKLFGEKSASFREEYIRLCQKYYSSEPQAVDFLECAEEARKKINSWVKTQTKGKIPNLLPEGSVDGDTRMVLVNAVYFKGKWKTPFEKKLNGLYPFRVNSAQRTPVQMMYLREKLNIGYIEDLKAQILELPYAGDVSMFLLLPDEIADVSTGLELLESEITYDKLNKWTSKDKMAEDEVEVYIPQFKLEEHYELRSILRSMGMEDAFNKGRANFSGMSERNDLFLSEVFHQAMVDVNEEGTEAAAGTGGVMTGRTGHGGPQFVADHPFLFLIMHKITNCILFFGRFSSP

SEQ ID NO: 3031 - RNA, 1248 nt, Artificial Sequence
  PAI-2__Homo_sapiens__AAA36797
auggaggaucuuuguguggcaaacacacucuuugcccucaauuuauucaagcaucuggcaaaagcaagccccacccagaaccucuuccucuccccauggagcaucucguccaccauggccauggucuacaugggcuccaggggcagcaccgaagaccagauggccaaggugcuucaguuuaaugaagugggagccaaugcaguuacccccaugacuccagagaacuuuaccagcuguggguucaugcagcagauccagaaggguaguuauccugaugcgauuuugcaggcacaagcugcagauaaaauccauucauccuuccgcucucucagcucugcaaucaaugcauccacagggaauuauuuacuggaaagugucaauaagcuguuuggugagaagucugcgagcuuccgggaagaauauauucgacucugucagaaauauuacuccucagaaccccaggcaguagacuuccuagaaugugcagaagaagcuagaaaaaagauuaauuccugggucaagacucaaaccaaaggcaaaaucccaaacuuguuaccugaagguucuguagauggggauaccaggaugguccuggugaaugcugucuacuucaaaggaaaguggaaaacuccauuugagaagaaacuaaaugggcuuuauccuuuccguguaaacucggcucagcgcacaccuguacagaugauguacuugcgugaaaagcuaaacauuggauacauagaagaccuaaaggcucagauucuagaacucccauaugcuggagauguuagcauguucuuguugcuuccagaugaaauugccgauguguccacuggcuuggagcugcuggaaagugaaauaaccuaugacaaacucaacaaguggaccagcaaagacaaaauggcugaagaugaaguugagguauacauaccccaguucaaauuagaagagcauuaugaacucagauccauucugagaagcaugggcauggaggacgccuucaacaagggacgggccaauuucucagggaugucggagaggaaugaccuguuucuuucugaaguguuccaccaagccaugguggaugugaaugaggagggcacugaagcagccgcuggcacaggagguguuaugacagggagaacuggacauggaggcccacaguuuguggcagaucauccuuuucuuuuucuuauuaugcauaagauaaccaacugcauuuuauuuuucggcagauuuuccucacccuaa

SEQ ID NO: 3032 - RNA, 1248 nt, Artificial Sequence
  derived and/or modified sequence opt1 from PAI-2__Homo_sapiens__AAA36797
auggaggaccugugcguggccaacacccucuucgcccugaaccuguucaagcaccucgcgaaggccagccccacccagaaccuguuccuguccccguggagcaucuccagcacgauggccauggucuacaugggcucccgcgggagcaccgaggaccagauggccaaggugcuccaguucaacgaggugggcgccaacgcggucacccccaugacccccgagaacuucacguccugcggguucaugcagcagauccagaagggcagcuaccccgacgccauccugcaggcccaggccgcggacaagauccacuccagcuuccggucccugagcuccgccaucaacgccagcaccgggaacuaccuccuggaguccgugaacaagcuguucggcgagaaguccgccagcuuccgcgaggaguacauccggcucugccagaaguacuacagcuccgagccgcaggccguggacuuccuggagugcgcggaggaggcccgcaagaagaucaacagcugggucaagacccagaccaagggcaagauccccaaccugcuccccgaggggagcguggacggcgacacgcggauggugcuggucaacgccguguacuucaaggggaaguggaagacccccuucgagaagaagcugaacggccucuacccguuccgcgugaacuccgcccagcggacccccguccagaugauguaccugcgcgagaagcugaacaucggguacaucgaggaccucaaggcccagauccuggagcugcccuacgcgggcgacgugagcauguuccuccugcugcccgacgagaucgccgacguguccaccggccucgagcugcuggagagcgagaucacguacgacaagcucaacaaguggaccuccaaggacaagauggccgaggacgaggucgagguguacaucccgcaguucaagcuggaggagcacuacgagcugcggagcauccuccgcuccauggggauggaggacgccuucaacaagggccgggccaacuucagcgggauguccgagcgcaacgaccuguuccugagcgagguguuccaccaggcgauggucgacgugaacgaggagggcaccgaggccgccgccggcaccgggggcgugaugacggggcggaccggccacgggggcccccaguucgucgccgaccaccccuuccucuuccugaucaugcacaagaucaccaacugcauccuguucuucggccgcuucuccagccccuga

SEQ ID NO: 3033 - RNA, 1248 nt, Artificial Sequence
  derived and/or modified sequence opt2 from PAI-2__Homo_sapiens__AAA36797
auggaggaccucugcgucgccaacacccucuucgcccucaaccucuucaagcaccucgccaaggccucccccacccagaaccucuuccucucccccugguccaucuccuccaccauggccauggucuacaugggcucccgcggcuccaccgaggaccagauggccaagguccuccaguucaacgaggucggcgccaacgccgucacccccaugacccccgagaacuucaccuccugcggcuucaugcagcagauccagaagggcuccuaccccgacgccauccuccaggcccaggccgccgacaagauccacuccuccuuccgcucccucuccuccgccaucaacgccuccaccggcaacuaccuccucgaguccgucaacaagcucuucggcgagaaguccgccuccuuccgcgaggaguacauccgccucugccagaaguacuacuccuccgagccccaggccgucgacuuccucgagugcgccgaggaggcccgcaagaagaucaacuccugggucaagacccagaccaagggcaagauccccaaccuccuccccgagggcuccgucgacggcgacacccgcaugguccucgucaacgccgucuacuucaagggcaaguggaagacccccuucgagaagaagcucaacggccucuaccccuuccgcgucaacuccgcccagcgcacccccguccagaugauguaccuccgcgagaagcucaacaucggcuacaucgaggaccucaaggcccagauccucgagcuccccuacgccggcgacgucuccauguuccuccuccuccccgacgagaucgccgacgucuccaccggccucgagcuccucgaguccgagaucaccuacgacaagcucaacaaguggaccuccaaggacaagauggccgaggacgaggucgaggucuacaucccccaguucaagcucgaggagcacuacgagcuccgcuccauccuccgcuccaugggcauggaggacgccuucaacaagggccgcgccaacuucuccggcauguccgagcgcaacgaccucuuccucuccgaggucuuccaccaggccauggucgacgucaacgaggagggcaccgaggccgccgccggcaccggcggcgucaugaccggccgcaccggccacggcggcccccaguucgucgccgaccaccccuuccucuuccucaucaugcacaagaucaccaacugcauccucuucuucggccgcuucuccucccccuga

SEQ ID NO: 3034 - RNA, 1248 nt, Artificial Sequence
  derived and/or modified sequence opt3 from PAI-2__Homo_sapiens__AAA36797
auggaggaccugugcguggccaacacccucuucgcucuuaaucuguuuaagcacuuggcaaaagccagccccacacagaacuuauuccuguccccuuggucuaucucaaguacuauggcgauggucuacaugggcagcagaggguccacggaagaucaaauggcuaagguucuacaguuuaaugaggugggagccaacgcaguaaccccaaugacaccggaaaauuucacuucuugugguuuuaugcagcagauucaaaaaggcucguaucccgacgccauacuccaggcucaggcagccgauaagauccauagcucauucaggagucuguccucugcuauuaacgccagcaccgggaauuaccuucuggaguccgugaacaaauuguuuggagaaaagucagcgaguuuccgggaggaguauauccgccucugccagaaguacuauagcucugaaccucaagcagucgacuuucuggagugugccgaagaggcucguaaaaagauuaauuccugggugaaaacacagaccaagggcaaaaucccaaaccugcuccccgaggguucaguugauggggacacucgaaugguguuagucaaugccguguacuucaagggaaaguggaaaacaccuuuugaaaagaaacugaacggccuuuauccauucagaguaaauagcgcacagaggacccccguucagaugauguacuugcgggagaagcugaacauaggcuacaucgaagaucuaaaagcucaaauucucgagcugccuuaugccggggacgugaguauguuucuucuguugccagaugaaaucgcggacgucucuacgggacucgagcuguuagaguccgaaauuacuuacgauaagcugaauaaauggaccagcaaggacaagauggccgaggaugaaguggagguguauaucccgcaguucaaacucgaggaacacuacgagcuucgcucgauacugagaucuauggguauggaagacgcauucaacaagggcagggcuaacuuuuccgggaugucagagcggaaugacuuguuccuaagugaagucuuucaucaggccaugguugaugugaacgaggaaggaacagaggcugccgcaggcacuggugggguaaugaccggacgcacaggccacggcgggccccaauucguggccgaccauccuuuucuguuccucauuaugcacaaaaucaccaauugcauucuguuuuucggacgauuuagcuccccauga

SEQ ID NO: 3035 - RNA, 1248 nt, Artificial Sequence
  derived and/or modified sequence opt4 from PAI-2__Homo_sapiens__AAA36797
auggaggaccugugcguggccaacacccuguucgcccugaaccuguucaagcaccuggccaaggccagccccacccagaaccuguuccugagccccuggagcaucagcagcaccauggccaugguguacaugggcagcagaggcagcaccgaggaccagauggccaaggugcugcaguucaacgaggugggcgccaacgccgugacccccaugacccccgagaacuucaccagcugcggcuucaugcagcagauccagaagggcagcuaccccgacgccauccugcaggcccaggccgccgacaagauccacagcagcuucagaagccugagcagcgccaucaacgccagcaccggcaacuaccugcuggagagcgugaacaagcuguucggcgagaagagcgccagcuucagagaggaguacaucagacugugccagaaguacuacagcagcgagccccaggccguggacuuccuggagugcgccgaggaggccagaaagaagaucaacagcugggugaagacccagaccaagggcaagauccccaaccugcugcccgagggcagcguggacggcgacaccagaauggugcuggugaacgccguguacuucaagggcaaguggaagacccccuucgagaagaagcugaacggccuguaccccuucagagugaacagcgcccagagaacccccgugcagaugauguaccugagagagaagcugaacaucggcuacaucgaggaccugaaggcccagauccuggagcugcccuacgccggcgacgugagcauguuccugcugcugcccgacgagaucgccgacgugagcaccggccuggagcugcuggagagcgagaucaccuacgacaagcugaacaaguggaccagcaaggacaagauggccgaggacgagguggagguguacaucccccaguucaagcuggaggagcacuacgagcugagaagcauccugagaagcaugggcauggaggacgccuucaacaagggcagagccaacuucagcggcaugagcgagagaaacgaccuguuccugagcgagguguuccaccaggccaugguggacgugaacgaggagggcaccgaggccgccgccggcaccggcggcgugaugaccggcagaaccggccacggcggcccccaguucguggccgaccaccccuuccuguuccugaucaugcacaagaucaccaacugcauccuguucuucggcagauucagcagccccuga

SEQ ID NO: 3036 - RNA, 1248 nt, Artificial Sequence
  derived and/or modified sequence opt5 from PAI-2__Homo_sapiens__AAA36797
auggaggaccugugcguggccaacacccucuucgcucugaaucuuuuuaagcaccuggccaaagcgagccccacacagaaccucuuccuguccccuuggucuaucagcuccacgauggcuauggucuacaugggcucuagagggagcaccgaagaucaaauggccaagguucuucaguuuaaugaggugggagccaacgcugugacaccgaugacccccgaaaauuucacauccuguggcuuuaugcagcagauucaaaaagggucuuauccugacgccauccugcaggcucaggccgcggauaagauucauagcuccuuccggagccucucuuccgccaucaacgcuagcaccggaaauuaccugcuggagucugucaacaaacucuuuggcgaaaaguccgccagcuuccgcgaggaguauauuagacugugccagaaguacuauucuuccgaaccccaagcuguggacuuucuugagugugccgaagaggcgcggaaaaagaucaauagcuggguuaaaacacagaccaaggggaaaaucccuaaccugcuccccgagggauccguggauggcgacacgcgcaugguccuggugaaugccguuuacuucaagggcaaguggaaaaccccuuuugaaaagaaacuuaacgggcuguauccguucagagucaauucugcucagcggacacccgugcagaugauguaccuccgcgagaagcugaacauuggauacaucgaagaucugaaagcccaaauucucgagcugccuuaugcuggcgacgugagcauguuucuucugcuccccgaugaaaucgccgacguguccaccgggcuggagcuucuggagagcgaaauuacauacgauaagcucaauaaauggaccucuaaggacaagauggccgaggaugaagucgagguuuauaucccucaguucaaacuggaggaacacuacgagcugagauccauucuccggagcaugggaauggaagacgcuuucaacaagggccgcgcgaacuuuucugggaugagcgagagaaaugaccuguuccuuuccgaaguguuucaucaggccaugguggaugucaacgaggaaggaacggaggcugccgccggcacaggcggggugaugaccggacggacaggccacgggggaccccaauucguugcugaccauccguuucuguuccucaucaugcacaaaaucaccaauugcauucuguuuuucggccgcuuuucuagcccuuga

SEQ ID NO: 3037 - protein, 175 aa, Artificial Sequence
  PAP__Homo_sapiens__Q06141
MLPPMALPSVSWMLLSCLMLLSQVQGEEPQRELPSARIRCPKGSKAYGSHCYALFLSPKSWTDADLACQKRPSGNLVSVLSGAEGSFVSSLVKSIGNSYSYVWIGLHDPTQGTEPNGEGWEWSSSDVMNYFAWERNPSTISSPGHCASLSRSTAFLRWKDYNCNVRLPYVCKFTD

SEQ ID NO: 3038 - RNA, 528 nt, Artificial Sequence
  PAP__Homo_sapiens__AAA60020
augcugccucccauggcccugcccaguguaucuuggaugcugcuuuccugccucaugcugcugucucagguucaaggugaagaaccccagagggaacugcccucugcacggauccgcugucccaaaggcuccaaggccuauggcucccacugcuaugccuuguuuuugucaccaaaauccuggacagaugcagaucuggccugccagaagcggcccucuggaaaccuggugucugugcucaguggggcugagggauccuucguguccucccuggugaagagcauugguaacagcuacucauacgucuggauugggcuccaugaccccacacagggcaccgagcccaauggagaagguugggaguggaguagcagugaugugaugaauuacuuugcaugggagagaaaucccuccaccaucucaagccccggccacugugcgagccugucgagaagcacagcauuucugagguggaaagauuauaacuguaaugugagguuacccuaugucugcaaguucacugacuag

SEQ ID NO: 3039 - RNA, 528 nt, Artificial Sequence
  derived and/or modified sequence opt1 from PAP__Homo_sapiens__AAA60020
augcugcccccgauggcccuccccagcguguccuggaugcugcugagcugccucaugcugcugucccagguccagggcgaggagccccagcgcgagcuccccagcgcccggauccgcugcccgaagggguccaaggcguacggcagccacugcuacgcccuguuccugucccccaagagcuggaccgacgccgaccucgccugccagaagcggcccuccgggaaccuggugagcgugcuguccggcgccgaggggagcuucgucuccagccucgugaaguccaucggcaacagcuacuccuacguguggaucggccugcacgaccccacccaggggacggagccgaacggcgaggggugggaguggagcuccagcgacgucaugaacuacuucgcgugggagcgcaaccccagcaccaucuccagccccggccacugcgccucccugagccgguccaccgccuuccuccgcuggaaggacuacaacugcaacgugcggcugcccuacgugugcaaguucaccgacuga

SEQ ID NO: 3040 - RNA, 528 nt, Artificial Sequence
  derived and/or modified sequence opt2 from PAP__Homo_sapiens__AAA60020
augcucccccccauggcccuccccuccgucuccuggaugcuccucuccugccucaugcuccucucccagguccagggcgaggagccccagcgcgagcuccccuccgcccgcauccgcugccccaagggcuccaaggccuacggcucccacugcuacgcccucuuccucucccccaaguccuggaccgacgccgaccucgccugccagaagcgccccuccggcaaccucgucuccguccucuccggcgccgagggcuccuucgucuccucccucgucaaguccaucggcaacuccuacuccuacgucuggaucggccuccacgaccccacccagggcaccgagcccaacggcgagggcugggagugguccuccuccgacgucaugaacuacuucgccugggagcgcaaccccuccaccaucuccucccccggccacugcgccucccucucccgcuccaccgccuuccuccgcuggaaggacuacaacugcaacguccgccuccccuacgucugcaaguucaccgacuga

SEQ ID NO: 3041 - RNA, 528 nt, Artificial Sequence
  derived and/or modified sequence opt3 from PAP__Homo_sapiens__AAA60020
augcugcccccuauggcccucccaagcguguccuggaugcuucugucuugcuugauguuacugucacagguccaaggcgaggaaccgcagagagagcuacccagugcuaggauccgguguccuaaggggagcaaagcauacggaucccacugcuaugcccucuuccugucuccaaagucguggaccgacgcggaucuugcuugucagaaacgccccucagguaaccugguuagcguguugaguggcgccgaaggguccuuuguaucuagccucgugaaguccauuggaaauucauacaguuaugucuggauaggccugcaugacccuacacaggguacugagccaaacggggaaggaugggaguggucuagcuccgaugugaugaauuacuucgcaugggagcgaaaccccucaacgaucagcaguccuggccacugcgccucucugucccguagcaccgcuuuucucagauggaaagacuauaauuguaacguuagguuaccauacgugugcaaguucacagauuga

SEQ ID NO: 3042 - RNA, 528 nt, Artificial Sequence
  derived and/or modified sequence opt4 from PAP__Homo_sapiens__AAA60020
augcugccccccauggcccugcccagcgugagcuggaugcugcugagcugccugaugcugcugagccaggugcagggcgaggagccccagagagagcugcccagcgccagaaucagaugccccaagggcagcaaggccuacggcagccacugcuacgcccuguuccugagccccaagagcuggaccgacgccgaccuggccugccagaagagacccagcggcaaccuggugagcgugcugagcggcgccgagggcagcuucgugagcagccuggugaagagcaucggcaacagcuacagcuacguguggaucggccugcacgaccccacccagggcaccgagcccaacggcgagggcugggaguggagcagcagcgacgugaugaacuacuucgccugggagagaaaccccagcaccaucagcagccccggccacugcgccagccugagcagaagcaccgccuuccugagauggaaggacuacaacugcaacgugagacugcccuacgugugcaaguucaccgacuga

SEQ ID NO: 3043 - RNA, 528 nt, Artificial Sequence
  derived and/or modified sequence opt5 from PAP__Homo_sapiens__AAA60020
augcugcccccuauggcccucccgagcguguccuggaugcugcuuucuugccugaugcuccugagccagguccaaggcgaggaaccccagagagagcuuccuuccgcucggauccgcugucccaaggggucuaaagccuacggaagccacugcuaugcgcuguuccucuccccuaagucuuggaccgacgcugaucuggccugucagaaaagacccagcggcaaccugguuuccgugcucagcggggccgaaggaucuuuuguguccagccuggucaagucuauuggcaauuccuacagcuauguguggaucgggcuucaugacccuacacagggaacggagccgaacggcgaaggcugggaguggucuuccagcgauguuaugaauuacuucgcuugggagcggaaccccuccaccauuucuagcccugggcacugcgccucccugagccgcucuacagcuuuucucagauggaaagacuauaauuguaacgugcggcugcccuacgucugcaaguucaccgauuga

SEQ ID NO: 3044 - protein, 175 aa, Artificial Sequence; identical to SEQ ID NO: 3037
  PAP__Homo_sapiens__Q53S56

SEQ ID NO: 3045 - RNA, 528 nt, Artificial Sequence; identical to SEQ ID NO: 3038
  PAP__Homo_sapiens__AAT11159

SEQ ID NO: 3046 - RNA, 528 nt, Artificial Sequence; identical to SEQ ID NO: 3039
  derived and/or modified sequence opt1 from PAP__Homo_sapiens__AAT11159

SEQ ID NO: 3047 - RNA, 528 nt, Artificial Sequence; identical to SEQ ID NO: 3040
  derived and/or modified sequence opt2 from PAP__Homo_sapiens__AAT11159

SEQ ID NO: 3048 - RNA, 528 nt, Artificial Sequence; identical to SEQ ID NO: 3041
  derived and/or modified sequence opt3 from PAP__Homo_sapiens__AAT11159

SEQ ID NO: 3049 - RNA, 528 nt, Artificial Sequence; identical to SEQ ID NO: 3042
  derived and/or modified sequence opt4 from PAP__Homo_sapiens__AAT11159

SEQ ID NO: 3050 - RNA, 528 nt, Artificial Sequence; identical to SEQ ID NO: 3043
  derived and/or modified sequence opt5 from PAP__Homo_sapiens__AAT11159

SEQ ID NO: 3051 - protein, 126 aa, Artificial Sequence
  PATE__Homo_sapiens__Q8WXA2
MDKSLLLELPILLCCFRALSGSLSMRNDAVNEIVAVKNNFPVIEIVQCRMCHLQFPGEKCSRGRGICTATTEEACMVGRMFKRDGNPWLTFMGCLKNCADVKGIRWSVYLVNFRCCRSHDLCNEDL

SEQ ID NO: 3052 - RNA, 381 nt, Artificial Sequence
  PATE__Homo_sapiens__AAH39863
auggacaagucccucuugcuggaacuccccauccugcucugcugcuuuagggcauuaucuggaucacuuucaaugagaaaugaugcagucaaugaaauaguugcugugaaaaacaauuuuccugugauagaaauuguucaguguaggaugugccaccuccaguucccaggagaaaagugcuccagaggaagaggaauaugcacagcaacaacagaagaggccugcaugguuggaaggauguucaaaagggaugguaaucccugguuaaccuucaugggcugccuaaagaacugugcugaugugaaaggcauaagguggagugucuauuuggugaacuucaggugcugcaggagccaugaccugugcaaugaagaccuuuag

SEQ ID NO: 3053 - RNA, 381 nt, Artificial Sequence
  derived and/or modified sequence opt1 from PATE__Homo_sapiens__AAH39863
auggacaagagccugcuccuggagcugcccauccuccugugcugcuuccgcgcccuguccggcagccucuccaugcggaacgacgccgugaacgagaucgucgcggugaagaacaacuucccggugaucgagaucguccagugccgcaugugccaccuccaguuccccggggagaagugcagccggggccgcgggaucugcaccgccaccacggaggaggccugcauggugggccggauguucaagcgcgacgggaaccccuggcugaccuucaugggcugccugaagaacugcgccgacgugaagggcauccggugguccgucuaccuggugaacuuccgcugcugccggagccacgaccugugcaacgaggaccucuga

SEQ ID NO: 3054 - RNA, 381 nt, Artificial Sequence
  derived and/or modified sequence opt2 from PATE__Homo_sapiens__AAH39863
auggacaagucccuccuccucgagcuccccauccuccucugcugcuuccgcgcccucuccggcucccucuccaugcgcaacgacgccgucaacgagaucgucgccgucaagaacaacuuccccgucaucgagaucguccagugccgcaugugccaccuccaguuccccggcgagaagugcucccgcggccgcggcaucugcaccgccaccaccgaggaggccugcauggucggccgcauguucaagcgcgacggcaaccccuggcucaccuucaugggcugccucaagaacugcgccgacgucaagggcauccgcugguccgucuaccucgucaacuuccgcugcugccgcucccacgaccucugcaacgaggaccucuga

SEQ ID NO: 3055 - RNA, 381 nt, Artificial Sequence
  derived and/or modified sequence opt3 from PATE__Homo_sapiens__AAH39863
auggacaagagccugcuccuugagcugcccaucuuguuaugcuguuucagagcccuguccggcucucuaucaaugaggaacgaugcugugaaugaaauugucgcaguuaaaaacaauuuuccugugauagagaucguacagugccggaugugucaccuccaauucccaggggaaaagugcagucgcggacgagguauuuguaccgccacaacugaggaagcgugcauggugggccguauguuuaaaagagacgggaacccguggcugacguucaugggaugucuuaagaauugcgcugaugucaaaggcaucagguggagcguguaccugguuaacuuucgguguugccgcucccaugacuuguguaaugaggaucucuga

SEQ ID NO: 3056 - RNA, 381 nt, Artificial Sequence
  derived and/or modified sequence opt4 from PATE__Homo_sapiens__AAH39863
auggacaagagccugcugcuggagcugcccauccugcugugcugcuucagagcccugagcggcagccugagcaugagaaacgacgccgugaacgagaucguggccgugaagaacaacuuccccgugaucgagaucgugcagugcagaaugugccaccugcaguuccccggcgagaagugcagcagaggcagaggcaucugcaccgccaccaccgaggaggccugcauggugggcagaauguucaagagagacggcaaccccuggcugaccuucaugggcugccugaagaacugcgccgacgugaagggcaucagauggagcguguaccuggugaacuucagaugcugcagaagccacgaccugugcaacgaggaccuguga

SEQ ID NO: 3057 - RNA, 381 nt, Artificial Sequence
  derived and/or modified sequence opt5 from PATE__Homo_sapiens__AAH39863
auggacaagagccugcuccuggagcuucccauccugcucugcuguuucagagcccuguccggcucucuuagcaugcggaacgaugcugugaaugaaauugucgccguuaaaaacaauuuuccugugaucgagauugugcagugccgcaugugucaucugcaauucccgggggaaaagugcuccagaggacggggcaucuguaccgcgacaacggaggaggcuugcauggucgggcgcauguuuaaaagagacggaaaccccuggcucaccuucaugggcugucugaagaauugcgccgaugugaaagggauucgguggucuguuuaccuggugaacuuucgcuguugcagaagccacgaccucuguaaugaagaucuguga

SEQ ID NO: 3058 - protein, 479 aa, Artificial Sequence
  PAX3__Homo_sapiens__P23760
MTTLAGAVPRMMRPGPGQNYPRSGFPLEVSTPLGQGRVNQLGGVFINGRPLPNHIRHKIVEMAHHGIRPCVISRQLRVSHGCVSKILCRYQETGSIRPGAIGGSKPKQVTTPDVEKKIEEYKRENPGMFSWEIRDKLLKDAVCDRNTVPSVSSISRILRSKFGKGEEEEADLERKEAEESEKKAKHSIDGILSERASAPQSDEGSDIDSEPDLPLKRKQRRSRTTFTAEQLEELERAFERTHYPDIYTREELAQRAKLTEARVQVWFSNRRARWRKQAGANQLMAFNHLIPGGFPPTAMPTLPTYQLSETSYQPTSIPQAVSDPSSTVHRPQPLPPSTVHQSTIPSNPDSSSAYCLPSTRHGFSSYTDSFVPPSGPSNPMNPTIGNGLSPQVMGLLTNHGGVPHQPQTDYALSPLTGGLEPTTTVSASCSQRLDHMKSLDSLPTSQSYCPPTYSTTGYSMDPVTGYQYGQYGQSKPWTF

SEQ ID NO: 3059 - RNA, 1440 nt, Artificial Sequence
  PAX3__Homo_sapiens__CCDS42826.1
augaccacgcuggccggcgcugugcccaggaugaugcggccgggcccggggcagaacuacccgcguagcggguucccgcuggaaguguccacuccccucggccagggccgcgucaaccagcucggcgguguuuuuaucaacggcaggccgcugcccaaccacauccgccacaagaucguggagauggcccaccacggcauccggcccugcgucaucucgcgccagcugcgcgugucccacggcugcgucuccaagauccugugcagguaccaggagacuggcuccauacguccuggugccaucggcggcagcaagcccaagcaggugacaacgccugacguggagaagaaaauugaggaauacaaaagagagaacccgggcauguucagcugggaaauccgagacaaauuacucaaggacgcggucugugaucgaaacaccgugccgucagugaguuccaucagccgcauccugagaaguaaauucgggaaaggugaagaggaggaggccgacuuggagaggaaggaggcagaggaaagcgagaagaaggccaaacacagcaucgacggcauccugagcgagcgagccucagcaccccaaucagaugaaggcucugauauugacucugaaccagauuuaccacuaaagaggaaacagcgcagaagccgaaccaccuucacagcagaacagcuggaggaacuggagcgugcuuuugagagaacucauuacccugacauuuauacuagggaggaacuggcccagagggcgaagcucaccgaggcccgaguacaggucugguuuagcaaccgccgugcaagauggaggaagcaagcuggggccaaucaacugauggcuuucaaccaucucauucccgggggguucccucccacugccaugccgaccuugccaacguaccagcugucggagaccucuuaccagcccacaucuauuccacaagcugugucagaucccagcagcaccguucacagaccucaaccgcuuccuccaagcacuguacaccaaagcacgauuccuuccaacccagacagcagcucugccuacugccuccccagcaccaggcauggauuuuccagcuauacagacagcuuugugccuccgucggggcccuccaaccccaugaaccccaccauuggcaauggccucucaccucagguaaugggacuccugaccaaccacggugggguaccucaucagccccagacugauuacgcgcucuccccucucaccgggggucuggaaccuaccaccacggugucggccagcugcagucagagacuagaccauaugaagagcuuggacagucugccaacaucucaguccuacuguccacccaccuauagcaccacaggcuacaguauggacccugucacaggcuaccaauaugggcaguauggacaaaguaagccuuggacuuuuuag

SEQ ID NO: 3060 - RNA, 1440 nt, Artificial Sequence
  derived and/or modified sequence opt1 from PAX3__Homo_sapiens__CCDS42826.1
augaccacccuggccggcgccgugccccgcaugaugcggccggggcccggccagaacuacccccgcagcggguucccccucgaggucuccacgccgcugggccaggggcgggugaaccagcugggcggcguguucaucaacgggcgcccccuccccaaccacauccggcacaagaucgucgagauggcgcaccacggcauccgccccugcgugaucagccggcagcugcgcgugucccacgggugcgucagcaagauccugugccgguaccaggagaccggcuccauccgcccgggggccaucggcggcagcaagcccaagcaggucaccacccccgacguggagaagaagaucgaggaguacaagcgggagaaccccgggauguucuccugggagauccgcgacaagcuccugaaggacgccgugugcgaccggaacacggugccgagcguguccagcaucucccgcauccugcggagcaaguucggcaagggggaggaggaggaggccgaccucgagcgcaaggaggccgaggaguccgagaagaaggcgaagcacagcaucgacggcauccuguccgagcgggccagcgcgccccaguccgacgagggcagcgacaucgacuccgagcccgaccugccccucaagcgcaagcagcggcgcagccggaccaccuucaccgccgagcagcuggaggagcuggagcgcgccuucgagcgcacgcacuacccggacaucuacacccgggaggagcucgcccagcgcgccaagcugaccgaggcccggguccaggugugguucagcaaccgccgggcccgcuggcggaagcaggcgggggccaaccagcugauggccuucaaccaccucauccccggcggguucccgcccaccgccaugcccacgcugcccaccuaccagcuguccgagaccagcuaccagcccaccuccaucccccaggccgugagcgacccguccagcacgguccaccgcccccagccccugcccccguccaccgugcaccagagcaccauccccuccaaccccgacagcuccagcgcguacugccucccguccacccggcacggcuucagcuccuacacggacagcuucgugccgcccuccgggcccagcaaccccaugaaccccaccaucggcaacggccuguccccgcaggucauggggcuccugaccaaccacggcggggugccccaccagccccagaccgacuacgcccugagcccccucacgggcgggcuggagcccaccaccaccgugagcgccuccugcagccagcgccuggaccacaugaagucccucgacagccugcccacgucccagagcuacugcccgcccaccuacuccaccaccggcuacagcauggaccccgucacgggcuaccaguacgggcaguacggccaguccaagcccuggaccuucuga

SEQ ID NO: 3061 - RNA, 1440 nt, Artificial Sequence
  derived and/or modified sequence opt2 from PAX3__Homo_sapiens__CCDS42826.1
augaccacccucgccggcgccgucccccgcaugaugcgccccggccccggccagaacuacccccgcuccggcuucccccucgaggucuccaccccccucggccagggccgcgucaaccagcucggcggcgucuucaucaacggccgcccccuccccaaccacauccgccacaagaucgucgagauggcccaccacggcauccgccccugcgucaucucccgccagcuccgcgucucccacggcugcgucuccaagauccucugccgcuaccaggagaccggcuccauccgccccggcgccaucggcggcuccaagcccaagcaggucaccacccccgacgucgagaagaagaucgaggaguacaagcgcgagaaccccggcauguucuccugggagauccgcgacaagcuccucaaggacgccgucugcgaccgcaacaccguccccuccgucuccuccaucucccgcauccuccgcuccaaguucggcaagggcgaggaggaggaggccgaccucgagcgcaaggaggccgaggaguccgagaagaaggccaagcacuccaucgacggcauccucuccgagcgcgccuccgccccccaguccgacgagggcuccgacaucgacuccgagcccgaccucccccucaagcgcaagcagcgccgcucccgcaccaccuucaccgccgagcagcucgaggagcucgagcgcgccuucgagcgcacccacuaccccgacaucuacacccgcgaggagcucgcccagcgcgccaagcucaccgaggcccgcguccaggucugguucuccaaccgccgcgcccgcuggcgcaagcaggccggcgccaaccagcucauggccuucaaccaccucauccccggcggcuucccccccaccgccaugcccacccuccccaccuaccagcucuccgagaccuccuaccagcccaccuccaucccccaggccgucuccgaccccuccuccaccguccaccgcccccagccccucccccccuccaccguccaccaguccaccauccccuccaaccccgacuccuccuccgccuacugccuccccuccacccgccacggcuucuccuccuacaccgacuccuucgucccccccuccggccccuccaaccccaugaaccccaccaucggcaacggccucuccccccaggucaugggccuccucaccaaccacggcggcgucccccaccagccccagaccgacuacgcccucuccccccucaccggcggccucgagcccaccaccaccgucuccgccuccugcucccagcgccucgaccacaugaagucccucgacucccuccccaccucccaguccuacugcccccccaccuacuccaccaccggcuacuccauggaccccgucaccggcuaccaguacggccaguacggccaguccaagcccuggaccuucuga

SEQ ID NO: 3062 - RNA, 1440 nt, Artificial Sequence
  derived and/or modified sequence opt3 from PAX3__Homo_sapiens__CCDS42826.1
augaccacacuggccggcgcugugcccagaaugaugaggccugggccaggacagaacuacccgcggagcgguuucccccucgaggucuccacuccucuuggccaagggcgcguuaaucagcugggaggcguguuuaucaacggucgaccauugcccaaucacauucgucauaagauaguagaaauggcacaccaugggaucagaccuugcgugauuucuaggcaguuacgggucucacacggaugcgugaguaaaauccugugccgcuaucaggagacgggcagcauuagaccaggcgccaucgggggauccaagcccaaacaaguuaccacaccugacguggaaaagaaaauagaggaauacaagagggagaacccagguauguucucuugggagauccgggauaagcuacucaaagacgcggucugugaucgcaauacugugccgucgguaucaagcauuagucgaauccugagauccaaguuuggcaaaggggaagaggaagaggcugaccuugagaggaaggaagccgaggaaucugagaaaaaggcaaagcauagcauugauggaauccuguccgaacgggccucagcuccccagagugacgagggcagcgauauagacucugagccugauuugccacucaaacguaagcagcgcagauccaggaccacauucaccgcagaacagcuggaggaacuggagcgggccuuugaacgaacucacuaucccgacauuuacacacgcgaggagcucgcucaaagagccaaauuaaccgaagcgaggguucaggugugguucucaaaccggcgcgcaagauggaggaagcaggccggugcuaaucagcugauggccuuuaaccaccuuaucccugggggauucccacccacggcaaugccgacuuugccuaccuaucaacugagcgagacaaguuaccagcccacuucuauuccacaggcugucuccgauccuagcucgaccgugcaucguccccaaccacuacccccuucuacagugcaccaguccaccaucccaucaaauccggacaguagcuccgccuauugccuccccucuacgcggcauggcuuuagcucauacacugauaguuucgucccuccauccggccccagcaacccuaugaauccaacaaucgggaacggacugucuccccagguuaugggucuucugaccaaucacggcggggugccgcaccagccucaaacugacuacgcguugucaccacucacaggaggccuggaacccaccacgaccguaagugccagcuguucccagcgauuagaccauaugaaaucucuggauucgcucccuacaagccaguccuauugucccccaacuuacucaaccacagguuauaguauggacccugugacuggguaccaguauggccaauacggacagucuaagcccuggaccuuuuga

SEQ ID NO: 3063 - RNA, 1440 nt, Artificial Sequence
  derived and/or modified sequence opt4 from PAX3__Homo_sapiens__CCDS42826.1
augaccacccuggccggcgccgugcccagaaugaugagacccggccccggccagaacuaccccagaagcggcuucccccuggaggugagcaccccccugggccagggcagagugaaccagcugggcggcguguucaucaacggcagaccccugcccaaccacaucagacacaagaucguggagauggcccaccacggcaucagacccugcgugaucagcagacagcugagagugagccacggcugcgugagcaagauccugugcagauaccaggagaccggcagcaucagacccggcgccaucggcggcagcaagcccaagcaggugaccacccccgacguggagaagaagaucgaggaguacaagagagagaaccccggcauguucagcugggagaucagagacaagcugcugaaggacgccgugugcgacagaaacaccgugcccagcgugagcagcaucagcagaauccugagaagcaaguucggcaagggcgaggaggaggaggccgaccuggagagaaaggaggccgaggagagcgagaagaaggccaagcacagcaucgacggcauccugagcgagagagccagcgccccccagagcgacgagggcagcgacaucgacagcgagcccgaccugccccugaagagaaagcagagaagaagcagaaccaccuucaccgccgagcagcuggaggagcuggagagagccuucgagagaacccacuaccccgacaucuacaccagagaggagcuggcccagagagccaagcugaccgaggccagagugcaggugugguucagcaacagaagagccagauggagaaagcaggccggcgccaaccagcugauggccuucaaccaccugauccccggcggcuucccccccaccgccaugcccacccugcccaccuaccagcugagcgagaccagcuaccagcccaccagcaucccccaggccgugagcgaccccagcagcaccgugcacagaccccagccccugccccccagcaccgugcaccagagcaccauccccagcaaccccgacagcagcagcgccuacugccugcccagcaccagacacggcuucagcagcuacaccgacagcuucgugccccccagcggccccagcaaccccaugaaccccaccaucggcaacggccugagcccccaggugaugggccugcugaccaaccacggcggcgugccccaccagccccagaccgacuacgcccugagcccccugaccggcggccuggagcccaccaccaccgugagcgccagcugcagccagagacuggaccacaugaagagccuggacagccugcccaccagccagagcuacugcccccccaccuacagcaccaccggcuacagcauggaccccgugaccggcuaccaguacggccaguacggccagagcaagcccuggaccuucuga

SEQ ID NO: 3064 - RNA, 1440 nt, Artificial Sequence
  derived and/or modified sequence opt5 from PAX3__Homo_sapiens__CCDS42826.1
augaccacacuggccggcgcugugcccagaaugaugcggccugggccgggacagaacuacccccgcagcggcuucccucucgaggucuccacgccccuggggcaaggaagaguuaaucagcuuggcgggguguuuaucaacggacggccucugcccaaucacauucgccauaagaucguggaaauggcccaccauggcauuagaccuugcgucaucucucggcagcuccgcgugagccacggcuguguuuccaaaauucugugcagauaucaggagaccgggucuauccggccgggagcgaucggcgggagcaagcccaaacaagugacaaccccugacgucgaaaagaaaauugaggaauacaagcgcgagaaccccggaauguucuccugggagaucagagauaaacuucugaaggacgcugugugugaucggaauacaguuccuucugugagcuccauuagccgcauccucagaucuaaguuuggcaaaggggaagaggaagaggccgaccuggagcggaaggaagccgaggaauccgagaaaaaggcuaagcauagcauugauggaauccugucugaacgcgccuccgcuccccagagcgacgagggcucugauauugacuccgagccggaucucccucugaaaagaaagcagcggagaagccgcaccacauucaccgccgaacagcuugaggaacuggagcgggcguuugaaagaacgcacuaucccgacaucuacacccgcgaggagcucgcccaacgggcuaaacugacagaagccagaguccaggugugguucuccaaccgccgggcuagauggcgcaagcaggccggcgcgaaucagcuuauggccuuuaaccaccugaucccugggggauucccucccaccgcuaugcccacacucccgaccuaucaacugucugagacgagcuaccagcccacauccauuccucaggccgugagcgaucccucuuccaccguccaucggccucaaccccugccgccuagcacaguucaccagucuaccauccccagcaauccugacuccucuagcgcuuauugccuccccuccaccagacauggcuuuagcucuuacacagauuccuucgugccucccagcgggccgucuaacccuaugaaucccacgauuggaaacggccuguccccucaggugauggggcuucugaccaaucacggaggcgucccccaccagccgcaaacagacuacgcccucagcccccugaccggcgggcuugaaccuacaaccacgguguccgccucuuguagccagcgccuggaccauaugaaaucccucgauucucugcccacaagccaguccuauugcccucccaccuacagcaccacaggauauucuauggacccuguuaccggcuaccaguaugggcaauacggacaguccaagcccuggacauuuuga

SEQ ID NO: 3065 - protein, 391 aa, Artificial Sequence
  PAX5__Homo_sapiens__Q02548
MDLEKNYPTPRTSRTGHGGVNQLGGVFVNGRPLPDVVRQRIVELAHQGVRPCDISRQLRVSHGCVSKILGRYYETGSIKPGVIGGSKPKVATPKVVEKIAEYKRQNPTMFAWEIRDRLLAERVCDNDTVPSVSSINRIIRTKVQQPPNQPVPASSHSIVSTGSVTQVSSVSTDSAGSSYSISGILGITSPSADTNKRKRDEGIQESPVPNGHSLPGRDFLRKQMRGDLFTQQQLEVLDRVFERQHYSDIFTTTEPIKPEQTTEYSAMASLAGGLDDMKANLASPTPADIGSSVPGPQSYPIVTGRDLASTTLPGYPPHVPPAGQGSYSAPTLTGMVPGSEFSGSPYSHPQYSSYNDSWRFPNPGLLGSPYYYSAAARGAAPPAAATAYDRH

SEQ ID NO: 3066 - RNA, 1176 nt, Artificial Sequence
  PAX5__Homo_sapiens__AAA58397
auggauuuagagaaaaauuauccgacuccucggaccagcaggacaggacauggaggagugaaucagcuuggggggguuuuugugaauggacggccacucccggauguaguccgccagaggauaguggaacuugcucaucaaggugucaggcccugcgacaucuccaggcagcuucgggucagccaugguugugucagcaaaauucuuggcagguauuaugagacaggaagcaucaagccugggguaauuggaggauccaaaccaaaggucgccacacccaaagugguggaaaaaaucgcugaauauaaacgccaaaaucccaccauguuugccugggagaucagggaccggcugcuggcagagcgggugugugacaaugacaccgugccuagcgucaguuccaucaacaggaucauccggacaaaaguacagcagccacccaaccaaccagucccagcuuccagucacagcauaguguccacuggcuccgugacgcagguguccucggugagcacggauucggccggcucgucguacuccaucagcggcauccugggcaucacgucccccagcgccgacaccaacaagcgcaagagagacgaagguauucaggagucuccggugccgaacggccacucgcuuccgggcagagacuuccuccggaagcagaugcggggagacuuguucacacagcagcagcuggaggugcuggaccgcguguuugagaggcagcacuacucagacaucuucaccaccacagagcccaucaagcccgagcagaccacagaguauucagccauggccucgcuggcuggugggcuggacgacaugaaggccaaucuggccagccccaccccugcugacaucgggagcagugugccaggcccgcaguccuaccccauugugacaggccgugacuuggcgagcacgacccuccccggguacccuccacacgucccccccgcuggacagggcagcuacucagcaccgacgcugacagggauggugccugggagugaguuuuccgggagucccuacagccacccucaguauuccucguacaacgacuccuggagguuccccaacccggggcugcuuggcucccccuacuauuauagcgcugccgcccgaggagccgccccaccugcagccgccacugccuaugaccgucacuga

SEQ ID NO: 3067 - RNA, 1176 nt, Artificial Sequence
  derived and/or modified sequence opt1 from PAX5__Homo_sapiens__AAA58397
auggaccuggagaagaacuaccccacgccccgcaccagccggaccggccacgggggcgugaaccagcucgggggcgucuucgugaacgggcgcccccugcccgacgugguccggcagcgcaucguggagcuggcccaccagggcgugcggcccugcgacaucucccgccagcuccgggucagccacggcugcguguccaagauccuggggcgcuacuacgagaccggcagcaucaagccgggggugaucggcggguccaagcccaaggucgccacccccaaggugguggagaagaucgcggaguacaagcggcagaaccccaccauguucgccugggagauccgcgaccggcugcucgccgagcgcgucugcgacaacgacacggugccgagcguguccagcaucaaccggaucauccgcaccaagguccagcagccgcccaaccagcccgugcccgccuccagccacuccaucgugagcaccggcuccgucacccaggugagcuccgugagcacggacuccgccggcagcuccuacagcaucagcgggauccugggcaucaccucccccagcgcggacaccaacaagcggaagcgcgacgaggggauccaggagucccccguccccaacggccacagccugccgggccgggacuuccuccgcaagcagaugcgcggggaccuguucacccagcagcagcuggaggugcucgaccggguguucgagcggcagcacuacuccgacaucuucacgaccaccgagcccaucaagcccgagcagaccacggaguacagcgccauggccucccuggccggcgggcuggacgacaugaaggcgaaccucgccagccccaccccggccgacaucggcuccagcguccccgggccccaguccuaccccaucgugaccggccgcgaccuggccagcaccacgcugccgggcuacccgccccacgucccgcccgccgggcagggcuccuacagcgcgcccacccucaccgggauggugcccggcuccgaguucagcgggucccccuacagccacccccaguacuccagcuacaacgacagcuggcgcuuccccaaccccggccugcugggcuccccguacuacuacagcgccgccgcccgcggggccgcgccgcccgccgccgccaccgccuacgaccggcacuga

SEQ ID NO: 3068 - RNA, 1176 nt, Artificial Sequence
  derived and/or modified sequence opt2 from PAX5__Homo_sapiens__AAA58397
auggaccucgagaagaacuaccccaccccccgcaccucccgcaccggccacggcggcgucaaccagcucggcggcgucuucgucaacggccgcccccuccccgacgucguccgccagcgcaucgucgagcucgcccaccagggcguccgccccugcgacaucucccgccagcuccgcgucucccacggcugcgucuccaagauccucggccgcuacuacgagaccggcuccaucaagcccggcgucaucggcggcuccaagcccaaggucgccacccccaaggucgucgagaagaucgccgaguacaagcgccagaaccccaccauguucgccugggagauccgcgaccgccuccucgccgagcgcgucugcgacaacgacaccguccccuccgucuccuccaucaaccgcaucauccgcaccaagguccagcagccccccaaccagcccguccccgccuccucccacuccaucgucuccaccggcuccgucacccaggucuccuccgucuccaccgacuccgccggcuccuccuacuccaucuccggcauccucggcaucaccucccccuccgccgacaccaacaagcgcaagcgcgacgagggcauccaggagucccccguccccaacggccacucccuccccggccgcgacuuccuccgcaagcagaugcgcggcgaccucuucacccagcagcagcucgagguccucgaccgcgucuucgagcgccagcacuacuccgacaucuucaccaccaccgagcccaucaagcccgagcagaccaccgaguacuccgccauggccucccucgccggcggccucgacgacaugaaggccaaccucgccucccccacccccgccgacaucggcuccuccguccccggcccccaguccuaccccaucgucaccggccgcgaccucgccuccaccacccuccccggcuaccccccccacgucccccccgccggccagggcuccuacuccgcccccacccucaccggcaugguccccggcuccgaguucuccggcucccccuacucccacccccaguacuccuccuacaacgacuccuggcgcuuccccaaccccggccuccucggcucccccuacuacuacuccgccgccgcccgcggcgccgccccccccgccgccgccaccgccuacgaccgccacuga

SEQ ID NO: 3069 - RNA, 1176 nt, Artificial Sequence
  derived and/or modified sequence opt3 from PAX5__Homo_sapiens__AAA58397
auggaccuggagaagaacuaccccaccccuagaacaagcaggacuggccacgggggagugaaucagcucgguggcgucuucguuaacgggcggccacuuccggaugugguacgccaacgaaucguggaacuggcccaucagggaguccgucccugcgacauuuccagacaguugagggugucucacggcuguguuucaaaaauauuaggucgguauuacgagacggggaguaucaagccuggagugauuggcggcagcaaaccaaaggucgcuacccccaaagugguagaaaagaucgcagaguauaagcgccagaauccuacaauguuugccugggaaauuagagauaggcugcuagcggagcggguuugcgacaacgauacugugccauccgucucuucgaucaaucgcauaauccgaaccaaagugcaacagcccccuaaccagccagugccggcuucaagccauaguauugucuccacagggucuguuacccaggugagcuccguaucaacugacagugccggaagcucuuacuccaucucagguauucucggcaucacaagccccagugcagauaccaauaagagaaaaagggacgaggggauacaagaaucuccugugccaaacggacacucccugcccggccgggauuuccuucguaagcagaugcgcggugaccuguuuacgcagcagcaauuggagguccucgauagaguguucgaaaggcagcauuauagcgacauuuuuacuaccacagagccuaucaaaccagagcagacuaccgaauacucggccauggcuucucuggcagggggacuggaugacaugaaggccaaucucgcuucccccacaccggccgacauuggcucaaguguuccuggcccccaaagcuauccaaucgugaccgggcgggauuuagcguccacgacucugccuggauaucccccacacgugcccccugcaggucagggcucuuacagcgccccaacacuuaccgggauggucccgggaucagaguucaguggcucccccuacagccacccucaguacucuucauauaacgacaguuggcgauuuccaaaucccgguuugcuggggagcccuuacuauuacuccgcugccgcacgcggcgcugccccacccgcggccgcaacugcuuaugauagacauuga

SEQ ID NO: 3070 - RNA, 1176 nt, Artificial Sequence
  derived and/or modified sequence opt4 from PAX5__Homo_sapiens__AAA58397
auggaccuggagaagaacuaccccacccccagaaccagcagaaccggccacggcggcgugaaccagcugggcggcguguucgugaacggcagaccccugcccgacguggugagacagagaaucguggagcuggcccaccagggcgugagacccugcgacaucagcagacagcugagagugagccacggcugcgugagcaagauccugggcagauacuacgagaccggcagcaucaagcccggcgugaucggcggcagcaagcccaagguggccacccccaaggugguggagaagaucgccgaguacaagagacagaaccccaccauguucgccugggagaucagagacagacugcuggccgagagagugugcgacaacgacaccgugcccagcgugagcagcaucaacagaaucaucagaaccaaggugcagcagccccccaaccagcccgugcccgccagcagccacagcaucgugagcaccggcagcgugacccaggugagcagcgugagcaccgacagcgccggcagcagcuacagcaucagcggcauccugggcaucaccagccccagcgccgacaccaacaagagaaagagagacgagggcauccaggagagccccgugcccaacggccacagccugcccggcagagacuuccugagaaagcagaugagaggcgaccuguucacccagcagcagcuggaggugcuggacagaguguucgagagacagcacuacagcgacaucuucaccaccaccgagcccaucaagcccgagcagaccaccgaguacagcgccauggccagccuggccggcggccuggacgacaugaaggccaaccuggccagccccacccccgccgacaucggcagcagcgugcccggcccccagagcuaccccaucgugaccggcagagaccuggccagcaccacccugcccggcuaccccccccacgugccccccgccggccagggcagcuacagcgcccccacccugaccggcauggugcccggcagcgaguucagcggcagccccuacagccacccccaguacagcagcuacaacgacagcuggagauuccccaaccccggccugcugggcagccccuacuacuacagcgccgccgccagaggcgccgccccccccgccgccgccaccgccuacgacagacacuga

SEQ ID NO: 3071 - RNA, 1176 nt, Artificial Sequence
  derived and/or modified sequence opt5 from PAX5__Homo_sapiens__AAA58397
auggaccuggagaagaacuaccccaccccuagaacaagccggacgggccacgggggagugaaucagcucggcggggucuucguuaacggacgcccgcugcccgauguggugagacaacggaucgucgaacuugcccaucagggcgugcgcccuugcgacauuuccagacagcugcggguuucucacgggugugugagcaaaauccucggacgcuauuacgagaccggcuccauuaagcccggcgucaucgggggaucuaaaccuaagguggcuacacccaaaguuguggaaaagauugccgaguauaagagacagaauccuaccauguuugcgugggaaauccgggaucgccugcuugcugagagagucugcgacaacgauacagugccgagcguguccucuaucaaucggauuauccgcaccaaaguccaacagcccccuaaccagcccguuccugccagcucccauagcauugugucuacaggcuccgugacccaggucagcucuguguccacggacagcgccgggucuuccuacagcaucuccggcauucugggaaucaccucucccagcgcugauacaaauaagagaaaacgggacgaggggauucaagaauccccgguuccuaacggacacagccuccccggccgcgauuuccugagaaagcagaugcggggcgaccuguuuacccagcagcaacucgaggugcuggauagagucuucgaacgccagcauuauucugacaucuuuacaaccacggagccuaucaaacccgagcagacaaccgaauacuccgccauggcuagccuugccgggggacuggaugacaugaaggcgaaucucgccucucccacacccgcugacauuggcagcuccgugccggggccccaaucuuauccuaucguuaccggacgggaucuggccagcaccacacuucccggcuacccuccccacgugccgccugcugggcagggauccuacagcgcccccacgcugaccggcauggucccuggcucugaguucuccgggagccccuauucucacccucaguacuccagcuauaacgacuccuggagauuucccaauccgggacuccugggcucuccuuacuauuacagcgcggccgcucgcggggccgcuccucccgccgccgcuacagcguaugaucggcauuga

SEQ ID NO: 3072 - protein, 290 aa, Artificial Sequence
  PD1L1__Homo_sapiens__Q9NZQ7
MRIFAVFIFMTYWHLLNAFTVTVPKDLYVVEYGSNMTIECKFPVEKQLDLAALIVYWEMEDKNIIQFVHGEEDLKVQHSSYRQRARLLKDQLSLGNAALQITDVKLQDAGVYRCMISYGGADYKRITVKVNAPYNKINQRILVVDPVTSEHELTCQAEGYPKAEVIWTSSDHQVLSGKTTTTNSKREEKLFNVTSTLRINTTTNEIFYCTFRRLDPEENHTAELVIPELPLAHPPNERTHLVILGAILLCLGVALTFIFRLRKGRMMDVKKCGIQDTNSKKQSDTHLEET

SEQ ID NO: 3073 - RNA, 873 nt, Artificial Sequence
  PD1L1__Homo_sapiens__AAF25807
augaggauauuugcugucuuuauauucaugaccuacuggcauuugcugaacgcauuuacugucacgguucccaaggaccuauaugugguagaguaugguagcaauaugacaauugaaugcaaauucccaguagaaaaacaauuagaccuggcugcacuaauugucuauugggaaauggaggauaagaacauuauucaauuugugcauggagaggaagaccugaagguucagcauaguagcuacagacagagggcccggcuguugaaggaccagcucucccugggaaaugcugcacuucagaucacagaugugaaauugcaggaugcagggguguaccgcugcaugaucagcuaugguggugccgacuacaagcgaauuacugugaaagucaaugccccauacaacaaaaucaaccaaagaauuuugguuguggauccagucaccucugaacaugaacugacaugucaggcugagggcuaccccaaggccgaagucaucuggacaagcagugaccaucaaguccugagugguaagaccaccaccaccaauuccaagagagaggagaagcuuuucaaugugaccagcacacugagaaucaacacaacaacuaaugagauuuucuacugcacuuuuaggagauuagauccugaggaaaaccauacagcugaauuggucaucccagaacuaccucuggcacauccuccaaaugaaaggacucacuugguaauucugggagccaucuuauuaugccuugguguagcacugacauucaucuuccguuuaagaaaagggagaaugauggaugugaaaaaauguggcauccaagauacaaacucaaagaagcaaagugauacacauuuggaggagacguaa

SEQ ID NO: 3074 - RNA, 873 nt, Artificial Sequence
  derived and/or modified sequence opt1 from PD1L1__Homo_sapiens__AAF25807
augcgcaucuucgccguguucaucuucaugaccuacuggcaccuccucaacgccuucaccgucacggugcccaaggaccuguacguggucgaguacggcagcaacaugaccaucgagugcaaguucccgguggagaagcagcuggaccucgcggcccugaucguguacugggagauggaggacaagaacaucauccaguucguccacggggaggaggaccugaaggugcagcacuccagcuaccggcagcgcgcccggcuccugaaggaccagcugucccucggcaacgccgcccugcagaucaccgacgugaagcugcaggacgcgggggucuaccgcugcaugaucagcuacggcggggccgacuacaagcggaucaccgugaaggugaacgcccccuacaacaagaucaaccagcgcauccucgucguggaccccgugacguccgagcacgagcugaccugccaggccgagggcuaccccaaggcggaggucaucuggaccagcuccgaccaccaggugcugagcggcaagaccacgaccaccaacuccaagcgggaggagaagcuguucaacgugaccagcacgcugcgcaucaacaccaccaccaacgagaucuucuacugcacguuccggcgccuggacccggaggagaaccacaccgccgagcucgucauccccgagcugccccuggcccacccgcccaacgagcggacccaccucgugauccugggggccauccugcucugccugggcguggcccugaccuucaucuuccgccuccggaaggggcgcaugauggacgucaagaagugcggcauccaggacacgaacuccaagaagcagagcgacacccaccuggaggagaccuga

SEQ ID NO: 3075 - RNA, 873 nt, Artificial Sequence
  derived and/or modified sequence opt2 from PD1L1__Homo_sapiens__AAF25807
augcgcaucuucgccgucuucaucuucaugaccuacuggcaccuccucaacgccuucaccgucaccguccccaaggaccucuacgucgucgaguacggcuccaacaugaccaucgagugcaaguuccccgucgagaagcagcucgaccucgccgcccucaucgucuacugggagauggaggacaagaacaucauccaguucguccacggcgaggaggaccucaagguccagcacuccuccuaccgccagcgcgcccgccuccucaaggaccagcucucccucggcaacgccgcccuccagaucaccgacgucaagcuccaggacgccggcgucuaccgcugcaugaucuccuacggcggcgccgacuacaagcgcaucaccgucaaggucaacgcccccuacaacaagaucaaccagcgcauccucgucgucgaccccgucaccuccgagcacgagcucaccugccaggccgagggcuaccccaaggccgaggucaucuggaccuccuccgaccaccagguccucuccggcaagaccaccaccaccaacuccaagcgcgaggagaagcucuucaacgucaccuccacccuccgcaucaacaccaccaccaacgagaucuucuacugcaccuuccgccgccucgaccccgaggagaaccacaccgccgagcucgucauccccgagcucccccucgcccacccccccaacgagcgcacccaccucgucauccucggcgccauccuccucugccucggcgucgcccucaccuucaucuuccgccuccgcaagggccgcaugauggacgucaagaagugcggcauccaggacaccaacuccaagaagcaguccgacacccaccucgaggagaccuga

SEQ ID NO: 3076 - RNA, 873 nt, Artificial Sequence
  derived and/or modified sequence opt3 from PD1L1__Homo_sapiens__AAF25807
augagaaucuucgccguguuuauuuucaugaccuacuggcaccuccucaacgcuuuuacagucacuguucccaaggaccuuuaugugguagaguacggcagcaauaugacgauagaaugcaaauucccuguggagaagcagcuggauuuggcagccuuaaucgucuauugggaaauggaggacaaaaacauuauccaauuugugcauggggaagaggaucugaagguucagcacuccucuuacaggcagcgggcgcgccuacucaaagaccagcugucacuuggaaaugcugcccugcaaauuaccgaugugaaguugcaggacgccggugucuaucgauguaugaucaguuacggcggggcagauuauaagcguauaacagugaaaguaaacgcuccauacaauaagaucaaccagaggauucucguuguggacccggucacuagcgagcaugaacugaccugccaggcagagggauaccccaaagccgaagugaucuggacauccucugaucaccaagugcugucgggcaagaccacuacaaccaauucaaaaagagaggagaagcuguucaacgucacgagcacuuuacggauuaauaccacaacuaacgaaaucuuuuauuguaccuuccgcagacuggacccugaggaaaaucauacagcugagcuuguuauaccagaauugccccuggcccacccuccaaacgagaggacccaccuagugauucucggugcgauccugcuuugccuggggguagcauugacguuuauuuuccggcuccgcaagggacgaaugauggaugugaaaaaguguggcauccaggacacuaauaguaaaaagcaguccgauacacaucuggaggaaaccuga

SEQ ID NO: 3077 - RNA, 873 nt, Artificial Sequence
  derived and/or modified sequence opt4 from PD1L1__Homo_sapiens__AAF25807
augagaaucuucgccguguucaucuucaugaccuacuggcaccugcugaacgccuucaccgugaccgugcccaaggaccuguacgugguggaguacggcagcaacaugaccaucgagugcaaguuccccguggagaagcagcuggaccuggccgcccugaucguguacugggagauggaggacaagaacaucauccaguucgugcacggcgaggaggaccugaaggugcagcacagcagcuacagacagagagccagacugcugaaggaccagcugagccugggcaacgccgcccugcagaucaccgacgugaagcugcaggacgccggcguguacagaugcaugaucagcuacggcggcgccgacuacaagagaaucaccgugaaggugaacgcccccuacaacaagaucaaccagagaauccuggugguggaccccgugaccagcgagcacgagcugaccugccaggccgagggcuaccccaaggccgaggugaucuggaccagcagcgaccaccaggugcugagcggcaagaccaccaccaccaacagcaagagagaggagaagcuguucaacgugaccagcacccugagaaucaacaccaccaccaacgagaucuucuacugcaccuucagaagacuggaccccgaggagaaccacaccgccgagcuggugauccccgagcugccccuggcccacccccccaacgagagaacccaccuggugauccugggcgccauccugcugugccugggcguggcccugaccuucaucuucagacugagaaagggcagaaugauggacgugaagaagugcggcauccaggacaccaacagcaagaagcagagcgacacccaccuggaggagaccuga

SEQ ID NO: 3078 - RNA, 873 nt, Artificial Sequence
  derived and/or modified sequence opt5 from PD1L1__Homo_sapiens__AAF25807
augagaaucuucgccguguuuauuuucaugaccuacuggcaccuccucaacgcuuuuacagucacgguucccaaggaccuguaugugguggaguacggcagcaauaugaccaucgaaugcaaauucccugucgagaagcagcuugaucuggccgcgcucauuguguauugggaaauggaggacaaaaacaucauucaauuuguucauggggaagaggaucugaaggugcagcacuccucuuaccggcagcgcgcuagacuucugaaagaccagcucagccugggaaaugccgcccugcaaaucacagaugucaagcuccaggacgcuggcguguaucgguguaugaucuccuacgggggagccgauuauaagcgcauuaccguuaaagugaacgcuccguacaauaagaucaaccagcggauucuggucguggaccccgugacaucugagcaugaacuuaccugccaggccgagggcuacccuaaagcggaagucaucuggacaagcuccgaucaccaaguucugucugggaagaccacgaccacaaauagcaaaagagaggagaagcuguucaacgugaccuccacacugcgcauuaauaccacgacaaacgaaaucuuuuauuguaccuucagacggcuugaccccgaggaaaaucauacagccgagcuggugauuccugaacucccccuggcucacccuccgaacgagcgcacccaccuggucauccucggagccauccugcuuugccugggcguggcucucaccuuuauuuucagacugcggaagggccgcaugauggauguuaaaaagugugggauccaggacacaaauagcaaaaagcagucugauacgcaucuugaggaaaccuga

SEQ ID NO: 3079 - protein, 288 aa, Artificial Sequence
  PDCD1__Homo_sapiens__Q15116
MQIPQAPWPVVWAVLQLGWRPGWFLDSPDRPWNPPTFSPALLVVTEGDNATFTCSFSNTSESFVLNWYRMSPSNQTDKLAAFPEDRSQPGQDCRFRVTQLPNGRDFHMSVVRARRNDSGTYLCGAISLAPKAQIKESLRAELRVTERRAEVPTAHPSPSPRPAGQFQTLVVGVVGGLLGSLVLLVWVLAVICSRAARGTIGARRTGQPLKEDPSAVPVFSVDYGELDFQWREKTPEPPVPCVPEQTEYATIVFPSGMGTSSPARRGSADGPRSAQPLRPEDGHCSWPL

SEQ ID NO: 3080 - RNA, 867 nt, Artificial Sequence
  PDCD1__Homo_sapiens__AAH74740
augcagaucccacaggcgcccuggccagucgucugggcggugcuacaacugggcuggcggccaggaugguucuuagacuccccagacaggcccuggaacccccccaccuucuccccagcccugcucguggugaccgaaggggacaacgccaccuucaccugcagcuucuccaacacaucggagagcuucgugcuaaacugguaccgcaugagccccagcaaccagacggacaagcuggccgcuuuccccgaggaccgcagccagcccggccaggacugccgcuuccgugucacacaacugcccaacgggcgugacuuccacaugagcguggucagggcccggcgcaaugacagcggcaccuaccucuguggggccaucucccuggcccccaaggcgcagaucaaagagagccugcgggcagagcucagggugacagagagaagggcagaagugcccacagcccaccccagccccucacccaggccagccggccaguuccaaacccuggugguuggugucgugggcggccugcugggcagccuggugcugcuagucuggguccuggccgucaucugcucccgggccgcacgagggacaauaggagccaggcgcaccggccagccccugaaggaggaccccucagccgugccuguguucucuguggacuauggggagcuggauuuccaguggcgagagaagaccccggagccccccgugcccugugucccugagcagacggaguaugccaccauugucuuuccuagcggaaugggcaccucaucccccgcccgcaggggcucagccgacggcccucggagugcccagccacugaggccugaggauggacacugcucuuggccccucuga

SEQ ID NO: 3081 - RNA, 867 nt, Artificial Sequence
  derived and/or modified sequence opt1 from PDCD1__Homo_sapiens__AAH74740
augcagaucccccaggccccguggcccguggucugggccgugcugcagcucggcuggcgccccgggugguuccuggacagccccgaccggccguggaacccgcccaccuucucccccgcgcugcucguggucaccgagggcgacaacgccacguucacgugcagcuucuccaacaccagcgaguccuucgugcugaacugguaccgcaugagccccuccaaccagaccgacaagcuggccgccuuccccgaggaccggagccagcccgggcaggacugccgcuuccgggugacccagcuccccaacggccgcgacuuccacauguccgucgugcgggcccgccggaacgacagcgggaccuaccugugcggcgcgaucucccuggccccgaaggcccagaucaaggagagccuccgcgccgagcugcgggugaccgagcgccgggcggagguccccaccgcccaccccucccccagcccgcgccccgccggccaguuccagacgcugguggugggggucgugggcgggcuccugggcucccuggugcuccuggucugggugcuggccgugaucugcagccgggccgcgcgcgggaccaucggcgcccggcgcaccggccagccccucaaggaggaccccuccgccgucccgguguucagcguggacuacggggagcuggacuuccaguggcgggagaagacccccgagccgcccguccccugcgugcccgagcagacggaguacgccaccaucguguuccccuccggcauggggaccagcagccccgcccgccggggcuccgcggacggcccgcgcagcgcccagccccugcgccccgaggacgggcacugcuccuggccgcucuga

SEQ ID NO: 3082 - RNA, 867 nt, Artificial Sequence
  derived and/or modified sequence opt2 from PDCD1__Homo_sapiens__AAH74740
augcagaucccccaggcccccuggcccgucgucugggccguccuccagcucggcuggcgccccggcugguuccucgacucccccgaccgccccuggaacccccccaccuucucccccgcccuccucgucgucaccgagggcgacaacgccaccuucaccugcuccuucuccaacaccuccgaguccuucguccucaacugguaccgcaugucccccuccaaccagaccgacaagcucgccgccuuccccgaggaccgcucccagcccggccaggacugccgcuuccgcgucacccagcuccccaacggccgcgacuuccacauguccgucguccgcgcccgccgcaacgacuccggcaccuaccucugcggcgccaucucccucgcccccaaggcccagaucaaggagucccuccgcgccgagcuccgcgucaccgagcgccgcgccgagguccccaccgcccaccccucccccuccccccgccccgccggccaguuccagacccucgucgucggcgucgucggcggccuccucggcucccucguccuccucgucuggguccucgccgucaucugcucccgcgccgcccgcggcaccaucggcgcccgccgcaccggccagccccucaaggaggaccccuccgccguccccgucuucuccgucgacuacggcgagcucgacuuccaguggcgcgagaagacccccgagccccccguccccugcguccccgagcagaccgaguacgccaccaucgucuuccccuccggcaugggcaccuccucccccgcccgccgcggcuccgccgacggcccccgcuccgcccagccccuccgccccgaggacggccacugcuccuggccccucuga

SEQ ID NO: 3083 - RNA, 867 nt, Artificial Sequence
  derived and/or modified sequence opt3 from PDCD1__Homo_sapiens__AAH74740
augcagaucccccaagccccuuggccaguggucugggcuguucugcagcucggcuggagaccggggugguuccuugacagccccgauaggccuuggaacccacccaccuuuuccccugcacuguuggugguaacagagggagacaaugccacuuucacgugcucuuuuucaaacaccagugagagcuucguguuaaauugguaccggauguccccaucuaaccagacagauaagcuggcggcuuuucccgaagaccgcucgcagccuggucaagauugucgauuccgugucacucagcuaccaaauggcagagacuuucacaugucagugguuagggcccggcgcaacgauagcgggaccuaucucugcggagcaauuagucuggccccgaaagcucagauaaaggaaucccuuagagcagagcugagggugacagaacggcgcgccgagguccccaccgcucauccuucuccaagcccccgaccugccggccaguuccaaacuuuggugguagguguugucgggggacuccugggcucccuggugcucuuagugugggugcuggcggucaucuguucaagagcagccaggggcacaauuggggcucggcguaccggacagccacuuaaagaggaccccagugccguuccgguguuuagcguagauuacggugaauuggacuuccaguggcgcgagaagacgccugaacccccagugccuugcguccccgagcagacugaguaugcaaccaucguguuuccaucuggcauggggacauccucacccgcuagaaggggaagcgccgauggcccucggagugcgcaaccacugcgaccggaagacggucacuguucuuggccccuauga

SEQ ID NO: 3084 - RNA, 867 nt, Artificial Sequence
  derived and/or modified sequence opt4 from PDCD1__Homo_sapiens__AAH74740
augcagaucccccaggcccccuggcccguggugugggccgugcugcagcugggcuggagacccggcugguuccuggacagccccgacagacccuggaacccccccaccuucagccccgcccugcugguggugaccgagggcgacaacgccaccuucaccugcagcuucagcaacaccagcgagagcuucgugcugaacugguacagaaugagccccagcaaccagaccgacaagcuggccgccuuccccgaggacagaagccagcccggccaggacugcagauucagagugacccagcugcccaacggcagagacuuccacaugagcguggugagagccagaagaaacgacagcggcaccuaccugugcggcgccaucagccuggcccccaaggcccagaucaaggagagccugagagccgagcugagagugaccgagagaagagccgaggugcccaccgcccaccccagccccagccccagacccgccggccaguuccagacccugguggugggcguggugggcggccugcugggcagccuggugcugcuggugugggugcuggccgugaucugcagcagagccgccagaggcaccaucggcgccagaagaaccggccagccccugaaggaggaccccagcgccgugcccguguucagcguggacuacggcgagcuggacuuccaguggagagagaagacccccgagccccccgugcccugcgugcccgagcagaccgaguacgccaccaucguguuccccagcggcaugggcaccagcagccccgccagaagaggcagcgccgacggccccagaagcgcccagccccugagacccgaggacggccacugcagcuggccccuguga

SEQ ID NO: 3085 - RNA, 867 nt, Artificial Sequence
  derived and/or modified sequence opt5 from PDCD1__Homo_sapiens__AAH74740
augcagaucccccaagccccuuggccgguggucugggcuguucugcagcucggcuggagacccgggugguuccuggacagcccugaucggcccuggaacccucccaccuuuuccccugcccuucugguggugacagagggagacaaugcgacguuuaccugcucuuucagcaacacauccgaaucuuucguccucaauugguaccgcaugagcccguccaaccagaccgauaagcuggcugccuuucccgaggacagaucucagccuggccaagauugucgguuccgcgugacacagcuucccaaugggagagacuuucacaugagcguugugcgggcccgcagaaacgauuccggaaccuaucugugcggcgcuauuagccucgccccuaaagcucagaucaaggaaucucugcgggccgagcugcgcgucacagaaagacgggcggaggugcccaccgcccauccguccccuagcccccgcccugcugggcaguuccaaacgcucguugugggagucgugggcggccugcuugggucucuggugcuccuggucuggguucuugccgugauuuguuccagagcugcccggggaaccaucggcgcgcgcagaacagggcagccccugaaagaggaccccagcgccgugccugucuuuucuguggauuacggagaacucgacuuccaguggcgggagaagaccccggaacccccuguucccugcgugccugagcagacagaguaugcuaccauugucuuucccuccggcauggggacgagcuccccggccagacgcggaucugcugauggcccucggagcgcccaaccccugagaccugaagacggccacuguuccuggccccuguga

SEQ ID NO: 3086 - protein, 335 aa, Artificial Sequence
  PDEF__Homo_sapiens__O95238
MGSASPGLSSVSPSHLLLPPDTVSRTGLEKAAAGAVGLERRDWSPSPPATPEQGLSAFYLSYFDMLYPEDSSWAAKAPGASSREEPPEEPEQCPVIDSQAPAGSLDLVPGGLTLEEHSLEQVQSMVVGEVLKDIETACKLLNITADPMDWSPSNVQKWLLWTEHQYRLPPMGKAFQELAGKELCAMSEEQFRQRSPLGGDVLHAHLDIWKSAAWMKERTSPGAIHYCASTSEESWTDSEVDSSCSGQPIHLWQFLKELLLKPHSYGRFIRWLNKEKGIFKIEDSAQVARLWGIRKNRPAMNYDKLSRSIRQYYKKGIIRKPDISQRLVYQFVHPI

SEQ ID NO: 3087 - RNA, 1008 nt, Artificial Sequence
  PDEF__Homo_sapiens__AAC95296
augggcagcgccagcccgggucugagcagcguaucccccagccaccuccugcugccccccgacacggugucgcggacaggcuuggagaaggcggcagcgggggcagugggucucgagagacgggacuggagucccaguccacccgccacgcccgagcagggccuguccgccuucuaccucuccuacuuugacaugcuguacccugaggacagcagcugggcagccaaggccccuggggccagcagucgggaggagccaccugaggagccugagcagugcccggucauugacagccaagccccagcgggcagccuggacuuggugcccggcgggcugaccuuggaggagcacucgcuggagcaggugcaguccaugguggugggcgaagugcucaaggacaucgagacggccugcaagcugcucaacaucaccgcagaucccauggacuggagccccagcaaugugcagaaguggcuccuguggacagagcaccaauaccggcugccccccaugggcaaggccuuccaggagcuggcgggcaaggagcugugcgccaugucggaggagcaguuccgccagcgcucgccccuggguggggaugugcugcacgcccaccuggacaucuggaagucagcggccuggaugaaagagcggacuucaccuggggcgauucacuacugugccucgaccagugaggagagcuggaccgacagcgagguggacucaucaugcuccgggcagcccauccaccuguggcaguuccucaaggaguugcuacucaagccccacagcuauggccgcuucauuagguggcucaacaaggagaagggcaucuucaaaauugaggacucagcccagguggcccggcuguggggcauccgcaagaaccgucccgccaugaacuacgacaagcugagccgcuccauccgccaguauuacaagaagggcaucauccggaagccagacaucucccagcgccucgucuaccaguucgugcaccccaucuga

SEQ ID NO: 3088 - RNA, 1008 nt, Artificial Sequence
  derived and/or modified sequence opt1 from PDEF__Homo_sapiens__AAC95296
augggcagcgccucccccgggcugagcuccgugagcccgucccaccuccugcugccgcccgacaccgucagccgcaccggccucgagaaggccgcggccggggccgugggccuggagcggcgcgacuggucccccagcccgcccgccacgcccgagcaggggcuguccgccuucuaccucagcuacuucgacaugcuguaccccgaggacuccagcugggcggccaaggcccccggcgccuccagccgggaggagccgcccgaggagcccgagcagugccccgugaucgacucccaggcgcccgccggcagccuggaccucguccccgggggccugacccuggaggagcacucccucgagcagguccagagcaugguggugggggaggugcugaaggacaucgagaccgccugcaagcugcucaacaucaccgccgaccccauggacugguccccgagcaacgugcagaaguggcugcuguggacggagcaccaguaccgccucccgcccaugggcaaggccuuccaggagcuggcggggaaggagcugugcgccaugagcgaggagcaguuccggcagcgcagcccccucggcggcgacguccugcacgcccaccuggacaucuggaaguccgccgccuggaugaaggagcggaccucccccggggcgauccacuacugcgccagcaccuccgaggagagcuggaccgacuccgagguggacagcuccugcagcggccagcccauccaccucuggcaguuccugaaggagcugcuccugaagccccacuccuacgggcgcuucauccgguggcugaacaaggagaagggcaucuucaagaucgaggacagcgcccagguggcccgccucuggggcauccggaagaaccgccccgccaugaacuacgacaagcugucccggagcauccgccaguacuacaagaaggggaucauccggaagccggacaucucccagcgccuggucuaccaguucgugcaccccaucuga

SEQ ID NO: 3089 - RNA, 1008 nt, Artificial Sequence
  derived and/or modified sequence opt2 from PDEF__Homo_sapiens__AAC95296
augggcuccgccucccccggccucuccuccgucucccccucccaccuccuccucccccccgacaccgucucccgcaccggccucgagaaggccgccgccggcgccgucggccucgagcgccgcgacuggucccccuccccccccgccacccccgagcagggccucuccgccuucuaccucuccuacuucgacaugcucuaccccgaggacuccuccugggccgccaaggcccccggcgccuccucccgcgaggagccccccgaggagcccgagcagugccccgucaucgacucccaggcccccgccggcucccucgaccucguccccggcggccucacccucgaggagcacucccucgagcagguccaguccauggucgucggcgagguccucaaggacaucgagaccgccugcaagcuccucaacaucaccgccgaccccauggacuggucccccuccaacguccagaaguggcuccucuggaccgagcaccaguaccgccucccccccaugggcaaggccuuccaggagcucgccggcaaggagcucugcgccauguccgaggagcaguuccgccagcgcuccccccucggcggcgacguccuccacgcccaccucgacaucuggaaguccgccgccuggaugaaggagcgcaccucccccggcgccauccacuacugcgccuccaccuccgaggaguccuggaccgacuccgaggucgacuccuccugcuccggccagcccauccaccucuggcaguuccucaaggagcuccuccucaagccccacuccuacggccgcuucauccgcuggcucaacaaggagaagggcaucuucaagaucgaggacuccgcccaggucgcccgccucuggggcauccgcaagaaccgccccgccaugaacuacgacaagcucucccgcuccauccgccaguacuacaagaagggcaucauccgcaagcccgacaucucccagcgccucgucuaccaguucguccaccccaucuga

SEQ ID NO: 3090 - RNA, 1008 nt, Artificial Sequence
  derived and/or modified sequence opt3 from PDEF__Homo_sapiens__AAC95296
augggcagcgccucccccgggcugucuucagugaguccuagccaccuccuucugccaccggacaccgucuccagaacaggauuggagaaggcugcagccggugcgguuggcuuagaaaggcgggauuggucucccucgccuccagcuacucccgagcaggggcugucagccuucuaccuaagcuauuuugacaugcucuacccugaagauaguuccugggcagccaaagcuccaggagcaucuagccgcgaggaacccccugaggagccagaacaaugcccggugaucgacucccaggcccccgcuggcucacuggaucuuguaccuggugggcugacguuggaggaacauagucucgaacaggugcagagcauggucgugggagagguucugaaggacauugaaaccgccuguaaacugcucaacauaacagcggauccaauggacuggucucccuccaaugugcaaaagugguuacuguggacugagcaccaguaucgacuuccuccaaugggcaaagcauuccaggaauuggccggcaaggagcugugcgcuaugucagaggagcaguuucgucaaagaagcccccuagggggagauguccuccaugcccaccuggacaucuggaagagugcagcuuggaugaaagagaggaccucuccgggugccauucauuacugugcguccacaagcgaagagucguggaccgauucugaaguggacuccucaugcaguggccagccuauccaccuuuggcaguuccugaaggaguugcuccugaaaccccacagcuaugggcgguuuauucgcugguuaaacaaggaaaaaggaaucuucaagauagaggauuccgcccagguagcaagacuguggggcaucaggaagaaucggccagcuaugaacuacgacaaacucucucgcagcauucgacaauauuacaagaaagguaucauuagaaagccugacaucucacagaggcuuguuuaccaguuugugcaucccauauga

SEQ ID NO: 3091 - RNA, 1008 nt, Artificial Sequence
  derived and/or modified sequence opt4 from PDEF__Homo_sapiens__AAC95296
augggcagcgccagccccggccugagcagcgugagccccagccaccugcugcugccccccgacaccgugagcagaaccggccuggagaaggccgccgccggcgccgugggccuggagagaagagacuggagccccagcccccccgccacccccgagcagggccugagcgccuucuaccugagcuacuucgacaugcuguaccccgaggacagcagcugggccgccaaggcccccggcgccagcagcagagaggagccccccgaggagcccgagcagugccccgugaucgacagccaggcccccgccggcagccuggaccuggugcccggcggccugacccuggaggagcacagccuggagcaggugcagagcaugguggugggcgaggugcugaaggacaucgagaccgccugcaagcugcugaacaucaccgccgaccccauggacuggagccccagcaacgugcagaaguggcugcuguggaccgagcaccaguacagacugccccccaugggcaaggccuuccaggagcuggccggcaaggagcugugcgccaugagcgaggagcaguucagacagagaagcccccugggcggcgacgugcugcacgcccaccuggacaucuggaagagcgccgccuggaugaaggagagaaccagccccggcgccauccacuacugcgccagcaccagcgaggagagcuggaccgacagcgagguggacagcagcugcagcggccagcccauccaccuguggcaguuccugaaggagcugcugcugaagccccacagcuacggcagauucaucagauggcugaacaaggagaagggcaucuucaagaucgaggacagcgcccagguggccagacuguggggcaucagaaagaacagacccgccaugaacuacgacaagcugagcagaagcaucagacaguacuacaagaagggcaucaucagaaagcccgacaucagccagagacugguguaccaguucgugcaccccaucuga

SEQ ID NO: 3092 - RNA, 1008 nt, Artificial Sequence
  derived and/or modified sequence opt5 from PDEF__Homo_sapiens__AAC95296
augggcagcgccucccccgggcugucuagcguguccccuucucaccuccugcuuccgcccgacaccgucagcagaacaggacuggagaaggcugccgcgggcgcuguugggcucgaacggcgcgauugguccccuucucccccugccacgcccgagcagggacugagcgccuucuaccuuuccuauuuugacaugcuguacccugaagauagcucuugggcugccaaagcuccgggcgccuccagcagagaggaacccccugaggagcccgaacaaugcccugugaucgacucucaggcgcccgccgggucccucgaucuggugccgggaggccugacccucgaggaacauagccuggagcagguccagucuauggugguuggcgaggugcuuaaggacauugaaacagcuuguaaacugcucaacaucaccgccgauccuauggacuggucccccagcaauguccaaaaguggcugcuuuggacagagcaccaguaucggcugccucccauggggaaggcuuuccaggaacucgccggaaaggagcugugcgcgauguccgaggaacaguuucgccaaagaucuccccugggcggggaugugcuccaugcccaccuggacauuuggaaaagcgcugccuggaugaaagagcggaccuccccuggagcuauccauuacugugccagcacaucugaagaguccuggaccgauagcgaaguugacucuagcugcuccggccagccgauucaccuuuggcaguuccugaaggagcuccugcuuaaaccccacucuuaugggcgcuuuaucagauggcugaacaaggaaaaaggaaucuucaagauugaggauagcgcccagguggcucggcucuggggcauccgcaagaauagaccugcgaugaacuacgacaaacugucccggagcauucgccaauauuacaagaaaggcaucauuagaaagcccgacaucucucagcggcuggucuaccaguuugugcauccuauuuga

SEQ ID NO: 3093 - protein, 738 aa, Artificial Sequence
  PECA1__Homo_sapiens__P16284
MQPRWAQGATMWLGVLLTLLLCSSLEGQENSFTINSVDMKSLPDWTVQNGKNLTLQCFADVSTTSHVKPQHQMLFYKDDVLFYNISSMKSTESYFIPEVRIYDSGTYKCTVIVNNKEKTTAEYQLLVEGVPSPRVTLDKKEAIQGGIVRVNCSVPEEKAPIHFTIEKLELNEKMVKLKREKNSRDQNFVILEFPVEEQDRVLSFRCQARIISGIHMQTSESTKSELVTVTESFSTPKFHISPTGMIMEGAQLHIKCTIQVTHLAQEFPEIIIQKDKAIVAHNRHGNKAVYSVMAMVEHSGNYTCKVESSRISKVSSIVVNITELFSKPELESSFTHLDQGERLNLSCSIPGAPPANFTIQKEDTIVSQTQDFTKIASKSDSGTYICTAGIDKVVKKSNTVQIVVCEMLSQPRISYDAQFEVIKGQTIEVRCESISGTLPISYQLLKTSKVLENSTKNSNDPAVFKDNPTEDVEYQCVADNCHSHAKMLSEVLRVKVIAPVDEVQISILSSKVVESGEDIVLQCAVNEGSGPITYKFYREKEGKPFYQMTSNATQAFWTKQKASKEQEGEYYCTAFNRANHASSVPRSKILTVRVILAPWKKGLIAVVIIGVIIALLIIAAKCYFLRKAKAKQMPVEMSRPAVPLLNSNNEKMSDPNMEANSHYGHNDDVRNHAMKPINDNKEPLNSDVQYTEVQVSSAESHKDLGKKDTETVYSEVRKAVPDAVESRYSRTEGSLDGT

SEQ ID NO: 3094 - RNA, 2217 nt, Artificial Sequence
  PECA1__Homo_sapiens__AAA36429
augcagccgaggugggcccaaggggccacgauguggcuuggaguccugcugacccuucugcucuguucaagccuugagggucaagaaaacucuuucacaaucaacaguguugacaugaagagccugccggacuggacggugcaaaaugggaagaaccugacccugcagugcuucgcggaugucagcaccaccucucacgucaagccucagcaccagaugcuguucuauaaggaugacgugcuguuuuacaacaucuccuccaugaagagcacagagaguuauuuuauuccugaaguccggaucuaugacucagggacauauaaauguacugugauugugaacaacaaagagaaaaccacugcagaguaccagcuguugguggaaggagugcccagucccagggugacacuggacaagaaagaggccauccaaggugggaucgugagggucaacuguucugucccagaggaaaaggccccaauacacuucacaauugaaaaacuugaacuaaaugaaaaaauggucaagcugaaaagagagaagaauucucgagaccagaauuuugugauacuggaauuccccguugaggaacaggaccgcguuuuauccuuccgaugucaagcuaggaucauuucugggauccauaugcagaccucagaaucuaccaagagugaacuggucaccgugacggaauccuucucuacacccaaguuccacaucagccccaccggaaugaucauggaaggagcucagcuccacauuaagugcaccauucaagugacucaccuggcccaggaguuuccagaaaucauaauucagaaggacaaggcgauuguggcccacaacagacauggcaacaaggcuguguacucagucauggccaugguggagcacaguggcaacuacacgugcaaaguggaguccagccgcauauccaaggucagcagcaucguggucaacauaacagaacuauuuuccaagcccgaacuggaaucuuccuucacacaucuggaccaaggugaaagacugaaccuguccugcuccaucccaggagcaccuccagccaacuucaccauccagaaggaagauacgauugugucacagacucaagauuucaccaagauagccucaaagucggacagugggacguauaucugcacugcagguauugacaaaguggucaagaaaagcaacacaguccagauagucguaugugaaaugcucucccagcccaggauuucuuaugaugcccaguuugaggucauaaaaggacagaccaucgaaguccguugcgaaucgaucaguggaacuuugccuauuucuuaccaacuuuuaaaaacaaguaaaguuuuggagaauaguaccaagaacucaaaugauccugcgguauucaaagacaaccccacugaagacgucgaauaccaguguguugcagauaauugccauucccaugccaaaauguuaagugagguucugagggugaaggugauagccccgguggaugagguccagauuucuauccugucaaguaaggugguggagucuggagaggacauugugcugcaaugugcugugaaugaaggaucuggucccaucaccuauaaguuuuacagagaaaaagagggcaaacccuucuaucaaaugaccucaaaugccacccaggcauuuuggaccaagcagaaggcuagcaaggaacaggagggagaguauuacugcacagccuucaacagagccaaccacgccuccaguguccccagaagcaaaauacugacagucagagucauucuugccccauggaagaaaggacuuauugcagugguuaucaucggagugaucauugcucucuugaucauugcggccaaauguuauuuucugaggaaagccaaggccaagcagaugccaguggaaauguccaggccagcaguaccacuucugaacuccaacaacgagaaaaugucagaucccaauauggaagcuaacagucauuacggucacaaugacgaugucagaaaccaugcaaugaaaccaauaaaugauaauaaagagccucugaacucagacgugcaguacacggaaguucaaguguccucagcugagucucacaaagaucuaggaaagaaggacacagagacaguguacagugaaguccggaaagcugucccugaugccguggaaagcagauacucuagaacggaaggcucccuugauggaacuuag

SEQ ID NO: 3095 - RNA, 2217 nt, Artificial Sequence
  derived and/or modified sequence opt1 from PECA1__Homo_sapiens__AAA36429
augcagccccgcugggcccagggcgccaccauguggcugggggugcuccugacccugcuccugugcagcucccuggagggccaggagaacagcuucacgaucaacuccgucgacaugaagucccucccggacuggaccgugcagaacgggaagaaccugacccugcagugcuucgcggacgugagcaccacgagccacgucaagccccagcaccagaugcuguucuacaaggacgacguccucuucuacaacaucuccagcaugaaguccaccgagagcuacuucauccccgaggugcggaucuacgacuccggcaccuacaagugcaccgugaucgugaacaacaaggagaagacgaccgccgaguaccagcugcucguggaggggguccccagcccgcgcgugacccuggacaagaaggaggccauccagggcggcaucgugcgggucaacugcuccgugcccgaggagaaggcccccauccacuucaccaucgagaagcuggagcucaacgagaagauggugaagcugaagcgcgagaagaacagccgggaccagaacuucgucauccuggaguuccccguggaggagcaggaccgcgugcucuccuuccggugccaggcccgcaucaucagcgggauccacaugcagacguccgagagcaccaaguccgagcuggucaccgugaccgagagcuucagcacgccgaaguuccacaucucccccaccggcaugaucauggagggggcgcagcugcacaucaagugcaccauccaggugacccaccucgcccaggaguuccccgagaucaucauccagaaggacaaggccaucgucgcccacaaccggcacggcaacaaggcgguguacagcgugauggccauggucgagcacuccgggaacuacacgugcaagguggagagcucccgcaucagcaaggucuccagcaucguggugaacaucaccgagcuguucuccaagcccgagcuggagagcuccuucacccaccucgaccagggcgagcggcugaaccugagcugcuccaucccgggcgccccgcccgccaacuucaccauccagaaggaggacacgaucgucagccagacccaggacuucaccaagaucgccuccaagagcgacuccgggaccuacaucugcacggcgggcaucgacaagguggugaagaaguccaacaccguccagaucguggugugcgagaugcucagccagccccgcaucagcuacgacgcccaguucgaggucaucaaggggcagaccaucgaggugcggugcgagagcaucuccggcacccugcccaucagcuaccagcugcucaagacguccaaggugcuggagaacagcaccaagaacuccaacgaccccgccgucuucaaggacaaccccaccgaggacguggaguaccagugcguggccgacaacugccacagccacgccaagaugcuguccgagguccuccgcgugaaggugaucgcgcccgucgacgaggugcagaucagcauccuguccagcaagguggucgaguccggcgaggacaucgugcugcagugcgccgugaacgaggggagcggcccgaucaccuacaaguucuaccgggagaaggaggggaagcccuucuaccagaugacguccaacgccacccaggccuucuggaccaagcagaaggccagcaaggagcaggagggcgaguacuacugcaccgcguucaaccgcgccaaccacgccuccagcgucccccgguccaagauccucaccgugcgcgugauccuggcccccuggaagaaggggcugaucgccgucgugaucaucggcgugaucaucgcgcuccugaucaucgccgccaagugcuacuuccugcggaaggccaaggcgaagcagaugccggucgagaugagccgccccgccgugccccuccugaacagcaacaacgagaagauguccgaccccaacauggaggccaacagccacuacggccacaacgacgacgugcggaaccacgccaugaagccgaucaacgacaacaaggagccccugaacuccgacguccaguacacggagguccaggugagcuccgccgagagccacaaggaccucgggaagaaggacaccgagaccguguacuccgaggugcgcaaggcggugcccgacgccgucgagagccgcuacucccggaccgagggcagccuggacgggacguga

SEQ ID NO: 3096 - RNA, 2217 nt, Artificial Sequence
  derived and/or modified sequence opt2 from PECA1__Homo_sapiens__AAA36429
augcagccccgcugggcccagggcgccaccauguggcucggcguccuccucacccuccuccucugcuccucccucgagggccaggagaacuccuucaccaucaacuccgucgacaugaagucccuccccgacuggaccguccagaacggcaagaaccucacccuccagugcuucgccgacgucuccaccaccucccacgucaagccccagcaccagaugcucuucuacaaggacgacguccucuucuacaacaucuccuccaugaaguccaccgaguccuacuucauccccgagguccgcaucuacgacuccggcaccuacaagugcaccgucaucgucaacaacaaggagaagaccaccgccgaguaccagcuccucgucgagggcguccccuccccccgcgucacccucgacaagaaggaggccauccagggcggcaucguccgcgucaacugcuccguccccgaggagaaggcccccauccacuucaccaucgagaagcucgagcucaacgagaagauggucaagcucaagcgcgagaagaacucccgcgaccagaacuucgucauccucgaguuccccgucgaggagcaggaccgcguccucuccuuccgcugccaggcccgcaucaucuccggcauccacaugcagaccuccgaguccaccaaguccgagcucgucaccgucaccgaguccuucuccacccccaaguuccacaucucccccaccggcaugaucauggagggcgcccagcuccacaucaagugcaccauccaggucacccaccucgcccaggaguuccccgagaucaucauccagaaggacaaggccaucgucgcccacaaccgccacggcaacaaggccgucuacuccgucauggccauggucgagcacuccggcaacuacaccugcaaggucgaguccucccgcaucuccaaggucuccuccaucgucgucaacaucaccgagcucuucuccaagcccgagcucgaguccuccuucacccaccucgaccagggcgagcgccucaaccucuccugcuccauccccggcgccccccccgccaacuucaccauccagaaggaggacaccaucgucucccagacccaggacuucaccaagaucgccuccaaguccgacuccggcaccuacaucugcaccgccggcaucgacaaggucgucaagaaguccaacaccguccagaucgucgucugcgagaugcucucccagccccgcaucuccuacgacgcccaguucgaggucaucaagggccagaccaucgagguccgcugcgaguccaucuccggcacccuccccaucuccuaccagcuccucaagaccuccaagguccucgagaacuccaccaagaacuccaacgaccccgccgucuucaaggacaaccccaccgaggacgucgaguaccagugcgucgccgacaacugccacucccacgccaagaugcucuccgagguccuccgcgucaaggucaucgcccccgucgacgagguccagaucuccauccucuccuccaaggucgucgaguccggcgaggacaucguccuccagugcgccgucaacgagggcuccggccccaucaccuacaaguucuaccgcgagaaggagggcaagcccuucuaccagaugaccuccaacgccacccaggccuucuggaccaagcagaaggccuccaaggagcaggagggcgaguacuacugcaccgccuucaaccgcgccaaccacgccuccuccgucccccgcuccaagauccucaccguccgcgucauccucgcccccuggaagaagggccucaucgccgucgucaucaucggcgucaucaucgcccuccucaucaucgccgccaagugcuacuuccuccgcaaggccaaggccaagcagaugcccgucgagaugucccgccccgccgucccccuccucaacuccaacaacgagaagauguccgaccccaacauggaggccaacucccacuacggccacaacgacgacguccgcaaccacgccaugaagcccaucaacgacaacaaggagccccucaacuccgacguccaguacaccgagguccaggucuccuccgccgagucccacaaggaccucggcaagaaggacaccgagaccgucuacuccgagguccgcaaggccguccccgacgccgucgagucccgcuacucccgcaccgagggcucccucgacggcaccuga

SEQ ID NO: 3097 - RNA, 2217 nt, Artificial Sequence
  derived and/or modified sequence opt3 from PECA1__Homo_sapiens__AAA36429
augcagcccagaugggcccaaggcgcuaccauguggcugggggugcuccuuacacuguuguuaugcagcucccuggagggacaggaaaacucuuucacuaucaauucagucgacaugaagagucuaccugauuggacgguucagaacgguaaaaaucucacccugcaguguuuugcagacgugagcacaacuucccacguaaagccacaacaucagaugcuuuucuacaaagaugacgugcuguuuuauaacauuucuucgaugaagucaaccgagagcuacuucauaccggaagucaggaucuaugauaguggcacauacaaaugcaccgugauuguuaauaacaaggagaagacuacagccgaauaucaguugcucguggaggggguccccuccccucgggugacccuggacaaaaaggaggcgauccagggaggcauuguacgcguuaauuguucugugccagaagagaaagcucccauccacuuuacgauagaaaagcuggagcucaacgagaaaauggucaaguuaaagcgagaaaagaauagccgugaucaaaacuucgugauccuggaguuuccuguggaggagcaggacagaguccuuuccuucaggugccaggcccggauuaucucagguauucauaugcagaccagugaaagcacuaagucugaguugguuacagugacugaguccuuuucaaccccaaaauuccacaucagccccacagggaugauaauggaaggagcacaacugcauauuaaguguaccauccagguaacgcaccuagcccaggaguuuccugaaauuaucauccaaaaagauaaggcuauuguggcacacaaucgccauggcaacaaagccgucuacagugugauggcuaugguugagcacucuggcaauuauacuugcaagguggaauccagcagaauaucgaaggucucuuccaucgugguaaacauuacagaacucuucucaaaaccagagcuggaaaguagcuuuacccaucuugaccagggggagaggcugaauuuguccuguucuaucccgggagcucccccugcgaacuucacuauacagaaggaagauacaauuguuagccagacccaagacuucacgaaaaucgcaucaaagagugauuccgguaccuacaucugcacagccggcauugacaaaguggucaaaaagagcaacacugugcagaucgucgugugugagaugcucucucagccacggauuucauacgacgcucaguuugaaguuauaaaagggcaaaccaucgaggugcgcugcgagaguauuagcggaacacugcccaucuccuaucaguuacugaagacuucuaaaguacucgaaaauucgaccaagaacagcaaugauccugccgucuucaaagacaacccaacagaggauguggaauaccaguguguugcagacaauugccacucccacgcuaagaugcuuucagaggugcugcgagucaaggugaucgcccccguagaugaggugcagauuaguauauugucuagcaaaguugucgaauccggcgaggacaucgugcuacaaugcgcggugaacgaagguucagggccgauuaccuauaaguuuuacagagagaaagaaggaaagccuuucuaucagaugacuagcaaugccacgcaggcauuuuggacaaaacagaaggcuucuaaggagcaagagggcgaauacuauuguaccgccuucaacagggcuaaucaugccuccagugucccccggagcaaaauccugacuguucgugugauucucgcaccauggaagaaaggccugaucgccgugguaauaaucggggucauuaucgcccuucugauuaucgcggcaaagugcuacuuuuugcgcaaagccaaggcuaaacagaugccuguggagaugucuagacccgccguuccacuccugaacuccaauaacgaaaagaugucagaucccaauauggaggcaaacagucacuacggacauaaugacgaugugaggaaccacgccaugaagccuauaaacgacaauaaagaaccauuaaacagcgauguccaguauaccgaggugcaaguuucguccgcugagucucauaaggaccuggguaaaaaggacacagaaaccguguacagcgagguacggaaagccgucccggaugcaguggaaucacgauauagucgcacugagggcucccuagacgggacauga

SEQ ID NO: 3098 - RNA, 2217 nt, Artificial Sequence
  derived and/or modified sequence opt4 from PECA1__Homo_sapiens__AAA36429
augcagcccagaugggcccagggcgccaccauguggcugggcgugcugcugacccugcugcugugcagcagccuggagggccaggagaacagcuucaccaucaacagcguggacaugaagagccugcccgacuggaccgugcagaacggcaagaaccugacccugcagugcuucgccgacgugagcaccaccagccacgugaagccccagcaccagaugcuguucuacaaggacgacgugcuguucuacaacaucagcagcaugaagagcaccgagagcuacuucauccccgaggugagaaucuacgacagcggcaccuacaagugcaccgugaucgugaacaacaaggagaagaccaccgccgaguaccagcugcugguggagggcgugcccagccccagagugacccuggacaagaaggaggccauccagggcggcaucgugagagugaacugcagcgugcccgaggagaaggcccccauccacuucaccaucgagaagcuggagcugaacgagaagauggugaagcugaagagagagaagaacagcagagaccagaacuucgugauccuggaguuccccguggaggagcaggacagagugcugagcuucagaugccaggccagaaucaucagcggcauccacaugcagaccagcgagagcaccaagagcgagcuggugaccgugaccgagagcuucagcacccccaaguuccacaucagccccaccggcaugaucauggagggcgcccagcugcacaucaagugcaccauccaggugacccaccuggcccaggaguuccccgagaucaucauccagaaggacaaggccaucguggcccacaacagacacggcaacaaggccguguacagcgugauggccaugguggagcacagcggcaacuacaccugcaagguggagagcagcagaaucagcaaggugagcagcaucguggugaacaucaccgagcuguucagcaagcccgagcuggagagcagcuucacccaccuggaccagggcgagagacugaaccugagcugcagcauccccggcgccccccccgccaacuucaccauccagaaggaggacaccaucgugagccagacccaggacuucaccaagaucgccagcaagagcgacagcggcaccuacaucugcaccgccggcaucgacaagguggugaagaagagcaacaccgugcagaucguggugugcgagaugcugagccagcccagaaucagcuacgacgcccaguucgaggugaucaagggccagaccaucgaggugagaugcgagagcaucagcggcacccugcccaucagcuaccagcugcugaagaccagcaaggugcuggagaacagcaccaagaacagcaacgaccccgccguguucaaggacaaccccaccgaggacguggaguaccagugcguggccgacaacugccacagccacgccaagaugcugagcgaggugcugagagugaaggugaucgcccccguggacgaggugcagaucagcauccugagcagcaaggugguggagagcggcgaggacaucgugcugcagugcgccgugaacgagggcagcggccccaucaccuacaaguucuacagagagaaggagggcaagcccuucuaccagaugaccagcaacgccacccaggccuucuggaccaagcagaaggccagcaaggagcaggagggcgaguacuacugcaccgccuucaacagagccaaccacgccagcagcgugcccagaagcaagauccugaccgugagagugauccuggcccccuggaagaagggccugaucgccguggugaucaucggcgugaucaucgcccugcugaucaucgccgccaagugcuacuuccugagaaaggccaaggccaagcagaugcccguggagaugagcagacccgccgugccccugcugaacagcaacaacgagaagaugagcgaccccaacauggaggccaacagccacuacggccacaacgacgacgugagaaaccacgccaugaagcccaucaacgacaacaaggagccccugaacagcgacgugcaguacaccgaggugcaggugagcagcgccgagagccacaaggaccugggcaagaaggacaccgagaccguguacagcgaggugagaaaggccgugcccgacgccguggagagcagauacagcagaaccgagggcagccuggacggcaccuga

SEQ ID NO: 3099 - RNA, 2217 nt, Artificial Sequence
  derived and/or modified sequence opt5 from PECA1__Homo_sapiens__AAA36429
augcagcccagaugggcccaaggcgcuaccauguggcugggggugcuccugacacuucugcucugcagcucccuggagggacaggaaaacucuuucacgaucaauagcgucgacaugaagucccuuccugauuggaccguucagaacggcaaaaaucugacacuccaguguuuugccgacgugucuaccacaagccacgugaagccgcaacaucagaugcuguucuacaaagaugacguccuguuuuauaacauuuccucuaugaaaagcaccgaguccuacuucauccccgaagugcggauuuaugauagcgggacauacaaaugcaccguuaucgugaauaacaaggagaagacgaccgcggaauaucagcuccuggucgagggagugccuucuccccgcguuacacuugacaaaaaggaggcuauucagggcgggaucgugagagucaauuguuccgugccugaagagaaagcccccauccacuuuaccauugaaaagcuggagcucaacgagaaaauggugaagcugaagcgggaaaagaauagccgcgaucaaaacuucgucauccuugaguuuccuguugaggagcaggacagagugcugucuuuccggugccaggcccgcauuaucuccggcauucauaugcagacaagcgaaucuaccaaguccgagcucgugacggucacagagagcuuuuccaccccgaaauuccacaucucucccacaggaaugauuauggaaggcgcucaacugcauaucaaguguaccauccaggugacccaccuggcccaggaguuuccugaaauuaucauucaaaaagauaaggcuaucguugcccacaauagacaugggaacaaagcgguguacagcgucauggccaugguggagcacuccggaaauuauacaugcaagguugaaagcucucggauuuccaaggugagcucuaucgucgugaacaucacggaacucuucagcaaacccgagcuggaauccucuuuuacccaucuugaccagggcgagcgccugaaucucagcuguuccauuccuggggcucccccggccaacuucacaauccagaaggaagauaccauugucagccagacacaagacuucaccaaaaucgcuucuaaguccgauagcggaacguacauuugcacagccggcaucgacaaagugguuaagaagucuaacaccgugcagaucgucgugugugagaugcugucccagccuagaauuagcuacgacgcgcaguuugaaguuaucaaagggcaaaccauugaggugcggugcgaguccaucucuggaacacuucccauuagcuaucagcugcucaagaccuccaaaguccuggaaaauucuacaaagaacagcaaugauccugccguguucaaagacaaccccacggaggauguggaauaccaguguguugcugacaauugccacucccacgccaagaugcugagcgagguccuccgcgugaaggugaucgcucccgucgaugaggugcagauuucuauccuguccagcaaaguuguggaaucuggcgaggacaucguccuucaaugcgccgugaacgaaggcuccgggccuauuaccuauaaguuuuacagagagaaagaaggaaagccguucuaucagaugacaagcaaugccacccaggcuuuuuggacaaaacagaaggcgucuaaggagcaagagggcgaauacuauuguaccgccuucaaccgggcuaaucaugccagcuccguuccccgcagcaaaauccugacggugagagucauucucgccccuuggaagaaagggcugaucgcugugguuauuaucggagugaucauugcccuucugaucauugcggcuaagugcuacuuucuccggaaagccaaggccaaacagaugcccgucgagaugucuagaccugcugugccccugcugaacuccaauaacgaaaagaugagcgauccgaauauggaggccaacucccacuacggccauaaugacgaugugcgcaaccacgcuaugaagccuaucaacgacaauaaagaaccccucaacucugauguccaguauaccgagguucaagugagcuccgccgagucucauaaggaccuggggaaaaaggacacagaaaccguguacagcgagguccggaaagcggugccugaugccguugaauccagauauucucgcacagagggaagccuugacggcaccuga

SEQ ID NO: 3100 - protein, 911 aa, Artificial Sequence
  PGCB__Homo_sapiens__Q96GW7
MAQLFLPLLAALVLAQAPAALADVLEGDSSEDRAFRVRIAGDAPLQGVLGGALTIPCHVHYLRPPPSRRAVLGSPRVKWTFLSRGREAEVLVARGVRVKVNEAYRFRVALPAYPASLTDVSLALSELRPNDSGIYRCEVQHGIDDSSDAVEVKVKGVVFLYREGSARYAFSFSGAQEACARIGAHIATPEQLYAAYLGGYEQCDAGWLSDQTVRYPIQTPREACYGDMDGFPGVRNYGVVDPDDLYDVYCYAEDLNGELFLGDPPEKLTLEEARAYCQERGAEIATTGQLYAAWDGGLDHCSPGWLADGSVRYPIVTPSQRCGGGLPGVKTLFLFPNQTGFPNKHSRFNVYCFRDSAQPSAIPEASNPASNPASDGLEAIVTVTETLEELQLPQEATESESRGAIYSIPIMEDGGGGSSTPEDPAEAPRTLLEFETQSMVPPTGFSEEEGKALEEEEKYEDEEEKEEEEEEEEVEDEALWAWPSELSSPGPEASLPTEPAAQEESLSQAPARAVLQPGASPLPDGESEASRPPRVHGPPTETLPTPRERNLASPSPSTLVEAREVGEATGGPELSGVPRGESEETGSSEGAPSLLPATRAPEGTRELEAPSEDNSGRTAPAGTSVQAQPVLPTDSASRGGVAVVPASGDCVPSPCHNGGTCLEEEEGVRCLCLPGYGGDLCDVGLRFCNPGWDAFQGACYKHFSTRRSWEEAETQCRMYGAHLASISTPEEQDFINNRYREYQWIGLNDRTIEGDFLWSDGVPLLYENWNPGQPDSYFLSGENCVVMVWHDQGQWSDVPCNYHLSYTCKMGLVSCGPPPELPLAQVFGRPRLRYEVDTVLRYRCREGLAQRNLPLIRCQENGRWEAPQISCVPRRPARALHPEEDPEGRQGRLLGRWKALLIPPSSPMPGP

SEQ ID NO: 3101 - RNA, 2736 nt, Artificial Sequence
  PGCB__Homo_sapiens__AAG23134
auggcccagcuguuccugccccugcuggcagcccugguccuggcccaggcuccugcagcuuuagcagauguucuggaaggagacagcucagaggaccgcgcuuuucgcgugcgcaucgcgggcgacgcgccacugcagggcgugcucggcggcgcccucaccaucccuugccacguccacuaccugcggccaccgccgagccgccgggcugugcugggcucuccgcgggucaaguggacuuuccugucccggggccgggaggcagaggugcugguggcgcggggagugcgcgucaaggugaacgaggccuaccgguuccgcguggcacugccugcguacccagcgucgcucaccgacgucucccuggcgcugagcgagcugcgccccaacgacucagguaucuaucgcugugagguccagcacggcaucgaugacagcagcgacgcuguggaggucaaggucaaaggggucgucuuucucuaccgagagggcucugcccgcuaugcuuucuccuuuucuggggcccaggaggccugugcccgcauuggagcccacaucgccaccccggagcagcucuaugccgccuaccuugggggcuaugagcaaugugaugcuggcuggcugucggaucagaccgugagguaucccauccagaccccacgagaggccuguuacggagacauggauggcuuccccgggguccggaacuauggugugguggacccggaugaccucuaugauguguacuguuaugcugaagaccuaaauggagaauuguuccugggugacccuccagagaagcugacauuggaggaagcacgggcguacugccaggagcggggugcagagauugccaccacgggccaacuguaugcagccugggaugguggccuggaccacugcagcccaggguggcuagcugauggcagugugcgcuaccccaucgucacacccagccagcgcuguggugggggcuugccuggugucaagacucucuuccucuuccccaaccagacuggcuuccccaauaagcacagccgcuucaacgucuacugcuuccgagacucggcccagccuucugccaucccugaggccuccaacccagccuccaacccagccucugauggacuagaggcuaucgucacagugacagagacccuggaggaacugcagcugccucaggaagccacagagagugaaucccguggggccaucuacuccauccccaucauggaggacggaggagguggaagcuccacuccagaagacccagcagaggccccuaggacgcuccuagaauuugaaacacaauccaugguaccgcccacgggguucucagaagaggaagguaaggcauuggaggaagaagagaaauaugaagaugaagaagagaaagaggaggaagaagaagaggaggagguggaggaugaggcucugugggcauggcccagcgagcucagcagcccgggcccugaggccucucuccccacugagccagcagcccaggaggagucacucucccaggcgccagcaagggcaguccugcagccuggugcaucaccacuuccugauggagagucagaagcuuccaggccuccaaggguccauggaccaccuacugagacucugcccacucccagggagaggaaccuagcauccccaucaccuuccacucugguugaggcaagagaggugggggaggcaacuggugguccugagcuaucuggggucccucgaggagagagcgaggagacaggaagcuccgagggugccccuucccugcuuccagccacacgggccccugaggguaccagggagcuggaggcccccucugaagauaauucuggaagaacugccccagcagggaccucagugcaggcccagccagugcugcccacugacagcgccagccgagguggaguggccgugguccccgcaucaggugacuguguccccagccccugccacaauggugggacaugcuuggaggaggaggaagggguccgcugccuaugucugccuggcuaugggggggaccugugcgauguuggccuccgcuucugcaaccccggcugggacgccuuccagggcgccugcuacaagcacuuuuccacacgaaggagcugggaggaggcagagacccagugccggauguacggcgcgcaucuggccagcaucagcacacccgaggaacaggacuucaucaacaaccgguaccgggaguaccaguggaucggacucaacgacaggaccaucgaaggcgacuucuuguggucggauggcgucccccugcucuaugagaacuggaacccugggcagccugacagcuacuuccugucuggagagaacugcguggucaugguguggcaugaucagggacaauggagugacgugcccugcaacuaccaccuguccuacaccugcaagauggggcugguguccugugggccgccaccggagcugccccuggcucaaguguucggccgcccacggcugcgcuaugagguggacacugugcuucgcuaccggugccgggaaggacuggcccagcgcaaucugccgcugauccgaugccaagagaacggucguugggaggccccccagaucuccugugugcccagaagaccugcccgagcucugcacccagaggaggacccagaaggacgucaggggaggcuacugggacgcuggaaggcgcuguugauccccccuuccagccccaugccaggucccuag

SEQ ID NO: 3102 - RNA, 2736 nt, Artificial Sequence
  derived and/or modified sequence opt1 from PGCB__Homo_sapiens__AAG23134
auggcccagcuguuccucccccugcuggccgcgcucgugcuggcccaggccccggccgcccuggcggacguccucgagggcgacagcuccgaggaccgcgccuuccgggugcgcaucgccggggacgcgccccugcagggcgugcucgggggcgcccugaccauccccugccacguccacuaccugcggcccccgcccagccgccgggccgugcuggggagcccccgcgugaaguggaccuuccucucccggggccgcgaggccgagguccugguggcccggggcgugcgcgucaaggugaacgaggccuaccgguuccgcguggcgcugcccgccuacccggccucccucacggacgucagccuggcccuguccgagcuccggcccaacgacagcgggaucuaccgcugcgaggugcagcacggcaucgacgacuccagcgacgccguggaggucaaggugaaggggguggucuuccuguaccgggagggcuccgcgcgcuacgccuucagcuucuccggggcccaggaggccugcgcccggaucggcgcgcacaucgccacccccgagcagcuguacgccgccuaccucggcggguacgagcagugcgacgccggcuggcugagcgaccagaccgugcgcuaccccauccagaccccgcgggaggcgugcuacggggacauggacggcuuccccggcgugcgcaacuacggggucguggaccccgacgaccuguacgacguguacugcuacgccgaggaccucaacggcgagcuguuccugggggacccgcccgagaagcucacgcuggaggaggcccgggccuacugccaggagcgcggcgcggagaucgccaccaccgggcagcuguacgccgccugggacggcggccucgaccacugcucccccggguggcuggccgacggcagcguccgcuaccccaucgugacccccucccagcggugcgggggcgggcugccgggcgucaagacccucuuccuguuccccaaccagaccggcuuccccaacaagcacagccgcuucaacguguacugcuuccgggacuccgcgcagcccagcgccaucccggaggccagcaaccccgccuccaaccccgccagcgacgggcuggaggcgaucgugaccgucaccgagacgcucgaggagcugcagcugccccaggaggccaccgaguccgagagccgcggcgccaucuacuccaucccgaucauggaggacgggggcgggggcagcuccacccccgaggaccccgccgaggccccgcggacccuccuggaguucgagacgcagagcauggugccgcccaccggcuucuccgaggaggaggggaaggcgcuggaggaggaggagaaguacgaggacgaggaggagaaggaggaggaggaggaggaggaggagguggaggacgaggcccucugggccuggcccagcgagcuguccagccccggccccgaggccucccugcccaccgagcccgcggcccaggaggagagccucucccaggccccggcccgcgccguccugcagcccggggcgagcccccugcccgacggcgaguccgaggccagccggccgccccgcgugcacggcccgcccaccgagacgcuccccacgccccgggagcgcaaccuggccucccccagccccagcacccugguggaggcccgggaggucggggaggccaccggcgggccggagcuguccggcgugccccgcggggagagcgaggagacgggcuccagcgagggcgcgcccucccuccugcccgccacccgggccccggaggggacccgcgagcuggaggcccccagcgaggacaacuccggccggaccgcccccgcggggacgagcgugcaggcccagccgguccuccccaccgacuccgccagccgcggcgggguggccgugguccccgcguccggcgacugcgugcccagcccgugccacaacggcgggaccugccuggaggaggaggagggcgugcggugccugugccuccccggguacggcggggaccugugcgacgucggccugcgcuucugcaaccccggcugggacgccuuccagggggccugcuacaagcacuucuccacccggcgcagcugggaggaggccgagacgcagugccgcauguacggcgcccaccucgcguccaucagcacccccgaggagcaggacuucaucaacaaccgguaccgcgaguaccaguggaucgggcugaacgaccggaccaucgagggcgacuuccugugguccgacggggugccgcuccuguacgagaacuggaaccccggccagcccgacagcuacuuccugagcggcgagaacugcguggucaugguguggcacgaccaggggcagugguccgacgugcccugcaacuaccaccucagcuacacgugcaagaugggccuggucuccugcgggccgccgcccgagcugccccucgcccagguguucggccgcccccggcugcgcuacgagguggacaccguccugcgguaccgcugccgggagggccucgcccagcgcaaccugccccugauccggugccaggagaacgggcgcugggaggcgccccagaucagcugcgugccccggcgcccggcccgggcccuccaccccgaggaggaccccgagggccgccaggggcggcugcugggccgcuggaaggcccuccugaucccgcccuccagccccaugcccgggcccuga

SEQ ID NO: 3103 - RNA, 2736 nt, Artificial Sequence
  derived and/or modified sequence opt2 from PGCB__Homo_sapiens__AAG23134
auggcccagcucuuccucccccuccucgccgcccucguccucgcccaggcccccgccgcccucgccgacguccucgagggcgacuccuccgaggaccgcgccuuccgcguccgcaucgccggcgacgccccccuccagggcguccucggcggcgcccucaccauccccugccacguccacuaccuccgccccccccccucccgccgcgccguccucggcuccccccgcgucaaguggaccuuccucucccgcggccgcgaggccgagguccucgucgcccgcggcguccgcgucaaggucaacgaggccuaccgcuuccgcgucgcccuccccgccuaccccgccucccucaccgacgucucccucgcccucuccgagcuccgccccaacgacuccggcaucuaccgcugcgagguccagcacggcaucgacgacuccuccgacgccgucgaggucaaggucaagggcgucgucuuccucuaccgcgagggcuccgcccgcuacgccuucuccuucuccggcgcccaggaggccugcgcccgcaucggcgcccacaucgccacccccgagcagcucuacgccgccuaccucggcggcuacgagcagugcgacgccggcuggcucuccgaccagaccguccgcuaccccauccagaccccccgcgaggccugcuacggcgacauggacggcuuccccggcguccgcaacuacggcgucgucgaccccgacgaccucuacgacgucuacugcuacgccgaggaccucaacggcgagcucuuccucggcgacccccccgagaagcucacccucgaggaggcccgcgccuacugccaggagcgcggcgccgagaucgccaccaccggccagcucuacgccgccugggacggcggccucgaccacugcucccccggcuggcucgccgacggcuccguccgcuaccccaucgucacccccucccagcgcugcggcggcggccuccccggcgucaagacccucuuccucuuccccaaccagaccggcuuccccaacaagcacucccgcuucaacgucuacugcuuccgcgacuccgcccagcccuccgccauccccgaggccuccaaccccgccuccaaccccgccuccgacggccucgaggccaucgucaccgucaccgagacccucgaggagcuccagcucccccaggaggccaccgaguccgagucccgcggcgccaucuacuccauccccaucauggaggacggcggcggcggcuccuccacccccgaggaccccgccgaggccccccgcacccuccucgaguucgagacccaguccauggucccccccaccggcuucuccgaggaggagggcaaggcccucgaggaggaggagaaguacgaggacgaggaggagaaggaggaggaggaggaggaggaggaggucgaggacgaggcccucugggccuggcccuccgagcucuccucccccggccccgaggccucccuccccaccgagcccgccgcccaggaggagucccucucccaggcccccgcccgcgccguccuccagcccggcgccuccccccuccccgacggcgaguccgaggccucccgccccccccgcguccacggcccccccaccgagacccuccccaccccccgcgagcgcaaccucgccucccccucccccuccacccucgucgaggcccgcgaggucggcgaggccaccggcggccccgagcucuccggcgucccccgcggcgaguccgaggagaccggcuccuccgagggcgcccccucccuccuccccgccacccgcgcccccgagggcacccgcgagcucgaggcccccuccgaggacaacuccggccgcaccgcccccgccggcaccuccguccaggcccagcccguccuccccaccgacuccgccucccgcggcggcgucgccgucguccccgccuccggcgacugcguccccucccccugccacaacggcggcaccugccucgaggaggaggagggcguccgcugccucugccuccccggcuacggcggcgaccucugcgacgucggccuccgcuucugcaaccccggcugggacgccuuccagggcgccugcuacaagcacuucuccacccgccgcuccugggaggaggccgagacccagugccgcauguacggcgcccaccucgccuccaucuccacccccgaggagcaggacuucaucaacaaccgcuaccgcgaguaccaguggaucggccucaacgaccgcaccaucgagggcgacuuccucugguccgacggcgucccccuccucuacgagaacuggaaccccggccagcccgacuccuacuuccucuccggcgagaacugcgucgucauggucuggcacgaccagggccagugguccgacguccccugcaacuaccaccucuccuacaccugcaagaugggccucgucuccugcggccccccccccgagcucccccucgcccaggucuucggccgcccccgccuccgcuacgaggucgacaccguccuccgcuaccgcugccgcgagggccucgcccagcgcaaccucccccucauccgcugccaggagaacggccgcugggaggccccccagaucuccugcgucccccgccgccccgcccgcgcccuccaccccgaggaggaccccgagggccgccagggccgccuccucggccgcuggaaggcccuccucaucccccccuccucccccaugcccggccccuga

SEQ ID NO: 3104 - RNA, 2736 nt, Artificial Sequence
  derived and/or modified sequence opt3 from PGCB__Homo_sapiens__AAG23134
auggcccagcuguuccucccccuucuggcugcauugguguuagcccaagcgccugcugcccuggcagacguccuagagggcgauagcuccgaagacagagccuuuaggguucggaucgcuggggaugcaccacuccagggagugcuggguggcgcccuuaccauuccgugccacguacauuaccugcgacccccuccaucucgccgugcuguguuggggucacccagagucaaguggacauuccucaguaggggacgggaggccgaagugcugguugcgcgcggcgugagagucaaagugaacgaggcauauagguuucggguagcccugccugcuuacccagccagccucacugacguuuccuuagcacugucugaacuucgccccaaugauucggguauauaucgaugugaggugcagcacgggaucgacgauucaagcgacgcugucgaggugaaggugaaaggagucguuuucuuguacagagaaggcagugccagguaugcguuuuccuucucuggcgcccaggaggcaugcgcucggauuggggcccauaucgcuacgccugaacaacuguacgccgcauaucuaggagguuacgagcagugugaugccggcuggcucagcgaccagaccgugcguuacccaauucagacaccgcgcgaggcuugcuauggggauauggacggauuucccggcguaagaaacuacgguguggucgauccugacgaccuguaugauguguacuguuaugcggaagaccuuaauggggagcuguucuugggagauccacccgaaaagcucacucuggaggaagcaagggccuacugccaagagcggggcgcugagaucgccaccacaggccaguuauaugcagccugggacgggggacuggaucacuguuccccugguuggcucgcugacggcucaguucgauacccaauagugacccccagucagcgcugcgggggaggccuuccgggugucaaaacucuguuuuuguucccuaaccagacaggguuucccaauaagcauagcagauucaacguguacuguuuuagggauucugcccaaccauccgcaaucccugaagcgucaaaucccgcuagcaacccagccagugacggccuagaggcaauuguaaccguuacggaaacucuggaggaacuccagcugccccaggaggccaccgagucugaaucccggggagcuaucuauagcauuccuaucauggaggauggcgggggagguucgucuacaccagaagacccggccgaggcaccccgcacucuucuggaguucgaaacccaauccauggugccuccaacaggcuucucagaggaagaggggaaggcuuuggaagaggaggaaaaauacgaggaugaagaggaaaaggaggaggaagaggaagaggaagaggucgaggacgaagcccucugggcguggcccagugagcugagcuccccuggaccagaagccucuuuacccaccgagccggcugcacaggaagagagccugucacaggccccugcuagagccgugcuacagccaggcgcaaguccccucccugacggugaguccgaagcgagcaggcccccacguguccacgggccucccacggagacucugccaacaccgcgggaacgaaaucuugccucuccuucacccaguaccuugguggaggcuagagagguuggcgaagccacuggaggcccagagcugagcggggugcccaggggagaauccgaggaaacagguucuucggagggcgcaccuagccuccugccagcuacccgcgcccccgaggggacgcgggaacuugaggcaccuuccgaagauaacucaggaagaaccgccccggcuggcacaaguguacaagcgcagccaguccugcccacugacucugccagcaggggugggguggcaguugugccugcuuccggcgauugcgucccaucacccugucacaauggagggaccugcuuggaggaagaggagggcgugcgcugccucugucugccuggauauggcggugacuuaugcgauguagggcugcgauuuuguaacccgggaugggacgccuuccagggcgccugcuacaaacauuuuagcacacggcguucuugggaagaggcugaaacucaguguagaauguauggugcacaccuagccuccauaaguacccccgaggaacaagauuucauuaauaacagguaccgcgaguaucaguggaucggccucaaugaccggacaauugagggggauuuucuguggagcgacggagugccacuuuuguacgaaaacuggaacccuggccagcccgauucuuacuuccuguccggggagaauugcguugucaugguguggcaugaccagggacaauggucagaugugccauguaacuaucaccucaguuauaccugcaagaugggccuggucagcugugguccucccccagaauuaccgcuggcgcagguuuuugggagaccuaggcuucgauacgagguggacacuguguugcgcuaccggugcagagagggacucgcucagaggaaucugccccuaauccguugucaggaaaacggccgcugggaggccccacaaaucucgugcguaccccggagaccugcaagggcccugcacccagaagaggaccccgaaggucgacagggccggcuccuggggcgcuggaaagcucuuuugauuccuccguccucuccaaugcccggaccuuga

SEQ ID NO: 3105 - RNA, 2736 nt, Artificial Sequence
  derived and/or modified sequence opt4 from PGCB__Homo_sapiens__AAG23134
auggcccagcuguuccugccccugcuggccgcccuggugcuggcccaggcccccgccgcccuggccgacgugcuggagggcgacagcagcgaggacagagccuucagagugagaaucgccggcgacgccccccugcagggcgugcugggcggcgcccugaccauccccugccacgugcacuaccugagacccccccccagcagaagagccgugcugggcagccccagagugaaguggaccuuccugagcagaggcagagaggccgaggugcugguggccagaggcgugagagugaaggugaacgaggccuacagauucagaguggcccugcccgccuaccccgccagccugaccgacgugagccuggcccugagcgagcugagacccaacgacagcggcaucuacagaugcgaggugcagcacggcaucgacgacagcagcgacgccguggaggugaaggugaagggcgugguguuccuguacagagagggcagcgccagauacgccuucagcuucagcggcgcccaggaggccugcgccagaaucggcgcccacaucgccacccccgagcagcuguacgccgccuaccugggcggcuacgagcagugcgacgccggcuggcugagcgaccagaccgugagauaccccauccagacccccagagaggccugcuacggcgacauggacggcuuccccggcgugagaaacuacggcgugguggaccccgacgaccuguacgacguguacugcuacgccgaggaccugaacggcgagcuguuccugggcgacccccccgagaagcugacccuggaggaggccagagccuacugccaggagagaggcgccgagaucgccaccaccggccagcuguacgccgccugggacggcggccuggaccacugcagccccggcuggcuggccgacggcagcgugagauaccccaucgugacccccagccagagaugcggcggcggccugcccggcgugaagacccuguuccuguuccccaaccagaccggcuuccccaacaagcacagcagauucaacguguacugcuucagagacagcgcccagcccagcgccauccccgaggccagcaaccccgccagcaaccccgccagcgacggccuggaggccaucgugaccgugaccgagacccuggaggagcugcagcugccccaggaggccaccgagagcgagagcagaggcgccaucuacagcauccccaucauggaggacggcggcggcggcagcagcacccccgaggaccccgccgaggcccccagaacccugcuggaguucgagacccagagcauggugccccccaccggcuucagcgaggaggagggcaaggcccuggaggaggaggagaaguacgaggacgaggaggagaaggaggaggaggaggaggaggaggagguggaggacgaggcccugugggccuggcccagcgagcugagcagccccggccccgaggccagccugcccaccgagcccgccgcccaggaggagagccugagccaggcccccgccagagccgugcugcagcccggcgccagcccccugcccgacggcgagagcgaggccagcagaccccccagagugcacggcccccccaccgagacccugcccacccccagagagagaaaccuggccagccccagccccagcacccugguggaggccagagaggugggcgaggccaccggcggccccgagcugagcggcgugcccagaggcgagagcgaggagaccggcagcagcgagggcgcccccagccugcugcccgccaccagagcccccgagggcaccagagagcuggaggcccccagcgaggacaacagcggcagaaccgcccccgccggcaccagcgugcaggcccagcccgugcugcccaccgacagcgccagcagaggcggcguggccguggugcccgccagcggcgacugcgugcccagccccugccacaacggcggcaccugccuggaggaggaggagggcgugagaugccugugccugcccggcuacggcggcgaccugugcgacgugggccugagauucugcaaccccggcugggacgccuuccagggcgccugcuacaagcacuucagcaccagaagaagcugggaggaggccgagacccagugcagaauguacggcgcccaccuggccagcaucagcacccccgaggagcaggacuucaucaacaacagauacagagaguaccaguggaucggccugaacgacagaaccaucgagggcgacuuccuguggagcgacggcgugccccugcuguacgagaacuggaaccccggccagcccgacagcuacuuccugagcggcgagaacugcguggugaugguguggcacgaccagggccaguggagcgacgugcccugcaacuaccaccugagcuacaccugcaagaugggccuggugagcugcggccccccccccgagcugccccuggcccagguguucggcagacccagacugagauacgagguggacaccgugcugagauacagaugcagagagggccuggcccagagaaaccugccccugaucagaugccaggagaacggcagaugggaggccccccagaucagcugcgugcccagaagacccgccagagcccugcaccccgaggaggaccccgagggcagacagggcagacugcugggcagauggaaggcccugcugaucccccccagcagccccaugcccggccccuga

SEQ ID NO: 3106 - RNA, 2736 nt, Artificial Sequence
  derived and/or modified sequence opt5 from PGCB__Homo_sapiens__AAG23134
auggcccagcuguuccucccccugcuugcugcccuggugcucgcgcaagcuccugccgcccuggcugacguccuugagggcgauagcuccgaagacagagccuuucggguucgcaucgcuggggaugccccgcugcagggagugcucggcggggcgcugaccauucccugccacgugcauuaccugagaccucccccuucucggcgcgccguccucggaagccccagagugaaguggacauuccugucccggggccgcgaggcugaaguucuuguggccagagggguccgggugaaaguuaacgaggcuuaucgcuuuagaguggcccugccugcguacccggccucucucacggacgucagccuggcucuuuccgaacugcggcccaaugauucuggaaucuaucgcugugaggugcagcacggcauugacgauagcuccgacgccguggaggucaagguuaaaggcgugguguuccucuacagagaagggagcgcucgguaugccuuuucuuucuccggagcccaggaggcuugcgcgcgcaucggcgcccauauugcuaccccugaacaacuguacgccgccuaucugggcggauacgagcagugugaugcuggcuggcucagcgaccagacagucagauaccccauccagaccccucgggaggccugcuauggggauauggacggauuucccggcgugagaaacuacggcguuguggauccggacgaccuguaugaugucuacuguuaugcggaagaccuuaauggggagcuguuccucggagauccucccgaaaagcugacacuugaggaagcucgcgccuacugccaagagcggggcgccgagaucgcuaccacagggcagcuguaugccgcuugggacggaggccucgaucacuguucuccuggguggcuggccgacggauccgugagauaccccauuguuacccccagccagcgcugcggcggcgggcugccuggagugaaaacgcucuuucuguucccgaaccagaccggcuuucccaauaagcauucucgguucaacgucuacuguuuuagagauuccgcgcaaccuagcgccauccccgaagccuccaauccugccucuaaccccgcuagcgacgggcuugaggccauugugacagucaccgaaacacuggaggaacuccagcugccgcaggaggcgaccgaguccgaaagccgcggagccaucuauucuauuccuaucauggaggauggcgggggcggauccagcacgcccgaagacccugcugaggcuccccggacacuucuggaguucgaaacccaaucuauggugccucccacaggcuucagcgaggaagaggggaaggcucucgaagaggaggaaaaauacgaggaugaagaggaaaaggaggaggaagaggaagaggaagagguugaggacgaagcccugugggccuggccguccgagcugucuagcccuggacccgaggcuucccuccccaccgaaccugcggcccaggaagagagccugucucaggcuccggccagagccgugcuucagcccggcgcuuccccucugcccgacggggagagcgaagccucucgcccuccccggguccacggaccucccaccgagacacucccgacgccuagagaacgcaaucuggcgucccccagcccuuccacccugguggaggcucgggagguuggcgaagccacagggggccccgagcuuucuggagugccgagaggcgaaagcgaggaaaccggguccucugagggagccccuagccuccugcccgcuacacgggccccugagggcacccgcgaacuggaggcgcccuccgaagauaacagcgggagaacggcucccgccggaacaucuguccaagcccagccugugcucccgaccgacuccgcuagccggggcgggguggccguuguccccgcuucuggcgauugcgugccuucccccugucacaauggagggaccugccuggaggaagaggagggggugagaugccuuugucugccuggauauggcggggaccucugcgaugucggacugcgcuuuuguaaccccggcugggacgccuuccagggggcgugcuacaaacauuuuagcacacggagaucuugggaagaggccgaaacccagugucgcauguauggcgcucaccuggccagcauuuccacaccugaggaacaagauuucaucaauaacagauaccgggaguaucaguggaucggacuuaaugaccgcacgauugagggcgauuuucucuggagcgacggggugccgcugcuguacgaaaacuggaaccccggacagccugauucuuacuuccucuccggcgagaauugcguugugauggucuggcaugaccaggggcaauggagcgaugugcccuguaacuaucaccuguccuauaccugcaagaugggacuuguuucuuguggcccucccccggaacugccucucgcucagguguuuggcagaccccggcugcgcuacgaggucgacacagugcugagauaccggugccgcgaggggcuugcccagagaaaucucccccugauccggugucaggaaaacggacgcugggaggccccucaaauuagcugcguucccagacggccugcuagagcgcugcacccggaagaggaccccgaaggccgccaggggcggcuccugggaagauggaaagcccuucugaucccucccuccucuccuaugcccggcccguga

SEQ ID NO: 3107 - protein, 1106 aa, Artificial Sequence
  PGFRB__Homo_sapiens__P09619
MRLPGAMPALALKGELLLLSLLLLLEPQISQGLVVTPPGPELVLNVSSTFVLTCSGSAPVVWERMSQEPPQEMAKAQDGTFSSVLTLTNLTGLDTGEYFCTHNDSRGLETDERKRLYIFVPDPTVGFLPNDAEELFIFLTEITEITIPCRVTDPQLVVTLHEKKGDVALPVPYDHQRGFSGIFEDRSYICKTTIGDREVDSDAYYVYRLQVSSINVSVNAVQTVVRQGENITLMCIVIGNEVVNFEWTYPRKESGRLVEPVTDFLLDMPYHIRSILHIPSAELEDSGTYTCNVTESVNDHQDEKAINITVVESGYVRLLGEVGTLQFAELHRSRTLQVVFEAYPPPTVLWFKDNRTLGDSSAGEIALSTRNVSETRYVSELTLVRVKVAEAGHYTMRAFHEDAEVQLSFQLQINVPVRVLELSESHPDSGEQTVRCRGRGMPQPNIIWSACRDLKRCPRELPPTLLGNSSEEESQLETNVTYWEEEQEFEVVSTLRLQHVDRPLSVRCTLRNAVGQDTQEVIVVPHSLPFKVVVISAILALVVLTIISLIILIMLWQKKPRYEIRWKVIESVSSDGHEYIYVDPMQLPYDSTWELPRDQLVLGRTLGSGAFGQVVEATAHGLSHSQATMKVAVKMLKSTARSSEKQALMSELKIMSHLGPHLNVVNLLGACTKGGPIYIITEYCRYGDLVDYLHRNKHTFLQHHSDKRRPPSAELYSNALPVGLPLPSHVSLTGESDGGYMDMSKDESVDYVPMLDMKGDVKYADIESSNYMAPYDNYVPSAPERTCRATLINESPVLSYMDLVGFSYQVANGMEFLASKNCVHRDLAARNVLICEGKLVKICDFGLARDIMRDSNYISKGSTFLPLKWMAPESIFNSLYTTLSDVWSFGILLWEIFTLGGTPYPELPMNEQFYNAIKRGYRMAQPAHASDEIYEIMQKCWEEKFEIRPPFSQLVLLLERLLGEGYKKKYQQVDEEFLRSDHPAILRSQARLPGFHGLRSPLDTSSVLYTAVQPNEGDNDYIIPLPDPKPEVADEGPLEGSPSLASSTLNEVNTSSTISCDSPLEPQDEPEPEPQLELQVEPEPELEQLPDSGCPAPRAEAEDSFL

SEQ ID NO: 3108 - RNA, 3321 nt, Artificial Sequence
  PGFRB__Homo_sapiens__AAA60049
augcggcuuccgggugcgaugccagcucuggcccucaaaggcgagcugcuguugcugucucuccuguuacuucuggaaccacagaucucucagggccuggucgucacacccccggggccagagcuuguccucaaugucuccagcaccuucguucugaccugcucggguucagcuccgguggugugggaacggaugucccaggagcccccacaggaaauggccaaggcccaggauggcaccuucuccagcgugcucacacugaccaaccucacugggcuagacacgggagaauacuuuugcacccacaaugacucccguggacuggagaccgaugagcggaaacggcucuacaucuuugugccagaucccaccgugggcuuccucccuaaugaugccgaggaacuauucaucuuucucacggaaauaacugagaucaccauuccaugccgaguaacagacccacagcugguggugacacugcacgagaagaaaggggacguugcacugccuguccccuaugaucaccaacguggcuuuucugguaucuuugaggacagaagcuacaucugcaaaaccaccauuggggacagggagguggauucugaugccuacuaugucuacagacuccaggugucauccaucaacgucucugugaacgcagugcagacugugguccgccagggugagaacaucacccucaugugcauugugaucgggaaugagguggucaacuucgaguggacauacccccgcaaagaaagugggcggcugguggagccggugacugacuuccucuuggauaugccuuaccacauccgcuccauccugcacauccccagugccgaguuagaagacucggggaccuacaccugcaaugugacggagagugugaaugaccaucaggaugaaaaggccaucaacaucaccgugguugagagcggcuacgugcggcuccugggagaggugggcacacuacaauuugcugagcugcaucggagccggacacugcagguaguguucgaggccuacccaccgcccacuguccugugguucaaagacaaccgcacccugggcgacuccagcgcuggcgaaaucgcccuguccacgcgcaacgugucggagacccgguaugugucagagcugacacugguucgcgugaagguggcagaggcuggccacuacaccaugcgggccuuccaugaggaugcugagguccagcucuccuuccagcuacagaucaaugucccuguccgagugcuggagcuaagugagagccacccugacaguggggaacagacaguccgcugucguggccggggcaugccccagccgaacaucaucuggucugccugcagagaccucaaaagguguccacgugagcugccgcccacgcugcuggggaacaguuccgaagaggagagccagcuggagacuaacgugacguacugggaggaggagcaggaguuugagguggugagcacacugcgucugcagcacguggaucggccacugucggugcgcugcacgcugcgcaacgcugugggccaggacacgcaggaggucaucguggugccacacuccuugcccuuuaaggugguggugaucucagccauccuggcccugguggugcucaccaucaucucccuuaucauccucaucaugcuuuggcagaagaagccacguuacgagauccgauggaaggugauugagucugugagcucugacggccaugaguacaucuacguggaccccaugcagcugcccuaugacuccacgugggagcugccgcgggaccagcuugugcugggacgcacccucggcucuggggccuuugggcaggugguggaggccacggcucauggccugagccauucucaggccacgaugaaaguggccgucaagaugcuuaaauccacagcccgcagcagugagaagcaagcccuuaugucggagcugaagaucaugagucaccuugggccccaccugaacguggucaaccuguugggggccugcaccaaaggaggacccaucuauaucaucacugaguacugccgcuacggagaccugguggacuaccugcaccgcaacaaacacaccuuccugcagcaccacuccgacaagcgccgcccgcccagcgcggagcucuacagcaaugcucugcccguugggcucccccugcccagccauguguccuugaccggggagagcgacgguggcuacauggacaugagcaaggacgagucgguggacuaugugcccaugcuggacaugaaaggagacgucaaauaugcagacaucgaguccuccaacuacauggccccuuacgauaacuacguucccucugccccugagaggaccugccgagcaacuuugaucaacgagucuccagugcuaagcuacauggaccucgugggcuucagcuaccagguggccaauggcauggaguuucuggccuccaagaacugcguccacagagaccuggcggcuaggaacgugcucaucugugaaggcaagcuggucaagaucugugacuuuggccuggcucgagacaucaugcgggacucgaauuacaucuccaaaggcagcaccuuuuugccuuuaaaguggauggcuccggagagcaucuucaacagccucuacaccacccugagcgacgugugguccuucgggauccugcucugggagaucuucaccuuggguggcaccccuuacccagagcugcccaugaacgagcaguucuacaaugccaucaaacgggguuaccgcauggcccagccugcccaugccuccgacgagaucuaugagaucaugcagaagugcugggaagagaaguuugagauucggccccccuucucccagcuggugcugcuucucgagagacuguugggcgaagguuacaaaaagaaguaccagcagguggaugaggaguuucugaggagugaccacccagccauccuucggucccaggcccgcuugccuggguuccauggccuccgaucuccccuggacaccagcuccguccucuauacugccgugcagcccaaugagggugacaacgacuauaucaucccccugccugaccccaaacccgagguugcugacgagggcccacuggaggguucccccagccuagccagcuccacccugaaugaagucaacaccuccucaaccaucuccugugacagcccccuggagccccaggacgaaccagagccagagccccagcuugagcuccagguggagccggagccagagcuggaacaguugccggauucggggugcccugcgccucgggcggaagcagaggauagcuuccuguag

SEQ ID NO: 3109 - RNA, 3321 nt, Artificial Sequence
  derived and/or modified sequence opt1 from PGFRB__Homo_sapiens__AAA60049
augcgccugcccggcgccaugccggcccucgcgcugaagggggagcugcuccugcugagccuccugcugcuccuggagccccagaucucccagggccugguggucaccccgcccgggcccgagcucgugcugaacgugagcuccaccuucguccugacgugcagcggcuccgcccccguggugugggagcggaugagccaggagccgccccaggagauggccaaggcccaggacgggaccuucuccagcguccucacccugaccaaccugacgggccucgacaccggcgaguacuucugcacccacaacgacucccgcgggcuggagaccgacgagcggaagcgccuguacaucuucgugcccgaccccacggugggcuuccuccccaacgacgccgaggagcuguucaucuuccugaccgagaucaccgagaucaccauccccugccgggucacggacccgcagcucguggugacccugcacgagaagaagggggacgucgcgcugcccgugcccuacgaccaccagcgcggcuucagcgggaucuucgaggaccgguccuacaucugcaagaccaccaucggcgaccgcgagguggacagcgacgccuacuacgucuaccggcuccagguguccagcaucaacguguccgucaacgccgugcagacggugguccgccagggcgagaacaucacccugaugugcaucgugaucgggaacgagguggucaacuucgaguggaccuacccccggaaggagagcggccgccugguggagccggucaccgacuuccuccuggacaugcccuaccacauccgguccauccugcacauccccagcgccgagcucgaggacuccgggacguacacgugcaacgugaccgagagcgugaacgaccaccaggacgagaaggcgaucaacaucaccgucguggagagcggcuacgugcgccugcugggcgaggucgggacccuccaguucgccgagcugcaccggucccgcacccuccaggugguguucgaggccuacccgccgcccaccguccugugguucaaggacaaccggacccugggcgacagcuccgccggggagaucgcccugagcacgcgcaacguguccgagacccgguacgugagcgagcucacccugguccgcgugaagguggcggaggccggccacuacaccaugcgggccuuccacgaggacgccgagguccagcuguccuuccagcuccagaucaacgugcccgugcgcguccuggagcugagcgagucccaccccgacagcggggagcagacggugcgcugccggggccgcggcaugccccagcccaacaucaucugguccgccugccgggaccucaagcgcugcccccgggagcugcccccgacccugcuggggaacagcuccgaggaggagagccagcucgagaccaacgugaccuacugggaggaggagcaggaguucgaggucguguccacgcugcgccugcagcacguggaccggccccucagcguccgcugcacccugcggaacgcggugggccaggacacccaggaggugaucgucgugccccacucccugccguucaagguggucgugaucagcgccauccucgcccuggugguccugaccaucaucucccucaucauccugaucaugcuguggcagaagaagccccgcuacgagauccgguggaaggugaucgagagcgugagcuccgacgggcacgaguacaucuacgucgaccccaugcagcuccccuacgacagcaccugggagcugccgcgcgaccagcuggugcucggccggacgcugggguccggcgccuucggccagguggucgaggccaccgcgcacgggcugagccacucccaggccaccaugaagguggccgugaagaugcucaagagcaccgcccgcuccagcgagaagcaggcccugauguccgagcugaagaucaugagccaccucggcccccaccugaacgucgugaaccugcucggggcgugcacgaagggcgggcccaucuacaucaucaccgaguacugccgguacggcgaccugguggacuaccugcaccgcaacaagcacaccuuccuccagcaccacuccgacaagcggcggcccccgagcgccgagcuguacuccaacgcccugcccgucggccucccccugcccagccacgugucccugaccggggagagcgacggcggguacauggacauguccaaggacgagagcguggacuacgucccgaugcucgacaugaagggcgacgugaaguacgccgacaucgagagcuccaacuacauggcgcccuacgacaacuacgugcccagcgcccccgagcgcacgugccgcgccacccugaucaacgaguccccgguccugagcuacauggaccucgugggcuucuccuaccaggucgccaacgggauggaguuccuggccagcaagaacugcgugcaccgcgaccuggcggcccggaacgugcucaucugcgagggcaagcuggucaagaucugcgacuucgggcuggcccgcgacaucaugcgggacuccaacuacaucagcaagggcuccaccuuccucccccugaaguggauggcccccgagagcaucuucaacucccuguacaccacgcucagcgacgugugguccuucgggauccugcugugggagaucuucacccucggcggcacccccuacccggagcugcccaugaacgagcaguucuacaacgccaucaagcgcggguaccggauggcgcagcccgcccacgccagcgacgagaucuacgagaucaugcagaagugcugggaggagaaguucgagauccggcccccguucucccagcuggugcuccugcuggagcgccuccugggcgagggguacaagaagaaguaccagcaggucgacgaggaguuccugcgcagcgaccaccccgccauccuccggucccaggcccgccugcccggcuuccacgggcugcggagcccgcucgacaccuccagcgugcuguacacggcggugcagcccaacgagggcgacaacgacuacaucaucccccugcccgacccgaagcccgaggucgccgacgagggcccccucgaggggagccccucccuggccagcuccacccugaacgaggugaacaccagcuccaccaucagcugcgacuccccgcucgagccccaggacgagcccgagcccgagccgcagcuggagcuccagguggagcccgagcccgagcuggagcagcugcccgacagcggcugcccggcgccccgcgccgaggccgaggacuccuuccuguga

SEQ ID NO: 3110 - RNA, 3321 nt, Artificial Sequence
  derived and/or modified sequence opt2 from PGFRB__Homo_sapiens__AAA60049
augcgccuccccggcgccaugcccgcccucgcccucaagggcgagcuccuccuccucucccuccuccuccuccucgagccccagaucucccagggccucgucgucaccccccccggccccgagcucguccucaacgucuccuccaccuucguccucaccugcuccggcuccgcccccgucgucugggagcgcaugucccaggagcccccccaggagauggccaaggcccaggacggcaccuucuccuccguccucacccucaccaaccucaccggccucgacaccggcgaguacuucugcacccacaacgacucccgcggccucgagaccgacgagcgcaagcgccucuacaucuucguccccgaccccaccgucggcuuccuccccaacgacgccgaggagcucuucaucuuccucaccgagaucaccgagaucaccauccccugccgcgucaccgacccccagcucgucgucacccuccacgagaagaagggcgacgucgcccuccccguccccuacgaccaccagcgcggcuucuccggcaucuucgaggaccgcuccuacaucugcaagaccaccaucggcgaccgcgaggucgacuccgacgccuacuacgucuaccgccuccaggucuccuccaucaacgucuccgucaacgccguccagaccgucguccgccagggcgagaacaucacccucaugugcaucgucaucggcaacgaggucgucaacuucgaguggaccuacccccgcaaggaguccggccgccucgucgagcccgucaccgacuuccuccucgacaugcccuaccacauccgcuccauccuccacauccccuccgccgagcucgaggacuccggcaccuacaccugcaacgucaccgaguccgucaacgaccaccaggacgagaaggccaucaacaucaccgucgucgaguccggcuacguccgccuccucggcgaggucggcacccuccaguucgccgagcuccaccgcucccgcacccuccaggucgucuucgaggccuaccccccccccaccguccucugguucaaggacaaccgcacccucggcgacuccuccgccggcgagaucgcccucuccacccgcaacgucuccgagacccgcuacgucuccgagcucacccucguccgcgucaaggucgccgaggccggccacuacaccaugcgcgccuuccacgaggacgccgagguccagcucuccuuccagcuccagaucaacguccccguccgcguccucgagcucuccgagucccaccccgacuccggcgagcagaccguccgcugccgcggccgcggcaugccccagcccaacaucaucugguccgccugccgcgaccucaagcgcugcccccgcgagcucccccccacccuccucggcaacuccuccgaggaggagucccagcucgagaccaacgucaccuacugggaggaggagcaggaguucgaggucgucuccacccuccgccuccagcacgucgaccgcccccucuccguccgcugcacccuccgcaacgccgucggccaggacacccaggaggucaucgucgucccccacucccuccccuucaaggucgucgucaucuccgccauccucgcccucgucguccucaccaucaucucccucaucauccucaucaugcucuggcagaagaagccccgcuacgagauccgcuggaaggucaucgaguccgucuccuccgacggccacgaguacaucuacgucgaccccaugcagcuccccuacgacuccaccugggagcucccccgcgaccagcucguccucggccgcacccucggcuccggcgccuucggccaggucgucgaggccaccgcccacggccucucccacucccaggccaccaugaaggucgccgucaagaugcucaaguccaccgcccgcuccuccgagaagcaggcccucauguccgagcucaagaucaugucccaccucggcccccaccucaacgucgucaaccuccucggcgccugcaccaagggcggccccaucuacaucaucaccgaguacugccgcuacggcgaccucgucgacuaccuccaccgcaacaagcacaccuuccuccagcaccacuccgacaagcgccgcccccccuccgccgagcucuacuccaacgcccuccccgucggccucccccuccccucccacgucucccucaccggcgaguccgacggcggcuacauggacauguccaaggacgaguccgucgacuacguccccaugcucgacaugaagggcgacgucaaguacgccgacaucgaguccuccaacuacauggcccccuacgacaacuacguccccuccgcccccgagcgcaccugccgcgccacccucaucaacgagucccccguccucuccuacauggaccucgucggcuucuccuaccaggucgccaacggcauggaguuccucgccuccaagaacugcguccaccgcgaccucgccgcccgcaacguccucaucugcgagggcaagcucgucaagaucugcgacuucggccucgcccgcgacaucaugcgcgacuccaacuacaucuccaagggcuccaccuuccucccccucaaguggauggcccccgaguccaucuucaacucccucuacaccacccucuccgacgucugguccuucggcauccuccucugggagaucuucacccucggcggcacccccuaccccgagcuccccaugaacgagcaguucuacaacgccaucaagcgcggcuaccgcauggcccagcccgcccacgccuccgacgagaucuacgagaucaugcagaagugcugggaggagaaguucgagauccgcccccccuucucccagcucguccuccuccucgagcgccuccucggcgagggcuacaagaagaaguaccagcaggucgacgaggaguuccuccgcuccgaccaccccgccauccuccgcucccaggcccgccuccccggcuuccacggccuccgcuccccccucgacaccuccuccguccucuacaccgccguccagcccaacgagggcgacaacgacuacaucaucccccuccccgaccccaagcccgaggucgccgacgagggcccccucgagggcucccccucccucgccuccuccacccucaacgaggucaacaccuccuccaccaucuccugcgacuccccccucgagccccaggacgagcccgagcccgagccccagcucgagcuccaggucgagcccgagcccgagcucgagcagcuccccgacuccggcugccccgccccccgcgccgaggccgaggacuccuuccucuga

SEQ ID NO: 3111 - RNA, 3321 nt, Artificial Sequence
  derived and/or modified sequence opt3 from PGFRB__Homo_sapiens__AAA60049
augagacugcccggcgccaugccugcucucgcacuuaagggggagcuguuguuacugagccuacuccugcuucuggaaccacagaucucccaaggauugguggucaccccgcccgguccugagcucguucugaacgugucuucaacauucguacugacuugcaguggcagcgccccaguggucugggaaaggaugucccaggagcccccucaggaaauggcgaaagcucaggacgggacguuuucuucggugcucaccuuaacaaaucugacuggacuugauaccggcgaguacuucuguacacacaacgacucacgggguuuggagaccgaugaacgcaagcgacuguauauuuuuguuccagaccccacugugggguuccuaccuaaugaugccgaggaacucuuuauauuccugacagagaucaccgagauuacgaucccaugccgugucacugacccgcaacuugugguaacccugcaugaaaagaagggagauguugcauugcccgugccuuacgaccaccagagaggcuuuagcggcauuuucgaggauaggaguuauaucuguaaaacaacuauaggggaccgggaagucgauuccgacgccuacuauguguaccgccuccaggugucuagcaucaacgucuccguuaaugcugugcagaccguagugagacaaggagagaacauuacacugaugugcaucgucauugguaaugaagugguuaacuuugaguggaccuauccaaggaaggagucaggccgguuaguggaacccgucacggauuuccugcucgacaugccuuaccauauccgcaguauacuucacauuccaagcgcagagcuggaagacucugggacuuacacauguaaugugaccgaguccguaaacgaucaucaggacgaaaaggccaucaauauuacuguuguggagucaggauauguccgauugcuaggcgagguggguacacugcaguuugcugaacuccacagaagcaggacccugcaggucguguucgaggccuaucccccgccuacgguucuuugguuuaaagauaaccggacccugggggacaguucugcgggagaaaucgcauuguccacacguaaugugagcgagacucgcuacguaucggaacucacccuggucagagugaagguugccgaggcuggccacuacacaaugagggccuuccaugaggaugcagaagugcaauuaucuuuccagcugcagaucaacguccccgugcggguacuagagcucuccgaaucacacccagacaguggcgagcaaacugugcgaugccgcgggagaggaaugccucagcccaauauuauauggagcgcuuguagggaucugaaacggugcccacgcgagcuucccccuaccuugcuggguaacuccucugaagaggaaagccagcucgagacaaacguuaccuauugggaagaggagcaggaauuugaggucgugucaacucugagacuucaacauguggacaggccacugaguguccguuguacguugcggaaugccguuggccaggauacacaggaagugaucgugguaccgcacucccuccccuucaaggucgugguuauuagcgcgauccuggccuuagugguccugaccauaauuucucuaaucauccucauuaugcuguggcagaaaaagccucgauacgagaucagauggaaggugauugaaucaguuaguagcgacgggcacgaguauauauacguggauccaaugcaacuucccuacgacuccacuugggaguugccuagggaccagcugguacucggacgcacccugggcucuggugcauuugggcaggucguggaagcuacagcccauggcuuaucgcacagccaggcuaccaugaaaguggccgucaagaugcugaaauccacugcacggucaagugagaagcaagcccuuaugucugaauugaaaaucaugagccaucucggaccacaccugaacguugugaaucuacugggcgcuugcacaaaagggggacccauuuauaucaucacggaguacuguagauauggugaucucguagacuaccugcauaggaacaaacacaccuuccuucagcaccauuccgauaagcgccgaccgccuucagcggaauuguauagcaaugcacugccagugggcuuaccccucccuucucacgucucccugacuggggagagugacggaggcuacauggauaugagcaaggacgagucuguggauuauguucccaugcuugacaugaaaggugaugugaaguacgccgacauugaauccucaaacuacauggcuccauaugauaauuacgucccuagugcccccgagcggacaugccgugcaacccugauaaacgaaagcccaguguugucguauauggaccucguuggguuuuccuaccagguggccaauggcauggaguuccuggcuucuaaaaacugcguccauagagaucuagccgcaaggaauguacugaucugugagggaaagcucgugaaaauuugcgacuuuggccuggcgcgcgacaucaugcgggauagcaacuauauuucaaaggggaguacauuccuuccguugaaguggauggcuccugaauccaucuuuaauucucuguacacuaccuuaagcgacguuugguccuucggaauacuccugugggagaucuuuacgcuugguggcacccccuauccagaacugcccaugaacgagcaguucuacaaugccauuaaaagaggguacaggauggcacaaccugcccacgcuucagaugaaaucuaugagauuaugcagaaguguugggaggaaaaauuugagauccgaccacccuucagccagcuagugcuccuguuggaacgccuguuaggagagggcuacaagaaaaaguaucaacaggucgacgaagaguuccuccggagugaucacccugccauacugagaucucaggcaaggcuuccggguuuucaugggcugcguuccccauuggacacaagcucggugcucuacacugcuguacagcccaacgagggcgauaacgacuauauuaucccucugccagaucccaagccugaaguggccgacgagggaccgcuagaaggcucacccucucuggcgaguuccacccuuaaugaggucaacacaagcucuacuauuagcugcgauuccccacucgaaccucaagacgagcccgagccagaaccucagcuggaguugcagguugaacccgagccagagcuggaacaguuaccggauucaggguguccugcuccccgcgccgaggcagaagacaguuuccucuga

SEQ ID NO: 3112 - RNA, 3321 nt, Artificial Sequence
  derived and/or modified sequence opt4 from PGFRB__Homo_sapiens__AAA60049
augagacugcccggcgccaugcccgcccuggcccugaagggcgagcugcugcugcugagccugcugcugcugcuggagccccagaucagccagggccugguggugaccccccccggccccgagcuggugcugaacgugagcagcaccuucgugcugaccugcagcggcagcgcccccguggugugggagagaaugagccaggagcccccccaggagauggccaaggcccaggacggcaccuucagcagcgugcugacccugaccaaccugaccggccuggacaccggcgaguacuucugcacccacaacgacagcagaggccuggagaccgacgagagaaagagacuguacaucuucgugcccgaccccaccgugggcuuccugcccaacgacgccgaggagcuguucaucuuccugaccgagaucaccgagaucaccauccccugcagagugaccgacccccagcugguggugacccugcacgagaagaagggcgacguggcccugcccgugcccuacgaccaccagagaggcuucagcggcaucuucgaggacagaagcuacaucugcaagaccaccaucggcgacagagagguggacagcgacgccuacuacguguacagacugcaggugagcagcaucaacgugagcgugaacgccgugcagaccguggugagacagggcgagaacaucacccugaugugcaucgugaucggcaacgagguggugaacuucgaguggaccuaccccagaaaggagagcggcagacugguggagcccgugaccgacuuccugcuggacaugcccuaccacaucagaagcauccugcacauccccagcgccgagcuggaggacagcggcaccuacaccugcaacgugaccgagagcgugaacgaccaccaggacgagaaggccaucaacaucaccgugguggagagcggcuacgugagacugcugggcgaggugggcacccugcaguucgccgagcugcacagaagcagaacccugcaggugguguucgaggccuaccccccccccaccgugcugugguucaaggacaacagaacccugggcgacagcagcgccggcgagaucgcccugagcaccagaaacgugagcgagaccagauacgugagcgagcugacccuggugagagugaagguggccgaggccggccacuacaccaugagagccuuccacgaggacgccgaggugcagcugagcuuccagcugcagaucaacgugcccgugagagugcuggagcugagcgagagccaccccgacagcggcgagcagaccgugagaugcagaggcagaggcaugccccagcccaacaucaucuggagcgccugcagagaccugaagagaugccccagagagcugccccccacccugcugggcaacagcagcgaggaggagagccagcuggagaccaacgugaccuacugggaggaggagcaggaguucgagguggugagcacccugagacugcagcacguggacagaccccugagcgugagaugcacccugagaaacgccgugggccaggacacccaggaggugaucguggugccccacagccugcccuucaaggugguggugaucagcgccauccuggcccugguggugcugaccaucaucagccugaucauccugaucaugcuguggcagaagaagcccagauacgagaucagauggaaggugaucgagagcgugagcagcgacggccacgaguacaucuacguggaccccaugcagcugcccuacgacagcaccugggagcugcccagagaccagcuggugcugggcagaacccugggcagcggcgccuucggccaggugguggaggccaccgcccacggccugagccacagccaggccaccaugaagguggccgugaagaugcugaagagcaccgccagaagcagcgagaagcaggcccugaugagcgagcugaagaucaugagccaccugggcccccaccugaacguggugaaccugcugggcgccugcaccaagggcggccccaucuacaucaucaccgaguacugcagauacggcgaccugguggacuaccugcacagaaacaagcacaccuuccugcagcaccacagcgacaagagaagaccccccagcgccgagcuguacagcaacgcccugcccgugggccugccccugcccagccacgugagccugaccggcgagagcgacggcggcuacauggacaugagcaaggacgagagcguggacuacgugcccaugcuggacaugaagggcgacgugaaguacgccgacaucgagagcagcaacuacauggcccccuacgacaacuacgugcccagcgcccccgagagaaccugcagagccacccugaucaacgagagccccgugcugagcuacauggaccuggugggcuucagcuaccagguggccaacggcauggaguuccuggccagcaagaacugcgugcacagagaccuggccgccagaaacgugcugaucugcgagggcaagcuggugaagaucugcgacuucggccuggccagagacaucaugagagacagcaacuacaucagcaagggcagcaccuuccugccccugaaguggauggcccccgagagcaucuucaacagccuguacaccacccugagcgacguguggagcuucggcauccugcugugggagaucuucacccugggcggcacccccuaccccgagcugcccaugaacgagcaguucuacaacgccaucaagagaggcuacagaauggcccagcccgcccacgccagcgacgagaucuacgagaucaugcagaagugcugggaggagaaguucgagaucagaccccccuucagccagcuggugcugcugcuggagagacugcugggcgagggcuacaagaagaaguaccagcagguggacgaggaguuccugagaagcgaccaccccgccauccugagaagccaggccagacugcccggcuuccacggccugagaagcccccuggacaccagcagcgugcuguacaccgccgugcagcccaacgagggcgacaacgacuacaucaucccccugcccgaccccaagcccgagguggccgacgagggcccccuggagggcagccccagccuggccagcagcacccugaacgaggugaacaccagcagcaccaucagcugcgacagcccccuggagccccaggacgagcccgagcccgagccccagcuggagcugcagguggagcccgagcccgagcuggagcagcugcccgacagcggcugccccgcccccagagccgaggccgaggacagcuuccuguga

SEQ ID NO: 3113 - RNA, 3321 nt, Artificial Sequence
  derived and/or modified sequence opt5 from PGFRB__Homo_sapiens__AAA60049
augagacugcccggcgccaugccugcucucgcccugaagggggagcuucugcuccugagccuucugcuccugcuggaaccgcagaucucccaaggacucguggucacacccccuggccccgagcugguucuuaacgugucuagcaccuucgugcugacgugcuccgggucugcgccugucgugugggaacggaugagccaggagcccccucaggaaauggcuaaagcccaggacggaaccuuuuccucuguucucacacugaccaaucuuacaggccuggauaccggggaguacuucuguacacacaacgacagccgcggacucgagaccgaugaaagaaagcggcuguauauuuuugugccggaccccacggucggcuuccugccuaaugaugccgaggaacucuuuaucuuccugaccgagauuacagagaucaccauucccugccgcgugacagacccucaacuuguugugacccugcaugaaaagaagggcgaugucgcucuccccgugccguacgaccaccagagaggguuuuccggaaucuucgaggaucggagcuauaucuguaaaacgacaauuggcgaccgcgaaguggauucugacgccuacuaugucuacagacugcagguuuccagcaucaacgugucugugaaugcuguccagaccgugguucggcaaggggagaacauuacacuuaugugcaucgugauuggaaaugaagucgugaacuuugaguggaccuauccucgcaaggaguccggcagacugguugaacccgugaccgauuuccuccuggacaugccuuaccauauccggagcauucugcacauccccucugccgagcucgaagacuccgggacauacacguguaaugucaccgagagcgugaacgaucaucaggacgaaaaggcgaucaauauuacagucguggaguccggauauguucgccugcuuggcgaggugggcacccugcaguuugccgaacuccacagaucucggacacugcaggucguguucgaggcuuaucccccuccgaccguucuuugguuuaaagauaaccgcacgcugggggacagcuccgccggagaaaucgcucucagcacaagaaaugugucugagacccgguacgucuccgaacugacccuggugagagugaagguugccgaggcgggccacuacacaaugcgcgccuuccaugaggaugcugaaguccaacucagcuuccagcugcagauuaacgugcccgugcggguccuugagcugucugaaagccacccugacuccggggagcaaaccgugagaugccgcggacggggcaugccccagccuaauaucauuuggucugccuguagagaucucaaacgcugcccccgggagcugccgccuacacugcuugggaacagcuccgaagaggaaagccagcucgagacgaacguuaccuauugggaagaggagcaggaauuugagguggucucuacacugagacugcaacauguggaccgcccccucuccguucgguguacccugagaaaugcugugggacaggauacacaggaagucaucgugguuccucacagccuucccuucaagguggucgugaucucugccauucuggcccucgugguccugaccaucauuucccugaucauucuuaucaugcucuggcagaaaaagccucgcuacgagauccgguggaagguuauugaaagcguguccucugacggccacgaguauaucuacguggaucccaugcaacugccguacgacagcacgugggagcugccuagagaccagcucguccugggccggacccuuggguccggagcuuuuggccaggugguugaagcgacagcccaugggcugucucacagccaggcuaccaugaaaguggccgucaagaugcucaaauccacagcccgcagcucugagaagcaagcucugauguccgaacugaaaauuaugagccaucuuggaccccaccucaacgugguuaaucugcugggcgccugcaccaaagggggccccaucuauauuaucacggaguacuguagauauggagaucucguggacuaccugcaucggaacaaacacacauuccuucagcaccauucugauaagagacgcccuccguccgcggaacuguauagcaaugcucuccccgucggccugccucugcccucucacgugagccuuaccggggaguccgacggaggcuacauggauaugagcaaggacgagucuguugauuaugugccuaugcucgacaugaaaggggaugucaaguacgccgacauugaauccagcaacuacauggcccccuaugauaauuacgugccuuccgcucccgagcggacaugcagagccacccugaucaacgaaucuccggugcugagcuauauggaccucgucggauuuuccuaccagguugcuaauggcauggaguuccuggccucuaaaaacugcgugcaucgcgaucuugcggccagaaaugugcugaucugugaggggaagcucgucaaaauuugcgacuuuggccuggcucgggacaucaugcgcgauagcaacuauauuuccaagggaucuaccuuccugccucuuaaguggauggcccccgaaagcaucuuuaauucccuguacacaacgcucagcgacguguggucuuucggcauucugcucugggagaucuuuacccuugggggaacaccuuaucccgaacugccgaugaacgagcaguucuacaaugcuaucaaaagaggcuaccggauggcccaaccugcgcacgccuccgaugaaauuuaugagaucaugcagaaguguugggaggaaaaauuugagauuagacccccuuucagccagcugguucuccugcuggaacgccuucugggggagggauacaagaaaaaguaucaacagguggacgaagaguuccuccggucugaucaccccgcuauccugcgcucccaggccagacuccccggcuuucaugggcugcggagcccucuugacaccucuuccguccuguacacagcugugcagccgaacgagggcgauaacgacuauauuaucccccucccugaucccaagccugaaguugccgacgagggaccccuggaaggcagcccuucccuggccagcucuacccuuaaugaggugaacacgagcuccacaaucucuugcgauagcccgcuggaaccccaagacgagccugagcccgaaccucagcucgagcugcaggucgaacccgagccggagcucgaacagcugccugauuccgggugucccgcuccccgcgcggaggccgaagacucuuuccuuuga

SEQ ID NO: 3114 - protein, 313 aa, Artificial Sequence
  Pim-1_-Kinase__Homo_sapiens__A0A024RD25
MLLSKINSLAHLRAAPCNDLHATKLAPGKEKEPLESQYQVGPLLGSGGFGSVYSGIRVSDNLPVAIKHVEKDRISDWGELPNGTRVPMEVVLLKKVSSGFSGVIRLLDWFERPDSFVLILERPEPVQDLFDFITERGALQEELARSFFWQVLEAVRHCHNCGVLHRDIKDENILIDLNRGELKLIDFGSGALLKDTVYTDFDGTRVYSPPEWIRYHRYHGRSAAVWSLGILLYDMVCGDIPFEHDEEIIRGQVFFRQRVSSECQHLIRWCLALRPSDRPTFEEIQNHPWMQDVLLPQETAEIHLHSLSPGPSK

SEQ ID NO: 3115 - RNA, 942 nt, Artificial Sequence
  Pim-1_-Kinase__Homo_sapiens__EAX03935
augcucuuguccaaaaucaacucgcuugcccaccugcgcgccgcgcccugcaacgaccugcacgccaccaagcuggcgcccggcaaggagaaggagccccuggagucgcaguaccaggugggcccgcuacugggcagcggcggcuucggcucggucuacucaggcauccgcgucuccgacaacuugccgguggccaucaaacacguggagaaggaccggauuuccgacuggggagagcugccuaauggcacucgagugcccauggaagugguccugcugaagaaggugagcucggguuucuccggcgucauuaggcuccuggacugguucgagaggcccgacaguuucguccugauccuggagaggcccgagccggugcaagaucucuucgacuucaucacggaaaggggagcccugcaagaggagcuggcccgcagcuucuucuggcaggugcuggaggccgugcggcacugccacaacugcggggugcuccaccgcgacaucaaggacgaaaacauccuuaucgaccucaaucgcggcgagcucaagcucaucgacuucgggucgggggcgcugcucaaggacaccgucuacacggacuucgaugggacccgaguguauagcccuccagaguggauccgcuaccaucgcuaccauggcaggucggcggcagucuggucccuggggauccugcuguaugauaugguguguggagauauuccuuucgagcaugacgaagagaucaucaggggccagguuuucuucaggcagagggucucuucagaaugucagcaucucauuagauggugcuuggcccugagaccaucagauaggccaaccuucgaagaaauccagaaccauccauggaugcaagauguucuccugccccaggaaacugcugagauccaccuccacagccugucgccggggcccagcaaauag

SEQ ID NO: 3116 - RNA, 942 nt, Artificial Sequence
  derived and/or modified sequence opt1 from Pim-1_-Kinase__Homo_sapiens__EAX03935
augcugcucagcaagaucaacucccuggcccaccuccgcgccgcgcccugcaacgaccugcacgccaccaagcuggccccgggcaaggagaaggagccccuggagagccaguaccagguggggccccuccugggcuccgggggcuucgggagcgucuacuccggcauccgggugagcgacaaccugcccguggccaucaagcacgucgagaaggaccgcaucuccgacuggggcgagcucccgaacgggacccgggugcccauggaggugguccugcugaagaaggugagcuccggcuucagcggggugauccgccuccuggacugguucgagcggcccgacuccuucguccugauccucgagcgccccgagccggugcaggaccuguucgacuucaucacggagcggggcgcccugcaggaggagcucgcgcgcagcuucuucuggcagguccuggaggccgugcggcacugccacaacugcggggugcugcaccgcgacaucaaggacgagaacauccucaucgaccugaaccggggcgagcugaagcucaucgacuucggcuccggggcccugcugaaggacaccguguacaccgacuucgacggcacccgcgucuacagcccgcccgaguggauccgguaccaccgcuaccacgggcgguccgccgcgguguggagccucggcauccugcuguacgacauggugugcggcgacauccccuucgagcacgacgaggagaucauccgcgggcaggucuucuuccggcagcgcguguccagcgagugccagcaccucauccgguggugccuggcccugcgccccuccgaccggcccacguucgaggagauccagaaccaccccuggaugcaggacgugcuccugccccaggagaccgccgagauccaccuccacagccugagcccgggccccuccaaguga

SEQ ID NO: 3117 - RNA, 942 nt, Artificial Sequence
  derived and/or modified sequence opt2 from Pim-1_-Kinase__Homo_sapiens__EAX03935
augcuccucuccaagaucaacucccucgcccaccuccgcgccgcccccugcaacgaccuccacgccaccaagcucgcccccggcaaggagaaggagccccucgagucccaguaccaggucggcccccuccucggcuccggcggcuucggcuccgucuacuccggcauccgcgucuccgacaaccuccccgucgccaucaagcacgucgagaaggaccgcaucuccgacuggggcgagcuccccaacggcacccgcguccccauggaggucguccuccucaagaaggucuccuccggcuucuccggcgucauccgccuccucgacugguucgagcgccccgacuccuucguccucauccucgagcgccccgagcccguccaggaccucuucgacuucaucaccgagcgcggcgcccuccaggaggagcucgcccgcuccuucuucuggcagguccucgaggccguccgccacugccacaacugcggcguccuccaccgcgacaucaaggacgagaacauccucaucgaccucaaccgcggcgagcucaagcucaucgacuucggcuccggcgcccuccucaaggacaccgucuacaccgacuucgacggcacccgcgucuacuccccccccgaguggauccgcuaccaccgcuaccacggccgcuccgccgccgucuggucccucggcauccuccucuacgacauggucugcggcgacauccccuucgagcacgacgaggagaucauccgcggccaggucuucuuccgccagcgcgucuccuccgagugccagcaccucauccgcuggugccucgcccuccgccccuccgaccgccccaccuucgaggagauccagaaccaccccuggaugcaggacguccuccucccccaggagaccgccgagauccaccuccacucccucucccccggccccuccaaguga

SEQ ID NO: 3118 - RNA, 942 nt, Artificial Sequence
  derived and/or modified sequence opt3 from Pim-1_-Kinase__Homo_sapiens__EAX03935
augcugcucagcaagaucaacucccuugcccaccugagagcugcacccugcaaugacuugcaugccaccaaauuagcgccuggcaaggagaaagaaccacuggagucucaguaccaaguggggccgcuacucggaucagguggcuucgggagugucuauagcggaauuaggguuuccgauaaccugcccguggcuauaaagcacguagaaaaagaccggaucucugauuggggcgagcuuccuaaugguacacgcgugccaauggaagucgugcuguugaagaagguuucgucaggguuuagcggagugauucgacuccuggacugguucgagcgucccgauaguuuuguccugauccucgagagaccugaaccagugcaggacuuauucgauuuuauuacugagaggggcgcccugcaggaggaacuugcacgguccuucuuuuggcagguauuggaggccguucgccauugucacaacugcggcgugcugcauagagacaucaaagaugaaaauauacuaaucgaccucaacaggggagagcugaaacuuauugauuucggaucuggugcucuguugaaggacacggucuacaccgauuuugacggcacacggguguauagcccucccgaauggauccgcuaccaccgauaucacgggagauccgcagccguguggucacucgggauucuguuauacgacauggucuguggcgauaucccauucgagcaugacgaagagauaauuaggggucaaguguuuuuccggcagcguguuaguagcgagugccagcaccugauccgcuggugucucgcucuuagaccgucugauaggcccacuuuugaagagauucagaaucauccuuggaugcaagacguacuguugccacaggaaaccgccgagauccaccuacacucccugucacccgggccuagcaaguga

SEQ ID NO: 3119 - RNA, 942 nt, Artificial Sequence
  derived and/or modified sequence opt4 from Pim-1_-Kinase__Homo_sapiens__EAX03935
augcugcugagcaagaucaacagccuggcccaccugagagccgcccccugcaacgaccugcacgccaccaagcuggcccccggcaaggagaaggagccccuggagagccaguaccaggugggcccccugcugggcagcggcggcuucggcagcguguacagcggcaucagagugagcgacaaccugcccguggccaucaagcacguggagaaggacagaaucagcgacuggggcgagcugcccaacggcaccagagugcccauggagguggugcugcugaagaaggugagcagcggcuucagcggcgugaucagacugcuggacugguucgagagacccgacagcuucgugcugauccuggagagacccgagcccgugcaggaccuguucgacuucaucaccgagagaggcgcccugcaggaggagcuggccagaagcuucuucuggcaggugcuggaggccgugagacacugccacaacugcggcgugcugcacagagacaucaaggacgagaacauccugaucgaccugaacagaggcgagcugaagcugaucgacuucggcagcggcgcccugcugaaggacaccguguacaccgacuucgacggcaccagaguguacagcccccccgaguggaucagauaccacagauaccacggcagaagcgccgccguguggagccugggcauccugcuguacgacauggugugcggcgacauccccuucgagcacgacgaggagaucaucagaggccagguguucuucagacagagagugagcagcgagugccagcaccugaucagauggugccuggcccugagacccagcgacagacccaccuucgaggagauccagaaccaccccuggaugcaggacgugcugcugccccaggagaccgccgagauccaccugcacagccugagccccggccccagcaaguga

SEQ ID NO: 3120 - RNA, 942 nt, Artificial Sequence
  derived and/or modified sequence opt5 from Pim-1_-Kinase__Homo_sapiens__EAX03935
augcugcucagcaagaucaacucccuggcccaccuuagagcugcccccugcaaugaccugcaugcgaccaaacucgcuccuggcaaggagaaagaaccgcuggagucucaguaccaaguggggccccuucugggaagcggcggguucggauccgucuauucuggcauucggguuagcgauaaccucccuguggccaucaagcacguggaaaaagaccgcauuuccgauuggggagagcugcccaauggaacaagagucccuauggaagugguucugcucaagaaggugucuagcggcuuuuccggcgucauccggcugcuugacugguucgagcgccccgauagcuuugugcugauucucgagagaccugaaccgguucaggaccuguucgauuuuaucacggagcgcggggcccuucaggaggaacuggcucggucuuucuuuuggcaagugcucgaggccgucagacauugucacaacugcggagugcugcaucgggacaucaaagaugaaaauauucugaucgaccucaaccgcggcgagcugaaacuuauugauuucggguccggagcucugcucaaggacaccguguacacagauuuugacggcaccagagucuauucucccccugaauggauccgguaccaccgcuaucacgggagaagcgccgcgguuuggucccuggggauucuucuguacgacaugguguguggcgauauccccuucgagcaugacgaagagauuauccggggccagguguuuuuccgccagagagucagcucugagugccagcaccucauccgguggugucuggcccugagaccuuccgaucgccccacauuugaagagauucagaaucauccguggaugcaagacgugcuccugccucaggaaaccgcugagauccaccuucacagccugucccccgggccuucuaaguga

SEQ ID NO: 3121 - protein, 100 aa, Artificial Sequence
  Pin-1__Homo_sapiens__O15428
MADEEKLPPGWEKRMSRPSGRGYYFNHITNPSQWERPSGNSSSGGKIWQGEPARVRRSHLLVKPVKAALDLAAGNHPDQGGGPGADQRLHPEDQGRREGL

SEQ ID NO: 3122 - RNA, 303 nt, Artificial Sequence
  Pin-1__Homo_sapiens__AAB81333
auggcggacgaggagaaacugccgccuggcugggaaaagcgcaugagccgccccucaggccgaggguacuacuucaaccacaucacuaaccccagccagugggagcggcccagcgggaacagcagcaguggcggcaaaaucuggcagggggagcccgccaggguccgccgcucgcaccugcuagugaagccagucaaggcggcccucgaccuggcggcaggaaaucacccggaccaaggaggaggcccuggagcugaucagcggcuacauccagaagaucaaggcaggagagaaggacuuuga

SEQ ID NO: 3123 - RNA, 303 nt, Artificial Sequence
  derived and/or modified sequence opt1 from Pin-1__Homo_sapiens__AAB81333
auggccgacgaggagaagcugcccccgggcugggagaagcgcaugagccggcccuccgggcgcggcuacuacuucaaccacaucaccaaccccagccagugggagcggcccuccgggaacagcuccagcggcgggaagaucuggcagggcgagccggcccgcgugcggcgcucccaccuccuggucaagcccgugaaggcggcccuggaccucgccgccggcaaccaccccgaccagggcggcgggcccggggccgaccagcggcugcacccggaggaccaggggcgccgggagggccuguga

SEQ ID NO: 3124 - RNA, 303 nt, Artificial Sequence
  derived and/or modified sequence opt2 from Pin-1__Homo_sapiens__AAB81333
auggccgacgaggagaagcucccccccggcugggagaagcgcaugucccgccccuccggccgcggcuacuacuucaaccacaucaccaaccccucccagugggagcgccccuccggcaacuccuccuccggcggcaagaucuggcagggcgagcccgcccgcguccgccgcucccaccuccucgucaagcccgucaaggccgcccucgaccucgccgccggcaaccaccccgaccagggcggcggccccggcgccgaccagcgccuccaccccgaggaccagggccgccgcgagggccucuga

SEQ ID NO: 3125 - RNA, 303 nt, Artificial Sequence
  derived and/or modified sequence opt3 from Pin-1__Homo_sapiens__AAB81333
auggccgacgaggaaaagcugcccccuggcugggagaaaagaaugagcaggccauccgggcggggauacuauuucaaccacaucaccaauccgucucagugggaacgccccucagguaacaguagcuccggcgggaagauuuggcaaggagagccugcucgagugcguagaucucaucuccuugucaaaccaguuaaggcagcccuggauuuggcggcuggcaaucaccccgaccagggugggggaccuggcgccgaucagagguuacauccagaagaccagggccggcgcgaggggcuguga

SEQ ID NO: 3126 - RNA, 303 nt, Artificial Sequence
  derived and/or modified sequence opt4 from Pin-1__Homo_sapiens__AAB81333
auggccgacgaggagaagcugccccccggcugggagaagagaaugagcagacccagcggcagaggcuacuacuucaaccacaucaccaaccccagccagugggagagacccagcggcaacagcagcagcggcggcaagaucuggcagggcgagcccgccagagugagaagaagccaccugcuggugaagcccgugaaggccgcccuggaccuggccgccggcaaccaccccgaccagggcggcggccccggcgccgaccagagacugcaccccgaggaccagggcagaagagagggccuguga

SEQ ID NO: 3127 - RNA, 303 nt, Artificial Sequence
  derived and/or modified sequence opt5 from Pin-1__Homo_sapiens__AAB81333
auggccgacgaggaaaagcugcccccuggcugggagaaaagaaugagccggccguccgggcgcggauacuauuucaaccacaucaccaaucccucucagugggaaagaccuagcggcaacuccucuagcgggggaaagauuuggcaaggcgagcccgcucgggugcgcagaucccaucuccuggucaaaccuguuaaggccgcgcuugaucuggcugccgggaaucaccccgaccagggaggcggcccuggggccgaucagcggcuccauccggaagaccagggacgcagagagggccuguga

SEQ ID NO: 3128 - protein, 163 aa, Artificial Sequence
  Pin-1__Homo_sapiens__Q13526
MADEEKLPPGWEKRMSRSSGRVYYFNHITNASQWERPSGNSSSGGKNGQGEPARVRCSHLLVKHSQSRRPSSWRQEKITRTKEEALELINGYIQKIKSGEEDFESLASQFSDCSSAKARGDLGAFSRGQMQKPFEDASFALRTGEMSGPVFTDSGIHIILRTE

SEQ ID NO: 3129 - RNA, 492 nt, Artificial Sequence
  Pin-1__Homo_sapiens__AAC50492
auggcggacgaggagaagcugccgcccggcugggagaagcgcaugagccgcagcucaggccgaguguacuacuucaaccacaucacuaacgccagccagugggagcggcccagcggcaacagcagcagugguggcaaaaacgggcagggggagccugccaggguccgcugcucgcaccugcuggugaagcacagccagucacggcggcccucguccuggcggcaggagaagaucacccggaccaaggaggaggcccuggagcugaucaacggcuacauccagaagaucaagucgggagaggaggacuuugagucucuggccucacaguucagcgacugcagcucagccaaggccaggggagaccugggugccuucagcagaggucagaugcagaagccauuugaagacgccucguuugcgcugcggacgggggagaugagcgggcccguguucacggauuccggcauccacaucauccuccgcacugaguga

SEQ ID NO: 3130 - RNA, 492 nt, Artificial Sequence
  derived and/or modified sequence opt1 from Pin-1__Homo_sapiens__AAC50492
auggccgacgaggagaagcugcccccgggcugggagaagcgcaugagccgguccagcgggcgcguguacuacuucaaccacaucaccaacgccucccagugggagcggcccagcggcaacuccagcuccgggggcaagaacgggcagggcgagcccgcgcgcguccggugcagccaccuccuggugaagcacucccagagccgccggcccuccagcuggcgccaggagaagaucacccggacgaaggaggaggcccuggagcucaucaacggcuacauccagaagaucaaguccggggaggaggacuucgagagccuggccucccaguucagcgacugcuccagcgccaaggcccgcggcgaccugggggcguucucccggggccagaugcagaagccguucgaggacgccagcuucgcccuccgcaccggggagaugagcggccccguguucaccgacuccggcauccacaucauccugcggaccgaguga

SEQ ID NO: 3131 - RNA, 492 nt, Artificial Sequence
  derived and/or modified sequence opt2 from Pin-1__Homo_sapiens__AAC50492
auggccgacgaggagaagcucccccccggcugggagaagcgcaugucccgcuccuccggccgcgucuacuacuucaaccacaucaccaacgccucccagugggagcgccccuccggcaacuccuccuccggcggcaagaacggccagggcgagcccgcccgcguccgcugcucccaccuccucgucaagcacucccagucccgccgccccuccuccuggcgccaggagaagaucacccgcaccaaggaggaggcccucgagcucaucaacggcuacauccagaagaucaaguccggcgaggaggacuucgagucccucgccucccaguucuccgacugcuccuccgccaaggcccgcggcgaccucggcgccuucucccgcggccagaugcagaagcccuucgaggacgccuccuucgcccuccgcaccggcgagauguccggccccgucuucaccgacuccggcauccacaucauccuccgcaccgaguga

SEQ ID NO: 3132 - RNA, 492 nt, Artificial Sequence
  derived and/or modified sequence opt3 from Pin-1__Homo_sapiens__AAC50492
auggccgacgaggaaaagcugcccccuggcugggagaaaagaaugagcagguccucugggcggguguacuauuucaaccacaucaccaaugcuucacagugggaacgcccaaguggaaacagcuccucugguggcaagaaugggcaaggagagccggcacgaguccguugcucgcaucuccuuguuaaacacucacagagcagaaggcccaguuccuggcggcaggaaaagauuacacgcacuaaagaggaggcccuggaauugauaaacggcuacauccagaagauuaagucuggugaggaagauuuugagagcuuagcgucccaauucucagacuguaguagcgcuaaagccagaggggaucugggagcauuuucuaggggccagaugcagaagccuuucgaggacgccuccuuugcucuacggacgggcgaaaugucagggccaguguucaccgauagcggaauccauauuauccuccgcacagaguga

SEQ ID NO: 3133 - RNA, 492 nt, Artificial Sequence
  derived and/or modified sequence opt4 from Pin-1__Homo_sapiens__AAC50492
auggccgacgaggagaagcugccccccggcugggagaagagaaugagcagaagcagcggcagaguguacuacuucaaccacaucaccaacgccagccagugggagagacccagcggcaacagcagcagcggcggcaagaacggccagggcgagcccgccagagugagaugcagccaccugcuggugaagcacagccagagcagaagacccagcagcuggagacaggagaagaucaccagaaccaaggaggaggcccuggagcugaucaacggcuacauccagaagaucaagagcggcgaggaggacuucgagagccuggccagccaguucagcgacugcagcagcgccaaggccagaggcgaccugggcgccuucagcagaggccagaugcagaagcccuucgaggacgccagcuucgcccugagaaccggcgagaugagcggccccguguucaccgacagcggcauccacaucauccugagaaccgaguga

SEQ ID NO: 3134 - RNA, 492 nt, Artificial Sequence
  derived and/or modified sequence opt5 from Pin-1__Homo_sapiens__AAC50492
auggccgacgaggaaaagcugcccccuggcugggagaaaagaaugagccgguccucugggcgcguguacuauuucaaccacaucaccaaugcuagccagugggaaagaccguccggaaacucuagcuccggcgggaagaauggacaaggcgagcccgcccggguccgcugcucucaucuccugguuaaacacagccaguccagacggccuagcucuuggcgccaggaaaagauuacaagaacgaaagaggaggcgcuugaacugaucaacggguacauucagaagaucaaguccggagaggaagauuuugagagccucgcuucucaauucuccgacuguagcucugccaaagcccggggcgaucugggcgcuuuuucccgcgggcagaugcagaagcccuucgaggacgccagcuuugcucuuagaaccggagaaauguccggcccuguguucacagauucugggauucauaucauccugcggaccgaguga

SEQ ID NO: 3135 - protein, 45 aa, Artificial Sequence
  Pin-1__Homo_sapiens__Q49AR7
MQKPFEDASFALRTGEMSGPVFTDSGIHIILRTECWRQTRGPNCF

SEQ ID NO: 3136 - RNA, 138 nt, Artificial Sequence
  Pin-1__Homo_sapiens__AAH31971
augcagaagccauuugaagacgccucguuugcgcugcggacgggggagaugagcgggcccguguucacggauuccggcauccacaucauccuccgcacugagugcuggaggcagacucgagggccgaauuguuucuag

SEQ ID NO: 3137 - RNA, 138 nt, Artificial Sequence
  derived and/or modified sequence opt1 from Pin-1__Homo_sapiens__AAH31971
augcagaagcccuucgaggacgccagcuucgcccugcgcaccggcgagauguccgggccgguguucaccgacagcggcauccacaucauccuccggacggagugcuggcgccagacccgggggcccaacugcuucuga

SEQ ID NO: 3138 - RNA, 138 nt, Artificial Sequence
  derived and/or modified sequence opt2 from Pin-1__Homo_sapiens__AAH31971
augcagaagcccuucgaggacgccuccuucgcccuccgcaccggcgagauguccggccccgucuucaccgacuccggcauccacaucauccuccgcaccgagugcuggcgccagacccgcggccccaacugcuucuga

SEQ ID NO: 3139 - RNA, 138 nt, Artificial Sequence
  derived and/or modified sequence opt3 from Pin-1__Homo_sapiens__AAH31971
augcagaagcccuucgaggacgccagcuuugcucugagaaccggcgaaauguccgggccuguguucacagauucuggaauccacauuauacucaggacugagugcuggcggcaaacgcgcgguccaaacuguuuuuga

SEQ ID NO: 3140 - RNA, 138 nt, Artificial Sequence
  derived and/or modified sequence opt4 from Pin-1__Homo_sapiens__AAH31971
augcagaagcccuucgaggacgccagcuucgcccugagaaccggcgagaugagcggccccguguucaccgacagcggcauccacaucauccugagaaccgagugcuggagacagaccagaggccccaacugcuucuga

SEQ ID NO: 3141 - RNA, 138 nt, Artificial Sequence
  derived and/or modified sequence opt5 from Pin-1__Homo_sapiens__AAH31971
augcagaagcccuucgaggacgccagcuuugcucugagaaccggcgaaauguccgggccuguguucacagauucuggaauccacauuauccuccggacggagugcuggcgccaaaccagaggcccgaacuguuuuuga

SEQ ID NO: 3142 - protein, 212 aa, Artificial Sequence
  PLAC1__Homo_sapiens__Q9HBJ0
MKVFKFIGLMILLTSAFSAGSGQSPMTVLCSIDWFMVTVHPFMLNNDVCVHFHELHLGLGCPPNHVQPHAYQFTYRVTECGIRAKAVSQDMVIYSTEIHYSSKGTPSKFVIPVSCAAPQKSPWLTKPCSMRVASKSRATAQKDEKCYEVFSLSQSSQRPNCDCPPCVFSEEEHTQVPCHQAGAQEAQPLQPSHFLDISEDWSLHTDDMIGSM

SEQ ID NO: 3143 - RNA, 639 nt, Artificial Sequence
  PLAC1__Homo_sapiens__AAG22596
augaaaguuuuuaaguucauaggacugaugauccuccucaccucugcguuuucagccgguucaggacaaaguccaaugacugugcugugcuccauagacugguucauggucacagugcaccccuucaugcuaaacaacgauguguguguacacuuucaugaacuacacuugggccuggguugccccccaaaccauguucagccacacgccuaccaguucaccuaccguguuacugaauguggcaucagggccaaagcugucucucaggacaugguuaucuacagcacugagauacacuacucuucuaagggcacgccaucuaaguuugugaucccagugucaugugcugccccccaaaaguccccauggcucaccaagcccugcuccaugagaguagccagcaagagcagggccacagcccagaaggaugagaaaugcuacgagguguucagcuugucacaguccagucaaaggcccaacugcgauuguccaccuugugucuucagugaagaagagcauacccaggucccuugucaccaagcaggggcucaggaggcucaaccucugcagccaucucacuuucuugauauuucugaggauuggucucuucacacagaugauaugauuggguccauguga

SEQ ID NO: 3144 - RNA, 639 nt, Artificial Sequence
  derived and/or modified sequence opt1 from PLAC1__Homo_sapiens__AAG22596
augaagguguucaaguucaucggccugaugauccuccugaccagcgccuucuccgccgggagcggccagucccccaugaccguccugugcagcaucgacugguucauggugacggugcacccguucaugcucaacaacgacgucugcgugcacuuccacgagcugcaccuggggcucggcugcccgcccaaccacgugcagccccacgcguaccaguucaccuaccgcgucaccgagugcgggauccgggccaaggccgugucccaggacauggugaucuacagcaccgagauccacuacuccagcaagggcacgcccuccaaguucgucauccccgugagcugcgccgcgccccagaagucccccuggcugaccaagccgugcagcaugcgcguggccuccaagagccgggccaccgcccagaaggacgagaagugcuacgaggucuucucccugagccaguccagccagcgccccaacugcgacugcccgcccugcguguucuccgaggaggagcacacccaggugcccugccaccaggccggcgcgcaggaggcccagccccuccagcccagccacuuccuggacaucagcgaggacuggucccugcacacggacgacaugaucgggagcauguga

SEQ ID NO: 3145 - RNA, 639 nt, Artificial Sequence
  derived and/or modified sequence opt2 from PLAC1__Homo_sapiens__AAG22596
augaaggucuucaaguucaucggccucaugauccuccucaccuccgccuucuccgccggcuccggccagucccccaugaccguccucugcuccaucgacugguucauggucaccguccaccccuucaugcucaacaacgacgucugcguccacuuccacgagcuccaccucggccucggcugcccccccaaccacguccagccccacgccuaccaguucaccuaccgcgucaccgagugcggcauccgcgccaaggccgucucccaggacauggucaucuacuccaccgagauccacuacuccuccaagggcacccccuccaaguucgucauccccgucuccugcgccgccccccagaagucccccuggcucaccaagcccugcuccaugcgcgucgccuccaagucccgcgccaccgcccagaaggacgagaagugcuacgaggucuucucccucucccaguccucccagcgccccaacugcgacugcccccccugcgucuucuccgaggaggagcacacccagguccccugccaccaggccggcgcccaggaggcccagccccuccagcccucccacuuccucgacaucuccgaggacuggucccuccacaccgacgacaugaucggcuccauguga

SEQ ID NO: 3146 - RNA, 639 nt, Artificial Sequence
  derived and/or modified sequence opt3 from PLAC1__Homo_sapiens__AAG22596
augaagguguucaaauuuaucggccugaugauucuccuuaccagcgccuucuccgcugggucuggacagucacccaugacaguccugugcaguauagacugguuuaugguuacugugcacccuuucauguugaacaaugauguaugugugcauuuucacgaguuacaucugggucuaggcugcccaccgaaccacguccaaccccaugcauaccaguucacguauagagugaccgaaugugggaucagggccaaggcgguuagccaggacauggugauuuacuccacagagauccacuauucuucgaaaggaacuccuucaaaguuugucauuccagugagcugcgcugcaccccagaaaaguccuuggcucaccaagccauguuccaugcggguagccucuaagagccgcgccacagcucaaaaagaugaaaagugcuacgagguuuucucccugucacagaguagccagcgacccaauugugacugcccuccauguguguuuucugaagaggagcacacccaggucccgugccaucaagcaggcgcccaggaagcucagccccuucagccuucccacuuccuggauaucucagaggacuggagcuugcauacugaugacaugauagguaguauguga

SEQ ID NO: 3147 - RNA, 639 nt, Artificial Sequence
  derived and/or modified sequence opt4 from PLAC1__Homo_sapiens__AAG22596
augaagguguucaaguucaucggccugaugauccugcugaccagcgccuucagcgccggcagcggccagagccccaugaccgugcugugcagcaucgacugguucauggugaccgugcaccccuucaugcugaacaacgacgugugcgugcacuuccacgagcugcaccugggccugggcugcccccccaaccacgugcagccccacgccuaccaguucaccuacagagugaccgagugcggcaucagagccaaggccgugagccaggacauggugaucuacagcaccgagauccacuacagcagcaagggcacccccagcaaguucgugauccccgugagcugcgccgccccccagaagagccccuggcugaccaagcccugcagcaugagaguggccagcaagagcagagccaccgcccagaaggacgagaagugcuacgagguguucagccugagccagagcagccagagacccaacugcgacugcccccccugcguguucagcgaggaggagcacacccaggugcccugccaccaggccggcgcccaggaggcccagccccugcagcccagccacuuccuggacaucagcgaggacuggagccugcacaccgacgacaugaucggcagcauguga

SEQ ID NO: 3148 - RNA, 639 nt, Artificial Sequence
  derived and/or modified sequence opt5 from PLAC1__Homo_sapiens__AAG22596
augaagguguucaaauuuaucggccugaugauucuccugaccagcgccuucuccgcugggucuggacagagccccaugacaguccuuugcuccaucgacugguuuaugguuacggugcacccuuucaugcugaacaaugauguguguguccauuuucacgagcuccaucugggccuugggugcccgcccaaccacgugcaaccucaugccuaccaguucaccuauagaguuacagaauguggcauucgggcgaaggcugugucucaggacauggucaucuacagcaccgagauucacuauuccucuaaaggaacacccagcaaguuugugaucccuguuuccugcgccgcuccccagaaaagcccuuggcugaccaagccguguucuaugcgcguggccuccaagagcagagccacagcucaaaaagaugaaaagugcuacgaggucuucucucucucccagagcucucagcggcccaauugugacugcccucccuguguguuuuccgaagaggagcacacccaggugccuugccaucaagccggggcgcaggaagcccagccccugcagccgagccacuuccuggauaucuccgaggacuggucucuccauacggaugacaugauuggaagcauguga

SEQ ID NO: 3149 - protein, 661 aa, Artificial Sequence
  PMEL__Homo_sapiens__P40967
MDLVLKRCLLHLAVIGALLAVGATKVPRNQDWLGVSRQLRTKAWNRQLYPEWTEAQRLDCWRGGQVSLKVSNDGPTLIGANASFSIALNFPGSQKVLPDGQVIWVNNTIINGSQVWGGQPVYPQETDDACIFPDGGPCPSGSWSQKRSFVYVWKTWGQYWQVLGGPVSGLSIGTGRAMLGTHTMEVTVYHRRGSRSYVPLAHSSSAFTITDQVPFSVSVSQLRALDGGNKHFLRNQPLTFALQLHDPSGYLAEADLSYTWDFGDSSGTLISRALVVTHTYLEPGPVTAQVVLQAAIPLTSCGSSPVPGTTDGHRPTAEAPNTTAGQVPTTEVVGTTPGQAPTAEPSGTTSVQVPTTEVISTAPVQMPTAESTGMTPEKVPVSEVMGTTLAEMSTPEATGMTPAEVSIVVLSGTTAAQVTTTEWVETTARELPIPEPEGPDASSIMSTESITGSLGPLLDGTATLRLVKRQVPLDCVLYRYGSFSVTLDIVQGIESAEILQAVPSGEGDAFELTVSCQGGLPKEACMEISSPGCQPPAQRLCQPVLPSPACQLVLHQILKGGSGTYCLNVSLADTNSLAVVSTQLIMPGQEAGLGQVPLIVGILLVLMAVVLASLIYRRRLMKQDFSVPQLPHSSSHWLRLPRIFCSCPIGENSPLLSGQQV

SEQ ID NO: 3150 - RNA, 1986 nt, Artificial Sequence
  PMEL__Homo_sapiens__AAB00386
auggaucuggugcuaaaaagaugccuucuucauuuggcugugauaggugcuuugcuggcugugggggcuacaaaaguacccagaaaccaggacuggcuuggugucucaaggcaacucagaaccaaagccuggaacaggcagcuguauccagaguggacagaagcccagagacuugacugcuggagagguggucaagugucccucaaggucaguaaugaugggccuacacugauuggugcaaaugccuccuucucuauugccuugaacuucccuggaagccaaaagguauugccagaugggcagguuaucugggucaacaauaccaucaucaaugggagccagguguggggaggacagccaguguauccccaggaaacugacgaugccugcaucuucccugaugguggaccuugcccaucuggcucuuggucucagaagagaagcuuuguuuaugucuggaagaccuggggccaauacuggcaaguucuagggggcccagugucugggcugagcauugggacaggcagggcaaugcugggcacacacaccauggaagugacugucuaccaucgccggggaucccggagcuaugugccucuugcucauuccagcucagccuucaccauuacugaccaggugccuuucuccgugagcgugucccaguugcgggccuuggauggagggaacaagcacuuccugagaaaucagccucugaccuuugcccuccagcuccaugaccccaguggcuaucuggcugaagcugaccucuccuacaccugggacuuuggagacaguaguggaacccugaucucucgggcacuuguggucacucauacuuaccuggagccuggcccagucacugcccaggugguccugcaggcugccauuccucucaccuccuguggcuccuccccaguuccaggcaccacagaugggcacaggccaacugcagaggccccuaacaccacagcuggccaagugccuacuacagaaguuguggguacuacaccuggucaggcgccaacugcagagcccucuggaaccacaucugugcaggugccaaccacugaagucauaagcacugcaccugugcagaugccaacugcagagagcacagguaugacaccugagaaggugccaguuucagaggucauggguaccacacuggcagagaugucaacuccagaggcuacagguaugacaccugcagagguaucaauuguggugcuuucuggaaccacagcugcacagguaacaacuacagaguggguggagaccacagcuagagagcuaccuaucccugagccugaagguccagaugccagcucaaucaugucuacggaaaguauuacagguucccugggcccccugcuggaugguacagccaccuuaaggcuggugaagagacaagucccccuggauuguguucuguaucgauaugguuccuuuuccgucacccuggacauuguccaggguauugaaagugccgagauccugcaggcugugccguccggugagggggaugcauuugagcugacuguguccugccaaggcgggcugcccaaggaagccugcauggagaucucaucgccagggugccagcccccugcccagcggcugugccagccugugcuacccagcccagccugccagcugguucugcaccagauacugaaggguggcucggggacauacugccucaaugugucucuggcugauaccaacagccuggcaguggucagcacccagcuuaucaugccuggucaagaagcaggccuugggcagguuccgcugaucgugggcaucuugcugguguugauggcugugguccuugcaucucugauauauaggcgcagacuuaugaagcaagacuucuccguaccccaguugccacauagcagcagucacuggcugcgucuaccccgcaucuucugcucuugucccauuggugagaauagcccccuccucagugggcagcaggucuga

SEQ ID NO: 3151 - RNA, 1986 nt, Artificial Sequence
  derived and/or modified sequence opt1 from PMEL__Homo_sapiens__AAB00386
auggaccuggugcucaagcgcugccugcugcaccucgccgugaucggcgcccugcuggcggugggggccaccaaggugccccggaaccaggacuggcucggcgucagccgccagcugcggaccaaggccuggaaccgccagcuguacccggaguggacggaggcccagcggcucgacugcuggcgcgggggccaggugucccugaaggugagcaacgacgggcccacccugaucggcgccaacgcguccuucagcaucgcccucaacuuccccggcucccagaagguccugcccgacggccaggugaucugggugaacaacaccaucaucaacgggagccaggucuggggcgggcagccgguguacccccaggagaccgacgacgccugcaucuuccccgacgggggccccugcccguccggcagcuggucccagaagcggagcuucguguacgucuggaagacgugggggcaguacuggcagguccugggcgggcccguguccggccucagcaucggcaccgggcgcgccaugcugggcacccacaccauggaggugacgguguaccaccggcgcgggucccggagcuacgugccccuggcgcacuccagcuccgccuucaccaucaccgaccagguccccuucagcguguccgugagccagcuccgcgcccuggacggcgggaacaagcacuuccugcggaaccagccgcucaccuucgcccugcagcugcacgaccccagcggcuaccucgccgaggcggaccuguccuacacgugggacuucggcgacagcuccgggacccugaucagccgcgcccucgucgugacccacaccuaccuggagcccggccccgugacggcccaggucgugcugcaggccgccaucccgcucaccuccugcgggagcucccccguccccggcaccaccgacgggcaccggcccacggcggaggccccgaacaccaccgccggccaggugcccaccacggagguggucggcaccacccccgggcaggcccccaccgccgagccgagcggcacgaccuccguccaggugcccaccaccgaggugaucagcacggcgcccgugcagaugcccaccgccgaguccaccgggaugaccccggagaaggugcccgucagcgaggugaugggcacgacccuggccgagauguccacccccgaggccaccgggaugaccccggccgaggugagcaucgucgugcuguccggcacgaccgcggcccaggugaccaccacggagugggucgagaccaccgcccgcgagcuccccauccccgagcccgagggcccggacgccagcuccaucaugagcaccgaguccaucacggggagccugggcccccugcucgacgggaccgcgacccugcggcuggugaagcgccaggugccccucgacugcguccuguaccgguacggcagcuucuccgugacccuggacaucgugcagggcaucgagagcgccgagauccuccaggccguccccuccggggagggcgacgccuucgagcugacggugagcugccagggcgggcugccgaaggaggccugcauggagaucuccagccccgggugccagccgcccgcgcagcgccucugccagcccgugcugcccucccccgccugccagcugguccuccaccagauccugaagggcggcagcgggaccuacugccugaacgugucccuggccgacaccaacagccucgccguggucuccacccagcugaucaugcccggccaggaggccgggcugggccaggugccgcucaucguggggauccugcugguccucauggcgguggugcuggccagccugaucuaccggcgccgccucaugaagcaggacuucuccgucccccagcugccccacagcuccagccacuggcugcggcucccccgcaucuucugcuccugcccgaucggcgagaacagcccccugcugagcggccagcaggucuga

SEQ ID NO: 3152 - RNA, 1986 nt, Artificial Sequence
  derived and/or modified sequence opt2 from PMEL__Homo_sapiens__AAB00386
auggaccucguccucaagcgcugccuccuccaccucgccgucaucggcgcccuccucgccgucggcgccaccaaggucccccgcaaccaggacuggcucggcgucucccgccagcuccgcaccaaggccuggaaccgccagcucuaccccgaguggaccgaggcccagcgccucgacugcuggcgcggcggccaggucucccucaaggucuccaacgacggccccacccucaucggcgccaacgccuccuucuccaucgcccucaacuuccccggcucccagaagguccuccccgacggccaggucaucugggucaacaacaccaucaucaacggcucccaggucuggggcggccagcccgucuacccccaggagaccgacgacgccugcaucuuccccgacggcggccccugccccuccggcuccuggucccagaagcgcuccuucgucuacgucuggaagaccuggggccaguacuggcagguccucggcggccccgucuccggccucuccaucggcaccggccgcgccaugcucggcacccacaccauggaggucaccgucuaccaccgccgcggcucccgcuccuacgucccccucgcccacuccuccuccgccuucaccaucaccgaccagguccccuucuccgucuccgucucccagcuccgcgcccucgacggcggcaacaagcacuuccuccgcaaccagccccucaccuucgcccuccagcuccacgaccccuccggcuaccucgccgaggccgaccucuccuacaccugggacuucggcgacuccuccggcacccucaucucccgcgcccucgucgucacccacaccuaccucgagcccggccccgucaccgcccaggucguccuccaggccgccaucccccucaccuccugcggcuccucccccguccccggcaccaccgacggccaccgccccaccgccgaggcccccaacaccaccgccggccagguccccaccaccgaggucgucggcaccacccccggccaggcccccaccgccgagcccuccggcaccaccuccguccagguccccaccaccgaggucaucuccaccgcccccguccagaugcccaccgccgaguccaccggcaugacccccgagaagguccccgucuccgaggucaugggcaccacccucgccgagauguccacccccgaggccaccggcaugacccccgccgaggucuccaucgucguccucuccggcaccaccgccgcccaggucaccaccaccgagugggucgagaccaccgcccgcgagcuccccauccccgagcccgagggccccgacgccuccuccaucauguccaccgaguccaucaccggcucccucggcccccuccucgacggcaccgccacccuccgccucgucaagcgccaggucccccucgacugcguccucuaccgcuacggcuccuucuccgucacccucgacaucguccagggcaucgaguccgccgagauccuccaggccguccccuccggcgagggcgacgccuucgagcucaccgucuccugccagggcggccuccccaaggaggccugcauggagaucuccucccccggcugccagccccccgcccagcgccucugccagcccguccuccccucccccgccugccagcucguccuccaccagauccucaagggcggcuccggcaccuacugccucaacgucucccucgccgacaccaacucccucgccgucgucuccacccagcucaucaugcccggccaggaggccggccucggccaggucccccucaucgucggcauccuccucguccucauggccgucguccucgccucccucaucuaccgccgccgccucaugaagcaggacuucuccgucccccagcucccccacuccuccucccacuggcuccgccucccccgcaucuucugcuccugccccaucggcgagaacuccccccuccucuccggccagcaggucuga

SEQ ID NO: 3153 - RNA, 1986 nt, Artificial Sequence
  derived and/or modified sequence opt3 from PMEL__Homo_sapiens__AAB00386
auggaccuggugcucaagagaugccuucugcacuuggccgucaucggcgcuuuacuggcaguuggggccaccaaagugcccaggaaccaggauuggcuaggaguaagccggcaacuccgcacaaaggcguggaaucgacagcuguacccugaguggacugaagcucagcgucuugacuguuggagagguggccaggugucccugaaagucucuaacgaugggccaacguugauuggagccaaugcaucauucaguauagcccucaacuuuccgggcagccaaaaggugcugcccgacggucagguuaucugggugaauaacaccauuaucaaugggucccaggucuggggaggccagccuguguauccacaagagacagaugacgcuugcauuuuccccgauggcgggccuuguccaucuggaucguggucacagaaaaggagcuuuguauacguuuggaagacuuggggucaguauuggcaagugcugggcgggcccgucaguggacucuccaucggcaccggucgggcaauguuagggacacauaccauggaagugacuguguaccaccgcagaggaucuaggagcuaugucccucuggcccauuccucaagugcuuucacaauaaccgaccagguuccauuuagcgugucuguaucccagcuucgggccuuggauggcggcaacaagcacuuccugcgcaaucagccgcuaacguuugcgcuccaacugcaugaccccucaggguaccuugcagaggccgaucugagcuauacuugggacuucggagauaguucugguaccuugaucucccgagcucucguggucacacacacuuaccuggaaccuggcccagugaccgcccagguuguguuacaggcagcuauuccccugacaagcugcgggucgucuccugucccaggaaccacggacggccacagacccacugccgaggcgccgaacacaaccgccggucaggugccuacuacagagguaguugggaccacgcccggccaagcaccaaccgcugaaccuuccggaacaacuucagugcagguccccaccacagaggugaucaguacugccccaguccagaugcccaccgcugaaagcacaggcaugaccccugagaaagugccaguuuccgaggugauggggacuacgcucgccgaaaugucuacaccggaggcaaccggaaugacucccgccgaaguaagcauugucgugcuuucagguaccacagcugcgcagguuaccacuacagaguggguggaaacgaccgcaagggagcugccuaucccagagcccgaaggcccugacgccaguuccauaaugagcacugagucuauuacagggucauugggaccacuacuggauggcaccgcuacacuccggcuggucaagcgucaagugccccuugacuguguacuguaccgcuaugguaguuuuagcgugacuuuggauaucguucaggggauugaauccgccgagauccuccaggcagucccgucuggcgaaggagacgccuucgagcugaccgugucgugccagggcggguuaccuaaagaggcuuguauggaaaucagcuccccaggaugccaacccccugcccagagacugugucagcccgugcuaccaaguccugcaugccagcucguccugcaucaaauucuuaaggguggcucagggacguacuguuugaauguuucucuggcggauaccaacagccucgcugugguguccacacagcugauaaugcccggacaggaggccggccuuggucaaguaccacugaucgucgggauuuugcucgugcugauggcaguuguguuagccucacugaucuauaggcggcgacuaaugaaacaggacuuuagcgucccgcagcucccucacucuuccagucauuggcugcgccuucccagaauauucugcagcugcccaauuggcgaaaauucucccuugcuguccggacagcaaguguga

SEQ ID NO: 3154 - RNA, 1986 nt, Artificial Sequence
  derived and/or modified sequence opt4 from PMEL__Homo_sapiens__AAB00386
auggaccuggugcugaagagaugccugcugcaccuggccgugaucggcgcccugcuggccgugggcgccaccaaggugcccagaaaccaggacuggcugggcgugagcagacagcugagaaccaaggccuggaacagacagcuguaccccgaguggaccgaggcccagagacuggacugcuggagaggcggccaggugagccugaaggugagcaacgacggccccacccugaucggcgccaacgccagcuucagcaucgcccugaacuuccccggcagccagaaggugcugcccgacggccaggugaucugggugaacaacaccaucaucaacggcagccagguguggggcggccagcccguguacccccaggagaccgacgacgccugcaucuuccccgacggcggccccugccccagcggcagcuggagccagaagagaagcuucguguacguguggaagaccuggggccaguacuggcaggugcugggcggccccgugagcggccugagcaucggcaccggcagagccaugcugggcacccacaccauggaggugaccguguaccacagaagaggcagcagaagcuacgugccccuggcccacagcagcagcgccuucaccaucaccgaccaggugcccuucagcgugagcgugagccagcugagagcccuggacggcggcaacaagcacuuccugagaaaccagccccugaccuucgcccugcagcugcacgaccccagcggcuaccuggccgaggccgaccugagcuacaccugggacuucggcgacagcagcggcacccugaucagcagagcccugguggugacccacaccuaccuggagcccggccccgugaccgcccagguggugcugcaggccgccaucccccugaccagcugcggcagcagccccgugcccggcaccaccgacggccacagacccaccgccgaggcccccaacaccaccgccggccaggugcccaccaccgagguggugggcaccacccccggccaggcccccaccgccgagcccagcggcaccaccagcgugcaggugcccaccaccgaggugaucagcaccgcccccgugcagaugcccaccgccgagagcaccggcaugacccccgagaaggugcccgugagcgaggugaugggcaccacccuggccgagaugagcacccccgaggccaccggcaugacccccgccgaggugagcaucguggugcugagcggcaccaccgccgcccaggugaccaccaccgaguggguggagaccaccgccagagagcugcccauccccgagcccgagggccccgacgccagcagcaucaugagcaccgagagcaucaccggcagccugggcccccugcuggacggcaccgccacccugagacuggugaagagacaggugccccuggacugcgugcuguacagauacggcagcuucagcgugacccuggacaucgugcagggcaucgagagcgccgagauccugcaggccgugcccagcggcgagggcgacgccuucgagcugaccgugagcugccagggcggccugcccaaggaggccugcauggagaucagcagccccggcugccagccccccgcccagagacugugccagcccgugcugcccagccccgccugccagcuggugcugcaccagauccugaagggcggcagcggcaccuacugccugaacgugagccuggccgacaccaacagccuggccguggugagcacccagcugaucaugcccggccaggaggccggccugggccaggugccccugaucgugggcauccugcuggugcugauggccguggugcuggccagccugaucuacagaagaagacugaugaagcaggacuucagcgugccccagcugccccacagcagcagccacuggcugagacugcccagaaucuucugcagcugccccaucggcgagaacagcccccugcugagcggccagcagguguga

SEQ ID NO: 3155 - RNA, 1986 nt, Artificial Sequence
  derived and/or modified sequence opt5 from PMEL__Homo_sapiens__AAB00386
auggaccuggugcucaagagaugccugcuucaccuggccgucaucggcgcucuccuggccguuggggcgaccaaagugccccggaaccaggauuggcuuggagugagccgccaacugagaacaaaggcuuggaaucggcagcucuacccugaguggacggaagcccagcgccuggacuguuggagaggcgggcaggucucccugaaagugucuaacgauggaccgacccucauuggcgccaaugcuagcuucuccaucgcccugaacuuucccgggucucaaaagguucuuccugacggacaggugauuugggucaauaacacaaucauuaauggcagccagguguggggcgggcagcccguuuauccucaagagaccgaugacgcuugcaucuuccccgauggaggcccuuguccguccgggucuuggagccagaaacgguccuuuguguacgucuggaagacauggggacaguauuggcaagugcugggcgggcccgugagcggacucucuaucggcaccggccgcgccaugcuggggacacauaccauggaagucacgguuuaccacagacggggaucccgcagcuaugugccucuugcgcauucuuccagcgccuucaccauuacagaccaggugcccuuuucugucuccgugagccagcugagagcucucgauggcgggaacaagcacuuccugcggaaucagccucugaccuuugcccuccaacugcaugaccccuccggauaccuugcugaggccgaucugucuuauacaugggacuucggcgauagcuccgggacccucaucagccgcgcgcugguugugacgcacacauaccuugaaccgggaccugucaccgcccaggugguucugcaggcugccauuccccucacaucuugcggcuccagcccugugcccggcaccaccgacgggcacagacccacagcugaggccccuaacacgaccgccggacaggucccgacaaccgagguggucggcacaacccccgggcaagcuccuacggcggaacccucuggaacaaccagcgugcagguuccuaccacagaggugaucuccaccgcccccguccagaugccgacagcugaaucuacgggcaugaccccugagaaagugcccguuagcgaggugauggggacaacccuggccgaaauguccacaccugaggccaccggcaugacgcccgcugaagucagcauuguggugcugucuggaaccacagccgcgcagguuaccacaaccgagugggucgaaacgacagcucgggagcucccuauccccgagccggaaggcccugacgccuccagcauuaugucuaccgaguccaucacagggagccugggaccccuucuggauggcaccgccacccuccgccuggugaagagacaagugccccuugacuguguccuguaccgguauggguccuuuucugugacacucgauaucguucagggaauugaaagcgcugagauccugcaggccgugccuuccggcgaaggggacgcuuucgagcugacggucucuugccagggcggacucccgaaagaggccuguauggaaauuagcucccccggcugccaaccucccgcgcagagacugugucagccugugcuucccagcccugccugccagcugguucuccaucaaauccugaaagggggaucuggcaccuacugucugaaugugucccuugcugauacaaacagccucgccgucgugucuacccagcugauuaugcccgggcaggaggcuggacugggccaaguuccgcucaucguggggauccugcuuguccugauggccguggugcucgcgucccugauuuaucgccggagacugaugaagcaggacuuuagcgucccucagcuuccccacucuagcucccauuggcuccgccugccucggaucuucugcagcugccccauuggcgaaaauucuccgcugcucuccggacagcaaguuuga

SEQ ID NO: 3156 - protein, 882 aa, Artificial Sequence
  PML__Homo_sapiens__P29590
MEPAPARSPRPQQDPARPQEPTMPPPETPSEGRQPSPSPSPTERAPASEEEFQFLRCQQCQAEAKCPKLLPCLHTLCSGCLEASGMQCPICQAPWPLGADTPALDNVFFESLQRRLSVYRQIVDAQAVCTRCKESADFWCFECEQLLCAKCFEAHQWFLKHEARPLAELRNQSVREFLDGTRKTNNIFCSNPNHRTPTLTSIYCRGCSKPLCCSCALLDSSHSELKCDISAEIQQRQEELDAMTQALQEQDSAFGAVHAQMHAAVGQLGRARAETEELIRERVRQVVAHVRAQERELLEAVDARYQRDYEEMASRLGRLDAVLQRIRTGSALVQRMKCYASDQEVLDMHGFLRQALCRLRQEEPQSLQAAVRTDGFDEFKVRLQDLSSCITQGKDAAVSKKASPEAASTPRDPIDVDLPEEAERVKAQVQALGLAEAQPMAVVQSVPGAHPVPVYAFSIKGPSYGEDVSNTTTAQKRKCSQTQCPRKVIKMESEEGKEARLARSSPEQPRPSTSKAVSPPHLDGPPSPRSPVIGSEVFLPNSNHVASGAGEAEERVVVISSSEDSDAENSSSRELDDSSSESSDLQLEGPSTLRVLDENLADPQAEDRPLVFFDLKIDNETQKISQLAAVNRESKFRVVIQPEAFFSIYSKAVSLEVGLQHFLSFLSSMRRPILACYKLWGPGLPNFFRALEDINRLWEFQEAISGFLAALPLIRERVPGASSFKLKNLAQTYLARNMSERSAMAAVLAMRDLCRLLEVSPGPQLAQHVYPFSSLQCFASLQPLVQAAVLPRAEARLLALHNVSFMELLSAHRRDRQGGLKKYSRYLSLQTTTLPPAQPAFNLQALGTYFEGLLEGPALARAEGVSTPLAGRGLAERASQQS

SEQ ID NO: 3157 - RNA, 2649 nt, Artificial Sequence
  PML__Homo_sapiens__CCDS10255.1
auggagccugcacccgcccgaucuccgaggccccagcaggaccccgcccggccccaggagcccaccaugccuccccccgagacccccucugaaggccgccagcccagccccagccccagcccuacagagcgagcccccgcuucggaggaggaguuccaguuucugcgcugccagcaaugccaggcggaagccaagugcccgaagcugcugccuugucugcacacgcugugcucaggaugccuggaggcgucgggcaugcagugccccaucugccaggcgcccuggccccuaggugcagacacacccgcccuggauaacgucuuuuucgagagucugcagcggcgccugucgguguaccggcagauuguggaugcgcaggcugugugcacccgcugcaaagagucggccgacuucuggugcuuugagugcgagcagcuccucugcgccaagugcuucgaggcacaccagugguuccucaagcacgaggcccggccccuagcagagcugcgcaaccagucggugcgugaguuccuggacggcacccgcaagaccaacaacaucuucugcuccaaccccaaccaccgcaccccuacgcugaccagcaucuacugccgaggauguuccaagccgcugugcugcucgugcgcgcuccuugacagcagccacagugagcucaagugcgacaucagcgcagagauccagcagcgacaggaggagcuggacgccaugacgcaggcgcugcaggagcaggauagugccuuuggcgcgguucacgcgcagaugcacgcggccgucggccagcugggccgcgcgcgugccgagaccgaggagcugauccgcgagcgcgugcgccaggugguagcucacgugcgggcucaggagcgcgagcugcuggaggcuguggacgcgcgguaccagcgcgacuacgaggagauggccagucggcugggccgccuggaugcugugcugcagcgcauccgcacgggcagcgcgcuggugcagaggaugaagugcuacgccucggaccaggaggugcuggacaugcacgguuuccugcgccaggcgcucugccgccugcgccaggaggagccccagagccugcaagcugccgugcgcaccgauggcuucgacgaguucaaggugcgccugcaggaccucagcucuugcaucacccaggggaaagaugcagcuguauccaagaaagccagcccagaggcugccagcacucccagggacccuauugacguugaccugcccgaggaggcagagagagugaaggcccagguucaggcccuggggcuggcugaagcccagccuauggcugugguacagucagugcccggggcacaccccgugccaguguacgccuucuccaucaaaggcccuuccuauggagaggaugucuccaauacaacgacagcccagaagaggaagugcagccagacccagugccccaggaaggucaucaagauggagucugaggaggggaaggaggcaagguuggcucggagcuccccggagcagcccaggcccagcaccuccaaggcagucucaccaccccaccuggauggaccgccuagccccaggagccccgucauaggaagugaggucuuccugcccaacagcaaccacguggccaguggcgccggggaggcagaggaacgcguuguggugaucagcagcucggaagacucagaugccgaaaacucguccucccgagagcuggaugacagcagcagugaguccagugaccuccagcuggaaggccccagcacccucaggguccuggacgagaaccuugcugacccccaagcagaagacagaccucugguuuucuuugaccucaagauugacaaugaaacccagaagauuagccagcuggcugcggugaaccgggaaagcaaguuccgcguggucauccagccugaagccuucuucagcaucuacuccaaggccgugucccuggagguggggcugcagcacuuccucagcuuucugagcuccaugcgccgcccuaucuuggccugcuacaagcugugggggccuggccucccaaacuucuuccgggcccuggaggacauuaacaggcugugggaauuccaggaggccaucucgggcuuccuggcugcccugccucucauccgggagcgugugcccggggccagcagcuucaaacucaagaaccuggcccagaccuaccuggcgagaaacaugagcgagcgcagcgccauggcugccgugcuggccaugcgugaccugugccgccuccucgaggucuccccgggcccccagcuggcccagcaugucuaccccuucaguagccugcagugcuuugccucccugcagccccuggugcaggcagcugugcugccccgggcugaggcccgccuccuggcccuacacaacgugagcuucauggagcugcugagugcacaccgccgugaccggcaggggggccugaagaaguacagccgcuaucuaagccugcagaccaccacguugcccccugcccagccugcuuucaaccugcaggcucugggcaccuacuuugaaggccuguuggaggguccggcgcuggcacgggcagaaggagucuccaccccacuugcuggccguggcuuggcagagagggccucccagcagagcuga

SEQ ID NO: 3158 - RNA, 2649 nt, Artificial Sequence
  derived and/or modified sequence opt1 from PML__Homo_sapiens__CCDS10255.1
auggagcccgccccggcccgcagcccccggccccagcaggaccccgcgcgcccgcaggagcccaccaugcccccgcccgagacccccuccgagggccggcagcccagccccuccccgagccccaccgagcgcgcccccgccuccgaggaggaguuccaguuccugcggugccagcagugccaggccgaggccaagugccccaagcuccugccgugccugcacacccucugcagcgggugccuggaggcguccggcaugcagugccccaucugccaggcccccuggccccugggggccgacaccccggcccucgacaacguguucuucgagagccugcagcgccggcuguccgucuaccgccagaucguggacgcgcaggccgugugcacccggugcaaggagagcgccgacuucuggugcuucgagugcgagcagcuccugugcgccaagugcuucgaggcccaccagugguuccugaagcacgaggcgcgcccccucgccgagcugcggaaccaguccguccgcgaguuccuggacggcacgcggaagaccaacaacaucuucugcagcaaccccaaccaccgcacccccacccucacguccaucuacugccgggggugcagcaagccgcugugcugcuccugcgcccugcucgacagcucccacagcgagcugaagugcgacaucuccgccgagauccagcagcgccaggaggagcuggacgccaugacccaggcgcuccaggagcaggacagcgccuucggcgccgugcacgcccagaugcacgccgcggugggccagcuggggcgggcccgcgccgagaccgaggagcugauccgggagcgcguccgccaggugguggcccacguccgggcccaggagcgcgagcuccuggaggcgguggacgcccgguaccagcgcgacuacgaggagauggccagccggcugggccgccucgacgccgugcugcagcggauccgcaccggguccgcgcugguccagcggaugaagugcuacgccagcgaccaggaggugcucgacaugcacggcuuccugcgccaggcccugugccggcuccgccaggaggagccccagucccugcaggccgccgugcggacggacggguucgacgaguucaagguccgccugcaggaccucagcuccugcaucacccagggcaaggacgcggccgugagcaagaaggccucccccgaggccgccagcacgccccgggacccgaucgacguggaccugcccgaggaggcggagcgcgucaaggcccaggugcaggcccugggccucgccgaggcccagcccauggcggugguccaguccgugccgggggcccaccccgugcccgucuacgccuucagcaucaagggccccuccuacggggaggacgugagcaacaccaccaccgcccagaagcggaagugcucccagacccagugcccgcgcaaggucaucaagauggagagcgaggagggcaaggaggcgcggcuggcccgcuccagccccgagcagccccggcccuccaccagcaaggccguguccccgccccaccuggacggcccgcccagcccccgcagccccgugaucggguccgaggucuuccuccccaacagcaaccacguggccuccggcgccggggaggcggaggagcgcguggucgugaucagcuccagcgaggacuccgacgccgagaacagcuccagccgggagcuggacgacuccagcuccgagagcuccgaccugcagcucgagggccccagcacgcugcgcgugcuggacgagaaccucgccgacccgcaggccgaggaccggccccuggucuucuucgaccugaagaucgacaacgagacccagaagaucucccagcuggccgcggugaaccgcgagagcaaguuccggguggucauccagcccgaggccuucuucagcaucuacuccaaggccgugagccucgagguggggcugcagcacuuccuguccuuccucagcuccaugcgccggcccauccuggccugcuacaagcuguggggcccgggccuccccaacuucuuccgcgcccuggaggacaucaaccggcugugggaguuccaggaggcgaucagcggguuccucgccgcccugccccugauccgcgagcggguccccggcgccuccagcuucaagcucaagaaccuggcgcagaccuaccuggcccgcaacauguccgagcggagcgccauggccgccgugcucgcgaugcgcgaccugugccggcugcucgagguguccccggggccccagcuggcccagcacgucuaccccuucagcucccugcagugcuucgccagccuccagccgcuggugcaggccgccgugcugccccgcgcggaggcccggcuccuggcccugcacaacgucuccuucauggagcuccugagcgcccaccgccgggaccgccagggcgggcugaagaaguacucccgguaccucagccugcagaccacgacccugccgcccgcccagcccgcguucaaccuccaggcccugggcaccuacuucgagggccugcucgaggggcccgcccuggcccgcgccgagggcguguccacgccccuggcggggcgcggccucgccgagcgggccagccagcagagcuga

SEQ ID NO: 3159 - RNA, 2649 nt, Artificial Sequence
  derived and/or modified sequence opt2 from PML__Homo_sapiens__CCDS10255.1
auggagcccgcccccgcccgcuccccccgcccccagcaggaccccgcccgcccccaggagcccaccaugcccccccccgagacccccuccgagggccgccagcccucccccucccccucccccaccgagcgcgcccccgccuccgaggaggaguuccaguuccuccgcugccagcagugccaggccgaggccaagugccccaagcuccuccccugccuccacacccucugcuccggcugccucgaggccuccggcaugcagugccccaucugccaggcccccuggccccucggcgccgacacccccgcccucgacaacgucuucuucgagucccuccagcgccgccucuccgucuaccgccagaucgucgacgcccaggccgucugcacccgcugcaaggaguccgccgacuucuggugcuucgagugcgagcagcuccucugcgccaagugcuucgaggcccaccagugguuccucaagcacgaggcccgcccccucgccgagcuccgcaaccaguccguccgcgaguuccucgacggcacccgcaagaccaacaacaucuucugcuccaaccccaaccaccgcacccccacccucaccuccaucuacugccgcggcugcuccaagccccucugcugcuccugcgcccuccucgacuccucccacuccgagcucaagugcgacaucuccgccgagauccagcagcgccaggaggagcucgacgccaugacccaggcccuccaggagcaggacuccgccuucggcgccguccacgcccagaugcacgccgccgucggccagcucggccgcgcccgcgccgagaccgaggagcucauccgcgagcgcguccgccaggucgucgcccacguccgcgcccaggagcgcgagcuccucgaggccgucgacgcccgcuaccagcgcgacuacgaggagauggccucccgccucggccgccucgacgccguccuccagcgcauccgcaccggcuccgcccucguccagcgcaugaagugcuacgccuccgaccaggagguccucgacaugcacggcuuccuccgccaggcccucugccgccuccgccaggaggagccccagucccuccaggccgccguccgcaccgacggcuucgacgaguucaagguccgccuccaggaccucuccuccugcaucacccagggcaaggacgccgccgucuccaagaaggccucccccgaggccgccuccaccccccgcgaccccaucgacgucgaccuccccgaggaggccgagcgcgucaaggcccagguccaggcccucggccucgccgaggcccagcccauggccgucguccaguccguccccggcgcccaccccguccccgucuacgccuucuccaucaagggccccuccuacggcgaggacgucuccaacaccaccaccgcccagaagcgcaagugcucccagacccagugcccccgcaaggucaucaagauggaguccgaggagggcaaggaggcccgccucgcccgcuccucccccgagcagccccgccccuccaccuccaaggccgucucccccccccaccucgacggcccccccuccccccgcucccccgucaucggcuccgaggucuuccuccccaacuccaaccacgucgccuccggcgccggcgaggccgaggagcgcgucgucgucaucuccuccuccgaggacuccgacgccgagaacuccuccucccgcgagcucgacgacuccuccuccgaguccuccgaccuccagcucgagggccccuccacccuccgcguccucgacgagaaccucgccgacccccaggccgaggaccgcccccucgucuucuucgaccucaagaucgacaacgagacccagaagaucucccagcucgccgccgucaaccgcgaguccaaguuccgcgucgucauccagcccgaggccuucuucuccaucuacuccaaggccgucucccucgaggucggccuccagcacuuccucuccuuccucuccuccaugcgccgccccauccucgccugcuacaagcucuggggccccggccuccccaacuucuuccgcgcccucgaggacaucaaccgccucugggaguuccaggaggccaucuccggcuuccucgccgcccucccccucauccgcgagcgcguccccggcgccuccuccuucaagcucaagaaccucgcccagaccuaccucgcccgcaacauguccgagcgcuccgccauggccgccguccucgccaugcgcgaccucugccgccuccucgaggucucccccggcccccagcucgcccagcacgucuaccccuucuccucccuccagugcuucgccucccuccagccccucguccaggccgccguccucccccgcgccgaggcccgccuccucgcccuccacaacgucuccuucauggagcuccucuccgcccaccgccgcgaccgccagggcggccucaagaaguacucccgcuaccucucccuccagaccaccacccucccccccgcccagcccgccuucaaccuccaggcccucggcaccuacuucgagggccuccucgagggccccgcccucgcccgcgccgagggcgucuccaccccccucgccggccgcggccucgccgagcgcgccucccagcaguccuga

SEQ ID NO: 3160 - RNA, 2649 nt, Artificial Sequence
  derived and/or modified sequence opt3 from PML__Homo_sapiens__CCDS10255.1
auggagcccgccccugcuagaagcccaaggccgcagcaagaccccgcacggccucaggaaccaaccaugcccccuccagagacacccuccgaaggccgccagccuucuccaucaccgagucccacugagcgagccccugcgagcgaagaggaguuccaguuucugcguugccaacagugucaggcugaagccaagugcccaaaacuccuucccugucugcacacguugugcuccggguguuuagaggcaucuggaaugcagugcccuaucugucaagccccauggccccugggugcugauaccccggcacuagacaacguguucuuugaaucgcuccagagaaggcugucagucuaccggcagauuguugaugcccaggcugugugcacacgcuguaaggagagcgccgacuucuggugcuuugagugugaacaacuucugugcgcgaaaugcuucgaggcacaucagugguuuuugaagcacgaagccagaccucucgcugagcugaggaaucagaguguacgggaauuucuggauggcacucgcaaaaccaacaauauauuuuguuccaaccccaaucaucgaacaccaacccucacuucuaucuauugcagaggguguagcaagccuuuaugcuguuccugcgcccugcuugacucaagucacagcgaguugaagugugauauuucugcagagauccaacagaggcaggaagaacuggacgcuaugacacaggcccuacaagaacaggauuccgcguucggagccgugcaugcacagaugcacgcugccgucggccagcucggucgggcucgugccgagaccgaggagcugauucgcgagagagugaggcaaguuguggcacacguccgggcccaggaacgagagcuucuggaagcuguggacgcgcgcuaccagagagauuaugaggaaauggcaucaagguuggggcggcucgacgccguacugcagcgcaucagaacgggaagcgcuuuaguucaaaggaugaaaugcuacgccagugaucaggaggugcuggacaugcauggcuuucuccgucaggcacuuugucggcugcgacaggaggaaccccaaucuuugcaggccgcugucagaacugacggcuucgaugaguuuaaggugaggcuacaggaccuguccagcugcauaacccaagggaaagaugccgcagugucgaagaaagcgucuccagaagcugccuccacaccccgcgacccuaucgaugucgaccucccagaggaggcagaacggguuaaggcccaggugcaggcucugggacuugccgaggcacagccgauggcuguagugcaaucaguccccggugcccacccugugccaguuuaugcguucaguauuaagggccccagcuacggggaagauguguccaacacuaccacagcccagaaaagaaaguguucucagacccagugcccuaggaaagucaucaagauggagagcgaagagggaaaagaggcucgccuggcacgaucaaguccagaacaaccccggccguccacgagcaaggccgugucuccuccacauuuggacggucccccuucaccccguaguccaguaauuggcagcgagguuuuccucccuaauuccaaccacguggcuucuggggccggagaagcagaggaaagagucguggucaucucgagcuccgaggauucagacgcggagaauaguucuagcagggaacuggaugacuccucaagcgagucuuccgacuuacagcuggaaggccccaguacucuacgcgugcucgaugagaaccuggccgacccacaggcugaagaucggccgcuuguuuucuucgacuugaaaauagauaaugagacacagaagauuagccaacuggccgcagugaacagagagucuaaguuuaggguagucauccagccugaggcuuucuuuuccauuuauucaaaagccgugagucucgaaguuggccugcagcacuuccuuagcuuucugucguccaugcgacgccccaucuuggcaugcuacaagcucugggggccaggacugcccaauuucuuucgggccuuagaagacaucaacagacugugggaguuccaagaggcuauuucugguuuucuagcggcccucccucugauaagggaacgugugccaggcgcaagcucauucaaacuuaagaauuuggcucagaccuaccuggcccgcaacaugagugagcgguccgccauggcugcaguccucgccaugagagaucuguguagguuacuggaagugucucccgggccucagcuugcgcagcauguauauccguuuagcuccuugcaaugcuucgcuucacuccagccacuggugcaggccgcaguucuaccccgagccgaggcucggcugcucgcacugcacaacgucagcuucauggaacuuuugagugcccaucgcagagacaggcagggaggccugaaaaaguacucucgguauuuaucccuccaaacuacaacccugccuccagcgcagcccgcuuuuaaucuucaggcccuggguacguacuucgagggguugcucgagggcccugcacuggcccgagcugaaggagugagcaccccgcuagccggcagagggcuggcagagcgcgcuucgcagcaaucauga

SEQ ID NO: 3161 - RNA, 2649 nt, Artificial Sequence
  derived and/or modified sequence opt4 from PML__Homo_sapiens__CCDS10255.1
auggagcccgcccccgccagaagccccagaccccagcaggaccccgccagaccccaggagcccaccaugcccccccccgagacccccagcgagggcagacagcccagccccagccccagccccaccgagagagcccccgccagcgaggaggaguuccaguuccugagaugccagcagugccaggccgaggccaagugccccaagcugcugcccugccugcacacccugugcagcggcugccuggaggccagcggcaugcagugccccaucugccaggcccccuggccccugggcgccgacacccccgcccuggacaacguguucuucgagagccugcagagaagacugagcguguacagacagaucguggacgcccaggccgugugcaccagaugcaaggagagcgccgacuucuggugcuucgagugcgagcagcugcugugcgccaagugcuucgaggcccaccagugguuccugaagcacgaggccagaccccuggccgagcugagaaaccagagcgugagagaguuccuggacggcaccagaaagaccaacaacaucuucugcagcaaccccaaccacagaacccccacccugaccagcaucuacugcagaggcugcagcaagccccugugcugcagcugcgcccugcuggacagcagccacagcgagcugaagugcgacaucagcgccgagauccagcagagacaggaggagcuggacgccaugacccaggcccugcaggagcaggacagcgccuucggcgccgugcacgcccagaugcacgccgccgugggccagcugggcagagccagagccgagaccgaggagcugaucagagagagagugagacaggugguggcccacgugagagcccaggagagagagcugcuggaggccguggacgccagauaccagagagacuacgaggagauggccagcagacugggcagacuggacgccgugcugcagagaaucagaaccggcagcgcccuggugcagagaaugaagugcuacgccagcgaccaggaggugcuggacaugcacggcuuccugagacaggcccugugcagacugagacaggaggagccccagagccugcaggccgccgugagaaccgacggcuucgacgaguucaaggugagacugcaggaccugagcagcugcaucacccagggcaaggacgccgccgugagcaagaaggccagccccgaggccgccagcacccccagagaccccaucgacguggaccugcccgaggaggccgagagagugaaggcccaggugcaggcccugggccuggccgaggcccagcccauggccguggugcagagcgugcccggcgcccaccccgugcccguguacgccuucagcaucaagggccccagcuacggcgaggacgugagcaacaccaccaccgcccagaagagaaagugcagccagacccagugccccagaaaggugaucaagauggagagcgaggagggcaaggaggccagacuggccagaagcagccccgagcagcccagacccagcaccagcaaggccgugagccccccccaccuggacggcccccccagccccagaagccccgugaucggcagcgagguguuccugcccaacagcaaccacguggccagcggcgccggcgaggccgaggagagagugguggugaucagcagcagcgaggacagcgacgccgagaacagcagcagcagagagcuggacgacagcagcagcgagagcagcgaccugcagcuggagggccccagcacccugagagugcuggacgagaaccuggccgacccccaggccgaggacagaccccugguguucuucgaccugaagaucgacaacgagacccagaagaucagccagcuggccgccgugaacagagagagcaaguucagaguggugauccagcccgaggccuucuucagcaucuacagcaaggccgugagccuggaggugggccugcagcacuuccugagcuuccugagcagcaugagaagacccauccuggccugcuacaagcuguggggccccggccugcccaacuucuucagagcccuggaggacaucaacagacugugggaguuccaggaggccaucagcggcuuccuggccgcccugccccugaucagagagagagugcccggcgccagcagcuucaagcugaagaaccuggcccagaccuaccuggccagaaacaugagcgagagaagcgccauggccgccgugcuggccaugagagaccugugcagacugcuggaggugagccccggcccccagcuggcccagcacguguaccccuucagcagccugcagugcuucgccagccugcagccccuggugcaggccgccgugcugcccagagccgaggccagacugcuggcccugcacaacgugagcuucauggagcugcugagcgcccacagaagagacagacagggcggccugaagaaguacagcagauaccugagccugcagaccaccacccugccccccgcccagcccgccuucaaccugcaggcccugggcaccuacuucgagggccugcuggagggccccgcccuggccagagccgagggcgugagcaccccccuggccggcagaggccuggccgagagagccagccagcagagcuga

SEQ ID NO: 3162 - RNA, 2649 nt, Artificial Sequence
  derived and/or modified sequence opt5 from PML__Homo_sapiens__CCDS10255.1
auggagcccgccccugcuagaagcccgcggccccagcaagacccugcccgcccccaggaaccuaccaugcccccuccggagacacccuccgaaggcagacagccuucucccagcccuucccccacggagcgggcgccggcuucugaagaggaguuccaguuucugcgcugccaacagugucaggccgaagccaagugcccuaaacuccugcccugucuucacacccugugcagcgggugucucgaggcuuccggaaugcagugcccuaucugucaagcccccuggccccugggcgcugauaccccugcccuugacaacguguucuuugaaucucugcagagacggcucagcgucuaccgccagauuguugaugcgcaggccgugugcacaagauguaaggaguccgcugacuucuggugcuuugagugugaacaacugcugugcgccaaaugcuucgaggcucaucagugguuucucaagcacgaagcccggccgcuggcggagcuucgcaaucagagcgugagagaauuucuggaugggacacggaaaaccaacaauaucuuuuguucuaaccccaaucaucgcacaccuacccucacguccauuuauugcagaggauguagcaagccccugugcuguucuugcgcccuucuggacuccagccacucugagcucaagugugauaucuccgcugagauucaacagcggcaggaggagcuggacgccaugacccaggcucugcaagaacaggauagcgccuucggcgccguccaugcucagaugcacgcggccguggggcagcucggacgcgcuagagccgagacagaggaacugauccgggagagaguucgccaaguggucgcccacgugcgggcucaggaaagagagcuucuggaagccguugacgcgcgcuaccagcgggauuaugaggaaauggcuuccagacucggccgccuggacgccgugcuucagcggaucagaaccggcucugcccugguccaacgcaugaaaugcuacgcuagcgaucaggaggugcucgacaugcauggguuucugcggcaggcccuguguagacuccgccaggaggaaccucaaucccugcaggcugccgugcggacagacggauucgaugaguuuaaggucagacuucaggaccugagcucuugcauuacccaaggcaaagaugcggccguuuccaagaaagcuagccccgaagccgcuucuacgccgcgggacccuaucgauguggaccuccccgaggaggccgaacgcgugaaggcgcagguccaggcccuggggcuugcugaggcccagccuauggcugugguucaaagcgugcccggagcccacccuguccccguguaugccuucuccauuaagggcccgucuuacggggaagauguuagcaacacaaccacagcucagaaaagaaaguguucccagacccagugcccucggaaagugaucaagauggagagcgaagagggaaaagaggcgagacuggcccggucuucccccgaacaaccccgcccuagcaccucuaaggcugucuccccgccccaucucgacggcccucccagcccuagaucccccgugauuggcucugaggucuuccugccuaauagcaaccacguggccuccggggccggagaagcugaggaacgcguuguggucaucucuagcuccgaggauagcgacgccgaaaauucuuccagcagagaacuggaugacucuuccagcgagucuagcgaccuccagcuggaaggccccuccacacuucgggugcuggaugagaaccucgcggacccgcaggcugaagaucgcccucugguuuucuucgaccugaaaauugauaaugagacgcagaagaucagccaacuugccgccgugaacagagagucuaaguuucgggucgugauccagcccgaggcuuucuuuuccauuuauagcaaagccgugucccucgaaguugggcugcagcacuuccugucuuuucucagcuccaugcgcagaccuauccuggcgugcuacaaacuuuggggacccggccugccgaauuucuuucgggcucucgaagacauuaaccgccugugggaguuccaagaggccaucucuggguuucuggccgcccuuccucucauuagagaacggguccccggagcuagcuccuucaagcugaagaaucuggcucagaccuaccucgcccgcaacaugucugagagaagcgcgauggccgcugugcuggccaugcgggaucuuuguagacugcucgaaguguccccuggcccccagcuggcucagcaugucuaucccuuuagcucucugcaaugcuucgccucccuucagccucucgugcaggccgcuguucugccgcgcgcggaggcccggcugcucgcucugcacaacgugagcuucauggaacuucugucugcccauagacgcgaccggcagggcgggcucaaaaaguacuccagauaucugagccugcaaacaaccacacuucccccugcccagcccgcuuuuaaucuccaggcccugggaaccuacuucgagggccugcucgaggggccugcgcuggcucgcgccgaaggagucucuacgccccuugccggccgggggcuggcugagagagccucccagcaaagcuga

SEQ ID NO: 3163 - protein, 1075 aa, Artificial Sequence
  POTEF__Homo_sapiens__A5A3E0
MVVEVDSMPAASSVKKPFGLRSKMGKWCCRCFPCCRESGKSNVGTSGDHDDSAMKTLRSKMGKWCRHCFPCCRGSGKSNVGASGDHDDSAMKTLRNKMGKWCCHCFPCCRGSSKSKVGAWGDYDDSAFMEPRYHVRGEDLDKLHRAAWWGKVPRKDLIVMLRDTDVNKQDKQKRTALHLASANGNSEVVKLLLDRRCQLNVLDNKKRTALIKAVQCQEDECALMLLEHGTDPNIPDEYGNTTLHYAIYNEDKLMAKALLLYGADIESKNKHGLTPLLLGVHEQKQQVVKFLIKKKANLNALDRYGRTALILAVCCGSASIVSLLLEQNIDVSSQDLSGQTAREYAVSSHHHVICQLLSDYKEKQMLKISSENSNPEQDLKLTSEEESQRFKGSENSQPEKMSQEPEINKDGDREVEEEMKKHESNNVGLLENLTNGVTAGNGDNGLIPQRKSRTPENQQFPDNESEEYHRICELLSDYKEKQMPKYSSENSNPEQDLKLTSEEESQRLKGSENGQPEKRSQEPEINKDGDRELENFMAIEEMKKHRSTHVGFPENLTNGATAGNGDDGLIPPRKSRTPESQQFPDTENEEYHSDEQNDTQKQFCEEQNTGILHDEILIHEEKQIEVVEKMNSELSLSCKKEKDILHENSTLREEIAMLRLELDTMKHQSQLREKKYLEDIESVKKRNDNLLKALQLNELTMDDDTAVLVIDNGSGMCKAGFAGDDAPRAVFPSIVGRPRQQGMMGGMHQKESYVGKEAQSKRGILTLKYPMEHGIITNWDDMEKIWHHTFYNELRVAPEEHPVLLTEATLNPKANREKMTQIMFETFNTPAMYVAIQAVLSLYTSGRTTGIVMDSGDGVTHTVPIYEGNALPHATLRLDLAGRELPDYLMKILTEHGYRFTTMAEREIVRDIKEKLCYVALDFEQEMATVASSSSLEKSYELPDGQVITIGNERFRCPEALFQPCFLGMESCGIHETTFNSIMKSDVDIRKDLYTNTVLSGGTTMYPGMAHRMQKEIAALAPSMMKIRIIAPPKRKYSVWVGGSILASLSTFQQMWISKQEYDESGPSIVHRKCL

SEQ ID NO: 3164 - RNA, 3228 nt, Artificial Sequence
  POTEF__Homo_sapiens__CCDS46409.1
auggugguugagguugauuccaugccggcugccucuucugugaagaagccauuuggucucaggagcaagaugggcaaguggugcugccguugcuuccccugcugcagggagagcggcaagagcaacgugggcacuucuggagaccacgacgacucugcuaugaagacacucaggagcaagaugggcaaguggugccgccacugcuuccccugcugcagggggaguggcaagagcaacgugggcgcuucuggagaccacgacgacucugcuaugaagacacucaggaacaagaugggcaaguggugcugccacugcuuccccugcugcagggggagcagcaagagcaaggugggcgcuuggggagacuacgaugacagugccuucauggagcccagguaccacguccguggagaagaucuggacaagcuccacagagcugccuggugggguaaaguccccagaaaggaucucaucgucaugcucagggacacugacgugaacaagcaggacaagcaaaagaggacugcucuacaucuggccucugccaaugggaauucagaaguaguaaaacuccugcuggacagacgaugucaacuuaauguccuugacaacaaaaagaggacagcucugauaaaggccguacaaugccaggaagaugaaugugcguuaauguugcuggaacauggcacugauccaaauauuccagaugaguauggaaauaccacucugcacuacgcuaucuauaaugaagauaaauuaauggccaaagcacugcucuuauauggugcugauaucgaaucaaaaaacaagcauggccucacaccacuguuacuugguguacaugagcaaaaacagcaagucgugaaauuuuuaauuaagaaaaaagcgaauuuaaaugcacuggauagauauggaagaacugcucucauacuugcuguauguuguggaucagcaaguauagucagccuucuacuugagcaaaauauugauguaucuucucaagaucuaucuggacagacggccagagaguaugcuguuucuagucaucaucauguaauuugccaguuacuuucugacuacaaagaaaaacagaugcuaaaaaucucuucugaaaacagcaauccagaacaagacuuaaagcugacaucagaggaagagucacaaagguucaaaggcagugaaaauagccagccagagaaaaugucucaagaaccagaaauaaauaaggauggugauagagagguugaagaagaaaugaagaagcaugaaaguaauaaugugggauuacuagaaaaccugacuaauggugucacugcuggcaauggugauaauggauuaauuccucaaaggaagagcagaacaccugaaaaucagcaauuuccugacaacgaaagugaagaguaucacagaauuugugaauuacuuucugacuacaaagaaaagcagaugccaaaauacucuucugaaaacagcaacccagaacaagacuuaaagcugacaucagaggaagagucacaaaggcuuaaaggcagugaaaauggccagccagagaaaagaucucaagaaccagaaauaaauaaggauggugauagagagcuagaaaauuuuauggcuaucgaagaaaugaagaagcacagaaguacucaugucggauucccagaaaaccugacuaauggugccacugcuggcaauggugaugauggauuaauuccuccaaggaagagcagaacaccugaaagccagcaauuuccugacacugagaaugaagaguaucacagugacgaacaaaaugauacucagaagcaauuuugugaagaacagaacacuggaauauuacacgaugagauucugauucaugaagaaaagcagauagaagugguugaaaaaaugaauucugagcuuucucuuaguuguaagaaagaaaaagacaucuugcaugaaaauaguacguugcgggaagaaauugccaugcuaagacuggagcuagacacaaugaaacaucagagccagcuaagagaaaagaaauauuuggaggauauugaaagugugaaaaaaaggaaugauaaucuuuuaaaggcucuacaauugaaugagcucaccauggaugaugauaccgcugugcucgucauugacaacggcucuggcaugugcaaggccggcuuugcgggcgacgaugccccccgggcugucuucccuuccaucguggggcgccccaggcagcagggcaugauggggggcaugcaucagaaagaguccuaugugggcaaggaggcccagagcaaaagaggcauccugacccugaaguaccccauggaacacggcaucaucaccaacugggaugacauggagaagaucuggcaccacaccuucuacaacgagcugcguguggcucccgaggagcaccccguccugcugaccgaggccacccugaacccuaaggccaaccgcgagaagaugacccagaucauguuugagaccuucaacaccccagccauguacguggccauccaggcugugcugucccuguacaccucuggccguacuacuggcaucgugauggacucuggugacggggucacccacacugugcccaucuaugaggggaaugcccucccccaugccacccugcgccuagaccuggcugggcgggaacugccugacuaccucaugaagauccucaccgagcauggcuauagguucaccaccauggccgagcgggaaaucgugcgugacaucaaagagaagcugugcuauguugcccuggacuucgagcaggagauggccacgguggccuccagcuccucccuagagaagagcuacgagcugcccgauggccaggucaucaccaucggcaacgagcgguuccgcugccccgaggcgcucuuccagccuugcuuccugggcauggaauccuguggcauccaugaaacuaccuucaacuccaucaugaagucugauguggacauccgcaaagaccuguacaccaacacagugcugucuggcggcaccaccauguacccuggcauggcccacagaaugcagaaggagaucgcugcccuggcgccuagcaugaugaagaucaggaucauugcuccucccaagcgcaaguacuccgugugggucgguggcuccauccuggccucgcuguccaccuuccagcagauguggaucagcaagcaggaguaugaugagucaggccccuccauuguccaccgcaaaugcuuguag

SEQ ID NO: 3165 - RNA, 3228 nt, Artificial Sequence
  derived and/or modified sequence opt1 from POTEF__Homo_sapiens__CCDS46409.1
augguggucgagguggacagcaugcccgccgccuccagcgugaagaagcccuucggccugcgcuccaagauggggaaguggugcugccggugcuuccccugcugccgcgagagcggcaaguccaacgucgggaccagcggcgaccacgacgacuccgcgaugaagacccuccggagcaagauggggaaguggugccgccacugcuuccccugcugccggggcuccggcaagagcaacgugggggccuccggcgaccacgacgacagcgccaugaagacgcugcgcaacaagauggggaaguggugcugccacugcuuccccugcugccggggcuccagcaaguccaaggugggggccuggggcgacuacgacgacagcgccuucauggagccgcgcuaccacguccggggcgaggaccuggacaagcuccaccgcgcggccuggugggggaaggugccccggaaggaccugaucgugaugcugcgcgacaccgacgucaacaagcaggacaagcagaagcggaccgcccuccaccuggccuccgcgaacggcaacagcgagguggugaagcugcuccuggaccgccggugccagcugaacguccucgacaacaagaagcgcaccgcccugaucaaggccgugcagugccaggaggacgagugcgcccugaugcuccuggagcacgggacggaccccaacauccccgacgaguacggcaacaccacccugcacuacgccaucuacaacgaggacaagcucauggcgaaggcccugcugcucuacggcgccgacaucgaguccaagaacaagcacgggcugaccccgcugcuccugggcgugcacgagcagaagcagcaggucgugaaguuccugaucaagaagaaggccaaccucaacgcccuggaccgguacgggcgcacggcgcugauccucgccgugugcugcggcagcgccagcaucgucucccugcugcucgagcagaacaucgacgugagcucccaggaccugagcgggcagaccgcccgggaguacgccguguccagccaccaccacgucaucugccagcugcucuccgacuacaaggagaagcagaugcugaagaucagcuccgagaacagcaaccccgagcaggaccugaagcucaccuccgaggaggagagccagcgcuucaagggcuccgagaacagccagcccgagaagaugucccaggagcccgagaucaacaaggacggcgaccgggagguggaggaggagaugaagaagcacgagagcaacaacguggggcugcuggagaaccucaccaacggcgucacggcggggaacggcgacaacgggcugaucccgcagcgcaagucccgcacccccgagaaccagcaguuccccgacaacgagagcgaggaguaccaccggaucugcgagcugcucuccgacuacaaggagaagcagaugcccaaguacagcagcgagaacuccaacccggagcaggaccugaagcugaccagcgaggaggagucccagcgccucaagggcagcgagaacggccagcccgagaagcggucccaggagcccgagaucaacaaggacggggaccgcgagcuggagaacuucauggccaucgaggagaugaagaagcaccggagcacccacgugggcuuccccgagaaccugacgaacggggccaccgccggcaacggggacgacggccugaucccgccccgcaagucccggacccccgagagccagcaguuccccgacaccgagaacgaggaguaccacuccgacgagcagaacgacacgcagaagcaguucugcgaggagcagaacaccggcauccuccacgacgagauccugauccacgaggagaagcagaucgaggucguggagaagaugaacagcgagcugucccucagcugcaagaaggagaaggacauccugcacgagaacuccacccugcgcgaggagaucgccaugcuccggcuggagcuggacaccaugaagcaccagagccagcuccgcgagaagaaguaccuggaggacaucgaguccgugaagaagcggaacgacaaccugcucaaggcgcugcagcugaacgagcucacgauggacgacgacaccgccguccuggugaucgacaacgggagcggcaugugcaaggccggguucgccggcgacgacgcgccgcgcgccguguuccccuccaucgucggccggccccgccagcaggggaugaugggcgggaugcaccagaaggagagcuacgugggcaaggaggcccagagcaagcgggggauccugacccucaaguaccccauggagcacggcaucaucaccaacugggacgacauggagaagaucuggcaccacacguucuacaacgagcugcgcguggccccggaggagcaccccguccugcucaccgaggccacccugaaccccaaggcgaaccgggagaagaugacccagaucauguucgagacguucaacaccccggccauguacguggccauccaggccgugcugucccucuacaccagcggccgcaccacggggaucgucauggacuccggcgacggggugacccacaccgugcccaucuacgagggcaacgcccugccccacgcgacccugcggcucgaccuggccgggcgcgagcugcccgacuaccucaugaagauccugaccgagcacggcuaccgcuucacgaccauggccgagcgggagaucguccgcgacaucaaggagaagcugugcuacguggcccucgacuucgagcaggagauggccaccguggcgagcuccagcucccuggagaaguccuacgagcugccggacggccaggucaucaccaucgggaacgagcgguuccgcugccccgaggcccucuuccagcccugcuuccugggcauggagagcugcgggauccacgagacgaccuucaacagcaucaugaaguccgacguggacauccggaaggaccuguacaccaacaccgugcucagcggcgggacgaccauguaccccggcauggcccaccgcaugcagaaggagaucgccgcgcuggccccguccaugaugaagauccggaucaucgccccgcccaagcgcaaguacagcgucugggugggcggguccauccuggccagccucuccaccuuccagcagauguggaucagcaagcaggaguacgacgaguccggccccagcaucgugcaccggaagugccuguga

SEQ ID NO: 3166 - RNA, 3228 nt, Artificial Sequence
  derived and/or modified sequence opt2 from POTEF__Homo_sapiens__CCDS46409.1
auggucgucgaggucgacuccaugcccgccgccuccuccgucaagaagcccuucggccuccgcuccaagaugggcaaguggugcugccgcugcuuccccugcugccgcgaguccggcaaguccaacgucggcaccuccggcgaccacgacgacuccgccaugaagacccuccgcuccaagaugggcaaguggugccgccacugcuuccccugcugccgcggcuccggcaaguccaacgucggcgccuccggcgaccacgacgacuccgccaugaagacccuccgcaacaagaugggcaaguggugcugccacugcuuccccugcugccgcggcuccuccaaguccaaggucggcgccuggggcgacuacgacgacuccgccuucauggagccccgcuaccacguccgcggcgaggaccucgacaagcuccaccgcgccgccugguggggcaaggucccccgcaaggaccucaucgucaugcuccgcgacaccgacgucaacaagcaggacaagcagaagcgcaccgcccuccaccucgccuccgccaacggcaacuccgaggucgucaagcuccuccucgaccgccgcugccagcucaacguccucgacaacaagaagcgcaccgcccucaucaaggccguccagugccaggaggacgagugcgcccucaugcuccucgagcacggcaccgaccccaacauccccgacgaguacggcaacaccacccuccacuacgccaucuacaacgaggacaagcucauggccaaggcccuccuccucuacggcgccgacaucgaguccaagaacaagcacggccucaccccccuccuccucggcguccacgagcagaagcagcaggucgucaaguuccucaucaagaagaaggccaaccucaacgcccucgaccgcuacggccgcaccgcccucauccucgccgucugcugcggcuccgccuccaucgucucccuccuccucgagcagaacaucgacgucuccucccaggaccucuccggccagaccgcccgcgaguacgccgucuccucccaccaccacgucaucugccagcuccucuccgacuacaaggagaagcagaugcucaagaucuccuccgagaacuccaaccccgagcaggaccucaagcucaccuccgaggaggagucccagcgcuucaagggcuccgagaacucccagcccgagaagaugucccaggagcccgagaucaacaaggacggcgaccgcgaggucgaggaggagaugaagaagcacgaguccaacaacgucggccuccucgagaaccucaccaacggcgucaccgccggcaacggcgacaacggccucaucccccagcgcaagucccgcacccccgagaaccagcaguuccccgacaacgaguccgaggaguaccaccgcaucugcgagcuccucuccgacuacaaggagaagcagaugcccaaguacuccuccgagaacuccaaccccgagcaggaccucaagcucaccuccgaggaggagucccagcgccucaagggcuccgagaacggccagcccgagaagcgcucccaggagcccgagaucaacaaggacggcgaccgcgagcucgagaacuucauggccaucgaggagaugaagaagcaccgcuccacccacgucggcuuccccgagaaccucaccaacggcgccaccgccggcaacggcgacgacggccucauccccccccgcaagucccgcacccccgagucccagcaguuccccgacaccgagaacgaggaguaccacuccgacgagcagaacgacacccagaagcaguucugcgaggagcagaacaccggcauccuccacgacgagauccucauccacgaggagaagcagaucgaggucgucgagaagaugaacuccgagcucucccucuccugcaagaaggagaaggacauccuccacgagaacuccacccuccgcgaggagaucgccaugcuccgccucgagcucgacaccaugaagcaccagucccagcuccgcgagaagaaguaccucgaggacaucgaguccgucaagaagcgcaacgacaaccuccucaaggcccuccagcucaacgagcucaccauggacgacgacaccgccguccucgucaucgacaacggcuccggcaugugcaaggccggcuucgccggcgacgacgccccccgcgccgucuuccccuccaucgucggccgcccccgccagcagggcaugaugggcggcaugcaccagaaggaguccuacgucggcaaggaggcccaguccaagcgcggcauccucacccucaaguaccccauggagcacggcaucaucaccaacugggacgacauggagaagaucuggcaccacaccuucuacaacgagcuccgcgucgcccccgaggagcaccccguccuccucaccgaggccacccucaaccccaaggccaaccgcgagaagaugacccagaucauguucgagaccuucaacacccccgccauguacgucgccauccaggccguccucucccucuacaccuccggccgcaccaccggcaucgucauggacuccggcgacggcgucacccacaccguccccaucuacgagggcaacgcccucccccacgccacccuccgccucgaccucgccggccgcgagcuccccgacuaccucaugaagauccucaccgagcacggcuaccgcuucaccaccauggccgagcgcgagaucguccgcgacaucaaggagaagcucugcuacgucgcccucgacuucgagcaggagauggccaccgucgccuccuccuccucccucgagaaguccuacgagcuccccgacggccaggucaucaccaucggcaacgagcgcuuccgcugccccgaggcccucuuccagcccugcuuccucggcauggaguccugcggcauccacgagaccaccuucaacuccaucaugaaguccgacgucgacauccgcaaggaccucuacaccaacaccguccucuccggcggcaccaccauguaccccggcauggcccaccgcaugcagaaggagaucgccgcccucgcccccuccaugaugaagauccgcaucaucgccccccccaagcgcaaguacuccgucugggucggcggcuccauccucgccucccucuccaccuuccagcagauguggaucuccaagcaggaguacgacgaguccggccccuccaucguccaccgcaagugccucuga

SEQ ID NO: 3167 - RNA, 3228 nt, Artificial Sequence
  derived and/or modified sequence opt3 from POTEF__Homo_sapiens__CCDS46409.1
augguggucgagguugacagcaugcccgccgcuuccucugugaagaaaccuuucggccugagaucaaagauggggaaauggugcuguaggugcuuuccauguugccgggaaaguggaaagagcaacguagguaccuccggcgaucacgacgauucugcaaugaaaacacuccgcucgaagauggggaaguggugucgacauugcuucccguguugccguggaucaggcaaaagcaaugugggugccaguggggaccacgaugacuccgcgaugaagacucuuagaaacaaaaugggaaagugguguugccauuguuuucccugcugcaggggcucuagcaaauccaaggucggcgcuuggggagauuacgacgauucagccuucauggagccucgguaucacgugcgcggggaagaccuggauaaguugcauagagcagccuggugggguaaaguuccaaggaaggacuuaaucgugaugcugcgggauacggacgucaauaaacaggacaagcaaaaacgcaccgcucuacaccucgcaagugccaacggcaauagcgaggugguaaagcugcuucuggaucgaagaugucaguugaacguucucgacaauaaaaagaggacagcucugauuaaggccgugcagugccaggaagaugagugugcgcugaugcucuuagagcacgggacugaccccaacauaccugaugaauacggaaauaccacacugcauuaugcaaucuacaacgaggacaaacuuauggccaaggcuuugcugcuauauggcgccgauauugaaucuaaaaauaagcacggucucaccccacugcuucuggggguccaugagcaaaaacaacagguggugaaguuuuugaucaagaaaaaggcaaaccucaaugcucuggaccgguacggacguacugccuuaauucuggcggucugcuguggcuccgccucaaucguuagccuccuucuggagcagaacauagaugugaguucucaggacuuguccggccagacagcacgcgaauaugcuguaagcucgcaccaccaugugaucugccagcuacugucugauuacaaagagaagcagaugcucaaaauuuccucagaaaauaguaaccccgagcaagaccugaaacuuaccagcgaagaggagucccagagauucaaggggucugaaaacagccagccugagaagaugucacaagaaccagagaucaauaaggacggagauagggaagucgaggaggaaaugaaaaagcacgagaguaacaaugugggucuguuggaaaaccucacgaauggcguuacugccgggaacggagacaauggccugauuccgcagcggaaaucccgaacccccgagaaccagcaguuuccugauaaugaaagcgaggaguaccaucgcaucugugaauuacugucugacuauaaggagaagcaaaugccaaaauacucaagugaaaacagcaaucccgagcaggaucuaaagcucacauccgaggaagagucucagagacugaaagguucggaaaacgggcagccugagaagaggagccaagaaccagagauaaauaaagacggcgaucgggagcuugaaaacuucauggcuauugaggaaaugaagaaacaccgcuccacucaugugggauuucccgagaauuugaccaacggcgccacagcagggaacggagacgauggucugaucccgccuagaaagucaaggacccccgaaagucagcaguucccagacacggagaaugaggaauaucacucugaugagcagaacgacacucaaaagcaguuuugcgaggaacagaauacaggcauucuccacgaugaaauccugauccaugaggagaaacagauugaagucguggagaagaugaacagcgaacuuucccugucauguaaaaaggagaaagacauauugcacgagaauagcacccuccgugaagagaucgccaugcugcgguuagaacuggacacuaugaagcaucaaucucagcuacgagagaagaaauaccucgaagauauugaguccguaaagaaaagaaacgacaaucugcuuaaggcuuugcagcugaacgagcucacaauggaugacgauaccgcgguucuggugaucgacaaugggaguggaaugugcaaagcaggcuucgccggugaugacgcuccuagggccgucuuucccagcauaguggggcgcccacggcaacagggcaugaugggaggcaugcaccagaaggaaucuuaugucgggaaggaggcacaguccaaaagaggaauuuuaacgcugaaguaccccauggaacacgguaucaucaccaacugggaugacauggagaaaauuuggcaucacacauucuauaaugaacuuaggguggccccugaggagcauccaguuuugcucacugaagcuacccugaacccgaaggccaaucgcgagaaaaugacacaaaucauguucgaaacuuuuaacacccccgcaauguacguggcgauucaggcuguacuaucacuguacacaaguggccgaaccacugggauagucauggauagcggagacggcgugacgcacacaguuccuaucuaugaggguaaugcccucccacaugcaacccugcggcuugauuuggccgggcgugaacugcccgacuacuuaaugaagauucucacugagcacggcuauagauucaccacaauggcugagagggaaaucgugcgcgacaucaaggagaaacuguguuacgucgcccuugauuuugaacaggagauggcaaccguggcuucguccucuagccuggagaagucauaugaauugccugacggacagguaauuacuauaggcaacgagcgguucagaugcccagaagcccucuuucaacccugcuuccuggggauggagaguuguggaauccacgaaacaacguuuaacuccauuaugaaaucugauguggacaucaggaaggaucuauacaccaauacuguucugagcggcgguacaaccauguauccggggauggcgcaucgaaugcagaaagagauugccgcucucgcaccuuccaugaugaagauccgcauaaucgccccacccaaacggaaguacucagucugggugggaggcagcauucuggcuagucuuucuacauuccagcagauguggaucuccaagcaagaguacgacgaaagcgguccuucgauugugcacagaaaaugcuuguga

SEQ ID NO: 3168 - RNA, 3228 nt, Artificial Sequence
  derived and/or modified sequence opt4 from POTEF__Homo_sapiens__CCDS46409.1
auggugguggagguggacagcaugcccgccgccagcagcgugaagaagcccuucggccugagaagcaagaugggcaaguggugcugcagaugcuuccccugcugcagagagagcggcaagagcaacgugggcaccagcggcgaccacgacgacagcgccaugaagacccugagaagcaagaugggcaaguggugcagacacugcuuccccugcugcagaggcagcggcaagagcaacgugggcgccagcggcgaccacgacgacagcgccaugaagacccugagaaacaagaugggcaaguggugcugccacugcuuccccugcugcagaggcagcagcaagagcaaggugggcgccuggggcgacuacgacgacagcgccuucauggagcccagauaccacgugagaggcgaggaccuggacaagcugcacagagccgccugguggggcaaggugcccagaaaggaccugaucgugaugcugagagacaccgacgugaacaagcaggacaagcagaagagaaccgcccugcaccuggccagcgccaacggcaacagcgagguggugaagcugcugcuggacagaagaugccagcugaacgugcuggacaacaagaagagaaccgcccugaucaaggccgugcagugccaggaggacgagugcgcccugaugcugcuggagcacggcaccgaccccaacauccccgacgaguacggcaacaccacccugcacuacgccaucuacaacgaggacaagcugauggccaaggcccugcugcuguacggcgccgacaucgagagcaagaacaagcacggccugaccccccugcugcugggcgugcacgagcagaagcagcagguggugaaguuccugaucaagaagaaggccaaccugaacgcccuggacagauacggcagaaccgcccugauccuggccgugugcugcggcagcgccagcaucgugagccugcugcuggagcagaacaucgacgugagcagccaggaccugagcggccagaccgccagagaguacgccgugagcagccaccaccacgugaucugccagcugcugagcgacuacaaggagaagcagaugcugaagaucagcagcgagaacagcaaccccgagcaggaccugaagcugaccagcgaggaggagagccagagauucaagggcagcgagaacagccagcccgagaagaugagccaggagcccgagaucaacaaggacggcgacagagagguggaggaggagaugaagaagcacgagagcaacaacgugggccugcuggagaaccugaccaacggcgugaccgccggcaacggcgacaacggccugaucccccagagaaagagcagaacccccgagaaccagcaguuccccgacaacgagagcgaggaguaccacagaaucugcgagcugcugagcgacuacaaggagaagcagaugcccaaguacagcagcgagaacagcaaccccgagcaggaccugaagcugaccagcgaggaggagagccagagacugaagggcagcgagaacggccagcccgagaagagaagccaggagcccgagaucaacaaggacggcgacagagagcuggagaacuucauggccaucgaggagaugaagaagcacagaagcacccacgugggcuuccccgagaaccugaccaacggcgccaccgccggcaacggcgacgacggccugaucccccccagaaagagcagaacccccgagagccagcaguuccccgacaccgagaacgaggaguaccacagcgacgagcagaacgacacccagaagcaguucugcgaggagcagaacaccggcauccugcacgacgagauccugauccacgaggagaagcagaucgaggugguggagaagaugaacagcgagcugagccugagcugcaagaaggagaaggacauccugcacgagaacagcacccugagagaggagaucgccaugcugagacuggagcuggacaccaugaagcaccagagccagcugagagagaagaaguaccuggaggacaucgagagcgugaagaagagaaacgacaaccugcugaaggcccugcagcugaacgagcugaccauggacgacgacaccgccgugcuggugaucgacaacggcagcggcaugugcaaggccggcuucgccggcgacgacgcccccagagccguguuccccagcaucgugggcagacccagacagcagggcaugaugggcggcaugcaccagaaggagagcuacgugggcaaggaggcccagagcaagagaggcauccugacccugaaguaccccauggagcacggcaucaucaccaacugggacgacauggagaagaucuggcaccacaccuucuacaacgagcugagaguggcccccgaggagcaccccgugcugcugaccgaggccacccugaaccccaaggccaacagagagaagaugacccagaucauguucgagaccuucaacacccccgccauguacguggccauccaggccgugcugagccuguacaccagcggcagaaccaccggcaucgugauggacagcggcgacggcgugacccacaccgugcccaucuacgagggcaacgcccugccccacgccacccugagacuggaccuggccggcagagagcugcccgacuaccugaugaagauccugaccgagcacggcuacagauucaccaccauggccgagagagagaucgugagagacaucaaggagaagcugugcuacguggcccuggacuucgagcaggagauggccaccguggccagcagcagcagccuggagaagagcuacgagcugcccgacggccaggugaucaccaucggcaacgagagauucagaugccccgaggcccuguuccagcccugcuuccugggcauggagagcugcggcauccacgagaccaccuucaacagcaucaugaagagcgacguggacaucagaaaggaccuguacaccaacaccgugcugagcggcggcaccaccauguaccccggcauggcccacagaaugcagaaggagaucgccgcccuggcccccagcaugaugaagaucagaaucaucgccccccccaagagaaaguacagcgugugggugggcggcagcauccuggccagccugagcaccuuccagcagauguggaucagcaagcaggaguacgacgagagcggccccagcaucgugcacagaaagugccuguga

SEQ ID NO: 3169 - RNA, 3228 nt, Artificial Sequence
  derived and/or modified sequence opt5 from POTEF__Homo_sapiens__CCDS46409.1
augguggucgagguugacagcaugcccgccgcuuccucugugaagaaaccuuucggccugagaagcaagauggggaaauggugcugucggugcuuuccguguugccgcgaauccggaaagucuaacgugggcaccagcggggaucacgacgauuccgccaugaaaacacucagaucuaagaugggaaaguggugucggcauugcuuccccuguugccgcggcagcgggaaauccaaugucggagcgagcggcgaccacgaugacucugcuaugaagacgcugagaaacaaaaugggcaagugguguugccauuguuuuccuugcugccggggguccagcaaaucuaaggugggagccuggggcgauuacgacgauuccgccuucauggagccccgcuaucacguuagaggggaagaccuugauaagcugcaucgggcugccugguggggaaaagugccucgcaaggaccucaucgucaugcugagagauaccgacgugaauaaacaggacaagcaaaaacggacagcccuucaccuggcuagcgcgaacggcaauucugagguugugaagcuccugcuggaucgcagaugucagcucaacguccuggacaauaaaaagcggaccgcccuuauuaaggcugugcagugccaggaagaugagugugcccugaugcuccuggagcacgggacagaccccaacaucccugaugaauacggaaauaccacacuucauuaugcuauuuacaacgaggacaaacugauggccaaggcgcuccugcuguauggcgccgauaucgaauccaaaaauaagcacggccucaccccgcugcuucugggggugcaugagcaaaaacagcaggucguuaaguuucucauuaagaaaaaggcuaaccugaaugcccuugaccgcuacggaagaacggcucugauccucgccgugugcuguggcagcgccuccaucgugucucugcugcucgagcagaacauugaugucagcucccaagaccugagcgggcagaccgcucgggaauaugcggugucuucccaccaccauguuaucugccagcuucugagcgauuacaaagagaagcagaugcucaaaauuucuagcgaaaauuccaaccccgagcaagaccugaaacuuacaucugaagaggagagccagagauucaagggauccgaaaacagccagccugagaagaugucucaagaacccgagaucaauaaggacggcgaucgcgaaguggaggaggaaaugaaaaagcacgaguccaacaaugucgggcugcucgaaaaccugaccaauggagugacagccggcaacggcgacaaugggcugauuccucagcggaaaagcagaacccccgagaaccagcaguuuccggauaaugaaucugaggaguaccaucgcaucugugaacuccuguccgacuauaaggagaagcaaaugccuaaauacagcuccgaaaacucuaaucccgagcaggaucuuaagcugacgagcgaggaagagucccagcggcucaaaggaucugaaaacggccagccugagaagagaagccaagaacccgagauuaauaaagacggggaucgcgagcuggaaaacuucauggcuaucgaggaaaugaagaaacaccgguccacacauguuggauuucccgagaaucugaccaacggcgccacagccgggaacggcgacgauggacuuaucccuccgagaaagagccgcacccccgaaucucagcaguucccugacaccgagaaugaggaauaucacuccgaugagcagaacgacacacaaaagcaguuuugcgaggaacagaauacgggcauucuccacgaugaaauccugauucaugaggagaaacagaucgaaguggucgagaagaugaacagcgaacugucucucuccuguaaaaaggagaaagacauucugcacgagaauagcacccuucgggaagagaucgcuaugcugagacucgaacuggacacaaugaagcaucaaucucagcugcgcgagaagaaauaccuugaagauaucgagagcgugaagaaacggaacgacaaucuccugaaggcccugcagcucaacgagcugaccauggaugacgauacagcgguccuugugauugacaauggguccggaaugugcaaagcuggcuucgccggggaugacgcccccagagcuguuuuuccuagcaucgugggacggccccgccaacagggcaugaugggcgggaugcaccagaaggaaucuuaugucggaaaggaggcccaguccaaaagaggcauucugacccucaaguacccgauggaacacgggaucauuacgaacugggaugacauggagaaaaucuggcaucacacauucuauaaugaacugcggguggcuccugaggagcaucccguucugcuuaccgaagccacccucaacccuaaggcgaauagagagaaaaugacacaaaucauguucgaaaccuuuaacacacccgccauguacguggcuauucaggccguccugagccuguacacguccggacgcaccacaggcaucgugauggauucuggggacggagugacccacacaguuccuauuuaugagggcaaugcucucccccaugccacccugcggcuugaucuggcggggagagaacucccggacuaccugaugaagauccugacggagcacggcuaucgcuucaccacaauggccgagagagaaauuguccgggacaucaaggagaaacuuuguuacguggcucucgauuuugaacaggagauggccaccguggcuagcuccucuagccuggagaaguccuaugaacugccugacggacaggucauuacaaucggcaacgagcgcuucagaugccccgaagcccucuuucaacccugcuuccuggggauggagucuuguggaauccacgaaaccacguuuaacagcauuaugaaauccgauguggacauccggaaggaucuuuacacaaauaccguucugagcggcgggacaaccauguauccuggaauggcccaucgcaugcagaaagagauugcugcgcucgccccgucuaugaugaagaucagaauuaucgcucccccuaaacggaaguacuccgugugggucggcgggagcauccuggccucucuguccaccuuccagcagauguggauuagcaagcaagaguacgacgaaucuggccccuccaucgugcaccgcaaaugccuuuga

SEQ ID NO: 3170 - protein, 584 aa, Artificial Sequence
  POTE__Homo_sapiens__Q86YR6
MVAEVCSMPTASTVKKPFDLRSKMGKWCHHRFPCCRGSGKSNMGTSGDHDDSFMKMLRSKMGKCCRHCFPCCRGSGTSNVGTSGDHENSFMKMLRSKMGKWCCHCFPCCRGSGKSNVGAWGDYDHSAFMEPRYHIRREDLDKLHRAAWWGKVPRKDLIVMLRDTDMNKRDKEKRTALHLASANGNSEVVQLLLDRRCQLNVLDNKKRTALIKAIQCQEDECVLMLLEHGADRNIPDEYGNTALHYAIYNEDKLMAKALLLYGADIESKNKCGLTPLLLGVHEQKQQVVKFLIKKKANLNVLDRYGRTALILAVCCGSASIVNLLLEQNVDVSSQDLSGQTAREYAVSSHHHVICELLSDYKEKQMLKISSENSNPEQDLKLTSEEESQRLKVSENSQPEKMSQEPEINKDCDREVEEEIKKHGSNPVGLPENLTNGASAGNGDDGLIPQRRSRKPENQQFPDTENEEYHSDEQNDTRKQLSEEQNTGISQDEILTNKQKQIEVAEQKMNSELSLSHKKEEDLLRENSVLQEEIAMLRLELDETKHQNQLRENKILEEIESVKEKTDKLLRAMQLNEEALTKTNI

SEQ ID NO: 3171 - RNA, 1755 nt, Artificial Sequence
  POTE__Homo_sapiens__CCDS13562.1
augguggcugagguuuguucaaugcccacugccucuacugugaagaagccauuugaucucaggagcaagaugggcaaguggugccaccaccgcuuccccugcugcagggggagcggcaagagcaacaugggcacuucuggagaccacgacgacuccuuuaugaagaugcucaggagcaagaugggcaaguguugccgccacugcuuccccugcugcagggggagcggcacgagcaacgugggcacuucuggagaccaugaaaacuccuuuaugaagaugcucaggagcaagaugggcaaguggugcugucacugcuuccccugcugcagggggagcggcaagagcaacgugggcgcuuggggagacuacgaccacagcgccuucauggagccgagguaccacauccgucgagaagaucuggacaagcuccacagagcugccuggugggguaaaguccccagaaaggaucucaucgucaugcucagggacacugacaugaacaagagggacaaggaaaagaggacugcucuacauuuggccucugccaauggaaauucagaaguaguacaacuccugcuggacagacgaugucaacuuaauguccuugacaacaaaaaaaggacagcucugauaaaggccauacaaugccaggaagaugaauguguguuaauguugcuggaacauggcgcugaucgaaauauuccagaugaguauggaaauaccgcucuacacuaugcuaucuacaaugaagauaaauuaauggccaaagcacugcucuuauauggugcugauauugaaucaaaaaacaaguguggccucacaccacuuuugcuuggcguacaugaacaaaaacagcaaguggugaaauuuuuaaucaagaaaaaagcuaauuuaaauguacuugauagauauggaagaacugcccucauacuugcuguauguuguggaucagcaaguauagucaaucuucuacuugagcaaaauguugauguaucuucucaagaucuaucuggacagacggccagagaguaugcuguuucuagucaucaucauguaauuugugaauuacuuucugacuauaaagaaaaacagaugcuaaaaaucucuucugaaaacagcaauccagaacaagacuuaaagcugacaucagaggaagagucacaaaggcuuaaagucagugaaaauagccagccagagaaaaugucucaagaaccagaaauaaauaaggacugugauagagagguugaagaagaaauaaagaagcauggaaguaauccugugggauuaccagaaaaccugacuaauggugccagugcuggcaauggugaugauggauuaauuccacaaaggaggagcagaaaaccugaaaaucagcaauuuccugacacugagaaugaagaguaucacagugaugaacaaaaugauacccggaaacaacuuucugaagaacagaacacuggaauaucacaagaugagauucugacuaauaaacaaaagcagauagaaguggcugaacagaaaaugaauucugagcuuucucuuagucauaagaaagaagaagaucucuugcgugaaaacagcguguugcaggaagaaauugccaugcuaagacuggaacuagaugaaacaaaacaucagaaccagcuaagggaaaauaaaauuuuggaggaaauugaaagugugaaagaaaagacugauaaacuucuaagggcuaugcaauugaaugaagaagcauuaacgaaaaccaauauuuaa

SEQ ID NO: 3172 - RNA, 1755 nt, Artificial Sequence
  derived and/or modified sequence opt1 from POTE__Homo_sapiens__CCDS13562.1
augguggccgaggucugcagcaugcccaccgccuccaccgugaagaagccguucgaccugcgcagcaagaugggcaaguggugccaccaccgguuccccugcugccgcggguccggcaagagcaacauggggacguccggcgaccacgacgacagcuucaugaagaugcuccgguccaagauggggaagugcugccgccacugcuuccccugcugccggggcagcggcaccuccaacguggggaccagcggcgaccacgagaacuccuucaugaagaugcugcgcagcaagauggggaaguggugcugccacugcuuccccugcugccggggcuccggcaagagcaacgucggggcguggggcgacuacgaccacuccgccuucauggagccgcgcuaccacauccggcgcgaggaccuggacaagcuccaccgggccgccuggugggggaaggugccccgcaaggaccugaucgugaugcugcgggacaccgacaugaacaagcgcgacaaggagaagcggacggcccuccaccuggcgagcgccaacggcaacuccgaggucgugcagcugcuccuggaccgccggugccagcugaacgugcucgacaacaagaagcgcaccgcccugaucaaggccauccagugccaggaggacgagugcguccugaugcuccuggagcacggggcggaccggaacauccccgacgaguacggcaacaccgcccugcacuacgccaucuacaacgaggacaagcucauggccaaggcccugcugcucuacggcgcggacaucgagagcaagaacaagugcgggcugacgccccugcuccugggcgugcacgagcagaagcagcaggucgugaaguuccugaucaagaagaaggccaaccucaacgugcuggaccgcuacgggcggaccgcccugauccucgccgugugcugcggcuccgccagcaucgucaaccugcugcucgagcagaacguggacgugagcucccaggaccugagcgggcagaccgcgcgcgaguacgccgucuccagccaccaccacgugaucugcgagcugcucuccgacuacaaggagaagcagaugcugaagaucagcuccgagaacagcaacccggagcaggaccugaagcucaccuccgaggaggagagccagcgccugaagguguccgagaacagccagcccgagaagaugucccaggagcccgagaucaacaaggacugcgaccgggaggucgaggaggagaucaagaagcacggcagcaaccccgugggccugccggagaaccucaccaacggggccuccgccggcaacggggacgacggccugaucccccagcgccggagccgcaagcccgagaaccagcaguuccccgacacggagaacgaggaguaccacuccgacgagcagaacgacacccggaagcagcugagcgaggagcagaacaccgggaucucccaggacgagauccucaccaacaagcagaagcagaucgagguggccgagcagaagaugaacagcgagcugagccugucccacaagaaggaggaggaccuccugcgcgagaacagcguccugcaggaggagaucgcgaugcugcggcucgagcuggacgagacgaagcaccagaaccagcugcgcgagaacaagauccucgaggagaucgaguccgugaaggagaagaccgacaagcugcugcgggccaugcagcucaacgaggaggcccugaccaagaccaacaucuga

SEQ ID NO: 3173 - RNA, 1755 nt, Artificial Sequence
  derived and/or modified sequence opt2 from POTE__Homo_sapiens__CCDS13562.1
auggucgccgaggucugcuccaugcccaccgccuccaccgucaagaagcccuucgaccuccgcuccaagaugggcaaguggugccaccaccgcuuccccugcugccgcggcuccggcaaguccaacaugggcaccuccggcgaccacgacgacuccuucaugaagaugcuccgcuccaagaugggcaagugcugccgccacugcuuccccugcugccgcggcuccggcaccuccaacgucggcaccuccggcgaccacgagaacuccuucaugaagaugcuccgcuccaagaugggcaaguggugcugccacugcuuccccugcugccgcggcuccggcaaguccaacgucggcgccuggggcgacuacgaccacuccgccuucauggagccccgcuaccacauccgccgcgaggaccucgacaagcuccaccgcgccgccugguggggcaaggucccccgcaaggaccucaucgucaugcuccgcgacaccgacaugaacaagcgcgacaaggagaagcgcaccgcccuccaccucgccuccgccaacggcaacuccgaggucguccagcuccuccucgaccgccgcugccagcucaacguccucgacaacaagaagcgcaccgcccucaucaaggccauccagugccaggaggacgagugcguccucaugcuccucgagcacggcgccgaccgcaacauccccgacgaguacggcaacaccgcccuccacuacgccaucuacaacgaggacaagcucauggccaaggcccuccuccucuacggcgccgacaucgaguccaagaacaagugcggccucaccccccuccuccucggcguccacgagcagaagcagcaggucgucaaguuccucaucaagaagaaggccaaccucaacguccucgaccgcuacggccgcaccgcccucauccucgccgucugcugcggcuccgccuccaucgucaaccuccuccucgagcagaacgucgacgucuccucccaggaccucuccggccagaccgcccgcgaguacgccgucuccucccaccaccacgucaucugcgagcuccucuccgacuacaaggagaagcagaugcucaagaucuccuccgagaacuccaaccccgagcaggaccucaagcucaccuccgaggaggagucccagcgccucaaggucuccgagaacucccagcccgagaagaugucccaggagcccgagaucaacaaggacugcgaccgcgaggucgaggaggagaucaagaagcacggcuccaaccccgucggccuccccgagaaccucaccaacggcgccuccgccggcaacggcgacgacggccucaucccccagcgccgcucccgcaagcccgagaaccagcaguuccccgacaccgagaacgaggaguaccacuccgacgagcagaacgacacccgcaagcagcucuccgaggagcagaacaccggcaucucccaggacgagauccucaccaacaagcagaagcagaucgaggucgccgagcagaagaugaacuccgagcucucccucucccacaagaaggaggaggaccuccuccgcgagaacuccguccuccaggaggagaucgccaugcuccgccucgagcucgacgagaccaagcaccagaaccagcuccgcgagaacaagauccucgaggagaucgaguccgucaaggagaagaccgacaagcuccuccgcgccaugcagcucaacgaggaggcccucaccaagaccaacaucuga

SEQ ID NO: 3174 - RNA, 1755 nt, Artificial Sequence
  derived and/or modified sequence opt3 from POTE__Homo_sapiens__CCDS13562.1
augguggccgaggucugcagcaugcccaccgcuuccacaguuaagaaaccuuucgaccugagaucuaagaugggcaaauggugucaccauagguuuccaugcugucgggggucaggaaagaguaacauggguacuagcggcgaucacgacgauuccuucaugaaaaugcuccgcucuaagauggggaagugcugucgacauugcuuuccguguugccguggaucgggcacgucaaauguggguaccagcggggaccacgaaaacaguuucaugaaaaugcuuagauccaagaugggaaaaugguguugccauuguuuucccugcugcaggggcucuggcaagagcaauguaggggcauggggagauuacgaccacuccgccuucauggagccucgguaucacauccgcagagaagaucuggacaaauugcauagggcggcuuggugggguaaggugccacggaaggauuuaauugucaugcugcgcgacacagauaugaacaaacgagacaaggagaaaagaacugcccuacaccucgcaucagccaauggcaacagugaagugguucagcugcuucuggauaggcggugucaauugaaugugcucgacaacaagaaacguaccgcucugauaaaggcaauccagugccaggaggacgaguguguccugaugcucuuagaacauggggccgaucgcaauauucccgacgaguacggaaacacagcucugcacuaugccaucuacaaugaagauaaacuuauggcgaaggcauugcugcuauauggcgccgacauugagagcaagaacaaaugcggucucaccccucugcuucugggggugcacgagcagaagcaacagguaguuaaauuuuugaucaagaaaaaggcuaaucucaacgugcuggauagauacggaaggacugccuuaauacuggcagucuguugcggcucugcuuccaucgugaaucuccuucuggaacagaacguggacgucucaagccaggauuugaguggccaaacagcccgggaguaugcgguuucuucccaucaccaugugauuugugaacuacugagcgacuacaaggagaaacagaugcucaagaucucgucugaaaacuccaauccagagcaggaucugaaacuuaccucagaggaagagagucagcgacugaagguaagcgaaaacucccaacccgagaaaaugucucaggaaccugagauuaauaaggacugcgaucgcgagguggaagaggaaaucaagaaacacgggagcaacccagucggauugccggagaaucucacgaacggugccucagcaggcaauggggacgacggacugauaccccagagaaggagucggaagccugaaaaccaacaguucccagauacugagaaugaggaauaccauuccgacgagcagaacgauacccgcaaacaguuaagcgaagaacaaaauacaggcauuucucaggacgagauccugacuaacaagcagaaacagauugaaguggcugagcaaaagaugaauagugaacuaucacucagccacaagaaagaggaagaucugcuuagagagaacuccguuuugcaggaggaaaucgccaugcugaggcucgagcuggacgaaaccaagcaccagaaucagcuucgugagaacaaaauccuggaagagauugagucugugaaggagaaaacagauaaguugcuccgggcuaugcaacugaacgaggaagccuuaaccaaaacgaauauauga

SEQ ID NO: 3175 - RNA, 1755 nt, Artificial Sequence
  derived and/or modified sequence opt4 from POTE__Homo_sapiens__CCDS13562.1
augguggccgaggugugcagcaugcccaccgccagcaccgugaagaagcccuucgaccugagaagcaagaugggcaaguggugccaccacagauuccccugcugcagaggcagcggcaagagcaacaugggcaccagcggcgaccacgacgacagcuucaugaagaugcugagaagcaagaugggcaagugcugcagacacugcuuccccugcugcagaggcagcggcaccagcaacgugggcaccagcggcgaccacgagaacagcuucaugaagaugcugagaagcaagaugggcaaguggugcugccacugcuuccccugcugcagaggcagcggcaagagcaacgugggcgccuggggcgacuacgaccacagcgccuucauggagcccagauaccacaucagaagagaggaccuggacaagcugcacagagccgccugguggggcaaggugcccagaaaggaccugaucgugaugcugagagacaccgacaugaacaagagagacaaggagaagagaaccgcccugcaccuggccagcgccaacggcaacagcgagguggugcagcugcugcuggacagaagaugccagcugaacgugcuggacaacaagaagagaaccgcccugaucaaggccauccagugccaggaggacgagugcgugcugaugcugcuggagcacggcgccgacagaaacauccccgacgaguacggcaacaccgcccugcacuacgccaucuacaacgaggacaagcugauggccaaggcccugcugcuguacggcgccgacaucgagagcaagaacaagugcggccugaccccccugcugcugggcgugcacgagcagaagcagcagguggugaaguuccugaucaagaagaaggccaaccugaacgugcuggacagauacggcagaaccgcccugauccuggccgugugcugcggcagcgccagcaucgugaaccugcugcuggagcagaacguggacgugagcagccaggaccugagcggccagaccgccagagaguacgccgugagcagccaccaccacgugaucugcgagcugcugagcgacuacaaggagaagcagaugcugaagaucagcagcgagaacagcaaccccgagcaggaccugaagcugaccagcgaggaggagagccagagacugaaggugagcgagaacagccagcccgagaagaugagccaggagcccgagaucaacaaggacugcgacagagagguggaggaggagaucaagaagcacggcagcaaccccgugggccugcccgagaaccugaccaacggcgccagcgccggcaacggcgacgacggccugaucccccagagaagaagcagaaagcccgagaaccagcaguuccccgacaccgagaacgaggaguaccacagcgacgagcagaacgacaccagaaagcagcugagcgaggagcagaacaccggcaucagccaggacgagauccugaccaacaagcagaagcagaucgagguggccgagcagaagaugaacagcgagcugagccugagccacaagaaggaggaggaccugcugagagagaacagcgugcugcaggaggagaucgccaugcugagacuggagcuggacgagaccaagcaccagaaccagcugagagagaacaagauccuggaggagaucgagagcgugaaggagaagaccgacaagcugcugagagccaugcagcugaacgaggaggcccugaccaagaccaacaucuga

SEQ ID NO: 3176 - RNA, 1755 nt, Artificial Sequence
  derived and/or modified sequence opt5 from POTE__Homo_sapiens__CCDS13562.1
augguggccgaggucugcagcaugcccaccgcuuccacaguuaagaaaccuuucgaccugagaucuaagaugggcaaauggugucaccaucgguuuccgugcugucgcgggagcggaaaguccaacaugggcacgucuggggaucacgacgauagcuucaugaaaaugcucagauccaagaugggaaagugcugucggcauugcuuucccuguugccgcggcucugggaccagcaaugugggaacauccggcgaccacgaaaacagcuucaugaaaaugcugagaucuaagaugggcaaaugguguugccauuguuuuccuugcugccggggguccggaaagagcaaugugggcgccuggggagauuacgaccacucugcguucauggagccccgcuaucacaucagacgggaagaucuugacaaacugcaucgcgcugccuggugggggaaggucccuagaaaggaucucauugugaugcugcgggacaccgauaugaacaaacgcgacaaggagaaaagaacagcccuucaccuggcuuccgccaauggcaacagcgaaguugugcagcuccugcuggaucggcgcugucaacucaauguccuggacaacaagaaaagaaccgcucuuaucaaggccauucagugccaggaggacgagugugugcugaugcuccuggaacauggggcggaucggaauauccccgacgaguacggaaacacagcccuucacuaugcuauuuacaaugaagauaaacugauggccaaggcucuccugcuguauggcgccgacaucgagucuaagaacaaaugcggccucaccccucugcuucuggggguucacgagcagaagcaacagguggucaaauuucucaucaagaaaaaggcgaaucugaacgugcuugauagauacggacgcacggcccugauucucgcuguguguugcggcuccgccagcaucgucaaucugcugcucgaacagaacguugacguguccucucaggaucugagcgggcaaaccgcucgggaguaugccguguccagccaucaccaugucauuugugaacuucugucugacuacaaggagaaacagaugcucaagaucuccagcgaaaacucuaauccggagcaggaucugaaacuuacaagcgaggaagagucccagagacugaaggugucugaaaacagccaacccgagaaaaugucccaggaaccugagauuaauaaggacugcgaucgcgagguugaagaggaaaucaagaaacacggaagcaaccccgugggccucccugagaaucugaccaacggggccucugcuggaaauggcgacgacggccugauuccccagcggagaucccgcaagccggaaaaccaacaguucccugauacagagaaugaggaauaccauagcgacgagcagaacgauacccggaaacagcucucugaagaacaaaauacggggaucucccaggacgagauccugacaaacaagcagaaacagauugaagucgcggagcaaaagaugaauagcgaacuuucccugucucacaagaaagaggaagaucuccugagagagaacagcgugcugcaggaggaaaucgccaugcuucgccucgagcuggacgaaaccaagcaccagaaucagcugcgggagaacaaaauucucgaagagaucgaguccguuaaggagaaaacagauaagcugcuuagagcuaugcaacugaacgaggaagcccucaccaaaaccaauauuuga

SEQ ID NO: 3177 - protein, 509 aa, Artificial Sequence
  PRAME__Homo_sapiens__A0A024R1E6
MERRRLWGSIQSRYISMSVWTSPRRLVELAGQSLLKDEALAIAALELLPRELFPPLFMAAFDGRHSQTLKAMVQAWPFTCLPLGVLMKGQHLHLETFKAVLDGLDVLLAQEVRPRRWKLQVLDLRKNSHQDFWTVWSGNRASLYSFPEPEAAQPMTKKRKVDGLSTEAEQPFIPVEVLVDLFLKEGACDELFSYLIEKVKRKKNVLRLCCKKLKIFAMPMQDIKMILKMVQLDSIEDLEVTCTWKLPTLAKFSPYLGQMINLRRLLLSHIHASSYISPEKEEQYIAQFTSQFLSLQCLQALYVDSLFFLRGRLDQLLRHVMNPLETLSITNCRLSEGDVMHLSQSPSVSQLSVLSLSGVMLTDVSPEPLQALLERASATLQDLVFDECGITDDQLLALLPSLSHCSQLTTLSFYGNSISISALQSLLQHLIGLSNLTHVLYPVPLESYEDIHGTLHLERLAYLHARLRELLCELGRPSMVWLSANPCPHCGDRTFYDPEPILCPCFMPN

SEQ ID NO: 3178 - RNA, 1530 nt, Artificial Sequence
  PRAME__Homo_sapiens__EAW59519
auggaacgaaggcguuugugggguuccauucagagccgauacaucagcaugaguguguggacaagcccacggagacuuguggagcuggcagggcagagccugcugaaggaugaggcccuggccauugccgcccuggaguugcugcccagggagcucuucccgccacucuucauggcagccuuugacgggagacacagccagacccugaaggcaauggugcaggccuggcccuucaccugccucccucugggagugcugaugaagggacaacaucuucaccuggagaccuucaaagcugugcuugauggacuugaugugcuccuugcccaggagguucgccccaggagguggaaacuucaagugcuggauuuacggaagaacucucaucaggacuucuggacuguauggucuggaaacagggccagucuguacucauuuccagagccagaagcagcucagcccaugacaaagaagcgaaaaguagaugguuugagcacagaggcagagcagcccuucauuccaguagaggugcucguagaccuguuccucaaggaaggugccugugaugaauuguucuccuaccucauugagaaagugaagcgaaagaaaaauguacuacgccugugcuguaagaagcugaagauuuuugcaaugcccaugcaggauaucaagaugauccugaaaauggugcagcuggacucuauugaagauuuggaagugacuuguaccuggaagcuacccaccuuggcgaaauuuucuccuuaccugggccagaugauuaaucugcguagacuccuccucucccacauccaugcaucuuccuacauuuccccggagaaggaagagcaguauaucgcccaguucaccucucaguuccucagucugcagugccugcaggcucucuauguggacucuuuauuuuuccuuagaggccgccuggaucaguugcucaggcacgugaugaaccccuuggaaacccucucaauaacuaacugccggcuuucggaaggggaugugaugcaucugucccagagucccagcgucagucagcuaaguguccugagucuaaguggggucaugcugaccgauguaagucccgagccccuccaagcucugcuggagagagccucugccacccuccaggaccuggucuuugaugagugugggaucacggaugaucagcuccuugcccuccugccuucccugagccacugcucccagcuuacaaccuuaagcuucuacgggaauuccaucuccauaucugccuugcagagucuccugcagcaccucaucgggcugagcaaucugacccacgugcuguauccugucccccuggagaguuaugaggacauccaugguacccuccaccuggagaggcuugccuaucugcaugccaggcucagggaguugcugugugaguuggggcggcccagcauggucuggcuuagugccaaccccuguccucacuguggggacagaaccuucuaugacccggagcccauccugugccccuguuucaugccuaacuag

SEQ ID NO: 3179 - RNA, 1530 nt, Artificial Sequence
  derived and/or modified sequence opt1 from PRAME__Homo_sapiens__EAW59519
auggagcgccggcgccuguggggcagcauccagucccgguacaucagcauguccguguggaccagcccccgccggcucgucgagcuggccgggcagucccugcucaaggacgaggcccuggcgaucgccgcccuggagcuccugccgcgcgagcuguucccgccccucuucauggccgccuucgacggccggcacagccagacccugaaggcgauggugcaggccuggcccuucacgugccugccccucggggugcugaugaagggccagcaccuccaccuggagaccuucaaggccguccuggacgggcuggacgugcuccuggcccaggaggugcgcccccggcgcuggaagcugcagguccucgaccugcggaagaacucccaccaggacuucuggaccguguggagcggcaaccgcgcgucccuguacagcuuccccgagcccgaggccgcccagccgaugaccaagaagcggaagguggacggccucuccacggaggccgagcagcccuucauccccgucgaggugcugguggaccuguuccucaaggagggggccugcgacgagcuguucagcuaccugaucgagaaggucaagcgcaagaagaacgugcuccggcugugcugcaagaagcugaagaucuucgcgaugcccaugcaggacaucaagaugauccucaagauggugcagcuggacuccaucgaggaccuggaggugaccugcaccuggaagcucccgacccuggccaaguucagccccuaccugggccagaugaucaaccuccgccggcugcugcucucccacauccacgccagcuccuacaucagccccgagaaggaggagcaguacaucgcccaguucacgucccaguuccugagccugcagugccuccaggcccuguacgucgacagccuguucuuccuccgcgggcggcuggaccagcugcugcgccacgugaugaacccccucgagacccuguccaucaccaacugccggcugagcgagggcgacgucaugcaccucucccagagcccguccgugagccagcuguccgugcugagccucuccggggucaugcugaccgacgugagccccgagccccugcaggcgcuccuggagcgcgccuccgccacgcugcaggaccucguguucgacgagugcggcaucaccgacgaccagcugcuggcccuccugcccagccugucccacugcagccagcucaccacccuguccuucuacggcaacagcaucuccaucagcgcccugcagucccuccugcagcaccugaucgggcucagcaaccugacgcacguccuguacccggugccccucgagagcuacgaggacauccacggcacccugcaccuggagcgccucgcguaccugcacgcccggcugcgcgagcuccugugcgagcuggggcggcccuccauggucuggcucagcgccaaccccugcccgcacugcggcgaccgcaccuucuacgaccccgagcccauccugugccccugcuucaugccgaacuga

SEQ ID NO: 3180 - RNA, 1530 nt, Artificial Sequence
  derived and/or modified sequence opt2 from PRAME__Homo_sapiens__EAW59519
auggagcgccgccgccucuggggcuccauccagucccgcuacaucuccauguccgucuggaccuccccccgccgccucgucgagcucgccggccagucccuccucaaggacgaggcccucgccaucgccgcccucgagcuccucccccgcgagcucuuccccccccucuucauggccgccuucgacggccgccacucccagacccucaaggccaugguccaggccuggcccuucaccugccucccccucggcguccucaugaagggccagcaccuccaccucgagaccuucaaggccguccucgacggccucgacguccuccucgcccaggagguccgcccccgccgcuggaagcuccagguccucgaccuccgcaagaacucccaccaggacuucuggaccgucugguccggcaaccgcgccucccucuacuccuuccccgagcccgaggccgcccagcccaugaccaagaagcgcaaggucgacggccucuccaccgaggccgagcagcccuucauccccgucgagguccucgucgaccucuuccucaaggagggcgccugcgacgagcucuucuccuaccucaucgagaaggucaagcgcaagaagaacguccuccgccucugcugcaagaagcucaagaucuucgccaugcccaugcaggacaucaagaugauccucaagaugguccagcucgacuccaucgaggaccucgaggucaccugcaccuggaagcuccccacccucgccaaguucucccccuaccucggccagaugaucaaccuccgccgccuccuccucucccacauccacgccuccuccuacaucucccccgagaaggaggagcaguacaucgcccaguucaccucccaguuccucucccuccagugccuccaggcccucuacgucgacucccucuucuuccuccgcggccgccucgaccagcuccuccgccacgucaugaacccccucgagacccucuccaucaccaacugccgccucuccgagggcgacgucaugcaccucucccagucccccuccgucucccagcucuccguccucucccucuccggcgucaugcucaccgacgucucccccgagccccuccaggcccuccucgagcgcgccuccgccacccuccaggaccucgucuucgacgagugcggcaucaccgacgaccagcuccucgcccuccuccccucccucucccacugcucccagcucaccacccucuccuucuacggcaacuccaucuccaucuccgcccuccagucccuccuccagcaccucaucggccucuccaaccucacccacguccucuaccccgucccccucgaguccuacgaggacauccacggcacccuccaccucgagcgccucgccuaccuccacgcccgccuccgcgagcuccucugcgagcucggccgccccuccauggucuggcucuccgccaaccccugcccccacugcggcgaccgcaccuucuacgaccccgagcccauccucugccccugcuucaugcccaacuga

SEQ ID NO: 3181 - RNA, 1530 nt, Artificial Sequence
  derived and/or modified sequence opt3 from PRAME__Homo_sapiens__EAW59519
auggagagaaggcggcuguggggcagcauccagucccgcuacauuucuaugucaguguggaccaguccccgacgucucgucgaacuugccgggcaaagccuguugaaggacgaggcuuuagcaauagccgcgcuggaacuacucccuagagagcuguucccaccgcuuuuuauggcugccuucgauggaaggcacucccagacacugaaagcaaugguucaggccuggcccuuuacuugcuugccucucggugugcugaugaagggccagcaucugcaccucgaaacguucaaagcuguauuagacgggcuggaugugcuuuuggcacaagagguccggccacgcagauggaagcuacaggugcuggaccucaggaaaaacucucaucaggauuuuuggaccguuuggucgggaaaucgggccucacuguauagcuuccccgagccugaagcugcccagccaaugacaaagaagcgcaaaguggacggccuuaguacugaggcggaacaacccuuuaucccugucgaggugcugguagauuuguuccucaaggagggugcaugugacgaacuguuuuccuacuuaauugagaaaguuaagcgaaagaaaaacgugcugagacucugcuguaagaaacuuaagaucuucgccaugccaaugcaggauauuaaaaugauccugaagaugguccaguuggacucuauagaagaucuagaggugaccugcacauggaaacugccgacccucgcuaaguuuagccccuaucuggggcagaugaucaaucuuaggcggcuguugcucucccacauucaugccucaaguuacaucagcccugaaaaagaggagcaauauauugcacaguucacuucucaguuucuguccuuacaaugucugcaggcucuauacguggacucacucuucuuccugcguggacgccuugaucaguugcugagacacgucaugaacccacucgaaacacugagcaucaccaauugcaggcuuagugagggcgacguuaugcaccugucucagucccccagcgugucgcaauugucuguacucucccugucaggcgugauguuaacggacgucaguccugaaccacugcaggcccuacucgagcgggcgagcgccacucugcaggaucuuguguuugacgaaugugggauaaccgaugaccaguugcuggcacuccugcccuccuuaucucauugcagccaacugacaacucuuucauucuauggaaacaguauuuccaucagcgcuuugcagucucuccugcagcaccuaauuggucugucaaaucucacccauguucuguacccggugccucuugagaguuacgaggauauccacggcacauugcaccuggaacgauuagccuaucuccaugcucgccugagagagcuucugugugaauuggggaggcccagcauggucuggcucuccgccaacccaugcccucacuguggagaccggaccuuuuacgaucccgagccaauccugugccccugcuucaugccuaauuga

SEQ ID NO: 3182 - RNA, 1530 nt, Artificial Sequence
  derived and/or modified sequence opt4 from PRAME__Homo_sapiens__EAW59519
auggagagaagaagacuguggggcagcauccagagcagauacaucagcaugagcguguggaccagccccagaagacugguggagcuggccggccagagccugcugaaggacgaggcccuggccaucgccgcccuggagcugcugcccagagagcuguuccccccccuguucauggccgccuucgacggcagacacagccagacccugaaggccauggugcaggccuggcccuucaccugccugccccugggcgugcugaugaagggccagcaccugcaccuggagaccuucaaggccgugcuggacggccuggacgugcugcuggcccaggaggugagacccagaagauggaagcugcaggugcuggaccugagaaagaacagccaccaggacuucuggaccguguggagcggcaacagagccagccuguacagcuuccccgagcccgaggccgcccagcccaugaccaagaagagaaagguggacggccugagcaccgaggccgagcagcccuucauccccguggaggugcugguggaccuguuccugaaggagggcgccugcgacgagcuguucagcuaccugaucgagaaggugaagagaaagaagaacgugcugagacugugcugcaagaagcugaagaucuucgccaugcccaugcaggacaucaagaugauccugaagauggugcagcuggacagcaucgaggaccuggaggugaccugcaccuggaagcugcccacccuggccaaguucagccccuaccugggccagaugaucaaccugagaagacugcugcugagccacauccacgccagcagcuacaucagccccgagaaggaggagcaguacaucgcccaguucaccagccaguuccugagccugcagugccugcaggcccuguacguggacagccuguucuuccugagaggcagacuggaccagcugcugagacacgugaugaacccccuggagacccugagcaucaccaacugcagacugagcgagggcgacgugaugcaccugagccagagccccagcgugagccagcugagcgugcugagccugagcggcgugaugcugaccgacgugagccccgagccccugcaggcccugcuggagagagccagcgccacccugcaggaccugguguucgacgagugcggcaucaccgacgaccagcugcuggcccugcugcccagccugagccacugcagccagcugaccacccugagcuucuacggcaacagcaucagcaucagcgcccugcagagccugcugcagcaccugaucggccugagcaaccugacccacgugcuguaccccgugccccuggagagcuacgaggacauccacggcacccugcaccuggagagacuggccuaccugcacgccagacugagagagcugcugugcgagcugggcagacccagcaugguguggcugagcgccaaccccugcccccacugcggcgacagaaccuucuacgaccccgagcccauccugugccccugcuucaugcccaacuga

SEQ ID NO: 3183 - RNA, 1530 nt, Artificial Sequence
  derived and/or modified sequence opt5 from PRAME__Homo_sapiens__EAW59519
auggagagacggcgccuguggggcagcauccaguccagauacauuucuaugagcguguggaccucuccccggcgccucgucgaacuggccgggcaaucccuucugaaggacgaggcucucgccaucgcggcucuggaacuucugccuagagagcuuuucccgccccuguuuauggccgccuucgauggacggcacagccagacacugaaagcuaugguucaggccuggccuuuuacgugccucccccugggcgugcuuaugaaggggcagcaucugcaccucgaaaccuucaaagcugugcuggacggacuugauguccugcucgcccaagaggugcgcccuagacgguggaagcugcagguucuggaccuccgcaaaaacucccaucaggauuuuuggacaguguggucuggcaauagagcgagccuguauuccuuccccgagccugaagccgcucagccgaugaccaagaagcggaaagucgacgggcuuagcacagaggccgaacaacccuuuauuccuguggagguucugguggaucucuuccugaaggagggagcuugugacgaacucuuuucuuaccugaucgagaaagucaagcgcaaaaagaacgugcucagacugugcuguaagaaacugaagauuuucgccaugcccaugcaggauaucaaaaugauccucaagauggugcagcuggacuccauugaagaucuugagguuaccugcacauggaaacugccuacccucgcgaaguuuagccccuaucugggccagaugaucaaucuucggcgccugcuccugucucacauucaugccuccagcuacaucucuccggaaaaagaggagcaauauauugcucaguucacgucccaguuucugagccuccaaugucugcaggcccuuuacgucgacucccuguucuuccucagaggccggcuggaucagcugcuuagacacgugaugaacccucucgaaacccugucuaucacaaauugccgccugagcgagggggacgugaugcaccucucccagagccccucugucucccaacugagcgugcuuucucugagcggaguuaugcucaccgacguguccccugaaccccugcaggcucugcuugagcgggccucugccacacuccaggaucuggucuuugacgaauguggcauuaccgaugaccagcugcucgcucugcuucccagccugucccauugcagccaacucacgacacugucuuucuaugggaacuccaucagcaucucugcgcugcagucccuucuccagcaccugauuggacugagcaaucucacccaugugcuguacccuguuccgcuugaguccuacgaggauauccacggcacacugcaccucgaaagacuggccuaucugcaugcucgccuucgggagcuccugugugaacuggggagacccucuaugguguggcucagcgccaacccuugcccccacuguggagaccgcaccuuuuacgauccugagcccauucugugcccgugcuucaugccuaauuga

SEQ ID NO: 3184 - protein, 509 aa, Artificial Sequence; identical to SEQ ID NO: 3177
  PRAME__Homo_sapiens__P78395

SEQ ID NO: 3185 - RNA, 1530 nt, Artificial Sequence; identical to SEQ ID NO: 3178
  PRAME__Homo_sapiens__AAC51160

SEQ ID NO: 3186 - RNA, 1530 nt, Artificial Sequence; identical to SEQ ID NO: 3179
  derived and/or modified sequence opt1 from PRAME__Homo_sapiens__AAC51160

SEQ ID NO: 3187 - RNA, 1530 nt, Artificial Sequence; identical to SEQ ID NO: 3180
  derived and/or modified sequence opt2 from PRAME__Homo_sapiens__AAC51160

SEQ ID NO: 3188 - RNA, 1530 nt, Artificial Sequence; identical to SEQ ID NO: 3181
  derived and/or modified sequence opt3 from PRAME__Homo_sapiens__AAC51160

SEQ ID NO: 3189 - RNA, 1530 nt, Artificial Sequence; identical to SEQ ID NO: 3182
  derived and/or modified sequence opt4 from PRAME__Homo_sapiens__AAC51160

SEQ ID NO: 3190 - RNA, 1530 nt, Artificial Sequence; identical to SEQ ID NO: 3183
  derived and/or modified sequence opt5 from PRAME__Homo_sapiens__AAC51160

SEQ ID NO: 3191 - protein, 214 aa, Artificial Sequence
  PRDX5/m__Homo_sapiens__P30044
MGLAGVCALRRSAGYILVGGAGGQSAAAAARRYSEGEWASGGVRSFSRAAAAMAPIKVGDAIPAVEVFEGEPGNKVNLAELFKGKKGVLFGVPGAFTPGCSKTHLPGFVEQAEALKAKGVQVVACLSVNDAFVTGEWGRAHKAEGKVRLLADPTGAFGKETDLLLDDSLVSIFGNRRLKRFSMVVQDGIVKALNVEPDGTGLTCSLAPNIISQL

SEQ ID NO: 3192 - RNA, 645 nt, Artificial Sequence
  PRDX5/m__Homo_sapiens__CCDS8069.1
augggacuagcuggcgugugcgcccugagacgcucagcgggcuauauacucgucgguggggccggcggucagucugcggcagcggcagcaagacgguacagugaaggagagugggcgucuggcgggguccgcaguuucagcagagccgcugcagccauggccccaaucaaggugggagaugccaucccagcaguggagguguuugaaggggagccagggaacaaggugaaccuggcagagcuguucaagggcaagaagggugugcuguuuggaguuccuggggccuucaccccuggauguuccaagacacaccugccaggguuuguggagcaggcugaggcucugaaggccaagggaguccaggugguggccugucugaguguuaaugaugccuuugugacuggcgaguggggccgagcccacaaggcggaaggcaagguucggcuccuggcugaucccacuggggccuuugggaaggagacagacuuauuacuagaugauucgcugguguccaucuuugggaaucgacgucucaagagguucuccauggugguacaggauggcauagugaaggcccugaauguggaaccagauggcacaggccucaccugcagccuggcacccaauaucaucucacagcucuga

SEQ ID NO: 3193 - RNA, 645 nt, Artificial Sequence
  derived and/or modified sequence opt1 from PRDX5/m__Homo_sapiens__CCDS8069.1
augggccuggccggggugugcgcccuccgccggagcgcgggcuacauccuggucgggggcgccgggggccaguccgccgccgccgcggcccgccgguacagcgagggcgagugggccuccgggggcgugcgcagcuucucccgggccgcggccgccauggcccccaucaaggugggggacgccaucccggcggucgagguguucgagggcgagcccgggaacaaggugaaccuggccgagcuguucaagggcaagaagggcguccuguucggggugcccggcgccuucacccccgggugcagcaagacccaccucccgggcuucguggagcaggccgaggcccucaaggcgaagggcguccaggugguggccugccuguccgucaacgacgccuucgugacgggggaguggggccgcgcccacaaggccgaggggaaggugcggcugcucgcggaccccaccggcgccuucgggaaggagaccgaccugcugcucgacgacagccuggucuccaucuucggcaaccgccggcugaagcgcuucagcaugguggugcaggacggcaucgucaaggcccucaacguggagcccgacgggaccggccugacgugcucccuggcccccaacaucaucagccagcucuga

SEQ ID NO: 3194 - RNA, 645 nt, Artificial Sequence
  derived and/or modified sequence opt2 from PRDX5/m__Homo_sapiens__CCDS8069.1
augggccucgccggcgucugcgcccuccgccgcuccgccggcuacauccucgucggcggcgccggcggccaguccgccgccgccgccgcccgccgcuacuccgagggcgagugggccuccggcggcguccgcuccuucucccgcgccgccgccgccauggcccccaucaaggucggcgacgccauccccgccgucgaggucuucgagggcgagcccggcaacaaggucaaccucgccgagcucuucaagggcaagaagggcguccucuucggcguccccggcgccuucacccccggcugcuccaagacccaccuccccggcuucgucgagcaggccgaggcccucaaggccaagggcguccaggucgucgccugccucuccgucaacgacgccuucgucaccggcgaguggggccgcgcccacaaggccgagggcaagguccgccuccucgccgaccccaccggcgccuucggcaaggagaccgaccuccuccucgacgacucccucgucuccaucuucggcaaccgccgccucaagcgcuucuccauggucguccaggacggcaucgucaaggcccucaacgucgagcccgacggcaccggccucaccugcucccucgcccccaacaucaucucccagcucuga

SEQ ID NO: 3195 - RNA, 645 nt, Artificial Sequence
  derived and/or modified sequence opt3 from PRDX5/m__Homo_sapiens__CCDS8069.1
augggccuggccggggugugcgcucucagaaggagcgcaggauacauccuugucgguggcgccgggggacaguccgcggcugccgcagcccggcgcuauucugagggcgaaugggcuucaggugggguucgaaguuucagccgugcagccgcugccauggcgcccauuaaggugggagacgcaauaccugccguagagguguuugaaggcgagccaggcaacaaagucaaucuggcugaauuguucaaggggaaaaagggaguguuauuugguguuccgggcgccuucacccccggguguuccaaaacacaucugccuggauuuguggagcaagcagaggcucuaaaggccaagggcguccaggugguagcgugccucucuguuaacgaugccuucgugacuggugaaugggggagagcacacaaagcugagggaaaggucaggcugcuugccgacccaacgggcgcuuuuggcaaagaaaccgaucuguugcucgacgauucgcuggugucaaucuucgggaaucggcgccugaagagauuuagcauggugguccaggacggaauuguuaaagcccucaacguggagcccgaugguacaggcuuaacuuguagucuggcaccuaauaucauuucccagcuuuga

SEQ ID NO: 3196 - RNA, 645 nt, Artificial Sequence
  derived and/or modified sequence opt4 from PRDX5/m__Homo_sapiens__CCDS8069.1
augggccuggccggcgugugcgcccugagaagaagcgccggcuacauccuggugggcggcgccggcggccagagcgccgccgccgccgccagaagauacagcgagggcgagugggccagcggcggcgugagaagcuucagcagagccgccgccgccauggcccccaucaaggugggcgacgccauccccgccguggagguguucgagggcgagcccggcaacaaggugaaccuggccgagcuguucaagggcaagaagggcgugcuguucggcgugcccggcgccuucacccccggcugcagcaagacccaccugcccggcuucguggagcaggccgaggcccugaaggccaagggcgugcaggugguggccugccugagcgugaacgacgccuucgugaccggcgaguggggcagagcccacaaggccgagggcaaggugagacugcuggccgaccccaccggcgccuucggcaaggagaccgaccugcugcuggacgacagccuggugagcaucuucggcaacagaagacugaagagauucagcaugguggugcaggacggcaucgugaaggcccugaacguggagcccgacggcaccggccugaccugcagccuggcccccaacaucaucagccagcuguga

SEQ ID NO: 3197 - RNA, 645 nt, Artificial Sequence
  derived and/or modified sequence opt5 from PRDX5/m__Homo_sapiens__CCDS8069.1
augggccuggccggggugugcgcucucagacggagcgccggauacauccuggucggcggggcgggaggccaguccgcugccgccgcugcccgcagauauucugagggggaaugggcuagcggaggcguucgguccuucucucgcgccgcggccgcuauggcccccauuaaggugggcgacgcuaucccugccguggaggucuuugaaggggagccgggaaacaaagugaaucuugcggaacuguucaagggcaaaaaggggguucucuuuggagugcccggcgccuucaccccuggguguagcaaaacacaucugcccggauuugucgagcaagcugaggcccuuaaggcuaagggcgugcagguuguggccugccuguccgucaacgaugccuucgugacgggcgaaugggggagagcucacaaagcggagggaaaggugcggcuccuggccgacccuaccggcgcuuuugggaaagaaacagaucugcuccuggacgauucucuugucagcauuuucggaaaucgcagacugaagcgguuuuccaugguugugcaggacggcaucgugaaagcccucaacgucgagcccgaugggaccggacugacauguagccuugccccuaauauuaucucucagcuguga

SEQ ID NO: 3198 - protein, 102 aa, Artificial Sequence
  PRM2__Homo_sapiens__P04554
MVRYRVRSLSERSHEVYRQQLHGQEQGHHGQEEQGLSPEHVEVYERTHGQSHYRRRHCSRRRLHRIHRRQHRSCRRRKRRSCRHRRRHRRGCRTRKRTCRRH

SEQ ID NO: 3199 - RNA, 309 nt, Artificial Sequence
  PRM2__Homo_sapiens__AAA63250
augguccgauaccgcgugaggagccugagcgaacgcucgcacgagguguacaggcagcaguugcaugggcaagagcaaggacaccacggccaagaggagcaagggcugagcccggagcacgucgaggucuacgagaggacccauggccagucucacuauaggcgcagacacugcucucgaaggaggcugcaccggauccacaggcggcagcaucgcuccugcagaaggcgcaaaagacgcuccugcaggcaccggaggaggcaucgcagaggcugcagaaccaggaagagaacaugcagaaggcacuaa

SEQ ID NO: 3200 - RNA, 309 nt, Artificial Sequence
  derived and/or modified sequence opt1 from PRM2__Homo_sapiens__AAA63250
auggugcgcuaccggguccgcagccuguccgagcggagccacgagguguaccgccagcagcuccacggccaggagcaggggcaccacggccaggaggagcaggggcugucccccgagcacguggaggucuacgagcggacccacggccagagccacuaccgccggcgccacugcucccggcgccggcugcaccgcauccaccggcgccagcaccggagcugccgccggcgcaagcggcgcuccugccggcaccgccgccggcaccgccgggggugccgcacccggaagcgcacgugccggcgccacuga

SEQ ID NO: 3201 - RNA, 309 nt, Artificial Sequence
  derived and/or modified sequence opt2 from PRM2__Homo_sapiens__AAA63250
augguccgcuaccgcguccgcucccucuccgagcgcucccacgaggucuaccgccagcagcuccacggccaggagcagggccaccacggccaggaggagcagggccucucccccgagcacgucgaggucuacgagcgcacccacggccagucccacuaccgccgccgccacugcucccgccgccgccuccaccgcauccaccgccgccagcaccgcuccugccgccgccgcaagcgccgcuccugccgccaccgccgccgccaccgccgcggcugccgcacccgcaagcgcaccugccgccgccacuga

SEQ ID NO: 3202 - RNA, 309 nt, Artificial Sequence
  derived and/or modified sequence opt3 from PRM2__Homo_sapiens__AAA63250
auggugagauacaggguccggagccuguccgagcgcucucacgaaguuuaucgacagcaacuccauggccaggagcaggggcaccauggacaggaggaacaaggucuuucacccgaacacguggagguauacgagcguacccauggccagagucacuauagaaggcggcacugcagccgcagaaggcugcaucggauccaccgccgacagcauagauccuguaggcggcguaagcgcagaucuugcaggcaccggcgacgccacagaagggggugucggacacgcaaaagaacuugcaggcgucauuga

SEQ ID NO: 3203 - RNA, 309 nt, Artificial Sequence
  derived and/or modified sequence opt4 from PRM2__Homo_sapiens__AAA63250
auggugagauacagagugagaagccugagcgagagaagccacgagguguacagacagcagcugcacggccaggagcagggccaccacggccaggaggagcagggccugagccccgagcacguggagguguacgagagaacccacggccagagccacuacagaagaagacacugcagcagaagaagacugcacagaauccacagaagacagcacagaagcugcagaagaagaaagagaagaagcugcagacacagaagaagacacagaagaggcugcagaaccagaaagagaaccugcagaagacacuga

SEQ ID NO: 3204 - RNA, 309 nt, Artificial Sequence
  derived and/or modified sequence opt5 from PRM2__Homo_sapiens__AAA63250
auggugagauaccggguccgcagccuguccgagagaucucacgaaguuuaucggcagcaacuccauggccaggagcaggggcaccauggacaggaggaacaaggccugagccccgaacacguggagguguacgagcgcacccaugggcagucccacuauagacggcgccacugcucuagacggcgccuucauagaauccaccggcgccagcauagaagcugucggcgcagaaagcggagauccugccgccaccggagacgccaccggagaggaugucgcacacggaaaagaacgugccgccggcauuga

SEQ ID NO: 3205 - protein, 553 aa, Artificial Sequence
  prostein__Homo_sapiens__Q96JT2
MVQRLWVSRLLRHRKAQLLLVNLLTFGLEVCLAAGITYVPPLLLEVGVEEKFMTMVLGIGPVLGLVCVPLLGSASDHWRGRYGRRRPFIWALSLGILLSLFLIPRAGWLAGLLCPDPRPLELALLILGVGLLDFCGQVCFTPLEALLSDLFRDPDHCRQAYSVYAFMISLGGCLGYLLPAIDWDTSALAPYLGTQEECLFGLLTLIFLTCVAATLLVAEEAALGPTEPAEGLSAPSLSPHCCPCRARLAFRNLGALLPRLHQLCCRMPRTLRRLFVAELCSWMALMTFTLFYTDFVGEGLYQGVPRAEPGTEARRHYDEGVRMGSLGLFLQCAISLVFSLVMDRLVQRFGTRAVYLASVAAFPVAAGATCLSHSVAVVTASAALTGFTFSALQILPYTLASLYHREKQVFLPKYRGDTGGASSEDSLMTSFLPGPKPGAPFPNGHVGAGGSGLLPPPPALCGASACDVSVRVVVGEPTEARVVPGRGICLDLAILDSAFLLSQVAPSLFMGSIVQLSQSVTAYMVSAAGLGLVAIYFATQVVFDKSDLAKYSA

SEQ ID NO: 3206 - RNA, 1662 nt, Artificial Sequence
  prostein__Homo_sapiens__AAH50416
augguccagaggcugugggugagccgccugcugcggcaccggaaagcccagcucuugcuggucaaccugcuaaccuuuggccuggagguguguuuggccgcaggcaucaccuaugugccgccucugcugcuggaaguggggguagaggagaaguucaugaccauggugcugggcauugguccagugcugggccuggucugugucccgcuccuaggcucagccagugaccacuggcguggacgcuauggccgccgccggcccuucaucugggcacuguccuugggcauccugcugagccucuuucucaucccaagggccggcuggcuagcagggcugcugugcccggaucccaggccccuggagcuggcacugcucauccugggcguggggcugcuggacuucuguggccaggugugcuucacuccacuggaggcccugcucucugaccucuuccgggacccggaccacugucgccaggccuacucugucuaugccuucaugaucagucuugggggcugccugggcuaccuccugccugccauugacugggacaccagugcccuggcccccuaccugggcacccaggaggagugccucuuuggccugcucacccucaucuuccucaccugcguagcagccacacugcugguggcugaggaggcagcgcugggccccaccgagccagcagaagggcugucggcccccuccuugucgccccacugcuguccaugccgggcccgcuuggcuuuccggaaccugggcgcccugcuuccccggcugcaccagcugugcugccgcaugccccgcacccugcgccggcucuucguggcugagcugugcagcuggauggcacucaugaccuucacgcuguuuuacacggauuucgugggcgaggggcuguaccagggcgugcccagagcugagccgggcaccgaggcccggagacacuaugaugaaggcguucggaugggcagccuggggcuguuccugcagugcgccaucucccuggucuucucucuggucauggaccggcuggugcagcgauucggcacucgagcagucuauuuggccaguguggcagcuuucccuguggcugccggugccacaugccugucccacaguguggccguggugacagcuucagccgcccucaccggguucaccuucucagcccugcagauccugcccuacacacuggccucccucuaccaccgggagaagcagguguuccugcccaaauaccgaggggacacuggaggugcuagcagugaggacagccugaugaccagcuuccugccaggcccuaagccuggagcucccuucccuaauggacacgugggugcuggaggcaguggccugcucccaccuccacccgcgcucugcggggccucugccugugaugucuccguacgugugguggugggugagcccaccgaggccagggugguuccgggccggggcaucugccuggaccucgccauccuggauagugccuuccugcugucccagguggccccaucccuguuuaugggcuccauuguccagcucagccagucugucacugccuauauggugucugccgcaggccugggucuggucgccauuuacuuugcuacacagguaguauuugacaagagcgacuuggccaaauacucagcguag

SEQ ID NO: 3207 - RNA, 1662 nt, Artificial Sequence
  derived and/or modified sequence opt1 from prostein__Homo_sapiens__AAH50416
auggugcagcgccugugggucagccggcuccugcgccaccggaaggcccagcugcuccuggugaaccugcucaccuucggccuggaggugugccuggccgcggggaucaccuacgugcccccgcuccugcuggaggugggcguggaggagaaguucaugacgaugguccucgggaucggccccgugcuggggcuggugugcgucccccuccugggcuccgccagcgaccacuggcgcggccgguacgggcgccggcgccccuucaucugggcccugucccucggcauccugcugagccucuuccugaucccgcgggccggguggcuggccggccuccugugccccgacccccgcccccuggagcucgcgcugcugauccucggggugggccugcuggacuucugcggccaggugugcuucaccccgcucgaggcccugcuguccgaccucuuccgggaccccgaccacugccgccaggccuacagcgucuacgccuucaugaucucccucgggggcugccugggguaccugcugcccgcgaucgacugggacaccagcgcccuggcccccuaccucggcacccaggaggagugccuguucggccugcucacgcugaucuuccugaccugcguggccgccacccuccugguggcggaggaggccgcccuggggcccaccgagcccgccgagggccuguccgcccccagccucagcccccacugcugcccgugccgggcgcgccuggccuuccggaaccugggggcccuccugccccgccugcaccagcucugcugccggaugccccgcacgcugcggcgccuguucgucgccgagcucugcuccuggauggcccugaugaccuucacccuguucuacaccgacuucgugggcgaggggcucuaccagggcgugccccgggcggagccgggcacggaggcccgccgccacuacgacgaggggguccggaugggcucccuggggcuguuccuccagugcgccaucagccugguguucucccuggugauggaccgccucguccagcgguucggcacccgcgccguguaccuggccagcguggcggccuuccccgucgccgccggggcgaccugccugucccacagcguggccgucgugaccgccuccgccgcccucacgggcuucaccuucagcgcgcugcagauccugcccuacacccucgccagccuguaccaccgggagaagcaggucuuccugcccaaguaccgcggcgacaccgggggcgccuccagcgaggacucccucaugacgagcuuccugccggggcccaagcccggcgcccccuucccgaacgggcacgucggcgccggcggguccggccugcucccgccgccgcccgcgcugugcggggccagcgccugcgacguguccgugcgggucguggugggcgagcccaccgaggcccgcgucgugcccggccgggggaucugccuggaccucgccauccuggacagcgcguuccugcucucccagguggcccccagccuguucaugggcuccaucguccagcugagccaguccgugaccgccuacauggugagcgccgcggggcucggccuggucgccaucuacuucgccacccaggugguguucgacaaguccgaccuggccaaguacagcgccuga

SEQ ID NO: 3208 - RNA, 1662 nt, Artificial Sequence
  derived and/or modified sequence opt2 from prostein__Homo_sapiens__AAH50416
augguccagcgccucugggucucccgccuccuccgccaccgcaaggcccagcuccuccucgucaaccuccucaccuucggccucgaggucugccucgccgccggcaucaccuacguccccccccuccuccucgaggucggcgucgaggagaaguucaugaccaugguccucggcaucggccccguccucggccucgucugcgucccccuccucggcuccgccuccgaccacuggcgcggccgcuacggccgccgccgccccuucaucugggcccucucccucggcauccuccucucccucuuccucaucccccgcgccggcuggcucgccggccuccucugccccgacccccgcccccucgagcucgcccuccucauccucggcgucggccuccucgacuucugcggccaggucugcuucaccccccucgaggcccuccucuccgaccucuuccgcgaccccgaccacugccgccaggccuacuccgucuacgccuucaugaucucccucggcggcugccucggcuaccuccuccccgccaucgacugggacaccuccgcccucgcccccuaccucggcacccaggaggagugccucuucggccuccucacccucaucuuccucaccugcgucgccgccacccuccucgucgccgaggaggccgcccucggccccaccgagcccgccgagggccucuccgcccccucccucuccccccacugcugccccugccgcgcccgccucgccuuccgcaaccucggcgcccuccucccccgccuccaccagcucugcugccgcaugccccgcacccuccgccgccucuucgucgccgagcucugcuccuggauggcccucaugaccuucacccucuucuacaccgacuucgucggcgagggccucuaccagggcgucccccgcgccgagcccggcaccgaggcccgccgccacuacgacgagggcguccgcaugggcucccucggccucuuccuccagugcgccaucucccucgucuucucccucgucauggaccgccucguccagcgcuucggcacccgcgccgucuaccucgccuccgucgccgccuuccccgucgccgccggcgccaccugccucucccacuccgucgccgucgucaccgccuccgccgcccucaccggcuucaccuucuccgcccuccagauccuccccuacacccucgccucccucuaccaccgcgagaagcaggucuuccuccccaaguaccgcggcgacaccggcggcgccuccuccgaggacucccucaugaccuccuuccuccccggccccaagcccggcgcccccuuccccaacggccacgucggcgccggcggcuccggccuccucccccccccccccgcccucugcggcgccuccgccugcgacgucuccguccgcgucgucgucggcgagcccaccgaggcccgcgucguccccggccgcggcaucugccucgaccucgccauccucgacuccgccuuccuccucucccaggucgcccccucccucuucaugggcuccaucguccagcucucccaguccgucaccgccuacauggucuccgccgccggccucggccucgucgccaucuacuucgccacccaggucgucuucgacaaguccgaccucgccaaguacuccgccuga

SEQ ID NO: 3209 - RNA, 1662 nt, Artificial Sequence
  derived and/or modified sequence opt3 from prostein__Homo_sapiens__AAH50416
auggugcagagacugugggucagcaggcuccuucggcaccgcaaggcccaacuguuguuaguuaaccugcuaaccuucggccucgaggugugccuggcugcagggaucacauacguacccccucuucuguuggaagugggagucgaggaaaaauuuaugacuauggugcucgguauuggcccaguucuggggcuggugugugucccgcucuuaggauccgccucugaccauuggcgaggccguuaugguagaaggcggcccuucauaugggcgcugucacuugggaucuugcugagucuauuucucauuccucgcgcuggauggcuggccggccuucugugcccagaucccagaccuuuggagcucgcacuguuaauccugggcguggggcuccuugacuucuguggacagguaugcuuuacgccacuggaagccuugcuaagcgaucuguucagggaccccgaucacugucggcaggcuuacuccguuuaugcauuuaugauuucucucgguggcugccugggguaccuucugccugccaucgacugggauaccucggcuuuggccccauaucucggaacacaggaggagugucuguucggcuuacugacucuaauauuuuugaccugcguggcggcaacacugcuugucgccgaagaggcugccuuggguccgaccgaacccgcagaggggcugucagcuccuagccucaguccacauuguugccccugucgcgcccgacuggcguucagaaaucuuggagcccuguugccuaggcuccaccaacugugcugccggaugccacguacuuuacgcagacuguuuguggcagagcuauguuccuggauggcucucaugacauucacccuguuuuacacggacuucgugggcgaaggccuuuaucaggggguccccagggccgagccgggaacugaagcucggcgacauuacgaugaggguguucgcaugggcucuuuggggcuguuccuccagugcgccaucagccugguguuuuccuuaguaauggacagacuggugcagagguucggaacccgggcagucuaccuugccucaguggcugcguuuccuguugcagccggcgcuacauguuugagucacagcguggccgucgugacugcaucugccgcucucaccgguuucacauuuuccgcccugcaaauucuacccuauacccuggcaucacucuaccaccgcgaaaagcagguauuccugccaaaauauagaggggauacgggcggagcgagcagugaggacucucuuaugacuuccuuuuugccuggccccaagccaggggcucccuucccuaacggacauguuggugccggcgggagcggacuguuaccaccgcccccugcacucugcggcgccucggcuugugaugugucugucaggguggucgugggugagccaacagaagcccguguugugcccgggcggggcaucugccuggaccuugcaauucuggacuccgcuuuucuccucucacagguagccccuagucuguucaugggaagcaucguccagcuaucccaaucugugaccgcguacaugguuagcgccgcuggccuggggcucguggcaauauauuuugccacucaggucguguucgauaaaucagaccuggcuaaguacagugccuga

SEQ ID NO: 3210 - RNA, 1662 nt, Artificial Sequence
  derived and/or modified sequence opt4 from prostein__Homo_sapiens__AAH50416
auggugcagagacugugggugagcagacugcugagacacagaaaggcccagcugcugcuggugaaccugcugaccuucggccuggaggugugccuggccgccggcaucaccuacgugcccccccugcugcuggaggugggcguggaggagaaguucaugaccauggugcugggcaucggccccgugcugggccuggugugcgugccccugcugggcagcgccagcgaccacuggagaggcagauacggcagaagaagacccuucaucugggcccugagccugggcauccugcugagccuguuccugauccccagagccggcuggcuggccggccugcugugccccgaccccagaccccuggagcuggcccugcugauccugggcgugggccugcuggacuucugcggccaggugugcuucaccccccuggaggcccugcugagcgaccuguucagagaccccgaccacugcagacaggccuacagcguguacgccuucaugaucagccugggcggcugccugggcuaccugcugcccgccaucgacugggacaccagcgcccuggcccccuaccugggcacccaggaggagugccuguucggccugcugacccugaucuuccugaccugcguggccgccacccugcugguggccgaggaggccgcccugggccccaccgagcccgccgagggccugagcgcccccagccugagcccccacugcugccccugcagagccagacuggccuucagaaaccugggcgcccugcugcccagacugcaccagcugugcugcagaaugcccagaacccugagaagacuguucguggccgagcugugcagcuggauggcccugaugaccuucacccuguucuacaccgacuucgugggcgagggccuguaccagggcgugcccagagccgagcccggcaccgaggccagaagacacuacgacgagggcgugagaaugggcagccugggccuguuccugcagugcgccaucagccugguguucagccuggugauggacagacuggugcagagauucggcaccagagccguguaccuggccagcguggccgccuuccccguggccgccggcgccaccugccugagccacagcguggccguggugaccgccagcgccgcccugaccggcuucaccuucagcgcccugcagauccugcccuacacccuggccagccuguaccacagagagaagcagguguuccugcccaaguacagaggcgacaccggcggcgccagcagcgaggacagccugaugaccagcuuccugcccggccccaagcccggcgcccccuuccccaacggccacgugggcgccggcggcagcggccugcugccccccccccccgcccugugcggcgccagcgccugcgacgugagcgugagagugguggugggcgagcccaccgaggccagaguggugcccggcagaggcaucugccuggaccuggccauccuggacagcgccuuccugcugagccagguggcccccagccuguucaugggcagcaucgugcagcugagccagagcgugaccgccuacauggugagcgccgccggccugggccugguggccaucuacuucgccacccaggugguguucgacaagagcgaccuggccaaguacagcgccuga

SEQ ID NO: 3211 - RNA, 1662 nt, Artificial Sequence
  derived and/or modified sequence opt5 from prostein__Homo_sapiens__AAH50416
auggugcagagacugugggucagccggcuccugcgccacagaaaggcccaacuucugcucguuaaccugcuuaccuucggccuggaggugugccucgcugccgggaucacauacgugcccccucugcugcucgaagucggaguggaggaaaaauuuaugacgaugguucugggcauugggccggugcuuggacuggucugugugccccuccugggcuccgcgucugaccauuggcgggggcgcuauggaagacggcgcccuuucaucugggcucuuagccugggcauucuccugucccuguuucucauccccagagccggcuggcuggccgggcuucugugcccugauccccggccucucgagcuggcccuucugauucucggaguuggccugcuggacuucuguggacaggugugcuuuaccccgcucgaagcucugcuuucugaucuguuccgcgaccccgaucacuguagacaggcuuacagcgucuaugccuuuaugaucucccucgggggcugccugggguaccuucugccugcgaucgacugggauacaucugcccucgcucccuaucugggaacccaggaggagugucuguucggccuccugacacuuauuuuucugaccugcguggccgcuacacuccugguggccgaagaggcggcccugggcccuaccgaacccgcugaggggcuuagcgccccgucccucagcccucauuguugccccugucgggcucgccuggccuucagaaaucugggagcccuccugccucggcuucaccaacugugcugccgcaugcccagaacgcuccggagacuguuugucgcugagcuguguucuuggauggcgcuuaugaccuucacacucuuuuacaccgacuucguuggcgaagggcuguaucagggagugccccgcgccgagccuggcacagaagcucggagacauuacgaugagggggugcgcaugggaucccugggccucuuccugcagugcgccaucagccuugucuuuucucuggugauggaccggcucguucagagauucggcacccgcgccguguaccuggcuuccgucgccgcguuuccgguggcugccggggccacgugucugagccacucuguugcuguggucacagccuccgcugcccuuaccggauucacauuuagcgcgcuccaaauucugcccuauacccuggccucccucuaccaccgggaaaaacagguguuccugccuaaguauagaggcgauaccgggggagcuucuagcgaggacucccuuaugacgagcuuucugcccggcccuaagcccggggccccguucccuaacggccaugucggagcuggcgggucuggacuccugcccccucccccugcccugugcggcgcguccgccugugaugugagcguucgcguggucgugggggagcccacagaagcucggguugugccgggaagaggcaucugccuugaccucgccauucuggacucugcuuuucugcucagccaggucgccccuucccuguucauggggucuaucgugcagcuuagccaauccgugaccgccuacaugguuagcgcugcgggccugggacucgucgccauuuauuuugcuacacaggugguguucgauaaaucugaccuggccaaguacuccgccuga

SEQ ID NO: 3212 - protein, 215 aa, Artificial Sequence [sequence omitted]

SEQ ID NO: 3213 - RNA, 648 nt, Artificial Sequence
  proteinase-3__Homo_sapiens__CBI83574
auggccucccugcagaugcgggggaacccgggcagccacuucugcggaggcaccuugauccaccccagcuucgugcugacggccgcgcacugccugcgggacauaccccagcgccuggugaacguggugcucggagcccacaacgugcggacgcaggagcccacccagcagcacuucucgguggcucagguguuucugaacaacuacgacgcggagaacaaacugaacgacauucuccucauccagcugagcagcccagccaaccucagugccuccgucgccacaguccagcugccacagcaggaccagccagugccccacggcacccagugccuggccaugggcuggggccgcgugggugcccacgaccccccagcccagguccugcaggagcucaaugucaccguggugaccuucuucugccggccacauaacauuugcacuuucgucccucgccgcaaggccggcaucugcuucggagacucagguggcccccugaucugugauggcaucauccaaggaauagacuccuucgugaucuggggaugugccacccgccuuuucccugacuucuucacgcggguagcccucuacguggacuggauccguuccacgcugcgccguguggaggccaagggccgccccuga

SEQ ID NO: 3214 - RNA, 648 nt, Artificial Sequence
  derived and/or modified sequence opt1 from proteinase-3__Homo_sapiens__CBI83574
auggccagccugcagaugcgcggcaaccccgggucccacuucugcggcgggacccucauccacccgagcuucgugcugaccgccgcgcacugccugcgggacaucccccagcgccucgucaacguggugcugggcgcccacaacguccggacgcaggagcccacccagcagcacuucuccguggcccagguguuccugaacaacuacgacgccgagaacaagcucaacgacauccugcugauccagcucagcucccccgccaaccugagcgcguccgucgccaccgugcagcugccgcagcaggaccagcccgugccccacgggacccagugccucgccaugggcuggggccgcgucggggcccacgacccgcccgcccaggugcugcaggagcugaacgugacggucgugaccuucuucugccggccccacaacaucugcaccuucgugccccgccggaaggcgggcaucugcuucggggacagcggcgggccccucaucugcgacggcaucauccagggcaucgacuccuucgucaucugggggugcgccacccgccuguucccggacuucuucacgcggguggcccuguacguggacuggauccgcagcacccuccggcgcgucgaggccaagggccggcccuga

SEQ ID NO: 3215 - RNA, 648 nt, Artificial Sequence
  derived and/or modified sequence opt2 from proteinase-3__Homo_sapiens__CBI83574
auggccucccuccagaugcgcggcaaccccggcucccacuucugcggcggcacccucauccaccccuccuucguccucaccgccgcccacugccuccgcgacaucccccagcgccucgucaacgucguccucggcgcccacaacguccgcacccaggagcccacccagcagcacuucuccgucgcccaggucuuccucaacaacuacgacgccgagaacaagcucaacgacauccuccucauccagcucuccucccccgccaaccucuccgccuccgucgccaccguccagcucccccagcaggaccagcccgucccccacggcacccagugccucgccaugggcuggggccgcgucggcgcccacgacccccccgcccagguccuccaggagcucaacgucaccgucgucaccuucuucugccgcccccacaacaucugcaccuucgucccccgccgcaaggccggcaucugcuucggcgacuccggcggcccccucaucugcgacggcaucauccagggcaucgacuccuucgucaucuggggcugcgccacccgccucuuccccgacuucuucacccgcgucgcccucuacgucgacuggauccgcuccacccuccgccgcgucgaggccaagggccgccccuga

SEQ ID NO: 3216 - RNA, 648 nt, Artificial Sequence
  derived and/or modified sequence opt3 from proteinase-3__Homo_sapiens__CBI83574
auggccagccugcagaugagaggcaaccccgggucccacuucugcggagguacccucauccauccuucuuuugugcuuacagcugcacacugucugagggacauuccacaacgguuggucaauguuguguuaggcgcccauaacguacgcacucaggagccgacgcagcagcacuucucaguggcgcaagucuuucugaauaacuacgaugcugaaaauaagcuaaacgacauacuccugauccagcuuaguagccccgccaaucuguccgcaucuguggccaccguucaguugccucagcaagaucagccagugccccaugggacacagugccucgcuaugggauggggccgagucggugcacacgacccuccagcccaggugcugcaagagcugaacguaacuguugugaccuucuuuugucguccccacaauauuugcacauucgucccuagaaggaaagcugggaucuguuuuggagauucgggcggcccacucauuugcgacgggaucauacagggaaucgauucauucgugauuugggguugugccacccgguuauuuccggacuucuuuacucgcguggcgcuguaugucgauuggaucagaagcacacuuaggcggguugaagcaaagggccgccccuga

SEQ ID NO: 3217 - RNA, 648 nt, Artificial Sequence
  derived and/or modified sequence opt4 from proteinase-3__Homo_sapiens__CBI83574
auggccagccugcagaugagaggcaaccccggcagccacuucugcggcggcacccugauccaccccagcuucgugcugaccgccgcccacugccugagagacaucccccagagacuggugaacguggugcugggcgcccacaacgugagaacccaggagcccacccagcagcacuucagcguggcccagguguuccugaacaacuacgacgccgagaacaagcugaacgacauccugcugauccagcugagcagccccgccaaccugagcgccagcguggccaccgugcagcugccccagcaggaccagcccgugccccacggcacccagugccuggccaugggcuggggcagagugggcgcccacgacccccccgcccaggugcugcaggagcugaacgugaccguggugaccuucuucugcagaccccacaacaucugcaccuucgugcccagaagaaaggccggcaucugcuucggcgacagcggcggcccccugaucugcgacggcaucauccagggcaucgacagcuucgugaucuggggcugcgccaccagacuguuccccgacuucuucaccagaguggcccuguacguggacuggaucagaagcacccugagaagaguggaggccaagggcagacccuga

SEQ ID NO: 3218 - RNA, 648 nt, Artificial Sequence
  derived and/or modified sequence opt5 from proteinase-3__Homo_sapiens__CBI83574
auggccagccugcagaugagaggcaaccccgggucccacuucugcggaggcacccucauccauccuucuuuugugcugacagcugcccacugucuucgggacauuccgcaacgccuggucaauguugugcucggggcgcauaacgugagaacgcaggagcccacccagcagcacuucagcgucgcucaaguguuucugaauaacuacgaugccgaaaauaaacuuaacgacauccugcucauucagcuguccucuccugccaaucugagcgcuuccguugccacagugcagcucccccagcaagaucagccugucccccauggaacccagugccuggcuaugggcugggggcgggugggagcccacgacccuccggcgcagguucuucaagagcugaacgugacagucgugaccuucuuuugucgcccccacaauaucugcacauucgugccuagacggaaggccggcauuuguuuuggcgauucugggggaccccucaucugcgacggcaucauucaggggaucgauagcuucgucauuuggggaugugcuacccgccuguuuccugacuucuuuacgagaguugcccuuuauguggauuggauccgguccacccugcgcagaguggaagcuaagggccggcccuga

SEQ ID NO: 3219 - protein, 256 aa, Artificial Sequence
  proteinase-3__Homo_sapiens__P24158
MAHRPPSPALASVLLALLLSGAARAAEIVGGHEAQPHSRPYMASLQMRGNPGSHFCGGTLIHPSFVLTAAHCLRDIPQRLVNVVLGAHNVRTQEPTQQHFSVAQVFLNNYDAENKLNDVLLIQLSSPANLSASVATVQLPQQDQPVPHGTQCLAMGWGRVGAHDPPAQVLQELNVTVVTFFCRPHNICTFVPRRKAGICFGDSGGPLICDGIIQGIDSFVIWGCATRLFPDFFTRVALYVDWIRSTLRRVEAKGRP

SEQ ID NO: 3220 - RNA, 771 nt, Artificial Sequence
  proteinase-3__Homo_sapiens__AAH96183
auggcucaccggccccccagcccugcccuggcguccgugcugcuggccuugcugcugagcggugcugcccgagcugcggagaucgugggcgggcacgaggcgcagccacacucccggcccuacauggccucccugcagaugcgggggaacccgggcagccacuucugcggaggcaccuugauccaccccagcuucgugcugacggccgcgcacugccugcgggacauaccccagcgccuggugaacguggugcucggagcccacaacgugcggacgcaggagcccacccagcagcacuucucgguggcucagguguuucugaacaacuacgacgcggagaacaaacugaacgacguucuccucauccagcugagcagcccagccaaccucagugccuccgucgccacaguccagcugccacagcaggaccagccagugccccacggcacccagugccuggccaugggcuggggccgcgugggugcccacgaccccccagcccagguccugcaggagcucaaugucaccguggucaccuucuucugccggccacauaacauuugcacuuucgucccucgccgcaaggccggcaucugcuucggagacucagguggcccccugaucugugauggcaucauccaaggaauagacuccuucgugaucuggggaugugccacccgccuuuucccugacuucuucacgcggguagcccucuacguggacuggauccguuccacgcugcgccguguggaggccaagggccgccccuga

SEQ ID NO: 3221 - RNA, 771 nt, Artificial Sequence
  derived and/or modified sequence opt1 from proteinase-3__Homo_sapiens__AAH96183
auggcccaccggcccccgagccccgcccuggcguccgugcuccuggcccugcuccugagcggcgccgcccgcgccgcggagaucgucgggggccacgaggcccagccccacucccgccccuacauggccagccugcagaugcgggggaacccgggcucccacuucugcgggggcacccucauccaccccagcuucgugcugaccgccgcgcacugccugcgcgacaucccccagcggcucgugaacgucgugcugggcgcccacaacgugcgcacgcaggagcccacccagcagcacuucuccgucgcccagguguuccugaacaacuacgacgccgagaacaagcucaacgacgugcugcugauccagcucagcuccccggccaaccugagcgcguccgucgccaccgugcagcugccccagcaggaccagcccgugccccacgggacccagugccucgccaugggcugggggcgggucggcgcccacgacccgcccgcccaggugcugcaggagcugaacgugacggucgugaccuucuucugccgcccccacaacaucugcaccuucgugccccggcgcaaggcggggaucugcuucggcgacagcggcgggccgcucaucugcgacggcaucauccaggggaucgacuccuucgucaucuggggcugcgccacccggcuguuccccgacuucuucacgcgcguggcccuguacguggacuggauccggagcacccuccgccgggucgaggccaagggccgccccuga

SEQ ID NO: 3222 - RNA, 771 nt, Artificial Sequence
  derived and/or modified sequence opt2 from proteinase-3__Homo_sapiens__AAH96183
auggcccaccgcccccccucccccgcccucgccuccguccuccucgcccuccuccucuccggcgccgcccgcgccgccgagaucgucggcggccacgaggcccagccccacucccgccccuacauggccucccuccagaugcgcggcaaccccggcucccacuucugcggcggcacccucauccaccccuccuucguccucaccgccgcccacugccuccgcgacaucccccagcgccucgucaacgucguccucggcgcccacaacguccgcacccaggagcccacccagcagcacuucuccgucgcccaggucuuccucaacaacuacgacgccgagaacaagcucaacgacguccuccucauccagcucuccucccccgccaaccucuccgccuccgucgccaccguccagcucccccagcaggaccagcccgucccccacggcacccagugccucgccaugggcuggggccgcgucggcgcccacgacccccccgcccagguccuccaggagcucaacgucaccgucgucaccuucuucugccgcccccacaacaucugcaccuucgucccccgccgcaaggccggcaucugcuucggcgacuccggcggcccccucaucugcgacggcaucauccagggcaucgacuccuucgucaucuggggcugcgccacccgccucuuccccgacuucuucacccgcgucgcccucuacgucgacuggauccgcuccacccuccgccgcgucgaggccaagggccgccccuga

SEQ ID NO: 3223 - RNA, 771 nt, Artificial Sequence
  derived and/or modified sequence opt3 from proteinase-3__Homo_sapiens__AAH96183
auggcccacagacccccuagcccagcucuggcauccgugcuccuugcccuguuguuaucuggcgcggcuagggccgcagagaucgucgggggacaugaagcccagccgcacucacggcccuacauggcuagucugcaaaugcgcgguaacccuggcagccauuucugcgggggaacccuaauucacccauccuuuguucucacagcagcccauugucugcgagacauaccccagcgucuugugaauguagugcugggcgcucacaacgucagaacucaggagccuacgcagcaacacuucucuguggcccagguguuuuugaauaacuaugaugcggaaaauaagcucaacgacguucugcugauccagcucucgucaccagcaaauuuaagcgccagugucgcuaccgugcagcugccccaacaggaucagccuguaccacaugguacacagugccuugccaugggguggggaaggguuggcgcacacgacccgcccgcucaaguguugcaggagcugaacgucacuguggugaccuucuuuugucggccucauaauauuugcacauucgucccacgcagaaaagccggcaucuguuuuggggauuccggagguccccuaauuugcgacggcaucauacaggggaucgauucuuucguuauuuggggaugugcgaccaggcucuuuccugacuucuuuacucggguggcccuguacguagauuggauccgcagcacacuucgaagaguggaagcaaagggcaggccauga

SEQ ID NO: 3224 - RNA, 771 nt, Artificial Sequence
  derived and/or modified sequence opt4 from proteinase-3__Homo_sapiens__AAH96183
auggcccacagaccccccagccccgcccuggccagcgugcugcuggcccugcugcugagcggcgccgccagagccgccgagaucgugggcggccacgaggcccagccccacagcagacccuacauggccagccugcagaugagaggcaaccccggcagccacuucugcggcggcacccugauccaccccagcuucgugcugaccgccgcccacugccugagagacaucccccagagacuggugaacguggugcugggcgcccacaacgugagaacccaggagcccacccagcagcacuucagcguggcccagguguuccugaacaacuacgacgccgagaacaagcugaacgacgugcugcugauccagcugagcagccccgccaaccugagcgccagcguggccaccgugcagcugccccagcaggaccagcccgugccccacggcacccagugccuggccaugggcuggggcagagugggcgcccacgacccccccgcccaggugcugcaggagcugaacgugaccguggugaccuucuucugcagaccccacaacaucugcaccuucgugcccagaagaaaggccggcaucugcuucggcgacagcggcggcccccugaucugcgacggcaucauccagggcaucgacagcuucgugaucuggggcugcgccaccagacuguuccccgacuucuucaccagaguggcccuguacguggacuggaucagaagcacccugagaagaguggaggccaagggcagacccuga

SEQ ID NO: 3225 - RNA, 771 nt, Artificial Sequence
  derived and/or modified sequence opt5 from proteinase-3__Homo_sapiens__AAH96183
auggcccacagacccccuagcccggcucuggccuccgugcuccuggcgcuucugcucucuggcgcugcccgggccgcugagaucgucgggggacaugaagcccagccccacagccgcccuuacauggcuucccugcaaaugagaggcaaccccgggucucauuucugcggaggcacccuuauucacccuagcuuuguucugacagccgcgcauugucuccgggacaucccccagcgccuggugaaugugguccugggggcccacaacgugagaacgcaggagccuacccagcaacacuucuccguugcucagguguuucucaauaacuaugaugccgaaaauaagcugaacgacguccuucugauucagcucucuagcccggcuaaucuguccgccagcguggcgacaguucagcuuccccaacaggaucagccugugccccauggaacccagugccuggccaugggcuggggccgggucggggcucacgacccucccgcccaagugcuccaggagcugaacgugacagucguuaccuucuuuugucgcccgcauaauaucugcacauucgugccuagacggaaagcuggaauuuguuuuggcgauucugggggaccccugaucugcgacggcaucauucaggggaucgauuccuucgugauuuggggaugugccacccgccucuuuccugacuucuuuacgagagucgcccuguacguggauuggauccggagcacccuucgcagaguugaagcuaagggccggcccuga

SEQ ID NO: 3226 - protein, 919 aa, Artificial Sequence
  PSA__Homo_sapiens__P55786
MWLAAAAPSLARRLLFLGPPPPPLLLLVFSRSSRRRLHSLGLAAMPEKRPFERLPADVSPINYSLCLKPDLLDFTFEGKLEAAAQVRQATNQIVMNCADIDIITASYAPEGDEEIHATGFNYQNEDEKVTLSFPSTLQTGTGTLKIDFVGELNDKMKGFYRSKYTTPSGEVRYAAVTQFEATDARRAFPCWDEPAIKATFDISLVVPKDRVALSNMNVIDRKPYPDDENLVEVKFARTPVMSTYLVAFVVGEYDFVETRSKDGVCVRVYTPVGKAEQGKFALEVAAKTLPFYKDYFNVPYPLPKIDLIAIADFAAGAMENWGLVTYRETALLIDPKNSCSSSRQWVALVVGHELAHQWFGNLVTMEWWTHLWLNEGFASWIEYLCVDHCFPEYDIWTQFVSADYTRAQELDALDNSHPIEVSVGHPSEVDEIFDAISYSKGASVIRMLHDYIGDKDFKKGMNMYLTKFQQKNAATEDLWESLENASGKPIAAVMNTWTKQMGFPLIYVEAEQVEDDRLLRLSQKKFCAGGSYVGEDCPQWMVPITISTSEDPNQAKLKILMDKPEMNVVLKNVKPDQWVKLNLGTVGFYRTQYSSAMLESLLPGIRDLSLPPVDRLGLQNDLFSLARAGIISTVEVLKVMEAFVNEPNYTVWSDLSCNLGILSTLLSHTDFYEEIQEFVKDVFSPIGERLGWDPKPGEGHLDALLRGLVLGKLGKAGHKATLEEARRRFKDHVEGKQILSADLRSPVYLTVLKHGDGTTLDIMLKLHKQADMQEEKNRIERVLGATLLPDLIQKVLTFALSEEVRPQDTVSVIGGVAGGSKHGRKAAWKFIKDNWEELYNRYQGGFLISRLIKLSVEGFAVDKMAGEVKAFFESHPAPSAERTIQQCCENILLNAAWLKRDAESIHQYLLQRKASPPTV

SEQ ID NO: 3227 - RNA, 2760 nt, Artificial Sequence
  PSA__Homo_sapiens__CCDS45721.1
auguggcuggcagcugccgcccccucccucgcucgccgccugcucuuccucggcccuccgccuccuccccuccuccuucucgucuucagccgcuccucucgccgccgccuccacagccugggccucgccgcgaugccggagaagaggcccuucgagcggcugccugccgaugucucccccaucaacuacagccuuugccucaagcccgacuugcuggacuucaccuucgagggcaagcuggaggccgccgcccaggugaggcaggcgacuaaucagauugugaugaauugugcugauauugauauuauuacagcuucauaugcaccagaaggagaugaagaaauacaugcuacaggauuuaacuaucagaaugaagaugaaaaagucaccuugucuuucccuaguacucugcaaacagguacgggaaccuuaaagauagauuuuguuggagagcugaaugacaaaaugaaagguuucuauagaaguaaauauacuaccccuucuggagaggugcgcuaugcugcuguaacacaguuugaggcuacugaugcccgaagggcuuuuccuugcugggaugagccugcuaucaaagcaacuuuugauaucucauugguuguuccuaaagacagaguagcuuuaucaaacaugaauguaauugaccggaaaccauacccugaugaugaaaauuuaguggaagugaaguuugcccgcacaccuguuaugucuacauaucugguggcauuuguugugggugaauaugacuuuguagaaacaaggucaaaagaugguguguguguccguguuuacacuccuguuggcaaagcagagcaaggaaaauuugcguuagagguugcugcuaaaaccuugccuuuuuauaaggacuacuucaauguuccuuauccucuaccuaaaauugaucucauugcuauugcagacuuugcagcuggugccauggagaacuggggccuuguuacuuauagggagacugcauugcuuauugauccaaaaaauuccuguucuucaucccgccaguggguugcucugguugugggacaugaacucgcccaucaaugguuuggaaaucuuguuacuauggaaugguggacucaucuuugguuaaaugaagguuuugcauccuggauugaauaucuguguguagaccacugcuucccagaguaugauauuuggacucaguuuguuucugcugauuacacccgugcccaggagcuugacgccuuagauaacagccauccuauugaagucagugugggccauccaucugagguugaugagauauuugaugcuauaucauauagcaaaggugcaucugucauccgaaugcugcaugacuacauuggggauaaggacuuuaagaaaggaaugaacauguauuuaaccaaguuccaacaaaagaaugcugccacagaggaucucugggaaaguuuagaaaaugcuagugguaaaccuauagcagcugugaugaauaccuggaccaaacaaaugggauuuccccucauuuauguggaagcugaacagguagaagaugacagauuauugagguugucccaaaagaaguucugugcuggugggucauauguuggugaagauuguccccaguggauggucccuaucacaaucucuacuagugaagaccccaaccaggccaaacuaaaaauucuaauggacaagccagagaugaaugugguuuugaaaaaugucaaaccagaccaaugggugaaguuaaacuuaggaacaguuggguuuuaucggacccaguacagcucugccaugcuggaaaguuuauuaccaggcauucgugaccuuucucugcccccuguggaucgacuuggauuacagaaugaccucuucuccuuggcucgagcuggaaucauuagcacuguagagguucuaaaagucauggaggcuuuugugaaugagcccaauuauacuguauggagcgaccugagcuguaaccuggggauucucucaacucucuugucccacacagacuucuaugaggaaauccaggaguuugugaaagaugucuuuucaccuauaggggagagacugggcugggaccccaaaccuggagaaggucaucucgaugcacuccugaggggcuugguucugggaaaacuaggaaaagcaggacauaaggcaacguuagaagaagcccgucgucgguuuaaggaccacguggaaggaaaacagauucucuccgcugaucugaggaguccugucuaucugacuguuuugaagcauggugauggcacuacuuuagauauuauguuaaaacuucauaaacaagcagauaugcaagaagagaaaaaccgaaucgaaagaguccuuggcgcuacucuuuugccugaccugauucaaaaaguccucacguuugcacuuucagaagagguacguccacaggacacuguaucgguaauugguggaguagcuggaggcagcaagcaugguaggaaagcugcuuggaaauucauaaaggacaacugggaagaacuuuauaaccgauaccagggaggauucuuaauauccagacuaauaaagcuaucaguugagggauuugcaguugauaaaauggcuggagagguuaaggcuuucuucgagagucacccagcuccuucagcugagcguaccauccagcaguguugugaaaauauucugcugaaugcugccuggcuaaagcgagaugcugagagcauccaccaguaccuccuucagcggaaggccucaccacccacaguguga

SEQ ID NO: 3228 - RNA, 2760 nt, Artificial Sequence
  derived and/or modified sequence opt1 from PSA__Homo_sapiens__CCDS45721.1
auguggcuggccgccgcggcccccagccucgcccgccggcugcuguuccucggcccgcccccgccgccccugcugcuccugguguucucccgcagcucccggcgccggcugcacagccucgggcuggccgccaugcccgagaagcgccccuucgagcggcugcccgcggacgucucccccaucaacuacagccucugccugaagcccgaccugcucgacuucaccuucgagggcaagcuggaggccgccgcccaggugcgccaggcgaccaaccagaucgugaugaacugcgccgacaucgacaucaucacggccuccuacgcccccgagggggacgaggagauccacgccaccggcuucaacuaccagaacgaggacgagaaggucacccugagcuuccccuccacccuccagacggggaccggcacccugaagaucgacuucgugggcgagcugaacgacaagaugaagggguucuaccggagcaaguacaccacgccguccggcgaggugcgcuacgcggccgucacccaguucgaggccaccgacgcccggcgcgccuuccccugcugggacgagcccgcgaucaaggccaccuucgacaucagccucguggugcccaaggaccgggucgcccuguccaacaugaacgugaucgaccgcaagccguaccccgacgacgagaaccugguggaggucaaguucgcccggacgcccgugaugagcaccuaccucguggccuucgucgugggggaguacgacuucguggagacccgcuccaaggacggcgucugcgugcggguguacacccccgucgggaaggcggagcagggcaaguucgcccuggagguggccgccaagacgcugccguucuacaaggacuacuucaacgugcccuacccccuccccaagaucgaccugaucgccaucgcggacuucgccgccggcgccauggagaacugggggcuggucaccuaccgcgagaccgcgcuccugaucgacccgaagaacagcugcuccagcucccggcaguggguggcccuggucgugggccacgagcucgcccaccagugguucgggaaccuggugaccauggagugguggacgcaccuguggcucaacgagggcuucgccagcuggaucgaguaccugugcgucgaccacugcuuccccgaguacgacaucuggacccaguucgugagcgccgacuacacccgcgcgcaggagcuggacgcccucgacaacucccaccccaucgaggugagcgucggccaccccuccgagguggacgagaucuucgacgccaucagcuacuccaagggggccagcgugauccggaugcugcacgacuacaucggcgacaaggacuucaagaaggggaugaacauguaccugaccaaguuccagcagaagaacgccgcgacggaggaccucugggagucccuggagaacgccagcggcaagccgaucgccgccgucaugaacaccuggaccaagcagaugggguucccccugaucuacguggaggccgagcaggucgaggacgaccgccuccugcgccugucccagaagaaguucugcgcgggcggcagcuacgugggggaggacugcccccaguggauggugccgaucaccaucuccacgagcgaggaccccaaccaggccaagcucaagauccugauggacaagcccgagaugaacgugguccugaagaacgugaagcccgaccagugggugaagcugaaccucggcaccgucggguucuaccggacccaguacuccagcgccaugcuggagucccugcucccgggcauccgcgaccugagccugccgcccguggaccggcucgggcugcagaacgaccuguucucccucgcccgcgcgggcaucaucagcaccguggagguccugaaggugauggaggccuucgugaacgagcccaacuacacggucugguccgaccugagcugcaaccucggcauccugagcacccugcucucccacaccgacuucuacgaggagauccaggaguucgugaaggacguguucagccccaucggggagcggcugggcugggaccccaagcccggggagggccaccuggacgcccuccugcgcgggcugguccucggcaagcugggcaaggccgggcacaaggccacccuggaggaggcgcggcgccgguucaaggaccacguggagggcaagcagauccucuccgccgaccugcgcagccccguguaccugacgguccucaagcacggggacggcaccacccuggacaucaugcugaagcuccacaagcaggccgacaugcaggaggagaagaaccggaucgagcgcgugcugggcgccacccugcucccggaccugauccagaaggugcugaccuucgcccucuccgaggagguccggccccaggacacggugagcgugaucgggggcgucgccgggggcuccaagcacgggcgcaaggcggccuggaaguucaucaaggacaacugggaggagcuguacaaccgguaccagggcggcuuccugaucagccgccucaucaagcuguccguggagggguucgccguggacaagauggccggcgaggucaaggcguucuucgagagccaccccgcccccuccgccgagcggaccauccagcagugcugcgagaacauccugcucaacgccgcguggcugaagcgcgacgccgagagcauccaccaguaccugcuccagcggaaggccuccccgcccaccguguga

SEQ ID NO: 3229 - RNA, 2760 nt, Artificial Sequence
  derived and/or modified sequence opt2 from PSA__Homo_sapiens__CCDS45721.1
auguggcucgccgccgccgcccccucccucgcccgccgccuccucuuccucggcccccccccccccccccuccuccuccucgucuucucccgcuccucccgccgccgccuccacucccucggccucgccgccaugcccgagaagcgccccuucgagcgccuccccgccgacgucucccccaucaacuacucccucugccucaagcccgaccuccucgacuucaccuucgagggcaagcucgaggccgccgcccagguccgccaggccaccaaccagaucgucaugaacugcgccgacaucgacaucaucaccgccuccuacgcccccgagggcgacgaggagauccacgccaccggcuucaacuaccagaacgaggacgagaaggucacccucuccuuccccuccacccuccagaccggcaccggcacccucaagaucgacuucgucggcgagcucaacgacaagaugaagggcuucuaccgcuccaaguacaccacccccuccggcgagguccgcuacgccgccgucacccaguucgaggccaccgacgcccgccgcgccuuccccugcugggacgagcccgccaucaaggccaccuucgacaucucccucgucguccccaaggaccgcgucgcccucuccaacaugaacgucaucgaccgcaagcccuaccccgacgacgagaaccucgucgaggucaaguucgcccgcacccccgucauguccaccuaccucgucgccuucgucgucggcgaguacgacuucgucgagacccgcuccaaggacggcgucugcguccgcgucuacacccccgucggcaaggccgagcagggcaaguucgcccucgaggucgccgccaagacccuccccuucuacaaggacuacuucaacguccccuacccccuccccaagaucgaccucaucgccaucgccgacuucgccgccggcgccauggagaacuggggccucgucaccuaccgcgagaccgcccuccucaucgaccccaagaacuccugcuccuccucccgccagugggucgcccucgucgucggccacgagcucgcccaccagugguucggcaaccucgucaccauggagugguggacccaccucuggcucaacgagggcuucgccuccuggaucgaguaccucugcgucgaccacugcuuccccgaguacgacaucuggacccaguucgucuccgccgacuacacccgcgcccaggagcucgacgcccucgacaacucccaccccaucgaggucuccgucggccaccccuccgaggucgacgagaucuucgacgccaucuccuacuccaagggcgccuccgucauccgcaugcuccacgacuacaucggcgacaaggacuucaagaagggcaugaacauguaccucaccaaguuccagcagaagaacgccgccaccgaggaccucugggagucccucgagaacgccuccggcaagcccaucgccgccgucaugaacaccuggaccaagcagaugggcuucccccucaucuacgucgaggccgagcaggucgaggacgaccgccuccuccgccucucccagaagaaguucugcgccggcggcuccuacgucggcgaggacugcccccaguggaugguccccaucaccaucuccaccuccgaggaccccaaccaggccaagcucaagauccucauggacaagcccgagaugaacgucguccucaagaacgucaagcccgaccagugggucaagcucaaccucggcaccgucggcuucuaccgcacccaguacuccuccgccaugcucgagucccuccuccccggcauccgcgaccucucccucccccccgucgaccgccucggccuccagaacgaccucuucucccucgcccgcgccggcaucaucuccaccgucgagguccucaaggucauggaggccuucgucaacgagcccaacuacaccgucugguccgaccucuccugcaaccucggcauccucuccacccuccucucccacaccgacuucuacgaggagauccaggaguucgucaaggacgucuucucccccaucggcgagcgccucggcugggaccccaagcccggcgagggccaccucgacgcccuccuccgcggccucguccucggcaagcucggcaaggccggccacaaggccacccucgaggaggcccgccgccgcuucaaggaccacgucgagggcaagcagauccucuccgccgaccuccgcucccccgucuaccucaccguccucaagcacggcgacggcaccacccucgacaucaugcucaagcuccacaagcaggccgacaugcaggaggagaagaaccgcaucgagcgcguccucggcgccacccuccuccccgaccucauccagaagguccucaccuucgcccucuccgaggagguccgcccccaggacaccgucuccgucaucggcggcgucgccggcggcuccaagcacggccgcaaggccgccuggaaguucaucaaggacaacugggaggagcucuacaaccgcuaccagggcggcuuccucaucucccgccucaucaagcucuccgucgagggcuucgccgucgacaagauggccggcgaggucaaggccuucuucgagucccaccccgcccccuccgccgagcgcaccauccagcagugcugcgagaacauccuccucaacgccgccuggcucaagcgcgacgccgaguccauccaccaguaccuccuccagcgcaaggccuccccccccaccgucuga

SEQ ID NO: 3230 - RNA, 2760 nt, Artificial Sequence
  derived and/or modified sequence opt3 from PSA__Homo_sapiens__CCDS45721.1
auguggcuggccgcugcagcccccagccucgcgagaaggcuucuguucuugggcccuccaccgcccccuuuacugcuacucguguuuucccggucuucacgccgacgucugcacagucuugggcuggcugccaugccagagaagagacccuucgaaagguugccugcagacgucagcccaaucaacuacucccucugccugaaacccgaucugcucgacuuuaccuucgagggaaaguuagaagccgcugcacagguucggcaagccacaaaucagauugugaugaacugugcugauauagacaucauuacugccucuuaugcgccugagggugaugaagagauccaugcaacgggcuuuaauuaccagaacgaggacgaaaaaguaacccugucguucccaucaacacuucagacugggaccggaacauugaagauugauuuugugggcgagcugaaugacaaaaugaaggguuucuaucgcagcaaguacaccacuccgaguggggaagucagauaugccgcugugacacaauuugaggccaccgaugcaaggcgggcuuuccccugcugggacgagccugccaucaaagcgacguuugauauaucccuaguugugccaaaggaccgcgucgcccucucuaacaugaaugugaucgaucgaaaacccuacccugacgacgaaaaccugguagagguuaaguucgcaagaacuccagugaugagcaccuaucuugucgcuuuuguggugggagaauacgauuucgucgagacaagguccaaagacggcguuugugugcggguauacacucccgugggcaaggccgaacaggggaaguucgcucuggaggucgccgcaaaaaccuugccguuuuauaaggauuacuucaaugugccuuauccccucccaaaaauugaccugaucgccauugcugauuuugcggcaggagccauggagaacugggguuuaguuacauaccgugaaaccgcucugcucaucgacccuaaaaauucaugcaguagcucucgccaguggguggcccuugucgugggccacgagcuggcacaucagugguucgggaacuugguaacgauggaaugguggacucaccuauggcugaaugagggauuugccuccuggauagaauaucucuguguugaucauugcuuccccgaguacgacauuuggacacaauuugugucagcugauuauaccagagcccaggagcuggacgcacuugauaacagccacccaaucgaagucagugugggccaccccucugaggucgacgaaauuuucgacgcgaucuccuacagcaagggugcuucggugaucaggaugcugcaugauuacauuggggacaaggauuuuaaaaagggaaugaauauguauuugacuaaguuccagcagaaaaacgccgcaacagaggaccucugggaaucucuggagaacgccuccggcaagccuauagcugccguuaugaauaccuggacgaaacaaaugggcuuuccauuaaucuacguggaggcagaacagguagaggaugaccggcugcuacgacucucacagaagaaauucugugcugggggaaguuaugucggugaagauugcccgcaauggauggugcccauuaccaucagcacauccgaggacccuaaccaggccaagcugaagauacuuauggauaaaccagagaugaauguuguguugaagaacgucaaacccgaccagugggugaagcugaaucucggcacuguaggguuuuaccgcacccaguauucuagcgcgaugcuggaaucacuucugccuggaauuagagauuugagucucccacccguggacaggcugggcuuacaaaacgaucuguucucccuagcccgggcugguaucaucagcacaguugagguccucaaagugauggaagcauucgugaaugagccgaacuacacugucuggucugaccugucauguaaucuugggauuuugaguacccugcucagccacacagacuuuuaugaagagauccaggaguucguuaaggauguguuuuccccuauuggcgaacgccugggaugggacccaaagcccggcgaggggcauuuagaugcccugcuuagaggauuggugcucgguaaacugggcaaggcugggcacaaagccacccuagaagaggcaaggcgucgguucaaggaccacguagaaggaaaacagauacugucugcggaucuccgaucgccugucuaccugacugugcuuaagcauggcgacgguacgacauuggauaucaugcugaaguuacacaaacaggccgacaugcaagaggagaagaacagaauugaaaggguucucggggcuacccugcuucccgaucugauccagaaaguguugacuuuugcccucagcgaggaaguccgcccacaggacaccguguccguuaucggcggaguggcaggcgggucaaagcauggacggaaagcugccuggaaguucauuaaagauaauugggaggaacuguacaacagauaucaggguggcuuucuaauaaguaggcugaucaagcucucuguagagggguucgcagucgacaagauggccggagaggugaaagcguuuuucgaaagccacccugcucccuccgccgagcgcacaauucaacagugcugugaaaauauccugcuuaacgcagcuugguugaagcgagaugccgagucaauucaucaguaccuguuacagcggaaagccagcccaccgaccguguga

SEQ ID NO: 3231 - RNA, 2760 nt, Artificial Sequence
  derived and/or modified sequence opt4 from PSA__Homo_sapiens__CCDS45721.1
auguggcuggccgccgccgcccccagccuggccagaagacugcuguuccugggcccccccccccccccccugcugcugcugguguucagcagaagcagcagaagaagacugcacagccugggccuggccgccaugcccgagaagagacccuucgagagacugcccgccgacgugagccccaucaacuacagccugugccugaagcccgaccugcuggacuucaccuucgagggcaagcuggaggccgccgcccaggugagacaggccaccaaccagaucgugaugaacugcgccgacaucgacaucaucaccgccagcuacgcccccgagggcgacgaggagauccacgccaccggcuucaacuaccagaacgaggacgagaaggugacccugagcuuccccagcacccugcagaccggcaccggcacccugaagaucgacuucgugggcgagcugaacgacaagaugaagggcuucuacagaagcaaguacaccacccccagcggcgaggugagauacgccgccgugacccaguucgaggccaccgacgccagaagagccuuccccugcugggacgagcccgccaucaaggccaccuucgacaucagccugguggugcccaaggacagaguggcccugagcaacaugaacgugaucgacagaaagcccuaccccgacgacgagaaccugguggaggugaaguucgccagaacccccgugaugagcaccuaccugguggccuucguggugggcgaguacgacuucguggagaccagaagcaaggacggcgugugcgugagaguguacacccccgugggcaaggccgagcagggcaaguucgcccuggagguggccgccaagacccugcccuucuacaaggacuacuucaacgugcccuacccccugcccaagaucgaccugaucgccaucgccgacuucgccgccggcgccauggagaacuggggccuggugaccuacagagagaccgcccugcugaucgaccccaagaacagcugcagcagcagcagacaguggguggcccugguggugggccacgagcuggcccaccagugguucggcaaccuggugaccauggagugguggacccaccuguggcugaacgagggcuucgccagcuggaucgaguaccugugcguggaccacugcuuccccgaguacgacaucuggacccaguucgugagcgccgacuacaccagagcccaggagcuggacgcccuggacaacagccaccccaucgaggugagcgugggccaccccagcgagguggacgagaucuucgacgccaucagcuacagcaagggcgccagcgugaucagaaugcugcacgacuacaucggcgacaaggacuucaagaagggcaugaacauguaccugaccaaguuccagcagaagaacgccgccaccgaggaccugugggagagccuggagaacgccagcggcaagcccaucgccgccgugaugaacaccuggaccaagcagaugggcuucccccugaucuacguggaggccgagcagguggaggacgacagacugcugagacugagccagaagaaguucugcgccggcggcagcuacgugggcgaggacugcccccaguggauggugcccaucaccaucagcaccagcgaggaccccaaccaggccaagcugaagauccugauggacaagcccgagaugaacguggugcugaagaacgugaagcccgaccagugggugaagcugaaccugggcaccgugggcuucuacagaacccaguacagcagcgccaugcuggagagccugcugcccggcaucagagaccugagccugccccccguggacagacugggccugcagaacgaccuguucagccuggccagagccggcaucaucagcaccguggaggugcugaaggugauggaggccuucgugaacgagcccaacuacaccguguggagcgaccugagcugcaaccugggcauccugagcacccugcugagccacaccgacuucuacgaggagauccaggaguucgugaaggacguguucagccccaucggcgagagacugggcugggaccccaagcccggcgagggccaccuggacgcccugcugagaggccuggugcugggcaagcugggcaaggccggccacaaggccacccuggaggaggccagaagaagauucaaggaccacguggagggcaagcagauccugagcgccgaccugagaagccccguguaccugaccgugcugaagcacggcgacggcaccacccuggacaucaugcugaagcugcacaagcaggccgacaugcaggaggagaagaacagaaucgagagagugcugggcgccacccugcugcccgaccugauccagaaggugcugaccuucgcccugagcgaggaggugagaccccaggacaccgugagcgugaucggcggcguggccggcggcagcaagcacggcagaaaggccgccuggaaguucaucaaggacaacugggaggagcuguacaacagauaccagggcggcuuccugaucagcagacugaucaagcugagcguggagggcuucgccguggacaagauggccggcgaggugaaggccuucuucgagagccaccccgcccccagcgccgagagaaccauccagcagugcugcgagaacauccugcugaacgccgccuggcugaagagagacgccgagagcauccaccaguaccugcugcagagaaaggccagcccccccaccguguga

SEQ ID NO: 3232 - RNA, 2760 nt, Artificial Sequence
  derived and/or modified sequence opt5 from PSA__Homo_sapiens__CCDS45721.1
auguggcuggccgcugccgcgcccagccucgcuagacggcugcuuuuccugggcccuccgcccccuccccuccugcuucugguguuuucccgcucuagcagacggcgccuccacucccuggggcuggccgccaugccugagaagagacccuucgaacggcucccugcugacgucucuccgaucaacuacagccugugccuuaaacccgaucugcucgacuuuaccuucgagggaaagcuggaagccgcugcccagguucgccaagcgacaaaucagauugugaugaacugugccgauaucgacauuaucacggcuuccuaugccccugagggcgaugaagagauucaugcuaccggguuuaauuaccagaacgaggacgaaaaagugacacuuucuuuccccagcacccugcagacaggaaccggcacacucaagaucgauuuugucggggagcugaaugacaaaaugaagggauucuauagauccaaguacaccacgccuagcggcgaagugcgguaugccgcgguuacccaauuugaggccacagaugcucgcagagccuuccccugcugggacgagccggcuaucaaagccaccuuugauauuucucugguggucccuaaggaccggguggcccucuccaacaugaauguuaucgaucgcaaacccuacccugacgacgaaaaccugguggaggucaaguucgcuagaacacccgugaugagcaccuaucuuguggcguuugucguuggcgaauacgauuucguggagacgcggucuaaagacgggguguguguccgcguguacacacccguuggaaaggccgaacagggcaaguucgcucuggagguggccgccaaaacccucccuuuuuauaaggauuacuucaaugucccguauccccugccuaaaauugaccuuaucgcuauugccgauuuugcggcuggggccauggagaacuggggacuggugacauacagagaaaccgcccuccugaucgaccccaagaauagcugcuccucuucccggcaguggguugcucugguggucggccacgagcucgcccaucagugguucgggaaccuggugaccauggaaugguggacacaccuuuggcugaaugagggauuugcuagcuggauugaauaucucugugucgaucauugcuucccugaguacgacaucuggacgcaauuuguguccgccgauuauaccagagcgcaggagcuggacgcccuugauaacucucaccccaucgaaguuagcgugggccacccguccgaggucgacgaaauuuucgacgcuaucagcuacucuaaaggcgccuccgugauucgcaugcugcaugauuacaucggggacaaggauuuuaaaaagggaaugaauauguaucucacaaaguuccagcagaaaaacgcugccaccgaggaccugugggaaagccuggagaacgcgucuggcaagccuauugccgcuguuaugaauacauggaccaaacaaaugggguuuccccucaucuacguggaggccgaacaggucgaggaugaccggcugcuuagacugagccagaagaaauucugugcuggaggcuccuaugugggggaagauugcccucaauggauggugcccaucacgauuucuacaagcgaggacccuaaccaggccaagcucaagauccugauggauaaacccgagaugaauguuguccugaagaacgugaaaccggaccagugggugaaacuuaaucucggaaccgucggcuuuuaccgcacccaguauuccagcgccaugcuggaaucucugcucccuggcauucgggaucugucccuuccucccguggacagacuggggcuccaaaacgaucuguucagccuggcucgcgcgggaaucauuucuacaguugaggugcuuaaggucauggaagccuucgugaaugagcccaacuacaccguuugguccgaccucagcuguaaucugggcauccuguccacacuccugucucacacggacuuuuaugaagagauccaggaguucgugaaggaugucuuuagcccgauuggggaacggcuuggaugggaccccaagccuggcgaggggcaucuggaugcucuccugagaggccuggugcuuggaaaacucggcaaggccgggcacaaagccacccuggaagaggcucgccggagauucaaggaccacguugaaggaaaacagauccuguccgccgaucuccgcucucccguguaccugacaguccuuaagcauggcgacgggaccacacuggauauuaugcucaagcugcacaaacaggcggacaugcaagaggagaagaaccggaucgaaagagugcugggagcuacccuucucccugaucugauucagaaagugcugacguuugcccucagcgaggaaguccggccccaggacaccguuuccgugaucggcgggguggccggcggaagcaagcauggccgcaaagcugccuggaaguucauuaaagauaauugggaggaacuguacaacagauaucaagggggauuucuuaucucucggcugaucaagcucuccgucgagggcuucgcgguggacaagauggcuggggagguuaaagccuuuuucgaaagccacccugcccccucugcugagagaacaauucagcagugcugugaaaauauccugcugaacgccgcuuggcuuaagcgcgaugccgaguccauucaucaguaccugcuccagcggaaagcgagcccgccuaccguguga

SEQ ID NO: 3233 - protein, 219 aa, Artificial Sequence
  PSB9__Homo_sapiens__P28065
MLRAGAPTGDLPRAGEVHTGTTIMAVEFDGGVVMGSDSRVSAGEAVVNRVFDKLSPLHERIYCALSGSAADAQAVADMAAYQLELHGIELEEPPLVLAAANVVRNISYKYREDLSAHLMVAGWDQREGGQVYGTLGGMLTRQPFAIGGSGSTFIYGYVDAAYKPGMSPEECRRFTTDAIALAMSRDGSSGGVIYLVTITAAGVDHRVILGNELPKFYDE

SEQ ID NO: 3234 - RNA, 660 nt, Artificial Sequence
  PSB9__Homo_sapiens__AAH65513
augcugcgggcgggagcaccaaccggggacuuaccccgggcgggagaaguccacaccgggaccaccaucauggcaguggaguuugacgggggcguugugauggguucugauucccgagugucugcaggcgaggcgguggugaaccgaguguuugacaagcuguccccgcugcacgagcgcaucuacugugcacucucugguucagcugcugaugcccaagccguggccgacauggccgccuaccagcuggagcuccaugggauagaacuggaggaaccuccacuuguuuuggcugcugcaaauguggugagaaauaucagcuauaaauaucgagaggacuugucugcacaucucaugguagcuggcugggaccaacgugaaggaggucagguauauggaacccugggaggaaugcugacucgacagccuuuugccauugguggcuccggcagcaccuuuaucuaugguuauguggaugcagcauauaagccaggcaugucucccgaggagugcaggcgcuucaccacagacgcuauugcucuggccaugagccgggauggcucaagcgggggugucaucuaccuggucacuauuacagcugccgguguggaccaucgagucaucuugggcaaugaacugccaaaauucuaugaugaguga

SEQ ID NO: 3235 - RNA, 660 nt, Artificial Sequence
  derived and/or modified sequence opt1 from PSB9__Homo_sapiens__AAH65513
augcugcgcgccggcgcccccaccggggaccucccgcgggcgggcgaggugcacaccgggacgaccaucauggccgucgaguucgacggcgggguggugaugggcagcgacucccgcgucagcgccggcgaggccguggugaaccgggucuucgacaagcugagcccccugcacgagcgcaucuacugcgcccucuccggguccgcggccgacgcccaggccguggcggacauggccgccuaccagcuggagcugcacggcaucgagcucgaggagccgccccuggugcuggccgccgcgaacgucgugcggaacaucagcuacaaguaccgcgaggaccucuccgcccaccugaugguggccgggugggaccagcgggagggcgggcaggucuacggcacccugggcgggaugcucacccgccagcccuucgccaucggcgggagcggcuccacguucaucuacggcuacguggacgccgcguacaagcccgggaugagccccgaggagugccggcgcuucaccaccgacgccaucgcccuggccaugucccgggacggcagcuccgggggcgugaucuaccuggucaccaucacggccgcggggguggaccaccgcgugauccucggcaacgagcugcccaaguucuacgacgaguga

SEQ ID NO: 3236 - RNA, 660 nt, Artificial Sequence
  derived and/or modified sequence opt2 from PSB9__Homo_sapiens__AAH65513
augcuccgcgccggcgcccccaccggcgaccucccccgcgccggcgagguccacaccggcaccaccaucauggccgucgaguucgacggcggcgucgucaugggcuccgacucccgcgucuccgccggcgaggccgucgucaaccgcgucuucgacaagcucuccccccuccacgagcgcaucuacugcgcccucuccggcuccgccgccgacgcccaggccgucgccgacauggccgccuaccagcucgagcuccacggcaucgagcucgaggagcccccccucguccucgccgccgccaacgucguccgcaacaucuccuacaaguaccgcgaggaccucuccgcccaccucauggucgccggcugggaccagcgcgagggcggccaggucuacggcacccucggcggcaugcucacccgccagcccuucgccaucggcggcuccggcuccaccuucaucuacggcuacgucgacgccgccuacaagcccggcaugucccccgaggagugccgccgcuucaccaccgacgccaucgcccucgccaugucccgcgacggcuccuccggcggcgucaucuaccucgucaccaucaccgccgccggcgucgaccaccgcgucauccucggcaacgagcuccccaaguucuacgacgaguga

SEQ ID NO: 3237 - RNA, 660 nt, Artificial Sequence
  derived and/or modified sequence opt3 from PSB9__Homo_sapiens__AAH65513
augcugagagccggcgcucccaccggggaccucccuagggcaggagaggugcacacagguacuacgaucauggccgucgaguucgauggcgggguugugaugggaagcgacucccggguaucugcgggcgaagcuguggucaaccgcguguuugauaaacuuucaccacugcaugaacgaauuuacugcgccuugagugguagcgcagccgacgcucaggcaguugccgauauggcugccuaucaauuagagcugcacgggauagaacuagaggagccgccccucgugcuggcggcagccaaugucgugcguaacaucuccuacaaguauagagaagaccuuucugcucaucugaugguagccggaugggaucagagggagggcggccagguuuacgggaccuugggagguaugcucacacggcagccuuucgcaauuggcgggucgggaucaacuuuuaucuauggcuacguggacgcugccuauaagccagguaugagccccgaagagugucgcagauucaccacagaugcgauugcccuggcaaugaguagggacggguccucuggaggcgucaucuaccuggugaccauaacugcugccggcguggaucaccgggucauccucgggaaugaguuaccuaaauuuuacgacgaauga

SEQ ID NO: 3238 - RNA, 660 nt, Artificial Sequence
  derived and/or modified sequence opt4 from PSB9__Homo_sapiens__AAH65513
augcugagagccggcgcccccaccggcgaccugcccagagccggcgaggugcacaccggcaccaccaucauggccguggaguucgacggcggcguggugaugggcagcgacagcagagugagcgccggcgaggccguggugaacagaguguucgacaagcugagcccccugcacgagagaaucuacugcgcccugagcggcagcgccgccgacgcccaggccguggccgacauggccgccuaccagcuggagcugcacggcaucgagcuggaggagcccccccuggugcuggccgccgccaacguggugagaaacaucagcuacaaguacagagaggaccugagcgcccaccugaugguggccggcugggaccagagagagggcggccagguguacggcacccugggcggcaugcugaccagacagcccuucgccaucggcggcagcggcagcaccuucaucuacggcuacguggacgccgccuacaagcccggcaugagccccgaggagugcagaagauucaccaccgacgccaucgcccuggccaugagcagagacggcagcagcggcggcgugaucuaccuggugaccaucaccgccgccggcguggaccacagagugauccugggcaacgagcugcccaaguucuacgacgaguga

SEQ ID NO: 3239 - RNA, 660 nt, Artificial Sequence
  derived and/or modified sequence opt5 from PSB9__Homo_sapiens__AAH65513
augcugagagccggcgcucccaccggggaccucccucgggccggagaggugcacacaggcacgaccaucauggcggucgaguucgaugggggaguugugaugggcagcgacucccgcgugucugcuggggaggccgucgugaacagaguuuuugauaagcugagcccgcuucaugaacggauuuacugcgcccuguccggaucugcugccgacgcucaggccguggcggauauggccgcuuaucaacucgagcugcacggcaucgaacuugaggagcccccucugguccucgccgcugccaaugugguucgcaacauuagcuacaaauauagagaagaccuguccgcgcaucugaugguggccggcugggaucagcgggaagggggacaggucuacggcacacucgggggaaugcugacccgccagcccuucgcuaucggcgggucuggaagcacauuuauuuauggcuacguggacgccgcuuauaagccuggcaugucccccgaagaguguagacgguucaccacagaugccaucgcccuugcuaugagccgcgacgggucuuccggaggcgugaucuaccuggucaccauuacggcggccgggguugaucacagagugauccucggaaaugagcugccuaaauuuuacgacgaauga

SEQ ID NO: 3240 - protein, 114 aa, Artificial Sequence
  PSCA__Homo_sapiens__D3DWI6
MAGLALQPGTALLCYSCKAQVSNEDCLQVENCTQLGEQCWTARIRAVGLLTVISKGCSLNCVDDSQDYYVGKKNITCCDTDLCNASGAHALQPAAAILALLPALGLLLWGPGQL

SEQ ID NO: 3241 - RNA, 345 nt, Artificial Sequence
  PSCA__Homo_sapiens__EAW82312
auggcaggcuuggcccugcagccaggcacugcccugcugugcuacuccugcaaagcccaggugagcaacgaggacugccugcagguggagaacugcacccagcugggggagcagugcuggaccgcgcgcauccgcgcaguuggccuccugaccgucaucagcaaaggcugcagcuugaacugcguggaugacucacaggacuacuacgugggcaagaagaacaucacgugcugugacaccgacuugugcaacgccagcggggcccaugcccugcagccggcugcugccauccuugcgcugcucccugcacucggccugcugcucuggggacccggccagcucuag

SEQ ID NO: 3242 - RNA, 345 nt, Artificial Sequence
  derived and/or modified sequence opt1 from PSCA__Homo_sapiens__EAW82312
auggccggccuggcccuccagcccgggaccgcgcugcugugcuacagcugcaaggcccagguguccaacgaggacugccuccaggucgagaacugcacccagcugggcgagcagugcuggaccgcccgcauccgggccguggggcugcucaccgugaucagcaagggcugcucccugaacugcgucgacgacagccaggacuacuacguggggaagaagaacaucacgugcugcgacaccgaccugugcaacgccuccggcgcgcacgcccuccagccggccgccgcgauccuggcccugcuccccgcccugggccugcuccugugggggcccggccagcuguga

SEQ ID NO: 3243 - RNA, 345 nt, Artificial Sequence
  derived and/or modified sequence opt2 from PSCA__Homo_sapiens__EAW82312
auggccggccucgcccuccagcccggcaccgcccuccucugcuacuccugcaaggcccaggucuccaacgaggacugccuccaggucgagaacugcacccagcucggcgagcagugcuggaccgcccgcauccgcgccgucggccuccucaccgucaucuccaagggcugcucccucaacugcgucgacgacucccaggacuacuacgucggcaagaagaacaucaccugcugcgacaccgaccucugcaacgccuccggcgcccacgcccuccagcccgccgccgccauccucgcccuccuccccgcccucggccuccuccucuggggccccggccagcucuga

SEQ ID NO: 3244 - RNA, 345 nt, Artificial Sequence
  derived and/or modified sequence opt3 from PSCA__Homo_sapiens__EAW82312
auggccggccuggcucuccagcccgggaccgcacuucugugcuacagcuguaaggcccaaguguccaacgaggacugcuugcaggucgaaaauuguacacaguuaggagagcagugcuggacugcgagaaucagggcuguuggucugcuaacggugauuucuaaaggcuguucacucaacugcguagaugacagucaagauuauuacguggggaagaaaaauauaaccuguugcgacacagaucuguguaacgccagcggagcacacgcccuucagccugcugcagccauccuggcuuugcucccagcccugggccugcucuuaugggguccggggcagcuguga

SEQ ID NO: 3245 - RNA, 345 nt, Artificial Sequence
  derived and/or modified sequence opt4 from PSCA__Homo_sapiens__EAW82312
auggccggccuggcccugcagcccggcaccgcccugcugugcuacagcugcaaggcccaggugagcaacgaggacugccugcagguggagaacugcacccagcugggcgagcagugcuggaccgccagaaucagagccgugggccugcugaccgugaucagcaagggcugcagccugaacugcguggacgacagccaggacuacuacgugggcaagaagaacaucaccugcugcgacaccgaccugugcaacgccagcggcgcccacgcccugcagcccgccgccgccauccuggcccugcugcccgcccugggccugcugcuguggggccccggccagcuguga

SEQ ID NO: 3246 - RNA, 345 nt, Artificial Sequence
  derived and/or modified sequence opt5 from PSCA__Homo_sapiens__EAW82312
auggccggccuggcucuccagcccgggaccgcccugcuuugcuacagcuguaaggcgcaaguguccaacgaggacugccugcaggucgaaaauuguacacagcucggagagcagugcuggacggcuagaauccgggccguuggccugcuuaccgugauuucuaaaggguguagccugaacugcguggaugacucccaagauuauuacgucggaaagaaaaauaucacauguugcgacaccgaucucuguaacgccucuggcgcucacgcccugcagccugcugccgcgauucuggcccuccugccggcucuugggcugcuccuguggggacccggccagcuuuga

SEQ ID NO: 3247 - protein, 123 aa, Artificial Sequence
  PSCA__Homo_sapiens__O43653
MKAVLLALLMAGLALQPGTALLCYSCKAQVSNEDCLQVENCTQLGEQCWTARIRAVGLLTVISKGCSLNCVDDSQDYYVGKKNITCCDTDLCNASGAHALQPAAAILALLPALGLLLWGPGQL

SEQ ID NO: 3248 - RNA, 372 nt, Artificial Sequence
  PSCA__Homo_sapiens__AAC39607
augaaggcugugcugcuugcccuguugauggcaggcuuggcccugcagccaggcacugcccugcugugcuacuccugcaaagcccaggugagcaacgaggacugccugcagguggagaacugcacccagcugggggagcagugcuggaccgcgcgcauccgcgcaguuggccuccugaccgucaucagcaaaggcugcagcuugaacugcguggaugacucacaggacuacuacgugggcaagaagaacaucacgugcugugacaccgacuugugcaacgccagcggggcccaugcccugcagccggcugccgccauccuugcgcugcucccugcacucggccugcugcucuggggacccggccagcuauag

SEQ ID NO: 3249 - RNA, 372 nt, Artificial Sequence
  derived and/or modified sequence opt1 from PSCA__Homo_sapiens__AAC39607
augaaggccgugcugcucgcccugcugauggcgggccucgcccugcagcccgggaccgcccugcucugcuacagcugcaaggcccaggucuccaacgaggacugccuccagguggagaacugcacccagcugggcgagcagugcuggaccgcccgcauccgggcgguggggcugcugaccgucaucagcaagggcugcucccugaacugcguggacgacagccaggacuacuacguggggaagaagaacaucacgugcugcgacaccgaccucugcaacgccuccggcgcccacgcccugcagccggcggccgccauccuggcccuccugcccgcccugggccuccugcugugggggcccggccagcucuga

SEQ ID NO: 3250 - RNA, 372 nt, Artificial Sequence
  derived and/or modified sequence opt2 from PSCA__Homo_sapiens__AAC39607
augaaggccguccuccucgcccuccucauggccggccucgcccuccagcccggcaccgcccuccucugcuacuccugcaaggcccaggucuccaacgaggacugccuccaggucgagaacugcacccagcucggcgagcagugcuggaccgcccgcauccgcgccgucggccuccucaccgucaucuccaagggcugcucccucaacugcgucgacgacucccaggacuacuacgucggcaagaagaacaucaccugcugcgacaccgaccucugcaacgccuccggcgcccacgcccuccagcccgccgccgccauccucgcccuccuccccgcccucggccuccuccucuggggccccggccagcucuga

SEQ ID NO: 3251 - RNA, 372 nt, Artificial Sequence
  derived and/or modified sequence opt3 from PSCA__Homo_sapiens__AAC39607
augaaggccgugcugcucgcacuucugauggcuggcuuggccuuacagcccgggaccgcgcugcuaugcuacagcuguaaagcucaagucuccaacgaggacugccuccagguugaaaauuguacacagcugggagagcagugcuggacugccagaaucagggcagugggucuucugacgguaauuucuaagggcuguucauugaacugcguggaugacagucaagauuauuacgucgggaaaaagaauauaaccuguugcgacacagaucucuguaacgccagcggagcucacgcacugcagccugccgcugccauccuggcgcucuuaccagcacugggccuuuugcugugggguccggggcagcuauga

SEQ ID NO: 3252 - RNA, 372 nt, Artificial Sequence
  derived and/or modified sequence opt4 from PSCA__Homo_sapiens__AAC39607
augaaggccgugcugcuggcccugcugauggccggccuggcccugcagcccggcaccgcccugcugugcuacagcugcaaggcccaggugagcaacgaggacugccugcagguggagaacugcacccagcugggcgagcagugcuggaccgccagaaucagagccgugggccugcugaccgugaucagcaagggcugcagccugaacugcguggacgacagccaggacuacuacgugggcaagaagaacaucaccugcugcgacaccgaccugugcaacgccagcggcgcccacgcccugcagcccgccgccgccauccuggcccugcugcccgcccugggccugcugcuguggggccccggccagcuguga

SEQ ID NO: 3253 - RNA, 372 nt, Artificial Sequence
  derived and/or modified sequence opt5 from PSCA__Homo_sapiens__AAC39607
augaaggccgugcugcucgcucugcuuauggccggccuggcgcuccagcccgggaccgcucugcuuugcuacagcuguaaagcccaagucuccaacgaggacugccugcagguugaaaauuguacacagcucggagagcagugcuggacggccagaauccgggcugugggccugcugaccgugauuucuaagggguguagccucaacugcgucgaugacucccaagauuauuacgugggcaaaaagaauaucacauguugcgacaccgaucuguguaacgccucuggagcucacgcccuucagccugcggccgcuauucuggcccuccugccggcucuugggcugcuccuguggggacccggccagcuguga

SEQ ID NO: 3254 - protein, 320 aa, Artificial Sequence
  PSGR__Homo_sapiens__Q9H255
MSSCNFTHATFVLIGIPGLEKAHFWVGFPLLSMYVVAMFGNCIVVFIVRTERSLHAPMYLFLCMLAAIDLALSTSTMPKILALFWFDSREISFEACLTQMFFIHALSAIESTILLAMAFDRYVAICHPLRHAAVLNNTVTAQIGIVAVVRGSLFFFPLPLLIKRLAFCHSNVLSHSYCVHQDVMKLAYADTLPNVVYGLTAILLVMGVDVMFISLSYFLIIRTVLQLPSKSERAKAFGTCVSHIGVVLAFYVPLIGLSVVHRFGNSLHPIVRVVMGDIYLLLPPVINPIIYGAKTKQIRTRVLAMFKISCDKDLQAVGGK

SEQ ID NO: 3255 - RNA, 963 nt, Artificial Sequence
  PSGR__Homo_sapiens__AAG40776
augaguuccugcaacuucacacaugccaccuuugugcuuauugguaucccaggauuagagaaagcccauuucuggguuggcuucccccuccuuuccauguauguaguggcaauguuuggaaacugcaucguggucuucaucguaaggacggaacgcagccugcacgcuccgauguaccucuuucucugcaugcuugcagccauugaccuggccuuauccacauccaccaugccuaagauccuugcccuuuucugguuugauucccgagagauuagcuuugaggccugucuuacccagauguucuuuauucaugcccucucagccauugaauccaccauccugcuggccauggccuuugaccguuauguggccaucugccacccacugcgccaugcugcagugcucaacaauacaguaacagcccagauuggcaucguggcugugguccgcggaucccucuuuuuuuucccacugccucugcugaucaagcggcuggccuucugccacuccaauguccucucgcacuccuauuguguccaccaggauguaaugaaguuggccuaugcagacacuuugcccaaugugguauauggucuuacugccauucugcuggucaugggcguggacguaauguucaucuccuuguccuauuuucugauaauacgaacgguucugcaacugccuuccaagucagagcgggccaaggccuuuggaaccugugugucacacauuggugugguacucgccuucuaugugccacuuauuggccucucaguuguacaccgcuuuggaaacagccuucaucccauugugcguguugucaugggugacaucuaccugcugcugccuccugucaucaaucccaucaucuauggugccaaaaccaaacagaucagaacacgggugcuggcuauguucaagaucagcugugacaaggacuugcaggcugugggaggcaaguga

SEQ ID NO: 3256 - RNA, 963 nt, Artificial Sequence
  derived and/or modified sequence opt1 from PSGR__Homo_sapiens__AAG40776
augagcuccugcaacuucacccacgccaccuucgugcugaucggcauccccgggcucgagaaggcccacuucugggucggcuucccgcugcugagcauguacgugguggcgauguucgggaacugcaucgucguguucaucgugcgcacggagcggucccuccacgcccccauguaccuguuccugugcaugcucgccgccaucgaccuggcccugagcaccuccaccaugcccaagauccucgcgcuguucugguucgacagccgcgagaucuccuucgaggccugccugacccagauguucuucauccacgcccucagcgccaucgaguccacgauccugcuggcgauggccuucgaccgguacgucgccaucugccacccccuccgccacgccgccgugcugaacaacaccgugaccgcgcagaucggcaucgucgccguggugcgggggagccuguucuucuucccgcucccccugcugaucaagcgccucgccuucugccacuccaacguccugagccacuccuacugcgugcaccaggacgugaugaagcuggccuacgccgacacccuccccaacgucguguacggccugacggcgauccugcucgugaugggcgucgacgugauguucaucagccuguccuacuuccugaucauccggaccgugcuccagcugcccagcaaguccgagcgcgccaaggccuucgggaccugcgucagccacaucggcguggugcuggccuucuacgucccgcucaucgggcuguccgugguccaccgguucggcaacagccugcaccccaucgugcgcguggucaugggggacaucuaccuccugcugccgcccgugaucaaccccaucaucuacggcgccaagaccaagcagauccggacgcgcgugcucgcgauguucaagaucagcugcgacaaggaccugcaggccgucggcgggaaguga

SEQ ID NO: 3257 - RNA, 963 nt, Artificial Sequence
  derived and/or modified sequence opt2 from PSGR__Homo_sapiens__AAG40776
auguccuccugcaacuucacccacgccaccuucguccucaucggcauccccggccucgagaaggcccacuucugggucggcuucccccuccucuccauguacgucgucgccauguucggcaacugcaucgucgucuucaucguccgcaccgagcgcucccuccacgcccccauguaccucuuccucugcaugcucgccgccaucgaccucgcccucuccaccuccaccaugcccaagauccucgcccucuucugguucgacucccgcgagaucuccuucgaggccugccucacccagauguucuucauccacgcccucuccgccaucgaguccaccauccuccucgccauggccuucgaccgcuacgucgccaucugccacccccuccgccacgccgccguccucaacaacaccgucaccgcccagaucggcaucgucgccgucguccgcggcucccucuucuucuucccccucccccuccucaucaagcgccucgccuucugccacuccaacguccucucccacuccuacugcguccaccaggacgucaugaagcucgccuacgccgacacccuccccaacgucgucuacggccucaccgccauccuccucgucaugggcgucgacgucauguucaucucccucuccuacuuccucaucauccgcaccguccuccagcuccccuccaaguccgagcgcgccaaggccuucggcaccugcgucucccacaucggcgucguccucgccuucuacgucccccucaucggccucuccgucguccaccgcuucggcaacucccuccaccccaucguccgcgucgucaugggcgacaucuaccuccuccucccccccgucaucaaccccaucaucuacggcgccaagaccaagcagauccgcacccgcguccucgccauguucaagaucuccugcgacaaggaccuccaggccgucggcggcaaguga

SEQ ID NO: 3258 - RNA, 963 nt, Artificial Sequence
  derived and/or modified sequence opt3 from PSGR__Homo_sapiens__AAG40776
augagcuccugcaacuucacccacgccacauuugugcugaucggcauucccgggcucgagaaggcucauuucugggucggauuuccucuucugucuauguacguuguggcaauguucgguaauuguauaguaguguuuaucgucagaacugaaaggucauugcacgccccaauguauuuauuccugugcaugcuagcggcuauugaccucgcccugaguacgagcaccaugccgaaaauccuugcacuguuuugguucgauucccgggagauuucuuuugaagccuguuugacacagauguucuuuauccaugcucucucggcaauagagucaacuauccugcuggccauggcuuucgaccgcuacguggccauuugccacccccuccgacaugcggcaguuuuaaacaauaccgugacagcccaaaucggcauugucgcugugguacgugggagccuguuuuucuucccucuuccauugcugaucaagagacuagccuuuugucacaguaacguucucucccacucuuauugcgugcaucaggaugucaugaaacuggcauacgcugacacccuucccaaugugguguauggacugacugccauauugcucgucaugggcguugaugugauguucauuagccuguccuacuuuuuaaucauuaggacaguacugcagcucccuucaaagagugaacgggcgaaagccuucgguaccugugugagccacaucggggucgugcuugcauuuuauguuccacugaucggauugucugugguccaucgcuucggcaacucccuacaccccauugugagaguaguuaugggcgacauauaccugcuccugccuccagugaucaauccgauuaucuacggggcuaagacgaagcagauaaggacucggguccuugccauguuuaaaauuucaugcgauaaggaccugcaagcugugggagguaaauga

SEQ ID NO: 3259 - RNA, 963 nt, Artificial Sequence
  derived and/or modified sequence opt4 from PSGR__Homo_sapiens__AAG40776
augagcagcugcaacuucacccacgccaccuucgugcugaucggcauccccggccuggagaaggcccacuucugggugggcuucccccugcugagcauguacgugguggccauguucggcaacugcaucgugguguucaucgugagaaccgagagaagccugcacgcccccauguaccuguuccugugcaugcuggccgccaucgaccuggcccugagcaccagcaccaugcccaagauccuggcccuguucugguucgacagcagagagaucagcuucgaggccugccugacccagauguucuucauccacgcccugagcgccaucgagagcaccauccugcuggccauggccuucgacagauacguggccaucugccacccccugagacacgccgccgugcugaacaacaccgugaccgcccagaucggcaucguggccguggugagaggcagccuguucuucuucccccugccccugcugaucaagagacuggccuucugccacagcaacgugcugagccacagcuacugcgugcaccaggacgugaugaagcuggccuacgccgacacccugcccaacgugguguacggccugaccgccauccugcuggugaugggcguggacgugauguucaucagccugagcuacuuccugaucaucagaaccgugcugcagcugcccagcaagagcgagagagccaaggccuucggcaccugcgugagccacaucggcguggugcuggccuucuacgugccccugaucggccugagcguggugcacagauucggcaacagccugcaccccaucgugagaguggugaugggcgacaucuaccugcugcugccccccgugaucaaccccaucaucuacggcgccaagaccaagcagaucagaaccagagugcuggccauguucaagaucagcugcgacaaggaccugcaggccgugggcggcaaguga

SEQ ID NO: 3260 - RNA, 963 nt, Artificial Sequence
  derived and/or modified sequence opt5 from PSGR__Homo_sapiens__AAG40776
augagcuccugcaacuucacccacgccacauuugugcugaucggcauucccgggcucgagaaggcucauuucugggugggauuuccucugcuuucuauguacguuguggccauguucggcaauuguaucguggucuuuauugugagaacggaacggagccugcacgcgccgauguaucucuuccugugcaugcuugcugccaucgaccuggcccucuccaccucuacaaugcccaaaauucuggcucuguuuugguucgauagccgcgagaucuccuuugaagccugucucacccagauguucuuuauccaugcucugucugccauugagagcacaauccuucuggcgauggccuucgacagauacguugcuauuugccacccucuccggcaugccgcugugcugaacaauaccgucacagcccaaaucgggauuguggcgguugugcgcggaucccuguuuuucuucccccuuccucuccugaucaagagacuggccuuuugucacagcaacguccucucucacuccuauugcgugcaucaggaugugaugaaacuggcuuacgccgacacccuucccaaugucguuuauggccugacggcuauucuccuggugauggggguggaugucauguucaucagccuuucuuacuuucugaucauucggaccgugcuccagcugccuuccaagagcgaacgcgccaaagccuucggaacauguguuucucacaucggcgugguccuggcuuuuuaugugccgcucauuggccuguccguugugcauagauucgggaacagccuucaccccaucguccggguggucaugggagacauuuaccugcuccugccucccgugaucaauccuaucauuuacggcgcgaagaccaagcagauccgcacaagaguucuugccauguuuaaaauuuccugcgauaaggaccugcaagcugucgggggaaaauga

SEQ ID NO: 3261 - protein, 750 aa, Artificial Sequence
  PSM__Homo_sapiens__Q04609
MWNLLHETDSAVATARRPRWLCAGALVLAGGFFLLGFLFGWFIKSSNEATNITPKHNMKAFLDELKAENIKKFLYNFTQIPHLAGTEQNFQLAKQIQSQWKEFGLDSVELAHYDVLLSYPNKTHPNYISIINEDGNEIFNTSLFEPPPPGYENVSDIVPPFSAFSPQGMPEGDLVYVNYARTEDFFKLERDMKINCSGKIVIARYGKVFRGNKVKNAQLAGAKGVILYSDPADYFAPGVKSYPDGWNLPGGGVQRGNILNLNGAGDPLTPGYPANEYAYRRGIAEAVGLPSIPVHPIGYYDAQKLLEKMGGSAPPDSSWRGSLKVPYNVGPGFTGNFSTQKVKMHIHSTNEVTRIYNVIGTLRGAVEPDRYVILGGHRDSWVFGGIDPQSGAAVVHEIVRSFGTLKKEGWRPRRTILFASWDAEEFGLLGSTEWAEENSRLLQERGVAYINADSSIEGNYTLRVDCTPLMYSLVHNLTKELKSPDEGFEGKSLYESWTKKSPSPEFSGMPRISKLGSGNDFEVFFQRLGIASGRARYTKNWETNKFSGYPLYHSVYETYELVEKFYDPMFKYHLTVAQVRGGMVFELANSIVLPFDCRDYAVVLRKYADKIYSISMKHPQEMKTYSVSFDSLFSAVKNFTEIASKFSERLQDFDKSNPIVLRMMNDQLMFLERAFIDPLGLPDRPFYRHVIYAPSSHNKYAGESFPGIYDALFDIESKVDPSKAWGEVKRQIYVAAFTVQAAAETLSEVA

SEQ ID NO: 3262 - RNA, 2253 nt, Artificial Sequence
  PSM__Homo_sapiens__AAA60209
auguggaaucuccuucacgaaaccgacucggcuguggccaccgcgcgccgcccgcgcuggcugugcgcuggggcgcuggugcuggcggguggcuucuuucuccucggcuuccucuucgggugguuuauaaaauccuccaaugaagcuacuaacauuacuccaaagcauaauaugaaagcauuuuuggaugaauugaaagcugagaacaucaagaaguucuuauauaauuuuacacagauaccacauuuagcaggaacagaacaaaacuuucagcuugcaaagcaaauucaaucccaguggaaagaauuuggccuggauucuguugagcuagcacauuaugauguccuguuguccuacccaaauaagacucaucccaacuacaucucaauaauuaaugaagauggaaaugagauuuucaacacaucauuauuugaaccaccuccuccaggauaugaaaauguuucggauauuguaccaccuuucagugcuuucucuccucaaggaaugccagagggcgaucuaguguauguuaacuaugcacgaacugaagacuucuuuaaauuggaacgggacaugaaaaucaauugcucugggaaaauuguaauugccagauaugggaaaguuuucagaggaaauaagguuaaaaaugcccagcuggcaggggccaaaggagucauucucuacuccgacccugcugacuacuuugcuccuggggugaaguccuauccagaugguuggaaucuuccuggaggugguguccagcguggaaauauccuaaaucugaauggugcaggagacccucucacaccagguuacccagcaaaugaauaugcuuauaggcguggaauugcagaggcuguuggucuuccaaguauuccuguucauccaauuggauacuaugaugcacagaagcuccuagaaaaaauggguggcucagcaccaccagauagcagcuggagaggaagucucaaagugcccuacaauguuggaccuggcuuuacuggaaacuuuucuacacaaaaagucaagaugcacauccacucuaccaaugaagugacaagaauuuacaaugugauagguacucucagaggagcaguggaaccagacagauaugucauucugggaggucaccgggacucauggguguuuggugguauugacccucagaguggagcagcuguuguucaugaaauugugaggagcuuuggaacacugaaaaaggaaggguggagaccuagaagaacaauuuuguuugcaagcugggaugcagaagaauuuggucuucuugguucuacugagugggcagaggagaauucaagacuccuucaagagcguggcguggcuuauauuaaugcugacucaucuauagaaggaaacuacacucugagaguugauuguacaccgcugauguacagcuugguacacaaccuaacaaaagagcugaaaagcccugaugaaggcuuugaaggcaaaucucuuuaugaaaguuggacuaaaaaaaguccuuccccagaguucaguggcaugcccaggauaagcaaauugggaucuggaaaugauuuugagguguucuuccaacgacuuggaauugcuucaggcagagcacgguauacuaaaaauugggaaacaaacaaauucagcggcuauccacuguaucacagugucuaugaaacauaugaguugguggaaaaguuuuaugauccaauguuuaaauaucaccucacuguggcccagguucgaggagggaugguguuugagcuagccaauuccauagugcucccuuuugauugucgagauuaugcuguaguuuuaagaaaguaugcugacaaaaucuacaguauuucuaugaaacauccacaggaaaugaagacauacaguguaucauuugauucacuuuuuucugcaguaaagaauuuuacagaaauugcuuccaaguucagugagagacuccaggacuuugacaaaagcaacccaauaguauuaagaaugaugaaugaucaacucauguuucuggaaagagcauuuauugauccauuaggguuaccagacaggccuuuuuauaggcaugucaucuaugcuccaagcagccacaacaaguaugcaggggagucauucccaggaauuuaugaugcucuguuugauauugaaagcaaaguggacccuuccaaggccuggggagaagugaagagacagauuuauguugcagccuucacagugcaggcagcugcagagacuuugagugaaguagccuaa

SEQ ID NO: 3263 - RNA, 2253 nt, Artificial Sequence
  derived and/or modified sequence opt1 from PSM__Homo_sapiens__AAA60209
auguggaaccugcuccacgagaccgacagcgccguggccaccgcgcgccggccccgcuggcugugcgccggggcccugguccucgccgggggcuucuuccugcugggguuccucuucggcugguucaucaaguccagcaacgaggccacgaacaucaccccgaagcacaacaugaaggcguuccuggacgagcugaaggccgagaacaucaagaaguuccucuacaacuucacccagaucccccaccuggccgggaccgagcagaacuuccagcuggccaagcagauccagucccaguggaaggaguucggccucgacagcguggagcuggcgcacuacgacgugcugcucuccuaccccaacaagacgcaccccaacuacaucagcaucaucaacgaggacggcaacgagaucuucaacaccucccuguucgagccgcccccgcccggguacgagaacgucagcgacaucgugccgcccuucuccgccuucagcccccagggcaugcccgagggggaccugguguacgucaacuacgcccggaccgaggacuucuucaagcucgagcgcgacaugaagaucaacugcuccggcaagaucgugaucgcccgguacgggaagguguuccgcggcaacaaggucaagaacgcccagcuggcgggcgccaagggggugauccuguacagcgaccccgccgacuacuucgcccccggcgugaaguccuaccccgacggguggaaccuccccggcggcgggguccagcggggcaacauccugaaccugaacggggccggcgacccgcucacccccggguaccccgcgaacgaguacgccuaccgccggggcaucgccgaggccgugggccugcccagcaucccggugcaccccaucggguacuacgacgcccagaagcugcucgagaagaugggcggguccgcgccgcccgacagcuccuggcgcggcagccugaagguccccuacaacguggggcccggcuucacgggcaacuucuccacccagaaggugaagaugcacauccacagcaccaacgaggucacccggaucuacaacgugaucgggacgcugcgcggcgccguggagcccgaccgguacgucauccucgggggccaccgcgacagcuggguguucgggggcaucgacccccaguccggcgccgccgugguccacgagaucgugcggagcuucgggacccugaagaaggagggcuggcgcccgcggcgcaccauccuguucgccuccugggacgcggaggaguucgggcuccugggcagcaccgagugggccgaggagaacucccggcugcuccaggagcgcggcgucgccuacaucaacgccgacagcuccaucgaggggaacuacacgcugcggguggacugcacgccccugauguacagccucgugcacaaccugaccaaggagcugaagucccccgacgagggcuucgagggcaagagccucuacgaguccuggaccaagaaguccccgagccccgaguucagcgggaugccccgcaucuccaagcuggggagcggcaacgacuucgaggucuucuuccagcgccugggcaucgcguccgggcgggcccgcuacaccaagaacugggagaccaacaaguucagcggcuacccccucuaccacuccguguacgagaccuacgagcugguggagaaguucuacgacccgauguucaaguaccaccugaccgucgcccaggugcgcgggggcaugguguucgagcucgccaacagcaucguccugcccuucgacugccgggacuacgccguggugcugcggaaguacgcggacaagaucuacagcaucuccaugaagcacccccaggagaugaagacguacagcgucuccuucgacagccuguucuccgccgugaagaacuucaccgagaucgccagcaaguucuccgagcgccuccaggacuucgacaagagcaaccccaucgugcugcggaugaugaacgaccagcugauguuccucgagcgcgccuucaucgacccgcuggggcugcccgaccggcccuucuaccgccacgucaucuacgcccccuccagccacaacaaguacgcgggcgaguccuucccgggcaucuacgacgcccucuucgacaucgagagcaagguggaccccuccaaggccuggggcgaggugaagcggcagaucuacgucgccgccuucaccgugcaggcggccgccgagacccugagcgagguggccuga

SEQ ID NO: 3264 - RNA, 2253 nt, Artificial Sequence
  derived and/or modified sequence opt2 from PSM__Homo_sapiens__AAA60209
auguggaaccuccuccacgagaccgacuccgccgucgccaccgcccgccgcccccgcuggcucugcgccggcgcccucguccucgccggcggcuucuuccuccucggcuuccucuucggcugguucaucaaguccuccaacgaggccaccaacaucacccccaagcacaacaugaaggccuuccucgacgagcucaaggccgagaacaucaagaaguuccucuacaacuucacccagaucccccaccucgccggcaccgagcagaacuuccagcucgccaagcagauccagucccaguggaaggaguucggccucgacuccgucgagcucgcccacuacgacguccuccucuccuaccccaacaagacccaccccaacuacaucuccaucaucaacgaggacggcaacgagaucuucaacaccucccucuucgagccccccccccccggcuacgagaacgucuccgacaucgucccccccuucuccgccuucuccccccagggcaugcccgagggcgaccucgucuacgucaacuacgcccgcaccgaggacuucuucaagcucgagcgcgacaugaagaucaacugcuccggcaagaucgucaucgcccgcuacggcaaggucuuccgcggcaacaaggucaagaacgcccagcucgccggcgccaagggcgucauccucuacuccgaccccgccgacuacuucgcccccggcgucaaguccuaccccgacggcuggaaccuccccggcggcggcguccagcgcggcaacauccucaaccucaacggcgccggcgacccccucacccccggcuaccccgccaacgaguacgccuaccgccgcggcaucgccgaggccgucggccuccccuccauccccguccaccccaucggcuacuacgacgcccagaagcuccucgagaagaugggcggcuccgccccccccgacuccuccuggcgcggcucccucaagguccccuacaacgucggccccggcuucaccggcaacuucuccacccagaaggucaagaugcacauccacuccaccaacgaggucacccgcaucuacaacgucaucggcacccuccgcggcgccgucgagcccgaccgcuacgucauccucggcggccaccgcgacuccugggucuucggcggcaucgacccccaguccggcgccgccgucguccacgagaucguccgcuccuucggcacccucaagaaggagggcuggcgcccccgccgcaccauccucuucgccuccugggacgccgaggaguucggccuccucggcuccaccgagugggccgaggagaacucccgccuccuccaggagcgcggcgucgccuacaucaacgccgacuccuccaucgagggcaacuacacccuccgcgucgacugcaccccccucauguacucccucguccacaaccucaccaaggagcucaagucccccgacgagggcuucgagggcaagucccucuacgaguccuggaccaagaagucccccucccccgaguucuccggcaugccccgcaucuccaagcucggcuccggcaacgacuucgaggucuucuuccagcgccucggcaucgccuccggccgcgcccgcuacaccaagaacugggagaccaacaaguucuccggcuacccccucuaccacuccgucuacgagaccuacgagcucgucgagaaguucuacgaccccauguucaaguaccaccucaccgucgcccagguccgcggcggcauggucuucgagcucgccaacuccaucguccuccccuucgacugccgcgacuacgccgucguccuccgcaaguacgccgacaagaucuacuccaucuccaugaagcacccccaggagaugaagaccuacuccgucuccuucgacucccucuucuccgccgucaagaacuucaccgagaucgccuccaaguucuccgagcgccuccaggacuucgacaaguccaaccccaucguccuccgcaugaugaacgaccagcucauguuccucgagcgcgccuucaucgacccccucggccuccccgaccgccccuucuaccgccacgucaucuacgcccccuccucccacaacaaguacgccggcgaguccuuccccggcaucuacgacgcccucuucgacaucgaguccaaggucgaccccuccaaggccuggggcgaggucaagcgccagaucuacgucgccgccuucaccguccaggccgccgccgagacccucuccgaggucgccuga

SEQ ID NO: 3265 - RNA, 2253 nt, Artificial Sequence
  derived and/or modified sequence opt3 from PSM__Homo_sapiens__AAA60209
auguggaaccugcuccacgagaccgacagcgccguggcuacagcaagaaggccccgguggcuuugcgccggcgcgcuggucuuggcugggggauucuuuuuacuggguuuccuauuuggcugguucaucaaguccucuaaugaagccacuaacauuacgccuaaacauaauaugaaggcauuucucgaugagcugaaagccgaaaacauaaagaaauuccuuuacaauuuuacccagaucccacaccuggcugggacagagcaaaacuuccaguuggcaaagcagauucagucacaauggaaggaauuuggacucgacaguguugagcuggcccauuaugaugugcugcucagcuacccgaauaaaacucaccccaacuauaucuccauuaucaaugaggacggcaacgaaauauucaauaccucuuuauuugagccuccacccccugguuacgaaaacguaucggauaucgugccacccuucucagcuuuuagcccucaggggaugccagagggagaccuggucuaugugaauuacgcccgcacagaggauuucuucaagcuagaacgagacaugaaaauuaacuguaguggcaagaucguuauugcgcguuauggcaaaguguuuagagggaauaaggucaagaacgcacaguuggccggagcuaaaggugugauccuguacuccgauccggccgacuacuucgcacccggcguaaagucuuauccugauggguggaaccuaccaggaggcgguguucagagggggaauauacucaaccugaauggagcuggcgacccccuuaccccuggcuacccagccaacgaguaugcguaccggcgcgggauugccgaagcagugggacugcccagcaucccgguccauccuauugguuauuacgaugcucaaaaauugcucgagaagaugggcggguccgcucccccagacucaaguuggagaggaagccugaaagugccuuauaaugugggccccgguuuuacugggaacuucucuacacagaaggucaaaaugcacauccacuccaccaaugaaguuacgaggaucuacaacgugauuggcacuuuacggggagccguagagccagaccgcuacgugauacugggcgggcaucgagauucaugggucuuuggagguaucgacccccagagcggcgccgcagugguucacgagauugugagaaguuucgggacccucaagaaggaaggauggaggccucggcguacaauccuuuuugccucuugggaugcugaggaguucggccuguuggguuccacugaaugggcggaagagaauagccgccuacugcaggagagaggggucgcauauauaaacgccgacucgucuauugaaggcaauuacacccucaggguggauugcacaccacugauguauucccuuguacauaaccugaccaaagaguugaagucaccggacgaaggauuugagggcaaaagucucuacgaaagcuggacgaagaaaucccccucuccugaguucagcgggaugccacggaucucaaagcugggaagugguaaugauuuugagguuuucuuucaacgauuaggcaucgcuuccgggcgcgccagauauacuaagaacugggaaacaaauaaauucagcggauacccccuguaucacucuguguacgagaccuacgaacuugucgagaaguucuaugacccuauguuuaaauaccaccucacuguggcacaggucaggggcgguaugguguucgagcuggccaacucaauuguucuuccauuugauugucgggacuaugcugugguauugcgcaaguacgccgauaaaaucuauaguauuagcaugaagcauccccaggaaaugaagacauacuccgucucuuucgacucgcuguuuagcgcagugaaaaacuucaccgagauagcguccaaguuuucagaaagacuccaagacuucgauaaaaguaauccgaucguucugaggaugaugaacgaccagcuuauguuucuggagcgugcuuucauugauccuuuggggcucccagaccggcccuuuuaucgacacgugaucuacgccccuucuagccauaauaaguacgcaggcgaauccuuccccggaaucuaugaugcccuguuugacauugagucaaaagucgauccaagcaaggcuuggggcgaggugaagagacagauauacguagccgcauucacggugcaggcugccgcggaaaccuuaucugagguugccuga

SEQ ID NO: 3266 - RNA, 2253 nt, Artificial Sequence
  derived and/or modified sequence opt4 from PSM__Homo_sapiens__AAA60209
auguggaaccugcugcacgagaccgacagcgccguggccaccgccagaagacccagauggcugugcgccggcgcccuggugcuggccggcggcuucuuccugcugggcuuccuguucggcugguucaucaagagcagcaacgaggccaccaacaucacccccaagcacaacaugaaggccuuccuggacgagcugaaggccgagaacaucaagaaguuccuguacaacuucacccagaucccccaccuggccggcaccgagcagaacuuccagcuggccaagcagauccagagccaguggaaggaguucggccuggacagcguggagcuggcccacuacgacgugcugcugagcuaccccaacaagacccaccccaacuacaucagcaucaucaacgaggacggcaacgagaucuucaacaccagccuguucgagccccccccccccggcuacgagaacgugagcgacaucgugccccccuucagcgccuucagcccccagggcaugcccgagggcgaccugguguacgugaacuacgccagaaccgaggacuucuucaagcuggagagagacaugaagaucaacugcagcggcaagaucgugaucgccagauacggcaagguguucagaggcaacaaggugaagaacgcccagcuggccggcgccaagggcgugauccuguacagcgaccccgccgacuacuucgcccccggcgugaagagcuaccccgacggcuggaaccugcccggcggcggcgugcagagaggcaacauccugaaccugaacggcgccggcgacccccugacccccggcuaccccgccaacgaguacgccuacagaagaggcaucgccgaggccgugggccugcccagcauccccgugcaccccaucggcuacuacgacgcccagaagcugcuggagaagaugggcggcagcgccccccccgacagcagcuggagaggcagccugaaggugcccuacaacgugggccccggcuucaccggcaacuucagcacccagaaggugaagaugcacauccacagcaccaacgaggugaccagaaucuacaacgugaucggcacccugagaggcgccguggagcccgacagauacgugauccugggcggccacagagacagcuggguguucggcggcaucgacccccagagcggcgccgccguggugcacgagaucgugagaagcuucggcacccugaagaaggagggcuggagacccagaagaaccauccuguucgccagcugggacgccgaggaguucggccugcugggcagcaccgagugggccgaggagaacagcagacugcugcaggagagaggcguggccuacaucaacgccgacagcagcaucgagggcaacuacacccugagaguggacugcaccccccugauguacagccuggugcacaaccugaccaaggagcugaagagccccgacgagggcuucgagggcaagagccuguacgagagcuggaccaagaagagccccagccccgaguucagcggcaugcccagaaucagcaagcugggcagcggcaacgacuucgagguguucuuccagagacugggcaucgccagcggcagagccagauacaccaagaacugggagaccaacaaguucagcggcuacccccuguaccacagcguguacgagaccuacgagcugguggagaaguucuacgaccccauguucaaguaccaccugaccguggcccaggugagaggcggcaugguguucgagcuggccaacagcaucgugcugcccuucgacugcagagacuacgccguggugcugagaaaguacgccgacaagaucuacagcaucagcaugaagcacccccaggagaugaagaccuacagcgugagcuucgacagccuguucagcgccgugaagaacuucaccgagaucgccagcaaguucagcgagagacugcaggacuucgacaagagcaaccccaucgugcugagaaugaugaacgaccagcugauguuccuggagagagccuucaucgacccccugggccugcccgacagacccuucuacagacacgugaucuacgcccccagcagccacaacaaguacgccggcgagagcuuccccggcaucuacgacgcccuguucgacaucgagagcaagguggaccccagcaaggccuggggcgaggugaagagacagaucuacguggccgccuucaccgugcaggccgccgccgagacccugagcgagguggccuga

SEQ ID NO: 3267 - RNA, 2253 nt, Artificial Sequence
  derived and/or modified sequence opt5 from PSM__Homo_sapiens__AAA60209
auguggaaccugcuccacgagaccgacagcgccguggcuacagccagacggccccgcuggcugugcgcgggcgcucuuguccuggccgggggauucuuucuccugggcuuccuuuuugggugguucaucaaguccucuaaugaagccacgaacauuaccccuaaacauaauaugaaggcuuuucuggaugagcucaaagccgaaaacaucaagaaauuccuguacaauuuuacacagauuccgcaccuggcuggaaccgagcaaaacuuccagcucgccaagcagauccagagccaauggaaggaauuuggccuggacuccguugagcuugcgcauuaugaugugcugcucucuuaccccaauaaaacacacccuaacuauauuagcaucaucaaugaggacgggaacgaaauuuucaauaccucccuguuugagcccccucccccuggauacgaaaacgugucugauaucgucccgcccuucagcgccuuuuccccucagggcaugcccgagggcgaccuuguguauguuaauuacgcuagaacagaggauuucuucaagcuggaacgggacaugaaaauuaacuguagcgggaagaucgugauugcccgcuauggaaaagucuuuagaggcaauaaggugaagaacgcucagcucgccggggcgaaaggaguuauccuguacucugauccugccgacuacuucgcucccggcgugaaguccuauccggauggguggaaccugccuggaggcggcguccagcgggggaauauucucaaccugaauggagccggcgacccccuuaccccuggguaccccgcuaacgaguaugccuaccgcagaggaaucgccgaagcugugggccugcccagcaucccugugcauccgauuggguauuacgaugcgcaaaaacuccuggagaagaugggaggcucugcucccccugacuccagcuggcggggcucucuuaaaguccccuauaauguugggccuggauuuacgggcaacuucuccacccagaaggugaaaaugcacauccacagcacaaaugaagugacccgcauuuacaacgucaucgggacacugagaggagccguggagcccgaccgguacguuauucucggcgggcaucgcgauuccuggguguuuggcggaaucgacccgcagucuggcgccgccgucgugcacgagaucguucggagcuucgggacccugaagaaggaaggauggagaccucgcagaacgauucuguuugcuuccugggaugccgaggaguucggccuccuggggagcacagagugggcggaagaaaauucucggcuucugcaggagagaggaguggcuuauaucaacgccgacuccagcauugaaggcaauuacacccuccgcgucgauugcacaccccugauguauucucuugugcauaaccugaccaaagagcucaagagcccugacgaaggguuugagggcaaaucccuguacgaaucuuggaccaagaaaagccccuccccugaguucagcggaaugccccggaucucuaagcugggcuccgggaaugauuuugaggucuucuuucaaagacucggaauugccagcggccgcgcucgguauacaaagaacugggaaacgaauaaauucucuggguacccgcuguaucacuccguguacgagaccuacgaacuuguugagaaguucuaugacccuauguuuaaauaccaccugacaguggcccaggucagaggaggcaugguguucgagcucgcuaacagcaucguucugcccuuugauugucgcgacuaugccgugguccugcggaaguacgcggauaaaaucuauuccauuucuaugaagcauccccaggaaaugaagaccuacagcguguccuucgacucucuuuuuagcgccgugaaaaacuucacagagaucgcuuccaaguuuagcgaaagacuccaagacuucgauaaaucuaauccuauuguucugcgcaugaugaacgaccagcugauguuucucgagcgggccuucaucgauccgcuggggcuucccgacagaccuuuuuaucgccacgucauuuacgcucccuccagccauaauaaguacgccggcgaaucuuucccuggaaucuaugaugcgcuguuugacauugaguccaaaguggaucccagcaaggccuggggcgaggugaagcggcagaucuacgucgcugccuucaccgugcaggcugccgccgaaacgcucucugagguugcuuga

SEQ ID NO: 3268 - protein, 1306 aa, Artificial Sequence
  PTPRC__Homo_sapiens__NP_002829
MTMYLWLKLLAFGFAFLDTEVFVTGQSPTPSPTGLTTAKMPSVPLSSDPLPTHTTAFSPASTFERENDFSETTTSLSPDNTSTQVSPDSLDNASAFNTTGVSSVQTPHLPTHADSQTPSAGTDTQTFSGSAANAKLNPTPGSNAISDVPGERSTASTFPTDPVSPLTTTLSLAHHSSAALPARTSNTTITANTSDAYLNASETTTLSPSGSAVISTTTIATTPSKPTCDEKYANITVDYLYNKETKLFTAKLNVNENVECGNNTCTNNEVHNLTECKNASVSISHNSCTAPDKTLILDVPPGVEKFQLHDCTQVEKADTTICLKWKNIETFTCDTQNITYRFQCGNMIFDNKEIKLENLEPEHEYKCDSEILYNNHKFTNASKIIKTDFGSPGEPQIIFCRSEAAHQGVITWNPPQRSFHNFTLCYIKETEKDCLNLDKNLIKYDLQNLKPYTKYVLSLHAYIIAKVQRNGSAAMCHFTTKSAPPSQVWNMTVSMTSDNSMHVKCRPPRDRNGPHERYHLEVEAGNTLVRNESHKNCDFRVKDLQYSTDYTFKAYFHNGDYPGEPFILHHSTSYNSKALIAFLAFLIIVTSIALLVVLYKIYDLHKKRSCNLDEQQELVERDDEKQLMNVEPIHADILLETYKRKIADEGRLFLAEFQSIPRVFSKFPIKEARKPFNQNKNRYVDILPYDYNRVELSEINGDAGSNYINASYIDGFKEPRKYIAAQGPRDETVDDFWRMIWEQKATVIVMVTRCEEGNRNKCAEYWPSMEEGTRAFGDVVVKINQHKRCPDYIIQKLNIVNKKEKATGREVTHIQFTSWPDHGVPEDPHLLLKLRRRVNAFSNFFSGPIVVHCSAGVGRTGTYIGIDAMLEGLEAENKVDVYGYVVKLRRQRCLMVQVEAQYILIHQALVEYNQFGETEVNLSELHPYLHNMKKRDPPSEPSPLEAEFQRLPSYRSWRTQHIGNQEENKSKNRNSNVIPYDYNRVPLKHELEMSKESEHDSDESSDDDSDSEEPSKYINASFIMSYWKPEVMIAAQGPLKETIGDFWQMIFQRKVKVIVMLTELKHGDQEICAQYWGEGKQTYGDIEVDLKDTDKSSTYTLRVFELRHSKRKDSRTVYQYQYTNWSVEQLPAEPKELISMIQVVKQKLPQKNSSEGNKHHKSTPLLIHCRDGSQQTGIFCALLNLLESAETEEVVDIFQVVKALRKARPGMVSTFEQYQFLYDVIASTYPAQNGQVKKNNHQEDKIEFDNEVDKVKQDANCVNPLGAPEKLPEAKEQAEGSEPTSGTEGPEHSVNGPASPALNQGS

SEQ ID NO: 3269 - RNA, 3921 nt, Artificial Sequence
  PTPRC__Homo_sapiens__CCDS1397.2
augaccauguauuuguggcuuaaacucuuggcauuuggcuuugccuuucuggacacagaaguauuugugacagggcaaagcccaacaccuucccccacuggauugacuacagcaaagaugcccaguguuccacuuucaagugaccccuuaccuacucacaccacugcauucucacccgcaagcaccuuugaaagagaaaaugacuucucagagaccacaacuucucuuaguccagacaauacuuccacccaaguauccccggacucuuuggauaaugcuagugcuuuuaauaccacagguguuucaucaguacagacgccucaccuucccacgcacgcagacucgcagacgcccucugcuggaacugacacgcagacauucagcggcuccgccgccaaugcaaaacucaacccuaccccaggcagcaaugcuaucucagaugucccaggagagaggaguacagccagcaccuuuccuacagacccaguuuccccauugacaaccacccucagccuugcacaccacagcucugcugccuuaccugcacgcaccuccaacaccaccaucacagcgaacaccucagaugccuaccuuaaugccucugaaacaaccacucugagcccuucuggaagcgcugucauuucaaccacaacaauagcuacuacuccaucuaagccaacaugugaugaaaaauaugcaaacaucacuguggauuacuuauauaacaaggaaacuaaauuauuuacagcaaagcuaaauguuaaugagaauguggaauguggaaacaauacuugcacaaacaaugaggugcauaaccuuacagaauguaaaaaugcgucuguuuccauaucucauaauucauguacugcuccugauaagacauuaauauuagaugugccaccagggguugaaaaguuucaguuacaugauuguacacaaguugaaaaagcagauacuacuauuuguuuaaaauggaaaaauauugaaaccuuuacuugugauacacagaauauuaccuacagauuucagugugguaauaugauauuugauaauaaagaaauuaaauuagaaaaccuugaacccgaacaugaguauaagugugacucagaaauacucuauaauaaccacaaguuuacuaacgcaaguaaaauuauuaaaacagauuuugggaguccaggagagccucagauuauuuuuuguagaagugaagcugcacaucaaggaguaauuaccuggaaucccccucaaagaucauuucauaauuuuacccucuguuauauaaaagagacagaaaaagauugccucaaucuggauaaaaaccugaucaaauaugauuugcaaaauuuaaaaccuuauacgaaauauguuuuaucauuacaugccuacaucauugcaaaagugcaacguaauggaagugcugcaaugugucauuucacaacuaaaagugcuccuccaagccaggucuggaacaugacugucuccaugacaucagauaauaguaugcaugucaaguguaggccucccagggaccguaauggcccccaugaacguuaccauuuggaaguugaagcuggaaauacucugguuagaaaugagucgcauaagaauugcgauuuccguguaaaagaucuucaauauucaacagacuacacuuuuaaggccuauuuucacaauggagacuauccuggagaacccuuuauuuuacaucauucaacaucuuauaauucuaaggcacugauagcauuucuggcauuucugauuauugugacaucaauagcccugcuuguuguucucuacaaaaucuaugaucuacauaagaaaagauccugcaauuuagaugaacagcaggagcuuguugaaagggaugaugaaaaacaacugaugaauguggagccaauccaugcagauauuuuguuggaaacuuauaagaggaagauugcugaugaaggaagacuuuuucuggcugaauuucagagcaucccgcggguguucagcaaguuuccuauaaaggaagcucgaaagcccuuuaaccagaauaaaaaccguuauguugacauucuuccuuaugauuauaaccguguugaacucucugagauaaacggagaugcagggucaaacuacauaaaugccagcuauauugaugguuucaaagaacccaggaaauacauugcugcacaaggucccagggaugaaacuguugaugauuucuggaggaugauuugggaacagaaagccacaguuauugucauggucacucgaugugaagaaggaaacaggaacaagugugcagaauacuggccgucaauggaagagggcacucgggcuuuuggagauguuguuguaaagaucaaccagcacaaaagauguccagauuacaucauucagaaauugaacauuguaaauaaaaaagaaaaagcaacuggaagagaggugacucacauucaguucaccagcuggccagaccacggggugccugaggauccucacuugcuccucaaacugagaaggagagugaaugccuucagcaauuucuucaguggucccauuguggugcacugcagugcugguguugggcgcacaggaaccuauaucggaauugaugccaugcuagaaggccuggaagccgagaacaaaguggauguuuaugguuauguugucaagcuaaggcgacagagaugccugaugguucaaguagaggcccaguacaucuugauccaucaggcuuugguggaauacaaucaguuuggagaaacagaagugaauuugucugaauuacauccauaucuacauaacaugaagaaaagggauccacccagugagccgucuccacuagaggcugaauuccagagacuuccuucauauaggagcuggaggacacagcacauuggaaaucaagaagaaaauaaaaguaaaaacaggaauucuaaugucaucccauaugacuauaacagagugccacuuaaacaugagcuggaaaugaguaaagagagugagcaugauucagaugaauccucugaugaugacagugauucagaggaaccaagcaaauacaucaaugcaucuuuuauaaugagcuacuggaaaccugaagugaugauugcugcucagggaccacugaaggagaccauuggugacuuuuggcagaugaucuuccaaagaaaagucaaaguuauuguuaugcugacagaacugaaacauggagaccaggaaaucugugcucaguacuggggagaaggaaagcaaacauauggagauauugaaguugaccugaaagacacagacaaaucuucaacuuauacccuucgugucuuugaacugagacauuccaagaggaaagacucucgaacuguguaccaguaccaauauacaaacuggaguguggagcagcuuccugcagaacccaaggaauuaaucucuaugauucaggucgucaaacaaaaacuuccccagaagaauuccucugaagggaacaagcaucacaagaguacaccucuacucauucacugcagggauggaucucagcaaacgggaauauuuugugcuuuguuaaaucucuuagaaagugcggaaacagaagagguaguggauauuuuucaagugguaaaagcucuacgcaaagcuaggccaggcaugguuuccacauucgagcaauaucaauuccuauaugacgucauugccagcaccuacccugcucagaauggacaaguaaagaaaaacaaccaucaagaagauaaaauugaauuugauaaugaaguggacaaaguaaagcaggaugcuaauuguguuaauccacuuggugccccagaaaagcucccugaagcaaaggaacaggcugaagguucugaacccacgaguggcacugaggggccagaacauucugucaaugguccugcaaguccagcuuuaaaucaagguucauag

SEQ ID NO: 3270 - RNA, 3921 nt, Artificial Sequence
  derived and/or modified sequence opt1 from PTPRC__Homo_sapiens__CCDS1397.2
augaccauguaccuguggcucaagcugcuggccuucggcuucgccuuccucgacaccgagguguucgucacggggcagagccccaccccgucccccaccggccugaccacggcgaagaugcccagcgugccccuguccagcgacccgcuccccacccacaccaccgccuucucccccgccagcacguucgagcgcgagaacgacuucuccgagaccaccaccagccugucccccgacaacacgagcacccagguguccccggacagccuggacaacgccuccgccuucaacaccaccggggucagcuccgugcagacgccccaccuccccacccacgcggacagccagacccccuccgccggcaccgacacgcagaccuucagcggguccgccgccaacgcgaagcugaacccgacccccggcagcaacgccaucagcgacgugcccggcgagcgguccaccgccagcacguuccccaccgacccggucagcccccugaccaccacgcucucccuggcccaccacuccagcgccgcgcugcccgcccgcaccuccaacaccaccaucacggccaacaccagcgacgccuaccucaacgccuccgagaccaccacgcugagccccuccgggagcgcggugaucuccaccaccaccaucgccaccacgccgagcaagcccacgugcgacgagaaguacgccaacaucaccguggacuaccuguacaacaaggagaccaagcuguucaccgccaagcugaacgucaacgagaacguggagugcggcaacaacacgugcaccaacaacgaggugcacaaccugaccgagugcaagaacgccuccgucagcaucucccacaacagcugcaccgcgcccgacaagacccucauccuggacgugcccccggggguggagaaguuccagcugcacgacugcacccaggucgagaaggccgacaccacgaucugccucaaguggaagaacaucgagaccuucacgugcgacacccagaacaucaccuaccgguuccagugcggcaacaugaucuucgacaacaaggagaucaagcuggagaaccuggagcccgagcacgaguacaagugcgacuccgagauccucuacaacaaccacaaguucaccaacgccagcaagaucaucaagaccgacuucgggagccccggcgagccccagaucaucuucugccgcuccgaggccgcccaccagggcgugaucaccuggaacccgccccagcggagcuuccacaacuucacgcugugcuacaucaaggagaccgagaaggacugccugaaccucgacaagaaccugaucaaguacgaccugcagaaccucaagcccuacaccaaguacgugcugucccugcacgcguacaucaucgccaagguccagcgcaacgggagcgccgccaugugccacuucaccacgaaguccgcgccgcccagccagguguggaacaugaccguguccaugaccagcgacaacuccaugcacgucaagugccggccgccccgcgaccggaacggcccccacgagcgcuaccaccucgagguggaggccgggaacacccuggugcggaacgagagccacaagaacugcgacuuccgcgucaaggaccugcaguacuccacggacuacaccuucaaggccuacuuccacaacggcgacuaccccggcgagcccuucauccuccaccacagcaccuccuacaacagcaaggcccugaucgccuuccuggcguuccucaucaucgugaccuccaucgcccugcuggucgugcucuacaagaucuacgaccugcacaagaagcggagcugcaaccuggacgagcagcaggagcucguggagcgcgacgacgagaagcagcugaugaacgucgagcccauccacgccgacauccugcuggagacguacaagcggaagaucgccgacgaggggcgccucuuccuggccgaguuccaguccaucccgcggguguucagcaaguuccccaucaaggaggcgcgcaagcccuucaaccagaacaagaaccgguacguggacauccugcccuacgacuacaaccgcgucgagcucagcgagaucaacggcgacgccggguccaacuacaucaacgccagcuacaucgacggcuucaaggagccgcggaaguacaucgccgcccaggggccccgcgacgagaccguggacgacuucuggcgcaugaucugggagcagaaggcgaccgugaucgucauggugacccggugcgaggagggcaaccgcaacaagugcgccgaguacuggcccuccauggaggagggcacgcgggccuucggggacguggucgugaagaucaaccagcacaagcgcugccccgacuacaucauccagaagcugaacaucgugaacaagaaggagaaggccaccggccgggaggucacccacauccaguucaccagcuggccggaccacggggugcccgaggacccccaccuccuccugaagcugcgccggcgcgugaacgcguucuccaacuucuucagcggccccaucgucgugcacugcuccgccggggugggccggaccggcacguacaucgggaucgacgccaugcucgagggccuggaggccgagaacaaggucgacguguacggguacguggucaagcugcgccggcagcgcugccucaugguccagguggaggcccaguacauccugauccaccaggcgcugguggaguacaaccaguucggcgagaccgaggugaaccucagcgagcugcacccguaccugcacaacaugaagaagcgggacccgcccuccgagcccagcccccucgaggccgaguuccagcgccugcccuccuaccggagcuggcgcacccagcacaucgggaaccaggaggagaacaaguccaagaaccggaacagcaacgugauccccuacgacuacaaccgcgucccgcugaagcacgagcucgagauguccaaggagagcgagcacgacuccgacgagagcuccgacgacgacagcgacagcgaggagcccuccaaguacaucaacgccagcuucaucauguccuacuggaagcccgaggugaugaucgccgcccagggcccccugaaggagaccaucggcgacuucuggcagaugaucuuccagcggaaggugaaggucaucgugaugcugacggagcucaagcacggggaccaggagaucugcgcgcaguacuggggcgaggggaagcagaccuacggcgacaucgagguggaccugaaggacaccgacaagagcuccaccuacacgcugcgcgucuucgagcuccgccacagcaagcggaaggacucccgcaccguguaccaguaccaguacaccaacuggagcguggagcagcugccggccgagcccaaggagcugaucuccaugauccaggucgugaagcagaagcucccccagaagaacagcuccgagggcaacaagcaccacaagagcacgccccugcugauccacugccgggacgggucccagcagaccggcaucuucugcgcccuccugaaccugcucgagagcgccgagaccgaggagguggucgacaucuuccagguggugaaggcccugcgcaaggcgcggccggggauggucuccaccuucgagcaguaccaguuccuguacgacgugaucgccagcaccuaccccgcccagaacggccaggugaagaagaacaaccaccaggaggacaagaucgaguucgacaacgaggucgacaaggugaagcaggacgccaacugcgugaacccccucggggcgcccgagaagcugccggaggccaaggagcaggccgagggcuccgagcccacgagcggcaccgaggggcccgagcacuccgucaacggccccgccagcccggcccugaaccaggggagcuga

SEQ ID NO: 3271 - RNA, 3921 nt, Artificial Sequence
  derived and/or modified sequence opt2 from PTPRC__Homo_sapiens__CCDS1397.2
augaccauguaccucuggcucaagcuccucgccuucggcuucgccuuccucgacaccgaggucuucgucaccggccagucccccacccccucccccaccggccucaccaccgccaagaugcccuccgucccccucuccuccgacccccuccccacccacaccaccgccuucucccccgccuccaccuucgagcgcgagaacgacuucuccgagaccaccaccucccucucccccgacaacaccuccacccaggucucccccgacucccucgacaacgccuccgccuucaacaccaccggcgucuccuccguccagaccccccaccuccccacccacgccgacucccagacccccuccgccggcaccgacacccagaccuucuccggcuccgccgccaacgccaagcucaaccccacccccggcuccaacgccaucuccgacguccccggcgagcgcuccaccgccuccaccuuccccaccgaccccgucuccccccucaccaccacccucucccucgcccaccacuccuccgccgcccuccccgcccgcaccuccaacaccaccaucaccgccaacaccuccgacgccuaccucaacgccuccgagaccaccacccucucccccuccggcuccgccgucaucuccaccaccaccaucgccaccacccccuccaagcccaccugcgacgagaaguacgccaacaucaccgucgacuaccucuacaacaaggagaccaagcucuucaccgccaagcucaacgucaacgagaacgucgagugcggcaacaacaccugcaccaacaacgagguccacaaccucaccgagugcaagaacgccuccgucuccaucucccacaacuccugcaccgcccccgacaagacccucauccucgacgucccccccggcgucgagaaguuccagcuccacgacugcacccaggucgagaaggccgacaccaccaucugccucaaguggaagaacaucgagaccuucaccugcgacacccagaacaucaccuaccgcuuccagugcggcaacaugaucuucgacaacaaggagaucaagcucgagaaccucgagcccgagcacgaguacaagugcgacuccgagauccucuacaacaaccacaaguucaccaacgccuccaagaucaucaagaccgacuucggcucccccggcgagccccagaucaucuucugccgcuccgaggccgcccaccagggcgucaucaccuggaaccccccccagcgcuccuuccacaacuucacccucugcuacaucaaggagaccgagaaggacugccucaaccucgacaagaaccucaucaaguacgaccuccagaaccucaagcccuacaccaaguacguccucucccuccacgccuacaucaucgccaagguccagcgcaacggcuccgccgccaugugccacuucaccaccaaguccgccccccccucccaggucuggaacaugaccgucuccaugaccuccgacaacuccaugcacgucaagugccgccccccccgcgaccgcaacggcccccacgagcgcuaccaccucgaggucgaggccggcaacacccucguccgcaacgagucccacaagaacugcgacuuccgcgucaaggaccuccaguacuccaccgacuacaccuucaaggccuacuuccacaacggcgacuaccccggcgagcccuucauccuccaccacuccaccuccuacaacuccaaggcccucaucgccuuccucgccuuccucaucaucgucaccuccaucgcccuccucgucguccucuacaagaucuacgaccuccacaagaagcgcuccugcaaccucgacgagcagcaggagcucgucgagcgcgacgacgagaagcagcucaugaacgucgagcccauccacgccgacauccuccucgagaccuacaagcgcaagaucgccgacgagggccgccucuuccucgccgaguuccaguccaucccccgcgucuucuccaaguuccccaucaaggaggcccgcaagcccuucaaccagaacaagaaccgcuacgucgacauccuccccuacgacuacaaccgcgucgagcucuccgagaucaacggcgacgccggcuccaacuacaucaacgccuccuacaucgacggcuucaaggagccccgcaaguacaucgccgcccagggcccccgcgacgagaccgucgacgacuucuggcgcaugaucugggagcagaaggccaccgucaucgucauggucacccgcugcgaggagggcaaccgcaacaagugcgccgaguacuggcccuccauggaggagggcacccgcgccuucggcgacgucgucgucaagaucaaccagcacaagcgcugccccgacuacaucauccagaagcucaacaucgucaacaagaaggagaaggccaccggccgcgaggucacccacauccaguucaccuccuggcccgaccacggcguccccgaggacccccaccuccuccucaagcuccgccgccgcgucaacgccuucuccaacuucuucuccggccccaucgucguccacugcuccgccggcgucggccgcaccggcaccuacaucggcaucgacgccaugcucgagggccucgaggccgagaacaaggucgacgucuacggcuacgucgucaagcuccgccgccagcgcugccucaugguccaggucgaggcccaguacauccucauccaccaggcccucgucgaguacaaccaguucggcgagaccgaggucaaccucuccgagcuccaccccuaccuccacaacaugaagaagcgcgacccccccuccgagcccuccccccucgaggccgaguuccagcgccuccccuccuaccgcuccuggcgcacccagcacaucggcaaccaggaggagaacaaguccaagaaccgcaacuccaacgucauccccuacgacuacaaccgcgucccccucaagcacgagcucgagauguccaaggaguccgagcacgacuccgacgaguccuccgacgacgacuccgacuccgaggagcccuccaaguacaucaacgccuccuucaucauguccuacuggaagcccgaggucaugaucgccgcccagggcccccucaaggagaccaucggcgacuucuggcagaugaucuuccagcgcaaggucaaggucaucgucaugcucaccgagcucaagcacggcgaccaggagaucugcgcccaguacuggggcgagggcaagcagaccuacggcgacaucgaggucgaccucaaggacaccgacaaguccuccaccuacacccuccgcgucuucgagcuccgccacuccaagcgcaaggacucccgcaccgucuaccaguaccaguacaccaacugguccgucgagcagcuccccgccgagcccaaggagcucaucuccaugauccaggucgucaagcagaagcucccccagaagaacuccuccgagggcaacaagcaccacaaguccaccccccuccucauccacugccgcgacggcucccagcagaccggcaucuucugcgcccuccucaaccuccucgaguccgccgagaccgaggaggucgucgacaucuuccaggucgucaaggcccuccgcaaggcccgccccggcauggucuccaccuucgagcaguaccaguuccucuacgacgucaucgccuccaccuaccccgcccagaacggccaggucaagaagaacaaccaccaggaggacaagaucgaguucgacaacgaggucgacaaggucaagcaggacgccaacugcgucaacccccucggcgcccccgagaagcuccccgaggccaaggagcaggccgagggcuccgagcccaccuccggcaccgagggccccgagcacuccgucaacggccccgccucccccgcccucaaccagggcuccuga

SEQ ID NO: 3272 - RNA, 3921 nt, Artificial Sequence
  derived and/or modified sequence opt3 from PTPRC__Homo_sapiens__CCDS1397.2
augaccauguaccuguggcucaagcuccuggccuucggcuuugcuuucuuggacacagagguguuugucacugggcagagccccacgccuuccccaaccggauuaacaacugcaaaaaugccgucuguuccccugucaagugauccucuaccaacccacacaaccgccuucagccccgcguccacuuuugaaagagagaacgacuucucugaaacaaccacgucgcucucaccugauaauacuagcacccaagugaguccagacucccuggauaacgcuucugccuuuaauacaacugguguaagcuccgugcagacaccccaucuuccuacccacgcagacucacagaccccaagugccggcacggauacucagacauucagcgggucugcugcaaacgccaagcugaauccgacccccggauccaacgcuaucucagacgucccuggcgagaggagcacugccaguacauuuccaaccgaucccgugucuccuuugacgaccacacucucccuggcgcaucacagcucggcagcccugccagcucggacuucuaauaccacaauuacugccaacaccuccgacgcauaucucaaugcuucagaaacaaccacuuuaagucccagcgguuccgccguuauaucuacgacaaccaucgcgacuaccccgagcaaaccuacaugcgaugagaaguacgccaacauuaccguggacuaucuguacaauaaagagacuaaacuuuucacagcaaaguugaacgucaaugaaaacguggagugugggaauaacacgugcaccaacaaugaaguacauaaccugacugaguguaagaaugcuucaguuaguaucucccacaacagcugcacagcccccgauaagacccuaauucucgacgugccaccuggagucgagaaauuucaacugcacgacuguacacagguggaaaaggcugauacuaccaucugccuuaaauggaagaauauagagacguucaccugugacacacagaacaucacuuaucgcuuucagugcggcaauaugauuuucgauaacaaggaaaucaaacuggagaauuuggaacccgagcaugaguacaagugugacucugaaauucucuauaacaaucacaaauucaccaacgccucaaagaucauaaaaacagauuuuggcaguccaggggagccccaaauuaucuucugccgaagcgaagcagcccaucagggagugauuacuuggaauccuccacagcguuccuuucacaacuucacccuguguuacaucaaggagacggaaaaagacugcuuaaaucuggauaagaaccucaucaaguacgaccuucagaaccugaaaccguauacaaaguacgucuugucucuacacgcuuauauuauagcgaaaguucaaagaaaugguucggcagccaugugccauuuuaccacuaagagcgcucccccuucccagguguggaacaugacaguaucaaugaccagugauaauucuaugcacgugaaauguaggccaccccgggaccgcaacggcccucaugagagauaccaccuggaggucgaagccgggaauacucucgugaggaacgagagccauaagaauugcgauuuccggguuaaggaccugcaguauuccaccgacuacacauuuaaagcauauuuccacaacggagauuacccaggcgaacccuuuauccuucaccauucaacgagcuacaauucuaaggcccugauugcuuucuuggccuuucucaucauagugaccuccauugcacuguuagucgugcuguauaaaaucuacgaccuacacaagaaacgcaguuguaaccucgaugagcaacaggaacugguagagcgagacgaugagaagcagcuuaugaauguugaaccgauccaugcggacauuuugcuggagacuuauaagagaaaaaucgcugaugaagguaggcuuuuccuggccgaguuucagagcauuccucggguguucucuaaguucccaauaaaagaggcacguaagcccuuuaaccaaaauaaaaaccgcuacgucgacauccuuccuuaugauuacaauagaguggaacuguccgagauuaacggggacgccggaucaaacuauaucaaugcuaguuacaucgauggcuucaaggaacccaggaaguacauugccgcacagggcccacgggacgagacagucgaugacuuuuggcgaaugauaugggaacagaaagcuaccgugaucguuauggugacacgcugcgaggaggggaacagaaauaagugugccgaauauuggccuagcauggaggaaggaacuagggcguucggugacguagucgugaaaauuaaccagcacaagcggugccccgauuacaucauucaaaaauugaauaucguuaacaagaaagagaaggccaccggccgcgaagugacgcacauacaguuuacaucguggccagaccauggggucccggaggauccucaccuccuguuaaagcugagaaggcgugugaaugcuuucuccaacuuuuucucuggacccaucguagugcauuguagcgcaggcguuggucggaccgggacuuauauuggcaucgacgccaugcuagagggacucgaagcugagaauaaagucgauguguacggcuauguggucaagcugcgaagacagaggugccuuaugguucagguggaagcccaauacauuuugauccaccaggcacugguggaguauaaccaguuuggggaaaccgagguaaaucucucagagcugcauccauacuuacacaacaugaaaaagcgcgaucccccuagugaaccaucaccccuggaggcggaguuccagcggcuuccuucuuacagaagcuggaggacacaacacauaggaaaucaggaagagaacaaauccaagaaucgcaacucaaacgucauuccguaugacuacaaucgagugccauugaagcaugaacucgagaugagcaaagaaagugagcacgacucugaugaauccagcgacgaugacucggauucagaggagcccucuaaguauaucaacgccaguuuuauuauguccuacuggaaaccugaaguuaugaucgcugcccaggguccacugaaggagacuauaggcgacuucuggcaaaugaucuuucagcggaaagugaaggucauugugaugcuaaccgaacugaagcauggggaccaggagaucugugcacaguauuggggagaaggcaaacaaacauacggugauauugagguugaccucaaggauacggacaaaagcucuaccuauacucugcguguguucgagcuuagacacagcaagaggaaagauucccgcacaguauaccaguaccaguauaccaauuggucagucgaacaguugcccgcugagccuaaggaacugaucaguaugauacaaguggugaagcagaaauuaccgcagaagaacagcucugaggggaauaaacaucacaaguccacuccccuccugauucacugccgggacggcucacagcaaacaggaaucuucugugcccuucugaacuugcucgaaagugcagagaccgaggaagucguugauaucuuucaggugguaaaagcccugagaaaggcuaggccaggcauggugagcacguucgagcaguaccaauuucuauaugacgucauugcguccacuuacccugcccagaauggacaggugaaaaagaacaaucaucaggaagauaagaucgaguucgacaacgagguugauaaagugaagcaagacgcaaauugcgucaacccccugggggcuccagaaaaacucccugaggccaaggaacaggccgaggguucugaacccaccucgggcacagaggggccagagcacagcgugaauggaccggcuuccccugcacugaaccagggcuccuga

SEQ ID NO: 3273 - RNA, 3921 nt, Artificial Sequence
  derived and/or modified sequence opt4 from PTPRC__Homo_sapiens__CCDS1397.2
augaccauguaccuguggcugaagcugcuggccuucggcuucgccuuccuggacaccgagguguucgugaccggccagagccccacccccagccccaccggccugaccaccgccaagaugcccagcgugccccugagcagcgacccccugcccacccacaccaccgccuucagccccgccagcaccuucgagagagagaacgacuucagcgagaccaccaccagccugagccccgacaacaccagcacccaggugagccccgacagccuggacaacgccagcgccuucaacaccaccggcgugagcagcgugcagaccccccaccugcccacccacgccgacagccagacccccagcgccggcaccgacacccagaccuucagcggcagcgccgccaacgccaagcugaaccccacccccggcagcaacgccaucagcgacgugcccggcgagagaagcaccgccagcaccuuccccaccgaccccgugagcccccugaccaccacccugagccuggcccaccacagcagcgccgcccugcccgccagaaccagcaacaccaccaucaccgccaacaccagcgacgccuaccugaacgccagcgagaccaccacccugagccccagcggcagcgccgugaucagcaccaccaccaucgccaccacccccagcaagcccaccugcgacgagaaguacgccaacaucaccguggacuaccuguacaacaaggagaccaagcuguucaccgccaagcugaacgugaacgagaacguggagugcggcaacaacaccugcaccaacaacgaggugcacaaccugaccgagugcaagaacgccagcgugagcaucagccacaacagcugcaccgcccccgacaagacccugauccuggacgugccccccggcguggagaaguuccagcugcacgacugcacccagguggagaaggccgacaccaccaucugccugaaguggaagaacaucgagaccuucaccugcgacacccagaacaucaccuacagauuccagugcggcaacaugaucuucgacaacaaggagaucaagcuggagaaccuggagcccgagcacgaguacaagugcgacagcgagauccuguacaacaaccacaaguucaccaacgccagcaagaucaucaagaccgacuucggcagccccggcgagccccagaucaucuucugcagaagcgaggccgcccaccagggcgugaucaccuggaaccccccccagagaagcuuccacaacuucacccugugcuacaucaaggagaccgagaaggacugccugaaccuggacaagaaccugaucaaguacgaccugcagaaccugaagcccuacaccaaguacgugcugagccugcacgccuacaucaucgccaaggugcagagaaacggcagcgccgccaugugccacuucaccaccaagagcgccccccccagccagguguggaacaugaccgugagcaugaccagcgacaacagcaugcacgugaagugcagaccccccagagacagaaacggcccccacgagagauaccaccuggagguggaggccggcaacacccuggugagaaacgagagccacaagaacugcgacuucagagugaaggaccugcaguacagcaccgacuacaccuucaaggccuacuuccacaacggcgacuaccccggcgagcccuucauccugcaccacagcaccagcuacaacagcaaggcccugaucgccuuccuggccuuccugaucaucgugaccagcaucgcccugcugguggugcuguacaagaucuacgaccugcacaagaagagaagcugcaaccuggacgagcagcaggagcugguggagagagacgacgagaagcagcugaugaacguggagcccauccacgccgacauccugcuggagaccuacaagagaaagaucgccgacgagggcagacuguuccuggccgaguuccagagcauccccagaguguucagcaaguuccccaucaaggaggccagaaagcccuucaaccagaacaagaacagauacguggacauccugcccuacgacuacaacagaguggagcugagcgagaucaacggcgacgccggcagcaacuacaucaacgccagcuacaucgacggcuucaaggagcccagaaaguacaucgccgcccagggccccagagacgagaccguggacgacuucuggagaaugaucugggagcagaaggccaccgugaucgugauggugaccagaugcgaggagggcaacagaaacaagugcgccgaguacuggcccagcauggaggagggcaccagagccuucggcgacgugguggugaagaucaaccagcacaagagaugccccgacuacaucauccagaagcugaacaucgugaacaagaaggagaaggccaccggcagagaggugacccacauccaguucaccagcuggcccgaccacggcgugcccgaggacccccaccugcugcugaagcugagaagaagagugaacgccuucagcaacuucuucagcggccccaucguggugcacugcagcgccggcgugggcagaaccggcaccuacaucggcaucgacgccaugcuggagggccuggaggccgagaacaagguggacguguacggcuacguggugaagcugagaagacagagaugccugauggugcagguggaggcccaguacauccugauccaccaggcccugguggaguacaaccaguucggcgagaccgaggugaaccugagcgagcugcaccccuaccugcacaacaugaagaagagagacccccccagcgagcccagcccccuggaggccgaguuccagagacugcccagcuacagaagcuggagaacccagcacaucggcaaccaggaggagaacaagagcaagaacagaaacagcaacgugauccccuacgacuacaacagagugccccugaagcacgagcuggagaugagcaaggagagcgagcacgacagcgacgagagcagcgacgacgacagcgacagcgaggagcccagcaaguacaucaacgccagcuucaucaugagcuacuggaagcccgaggugaugaucgccgcccagggcccccugaaggagaccaucggcgacuucuggcagaugaucuuccagagaaaggugaaggugaucgugaugcugaccgagcugaagcacggcgaccaggagaucugcgcccaguacuggggcgagggcaagcagaccuacggcgacaucgagguggaccugaaggacaccgacaagagcagcaccuacacccugagaguguucgagcugagacacagcaagagaaaggacagcagaaccguguaccaguaccaguacaccaacuggagcguggagcagcugcccgccgagcccaaggagcugaucagcaugauccagguggugaagcagaagcugccccagaagaacagcagcgagggcaacaagcaccacaagagcaccccccugcugauccacugcagagacggcagccagcagaccggcaucuucugcgcccugcugaaccugcuggagagcgccgagaccgaggaggugguggacaucuuccagguggugaaggcccugagaaaggccagacccggcauggugagcaccuucgagcaguaccaguuccuguacgacgugaucgccagcaccuaccccgcccagaacggccaggugaagaagaacaaccaccaggaggacaagaucgaguucgacaacgagguggacaaggugaagcaggacgccaacugcgugaacccccugggcgcccccgagaagcugcccgaggccaaggagcaggccgagggcagcgagcccaccagcggcaccgagggccccgagcacagcgugaacggccccgccagccccgcccugaaccagggcagcuga

SEQ ID NO: 3274 - RNA, 3921 nt, Artificial Sequence
  derived and/or modified sequence opt5 from PTPRC__Homo_sapiens__CCDS1397.2
augaccauguaccuguggcucaagcugcuugccuucggcuuugcuuuccuggacacagagguguuugucacggggcagagccccaccccuuccccgacaggacucaccacagccaaaaugcccucuguuccucugagcuccgauccccuuccuacccacacaaccgcguucucucccgcuagcacguuugaaagagagaacgacuucuccgaaaccacaaccucucugagcccugauaauacauccacccaagugagcccggacucucucgauaacgccuccgccuuuaauacgacaggcgugagcucuguccagacaccccaucugccuacccacgcugacucccagacccccagcgccgggaccgauacacagacguucucuggauccgcugccaacgcgaagcugaauccuacccccggcagcaacgccaucuccgacgugccgggggagcggucuacagcuagcaccuuuccuacagaucccguuuccccucucaccacgacacugagccuugcccaucacucuuccgcugcccugcccgcgcgcaccagcaauaccacaauuaccgccaacacaucugacgcuuaucucaaugccagcgaaacgaccacacugucccccucuggaagcgcugugaucuccaccacaaccauugccacgaccccuagcaaaccgacaugcgaugagaaguacgccaacaucaccgucgacuaucuuuacaauaaagagacaaagcuguucaccgcuaagcucaacgugaaugaaaacguugaguguggcaauaacacgugcacaaacaaugaagugcauaaccugaccgaguguaaaaaugcgucugucuccauuagccacaacucuugcacagcccccgauaagacccugauccucgacgugccucccggcguggagaaauuucaacugcacgacuguacccaggucgaaaaggcugauacaacgaucugccuuaaauggaagaauauugagaccuucacaugugacacccagaacaucacauauagauuucagugcgggaauaugauuuucgauaacaaggaaaucaaacuggagaaucucgaaccugagcaugaguacaagugugacuccgaaauucuguauaacaaucacaaauucaccaacgccagcaagaucauuaaaacggauuuuggaucccccggcgagccgcaaaucaucuucugccggucugaagccgcucaucaggggguuauuacauggaauccuccccagcgcagcuuucacaacuucacccuuuguuacaucaaggagaccgaaaaagacugccugaaucucgauaagaaccugauuaaguacgaccugcagaaccucaaaccuuauacaaaguacgugcugucccuucacgccuauaucauugcgaaagugcaaagaaauggaucugcugccaugugccauuuuaccacaaagagcgcucccccuucccaggucuggaacaugacggugagcaugaccucugauaauuccaugcacguuaaaugucggcccccgcgcgacagaaacggcccucaugagcgguaccaccuggagguggaagccgggaauacacucguccgcaacgagagccauaagaauugcgauuucagagugaaggaccugcaguauucuaccgacuacacauuuaaagccuauuuccacaacggagauuaccccggcgaacccuuuauccuucaccauuccaccagcuacaauucuaaggcucugaucgccuuccucgcguuucugauuaucguuacgagcauugcccugcucgugguccuguauaaaaucuacgaccuucacaagaaacgguccuguaaccuggaugagcaacaggaacucguggagcgcgacgaugagaagcagcugaugaaugucgaaccuauucaugcugacauccugcuugagaccuauaagagaaaaaucgccgaugaaggccgccucuuccuggcugaguuucagagcauuccgcggguguucucuaaguuccccaucaaagaggccagaaagccuuuuaaccaaaauaaaaaccgguacguugacauucugcccuaugauuacaauagaguggaacucuccgagaucaacggggacgcgggaagcaacuauauuaaugccuccuacaucgauggcuucaaggaaccucgcaaguacauugcugcccaggggccccgggacgagacagucgaugacuuuuggagaaugaucugggaacagaaagcuaccgugaucguuauggugacacgcugcgaggagggaaaccggaauaagugugccgaauauuggccuucuauggaggaaggcaccagagccuucggggacgucguggugaaaauuaaccagcacaagcgcugccccgauuacaucauucaaaaacugaauaucguuaacaagaaagagaaggcuacaggacgggaagucacccacauucaguuuacgagcuggccggaccauggcgugccugaggauccccaccuucugcucaagcugagacgccgggugaaugcguucuccaacuuuuucucuggcccuaucgucgugcauuguagcgccgggguuggaagaacaggcaccuauaucgggauugacgcuaugcuggagggacuugaagccgagaauaaaguggaugucuacggcuaugugguuaagcuccgccggcagagaugccugauggugcaggucgaagcccaauacauccugauucaccaggcucucguggaguauaaccaguuuggggaaaccgagguuaaucuguccgagcuucaucccuaccugcacaacaugaaaaagcgggacccgccuucugaacccagcccucucgaggccgaguuccagcgccugcccuccuacagaagcuggcggacacaacacaucggcaaucaggaagagaacaaaucuaagaauagaaacuccaacgugauucccuaugauuacaaucgcgucccucugaagcaugaacuugagaugagcaaagaaucugagcacgacuccgaugaaagcucugacgaugacuccgauagcgaggagccguccaaguauaucaacgcgagcuuuaucaugucuuacuggaaacccgaagugaugauugcugcccagggaccucucaaggagaccaucggcgacuucuggcaaaugauuuuucagcggaaagugaaggucaucguuaugcugacggaacugaagcauggggaccaggagauuugugcccaguauuggggagaaggcaaacaaacauacggggauaucgagguggaccucaaggauaccgacaaaagcuccacauauacccugagaguguucgagcuucgccacucuaagagaaaagauagccggacagucuaccaguaccaguauaccaauugguccguggaacagcugcccgcugagccuaaggaacucaucucuaugauucaaguugugaagcagaaacugccccagaagaacagcuccgagggaaauaaacaucacaagucuacgccucugcuuauccacugccgcgacggcagccagcaaaccgggauuuucugugcccuccugaaccugcucgaauccgcggagacagaggaagucguggauaucuuucagguugugaaagcucugagaaaggcccggccgggcauggucagcaccuucgagcaguaccaauuucuuuaugacgugauugccucuacauaccccgcucagaauggacagguuaaaaagaacaaucaucaggaagauaagaucgaguucgacaacgagguggauaaagucaagcaagacgccaauugcgugaacccucugggcgcucccgaaaaacucccugaggccaaggaacaggcggagggguccgaacccaccagcggaacggagggcccggagcacucugugaaugggccugccucccccgcucugaaccagggaagcuga

SEQ ID NO: 3275 - protein, 207 aa, Artificial Sequence
  RAB8A__Homo_sapiens__P61006
MAKTYDYLFKLLLIGDSGVGKTCVLFRFSEDAFNSTFISTIGIDFKIRTIELDGKRIKLQIWDTAGQERFRTITTAYYRGAMGIMLVYDITNEKSFDNIRNWIRNIEEHASADVEKMILGNKCDVNDKRQVSKERGEKLALDYGIKFMETSAKANINVENAFFTLARDIKAKMDKKLEGNSPQGSNQGVKITPDQQKRSSFFRCVLL

SEQ ID NO: 3276 - RNA, 624 nt, Artificial Sequence
  RAB8A__Homo_sapiens__AAH02977
auggcgaagaccuacgauuaccuguucaagcugcugcugaucggggacucggggguggggaagaccuguguccuguuccgcuucuccgaggacgccuucaacuccacuuuuaucuccaccauaggaauugacuuuaaaauuaggaccauagagcucgauggcaagagaauuaaacugcagauaugggacacagccggucaggaacgguuucggacgaucacaacggccuacuacaggggugcaaugggcaucaugcuggucuacgacaucaccaacgagaaguccuucgacaacauccggaacuggauucgcaacauugaggagcacgccucugcagacgucgaaaagaugauacucgggaacaagugugaugugaaugacaagagacaaguuuccaaggaacggggagaaaagcuggcccucgacuauggaaucaaguucauggagaccagcgcgaaggccaacaucaauguggaaaaugcauuuuucacucucgccagagauaucaaagcaaaaauggacaaaaaauuggaaggcaacagcccccaggggagcaaccagggagucaaaaucacaccggaccagcagaagaggagcagcuuuuuccgauguguucuucuguga

SEQ ID NO: 3277 - RNA, 624 nt, Artificial Sequence
  derived and/or modified sequence opt1 from RAB8A__Homo_sapiens__AAH02977
auggccaagaccuacgacuaccuguucaagcuccugcugaucggcgacagcggggugggcaagaccugcguccucuuccgcuucuccgaggacgccuucaacagcacguucaucuccaccaucgggaucgacuucaagauccggaccaucgagcuggacggcaagcgcaucaagcugcagaucugggacaccgcggggcaggagcgguuccgcacgaucaccaccgccuacuaccggggcgccaugggcaucaugcucguguacgacaucaccaacgagaaguccuucgacaacauccgcaacuggauccggaacaucgaggagcacgccagcgccgacguggagaagaugauccuggggaacaagugcgacgucaacgacaagcgccaggugagcaaggagcggggcgagaagcuggcgcucgacuacgggaucaaguucauggagacguccgccaaggccaacaucaacguggagaacgccuucuucacccuggcgcgcgacaucaaggccaagauggacaagaagcuggagggcaacagcccccagggguccaaccagggcgucaagaucaccccggaccagcagaagcggagcuccuucuuccgcugcgugcuccuguga

SEQ ID NO: 3278 - RNA, 624 nt, Artificial Sequence
  derived and/or modified sequence opt2 from RAB8A__Homo_sapiens__AAH02977
auggccaagaccuacgacuaccucuucaagcuccuccucaucggcgacuccggcgucggcaagaccugcguccucuuccgcuucuccgaggacgccuucaacuccaccuucaucuccaccaucggcaucgacuucaagauccgcaccaucgagcucgacggcaagcgcaucaagcuccagaucugggacaccgccggccaggagcgcuuccgcaccaucaccaccgccuacuaccgcggcgccaugggcaucaugcucgucuacgacaucaccaacgagaaguccuucgacaacauccgcaacuggauccgcaacaucgaggagcacgccuccgccgacgucgagaagaugauccucggcaacaagugcgacgucaacgacaagcgccaggucuccaaggagcgcggcgagaagcucgcccucgacuacggcaucaaguucauggagaccuccgccaaggccaacaucaacgucgagaacgccuucuucacccucgcccgcgacaucaaggccaagauggacaagaagcucgagggcaacuccccccagggcuccaaccagggcgucaagaucacccccgaccagcagaagcgcuccuccuucuuccgcugcguccuccucuga

SEQ ID NO: 3279 - RNA, 624 nt, Artificial Sequence
  derived and/or modified sequence opt3 from RAB8A__Homo_sapiens__AAH02977
auggccaagaccuacgacuaucuguucaaacuccuucugaucggcgauaguggggugggaaagacaugcgucuuguuuagauucuccgaggacgcuuuuaacucuacuuucauuucaacgauagguaucgauuuuaaaauuaggaccaucgaauuagacggcaagcggauuaaacugcagaucugggauacagcagggcaagagcgcuuccgaacuauaaccacagccuacuaucguggagcgaugggcaucaugcuaguuuacgacauuaccaaugaaaagaguuuugauaacaucagaaauuggauuaggaacaucgaggaacacgcuagcgccgacguggagaagaugauacucgguaauaaaugugauguaaacgacaagcggcaaguguccaaagagcgcggggaaaagcuggcacuugauuauggaauuaaauucauggagacuucugccaaggcuaauaucaacgucgaaaaugcauuuuucacacuggccagagacauuaaggcuaaaauggauaagaaauuggagggcaacucgccccagggcucaaaucagggggugaagaucaccccugaccagcagaaaaggagcagcuuuuuccggugcguucuccuguga

SEQ ID NO: 3280 - RNA, 624 nt, Artificial Sequence
  derived and/or modified sequence opt4 from RAB8A__Homo_sapiens__AAH02977
auggccaagaccuacgacuaccuguucaagcugcugcugaucggcgacagcggcgugggcaagaccugcgugcuguucagauucagcgaggacgccuucaacagcaccuucaucagcaccaucggcaucgacuucaagaucagaaccaucgagcuggacggcaagagaaucaagcugcagaucugggacaccgccggccaggagagauucagaaccaucaccaccgccuacuacagaggcgccaugggcaucaugcugguguacgacaucaccaacgagaagagcuucgacaacaucagaaacuggaucagaaacaucgaggagcacgccagcgccgacguggagaagaugauccugggcaacaagugcgacgugaacgacaagagacaggugagcaaggagagaggcgagaagcuggcccuggacuacggcaucaaguucauggagaccagcgccaaggccaacaucaacguggagaacgccuucuucacccuggccagagacaucaaggccaagauggacaagaagcuggagggcaacagcccccagggcagcaaccagggcgugaagaucacccccgaccagcagaagagaagcagcuucuucagaugcgugcugcuguga

SEQ ID NO: 3281 - RNA, 624 nt, Artificial Sequence
  derived and/or modified sequence opt5 from RAB8A__Homo_sapiens__AAH02977
auggccaagaccuacgacuaucuguucaaacuccugcuuaucggcgauagcggggugggaaagacaugcguccuguuuagauucuccgaggacgcuuuuaacucuacguucauuagcaccaucggcauugauuuuaaaauccggacaauugaacucgacgggaagcgcaucaaacugcagaucugggauaccgccggacaagagagauuccggacaauuaccacagcguacuaucgcggcgcuauggggaucaugcuuguuuacgacauuaccaaugaaaaguccuuugauaacaucagaaauuggauucggaacaucgaggaacacgccucugccgacguggagaagaugauucugggaaauaaaugugaugugaacgacaagcgccaggucagcaaagagagaggcgaaaagcucgcucuggauuauggcaucaaauucauggagacguccgccaaggcuaauaucaacguggaaaaugccuuuuucacccuggcgcgggacauuaaggccaaaauggauaagaaacucgaggggaacucuccccagggaagcaaucagggcguuaagaucacaccugaccaacagaaacgcuccagcuuuuucagaugcgugcugcuuuga

SEQ ID NO: 3282 - protein, 419 aa, Artificial Sequence
  RAGE-1__Homo_sapiens__Q9UQ07
MKNYKAIGKIGEGTFSEVMKMQSLRDGNYYACKQMKQRFESIEQVNNLREIQALRRLNPHPNILMLHEVVFDRKSGSLALICELMDMNIYELIRGRRYPLSEKKIMHYMYQLCKSLDHIHRNGIFHRDVKPENILIKQDVLKLGDFGSCRSVYSKQPYTEYISTRWYRAPECLLTDGFYTYKMDLWSAGCVFYEIASLQPLFPGVNELDQISKIHDVIGTPAQKILTKFKQSRAMNFDFPFKKGSGIPLLTTNLSPQCLSLLHAMVAYDPDERIAAHQALQHPYFQEQRKTEKRALGSHRKAGFPEHPVAPEPLSNSCQISKEGRKQKQSLKQEEDRPKRRGPAYVMELPKLKLSGVVRLSSYSSPTLQSVLGSGTNGRVPVLRPLKCIPASKKTDPQKDLKPAPQQCRLPTIVRKGGR

SEQ ID NO: 3283 - RNA, 1260 nt, Artificial Sequence
  RAGE-1__Homo_sapiens__BAA81688
augaagaacuauaaagcaauuggcaaaauaggagagggaacguuuucugaaguuaugaagaugcaaagccugagagauggaaacuacuaugcauguaaacaaaugaagcagcgcuuugaaaguauugagcaagucaacaaccuacgagagauccaagcacugaggcgccugaauccgcacccaaacauucuuauguugcaugaagugguuuuugacagaaaaucugguucucuugcacuaauaugugaacuuauggacaugaauauuuaugagcuaauacgagggagaagauacccauuaucagaaaaaaaaauuaugcacuauauguaccaguuauguaagucccuggaucauauucacagaaauggaauauuucacagagauguaaaaccagaaaauauacuaauaaagcaggauguccugaaauuaggggacuuuggcuccugccggagugucuauuccaagcagccguacacggaauacaucuccacccgcugguaccgggccccggagugucuccucacugauggguucuacacguacaagauggaccuguggagcgccggcuguguguucuacgagaucgccagucugcagccccucuuuccuggaguaaaugaacuggaccaaaucucaaaaauccacgaugucaucggcacacccgcucagaagauccucaccaaguucaaacagucgagagcuaugaauuuugauuuuccuuuuaaaaagggaucaggaauaccucuacuaacaaccaauuuguccccacaaugccucucccuccugcacgcaaugguggccuaugaucccgaugagagaaucgccgcccaccaggcccugcagcaccccuacuuccaagaacagaggaaaacagagaagcgggcucugggcagccacagaaaagcuggcuuuccggagcacccuguggcaccggaaccacucaguaacagcugccagauuuccaaggagggcagaaagcagaaacagucccuaaagcaagaggaggaccgucccaagagacgaggaccggccuaugucauggaacugcccaaacuaaagcuuucgggaguggucagacugucgucuuacuccagccccacgcugcaguccgugcuuggaucuggaacaaauggaagagugccggugcugagacccuugaagugcaucccugcgagcaagaagacagauccgcagaaggaccuuaagccugccccgcagcagugucgccugcccaccauagugcggaaaggcggaagauaa

SEQ ID NO: 3284 - RNA, 1260 nt, Artificial Sequence
  derived and/or modified sequence opt1 from RAGE-1__Homo_sapiens__BAA81688
augaagaacuacaaggccaucggcaagaucggggagggcaccuucagcgaggugaugaagaugcagucccugcgcgacgggaacuacuacgccugcaagcagaugaagcagcgguucgagagcaucgagcaggucaacaaccuccgcgagauccaggcccugcggcgccugaacccccacccgaacauccucaugcugcacgaggugguguucgaccggaaguccggcagccuggcccucaucugcgagcugauggacaugaacaucuacgagcugauccgcgggcggcgcuacccccucuccgagaagaagaucaugcacuacauguaccagcugugcaagagccuggaccacauccaccggaacggcaucuuccaccgcgacgucaagcccgagaacauccucaucaagcaggacgugcugaagcugggcgacuucggguccugccggagcguguacuccaagcagcccuacaccgaguacaucagcacgcgcugguaccgggccccggagugccuccugaccgacggcuucuacaccuacaagauggaccugugguccgccgggugcgucuucuacgagaucgccagccuccagccccuguuccccggcgugaacgagcuggaccagaucuccaagauccacgacgugaucgggacccccgcgcagaagauccucacgaaguucaagcagagccgcgccaugaacuucgacuucccguucaagaagggcuccggcaucccccugcugaccaccaaccucagcccccagugccugucccugcuccacgccauggucgccuacgaccccgacgagcggaucgcggcccaccaggcccugcagcacccguacuuccaggagcagcgcaagaccgagaagcgggcccuggggagccaccgcaaggccggcuuccccgagcaccccguggcgcccgagccgcucuccaacagcugccagaucagcaaggaggggcggaagcagaagcagucccugaagcaggaggaggaccgccccaagcggcgcggccccgccuacgugauggagcugcccaagcucaagcugagcggcgucgugcgccuguccagcuacuccagcccgacgcuccaguccgugcuggggagcggcaccaacgggcggguccccgugcugcgcccccucaagugcauccccgccuccaagaagaccgacccgcagaaggaccugaagcccgcgccccagcagugccggcugcccaccaucgugcgcaagggcgggcgguga

SEQ ID NO: 3285 - RNA, 1260 nt, Artificial Sequence
  derived and/or modified sequence opt2 from RAGE-1__Homo_sapiens__BAA81688
augaagaacuacaaggccaucggcaagaucggcgagggcaccuucuccgaggucaugaagaugcagucccuccgcgacggcaacuacuacgccugcaagcagaugaagcagcgcuucgaguccaucgagcaggucaacaaccuccgcgagauccaggcccuccgccgccucaacccccaccccaacauccucaugcuccacgaggucgucuucgaccgcaaguccggcucccucgcccucaucugcgagcucauggacaugaacaucuacgagcucauccgcggccgccgcuacccccucuccgagaagaagaucaugcacuacauguaccagcucugcaagucccucgaccacauccaccgcaacggcaucuuccaccgcgacgucaagcccgagaacauccucaucaagcaggacguccucaagcucggcgacuucggcuccugccgcuccgucuacuccaagcagcccuacaccgaguacaucuccacccgcugguaccgcgcccccgagugccuccucaccgacggcuucuacaccuacaagauggaccucugguccgccggcugcgucuucuacgagaucgccucccuccagccccucuuccccggcgucaacgagcucgaccagaucuccaagauccacgacgucaucggcacccccgcccagaagauccucaccaaguucaagcagucccgcgccaugaacuucgacuuccccuucaagaagggcuccggcaucccccuccucaccaccaaccucuccccccagugccucucccuccuccacgccauggucgccuacgaccccgacgagcgcaucgccgcccaccaggcccuccagcaccccuacuuccaggagcagcgcaagaccgagaagcgcgcccucggcucccaccgcaaggccggcuuccccgagcaccccgucgcccccgagccccucuccaacuccugccagaucuccaaggagggccgcaagcagaagcagucccucaagcaggaggaggaccgccccaagcgccgcggccccgccuacgucauggagcuccccaagcucaagcucuccggcgucguccgccucuccuccuacuccucccccacccuccaguccguccucggcuccggcaccaacggccgcguccccguccuccgcccccucaagugcauccccgccuccaagaagaccgacccccagaaggaccucaagcccgccccccagcagugccgccuccccaccaucguccgcaagggcggccgcuga

SEQ ID NO: 3286 - RNA, 1260 nt, Artificial Sequence
  derived and/or modified sequence opt3 from RAGE-1__Homo_sapiens__BAA81688
augaagaacuacaaagccaucggcaagauuggggagggaaccuucagcgaagugaugaaaaugcagucccugagagacgguaauuauuacgcuugcaagcaaaugaaacagagguuugagucuauagaacaggucaacaaucuccgggagauccaggcacuucgccgacugaacccccacccuaauauuuugauguuacaugaaguuguguucgaucguaagucaggcagucuggcccuaaucugugagcucauggacaugaacauuuaugagcugaucagagggaggcgguacccacuuagcgaaaagaaaauaaugcacuauauguaccaacugugcaaguccuuggaucauauccaccgcaauggaauuuuucauagagacguaaaaccggagaacauccucauuaagcaggaugugcugaaacugggcgacuucgguucuuguaggucggucuauucaaagcagcccuacacagaauacaucagcacucggugguaucgcgcgccugagugccucuuaacggauggguuuuacaccuauaagauggaccuguggagugcuggauguguguucuacgagauagccucccuucagccauuguuucccggcguuaaugaacuggaucaaauuucuaaaauccacgacgugauuggcacuccugcacagaagauccuaacaaaauucaagcagagccgagccaugaacuuugauuucccauuuaaaaagggguccggaaucccccuccugaccacaaaucuuucaccucagugccugaguuugcuccacgcuauggucgcauaugacccagaugagagaauugccgcucaucaagcccugcagcacccguacuuccaggaacaaaggaaaaccgagaagcgggcguuagguagccaucguaaggcaggcuuucccgaacacccuguggccccagagccccugucuaacuccugucagauaucaaaagaggggcgcaagcagaaacagagccucaagcaagaagaggacagaccuaaaaggcggggaccagcuuauguaauggaacuucccaagcugaaguugaguggcguugugcgacuaucuuccuacagcucgccgacucugcagucuguccucgguuccgggacaaauggacgcgugccugugcugagaccccuuaaaugcaucccagccucaaagaaaaccgacccucagaaggaucugaaacccgcaccacagcaauguagguugcccacgauuguccggaagggcggccgcuga

SEQ ID NO: 3287 - RNA, 1260 nt, Artificial Sequence
  derived and/or modified sequence opt4 from RAGE-1__Homo_sapiens__BAA81688
augaagaacuacaaggccaucggcaagaucggcgagggcaccuucagcgaggugaugaagaugcagagccugagagacggcaacuacuacgccugcaagcagaugaagcagagauucgagagcaucgagcaggugaacaaccugagagagauccaggcccugagaagacugaacccccaccccaacauccugaugcugcacgaggugguguucgacagaaagagcggcagccuggcccugaucugcgagcugauggacaugaacaucuacgagcugaucagaggcagaagauacccccugagcgagaagaagaucaugcacuacauguaccagcugugcaagagccuggaccacauccacagaaacggcaucuuccacagagacgugaagcccgagaacauccugaucaagcaggacgugcugaagcugggcgacuucggcagcugcagaagcguguacagcaagcagcccuacaccgaguacaucagcaccagaugguacagagcccccgagugccugcugaccgacggcuucuacaccuacaagauggaccuguggagcgccggcugcguguucuacgagaucgccagccugcagccccuguuccccggcgugaacgagcuggaccagaucagcaagauccacgacgugaucggcacccccgcccagaagauccugaccaaguucaagcagagcagagccaugaacuucgacuuccccuucaagaagggcagcggcaucccccugcugaccaccaaccugagcccccagugccugagccugcugcacgccaugguggccuacgaccccgacgagagaaucgccgcccaccaggcccugcagcaccccuacuuccaggagcagagaaagaccgagaagagagcccugggcagccacagaaaggccggcuuccccgagcaccccguggcccccgagccccugagcaacagcugccagaucagcaaggagggcagaaagcagaagcagagccugaagcaggaggaggacagacccaagagaagaggccccgccuacgugauggagcugcccaagcugaagcugagcggcguggugagacugagcagcuacagcagccccacccugcagagcgugcugggcagcggcaccaacggcagagugcccgugcugagaccccugaagugcauccccgccagcaagaagaccgacccccagaaggaccugaagcccgccccccagcagugcagacugcccaccaucgugagaaagggcggcagauga

SEQ ID NO: 3288 - RNA, 1260 nt, Artificial Sequence
  derived and/or modified sequence opt5 from RAGE-1__Homo_sapiens__BAA81688
augaagaacuacaaagccaucggcaagauuggggagggaaccuucagcgaagugaugaaaaugcagucccugagagacggcaauuauuacgcuugcaagcaaaugaaacagcgguuugagucuaucgaacaggucaacaaucuccgcgagauucaggcccugagacggcuuaacccccacccuaauauccugaugcuccaugaaguuguguucgaucgcaagagcgggucccuggcgcuuauuugugagcugauggacaugaacaucuaugagcucaucagaggacggcgcuacccgcugucugaaaagaaaauuaugcacuauauguaccaacugugcaagagccucgaucauauccacagaaauggcauuuuucaucgggacgugaaacccgagaacauccugauuaagcaggauguccuuaaacugggggacuucggauccugucgcucuguguauagcaagcagccuuacacagaauacaucuccacgagaugguaucgggcucccgagugccuccugaccgauggcuuuuacacauauaagauggaccuuuggagcgccggcuguguuuucuacgagauugccucucugcagccucucuuucccggggugaaugaacuggaucaaaucuccaaaauccacgacgucauuggaaccccugcucagaagauccugacaaaauucaagcagagccgcgccaugaacuuugauuucccguuuaaaaagggcucugggauuccccuccugaccacaaaucuuuccccucagugccugagccuccugcacgcuaugguggccuaugaccccgaugagagaaucgcggcccaucaagcccuucagcacccuuacuuccaggaacaacggaaaaccgagaagcgcgcucugggaucucauagaaaggcuggcuuucccgaacacccgguugccccugagccccucuccaacagcugucagauuuccaaagaggggcggaagcagaaacagucucugaagcaagaagaggacagaccuaaacgccggggacccgcguaugugauggaacugcccaagcucaagcugagcggcgucgugagacuuuccagcuacucuuccccuacgcugcagagcgugcucggcucugggaccaauggacgcgucccgguucugcggccccuuaaaugcaucccugccagcaagaaaacagacccccagaaggaucugaaaccugcuccccagcaauguagacucccgaccaucgugcgcaagggcgggcgguga

SEQ ID NO: 3289 - protein, 462 aa, Artificial Sequence
  RARA__Homo_sapiens__P10276
MASNSSSCPTPGGGHLNGYPVPPYAFFFPPMLGGLSPPGALTTLQHQLPVSGYSTPSPATIETQSSSSEEIVPSPPSPPPLPRIYKPCFVCQDKSSGYHYGVSACEGCKGFFRRSIQKNMVYTCHRDKNCIINKVTRNRCQYCRLQKCFEVGMSKESVRNDRNKKKKEVPKPECSESYTLTPEVGELIEKVRKAHQETFPALCQLGKYTTNNSSEQRVSLDIDLWDKFSELSTKCIIKTVEFAKQLPGFTTLTIADQITLLKAACLDILILRICTRYTPEQDTMTFSDGLTLNRTQMHNAGFGPLTDLVFAFANQLLPLEMDDAETGLLSAICLICGDRQDLEQPDRVDMLQEPLLEALKVYVRKRRPSRPHMFPKMLMKITDLRSISAKGAERVITLKMEIPGSMPPLIQEMLENSEGLDTLSGQPGGGGRDGGGLAPPPGSCSPSLSPSSNRSSPATHSP

SEQ ID NO: 3290 - RNA, 1389 nt, Artificial Sequence
  RARA__Homo_sapiens__AAH08727
auggccagcaacagcagcuccugcccgacaccugggggcgggcaccucaauggguacccggugccucccuacgccuucuucuuccccccuaugcuggguggacucuccccgccaggcgcucugaccacucuccagcaccagcuuccaguuaguggauauagcacaccauccccagccaccauugagacccagagcagcaguucugaagagauagugcccagcccucccucgccacccccucuaccccgcaucuacaagccuugcuuugucugucaggacaaguccucaggcuaccacuauggggucagcgccugugagggcugcaagggcuucuuccgccgcagcauccagaagaacaugguguacacgugucaccgggacaagaacugcaucaucaacaaggugacccggaaccgcugccaguacugccgacugcagaagugcuuugaagugggcauguccaaggagucugugagaaacgaccgaaacaagaagaagaaggaggugcccaagcccgagugcucugagagcuacacgcugacgccggaggugggggagcucauugagaaggugcgcaaagcgcaccaggaaaccuucccugcccucugccagcugggcaaauacacuacgaacaacagcucagaacaacgugucucucuggacauugaccucugggacaaguucagugaacucuccaccaagugcaucauuaagacuguggaguucgccaagcagcugcccggcuucaccacccucaccaucgccgaccagaucacccuccucaaggcugccugccuggacauccugauccugcggaucugcacgcgguacacgcccgagcaggacaccaugaccuucucggacgggcugacccugaaccggacccagaugcacaacgcuggcuucggcccccucaccgaccuggucuuugccuucgccaaccagcugcugccccuggagauggaugaugcggagacggggcugcucagcgccaucugccucaucugcggagaccgccaggaccuggagcagccggaccggguggacaugcugcaggagccgcugcuggaggcgcuaaaggucuacgugcggaagcggaggcccagccgcccccacauguuccccaagaugcuaaugaagauuacugaccugcgaagcaucagcgccaagggggcugagcgggugaucacgcugaagauggagaucccgggcuccaugccgccucucauccaggaaauguuggagaacucagagggccuggacacucugagcggacagccgggggguggggggcgggacggggguggccuggcccccccgccaggcagcuguagccccagccucagccccagcuccaacagaagcagcccggccacccacuccccguga

SEQ ID NO: 3291 - RNA, 1389 nt, Artificial Sequence
  derived and/or modified sequence opt1 from RARA__Homo_sapiens__AAH08727
auggccagcaacuccagcuccugccccacccccggcgggggccaccugaacggguaccccgugccgcccuacgccuucuucuucccgcccaugcucggcgggcugagcccgcccggcgcgcugaccacgcuccagcaccagcugcccgucuccggcuacagcacccccucccccgccaccaucgagacccagagcuccagcuccgaggagaucgugcccagcccgcccuccccgccgccccugccccgcaucuacaagcccugcuucgugugccaggacaagagcuccggguaccacuacggcgucagcgccugcgaggggugcaagggcuucuuccggcgcuccauccagaagaacaugguguacacgugccaccgggacaagaacugcaucaucaacaaggugacccgcaaccggugccaguacugccgccuccagaagugcuucgaggucgggaugagcaaggaguccgugcggaacgaccgcaacaagaagaagaaggaggugcccaagcccgagugcagcgagagcuacacccugacccccgaggucggcgagcugaucgagaaggugcggaaggcccaccaggagacguuccccgcccucugccagcugggcaaguacaccaccaacaacuccagcgagcagcgcgugucccuggacaucgaccucugggacaaguucagcgagcuguccaccaagugcaucaucaagacggucgaguucgcgaagcagcugcccggguucaccacccucaccaucgccgaccagaucacgcugcugaaggccgccugccucgacauccugauccugcggaucugcacccgcuacacccccgagcaggacaccaugacguucagcgacggccucacccugaaccggacccagaugcacaacgcgggguucggcccccugaccgaccucguguucgccuucgccaaccagcugcugccccucgagauggacgacgccgagacgggccugcuguccgccaucugccucaucugcggggaccgccaggaccuggagcagcccgaccggguggacaugcugcaggagccgcuccuggaggcgcugaaggucuacgugcgcaagcggcgccccagccggccccacauguucccgaagaugcucaugaagaucaccgaccugcgcuccaucagcgccaagggcgccgagcgggugaucacccugaagauggagauccccggguccaugccgccccucauccaggagaugcuggagaacagcgagggccuggacacccucuccgggcagcccggcggcgggggccgcgacgggggcgggcuggccccgccgcccggcagcugcucccccagccugucccccagcuccaaccgcagcagccccgccacgcacucccccuga

SEQ ID NO: 3292 - RNA, 1389 nt, Artificial Sequence
  derived and/or modified sequence opt2 from RARA__Homo_sapiens__AAH08727
auggccuccaacuccuccuccugccccacccccggcggcggccaccucaacggcuaccccgucccccccuacgccuucuucuucccccccaugcucggcggccucuccccccccggcgcccucaccacccuccagcaccagcuccccgucuccggcuacuccacccccucccccgccaccaucgagacccaguccuccuccuccgaggagaucguccccuccccccccuccccccccccccucccccgcaucuacaagcccugcuucgucugccaggacaaguccuccggcuaccacuacggcgucuccgccugcgagggcugcaagggcuucuuccgccgcuccauccagaagaacauggucuacaccugccaccgcgacaagaacugcaucaucaacaaggucacccgcaaccgcugccaguacugccgccuccagaagugcuucgaggucggcauguccaaggaguccguccgcaacgaccgcaacaagaagaagaaggagguccccaagcccgagugcuccgaguccuacacccucacccccgaggucggcgagcucaucgagaagguccgcaaggcccaccaggagaccuuccccgcccucugccagcucggcaaguacaccaccaacaacuccuccgagcagcgcgucucccucgacaucgaccucugggacaaguucuccgagcucuccaccaagugcaucaucaagaccgucgaguucgccaagcagcuccccggcuucaccacccucaccaucgccgaccagaucacccuccucaaggccgccugccucgacauccucauccuccgcaucugcacccgcuacacccccgagcaggacaccaugaccuucuccgacggccucacccucaaccgcacccagaugcacaacgccggcuucggcccccucaccgaccucgucuucgccuucgccaaccagcuccucccccucgagauggacgacgccgagaccggccuccucuccgccaucugccucaucugcggcgaccgccaggaccucgagcagcccgaccgcgucgacaugcuccaggagccccuccucgaggcccucaaggucuacguccgcaagcgccgccccucccgcccccacauguuccccaagaugcucaugaagaucaccgaccuccgcuccaucuccgccaagggcgccgagcgcgucaucacccucaagauggagauccccggcuccaugcccccccucauccaggagaugcucgagaacuccgagggccucgacacccucuccggccagcccggcggcggcggccgcgacggcggcggccucgcccccccccccggcuccugcucccccucccucucccccuccuccaaccgcuccucccccgccacccacucccccuga

SEQ ID NO: 3293 - RNA, 1389 nt, Artificial Sequence
  derived and/or modified sequence opt3 from RARA__Homo_sapiens__AAH08727
auggccagcaacuccucuucaugccccaccccuggcgggggacaccugaaugguuacccagugccgcccuaugcuuucuuuuucccuccaaugcucggcgggcuuagucccccuggagcacugacaacuuugcagcaucaauuaccagucagcggcuacuccacgcccucuccugccaccaucgagacacagucgucaagcagugaggagauuguuccauccccgcccucuccuccaccccugccuagaauauauaagccauguuuugugugccaggacaaaagcuccgguuaccacuaugggguaucagcgugugaaggaugcaagggcuucuuuaggcggaguauccagaaaaacaugguguacacuugucaucgcgauaagaauugcauuaucaacaaagucacccgaaaucguugucaauauugcagacuacagaaguguuucgaggugggcaugagcaaggaaucuguuaggaacgaccggaauaaaaagaaaaaggaggugcccaaaccggagugcuccgaaucauacacacucaccccugaggucggggaacugauugagaaggugcgcaaggcucaccaggagacuuuucccgcccuuugucagcugggaaaauacacaaccaacaauagcagugaacaaagaguaucuuuggauaucgaccucugggauaaguucuccgagcugagcacgaaaugcauaaucaagacuguugaauuugcaaaacagcugccagguuucaccacacucacuauugccgaccagaucaccuuacugaaggcugcaugccuugauauuuugauccugaggauauguacacgguauaccccugagcaggacacgaugacuuuuucggauggccuaacacucaaccgcacccaaaugcauaaugccggguucggaccccugacugaccuuguguuugcuuucgccaaccagcuguugccacucgaaauggaugacgcggagacaggccuguuaucugcaauuugccugaucuguggugaucgacaggaccucgagcaacccgacagagucgauaugcuucaggaaccucuguuggaggcccuaaaaguguacgugaggaagcggcguccaucccgcccgcacauguuccccaagaugcugaugaaaauuaccgaccucagaucaaucagugcuaagggggccgaaagggucaucacgcugaaaauggagauuccuggaagcaugccaccccuuauacaggaaaugcuggaaaauuccgagggcuuggauacccucucuggccagccugggggagguggccgggacgggggaggccuggcaccacccccggguagcugcucaccuaguuuauccccaagcucuaaccgaucaagucccgcuacacacagcccuuga

SEQ ID NO: 3294 - RNA, 1389 nt, Artificial Sequence
  derived and/or modified sequence opt4 from RARA__Homo_sapiens__AAH08727
auggccagcaacagcagcagcugccccacccccggcggcggccaccugaacggcuaccccgugccccccuacgccuucuucuucccccccaugcugggcggccugagcccccccggcgcccugaccacccugcagcaccagcugcccgugagcggcuacagcacccccagccccgccaccaucgagacccagagcagcagcagcgaggagaucgugcccagcccccccagcccccccccccugcccagaaucuacaagcccugcuucgugugccaggacaagagcagcggcuaccacuacggcgugagcgccugcgagggcugcaagggcuucuucagaagaagcauccagaagaacaugguguacaccugccacagagacaagaacugcaucaucaacaaggugaccagaaacagaugccaguacugcagacugcagaagugcuucgaggugggcaugagcaaggagagcgugagaaacgacagaaacaagaagaagaaggaggugcccaagcccgagugcagcgagagcuacacccugacccccgaggugggcgagcugaucgagaaggugagaaaggcccaccaggagaccuuccccgcccugugccagcugggcaaguacaccaccaacaacagcagcgagcagagagugagccuggacaucgaccugugggacaaguucagcgagcugagcaccaagugcaucaucaagaccguggaguucgccaagcagcugcccggcuucaccacccugaccaucgccgaccagaucacccugcugaaggccgccugccuggacauccugauccugagaaucugcaccagauacacccccgagcaggacaccaugaccuucagcgacggccugacccugaacagaacccagaugcacaacgccggcuucggcccccugaccgaccugguguucgccuucgccaaccagcugcugccccuggagauggacgacgccgagaccggccugcugagcgccaucugccugaucugcggcgacagacaggaccuggagcagcccgacagaguggacaugcugcaggagccccugcuggaggcccugaagguguacgugagaaagagaagacccagcagaccccacauguuccccaagaugcugaugaagaucaccgaccugagaagcaucagcgccaagggcgccgagagagugaucacccugaagauggagauccccggcagcaugcccccccugauccaggagaugcuggagaacagcgagggccuggacacccugagcggccagcccggcggcggcggcagagacggcggcggccuggcccccccccccggcagcugcagccccagccugagccccagcagcaacagaagcagccccgccacccacagccccuga

SEQ ID NO: 3295 - RNA, 1389 nt, Artificial Sequence
  derived and/or modified sequence opt5 from RARA__Homo_sapiens__AAH08727
auggccagcaacuccucuagcugccccaccccuggcgggggacaccugaauggcuacccggugcccccuuaugcuuucuuuuucccucccaugcucgggggacugucucccccuggcgcccuuacaacgcugcagcaucaacucccggucuccggguacagcacccccuccccugcgacaaucgagacccagucuagcuccagcgaagagauuguucccucuccucccuccccgccuccccugccuagaaucuauaagcccuguuuugugugccaggacaaaagcucuggauaccacuauggcguguccgcuugugaaggcugcaagggguucuuucggcgcagcauucagaaaaacauggucuacacaugucauagagauaagaauugcaucauuaacaaagugacccggaaucgcugucaauauugcagacuucagaaguguuucgagguuggaaugucuaaggaauccgugcggaacgaccgcaauaaaaagaaaaaggagguccccaaaccugagugcagcgaauccuacacacugaccccggaggugggcgaacucaucgagaagguuagaaaggcccaccaggagacguuucccgcccugugucagcuggggaaauacaccacaaacaauucuagcgaacaacgggugucccucgauaucgaccugugggauaaguucagcgagcuuucuaccaaaugcauuaucaagacagucgaauuugcuaaacagcugccuggauucaccacgcucacaauugccgaccagaucacccugcuuaaggcugccugccuggauauucucauccugcgcauuuguacaagauauacccccgagcaggacaccaugacauuuuccgauggccugacgcucaaccggacccaaaugcauaaugcgggguucggaccucugacagaccuuguguuugccuucgcuaaccagcugcucccccuggaaauggaugacgccgagaccggccuucugagcgcuaucugccucaucuguggcgaucgccaggaccuggagcaaccggacagaguggauaugcugcaggaaccucuccuggaggcccuuaaagucuacguucggaagcgcagacccucucggccucacauguuccccaagaugcugaugaaaauuacagaccucagaagcaucuccgcgaagggggccgaacgcgugauuacccugaaaauggagaucccuggaucuaugcccccgcuuauucaggaaaugcuggagaauagcgagggccucgauacgcuguccgggcagccuggaggcgggggacgggacggcggcgggcuggcucccccucccggaagcugcucuccgucccucagccccucuuccaacagaagcuccccugccacacacucucccuga

SEQ ID NO: 3296 - protein, 189 aa, Artificial Sequence
  RASH__Homo_sapiens__P01112
MTEYKLVVVGAGGVGKSALTIQLIQNHFVDEYDPTIEDSYRKQVVIDGETCLLDILDTAGQEEYSAMRDQYMRTGEGFLCVFAINNTKSFEDIHQYREQIKRVKDSDDVPMVLVGNKCDLAARTVESRQAQDLARSYGIPYIETSAKTRQGVEDAFYTLVREIRQHKLRKLNPPDESGPGCMSCKCVLS

SEQ ID NO: 3297 - RNA, 570 nt, Artificial Sequence
  RASH__Homo_sapiens__AAB02605
augacggaauauaagcuggugguggugggcgccggcggugugggcaagagugcgcugaccauccagcugauccagaaccauuuuguggacgaauacgaccccacuauagaggauuccuaccggaagcagguggucauugauggggagacgugccuguuggacauccuggauaccgccggccaggaggaguacagcgccaugcgggaccaguacaugcgcaccggggagggcuuccuguguguguuugccaucaacaacaccaagucuuuugaggacauccaccaguacagggagcagaucaaacgggugaaggacucggaugacgugcccauggugcugguggggaacaagugugaccuggcugcacgcacuguggaaucucggcaggcucaggaccucgcccgaagcuacggcauccccuacaucgagaccucggccaagacccggcagggaguggaggaugccuucuacacguuggugcgugagauccggcagcacaagcugcggaagcugaacccuccugaugagaguggccccggcugcaugagcugcaagugugugcucuccuga

SEQ ID NO: 3298 - RNA, 570 nt, Artificial Sequence
  derived and/or modified sequence opt1 from RASH__Homo_sapiens__AAB02605
augaccgaguacaagcugguggucgugggcgccgggggcgugggcaagagcgcccucaccauccagcugauccagaaccacuucgucgacgaguacgaccccacgaucgaggacuccuaccgcaagcaggucgugaucgacggggagaccugccugcucgacauccuggacaccgcggggcaggaggaguacagcgccaugcgggaccaguacaugcgcaccggcgagggcuuccugugcguguucgccaucaacaacacgaaguccuucgaggacauccaccaguaccgggagcagaucaagcgcgugaaggacagcgacgacgugccgaugguccucguggggaacaagugcgaccuggccgcccggaccguggagucccgccaggcgcaggaccuggcccggagcuacggcauccccuacaucgagaccuccgccaagacccgccagggggucgaggacgccuucuacacgcucgugcgggagauccgccagcacaagcugcggaagcugaacccgcccgacgagagcggccccgggugcauguccugcaagugcgugcucagcuga

SEQ ID NO: 3299 - RNA, 570 nt, Artificial Sequence
  derived and/or modified sequence opt2 from RASH__Homo_sapiens__AAB02605
augaccgaguacaagcucgucgucgucggcgccggcggcgucggcaaguccgcccucaccauccagcucauccagaaccacuucgucgacgaguacgaccccaccaucgaggacuccuaccgcaagcaggucgucaucgacggcgagaccugccuccucgacauccucgacaccgccggccaggaggaguacuccgccaugcgcgaccaguacaugcgcaccggcgagggcuuccucugcgucuucgccaucaacaacaccaaguccuucgaggacauccaccaguaccgcgagcagaucaagcgcgucaaggacuccgacgacguccccaugguccucgucggcaacaagugcgaccucgccgcccgcaccgucgagucccgccaggcccaggaccucgcccgcuccuacggcauccccuacaucgagaccuccgccaagacccgccagggcgucgaggacgccuucuacacccucguccgcgagauccgccagcacaagcuccgcaagcucaacccccccgacgaguccggccccggcugcauguccugcaagugcguccucuccuga

SEQ ID NO: 3300 - RNA, 570 nt, Artificial Sequence
  derived and/or modified sequence opt3 from RASH__Homo_sapiens__AAB02605
augaccgaguacaagcugguggucguuggcgccgggggaguggguaaaagcgcucucacaauccagcuuauucaaaaccacuucguagacgaauaugaucccacuauagaggacuccuacagaaaacagguggucaucgauggcgaaacgugccuguuggacauuuuagauaccgcagggcaggaggaauauucugccaugagggaccaguacaugcggacaggagagggcuuucuguguguguucgcgaucaauaacacuaagucauuugaggauauucaucaauaucgcgaacagaucaagcgaguuaaagacagugaugacgugccuaugguccuaguggguaauaagugcgaucucgcugcccguaccguagagagcagacaggcacaggaccuggccagguccuacgggauaccauauaucgaaacaucugcuaagacccggcaaggaguugaggaugcauucuacacucuugugcgcgagauuagacagcacaaacugaggaaguugaacccgcccgacgaaucgggcccuggcuguaugucaugcaaauguguccucagcuga

SEQ ID NO: 3301 - RNA, 570 nt, Artificial Sequence
  derived and/or modified sequence opt4 from RASH__Homo_sapiens__AAB02605
augaccgaguacaagcuggugguggugggcgccggcggcgugggcaagagcgcccugaccauccagcugauccagaaccacuucguggacgaguacgaccccaccaucgaggacagcuacagaaagcagguggugaucgacggcgagaccugccugcuggacauccuggacaccgccggccaggaggaguacagcgccaugagagaccaguacaugagaaccggcgagggcuuccugugcguguucgccaucaacaacaccaagagcuucgaggacauccaccaguacagagagcagaucaagagagugaaggacagcgacgacgugcccauggugcuggugggcaacaagugcgaccuggccgccagaaccguggagagcagacaggcccaggaccuggccagaagcuacggcauccccuacaucgagaccagcgccaagaccagacagggcguggaggacgccuucuacacccuggugagagagaucagacagcacaagcugagaaagcugaacccccccgacgagagcggccccggcugcaugagcugcaagugcgugcugagcuga

SEQ ID NO: 3302 - RNA, 570 nt, Artificial Sequence
  derived and/or modified sequence opt5 from RASH__Homo_sapiens__AAB02605
augaccgaguacaagcugguggucguuggcgccgggggagugggcaaaagcgcucucacaauccagcugauucaaaaccacuucguggacgaauaugaucccacgaucgaggacuccuacagaaagcaggucgugauugauggggaaaccugccuucuggacauccucgauacagccggacaggaggaauauucugcgaugcgggaccaguacaugcgcaccggcgagggguuucuguguguuuucgcuauuaacaacacaaagagcuuugaggauauccaucaauauagagaacagaucaaacgggugaaagacuccgaugacgucccuauggugcuuguuggaaauaagugcgaucuggccgcccgcaccguggagucuagacaggcucaggaccucgcccggagcuacggcauuccguauaucgaaacauccgcuaagacccgccaaggcgucgaggaugccuucuacacgcuggugagagagauucggcagcacaaacugcgcaagcucaaucccccugacgaaucugggcccggauguaugagcugcaaaugugugcuguccuga

SEQ ID NO: 3303 - protein, 189 aa, Artificial Sequence [sequence omitted]

SEQ ID NO: 3304 - RNA, 570 nt, Artificial Sequence
  RASK__Homo_sapiens__AAB59445
augacugaauauaaacuugugguaguuggagcugguggcguaggcaagagugccuugacgauacagcuaauucagaaucauuuuguggacgaauaugauccaacaauagaggauuccuacaggaagcaaguaguaauugauggagaaaccugucucuuggauauucucgacacagcaggucaagaggaguacagugcaaugagggaccaguacaugaggacuggggagggcuuucuuuguguauuugccauaaauaauacuaaaucauuugaagauauucaccauuauagagaacaaauuaaaagaguuaaggacucugaagauguaccuaugguccuaguaggaaauaaaugugauuugccuucuagaacaguagacacaaaacaggcucaggacuuagcaagaaguuauggaauuccuuuuauugaaacaucagcaaagacaagacagagaguggaggaugcuuuuuauacauuggugagagagauccgacaauacagauugaaaaaaaucagcaaagaagaaaagacuccuggcugugugaaaauuaaaaaaugcauuauaauguaa

SEQ ID NO: 3305 - RNA, 570 nt, Artificial Sequence
  derived and/or modified sequence opt1 from RASK__Homo_sapiens__AAB59445
augaccgaguacaagcugguggucgugggcgccgggggcgugggcaagagcgcccucaccauccagcugauccagaaccacuucgucgacgaguacgaccccacgaucgaggacuccuaccgcaagcaggucgugaucgacggggagaccugccugcucgacauccuggacaccgcggggcaggaggaguacagcgccaugcgggaccaguacaugcgcaccggcgagggcuuccugugcguguucgccaucaacaacacgaaguccuucgaggacauccaccacuaccgggagcagaucaagcgcgugaaggacagcgaggacgugccgaugguccucguggggaacaagugcgaccugcccucccggaccguggacaccaagcaggcccaggaccuggcccgcagcuacggcauccccuucaucgagaccuccgcgaagacgcggcagcgcgucgaggacgccuucuacacccucgugcgggagauccgccaguaccggcugaagaagaucagcaaggaggagaagacccccgggugcgugaagaucaagaagugcaucaucauguga

SEQ ID NO: 3306 - RNA, 570 nt, Artificial Sequence
  derived and/or modified sequence opt2 from RASK__Homo_sapiens__AAB59445
augaccgaguacaagcucgucgucgucggcgccggcggcgucggcaaguccgcccucaccauccagcucauccagaaccacuucgucgacgaguacgaccccaccaucgaggacuccuaccgcaagcaggucgucaucgacggcgagaccugccuccucgacauccucgacaccgccggccaggaggaguacuccgccaugcgcgaccaguacaugcgcaccggcgagggcuuccucugcgucuucgccaucaacaacaccaaguccuucgaggacauccaccacuaccgcgagcagaucaagcgcgucaaggacuccgaggacguccccaugguccucgucggcaacaagugcgaccuccccucccgcaccgucgacaccaagcaggcccaggaccucgcccgcuccuacggcauccccuucaucgagaccuccgccaagacccgccagcgcgucgaggacgccuucuacacccucguccgcgagauccgccaguaccgccucaagaagaucuccaaggaggagaagacccccggcugcgucaagaucaagaagugcaucaucauguga

SEQ ID NO: 3307 - RNA, 570 nt, Artificial Sequence
  derived and/or modified sequence opt3 from RASK__Homo_sapiens__AAB59445
augaccgaguacaagcugguggucguuggcgccgggggaguggguaaaagcgcucucacaauccagcuuauucaaaaccacuucguagacgaauaugaucccacuauagaggacuccuacagaaaacagguggucaucgauggcgaaacgugccuguuggacauuuuagauaccgcagggcaggaggaauauucugccaugagggaccaguacaugcggacaggagagggcuuucuguguguguucgcgaucaauaacacuaagucauuugaggauauucaucacuaucgcgaacaaaucaagcgaguuaaagacagugaggaugugccuaugguccuaguggguaauaagugcgaccucccaagccguaccguagauacaaagcaggcucaggaccuggccagauccuacgggauaccguucaucgaaaccucugcaaaaacuaggcagcggguugaggaugccuuuuauacacuugugcgcgagauuagacaauacaggcugaagaaaaucucgaaggaagagaaaacccccggaugugucaagauuaagaaaugcaucauaauguga

SEQ ID NO: 3308 - RNA, 570 nt, Artificial Sequence
  derived and/or modified sequence opt4 from RASK__Homo_sapiens__AAB59445
augaccgaguacaagcuggugguggugggcgccggcggcgugggcaagagcgcccugaccauccagcugauccagaaccacuucguggacgaguacgaccccaccaucgaggacagcuacagaaagcagguggugaucgacggcgagaccugccugcuggacauccuggacaccgccggccaggaggaguacagcgccaugagagaccaguacaugagaaccggcgagggcuuccugugcguguucgccaucaacaacaccaagagcuucgaggacauccaccacuacagagagcagaucaagagagugaaggacagcgaggacgugcccauggugcuggugggcaacaagugcgaccugcccagcagaaccguggacaccaagcaggcccaggaccuggccagaagcuacggcauccccuucaucgagaccagcgccaagaccagacagagaguggaggacgccuucuacacccuggugagagagaucagacaguacagacugaagaagaucagcaaggaggagaagacccccggcugcgugaagaucaagaagugcaucaucauguga

SEQ ID NO: 3309 - RNA, 570 nt, Artificial Sequence
  derived and/or modified sequence opt5 from RASK__Homo_sapiens__AAB59445
augaccgaguacaagcugguggucguuggcgccgggggagugggcaaaagcgcucucacaauccagcugauucaaaaccacuucguggacgaauaugaucccacgaucgaggacuccuacagaaagcaggucgugauugauggggaaaccugccuucuggacauccucgauacagccggacaggaggaauauucugcgaugcgggaccaguacaugcgcaccggcgagggguuucuguguguuuucgcuauuaauaacacaaagagcuuugaggauauccaucacuauagagaacaaaucaaacgggugaaagacuccgaggaugucccuauggugcuuguuggaaauaagugcgaccugccgucucgcaccguggauacaaagcaggcccaggaccucgccagaagcuacggcauucccuucaucgaaaccuccgcuaaaacgcggcagcgcgucgaggaugccuuuuauacccuggugagagagauucggcaauaccgccugaagaaaaucucuaaggaagagaaaacaccuggcugugugaagauuaagaaaugcaucauuauguga

SEQ ID NO: 3310 - protein, 189 aa, Artificial Sequence
  RASN__Homo_sapiens__P01111
MTEYKLVVVGAGGVGKSALTIQLIQNHFVDEYDPTIEDSYRKQVVIDGETCLLDILDTAGQEEYSAMRDQYMRTGEGFLCVFAINNSKSFADINLYREQIKRVKDSDDVPMVLVGNKCDLPTRTVDTKQAHELAKSYGIPFIETSAKTRQGVEDAFYTLVREIRQYRMKKLNSSDDGTQGCMGLPCVVM

SEQ ID NO: 3311 - RNA, 570 nt, Artificial Sequence
  RASN__Homo_sapiens__AAA60255
augacugaguacaaacugguggugguuggagcaggugguguugggaaaagcgcacugacaauccagcuaauccagaaccacuuuguagaugaauaugaucccaccauagaggauucuuacagaaaacaagugguuauagauggugaaaccuguuuguuggacauacuggauacagcuggacaagaagaguacagugccaugagagaccaauacaugaggacaggcgaaggcuuccucuguguauuugccaucaauaauagcaagucauuugcggauauuaaccucuacagggagcagauuaagcgaguaaaagacucggaugauguaccuauggugcuagugggaaacaagugugauuugccaacaaggacaguugauacaaaacaagcccacgaacuggccaagaguuacgggauuccauucauugaaaccucagccaagaccagacaggguguugaagaugcuuuuuacacacugguaagagaaauacgccaguaccgaaugaaaaaacucaacagcagugaugaugggacucaggguuguaugggauugccauguguggugauguaa

SEQ ID NO: 3312 - RNA, 570 nt, Artificial Sequence
  derived and/or modified sequence opt1 from RASN__Homo_sapiens__AAA60255
augaccgaguacaagcugguggucgugggcgccgggggcgugggcaagagcgcccucaccauccagcugauccagaaccacuucgucgacgaguacgaccccacgaucgaggacuccuaccgcaagcaggucgugaucgacggggagaccugccugcucgacauccuggacaccgcggggcaggaggaguacagcgccaugcgggaccaguacaugcgcaccggcgagggcuuccugugcguguucgccaucaacaacuccaagagcuucgccgacaucaaccucuaccgggagcagaucaagcgcgugaaggacuccgacgacgugccgaugguccugguggggaacaagugcgaccugcccacgcggaccguggacaccaagcaggcccacgagcucgccaagagcuacggcauccccuucaucgagaccuccgcgaagacgcgccagggggucgaggacgccuucuacacccuggugcgggagauccgccaguaccggaugaagaagcugaacagcuccgacgacggcacccaggggugcaugggccuccccugcguggucauguga

SEQ ID NO: 3313 - RNA, 570 nt, Artificial Sequence
  derived and/or modified sequence opt2 from RASN__Homo_sapiens__AAA60255
augaccgaguacaagcucgucgucgucggcgccggcggcgucggcaaguccgcccucaccauccagcucauccagaaccacuucgucgacgaguacgaccccaccaucgaggacuccuaccgcaagcaggucgucaucgacggcgagaccugccuccucgacauccucgacaccgccggccaggaggaguacuccgccaugcgcgaccaguacaugcgcaccggcgagggcuuccucugcgucuucgccaucaacaacuccaaguccuucgccgacaucaaccucuaccgcgagcagaucaagcgcgucaaggacuccgacgacguccccaugguccucgucggcaacaagugcgaccuccccacccgcaccgucgacaccaagcaggcccacgagcucgccaaguccuacggcauccccuucaucgagaccuccgccaagacccgccagggcgucgaggacgccuucuacacccucguccgcgagauccgccaguaccgcaugaagaagcucaacuccuccgacgacggcacccagggcugcaugggccuccccugcgucgucauguga

SEQ ID NO: 3314 - RNA, 570 nt, Artificial Sequence
  derived and/or modified sequence opt3 from RASN__Homo_sapiens__AAA60255
augaccgaguacaagcugguggucguuggcgccgggggaguggguaaaagcgcucucacaauccagcuuauucaaaaccacuucguagacgaauaugaucccacuauagaggacuccuacagaaaacagguggucaucgauggcgaaacgugccuguuggacauuuuagauaccgcagggcaggaggaauauucugccaugagggaccaguacaugcggacaggagagggcuuucuguguguguucgcgaucaauaacucaaagaguuuugcugauauuaaucuauaucgcgagcaaaucaagcgaguuaaagacagcgaugacgugccuaugguccucguggguaacaagugcgaucugccaacucguaccguagacacaaagcaggcccaugaacuugcaaaauccuacgggauaccguucaucgagaccucugccaagacuagacagggaguugaagaugcuuuuuauacacuggugagggagauucggcaguaccgcaugaaaaagcucaauucgucagacgacggcacccaaggcuguaugggguugcccugcgucgugauguga

SEQ ID NO: 3315 - RNA, 570 nt, Artificial Sequence
  derived and/or modified sequence opt4 from RASN__Homo_sapiens__AAA60255
augaccgaguacaagcuggugguggugggcgccggcggcgugggcaagagcgcccugaccauccagcugauccagaaccacuucguggacgaguacgaccccaccaucgaggacagcuacagaaagcagguggugaucgacggcgagaccugccugcuggacauccuggacaccgccggccaggaggaguacagcgccaugagagaccaguacaugagaaccggcgagggcuuccugugcguguucgccaucaacaacagcaagagcuucgccgacaucaaccuguacagagagcagaucaagagagugaaggacagcgacgacgugcccauggugcuggugggcaacaagugcgaccugcccaccagaaccguggacaccaagcaggcccacgagcuggccaagagcuacggcauccccuucaucgagaccagcgccaagaccagacagggcguggaggacgccuucuacacccuggugagagagaucagacaguacagaaugaagaagcugaacagcagcgacgacggcacccagggcugcaugggccugcccugcguggugauguga

SEQ ID NO: 3316 - RNA, 570 nt, Artificial Sequence
  derived and/or modified sequence opt5 from RASN__Homo_sapiens__AAA60255
augaccgaguacaagcugguggucguuggcgccgggggagugggcaaaagcgcucucacaauccagcugauucaaaaccacuucguggacgaauaugaucccacgaucgaggacuccuacagaaagcaggucgugauugauggggaaaccugccuucuggacauccucgauacagccggacaggaggaauauucugcgaugcgggaccaguacaugcgcaccggcgagggguuucuguguguuuucgcuauuaauaacagcaaauccuuugccgauaucaaucuuuauagagagcaaaucaagcgggugaaagacucugaugacgucccuauggugcugguuggaaacaagugcgaucucccgacacgcaccguggacacaaagcaggcccaugaacuggcuaaaagcuacggcauucccuucaucgagaccuccgccaagacgagacagggcgucgaagaugcuuuuuauacccuggugcgggagauucgccaguacagaaugaaaaagcucaauucuagcgacgacgggacacaaggauguaugggccugccuugcguggucauguga

SEQ ID NO: 3317 - protein, 181 aa, Artificial Sequence
  RGS5__Homo_sapiens__O15539
MCKGLAALPHSCLERAKEIKIKLGILLQKPDSVGDLVIPYNEKPEKPAKTQKTSLDEALQWRDSLDKLLQNNYGLASFKSFLKSEFSEENLEFWIACEDYKKIKSPAKMAEKAKQIYEEFIQTEAPKEVNIDHFTKDITMKNLVEPSLSSFDMAQKRIHALMEKDSLPRFVRSEFYQELIK

SEQ ID NO: 3318 - RNA, 546 nt, Artificial Sequence
  RGS5__Homo_sapiens__AAB84001
augugcaaaggacuugcagcuuugccccacucaugccuggaaagggccaaggagauuaagaucaaguugggaauucuccuccagaagccagacucaguuggugaccuugucauuccguacaaugagaagccagagaaaccagccaagacccagaaaaccucgcuggacgaggcccugcaguggcgugauucccuggacaaacuccugcagaacaacuauggacuugccaguuucaaaaguuuccugaagucugaauucagugaggaaaaccuugaguucuggauugccugugaggauuacaagaagaucaaguccccugccaagauggcugagaaggcaaagcaaauuuaugaagaauucauucaaacggaggcuccuaaagaggugaauauugaccacuucacuaaggacaucacaaugaagaaccugguggaaccuucccugagcagcuuugacauggcccagaaaagaauccaugcccugauggaaaaggauucucugccucgcuuugugcgcucugaguuuuaucaggaguuaaucaaguag

SEQ ID NO: 3319 - RNA, 546 nt, Artificial Sequence
  derived and/or modified sequence opt1 from RGS5__Homo_sapiens__AAB84001
augugcaagggccuggccgcccucccccacagcugccuggagcgcgcgaaggagaucaagaucaagcuggggauccuccugcagaagccggacuccgugggcgaccuggucauccccuacaacgagaagcccgagaagcccgccaagacccagaagaccagccucgacgaggcccugcaguggcgggacucccuggacaagcuccugcagaacaacuacgggcuggccagcuucaaguccuuccucaagagcgaguucuccgaggagaaccuggaguucuggaucgccugcgaggacuacaagaagaucaagagcccggcgaagauggccgagaaggccaagcagaucuacgaggaguucauccagacggaggcccccaaggaggugaacaucgaccacuucaccaaggacaucaccaugaagaaccugguggagcccucccucagcuccuucgacauggcgcagaagcgcauccacgcccugauggagaaggacagccugccccgguucguccgcuccgaguucuaccaggagcucaucaaguga

SEQ ID NO: 3320 - RNA, 546 nt, Artificial Sequence
  derived and/or modified sequence opt2 from RGS5__Homo_sapiens__AAB84001
augugcaagggccucgccgcccucccccacuccugccucgagcgcgccaaggagaucaagaucaagcucggcauccuccuccagaagcccgacuccgucggcgaccucgucauccccuacaacgagaagcccgagaagcccgccaagacccagaagaccucccucgacgaggcccuccaguggcgcgacucccucgacaagcuccuccagaacaacuacggccucgccuccuucaaguccuuccucaaguccgaguucuccgaggagaaccucgaguucuggaucgccugcgaggacuacaagaagaucaagucccccgccaagauggccgagaaggccaagcagaucuacgaggaguucauccagaccgaggcccccaaggaggucaacaucgaccacuucaccaaggacaucaccaugaagaaccucgucgagcccucccucuccuccuucgacauggcccagaagcgcauccacgcccucauggagaaggacucccucccccgcuucguccgcuccgaguucuaccaggagcucaucaaguga

SEQ ID NO: 3321 - RNA, 546 nt, Artificial Sequence
  derived and/or modified sequence opt3 from RGS5__Homo_sapiens__AAB84001
augugcaagggccuggccgcucucccccacagcugucuugagagagcaaaagaaaucaagauuaaacuggggauauuguuacagaagccugacuccgugggagaucuggucaucccauacaacgagaaaccggaaaagcccgccaagacccagaaaacaucucuagacgaggcgcuccaauggagggauucacuggacaaacuucugcagaauaacuaugguuuggcuaguuucaagagcuuucucaaguccgaguucucugaagagaaucuggaauuuuggauugccugcgaggauuacaaaaagaucaagucgccugcaaaaauggccgaaaaggcuaaacagauuuaugaggaguucauccaaacugaagcaccaaaggagguuaacauagaccauuuuacgaaagauaucaccaugaagaaucugguggaacccucacucagcaguuucgacauggcccagaaacggauucacgcuuuaauggagaaggauucccugccucgcuuuguacgaucugaguucuaccaggaacuuaucaaguga

SEQ ID NO: 3322 - RNA, 546 nt, Artificial Sequence
  derived and/or modified sequence opt4 from RGS5__Homo_sapiens__AAB84001
augugcaagggccuggccgcccugccccacagcugccuggagagagccaaggagaucaagaucaagcugggcauccugcugcagaagcccgacagcgugggcgaccuggugauccccuacaacgagaagcccgagaagcccgccaagacccagaagaccagccuggacgaggcccugcaguggagagacagccuggacaagcugcugcagaacaacuacggccuggccagcuucaagagcuuccugaagagcgaguucagcgaggagaaccuggaguucuggaucgccugcgaggacuacaagaagaucaagagccccgccaagauggccgagaaggccaagcagaucuacgaggaguucauccagaccgaggcccccaaggaggugaacaucgaccacuucaccaaggacaucaccaugaagaaccugguggagcccagccugagcagcuucgacauggcccagaagagaauccacgcccugauggagaaggacagccugcccagauucgugagaagcgaguucuaccaggagcugaucaaguga

SEQ ID NO: 3323 - RNA, 546 nt, Artificial Sequence
  derived and/or modified sequence opt5 from RGS5__Homo_sapiens__AAB84001
augugcaagggccuggccgcucucccccacagcugucuggagagagccaaagaaaucaagauuaaacuugggauccugcuccagaagccugacuccgugggagaucuggucauuccguacaacgagaaacccgaaaagccugcgaagacccaaaagacaucucuugacgaggcucugcaguggcgggauagccucgacaagcugcugcagaauaacuauggccucgccuccuucaaaucuuuucugaaaagcgaguucuccgaagagaaucuugaauuuuggaucgccugcgaggauuacaaaaagauuaagucucccgcuaaaauggccgaaaaggcuaaacagaucuaugaggaguucauccaaacggaagccccuaaggagguuaacauugaccauuuuaccaaagauaucacaaugaagaaucugguggaacccagccucuccagcuucgacauggcgcagaaacgcauucacgcccugauggagaaggauucucuuccuagauuugugcgguccgaguucuaccaggaacugaucaaguga

SEQ ID NO: 3324 - protein, 724 aa, Artificial Sequence
  RHAMM/CD168__Homo_sapiens__O75330
MSFPKAPLKRFNDPSGCAPSPGAYDVKTLEVLKGPVSFQKSQRFKQQKESKQNLNVDKDTTLPASARKVKSSESKESQKNDKDLKILEKEIRVLLQERGAQDRRIQDLETELEKMEARLNAALREKTSLSANNATLEKQLIELTRTNELLKSKFSENGNQKNLRILSLELMKLRNKRETKMRGMMAKQEGMEMKLQVTQRSLEESQGKIAQLEGKLVSIEKEKIDEKSETEKLLEYIEEISCASDQVEKYKLDIAQLEENLKEKNDEILSLKQSLEENIVILSKQVEDLNVKCQLLEKEKEDHVNRNREHNENLNAEMQNLKQKFILEQQEREKLQQKELQIDSLLQQEKELSSSLHQKLCSFQEEMVKEKNLFEEELKQTLDELDKLQQKEEQAERLVKQLEEEAKSRAEELKLLEEKLKGKEAELEKSSAAHTQATLLLQEKYDSMVQSLEDVTAQFESYKALTASEIEDLKLENSSLQEKAAKAGKNAEDVQHQILATESSNQEYVRMLLDLQTKSALKETEIKEITVSFLQKITDLQNQLKQQEEDFRKQLEDEEGRKAEKENTTAELTEEINKWRLLYEELYNKTKPFQLQLDAFEVEKQALLNEHGAAQEQLNKIRDSYAKLLGHQNLKQKIKHVVKLKDENSQLKSEVSKLRCQLAKKKQSETKLQEELNKVLGIKHFDPSKAFHHESKENFALKTPLKEGNTNCYRAPMECQESWK

SEQ ID NO: 3325 - RNA, 2175 nt, Artificial Sequence
  RHAMM/CD168__Homo_sapiens__CCDS4362.1
auguccuuuccuaaggcgcccuugaaacgauucaaugacccuucugguugugcaccaucuccaggugcuuaugauguuaaaacuuuagaaguauugaaaggaccaguauccuuucagaaaucacaaagauuuaaacaacaaaaagaaucuaaacaaaaucuuaauguugacaaagauacuaccuugccugcuucagcuagaaaaguuaagucuucggaaucaaaggaaucucaaaagaaugauaaagauuugaagauauuagagaaagagauucguguucuucuacaggaacguggugcccaggacaggcggauccaggaucuggaaacugaguuggaaaagauggaagcaaggcuaaaugcugcacuaagggaaaaaacaucucucucugcaaauaaugcuacacuggaaaaacaacuuauugaauugaccaggacuaaugaacuacuaaaaucuaaguuuucugaaaaugguaaccagaagaauuugagaauucuaagcuuggaguugaugaaacuuagaaacaaaagagaaacaaagaugagggguaugauggcuaagcaagaaggcauggagaugaagcugcaggucacccaaaggagucucgaagagucucaagggaaaauagcccaacuggagggaaaacuuguuucaauagagaaagaaaagauugaugaaaaaucugaaacagaaaaacucuuggaauacaucgaagaaauuaguugugcuucagaucaaguggaaaaauacaagcuagauauugcccaguuagaagaaaauuugaaagagaagaaugaugaaauuuuaagccuuaagcagucucuugaggagaauauuguuauauuaucuaaacaaguagaagaucuaaaugugaaaugucagcugcuugaaaaagaaaaagaagaccaugucaacaggaauagagaacacaacgaaaaucuaaaugcagagaugcaaaacuuaaaacagaaguuuauucuugaacaacaggaacgugaaaagcuucaacaaaaagaauuacaaauugauucacuucugcaacaagagaaagaauuaucuucgagucuucaucagaagcucuguucuuuucaagaggaaaugguuaaagagaagaaucuguuugaggaagaauuaaagcaaacacuggaugagcuugauaaauuacagcaaaaggaggaacaagcugaaaggcuggucaagcaauuggaagaggaagcaaaaucuagagcugaagaauuaaaacuccuagaagaaaagcugaaagggaaggaggcugaacuggagaaaaguagugcugcucauacccaggccacccugcuuuugcaggaaaaguaugacaguauggugcaaagccuugaagauguuacugcucaauuugaaagcuauaaagcguuaacagccagugagauagaagaucuuaagcuggagaacucaucauuacaggaaaaagcggccaaggcugggaaaaaugcagaggauguucagcaucagauuuuggcaacugagagcucaaaucaagaauauguaaggaugcuucuagaucugcagaccaagucagcacuaaaggaaacagaaauuaaagaaaucacaguuucuuuucuucaaaaaauaacugauuugcagaaccaacucaagcaacaggaggaagacuuuagaaaacagcuggaagaugaagaaggaagaaaagcugaaaaagaaaauacaacagcagaauuaacugaagaaauuaacaaguggcgucuccucuaugaagaacuauauaauaaaacaaaaccuuuucagcuacaacuagaugcuuuugaaguagaaaaacaggcauuguugaaugaacauggugcagcucaggaacagcuaaauaaaauaagagauucauaugcuaaauuauugggucaucagaauuugaaacaaaaaaucaagcauguugugaaguugaaagaugaaaauagccaacucaaaucggaaguaucaaaacuccgcugucagcuugcuaaaaaaaaacaaagugagacaaaacuucaagaggaauugaauaaaguucuagguaucaaacacuuugauccuucaaaggcuuuucaucaugaaaguaaagaaaauuuugcccugaagaccccauuaaaagaaggcaauacaaacuguuaccgagcuccuauggagugucaagaaucauggaaguaa

SEQ ID NO: 3326 - RNA, 2175 nt, Artificial Sequence
  derived and/or modified sequence opt1 from RHAMM/CD168__Homo_sapiens__CCDS4362.1
augagcuuccccaaggccccgcugaagcgcuucaacgaccccuccggcugcgcccccagccccggggcguacgacgugaagacccucgagguccugaagggcccgguguccuuccagaagucccagcgguucaagcagcagaaggagagcaagcagaaccugaacguggacaaggacaccacgcuccccgccagcgcccgcaaggucaaguccagcgaguccaaggagagccagaagaacgacaaggaccugaagauccuggagaaggagauccgggugcuccugcaggagcgcggggcccaggaccggcgcauccaggaccuggagaccgagcucgagaagauggaggcccggcugaacgcggcccugcgcgagaagaccucccucagcgccaacaacgccacccuggagaagcagcugaucgagcucacgcggaccaacgagcugcugaaguccaaguucagcgagaacggcaaccagaagaaccuccgcauccugucccuggagcucaugaagcugcggaacaagcgcgagaccaagaugcgggggaugauggcgaagcaggagggcauggagaugaagcuccaggugacccagcgcagccuggaggagucccagggcaagaucgcccagcuggaggggaagcuggucagcaucgagaaggagaagaucgacgagaaguccgagacggagaagcuccuggaguacaucgaggagaucagcugcgccagcgaccagguggagaaguacaagcuggacaucgcccagcucgaggagaaccugaaggagaagaacgacgagauccugucccucaagcagagccuggaggagaacaucgugauccuguccaagcaggucgaggaccucaacgugaagugccagcugcuggagaaggagaaggaggaccacgugaaccggaaccgcgagcacaacgagaaccucaacgccgagaugcagaaccugaagcagaaguucauccuggagcagcaggagcgggagaagcuccagcagaaggagcugcagaucgacagccugcuccagcaggagaaggagcuguccagcucccugcaccagaagcucugcagcuuccaggaggagauggucaaggagaagaaccuguucgaggaggagcugaagcagacccuggacgagcucgacaagcugcagcagaaggaggagcaggcggagcgccuggugaagcagcucgaggaggaggccaagucccgggccgaggagcugaagcugcucgaggagaagcugaagggcaaggaggccgagcuggagaaguccagcgccgcgcacacccaggccacccuccugcugcaggagaaguacgacagcauggugcagucccucgaggacgucacggcccaguucgagagcuacaaggcccugaccgccuccgagaucgaggaccugaagcucgagaacagcucccugcaggagaaggcggccaaggccgggaagaacgccgaggacgugcagcaccagauccuggccaccgagagcuccaaccaggaguacgugcgcaugcuccuggaccugcagaccaagagcgcgcucaaggagacggagaucaaggagaucaccgucagcuuccugcagaagaucaccgaccugcagaaccagcucaagcagcaggaggaggacuuccggaagcagcuggaggacgaggagggccgcaaggccgagaaggagaacaccacggccgagcugaccgaggagaucaacaaguggcgccuccuguacgaggagcuguacaacaagaccaagcccuuccagcuccagcuggacgccuucgagguggagaagcaggcgcugcucaacgagcacggggccgcccaggagcagcugaacaagauccgggacuccuacgccaagcugcucggccaccagaaccugaagcagaagaucaagcacguggucaagcugaaggacgagaacagccagcucaaguccgaggugagcaagcugcgcugccagcuggccaagaagaagcaguccgagaccaagcuccaggaggagcugaacaaggugcugggcaucaagcacuucgaccccagcaaggcguuccaccacgaguccaaggagaacuucgcccucaagacgccgcugaaggaggggaacaccaacugcuaccgggcccccauggagugccaggagagcuggaaguga

SEQ ID NO: 3327 - RNA, 2175 nt, Artificial Sequence
  derived and/or modified sequence opt2 from RHAMM/CD168__Homo_sapiens__CCDS4362.1
auguccuuccccaaggccccccucaagcgcuucaacgaccccuccggcugcgcccccucccccggcgccuacgacgucaagacccucgagguccucaagggccccgucuccuuccagaagucccagcgcuucaagcagcagaaggaguccaagcagaaccucaacgucgacaaggacaccacccuccccgccuccgcccgcaaggucaaguccuccgaguccaaggagucccagaagaacgacaaggaccucaagauccucgagaaggagauccgcguccuccuccaggagcgcggcgcccaggaccgccgcauccaggaccucgagaccgagcucgagaagauggaggcccgccucaacgccgcccuccgcgagaagaccucccucuccgccaacaacgccacccucgagaagcagcucaucgagcucacccgcaccaacgagcuccucaaguccaaguucuccgagaacggcaaccagaagaaccuccgcauccucucccucgagcucaugaagcuccgcaacaagcgcgagaccaagaugcgcggcaugauggccaagcaggagggcauggagaugaagcuccaggucacccagcgcucccucgaggagucccagggcaagaucgcccagcucgagggcaagcucgucuccaucgagaaggagaagaucgacgagaaguccgagaccgagaagcuccucgaguacaucgaggagaucuccugcgccuccgaccaggucgagaaguacaagcucgacaucgcccagcucgaggagaaccucaaggagaagaacgacgagauccucucccucaagcagucccucgaggagaacaucgucauccucuccaagcaggucgaggaccucaacgucaagugccagcuccucgagaaggagaaggaggaccacgucaaccgcaaccgcgagcacaacgagaaccucaacgccgagaugcagaaccucaagcagaaguucauccucgagcagcaggagcgcgagaagcuccagcagaaggagcuccagaucgacucccuccuccagcaggagaaggagcucuccuccucccuccaccagaagcucugcuccuuccaggaggagauggucaaggagaagaaccucuucgaggaggagcucaagcagacccucgacgagcucgacaagcuccagcagaaggaggagcaggccgagcgccucgucaagcagcucgaggaggaggccaagucccgcgccgaggagcucaagcuccucgaggagaagcucaagggcaaggaggccgagcucgagaaguccuccgccgcccacacccaggccacccuccuccuccaggagaaguacgacuccaugguccagucccucgaggacgucaccgcccaguucgaguccuacaaggcccucaccgccuccgagaucgaggaccucaagcucgagaacuccucccuccaggagaaggccgccaaggccggcaagaacgccgaggacguccagcaccagauccucgccaccgaguccuccaaccaggaguacguccgcaugcuccucgaccuccagaccaaguccgcccucaaggagaccgagaucaaggagaucaccgucuccuuccuccagaagaucaccgaccuccagaaccagcucaagcagcaggaggaggacuuccgcaagcagcucgaggacgaggagggccgcaaggccgagaaggagaacaccaccgccgagcucaccgaggagaucaacaaguggcgccuccucuacgaggagcucuacaacaagaccaagcccuuccagcuccagcucgacgccuucgaggucgagaagcaggcccuccucaacgagcacggcgccgcccaggagcagcucaacaagauccgcgacuccuacgccaagcuccucggccaccagaaccucaagcagaagaucaagcacgucgucaagcucaaggacgagaacucccagcucaaguccgaggucuccaagcuccgcugccagcucgccaagaagaagcaguccgagaccaagcuccaggaggagcucaacaagguccucggcaucaagcacuucgaccccuccaaggccuuccaccacgaguccaaggagaacuucgcccucaagaccccccucaaggagggcaacaccaacugcuaccgcgcccccauggagugccaggaguccuggaaguga

SEQ ID NO: 3328 - RNA, 2175 nt, Artificial Sequence
  derived and/or modified sequence opt3 from RHAMM/CD168__Homo_sapiens__CCDS4362.1
augagcuuccccaaggccccucugaaaagauuuaacgacccauccggcugcgcuccgucucccggggcauacgaugugaagacccucgagguccuuaaaggaccuguuucauuccagaagagucaaagguuuaaacagcagaaggaaagcaagcagaaucugaacguggacaaagauacaacuuugccagccuccgcgcggaagguaaaaucuucggagucaaaggaaagccaaaagaaugacaaggauuuaaagauccuggagaaagaaauucgcgugcuacuccaggagcgaggugcucaggaccguagaauacaggaucuggagacggaacuugagaagauggaagccaggcugaacgcagccuugcgggagaaaaccagucucuccgcuaauaacgcaacacuggagaagcaacugaucgaacucacucgcaccaaugaguuacugaaaucuaaguucagcgaaaacggcaaucagaaaaaccuuagaauuuugucccuggagcuaaugaagcucaggaauaagcgggaaacaaaaaugcgcgggaugauggccaagcaggagggaauggagaugaaacugcaggucacccaacgaucacuugaagagagucagggcaagaucgcucagcuggaagguaaauuggugagcauugagaaggaaaagaucgacgagaaaucugagacugaaaagcuccuggaguauauagaagagaucuccugugccucagaucaaguugaaaaauacaaguuagacauugcgcagcuggaggagaaccucaaagaaaagaaugaugagauccuuagccugaagcagaguuuggaagagaacauugugauccuaucuaaacaggucgaggaccugaaugugaagugccaacuccuggaaaaagagaaggaagaucacguaaacagaaacagggagcauaaugaaaaccuuaaugcagagaugcagaaccugaaacagaaguuuauauuggagcagcaagaacgggagaagcuccagcagaaagaacugcagauugacuccuuacugcaacaggagaaggaacuaagcucgucucuccaccagaaacuguguuccuuccaggaggagaugguuaaggagaaaaaucuuuuugaagaagaguugaagcaaacacuggacgaacucgauaaacugcagcagaaggaggagcaagccgaacgucuugugaagcagcuggaggaagaggcuaaaucacgcgccgaggaauugaagcuccuggaggaaaaauuaaaggggaaagaggcagaacuggagaagaguagcgcugcccauacccaggcgacgcuacuccugcaggagaaguaugacuccaugguccaaucucuugaagaugugacugcccaguucgagagcuacaaagcauugaccgcuucagaaaucgaggaccugaagcucgaaaacaguucccugcaggagaaagccgcuaaggccggcaaaaaugcagaggaugugcagcaccaaauuuuagccacagaaagcucuaaccaggaguaugucagaaugcugcuugacuugcagacuaagucagcucucaaggaaaccgagaucaaagaaaucacaguuaguuuucugcagaagauuaccgaucuacaaaaucagcugaaacagcaagaggaggacuucaggaagcagcucgaagaugaggaaggacggaaagcggagaaggagaacacgacugcagaacugacagaggaaauaaauaaguggcgacuuuuguacgaggaacuguauaacaaaaccaagcccuuucaguuacagcucgacgccuucgagguggagaaacaagcucugcuuaaugaacauggcgccgcacaggagcagcugaacaagauccgcgauagcuacgccaaauugcucgggcaccagaaucugaagcagaaaauuaagcacguagugaagcuaaaagacgaaaacucccaacugaagucugaggucucgaaacucagaugccagcuggcuaagaaaaagcagagcgaaacuaaacuucaagaggaguugaacaaagugcugggaaucaagcauuuugacccuuccaaagccuuccaccaugaaucaaaggagaauuucgcauuaaaaacaccacucaaggaagguaacaccaauuguuacagggcgcccauggagugccaggaaaguuggaaguga

SEQ ID NO: 3329 - RNA, 2175 nt, Artificial Sequence
  derived and/or modified sequence opt4 from RHAMM/CD168__Homo_sapiens__CCDS4362.1
augagcuuccccaaggccccccugaagagauucaacgaccccagcggcugcgcccccagccccggcgccuacgacgugaagacccuggaggugcugaagggccccgugagcuuccagaagagccagagauucaagcagcagaaggagagcaagcagaaccugaacguggacaaggacaccacccugcccgccagcgccagaaaggugaagagcagcgagagcaaggagagccagaagaacgacaaggaccugaagauccuggagaaggagaucagagugcugcugcaggagagaggcgcccaggacagaagaauccaggaccuggagaccgagcuggagaagauggaggccagacugaacgccgcccugagagagaagaccagccugagcgccaacaacgccacccuggagaagcagcugaucgagcugaccagaaccaacgagcugcugaagagcaaguucagcgagaacggcaaccagaagaaccugagaauccugagccuggagcugaugaagcugagaaacaagagagagaccaagaugagaggcaugauggccaagcaggagggcauggagaugaagcugcaggugacccagagaagccuggaggagagccagggcaagaucgcccagcuggagggcaagcuggugagcaucgagaaggagaagaucgacgagaagagcgagaccgagaagcugcuggaguacaucgaggagaucagcugcgccagcgaccagguggagaaguacaagcuggacaucgcccagcuggaggagaaccugaaggagaagaacgacgagauccugagccugaagcagagccuggaggagaacaucgugauccugagcaagcagguggaggaccugaacgugaagugccagcugcuggagaaggagaaggaggaccacgugaacagaaacagagagcacaacgagaaccugaacgccgagaugcagaaccugaagcagaaguucauccuggagcagcaggagagagagaagcugcagcagaaggagcugcagaucgacagccugcugcagcaggagaaggagcugagcagcagccugcaccagaagcugugcagcuuccaggaggagauggugaaggagaagaaccuguucgaggaggagcugaagcagacccuggacgagcuggacaagcugcagcagaaggaggagcaggccgagagacuggugaagcagcuggaggaggaggccaagagcagagccgaggagcugaagcugcuggaggagaagcugaagggcaaggaggccgagcuggagaagagcagcgccgcccacacccaggccacccugcugcugcaggagaaguacgacagcauggugcagagccuggaggacgugaccgcccaguucgagagcuacaaggcccugaccgccagcgagaucgaggaccugaagcuggagaacagcagccugcaggagaaggccgccaaggccggcaagaacgccgaggacgugcagcaccagauccuggccaccgagagcagcaaccaggaguacgugagaaugcugcuggaccugcagaccaagagcgcccugaaggagaccgagaucaaggagaucaccgugagcuuccugcagaagaucaccgaccugcagaaccagcugaagcagcaggaggaggacuucagaaagcagcuggaggacgaggagggcagaaaggccgagaaggagaacaccaccgccgagcugaccgaggagaucaacaaguggagacugcuguacgaggagcuguacaacaagaccaagcccuuccagcugcagcuggacgccuucgagguggagaagcaggcccugcugaacgagcacggcgccgcccaggagcagcugaacaagaucagagacagcuacgccaagcugcugggccaccagaaccugaagcagaagaucaagcacguggugaagcugaaggacgagaacagccagcugaagagcgaggugagcaagcugagaugccagcuggccaagaagaagcagagcgagaccaagcugcaggaggagcugaacaaggugcugggcaucaagcacuucgaccccagcaaggccuuccaccacgagagcaaggagaacuucgcccugaagaccccccugaaggagggcaacaccaacugcuacagagcccccauggagugccaggagagcuggaaguga

SEQ ID NO: 3330 - RNA, 2175 nt, Artificial Sequence
  derived and/or modified sequence opt5 from RHAMM/CD168__Homo_sapiens__CCDS4362.1
augagcuuccccaaggccccucugaaaagauuuaacgacccguccggcugcgcucccucuccuggggccuacgaugugaagacccucgagguccugaaaggacccguuagcuuccagaagucccaacgguuuaaacagcagaaggaaucuaagcagaaucuuaacguggacaaagauacaacgcugccugcgagcgcucgcaaggugaaauccucugagagcaaggaaucccaaaagaaugacaaggaucucaagauccuggagaaagaaauuagaguccuucugcaggagcggggcgcccaggaccgcagaauccaggaucucgagaccgaacuggagaagauggaagcccggcugaacgcugcccuccgcgagaaaacaagccugucugcuaauaacgccacccuugagaagcaacugauugaacucacaagaaccaaugagcugcuuaaauccaaguucagcgaaaacgggaaucagaaaaaccugcggauccucucucuggagcugaugaagcuccgcaauaagagagaaacaaaaaugcggggaaugauggcgaagcaggagggcauggagaugaaacuucaggugacccaacgcucccuggaagagagccaggggaagauugcccagcuggaaggaaaacucguuucuaucgagaaggaaaagaucgacgagaaauccgagacggaaaagcugcuugaguauauugaagagaucagcugugcuuccgaucaaguggaaaaauacaagcuggacauugcccagcucgaggagaaccugaaagaaaagaaugaugagauccugucucucaagcagagccuggaagagaacauugucauccuuuccaaacagguggaggaccugaauguuaagugccaacuccuggaaaaagagaaggaagaucacgugaacagaaaccgggagcauaaugaaaaccuuaaugcugagaugcagaaccugaaacagaaguuuauucucgagcagcaagaacgcgagaagcugcagcagaaagaacugcagaucgacagccuccugcaacaggagaaggaacuuucuuccagccugcaccagaaacucuguucuuuccaggaggagauggucaaggaaaagaaucuguuugaggaggaacugaagcaaacccuugacgaacucgauaaacugcagcagaaggaggagcaagccgaaagacuggugaagcagcucgaggaagaggcgaaaagccgggccgaggaacugaaacuucuggaggaaaaacucaagggcaaagaggcugaacuggagaaguccucugccgcucauacacaggccacccugcuucuccaggagaaguaugacagcauggugcaaucccuggaagaugucacagcccaguucgagagcuacaaagcucugaccgcgucugaaaucgaggaccucaagcuggaaaacuccagccuucaggagaaagccgcuaaggccggcaaaaaugccgaggauguucagcaccaaauucuggcuacggaaucuuccaaccaggaguaugugagaaugcuccuggaccugcagacaaagagcgcccuuaaggaaaccgagaucaaagaaauuacaguguccuuucuccagaagaucaccgaucugcaaaaucagcugaaacagcaagaggaggacuuccgcaagcagcucgaagaugaggaagggcggaaagcggagaaggagaacaccacagcugaacugacggaggaaauuaauaaguggagacuucuguacgaggaacucuauaacaaaaccaagcccuuucagcugcagcuggacgccuucgaggucgagaaacaagcccuucucaaugaacauggagcugcccaggagcagcugaacaagauccgcgauucuuacgcuaaacugcucggccaccagaaucugaagcagaaaaucaagcacgugguuaaacuuaaagacgaaaacagccaacugaaguccgaggugucuaaacuccggugccagcuggccaagaaaaagcagagcgaaacaaagcugcaagaggagcuuaacaaaguccuggggauuaagcauuuugacccuuccaaagcguuccaccaugaaagcaaggagaauuucgcccucaaaaccccgcugaaggaaggaaacacaaauuguuacagagcucccauggagugccaggaaucuuggaaguga

SEQ ID NO: 3331 - protein, 193 aa, Artificial Sequence
  RHOC__Homo_sapiens__P08134
MAAIRKKLVIVGDGACGKTCLLIVFSKDQFPEVYVPTVFENYIADIEVDGKQVELALWDTAGQEDYDRLRPLSYPDTDVILMCFSIDSPDSLENIPEKWTPEVKHFCPNVPIILVGNKKDLRQDEHTRRELAKMKQEPVRSEEGRDMANRISAFGYLECSAKTKEGVREVFEMATRAGLQVRKNKRRRGCPIL

SEQ ID NO: 3332 - RNA, 582 nt, Artificial Sequence
  RHOC__Homo_sapiens__AAC33179
auggcugcaauccgaaagaagcuggugaucguuggggauggugccugugggaagaccugccuccucaucgucuucagcaaggaucaguuuccggaggucuacgucccuacugucuuugagaacuauauugcggacauugagguggacggcaagcagguggagcuggcucugugggacacagcagggcaggaagacuaugaucgacugcggccucucuccuacccggacacugaugucauccucaugugcuucuccaucgacagcccugacagccuggaaaacauuccugagaaguggaccccagaggugaagcacuucugccccaacgugcccaucauccugguggggaauaagaaggaccugaggcaagacgagcacaccaggagagagcuggccaagaugaagcaggagcccguucggucugaggaaggccgggacauggcgaaccggaucagugccuuuggcuaccuugagugcucagccaagaccaaggagggagugcgggagguguuugagauggccacucgggcuggccuccagguccgcaagaacaagcgucggaggggcugucccauucucuga

SEQ ID NO: 3333 - RNA, 582 nt, Artificial Sequence
  derived and/or modified sequence opt1 from RHOC__Homo_sapiens__AAC33179
auggccgccauccgcaagaagcuggugaucgucggcgacggggcgugcggcaagaccugccuccugaucguguucagcaaggaccaguuccccgagguguacgucccgaccguguucgagaacuacaucgccgacaucgagguggacgggaagcaggucgagcuggcccucugggacacggccggccaggaggacuacgaccggcugcgcccccuguccuaccccgacaccgacgugauccucaugugcuucagcaucgacucccccgacagccuggagaacaucccggagaaguggacccccgaggugaagcacuucugccccaacguccccaucauccugguggggaacaagaaggaccuccggcaggacgagcacacccgccgggagcuggccaagaugaagcaggagccggugcgcuccgaggagggccgggacauggcgaaccgcaucagcgccuucggcuaccuggagugcuccgccaagacgaaggaggggguccgggagguguucgagauggccacccgcgcgggccuccaggugcggaagaacaagcgccggcgcgggugccccauccuguga

SEQ ID NO: 3334 - RNA, 582 nt, Artificial Sequence
  derived and/or modified sequence opt2 from RHOC__Homo_sapiens__AAC33179
auggccgccauccgcaagaagcucgucaucgucggcgacggcgccugcggcaagaccugccuccucaucgucuucuccaaggaccaguuccccgaggucuacguccccaccgucuucgagaacuacaucgccgacaucgaggucgacggcaagcaggucgagcucgcccucugggacaccgccggccaggaggacuacgaccgccuccgcccccucuccuaccccgacaccgacgucauccucaugugcuucuccaucgacucccccgacucccucgagaacauccccgagaaguggacccccgaggucaagcacuucugccccaacguccccaucauccucgucggcaacaagaaggaccuccgccaggacgagcacacccgccgcgagcucgccaagaugaagcaggagcccguccgcuccgaggagggccgcgacauggccaaccgcaucuccgccuucggcuaccucgagugcuccgccaagaccaaggagggcguccgcgaggucuucgagauggccacccgcgccggccuccagguccgcaagaacaagcgccgccgcggcugccccauccucuga

SEQ ID NO: 3335 - RNA, 582 nt, Artificial Sequence
  derived and/or modified sequence opt3 from RHOC__Homo_sapiens__AAC33179
auggccgcuaucagaaagaaacuggugauugucggcgacggggcaugcggaaagaccugucuccuuauaguuuucagcaaagaucaguuucccgagguguacguaccuacaguguucgaaaacuauaucgccgacauugaggucgaugguaagcaaguggaacuggcguugugggacacugcuggccaggaggauuacgacagguuacggccacuguccuauccggauacggacguuauccuaaugugcuuuucuauugauucacccgacagucucgaaaauaucccugagaaauggaccccagaggugaagcacuucugucccaacgucccuauaauccugguggggaauaagaaagaucuucgccaggacgaacauacacgacgugagcuggccaagaugaaacaggaaccaguaagaagcgaggagggaagggauauggcaaaccggauuuccgccuuuggcuacuuggaaugcucugcuaagacuaaagaggguguucgcgaaguguucgagauggcaaccagagccgggcuccaagucaggaagaauaagcggcgccgaggaugucccauccuguga

SEQ ID NO: 3336 - RNA, 582 nt, Artificial Sequence
  derived and/or modified sequence opt4 from RHOC__Homo_sapiens__AAC33179
auggccgccaucagaaagaagcuggugaucgugggcgacggcgccugcggcaagaccugccugcugaucguguucagcaaggaccaguuccccgagguguacgugcccaccguguucgagaacuacaucgccgacaucgagguggacggcaagcagguggagcuggcccugugggacaccgccggccaggaggacuacgacagacugagaccccugagcuaccccgacaccgacgugauccugaugugcuucagcaucgacagccccgacagccuggagaacauccccgagaaguggacccccgaggugaagcacuucugccccaacgugcccaucauccuggugggcaacaagaaggaccugagacaggacgagcacaccagaagagagcuggccaagaugaagcaggagcccgugagaagcgaggagggcagagacauggccaacagaaucagcgccuucggcuaccuggagugcagcgccaagaccaaggagggcgugagagagguguucgagauggccaccagagccggccugcaggugagaaagaacaagagaagaagaggcugccccauccuguga

SEQ ID NO: 3337 - RNA, 582 nt, Artificial Sequence
  derived and/or modified sequence opt5 from RHOC__Homo_sapiens__AAC33179
auggccgcuaucagaaagaaacuggugauugucggcgacggggccugcggaaagaccugucuccugaucguuuucagcaaagaucaguuucccgagguguacgugccuacagucuucgaaaacuauauugcggacaucgagguggauggcaagcaaguugaacuugcucugugggacacggccgggcaggaggauuacgaccggcuccgcccgcuguccuaucccgauaccgacgugauucuuaugugcuuuucuaucgauagcccugacucccuggaaaauauccccgagaaauggacaccugaggucaagcacuucugucccaacgugccuauuauccucguuggaaauaagaaagaucugagacaggacgaacauacccggcgcgagcuggccaagaugaaacaggaaccggugagaucugaggagggccgggauauggcuaaccgcauuagcgccuuuggguaccucgaaugcuccgcuaagacaaaagagggagucagagaaguguucgagauggccacccgggcgggccugcaagugcgcaagaauaagagacggcgcggcugucccauccuuuga

SEQ ID NO: 3338 - protein, 295 aa, Artificial Sequence [sequence omitted]

SEQ ID NO: 3339 - RNA, 888 nt, Artificial Sequence
  RSSA__Homo_sapiens__AAA36161
auguccggagcccuugauguccugcaaaugaaggaggaggauguccuuaaguuccuugcagcaggaacccacuuagguggcaccaaucuugacuuccagauggaacaguacaucuauaaaaggaaaagugauggcaucuauaucauaaaucucaagaggaccugggagaagcuucugcuggcagcucgugcaauuguugccauugaaaacccugcugaugucaguguuauauccuccaggaauacuggccagagggcugugcugaaguuugcugcugccacuggagccacuccaauugcuggccgcuucacuccuggaaccuucacuaaccagauccaggcagccuuccgggagccacggcuucuugugguuacugaccccagggcugaccaccagccucucacggaggcaucuuauguuaaccuaccuaccauugcgcuguguaacacagauucuccucugcgcuauguggacauugccaucccaugcaacaacaagggagcucacucaguggguuugaugugguggaugcuggcucgggaaguucugcgcaugcguggcaccauuucccgugaacacccaugggaggucaugccugaucuguacuucuacagagauccugaagagauugaaaaagaagagcaggcugcugcugagaaggcagugaccaaggaggaauuucagggugaauggacugcucccgcuccugaguucacugcuacucagccugagguugcagacuggucugaagguguacaggugcccucugugccuauucagcaauucccuacugaagacuggagcgcucagccugccacggaagacuggucugcagcucccacugcucaggccacugaauggguaggagcaaccacugacuggucuuaa

SEQ ID NO: 3340 - RNA, 888 nt, Artificial Sequence
  derived and/or modified sequence opt1 from RSSA__Homo_sapiens__AAA36161
augagcggcgcccuggacgugcuccagaugaaggaggaggacguccugaaguuccuggccgcggggacccaccucggcgggaccaaccuggacuuccagauggagcaguacaucuacaagcgcaaguccgacggcaucuacaucaucaaccugaagcggacgugggagaagcuccugcuggccgcccgcgccaucguggccaucgagaaccccgcggacgugagcgucaucuccagccggaacaccgggcagcgcgccgugcucaaguucgccgccgcgaccggcgccaccccgaucgccggccgguucacgcccgggaccuucaccaaccagauccaggccgccuuccgcgagccccggcugcugguggucaccgacccccgcgcggaccaccagccgcucacggaggccuccuacgugaaccugcccaccaucgcccugugcaacaccgacagcccccuccgguacguggacaucgccauccccugcaacaacaagggcgcccacuccgucgggcugaugugguggaugcuggcgcgcgaggugcuccggaugcgcggcaccaucagccgggagcacccgugggaggugaugcccgaccuguacuucuaccgcgaccccgaggagaucgagaaggaggagcaggccgccgccgagaaggccgucacgaaggaggaguuccagggggaguggaccgcgcccgccccggaguucaccgccacccagcccgagguggccgacugguccgagggcgugcagguccccagcgugcccauccagcaguucccgacggaggacugguccgcccagcccgcgaccgaggacuggagcgccgcccccaccgcccaggcgaccgagugggugggcgccacgaccgacugguccuga

SEQ ID NO: 3341 - RNA, 888 nt, Artificial Sequence
  derived and/or modified sequence opt2 from RSSA__Homo_sapiens__AAA36161
auguccggcgcccucgacguccuccagaugaaggaggaggacguccucaaguuccucgccgccggcacccaccucggcggcaccaaccucgacuuccagauggagcaguacaucuacaagcgcaaguccgacggcaucuacaucaucaaccucaagcgcaccugggagaagcuccuccucgccgcccgcgccaucgucgccaucgagaaccccgccgacgucuccgucaucuccucccgcaacaccggccagcgcgccguccucaaguucgccgccgccaccggcgccacccccaucgccggccgcuucacccccggcaccuucaccaaccagauccaggccgccuuccgcgagccccgccuccucgucgucaccgacccccgcgccgaccaccagccccucaccgaggccuccuacgucaaccuccccaccaucgcccucugcaacaccgacuccccccuccgcuacgucgacaucgccauccccugcaacaacaagggcgcccacuccgucggccucaugugguggaugcucgcccgcgagguccuccgcaugcgcggcaccaucucccgcgagcaccccugggaggucaugcccgaccucuacuucuaccgcgaccccgaggagaucgagaaggaggagcaggccgccgccgagaaggccgucaccaaggaggaguuccagggcgaguggaccgcccccgcccccgaguucaccgccacccagcccgaggucgccgacugguccgagggcguccagguccccuccguccccauccagcaguuccccaccgaggacugguccgcccagcccgccaccgaggacugguccgccgcccccaccgcccaggccaccgagugggucggcgccaccaccgacugguccuga

SEQ ID NO: 3342 - RNA, 888 nt, Artificial Sequence
  derived and/or modified sequence opt3 from RSSA__Homo_sapiens__AAA36161
augagcggcgcccuggacgugcuccagaugaaggaggaagauguccuuaaauuccuggcugcagggacccacuugggagguacaaacuuagacuuucaaauggagcaguacaucuauaagagaaaauccgauggcauuuacauaaucaaucugaagaggacuugggaaaaacuacuccuggccgcgcgggcuauuguugccaucgagaaccccgcagacgugucuguaauuucaagucgcaauacggggcagcgagccgugcuuaaguucgcugcagccaccggagcuacaccuaucgccggccguuuuacuccagguaccuucacaaaccagauacaagcggcauuuagagaaccgaggcuguuggucgugaccgauccccgggccgaccaucagccucucacugaggcuagcuauguuaaucugccaacaaucgcccugugcaacaccgauucuccccuccgcuacguggacauugcaaucccuuguaauaacaagggggcucacuccgucggauuaaugugguggaugcuggccagagaggugcuuaggaugcggggcacgauuucgcgcgaacauccaugggagguaaugcccgauuuguauuucuaccgagacccugaagagaucgagaaagaggaacaggcggccgcagaaaaggcuguuacuaaagaggaauuucagggcgaguggaccgccccagcuccggaguucacagccacucaacccgaaguggcagauuggucagaggggguccaggugccuagcgugccaauacagcaguuucccaccgaagacuggagugcccaaccugcuacagaggauugguccgcggcaccaaccgcccaggcuacggaaugggucggagccacuacagacuggucuuga

SEQ ID NO: 3343 - RNA, 888 nt, Artificial Sequence
  derived and/or modified sequence opt4 from RSSA__Homo_sapiens__AAA36161
augagcggcgcccuggacgugcugcagaugaaggaggaggacgugcugaaguuccuggccgccggcacccaccugggcggcaccaaccuggacuuccagauggagcaguacaucuacaagagaaagagcgacggcaucuacaucaucaaccugaagagaaccugggagaagcugcugcuggccgccagagccaucguggccaucgagaaccccgccgacgugagcgugaucagcagcagaaacaccggccagagagccgugcugaaguucgccgccgccaccggcgccacccccaucgccggcagauucacccccggcaccuucaccaaccagauccaggccgccuucagagagcccagacugcugguggugaccgaccccagagccgaccaccagccccugaccgaggccagcuacgugaaccugcccaccaucgcccugugcaacaccgacagcccccugagauacguggacaucgccauccccugcaacaacaagggcgcccacagcgugggccugaugugguggaugcuggccagagaggugcugagaaugagaggcaccaucagcagagagcaccccugggaggugaugcccgaccuguacuucuacagagaccccgaggagaucgagaaggaggagcaggccgccgccgagaaggccgugaccaaggaggaguuccagggcgaguggaccgcccccgcccccgaguucaccgccacccagcccgagguggccgacuggagcgagggcgugcaggugcccagcgugcccauccagcaguuccccaccgaggacuggagcgcccagcccgccaccgaggacuggagcgccgcccccaccgcccaggccaccgagugggugggcgccaccaccgacuggagcuga

SEQ ID NO: 3344 - RNA, 888 nt, Artificial Sequence
  derived and/or modified sequence opt5 from RSSA__Homo_sapiens__AAA36161
augagcggcgcccuggacgugcuccagaugaaggaggaagauguccugaaauuccuugcugccgggacccaccugggaggcacaaaccucgacuuucaaauggagcaguacaucuauaagagaaaauccgaugggauuuacaucauuaaucugaagcggacgugggaaaaacuucugcucgcggcucgcgccaucguugccauugagaaccccgcugacgugucugugaucagcuccagaaauaccggacagcgggccguccugaaguucgcugccgcgacaggcgccaccccuaucgcugggcgcuuuacaccgggaaccuucacaaaccagauucaagccgcuuuuagagaaccccggcugcucgugguuaccgauccucgcgccgaccaucagccccugacggaggcgucuuaugugaaucuuccuaccaucgcccugugcaacacagauagcccccucagauacgucgacauugcuaucccuuguaauaacaagggcgcccacuccgugggccugaugugguggaugcuugcucgggagguucugcgcaugagagggaccauuucucgggaacauccgugggaggugaugcccgaucucuauuucuaccgcgacccugaagagaucgagaaagaggaacaggccgccgcugaaaaggcggucacaaaagaggaauuucagggagaguggaccgcccccgcuccugaguucacggccacacaacccgaaguggccgauuggagcgagggcgugcaggucccguccguuccuauucagcaguuucccaccgaagacuggagcgcucaaccugccacagaggauuggucugcggcucccaccgcccaggccaccgaaugggugggggcuacaacggacugguccuga

SEQ ID NO: 3345 - protein, 866 aa, Artificial Sequence
  RU1__Homo_sapiens__Q9UHJ3
MNGEQQLDADAGSGMEEVELSWEDYLEETGSTAVPYGSFKHVDTRLQNGFAPGMKLEVAVRTDPETYWVATVITTCEQLLLLRYDGYGEDRRADFWCDIRKADLYPIGWCEQNKKTLEAPEGIRDKVSDWDEFLRQTLIGACSPPVPLLEGLRNGRNPLDLIAPGSRLECQAFQDSLSTWIVTVVENIGGRLKLRYEGLESSDNYEHWLYYLDPFLHHVGWAAQQGYELQPPSAIRHLKNEAEWQEILAKVKEEEEEPLPSYLFKDKQVIGIHTFSVNMKLEAVDPWSPFGISPATVVKVFDEKYFLVEMDDLRPENHARRSFVCHADSPGIFPVQWSLKNGLHISPPPGYPSQDFDWADYLKQCGAEAAPQRCFPPLISEHEFKENMKLEAVNPILPEEVCVATITAVRGSYLWLQLEGSKKPIPECIVSVESMDIFPLGWCETNGHPLSTPRRARVYKQRKIAVVQPEKQVPSSRTVHEGLRNQELNSTESVMINGKYCCPKIYFNHRCFSGPYLNKGRIAELPQCVGPGNCVLVLREVLTLLINAAYKPSRVLRELQLDKDSVWHGCGEVLKAKYKGKSYRATVEIVKTADRVTEFCRQTCIKLECCPNLFGPRMVLDKCSENCSVLTKTKYTHYYGKKKNKRIGRPPGGHSNLACALKKASKRRKRRKNVFVHKKKRSSASVDNTPAGSPQGSGGEDEDDPDEGDDDSLSEGSTSEQQDELQEESEMSEKKSCSSSPTQSEISTSLPPDRQRRKRELRTFSFSDDENKPPSPKEIRIEVAERLHLDSNPLKWSVADVVRFIRSTDCAPLARIFLDQEIDGQALLLLTLPTVQECMDLKLGPAIKLCHHIERIKFAFYEQFAN

SEQ ID NO: 3346 - RNA, 2601 nt, Artificial Sequence
  RU1__Homo_sapiens__AAH14614
augaacggggagcagcagcuugaugcagaugccggcucugguauggaagagguagaauuaagcugggaagauuaucuagaagaaacaggguccacagcaguucccuaugggucuuuuaaacauguggacacacgucugcaaaauggauuugcuccugggaugaagcuggagguggcugugagaacagauccugagaccuacuggguugccaccguuaucacuaccugugagcaguugcuccuucuccgcuaugauggcuauggggaggaucggagagcagauuucuggugugacaucaggaaggcugaucucuaccccauuggguggugugagcagaauaagaagacccuugaagccccagaaggcaucagagauaaaguaucugacugggaugaguuucugcggcagacccugauaggagcauguaguccuccuguuccgcugcuagagggccuccguaaugggaggaauccuuuagaucucauugcuccaggauccagacuagaaugucaagcuuuccaggacucuuuaagcacuuggauuguuacuguaguagaaaacauuggaggaaggcugaagcuacguuaugaaggacuugaaaguucugacaauuaugaacauugguuguauuacuuggauccauuucuucaucacguugguugggcugcucaacagggauaugagcuucagcccccuucagccauuagacaucuaaaaaaugaagcugaguggcaagagauuuuggccaaagugaaagaggaagaggaagagccauuaccaucuuacuuauuuaaggacaaacaaguuauuggcauucauacauucucuguaaacaugaaauuggaagcuguagaccccuggucuccuuuugggaucucuccugcuacaguuguuaagguuuuugaugagaaguacuuucugguggaaauggaugacuugcguccugagaaccacgcacggcgauccuuugugugccacgccgacaguccuggcaucuucccugugcaguggagucugaagaauggccuacacaucagccccccuccaggcuacccaagccaggacuuugacugggcugacuaccucaaacaguguggugcugaagcugcuccccagaggugcuucccuccguuaauuucugaacaugaauuuaaggagaacaugaagcucgaggcggugaaccccauucucccugaagaaguguguguugcuaccaucacugcagugagaggcuccuaccuguggcuccagcuggaggguucuaagaagccuauaccugaauguauugugaguguggaauccauggauauauuuccuuugggcuggugugaaaccaacggccacccccucagcacuccucgccgagcacgaguauauaaacagaggaaaauugcagugguucagccagaaaaacaaguaccauccucgaggacuguccacgagggccugaggaaucaggagcugaacuccacagagucaguuaugauuaauggaaaauauugcuguccaaagauauacuucaaccaccguugcuucucagggccauaucuuaacaaaggaagaauugcugagcugccucaauguguaggaccugggaacuguguucugguccuuagagagguccucacuuuacuuaucaaugcagccuacaaacccagccguguccuucgggagcuccagcuggacaaagacucuguguggcacggauguggggaaguccuaaaagccaaauauaaaggaaagaguuaucgggcuacuguugagauagugaaaacagcagaucgggugacugaauucugccggcaaaccuguaucaaacuggaaugcuguccuaaccucuucgguccacggaugguucuggauaaguguucugagaacuguucuguacuuacaaagaccaaauacacacacuauuacggaaagaagaaaaauaaaagaauugggaggccaccuggugggcauaguaacuuagcuugugcccugaaaaaagccaguaagaggagaaagaggcggaaaaauguuuuuguucauaagaagaaacgcuccucugcaucuguugauaauaccccagcgggcucuccccagggaagugggggugaagaugaggaugacccagaugaaggggaugaugauucccuaagugaaggcaguacauccgagcagcaggaugagcuacaggaagaaucagaaaugucagaaaaaaagucaugcuccucuucucccacccaaagugagauauccacaucgcugccuccagauagacaaaggagaaaaagggagcuucgcaccuuuucauuuucugacgaugaaaauaaaccuccuucaccaaaggaaauaaggaucgaaguugcugaaaggcuucaccuggacaguaaccccuugaaguggaguguggcagacguugugcgguucaucagauccacugacugugcuccauuagcaagaauauuccuagaccaggaaauugaugggcaggcccuguugcuccuuacccuucccacuguucaagaaugcauggacuuaaaauugggcccugccaucaaacuuugccaucacauagagaggaucaaguuugcuuuuuaugagcaguuugccaacuga

SEQ ID NO: 3347 - RNA, 2601 nt, Artificial Sequence
  derived and/or modified sequence opt1 from RU1__Homo_sapiens__AAH14614
augaacggcgagcagcagcuggacgccgacgccgggagcggcauggaggagguggagcucuccugggaggacuaccuggaggagaccgggagcaccgcgguccccuacggcuccuucaagcacguggacacgcgccugcagaacggguucgccccgggcaugaagcucgagguggccguccggaccgaccccgagaccuacuggguggccaccgugaucacgaccugcgagcagcugcugcuccugcgcuacgacggcuacggggaggaccggcgcgccgacuucuggugcgacauccggaaggcggaccuguaccccaucggcuggugcgagcagaacaagaagacccucgaggcccccgaggggauccgcgacaaggucagcgacugggacgaguuccugcggcagacccugaucggcgccugcuccccgcccgugccccuccuggaggggcugcgcaacggccggaacccccucgaccugaucgccccgggcagccgccuggagugccaggcguuccaggacucccucagcacguggaucgugaccgucguggagaacaucgggggccggcugaagcugcgcuacgaggggcucgaguccagcgacaacuacgagcacuggcuguacuaccuggaccccuuccuccaccacgugggcugggccgcccagcagggcuacgagcugcagccgcccuccgccauccggcaccugaagaacgaggccgaguggcaggagauccucgcgaaggucaaggaggaggaggaggagccccugcccagcuaccuguucaaggacaagcaggucaucgggauccacaccuucuccgugaacaugaagcucgaggccguggaccccuggagccccuucggcaucuccccggccaccguggugaaggucuucgacgagaaguacuuccugguggagauggacgaccugcgccccgagaaccacgcccggcgcagcuucgugugccacgccgacucccccgggaucuuccccguccaguggagccucaagaacggccugcacaucuccccgccgcccggguaccccagccaggacuucgacugggcggacuaccugaagcagugcggcgccgaggccgcgccccagcggugcuucccgccccucaucagcgagcacgaguucaaggagaacaugaagcuggaggccgugaaccccauccugcccgaggaggugugcgucgccacgaucaccgccgugcgcggcuccuaccucuggcugcagcuggaggggagcaagaagcccauccccgagugcaucgucuccguggagagcauggacaucuucccgcucggcuggugcgagaccaacgggcacccccuguccacgccccggcgcgcccggguguacaagcagcgcaagaucgccgucgugcagcccgagaagcaggucccgagcucccgcaccgugcacgagggccugcggaaccaggagcucaacagcaccgaguccgugaugaucaacgggaaguacugcugccccaagaucuacuucaaccaccgcugcuucagcggccccuaccugaacaagggccggaucgccgagcugccccagugcguggggccgggcaacugcguccucgugcugcgcgaggugcugacccugcucaucaacgcggccuacaagcccucccggguccugcgcgagcugcagcucgacaaggacagcguguggcacgggugcggcgaggugcugaaggccaaguacaaggggaaguccuaccgggccaccgucgagaucgugaagacggcggaccgcgugaccgaguucugccggcagaccugcaucaagcuggagugcugccccaaccucuucggcccccgcaugguccuggacaagugcagcgagaacugcuccgugcugaccaagacgaaguacacccacuacuacggcaagaagaagaacaagcggaucgggcgcccgcccggcgggcacagcaaccucgccugcgcccugaagaaggccuccaagcggcgcaagcggcgcaagaacguguucguccacaagaagaagcggagcuccgccagcguggacaacacccccgcgggcagcccccagggcuccgggggcgaggacgaggacgacccggacgagggggacgacgacagccuguccgagggcagcaccuccgagcagcaggacgagcuccaggaggagagcgagauguccgagaagaaguccugcagcagcucccccacgcagagcgagaucuccaccagccugccgcccgaccgccagcggcgcaagcgcgagcugcggaccuucuccuucagcgacgacgagaacaagccgcccucccccaaggagauccgcaucgagguggccgagcggcuccaccuggacagcaacccccugaaguggagcgucgccgacguggugcgcuucauccgguccaccgacugcgcgccccucgcccgcaucuuccuggaccaggagaucgacgggcaggcccugcuccugcugacgcuccccaccguccaggagugcauggaccugaagcugggccccgccaucaagcucugccaccacaucgagcggaucaaguucgccuucuacgagcaguucgccaacuga

SEQ ID NO: 3348 - RNA, 2601 nt, Artificial Sequence
  derived and/or modified sequence opt2 from RU1__Homo_sapiens__AAH14614
augaacggcgagcagcagcucgacgccgacgccggcuccggcauggaggaggucgagcucuccugggaggacuaccucgaggagaccggcuccaccgccguccccuacggcuccuucaagcacgucgacacccgccuccagaacggcuucgcccccggcaugaagcucgaggucgccguccgcaccgaccccgagaccuacugggucgccaccgucaucaccaccugcgagcagcuccuccuccuccgcuacgacggcuacggcgaggaccgccgcgccgacuucuggugcgacauccgcaaggccgaccucuaccccaucggcuggugcgagcagaacaagaagacccucgaggcccccgagggcauccgcgacaaggucuccgacugggacgaguuccuccgccagacccucaucggcgccugcuccccccccgucccccuccucgagggccuccgcaacggccgcaacccccucgaccucaucgcccccggcucccgccucgagugccaggccuuccaggacucccucuccaccuggaucgucaccgucgucgagaacaucggcggccgccucaagcuccgcuacgagggccucgaguccuccgacaacuacgagcacuggcucuacuaccucgaccccuuccuccaccacgucggcugggccgcccagcagggcuacgagcuccagccccccuccgccauccgccaccucaagaacgaggccgaguggcaggagauccucgccaaggucaaggaggaggaggaggagccccuccccuccuaccucuucaaggacaagcaggucaucggcauccacaccuucuccgucaacaugaagcucgaggccgucgaccccuggucccccuucggcaucucccccgccaccgucgucaaggucuucgacgagaaguacuuccucgucgagauggacgaccuccgccccgagaaccacgcccgccgcuccuucgucugccacgccgacucccccggcaucuuccccguccaguggucccucaagaacggccuccacaucucccccccccccggcuaccccucccaggacuucgacugggccgacuaccucaagcagugcggcgccgaggccgccccccagcgcugcuuccccccccucaucuccgagcacgaguucaaggagaacaugaagcucgaggccgucaaccccauccuccccgaggaggucugcgucgccaccaucaccgccguccgcggcuccuaccucuggcuccagcucgagggcuccaagaagcccauccccgagugcaucgucuccgucgaguccauggacaucuucccccucggcuggugcgagaccaacggccacccccucuccaccccccgccgcgcccgcgucuacaagcagcgcaagaucgccgucguccagcccgagaagcagguccccuccucccgcaccguccacgagggccuccgcaaccaggagcucaacuccaccgaguccgucaugaucaacggcaaguacugcugccccaagaucuacuucaaccaccgcugcuucuccggccccuaccucaacaagggccgcaucgccgagcucccccagugcgucggccccggcaacugcguccucguccuccgcgagguccucacccuccucaucaacgccgccuacaagcccucccgcguccuccgcgagcuccagcucgacaaggacuccgucuggcacggcugcggcgagguccucaaggccaaguacaagggcaaguccuaccgcgccaccgucgagaucgucaagaccgccgaccgcgucaccgaguucugccgccagaccugcaucaagcucgagugcugccccaaccucuucggcccccgcaugguccucgacaagugcuccgagaacugcuccguccucaccaagaccaaguacacccacuacuacggcaagaagaagaacaagcgcaucggccgcccccccggcggccacuccaaccucgccugcgcccucaagaaggccuccaagcgccgcaagcgccgcaagaacgucuucguccacaagaagaagcgcuccuccgccuccgucgacaacacccccgccggcuccccccagggcuccggcggcgaggacgaggacgaccccgacgagggcgacgacgacucccucuccgagggcuccaccuccgagcagcaggacgagcuccaggaggaguccgagauguccgagaagaaguccugcuccuccucccccacccaguccgagaucuccaccucccucccccccgaccgccagcgccgcaagcgcgagcuccgcaccuucuccuucuccgacgacgagaacaagccccccucccccaaggagauccgcaucgaggucgccgagcgccuccaccucgacuccaacccccucaagugguccgucgccgacgucguccgcuucauccgcuccaccgacugcgccccccucgcccgcaucuuccucgaccaggagaucgacggccaggcccuccuccuccucacccuccccaccguccaggagugcauggaccucaagcucggccccgccaucaagcucugccaccacaucgagcgcaucaaguucgccuucuacgagcaguucgccaacuga

SEQ ID NO: 3349 - RNA, 2601 nt, Artificial Sequence
  derived and/or modified sequence opt3 from RU1__Homo_sapiens__AAH14614
augaacggcgagcagcaacuggacgccgaugcugggagcggaauggaagagguggaacucuccugggaggacuaccuugaagagaccgguucuacagcaguccccuauggcucauucaagcacguugauacuagacugcagaauggguuugccccuggaaugaaauuggagguggcgguaaggacggacccagaaaccuacuggguggcuacagucaucacuaccugcgagcaguuacugcuacuccgguaugauggcuacggugaagaccgccgagccgauuucuggugugacauucguaaggcagaucuguauccgauaggguggugcgagcagaacaaaaagacacuugaggcccccgaaggaaucagagacaaagugagugauugggacgaguuucugaggcaaaccuugauuggcgcuuguagcccuccaguuccccuccuggaaggccugcggaaugggcgcaacccucucgauuuaaucgcaccaggauccagacuggagugccaggccuuccaggacucucuuucgacuuggauugugacagucguggaaaauaucgguggcagguugaagcugcgguacgaggggcuagagucaagcgacaacuaugaacauuggcucuacuaccuggaucccuuucuucaccauguaggaugggcugcccagcaaggcuaugagcugcagccuccaagugcgauacgccacuugaagaaugaagcagaguggcaggaaauccucgccaaaguuaaggaggaggaagaggaaccgcugcccuccuacuuauucaaagacaaacaggugauugguauccauaccuuuucugucaacaugaagcuggaggcuguggauccuuggagcccauucgggauuucccccgccacgguggucaagguuuuugacgaaaaguauuuccucguggagauggaugaccuucgaccugagaaucacgcaagaaggucauuuguaugucacgcugauaguccaggaaucuuccccgugcaauggagccugaaaaacggcuugcauauaucuccgccucccggcuacccaucccaggacuuugauugggccgacuaucuaaagcagugcggggcggaagccgcaccucaacgguguuuucccccacugauuucagagcacgaguucaaagaaaauaugaagcucgaggcugucaaccccauccugccugaagaggugugcguugccacuauuaccgcugugcguggaagcuaccuuuggcugcaguuggaagguaguaaaaagccaaucccggaguguaucgucucuguggaauccauggauauuuucccccucggcuggugcgagacaaaugggcauccucugagcacuccacgcagagccaggguauauaaacagcggaagauagcaguugugcagcccgagaagcaagucccuucgucucgaaccgugcacgaaggauuacgcaaccaggagcuuaauuccacagaaucagucaugaucaacggcaaauacuguugcccaaagauuuacuucaaccacagaugcuuuaguggucccuaucuaaauaaagggaggaucgccgagcucccgcagugugugggcccuggaaacugcguucuggugcuucgggaaguauugacccugcucauaaaugcugcguacaagccaagccgcguccugagagagcuucagcuggacaaagacuccguguggcauggcuguggggagguuuugaaggcaaaguauaaaggaaagucuuacagggccacgguggaaauugucaaaacugcugaucgugugacagaguucugccggcaaaccuguaucaagcucgaaugcugucccaaccuguuugguccucgaaugguauuagacaaaugcagcgagaauuguucagugcugacuaagacaaaguauacccacuacuauggcaaaaagaaaaacaagagaaucgggaggcccccaggaggccauaguaaucuagccugcgcacucaaaaaggccuccaagcgccggaaaagaaggaagaacguuuucguccacaaaaagaaacgcagcucugcuucaguggauaauacgccugccgguaguccccaggggagcggcggagaagacgaggaugacccagaugagggcgacgaugacucccugucugaagggucgaccagcgagcagcaggaugaacuucaagaggaguccgaaaugucagagaagaaaaguuguucuagcuccccgacacagucagaaauuagcacuucuuugccucccgaccgacagcggcguaagagagagcugaggaccuuuuccuucagugaugacgaaaacaagccacccagcccuaaagagauccgcauugagguggcagaacggcuccaucuggacucuaauccauuaaagugguccgucgcggauguugugagauuuauaaggucaacagacugcgcuccccuggcccgaaucuuccuugaucaggagauugacggacaagcauugcuccugcuaacucugccuaccgugcaggaaugcauggaucucaaacuggguccggccaucaagcugugucaccacaucgagcgcauuaaauuugcuuucuacgaacaguuugccaacuga

SEQ ID NO: 3350 - RNA, 2601 nt, Artificial Sequence
  derived and/or modified sequence opt4 from RU1__Homo_sapiens__AAH14614
augaacggcgagcagcagcuggacgccgacgccggcagcggcauggaggagguggagcugagcugggaggacuaccuggaggagaccggcagcaccgccgugcccuacggcagcuucaagcacguggacaccagacugcagaacggcuucgcccccggcaugaagcuggagguggccgugagaaccgaccccgagaccuacuggguggccaccgugaucaccaccugcgagcagcugcugcugcugagauacgacggcuacggcgaggacagaagagccgacuucuggugcgacaucagaaaggccgaccuguaccccaucggcuggugcgagcagaacaagaagacccuggaggcccccgagggcaucagagacaaggugagcgacugggacgaguuccugagacagacccugaucggcgccugcagcccccccgugccccugcuggagggccugagaaacggcagaaacccccuggaccugaucgcccccggcagcagacuggagugccaggccuuccaggacagccugagcaccuggaucgugaccgugguggagaacaucggcggcagacugaagcugagauacgagggccuggagagcagcgacaacuacgagcacuggcuguacuaccuggaccccuuccugcaccacgugggcugggccgcccagcagggcuacgagcugcagccccccagcgccaucagacaccugaagaacgaggccgaguggcaggagauccuggccaaggugaaggaggaggaggaggagccccugcccagcuaccuguucaaggacaagcaggugaucggcauccacaccuucagcgugaacaugaagcuggaggccguggaccccuggagccccuucggcaucagccccgccaccguggugaagguguucgacgagaaguacuuccugguggagauggacgaccugagacccgagaaccacgccagaagaagcuucgugugccacgccgacagccccggcaucuuccccgugcaguggagccugaagaacggccugcacaucagccccccccccggcuaccccagccaggacuucgacugggccgacuaccugaagcagugcggcgccgaggccgccccccagagaugcuuccccccccugaucagcgagcacgaguucaaggagaacaugaagcuggaggccgugaaccccauccugcccgaggaggugugcguggccaccaucaccgccgugagaggcagcuaccuguggcugcagcuggagggcagcaagaagcccauccccgagugcaucgugagcguggagagcauggacaucuucccccugggcuggugcgagaccaacggccacccccugagcacccccagaagagccagaguguacaagcagagaaagaucgccguggugcagcccgagaagcaggugcccagcagcagaaccgugcacgagggccugagaaaccaggagcugaacagcaccgagagcgugaugaucaacggcaaguacugcugccccaagaucuacuucaaccacagaugcuucagcggccccuaccugaacaagggcagaaucgccgagcugccccagugcgugggccccggcaacugcgugcuggugcugagagaggugcugacccugcugaucaacgccgccuacaagcccagcagagugcugagagagcugcagcuggacaaggacagcguguggcacggcugcggcgaggugcugaaggccaaguacaagggcaagagcuacagagccaccguggagaucgugaagaccgccgacagagugaccgaguucugcagacagaccugcaucaagcuggagugcugccccaaccuguucggccccagaauggugcuggacaagugcagcgagaacugcagcgugcugaccaagaccaaguacacccacuacuacggcaagaagaagaacaagagaaucggcagaccccccggcggccacagcaaccuggccugcgcccugaagaaggccagcaagagaagaaagagaagaaagaacguguucgugcacaagaagaagagaagcagcgccagcguggacaacacccccgccggcagcccccagggcagcggcggcgaggacgaggacgaccccgacgagggcgacgacgacagccugagcgagggcagcaccagcgagcagcaggacgagcugcaggaggagagcgagaugagcgagaagaagagcugcagcagcagccccacccagagcgagaucagcaccagccugccccccgacagacagagaagaaagagagagcugagaaccuucagcuucagcgacgacgagaacaagccccccagccccaaggagaucagaaucgagguggccgagagacugcaccuggacagcaacccccugaaguggagcguggccgacguggugagauucaucagaagcaccgacugcgccccccuggccagaaucuuccuggaccaggagaucgacggccaggcccugcugcugcugacccugcccaccgugcaggagugcauggaccugaagcugggccccgccaucaagcugugccaccacaucgagagaaucaaguucgccuucuacgagcaguucgccaacuga

SEQ ID NO: 3351 - RNA, 2601 nt, Artificial Sequence
  derived and/or modified sequence opt5 from RU1__Homo_sapiens__AAH14614
augaacggcgagcagcaacuggacgccgaugcugggagcggaauggaagagguggaacucuccugggaggacuaccuggaagagaccggcucuacagccguccccuaugggagcuucaagcacguugauacgagacuucagaauggauuugcgccuggcaugaaacuggagguggcugugcggaccgacccggaaacauacugggucgccaccgugaucacaaccugcgagcagcuccugcuucugcgcuaugauggguacggagaagacagacgggccgauuucuggugugacauucgcaaggcugaucucuaucccaucggcuggugcgagcagaacaaaaagacacuggaggccccugaaggcauuagagacaaaguuuccgauugggacgaguuucugcggcaaacccucaucggggcuuguucucccccugugccccugcuugaaggacugcgcaauggcagaaacccucucgaucugauugccccggggagccggcuugagugccaggcguuccaggacucccugucuacguggaucgucaccgugguugaaaauaucggaggccgccucaagcugagauacgaggggcuggagagcuccgacaacuaugaacauuggcucuacuaccuggaucccuuucuucaccaugugggaugggccgcucagcaaggcuaugagcugcagccucccagcgccauucggcaccucaagaaugaagcugaguggcaggaaauccuggccaaagucaaggaggaggaagaggaaccucuucccucuuaccuguucaaagacaaacaggugauuggcauccauacauuuuccgugaacaugaagcucgaggcggucgauccguggagcccuuucgggauuucucccgccaccguugugaagguguuugacgaaaaguauuuccuggucgagauggaugaccugcgcccugagaaucacgcuagacgguccuuugugugucacgccgauagccccggaaucuuccccguucaauggucucucaaaaacggccugcauauuuccccuccgcccggguacccuagccaggacuuugauugggcugacuaucuuaagcagugcggagccgaagccgcuccccaacgcuguuucccuccccugaucuccgagcacgaguucaaagaaaauaugaagcucgaggcggugaacccgauccugccugaagaggucugcguggccacaauuaccgcuguuagaggcucuuaccuuuggcugcagcucgaagggagcaaaaagcccaucccugaguguauuguguccgucgaaagcauggauaucuuuccccugggauggugcgagacgaauggccauccucugucuacaccccggagagcccgcguguauaaacagcggaagauugccgucgugcagccggagaagcaaguuccuuccagcagaaccgugcacgaaggccuccgcaaccaggagcuuaauucuacagaaagcgucaugaucaacgggaaauacuguugccccaagaucuacuucaaccaccggugcuuuuccggacccuaucuuaauaaaggcagaauugcugagcugccucaguguguggggccgggaaacugcguucucgugcugcgcgaaguccugacccuucucaucaaugccgcguacaagcccucucgggugcugagagagcugcagcucgacaaagacagcguguggcauggcuguggggagguucugaaggcuaaguauaaaggcaaguccuaccgcgccaccgucgaaauugugaaaacagccgaucgggugacggaguucugcagacaaaccuguaucaagcuggaaugcuguccuaaccuguuuggaccccgcaugguccucgacaaaugcagcgagaauuguucugugcugacaaagaccaaguauacacacuacuauggcaaaaagaaaaacaagcggauugggagaccucccggaggccauuccaaucuggcuugcgcccuuaaaaaggcuagcaagcggcgcaaaagacggaagaacguuuucgugcacaaaaagaaaagaucuuccgccagcgucgauaauaccccugcggggucuccccagggauccggcggggaagacgaggaugacccggaugagggcgacgaugacagccucuccgaaggaucuacgagcgagcagcaggaugaacugcaagaggaguccgaaaugagcgagaagaaaucuuguuccagcucuccuacacaguccgaaaucagcaccucucugcccccugaccgccagcggagaaagcgcgagcucagaaccuuuagcuucuccgaugacgaaaacaagcccccgagcccuaaagagauccggauugagguggccgaacgccugcaucuugacucuaauccccugaagugguccguugcugauguggucagauuuauccggagcacagacugcgccccucucgcucgcauuuuccuggaucaggagaucgacggccaagcccugcuucuccugacccugcccacagugcaggaaugcauggaucucaaacuggggcccgcgauuaaacuuugucaccacaucgagagaauuaaguuugccuucuacgaacaguuugcuaacuga

SEQ ID NO: 3352 - protein, 476 aa, Artificial Sequence
  RU2__Homo_sapiens__Q9UHG0
MSGSSARSSHLSQPVVKSVLVYRNGDPFYAGRRVVIHEKKVSSFEVFLKEVTGGVQAPFGAVRNIYTPRTGHRIRKLDQIQSGGNYVAGGQEAFKKLNYLDIGEIKKRPMEVVNTEVKPVIHSRINVSARFRKPLQEPCTIFLIANGDLINPASRLLIPRKTLNQWDHVLQMVTEKITLRSGAVHRLYTLEGKLVESGAELENGQFYVAVGRDKFKKLPYSELLFDKSTMRRPFGQKASSLPPIVGSRKSKGSGNDRHSKSTVGSSDNSSPQPLKRKGKKEDVNSEKLTKLKQNVKLKNSQETIPNSDEGIFKAGAERSETRGAAEVQEDEDTQVEVPVDQRPAEIVDEEEDGEKANKDAEQKEDFSGMNGDLEEEGGREATDAPEQVEEILDHSEQQARPARVNGGTDEENGEELQQVNNELQLVLDKERKSQGAGSGQDEADVDPQRPPRPEVKITSPEENENNQQNKDYAAVA

SEQ ID NO: 3353 - RNA, 1431 nt, Artificial Sequence
  RU2__Homo_sapiens__CCDS4550.1
augagcggcagcagcgccagguccagccaccugucucagcccgucgugaagagcgugcuuguguaccgcaacggggaccccuucuacgcggggcgccgcgucgucauccaugagaagaagguguccagcuucgaagucuuccugaaggaggugaccggcggcguucaggcacccuuuggggccgucaggaacaucuacaccccgcggacuggccaccgaauccggaagcuagaccagauccagagcgggggcaauuacguggcuggaggccaggaagccuucaagaaacucaauuacuuggacauaggagaaaucaagaaaagaccaauggaaguuguuaauacagagguaaaaccaguaauccauagcaggaucaacgugucagcucgcuuuagaaaaccgcuucaggagccgugcacuaucuucuugauugcaaauggagaccucauaaacccagcuucucgccuccuuauccccagaaaaaccuugaaucagugggaucauguacuacaaauggucacagaaaaaaucacucugaggagcggggcuguucacaggcuuuauacuuuagaaggaaaacuuguugagaguggagcagaguuggagaaugggcaguuuuauguggcuguuggcagagauaaguuuaagaaacugccuuacagugaguuacuuuuugacaagucaacgaugagaaggccuuuuggucagaaagcuucuucacuaccuccuauuguaggauccagaaagucuaaagggaguggaaaugaucgccacucuaagucaacaguuggauccagugacaacucaucuccucagccccugaagaggaaagggaaaaaagaagacgugaauucagaaaaacugacgaaauugaaacaaaauguaaaauuaaagaauucacaagaaaccauuccaaauagugaugaaggcauuuucaaagcuggagcagagaggucugaaacacggggggcagcagaaguccaagaagaugaagauacucagguugagguuccagucgaucagaggccagcagaaauaguagacgaggaagaagauggagagaaggcaaacaaggaugcagaacagaaagaagacuuuucaggaaugaauggugaccuugaagaggaaggagguagggaggcuacagaugccccugagcaagucgaggagauucuggaucacagugagcagcaggcacgcccugcucguguaaauggaggcaccgaugaggagaauggugaggagcugcagcagguuaauaaugagcuucaacugguccuagacaaggaaagaaagucucaaggagcuggcaguggacaagaugaggcugauguagacccucaaagaccaccaaggccagaaguaaaaauuaccaguccagaagaaaaugaaaacaaccaacaaaacaaggacuaugcugccguggcuuag

SEQ ID NO: 3354 - RNA, 1431 nt, Artificial Sequence
  derived and/or modified sequence opt1 from RU2__Homo_sapiens__CCDS4550.1
augagcggcuccagcgcccgcuccagccaccugucccagcccguggucaagagcgugcucguguaccggaacggggacccguucuacgccggccgccgggucgugauccacgagaagaagguguccagcuucgaggucuuccugaaggaggugaccgggggcgugcaggcgcccuucggggccguccgcaacaucuacacgccccggacgggccaccgcauccggaagcuggaccagauccaguccggcgggaacuacguggccggcgggcaggaggccuucaagaagcucaacuaccuggacaucggcgagaucaagaagcgccccauggagguggucaacaccgaggugaagccggugauccacagccggaucaacgucuccgcccgcuuccggaagccccugcaggagcccugcaccaucuuccucaucgcgaacggggaccugaucaaccccgccagccgccugcucaucccgcggaagacccugaaccagugggaccacgugcugcagauggugacggagaagaucacccuccgcuccggcgccguccaccggcuguacacccuggagggcaagcucguggagagcggggccgagcuggagaacggccaguucuacguggcggucgggcgcgacaaguucaagaagcugcccuacuccgagcuccuguucgacaagagcaccaugcggcgccccuucggccagaaggccuccagccugcccccgaucgugggcucccgcaagagcaaggggagcggcaacgaccggcacuccaagagcacggugggguccagcgacaacuccagcccccagccccucaagcggaagggcaagaaggaggacgucaacuccgagaagcugaccaagcugaagcagaacgugaagcucaagaacagccaggagaccauccccaacuccgacgaggggaucuucaaggccggcgccgagcgcagcgagacccgcggcgccgcggagguccaggaggacgaggacacccagguggaggugccggucgaccagcggcccgccgagaucguggacgaggaggaggacggggagaaggccaacaaggacgccgagcagaaggaggacuucuccggcaugaacggggaccuggaggaggagggcgggcgcgaggccaccgacgcgcccgagcaggucgaggagauccuggaccacagcgagcagcaggcccggcccgcccgcgugaacggcggcaccgacgaggagaacggggaggagcuccagcaggucaacaacgagcugcagcuggugcucgacaaggagcggaagucccagggcgccgggagcggccaggacgaggccgacguggacccgcagcgcccgccccggcccgaggugaagaucaccucccccgaggagaacgagaacaaccagcagaacaaggacuacgcggccguggccuga

SEQ ID NO: 3355 - RNA, 1431 nt, Artificial Sequence
  derived and/or modified sequence opt2 from RU2__Homo_sapiens__CCDS4550.1
auguccggcuccuccgcccgcuccucccaccucucccagcccgucgucaaguccguccucgucuaccgcaacggcgaccccuucuacgccggccgccgcgucgucauccacgagaagaaggucuccuccuucgaggucuuccucaaggaggucaccggcggcguccaggcccccuucggcgccguccgcaacaucuacaccccccgcaccggccaccgcauccgcaagcucgaccagauccaguccggcggcaacuacgucgccggcggccaggaggccuucaagaagcucaacuaccucgacaucggcgagaucaagaagcgccccauggaggucgucaacaccgaggucaagcccgucauccacucccgcaucaacgucuccgcccgcuuccgcaagccccuccaggagcccugcaccaucuuccucaucgccaacggcgaccucaucaaccccgccucccgccuccucaucccccgcaagacccucaaccagugggaccacguccuccagauggucaccgagaagaucacccuccgcuccggcgccguccaccgccucuacacccucgagggcaagcucgucgaguccggcgccgagcucgagaacggccaguucuacgucgccgucggccgcgacaaguucaagaagcuccccuacuccgagcuccucuucgacaaguccaccaugcgccgccccuucggccagaaggccuccucccucccccccaucgucggcucccgcaaguccaagggcuccggcaacgaccgccacuccaaguccaccgucggcuccuccgacaacuccuccccccagccccucaagcgcaagggcaagaaggaggacgucaacuccgagaagcucaccaagcucaagcagaacgucaagcucaagaacucccaggagaccauccccaacuccgacgagggcaucuucaaggccggcgccgagcgcuccgagacccgcggcgccgccgagguccaggaggacgaggacacccaggucgagguccccgucgaccagcgccccgccgagaucgucgacgaggaggaggacggcgagaaggccaacaaggacgccgagcagaaggaggacuucuccggcaugaacggcgaccucgaggaggagggcggccgcgaggccaccgacgcccccgagcaggucgaggagauccucgaccacuccgagcagcaggcccgccccgcccgcgucaacggcggcaccgacgaggagaacggcgaggagcuccagcaggucaacaacgagcuccagcucguccucgacaaggagcgcaagucccagggcgccggcuccggccaggacgaggccgacgucgacccccagcgccccccccgccccgaggucaagaucaccucccccgaggagaacgagaacaaccagcagaacaaggacuacgccgccgucgccuga

SEQ ID NO: 3356 - RNA, 1431 nt, Artificial Sequence
  derived and/or modified sequence opt3 from RU2__Homo_sapiens__CCDS4550.1
augagcggcuccucugccagaucaagucaccugagccagcccguggucaaguccguucucguguacaggaacggggacccuuucuaugcuggacggcgcguagugauccaugagaaaaaggucucuucguuugaaguguuccuuaaagagguuaccgguggcgugcaagcaccauuuggggccguccgaaauauuuacacaccgcguacuggacacagaauaaggaagcuggaucagauccagucaggcgguaacuauguggcugggggacaggaagcguucaaaaaguugaauuacuuagacauuggcgagaucaagaaacggcccauggaaguaguuaacacggaggugaagccugucauucauagccgcaucaaugugagugccagauuuaggaaaccacugcaagagcccugcaccauauuccuaaucgcaaacggcgaucucauuaauccugccucccggcugcuuaucccacgcaagacacugaaccagugggaccacguguugcagauggucacugaaaagauuacccuccgaucuggggcuguucauagacuguauacacuggagggaaagcucguggaaagcggugcagaguuagagaauggccaguuuuacguagccguggggagggauaaguucaaaaagcugcccuauuccgaacuuuuguuugacaaaucaaccaugcggcguccuuucggacaaaaggcuaguagccugccaccgaucgucggcucucgcaaauccaaggguucagggaacgauagacacagcaaaaguacugugggaucuuccgacaauagcucgccccagccucuaaagaggaagggcaaaaaggaggauguuaacucugaaaaacucacaaagcugaaacagaaugugaaacuuaagaacucccaggagaccauaccaaauucagacgaaggcauuuuuaaagccggggcggagcggagugagacgcgaggagcagccgaaguccaagaggaugaagacacucagguggagguacccguugaucagcgcccugcugaaaucguggacgaggaggaagacggugagaaggccaacaaagaugcagaacaaaaggaggacuucagcggcaugaacggggaucuggaagaggagggaggcagagaagcuaccgacgccccagagcaggucgaagagauuuuggaucacuccgagcagcaggcgaggcccgcccgggugaauggugggacagacgaagagaacggcgaggaacuccaacaggucaauaacgaacugcaguuagugcuggauaaagagcgcaagucucagggagcaggcagcgggcaagacgaggcugauguugacccgcagagaccucccaggccagaagugaagaucacuucaccugaggaaaaugagaacaaucagcagaacaaagauuacgccgcuguagccuga

SEQ ID NO: 3357 - RNA, 1431 nt, Artificial Sequence
  derived and/or modified sequence opt4 from RU2__Homo_sapiens__CCDS4550.1
augagcggcagcagcgccagaagcagccaccugagccagcccguggugaagagcgugcugguguacagaaacggcgaccccuucuacgccggcagaagaguggugauccacgagaagaaggugagcagcuucgagguguuccugaaggaggugaccggcggcgugcaggcccccuucggcgccgugagaaacaucuacacccccagaaccggccacagaaucagaaagcuggaccagauccagagcggcggcaacuacguggccggcggccaggaggccuucaagaagcugaacuaccuggacaucggcgagaucaagaagagacccauggagguggugaacaccgaggugaagcccgugauccacagcagaaucaacgugagcgccagauucagaaagccccugcaggagcccugcaccaucuuccugaucgccaacggcgaccugaucaaccccgccagcagacugcugauccccagaaagacccugaaccagugggaccacgugcugcagauggugaccgagaagaucacccugagaagcggcgccgugcacagacuguacacccuggagggcaagcugguggagagcggcgccgagcuggagaacggccaguucuacguggccgugggcagagacaaguucaagaagcugcccuacagcgagcugcuguucgacaagagcaccaugagaagacccuucggccagaaggccagcagccugccccccaucgugggcagcagaaagagcaagggcagcggcaacgacagacacagcaagagcaccgugggcagcagcgacaacagcagcccccagccccugaagagaaagggcaagaaggaggacgugaacagcgagaagcugaccaagcugaagcagaacgugaagcugaagaacagccaggagaccauccccaacagcgacgagggcaucuucaaggccggcgccgagagaagcgagaccagaggcgccgccgaggugcaggaggacgaggacacccagguggaggugcccguggaccagagacccgccgagaucguggacgaggaggaggacggcgagaaggccaacaaggacgccgagcagaaggaggacuucagcggcaugaacggcgaccuggaggaggagggcggcagagaggccaccgacgcccccgagcagguggaggagauccuggaccacagcgagcagcaggccagacccgccagagugaacggcggcaccgacgaggagaacggcgaggagcugcagcaggugaacaacgagcugcagcuggugcuggacaaggagagaaagagccagggcgccggcagcggccaggacgaggccgacguggacccccagagaccccccagacccgaggugaagaucaccagccccgaggagaacgagaacaaccagcagaacaaggacuacgccgccguggccuga

SEQ ID NO: 3358 - RNA, 1431 nt, Artificial Sequence
  derived and/or modified sequence opt5 from RU2__Homo_sapiens__CCDS4550.1
augagcggcuccucugccagaagcucccaccugucucagcccguggucaagagcguucucguguaccggaacggggacccuuucuaugcuggacgcagaguggucauccaugagaaaaagguguccucuuuugaaguuuuccugaaagaggugaccggcgggguccaagccccguuuggagcggugcggaauauuuacacaccccgcacgggccacagaauccggaaacuugaucagauucagagcgggggaaacuauguugcuggcggccaggaagccuucaaaaagcugaauuaccucgacaucggggagauuaagaaacgcccuauggaaguggucaacaccgaggugaagcccgugauccauuccagaaucaaugucagcgcccgguuucgcaaaccucugcaagagcccugcacaauuuuccuuaucgcuaacggagaucugauuaauccugccucuagacuccugaucccgcggaagacccugaaccagugggaccacguucuccagauggugacagaaaagauuacccugcgcuccggcgcugugcauagacuuuauacacuggaggggaagcucgucgaaagcggagccgagcuggagaauggccaguuuuacguggcgguugggcgggauaaguucaaaaagcugcccuauucugaacuucucuuugacaaauccaccaugcgcagaccuuucggacaaaaggccagcucucugcccccuaucgugggcucccggaaaagcaagggcuccgggaacgauagacacucuaaaagcacggucggauccagcgacaauucuagcccccagccgcugaagcgcaagggcaaaaaggaggaugugaacuccgaaaaacucaccaagcugaaacagaauguuaaacuuaagaacucucaggagacaauuccuaauagcgacgaagggaucuuuaaggcuggagccgagcgguccgagaccagaggcgcugccgaagugcaagaggaugaagacacacaggucgaggugcccgucgaucagcgcccugcggaaaucguggacgaggaggaagacggggagaaggccaacaaagaugcugaacaaaaggaggacuucucuggaaugaacggcgaucuggaagaggagggcgggcgggaagccaccgacgcucccgagcagguugaagagauucucgaucacagcgagcagcaggccagacccgcccgcgugaauggaggcacggacgaagagaacggggaggaacugcaacaggucaauaacgaacuucagcuggugcucgauaaagagcggaagucccagggagcuggcagcgggcaagacgaggcggauguugacccucagagaccgccccgcccugaagugaagaucacaucucccgaggaaaaugagaacaaucagcagaacaaagauuacgccgcugucgccuga

SEQ ID NO: 3359 - protein, 453 aa, Artificial Sequence
  RUNX1__Homo_sapiens__Q01196
MRIPVDASTSRRFTPPSTALSPGKMSEALPLGAPDAGAALAGKLRSGDRSMVEVLADHPGELVRTDSPNFLCSVLPTHWRCNKTLPIAFKVVALGDVPDGTLVTVMAGNDENYSAELRNATAAMKNQVARFNDLRFVGRSGRGKSFTLTITVFTNPPQVATYHRAIKITVDGPREPRRHRQKLDDQTKPGSLSFSERLSELEQLRRTAMRVSPHHPAPTPNPRASLNHSTAFNPQPQSQMQDTRQIQPSPPWSYDQSYQYLGSIASPSVHPATPISPGRASGMTTLSAELSSRLSTAPDLTAFSDPRQFPALPSISDPRMHYPGAFTYSPTPVTSGIGIGMSAMGSATRYHTYLPPPYPGSSQAQGGPFQASSPSYHLYYGASAGSYQFSMVGGERSPPRILPPCTNASTGSALLNPSLPNQSDVVEAEGSHSNSPTNMAPSARLEEAVWRPY

SEQ ID NO: 3360 - RNA, 1362 nt, Artificial Sequence
  RUNX1__Homo_sapiens__BAA07903
augcguauccccguagaugccagcacgagccgccgcuucacgccgccuuccaccgcgcugagcccaggcaagaugagcgaggcguugccgcugggcgccccggacgccggcgcugcccuggccggcaagcugaggagcggcgaccgcagcaugguggaggugcuggccgaccacccgggcgagcuggugcgcaccgacagccccaacuuccucugcuccgugcugccuacgcacuggcgcugcaacaagacccugcccaucgcuuucaaggugguggcccuaggggauguuccagauggcacucuggucacugugauggcuggcaaugaugaaaacuacucggcugagcugagaaaugcuaccgcagccaugaagaaccagguugcaagauuuaaugaccucagguuugucggucgaaguggaagagggaaaagcuucacucugaccaucacugucuucacaaacccaccgcaagucgccaccuaccacagagccaucaaaaucacaguggaugggccccgagaaccucgaagacaucggcagaaacuagaugaucagaccaagcccgggagcuuguccuuuuccgagcggcucagugaacuggagcagcugcggcgcacagccaugagggucagcccacaccacccagcccccacgcccaacccucgugccucccugaaccacuccacugccuuuaacccucagccucagagucagaugcaggauacaaggcagauccaaccauccccaccgugguccuacgaucaguccuaccaauaccugggauccauugccucuccuucugugcacccagcaacgcccauuucaccuggacgugccagcggcaugacaacccucucugcagaacuuuccagucgacucucaacggcacccgaccugacagcguucagcgacccgcgccaguuccccgcgcugcccuccaucuccgacccccgcaugcacuauccaggcgccuucaccuacuccccgacgccggucaccucgggcaucggcaucggcaugucggccaugggcucggccacgcgcuaccacaccuaccugccgccgcccuaccccggcucgucgcaagcgcagggaggcccguuccaagccagcucgcccuccuaccaccuguacuacggcgccucggccggcuccuaccaguucuccauggugggcggcgagcgcucgccgccgcgcauccugccgcccugcaccaacgccuccaccggcuccgcgcugcucaaccccagccucccgaaccagagcgacgugguggaggccgagggcagccacagcaacucccccaccaacauggcgcccuccgcgcgccuggaggaggccguguggaggcccuacuga

SEQ ID NO: 3361 - RNA, 1362 nt, Artificial Sequence
  derived and/or modified sequence opt1 from RUNX1__Homo_sapiens__BAA07903
augcgcauccccguggacgccagcaccucccggcgcuucaccccgcccagcacggcccugucccccggcaagaugagcgaggcgcucccccugggggccccggacgccggcgccgcccuggcggggaagcuccgguccggcgaccgcagcauggucgaggugcuggccgaccaccccggggagcuggugcggaccgacucccccaacuuccucugcagcguccugcccacccacuggcgcugcaacaagacccugccgaucgccuucaaggugguggcccucggcgacguccccgacggcacgcuggugaccgugauggcggggaacgacgagaacuacuccgccgagcugcggaacgccaccgccgccaugaagaaccaggucgcgcgcuucaacgaccuccgguucgugggccgcagcgggcggggcaaguccuucacccugacgaucaccguguucaccaacccgccccaggucgccaccuaccaccgcgccaucaagaucacgguggacgggccccgggagccccgccggcaccgccagaagcuggacgaccagaccaagcccggcagccucuccuucagcgagcggcuguccgagcuggagcagcuccgccggaccgccaugcgcgugagcccccaccacccggcccccacccccaacccccgggcgucccugaaccacagcacggccuucaacccgcagccccagucccagaugcaggacacccgccagauccagcccagcccgcccuggagcuacgaccaguccuaccaguaccugggcagcaucgccucccccagcguccaccccgccacccccaucuccccggggcgcgccagcggcaugaccacgcucuccgcggagcugagcucccggcugagcaccgcccccgaccucaccgccuucuccgacccccgccaguucccggcccugcccagcaucuccgacccccggaugcacuaccccggggccuucaccuacagcccgacgcccgugaccuccggcaucggcaucgggaugagcgcgaugggcuccgccacccgcuaccacaccuaccugcccccgcccuaccccgggagcucccaggcccagggcgggcccuuccaggccagcagccccuccuaccaccucuacuacggcgcgagcgccggcuccuaccaguucagcauggucgggggcgagcgguccccgccccgcauccugccgcccugcacgaacgccagcaccggguccgcccugcucaaccccagccugcccaaccaguccgacgugguggaggccgagggcagccacuccaacagccccaccaacauggcgcccuccgcccggcuggaggaggccguguggcgcccguacuga

SEQ ID NO: 3362 - RNA, 1362 nt, Artificial Sequence
  derived and/or modified sequence opt2 from RUNX1__Homo_sapiens__BAA07903
augcgcauccccgucgacgccuccaccucccgccgcuucaccccccccuccaccgcccucucccccggcaagauguccgaggcccucccccucggcgcccccgacgccggcgccgcccucgccggcaagcuccgcuccggcgaccgcuccauggucgagguccucgccgaccaccccggcgagcucguccgcaccgacucccccaacuuccucugcuccguccuccccacccacuggcgcugcaacaagacccuccccaucgccuucaaggucgucgcccucggcgacguccccgacggcacccucgucaccgucauggccggcaacgacgagaacuacuccgccgagcuccgcaacgccaccgccgccaugaagaaccaggucgcccgcuucaacgaccuccgcuucgucggccgcuccggccgcggcaaguccuucacccucaccaucaccgucuucaccaaccccccccaggucgccaccuaccaccgcgccaucaagaucaccgucgacggcccccgcgagccccgccgccaccgccagaagcucgacgaccagaccaagcccggcucccucuccuucuccgagcgccucuccgagcucgagcagcuccgccgcaccgccaugcgcgucuccccccaccaccccgcccccacccccaacccccgcgccucccucaaccacuccaccgccuucaacccccagccccagucccagaugcaggacacccgccagauccagcccuccccccccugguccuacgaccaguccuaccaguaccucggcuccaucgccucccccuccguccaccccgccacccccaucucccccggccgcgccuccggcaugaccacccucuccgccgagcucuccucccgccucuccaccgcccccgaccucaccgccuucuccgacccccgccaguuccccgcccuccccuccaucuccgacccccgcaugcacuaccccggcgccuucaccuacucccccacccccgucaccuccggcaucggcaucggcauguccgccaugggcuccgccacccgcuaccacaccuaccuccccccccccuaccccggcuccucccaggcccagggcggccccuuccaggccuccucccccuccuaccaccucuacuacggcgccuccgccggcuccuaccaguucuccauggucggcggcgagcgcucccccccccgcauccucccccccugcaccaacgccuccaccggcuccgcccuccucaaccccucccuccccaaccaguccgacgucgucgaggccgagggcucccacuccaacucccccaccaacauggcccccuccgcccgccucgaggaggccgucuggcgccccuacuga

SEQ ID NO: 3363 - RNA, 1362 nt, Artificial Sequence
  derived and/or modified sequence opt3 from RUNX1__Homo_sapiens__BAA07903
augagaauccccguggacgccagcaccuccaggcgguucacaccuccaucuacugcucugucaccgggcaagaugagugaggcacucccccuuggggccccugaugcgggagcugcccuggcagguaaauugcgcagcggcgaccgauccauggucgaaguuuuagccgaucacccaggggagcuggugcguacggacucucccaacuuucuaugcucgguacucccuacccauuggagauguaauaagacacugccaauugcuuucaaaguggucgcacuuggagaugugcccgacggcacucugguuaccgugauggccgguaacgaugaaaauuacucagcugaguugaggaacgccacagcggcaaugaagaaucaggucgcccgguuuaacgaccuccgcuucguggggagaagcggaaggggcaaaaguuuuacccugacuauaacaguauucaccaauccuccacaaguugcuacguaucaccgggccaucaagauuacuguggauggcccgcgcgaaccccgaagacauaggcagaagcuggacgaucagaccaaaccugggucccucucuuuuagcgagcgguuauccgagcuggaacagcuucgucgcacagcaaugagagucucaccacaccaucccgcuccuacuccaaaccccagggccaguuugaaucacagcaccgcguucaacccgcaaccucagucucagaugcaggacacacggcaaauccagcccuccccaccuuggucauacgaucagagcuaucaguaccugggaaguauugccucucccuccgugcacccagcaacccccaucagcccuggucgagcuucgggcaugacgacucuaucugccgagcucuccucacgccugaguacagcuccagaccuuaccgccuuuagcgacccgagacaauuccccgcacugccuuccauaucugauccaaggaugcauuaucccggggccuuuacuuacagcccuacaccagugaccucaggaaucggcauugguaugagugcuaugggguccgcgacgcgguaucacaccuacuugcccccgccuuacccaggaagcucucaggcacagggcggccccuuccaagccucaaguccuagcuaucaucucuacuauggggcuuccgccggaucuuaccaguuuucgauggucgguggcgaacgcagcccacccagaauccugccucccugcacaaaugcauccacugggucagccuuacugaacccaagucucccgaaucagucugacguuguggaggcugagggaagccacuccaacucaccuaccaauauggcccccagcgcaaggcuugaagaggcgguauggcguccauauuga

SEQ ID NO: 3364 - RNA, 1362 nt, Artificial Sequence
  derived and/or modified sequence opt4 from RUNX1__Homo_sapiens__BAA07903
augagaauccccguggacgccagcaccagcagaagauucaccccccccagcaccgcccugagccccggcaagaugagcgaggcccugccccugggcgcccccgacgccggcgccgcccuggccggcaagcugagaagcggcgacagaagcaugguggaggugcuggccgaccaccccggcgagcuggugagaaccgacagccccaacuuccugugcagcgugcugcccacccacuggagaugcaacaagacccugcccaucgccuucaaggugguggcccugggcgacgugcccgacggcacccuggugaccgugauggccggcaacgacgagaacuacagcgccgagcugagaaacgccaccgccgccaugaagaaccagguggccagauucaacgaccugagauucgugggcagaagcggcagaggcaagagcuucacccugaccaucaccguguucaccaaccccccccagguggccaccuaccacagagccaucaagaucaccguggacggccccagagagcccagaagacacagacagaagcuggacgaccagaccaagcccggcagccugagcuucagcgagagacugagcgagcuggagcagcugagaagaaccgccaugagagugagcccccaccaccccgcccccacccccaaccccagagccagccugaaccacagcaccgccuucaacccccagccccagagccagaugcaggacaccagacagauccagcccagcccccccuggagcuacgaccagagcuaccaguaccugggcagcaucgccagccccagcgugcaccccgccacccccaucagccccggcagagccagcggcaugaccacccugagcgccgagcugagcagcagacugagcaccgcccccgaccugaccgccuucagcgaccccagacaguuccccgcccugcccagcaucagcgaccccagaaugcacuaccccggcgccuucaccuacagccccacccccgugaccagcggcaucggcaucggcaugagcgccaugggcagcgccaccagauaccacaccuaccugcccccccccuaccccggcagcagccaggcccagggcggccccuuccaggccagcagccccagcuaccaccuguacuacggcgccagcgccggcagcuaccaguucagcauggugggcggcgagagaagcccccccagaauccugccccccugcaccaacgccagcaccggcagcgcccugcugaaccccagccugcccaaccagagcgacgugguggaggccgagggcagccacagcaacagccccaccaacauggcccccagcgccagacuggaggaggccguguggagacccuacuga

SEQ ID NO: 3365 - RNA, 1362 nt, Artificial Sequence
  derived and/or modified sequence opt5 from RUNX1__Homo_sapiens__BAA07903
augagaauccccguggacgccagcaccucccggcgcuucacaccuccgucuacggcucugagccccggcaagauguccgaggcccucccucugggggcgcccgaugcuggagccgcccuugcuggcaaacugagaucuggggaccggagcauggucgaaguucucgccgaucacccuggagagcuggugcgcaccgacucccccaacuuucuuugcucugugcugccuacacauuggagauguaauaagacccucccgauugcuuucaaagucguggcccugggcgauguucccgacgggacacuggugaccgucauggcgggaaacgaugaaaauuacagcgccgagcuccggaacgcuacagccgcuaugaagaaucagguggcccgcuuuaacgaccugagauucguuggccgguccggccgcgggaaaucuuuuacccuuacgaucaccguguucacaaauccuccccaagucgcgaccuaucacagagccauuaagaucacaguggauggaccucgggaaccccgcagacaucggcagaagcuggacgaucagaccaaaccgggcagccucuccuuuagcgagcgccugucugagcuugaacagcugagacggacggcuaugagaguguccccucaccaucccgccccuacacccaacccccgcgcuagccucaaucacucuaccgccuucaacccucaaccgcagucccagaugcaggacacacggcaaauucagcccagcccucccugguccuacgaucagucuuaucaguaccuggggagcaucgccuccccuagcguccaccccgcuaccccgaucucuccugggagagcguccggcaugaccacacugagcgccgagcucucuagccgccuguccacggcucccgaccuuaccgccuuuucugacccucggcaauuccccgcccugccuagcauuuccgaucccagaaugcauuauccgggggcuuuuacauacagcccuacccccguuacaucuggaaucggcauuggcauguccgccauggggagcgcgacccgcuaucacacguaccugcccccuccguaccccggaucuucccaggcucagggcgggccuuuccaagccagcucccccucuuaucaucucuacuauggagccagcgcuggcuccuaccaguuuucuauggugggaggagaacggagcccucccagaauccuuccucccugcacaaaugccuccaccggcagcgcucugcucaacccgucucugccuaaucaguccgacguggucgaggccgagggcagccacucuaacucccccaccaauauggcgccuagcgcccgccuggaagaggcuguguggcggcccuauuga

SEQ ID NO: 3366 - protein, 359 aa, Artificial Sequence [sequence omitted]

SEQ ID NO: 3367 - RNA, 1080 nt, Artificial Sequence
  S-100__Homo_sapiens__ACI46041
augccgcuggagcuggagcugugucccgggcgcugggugggcgggcaacacccgugcuucaucauugccgagaucggccagaaccaccagggcgaccuggacguagccaagcgcaugauccgcauggccaaggaguguggggcugauugugccaaguuccagaagagugagcuagaauucaaguuuaaucggaaagccuuggagaggccauacaccucgaagcauuccugggggaagacguacggggagcacaaacgacaucuggaguucagccaugaccaguacagggagcugcagagguacgccgaggagguugggaucuucuucacugccucuggcauggaugagauggcaguugaauuccugcaugaacugaauguuccauuuuucaaaguuggaucuggagacacuaauaauuuuccuuaucuggaaaagacagccaaaaaaggucgcccaauggugaucuccagugggaugcagucaauggacaccaugaagcaaguuuaucagaucgugaagccccucaaccccaacuucugcuucuugcaguguaccagcgcauacccgcuccagccugaggacgucaaccugcgggucaucucggaauaucagaagcucuuuccugacauucccauaggguauucugggcaugaaacaggcauagcgauaucuguggccgcaguggcucugggggccaagguguuggaacgucacauaacuuuggacaagaccuggaaggggagugaccacucggccucgcuggagccuggagaacuggccgagcuggugcggucagugcgucuuguggagcgugcccugggcuccccaaccaagcagcugcugcccugugagauggccugcaaugagaagcugggcaagucugugguggccaaagugaaaauuccggaaggcaccauucuaacaauggacaugcucaccgugaaggugggugagcccaaagccuauccuccugaagacaucuuuaaucuagugggcaagaagguccuggucacuguugaagaggaugacaccaucauggaagaauugguagauaaucauggcaaaaaaaucaagucuuaa

SEQ ID NO: 3368 - RNA, 1080 nt, Artificial Sequence
  derived and/or modified sequence opt1 from S-100__Homo_sapiens__ACI46041
augccccuggagcucgagcugugccccggccgcugggucgggggccagcaccccugcuucaucaucgccgagaucgggcagaaccaccagggcgaccuggacguggccaagcggaugauccgcauggcgaaggagugcggggccgacugcgccaaguuccagaaguccgagcucgaguucaaguucaaccggaaggcccuggagcgccccuacaccagcaagcacagcuggggcaagaccuacggcgagcacaagcggcaccuggaguucucccacgaccaguaccgcgagcuccagcgguacgccgaggagguggggaucuucuucacggcgagcggcauggacgagauggccguggaguuccugcacgagcugaacguccccuucuucaaggugggguccggcgacaccaacaacuucccguaccucgagaagaccgccaagaaggggcgccccauggugaucagcuccggcaugcagagcauggacaccaugaagcaggucuaccagaucgugaagccccugaaccccaacuucugcuuccugcagugcacguccgccuacccgcuccagcccgaggacgugaaccugcgggucaucagcgaguaccagaagcuguuccccgacauccccaucggcuacuccgggcacgagaccggcaucgcgaucagcguggccgccguggcccucggggccaagguccuggagcgccacaucacccuggacaagaccuggaagggcuccgaccacagcgcgucccucgagccgggcgagcuggccgagcuggugcggagcgugcgccucgucgagcgggcccuggggucccccacgaagcagcugcuccccugcgagauggccugcaacgagaagcugggcaagagcgugguggccaaggucaagauccccgaggggaccauccugaccauggacaugcucaccgugaaggugggcgagccgaaggcguacccgcccgaggacaucuucaaccuggucgggaagaaggugcuggugacggucgaggaggacgacaccaucauggaggagcucguggacaaccacggcaagaagaucaaguccuga

SEQ ID NO: 3369 - RNA, 1080 nt, Artificial Sequence
  derived and/or modified sequence opt2 from S-100__Homo_sapiens__ACI46041
augccccucgagcucgagcucugccccggccgcugggucggcggccagcaccccugcuucaucaucgccgagaucggccagaaccaccagggcgaccucgacgucgccaagcgcaugauccgcauggccaaggagugcggcgccgacugcgccaaguuccagaaguccgagcucgaguucaaguucaaccgcaaggcccucgagcgccccuacaccuccaagcacuccuggggcaagaccuacggcgagcacaagcgccaccucgaguucucccacgaccaguaccgcgagcuccagcgcuacgccgaggaggucggcaucuucuucaccgccuccggcauggacgagauggccgucgaguuccuccacgagcucaacguccccuucuucaaggucggcuccggcgacaccaacaacuuccccuaccucgagaagaccgccaagaagggccgccccauggucaucuccuccggcaugcaguccauggacaccaugaagcaggucuaccagaucgucaagccccucaaccccaacuucugcuuccuccagugcaccuccgccuacccccuccagcccgaggacgucaaccuccgcgucaucuccgaguaccagaagcucuuccccgacauccccaucggcuacuccggccacgagaccggcaucgccaucuccgucgccgccgucgcccucggcgccaagguccucgagcgccacaucacccucgacaagaccuggaagggcuccgaccacuccgccucccucgagcccggcgagcucgccgagcucguccgcuccguccgccucgucgagcgcgcccucggcucccccaccaagcagcuccuccccugcgagauggccugcaacgagaagcucggcaaguccgucgucgccaaggucaagauccccgagggcaccauccucaccauggacaugcucaccgucaaggucggcgagcccaaggccuacccccccgaggacaucuucaaccucgucggcaagaagguccucgucaccgucgaggaggacgacaccaucauggaggagcucgucgacaaccacggcaagaagaucaaguccuga

SEQ ID NO: 3370 - RNA, 1080 nt, Artificial Sequence
  derived and/or modified sequence opt3 from S-100__Homo_sapiens__ACI46041
augccccuggagcucgaacuuugcccuggcagaugggucgggggacagcacccauguuucaucauugccgagauaggucaaaaccaucagggcgaccuggauguggcuaagaggaugauccggauggcaaaagaaugcggggccgacugugcgaaguuucagaaaagcgaguuggaauuuaaguuuaaucgcaaggcuuuagagcgaccguacaccuccaagcacucuuggggaaagacauauggcgagcauaaacgucaccuggaguucucacaugaucaguacagagagcuacaaagguaugccgaagagguugguauuuucuucacugcaagugggauggacgagauggccguggaauuucuccacgagcugaacguacccuucuuuaaggugggaagcggcgauacgaauaacuucccuuaccuugagaaaaccgcuaagaaaggccggccaauggucaucuccucugggaugcagucgauggacacaaugaaacagguguaucagauuguuaagccccugaauccuaacuuuugcuucuugcaauguacuucagcauacccacuccagcccgaagaugugaaucugcgcgucaucagcgaauaucagaaacuguuuccugacauaccaaucggauacaguggucacgagaccggcauugccaucuccguggcugccguagcgcucggggcaaagguuuuagagagacauauuacacuggauaaaaccuggaagggaucugaccacagcgccucccuugaaccgggcgaguuggcugaacuggugaggucaguccggcuaguggagcgcgcccucgguagucccacuaaacagcugcuuccuugcgaaauggcauguaacgagaagcuggggaaaagcguggucgcuaagguuaagaucccagagggaacaauauugaccauggauaugcucacggugaaaguaggcgaacccaaggccuacccuccagaggacauuuucaaucuggugggcaaaaaggucuuagugacuguugaagaggaugacaccaucauggaagaacugguggacaaccaugggaaaaagauuaagucuuga

SEQ ID NO: 3371 - RNA, 1080 nt, Artificial Sequence
  derived and/or modified sequence opt4 from S-100__Homo_sapiens__ACI46041
augccccuggagcuggagcugugccccggcagaugggugggcggccagcaccccugcuucaucaucgccgagaucggccagaaccaccagggcgaccuggacguggccaagagaaugaucagaauggccaaggagugcggcgccgacugcgccaaguuccagaagagcgagcuggaguucaaguucaacagaaaggcccuggagagacccuacaccagcaagcacagcuggggcaagaccuacggcgagcacaagagacaccuggaguucagccacgaccaguacagagagcugcagagauacgccgaggaggugggcaucuucuucaccgccagcggcauggacgagauggccguggaguuccugcacgagcugaacgugcccuucuucaaggugggcagcggcgacaccaacaacuuccccuaccuggagaagaccgccaagaagggcagacccauggugaucagcagcggcaugcagagcauggacaccaugaagcagguguaccagaucgugaagccccugaaccccaacuucugcuuccugcagugcaccagcgccuacccccugcagcccgaggacgugaaccugagagugaucagcgaguaccagaagcuguuccccgacauccccaucggcuacagcggccacgagaccggcaucgccaucagcguggccgccguggcccugggcgccaaggugcuggagagacacaucacccuggacaagaccuggaagggcagcgaccacagcgccagccuggagcccggcgagcuggccgagcuggugagaagcgugagacugguggagagagcccugggcagccccaccaagcagcugcugcccugcgagauggccugcaacgagaagcugggcaagagcgugguggccaaggugaagauccccgagggcaccauccugaccauggacaugcugaccgugaaggugggcgagcccaaggccuacccccccgaggacaucuucaaccuggugggcaagaaggugcuggugaccguggaggaggacgacaccaucauggaggagcugguggacaaccacggcaagaagaucaagagcuga

SEQ ID NO: 3372 - RNA, 1080 nt, Artificial Sequence
  derived and/or modified sequence opt5 from S-100__Homo_sapiens__ACI46041
augccccuggagcucgaacugugcccuggcagaugggugggaggacagcacccguguuucaucauugccgagaucggccaaaaccaucagggggaccuugaugucgcuaagcggaugauucgcauggccaaagaaugcggagcggacugugcuaaguuucagaaaagcgagcuggaguucaaguuuaauagaaaagcccucgagcggcccuacaccuccaagcacucuuggggcaagacauauggggagcauaaacgccaccuggaguucagccaugaucaguacagagaacuucaacgguaugccgaagagguuggaaucuuuuucacggcuuccggcauggacgagauggccguggaauuucugcacgagcucaacgugccuuucuuuaaggucggcucuggggauaccaauaacuuccccuaccuggagaaaacagcuaagaaaggacgcccuauggugauuagcuccggcaugcagucuauggacaccaugaagcagguuuaucagaucgugaagccccugaauccuaacuuuugcuuccuccaauguacaagcgccuacccgcugcagcccgaagaugucaaucuuagagugaucuccgaauaucagaaacuguuuccugacauucccaucggguacagcggacacgagaccggcauugcgaucucuguugccgcuguggcccucggggcuaagguccuggagcggcauauuacacuugauaaaaccuggaagggauccgaccacagcgccucucuggaaccuggcgagcucgcggaacuggugcgcuccgugagacuggucgagcgggcccucggcagccccacgaaacagcugcuuccgugcgaaauggcuuguaacgagaagcuggggaaaucuguuguggccaaggugaagaucccugagggaaccauucucacaauggauaugcugaccgucaaagugggcgaacccaaggcuuacccucccgaggacaucuucaaucuuguugggaaaaaggugcuggucacaguggaagaggaugacaccaucauggaagaacucguugacaaccaugggaaaaagauuaaguccuga

SEQ ID NO: 3373 - protein, 904 aa, Artificial Sequence
  SAGE__Homo_sapiens__Q9NXZ1
MQASPLQTSQPTPPEELHAAAYVFTNDGQQMRSDEVNLVATGHQSKKKHSRKSKRHSSSKRRKSMSSWLDKQEDAAVTHSICEERINNGQPVADNVLSTAPPWPDATIAHNIREERMENGQSRTDKVLSTAPPQLVHMAAAGIPSMSTRDLHSTVTHNIREERMENGQPQPDNVLSTGPTGLINMAATPIPAMSARDLYATVTHNVCEQKMENVQPAPDNVLLTLRPRRINMTDTGISPMSTRDPYATITYNVPEEKMEKGQPQPDNILSTASTGLINVAGAGTPAISTNGLYSTVPHNVCEEKMENDQPQPNNVLSTVQPVIIYLTATGIPGMNTRDQYATITHNVCEERVVNNQPLPSNALSTVLPGLAYLATADMPAMSTRDQHATIIHNLREEKKDNSQPTPDNVLSAVTPELINLAGAGIPPMSTRDQYATVNHHVHEARMENGQRKQDNVLSNVLSGLINMAGASIPAMSSRDLYATITHSVREEKMESGKPQTDKVISNDAPQLGHMAAGGIPSMSTKDLYATVTQNVHEERMENNQPQPSYDLSTVLPGLTYLTVAGIPAMSTRDQYATVTHNVHEEKIKNGQAASDNVFSTVPPAFINMAATGVSSMSTRDQYAAVTHNIREEKINNSQPAPGNILSTAPPWLRHMAAAGISSTITRDLYVTATHSVHEEKMTNGQQAPDNSLSTVPPGCINLSGAGISCRSTRDLYATVIHDIQEEEMENDQTPPDGFLSNSDSPELINMTGHCMPPNALDSFSHDFTSLSKDELLYKPDSNEFAVGTKNYSVSAGDPPVTVMSLVETVPNTPQISPAMAKKINDDIKYQLMKEVRRFGQNYERIFILLEEVQGSMKVKRQFVEFTIKEAARFKKVVLIQQLEKALKEIDSHCHLRKVKHMRKR

SEQ ID NO: 3374 - RNA, 2715 nt, Artificial Sequence
  SAGE__Homo_sapiens__CCDS14652.1
augcaggcuucuccacuucaaacgagucaaccaacuccaccugaagaacuucaugcugcugccuauguguuuacaaaugaugggcagcaaaugaggagugaugaaguaaaucugguugcaacagggcaucaaagcaaaaagaaacauuccagaaaauccaagagacacucuucaucuaagagaaggaagaguauguccucgugguuagacaaacaggaagaugcugcagucacucacagcauuugugaagagaggauaaauaacggccaaccaguagcugauaaugucuugucaacugcuccaccauggccugaugcuaccaucgcucacaauauccgugaagagaggauggaaaauggccaaucucgaacugacaaagucuugucaacugcuccaccacagcuuguucauauggcugcagcugguauuccauccaugaguaccagggaucugcauucuaccgucacucacaauauccgugaagagagaauggaaaauggccaaccccaaccugauaacgucuugucaacuggucccacagggcuuauuaauauggcagcaacuccuauuccagccaugagugccagagaucucuaugcuacagucacucacaaugucugugaacagaagauggaaaauguccaaccagcaccugauaacguguuguugacucuucgaccacggcguauuaauaugacagacacugguauuucacccaugaguaccagggauccauaugcuaccaucacuuacaaugucccugaggagaagauggaaaagggccaaccccaaccugauaacaucuugucaacugcuucaacagggcuuauuaauguggcaggagcugguacuccagccaucagcaccaauggccuguauuccaccgucccucacaaugucugugaagagaagauggaaaaugaccaaccgcaaccuaauaacguauugucaacuguucaaccagugauuauuuauuugacagcaacugguauuccgggcaugaauaccagggaucaguaugcuaccaucacucacaaugucugugaagagagagugguaaauaaccaaccacuaccuaguaacgccuugucaacuguucuaccagggcuugcuuauuuggcaacagcugauaugccagccaugaguaccagggaucagcaugcuaccaucauucacaaucugcgugaagagaagaaagauaacagccaaccaaccccugauaacgucuugucagcuguuacaccagagcuuauuaacuuggcaggagcugguauuccacccaugaguaccagggaucaguaugcuaccgucaaucaccauguccaugaagcaaggauggaaaauggccaacgaaaacaggauaacgucuugucaaauguucuauccgggcuuauuaauauggcaggagcuaguauuccagcaaugaguuccagggaucuguaugcuaccauuacucacaguguucgugaagagaagauggaaaguggcaaaccccaaacugauaaggucauaucaaaugaugcaccacagcuuggucauauggcugcaggugguauuccauccaugaguaccaaggaucuguaugcuaccgucacucaaaauguccaugaagagaggauggaaaauaaccaaccacaaccuaguuaugacuugucaacuguucuaccaggacuuacuuauuugacaguagcugguauuccggccaugaguaccagggaucaguaugcuaccgucacucacaauguccaugaagagaagauuaaaaauggccaagcagcauccgauaaugucuucucgacuguuccaccagcauuuauuaauauggcagcaacugguguuucauccaugaguaccagggaucaguaugcugcagucacucacaacauccgugaagagaagauaaauaacagccaaccagcaccugguaacaucuugucaacugcuccuccauggcuucgucauauggcagcagcuggaauuucauccacgauuaccagggaucuguaugucaccgccacucacaguguccaugaggagaagaugacaaauggccaacaggcaccugauaacuccuugucaacgguuccaccugguuguauuaaucugucaggagcugguauuucaugcagaaguaccagggaucuguaugcuacugucauucacgauauccaggaggaggagauggaaaaugaucaaaccccuccugauggcuuccugucaaauucugauucaccagagcugauaaauaugacaggacauuguaugccacccaaugcauuggauucuuucucucacgacuucacaagucucagcaaagaugagcugcuuuacaaaccugauaguaaugaauuugcgguaggcaccaaaaacuacagugucucugcaggugacccaccaguuacaguaaugucuuugguggaaacugugccaaauacaccacaaauaucuccugccauggcaaagaaaauuaaugaugauauaaaauaucaauuaaugaaagaaguucgaagguuugggcaaaauuaugaaagaauuuucauuuugcuugaagagguacaaggaucuaugaaagucaagagacaauuuguugaauuuaccaucaaggaagcagcaagguuuaaaaaaguugucuuaauucagcaacucgagaaggcgcuuaaagaaauagauucccacugccaucucagaaaaguuaagcacaugagaaaaagauaa

SEQ ID NO: 3375 - RNA, 2715 nt, Artificial Sequence
  derived and/or modified sequence opt1 from SAGE__Homo_sapiens__CCDS14652.1
augcaggccagcccccugcagaccucccagcccaccccgcccgaggagcugcacgccgcggccuacguguucaccaacgacggccagcagaugcgcagcgacgaggucaaccugguggccaccgggcaccaguccaagaagaagcacagccggaaguccaagcgccacagcuccagcaagcggcgcaaguccaugagcuccuggcuggacaagcaggaggacgccgccgugacccacagcaucugcgaggagcggaucaacaacggccagcccgucgcggacaacgugcucuccaccgccccgcccuggcccgacgccacgaucgcccacaacauccgcgaggagcggauggagaacgggcagagccgcaccgacaaggugcuguccaccgcgcccccgcagcugguccacauggccgccgccggcauccccagcauguccacccgggaccuccacagcacggugacccacaacauccgcgaggagcggauggagaacgggcagccccagcccgacaacgugcuguccaccggcccgaccggccugaucaacauggccgcgacgcccauccccgccaugagcgcccgcgaccucuacgccaccgucacccacaacgugugcgagcagaagauggagaacgugcagcccgccccggacaacguccugcugacccuccggccccgccggaucaacaugacggacaccgggaucagccccauguccacccgcgaccccuacgcgaccaucacguacaacgugccggaggagaagauggagaagggccagccccagcccgacaacauccugagcaccgccuccaccgggcugaucaacguggccggcgccgggacccccgccaucagcacgaacggccucuacuccaccgucccgcacaacgugugcgaggagaagauggagaacgaccagccccagcccaacaacgugcugagcaccguccagcccgugaucaucuaccugaccgcgacgggcauccccgggaugaacacccgggaccaguacgccaccaucacccacaacgugugcgaggagcgcgucgugaacaaccagccccuccccuccaacgcccugagcacggugcugccgggccucgccuaccuggccaccgcggacaugcccgccauguccacccgggaccagcacgccaccaucauccacaaccugcgcgaggagaagaaggacaacagccagcccacgcccgacaacguccucuccgccgugaccccggagcugaucaaccuggcgggggccggcaucccgcccaugagcacccgggaccaguacgccaccgucaaccaccacgugcacgaggcccgcauggagaacggccagcgcaagcaggacaacgugcucuccaacguccugagcgggcugaucaacauggccggcgcguccauccccgccaugagcucccgggaccucuacgccaccaucacgcacagcgugcgcgaggagaagauggaguccgggaagccccagaccgacaaggugaucagcaacgacgcgccccagcugggccacauggccgccgggggcauccccagcauguccaccaaggaccuguacgccaccgucacgcagaacgugcacgaggagcggauggagaacaaccagccccagccgagcuacgaccucuccaccgugcugcccggccugaccuaccucaccgucgccgggauccccgccaugagcacgcgcgaccaguacgccaccgugacccacaacgugcacgaggagaagaucaagaacggccaggcggccuccgacaacgucuucagcaccgugcccccggccuucaucaacauggccgcgacggggguguccagcauguccacccgggaccaguacgccgccgucacccacaacauccgcgaggagaagaucaacaacagccagcccgcccccggcaacauccuguccaccgcgccgcccuggcugcggcacauggccgccgccgggaucagcuccacgaucacccgcgaccucuacgugaccgccacccacagcgugcacgaggagaagaugacgaacggccagcaggcccccgacaacucccugagcaccgucccgcccggcugcaucaaccuguccggggcgggcaucagcugccggagcacccgcgaccucuacgccaccgugauccacgacauccaggaggaggagauggagaacgaccagacgccgcccgacggguuccuguccaacagcgacucccccgagcugaucaacaugaccggccacugcaugccgcccaacgcccucgacagcuucucccacgacuucaccagccuguccaaggacgagcugcucuacaagcccgacagcaacgaguucgccguggggaccaagaacuacuccgucagcgccggcgacccgcccgugacggugaugucccuggucgagaccgugcccaacacgccccagaucagccccgcgauggccaagaagaucaacgacgacaucaaguaccagcugaugaaggaggugcggcgcuucggccagaacuacgagcggaucuucauccugcucgaggagguccagggguccaugaaggugaagcgccaguucguggaguucaccaucaaggaggccgcccgguucaagaaggucgugcugauccagcagcuggagaaggcgcucaaggagaucgacagccacugccaccuccgcaaggugaagcacaugcggaagcgcuga

SEQ ID NO: 3376 - RNA, 2715 nt, Artificial Sequence
  derived and/or modified sequence opt2 from SAGE__Homo_sapiens__CCDS14652.1
augcaggccuccccccuccagaccucccagcccaccccccccgaggagcuccacgccgccgccuacgucuucaccaacgacggccagcagaugcgcuccgacgaggucaaccucgucgccaccggccaccaguccaagaagaagcacucccgcaaguccaagcgccacuccuccuccaagcgccgcaaguccauguccuccuggcucgacaagcaggaggacgccgccgucacccacuccaucugcgaggagcgcaucaacaacggccagcccgucgccgacaacguccucuccaccgccccccccuggcccgacgccaccaucgcccacaacauccgcgaggagcgcauggagaacggccagucccgcaccgacaagguccucuccaccgcccccccccagcucguccacauggccgccgccggcauccccuccauguccacccgcgaccuccacuccaccgucacccacaacauccgcgaggagcgcauggagaacggccagccccagcccgacaacguccucuccaccggccccaccggccucaucaacauggccgccacccccauccccgccauguccgcccgcgaccucuacgccaccgucacccacaacgucugcgagcagaagauggagaacguccagcccgcccccgacaacguccuccucacccuccgcccccgccgcaucaacaugaccgacaccggcaucucccccauguccacccgcgaccccuacgccaccaucaccuacaacguccccgaggagaagauggagaagggccagccccagcccgacaacauccucuccaccgccuccaccggccucaucaacgucgccggcgccggcacccccgccaucuccaccaacggccucuacuccaccgucccccacaacgucugcgaggagaagauggagaacgaccagccccagcccaacaacguccucuccaccguccagcccgucaucaucuaccucaccgccaccggcauccccggcaugaacacccgcgaccaguacgccaccaucacccacaacgucugcgaggagcgcgucgucaacaaccagccccuccccuccaacgcccucuccaccguccuccccggccucgccuaccucgccaccgccgacaugcccgccauguccacccgcgaccagcacgccaccaucauccacaaccuccgcgaggagaagaaggacaacucccagcccacccccgacaacguccucuccgccgucacccccgagcucaucaaccucgccggcgccggcaucccccccauguccacccgcgaccaguacgccaccgucaaccaccacguccacgaggcccgcauggagaacggccagcgcaagcaggacaacguccucuccaacguccucuccggccucaucaacauggccggcgccuccauccccgccauguccucccgcgaccucuacgccaccaucacccacuccguccgcgaggagaagauggaguccggcaagccccagaccgacaaggucaucuccaacgacgccccccagcucggccacauggccgccggcggcauccccuccauguccaccaaggaccucuacgccaccgucacccagaacguccacgaggagcgcauggagaacaaccagccccagcccuccuacgaccucuccaccguccuccccggccucaccuaccucaccgucgccggcauccccgccauguccacccgcgaccaguacgccaccgucacccacaacguccacgaggagaagaucaagaacggccaggccgccuccgacaacgucuucuccaccgucccccccgccuucaucaacauggccgccaccggcgucuccuccauguccacccgcgaccaguacgccgccgucacccacaacauccgcgaggagaagaucaacaacucccagcccgcccccggcaacauccucuccaccgccccccccuggcuccgccacauggccgccgccggcaucuccuccaccaucacccgcgaccucuacgucaccgccacccacuccguccacgaggagaagaugaccaacggccagcaggcccccgacaacucccucuccaccgucccccccggcugcaucaaccucuccggcgccggcaucuccugccgcuccacccgcgaccucuacgccaccgucauccacgacauccaggaggaggagauggagaacgaccagaccccccccgacggcuuccucuccaacuccgacucccccgagcucaucaacaugaccggccacugcaugccccccaacgcccucgacuccuucucccacgacuucaccucccucuccaaggacgagcuccucuacaagcccgacuccaacgaguucgccgucggcaccaagaacuacuccgucuccgccggcgacccccccgucaccgucaugucccucgucgagaccguccccaacaccccccagaucucccccgccauggccaagaagaucaacgacgacaucaaguaccagcucaugaaggagguccgccgcuucggccagaacuacgagcgcaucuucauccuccucgaggagguccagggcuccaugaaggucaagcgccaguucgucgaguucaccaucaaggaggccgcccgcuucaagaaggucguccucauccagcagcucgagaaggcccucaaggagaucgacucccacugccaccuccgcaaggucaagcacaugcgcaagcgcuga

SEQ ID NO: 3377 - RNA, 2715 nt, Artificial Sequence
  derived and/or modified sequence opt3 from SAGE__Homo_sapiens__CCDS14652.1
augcaggccagcccccugcaaaccucccagccuacaccaccggaggaacuccacgcugcagccuacguguucacuaacgacggccagcagaugagaucugaugaggucaaucuuguugcgacggggcaucaaucaaagaaaaagcacaguaggaaaagcaagcggcauuccucuucgaaacgccgaaagucaaugagcaguuggcuggacaagcaggaagaugcugccgugacccacuccaucugcgaggaacguauuaacaauggacagcccguagcagacaacguguugucuacagccccuccauggcccgaugcuacuauagcacauaauaucagagaggagaggauggaaaacggucagagccggaccgacaaagucuuauccacagccccuccacaacuggugcacauggcugccgcgggcauucccucaaugaguacccgcgaucuacacagcacuguuacacauaauaucagagaggaaaggauggagaacgggcagccucagccagacaaugugcucucuaccggaccgacgggccugauuaacauggcagccacucccaucccugcuauguccgcccgggaucuuuaugcaaccgucacacacaaugugugugagcagaagauggaaaacguacaaccagcucccgacaauguucuguugacucuccgcccucgaagaauaaacaugaccgauacagguaucucaccaaugagcaccagggaccccuacgccacgauuacuuauaaugugccggaggagaaaauggagaaggggcagccucagcccgauaacauccugaguacagcgucuaccggacugauuaacgucgccggcgcaggcacuccagcuaucuccacaaaugggcucuacagcaccgugccucauaacgugugcgaagagaaaauggagaaugaccaaccccagccaaacaaugucuuaucgacgguucagcccgugauaauuuaucugaccgccacaggaaucccugguaugaacacucgggaccaguacgcuaccauuacacacaauguaugugaagaacguguggucaacaaucaaccacuuccgucuaacgccuuguccacugugcugcccggccuagcauaucucgccaccgcugauaugccugcgaugucaacacgcgaccagcacgcaaccaucauccauaaucugagagaagagaagaaggauaacagucagccaacucccgacaauguucuuagcgccgugacgccugaacugauuaacuuggcuggggccggaauaccacccauguccacaagggaucaguacgcaaccgucaaucaccaugugcacgaggcccggauggagaacggccaacgaaaacaggacaacguacucucuaauguucugagcgguuuaaucaacauggcuggggccucaauuccggcaaugaguucccgcgaucuguacgcgacuaucacccauagcgugagagaagagaagauggaaucuggaaaaccucagacagacaaggucauaucaaaugaugcuccacagcucggccacauggccgcaggcgggauucccaguaugagcaccaaagaccuuuaugccacugugacacaaaacguccacgaggaaaggauggagaauaaccagccucagcccuccuacgaucugucuacgguguugccaggacuaaccuaucugacuguugcugguaucccugccaugucgacacgggaccaguacgcaaccgugacacauaauguacacgaggaaaagaucaaaaacggccaagcugccagcgacaaugucuuuuccacugugcccccagcguucauuaacauggccgcuaccgggguuucaaguaugucuacgcgcgaucaguaugcagccgugacccauaauaucagagaggaaaagauuaacaauagccagccggcuccuggaaacauacucuccacagcacccccauggcugaggcacauggccgcggccggcaucucaagcacuauuacccgugaccuuuacgucacagcuacucacucugugcaugaggagaagaugaccaauggucaacaggcccccgauaacucccugaguacgguaccuccagggugcaucaacuugagcggcgcaggaaucucuugucgguccacacgagaccucuaugcuaccgugauucacgauauacaggaagaggaaauggagaaugaccagacucccccugauggcuuucugucaaacagugacagcccggaauuaaucaauaugacagggcauugcaugccacccaacgcccuggauucguucucccacgacuuuaccucucuaagcaaagaugagcuccuguacaagccugacucaaaugaguucgcaguuggaacuaaaaacuacagugucuccgccggugauccacccgugaccgugaugucucuugucgaaacaguuccuaauacgccgcaaauuagccccgcuauggcgaagaaaaucaacgacgacauuaaguaucaguugaugaaggaggugagaagguuuggccagaauuacgaacgcaucuucauacugcucgaggaagugcagggguccaugaaaguaaagcggcaauuugucgaguucaccaucaaagaggccgcaagauuuaagaaagugguucugauucagcagcuugaaaaggcucugaaggagaucgauucacauugucacuugaggaaagugaagcacaugcgcaaacgauga

SEQ ID NO: 3378 - RNA, 2715 nt, Artificial Sequence
  derived and/or modified sequence opt4 from SAGE__Homo_sapiens__CCDS14652.1
augcaggccagcccccugcagaccagccagcccaccccccccgaggagcugcacgccgccgccuacguguucaccaacgacggccagcagaugagaagcgacgaggugaaccugguggccaccggccaccagagcaagaagaagcacagcagaaagagcaagagacacagcagcagcaagagaagaaagagcaugagcagcuggcuggacaagcaggaggacgccgccgugacccacagcaucugcgaggagagaaucaacaacggccagcccguggccgacaacgugcugagcaccgccccccccuggcccgacgccaccaucgcccacaacaucagagaggagagaauggagaacggccagagcagaaccgacaaggugcugagcaccgcccccccccagcuggugcacauggccgccgccggcauccccagcaugagcaccagagaccugcacagcaccgugacccacaacaucagagaggagagaauggagaacggccagccccagcccgacaacgugcugagcaccggccccaccggccugaucaacauggccgccacccccauccccgccaugagcgccagagaccuguacgccaccgugacccacaacgugugcgagcagaagauggagaacgugcagcccgcccccgacaacgugcugcugacccugagacccagaagaaucaacaugaccgacaccggcaucagccccaugagcaccagagaccccuacgccaccaucaccuacaacgugcccgaggagaagauggagaagggccagccccagcccgacaacauccugagcaccgccagcaccggccugaucaacguggccggcgccggcacccccgccaucagcaccaacggccuguacagcaccgugccccacaacgugugcgaggagaagauggagaacgaccagccccagcccaacaacgugcugagcaccgugcagcccgugaucaucuaccugaccgccaccggcauccccggcaugaacaccagagaccaguacgccaccaucacccacaacgugugcgaggagagaguggugaacaaccagccccugcccagcaacgcccugagcaccgugcugcccggccuggccuaccuggccaccgccgacaugcccgccaugagcaccagagaccagcacgccaccaucauccacaaccugagagaggagaagaaggacaacagccagcccacccccgacaacgugcugagcgccgugacccccgagcugaucaaccuggccggcgccggcaucccccccaugagcaccagagaccaguacgccaccgugaaccaccacgugcacgaggccagaauggagaacggccagagaaagcaggacaacgugcugagcaacgugcugagcggccugaucaacauggccggcgccagcauccccgccaugagcagcagagaccuguacgccaccaucacccacagcgugagagaggagaagauggagagcggcaagccccagaccgacaaggugaucagcaacgacgccccccagcugggccacauggccgccggcggcauccccagcaugagcaccaaggaccuguacgccaccgugacccagaacgugcacgaggagagaauggagaacaaccagccccagcccagcuacgaccugagcaccgugcugcccggccugaccuaccugaccguggccggcauccccgccaugagcaccagagaccaguacgccaccgugacccacaacgugcacgaggagaagaucaagaacggccaggccgccagcgacaacguguucagcaccgugccccccgccuucaucaacauggccgccaccggcgugagcagcaugagcaccagagaccaguacgccgccgugacccacaacaucagagaggagaagaucaacaacagccagcccgcccccggcaacauccugagcaccgccccccccuggcugagacacauggccgccgccggcaucagcagcaccaucaccagagaccuguacgugaccgccacccacagcgugcacgaggagaagaugaccaacggccagcaggcccccgacaacagccugagcaccgugccccccggcugcaucaaccugagcggcgccggcaucagcugcagaagcaccagagaccuguacgccaccgugauccacgacauccaggaggaggagauggagaacgaccagaccccccccgacggcuuccugagcaacagcgacagccccgagcugaucaacaugaccggccacugcaugccccccaacgcccuggacagcuucagccacgacuucaccagccugagcaaggacgagcugcuguacaagcccgacagcaacgaguucgccgugggcaccaagaacuacagcgugagcgccggcgacccccccgugaccgugaugagccugguggagaccgugcccaacaccccccagaucagccccgccauggccaagaagaucaacgacgacaucaaguaccagcugaugaaggaggugagaagauucggccagaacuacgagagaaucuucauccugcuggaggaggugcagggcagcaugaaggugaagagacaguucguggaguucaccaucaaggaggccgccagauucaagaagguggugcugauccagcagcuggagaaggcccugaaggagaucgacagccacugccaccugagaaaggugaagcacaugagaaagagauga

SEQ ID NO: 3379 - RNA, 2715 nt, Artificial Sequence
  derived and/or modified sequence opt5 from SAGE__Homo_sapiens__CCDS14652.1
augcaggccagcccccugcaaaccucccagccuacaccgcccgaggaacuccacgcugccgcguacguguucacgaacgacggccagcagaugagaucugaugaggucaaucugguugcuaccgggcaccaaagcaagaaaaagcacucccggaaaucuaagcgccauagcuccucuaaaagacggaaaagcauguccagcuggcuugacaagcaggaagaugccgccgugacacacucuaucugcgaggaacgcauuaacaauggacagccuguggcugacaacguccuguccaccgcucccccuuggcccgaugccacaaucgcccauaauauuagagaggagcggauggaaaacggccagagccgcaccgacaaagugcucucuacagcgccuccgcaacugguucacauggccgcugccgggauccccuccaugagcaccagagaucuucacucuacggugacccauaauauucgggaggaacgcauggagaacggacagccucagcccgacaauguccuguccacaggcccuaccgggcucaucaacauggcugccacacccaucccggcgaugagcgccagagaucuguaugcuaccgugacgcacaauguuugugagcagaagauggaaaacgugcaaccugcccccgacaauguccugcucacacugcggccucgcagaauuaacaugaccgauacaggaaucucccccaugucuacccgggaccccuacgcuaccauuacauauaaugugccugaggaaaagauggagaagggccagccgcagcccgauaacauccuuagcacggccuccaccggccugauuaacguggccggggcuggaaccccugcgaucagcaccaauggccucuacucuacagucccccauaacguuugcgaagagaaaauggagaaugaccaaccucagcccaacaaugugcuguccaccgugcagccggucauuaucuaucuuacggccacagggaucccuggaaugaacacccgcgaccaguacgcuaccauuacacacaaugugugugaagagagaguugugaacaaucaaccccugccuagcaacgcccucucuaccguccugcccggccuggccuaucucgcuacagccgauaugccugcgaugagcacgcgggaccagcacgcuaccaucauucauaaucugagagaagagaagaaggauaacucccagcccacaccggacaaugugcuuucugccguuaccccugaacugaucaaccucgccggggcuggcauuccucccaugagcacacgcgaucaguacgccaccgugaaucaccauguccacgaggcucggauggagaacggacaaagaaaacaggacaacgugcuguccaauguccuuagcggccugaucaacauggccggggcgucuauccccgccauguccagccgcgaucucuacgcuacgauuacccauucugugcgggaagagaagauggaauccggaaaaccgcagacagacaagguuaucagcaaugaugcuccccagcugggccacauggccgccgggggcauuccuuccaugucuaccaaagaccuguaugcgacagugacccaaaacguccacgaggaaagaauggagaauaaccagccccagccuagcuacgaucucuccacggugcugcccggacuuacauaucugaccguugccgggaucccugcuaugucuacacgcgaccaguacgccaccgugacccauaauguccacgaggaaaagauuaaaaacggacaagcugccagcgacaauguguuuuccacagugcccccggccuucaucaacauggcugcgacgggcguuagcucuauguccacccgggaucaguaugccgcugucacacauaauaucagagaggaaaagauuaacaauagccagccugcccccggcaacauccucucuaccgccccucccuggcugcgccacauggcugccgcggggauuuccagcacaaucacccgggaccuuuacgugacggcuacacacucugugcaugaggagaagaugaccaauggacaacaggccccggauaacagccuguccaccgucccucccggcugcauuaaccucagcggggccggaaucucuuguagauccacacgcgaccuguaugcuaccgugauucacgauauccaggaagaggaaauggagaaugaccagacaccucccgauggcuuucugagcaacuccgacucucccgaacucaucaauaugacggggcauugcaugccuccgaacgcccuggauagcuucucccacgacuuuaccucucuuagcaaagaugagcugcucuacaagcccgacuccaaugaguucgcgguuggcaccaaaaacuacucugugagcgcuggagauccucccgucacagugaugucccugguugaaacagugccuaauacaccccaaauuagcccugccauggccaagaaaaucaacgacgacauuaaguaucagcugaugaaggagguccggagauuuggccagaauuacgaacggaucuucauucuucucgaggaagugcaggggucuaugaaaguuaagcgccaauuuguggaguucacgaucaaagaggcugccagauuuaagaaagucgugcugauccagcagcuggaaaaggcucucaaggagauugauucccauugucaucugcggaaagugaagcacaugagaaaacgcuga

SEQ ID NO: 3380 - protein, 800 aa, Artificial Sequence
  SART-_1__Homo_sapiens__O43290
MGSSKKHRGEKEAAGTTAAAGTGGATEQPPRHREHKKHKHRSGGSGGSGGERRKRSRERGGERGSGRRGAEAEARSSTHGRERSQAEPSERRVKREKRDDGYEAAASSKTSSGDASSLSIEETNKLRAKLGLKPLEVNAIKKEAGTKEEPVTADVINPMALRQREELREKLAAAKEKRLLNQKLGKIKTLGEDDPWLDDTAAWIERSRQLQKEKDLAEKRAKLLEEMDQEFGVSTLVEEEFGQRRQDLYSARDLQGLTVEHAIDSFREGETMILTLKDKGVLQEEEDVLVNVNLVDKERAEKNVELRKKKPDYLPYAEDESVDDLAQQKPRSILSKYDEELEGERPHSFRLEQGGTADGLRERELEEIRAKLRLQAQSLSTVGPRLASEYLTPEEMVTFKKTKRRVKKIRKKEKEVVVRADDLLPLGDQTQDGDFGSRLRGRGRRRVSEVEEEKEPVPQPLPSDDTRVENMDISDEEEGGAPPPGSPQVLEEDEAELELQKQLEKGRRLRQLQQLQQLRDSGEKVVEIVKKLESRQRGWEEDEDPERKGAIVFNATSEFCRTLGEIPTYGLAGNREEQEELMDFERDEERSANGGSESDGEENIGWSTVNLDEEKQQQDFSASSTTILDEEPIVNRGLAAALLLCQNKGLLETTVQKVARVKAPNKSLPSAVYCIEDKMAIDDKYSRREEYRGFTQDFKEKDGYKPDVKIEYVDETGRKLTPKEAFRQLSHRFHGKGSGKMKTERRMKKLDEEALLKKMSSSDTPLGTVALLQEKQKAQKTPYIVLSGSGKSMNANTITK

SEQ ID NO: 3381 - RNA, 2403 nt, Artificial Sequence
  SART-_1__Homo_sapiens__AAH01058
auggggucguccaagaagcaucgcggagagaaggaggcggccgggacgacggcggcggccggcaccgggggugccaccgagcagccgccgcggcaccgggaacacaaaaaacacaagcaccggaguggcggcaguggcgguagcgguggcgaacgacggaagcggagccgggaacgugggggcgagcgcgggagcgggcggcgcggggccgaagcugaggcccggagcagcacgcacgggcgggagcgcagccaggcagagcccuccgagcggcgcgugaagcgggagaagcgcgaugacggcuacgaggccgcugccagcuccaaaacuagcucaggcgaugccuccucacucagcaucgaggagacuaacaaacuccgggcaaaguuggggcugaaacccuuggagguuaaugccaucaagaaggaggcgggcaccaaggaggagcccgugacagcugaugucaucaacccuauggccuugcgacagcgagaggagcugcgggagaagcuggcagcugccaaggagaagcgccugcugaaccaaaagcuggggaagauaaagacccuaggagaggaugaccccuggcuggacgacacugcagccuggaucgagaggagccggcagcugcagaaggagaaggaccuggcagagaagagggccaaguuacuggaggagauggaccaagaguuuggugucagcacucugguggaggaggaguucgggcagaggcggcaggaccuguacagugcccgggaccugcagggccucaccguggagcaugccauugauuccuuccgagaaggggagacaaugauucuuacccucaaggacaaaggcgugcugcaggaggaggaggacgugcuggugaacgugaaccugguggauaaggagcgggcagagaaaaauguggagcugcggaagaagaagccugacuaccugcccuaugccgaggacgagagcguggacgaccuggcgcagcaaaaaccucgcucuauccuguccaaguaugacgaagagcuugaaggggagcggccacauuccuuccgcuuggagcagggcggcacggcugauggccugcgggagcgggagcuggaggagauccgggccaagcugcggcugcaggcucagucccugagcacaguggggccccggcuggccuccgaauaccucacgccugaggagauggugaccuuuaaaaagaccaagcggagggugaagaaaauccgcaagaaggagaaggagguaguagugcgggcagaugacuugcugccucucggggaccagacucaggauggggacuuugguuccagacugcggggacggggucgccgccgaguguccgaaguggaggaggagaaggagccugugccucagccccugccgucggacgacacccgaguggagaacauggacaucagugaugaggaggaagguggagcuccaccgccgggguccccgcaggugcuggaggaggacgaggcggagcuggagcugcagaagcagcuggagaagggacgccggcugcgacaguuacagcagcuacagcagcugcgagacaguggcgagaaggugguggagauugugaagaagcuggagucucgccagcggggcugggaggaggaugaggaucccgagcggaagggggccaucguguucaacgccacguccgaguucugccgcaccuugggggagauccccaccuacgggcuggcuggcaaucgcgaggagcaggaggagcucauggacuuugaacgggaugaggagcgcucagccaacgguggcuccgaaucugacggggaggagaacaucggcuggagcacggugaaccuggacgaggagaagcagcagcaggauuucucugcuuccuccaccaccauccuggacgaggaaccgaucgugaauagggggcuggcagcugcccugcuccugugucagaacaaagggcugcuggagaccacagugcagaagguggcccgggugaaggcccccaacaagucgcugcccucagccguguacugcaucgaggauaagauggccaucgaugacaaguacagccggagggaggaauaccgaggcuucacacaggacuucaaggagaaggacggcuacaaacccgacguuaagaucgaauacguggaugagacgggccggaaacucacacccaaggaggcuuuccggcagcugucgcaccgcuuccauggcaagggcucaggcaagaugaagacagagcggcggaugaagaagcuggacgaggaggcgcuccugaagaagaugagcuccagcgacacgccccugggcaccguggcccugcuccaggagaagcagaaggcucagaagacccccuacaucgugcucagcggcagcggcaagagcaugaacgcgaacaccaucaccaaguga

SEQ ID NO: 3382 - RNA, 2403 nt, Artificial Sequence
  derived and/or modified sequence opt1 from SART-_1__Homo_sapiens__AAH01058
augggcagcuccaagaagcaccgcggggagaaggaggccgccggcaccaccgcggccgccgggacgggcggggccaccgagcagcccccgcggcaccgcgagcacaagaagcacaagcaccggagcggcggcuccgggggcagcgggggcgagcgccggaagcgcucccgggagcgcgggggcgagcggggcagcgggcgccggggcgccgaggcggaggcccgcuccagcacccacgggcgggagcgcucccaggccgagcccagcgagcggcgcgugaagcgggagaagcgcgacgacggcuacgaggccgcggccuccagcaagaccuccagcggcgacgccuccagccuguccaucgaggagacgaacaagcuccgggccaagcuggggcugaagccccucgaggucaacgccaucaagaaggaggcgggcaccaaggaggagcccgugaccgccgacgugaucaacccgauggcccugcgccagcgggaggagcugcgcgagaagcucgccgccgcgaaggagaagcgccugcugaaccagaagcucgggaagaucaagacccugggcgaggacgaccccuggcuggacgacacggccgccuggaucgagcggagccgccagcuccagaaggagaaggaccuggccgagaagcgggccaagcugcucgaggagauggaccaggaguucggggucuccacccugguggaggaggaguucggccagcgccggcaggaccuguacagcgcgcgcgaccuccagggccugaccguggagcacgccaucgacagcuuccgggagggggagaccaugauccugacgcucaaggacaagggcguccugcaggaggaggaggacgugcuggugaacgucaaccucguggacaaggagcgcgccgagaagaacguggagcugcggaagaagaagcccgacuaccugcccuacgccgaggacgaguccgucgacgaccucgcccagcagaagccgcgcagcauccuguccaaguacgacgaggagcuggagggggagcggccccacagcuuccgccucgagcagggcgggaccgcggacggccugcgggagcgcgagcuggaggagauccgggccaagcuccgccugcaggcccagucccugagcaccgugggcccccggcucgccuccgaguaccugacccccgaggagauggugacguucaagaagaccaagcgccgggucaagaagauccgcaagaaggagaaggagguggugguccgcgcggacgaccugcucccgcugggggaccagacccaggacggcgacuucgggagccggcugcgcggccgggggcgccggcgcguguccgagguggaggaggagaaggagcccgucccccagccccucccgagcgacgacacccggguggagaacauggacaucuccgacgaggaggagggcggcgccccgccgcccgggagcccccaggugcuggaggaggacgaggccgagcuggagcuccagaagcagcuggagaagggccgccggcugcgccagcuccagcagcugcagcagcugcgggacuccggggagaaggucguggagaucgucaagaagcuggagagccgccagcggggcugggaggaggacgaggaccccgagcgcaagggcgccaucguguucaacgccacguccgaguucugccggacccucggggagauccccaccuacggccuggcggggaaccgcgaggagcaggaggagcugauggacuucgagcgggacgaggagcgcagcgccaacggcggguccgagagcgacggcgaggagaacaucggcugguccaccgugaaccucgacgaggagaagcagcagcaggacuucagcgccagcuccacgaccauccuggacgaggagcccaucgucaaccgggggcuggccgccgcgcuccugcugugccagaacaagggccuccuggagaccaccgugcagaagguggcccgcgucaaggcccccaacaagagccugcccuccgccguguacugcaucgaggacaagauggccaucgacgacaaguacagccggcgcgaggaguaccgcggguucacgcaggacuucaaggagaaggacggcuacaagcccgacgugaagaucgaguacgucgacgagaccgggcggaagcucacccccaaggaggcguuccgccagcugucccaccgguuccacggcaagggcagcgggaagaugaagaccgagcgccggaugaagaagcuggacgaggaggcccuccugaagaagauguccagcuccgacacgccgcugggcaccguggcccuccugcaggagaagcagaaggcccagaagacccccuacaucgugcugagcggguccggcaagagcaugaacgcgaacaccaucacgaaguga

SEQ ID NO: 3383 - RNA, 2403 nt, Artificial Sequence
  derived and/or modified sequence opt2 from SART-_1__Homo_sapiens__AAH01058
augggcuccuccaagaagcaccgcggcgagaaggaggccgccggcaccaccgccgccgccggcaccggcggcgccaccgagcagcccccccgccaccgcgagcacaagaagcacaagcaccgcuccggcggcuccggcggcuccggcggcgagcgccgcaagcgcucccgcgagcgcggcggcgagcgcggcuccggccgccgcggcgccgaggccgaggcccgcuccuccacccacggccgcgagcgcucccaggccgagcccuccgagcgccgcgucaagcgcgagaagcgcgacgacggcuacgaggccgccgccuccuccaagaccuccuccggcgacgccuccucccucuccaucgaggagaccaacaagcuccgcgccaagcucggccucaagccccucgaggucaacgccaucaagaaggaggccggcaccaaggaggagcccgucaccgccgacgucaucaaccccauggcccuccgccagcgcgaggagcuccgcgagaagcucgccgccgccaaggagaagcgccuccucaaccagaagcucggcaagaucaagacccucggcgaggacgaccccuggcucgacgacaccgccgccuggaucgagcgcucccgccagcuccagaaggagaaggaccucgccgagaagcgcgccaagcuccucgaggagauggaccaggaguucggcgucuccacccucgucgaggaggaguucggccagcgccgccaggaccucuacuccgcccgcgaccuccagggccucaccgucgagcacgccaucgacuccuuccgcgagggcgagaccaugauccucacccucaaggacaagggcguccuccaggaggaggaggacguccucgucaacgucaaccucgucgacaaggagcgcgccgagaagaacgucgagcuccgcaagaagaagcccgacuaccuccccuacgccgaggacgaguccgucgacgaccucgcccagcagaagccccgcuccauccucuccaaguacgacgaggagcucgagggcgagcgcccccacuccuuccgccucgagcagggcggcaccgccgacggccuccgcgagcgcgagcucgaggagauccgcgccaagcuccgccuccaggcccagucccucuccaccgucggcccccgccucgccuccgaguaccucacccccgaggagauggucaccuucaagaagaccaagcgccgcgucaagaagauccgcaagaaggagaaggaggucgucguccgcgccgacgaccuccucccccucggcgaccagacccaggacggcgacuucggcucccgccuccgcggccgcggccgccgccgcgucuccgaggucgaggaggagaaggagcccgucccccagccccuccccuccgacgacacccgcgucgagaacauggacaucuccgacgaggaggagggcggcgcccccccccccggcuccccccagguccucgaggaggacgaggccgagcucgagcuccagaagcagcucgagaagggccgccgccuccgccagcuccagcagcuccagcagcuccgcgacuccggcgagaaggucgucgagaucgucaagaagcucgagucccgccagcgcggcugggaggaggacgaggaccccgagcgcaagggcgccaucgucuucaacgccaccuccgaguucugccgcacccucggcgagauccccaccuacggccucgccggcaaccgcgaggagcaggaggagcucauggacuucgagcgcgacgaggagcgcuccgccaacggcggcuccgaguccgacggcgaggagaacaucggcugguccaccgucaaccucgacgaggagaagcagcagcaggacuucuccgccuccuccaccaccauccucgacgaggagcccaucgucaaccgcggccucgccgccgcccuccuccucugccagaacaagggccuccucgagaccaccguccagaaggucgcccgcgucaaggcccccaacaagucccuccccuccgccgucuacugcaucgaggacaagauggccaucgacgacaaguacucccgccgcgaggaguaccgcggcuucacccaggacuucaaggagaaggacggcuacaagcccgacgucaagaucgaguacgucgacgagaccggccgcaagcucacccccaaggaggccuuccgccagcucucccaccgcuuccacggcaagggcuccggcaagaugaagaccgagcgccgcaugaagaagcucgacgaggaggcccuccucaagaagauguccuccuccgacaccccccucggcaccgucgcccuccuccaggagaagcagaaggcccagaagacccccuacaucguccucuccggcuccggcaaguccaugaacgccaacaccaucaccaaguga

SEQ ID NO: 3384 - RNA, 2403 nt, Artificial Sequence
  derived and/or modified sequence opt3 from SART-_1__Homo_sapiens__AAH01058
augggcagcuccaagaaacacagaggggagaaggaagccgcuggaaccacagcagccgcggguacuggcggggcuacggagcagcccccuaggcaucgggaacacaaaaagcauaaacaccgcucuggaggcucaggugggaguggaggcgagcgacguaagagaagcagggaacggggcggggagcgcggauccgguagaaggggcgccgaggcagaagcccggucuucgacccaugggcgcgagcgaucacaagcugaaccaagcgagagaagggugaagcgggagaaacgugacgauggauacgaagcagccgcuaguuccaagacaucuagcggcgacgccuccucacugaguaucgaggaaacuaacaaacuccgcgcgaaacuuggucugaaaccguuggaggucaaugcaauuaagaaggaagccgggaccaaagaggagcccguuacagcugaugugauaaacccuauggccuuaagacagagggaagaacugcgggaaaagcuagcagcugccaaagagaagcgacuccugaaucagaaacuuggaaagaucaaaacccugggcgaagacgauccaugguuggacgauacugcggccuggauugagcgcagcagacagcuccaaaaggagaaggaccuggcagaaaagagggcuaagcugcucgaggaaauggaucaggaguucggcguaucuacauuaguggaagaggaguuugggcagcggcgccaggaccuguauuccgccagagaucuucaaggauugaccgucgaacacgcuaucgacucauucagggagggugaaacgaugauucugacucuaaaagauaagggcgugcuccaggaggaggaagacguucuggugaacgucaaucuuguggacaaagagcgugccgaaaagaacguagagcugcggaagaaaaagcccgauuacuugccuuaugcagaagacgagagcguugaugaccucgcccagcagaaaccacgaaguauccugucuaaguacgaugaggaauuagagggggaaagaccccacuccuuuaggcuggagcaaggaggcaccgcugacggucuccgcgaacgggagcuugaggaaauaagagcgaaacugagguugcaggcacagagccuaucgacaguggggccucgccuggccucugaguaucucacuccagaagagauggucaccuucaagaagacaaaacgacgggugaagaaaauccguaagaaagaaaaggagguggucguuagagcugaugaccugcuuccgcugggcgaucaaacccaggacggagauuuuggcuccagguugcgcgggcggggaagaaggcgagugucagagguagaagaggaaaaggagcccgugccucagccacuccccagugacgacacgcgcgucgagaauauggauauuagcgacgaagaggaagguggcgccccuccacccggguccccucaggugcuggaggaagaugaggcagaguuagaacugcaaaaacagcuagagaagggacggagacucaggcagcugcagcaacuucagcaguugcgugacucuggcgaaaaaguuguggagaucgucaagaaacuggaaagccgccagcgggguugggaggaggaugaagacccggagagaaagggggccauuguguucaacgcuacuucagaauuuugcaggacacucggcgagauccccaccuacggacuggccggcaaucgagaagaacaagaggaacuuauggauuucgagcgggacgaggagcgcagugcaaacgggggauccgagagcgauggugaagagaauauaggcuggucuacuguaaaccuggacgaagagaaacagcagcaggauuuuucagcgaguagcacaaccauuuuggacgaggagccaaucguuaauagagggcucgcugccgcacuguuacugugucaaaacaagggacuacucgagacgaccgugcagaaggucgccagggugaaagcuccuaauaagucccugcccucugccgucuauugcauugaagauaaaauggcaaucgacgacaaguacucgcggcgagaggaauacagaggcuucacacaggauuuuaaagagaaggacgguuauaagccagaugugaaaaucgaauacguugacgagacugggcgcaaacuuacccccaaggaggcuuucaggcaauugagccaucguuuucacggcaagggauccggcaaaaugaagacagaacggagaaugaagaaacuggaugaggaagcccuccugaagaaaaugucaaguucugacacuccuuuagggaccguggcgcugcuucaggagaagcagaaagcccagaagacaccauauauuguauugagcggauccggcaagucaaugaacgcuaacaccauaacuaaauga

SEQ ID NO: 3385 - RNA, 2403 nt, Artificial Sequence
  derived and/or modified sequence opt4 from SART-_1__Homo_sapiens__AAH01058
augggcagcagcaagaagcacagaggcgagaaggaggccgccggcaccaccgccgccgccggcaccggcggcgccaccgagcagccccccagacacagagagcacaagaagcacaagcacagaagcggcggcagcggcggcagcggcggcgagagaagaaagagaagcagagagagaggcggcgagagaggcagcggcagaagaggcgccgaggccgaggccagaagcagcacccacggcagagagagaagccaggccgagcccagcgagagaagagugaagagagagaagagagacgacggcuacgaggccgccgccagcagcaagaccagcagcggcgacgccagcagccugagcaucgaggagaccaacaagcugagagccaagcugggccugaagccccuggaggugaacgccaucaagaaggaggccggcaccaaggaggagcccgugaccgccgacgugaucaaccccauggcccugagacagagagaggagcugagagagaagcuggccgccgccaaggagaagagacugcugaaccagaagcugggcaagaucaagacccugggcgaggacgaccccuggcuggacgacaccgccgccuggaucgagagaagcagacagcugcagaaggagaaggaccuggccgagaagagagccaagcugcuggaggagauggaccaggaguucggcgugagcacccugguggaggaggaguucggccagagaagacaggaccuguacagcgccagagaccugcagggccugaccguggagcacgccaucgacagcuucagagagggcgagaccaugauccugacccugaaggacaagggcgugcugcaggaggaggaggacgugcuggugaacgugaaccugguggacaaggagagagccgagaagaacguggagcugagaaagaagaagcccgacuaccugcccuacgccgaggacgagagcguggacgaccuggcccagcagaagcccagaagcauccugagcaaguacgacgaggagcuggagggcgagagaccccacagcuucagacuggagcagggcggcaccgccgacggccugagagagagagagcuggaggagaucagagccaagcugagacugcaggcccagagccugagcaccgugggccccagacuggccagcgaguaccugacccccgaggagauggugaccuucaagaagaccaagagaagagugaagaagaucagaaagaaggagaaggaggugguggugagagccgacgaccugcugccccugggcgaccagacccaggacggcgacuucggcagcagacugagaggcagaggcagaagaagagugagcgagguggaggaggagaaggagcccgugccccagccccugcccagcgacgacaccagaguggagaacauggacaucagcgacgaggaggagggcggcgcccccccccccggcagcccccaggugcuggaggaggacgaggccgagcuggagcugcagaagcagcuggagaagggcagaagacugagacagcugcagcagcugcagcagcugagagacagcggcgagaaggugguggagaucgugaagaagcuggagagcagacagagaggcugggaggaggacgaggaccccgagagaaagggcgccaucguguucaacgccaccagcgaguucugcagaacccugggcgagauccccaccuacggccuggccggcaacagagaggagcaggaggagcugauggacuucgagagagacgaggagagaagcgccaacggcggcagcgagagcgacggcgaggagaacaucggcuggagcaccgugaaccuggacgaggagaagcagcagcaggacuucagcgccagcagcaccaccauccuggacgaggagcccaucgugaacagaggccuggccgccgcccugcugcugugccagaacaagggccugcuggagaccaccgugcagaagguggccagagugaaggcccccaacaagagccugcccagcgccguguacugcaucgaggacaagauggccaucgacgacaaguacagcagaagagaggaguacagaggcuucacccaggacuucaaggagaaggacggcuacaagcccgacgugaagaucgaguacguggacgagaccggcagaaagcugacccccaaggaggccuucagacagcugagccacagauuccacggcaagggcagcggcaagaugaagaccgagagaagaaugaagaagcuggacgaggaggcccugcugaagaagaugagcagcagcgacaccccccugggcaccguggcccugcugcaggagaagcagaaggcccagaagacccccuacaucgugcugagcggcagcggcaagagcaugaacgccaacaccaucaccaaguga

SEQ ID NO: 3386 - RNA, 2403 nt, Artificial Sequence
  derived and/or modified sequence opt5 from SART-_1__Homo_sapiens__AAH01058
augggcagcuccaagaaacacagaggggagaaggaagccgcuggaaccacagccgcggcuggcaccgggggagccacggagcagcccccucggcaucgcgaacacaaaaagcauaaacacagaucuggcgggagcggaggcuccggcggggagcggcgcaagagaucucgggaacgcggaggcgagagagggagcggacggcgcggcgccgaggcugaagccagauccucuacacaugggcgggagcgcagccaagcugaaccguccgagagacgggugaagcgcgagaaaagagacgauggauacgaagccgcggccagcucuaagaccuccagcggcgacgcuucuucccugagcaucgaggaaacaaacaaacuccgggccaagcugggccuuaaaccccuggaggucaaugcuauuaagaaggaagccgggaccaaagaggagccuguuacagcggaugugaucaaccccauggcccucagacagcgcgaagaacugcgggaaaaacuugcugccgcuaaagagaagagacugcucaaucagaaacugggaaagauuaaaacccugggcgaagacgauccuuggcucgacgauacggccgccuggaucgagcgcucucggcagcugcaaaaggagaaggaccuugcugaaaagagagcgaagcugcucgaggaaauggaucaggaguucgggguguccacccuggucgaagaggaguuuggacagcgccggcaggaccuuuauagcgccagagaucugcaaggccucacaguggaacacgcuauugacuccuuccgcgagggggaaaccaugauccugacacugaaagauaagggaguucuccaggaggaggaagacgugcuggucaacgugaaucuuguugacaaagagcgggccgaaaagaacguggagcugagaaagaaaaagcccgauuaccucccuuaugccgaagacgagucugucgaugaccuggcucagcagaaaccgcgcagcauccuuuccaaguacgaugaggaacuggagggcgaacggccccacagcuuuagacucgagcaaggcgggaccgccgacggacugcgggaacgcgagcuggaggaaauuagagcgaaacuccggcugcaggcucagucucuuuccacggugggcccuagacuggccagcgaguaucucacacccgaagagauggugaccuucaagaagacaaaacgccgggucaagaaaaucagaaagaaagaaaaggagguuguggugcgcgccgaugaccugcuuccucugggggaucaaacccaggacggagauuuuggcucuagacuccgggggcgcggcagacggcgcgucagcgagguggaagaggaaaaggagcccguuccgcagccucugcccuccgacgacaccagaguggagaauauggauauuucugacgaagaggaaggaggcgcuccuccucccgggagcccccagguccuggaggaagaugaggccgagcucgaacugcaaaaacagcuugagaagggacggcgccugagacagcuccagcaacugcagcagcugcgggacuccggcgaaaaagugguugagaucgugaagaaacuugaaagccgccagagagggugggaggaggaugaagacccggagcggaagggagcuauugucuucaacgccacaucugaauuuugcagaacgcucggcgagauccccaccuacgggcuggcgggcaaucgcgaggagcaagaggaacugauggauuucgagcgggacgaagagagauccgccaacggaggcagcgagucugauggggaagagaauauuggaugguccacagugaaccucgacgaagagaaacagcagcaggauuuuagcgcuuccucuaccacaauccuggacgaggaaccuaucgucaaucgcggccuugccgcugcccugcuccugugucaaaacaaggggcugcuugagaccacggugcagaagguugcgcgggugaaagcccccaauaagagccucccuuccgcugucuauugcauugaagauaaaauggccaucgacgacaaguacucuagacgcgaggaauaccggggauucacacaggauuuuaaagagaaggacggcuauaagcccgaugugaaaauugaauacguugacgagaccgggagaaagcugaccccgaaagaggcuuuccgccaacugagccaucgguuucacggcaagggauccggcaaaaugaagacagaaagacggaugaagaaacucgaugaggaagcccugcuuaagaaaaugucuagcuccgacaccccucuggggacaguggcccuccugcaggagaagcagaaagcucagaagacgcccuauaucguccugagcggaucuggcaaguccaugaacgcgaacaccauuacaaaauga

SEQ ID NO: 3387 - protein, 958 aa, Artificial Sequence [sequence omitted]

SEQ ID NO: 3388 - RNA, 2877 nt, Artificial Sequence
  SART-2__Homo_sapiens__AAF00087
augaggacucacacacggggggcucccaguguguuuuucauauauuugcuuugcuuugugucagccuacaucaccgacgagaacccagaaguuaugauucccuucaccaaugccaacuacgacagccaucccaugcuguacuucuccagggcagaaguggcggagcugcagcucagggcugccagcucgcacgagcacauugcagcccgccucacggaggcugugcacacgaugcuguccagccccuuggaauaccucccucccugggaucccaaggacuacagugcccgcuggaaugaaauuuuuggaaacaacuugggugccuuggcaauguucugugugcuguauccugagaacauugaagcccgagacauggccaaagacuacauggagaggauggcagcgcagccuaguugguuggugaaagaugcuccuugggaugaggucccgcuugcucacucccugguugguuuugccacugcuuaugacuucuuguacaacuaccugagcaagacacaacaggagaaguuucuugaagugauugccaaugccucaggguauauguaugaaacuucauacaggagaggauggggauuucaauaccugcacaaucaucagcccaccaacuguauggcuuugcucacgggaagccuaguccugaugaaucaaggauaucuucaagaagccuacuuauggaccaaacaaguucugaccaucauggagaaaucucuggucuugcucagggaggugacggauggcucccucuaugaaggaguugcguauggcagcuacaccacuagaucacucuuccaauacauguuucucguccagaggcacuucaacaucaaccacuuuggccauccguggcuuaaacaacacuuugcauuuauguauagaaccauccugccaggguuucaaaggacuguggcuauugcggacucaaauuacaacugguuuuaugguccagaaagccaauuaguguuccuugauaaauuugucaugcguaauggcagugguaacuggcuagcugaccaaaucagaaggaaccgugugguggaagguccaggaacaccauccaaagggcagcgcuggugcacucugcacacagaauuucucugguaugauggcagcuugaaaucgguuccuccuccagacuuuggcaccccuacacugcauuauuuugaagacuggggugucgugacuuauggaagugcacuaccugcagaaaucaauagaucuuuccuuuccuucaagucuggaaaacuggggggacgugcaauauaugacauuguccacagaaacaaauacaaagauuggaucaaaggauggagaaauuuuaaugcagggcaugaacauccugaucaaaacucauuuacuuuugcucccaauggugugccuuucauuacugaggcucuguacgggccaaaguacaccuucuucaacaauguuuugauguuuuccccagcugugucaaagagcugcuuuucucccugggugggucaggucacagaagacugcucaucaaaauggucuaaauacaagcaugaccuggcagcuaguugucaggggagggugguugcagcagaggagaaaaauggggugguuuucauccgaggagaaggugugggagcuuauaacccccagcucaaccugaagaauguucagaggaaucucauccuccuacauccacagcugcuucuccuuguagaccaaauacaccugggagaggagagucccuuggagacagcagcgagcuucuuccauaauguggauguuccuuuugaggagacugugguagaugguguccauggggcuuucaucaggcagagagauggucucuauaaaauguacuggauggacgauacuggcuacagcgagaaagcaaccuuugccucagugacauauccucggggcuaucccuacaacgggacaaacuaugugaaugucaccaugcaccuccgaagucccaucaccagggcagcuuaccucuucauagggccaucuauagauguucagagcuucacuguccacggagacucucagcaacuggauguguucauagccaccagcaaacaugccuacgccacauaccuguggacaggugaggccacaggacagucugccuuugcacaggucauugcugaucgucacaaaauucuguuugaccggaauucagccaucaagagcagcauugucccugaggugaaggacuaugcugcuauuguggaacagaacuugcagcauuuuaaaccaguguuucagcugcuggagaagcagauacugucccgaguccggaacacagcuagcuuuaggaagacugcugaacgccugcugagauuuucagauaagagacagacugaggaggccauugacaggauuuuugccauaucacagcaacagcagcagcaaagcaagucaaagaaaaaccgaagggcaggcaaacgcuauaaauuuguggaugcugucccugauauuuuugcacagauugaagucaaugagaaaaagauuagacagaaagcucagauuuuggcacagaaagaacuacccauagaugaagaugaagaaaugaaagaccuuuuagauuuugcagauguaacauacgagaaacauaaaaaugggggcuugauuaaaggccgguuuggacaggcacggauggugacaacuacacacagcagggccccaucacugucugcuuccuauaccagguuguuccugauucugaacauugcuauuuucuuugucauguuggcaaugcaacugacuuauuuccagagggcccagagccuacauggccaaagaugucuuuaugcaguucuucucauagauagcuguauuuuauuaugguuguacucuucuuguucccaaucacaguguuag

SEQ ID NO: 3389 - RNA, 2877 nt, Artificial Sequence
  derived and/or modified sequence opt1 from SART-2__Homo_sapiens__AAF00087
augcgcacccacacccggggcgcccccagcguguucuucaucuaccugcucugcuucgucuccgccuacaucacggacgagaacccggaggugaugauccccuucaccaacgcgaacuacgacagccaccccaugcuguacuucucccgcgccgagguggccgagcugcagcuccgggccgccagcucccacgagcacaucgcggcccgccugaccgaggccguccacaccaugcugagcagcccccucgaguaccugccgcccugggaccccaaggacuacuccgcccgguggaacgagaucuucgggaacaaccugggcgcgcucgccauguucugcgugcuguaccccgagaacaucgaggcccgcgacauggccaaggacuacauggagcggauggccgcgcagccguccuggcuggugaaggacgcccccugggacgaggucccccucgcccacagccuggugggguucgccacggccuacgacuuccuguacaacuaccucuccaagacccagcaggagaaguuccuggaggugaucgcgaacgccagcggcuacauguacgagaccuccuaccgccggggguggggcuuccaguaccugcacaaccaccagcccaccaacugcauggcccuccugacgggcagccugguccucaugaaccagggguaccugcaggaggccuaccuguggaccaagcagguccucaccaucauggagaagucccuggugcugcuccgcgaggugaccgacggcagccuguacgaggggguggccuacggcuccuacacgacccggagccuguuccaguacauguuccucgugcagcgccacuucaacaucaaccacuucgggcacccguggcugaagcagcacuucgcguucauguaccggaccauccugcccggcuuccagcgcaccgucgccaucgccgacuccaacuacaacugguucuacggccccgagagccagcucguguuccuggacaaguucgugaugcggaacgggagcggcaacuggcuggccgaccagauccgccggaaccgcgucguggaggggcccggcacgccguccaagggccagcgguggugcacccuccacaccgaguuccugugguacgacgggagccugaaguccgugcccccgcccgacuucggcacccccacgcuccacuacuucgaggacuggggcgucgugaccuacgggagcgcccugcccgcggagaucaaccgcuccuuccugagcuucaaguccgggaagcucggcggccgggccaucuacgacaucgugcaccgcaacaaguacaaggacuggaucaagggguggcgcaacuucaacgccggccacgagcaccccgaccagaacagcuucaccuucgcccccaacggggucccguucaucaccgaggcgcuguacggccccaaguacacguucuucaacaacgugcugauguucucccccgccgucagcaaguccugcuucagccccugggugggccaggugaccgaggacugcuccagcaagugguccaaguacaagcacgaccucgccgccagcugccaggggcgggucguggccgcggaggagaagaacggcguggucuucauccgcggggagggcgugggggccuacaacccgcagcugaaccugaagaacgugcagcggaaccucauccugcugcacccccagcugcuccugcuggucgaccagauccaccucggcgaggagagcccccuggagaccgccgccuccuucuuccacaacguggacgugccguucgaggagaccgucguggacggggugcacggcgccuucauccgccagcgggacggccuguacaagauguacuggauggacgacacgggguacuccgagaaggcgaccuucgccagcgucaccuacccccgcggcuaccccuacaacgggaccaacuacgugaacgugacgaugcaccuccggagccccaucacccgcgccgccuaccuguucaucggcccguccaucgacguccagagcuucaccgugcacggcgacucccagcagcuggacguguucaucgccaccagcaagcacgcguacgccacguaccucuggaccggggaggccaccggccaguccgccuucgcgcaggucaucgccgaccggcacaagauccuguucgaccgcaacagcgccaucaaguccagcaucgugcccgaggugaaggacuacgccgccaucgucgagcagaaccugcagcacuucaagcccguguuccagcuccuggagaagcagauccugucccgggugcgcaacaccgcgagcuuccggaagaccgccgagcgccuccugcgguucuccgacaagcgccagacggaggaggccaucgaccggaucuucgccaucagccagcagcagcagcagcaguccaagagcaagaagaaccgccgggccgggaagcgcuacaaguucgucgacgcggugcccgacaucuucgcccagaucgaggugaacgagaagaagauccgccagaaggcccagauccuggcccagaaggagcucccgaucgacgaggacgaggagaugaaggaccugcuggacuucgccgacgucaccuacgagaagcacaagaacggcgggcucaucaagggccgguucggccaggcgcgcauggugaccaccacgcacucccgggcccccagccuguccgccagcuacacccgccuguuccucauccugaacaucgccaucuucuucgugaugcuggcgaugcagcucaccuacuuccagcgggcccagagccugcacgggcagcgcugccuguacgccguccuccugaucgacuccugcauccugcucuggcuguacagcuccugcagccagucccagugcuga

SEQ ID NO: 3390 - RNA, 2877 nt, Artificial Sequence
  derived and/or modified sequence opt2 from SART-2__Homo_sapiens__AAF00087
augcgcacccacacccgcggcgcccccuccgucuucuucaucuaccuccucugcuucgucuccgccuacaucaccgacgagaaccccgaggucaugauccccuucaccaacgccaacuacgacucccaccccaugcucuacuucucccgcgccgaggucgccgagcuccagcuccgcgccgccuccucccacgagcacaucgccgcccgccucaccgaggccguccacaccaugcucuccuccccccucgaguaccucccccccugggaccccaaggacuacuccgcccgcuggaacgagaucuucggcaacaaccucggcgcccucgccauguucugcguccucuaccccgagaacaucgaggcccgcgacauggccaaggacuacauggagcgcauggccgcccagcccuccuggcucgucaaggacgcccccugggacgaggucccccucgcccacucccucgucggcuucgccaccgccuacgacuuccucuacaacuaccucuccaagacccagcaggagaaguuccucgaggucaucgccaacgccuccggcuacauguacgagaccuccuaccgccgcggcuggggcuuccaguaccuccacaaccaccagcccaccaacugcauggcccuccucaccggcucccucguccucaugaaccagggcuaccuccaggaggccuaccucuggaccaagcagguccucaccaucauggagaagucccucguccuccuccgcgaggucaccgacggcucccucuacgagggcgucgccuacggcuccuacaccacccgcucccucuuccaguacauguuccucguccagcgccacuucaacaucaaccacuucggccaccccuggcucaagcagcacuucgccuucauguaccgcaccauccuccccggcuuccagcgcaccgucgccaucgccgacuccaacuacaacugguucuacggccccgagucccagcucgucuuccucgacaaguucgucaugcgcaacggcuccggcaacuggcucgccgaccagauccgccgcaaccgcgucgucgagggccccggcacccccuccaagggccagcgcuggugcacccuccacaccgaguuccucugguacgacggcucccucaaguccguccccccccccgacuucggcacccccacccuccacuacuucgaggacuggggcgucgucaccuacggcuccgcccuccccgccgagaucaaccgcuccuuccucuccuucaaguccggcaagcucggcggccgcgccaucuacgacaucguccaccgcaacaaguacaaggacuggaucaagggcuggcgcaacuucaacgccggccacgagcaccccgaccagaacuccuucaccuucgcccccaacggcguccccuucaucaccgaggcccucuacggccccaaguacaccuucuucaacaacguccucauguucucccccgccgucuccaaguccugcuucucccccugggucggccaggucaccgaggacugcuccuccaagugguccaaguacaagcacgaccucgccgccuccugccagggccgcgucgucgccgccgaggagaagaacggcgucgucuucauccgcggcgagggcgucggcgccuacaacccccagcucaaccucaagaacguccagcgcaaccucauccuccuccacccccagcuccuccuccucgucgaccagauccaccucggcgaggaguccccccucgagaccgccgccuccuucuuccacaacgucgacguccccuucgaggagaccgucgucgacggcguccacggcgccuucauccgccagcgcgacggccucuacaagauguacuggauggacgacaccggcuacuccgagaaggccaccuucgccuccgucaccuacccccgcggcuaccccuacaacggcaccaacuacgucaacgucaccaugcaccuccgcucccccaucacccgcgccgccuaccucuucaucggccccuccaucgacguccaguccuucaccguccacggcgacucccagcagcucgacgucuucaucgccaccuccaagcacgccuacgccaccuaccucuggaccggcgaggccaccggccaguccgccuucgcccaggucaucgccgaccgccacaagauccucuucgaccgcaacuccgccaucaaguccuccaucguccccgaggucaaggacuacgccgccaucgucgagcagaaccuccagcacuucaagcccgucuuccagcuccucgagaagcagauccucucccgcguccgcaacaccgccuccuuccgcaagaccgccgagcgccuccuccgcuucuccgacaagcgccagaccgaggaggccaucgaccgcaucuucgccaucucccagcagcagcagcagcaguccaaguccaagaagaaccgccgcgccggcaagcgcuacaaguucgucgacgccguccccgacaucuucgcccagaucgaggucaacgagaagaagauccgccagaaggcccagauccucgcccagaaggagcuccccaucgacgaggacgaggagaugaaggaccuccucgacuucgccgacgucaccuacgagaagcacaagaacggcggccucaucaagggccgcuucggccaggcccgcauggucaccaccacccacucccgcgcccccucccucuccgccuccuacacccgccucuuccucauccucaacaucgccaucuucuucgucaugcucgccaugcagcucaccuacuuccagcgcgcccagucccuccacggccagcgcugccucuacgccguccuccucaucgacuccugcauccuccucuggcucuacuccuccugcucccagucccagugcuga

SEQ ID NO: 3391 - RNA, 2877 nt, Artificial Sequence
  derived and/or modified sequence opt3 from SART-2__Homo_sapiens__AAF00087
augagaacccacacaaggggcgcccccagcguguucuuuaucuaccugcucugcuucgucuccgcuuauauuacugacgagaacccugaaguuaugauaccauuuacgaaugcaaacuacgauucucauccgaugcuuuauuucucacgggccgagguggcggaacugcaguugcgcgcugccaguagccacgagcauaucgcagcccgauuaaccgaagcuguacacacaaugcuguccucuccccuagaguaccucccuccaugggaccccaaggauuauucggcacguuggaaugagauuuuugggaacaaucugggagcccuugcuauguucugugugcuguacccugaaaacaucgaggccagagacauggcgaaagauuauauggaaaggauggcagcccaaccaucaugguuggucaaggacgcucccugggaugaggugccucucgcccauagccugguugguuuugcaacugcuuacgacuuccuguacaauuaucucaguaaaacccagcaggagaaguuuuuagaagugauugccaacgcguccggcuacauguaugagacaucuuaccggcgcggguggggauuccaguaucugcacaaucaccaaccaaccaacugcauggcccuuuugacuggcagccugguccuaaugaaucaggguuaccuccaggaagcauaucuguggacaaaacaggugcuuaccaucauggagaagucccugguauugcucagagaaguuacggaugggucacuguacgagggaguggcuuacggcaguuauacuaccaggagcuuauuucaauacauguuccugguccagcggcauuuuaacauaaaucacuucggccauccguggcucaagcagcacuucgccuuuauguaucgcacaauccuucccggguuccagcgaacuguggcuauugccgacucuaacuacaauugguuuuauggaccugagucccaacugguguucuuggauaaauuugucaugagaaacgguucaggcaacuggcuagcagaccagaucaggcggaaucguguuguggaagggccaggaacccccagcaagggccagcgcugguguacacugcacaccgaguuccucugguacgaugguagucugaaaucuguaccuccacccgacuuugggacgccgacucuucauuauuucgaagacuggggaguggucacauacggcuccgcccugccugcugagauuaacagaucguuuuugagcuucaagucuggcaaacucgggggaagggcgaucuacgauauagugcaccggaauaaguauaaggacuggauuaaagguuggcgaaacuuuaaugcaggccaugaacaccccgaucaaaacuccuucaccuuugccccaaaugggguuccuuucaucacugaggcucuguacggacccaaguauacauucuuuaacaauguguuaauguucucaccagccgucaguaaaagcugcuuuucccccugggugggccagguaaccgaggacuguucuagcaaguggucaaaauacaagcaugaucuggcagccaguugccagggucgcguuguggcugccgaagagaaaaacggggucguguucauuagaggcgaaggagucggcgcauauaauccucagcuaaaccucaagaaugugcaaaggaaccugauccuuuugcacccacagcugcuccugcuuguugaccagauccaccugggggaggaauccccguuggagacggcggcuagcuuuuuccauaauguggauguacccuuugaggaaaccgucguggacggaguucacggugccuucauucggcagcgcgauggccucuacaagauguauuggauggacgauacaggguacucugagaaagcaacuuuugccucagugaccuacccuagaggauauccauacaacggcacaaacuaugucaaugugacuaugcaucugaggagucccauaacccgugcugccuacuuauucaucgguccuagcauugacguacaauccuuuacagugcacggggacucucagcagcuggauguuuucaucgcaaccucgaagcacgcuuaugccacuuaccuauggacgggcgaagcgacaggacagagcgccuuugcucaagucauagcagaccggcauaaaauucucuucgaucgaaacuccgccaucaagucaaguaucgugccagaggugaaagacuaugcugccauugucgagcagaaucugcagcacuucaagcccguuuuucagcuuuuggaaaagcaaauccugucuagagugaggaacaccgcgagcuuccgcaaaacugcagagcggcuccugagauuuuccgauaagaggcagaccgaagaggccauugaccgcauauucgcuaucucacagcaacagcagcagcaaagcaaaucuaagaaaaaucgacgggccggcaagcguuacaaguuuguggaugcaguaccggacauuuucgcucagaucgaagucaacgagaaaaagaucagacagaaagcccagauuuuagcacaaaaggagcugccuauagaugaagacgaggaaaugaaagaucuuuuggacuuugccgaugugacauacgagaagcauaagaaugggggacucaucaaagguagguucggccaggcucgcaugguuaccacuacacacucccgggcgccaagucugagcgccucuuauacgagacuauuucugauucucaacaucgcaauuuucuuugugaugcuggcuaugcagcuuaccuacuuccagagggcccaauccuugcaugggcagcgaugucuguaugccgucuuacucaucgacucaugcauacugcuuuggcuguacaguagcuguucgcagucccaaugcuga

SEQ ID NO: 3392 - RNA, 2877 nt, Artificial Sequence
  derived and/or modified sequence opt4 from SART-2__Homo_sapiens__AAF00087
augagaacccacaccagaggcgcccccagcguguucuucaucuaccugcugugcuucgugagcgccuacaucaccgacgagaaccccgaggugaugauccccuucaccaacgccaacuacgacagccaccccaugcuguacuucagcagagccgagguggccgagcugcagcugagagccgccagcagccacgagcacaucgccgccagacugaccgaggccgugcacaccaugcugagcagcccccuggaguaccugccccccugggaccccaaggacuacagcgccagauggaacgagaucuucggcaacaaccugggcgcccuggccauguucugcgugcuguaccccgagaacaucgaggccagagacauggccaaggacuacauggagagaauggccgcccagcccagcuggcuggugaaggacgcccccugggacgaggugccccuggcccacagccuggugggcuucgccaccgccuacgacuuccuguacaacuaccugagcaagacccagcaggagaaguuccuggaggugaucgccaacgccagcggcuacauguacgagaccagcuacagaagaggcuggggcuuccaguaccugcacaaccaccagcccaccaacugcauggcccugcugaccggcagccuggugcugaugaaccagggcuaccugcaggaggccuaccuguggaccaagcaggugcugaccaucauggagaagagccuggugcugcugagagaggugaccgacggcagccuguacgagggcguggccuacggcagcuacaccaccagaagccuguuccaguacauguuccuggugcagagacacuucaacaucaaccacuucggccaccccuggcugaagcagcacuucgccuucauguacagaaccauccugcccggcuuccagagaaccguggccaucgccgacagcaacuacaacugguucuacggccccgagagccagcugguguuccuggacaaguucgugaugagaaacggcagcggcaacuggcuggccgaccagaucagaagaaacagagugguggagggccccggcacccccagcaagggccagagauggugcacccugcacaccgaguuccugugguacgacggcagccugaagagcgugcccccccccgacuucggcacccccacccugcacuacuucgaggacuggggcguggugaccuacggcagcgcccugcccgccgagaucaacagaagcuuccugagcuucaagagcggcaagcugggcggcagagccaucuacgacaucgugcacagaaacaaguacaaggacuggaucaagggcuggagaaacuucaacgccggccacgagcaccccgaccagaacagcuucaccuucgcccccaacggcgugcccuucaucaccgaggcccuguacggccccaaguacaccuucuucaacaacgugcugauguucagccccgccgugagcaagagcugcuucagccccugggugggccaggugaccgaggacugcagcagcaaguggagcaaguacaagcacgaccuggccgccagcugccagggcagagugguggccgccgaggagaagaacggcgugguguucaucagaggcgagggcgugggcgccuacaacccccagcugaaccugaagaacgugcagagaaaccugauccugcugcacccccagcugcugcugcugguggaccagauccaccugggcgaggagagcccccuggagaccgccgccagcuucuuccacaacguggacgugcccuucgaggagaccgugguggacggcgugcacggcgccuucaucagacagagagacggccuguacaagauguacuggauggacgacaccggcuacagcgagaaggccaccuucgccagcgugaccuaccccagaggcuaccccuacaacggcaccaacuacgugaacgugaccaugcaccugagaagccccaucaccagagccgccuaccuguucaucggccccagcaucgacgugcagagcuucaccgugcacggcgacagccagcagcuggacguguucaucgccaccagcaagcacgccuacgccaccuaccuguggaccggcgaggccaccggccagagcgccuucgcccaggugaucgccgacagacacaagauccuguucgacagaaacagcgccaucaagagcagcaucgugcccgaggugaaggacuacgccgccaucguggagcagaaccugcagcacuucaagcccguguuccagcugcuggagaagcagauccugagcagagugagaaacaccgccagcuucagaaagaccgccgagagacugcugagauucagcgacaagagacagaccgaggaggccaucgacagaaucuucgccaucagccagcagcagcagcagcagagcaagagcaagaagaacagaagagccggcaagagauacaaguucguggacgccgugcccgacaucuucgcccagaucgaggugaacgagaagaagaucagacagaaggcccagauccuggcccagaaggagcugcccaucgacgaggacgaggagaugaaggaccugcuggacuucgccgacgugaccuacgagaagcacaagaacggcggccugaucaagggcagauucggccaggccagaauggugaccaccacccacagcagagcccccagccugagcgccagcuacaccagacuguuccugauccugaacaucgccaucuucuucgugaugcuggccaugcagcugaccuacuuccagagagcccagagccugcacggccagagaugccuguacgccgugcugcugaucgacagcugcauccugcuguggcuguacagcagcugcagccagagccagugcuga

SEQ ID NO: 3393 - RNA, 2877 nt, Artificial Sequence
  derived and/or modified sequence opt5 from SART-2__Homo_sapiens__AAF00087
augagaacccacacacggggcgcccccagcguguucuuuaucuaccugcucugcuucgucuccgcuuauauuacggacgagaacccugaaguuaugaucccguuuaccaaugccaacuacgauucucaucccaugcuguauuucagccgcgcggagguggcugaacuucagcugagagccgccuccucucacgagcauauugcugcccggcucacagaagcugugcacaccaugcugagcuccccucuugaguaccugcccccuugggaccccaaggauuauucugcccgcuggaaugagaucuuugggaacaaucucggagcgcuggccauguucuguguccuguacccugaaaacauugaggcuagagacauggccaaagauuauauggaacggauggcugcccaaccgagcuggcucgugaaggacgcgcccugggaugagguuccucuggcccauucccuugugggcuuugcuacagccuacgacuuccuguacaauuaucucagcaaaacccagcaggagaaguuucuggaagucaucgcuaacgccucuggguacauguaugagacauccuaccgcagaggauggggcuuccaguaucuucacaaucaccaacccaccaacugcauggcccugcucacggggagccuggugcugaugaaucagggauaccuccaggaggcuuaucuguggaccaaacagguucuuacaaucauggaaaagucucuggugcuccugcgggaagucaccgauggcucccuuuacgagggcguggcguacgggagcuauacaacccgcucucuguuucaauacauguuccucgugcagagacauuuuaacauuaaucacuucggacauccuuggcugaagcagcacuucgccuuuauguaucggacgauccugcccggcuuccagcgcacagucgcuauugccgacuccaacuacaauugguuuuaugggccggagagccaacucguuuuccuggauaaauuugugaugagaaacggauccggcaacuggcuugccgaccagauccggcgcaauagaguggucgaagggccuggaacccccucuaagggccagcggugguguacacugcacaccgaguuccucugguacgauggcagccugaaauccgugccuccucccgacuuugggacccccacacuucauuauuucgaagacuggggaguugugacguacggcagcgcucugccggccgagauuaacagaucuuuucucuccuucaagagcgggaaacugggaggccgcgcgaucuacgauauuguccaccggaauaaguauaaggacuggaucaaaggguggagaaacuuuaaugcuggacaugaacaccccgaucaaaacucuuucaccuuugccccuaauggcgugcccuucaucacagaggcccuguacggcccuaaguauaccuucuuuaacaauguucucauguucagccccgcuguguccaaaucuugcuuuagcccgugggucggacaggugacagaggacuguuccagcaaguggucuaaauacaagcaugaucuggccgcuuccugccaggggcgcgucguggccgcggaagagaaaaacggcguuguguucauuagaggggaaggagucggcgccuauaauccucagcuuaaccugaagaaugugcaacggaaccucauccugcugcacccccagcuucuccugcugguugaccagauucaccucggggaggaaagcccucuggagaccgcugccagcuuuuuccauaauguggauguccccuuugaggaaacggugguggacggcguucacggagcuuucauccgccagcgggauggccuuuacaagauguauuggauggacgauacaggguacuccgagaaagccaccuuugcgagcgucaccuacccuagaggauaucccuacaacggcacaaacuaugugaaugugaccaugcaucugcgcuccccgauuacacgggccgcuuaccucuucaucgggccuucuaucgacguccaaucuuuuacggugcacggagacucccagcagcuggauguuuucauugccaccucuaagcacgcuuaugccacauaccuguggaccggcgaagccacagggcagagcgcuuuugcgcaagugaucgccgacagacauaaaauucuuuucgaucgcaacuccgcuaucaagagcucuauuguccccgaggugaaagacuaugccgccaucguugagcagaaucuccagcacuucaagcccguguuucagcugcuggaaaagcaaauccucucccgggucagaaacaccgcuagcuuccggaaaacggccgagcgccugcuuagauuuucugauaagcggcagaccgaagaggcgauugacagaaucuucgcuauuucccagcaacagcagcagcaaagcaaaucuaagaaaaaucgccgggccggcaagagauacaaguuuguggaugccguuccugacaucuucgcucagauugaagugaacgagaaaaagauccgccagaaagcccagauucuggcgcaaaaggagcucccgaucgaugaagacgaggaaaugaaagaucugcuggacuuugcugaugucacauacgagaagcauaagaauggaggccuuaucaaagggagauucggacaggcccggauggugaccacaacccacagccgcgcccccucccucagcgcuucuuauacgagacuguuucugauucucaacaucgccauuuucuuugugaugcuggcuaugcagcuuacauacuuccagcgggcccaaucccugcauggccagcgcugucucuaugcgguccugcugaucgacagcugcauucuucucuggcuguacuccucuuguagccagucccaaugcuga

SEQ ID NO: 3394 - protein, 963 aa, Artificial Sequence
  SART-3__Homo_sapiens__Q15020
MATAAETSASEPEAESKAGPKADGEEDEVKAARTRRKVLSRAVAAATYKTMGPAWDQQEEGVSESDGDEYAMASSAESSPGEYEWEYDEEEEKNQLEIERLEEQLSINVYDYNCHVDLIRLLRLEGELTKVRMARQKMSEIFPLTEELWLEWLHDEISMAQDGLDREHVYDLFEKAVKDYICPNIWLEYGQYSVGGIGQKGGLEKVRSVFERALSSVGLHMTKGLALWEAYREFESAIVEAARLEKVHSLFRRQLAIPLYDMEATFAEYEEWSEDPIPESVIQNYNKALQQLEKYKPYEEALLQAEAPRLAEYQAYIDFEMKIGDPARIQLIFERALVENCLVPDLWIRYSQYLDRQLKVKDLVLSVHNRAIRNCPWTVALWSRYLLAMERHGVDHQVISVTFEKALNAGFIQATDYVEIWQAYLDYLRRRVDFKQDSSKELEELRAAFTRALEYLKQEVEERFNESGDPSCVIMQNWARIEARLCNNMQKARELWDSIMTRGNAKYANMWLEYYNLERAHGDTQHCRKALHRAVQCTSDYPEHVCEVLLTMERTEGSLEDWDIAVQKTETRLARVNEQRMKAAEKEAALVQQEEEKAEQRKRARAEKKALKKKKKIRGPEKRGADEDDEKEWGDDEEEQPSKRRRVENSIPAAGETQNVEVAAGPAGKCAAVDVEPPSKQKEKAASLKRDMPKVLHDSSKDSITVFVSNLPYSMQEPDTKLRPLFEACGEVVQIRPIFSNRGDFRGYCYVEFKEEKSALQALEMDRKSVEGRPMFVSPCVDKSKNPDFKVFRYSTSLEKHKLFISGLPFSCTKEELEEICKAHGTVKDLRLVTNRAGKPKGLAYVEYENESQASQAVMKMDGMTIKENIIKVAISNPPQRKVPEKPETRKAPGGPMLLPQTYGARGKGRTQLSLLPRALQRPSAAAPQAENGPAAAPAVAAPAATEAPKMSNADFAKLFLRK

SEQ ID NO: 3395 - RNA, 2892 nt, Artificial Sequence
  SART-3__Homo_sapiens__AAH93784
auggcgacugcggccgaaaccucggcuucagaacccgaggcugaguccaaggcugggcccaaggcugacggagaggaggaugagguuaaggcggcuaggacaaggagaaagguguuaucgcgggcuguggccgcugcgacauacaagaccauggggccagcgugggaucagcaggaggaaggcgugagcgagagcgauggggaugaguacgccauggcuuccuccgcggagagcucccccggggaguacgagugggaauaugacgaagaggaggagaaaaaccagcuggagauugagagacuggaggagcaguugucuaucaacgucuaugacuacaacugccauguggacuugaucagacugcucaggcuggaaggggagcuuaccaaggugaggauggcccgccagaagaugagugaaaucuuucccuugacugaagagcucuggcuggaguggcugcaugacgagaucagcauggcccaggauggccuggacagagagcacguguaugaccucuuugagaaagccgugaaggauuacauuuguccuaacauuuggcuagaguauggccaguacucaguuggugggauuggucagaaagguggccuugagaaaguucgcuccguguuugaaagggcucucucgucuguugguuuacauaugaccaaaggacucgcccucugggaggcuuaccgagaguuugaaagugcgauuguggaagcugcucggcuugagaaaguccacagucuuuuccggcgacaguuggcgaucccacucuaugauauggaggccacauuugcagaguaugaagaauggucagaagacccaauaccagagucaguaauucagaacuauaacaaagcacuacagcagcuggagaaauauaaacccuaugaagaagcacuguugcaggcagaggcaccaaggcuggcagaauaucaagcauauaucgauuuugagaugaaaauuggcgauccugcucgcauucaguugaucuuugagcgcgcccuggucgagaacugccuugucccagacuuauggauccguuacagucaguaccuagaucgacaacugaaaguaaaggauuugguuuuaucuguacauaaccgcgcuauuagaaacugccccuggacaguugccuuauggagucgguaccucuuggccauggagagacauggaguugaucaucaaguaauuucuguaaccuucgagaaagcuuugaaugccggcuucauccaggccacugauuauguggagauuuggcaggcauaccuugauuaccugaggagaaggguugauuucaaacaagacuccaguaaagagcuggaggaguugagggccgccuuuacucgugccuuggaguaucugaagcaggagguggaagagcguuucaaugagaguggugauccaagcugcgugauuaugcagaacugggcuaggauugaggcucgacugugcaauaacaugcagaaagcucgggaacucugggauagcaucaugaccagaggaaaugccaaguacgccaacauguggcuagaguauuacaaccuggaaagagcucauggugacacccagcacugccggaaggcucugcaccgggccguccagugcaccagugacuacccagagcacgucugcgaaguguuacucaccauggagaggacagaagguucuuuagaagauugggauauagcuguucagaaaacugaaacccgauuagcucgugucaaugagcagagaaugaaggcugcagagaaggaagcagcccuugugcagcaagaagaagaaaaggcugaacaacggaaaagagcucgggcugagaagaaagcguuaaaaaagaagaaaaagaucagaggcccagagaagcgcggagcagaugaggacgaugagaaagaguggggcgaugaugaagaagagcagccuuccaaacgcagaagggucgagaacagcaucccugcagcuggagaaacacaaaauguagaaguagcagcagggcccgcugggaaaugugcugccguagauguggagcccccuucgaagcagaaggagaaggcagccucccugaagagggacaugcccaaggugcugcacgacagcagcaaggacagcaucaccgucuuugucagcaaccugcccuacagcaugcaggagccggacacgaagcucaggccacucuucgaggccuguggggaggugguccagauccgacccaucuucagcaaccguggggauuuccgagguuacugcuacguggaguuuaaagaagagaaaucagcccuucaggcacuggagauggaccggaaaaguguagaagggaggccaauguuuguuucccccuguguggauaagagcaaaaaccccgauuuuaagguguucagguacagcacuucccuagagaaacacaagcuguucaucucaggccugccuuucuccuguacuaaagaggaacuagaagaaaucuguaaggcucauggcaccgugaaggaccucaggcuggucaccaaccgggcuggcaaaccaaagggccuggccuacguggaguaugaaaaugaaucccaggcgucgcaggcugugaugaagauggacggcaugacuaucaaagagaacaucaucaaaguggcaaucagcaacccuccucagaggaaaguuccagagaagccagagaccaggaaggcaccagguggccccaugcuuuugccgcagacauacggagcgagggggaagggaaggacgcagcugucucuacugccucgugcccugcagcgcccaagugcugcagcuccucaggcugagaacggcccugccgcggcuccugcaguugccgccccagcagccaccgaggcacccaagauguccaaugccgauuuugccaagcuguuucugagaaaguga

SEQ ID NO: 3396 - RNA, 2892 nt, Artificial Sequence
  derived and/or modified sequence opt1 from SART-3__Homo_sapiens__AAH93784
auggccaccgccgcggagaccagcgccuccgagcccgaggccgagagcaaggccggcccgaaggccgacggggaggaggacgaggugaaggcggcccgcacgcggcgcaagguccugucccgggccguggccgcggccaccuacaagaccaugggccccgccugggaccagcaggaggagggggugagcgaguccgacggcgacgaguacgccauggccagcuccgcggagagcucccccggggaguacgagugggaguacgacgaggaggaggagaagaaccagcucgagaucgagcgccuggaggagcagcugagcaucaacgucuacgacuacaacugccacguggaccucauccggcugcugcgccucgagggcgagcugaccaaggugcggauggcccgccagaagauguccgagaucuucccccugacggaggagcucuggcuggaguggcugcacgacgagaucagcauggcccaggacggccucgaccgggagcacgucuacgaccuguucgagaaggccgugaaggacuacaucugcccgaacaucuggcuggaguacgggcaguacuccgugggcgggaucggccagaagggcgggcucgagaagguccgcagcguguucgagcgggcccuguccagcgugggccugcacaugaccaaggggcucgcgcugugggaggccuaccgcgaguucgaguccgccaucgucgaggccgcccggcuggagaaggugcacagccucuuccgccggcagcuggcgaucccccuguacgacauggaggccaccuucgccgaguacgaggagugguccgaggaccccauccccgagagcgugauccagaacuacaacaaggcccuccagcagcuggagaaguacaagccguacgaggaggcccugcuccaggcggaggcgccccgccuggccgaguaccaggccuacaucgacuucgagaugaagaucggcgaccccgcccggauccagcugaucuucgagcgcgcccucgucgagaacugccuggugcccgaccuguggauccgguacagccaguaccucgaccgccagcugaaggugaaggaccugguccucuccgugcacaaccgggccauccgcaacugcccguggaccguggcccuguggagccgcuaccugcucgccauggagcggcacggggucgaccaccaggugaucuccgugacguucgagaaggcgcugaacgccggcuucauccaggccaccgacuacgucgagaucuggcaggccuaccuggacuaccuccgccggcgcguggacuucaagcaggacagcuccaaggagcuggaggagcugcgggccgcguucacccgcgcccucgaguaccugaagcaggaggucgaggagcgguucaacgagagcggcgaccccuccugcgugaucaugcagaacugggcccgcaucgaggcccggcugugcaacaacaugcagaaggcccgcgagcucugggacagcaucaugacccgggggaacgcgaaguacgccaacauguggcuggaguacuacaaccuggagcgcgcccacggcgacacgcagcacugccggaaggcccugcaccgcgcggugcagugcaccuccgacuaccccgagcacgucugcgaggugcuccugaccauggagcggaccgaggggagccuggaggacugggacaucgccgugcagaagacggagacccgccucgcccgggucaacgagcagcgcaugaaggccgccgagaaggaggcggcccuggugcagcaggaggaggagaaggccgagcagcggaagcgcgcccgcgccgagaagaaggcgcugaagaagaagaagaagauccggggccccgagaagcgcggggccgacgaggacgacgagaaggaguggggcgacgacgaggaggagcagccguccaagcggcgccggguggagaacagcauccccgccgccggcgagacccagaacgucgagguggccgcggggcccgccggcaagugcgccgccguggacgucgagcccccguccaagcagaaggagaaggcggccagccucaagcgcgacaugcccaaggugcugcacgacuccagcaaggacuccaucaccguguucgucagcaaccugcccuacuccaugcaggagcccgacacgaagcuccggccgcuguucgaggccugcggggagguggugcagauccgccccaucuucagcaaccggggcgacuuccgcggguacugcuacgucgaguucaaggaggagaaguccgcccugcaggcccucgagauggaccgcaagagcguggagggccggcccauguucgugagccccugcgucgacaaguccaagaacccggacuucaagguguuccgguacagcaccucccuggagaagcacaagcuguucaucagcggccuccccuucuccugcaccaaggaggagcuggaggagaucugcaaggcgcacgggaccgugaaggaccugcgccucgucacgaaccgggccggcaagcccaaggggcuggccuacguggaguacgagaacgagagccaggccucccaggccgugaugaagauggacggcaugaccaucaaggagaacaucaucaaggucgcgaucagcaacccgccccagcgcaaggugcccgagaagcccgagacccggaaggcccccgggggcccgaugcugcucccccagaccuacggcgcccgcgggaagggccggacgcagcugucccugcucccccgcgcccugcagcggccgagcgccgcggcgccccaggccgagaacgggcccgccgccgcccccgccguggccgccccggcggccaccgaggcccccaagauguccaacgccgacuucgccaagcuguuccuccgcaaguga

SEQ ID NO: 3397 - RNA, 2892 nt, Artificial Sequence
  derived and/or modified sequence opt2 from SART-3__Homo_sapiens__AAH93784
auggccaccgccgccgagaccuccgccuccgagcccgaggccgaguccaaggccggccccaaggccgacggcgaggaggacgaggucaaggccgcccgcacccgccgcaagguccucucccgcgccgucgccgccgccaccuacaagaccaugggccccgccugggaccagcaggaggagggcgucuccgaguccgacggcgacgaguacgccauggccuccuccgccgaguccucccccggcgaguacgagugggaguacgacgaggaggaggagaagaaccagcucgagaucgagcgccucgaggagcagcucuccaucaacgucuacgacuacaacugccacgucgaccucauccgccuccuccgccucgagggcgagcucaccaagguccgcauggcccgccagaagauguccgagaucuucccccucaccgaggagcucuggcucgaguggcuccacgacgagaucuccauggcccaggacggccucgaccgcgagcacgucuacgaccucuucgagaaggccgucaaggacuacaucugccccaacaucuggcucgaguacggccaguacuccgucggcggcaucggccagaagggcggccucgagaagguccgcuccgucuucgagcgcgcccucuccuccgucggccuccacaugaccaagggccucgcccucugggaggccuaccgcgaguucgaguccgccaucgucgaggccgcccgccucgagaagguccacucccucuuccgccgccagcucgccaucccccucuacgacauggaggccaccuucgccgaguacgaggagugguccgaggaccccauccccgaguccgucauccagaacuacaacaaggcccuccagcagcucgagaaguacaagcccuacgaggaggcccuccuccaggccgaggccccccgccucgccgaguaccaggccuacaucgacuucgagaugaagaucggcgaccccgcccgcauccagcucaucuucgagcgcgcccucgucgagaacugccucguccccgaccucuggauccgcuacucccaguaccucgaccgccagcucaaggucaaggaccucguccucuccguccacaaccgcgccauccgcaacugccccuggaccgucgcccucuggucccgcuaccuccucgccauggagcgccacggcgucgaccaccaggucaucuccgucaccuucgagaaggcccucaacgccggcuucauccaggccaccgacuacgucgagaucuggcaggccuaccucgacuaccuccgccgccgcgucgacuucaagcaggacuccuccaaggagcucgaggagcuccgcgccgccuucacccgcgcccucgaguaccucaagcaggaggucgaggagcgcuucaacgaguccggcgaccccuccugcgucaucaugcagaacugggcccgcaucgaggcccgccucugcaacaacaugcagaaggcccgcgagcucugggacuccaucaugacccgcggcaacgccaaguacgccaacauguggcucgaguacuacaaccucgagcgcgcccacggcgacacccagcacugccgcaaggcccuccaccgcgccguccagugcaccuccgacuaccccgagcacgucugcgagguccuccucaccauggagcgcaccgagggcucccucgaggacugggacaucgccguccagaagaccgagacccgccucgcccgcgucaacgagcagcgcaugaaggccgccgagaaggaggccgcccucguccagcaggaggaggagaaggccgagcagcgcaagcgcgcccgcgccgagaagaaggcccucaagaagaagaagaagauccgcggccccgagaagcgcggcgccgacgaggacgacgagaaggaguggggcgacgacgaggaggagcagcccuccaagcgccgccgcgucgagaacuccauccccgccgccggcgagacccagaacgucgaggucgccgccggccccgccggcaagugcgccgccgucgacgucgagccccccuccaagcagaaggagaaggccgccucccucaagcgcgacaugcccaagguccuccacgacuccuccaaggacuccaucaccgucuucgucuccaaccuccccuacuccaugcaggagcccgacaccaagcuccgcccccucuucgaggccugcggcgaggucguccagauccgccccaucuucuccaaccgcggcgacuuccgcggcuacugcuacgucgaguucaaggaggagaaguccgcccuccaggcccucgagauggaccgcaaguccgucgagggccgccccauguucgucucccccugcgucgacaaguccaagaaccccgacuucaaggucuuccgcuacuccaccucccucgagaagcacaagcucuucaucuccggccuccccuucuccugcaccaaggaggagcucgaggagaucugcaaggcccacggcaccgucaaggaccuccgccucgucaccaaccgcgccggcaagcccaagggccucgccuacgucgaguacgagaacgagucccaggccucccaggccgucaugaagauggacggcaugaccaucaaggagaacaucaucaaggucgccaucuccaaccccccccagcgcaagguccccgagaagcccgagacccgcaaggcccccggcggccccaugcuccucccccagaccuacggcgcccgcggcaagggccgcacccagcucucccuccucccccgcgcccuccagcgccccuccgccgccgccccccaggccgagaacggccccgccgccgcccccgccgucgccgcccccgccgccaccgaggcccccaagauguccaacgccgacuucgccaagcucuuccuccgcaaguga

SEQ ID NO: 3398 - RNA, 2892 nt, Artificial Sequence
  derived and/or modified sequence opt3 from SART-3__Homo_sapiens__AAH93784
auggccaccgcugcagagacaagcgccuccgaacccgaggcggaaucuaaggcuggcccuaaagccgacggggaggaagaugaggugaaggcagccagaacuaggcggaaaguccugucacgcgcuguugcagccgcuacguacaagaccaugggaccagccugggaccagcaagaggaaggugugagugagagcgauggcgacgaauaugcgauggcauccucugccgagucgucaccgggggaguacgaaugggaguaugaugaagaggaagagaaaaaccagcucgagaucgaacgacuugaggaacagcugagcauuaauguauacgacuauaacugccacguggauuugauacguuuacugagacuagagggagaacucacaaaggucaggauggcucggcagaagaugagugagaucuucccccugacugaggaacuuuggcuggagugguugcaugacgaaauuuccauggcccaagauggccucgaccgcgagcacguguacgaucuguuugaaaaagcaguuaaggacuauaucuguccuaauauuuggcuggaguacggucaguacucugucgggggaaucggccagaaaggcgggcucgagaaggugagaagcguguucgaaagggcuuuauccucaguaggacugcauaugaccaaaggucuugccuugugggaggcguaucgggaauuugagagugccauaguugaggcagcucgccuggaaaaggugcacagccuauuccgaagacagcucgccaucccacuguacgauauggaggcuacauuugccgaauaugaggaauggucugaggaccccauuccugaguccgucauccaaaacuacaauaaggcacuucagcagcuggaaaaauauaagccauacgaggaagccuugcuccaggcugaggcgcccaggcuggcagaauaucaagccuacauugacuucgagaugaaaaucggcgauccugcucggauacaguuaauuuuugagcgugcccugguggaaaacugccucgugccagaccuuuggauccgcuacucacaguaucuggauagacaauugaaggucaaagaccuaguucugagcgugcauaauagggcaauucggaacuguccguggaccguagcccucuggagucgauaccugcuugcuauggagcgccacgggguggaucaccaggucaucucugugacuuucgaaaaggcccugaaugcaggauuuauccaggcgacagacuauguugagauuuggcaggcuuacuuggauuaucucagaaggcggguggacuucaaacaagauuccagcaaggaacuggaggaguuacgcgccgcauuuaccagagcccuggaauaccuaaagcaggaggucgaagagagguucaacgagucgggcgaccccucuugcgugauaaugcagaauugggcucguaucgaagcccggcucuguaacaauaugcagaaagcacgagagcugugggauuccauuaugacgagagguaacgcuaaguaugccaauauguggcuugaauacuacaacuuggagagggcgcauggggacacucaacacugccgcaaagcccugcaucgggcuguacaguguaccucagacuauccugaacacguuugcgaggugcuccugacaauggagagaacugaaggaagucuugaggauugggacaucgcaguccagaagaccgaaacaaggcuggcccgcgugaacgagcagcgaaugaaagcugccgaaaaggaggcagcguugguccaacaggaggaagagaaggccgaacagcggaaacgugcuagagccgagaagaaagcacucaagaaaaagaagaaaauaaggggcccagaaaagcgcggcgcugaugaggacgaugagaaagaauggggagacgaugaggaagaacagcccagcaagcggagaaggguggaaaauuccauuccugccgcaggggaaacccaaaacguugagguggccgcugguccagcgggcaaaugugccgcaguagacgucgaacccccgucuaagcagaaggagaaagcugccagccugaagcgagauaugccuaaaguguuacacgacucaaguaaggauuccaucacgguuuuugugagcaaucugcccuacucuaugcaggaaccagacacuaaacuacgcccucucuucgaggccugcggggaggucgugcaaauccggcccauuuucucaaacagaggagauuuuaggggcuauuguuacguagaguucaaggaggagaaaagugcucugcaggcacuugagauggaccguaagagcguggaaggucgcccaauguuuguuucccccugcgucgacaagucuaaaaauccugauuucaagguguuucgguauucgaccagcuuggagaaacauaagcuguucaucuccgggcucccauuuucaugcacaaaagaggaacuggaggaaauuuguaaggcccacggcacugugaaggacuuaagacuggucacaaacagggcgggaaaaccgaagggccuugcuuacguugaguaugaaaaugagagucaggccucucaggcagugaugaaaauggaugggaugaccauaaaggagaacaucauuaaaguggccaucagcaaucccccucaacgaaagguaccagaaaagcccgagacgcggaaagcuccuggagguccaauguugcucccccagaccuacggcgcacgcgggaagggaagaacacagcugucccuacugccgagggcccuccagcggccuucagcggcugccccacaagcagaaaacggccccgccgcugccccugcagucgcugcccccgcggccacugaggcaccaaaaaugagcaaugcugacuucgccaagcuguuucuucgaaaauga

SEQ ID NO: 3399 - RNA, 2892 nt, Artificial Sequence
  derived and/or modified sequence opt4 from SART-3__Homo_sapiens__AAH93784
auggccaccgccgccgagaccagcgccagcgagcccgaggccgagagcaaggccggccccaaggccgacggcgaggaggacgaggugaaggccgccagaaccagaagaaaggugcugagcagagccguggccgccgccaccuacaagaccaugggccccgccugggaccagcaggaggagggcgugagcgagagcgacggcgacgaguacgccauggccagcagcgccgagagcagccccggcgaguacgagugggaguacgacgaggaggaggagaagaaccagcuggagaucgagagacuggaggagcagcugagcaucaacguguacgacuacaacugccacguggaccugaucagacugcugagacuggagggcgagcugaccaaggugagaauggccagacagaagaugagcgagaucuucccccugaccgaggagcuguggcuggaguggcugcacgacgagaucagcauggcccaggacggccuggacagagagcacguguacgaccuguucgagaaggccgugaaggacuacaucugccccaacaucuggcuggaguacggccaguacagcgugggcggcaucggccagaagggcggccuggagaaggugagaagcguguucgagagagcccugagcagcgugggccugcacaugaccaagggccuggcccugugggaggccuacagagaguucgagagcgccaucguggaggccgccagacuggagaaggugcacagccuguucagaagacagcuggccaucccccuguacgacauggaggccaccuucgccgaguacgaggaguggagcgaggaccccauccccgagagcgugauccagaacuacaacaaggcccugcagcagcuggagaaguacaagcccuacgaggaggcccugcugcaggccgaggcccccagacuggccgaguaccaggccuacaucgacuucgagaugaagaucggcgaccccgccagaauccagcugaucuucgagagagcccugguggagaacugccuggugcccgaccuguggaucagauacagccaguaccuggacagacagcugaaggugaaggaccuggugcugagcgugcacaacagagccaucagaaacugccccuggaccguggcccuguggagcagauaccugcuggccauggagagacacggcguggaccaccaggugaucagcgugaccuucgagaaggcccugaacgccggcuucauccaggccaccgacuacguggagaucuggcaggccuaccuggacuaccugagaagaagaguggacuucaagcaggacagcagcaaggagcuggaggagcugagagccgccuucaccagagcccuggaguaccugaagcaggagguggaggagagauucaacgagagcggcgaccccagcugcgugaucaugcagaacugggccagaaucgaggccagacugugcaacaacaugcagaaggccagagagcugugggacagcaucaugaccagaggcaacgccaaguacgccaacauguggcuggaguacuacaaccuggagagagcccacggcgacacccagcacugcagaaaggcccugcacagagccgugcagugcaccagcgacuaccccgagcacgugugcgaggugcugcugaccauggagagaaccgagggcagccuggaggacugggacaucgccgugcagaagaccgagaccagacuggccagagugaacgagcagagaaugaaggccgccgagaaggaggccgcccuggugcagcaggaggaggagaaggccgagcagagaaagagagccagagccgagaagaaggcccugaagaagaagaagaagaucagaggccccgagaagagaggcgccgacgaggacgacgagaaggaguggggcgacgacgaggaggagcagcccagcaagagaagaagaguggagaacagcauccccgccgccggcgagacccagaacguggagguggccgccggccccgccggcaagugcgccgccguggacguggagccccccagcaagcagaaggagaaggccgccagccugaagagagacaugcccaaggugcugcacgacagcagcaaggacagcaucaccguguucgugagcaaccugcccuacagcaugcaggagcccgacaccaagcugagaccccuguucgaggccugcggcgagguggugcagaucagacccaucuucagcaacagaggcgacuucagaggcuacugcuacguggaguucaaggaggagaagagcgcccugcaggcccuggagauggacagaaagagcguggagggcagacccauguucgugagccccugcguggacaagagcaagaaccccgacuucaagguguucagauacagcaccagccuggagaagcacaagcuguucaucagcggccugcccuucagcugcaccaaggaggagcuggaggagaucugcaaggcccacggcaccgugaaggaccugagacuggugaccaacagagccggcaagcccaagggccuggccuacguggaguacgagaacgagagccaggccagccaggccgugaugaagauggacggcaugaccaucaaggagaacaucaucaagguggccaucagcaaccccccccagagaaaggugcccgagaagcccgagaccagaaaggcccccggcggccccaugcugcugccccagaccuacggcgccagaggcaagggcagaacccagcugagccugcugcccagagcccugcagagacccagcgccgccgccccccaggccgagaacggccccgccgccgcccccgccguggccgcccccgccgccaccgaggcccccaagaugagcaacgccgacuucgccaagcuguuccugagaaaguga

SEQ ID NO: 3400 - RNA, 2892 nt, Artificial Sequence
  derived and/or modified sequence opt5 from SART-3__Homo_sapiens__AAH93784
auggccaccgcugccgagacaagcgcguccgaacccgaggcugaaucuaaggccggcccuaaagccgacggggaggaagaugaggugaaggcugccagaacgcggcgcaaaguccugagcagagcuguugccgcggccaccuacaagacaaugggaccggcuugggaccagcaagaggaaggcguguccgagucugauggggacgaauaugccauggcuagcuccgccgagucuagccccggagaguacgaaugggaguaugaugaagaggaagagaaaaaccagcucgagaucgaacggcuggaggaacagcuuuccauuaauguguacgacuauaacugccacgucgaucugauccgccuccugagacuugagggcgaacugaccaaggugcggauggcgcgccagaagaugagcgagauuuucccucucacagaggaacuguggcuggaguggcuccaugacgaaaucucuauggcccaagaugggcuggacagagagcacguuuacgaucuuuuugaaaaagcugugaaggacuauauuugucccaauaucuggcuggaguacggacaguacuccgucggcggcaucgggcagaaaggaggccucgagaaggugcggagcguuuucgaacgcgcccugucuuccguggggcuucauaugaccaaaggacuggcucucugggaggccuauagagaauuugagagcgccauugucgaggcugcgcggcuggaaaaggugcacucucuguuccgcagacagcucgccaucccucuguacgauauggaggcuacauuugccgaauaugaggaaugguccgaggaccccauuccugagagcgugauccaaaacuacaauaaggcccuucagcagcuggaaaaauauaagccguacgaggaagcucuccugcaggccgaggcgccccggcuugcugaauaucaagccuacauugacuucgagaugaaaaucggcgauccugcccgcauucagcugaucuuugagagagcucucgucgaaaacugccugguucccgaccuguggauccgguacucccaguaucucgauagacaacugaaggugaaagaccuugugcugucuguccauaaucgcgccauucggaacuguccuuggaccguggcucucuggagcagauaccugcuugccauggagcgccacgggguugaucaccaggugaucuccgucacguucgaaaaggcgcugaaugccggauuuauucaggcuaccgacuauguggagaucuggcaggccuaccucgauuaucugcggagacgcguugacuucaaacaagauagcucuaaggaacuggaggagcuccgggcugccuuuacaagagcgcuggaauaccuuaagcaggagguggaagaacgcuucaacgaguccggcgaccccagcugcgucauuaugcagaauugggcccggaucgaagcuagacuguguaacaauaugcagaaagcccgcgagcucugggauucuaucaugacccggggcaacgcuaaguaugccaauauguggcuggaauacuacaaccuggagagagcccauggggacacacaacacugccggaaagcccuucaucgcgcggugcaguguaccagcgacuauccggaacacgucugcgaggugcuccugacgauggagagaacagaaggaucccuggaggauugggacauugccguucagaagaccgaaacacggcucgcuagagugaacgagcagcgcaugaaagccgccgaaaaggaggcugcccugguccaacaggaggaagagaaggcggaacagcggaaaagagcucgcgccgagaagaaagcccuuaagaaaaagaagaaaaucagaggcccugaaaagcgcggggcugaugaggacgaugagaaagaauggggagacgaugaggaggagcagcccucuaagcggagacggguggagaauagcauuccugccgcgggcgaaacccaaaacguugagguggcugccgggcccgccggaaaaugugcugccgucgacguggaacccccuuccaagcagaaggagaaagcugccagccugaagcgcgauaugccgaaagugcuccacgacucuuccaaggauagcaucaccguuuuugucucuaaucugcccuacuccaugcaggaaccugacacaaaacugagaccccuuuucgaggcgugcggcgagguggugcaaauucggccuaucuucagcaaccgcggcgauuuuagaggguauuguuacgucgaguucaaggaagaaaaauccgcccuccaggcucuggagauggaccggaagucuguggaaggacgccccauguuuguuagcccgugcguggacaaguccaaaaauccugauuucaaggucuuuagauauucuacgagccuggagaaacauaaacucuucaucuccggccugcccuuuagcugcaccaaggaggaacuugaggaaauuuguaaggcccacgggacagugaaggaccugcggcucguuaccaacagagcuggaaaaccuaagggccuggccuacguggaguaugaaaaugagucucaggccucccaggcugucaugaaaauggaugggaugacaaucaaggagaacauuaucaaaguggcgauuagcaaucccccucaacgcaagguucccgaaaagccggagacccggaaagccccuggcggacccaugcugcuuccccagacguacggcgcuagagggaagggacgcacacagcucucucugcugccucgggcccuccagagaccguccgccgcugcuccccaagcggaaaacggcccugcugccgcccccgcuguggccgcgccugcugccaccgaggcccccaaaaugagcaaugcugacuucgccaagcuguuucuucgcaaauga

SEQ ID NO: 3401 - protein, 760 aa, Artificial Sequence
  SEPR__Homo_sapiens__Q12884
MKTWVKIVFGVATSAVLALLVMCIVLRPSRVHNSEENTMRALTLKDILNGTFSYKTFFPNWISGQEYLHQSADNNIVLYNIETGQSYTILSNRTMKSVNASNYGLSPDRQFVYLESDYSKLWRYSYTATYYIYDLSNGEFVRGNELPRPIQYLCWSPVGSKLAYVYQNNIYLKQRPGDPPFQITFNGRENKIFNGIPDWVYEEEMLATKYALWWSPNGKFLAYAEFNDTDIPVIAYSYYGDEQYPRTINIPYPKAGAKNPVVRIFIIDTTYPAYVGPQEVPVPAMIASSDYYFSWLTWVTDERVCLQWLKRVQNVSVLSICDFREDWQTWDCPKTQEHIEESRTGWAGGFFVSTPVFSYDAISYYKIFSDKDGYKHIHYIKDTVENAIQITSGKWEAINIFRVTQDSLFYSSNEFEEYPGRRNIYRISIGSYPPSKKCVTCHLRKERCQYYTASFSDYAKYYALVCYGPGIPISTLHDGRTDQEIKILEENKELENALKNIQLPKEEIKKLEVDEITLWYKMILPPQFDRSKKYPLLIQVYGGPCSQSVRSVFAVNWISYLASKEGMVIALVDGRGTAFQGDKLLYAVYRKLGVYEVEDQITAVRKFIEMGFIDEKRIAIWGWSYGGYVSSLALASGTGLFKCGIAVAPVSSWEYYASVYTERFMGLPTKDDNLEHYKNSTVMARAEYFRNVDYLLIHGTADDNVHFQNSAQIAKALVNAQVDFQAMWYSDQNHGLSGLSTNHLYTHMTHFLKQCFSLSD

SEQ ID NO: 3402 - RNA, 2283 nt, Artificial Sequence
  SEPR__Homo_sapiens__AAC51668
augaagacuuggguaaaaaucguauuuggaguugccaccucugcugugcuugccuuauuggugaugugcauugucuuacgcccuucaagaguucauaacucugaagaaaauacaaugagagcacucacacugaaggauauuuuaaauggaacauuuucuuauaaaacauuuuuuccaaacuggauuucaggacaagaauaucuucaucaaucugcagauaacaauauaguacuuuauaauauugaaacagggcaaucauauaccauuuugaguaauagaaccaugaaaagugugaaugcuucaaauuacggcuuaucaccugaucggcaauuuguauaucuagaaagugauuauucaaagcuuuggagauacucuuacacagcaacauauuacaucuaugaccuuagcaauggagaauuuguaagaggaaaugagcuuccucguccaauucaguauuuaugcuggucgccuguugggaguaaauuagcauaugucuaucaaaacaauaucuauuugaaacaaagaccaggagauccaccuuuucaaauaacauuuaauggaagagaaaauaaaauauuuaauggaaucccagacuggguuuaugaagaggaaaugcuugcuacaaaauaugcucucugguggucuccuaauggaaaauuuuuggcauaugcggaauuuaaugauacggauauaccaguuauugccuauuccuauuauggcgaugaacaauauccuagaacaauaaauauuccauacccaaaggcuggagcuaagaaucccguuguucggauauuuauuaucgauaccacuuacccugcguauguagguccccaggaagugccuguuccagcaaugauagccucaagugauuauuauuucaguuggcucacguggguuacugaugaacgaguauguuugcaguggcuaaaaagaguccagaauguuucgguccugucuauaugugacuucagggaagacuggcagacaugggauuguccaaagacccaggagcauauagaagaaagcagaacuggaugggcugguggauucuuuguuucaacaccaguuuucagcuaugaugccauuucguacuacaaaauauuuagugacaaggauggcuacaaacauauucacuauaucaaagacacuguggaaaaugcuauucaaauuacaaguggcaagugggaggccauaaauauauucagaguaacacaggauucacuguuuuauucuagcaaugaauuugaagaauacccuggaagaagaaacaucuacagaauuagcauuggaagcuauccuccaagcaagaaguguguuacuugccaucuaaggaaagaaaggugccaauauuacacagcaaguuucagcgacuacgccaaguacuaugcacuugucugcuacggcccaggcauccccauuuccacccuucaugauggacgcacugaucaagaaauuaaaauccuggaagaaaacaaggaauuggaaaaugcuuugaaaaauauccagcugccuaaagaggaaauuaagaaacuugaaguagaugaaauuacuuuaugguacaagaugauucuuccuccucaauuugacagaucaaagaaguaucccuugcuaauucaaguguaugguggucccugcagucagaguguaaggucuguauuugcuguuaauuggauaucuuaucuugcaaguaaggaagggauggucauugccuugguggauggucgaggaacagcuuuccaaggugacaaacuccucuaugcaguguaucgaaagcuggguguuuaugaaguugaagaccagauuacagcugucagaaaauucauagaaauggguuucauugaugaaaaaagaauagccauauggggcugguccuauggaggauacguuucaucacuggcccuugcaucuggaacuggucuuuucaaaugugguauagcaguggcuccagucuccagcugggaauauuacgcgucugucuacacagagagauucaugggucucccaacaaaggaugauaaucuugagcacuauaagaauucaacugugauggcaagagcagaauauuucagaaauguagacuaucuucucauccacggaacagcagaugauaaugugcacuuucagaacucagcacagauugcuaaagcucugguuaaugcacaaguggauuuccaggcaaugugguacucugaccagaaccacggcuuauccggccuguccacgaaccacuuauacacccacaugacccacuuccuaaagcaguguuucucuuugucagacuaa

SEQ ID NO: 3403 - RNA, 2283 nt, Artificial Sequence
  derived and/or modified sequence opt1 from SEPR__Homo_sapiens__AAC51668
augaagaccugggugaagaucgucuucggcguggccaccagcgccgugcuggcgcuccuggucaugugcaucgugcugcgccccucccgggugcacaacagcgaggagaacacgaugcgcgcccucacccugaaggacauccugaacgggaccuucuccuacaagaccuucuucccgaacuggaucagcggccaggaguaccuccaccaguccgccgacaacaacaucguccuguacaacaucgagacggggcagagcuacaccauccuguccaaccggaccaugaaguccgugaacgccagcaacuacggccucagccccgaccgccaguucguguaccuggaguccgacuacagcaagcuguggcgguacuccuacaccgccacguacuacaucuacgaccucagcaacggggaguucguccgcggcaacgagcugccccggcccauccaguaccugugcugguccccggugggcagcaagcucgcguacguguaccagaacaacaucuaccugaagcagcgccccggggacccgcccuuccagaucaccuucaacggccgggagaacaagaucuucaacgggauccccgacugggucuacgaggaggagaugcuggccaccaaguacgcccucugguggucccccaacggcaaguuccuggccuacgcggaguucaacgacaccgacauccccgugaucgccuacagcuacuacggggacgagcaguacccccgcacgaucaacaucccguaccccaaggccggcgccaagaaccccgugguccggaucuucaucaucgacaccaccuaccccgccuacgugggcccgcaggaggugcccguccccgcgaugaucgccuccagcgacuacuacuucagcuggcugaccugggugacggacgagcgcgugugccuccaguggcugaagcggguccagaacguguccgugcugagcaucugcgacuuccgcgaggacuggcagaccugggacugccccaagacccaggagcacaucgaggagucccggaccgggugggccggcggguucuucgucagcacgccgguguucuccuacgacgccaucagcuacuacaagaucuucuccgacaaggacggcuacaagcacauccacuacaucaaggacaccgucgagaacgccauccagaucaccagcggcaagugggaggcgaucaacaucuuccgcgugacccaggacucccucuucuacagcuccaacgaguucgaggaguaccccgggcggcgcaacaucuaccggaucagcaucggcuccuacccgcccagcaagaagugcgugacgugccaccuccgcaaggagcggugccaguacuacaccgccuccuucagcgacuacgccaaguacuacgcccuggucugcuacgggcccggcauccccaucuccacccugcacgacgggcgcaccgaccaggagaucaagauccuggaggagaacaaggagcuggagaacgcccucaagaacauccagcugcccaaggaggagaucaagaagcuggagguggacgagaucacgcucugguacaagaugauccugcccccgcaguucgaccgcagcaagaaguacccccugcucauccagguguacggcggccccugcucccagagcguccggagcguguucgcggugaacuggaucuccuaccuggccagcaaggaggggauggucaucgcccugguggacggccgcgggaccgccuuccagggcgacaagcuccuguacgccguguaccggaagcugggggucuacgagguggaggaccagaucaccgcggugcgcaaguucaucgagaugggcuucaucgacgagaagcggaucgccaucuggggcugguccuacgggggcuacgucagcucccucgcccuggccagcgggaccggccuguucaagugcgggaucgcgguggccccgguguccagcugggaguacuacgccuccgucuacacggagcgcuucaugggccuccccaccaaggacgacaaccuggagcacuacaagaacagcaccgugauggcccgggccgaguacuuccgcaacguggacuaccugcucauccacggcaccgcggacgacaacguccacuuccagaacuccgcccagaucgccaaggcccuggugaacgcccagguggacuuccaggcgaugugguacagcgaccagaaccacgggcuguccggccugagcacgaaccaccucuacacccacaugacccacuuccugaagcagugcuucucccugagcgacuga

SEQ ID NO: 3404 - RNA, 2283 nt, Artificial Sequence
  derived and/or modified sequence opt2 from SEPR__Homo_sapiens__AAC51668
augaagaccugggucaagaucgucuucggcgucgccaccuccgccguccucgcccuccucgucaugugcaucguccuccgccccucccgcguccacaacuccgaggagaacaccaugcgcgcccucacccucaaggacauccucaacggcaccuucuccuacaagaccuucuuccccaacuggaucuccggccaggaguaccuccaccaguccgccgacaacaacaucguccucuacaacaucgagaccggccaguccuacaccauccucuccaaccgcaccaugaaguccgucaacgccuccaacuacggccucucccccgaccgccaguucgucuaccucgaguccgacuacuccaagcucuggcgcuacuccuacaccgccaccuacuacaucuacgaccucuccaacggcgaguucguccgcggcaacgagcucccccgccccauccaguaccucugcuggucccccgucggcuccaagcucgccuacgucuaccagaacaacaucuaccucaagcagcgccccggcgacccccccuuccagaucaccuucaacggccgcgagaacaagaucuucaacggcauccccgacugggucuacgaggaggagaugcucgccaccaaguacgcccucugguggucccccaacggcaaguuccucgccuacgccgaguucaacgacaccgacauccccgucaucgccuacuccuacuacggcgacgagcaguacccccgcaccaucaacauccccuaccccaaggccggcgccaagaaccccgucguccgcaucuucaucaucgacaccaccuaccccgccuacgucggcccccaggagguccccguccccgccaugaucgccuccuccgacuacuacuucuccuggcucaccugggucaccgacgagcgcgucugccuccaguggcucaagcgcguccagaacgucuccguccucuccaucugcgacuuccgcgaggacuggcagaccugggacugccccaagacccaggagcacaucgaggagucccgcaccggcugggccggcggcuucuucgucuccacccccgucuucuccuacgacgccaucuccuacuacaagaucuucuccgacaaggacggcuacaagcacauccacuacaucaaggacaccgucgagaacgccauccagaucaccuccggcaagugggaggccaucaacaucuuccgcgucacccaggacucccucuucuacuccuccaacgaguucgaggaguaccccggccgccgcaacaucuaccgcaucuccaucggcuccuacccccccuccaagaagugcgucaccugccaccuccgcaaggagcgcugccaguacuacaccgccuccuucuccgacuacgccaaguacuacgcccucgucugcuacggccccggcauccccaucuccacccuccacgacggccgcaccgaccaggagaucaagauccucgaggagaacaaggagcucgagaacgcccucaagaacauccagcuccccaaggaggagaucaagaagcucgaggucgacgagaucacccucugguacaagaugauccuccccccccaguucgaccgcuccaagaaguacccccuccucauccaggucuacggcggccccugcucccaguccguccgcuccgucuucgccgucaacuggaucuccuaccucgccuccaaggagggcauggucaucgcccucgucgacggccgcggcaccgccuuccagggcgacaagcuccucuacgccgucuaccgcaagcucggcgucuacgaggucgaggaccagaucaccgccguccgcaaguucaucgagaugggcuucaucgacgagaagcgcaucgccaucuggggcugguccuacggcggcuacgucuccucccucgcccucgccuccggcaccggccucuucaagugcggcaucgccgucgcccccgucuccuccugggaguacuacgccuccgucuacaccgagcgcuucaugggccuccccaccaaggacgacaaccucgagcacuacaagaacuccaccgucauggcccgcgccgaguacuuccgcaacgucgacuaccuccucauccacggcaccgccgacgacaacguccacuuccagaacuccgcccagaucgccaaggcccucgucaacgcccaggucgacuuccaggccaugugguacuccgaccagaaccacggccucuccggccucuccaccaaccaccucuacacccacaugacccacuuccucaagcagugcuucucccucuccgacuga

SEQ ID NO: 3405 - RNA, 2283 nt, Artificial Sequence
  derived and/or modified sequence opt3 from SEPR__Homo_sapiens__AAC51668
augaagaccugggugaaaaucgucuucggcguugccacaagcgcugugcuggcacuccuuguaaugugcauugugcugagacccuccaggguccacaacucugaggaaaauacuaugcgggccuugacguuaaaggacauacugaacgggaccuuuucauacaaaacauucuuuccuaauuggaucaguggacaggaguaucuacaucaaagcgcggauaacaauauugugcucuacaacaucgaaacuggucaguccuauaccauucugucuaaucgcacaaugaagucgguuaacgcuucaaauuacggccuuagcccagaccgacaguucguguaucuggagagugauuacuccaaauuguggcguuauucuuacaccgccacuuacuauaucuacgaccucagcaacggggaauuugucagaggaaaugagcugccgaggcccauacaguaucuguguugguccccugugggcucaaagcucgcauacguauaucaaaacaauaucuacuuaaagcagcggccaggugaucccccuuuccagauuacauuuaacgggcgcgagaauaaaaucuucaacggcauuccagacuggguuuaugaagaggaaaugcuggccaccaaguacgcucuuugguggagucccaacggaaaauuuuuggcauacgccgaguucaaugauacggacaucccugugauagcuuauagcuacuauggcgaugagcaguacccaagaacuauuaacaucccguaucccaaggccggggcgaaaaauccugucgugaggauuuuuaucaucgacaccacauacccagcauaugugggaccccaagaagucccuguuccagccaugauugcuucuuccgauuacuacuucucauggcugacuugggugaccgacgagcggguaugccuacaguggcucaagcgcgugcagaacgucagcgugcugaguauaugugauuuucgagaagacuggcagacaugggacugccccaagacccaagagcacaucgaagagucuagaacggguugggccggcggguucuucguuuccacuccgguguuuagcuaugaugcaauuucguacuauaaaaucuucucugacaaggauggauacaaacauauacacuauauuaaggacacagucgagaaugcuauccagaucaccuccggcaaaugggaagccauuaacaucuuuagggugacucaggauucacuuuucuacaguagcaaugaguuugaagaguauccuggucggcguaacauuuaccgcauauccaucgggucuuaucccccaagcaagaaauguguaacaugccaucugagaaaggaaaggugucaauacuacaccgcgucauucagugacuaugccaaguacuaugcauugguuugcuacggaccuggcauucccaucuccacgcuccacgauggccggaccgaccaggagaucaaaauucuggaggaaaauaaggaguuagaaaacgcucugaaaaauauacagcucccaaaggaggaaaucaaaaagcuggagguggaugagauuacacuuugguauaagaugaucuugcccccucaguuugaccgaagcaaaaaguacccacuacugauucaagucuacgggggaccguguucucagucagugcgcagugucuucgccgugaacuggaucagcuaucucgcuuccaaagaagguaugguuauagcccugguggauggcagagggacugcauuucagggagacaaacuucuguacgccguauauaggaaguugggcgucuacgagguggaagaccagaucaccgcuguucggaaguucauugagauggguuuuaucgaugagaagcgcauugcgaucuggggguggucuuauggcggauacgugucgagccucgcacuggccuccggcacaggguuauucaaaugcggaauagcugucgcccccgugucaaguugggaauauuacgcaucuguauacacugagagauuuaugggucugccuaccaaggacgauaaucuagaacacuauaaaaacagcacagugauggccagggcugaguacuuccguaauguugacuaucuccugauucauggcaccgccgaugacaacguccacuuccaaaacuccgcacagaucgcgaaggcucuugugaaugcccagguggauuuucaggcaaugugguacucagaccaaaaccauggguugagcggacugucuacuaaucaccucuauacgcacaugacacauuuccugaaacaguguuuuucccuuagugauuga

SEQ ID NO: 3406 - RNA, 2283 nt, Artificial Sequence
  derived and/or modified sequence opt4 from SEPR__Homo_sapiens__AAC51668
augaagaccugggugaagaucguguucggcguggccaccagcgccgugcuggcccugcuggugaugugcaucgugcugagacccagcagagugcacaacagcgaggagaacaccaugagagcccugacccugaaggacauccugaacggcaccuucagcuacaagaccuucuuccccaacuggaucagcggccaggaguaccugcaccagagcgccgacaacaacaucgugcuguacaacaucgagaccggccagagcuacaccauccugagcaacagaaccaugaagagcgugaacgccagcaacuacggccugagccccgacagacaguucguguaccuggagagcgacuacagcaagcuguggagauacagcuacaccgccaccuacuacaucuacgaccugagcaacggcgaguucgugagaggcaacgagcugcccagacccauccaguaccugugcuggagccccgugggcagcaagcuggccuacguguaccagaacaacaucuaccugaagcagagacccggcgacccccccuuccagaucaccuucaacggcagagagaacaagaucuucaacggcauccccgacuggguguacgaggaggagaugcuggccaccaaguacgcccugugguggagccccaacggcaaguuccuggccuacgccgaguucaacgacaccgacauccccgugaucgccuacagcuacuacggcgacgagcaguaccccagaaccaucaacauccccuaccccaaggccggcgccaagaaccccguggugagaaucuucaucaucgacaccaccuaccccgccuacgugggcccccaggaggugcccgugcccgccaugaucgccagcagcgacuacuacuucagcuggcugaccugggugaccgacgagagagugugccugcaguggcugaagagagugcagaacgugagcgugcugagcaucugcgacuucagagaggacuggcagaccugggacugccccaagacccaggagcacaucgaggagagcagaaccggcugggccggcggcuucuucgugagcacccccguguucagcuacgacgccaucagcuacuacaagaucuucagcgacaaggacggcuacaagcacauccacuacaucaaggacaccguggagaacgccauccagaucaccagcggcaagugggaggccaucaacaucuucagagugacccaggacagccuguucuacagcagcaacgaguucgaggaguaccccggcagaagaaacaucuacagaaucagcaucggcagcuacccccccagcaagaagugcgugaccugccaccugagaaaggagagaugccaguacuacaccgccagcuucagcgacuacgccaaguacuacgcccuggugugcuacggccccggcauccccaucagcacccugcacgacggcagaaccgaccaggagaucaagauccuggaggagaacaaggagcuggagaacgcccugaagaacauccagcugcccaaggaggagaucaagaagcuggagguggacgagaucacccugugguacaagaugauccugcccccccaguucgacagaagcaagaaguacccccugcugauccagguguacggcggccccugcagccagagcgugagaagcguguucgccgugaacuggaucagcuaccuggccagcaaggagggcauggugaucgcccugguggacggcagaggcaccgccuuccagggcgacaagcugcuguacgccguguacagaaagcugggcguguacgagguggaggaccagaucaccgccgugagaaaguucaucgagaugggcuucaucgacgagaagagaaucgccaucuggggcuggagcuacggcggcuacgugagcagccuggcccuggccagcggcaccggccuguucaagugcggcaucgccguggcccccgugagcagcugggaguacuacgccagcguguacaccgagagauucaugggccugcccaccaaggacgacaaccuggagcacuacaagaacagcaccgugauggccagagccgaguacuucagaaacguggacuaccugcugauccacggcaccgccgacgacaacgugcacuuccagaacagcgcccagaucgccaaggcccuggugaacgcccagguggacuuccaggccaugugguacagcgaccagaaccacggccugagcggccugagcaccaaccaccuguacacccacaugacccacuuccugaagcagugcuucagccugagcgacuga

SEQ ID NO: 3407 - RNA, 2283 nt, Artificial Sequence
  derived and/or modified sequence opt5 from SEPR__Homo_sapiens__AAC51668
augaagaccugggugaaaaucgucuucggcguugccacaagcgcugugcuggcccuccuggugaugugcauuguccuuagacccucccgggugcacaacucugaggaaaauacgaugcgcgcgcugacccucaaggacauccugaacgggacauuuagcuacaaaaccuucuuuccuaauuggauuuccggacaggaguaucuucaucaaucugcugauaacaauaucguucuguacaacauugaaacaggccagagcuauaccauccucuccaauagaacaaugaagucugugaacgccagcaauuacgggcuguccccggaccggcaguucgucuaucuggagagcgauuacucuaaacucuggcgcuauuccuacaccgccacguacuauaucuacgaccugagcaacggagaauuugugagaggcaaugagcuuccccggccuauucaguaucuguguuggucucccguuggguccaagcucgcuuacguguaucaaaacaauaucuaccugaagcagcgcccuggagaucccccuuuccagauuaccuuuaacggcagagagaauaaaaucuucaacggcauuccggacugggucuaugaagaggaaaugcuugccacaaaguacgcucugugguggagccccaacgggaaauuucucgccuacgcggaguucaaugauaccgacaucccugugauugccuauucuuacuauggagaugagcaguacccccggacaaucaacaucccuuaucccaaggcuggcgccaaaaauccggugguccgcauuuuuaucauugacaccacguacccugcuuauguugggccccaagaagugccugugcccgccaugaucgcguccagcgauuacuacuucuccuggcugacaugggucaccgacgagagagugugccugcaguggcucaagcggguucagaacgugucuguccugagcauuugugauuuucgcgaagacuggcagacaugggacugccccaagacccaagagcacaucgaagaguccagaaccggaugggccggcggguucuucgugagcacaccuguguuuucuuaugaugcuaucuccuacuauaaaauuuucagcgacaaggauggauacaaacauauccacuauauuaaggacacgguugagaaugccauccagauuaccucuggcaaaugggaagcuaucaacaucuuucgggucacacaggauagccuuuucuacuccucuaaugaguuugaagaguauccgggccgcagaaacauuuaccggaucagcauuggguccuaucccccuagcaagaaaugugugaccugccaucugagaaaggaacgcugucaauacuacacagccucuuucuccgacuaugccaaguacuaugcucucgucugcuacggacccggcaucccuauuagcacccugcacgaugggcggacggaccaggagaucaaaauucuugaggaaaauaaggagcuggaaaacgcgcucaaaaauauccagcugcccaaggaggaaaucaaaaagcuggagguggaugagauuacacucugguauaagaugauccugccgccucaguuugacagaucuaaaaaguacccccuucugauucaaguuuacggaggcccuuguucccagagcgugcgcuccgucuucgccgugaacuggaucucuuaucucgcuagcaaagaagggaugguuauugcccugguggauggacggggcaccgccuuucagggcgacaagcuccuguacgcugucuauagaaaacucgggguguacgagguggaagaccagaucaccgccguucgcaaguucaucgagaugggauuuauugaugagaagcggaucgcgauuuggggcugguccuaugggggauacgucucuagccuggcucuggccuccggcacagggcuuuucaaaugcggcaucgccguggcucccgugagcucuugggaauauuacgccuccgucuacaccgagagauuuaugggacugccuacaaaggacgauaaucuugaacacuauaaaaacagcacggugauggcucgcgccgaguacuuccggaauguugacuaucugcucauucauggcaccgcggaugacaacgugcacuuccaaaacucugcccagaucgcuaaggcccuggucaaugcucagguggauuuucaggccaugugguacuccgaccaaaaccaugggcugagcggacuuucuacaaaucaccucuauacccacaugacacauuuccugaaacaguguuuuagccuguccgauuga

SEQ ID NO: 3408 - protein, 333 aa, Artificial Sequence
  SIA7F__Homo_sapiens__Q969X2
MACSRPPSQCEPTSLPPGPPAGRRHLPLSRRRREMSSNKEQRSAVFVILFALITILILYSSNSANEVFHYGSLRGRSRRPVNLKKWSITDGYVPILGNKTLPSRCHQCVIVSSSSHLLGTKLGPEIERAECTIRMNDAPTTGYSADVGNKTTYRVVAHSSVFRVLRRPQEFVNRTPETVFIFWGPPSKMQKPQGSLVRVIQRAGLVFPNMEAYAVSPGRMRQFDDLFRGETGKDREKSHSWLSTGWFTMVIAVELCDHVHVYGMVPPNYCSQRPRLQRMPYHYYEPKGPDECVTYIQNEHSRKGNHHRFITEKRVFSSWAQLYGITFSHPSWT

SEQ ID NO: 3409 - RNA, 1002 nt, Artificial Sequence
  SIA7F__Homo_sapiens__AAH06564
auggcuugcucgaggccccccagccagugugaacccacaucccugcccccagggccaccugcaggacgccgacaccuaccccucagcagacgccggagagaaaugaguagcaacaaagagcagcggucagcaguguucgugauccucuuugcccucaucaccauccucauccucuacagcuccaacagugccaaugaggucuuccauuacggcucccugcggggccguagccgccgaccugucaaccucaagaaguggagcaucacugacggcuauguccccauucucggcaacaagacacugcccucucggugccaccagugugugauugucagcagcuccagccaccugcugggcaccaagcugggcccugagaucgagcgggcugaguguacaauccgcaugaaugaugcacccaccacuggcuacucagcugaugugggcaacaagaccaccuaccgcgucguggcccauuccaguguguuccgcgugcugaggaggccccaggaguuugucaaccggaccccugaaaccguguucaucuucugggggcccccgagcaagaugcagaagccccagggcagccucgugcgugugauccagcgagcgggccugguguuccccaacauggaagcauaugccgucucucccggccgcaugcggcaauuugacgaccucuuccggggugagacgggcaaggacagggagaagucucauucgugguugagcacaggcugguuuaccauggugaucgcgguggaguugugugaccacgugcaugucuauggcauggucccccccaacuacugcagccagcggccccgccuccagcgcaugcccuaccacuacuacgagcccaaggggccggacgaaugugucaccuacauccagaaugagcacagucgcaagggcaaccaccaccgcuucaucaccgagaaaagggucuucucaucgugggcccagcuguauggcaucaccuucucccaccccuccuggaccuag

SEQ ID NO: 3410 - RNA, 1002 nt, Artificial Sequence
  derived and/or modified sequence opt1 from SIA7F__Homo_sapiens__AAH06564
auggccugcagccggcccccgucccagugcgagcccaccagccugccgcccggcccgcccgccgggcgccgccaccucccccugucccggcgccggcgcgagaugagcuccaacaaggagcagcggagcgcgguguucgucauccuguucgcccucaucaccauccugauccuguacuccagcaacuccgccaacgagguguuccacuacggcagccuccgcgggcggucccgccggcccgugaaccugaagaaguggagcaucacggacggcuacguccccauccuggggaacaagacccuccccucccgcugccaccagugcgugaucgugagcuccagcucccaccuccugggcaccaagcugggccccgagaucgagcgggccgagugcaccauccgcaugaacgacgcccccacgaccggguacagcgcggacgucggcaacaagaccaccuaccgggugguggcccacuccagcgucuuccgcgugcugcggcgcccgcaggaguucgugaaccggacgcccgagaccgucuucaucuucugggggccgcccagcaagaugcagaagccccagggcucccuggugcgcgugauccagcgggccgggcucgucuuccccaacauggaggccuacgcggugagccccggccgcaugcgccaguucgacgaccuguuccggggcgagaccgggaaggaccgcgagaagucccacagcuggcuguccaccggcugguucacgauggugaucgccgucgagcucugcgaccacgugcacguguacgggauggugcccccgaacuacugcagccagcggccccgccugcagcggaugcccuaccacuacuacgagcccaagggcccggacgagugcgucaccuacauccagaacgagcacucccgcaagggcaaccaccaccgguucaucaccgagaagcgcguguucagcuccugggcccagcuguacgggaucaccuucagccaccccuccuggacguga

SEQ ID NO: 3411 - RNA, 1002 nt, Artificial Sequence
  derived and/or modified sequence opt2 from SIA7F__Homo_sapiens__AAH06564
auggccugcucccgcccccccucccagugcgagcccaccucccucccccccggcccccccgccggccgccgccaccucccccucucccgccgccgccgcgagauguccuccaacaaggagcagcgcuccgccgucuucgucauccucuucgcccucaucaccauccucauccucuacuccuccaacuccgccaacgaggucuuccacuacggcucccuccgcggccgcucccgccgccccgucaaccucaagaagugguccaucaccgacggcuacguccccauccucggcaacaagacccuccccucccgcugccaccagugcgucaucgucuccuccuccucccaccuccucggcaccaagcucggccccgagaucgagcgcgccgagugcaccauccgcaugaacgacgcccccaccaccggcuacuccgccgacgucggcaacaagaccaccuaccgcgucgucgcccacuccuccgucuuccgcguccuccgccgcccccaggaguucgucaaccgcacccccgagaccgucuucaucuucuggggcccccccuccaagaugcagaagccccagggcucccucguccgcgucauccagcgcgccggccucgucuuccccaacauggaggccuacgccgucucccccggccgcaugcgccaguucgacgaccucuuccgcggcgagaccggcaaggaccgcgagaagucccacuccuggcucuccaccggcugguucaccauggucaucgccgucgagcucugcgaccacguccacgucuacggcauggucccccccaacuacugcucccagcgcccccgccuccagcgcaugcccuaccacuacuacgagcccaagggccccgacgagugcgucaccuacauccagaacgagcacucccgcaagggcaaccaccaccgcuucaucaccgagaagcgcgucuucuccuccugggcccagcucuacggcaucaccuucucccaccccuccuggaccuga

SEQ ID NO: 3412 - RNA, 1002 nt, Artificial Sequence
  derived and/or modified sequence opt3 from SIA7F__Homo_sapiens__AAH06564
auggccugcagcagacccccuucccagugugagccaaccucucugccgcccggcccuccagcugggaggcggcaccucccccuuucacgccgacguagagaaaugaguagcaacaaggagcaaagguccgcaguguucgucauccuguuugccuugauuacaauauuaauccuguacucuucaaauucggcgaacgaaguuuuccauuauggaagccuacggggucgcaguagaaggccugugaaucucaaaaagugguccauuacugacggcuacguaccaauccuggggaacaaaacgcuucccucucggugccaccagugugugauugucagcuccucaagucaucuguugggaaccaagcucggcccugagaucgaacgcgcugagugcacaauacgaaugaaugaugccccaacuaccgguuauagcgcagacguggggaacaaaacaaccuacagaguuguggcccacucuuccgucuuuagggugcugcggcguccgcaggaguucguaaaucgcacucccgaaacaguuuuuaucuucuggggaccuccaucaaagaugcagaagccccaaggcagccuggugagagucauucagagggcuggccucguguuuccuaacauggaggcauaugccgugaguccagggcggaugcgacaguucgaugacuuauuucgcggagaaaccgguaaagauagagagaagucucauuccuggcugagcacgggcugguucacuauggucaucgcuguugagcuuugugaccacgugcacguauacgggauggugcccccgaauuauugcucgcagaggccucgguugcaacgcaugcccuaccauuacuaugaaccaaaaggaccugaugagugugucaccuacauucagaacgaacacucuagaaagggcaaucaucacagguuuaucacagagaaacguguguucuccucaugggcccagcuguaugguauaacuuuuagucaccccagcuggaccuga

SEQ ID NO: 3413 - RNA, 1002 nt, Artificial Sequence
  derived and/or modified sequence opt4 from SIA7F__Homo_sapiens__AAH06564
auggccugcagcagaccccccagccagugcgagcccaccagccugccccccggcccccccgccggcagaagacaccugccccugagcagaagaagaagagagaugagcagcaacaaggagcagagaagcgccguguucgugauccuguucgcccugaucaccauccugauccuguacagcagcaacagcgccaacgagguguuccacuacggcagccugagaggcagaagcagaagacccgugaaccugaagaaguggagcaucaccgacggcuacgugcccauccugggcaacaagacccugcccagcagaugccaccagugcgugaucgugagcagcagcagccaccugcugggcaccaagcugggccccgagaucgagagagccgagugcaccaucagaaugaacgacgcccccaccaccggcuacagcgccgacgugggcaacaagaccaccuacagagugguggcccacagcagcguguucagagugcugagaagaccccaggaguucgugaacagaacccccgagaccguguucaucuucuggggcccccccagcaagaugcagaagccccagggcagccuggugagagugauccagagagccggccugguguuccccaacauggaggccuacgccgugagccccggcagaaugagacaguucgacgaccuguucagaggcgagaccggcaaggacagagagaagagccacagcuggcugagcaccggcugguucaccauggugaucgccguggagcugugcgaccacgugcacguguacggcauggugccccccaacuacugcagccagagacccagacugcagagaaugcccuaccacuacuacgagcccaagggccccgacgagugcgugaccuacauccagaacgagcacagcagaaagggcaaccaccacagauucaucaccgagaagagaguguucagcagcugggcccagcuguacggcaucaccuucagccaccccagcuggaccuga

SEQ ID NO: 3414 - RNA, 1002 nt, Artificial Sequence
  derived and/or modified sequence opt5 from SIA7F__Homo_sapiens__AAH06564
auggccugcagcagacccccuucccagugugagccgaccucucugcccccugggcccccugcuggccggcgccaccucccccugagcagacggcgcagagaaauguccucuaacaaggagcaacggagcgccguguucgucauccuuuuugcgcugauuacaauccucauucuguacuccucuaauagcgcuaacgaaguuuuccauuauggaucccuucgcggcagaagccggcgcccugugaaucugaaaaaguggucuaucacggacggguacgugccgauucucggaaacaaaacccugcccuccagaugccaccagugugucaucgugucuagcuccagccaucugcucggcacaaagcuggggccugagaucgaacgggccgagugcaccauucgcaugaaugaugcccccacaaccggauauucugcugacguuggcaacaaaacaaccuacagaguggucgcccacuccagcguguuucggguucuucgcagaccucaggaguucgugaaucggacgcccgaaaccgucuuuaucuucuggggcccgccuuccaagaugcagaagccccaagggucucuggugagagugauucagcgcgcuggacucgucuuuccuaacauggaggccuaugcgguuagccccggccggaugagacaguucgaugaccuguuucgcggggaaacaggaaaagaucgggagaagucccauagcuggcuuucuaccggcugguucacaauggugaucgccguggagcugugugaccacguccacguguacgggaugguucccccuaauuauugcucccagagaccgcgccuccaacggaugcccuaccauuacuaugaaccuaaaggacccgaugagugugugaccuacauucagaacgaacacagcagaaagggcaaucaucaccgcuuuaucacggagaaacgggucuucucuagcugggcucagcuguauggcauuacauuuucccacccuucuuggaccuga

SEQ ID NO: 3415 - protein, 356 aa, Artificial Sequence
  SIA8A__Homo_sapiens__Q92185
MSPCGRARRQTSRGAMAVLAWKFPRTRLPMGASALCVVVLCWLYIFPVYRLPNEKEIVQGVLQQGTAWRRNQTAARAFRKQMEDCCDPAHLFAMTKMNSPMGKSMWYDGEFLYSFTIDNSTYSLFPQATPFQLPLKKCAVVGNGGILKKSGCGRQIDEANFVMRCNLPPLSSEYTKDVGSKSQLVTANPSIIRQRFQNLLWSRKTFVDNMKIYNHSYIYMPAFSMKTGTEPSLRVYYTLSDVGANQTVLFANPNFLRSIGKFWKSRGIHAKRLSTGLFLVSAALGLCEEVAIYGFWPFSVNMHEQPISHHYYDNVLPFSGFHAMPEEFLQLWYLHKIGALRMQLDPCEDTSLQPTS

SEQ ID NO: 3416 - RNA, 1071 nt, Artificial Sequence
  SIA8A__Homo_sapiens__AAC37586
augagccccugcgggcgggcccggcgacaaacguccagaggggccauggcuguacuggcguggaaguucccgcggacccggcugcccaugggagccagugcccucugugucgugguccucuguuggcucuacaucuuccccgucuaccggcugcccaacgagaaagagaucgugcagggggugcugcaacagggcacggcguggaggaggaaccagaccgcggccagagcguucaggaaacaaauggaagacugcugcgacccugcccaucucuuugcuaugacuaaaaugaauuccccuauggggaagagcaugugguaugacggggaguuuuuauacucauucaccauugacaauucaacuuacucucucuucccacaggcaaccccauuccagcugccauugaagaaaugcgcgguggugggaaauggugggauucugaagaagaguggcuguggccgucaaauagaugaagcaaauuuugucaugcgaugcaaucucccuccuuugucaagugaauacacuaaggauguuggauccaaaagucaguuagugacagcuaaucccagcauaauucggcaaagguuucagaaccuucugugguccagaaagacauuuguggacaacaugaaaaucuauaaccacaguuacaucuacaugccugccuuuucuaugaagacaggaacagagccaucuuugaggguuuauuauacacugucagauguuggugccaaucaaacagugcuguuugccaaccccaacuuucugcguagcauuggaaaguucuggaaaaguagaggaauccaugccaagcgccuguccacaggacuuuuucuggugagcgcagcucugggucucugugaagagguggccaucuauggcuucuggcccuucucugugaauaugcaugagcagcccaucagccaccacuacuaugacaacgucuuacccuuuucuggcuuccaugccaugcccgaggaauuucuccaacucugguaucuucauaaaaucggugcacugagaaugcagcuggacccaugugaagauaccucacuccagcccacuuccuag

SEQ ID NO: 3417 - RNA, 1071 nt, Artificial Sequence
  derived and/or modified sequence opt1 from SIA8A__Homo_sapiens__AAC37586
augagccccugcggccgcgcccggcgccagaccucccgcggggccauggcggugcuggccuggaaguucccgcggacccggcuccccaugggcgccagcgcccugugcgucguggugcugugcuggcucuacaucuuccccgucuaccgccugcccaacgagaaggagaucgugcagggggugcugcagcagggcacggccuggcggcgcaaccagaccgcggcccgggccuuccgcaagcagauggaggacugcugcgacccggcccaccucuucgcgaugaccaagaugaacucccccaugggcaagagcaugugguacgacggggaguuccuguacuccuucaccaucgacaacagcacguacucccuguucccccaggccacccccuuccagcucccgcugaagaagugcgccgucgugggcaacgggggcauccugaagaaguccgggugcggccggcagaucgacgaggccaacuucgugaugcgcugcaaccucccgccccugagcagcgaguacaccaaggacgucggguccaagagccagcuggugaccgccaaccccuccaucauccggcagcgcuuccagaaccuccuguggagccggaagacguucguggacaacaugaagaucuacaaccacuccuacaucuacaugcccgcguucagcaugaagaccggcaccgagcccucccugcgcgucuacuacacccucagcgacgugggcgccaaccagacggugcuguucgccaaccccaacuuccugcgguccaucgggaaguucuggaagucccgcggcauccacgccaagcggcucagcaccgggcuguuccuggucagcgccgcgcucggccugugcgaggagguggccaucuacggcuucuggcccuucagcgugaacaugcacgagcagccgaucucccaccacuacuacgacaacguccugcccuucagcggguuccacgccaugcccgaggaguuccuccagcugugguaccugcacaagaucggcgcccuccgcaugcagcuggaccccugcgaggacaccucccugcagccgaccagcuga

SEQ ID NO: 3418 - RNA, 1071 nt, Artificial Sequence
  derived and/or modified sequence opt2 from SIA8A__Homo_sapiens__AAC37586
augucccccugcggccgcgcccgccgccagaccucccgcggcgccauggccguccucgccuggaaguucccccgcacccgccuccccaugggcgccuccgcccucugcgucgucguccucugcuggcucuacaucuuccccgucuaccgccuccccaacgagaaggagaucguccagggcguccuccagcagggcaccgccuggcgccgcaaccagaccgccgcccgcgccuuccgcaagcagauggaggacugcugcgaccccgcccaccucuucgccaugaccaagaugaacucccccaugggcaaguccaugugguacgacggcgaguuccucuacuccuucaccaucgacaacuccaccuacucccucuucccccaggccacccccuuccagcucccccucaagaagugcgccgucgucggcaacggcggcauccucaagaaguccggcugcggccgccagaucgacgaggccaacuucgucaugcgcugcaaccuccccccccucuccuccgaguacaccaaggacgucggcuccaagucccagcucgucaccgccaaccccuccaucauccgccagcgcuuccagaaccuccucuggucccgcaagaccuucgucgacaacaugaagaucuacaaccacuccuacaucuacaugcccgccuucuccaugaagaccggcaccgagcccucccuccgcgucuacuacacccucuccgacgucggcgccaaccagaccguccucuucgccaaccccaacuuccuccgcuccaucggcaaguucuggaagucccgcggcauccacgccaagcgccucuccaccggccucuuccucgucuccgccgcccucggccucugcgaggaggucgccaucuacggcuucuggcccuucuccgucaacaugcacgagcagcccaucucccaccacuacuacgacaacguccuccccuucuccggcuuccacgccaugcccgaggaguuccuccagcucugguaccuccacaagaucggcgcccuccgcaugcagcucgaccccugcgaggacaccucccuccagcccaccuccuga

SEQ ID NO: 3419 - RNA, 1071 nt, Artificial Sequence
  derived and/or modified sequence opt3 from SIA8A__Homo_sapiens__AAC37586
augagccccugcggcagagccaggcggcagaccucccgcggggcuauggcagugcuggccuggaaguucccucgaacacgucucccaaugggagcgucugcucuuugugucguugugcugugcugguuguacaucuuuccgguauauagauuacccaacgagaaagaaauugugcaagguguccugcagcagggcacugccuggaggcggaaucagacggcagcccgcgcuuucagaaagcaaauggaggacuguugcgauccugcacaccuauuugccaugaccaaaaugaacucaccaauggggaagaguaugugguacgacggagaguuccucuauagcuuuacaauagauaauuccacuuacucucuguucccccaggcuaccccuuuucagcuuccacugaaaaagugugccgugguuggcaacggugggaucuugaagaaaucgggaugcggcaggcagauugacgaagcgaauuucgugaugcgguguaaccugcccccucucucaagcgaauauacaaaggaugucggcaguaaaucccaacuggugaccgcaaauccaucuaucauucgccagcgauuucagaaccucuuauggagcagaaagacuuucguagacaauaugaaaaucuacaaccauuccuauauauacaugccggccuuuucaaugaagacagggaccgagcccagucugaggguuuacuauacgcuuagcgaugugggagcuaaucagacugucuuguucgccaacccuaauuuucugcggucuaucgguaaguucuggaaaucccguggcauucacgcaaagcgccuaucaaccggacucuuccuggugagcgcugcccuugggcugugcgaggaaguggcgaucuacggcuuuuggccauucagugucaacaugcaugagcaacccauuucucaccauuauuacgacaauguuuugccuuuuuccgguuuccacgccaugccagaagaguuucuccagcugugguauuuacacaaaaucggggcacugagaaugcagcucgaucccugugaggacacaagccuucaaccgacuucguga

SEQ ID NO: 3420 - RNA, 1071 nt, Artificial Sequence
  derived and/or modified sequence opt4 from SIA8A__Homo_sapiens__AAC37586
augagccccugcggcagagccagaagacagaccagcagaggcgccauggccgugcuggccuggaaguuccccagaaccagacugcccaugggcgccagcgcccugugcgugguggugcugugcuggcuguacaucuuccccguguacagacugcccaacgagaaggagaucgugcagggcgugcugcagcagggcaccgccuggagaagaaaccagaccgccgccagagccuucagaaagcagauggaggacugcugcgaccccgcccaccuguucgccaugaccaagaugaacagccccaugggcaagagcaugugguacgacggcgaguuccuguacagcuucaccaucgacaacagcaccuacagccuguucccccaggccacccccuuccagcugccccugaagaagugcgccguggugggcaacggcggcauccugaagaagagcggcugcggcagacagaucgacgaggccaacuucgugaugagaugcaaccugcccccccugagcagcgaguacaccaaggacgugggcagcaagagccagcuggugaccgccaaccccagcaucaucagacagagauuccagaaccugcuguggagcagaaagaccuucguggacaacaugaagaucuacaaccacagcuacaucuacaugcccgccuucagcaugaagaccggcaccgagcccagccugagaguguacuacacccugagcgacgugggcgccaaccagaccgugcuguucgccaaccccaacuuccugagaagcaucggcaaguucuggaagagcagaggcauccacgccaagagacugagcaccggccuguuccuggugagcgccgcccugggccugugcgaggagguggccaucuacggcuucuggcccuucagcgugaacaugcacgagcagcccaucagccaccacuacuacgacaacgugcugcccuucagcggcuuccacgccaugcccgaggaguuccugcagcugugguaccugcacaagaucggcgcccugagaaugcagcuggaccccugcgaggacaccagccugcagcccaccagcuga

SEQ ID NO: 3421 - RNA, 1071 nt, Artificial Sequence
  derived and/or modified sequence opt5 from SIA8A__Homo_sapiens__AAC37586
augagccccugcggcagagcccggcgccagaccuccagaggggcuauggccgugcuggcguggaaguucccucggacacgccucccgaugggagcuucugcccugugugucguugugcuuugcuggcuguacaucuuucccguguauagacucccuaacgagaaagaaauuguccaaggcgugcugcagcaggggacggccuggcggcgcaaucagaccgcugccagagcuuuccggaagcaaauggaggacuguugcgaucccgcccaccuuuuugcgaugacaaaaaugaacagcccuaugggaaaguccaugugguacgacggcgaguuccuguauucuuuuaccaucgauaauagcacauacucccucuucccccaggccaccccuuuucagcugccgcugaaaaagugugcuguuguggggaacggaggcauucucaagaaaucuggcugcgggcgccagaucgacgaagccaauuucgucaugagauguaaccugcccccucuuagcuccgaauauacaaaggaugugggaagcaaaucucaacugguuaccgcuaaucccuccauuauccggcagcgcuuucagaaccuccuguggagcagaaagacguucguggacaauaugaaaaucuacaaccauucuuauauuuacaugccugccuuuuccaugaagaccggcacagagcccagccuucgggucuacuauacccugucugaugugggggcgaaucagacaguccucuucgccaacccgaauuuucugcgcuccaucggaaaguucuggaaaagcagaggcauucacgcuaagcggcuguccaccggacucuuccuggugucugccgcucuugggcugugcgaggaaguugccaucuacggcuuuuggccuuucagcgugaacaugcaugagcaacccauuucccaccauuauuacgacaaugugcucccuuuuagcggcuuccacgccaugcccgaagaguuucugcagcuuugguaucugcacaaaaucggggcucucagaaugcagcuggaucccugugaggacacgucucugcaaccuacauccuga

SEQ ID NO: 3422 - protein, 418 aa, Artificial Sequence
  SIAT9__Homo_sapiens__Q9UNP4
MRTKAAGCAERRPLQPRTEAAAAPAGRAMPSEYTYVKLRSDCSRPSLQWYTRAQSKMRRPSLLLKDILKCTLLVFGVWILYILKLNYTTEECDMKKMHYVDPDHVKRAQKYAQQVLQKECRPKFAKTSMALLFEHRYSVDLLPFVQKAPKDSEAESKYDPPFGFRKFSSKVQTLLELLPEHDLPEHLKAKTCRRCVVIGSGGILHGLELGHTLNQFDVVIRLNSAPVEGYSEHVGNKTTIRMTYPEGAPLSDLEYYSNDLFVAVLFKSVDFNWLQAMVKKETLPFWVRLFFWKQVAEKIPLQPKHFRILNPVIIKETAFDILQYSEPQSRFWGRDKNVPTIGVIAVVLATHLCDEVSLAGFGYDLNQPRTPLHYFDSQCMAAMNFQTMHNVTTETKFLLKLVKEGVVKDLSGGIDREF

SEQ ID NO: 3423 - RNA, 1257 nt, Artificial Sequence
  SIAT9__Homo_sapiens__BAG50894
augcggacgaaggcggcgggcugcgcggagcggcguccccugcagccgcggaccgaggcagcggcggcaccugccggccgagcaaugccaagugaguacaccuaugugaaacugagaagugauugcucgaggccuucccugcaaugguacacccgagcucaaagcaagaugagaaggcccagcuuguuauuaaaagacauccucaaauguacauugcuuguguuuggaguguggauccuuuauauccucaaguuaaauuauacuacugaagaaugugacaugaaaaaaaugcauuauguggacccugaccauguaaagagagcucagaaauaugcucagcaagucuugcagaaggaaugucgucccaaguuugccaagacaucaauggcgcuguuauuugagcacagguauagcguggacuuacucccuuuugugcagaaggcccccaaagacagugaagcugaguccaaguacgauccuccuuuuggguuccggaaguucuccaguaaaguccagacccucuuggaacucuugccagagcacgaccucccugaacacuugaaagccaagaccugucggcgcugugugguuauuggaagcggaggaauacugcacggauuagaacugggccacacccugaaccaguucgauguugugauaagguuaaacagugcaccaguugagggauauucagaacauguuggaaauaaaacuacuauaaggaugacuuauccagagggcgcaccacugucugaccuugaauauuauuccaaugacuuauuuguugcuguuuuauuuaagaguguugauuucaacuggcuucaagcaaugguaaaaaaggaaacccugccauucuggguacgacucuucuuuuggaagcagguggcagaaaaaaucccacugcagccaaaacauuucaggauuuugaauccaguuaucaucaaagagacugccuuugacauccuucaguacucagagccucagucaagguucuggggccgagauaagaacguccccacaaucggugucauugccguugucuuagccacacaucugugcgaugaagucaguuuggcggguuuuggauaugaccucaaucaacccagaacaccuuugcacuacuucgacagucaaugcauggcugcuaugaacuuucagaccaugcauaaugugacaacggaaaccaaguuccucuuaaagcuggucaaagagggaguggugaaagaucucaguggaggcauugaucgugaauuuuga

SEQ ID NO: 3424 - RNA, 1257 nt, Artificial Sequence
  derived and/or modified sequence opt1 from SIAT9__Homo_sapiens__BAG50894
augcgcaccaaggccgccggcugcgcggagcggcgcccccugcagccgcggaccgaggccgccgccgcccccgcggggcgcgccaugcccagcgaguacacguacgugaagcuccgguccgacugcagccgccccucccugcagugguacacccgggcccagagcaagaugcgccggccgucccugcuccugaaggacauccugaagugcacccuccuggucuucggcguguggauccuguacauccucaagcugaacuacaccacggaggagugcgacaugaagaagaugcacuacguggaccccgaccacgucaagcgcgcccagaaguacgcgcagcagguccugcagaaggagugccggcccaaguucgccaagaccagcauggcccuccuguucgagcaccgcuacuccguggaccugcuccccuucgugcagaaggccccgaaggacagcgaggccgaguccaaguacgacccgcccuucggguuccggaaguucagcuccaaggugcagacccugcuggagcuccugcccgagcacgaccugcccgagcaccucaaggcgaagaccugccgccggugcguggucaucggcagcgggggcauccugcacggccuggagcucgggcacacgcugaaccaguucgacguggugauccgccugaacuccgcccccgucgagggcuacagcgagcacguggggaacaagaccaccauccggaugaccuaccccgagggcgcgccccucuccgaccuggaguacuacagcaacgaccuguucguggccguccucuucaaguccguggacuucaacuggcugcaggccauggugaagaaggagacgcugccguucuggguccgccucuucuucuggaagcaggucgccgagaagaucccccugcagcccaagcacuuccggauccugaaccccgugaucaucaaggagaccgccuucgacauccuccaguacagcgagccgcagucccgcuucugggggcgggacaagaacgugcccaccaucggcgugaucgccgugguccuggccacccaccugugcgacgaggugagccucgccggcuucggguacgaccugaaccagccccgcacgccccugcacuacuucgacagccagugcauggcggccaugaacuuccagaccaugcacaacgucaccaccgagacgaaguuccuccugaagcuggugaaggagggcguggucaaggaccucuccgggggcaucgaccgcgaguucuga

SEQ ID NO: 3425 - RNA, 1257 nt, Artificial Sequence
  derived and/or modified sequence opt2 from SIAT9__Homo_sapiens__BAG50894
augcgcaccaaggccgccggcugcgccgagcgccgcccccuccagccccgcaccgaggccgccgccgcccccgccggccgcgccaugcccuccgaguacaccuacgucaagcuccgcuccgacugcucccgccccucccuccagugguacacccgcgcccaguccaagaugcgccgccccucccuccuccucaaggacauccucaagugcacccuccucgucuucggcgucuggauccucuacauccucaagcucaacuacaccaccgaggagugcgacaugaagaagaugcacuacgucgaccccgaccacgucaagcgcgcccagaaguacgcccagcagguccuccagaaggagugccgccccaaguucgccaagaccuccauggcccuccucuucgagcaccgcuacuccgucgaccuccuccccuucguccagaaggcccccaaggacuccgaggccgaguccaaguacgacccccccuucggcuuccgcaaguucuccuccaagguccagacccuccucgagcuccuccccgagcacgaccuccccgagcaccucaaggccaagaccugccgccgcugcgucgucaucggcuccggcggcauccuccacggccucgagcucggccacacccucaaccaguucgacgucgucauccgccucaacuccgcccccgucgagggcuacuccgagcacgucggcaacaagaccaccauccgcaugaccuaccccgagggcgccccccucuccgaccucgaguacuacuccaacgaccucuucgucgccguccucuucaaguccgucgacuucaacuggcuccaggccauggucaagaaggagacccuccccuucuggguccgccucuucuucuggaagcaggucgccgagaagaucccccuccagcccaagcacuuccgcauccucaaccccgucaucaucaaggagaccgccuucgacauccuccaguacuccgagccccagucccgcuucuggggccgcgacaagaacguccccaccaucggcgucaucgccgucguccucgccacccaccucugcgacgaggucucccucgccggcuucggcuacgaccucaaccagccccgcaccccccuccacuacuucgacucccagugcauggccgccaugaacuuccagaccaugcacaacgucaccaccgagaccaaguuccuccucaagcucgucaaggagggcgucgucaaggaccucuccggcggcaucgaccgcgaguucuga

SEQ ID NO: 3426 - RNA, 1257 nt, Artificial Sequence
  derived and/or modified sequence opt3 from SIAT9__Homo_sapiens__BAG50894
augagaaccaaggccgcuggcugcgcagaaaggcggccccugcagccucgcacagaagccgcggcugccccagcagggcgagccaugccgagcgaguacacuuaugugaaacuccguuccgacuguucuagacccucacuucaaugguacacgagggcucagaguaagaugcggcgcccuagccuguuguuaaaagauauccugaagugcacccuacucgucuucggaguuuggauucuguauauacuuaaacugaacuacacaacugaagagugugacaugaagaagaugcacuauguggauccagaccauguaaaaagagcacagaaguacgcccagcaaguguugcagaaagaaugcaggcccaaguuugcuaaaaccuccauggcccuccuguucgagcaccgguauucugucgaucugcucccuuuugugcagaaggcgccaaaggacucggaggcagaaucaaaauacgaucccccuuucgguuuucgcaaguucagcaguaaaguucagacauuacuggagcuuuugccagaacaugaccugccggagcaccuaaaggccaaaaccugucgaagaugcguggucaucggcuccgggggcauucuccauggacuggagcuuggucacacucugaaucaauuugaugugguaaucagguugaacucugcucccguugaaggguacagcgagcacgugggaaauaagacaaccauucggaugacguauccugaaggcgccccacucuccgaccuggaguacuauucaaacgauuuauucgucgcagugcuguuuaaaaguguggacuucaauuggcuccaggcuauggucaagaaggaaacucuucccuuuuggguucgucuguucuuuuggaaacagguggccgagaagaucccuuugcagccaaaacauuuccgcauacuaaaccccguaaucauuaaggagaccgcguucgauauccugcaauacagcgaaccgcagucuagauuuuggggcagggacaaaaaugugccuacaauuggggucaucgccgugguucucgcaacucaccugugugacgaggugucccuugcuggauucgguuaugaucugaaccagccccggaccccauugcauuacuuugacucacaaugcauggccgcuaugaauuuccagacaaugcacaacgucaccacggaaacuaaguuucuccugaaguuagugaaagagggcguaguuaaggaucugagcgggggaauagaccgagaguucuga

SEQ ID NO: 3427 - RNA, 1257 nt, Artificial Sequence
  derived and/or modified sequence opt4 from SIAT9__Homo_sapiens__BAG50894
augagaaccaaggccgccggcugcgccgagagaagaccccugcagcccagaaccgaggccgccgccgcccccgccggcagagccaugcccagcgaguacaccuacgugaagcugagaagcgacugcagcagacccagccugcagugguacaccagagcccagagcaagaugagaagacccagccugcugcugaaggacauccugaagugcacccugcugguguucggcguguggauccuguacauccugaagcugaacuacaccaccgaggagugcgacaugaagaagaugcacuacguggaccccgaccacgugaagagagcccagaaguacgcccagcaggugcugcagaaggagugcagacccaaguucgccaagaccagcauggcccugcuguucgagcacagauacagcguggaccugcugcccuucgugcagaaggcccccaaggacagcgaggccgagagcaaguacgacccccccuucggcuucagaaaguucagcagcaaggugcagacccugcuggagcugcugcccgagcacgaccugcccgagcaccugaaggccaagaccugcagaagaugcguggugaucggcagcggcggcauccugcacggccuggagcugggccacacccugaaccaguucgacguggugaucagacugaacagcgcccccguggagggcuacagcgagcacgugggcaacaagaccaccaucagaaugaccuaccccgagggcgccccccugagcgaccuggaguacuacagcaacgaccuguucguggccgugcuguucaagagcguggacuucaacuggcugcaggccauggugaagaaggagacccugcccuucugggugagacuguucuucuggaagcagguggccgagaagaucccccugcagcccaagcacuucagaauccugaaccccgugaucaucaaggagaccgccuucgacauccugcaguacagcgagccccagagcagauucuggggcagagacaagaacgugcccaccaucggcgugaucgccguggugcuggccacccaccugugcgacgaggugagccuggccggcuucggcuacgaccugaaccagcccagaaccccccugcacuacuucgacagccagugcauggccgccaugaacuuccagaccaugcacaacgugaccaccgagaccaaguuccugcugaagcuggugaaggagggcguggugaaggaccugagcggcggcaucgacagagaguucuga

SEQ ID NO: 3428 - RNA, 1257 nt, Artificial Sequence
  derived and/or modified sequence opt5 from SIAT9__Homo_sapiens__BAG50894
augagaaccaaggccgcuggcugcgccgaacggcgcccccugcagccuagaacagaagcggcugccgccccggcugggcgggccaugcccagcgaguacacguaugugaaacuccgcuccgacuguucuagaccuagccugcaaugguacacccgggcucaguccaagaugcgcagacccucucuucugcucaaagauauccugaagugcacacuucuggucuucggaguuuggauucucuauauccugaaacugaacuacaccacagaagagugugacaugaagaagaugcacuauguggauccugaccaugugaaacgggcccagaaguacgcgcagcaaguccuccagaaagaaugccgccccaaguuugccaaaaccagcauggcucugcuuuucgagcacagauauuccguggaucugcucccuuuuguucagaaggccccgaaggacucugaggcugaaagcaaauacgaucccccuuucggcuuucggaaguucuccagcaaagugcagacacugcuugagcugcuccccgaacaugaccugccugagcaccugaaggccaaaaccugucgcagaugcgucgugauugggucuggaggcauccuccaugggcuggagcuuggacacacgcugaaucaauuugauguugugauucggcucaacuccgcgcccgucgaaggcuacagcgagcacgugggcaauaagaccacaauccgcaugaccuauccggaaggggccccucugucugaccuugaguacuauuccaacgaucuguucguggcuguccucuuuaaaagcguugacuucaauuggcugcaggccauggugaagaaggaaacacugcccuuuugggugagacucuucuuuuggaaacaggucgcugagaagaucccucugcagcccaaacauuuccggauucuuaaccccgugaucauuaaggagaccgccuucgauauccugcaauacucugaaccucaguccagauuuuggggacgcgacaaaaauguuccgacgauuggcgugaucgccgucgugcucgcuacacaccugugugacgagguuagccuugcgggguucggauaugaucugaaccagccccggaccccucuccauuacuuugacucccaaugcauggccgcuaugaauuuccagacaaugcacaacgugaccaccgaaacaaaguuucugcugaagcucgucaaagagggcguggucaaggaucugucugggggaauugacagagaguucuga

SEQ ID NO: 3429 - protein, 352 aa, Artificial Sequence
  SIRT2/m__Homo_sapiens__A0A024R0G8
MDFLRNLFSQTLSLGSQKERLLDELTLEGVARYMQSERCRRVICLVGAGISTSAGIPDFRSPSTGLYDNLEKYHLPYPEAIFEISYFKKHPEPFFALAKELYPGQFKPTICHYFMRLLKDKGLLLRCYTQNIDTLERIAGLEQEDLVEAHGTFYTSHCVSASCRHEYPLSWMKEKIFSEVTPKCEDCQSLVKPDIVFFGESLPARFFSCMQSDFLKVDLLLVMGTSLQVQPFASLISKAPLSTPRLLINKEKAGQSDPFLGMIMGLGGGMDFDSKKAYRDVAWLGECDQGCLALAELLGWKKELEDLVRREHASIDAQSGAGVPNPSTSASPKKSPPPAKDEARTTEREKPQ

SEQ ID NO: 3430 - RNA, 1059 nt, Artificial Sequence
  SIRT2/m__Homo_sapiens__EAW56837
auggacuuccugcggaacuuauucucccagacgcucagccugggcagccagaaggagcgucugcuggacgagcugaccuuggaagggguggcccgguacaugcagagcgaacgcugucgcagagucaucuguuuggugggagcuggaaucuccacauccgcaggcauccccgacuuucgcucuccauccaccggccucuaugacaaccuagagaaguaccaucuucccuacccagaggccaucuuugagaucagcuauuucaagaaacauccggaacccuucuucgcccucgccaaggaacucuauccugggcaguucaagccaaccaucugucacuacuucaugcgccugcugaaggacaaggggcuacuccugcgcugcuacacgcagaacauagauacccuggagcgaauagccgggcuggaacaggaggacuugguggaggcgcacggcaccuucuacacaucacacugcgucagcgccagcugccggcacgaauacccgcuaagcuggaugaaagagaagaucuucucugaggugacgcccaagugugaagacugucagagccuggugaagccugauaucgucuuuuuuggugagagccucccagcgcguuucuucuccuguaugcagucagacuuccugaagguggaccuccuccuggucauggguaccuccuugcaggugcagcccuuugccucccucaucagcaaggcaccccucuccaccccucgccugcucaucaacaaggagaaagcuggccagucggacccuuuccuggggaugauuaugggccucggaggaggcauggacuuugacuccaagaaggccuacagggacguggccuggcugggugaaugcgaccagggcugccuggcccuugcugagcuccuuggauggaagaaggagcuggaggaccuuguccggagggagcacgccagcauagaugcccagucgggggcggggguccccaaccccagcacuucagcuucccccaagaaguccccgccaccugccaaggacgaggccaggacaacagagagggagaaaccccaguga

SEQ ID NO: 3431 - RNA, 1059 nt, Artificial Sequence
  derived and/or modified sequence opt1 from SIRT2/m__Homo_sapiens__EAW56837
auggacuuccugcgcaaccucuucagccagacccugagccugggcagccagaaggagcggcuccuggacgagcugacccucgaggggguggcccgcuacaugcaguccgagcggugccgccgggucaucugccuggugggcgccgggaucagcacguccgcgggcauccccgacuuccgcagccccuccaccgggcuguacgacaaccucgagaaguaccaccuccccuaccccgaggccaucuucgagaucagcuacuucaagaagcaccccgagccguucuucgcccuggccaaggagcuguaccccggccaguucaagcccaccaucugccacuacuucaugcggcugcugaaggacaagggccuccugcugcgcugcuacacccagaacaucgacacgcucgagcggaucgccgggcuggagcaggaggaccugguggaggcgcacggcaccuucuacaccucccacugcgucagcgccuccugccgccacgaguacccccucagcuggaugaaggagaagaucuucuccgaggugaccccgaagugcgaggacugccagagccuggugaagcccgacaucgucuucuucggggagucccugcccgcccgguucuucagcugcaugcaguccgacuuccucaagguggaccugcugcucgugaugggcacgagccugcagguccagcccuucgccucccugaucagcaaggcgccgcucagcacgccccgccugcugaucaacaaggagaaggccgggcaguccgaccccuuccucggcaugaucaugggccucgggggcgggauggacuucgacagcaagaaggccuaccgggacguggccuggcugggcgagugcgaccagggcugccuggcccuggcggagcugcucggguggaagaaggagcuggaggaccuggugcgccgggagcacgccuccaucgacgcccagagcggcgccgggguccccaacccguccaccagcgccucccccaagaaguccccgccgcccgcgaaggacgaggcccgcaccaccgagcgggagaagccccaguga

SEQ ID NO: 3432 - RNA, 1059 nt, Artificial Sequence
  derived and/or modified sequence opt2 from SIRT2/m__Homo_sapiens__EAW56837
auggacuuccuccgcaaccucuucucccagacccucucccucggcucccagaaggagcgccuccucgacgagcucacccucgagggcgucgcccgcuacaugcaguccgagcgcugccgccgcgucaucugccucgucggcgccggcaucuccaccuccgccggcauccccgacuuccgcucccccuccaccggccucuacgacaaccucgagaaguaccaccuccccuaccccgaggccaucuucgagaucuccuacuucaagaagcaccccgagcccuucuucgcccucgccaaggagcucuaccccggccaguucaagcccaccaucugccacuacuucaugcgccuccucaaggacaagggccuccuccuccgcugcuacacccagaacaucgacacccucgagcgcaucgccggccucgagcaggaggaccucgucgaggcccacggcaccuucuacaccucccacugcgucuccgccuccugccgccacgaguacccccucuccuggaugaaggagaagaucuucuccgaggucacccccaagugcgaggacugccagucccucgucaagcccgacaucgucuucuucggcgagucccuccccgcccgcuucuucuccugcaugcaguccgacuuccucaaggucgaccuccuccucgucaugggcaccucccuccagguccagcccuucgccucccucaucuccaaggccccccucuccaccccccgccuccucaucaacaaggagaaggccggccaguccgaccccuuccucggcaugaucaugggccucggcggcggcauggacuucgacuccaagaaggccuaccgcgacgucgccuggcucggcgagugcgaccagggcugccucgcccucgccgagcuccucggcuggaagaaggagcucgaggaccucguccgccgcgagcacgccuccaucgacgcccaguccggcgccggcguccccaaccccuccaccuccgccucccccaagaagucccccccccccgccaaggacgaggcccgcaccaccgagcgcgagaagccccaguga

SEQ ID NO: 3433 - RNA, 1059 nt, Artificial Sequence
  derived and/or modified sequence opt3 from SIRT2/m__Homo_sapiens__EAW56837
auggacuuccugagaaaccucuuuagccagacccuuucccugggcucucaaaaggagagguuguuagaugaacugacacuagaggggguggcccgguacaugcagucagaacgcugccgacgugucaucugucucguuggagcugguauuaguacuagcgcaggcauacccgacuucagauccccuucuacggggcuguaugauaaucuugagaaauaccaucugccauauccggaagccaucuuugagauuucguacuucaagaaacaccccgagccauuuuucgcguuggcuaaggaacucuauccuggacaguuuaaacccaccaucugccacuacuucaugaggcugcugaaggacaagggccucuuacugcgguguuauacacagaacauugauacucuugagcgcaucgccgguuuggaacaagaggaccugguggaggcacaugggaccuuuuacacaucacacugcguaagcgccaguuguagacaugaauacccucuauccuggaugaaagagaagauauucucugaagugaccccaaaaugcgaggauugucagagccucgucaagcccgacaucguguuuuucggagaaucccugccugcuagguuuuucucaugcaugcagagugauuuccuuaaaguugaccuguugcucgugaugggcacuagccugcagguccaaccauuugcaucuuuaauuuccaaggccccgcugucaacaccccggcuccuuaucaauaaggagaaagcuggccagagcgauccuuuccuggggaugauuaugggauuggguggcgggauggacuuugauaguaagaaagccuaucgcgacguggcguggcuaggagagugugaccagggcugccuggcacucgccgaacugcuugguuggaagaaagagcuggaagauuugguacgaagagagcacgcuucuaucgacgcccaguccggggcaggaguuccaaaccccagcaccucggcuucuccuaagaaauccccacccccggccaaggaugaagcgaggacgacugagcgggagaagccucaauga

SEQ ID NO: 3434 - RNA, 1059 nt, Artificial Sequence
  derived and/or modified sequence opt4 from SIRT2/m__Homo_sapiens__EAW56837
auggacuuccugagaaaccuguucagccagacccugagccugggcagccagaaggagagacugcuggacgagcugacccuggagggcguggccagauacaugcagagcgagagaugcagaagagugaucugccuggugggcgccggcaucagcaccagcgccggcauccccgacuucagaagccccagcaccggccuguacgacaaccuggagaaguaccaccugcccuaccccgaggccaucuucgagaucagcuacuucaagaagcaccccgagcccuucuucgcccuggccaaggagcuguaccccggccaguucaagcccaccaucugccacuacuucaugagacugcugaaggacaagggccugcugcugagaugcuacacccagaacaucgacacccuggagagaaucgccggccuggagcaggaggaccugguggaggcccacggcaccuucuacaccagccacugcgugagcgccagcugcagacacgaguacccccugagcuggaugaaggagaagaucuucagcgaggugacccccaagugcgaggacugccagagccuggugaagcccgacaucguguucuucggcgagagccugcccgccagauucuucagcugcaugcagagcgacuuccugaagguggaccugcugcuggugaugggcaccagccugcaggugcagcccuucgccagccugaucagcaaggccccccugagcacccccagacugcugaucaacaaggagaaggccggccagagcgaccccuuccugggcaugaucaugggccugggcggcggcauggacuucgacagcaagaaggccuacagagacguggccuggcugggcgagugcgaccagggcugccuggcccuggccgagcugcugggcuggaagaaggagcuggaggaccuggugagaagagagcacgccagcaucgacgcccagagcggcgccggcgugcccaaccccagcaccagcgccagccccaagaagagccccccccccgccaaggacgaggccagaaccaccgagagagagaagccccaguga

SEQ ID NO: 3435 - RNA, 1059 nt, Artificial Sequence
  derived and/or modified sequence opt5 from SIRT2/m__Homo_sapiens__EAW56837
auggacuuccugagaaaccucuuuagccagacccugucccuuggcucucaaaaggagcggcugcucgaugaacugacacuugaggggguggcccgcuacaugcagagcgaaagaugccggcgcgucaucugucugguuggagcuggcauuuccacgucugccgggauccccgacuucagaagcccuuccaccggacucuaugauaaucuggagaaauaccaucugccguaucccgaagcgauuuuugagaucucuuacuucaagaaacacccugagcccuuuuucgcucucgccaaggaacuguauccuggccaguuuaaacccacaauuugccacuacuucaugcggcuucugaaggacaaggggcuccugcuucgcuguuauacccagaacaucgauacacuggagagaaucgccggacucgaacaagaggaccugguggaggcucauggcaccuuuuacacaagccacugcguguccgccagcugucggcaugaauacccucugucuuggaugaaagagaagauuuucuccgaagucaccccgaaaugcgaggauugucagagccucgugaagcccgacaucguguuuuucggcgaaucucugccugcucgcuuuuucuccugcaugcagagcgauuuccuuaaaguugaccugcuccuggucauggggacgucucuucaggugcaacccuuugccucccugauuagcaaggcgccucucuccacccccagacugcugaucaauaaggagaaagccggacagucugauccguuccucggcaugauuauggggcugggaggcgggauggacuuugauagcaagaaagccuaucgggacguugcuuggcuuggagagugugaccagggcugccuggcucucgccgaacugcuuggcuggaagaaagagcuggaagaucucgugcgcagagagcacgcguccaucgacgcccagagcggggcuggagucccuaaccccucuacauccgccagcccuaagaaaucucccccucccgcuaaggaugaagcccggaccacagagcgcgagaagccgcaauga

SEQ ID NO: 3436 - protein, 389 aa, Artificial Sequence
  SIRT2/m__Homo_sapiens__Q8IXJ6
MAEPDPSHPLETQAGKVQEAQDSDSDSEGGAAGGEADMDFLRNLFSQTLSLGSQKERLLDELTLEGVARYMQSERCRRVICLVGAGISTSAGIPDFRSPSTGLYDNLEKYHLPYPEAIFEISYFKKHPEPFFALAKELYPGQFKPTICHYFMRLLKDKGLLLRCYTQNIDTLERIAGLEQEDLVEAHGTFYTSHCVSASCRHEYPLSWMKEKIFSEVTPKCEDCQSLVKPDIVFFGESLPARFFSCMQSDFLKVDLLLVMGTSLQVQPFASLISKAPLSTPRLLINKEKAGQSDPFLGMIMGLGGGMDFDSKKAYRDVAWLGECDQGCLALAELLGWKKELEDLVRREHASIDAQSGAGVPNPSTSASPKKSPPPAKDEARTTEREKPQ

SEQ ID NO: 3437 - RNA, 1170 nt, Artificial Sequence
  SIRT2/m__Homo_sapiens__AAD40850
auggcagagccagaccccucucacccucuggagacccaggcagggaaggugcaggaggcucaggacucagauucagacucugagggaggagccgcugguggagaagcagacauggacuuccugcggaacuuauucucccagacgcucagccugggcagccagaaggagcgucugcuggacgagcugaccuuggaagggguggcccgguacaugcagagcgaacgcugucgcagagucaucuguuuggugggagcuggaaucuccacauccgcaggcauccccgacuuucgcucuccauccaccggccucuaugacaaccuagagaaguaccaucuucccuacccagaggccaucuuugagaucagcuauuucaagaaacauccggaacccuucuucgcccucgccaaggaacucuauccugggcaguucaagccaaccaucugucacuacuucaugcgccugcugaaggacaaggggcuacuccugcgcugcuacacgcagaacauagauacccuggagcgaauagccgggcuggaacaggaggacuugguggaggcgcacggcaccuucuacacaucacacugcgucagcgccagcugccggcacgaauacccgcuaagcuggaugaaagagaagaucuucucugaggugacgcccaagugugaagacugucagagccuggugaagccugauaucgucuuuuuuggugagagccucccagcgcguuucuucuccuguaugcagucagacuuccugaagguggaccuccuccuggucauggguaccuccuugcaggugcagcccuuugccucccucaucagcaaggcaccccucuccaccccucgccugcucaucaacaaggagaaagcuggccagucggacccuuuccuggggaugauuaugggccucggaggaggcauggacuuugacuccaagaaggccuacagggacguggccuggcugggugaaugcgaccagggcugccuggcccuugcugagcuccuuggauggaagaaggagcuggaggaccuuguccggagggagcacgccagcauagaugcccagucgggggcggggguccccaaccccagcacuucagcuucccccaagaaguccccgccaccugccaaggacgaggccaggacaacagagagggagaaaccccaguga

SEQ ID NO: 3438 - RNA, 1170 nt, Artificial Sequence
  derived and/or modified sequence opt1 from SIRT2/m__Homo_sapiens__AAD40850
auggccgagcccgaccccagccacccccuggagacccaggccggcaaggugcaggaggcgcaggacagcgacagcgacuccgagggcggggccgccgggggcgaggccgacauggacuuccuccgcaaccuguucagccagacccugucccucgggagccagaaggagcggcugcuggacgagcucacgcuggagggcgucgcccgcuacaugcaguccgagcggugccgccgggugaucugccuggugggcgcggggaucagcaccuccgccggcauccccgacuuccgcagccccuccaccgggcucuacgacaaccuggagaaguaccaccucccguaccccgaggccaucuucgagaucagcuacuucaagaagcaccccgagcccuucuucgcccuggcgaaggagcuguacccgggccaguucaagcccaccaucugccacuacuucaugcggcugcucaaggacaaggggcugcugcuccgcugcuacacgcagaacaucgacacccuggagcggaucgccggccuggagcaggaggaccucgucgaggcccacggcaccuucuacaccucccacugcgugagcgccuccugccgccacgaguacccccugagcuggaugaaggagaagaucuucuccgaggugacgcccaagugcgaggacugccagagccuggucaagccggacaucguguucuucggggagucccuccccgcccgguucuucagcugcaugcagagcgacuuccugaagguggaccugcuccuggucaugggcaccucccuccaggugcagcccuucgcgagccugaucuccaaggcgccccugagcaccccgcgccugcucaucaacaaggagaaggccgggcaguccgaccccuuccugggcaugaucaugggccucgggggcgggauggacuucgacagcaagaaggccuaccgggacguggccuggcugggcgagugcgaccaggggugccuggcccuggccgagcuccugggcuggaagaaggagcuggaggaccucguccgccgggagcacgccuccaucgacgcccagagcggcgccggggugcccaaccccuccaccagcgcguccccgaagaaguccccgccgcccgccaaggacgaggcccgcacgaccgagcgggagaagccccaguga

SEQ ID NO: 3439 - RNA, 1170 nt, Artificial Sequence
  derived and/or modified sequence opt2 from SIRT2/m__Homo_sapiens__AAD40850
auggccgagcccgaccccucccacccccucgagacccaggccggcaagguccaggaggcccaggacuccgacuccgacuccgagggcggcgccgccggcggcgaggccgacauggacuuccuccgcaaccucuucucccagacccucucccucggcucccagaaggagcgccuccucgacgagcucacccucgagggcgucgcccgcuacaugcaguccgagcgcugccgccgcgucaucugccucgucggcgccggcaucuccaccuccgccggcauccccgacuuccgcucccccuccaccggccucuacgacaaccucgagaaguaccaccuccccuaccccgaggccaucuucgagaucuccuacuucaagaagcaccccgagcccuucuucgcccucgccaaggagcucuaccccggccaguucaagcccaccaucugccacuacuucaugcgccuccucaaggacaagggccuccuccuccgcugcuacacccagaacaucgacacccucgagcgcaucgccggccucgagcaggaggaccucgucgaggcccacggcaccuucuacaccucccacugcgucuccgccuccugccgccacgaguacccccucuccuggaugaaggagaagaucuucuccgaggucacccccaagugcgaggacugccagucccucgucaagcccgacaucgucuucuucggcgagucccuccccgcccgcuucuucuccugcaugcaguccgacuuccucaaggucgaccuccuccucgucaugggcaccucccuccagguccagcccuucgccucccucaucuccaaggccccccucuccaccccccgccuccucaucaacaaggagaaggccggccaguccgaccccuuccucggcaugaucaugggccucggcggcggcauggacuucgacuccaagaaggccuaccgcgacgucgccuggcucggcgagugcgaccagggcugccucgcccucgccgagcuccucggcuggaagaaggagcucgaggaccucguccgccgcgagcacgccuccaucgacgcccaguccggcgccggcguccccaaccccuccaccuccgccucccccaagaagucccccccccccgccaaggacgaggcccgcaccaccgagcgcgagaagccccaguga

SEQ ID NO: 3440 - RNA, 1170 nt, Artificial Sequence
  derived and/or modified sequence opt3 from SIRT2/m__Homo_sapiens__AAD40850
auggccgagcccgacccuagccacccacuggaaacccaggcuggcaaggugcaagaggcacaggauuccgacucugauucagaagggggagccgcggguggcgaggcugacauggauuuccucagaaaccuuuuuagucagacacugagcuuggggucccagaaagaaagguuacuggacgagcuaacucucgagggagucgcccgguacaugcaaucugaacgcugccgacguguuaucugucuggugggcgcagguauuucgacgucagccgggauaccggauuucagaagccccaguaccggacuuuaugacaaucuggagaaguaccauuugccuuauccagaagcuaucuuugagauuuccuacuucaaaaagcaccccgagccauuuuucgcacucgccaaagaacuguauccuggccaguuuaagcccacaaucugccauuacuucaugaggcugcucaaggauaaaggcuuacugcuucgguguuauacucagaacauugacaccuuggagcgcaucgcugggcuggaacaggaggaucuaguagaagcccacggaacauuuuacaccucucauugcgugagcgcguccuguagacacgaguacccucucucauggaugaaggagaaaauauucagugaagucacuccaaagugcgaggacugucaaagccuggugaaaccggauaucguguuuuucggugaaucucuucccgcaagguuuuucuccugcaugcagucagacuuccugaagguugacuugcuccuggucaugggcaccagcuuacaggugcagccuuuugccagucugauuucuaaggcuccacucuccacaccccggcuucugaucaauaaagagaaggccgggcaaagcgauccuuucuugggaaugauuaugggccuaggugggggaauggacuuugauucgaaaaaggcauaucgcgacguagcuuggcugggcgaaugugaucagggcugccucgcccuggcggagcuucugggguggaaaaaggaguuggaagaccucguucgaagagagcacgccucuaucgaugcacaguccggagcuggugugccaaaccccucaacgagugccagcccgaaaaaguccccucccccagcuaaggacgaagccaggacuaccgagcgggaaaaaccucaauga

SEQ ID NO: 3441 - RNA, 1170 nt, Artificial Sequence
  derived and/or modified sequence opt4 from SIRT2/m__Homo_sapiens__AAD40850
auggccgagcccgaccccagccacccccuggagacccaggccggcaaggugcaggaggcccaggacagcgacagcgacagcgagggcggcgccgccggcggcgaggccgacauggacuuccugagaaaccuguucagccagacccugagccugggcagccagaaggagagacugcuggacgagcugacccuggagggcguggccagauacaugcagagcgagagaugcagaagagugaucugccuggugggcgccggcaucagcaccagcgccggcauccccgacuucagaagccccagcaccggccuguacgacaaccuggagaaguaccaccugcccuaccccgaggccaucuucgagaucagcuacuucaagaagcaccccgagcccuucuucgcccuggccaaggagcuguaccccggccaguucaagcccaccaucugccacuacuucaugagacugcugaaggacaagggccugcugcugagaugcuacacccagaacaucgacacccuggagagaaucgccggccuggagcaggaggaccugguggaggcccacggcaccuucuacaccagccacugcgugagcgccagcugcagacacgaguacccccugagcuggaugaaggagaagaucuucagcgaggugacccccaagugcgaggacugccagagccuggugaagcccgacaucguguucuucggcgagagccugcccgccagauucuucagcugcaugcagagcgacuuccugaagguggaccugcugcuggugaugggcaccagccugcaggugcagcccuucgccagccugaucagcaaggccccccugagcacccccagacugcugaucaacaaggagaaggccggccagagcgaccccuuccugggcaugaucaugggccugggcggcggcauggacuucgacagcaagaaggccuacagagacguggccuggcugggcgagugcgaccagggcugccuggcccuggccgagcugcugggcuggaagaaggagcuggaggaccuggugagaagagagcacgccagcaucgacgcccagagcggcgccggcgugcccaaccccagcaccagcgccagccccaagaagagccccccccccgccaaggacgaggccagaaccaccgagagagagaagccccaguga

SEQ ID NO: 3442 - RNA, 1170 nt, Artificial Sequence
  derived and/or modified sequence opt5 from SIRT2/m__Homo_sapiens__AAD40850
auggccgagcccgacccuagccacccgcuggaaacccaggcuggcaaggugcaagaggcccaggauuccgacucugauagcgaagggggagcggcuggcggggaggccgacauggauuuccucagaaaccuguuuucccagacacuuucucugggaagccagaaagaacggcuccuggacgagcuuacgcuggagggcgucgcccgcuacaugcaauccgaaagaugccggcgcguuaucugucucgugggggcuggaauuucuaccagcgccggcauccccgauuucagauccccuagcacaggccuguaugacaaucuggagaaguaccaucuccccuauccugaagcuauuuuugagaucucuuacuucaaaaagcaccccgagccguuuuucgcccuggcgaaagaacuuuauccugggcaguuuaagcccaccauuugccauuacuucaugcggcugcucaaggauaaaggacugcuucugcgcuguuauacacagaacaucgacacccucgagagaaucgccggccuggaacaggaggaucugguggaagcucacgggacauuuuacaccucccauugcgucagcgccucuugucggcacgaguacccucucuccuggaugaaggagaaaauuuucagcgaagugacgcccaagugcgaggacugucaaucucugguuaaaccugauaucguguuuuucggagaaucccuucccgcucgcuuuuucagcugcaugcaguccgacuuccugaaggucgaccuccugcuugugaugggcaccucucugcagguucagccguuugccagccucauuuccaaggcgccucugagcacacccagacugcucaucaauaaagagaaggccgggcaaucugauccuuuccugggaaugauuaugggccuuggcgggggaauggacuuugauuccaaaaaggcuuaucgggacguggccuggcugggcgaaugugaucaggggugccucgcucuggccgagcuucugggauggaaaaaggagcucgaagaccugguccgcagagagcacgccagcaucgaugcucagucuggcgcgggggugcccaaccccagcaccuccgccucuccuaaaaagagcccgcccccugcuaaggacgaagcccggacaaccgagcgcgaaaaaccccaauga

SEQ ID NO: 3443 - protein, 466 aa, Artificial Sequence
  SOX10__Homo_sapiens__P56693
MAEEQDLSEVELSPVGSEEPRCLSPGSAPSLGPDGGGGGSGLRASPGPGELGKVKKEQQDGEADDDKFPVCIREAVSQVLSGYDWTLVPMPVRVNGASKSKPHVKRPMNAFMVWAQAARRKLADQYPHLHNAELSKTLGKLWRLLNESDKRPFIEEAERLRMQHKKDHPDYKYQPRRRKNGKAAQGEAECPGGEAEQGGTAAIQAHYKSAHLDHRHPGEGSPMSDGNPEHPSGQSHGPPTPPTTPKTELQSGKADPKRDGRSMGEGGKPHIDFGNVDIGEISHEVMSNMETFDVAELDQYLPPNGHPGHVSSYSAAGYGLGSALAVASGHSAWISKPPGVALPTVSPPGVDAKAQVKTETAGPQGPPHYTDQPSTSQIAYTSLSLPHYGSAFPSISRPQFDYSDHQPSGPYYGHSGQASGLYSAFSYMGPSQRPLYTAISDPSPSGPQSHSPTHWEQPVYTTLSRP

SEQ ID NO: 3444 - RNA, 1401 nt, Artificial Sequence
  SOX10__Homo_sapiens__AAH02824
auggcggaggagcaggaccuaucggagguggagcugagccccgugggcucggaggagccccgcugccuguccccggggagcgcgcccucgcuagggcccgacggcggcggcggcggaucgggccugcgagccagcccggggccaggcgagcugggcaaggucaagaaggagcagcaggacggcgaggcggacgaugacaaguuccccgugugcauccgcgaggccgucagccaggugcucagcggcuacgacuggacgcuggugcccaugcccgugcgcgucaacggcgccagcaaaagcaagccgcacgucaagcggcccaugaacgccuucauggugugggcucaggcagcgcgcaggaagcucgcggaccaguacccgcaccugcacaacgcugagcucagcaagacgcugggcaagcucuggaggcugcugaacgaaagugacaagcgccccuucaucgaggaggcugagcggcuccguaugcagcacaagaaagaccacccggacuacaaguaccagcccaggcggcggaagaacgggaaggccgcccagggcgaggcggagugccccgguggggaggccgagcaaggugggaccgccgccauccaggcccacuacaagagcgcccacuuggaccaccggcacccaggagagggcucccccaugucagaugggaaccccgagcaccccucaggccagagccauggcccacccaccccuccaaccaccccgaagacagagcugcagucgggcaaggcagacccgaagcgggacgggcgcuccaugggggagggcgggaagccucacaucgacuucggcaacguggacauuggugagaucagccacgagguaauguccaacauggagaccuuugauguggcugaguuggaccaguaccugccgcccaaugggcacccaggccaugugagcagcuacucagcagccggcuaugggcugggcagugcccuggccguggccaguggacacuccgccuggaucuccaagccaccaggcguggcucugcccacggucucaccaccugguguggaugccaaagcccaggugaagacagagaccgcggggccccaggggcccccacacuacaccgaccagccauccaccucacagaucgccuacaccucccucagccugccccacuauggcucagccuuccccuccaucucccgcccccaguuugacuacucugaccaucagcccucaggacccuauuauggccacucgggccaggccucuggccucuacucggccuucuccuauauggggcccucgcagcggccccucuacacggccaucucugaccccagccccucagggccccagucccacagccccacacacugggagcagccaguauauacgacacugucccggcccuaa

SEQ ID NO: 3445 - RNA, 1401 nt, Artificial Sequence
  derived and/or modified sequence opt1 from SOX10__Homo_sapiens__AAH02824
auggccgaggagcaggaccugagcgagguggagcucucccccgucggcagcgaggagccgcgcugccugucccccgggagcgcccccucccugggccccgacgggggcgggggcggcagcgggcuccgggcguccccgggccccggggagcugggcaaggugaagaaggagcagcaggacggggaggccgacgacgacaaguuccccgugugcauccgcgaggccgucagccaggugcuguccggcuacgacuggacccucgugcccaugccgguccgggugaacggcgccagcaaguccaagccccacgugaagcgccccaugaacgccuucauggucugggcgcaggccgcccggcgcaagcuggccgaccaguacccccaccuccacaacgcggagcucagcaagacccuggggaagcuguggcggcuccugaacgaguccgacaagcgcccguucaucgaggaggccgagcggcugcgcaugcagcacaagaaggaccaccccgacuacaaguaccagccccggcgccggaagaacggcaaggccgcccagggggaggccgagugccccggcggcgaggcggagcagggcgggacggccgccauccaggcccacuacaagagcgcccaccucgaccaccgccacccgggggagggcucccccaugagcgacgggaaccccgagcaccccuccggccagagccacggcccgcccaccccgcccaccacccccaagacggagcugcaguccgggaaggcggaccccaagcgggacggccgcagcaugggggagggcgggaagccccacaucgacuucggcaacguggacaucggcgagaucagccacgaggugauguccaacauggagaccuucgacgucgccgagcuggaccaguaccugcccccgaacgggcaccccggccacgugagcuccuacagcgccgccggguacggccugggguccgcccuggcgguggccagcggccacuccgccuggaucagcaagcccccgggcgucgcccuccccaccguguccccgcccgggguggacgccaaggcgcaggucaagaccgagacggccggcccccaggggccgccccacuacaccgaccagcccagcaccucccagaucgccuacaccagccugucccugccccacuacggcagcgccuuccccuccaucagccggccccaguucgacuacuccgaccaccagcccagcggcccguacuacgggcacuccggccaggcgagcgggcucuacagcgccuucuccuacaugggccccagccagcgcccccuguacacggccaucuccgaccccagcccguccgggccccagagccacucccccacccacugggagcagcccguguacaccacccugagccggccguga

SEQ ID NO: 3446 - RNA, 1401 nt, Artificial Sequence
  derived and/or modified sequence opt2 from SOX10__Homo_sapiens__AAH02824
auggccgaggagcaggaccucuccgaggucgagcucucccccgucggcuccgaggagccccgcugccucucccccggcuccgcccccucccucggccccgacggcggcggcggcggcuccggccuccgcgccucccccggccccggcgagcucggcaaggucaagaaggagcagcaggacggcgaggccgacgacgacaaguuccccgucugcauccgcgaggccgucucccagguccucuccggcuacgacuggacccucguccccaugcccguccgcgucaacggcgccuccaaguccaagccccacgucaagcgccccaugaacgccuucauggucugggcccaggccgcccgccgcaagcucgccgaccaguacccccaccuccacaacgccgagcucuccaagacccucggcaagcucuggcgccuccucaacgaguccgacaagcgccccuucaucgaggaggccgagcgccuccgcaugcagcacaagaaggaccaccccgacuacaaguaccagccccgccgccgcaagaacggcaaggccgcccagggcgaggccgagugccccggcggcgaggccgagcagggcggcaccgccgccauccaggcccacuacaaguccgcccaccucgaccaccgccaccccggcgagggcucccccauguccgacggcaaccccgagcaccccuccggccagucccacggcccccccaccccccccaccacccccaagaccgagcuccaguccggcaaggccgaccccaagcgcgacggccgcuccaugggcgagggcggcaagccccacaucgacuucggcaacgucgacaucggcgagaucucccacgaggucauguccaacauggagaccuucgacgucgccgagcucgaccaguaccucccccccaacggccaccccggccacgucuccuccuacuccgccgccggcuacggccucggcuccgcccucgccgucgccuccggccacuccgccuggaucuccaagccccccggcgucgcccuccccaccgucuccccccccggcgucgacgccaaggcccaggucaagaccgagaccgccggcccccagggccccccccacuacaccgaccagcccuccaccucccagaucgccuacaccucccucucccucccccacuacggcuccgccuuccccuccaucucccgcccccaguucgacuacuccgaccaccagcccuccggccccuacuacggccacuccggccaggccuccggccucuacuccgccuucuccuacaugggccccucccagcgcccccucuacaccgccaucuccgaccccucccccuccggcccccagucccacucccccacccacugggagcagcccgucuacaccacccucucccgccccuga

SEQ ID NO: 3447 - RNA, 1401 nt, Artificial Sequence
  derived and/or modified sequence opt3 from SOX10__Homo_sapiens__AAH02824
auggccgaggaacaggaccugagcgagguggaacucucccccgucggcucugaggaaccuagaugccuuucaccagggagugcuccgagccugggacccgaugguggcgggggaggcuccgguuugagggcaucuccugggccaggagaguuaggcaagguuaaaaaggagcaacaggacggcgaagccgaugacgauaaauuccccguguguauccgggaggcgguaucgcaagugcugucaggguacgacuggacccuagucccuaugccagugcgcguuaacggagcuagcaagaguaaaccccacgugaagcgaccuaugaaugccuuuauggucugggcacaggccgcucguagaaagcucgcagaucaauauccacaucugcacaacgccgaacuuuccaaaacacuggguaaguuguggaggcuccugaaugagucugacaaacggccguucauugaggaagcugagcgccugagaaugcagcauaagaaagaucaccccgacuacaaguaucagccuaggcggcgcaagaacggcaaagccgcgcagggggaagcagagugcccaggaggcgaagccgagcaaggugggacugcugccauacaggcacauuacaagagcgcucaccucgaucaccgacaucccggagagggcuccccuaugucagacggcaauccagaacaccccagugggcagagccauggaccgccuacgcccccaaccacaccuaaaacugaguuacagucugguaaggccgaucccaaaagagacggcagguccaugggggaaggaggcaagccacacaucgacuuugguaacguggauauuggggagaucucacacgaaguaaugagcaauauggagaccuucgacguugcggagcuggaucaauaucuucccccuaacggccauccaggacacgugaguucuuacuccgccgcaggcuauggguugggaagcgcucuggccgucgcuucgggucauucugccuggauuuccaaaccgcccggcguggcacuaccuacagugucaccacccggggucgacgccaaggcucagguuaagaccgaaacugcgggaccucagggcccaccccacuacacagaucaaccgaguaccagccagaucgcauacacgucccucucucugccucauuaugguagcgccuuuccaucaauaagucggccccaguucgacuacuccgaucaccagccuagcgggcccuauuacggccacucuggacaggcuucaggccuuuauagugccuuuagcuacauggggccaucccagcguccucuguauacugcaaucucugaccccucgccaagcggaccgcagucccauucaccuacccacugggagcagcccguguacacaacuuugagucgcccauga

SEQ ID NO: 3448 - RNA, 1401 nt, Artificial Sequence
  derived and/or modified sequence opt4 from SOX10__Homo_sapiens__AAH02824
auggccgaggagcaggaccugagcgagguggagcugagccccgugggcagcgaggagcccagaugccugagccccggcagcgcccccagccugggccccgacggcggcggcggcggcagcggccugagagccagccccggccccggcgagcugggcaaggugaagaaggagcagcaggacggcgaggccgacgacgacaaguuccccgugugcaucagagaggccgugagccaggugcugagcggcuacgacuggacccuggugcccaugcccgugagagugaacggcgccagcaagagcaagccccacgugaagagacccaugaacgccuucauggugugggcccaggccgccagaagaaagcuggccgaccaguacccccaccugcacaacgccgagcugagcaagacccugggcaagcuguggagacugcugaacgagagcgacaagagacccuucaucgaggaggccgagagacugagaaugcagcacaagaaggaccaccccgacuacaaguaccagcccagaagaagaaagaacggcaaggccgcccagggcgaggccgagugccccggcggcgaggccgagcagggcggcaccgccgccauccaggcccacuacaagagcgcccaccuggaccacagacaccccggcgagggcagccccaugagcgacggcaaccccgagcaccccagcggccagagccacggcccccccaccccccccaccacccccaagaccgagcugcagagcggcaaggccgaccccaagagagacggcagaagcaugggcgagggcggcaagccccacaucgacuucggcaacguggacaucggcgagaucagccacgaggugaugagcaacauggagaccuucgacguggccgagcuggaccaguaccugccccccaacggccaccccggccacgugagcagcuacagcgccgccggcuacggccugggcagcgcccuggccguggccagcggccacagcgccuggaucagcaagccccccggcguggcccugcccaccgugagcccccccggcguggacgccaaggcccaggugaagaccgagaccgccggcccccagggccccccccacuacaccgaccagcccagcaccagccagaucgccuacaccagccugagccugccccacuacggcagcgccuuccccagcaucagcagaccccaguucgacuacagcgaccaccagcccagcggccccuacuacggccacagcggccaggccagcggccuguacagcgccuucagcuacaugggccccagccagagaccccuguacaccgccaucagcgaccccagccccagcggcccccagagccacagccccacccacugggagcagcccguguacaccacccugagcagacccuga

SEQ ID NO: 3449 - RNA, 1401 nt, Artificial Sequence
  derived and/or modified sequence opt5 from SOX10__Homo_sapiens__AAH02824
auggccgaggaacaggaccugagcgagguggaacucucccccgucggcucugaggaaccuagaugccugagcccgggguccgcucccucucuuggaccugauggcgggggaggcgggagcggacugcgggccucccccggcccuggcgagcucgggaagguuaaaaaggagcaacaggacggagaagcggaugacgauaaauuccccguguguauccgcgaggcugugucucagguccugagcggcuacgacuggacccuugugccuaugccgguuagagugaacggggccuccaagagcaaaccccacgucaagcggccuaugaaugccuuuauggugugggcucaggccgcucgcagaaagcuggccgaucaauauccccaucuccacaacgcggaacugucuaaaacacugggaaagcucuggcggcugcuuaaugaguccgacaaacgcccuuucauugaggaagccgagagacugcggaugcagcauaagaaagaucaccccgacuacaaguaucagccgcgcagacggaagaacggcaaagcugcccagggggaagcugagugcccuggaggcgaagccgagcaaggcgggacggcggccauccaggcucauuacaagagcgcccaccucgaucaccgccaucccggagagggcucuccuauguccgacgggaaucccgaacaccccagcggacagucucauggcccuccgacacccccuaccacccccaaaacagagcugcaguccgggaaggcugauccuaaaagagacggacggagcaugggcgaaggcgggaagccccacauugacuuuggaaacguugauaucggcgagauuucccacgaagugaugucuaauauggagaccuucgacgucgccgagcuugaucaauaucugccgccuaacgggcaucccggacacgugagcuccuacagcgccgcuggcuaugggcucggcucugcgcuggccguggcuuccggacauagcgccuggaucucuaaaccucccggcgucgcccugccuacaguuagcccgcccgggguggacgcuaaggcccaggugaagaccgaaacggcgggaccucagggcccuccccacuacaccgaucaacccuccacaucucagaucgcuuacaccagccucucccugccgcauuaugggagcgccuuucccucuauuucccgcccucaguucgacuacagcgaucaccagcccucuggaccuuauuacggccacuccgggcaagccagcggccuuuauuccgcuuuuucuuacaugggacccagccagagaccucuguauacagccaucuccgaccccucuccgagcggcccucagucccauagccccacccacugggagcagccugucuacacgacacucucucggcccuga

SEQ ID NO: 3450 - protein, 151 aa, Artificial Sequence
  SP17__Homo_sapiens__Q15506
MSIPFSNTHYRIPQGFGNLLEGLTREILREQPDNIPAFAAAYFESLLEKREKTNFDPAEWGSKVEDRFYNNHAFEEQEPPEKSDPKQEESQISGKEEETSVTILDSSEEDKEKEEVAAVKIQAAFRGHIAREEAKKMKTNSLQNEEKEENK

SEQ ID NO: 3451 - RNA, 456 nt, Artificial Sequence
  SP17__Homo_sapiens__AAH32457
augucgauuccauucuccaacacccacuaccgaauuccacaaggauuugggaaucuucuugaagggcugacacgcgagauucugagagagcaaccggacaauauaccagcuuuugcagcagccuauuuugagagccuucuagagaaaagagagaaaaccaacuuugauccagcagaaugggggaguaagguagaagaccgcuucuauaacaaucaugcauucgaggagcaagaaccaccugagaaaagugauccuaaacaagaagagucucagauaucugggaaggaggaagagacaucagucaccaucuuagacucuucugaggaagauaaggaaaaagaagagguugcugcugucaaaauccaagcugccuuccggggacacauagccagagaggaggcaaagaaaaugaaaacaaauagucuucaaaaugaggaaaaagaggaaaacaaguga

SEQ ID NO: 3452 - RNA, 456 nt, Artificial Sequence
  derived and/or modified sequence opt1 from SP17__Homo_sapiens__AAH32457
augagcauccccuucuccaacacccacuaccgcaucccgcagggcuucgggaaccugcucgagggccugacccgggagauccugcgcgagcagcccgacaacauccccgccuucgccgcggccuacuucgagagccuccuggagaagcgggagaagacgaacuucgaccccgccgaguggggguccaagguggaggaccgcuucuacaacaaccacgccuucgaggagcaggagccgcccgagaaguccgaccccaagcaggaggagagccagaucagcggcaaggaggaggagaccuccgucaccauccuggacagcuccgaggaggacaaggagaaggaggagguggccgcggugaagauccaggccgccuuccgggggcacaucgcccgcgaggaggcgaagaagaugaagaccaacagccuccagaacgaggagaaggaggagaacaaguga

SEQ ID NO: 3453 - RNA, 456 nt, Artificial Sequence
  derived and/or modified sequence opt2 from SP17__Homo_sapiens__AAH32457
auguccauccccuucuccaacacccacuaccgcaucccccagggcuucggcaaccuccucgagggccucacccgcgagauccuccgcgagcagcccgacaacauccccgccuucgccgccgccuacuucgagucccuccucgagaagcgcgagaagaccaacuucgaccccgccgaguggggcuccaaggucgaggaccgcuucuacaacaaccacgccuucgaggagcaggagccccccgagaaguccgaccccaagcaggaggagucccagaucuccggcaaggaggaggagaccuccgucaccauccucgacuccuccgaggaggacaaggagaaggaggaggucgccgccgucaagauccaggccgccuuccgcggccacaucgcccgcgaggaggccaagaagaugaagaccaacucccuccagaacgaggagaaggaggagaacaaguga

SEQ ID NO: 3454 - RNA, 456 nt, Artificial Sequence
  derived and/or modified sequence opt3 from SP17__Homo_sapiens__AAH32457
augagcauccccuucuccaacacccacuacaggauuccucagggcuuugggaaucugcucgagggacuuacaagagaaauacugcgggagcaaccagacaacaucccggccuucgcugcagccuauuuugaaucuuuguuagagaagcgcgagaaaacuaauuucgaucccgcggagugggguucaaagguggaggaccgauuuuacaacaaucaugcuuucgaagaacaggaaccuccagagaaaagugaucccaagcaggaggaaagccagauuuccggcaaagaggaagagacgucugucaccauccuggacucgucagaagaggauaaggagaaggaagagguugccgcagugaaaauucaagccgcuuuucgugggcacaucgcaagagaagaggccaagaaaaugaagacaaacagccuacagaaugaagagaaagaggaaaacaaguga

SEQ ID NO: 3455 - RNA, 456 nt, Artificial Sequence
  derived and/or modified sequence opt4 from SP17__Homo_sapiens__AAH32457
augagcauccccuucagcaacacccacuacagaaucccccagggcuucggcaaccugcuggagggccugaccagagagauccugagagagcagcccgacaacauccccgccuucgccgccgccuacuucgagagccugcuggagaagagagagaagaccaacuucgaccccgccgaguggggcagcaagguggaggacagauucuacaacaaccacgccuucgaggagcaggagccccccgagaagagcgaccccaagcaggaggagagccagaucagcggcaaggaggaggagaccagcgugaccauccuggacagcagcgaggaggacaaggagaaggaggagguggccgccgugaagauccaggccgccuucagaggccacaucgccagagaggaggccaagaagaugaagaccaacagccugcagaacgaggagaaggaggagaacaaguga

SEQ ID NO: 3456 - RNA, 456 nt, Artificial Sequence
  derived and/or modified sequence opt5 from SP17__Homo_sapiens__AAH32457
augagcauccccuucuccaacacccacuaccggauuccucagggcuuugggaaucugcucgagggacugacaagagaaauccuucgcgagcaaccggacaacauucccgccuucgcugccgcguauuuugaaucucugcucgagaagagagagaaaacgaauuucgauccugcugaguggggcagcaagguggaggaccgguuuuacaacaaucaugccuucgaagaacaggaacccccugagaaauccgaucccaagcaggaggaaucucagaucagcgggaaagaggaagagaccuccgucacaauucuggacucuagcgaagaggauaaggagaaggaagagguugccgcugugaaaauccaagccgcuuuucgcggacacaucgccagagaagaggcgaagaaaaugaagaccaacucccuucagaaugaagagaaagaggaaaacaaguga

SEQ ID NO: 3457 - protein, 97 aa, Artificial Sequence
  SPNXA__Homo_sapiens__Q9NS26
MDKQSSAGGVKRSVPCDSNEANEMMPETPTGDSDPQPAPKKMKTSESSTILVVRYRRNFKRTSPEELLNDHARENRINPLQMEEEEFMEIMVEIPAK

SEQ ID NO: 3458 - RNA, 294 nt, Artificial Sequence
  SPNXA__Homo_sapiens__AAF28420
auggacaaacaauccagugccggcggggugaagaggagcguccccugugauuccaacgaggccaacgagaugaugccggagaccccaacuggggacucagacccgcaaccugcuccuaaaaaaaugaaaacaucugaguccucgaccauacuagugguucgcuacaggaggaacuuuaaaagaacaucuccagaggaacugcugaaugaccacgcccgagagaacagaaucaacccccuccaaauggaggaggaggaauucauggaaauaaugguugaaauaccugcaaaguag

SEQ ID NO: 3459 - RNA, 294 nt, Artificial Sequence
  derived and/or modified sequence opt1 from SPNXA__Homo_sapiens__AAF28420
auggacaagcagagcuccgccggcggggugaagcgcagcguccccugcgacuccaacgaggccaacgagaugaugccggagacccccaccggcgacagcgacccccagcccgcgccgaagaagaugaagacguccgagagcuccaccauccugguggugcgguaccgccggaacuucaagcgcaccagccccgaggagcuccugaacgaccacgcccgggagaaccgcaucaacccccugcagauggaggaggaggaguucauggagaucauggucgagauccccgccaaguga

SEQ ID NO: 3460 - RNA, 294 nt, Artificial Sequence
  derived and/or modified sequence opt2 from SPNXA__Homo_sapiens__AAF28420
auggacaagcaguccuccgccggcggcgucaagcgcuccguccccugcgacuccaacgaggccaacgagaugaugcccgagacccccaccggcgacuccgacccccagcccgcccccaagaagaugaagaccuccgaguccuccaccauccucgucguccgcuaccgccgcaacuucaagcgcaccucccccgaggagcuccucaacgaccacgcccgcgagaaccgcaucaacccccuccagauggaggaggaggaguucauggagaucauggucgagauccccgccaaguga

SEQ ID NO: 3461 - RNA, 294 nt, Artificial Sequence
  derived and/or modified sequence opt3 from SPNXA__Homo_sapiens__AAF28420
auggacaagcagagcuccgccggcggggugaaaagaucuguccccugcgauucaaacgaggcuaaugaaaugaugccugagaccccaacaggagacagugauccgcaacccgcaccuaagaaaaugaagacuagcgaauccucuacgauccugguugugagguaccggcgcaacuucaaacgaaccucgccagaggaacuccuuaaugaccacgcccgugagaacagaauuaauccccugcagauggaggaagaggaauuuauggagauaaugguagagaucccugcgaaguga

SEQ ID NO: 3462 - RNA, 294 nt, Artificial Sequence
  derived and/or modified sequence opt4 from SPNXA__Homo_sapiens__AAF28420
auggacaagcagagcagcgccggcggcgugaagagaagcgugcccugcgacagcaacgaggccaacgagaugaugcccgagacccccaccggcgacagcgacccccagcccgcccccaagaagaugaagaccagcgagagcagcaccauccugguggugagauacagaagaaacuucaagagaaccagccccgaggagcugcugaacgaccacgccagagagaacagaaucaacccccugcagauggaggaggaggaguucauggagaucaugguggagauccccgccaaguga

SEQ ID NO: 3463 - RNA, 294 nt, Artificial Sequence
  derived and/or modified sequence opt5 from SPNXA__Homo_sapiens__AAF28420
auggacaagcagagcuccgccggcggggugaaaagaucuguccccugcgauagcaacgaggcuaaugaaaugaugccugagaccccgacaggagacuccgauccccaaccugcccccaagaaaaugaagacgucugaaagcuccaccauccugguugugcgguaccgcagaaacuucaaacggacaucuccugaggaacuccugaaugaccacgcgcgcgagaacagaauuaauccccuucagauggaggaagaggaauuuauggagaucaugguggagauuccugcuaaguga

SEQ ID NO: 3464 - protein, 141 aa, Artificial Sequence
  SPXN3__Homo_sapiens__Q5MJ09
MEQPTSSTNGEKTKSPCESNNKKNDEMQEVPNRVLAPEQSLKKTKTSEYPIIFVYYLRKGKKINSNQLENEQSQENSINPIQKEEDEGVDLSEGSSNEDEDLGPCEGPSKEDKDLDSSEGSSQEDEDLGLSEGSSQDSGED

SEQ ID NO: 3465 - RNA, 426 nt, Artificial Sequence
  SPXN3__Homo_sapiens__AAH62750
auggaacagccaacuuccaguaccaauggggagaagacgaagagccccugugaauccaauaacaaaaaaaaugaugagaugcaagagguaccaaacagagucuuagcccccgaacagaguuugaagaagacaaaaacaucagaauauccaauaauauuuguguauuaccucaggaaggguaagaaaauaaauucaaaucaacuggagaaugaacagucccaagagaacuccaucaauccaauccaaaaggaggaggacgaaggcguagacuuaucugaaggaucuucaaaugaggaugaagaccuaggcccaugugaaggaccuucaaaggaggacaaagaucuagacucaucugaaggauccucacaggaggaugaagaccuaggcuuaucugaaggaucuucacaggacaguggggaggauuag

SEQ ID NO: 3466 - RNA, 426 nt, Artificial Sequence
  derived and/or modified sequence opt1 from SPXN3__Homo_sapiens__AAH62750
auggagcagcccaccagcuccaccaacggcgagaagaccaagagcccgugcgaguccaacaacaagaagaacgacgagaugcaggaggugcccaaccgcguccuggcccccgagcagagccucaagaagacgaagaccuccgaguaccccaucaucuucguguacuaccugcggaaggggaagaagaucaacagcaaccagcuggagaacgagcagucccaggagaacagcaucaacccgauccagaaggaggaggacgagggcguggaccucuccgaggggagcuccaacgaggacgaggaccugggccccugcgaggggcccagcaaggaggacaaggaccuggacuccagcgagggcuccagccaggaggacgaggaccucggccuguccgaggggagcucccaggacagcggcgaggacuga

SEQ ID NO: 3467 - RNA, 426 nt, Artificial Sequence
  derived and/or modified sequence opt2 from SPXN3__Homo_sapiens__AAH62750
auggagcagcccaccuccuccaccaacggcgagaagaccaagucccccugcgaguccaacaacaagaagaacgacgagaugcaggagguccccaaccgcguccucgcccccgagcagucccucaagaagaccaagaccuccgaguaccccaucaucuucgucuacuaccuccgcaagggcaagaagaucaacuccaaccagcucgagaacgagcagucccaggagaacuccaucaaccccauccagaaggaggaggacgagggcgucgaccucuccgagggcuccuccaacgaggacgaggaccucggccccugcgagggccccuccaaggaggacaaggaccucgacuccuccgagggcuccucccaggaggacgaggaccucggccucuccgagggcuccucccaggacuccggcgaggacuga

SEQ ID NO: 3468 - RNA, 426 nt, Artificial Sequence
  derived and/or modified sequence opt3 from SPXN3__Homo_sapiens__AAH62750
auggagcagcccaccagcuccacaaacggcgaaaagacuaaaucuccuugcgagucaaauaacaagaaaaaugacgaaaugcaagaggugccaaacagaguccuggccccggaacagagucucaagaaaacgaagaccagcgaguaccccaucauuuucguuuauuaccuuaggaaggggaaaaagauaaauuccaaccagcuggagaaugaacagucucaagagaacucgaucaauccuauucagaaagaagaggaugagggaguggacuugucagaagguagcaguaacgaggaugaagacuuaggcccaugugaggggcccuccaaggaagauaaagaccuggauucuagcgagggauccucacaggaggacgaagaucuaggccucagugaggguagcucucaggacuccggggaagauuga

SEQ ID NO: 3469 - RNA, 426 nt, Artificial Sequence
  derived and/or modified sequence opt4 from SPXN3__Homo_sapiens__AAH62750
auggagcagcccaccagcagcaccaacggcgagaagaccaagagccccugcgagagcaacaacaagaagaacgacgagaugcaggaggugcccaacagagugcuggcccccgagcagagccugaagaagaccaagaccagcgaguaccccaucaucuucguguacuaccugagaaagggcaagaagaucaacagcaaccagcuggagaacgagcagagccaggagaacagcaucaaccccauccagaaggaggaggacgagggcguggaccugagcgagggcagcagcaacgaggacgaggaccugggccccugcgagggccccagcaaggaggacaaggaccuggacagcagcgagggcagcagccaggaggacgaggaccugggccugagcgagggcagcagccaggacagcggcgaggacuga

SEQ ID NO: 3470 - RNA, 426 nt, Artificial Sequence
  derived and/or modified sequence opt5 from SPXN3__Homo_sapiens__AAH62750
auggagcagcccaccagcuccacaaacggcgaaaagacgaaaucuccuugcgagagcaauaacaagaaaaaugacgaaaugcaagaggugccgaacagaguccuggcccccgaacagucccucaagaaaaccaagacaucugaguacccuaucauuuucguuuauuaccugcggaaggggaaaaagaucaauagcaaccagcuugagaaugaacagucccaagagaacucuauuaaucccauccagaaagaagaggaugagggaguggaccugagcgaaggcuccagcaacgaggaugaagaccucgggccuugugagggacccucuaaggaagauaaagaccuggauuccagcgaggggucuucccaggaggacgaagaucuuggccugagcgagggaucuucccaggacagcggcgaagauuga

SEQ ID NO: 3471 - protein, 188 aa, Artificial Sequence
  SSX-1__Homo_sapiens__Q16384
MNGDDTFAKRPRDDAKASEKRSKAFDDIATYFSKKEWKKMKYSEKISYVYMKRNYKAMTKLGFKVTLPPFMCNKQATDFQGNDFDNDHNRRIQVEHPQMTFGRLHRIIPKIMPKKPAEDENDSKGVSEASGPQNDGKQLHPPGKANISEKINKRSGPKRGKHAWTHRLRERKQLVIYEEISDPEEDDE

SEQ ID NO: 3472 - RNA, 567 nt, Artificial Sequence
  SSX-1__Homo_sapiens__AAH01003
augaacggagacgacaccuuugcaaagagacccagggaugaugcuaaagcaucagagaagagaagcaaggccuuugaugauauugccacauacuucucuaagaaagaguggaaaaagaugaaauacucggagaaaaucagcuauguguauaugaagagaaacuauaaggccaugacuaaacuagguuucaaagucacccucccaccuuucauguguaauaaacaggccacagacuuccaggggaaugauuuugauaaugaccauaaccgcaggauucagguugaacauccucagaugacuuucggcaggcuccacagaaucaucccgaagaucaugcccaagaagccagcagaggacgaaaaugauucgaagggagugucagaagcaucuggcccacaaaacgaugggaaacaacugcaccccccaggaaaagcaaauauuucugagaagauuaauaagagaucuggacccaaaagggggaaacaugccuggacccacagacugcgugagagaaagcagcuggugauuuaugaagagaucagcgacccugaggaagaugacgaguaa

SEQ ID NO: 3473 - RNA, 567 nt, Artificial Sequence
  derived and/or modified sequence opt1 from SSX-1__Homo_sapiens__AAH01003
augaacggcgacgacaccuucgccaagcgcccccgggacgacgccaaggcgagcgagaagcgcuccaaggccuucgacgacaucgccaccuacuucagcaagaaggaguggaagaagaugaaguacuccgagaagaucagcuacguguacaugaagcggaacuacaaggccaugacgaagcugggguucaaggucacccucccgcccuucaugugcaacaagcaggccaccgacuuccagggcaacgacuucgacaacgaccacaaccgccggauccagguggagcacccccagaugaccuucgggcgccugcaccggaucauccccaagaucaugccgaagaagcccgcggaggacgagaacgacuccaagggcgugagcgaggccuccgggccccagaacgacggcaagcagcugcacccgcccggcaaggccaacaucagcgagaagaucaacaagcgcuccgggcccaagcggggcaagcacgccuggacgcaccgccuccgggagcgcaagcagcuggucaucuacgaggagaucagcgaccccgaggaggacgacgaguga

SEQ ID NO: 3474 - RNA, 567 nt, Artificial Sequence
  derived and/or modified sequence opt2 from SSX-1__Homo_sapiens__AAH01003
augaacggcgacgacaccuucgccaagcgcccccgcgacgacgccaaggccuccgagaagcgcuccaaggccuucgacgacaucgccaccuacuucuccaagaaggaguggaagaagaugaaguacuccgagaagaucuccuacgucuacaugaagcgcaacuacaaggccaugaccaagcucggcuucaaggucacccucccccccuucaugugcaacaagcaggccaccgacuuccagggcaacgacuucgacaacgaccacaaccgccgcauccaggucgagcacccccagaugaccuucggccgccuccaccgcaucauccccaagaucaugcccaagaagcccgccgaggacgagaacgacuccaagggcgucuccgaggccuccggcccccagaacgacggcaagcagcuccacccccccggcaaggccaacaucuccgagaagaucaacaagcgcuccggccccaagcgcggcaagcacgccuggacccaccgccuccgcgagcgcaagcagcucgucaucuacgaggagaucuccgaccccgaggaggacgacgaguga

SEQ ID NO: 3475 - RNA, 567 nt, Artificial Sequence
  derived and/or modified sequence opt3 from SSX-1__Homo_sapiens__AAH01003
augaacggcgacgauaccuucgccaagagacccagggacgaugcuaaagcaagcgagaagcgguccaaagccuuugacgauaucgcgacauacuucucuaagaaagaauggaagaagaugaaauauucagagaagauuaguuacguguauaugaaacgcaauuacaaggcuaugacuaaacugggguuuaaggucacgcucccuccauucaugugcaacaagcaggccaccgacuuucaaggaaaugauuucgacaacgaucacaaucgacguauacagguugaacauccgcagaugacauuugguagacuucacaggaucauucccaaaaucaugccuaagaaaccagcagaggacgaaaacgauagcaagggcguguccgaggccucugggccccagaaugacggaaaacaacugcauccuccaggcaaggcuaacauuucggagaaaaucaauaagcggucaggucccaagcgcgggaaacacgcauggacucauagauugagggaacggaagcaguuaguaauauaugaggaaaucagcgauccugaggaggacgacgaauga

SEQ ID NO: 3476 - RNA, 567 nt, Artificial Sequence
  derived and/or modified sequence opt4 from SSX-1__Homo_sapiens__AAH01003
augaacggcgacgacaccuucgccaagagacccagagacgacgccaaggccagcgagaagagaagcaaggccuucgacgacaucgccaccuacuucagcaagaaggaguggaagaagaugaaguacagcgagaagaucagcuacguguacaugaagagaaacuacaaggccaugaccaagcugggcuucaaggugacccugccccccuucaugugcaacaagcaggccaccgacuuccagggcaacgacuucgacaacgaccacaacagaagaauccagguggagcacccccagaugaccuucggcagacugcacagaaucauccccaagaucaugcccaagaagcccgccgaggacgagaacgacagcaagggcgugagcgaggccagcggcccccagaacgacggcaagcagcugcacccccccggcaaggccaacaucagcgagaagaucaacaagagaagcggccccaagagaggcaagcacgccuggacccacagacugagagagagaaagcagcuggugaucuacgaggagaucagcgaccccgaggaggacgacgaguga

SEQ ID NO: 3477 - RNA, 567 nt, Artificial Sequence
  derived and/or modified sequence opt5 from SSX-1__Homo_sapiens__AAH01003
augaacggcgacgauaccuucgccaagagaccccgggacgaugcuaaagccagcgagaagcgcuccaaagcguuugacgauaucgcuacauacuucucuaagaaagaauggaagaagaugaaauauagcgagaagauuuccuacguguauaugaaaagaaauuacaaggccaugacgaaacugggguuuaaggucacccucccuccguucaugugcaacaagcaggccacagacuuucaaggaaaugauuucgacaacgaucacaaucggcgcauccagguugaacauccccagaugaccuuuggcagacugcaccggauuaucccuaaaauuaugcccaagaaaccugcugaggacgaaaacgauucuaagggggugagcgaggccuccggaccccagaaugacggcaaacaacuucauccuccggggaaggcuaacaucucugagaaaaucaauaagcgcagcggacccaagagaggcaaacacgccuggacacaucggcugcgcgaaagaaagcagcucgugauuuaugaggaaaucuccgauccugaggaggacgacgaauga

SEQ ID NO: 3478 - protein, 188 aa, Artificial Sequence
  SSX-2__Homo_sapiens__Q16385
MNGDDAFARRPTVGAQIPEKIQKAFDDIAKYFSKEEWEKMKASEKIFYVYMKRKYEAMTKLGFKATLPPFMCNKRAEDFQGNDLDNDPNRGNQVERPQMTFGRLQGISPKIMPKKPAEEGNDSEEVPEASGPQNDGKELCPPGKPTTSEKIHERSGPKRGEHAWTHRLRERKQLVIYEEISDPEEDDE

SEQ ID NO: 3479 - RNA, 567 nt, Artificial Sequence
  SSX-2__Homo_sapiens__AAH16957
augaacggagacgacgccuuugcaaggagacccacgguuggugcucaaauaccagagaagauccaaaaggccuucgaugauauugccaaauacuucucuaaggaagagugggaaaagaugaaagccucagagaaaaucuucuauguguauaugaagagaaaguaugaggcuaugacuaaacuagguuucaaggccacccucccaccuuucauguguaauaaacgggccgaagacuuccaggggaaugauuuggauaaugacccuaaccgugggaaucagguugaacguccucagaugacuuucggcaggcuccagggaaucuccccgaagaucaugcccaagaagccagcagaggaaggaaaugauucggaggaagugccagaagcaucuggcccacaaaaugaugggaaagagcugugccccccgggaaaaccaacuaccucugagaagauucacgagagaucuggacccaaaaggggggaacaugccuggacccacagacugcgugagagaaaacagcuggugauuuaugaagagaucagcgacccugaggaagaugacgaguaa

SEQ ID NO: 3480 - RNA, 567 nt, Artificial Sequence
  derived and/or modified sequence opt1 from SSX-2__Homo_sapiens__AAH16957
augaacggcgacgacgccuucgcccgccggcccaccgugggggcgcagaucccggagaagauccagaaggccuucgacgacaucgccaaguacuucagcaaggaggagugggagaagaugaaggccuccgagaagaucuucuacgucuacaugaagcgcaaguacgaggccaugaccaagcugggcuucaaggcgacgcucccgcccuucaugugcaacaagcgggccgaggacuuccaggggaacgaccuggacaacgaccccaaccgcggcaaccagguggagcggccccagaugaccuucgggcgccugcagggcaucagccccaagaucaugcccaagaagcccgccgaggagggcaacgacuccgaggaggugccggaggccagcgggccccagaacgacggcaaggagcucugcccgcccgggaagcccaccaccuccgagaagauccacgagcggagcggccccaagcgcggggagcacgcguggacgcaccggcugcgcgagcggaagcagcuggucaucuacgaggagaucuccgaccccgaggaggacgacgaguga

SEQ ID NO: 3481 - RNA, 567 nt, Artificial Sequence
  derived and/or modified sequence opt2 from SSX-2__Homo_sapiens__AAH16957
augaacggcgacgacgccuucgcccgccgccccaccgucggcgcccagauccccgagaagauccagaaggccuucgacgacaucgccaaguacuucuccaaggaggagugggagaagaugaaggccuccgagaagaucuucuacgucuacaugaagcgcaaguacgaggccaugaccaagcucggcuucaaggccacccucccccccuucaugugcaacaagcgcgccgaggacuuccagggcaacgaccucgacaacgaccccaaccgcggcaaccaggucgagcgcccccagaugaccuucggccgccuccagggcaucucccccaagaucaugcccaagaagcccgccgaggagggcaacgacuccgaggagguccccgaggccuccggcccccagaacgacggcaaggagcucugcccccccggcaagcccaccaccuccgagaagauccacgagcgcuccggccccaagcgcggcgagcacgccuggacccaccgccuccgcgagcgcaagcagcucgucaucuacgaggagaucuccgaccccgaggaggacgacgaguga

SEQ ID NO: 3482 - RNA, 567 nt, Artificial Sequence
  derived and/or modified sequence opt3 from SSX-2__Homo_sapiens__AAH16957
augaacggcgacgaugccuucgcuagaaggcccaccgugggggcacagaucccugagaagauucaaaaagccuuugacgauauagcgaaguacuucagcaaagaagagugggaaaagaugaaggcuuccgagaaaaucuuuuaugucuacaugaagcggaaauaugaagccaugacaaagcugggauucaaagcaacucucccaccguuuaugugcaauaagcgcgccgaggacuuccaggguaacgaucuugacaaugaucccaaccgaggcaaucagguugagcguccucagaugacguuugggagacugcaaggaauuucuccaaaaaucaugcccaagaagccugcugaagagggcaacgacucagaagaggugccagaggcaagugguccccagaaugaugggaaagaauuguguccuccaggaaagccgaccacaagcgagaaaauucacgaaagguccggccccaagcggggcgagcaugccuggacucaccgcuuaagagaaaggaaacagcugguaaucuacgaggagauaucugacccugaagaggaugacgaauga

SEQ ID NO: 3483 - RNA, 567 nt, Artificial Sequence
  derived and/or modified sequence opt4 from SSX-2__Homo_sapiens__AAH16957
augaacggcgacgacgccuucgccagaagacccaccgugggcgcccagauccccgagaagauccagaaggccuucgacgacaucgccaaguacuucagcaaggaggagugggagaagaugaaggccagcgagaagaucuucuacguguacaugaagagaaaguacgaggccaugaccaagcugggcuucaaggccacccugccccccuucaugugcaacaagagagccgaggacuuccagggcaacgaccuggacaacgaccccaacagaggcaaccagguggagagaccccagaugaccuucggcagacugcagggcaucagccccaagaucaugcccaagaagcccgccgaggagggcaacgacagcgaggaggugcccgaggccagcggcccccagaacgacggcaaggagcugugcccccccggcaagcccaccaccagcgagaagauccacgagagaagcggccccaagagaggcgagcacgccuggacccacagacugagagagagaaagcagcuggugaucuacgaggagaucagcgaccccgaggaggacgacgaguga

SEQ ID NO: 3484 - RNA, 567 nt, Artificial Sequence
  derived and/or modified sequence opt5 from SSX-2__Homo_sapiens__AAH16957
augaacggcgacgaugccuucgcuagacggcccaccgugggggcccagaucccugagaagauucaaaaagcguuugacgauaucgcuaaguacuucagcaaagaagagugggaaaagaugaaagccuccgagaagaucuuuuaugucuacaugaagcgcaaauaugaagccaugacaaagcugggauucaaagcuacgcucccgcccuuuaugugcaauaagagagccgaggacuuccagggcaacgaucuggacaaugauccuaaccgggggaaucagguugagcgcccccagaugaccuuuggaagacuucaaggcauuucuccuaaaauuaugcccaagaagccugcugaagaggggaacgacagcgaagaggugccggaggccuccggaccccagaaugauggcaaagaacuguguccucccggcaagccuacaaccucugagaaaauccacgaacggagcgggcccaagcgcggagagcaugcguggacacacagacuccgggaacgcaaacagcuggugaucuacgaggagauuuccgacccggaagaggaugacgaauga

SEQ ID NO: 3485 - protein, 188 aa, Artificial Sequence
  SSX3__Homo_sapiens__Q99909
MNGDDTFARRPTVGAQIPEKIQKAFDDIAKYFSKEEWEKMKVSEKIVYVYMKRKYEAMTKLGFKAILPSFMRNKRVTDFQGNDFDNDPNRGNQVQRPQMTFGRLQGIFPKIMPKKPAEEGNVSKEVPEASGPQNDGKQLCPPGKPTTSEKINMISGPKRGEHAWTHRLRERKQLVIYEEISDPEEDDE

SEQ ID NO: 3486 - RNA, 567 nt, Artificial Sequence
  SSX3__Homo_sapiens__AAC05819
augaacggagaugacaccuuugcaaggagacccacgguuggugcucaaauaccagagaagauacaaaaggccuucgaugauauugccaaauacuucucuaaggaagagugggaaaagaugaaagucucggagaaaaucgucuauguguauaugaagagaaaguaugaggccaugacuaaacuagguuucaaggccauccucccaucuuucaugcguaauaaacgggucacagacuuccaggggaaugauuuugauaaugacccuaaccgugggaaucagguucaacguccucagaugacuuucggcaggcuccagggaaucuucccgaagaucaugcccaagaagccagcagaggaaggaaauguuucgaaggaagugccagaagcaucuggcccacaaaacgaugggaaacagcugugccccccgggaaaaccaacuaccucugagaagauuaacaugauaucuggacccaaaaggggggaacaugccuggacccacagacugcgugagagaaagcagcuggugauuuaugaagagaucagcgauccugaggaagaugaugaguaa

SEQ ID NO: 3487 - RNA, 567 nt, Artificial Sequence
  derived and/or modified sequence opt1 from SSX3__Homo_sapiens__AAC05819
augaacggcgacgacaccuucgcccgccggcccaccgugggggcccagaucccggagaagauccagaaggcguucgacgacaucgccaaguacuucagcaaggaggagugggagaagaugaaggucuccgagaagaucguguacguguacaugaagcgcaaguacgaggccaugacgaagcugggcuucaaggccauccuccccagcuucaugcggaacaagcgcgucaccgacuuccaggggaacgacuucgacaacgaccccaaccggggcaaccaggugcagcgcccccagaugaccuucgggcggcugcagggcaucuucccgaagaucaugcccaagaagcccgccgaggagggcaacguguccaaggagguccccgaggcgagcgggccgcagaacgacggcaagcagcugugcccgcccgggaagcccaccacguccgagaagaucaacaugaucagcggccccaagcgcggggagcacgccuggacccaccggcuccgcgagcggaagcagcuggugaucuacgaggagaucuccgaccccgaggaggacgacgaguga

SEQ ID NO: 3488 - RNA, 567 nt, Artificial Sequence
  derived and/or modified sequence opt2 from SSX3__Homo_sapiens__AAC05819
augaacggcgacgacaccuucgcccgccgccccaccgucggcgcccagauccccgagaagauccagaaggccuucgacgacaucgccaaguacuucuccaaggaggagugggagaagaugaaggucuccgagaagaucgucuacgucuacaugaagcgcaaguacgaggccaugaccaagcucggcuucaaggccauccuccccuccuucaugcgcaacaagcgcgucaccgacuuccagggcaacgacuucgacaacgaccccaaccgcggcaaccagguccagcgcccccagaugaccuucggccgccuccagggcaucuuccccaagaucaugcccaagaagcccgccgaggagggcaacgucuccaaggagguccccgaggccuccggcccccagaacgacggcaagcagcucugcccccccggcaagcccaccaccuccgagaagaucaacaugaucuccggccccaagcgcggcgagcacgccuggacccaccgccuccgcgagcgcaagcagcucgucaucuacgaggagaucuccgaccccgaggaggacgacgaguga

SEQ ID NO: 3489 - RNA, 567 nt, Artificial Sequence
  derived and/or modified sequence opt3 from SSX3__Homo_sapiens__AAC05819
augaacggcgacgauaccuucgccagaaggcccacagugggggcucagaucccugagaagauucaaaaagcauuugacgauauagccaaguacuucagcaaagaagagugggaaaagaugaaagucuccgagaagaucguuuauguguacaugaagcggaaauaugaagcgaugacuaagcugggauuuaaagcuauucucccaucuuucaugcgcaauaagcgaguaacggacuuucaggguaacgauuucgacaaugauccgaaccguggcaaucaggugcagagaccccaaaugaccuuugggaggcuucagggaaucuucccuaaaauuaugccaaagaagcccgccgaggagggcaacgucucaaaagaagugccugaggcaagugguccacagaaugacgggaagcagcugugcccucccggaaaaccaacaacuagcgaaaagaucaacaugauauccggcccgaaacggggcgagcacgccuggacccaucgcuugagagagaggaagcaauuaguuaucuacgaagagauuucugaucccgaagaggacgaugaauga

SEQ ID NO: 3490 - RNA, 567 nt, Artificial Sequence
  derived and/or modified sequence opt4 from SSX3__Homo_sapiens__AAC05819
augaacggcgacgacaccuucgccagaagacccaccgugggcgcccagauccccgagaagauccagaaggccuucgacgacaucgccaaguacuucagcaaggaggagugggagaagaugaaggugagcgagaagaucguguacguguacaugaagagaaaguacgaggccaugaccaagcugggcuucaaggccauccugcccagcuucaugagaaacaagagagugaccgacuuccagggcaacgacuucgacaacgaccccaacagaggcaaccaggugcagagaccccagaugaccuucggcagacugcagggcaucuuccccaagaucaugcccaagaagcccgccgaggagggcaacgugagcaaggaggugcccgaggccagcggcccccagaacgacggcaagcagcugugcccccccggcaagcccaccaccagcgagaagaucaacaugaucagcggccccaagagaggcgagcacgccuggacccacagacugagagagagaaagcagcuggugaucuacgaggagaucagcgaccccgaggaggacgacgaguga

SEQ ID NO: 3491 - RNA, 567 nt, Artificial Sequence
  derived and/or modified sequence opt5 from SSX3__Homo_sapiens__AAC05819
augaacggcgacgauaccuucgccagacggcccacagugggggcucagaucccugagaagauucaaaaagccuuugacgauaucgcgaaguacuucagcaaagaagagugggaaaagaugaaagucuccgagaagauuguuuauguguacaugaagcgcaaauaugaagcuaugacgaagcugggauuuaaagccauccucccgucuuucaugagaaauaagcgggugaccgacuuucagggcaacgauuucgacaaugaucccaaccgcgggaaucagguccagagaccucaaaugacauuuggacggcugcagggcauuuuccccaaaaucaugccuaagaagcccgccgaggaggggaacgugagcaaagaaguuccugaggcuuccggaccgcagaaugacggcaagcagcuuugcccucccggcaaacccaccacaucugaaaagaucaacaugauuagcgggccuaaacgcggagagcacgccuggacccauagacugcgggagcgcaagcaacucgugaucuacgaagagauuuccgaucccgaagaggacgaugaauga

SEQ ID NO: 3492 - protein, 188 aa, Artificial Sequence
  SSX-4__Homo_sapiens__O60224
MNGDDAFARRPRDDAQISEKLRKAFDDIAKYFSKKEWEKMKSSEKIVYVYMKLNYEVMTKLGFKVTLPPFMRSKRAADFHGNDFGNDRNHRNQVERPQMTFGSLQRIFPKIMPKKPAEEENGLKEVPEASGPQNDGKQLCPPGNPSTLEKINKTSGPKRGKHAWTHRLRERKQLVVYEEISDPEEDDE

SEQ ID NO: 3493 - RNA, 567 nt, Artificial Sequence
  SSX-4__Homo_sapiens__AAC05820
augaacggagacgacgccuuugcaaggagacccagggaugaugcucaaauaucagagaaguuacgaaaggccuucgaugauauugccaaauacuucucuaagaaagagugggaaaagaugaaauccucggagaaaaucgucuauguguauaugaagcuaaacuaugaggucaugacuaaacuagguuucaaggucacccucccaccuuucaugcguaguaaacgggcugcagacuuccacgggaaugauuuugguaacgaucgaaaccacaggaaucagguugaacguccucagaugacuuucggcagccuccagagaaucuucccgaagaucaugcccaagaagccagcagaggaagaaaaugguuugaaggaagugccagaggcaucuggcccacaaaaugaugggaaacagcugugccccccgggaaauccaaguaccuuggagaagauuaacaagacaucuggacccaaaagggggaaacaugccuggacccacagacugcgugagagaaagcagcuggugguuuaugaagagaucagcgacccugaggaagaugacgaguaa

SEQ ID NO: 3494 - RNA, 567 nt, Artificial Sequence
  derived and/or modified sequence opt1 from SSX-4__Homo_sapiens__AAC05820
augaacggcgacgacgccuucgcccgccggccccgcgacgacgcgcagaucagcgagaagcugcggaaggccuucgacgacaucgccaaguacuucuccaagaaggagugggagaagaugaaguccagcgagaagaucguguacgucuacaugaagcucaacuacgaggugaugaccaagcugggguucaaggugacccugccgcccuucaugcgcagcaagcgggccgccgacuuccacggcaacgacuucgggaacgaccgcaaccaccggaaccaggucgagcgcccccagaugacguucggcucccuccagcggaucuuccccaagaucaugccgaagaagcccgcggaggaggagaacgggcugaaggaggugcccgaggccagcggcccccagaacgacggcaagcagcugugcccgcccgggaaccccuccacccucgagaagaucaacaagaccagcggccccaagcgcgggaagcacgccuggacccaccggcugcgcgagcggaagcagcugguggucuacgaggagaucuccgacccggaggaggacgacgaguga

SEQ ID NO: 3495 - RNA, 567 nt, Artificial Sequence
  derived and/or modified sequence opt2 from SSX-4__Homo_sapiens__AAC05820
augaacggcgacgacgccuucgcccgccgcccccgcgacgacgcccagaucuccgagaagcuccgcaaggccuucgacgacaucgccaaguacuucuccaagaaggagugggagaagaugaaguccuccgagaagaucgucuacgucuacaugaagcucaacuacgaggucaugaccaagcucggcuucaaggucacccucccccccuucaugcgcuccaagcgcgccgccgacuuccacggcaacgacuucggcaacgaccgcaaccaccgcaaccaggucgagcgcccccagaugaccuucggcucccuccagcgcaucuuccccaagaucaugcccaagaagcccgccgaggaggagaacggccucaaggagguccccgaggccuccggcccccagaacgacggcaagcagcucugcccccccggcaaccccuccacccucgagaagaucaacaagaccuccggccccaagcgcggcaagcacgccuggacccaccgccuccgcgagcgcaagcagcucgucgucuacgaggagaucuccgaccccgaggaggacgacgaguga

SEQ ID NO: 3496 - RNA, 567 nt, Artificial Sequence
  derived and/or modified sequence opt3 from SSX-4__Homo_sapiens__AAC05820
augaacggcgacgaugccuucgcuagaaggccccgggacgaugcacagaucagcgagaagcugcgcaaagccuuugacgauauugcgaaguacuucuccaaaaaggaaugggagaaaaugaagucuucagaaaagauaguguaugucuacaugaaacucaauuaugagguuaugaccaaacuuggguuuaaggugacacugccuccauucaugcgaaguaagcgugcugccgacuuucacggaaacgauuucgguaaugacagaaaccauaggaaucaaguagaacggccgcagaugacuuuuggcagcuugcagcgcaucuuccccaaaauuaugccuaagaagccagcagaggaggaaaacggguuaaaagaggugcccgaagccuccggaccucagaaugauggcaagcaacugugcccacccgguaacccuucuacgcuagagaaaaucaauaagaccucggggccaaaaagaggaaagcacgcuuggacacauaggcuccgggagcgcaaacagcuggucguguacgaagagauuucagacccggaagaggaugacgaauga

SEQ ID NO: 3497 - RNA, 567 nt, Artificial Sequence
  derived and/or modified sequence opt4 from SSX-4__Homo_sapiens__AAC05820
augaacggcgacgacgccuucgccagaagacccagagacgacgcccagaucagcgagaagcugagaaaggccuucgacgacaucgccaaguacuucagcaagaaggagugggagaagaugaagagcagcgagaagaucguguacguguacaugaagcugaacuacgaggugaugaccaagcugggcuucaaggugacccugccccccuucaugagaagcaagagagccgccgacuuccacggcaacgacuucggcaacgacagaaaccacagaaaccagguggagagaccccagaugaccuucggcagccugcagagaaucuuccccaagaucaugcccaagaagcccgccgaggaggagaacggccugaaggaggugcccgaggccagcggcccccagaacgacggcaagcagcugugcccccccggcaaccccagcacccuggagaagaucaacaagaccagcggccccaagagaggcaagcacgccuggacccacagacugagagagagaaagcagcuggugguguacgaggagaucagcgaccccgaggaggacgacgaguga

SEQ ID NO: 3498 - RNA, 567 nt, Artificial Sequence
  derived and/or modified sequence opt5 from SSX-4__Homo_sapiens__AAC05820
augaacggcgacgaugccuucgcuagacggccccgcgacgaugcccagaucagcgagaagcugagaaaagcguuugacgauauugcuaaguacuucuccaaaaaggaaugggagaaaaugaagucuagcgaaaagaucguguaugucuacaugaaacucaauuaugagguuaugaccaagcugggguuuaaagugacacuuccuccguucaugcgguccaagcgcgccgccgacuuucacggaaacgauuucggcaaugacagaaaccaucggaaucaaguggaacgcccccagaugacguuugggucucugcagagaauuuucccuaaaaucaugcccaagaagccugcugaggaggaaaacggacucaaagagguccccgaagccagcggcccucagaaugaugggaagcaacugugcccgcccggaaacccuuccacccuugagaaaauuaauaagacaucuggccccaaacggggcaagcacgcuuggacccaucgccugagagagcggaaacagcucgugguuuacgaagagaucagcgacccugaagaggaugacgaauga

SEQ ID NO: 3499 - protein, 295 aa, Artificial Sequence
  ST1A1__Homo_sapiens__P50225
MELIQDTSRPPLEYVKGVPLIKYFAEALGPLQSFQARPDDLLISTYPKSGTTWVSQILDMIYQGGDLEKCHRAPIFMRVPFLEFKAPGIPSGMETLKDTPAPRLLKTHLPLALLPQTLLDQKVKVVYVARNAKDVAVSYYHFYHMAKVHPEPGTWDSFLEKFMVGEVSYGSWYQHVQEWWELSRTHPVLYLFYEDMKENPKREIQKILEFVGRSLPEETVDFVVQHTSFKEMKKNPMTNYTTVPQEFMDHSISPFMRKGMAGDWKTTFTVAQNERFDADYAEKMAGCSLSFRSEL

SEQ ID NO: 3500 - RNA, 888 nt, Artificial Sequence
  ST1A1__Homo_sapiens__CCDS32420.1
auggagcugauccaggacaccucccgcccgccacuggaguacgugaagggggucccgcucaucaaguacuuugcagaggcacuggggccccugcagagcuuccaggcccggccugaugaccugcucaucagcaccuaccccaaguccggcacuaccuggguaagccagauucuggacaugaucuaccaggguggugaccuggagaagugucaccgagcucccaucuucaugcgggugcccuuccuugaguucaaagccccagggauucccucagggauggagacucugaaagacacaccggccccacgacuccugaagacacaccugccccuggcucugcucccccagacucuguuggaucagaaggucaagguggucuauguugcccgcaacgcaaaggauguggcaguuuccuacuaccacuucuaccacauggccaaggugcacccugagccugggaccugggacagcuuccuggagaaguucauggucggagaaguguccuacggauccugguaccagcacgugcaggaguggugggagcugagccgcacccacccuguucucuaccucuucuaugaagacaugaaggagaacccgaaaagggagauucaaaagauccuggaguuuguggggcgcucccugccagaggagaccguggacuucgugguucagcacacgucguucaaggagaugaagaagaacccuaugaccaacuacaccaccgucccccaggaguucauggaccacagcaucucccccuucaugaggaaaggcauggcuggggacuggaagaccaccuucaccguggcgcagaaugagcgcuucgaugcggacuaugcggagaagauggcaggcugcagccucagcuuccgcucugagcuguga

SEQ ID NO: 3501 - RNA, 888 nt, Artificial Sequence
  derived and/or modified sequence opt1 from ST1A1__Homo_sapiens__CCDS32420.1
auggagcugauccaggacaccagccggcccccgcucgaguacgugaagggcgucccccugaucaaguacuucgccgaggcccuggggccccuccaguccuuccaggcgcgccccgacgaccugcugaucagcaccuacccgaaguccggcacgaccugggugagccagauccucgacaugaucuaccagggcggggaccuggagaagugccaccgcgcccccaucuucaugcgggugcccuuccuggaguucaaggcccccgggaucccguccggcauggagacccucaaggacacccccgcgccccgccugcugaagacgcaccucccccuggcccugcucccgcagacccugcuggaccagaaggucaaggugguguacgucgcccggaacgccaaggacguggccgugagcuacuaccacuucuaccacauggccaagguccaccccgagcccggcaccugggacuccuuccucgagaaguucauggugggggaggugagcuacggcuccugguaccagcacguccaggaguggugggagcugagccgcacccaccccgugcuguaccucuucuacgaggacaugaaggagaacccgaagcgggagauccagaagauccuggaguucguggggcgcucccugcccgaggagacggucgacuucguggugcagcacaccagcuucaaggagaugaagaagaaccccaugaccaacuacaccacggucccccaggaguucauggaccacuccaucagcccguucaugcggaagggcauggcgggggacuggaagaccaccuucaccguggcccagaacgagcgcuucgacgccgacuacgccgagaagauggccggcugcucccucagcuuccgguccgagcuguga

SEQ ID NO: 3502 - RNA, 888 nt, Artificial Sequence
  derived and/or modified sequence opt2 from ST1A1__Homo_sapiens__CCDS32420.1
auggagcucauccaggacaccucccgccccccccucgaguacgucaagggcgucccccucaucaaguacuucgccgaggcccucggcccccuccaguccuuccaggcccgccccgacgaccuccucaucuccaccuaccccaaguccggcaccaccugggucucccagauccucgacaugaucuaccagggcggcgaccucgagaagugccaccgcgcccccaucuucaugcgcguccccuuccucgaguucaaggcccccggcauccccuccggcauggagacccucaaggacacccccgccccccgccuccucaagacccaccucccccucgcccuccucccccagacccuccucgaccagaaggucaaggucgucuacgucgcccgcaacgccaaggacgucgccgucuccuacuaccacuucuaccacauggccaagguccaccccgagcccggcaccugggacuccuuccucgagaaguucauggucggcgaggucuccuacggcuccugguaccagcacguccaggaguggugggagcucucccgcacccaccccguccucuaccucuucuacgaggacaugaaggagaaccccaagcgcgagauccagaagauccucgaguucgucggccgcucccuccccgaggagaccgucgacuucgucguccagcacaccuccuucaaggagaugaagaagaaccccaugaccaacuacaccaccgucccccaggaguucauggaccacuccaucucccccuucaugcgcaagggcauggccggcgacuggaagaccaccuucaccgucgcccagaacgagcgcuucgacgccgacuacgccgagaagauggccggcugcucccucuccuuccgcuccgagcucuga

SEQ ID NO: 3503 - RNA, 888 nt, Artificial Sequence
  derived and/or modified sequence opt3 from ST1A1__Homo_sapiens__CCDS32420.1
auggagcugauccaggacaccagcagacccccucucgaauacgugaagggcgucccacuuauuaaauauuucgccgaggcucuggggccguugcaauccuuucaggcaaggcccgaugacuuacugauaucuacauacccuaagucaggaacuacguggguuagucagauccuagauaugauuuaucaggguggcgaccucgaaaaaugccaccgggccccaaucuucaugcgcgugcccuuucuggaguucaaggcgccugggauuccaagcggaauggaaacccuuaaagauacacccgcuccucgacuguugaagacucaucucccacuggcccugcucccgcaaaccuuacuggaccagaagguaaaaguggucuacguggcacguaacgccaaggauguugcuguguccuauuaccacuuuuaucauauggcaaaaguccaccccgagccuggcacaugggacucuuuccuugagaaguuuauggugggugaaguaucguacgggucaugguaccagcauguucaggaguggugggaauugagcagaacccacccagugcuguaucuauucuacgaggauaugaaagagaaucccaagagggaaauccaaaagauacucgaguuugucggacggagucugccugaagagacuguggacuucgugguccagcacacauccuuuaaagaaaugaagaaaaacccaaugaccaauuauacgacuguuccccaggaguucauggaucauucuaucagcccguuuaugcgcaagggcauggccggcgacuggaaaaccacauucacuguggcucagaacgagagauucgaugccgacuacgcggaaaagauggcaggguguucccuuucauuuaggagugagcuguga

SEQ ID NO: 3504 - RNA, 888 nt, Artificial Sequence
  derived and/or modified sequence opt4 from ST1A1__Homo_sapiens__CCDS32420.1
auggagcugauccaggacaccagcagacccccccuggaguacgugaagggcgugccccugaucaaguacuucgccgaggcccugggcccccugcagagcuuccaggccagacccgacgaccugcugaucagcaccuaccccaagagcggcaccaccugggugagccagauccuggacaugaucuaccagggcggcgaccuggagaagugccacagagcccccaucuucaugagagugcccuuccuggaguucaaggcccccggcauccccagcggcauggagacccugaaggacacccccgcccccagacugcugaagacccaccugccccuggcccugcugccccagacccugcuggaccagaaggugaaggugguguacguggccagaaacgccaaggacguggccgugagcuacuaccacuucuaccacauggccaaggugcaccccgagcccggcaccugggacagcuuccuggagaaguucauggugggcgaggugagcuacggcagcugguaccagcacgugcaggaguggugggagcugagcagaacccaccccgugcuguaccuguucuacgaggacaugaaggagaaccccaagagagagauccagaagauccuggaguucgugggcagaagccugcccgaggagaccguggacuucguggugcagcacaccagcuucaaggagaugaagaagaaccccaugaccaacuacaccaccgugccccaggaguucauggaccacagcaucagccccuucaugagaaagggcauggccggcgacuggaagaccaccuucaccguggcccagaacgagagauucgacgccgacuacgccgagaagauggccggcugcagccugagcuucagaagcgagcuguga

SEQ ID NO: 3505 - RNA, 888 nt, Artificial Sequence
  derived and/or modified sequence opt5 from ST1A1__Homo_sapiens__CCDS32420.1
auggagcugauccaggacaccagcagacccccucucgaauacgugaagggcgucccgcugauuaaauauuucgccgaggcucuugggccccugcaauccuuucaggcccggccugaugaccuccugaucucuacauaccccaagagcggaacgaccuggguuucccagauucuugauaugaucuaucagggcggggaccuggaaaaaugccaccgcgcgccuauuuucaugagagugcccuuucucgaguucaaggcuccuggaaucccgucuggcauggaaacacugaaagauacccccgccccucggcugcucaagacacaucugccccuugcccugcucccucaaacccugcuugaccagaaggugaaagucguguacguugcucgcaacgccaaggauguggcugucagcuauuaccacuuuuaucauauggccaaagugcaccccgagccggggacaugggacuccuuccuggagaaguuuaugguuggagaagugucuuacggcagcugguaccagcauguccaggaguggugggaacucuccagaacccacccugugcuguaucuguucuacgaggauaugaaagagaaucccaagcgggaaauccaaaagauucucgaguuugugggccgcagccugccugaagagacggucgacuucguugugcagcacaccucuuuuaaagaaaugaagaaaaaccccaugacaaauuauaccacagugccccaggaguucauggaucauuccaucagcccuuuuaugagaaaggggauggcgggagacuggaaaaccacguucacagucgcccagaacgagcgguucgaugcugacuacgccgaaaagauggcuggcuguucucuuuccuuucgcagcgagcuguga

SEQ ID NO: 3506 - protein, 1268 aa, Artificial Sequence
  STAG2__Homo_sapiens__Q8N3U4-2
MIAAPEIPTDFNLLQESETHFSSDTDFEDIEGKNQKQGKGKTCKKGKKGPAEKGKGGNGGGKPPSGPNRMNGHHQQNGVENMMLFEVVKMGKSAMQSVVDDWIESYKHDRDIALLDLINFFIQCSGCKGVVTAEMFRHMQNSEIIRKMTEEFDEDSGDYPLTMAGPQWKKFKSSFCEFIGVLVRQCQYSIIYDEYMMDTVISLLTGLSDSQVRAFRHTSTLAAMKLMTALVNVALNLSINMDNTQRQYEAERNKMIGKRANERLELLLQKRKELQENQDEIENMMNAIFKGVFVHRYRDAIAEIRAICIEEIGIWMKMYSDAFLNDSYLKYVGWTMHDKQGEVRLKCLTALQGLYYNKELNSKLELFTSRFKDRIVSMTLDKEYDVAVQAIKLLTLVLQSSEEVLTAEDCENVYHLVYSAHRPVAVAAGEFLYKKLFSRRDPEEDGMMKRRGRQGPNANLVKTLVFFFLESELHEHAAYLVDSMWDCATELLKDWECMNSLLLEEPLSGEEALTDRQESALIEIMLCTIRQAAECHPPVGRGTGKRVLTAKEKKTQLDDRTKITELFAVALPQLLAKYSVDAEKVTNLLQLPQYFDLEIYTTGRLEKHLDALLRQIRNIVEKHTDTDVLEACSKTYHALCNEEFTIFNRVDISRSQLIDELADKFNRLLEDFLQEGEEPDEDDAYQVLSTLKRITAFHNAHDLSKWDLFACNYKLLKTGIENGDMPEQIVIHALQCTHYVILWQLAKITESSSTKEDLLRLKKQMRVFCQICQHYLTNVNTTVKEQAFTILCDILMIFSHQIMSGGRDMLEPLVYTPDSSLQSELLSFILDHVFIEQDDDNNSADGQQEDEASKIEALHKRRNLLAAFCKLIVYTVVEMNTAADIFKQYMKYYNDYGDIIKETMSKTRQIDKIQCAKTLILSLQQLFNEMIQENGYNFDRSSSTFSGIKELARRFALTFGLDQLKTREAIAMLHKDGIEFAFKEPNPQGESHPPLNLAFLDILSEFSSKLLRQDKRTVYVYLEKFMTFQMSLRREDVWLPLMSYRNSLLAGGDDDTMSVISGISSRGSTVRSKKSKPSTGKRKVVEGMQLSLTEESSSSDSMWLSREQTLHTPVMMQTPQLTSTIMREPKRLRPEDSFMSVYPMQTEHHQTPLDYNTQVTWMLAQRQQEEARQQQERAAMSYVKLRTNLQHAIRRGTSLMEDDEEPIVEDVMMSSEGRIEDLNEGMDFDTMDIDLPPSKNRRERTELKPDFFDPASIMDESVLGVSMF

SEQ ID NO: 3507 - RNA, 3807 nt, Artificial Sequence
  STAG2__Homo_sapiens__CCDS43990.1
augauagcagcuccagaaauaccaacugauuuuaaucuacuacaggagucagaaacacauuuuucuucugacacagauuuugaagauaucgaaggaaaaaaccaaaagcaaggcaaaggcaaaacuuguaaaaaaggcaaaaagggcccagcagaaaagggcaaagguggaaauggaggaggaaaaccuccuucugguccaaaccgaaugaauggucaucaccaacagaauggaguggaaaacaugauguuguuugaaguuguuaaaaugggcaagagugcuaugcagucggugguagaugauuggauagaaucauacaagcaugaccgagauauagcacuucuugaccuuaucaacuuuuuuauucaguguucaggcuguaaaggaguugucacagcagaaauguuuagacauaugcagaacucugagauaauucgaaaaaugacugaagaauucgaugaggauaguggagauuauccacuuaccauggcugguccucaguggaagaaguucaaauccaguuuuugugaauucauuggcguguuaguacggcaaugucaauauaguaucauauaugaugaguauaugauggauacagucauuucacuucuuacaggauugucugacucacaagucagagcauuucgacauacaagcacccuggcagcuaugaaguugaugacagcuuuggugaauguggcacuaaaucuuagcauuaauauggauaauacacaaagacaauaugaagcagaacggaauaaaaugauuggaaaacgagccaaugagaggcuagaacuccugcuacaaaagcggaaagagcuucaggaaaaucaagaugaaauagaaaauaugaugaaugcaauauuuaaaggaguguuuguacauagauaccgugaugcgauagcugaaauucgagcuauuugcauugaagagauuggcauuuggaugaagauguauagugaugccuuucuuaaugacaguuauuuaaaauauguugguuggacuaugcaugauaagcaaggugaaguaagacucaaaugucuuacugcucuacaagggcuuuauuauaacaaagagcuuaauuccaaacuggaacuuuuuaccagucgguucaaggauagaauugugucuaugacccuugacaaagaauaugauguugcaguacaagcaauaaaauuacucacucuuguuuuacagaguagugaagaaguucucacugcagaagauugugaaaaugucuaucaucugguuuauucagcucaccggccaguagcaguagcagcuggagaauuucucuacaaaaagcucuucagucguagagauccagaggaggauggaaugaugaaaagaagaggaagacaagguccaaaugccaaccuuguuaagacauugguuuuuuucuuucuagaaagugaguuacaugagcaugcagcauaccuuguggauagcaugugggacugugcuacugagcugcugaaagacugggaauguaugaauagcuuguuacuggaagagccacuuaguggagaggaagcacuaacagauaggcaagagagugcucugauugaaauaaugcuuuguaccauuagacaagcggcugaaugucauccucccgugggaagagggacaggaaaaagggugcuuacagcaaaggagaagaagacacaguuggaugauaggacaaaaaucacugagcuuuuugccguggcccuuccucaguuauuagcaaaauacucuguagaugcagaaaaggugacuaacuuguugcaguugccucaguacuuugauuuggaaauauauaccacuggacgauuagaaaagcauuuggaugccuuauugcgacagauccggaauauuguagagaagcacacagauacagauguuuuggaagcauguucuaaaacuuaccaugcacucuguaaugaagaguucacaaucuucaacagaguagauauuucaagaagucaacugauagaugaauuggcagauaaauuuaaccggcuucuugaagauuuucugcaagagggugaagaaccugaugaagaugaugcauaucagguauugucaacauugaagaggaucacugcuuuucauaaugcccaugaccuuucaaagugggauuuauuugcuuguaauuacaaacucuugaaaacuggaaucgaaaauggagacaugccugagcagauuguuauucacgcacugcaguguacucacuauguaauccuuuggcaacuugcuaagauaacugaaagcagcucuacaaaggaggacuugcugcguuuaaagaaacaaaugagaguauuuugucagauaugucaacauuaccugaccaacgugaauacuacuguuaaggaacaggccuucacuauucugugugauauuuugaugaucuucagccaucagauuaugucaggagggcgugacauguuagagccauuaguguauaccccugauucuucauugcagucugaguugcucagcuuuauuuuggaucaugucuucauugaacaggaugaugauaauaauagugcagauggucagcaagaggaugaagccaguaaaauugaagcucugcacaagagaagaaauuuacuugcagcauuuuguaagcuaauuguauauacugugguggagaugaauacagcugcagauaucuucaaacaguauaugaaguauuauaaugacuauggagauaucaucaaagaaacaaugaguaaaacaaggcagauagacaaaauucagugugcuaagacccuuauucucagucugcaacagcuuuuuaaugaaaugauacaagaaaauggcuauaauuuugauagaucauccucuacauuuaguggcauaaaagaacuugcucgacguuuugcuuuaacuuuuggacuugaucaguugaaaacaagagaagccauugccaugcuacacaaagauggcauagaauuugcuuuuaaagagccuaauccgcaaggggagagccauccaccuuuaaauuuggcauuucuugauauucugagugaauuuucuucuaaacuacuucgacaagacaaaagaacaguguauguuuacuuggaaaaguucaugaccuuucagaugucacuccgaagagaggauguguggcuuccacugaugucuuaccgaaauucuuugcuagcugguggugaugaugacaccaugucagucauuaguggaaucagcagccgggggucaacaguacggaguaaaaaaucaaaaccaucuacaggaaaacggaaagugguugagggcaugcagcuuucacucacugaagaaaguaguaguagugacaguaugugguuaagcagagaacaaacacugcacaccccuguuaugaugcagacaccacaacucaccuccacuauuaugagagagcccaaaagauuacggccugaggauagcuucaugaguguuuauccaaugcagacugaacaucaucaaacaccucuugauuauaacacgcagguaacauggauguuagcucaaagacaacaagaggaagcaaggcaacagcaggagagagcagcaaugagcuauguuaaacugcgaacuaaucuucagcaugccauucggcguggcacaagccuaauggaagaugaugaagagccaauuguggaagauguuaugauguccucagaagggaggauugaggaucuuaaugagggaauggauuuugacaccauggauauagauuugccaccaucaaagaacagacgagagagaacagaacugaagccugauuucuuugauccagcuucaauuauggaugaaucaguucuuggagugucaauguuuuaa

SEQ ID NO: 3508 - RNA, 3807 nt, Artificial Sequence
  derived and/or modified sequence opt1 from STAG2__Homo_sapiens__CCDS43990.1
augaucgccgcccccgagaucccgaccgacuucaaccugcuccaggagagcgagacccacuucuccagcgacacggacuucgaggacaucgagggcaagaaccagaagcaggggaagggcaagaccugcaagaaggggaagaagggccccgcggagaaggggaagggcggcaacgggggcgggaagccgcccuccggccccaaccgcaugaacgggcaccaccagcagaacggcguggagaacaugaugcuguucgaggucgugaagaugggcaagagcgccaugcaguccguggucgacgacuggaucgagagcuacaagcacgaccgggacaucgcccugcucgaccugaucaacuucuucauccagugcuccgggugcaagggcguggugaccgccgagauguuccgccacaugcagaacagcgagaucauccggaagaugaccgaggaguucgacgaggacuccggggacuacccccugacgauggccggcccccaguggaagaaguucaagagcuccuucugcgaguucaucggcguccucgugcgccagugccaguacagcaucaucuacgacgaguacaugauggacaccgugaucucccugcugaccgggcucagcgacucccagguccgggcguuccgccacaccagcacgcuggccgccaugaagcugaugaccgcccucgugaacguggcgcugaaccuguccaucaacauggacaacacccagcggcaguacgaggccgagcgcaacaagaugaucggcaagcgggccaacgagcgccucgagcugcugcuccagaagcggaaggagcugcaggagaaccaggacgagaucgagaacaugaugaacgccaucuucaagggggucuucgugcaccgcuaccgggacgccaucgcggagauccgcgccaucugcaucgaggagaucggcaucuggaugaagauguacagcgacgccuuccugaacgacuccuaccucaaguacgugggguggaccaugcacgacaagcagggcgagguccggcugaagugccugacggcccuccagggccuguacuacaacaaggagcugaacagcaagcucgagcuguucaccagccgcuucaaggaccggaucguguccaugacccuggacaaggaguacgacguggccguccaggcgaucaagcuccugacccuggugcuccagagcuccgaggaggugcugacggccgaggacugcgagaacgucuaccaccugguguacagcgcccaccgccccguggccgucgccgcgggggaguuccucuacaagaagcuguucucccggcgcgacccggaggaggacggcaugaugaagcggcgcgggcgccagggccccaacgccaaccuggugaagacccucgucuucuucuuccuggagagcgagcugcacgagcacgccgccuaccucguggacuccaugugggacugcgccaccgagcugcugaaggacugggagugcaugaacagccuccugcuggaggagccccucuccggggaggaggcgcugaccgaccggcaggagagcgcccugaucgagaucaugcugugcacgauccgccaggccgccgagugccacccgcccgugggccggggcaccgggaagcgcguccucaccgcgaaggagaagaagacccagcuggacgaccggacgaagaucaccgagcuguucgccguggcccucccccagcugcuggccaaguacuccguggacgccgagaaggucaccaaccuccugcagcugccccaguacuucgaccucgagaucuacaccacgggccgccuggagaagcaccuggacgcgcuccugcggcagauccgcaacaucguggagaagcacaccgacaccgacgugcuggaggccugcagcaagaccuaccacgcccucugcaacgaggaguucacgaucuucaaccgggucgacaucucccgcagccagcugaucgacgagcuggccgacaaguucaaccggcuccuggaggacuuccugcaggagggggaggagcccgacgaggacgacgccuaccaggugcucuccacccugaagcgcaucaccgcguuccacaacgcccacgaccugagcaagugggaccucuucgccugcaacuacaagcugcugaagaccggcaucgagaacggggacaugccggagcagaucgugauccacgcccuccagugcacgcacuacgucauccuguggcagcuggccaagaucaccgaguccagcuccaccaaggaggaccuccugcggcugaagaagcagaugcgcguguucugccagaucugccagcacuaccucaccaacgugaacaccacggucaaggagcaggcguucaccauccugugcgacauccugaugaucuucagccaccagaucaugagcggcggccgggacaugcucgagccccugguguacacccccgacuccagccugcaguccgagcuccugagcuucauccuggaccacguguucaucgagcaggacgacgacaacaacuccgccgacgggcagcaggaggacgaggccagcaagaucgaggcccuccacaagcgccggaaccugcuggcggccuucugcaagcucaucgucuacaccgugguggagaugaacacggccgccgacaucuucaagcaguacaugaaguacuacaacgacuacggcgacaucaucaaggagaccauguccaagacccgccagaucgacaagauccagugcgccaagacccugauccugagccuccagcagcuguucaacgagaugauccaggagaacggguacaacuucgaccgguccagcuccacguucagcggcaucaaggagcuggcgcgccgcuucgcccucaccuucggccuggaccagcugaagacccgggaggccaucgccaugcuccacaaggacgggaucgaguucgccuucaaggagcccaacccgcagggcgagucccacccgccccugaaccuggcguuccucgacauccugagcgaguucuccagcaagcugcuccgccaggacaagcggaccgucuacguguaccuggagaaguucaugacguuccagaugucccugcgccgggaggacguguggcucccccugaugagcuaccgcaacagccugcucgccgggggcgacgacgacaccauguccgucaucagcgggaucuccagccggggcuccaccgugcgcagcaagaaguccaagcccagcaccggcaagcggaagguggucgaggggaugcagcugucccugacggaggagagcuccagcuccgacagcauguggcucucccgcgagcagacccugcacacccccgugaugaugcagacgccccagcugaccagcaccaucaugcgggagcccaagcgccuccggccggaggacuccuucaugagcguguaccccaugcagaccgagcaccaccagacgccccuggacuacaacacccaggucaccuggaugcuggcccagcgccagcaggaggaggcccggcagcagcaggagcgcgccgcgauguccuacgugaagcuccggaccaaccugcagcacgccauccgccggggcaccagccugauggaggacgacgaggagccgaucguggaggacgucaugaugagcuccgaggggcgcaucgaggaccucaacgagggcauggacuucgacacgauggacaucgaccugccgcccagcaagaaccggcgcgagcgcaccgagcugaagcccgacuucuucgaccccgccuccaucauggacgagagcgugcucgggguguccauguucuga

SEQ ID NO: 3509 - RNA, 3807 nt, Artificial Sequence
  derived and/or modified sequence opt2 from STAG2__Homo_sapiens__CCDS43990.1
augaucgccgcccccgagauccccaccgacuucaaccuccuccaggaguccgagacccacuucuccuccgacaccgacuucgaggacaucgagggcaagaaccagaagcagggcaagggcaagaccugcaagaagggcaagaagggccccgccgagaagggcaagggcggcaacggcggcggcaagccccccuccggccccaaccgcaugaacggccaccaccagcagaacggcgucgagaacaugaugcucuucgaggucgucaagaugggcaaguccgccaugcaguccgucgucgacgacuggaucgaguccuacaagcacgaccgcgacaucgcccuccucgaccucaucaacuucuucauccagugcuccggcugcaagggcgucgucaccgccgagauguuccgccacaugcagaacuccgagaucauccgcaagaugaccgaggaguucgacgaggacuccggcgacuacccccucaccauggccggcccccaguggaagaaguucaaguccuccuucugcgaguucaucggcguccucguccgccagugccaguacuccaucaucuacgacgaguacaugauggacaccgucaucucccuccucaccggccucuccgacucccagguccgcgccuuccgccacaccuccacccucgccgccaugaagcucaugaccgcccucgucaacgucgcccucaaccucuccaucaacauggacaacacccagcgccaguacgaggccgagcgcaacaagaugaucggcaagcgcgccaacgagcgccucgagcuccuccuccagaagcgcaaggagcuccaggagaaccaggacgagaucgagaacaugaugaacgccaucuucaagggcgucuucguccaccgcuaccgcgacgccaucgccgagauccgcgccaucugcaucgaggagaucggcaucuggaugaagauguacuccgacgccuuccucaacgacuccuaccucaaguacgucggcuggaccaugcacgacaagcagggcgagguccgccucaagugccucaccgcccuccagggccucuacuacaacaaggagcucaacuccaagcucgagcucuucaccucccgcuucaaggaccgcaucgucuccaugacccucgacaaggaguacgacgucgccguccaggccaucaagcuccucacccucguccuccaguccuccgaggagguccucaccgccgaggacugcgagaacgucuaccaccucgucuacuccgcccaccgccccgucgccgucgccgccggcgaguuccucuacaagaagcucuucucccgccgcgaccccgaggaggacggcaugaugaagcgccgcggccgccagggccccaacgccaaccucgucaagacccucgucuucuucuuccucgaguccgagcuccacgagcacgccgccuaccucgucgacuccaugugggacugcgccaccgagcuccucaaggacugggagugcaugaacucccuccuccucgaggagccccucuccggcgaggaggcccucaccgaccgccaggaguccgcccucaucgagaucaugcucugcaccauccgccaggccgccgagugccacccccccgucggccgcggcaccggcaagcgcguccucaccgccaaggagaagaagacccagcucgacgaccgcaccaagaucaccgagcucuucgccgucgcccucccccagcuccucgccaaguacuccgucgacgccgagaaggucaccaaccuccuccagcucccccaguacuucgaccucgagaucuacaccaccggccgccucgagaagcaccucgacgcccuccuccgccagauccgcaacaucgucgagaagcacaccgacaccgacguccucgaggccugcuccaagaccuaccacgcccucugcaacgaggaguucaccaucuucaaccgcgucgacaucucccgcucccagcucaucgacgagcucgccgacaaguucaaccgccuccucgaggacuuccuccaggagggcgaggagcccgacgaggacgacgccuaccagguccucuccacccucaagcgcaucaccgccuuccacaacgcccacgaccucuccaagugggaccucuucgccugcaacuacaagcuccucaagaccggcaucgagaacggcgacaugcccgagcagaucgucauccacgcccuccagugcacccacuacgucauccucuggcagcucgccaagaucaccgaguccuccuccaccaaggaggaccuccuccgccucaagaagcagaugcgcgucuucugccagaucugccagcacuaccucaccaacgucaacaccaccgucaaggagcaggccuucaccauccucugcgacauccucaugaucuucucccaccagaucauguccggcggccgcgacaugcucgagccccucgucuacacccccgacuccucccuccaguccgagcuccucuccuucauccucgaccacgucuucaucgagcaggacgacgacaacaacuccgccgacggccagcaggaggacgaggccuccaagaucgaggcccuccacaagcgccgcaaccuccucgccgccuucugcaagcucaucgucuacaccgucgucgagaugaacaccgccgccgacaucuucaagcaguacaugaaguacuacaacgacuacggcgacaucaucaaggagaccauguccaagacccgccagaucgacaagauccagugcgccaagacccucauccucucccuccagcagcucuucaacgagaugauccaggagaacggcuacaacuucgaccgcuccuccuccaccuucuccggcaucaaggagcucgcccgccgcuucgcccucaccuucggccucgaccagcucaagacccgcgaggccaucgccaugcuccacaaggacggcaucgaguucgccuucaaggagcccaacccccagggcgagucccaccccccccucaaccucgccuuccucgacauccucuccgaguucuccuccaagcuccuccgccaggacaagcgcaccgucuacgucuaccucgagaaguucaugaccuuccagaugucccuccgccgcgaggacgucuggcucccccucauguccuaccgcaacucccuccucgccggcggcgacgacgacaccauguccgucaucuccggcaucuccucccgcggcuccaccguccgcuccaagaaguccaagcccuccaccggcaagcgcaaggucgucgagggcaugcagcucucccucaccgaggaguccuccuccuccgacuccauguggcucucccgcgagcagacccuccacacccccgucaugaugcagaccccccagcucaccuccaccaucaugcgcgagcccaagcgccuccgccccgaggacuccuucauguccgucuaccccaugcagaccgagcaccaccagaccccccucgacuacaacacccaggucaccuggaugcucgcccagcgccagcaggaggaggcccgccagcagcaggagcgcgccgccauguccuacgucaagcuccgcaccaaccuccagcacgccauccgccgcggcaccucccucauggaggacgacgaggagcccaucgucgaggacgucaugauguccuccgagggccgcaucgaggaccucaacgagggcauggacuucgacaccauggacaucgaccucccccccuccaagaaccgccgcgagcgcaccgagcucaagcccgacuucuucgaccccgccuccaucauggacgaguccguccucggcgucuccauguucuga

SEQ ID NO: 3510 - RNA, 3807 nt, Artificial Sequence
  derived and/or modified sequence opt3 from STAG2__Homo_sapiens__CCDS43990.1
augaucgccgcucccgagauuccuaccgacuucaaccugcuccaggaaagcgagacacacuuuuccucugauacugacuucgaagauauagagggcaagaaucaaaaacaggggaagggaaaaacgugcaagaaagguaagaagggcccagcagaaaaagggaagggaggcaacggugggggaaaaccgcccucaggcccuaauagaaugaacggccaucaccagcagaaugggguggagaacaugaugcuuuuugaggucguuaagaugggaaaaagugccaugcaaagcgugguagacgauuggaucgaauccuacaagcaugacagggauauugcgcuguuggacuuaaucaauuucuuuauucaguguucugguugcaagggcguggucaccgcugagauguuccggcacaugcagaacucggaaaucauacgcaaaaugacagaggaguuugaugaagacucaggggauuauccacugacuauggccggaccccaguggaagaaauucaagagcaguuuuugugaguucaucggcgugcuaguucgacaaugccaguacuccauuaucuaugacgaauacaugauggauaccgugauuucucuccugacaggucuuagcgacucccagguccgugcauuuagacauaccucaacucuggccgcuaugaaauugaugacagcacucgugaauguagcccugaaccugaguaucaauauggacaacacccagaggcaauaugaggcugaacggaauaagaugauagggaaacgcgccaacgagagacucgaguuacugcuucagaagaggaaggaauugcaggagaaucaagaugaaauugagaacaugaugaacgcgaucuucaaaggaguuuuugugcaccgguaccgcgacgcaauugccgaaauccgagcuaucuguauugaggagauaggcaucuggaugaagauguauagcgaugccuuccugaaugacucuuaccuaaaauacgucggcuggacgaugcacgauaagcagggggaagugagacucaaaugccugacugcacuucagggacuguauuacaacaaggagcucaauuccaaguuggaacuguucaccucaagguuuaaagaccggauugugagcaugacauuagauaaggaguaugacgucgcuguucaggccaucaaacugcucacucuugugcugcaaaguucugaagagguauugaccgcggaggauugugaaaacguguaccaucuagucuauuccgcccaccguccuguggcaguugcugccggugaguuccuguacaagaaacucuuuagccgcagagacccagaagaggauggcaugaugaagaggcgggggcgacagggacccaaugcuaaccuggugaagacacuugucuucuuuuuccuggagucggaauugcaugagcacgccgcauaucucguggacucuaugugggacugcgccaccgaacuguuaaaagauugggaguguaugaacucccugcuacucgaagaaccucugucaggcgaggaagcucuuacggaccgccaggagagugcguugauagaaauuaugcugugcacuaucagacaggcagccgagugucacccaccgguagguagggggacaggcaagcggguucucaccgcuaaagaaaagaaaacucaacuggaugaccgcacaaagaucaccgagcuuuuugccguggcacugccccaguugcucgccaaguacagcgucgaugcugagaaagugacgaaucuguuacagcugccucaguacuucgaccuagaaauuuauaccacaggaagacucgagaagcaucuggaugcccuuuugaggcaaauccguaauauugucgaaaaacacacugacaccgaugugcuggaggcaugcuccaagacauaccaugcgcucugcaacgaagaguuuacuauauucaaucggguugacaucucucgaagccagcugauugaugaguuagcugacaaauuuaacagacugcuugaagauuucuugcaggagggcgaggagccagacgaggacgaugccuaucaggugcucucaacccugaagaggaucacagcauuucacaaugcccaugaccuaaguaaaugggaucuguucgcuuguaacuacaagcuccugaagaccgggaucgaaaauggagacaugcccgagcaaauuguaauacacgcccuucagugcacucacuaugucaucuuguggcagcuggcaaaaauuacggaauccagcucuacaaaggaggauuuacuccgccugaaaaagcaaaugcggguguucugucagaucugccagcauuaccuuaccaacguuaacacuaccgugaaagaacaggcuuuuacaauucugugugacaucuugaugauauucucacaccaaaucaugagugguggcagagauaugcucgagccucuggucuauaccccagacagcucccuacagucugagcugcucucguuuauucuggaucauguguucaucgaacaggacgaugacaauaacagcgccgaugggcagcaagaggacgaagcguccaagauugaggcccuucacaagaggcgcaauuugcuggcugcauuuugcaaauuaaucguauacacugugguugaaaugaacacagccgcugacauauucaagcaguacaugaaauauuacaaugauuauggagacauuaucaaggagacgaugucaaaaacccgacagauugauaagauccagugugccaagacucucauacugagucuucaacagcuguuuaacgagaugauccaggaaaauggcuacaacuucgaccggucuagcuccacauuuucagguauuaaagagcuagcacguagauucgcgcucaccuuugggcuggaucaauugaagacaagggaagccaucgcuaugcugcacaaagacggcauugaguucgccuuuaaggaacccaauccgcagggagagagccauccucccuuaaaccucgcauuccuggauauccuuucugaguucuccaguaaacuguugcgccaggacaagcggacugucuauguguaccucgaaaaguuuaugaccuuccagaugagccugagaagggaggauguguggcuaccacugaugucuuaucgaaauucccuucucgcuggcggggacgaugacacgaugucagucauaaguggaauuagcucgcgcgguuccaccguucggucuaaaaagagcaaaccuucaacaggcaagagaaaagugguggaagggaugcaacugaguuugacugaggaguccucuagcuccgacucaauguggcugagcagggaacagaccuuacacacacccguaaugaugcagacuccacagcucaccaguacgaucaugcgugagcccaagcgccugcggccugaagauucuuuuauguccgucuacccaaugcaaacagagcaucaccagaccccgcuugacuacaacacucaggugacauggaugcuggcccagagacaacaggaagaggcaaggcagcagcaagagcgagccgcuaugagcuauguuaaauugcggaccaaucuccagcaugcgauccgcagaggaacuucgcugauggaagaugacgaggaacccauuguggaggaugucaugaugucaucugaaggcaggaucgaggaccuaaacgaggguauggauuucgacaccauggauauugaccugccuccaaguaagaaucggcgagaaagaacagagcuuaagcccgacuuuuucgauccugccuccauaauggaugaaagcgugcucgggguuucuauguuuuga

SEQ ID NO: 3511 - RNA, 3807 nt, Artificial Sequence
  derived and/or modified sequence opt4 from STAG2__Homo_sapiens__CCDS43990.1
augaucgccgcccccgagauccccaccgacuucaaccugcugcaggagagcgagacccacuucagcagcgacaccgacuucgaggacaucgagggcaagaaccagaagcagggcaagggcaagaccugcaagaagggcaagaagggccccgccgagaagggcaagggcggcaacggcggcggcaagccccccagcggccccaacagaaugaacggccaccaccagcagaacggcguggagaacaugaugcuguucgagguggugaagaugggcaagagcgccaugcagagcgugguggacgacuggaucgagagcuacaagcacgacagagacaucgcccugcuggaccugaucaacuucuucauccagugcagcggcugcaagggcguggugaccgccgagauguucagacacaugcagaacagcgagaucaucagaaagaugaccgaggaguucgacgaggacagcggcgacuacccccugaccauggccggcccccaguggaagaaguucaagagcagcuucugcgaguucaucggcgugcuggugagacagugccaguacagcaucaucuacgacgaguacaugauggacaccgugaucagccugcugaccggccugagcgacagccaggugagagccuucagacacaccagcacccuggccgccaugaagcugaugaccgcccuggugaacguggcccugaaccugagcaucaacauggacaacacccagagacaguacgaggccgagagaaacaagaugaucggcaagagagccaacgagagacuggagcugcugcugcagaagagaaaggagcugcaggagaaccaggacgagaucgagaacaugaugaacgccaucuucaagggcguguucgugcacagauacagagacgccaucgccgagaucagagccaucugcaucgaggagaucggcaucuggaugaagauguacagcgacgccuuccugaacgacagcuaccugaaguacgugggcuggaccaugcacgacaagcagggcgaggugagacugaagugccugaccgcccugcagggccuguacuacaacaaggagcugaacagcaagcuggagcuguucaccagcagauucaaggacagaaucgugagcaugacccuggacaaggaguacgacguggccgugcaggccaucaagcugcugacccuggugcugcagagcagcgaggaggugcugaccgccgaggacugcgagaacguguaccaccugguguacagcgcccacagacccguggccguggccgccggcgaguuccuguacaagaagcuguucagcagaagagaccccgaggaggacggcaugaugaagagaagaggcagacagggccccaacgccaaccuggugaagacccugguguucuucuuccuggagagcgagcugcacgagcacgccgccuaccugguggacagcaugugggacugcgccaccgagcugcugaaggacugggagugcaugaacagccugcugcuggaggagccccugagcggcgaggaggcccugaccgacagacaggagagcgcccugaucgagaucaugcugugcaccaucagacaggccgccgagugccacccccccgugggcagaggcaccggcaagagagugcugaccgccaaggagaagaagacccagcuggacgacagaaccaagaucaccgagcuguucgccguggcccugccccagcugcuggccaaguacagcguggacgccgagaaggugaccaaccugcugcagcugccccaguacuucgaccuggagaucuacaccaccggcagacuggagaagcaccuggacgcccugcugagacagaucagaaacaucguggagaagcacaccgacaccgacgugcuggaggccugcagcaagaccuaccacgcccugugcaacgaggaguucaccaucuucaacagaguggacaucagcagaagccagcugaucgacgagcuggccgacaaguucaacagacugcuggaggacuuccugcaggagggcgaggagcccgacgaggacgacgccuaccaggugcugagcacccugaagagaaucaccgccuuccacaacgcccacgaccugagcaagugggaccuguucgccugcaacuacaagcugcugaagaccggcaucgagaacggcgacaugcccgagcagaucgugauccacgcccugcagugcacccacuacgugauccuguggcagcuggccaagaucaccgagagcagcagcaccaaggaggaccugcugagacugaagaagcagaugagaguguucugccagaucugccagcacuaccugaccaacgugaacaccaccgugaaggagcaggccuucaccauccugugcgacauccugaugaucuucagccaccagaucaugagcggcggcagagacaugcuggagccccugguguacacccccgacagcagccugcagagcgagcugcugagcuucauccuggaccacguguucaucgagcaggacgacgacaacaacagcgccgacggccagcaggaggacgaggccagcaagaucgaggcccugcacaagagaagaaaccugcuggccgccuucugcaagcugaucguguacaccgugguggagaugaacaccgccgccgacaucuucaagcaguacaugaaguacuacaacgacuacggcgacaucaucaaggagaccaugagcaagaccagacagaucgacaagauccagugcgccaagacccugauccugagccugcagcagcuguucaacgagaugauccaggagaacggcuacaacuucgacagaagcagcagcaccuucagcggcaucaaggagcuggccagaagauucgcccugaccuucggccuggaccagcugaagaccagagaggccaucgccaugcugcacaaggacggcaucgaguucgccuucaaggagcccaacccccagggcgagagccaccccccccugaaccuggccuuccuggacauccugagcgaguucagcagcaagcugcugagacaggacaagagaaccguguacguguaccuggagaaguucaugaccuuccagaugagccugagaagagaggacguguggcugccccugaugagcuacagaaacagccugcuggccggcggcgacgacgacaccaugagcgugaucagcggcaucagcagcagaggcagcaccgugagaagcaagaagagcaagcccagcaccggcaagagaaaggugguggagggcaugcagcugagccugaccgaggagagcagcagcagcgacagcauguggcugagcagagagcagacccugcacacccccgugaugaugcagaccccccagcugaccagcaccaucaugagagagcccaagagacugagacccgaggacagcuucaugagcguguaccccaugcagaccgagcaccaccagaccccccuggacuacaacacccaggugaccuggaugcuggcccagagacagcaggaggaggccagacagcagcaggagagagccgccaugagcuacgugaagcugagaaccaaccugcagcacgccaucagaagaggcaccagccugauggaggacgacgaggagcccaucguggaggacgugaugaugagcagcgagggcagaaucgaggaccugaacgagggcauggacuucgacaccauggacaucgaccugccccccagcaagaacagaagagagagaaccgagcugaagcccgacuucuucgaccccgccagcaucauggacgagagcgugcugggcgugagcauguucuga

SEQ ID NO: 3512 - RNA, 3807 nt, Artificial Sequence
  derived and/or modified sequence opt5 from STAG2__Homo_sapiens__CCDS43990.1
augaucgccgcucccgagauuccuaccgacuucaaccugcuccaggaaagcgagacacacuuuuccucugauacggacuucgaagauaucgagggcaagaaucaaaaacaggggaagggaaaaaccugcaagaaaggcaagaaggggccggccgaaaaaggaaagggcgggaacggaggcggcaaacccccuagcgggcccaauagaaugaacggacaucaccagcagaauggcguggagaacaugaugcuguuugaggucguuaagauggggaaauccgcgaugcaaucugugguggacgauuggauugaaagcuacaagcaugaccgggauaucgcccuucuggaccucauuaauuucuuuauccaguguuccggaugcaagggcgucgugacagcugagauguuccgccacaugcagaacucugaaaucauuagaaaaaugaccgaggaguuugaugaagacagcggggauuauccucugacaauggccggaccccaguggaagaaauucaaguccagcuuuugugaguucaucggcguucuugugcggcaaugccaguacucuauuaucuaugacgaauacaugauggauaccgucauuucccugcucacaggccugagcgacucucaggugcgcgcuuuuagacauaccuccacgcuggccgcuaugaaacucaugaccgcccugguuaauguggcgcuuaaccugagcaucaauauggacaacacacagcggcaauaugaggccgaacgcaauaagaugauugggaaaagagcuaacgagcggcucgagcugcuucugcagaagcgcaaggaacuccaggagaaucaagaugaaaucgagaacaugaugaacgccaucuucaaaggagucuuugugcacagauaccgggacgcuauugccgaaauccgcgcgauuuguaucgaggagauuggcaucuggaugaagauguauucugaugccuuccugaaugacuccuaccugaaauacgugggguggaccaugcacgauaagcagggagaagucagacucaaaugccugacagcccuucagggccuguauuacaacaaggagcucaauagcaagcuggaacuuuucaccucccgguuuaaagaccgcaucguuucuaugacgcuggauaaggaguaugacguggcugugcaggcuauuaaacuccugacacugguccuccaaagcuccgaagaggugcugaccgccgaggauugugaaaacguuuaccaucuuguguauagcgcccacagaccugucgcuguggcggccggggaguuccuguacaagaaacucuuuucucggagagacccggaagaggauggaaugaugaagcgccggggcagacagggccccaaugcuaaccugguuaagacacuuguguucuuuuuccuggaguccgaacuccaugagcacgccgccuaucuggucgacagcaugugggacugcgcuaccgaacugcucaaagauugggaguguaugaauagccugcuucuggaagaaccucucagcggggaggaagcccugaccgaccgccaggaguccgcgcugaucgaaauuaugcuuugcacaauccggcaggcugccgagugucaucccccugugggaagaggcacggggaagcgcguccucaccgccaaagaaaagaaaacacaacuggaugaccggaccaagauuacagagcuguuugcuguggcccucccccagcugcuugcuaaguacucuguugaugccgagaaagugaccaaccugcuccagcugccgcaguacuucgaccuggaaaucuauacgacaggaagacuugagaagcaccucgaugcgcugcugcgccaaauccggaauauugucgaaaaacacaccgacaccgaugugcucgaggccugcagcaagacauaccaugcucugugcaacgaagaguuuaccaucuucaauagaguugacauuucccgcagccagcuuaucgaugagcuggccgacaaauuuaaccggcuccuggaagauuuccugcaggagggcgaggagccugacgaggacgaugcuuaucaggugcuuucuacacucaagagaauuacggccuuucacaaugcgcaugaccuguccaaaugggaucuguucgccuguaacuacaagcuccugaagaccgggaucgaaaauggcgacaugcccgagcaaauugucauccacgcccuucagugcacacacuaugugauccuguggcagcucgcuaaaauuaccgaaucuucuuccacaaaggaggaucugcugcggcuuaaaaagcaaaugcgcguguucugucagaucugccagcauuaccucaccaacguuaacacgaccgucaaagaacaggcuuuuacaauucugugugacauccugaugauuuucagccaccaaaucauguccggaggcagagauaugcucgagccucugguguauacccccgacucuagccuucaguccgagcugcucucuuuuauccuggaucauguguucauugaacaggacgaugacaauaacagcgccgaugggcagcaagaggacgaagccuccaagaucgaggcucugcacaagcggagaaaucuucuggcggccuuuugcaaacucauugucuacacagugguugaaaugaacaccgcugccgacaucuucaagcaguacaugaaauauuacaaugauuauggagacauuaucaaggagacgaugagcaaaacacgccagaucgauaagauucagugugccaagacccugauccucucucugcaacagcuuuuuaacgagaugauucaggaaaauggcuacaacuucgaccgguccagcucuacauuuuccgggaucaaagagcuggcuagacgcuucgcccucaccuuuggacuggaucaacugaagaccagagaagcgauugcuaugcuucacaaagacggcaucgaguucgccuuuaaggaacccaauccucagggggagagccauccgccccugaaccucgccuuccuggauauccucucugaguucagcuccaaacugcuucggcaggacaagcgcacaguguaugucuaccuggaaaaguuuaugacguuccagaugagccucagacgggaggauguguggcugccucugaugucuuaucgcaauucccuucuggcuggcggagacgaugacaccaugagcguuauuuccggcaucucuagcagaggguccacagugcggucuaaaaagagcaaacccuccaccggaaagcgcaaagucguggaaggcaugcaacucucucugacagaggagagcuccagcucugacuccauguggcucagcagagaacagacccugcacacgccuguuaugaugcagacaccccagcuuaccucuaccauuaugcgggagccgaagcgccugagaccugaagauuccuuuaugagcguguaccccaugcaaacagagcaucaccagaccccucuggacuacaacacacaggucacguggaugcucgcccagcggcaacaggaagaggcgagacagcagcaagagcgcgcugccaugucuuaugugaaacugcggaccaaucuucagcaugccaucagacgcgggacaucccugauggaagaugacgaggaacccauuguggaggaugucaugaugagcuccgaaggacggaucgaggaccucaacgagggcauggauuucgacaccauggauauugaccugccucccagcaagaauagacgcgaacggacagagcucaagccggacuuuuucgauccugcuucuaucauggaugaaagcguucuggggguguccauguuuuga

SEQ ID NO: 3513 - protein, 490 aa, Artificial Sequence
  STAMP-1__Homo_sapiens__Q8NFT2
MESISMMGSPKSLSETFLPNGINGIKDARKVTVGVIGSGDFAKSLTIRLIRCGYHVVIGSRNPKFASEFFPHVVDVTHHEDALTKTNIIFVAIHREHYTSLWDLRHLLVGKILIDVSNNMRINQYPESNAEYLASLFPDSLIVKGFNVVSAWALQLGPKDASRQVYICSNNIQARQQVIELARQLNFIPIDLGSLSSAREIENLPLRLFTLWRGPVVVAISLATFFFLYSFVRDVIHPYARNQQSDFYKIPIEIVNKTLPIVAITLLSLVYLAGLLAAAYQLYYGTKYRRFPPWLETWLQCRKQLGLLSFFFAMVHVAYSLCLPMRRSERYLFLNMAYQQVHANIENSWNEEEVWRIEMYISFGIMSLGLLSLLAVTSIPSVSNALNWREFSFIQSTLGYVALLISTFHVLIYGWKRAFEEEYYRFYTPPNFVLALVLPSIVILGKIILFLPCISRKLKRIKKGWEKSQFLEEGMGGTIPHVSPERVTVM

SEQ ID NO: 3514 - RNA, 1473 nt, Artificial Sequence
  STAMP-1__Homo_sapiens__CCDS5615.1
auggaaucaaucucuaugaugggaagcccuaagagccuuagugaaacuuuuuuaccuaauggcauaaaugguaucaaagaugcaaggaaggucacuguaggugugauuggaaguggagauuuugccaaauccuugaccauucgacuuauuagaugcggcuaucauguggucauaggaaguagaaauccuaaguuugcuucugaauuuuuuccucaugugguagaugucacucaucaugaagaugcucucacaaaaacaaauauaauauuuguugcuauacacagagaacauuauaccucccugugggaccugagacaucugcuuguggguaaaauccugauugaugugagcaauaacaugaggauaaaccaguacccagaauccaaugcugaauauuuggcuucauuauucccagauucuuugauugucaaaggauuuaauguugucucagcuugggcacuucaguuaggaccuaaggaugccagccggcagguuuauauaugcagcaacaauauucaagcgcgacaacagguuauugaacuugcccgccaguugaauuucauucccauugacuugggauccuuaucaucagccagagagauugaaaauuuaccccuacgacucuuuacucucuggagagggccaguggugguagcuauaagcuuggccacauuuuuuuuccuuuauuccuuugucagagaugugauucauccauaugcuagaaaccaacagagugacuuuuacaaaauuccuauagagauugugaauaaaaccuuaccuauaguugccauuacuuugcucucccuaguauaccucgcaggucuucuggcagcugcuuaucaacuuuauuacggcaccaaguauaggagauuuccaccuugguuggaaaccugguuacaguguagaaaacagcuuggauuacuaaguuuuuucuucgcuaugguccauguugccuacagccucugcuuaccgaugagaaggucagagagauauuuguuucucaacauggcuuaucagcagguucaugcaaauauugaaaacucuuggaaugaggaagaaguuuggagaauugaaauguauaucuccuuuggcauaaugagccuuggcuuacuuucccuccuggcagucacuucuaucccuucagugagcaaugcuuuaaacuggagagaauucaguuuuauucagucuacacuuggauaugucgcucugcucauaaguacuuuccauguuuuaauuuauggauggaaacgagcuuuugaggaagaguacuacagauuuuauacaccaccaaacuuuguucuugcucuuguuuugcccucaauuguaauucuggguaagauuauuuuauuccuuccauguauaagccgaaagcuaaaacgaauuaaaaaaggcugggaaaagagccaauuucuggaagaagguaugggaggaacaauuccucaugucuccccggagagggucacaguaauguga

SEQ ID NO: 3515 - RNA, 1473 nt, Artificial Sequence
  derived and/or modified sequence opt1 from STAMP-1__Homo_sapiens__CCDS5615.1
auggagagcaucuccaugaugggcagccccaagucccugagcgagaccuuccucccgaacgggaucaacggcaucaaggacgcccgcaaggugaccgucggggugaucggcuccggggacuucgccaagagccugacgauccggcugauccgcugcggcuaccacguggucaucggcucccggaaccccaaguucgcgagcgaguucuucccccacgugguggacgucacccaccacgaggacgcccucaccaagaccaacaucaucuucguggccauccaccgcgagcacuacacgucccugugggaccugcggcaccuccugguggggaagauccugaucgacgucagcaacaacaugcgcaucaaccaguaccccgaguccaacgccgaguaccucgccagccuguucccggacucccugaucgugaagggcuucaacguggucagcgcgugggcccuccagcuggggcccaaggacgccucccgccagguguacaucugcagcaacaacauccaggcccggcagcaggucaucgagcuggcgcggcagcucaacuucauccccaucgaccugggcucccugagcuccgcccgcgagaucgagaaccucccccugcggcuguucacccucuggcgcgggccgguggugguggccaucagccuggccaccuucuucuuccuguacagcuucguccgggacgugauccaccccuacgcccgcaaccagcaguccgacuucuacaagauccccaucgagaucgugaacaagacccuccccaucgucgcgaucacgcugcugagccucguguaccuggccggccugcucgccgccgccuaccagcuguacuacggcaccaaguaccggcgcuucccgcccuggcuggagaccuggcuccagugccggaagcagcuggggcugcucuccuucuucuucgcgauggugcacgucgccuacagccugugccugcccaugcgccgguccgagcgcuaccucuuccugaacauggccuaccagcagguccacgccaacaucgagaacagcuggaacgaggaggagguguggcggaucgagauguacaucuccuucggcaucaugagccuggggcuccugucccugcucgccgugaccagcauccccuccgugagcaacgcgcugaacuggcgcgaguucuccuucauccagagcacgcugggcuacgucgcccuccugaucuccaccuuccacgugcugaucuacggcuggaagcgcgccuucgaggaggaguacuaccgguucuacaccccgcccaacuucgugcuggcccucguccugcccagcaucgugauccuggggaagaucauccucuuccugcccugcaucucccgcaagcugaagcggaucaagaagggcugggagaagucccaguuccucgaggaggggaugggcgggaccaucccgcacgugagccccgagcgcgucacggugauguga

SEQ ID NO: 3516 - RNA, 1473 nt, Artificial Sequence
  derived and/or modified sequence opt2 from STAMP-1__Homo_sapiens__CCDS5615.1
auggaguccaucuccaugaugggcucccccaagucccucuccgagaccuuccuccccaacggcaucaacggcaucaaggacgcccgcaaggucaccgucggcgucaucggcuccggcgacuucgccaagucccucaccauccgccucauccgcugcggcuaccacgucgucaucggcucccgcaaccccaaguucgccuccgaguucuucccccacgucgucgacgucacccaccacgaggacgcccucaccaagaccaacaucaucuucgucgccauccaccgcgagcacuacaccucccucugggaccuccgccaccuccucgucggcaagauccucaucgacgucuccaacaacaugcgcaucaaccaguaccccgaguccaacgccgaguaccucgccucccucuuccccgacucccucaucgucaagggcuucaacgucgucuccgccugggcccuccagcucggccccaaggacgccucccgccaggucuacaucugcuccaacaacauccaggcccgccagcaggucaucgagcucgcccgccagcucaacuucauccccaucgaccucggcucccucuccuccgcccgcgagaucgagaaccucccccuccgccucuucacccucuggcgcggccccgucgucgucgccaucucccucgccaccuucuucuuccucuacuccuucguccgcgacgucauccaccccuacgcccgcaaccagcaguccgacuucuacaagauccccaucgagaucgucaacaagacccuccccaucgucgccaucacccuccucucccucgucuaccucgccggccuccucgccgccgccuaccagcucuacuacggcaccaaguaccgccgcuucccccccuggcucgagaccuggcuccagugccgcaagcagcucggccuccucuccuucuucuucgccaugguccacgucgccuacucccucugccuccccaugcgccgcuccgagcgcuaccucuuccucaacauggccuaccagcagguccacgccaacaucgagaacuccuggaacgaggaggaggucuggcgcaucgagauguacaucuccuucggcaucaugucccucggccuccucucccuccucgccgucaccuccauccccuccgucuccaacgcccucaacuggcgcgaguucuccuucauccaguccacccucggcuacgucgcccuccucaucuccaccuuccacguccucaucuacggcuggaagcgcgccuucgaggaggaguacuaccgcuucuacaccccccccaacuucguccucgcccucguccuccccuccaucgucauccucggcaagaucauccucuuccuccccugcaucucccgcaagcucaagcgcaucaagaagggcugggagaagucccaguuccucgaggagggcaugggcggcaccaucccccacgucucccccgagcgcgucaccgucauguga

SEQ ID NO: 3517 - RNA, 1473 nt, Artificial Sequence
  derived and/or modified sequence opt3 from STAMP-1__Homo_sapiens__CCDS5615.1
auggagagcaucuccaugaugggcucucccaagucacugagugaaaccuuccucccuaacgggauuaauggaauaaaagacgccagaaaggugacagucgguguuaucggcagcggggauuuugcuaaaucccuuacuauuaggcugauccggugcggauaccacgugguaauuggcucucgcaacccaaaguucgcaucggaguuuuucccgcauguggucgacgugacgcaccaugaagaugccuugaccaaaacaaauaucauauuuguugcgauccaccgagagcauuauacuucauuaugggaccugcgucaccuacucguggguaagauucugaucgaugucagcaacaauaugagaauuaaccaguaccccgaaaguaaugcugaguaucuugccucccuguucccugacucuuugaucgugaagggguuuaacguaguuagcgcaugggcccuccaacugggaccaaaagaugcuuccaggcaaguguacauauguucaaauaacauucaggcacggcagcaggucaucgagcuggcccgccagcucaauuucauucccaucgacuuaggcagucugagcucugcuagagaaaucgagaaccuuccuuugaggcuguuuacccuauggcggggcccagugguggucgccauuucccucgcgacauucuuuuuccuguauucauuuguucgcgaugugauacaccccuacgcacgaaaucagcagagcgacuucuauaagaucccuauugaaaucguaaacaaaacccuuccaauaguggccauuacucuguugagucucgucuaccuggcuggguuacuggccgcagcuuaccaacucuauuacggaacaaaguauagaagguucccgcccuggcuugagaccuggcugcagugccggaaacaguugggucuacugagcuuuuucuuugccauggugcauguugcguacucccucugucugccuaugcgucgcagcgagagauaucuuuuccugaauauggccuaccagcaagugcacgcaaacaucgaaaacucguggaaugaggaagaggucuggaggaucgaaauguauauuucuuuuggcaucauguccuuggggcuccugucauuacuggcugugacgaguauuccaagcguauccaacgcccuaaauuggcgggaguucucuuuuauacagagcacucucggauacguugcucugcuuaucucaaccuuccauguguugauuuacggcuggaagcgagccuuugaggaagaguauuaccgcuucuauacacccccuaacuuuguccuggcacucgugcugccaaguaucgucauccuugguaagauuauacuguucuugcccugcaucuccagaaaacucaagaggauuaaaaaggggugggaaaaaucucaguuucuggaggaaggaaugggcggcacuaucccgcacgugucuccugagcggguuaccgugauguga

SEQ ID NO: 3518 - RNA, 1473 nt, Artificial Sequence
  derived and/or modified sequence opt4 from STAMP-1__Homo_sapiens__CCDS5615.1
auggagagcaucagcaugaugggcagccccaagagccugagcgagaccuuccugcccaacggcaucaacggcaucaaggacgccagaaaggugaccgugggcgugaucggcagcggcgacuucgccaagagccugaccaucagacugaucagaugcggcuaccacguggugaucggcagcagaaaccccaaguucgccagcgaguucuucccccacgugguggacgugacccaccacgaggacgcccugaccaagaccaacaucaucuucguggccauccacagagagcacuacaccagccugugggaccugagacaccugcuggugggcaagauccugaucgacgugagcaacaacaugagaaucaaccaguaccccgagagcaacgccgaguaccuggccagccuguuccccgacagccugaucgugaagggcuucaacguggugagcgccugggcccugcagcugggccccaaggacgccagcagacagguguacaucugcagcaacaacauccaggccagacagcaggugaucgagcuggccagacagcugaacuucauccccaucgaccugggcagccugagcagcgccagagagaucgagaaccugccccugagacuguucacccuguggagaggccccguggugguggccaucagccuggccaccuucuucuuccuguacagcuucgugagagacgugauccaccccuacgccagaaaccagcagagcgacuucuacaagauccccaucgagaucgugaacaagacccugcccaucguggccaucacccugcugagccugguguaccuggccggccugcuggccgccgccuaccagcuguacuacggcaccaaguacagaagauucccccccuggcuggagaccuggcugcagugcagaaagcagcugggccugcugagcuucuucuucgccauggugcacguggccuacagccugugccugcccaugagaagaagcgagagauaccuguuccugaacauggccuaccagcaggugcacgccaacaucgagaacagcuggaacgaggaggagguguggagaaucgagauguacaucagcuucggcaucaugagccugggccugcugagccugcuggccgugaccagcauccccagcgugagcaacgcccugaacuggagagaguucagcuucauccagagcacccugggcuacguggcccugcugaucagcaccuuccacgugcugaucuacggcuggaagagagccuucgaggaggaguacuacagauucuacaccccccccaacuucgugcuggcccuggugcugcccagcaucgugauccugggcaagaucauccuguuccugcccugcaucagcagaaagcugaagagaaucaagaagggcugggagaagagccaguuccuggaggagggcaugggcggcaccaucccccacgugagccccgagagagugaccgugauguga

SEQ ID NO: 3519 - RNA, 1473 nt, Artificial Sequence
  derived and/or modified sequence opt5 from STAMP-1__Homo_sapiens__CCDS5615.1
auggagagcaucuccaugaugggcucucccaagagccuguccgaaaccuuccucccuaacgggauuaauggaaucaaagacgccagaaaggugacagucggcguuauugggucuggagauuuugcuaaaagccugacgauccggcuuauucgcugcggcuaccacguggugaucggguccagaaacccgaaguucgccucugaguuuuucccccaugucguggacguuacccaccaugaagaugcgcugacaaaaaccaauaucauuuuuguggcuauccaccgggagcauuauacaagccucugggaccugcgccaccuucuggucggaaagauucucaucgauguguccaacaauaugagaauuaaccaguacccugaaagcaaugccgaguaucuggccucucuguuccccgacucccucaucguuaagggcuuuaacguggucagcgcuugggcccugcaacuuggcccuaaagaugcuucucgccagguguacauuuguuccaauaacauccaggcccggcagcaagugaucgagcuggcgagacagcucaauuucauucccaucgaccuggggagccuuucuuccgcccgggaaauugagaaccugccucuccgccuguuuacccuguggagaggaccggucguuguggcuaucagccucgccacauucuuuuuccuguauuccuuugugcgggaugucauucaccccuacgcucgcaaucagcagucugacuucuauaagaucccuaucgaaauugugaacaaaacccuucccaucguugccauuacgcugcucagccugguguaccuugcgggccugcucgccgcugccuaccaacuguauuacgggaccaaguauagacgguucccucccuggcuggagacauggcuccagugccgcaaacagcugggacuucuguccuuuuucuuugcuaugguccauguggccuacagccucugucugccgaugagacggucugagagauaucuuuuccugaauauggccuaccagcaaguucacgcuaacaucgaaaacuccuggaaugaggaagagguguggcgcauugaaauguauaucagcuuuggcaucaugucucucgggcugcugagccuccuggcggucaccuccauuccuucugugagcaacgcccuuaauuggcgggaguucuccuuuauccagagcacacugggauacgucgcucuccugauuucuaccuuccaugugcugaucuacggcuggaagagagccuuugaggaagaguauuaccgcuucuauacgcccccuaacuuuguucuugcccucgugcugcccuccauugucauccugggcaagauuauccucuuccugcccugcaucagccggaaacuuaagagaauuaaaaaggggugggaaaaaucucaguuucuggaggaaggaaugggcgggacaaucccucacguguccccggagcgcguuaccgugauguga

SEQ ID NO: 3520 - protein, 258 aa, Artificial Sequence [sequence omitted]

SEQ ID NO: 3521 - RNA, 777 nt, Artificial Sequence
  STEAP-1__Homo_sapiens__EAW93749
auggaaagcagaaaagacaucacaaaccaagaagaaauuuggaaaaugaagccuaggagaaauuuagaagacaacgauuauuugcauaaggacacgggagagaccagcaugcuaaaaagaccugugcuuuugcauuugcagcaaacagcccaugcugaugaauuugacugcccuucagaacuucagcacgcacaggaacucuuuccacaguggcacuugccaauuaaaauagcugcuguuauggcaucucugacuuuucuuuacacucuucugagggaaguaauucacccuuuagcaacuucccaucaacaauauuuuuauaaaauuccaauccuggucaucaacaaagucuugccaaugguuuccaucacucucuuggcauugguuuaccuaccaggugugauagcagcaauuguccaaguucauaauggaaccaaguauaagaaguuuccacauugguuggauaaguggauguuaacaagaaagcaguuugggcuucucaguuuguuuuuugcuguacugcaugcaauuuauacucugucuuacgcaaugaggcgauccuacagauacaaguugcuaaacugggcauaucaacagguccaacaaaauaaagaagaugccuggauugagcaugauguuuggagaauggagauuuaugugucucugggaauugugggacuggcaauacuggcucuguuggcugugacaucuauuccaucugugagugacucuuugacauggagagaauuucacuauauucagguaaauaauauauaa

SEQ ID NO: 3522 - RNA, 777 nt, Artificial Sequence
  derived and/or modified sequence opt1 from STEAP-1__Homo_sapiens__EAW93749
auggagagccgcaaggacaucaccaaccaggaggagaucuggaagaugaagccccggcgcaaccuggaggacaacgacuaccuccacaaggacaccggcgagacguccaugcugaagcggccggugcugcuccaccuccagcagaccgcccacgccgacgaguucgacugccccagcgagcugcagcacgcgcaggagcuguucccccaguggcaccuccccaucaagaucgccgccgucauggccucccugaccuuccuguacacccugcugcgcgaggugauccacccgcucgccacgagccaccagcaguacuucuacaagauccccauccuggugaucaacaagguccugcccaugguguccaucacccuccuggcgcugguguaccuccccggggucaucgccgccaucguccaggugcacaacggcaccaaguacaagaaguucccgcacuggcuggacaaguggaugcugacccggaagcaguucgggcuccugagccuguucuucgccgugcuccacgcgaucuacacgcuguccuacgccaugcgccggagcuaccgcuacaagcugcucaacugggccuaccagcagguccagcagaacaaggaggacgccuggaucgagcacgacguguggcggauggagaucuacgugucccugggcaucguggggcuggccauccucgcgcugcuggccgugaccagcauccccuccgucagcgacucccucaccuggcgcgaguuccacuacauccaggugaacaacaucuga

SEQ ID NO: 3523 - RNA, 777 nt, Artificial Sequence
  derived and/or modified sequence opt2 from STEAP-1__Homo_sapiens__EAW93749
auggagucccgcaaggacaucaccaaccaggaggagaucuggaagaugaagccccgccgcaaccucgaggacaacgacuaccuccacaaggacaccggcgagaccuccaugcucaagcgccccguccuccuccaccuccagcagaccgcccacgccgacgaguucgacugccccuccgagcuccagcacgcccaggagcucuucccccaguggcaccuccccaucaagaucgccgccgucauggccucccucaccuuccucuacacccuccuccgcgaggucauccacccccucgccaccucccaccagcaguacuucuacaagauccccauccucgucaucaacaagguccuccccauggucuccaucacccuccucgcccucgucuaccuccccggcgucaucgccgccaucguccagguccacaacggcaccaaguacaagaaguucccccacuggcucgacaaguggaugcucacccgcaagcaguucggccuccucucccucuucuucgccguccuccacgccaucuacacccucuccuacgccaugcgccgcuccuaccgcuacaagcuccucaacugggccuaccagcagguccagcagaacaaggaggacgccuggaucgagcacgacgucuggcgcauggagaucuacgucucccucggcaucgucggccucgccauccucgcccuccucgccgucaccuccauccccuccgucuccgacucccucaccuggcgcgaguuccacuacauccaggucaacaacaucuga

SEQ ID NO: 3524 - RNA, 777 nt, Artificial Sequence
  derived and/or modified sequence opt3 from STEAP-1__Homo_sapiens__EAW93749
auggagagcagaaaggacaucaccaaccaggaagagauuuggaaaaugaagcccaggcggaaucuggaagauaacgacuaccuccacaaagauacaggcgagacuuccaugcuuaagcgcccugugcuguugcauuuacaacagacggcccacgcugacgaguucgauugcccaucugaacugcagcaugcacaggagcuauuuccgcaauggcaccuccccauaaaaaucgccgcggucauggcuucacugaccuuccuuuauacacuguugcgagaaguuauucauccucucgccaccagucaccagcaguacuuuuauaagaucccaauucuggugaucaauaagguacugcccauggugagcauaacucucuuagcacuggucuaccuuccuggggugaucgccgcuauuguucaggugcacaacggaacaaaauauaagaaauucccacauugguuggacaaguggaugcugacccguaaacaauuuggucuacucucccuguucuuugcaguccuucacgccaucuacacucugucuuaugcuaugagaaggucguaccgguacaaguugcucaauugggccuaucaacaggugcagcagaacaaggaggaugcguggauugaacaugacguauggcgcauggagaucuacguuucacugggcauagugggguuagcaauucuggcccuccuugcugucacaagcauccccaguguguccgauucucugaccuggagagaguuccacuauauucaggugaauaacaucuga

SEQ ID NO: 3525 - RNA, 777 nt, Artificial Sequence
  derived and/or modified sequence opt4 from STEAP-1__Homo_sapiens__EAW93749
auggagagcagaaaggacaucaccaaccaggaggagaucuggaagaugaagcccagaagaaaccuggaggacaacgacuaccugcacaaggacaccggcgagaccagcaugcugaagagacccgugcugcugcaccugcagcagaccgcccacgccgacgaguucgacugccccagcgagcugcagcacgcccaggagcuguucccccaguggcaccugcccaucaagaucgccgccgugauggccagccugaccuuccuguacacccugcugagagaggugauccacccccuggccaccagccaccagcaguacuucuacaagauccccauccuggugaucaacaaggugcugcccauggugagcaucacccugcuggcccugguguaccugcccggcgugaucgccgccaucgugcaggugcacaacggcaccaaguacaagaaguucccccacuggcuggacaaguggaugcugaccagaaagcaguucggccugcugagccuguucuucgccgugcugcacgccaucuacacccugagcuacgccaugagaagaagcuacagauacaagcugcugaacugggccuaccagcaggugcagcagaacaaggaggacgccuggaucgagcacgacguguggagaauggagaucuacgugagccugggcaucgugggccuggccauccuggcccugcuggccgugaccagcauccccagcgugagcgacagccugaccuggagagaguuccacuacauccaggugaacaacaucuga

SEQ ID NO: 3526 - RNA, 777 nt, Artificial Sequence
  derived and/or modified sequence opt5 from STEAP-1__Homo_sapiens__EAW93749
auggagagcagaaaggacaucaccaaccaggaagagauuuggaaaaugaagccccggcgcaaucuggaagauaacgacuaccuccacaaagauacaggcgagacguccaugcugaagagaccugugcuucugcaucuccaacagaccgcccacgcugacgaguucgauugcccgucugaacugcagcaugcccaggagcuuuuuccccaauggcaucugccuaucaaaauugcggcugucauggccagccucacauuccuguauacccugcuccgggaaguuauccacccccuggccacaucccaccagcaguacuuuuauaagauuccuauccuugugaucaauaaggugcugcccauggucucuauuacccuccuggcucuuguguaccugccugggguuaucgccgcuauugugcagguccacaacggaacaaaauauaagaaauucccgcauuggcucgacaaguggaugcugacccgcaaacaauuuggccugcucagccuguucuuugccgugcuucacgcgaucuacacgcuguccuaugccaugagacggucuuaccgcuacaagcuccugaauugggcuuaucagcagguucagcaaaacaaggaggaugccuggauugaacaugacguguggagaauggagaucuacgucagccuugggauugugggacuggcuauccucgcccugcuggcggugaccuccauccccagcgucucugauucccucacauggcgggaguuccacuauauucagguuaauaacaucuga

SEQ ID NO: 3527 - protein, 339 aa, Artificial Sequence
  STEAP-1__Homo_sapiens__Q9UHE8
MESRKDITNQEELWKMKPRRNLEEDDYLHKDTGETSMLKRPVLLHLHQTAHADEFDCPSELQHTQELFPQWHLPIKIAAIIASLTFLYTLLREVIHPLATSHQQYFYKIPILVINKVLPMVSITLLALVYLPGVIAAIVQLHNGTKYKKFPHWLDKWMLTRKQFGLLSFFFAVLHAIYSLSYPMRRSYRYKLLNWAYQQVQQNKEDAWIEHDVWRMEIYVSLGIVGLAILALLAVTSIPSVSDSLTWREFHYIQSKLGIVSLLLGTIHALIFAWNKWIDIKQFVWYTPPTFMIAVFLPIVVLIFKSILFLPCLRKKILKIRHGWEDVTKINKTEICSQL

SEQ ID NO: 3528 - RNA, 1020 nt, Artificial Sequence
  STEAP-1__Homo_sapiens__AAD15620
auggaaagcagaaaagacaucacaaaccaagaagaacuuuggaaaaugaagccuaggagaaauuuagaagaagacgauuauuugcauaaggacacgggagagaccagcaugcuaaaaagaccugugcuuuugcauuugcaccaaacagcccaugcugaugaauuugacugcccuucagaacuucagcacacacaggaacucuuuccacaguggcacuugccaauuaaaauagcugcuauuauagcaucucugacuuuucuuuacacucuucugagggaaguaauucacccuuuagcaacuucccaucaacaauauuuuuauaaaauuccaauccuggucaucaacaaagucuugccaaugguuuccaucacucucuuggcauugguuuaccugccaggugugauagcagcaauuguccaacuucauaauggaaccaaguauaagaaguuuccacauugguuggauaaguggauguuaacaagaaagcaguuugggcuucucaguuucuuuuuugcuguacugcaugcaauuuauagucugucuuacccaaugaggcgauccuacagauacaaguugcuaaacugggcauaucaacagguccaacaaaauaaagaagaugccuggauugagcaugauguuuggagaauggagauuuaugugucucugggaauugugggauuggcaauacuggcucuguuggcugugacaucuauuccaucugugagugacucuuugacauggagagaauuucacuauauucagagcaagcuaggaauuguuucccuucuacugggcacaauacacgcauugauuuuugccuggaauaaguggauagauauaaaacaauuuguaugguauacaccuccaacuuuuaugauagcuguuuuccuuccaauuguuguccugauauuuaaaagcauacuauuccugccaugcuugaggaagaagauacugaagauuagacaugguugggaagacgucaccaaaauuaacaaaacugagauauguucccaguuguag

SEQ ID NO: 3529 - RNA, 1020 nt, Artificial Sequence
  derived and/or modified sequence opt1 from STEAP-1__Homo_sapiens__AAD15620
auggagagccgcaaggacaucaccaaccaggaggagcuguggaagaugaagccccggcgcaaccucgaggaggacgacuaccugcacaaggacaccggcgagacguccaugcugaagcggccggugcuccugcaccuccaccagaccgcccacgccgacgaguucgacugccccagcgagcugcagcacacccaggagcuguucccccaguggcaccuccccaucaagaucgcggccaucaucgccucccugaccuuccuguacacgcugcuccgcgaggucauccacccgcuggccaccagccaccagcaguacuucuacaagauccccauccuggugaucaacaaggugcuccccauggucuccaucacccugcuggcccucguguaccugcccggggugaucgcggccaucguccagcugcacaacggcaccaaguacaagaaguucccgcacuggcucgacaaguggaugcugacgcggaagcaguucgggcugcucagcuucuucuucgccgugcugcacgccaucuacucccugagcuaccccaugcgccgguccuaccgcuacaagcuccugaacugggcguaccagcagguccagcagaacaaggaggacgccuggaucgagcacgacguguggcggauggagaucuacgugagccugggcaucguggggcucgccauccuggcccugcucgccgucaccuccauccccagcguguccgacagccugaccuggcgcgaguuccacuacauccaguccaagcugggcaucgugagccuccugcugggcaccauccacgcgcucaucuucgccuggaacaaguggaucgacaucaagcaguucgucugguacacgcccccgaccuucaugaucgccguguuccugcccaucgugguccugaucuucaaguccauccucuuccugcccugccugcggaagaagauccucaagauccgccacgggugggaggacgugaccaagaucaacaagaccgagaucugcagccagcuguga

SEQ ID NO: 3530 - RNA, 1020 nt, Artificial Sequence
  derived and/or modified sequence opt2 from STEAP-1__Homo_sapiens__AAD15620
auggagucccgcaaggacaucaccaaccaggaggagcucuggaagaugaagccccgccgcaaccucgaggaggacgacuaccuccacaaggacaccggcgagaccuccaugcucaagcgccccguccuccuccaccuccaccagaccgcccacgccgacgaguucgacugccccuccgagcuccagcacacccaggagcucuucccccaguggcaccuccccaucaagaucgccgccaucaucgccucccucaccuuccucuacacccuccuccgcgaggucauccacccccucgccaccucccaccagcaguacuucuacaagauccccauccucgucaucaacaagguccuccccauggucuccaucacccuccucgcccucgucuaccuccccggcgucaucgccgccaucguccagcuccacaacggcaccaaguacaagaaguucccccacuggcucgacaaguggaugcucacccgcaagcaguucggccuccucuccuucuucuucgccguccuccacgccaucuacucccucuccuaccccaugcgccgcuccuaccgcuacaagcuccucaacugggccuaccagcagguccagcagaacaaggaggacgccuggaucgagcacgacgucuggcgcauggagaucuacgucucccucggcaucgucggccucgccauccucgcccuccucgccgucaccuccauccccuccgucuccgacucccucaccuggcgcgaguuccacuacauccaguccaagcucggcaucgucucccuccuccucggcaccauccacgcccucaucuucgccuggaacaaguggaucgacaucaagcaguucgucugguacaccccccccaccuucaugaucgccgucuuccuccccaucgucguccucaucuucaaguccauccucuuccuccccugccuccgcaagaagauccucaagauccgccacggcugggaggacgucaccaagaucaacaagaccgagaucugcucccagcucuga

SEQ ID NO: 3531 - RNA, 1020 nt, Artificial Sequence
  derived and/or modified sequence opt3 from STEAP-1__Homo_sapiens__AAD15620
auggagagcagaaaggacaucaccaaccaggaggaacuguggaaaaugaagcccaggcggaaucucgaagaggaugacuaccuucacaaagauacaggcgaaacuuccaugcugaagcgcccuguguuguuacaucugcaccaaacggcccaugcugacgaguucgauugcccaucugagcuacagcacacccaggaacucuuuccgcaguggcaucugcccauuaaaauagcagccaucauugcgucacuuacauuccuguauacuuugcuccgagaggucauccacccucuggcuaccagucaccaacaguacuuuuauaagauuccaauccugguuauaaacaaggugcuccccaugguaagcaucacauuacuggcccuuguguacuugccuggggucauugcagccaucgugcagcugcauaauggaaccaaauauaagaaauucccacacuggcuagacaaguggaugcucacucguaaacaguuuggucugcuuuccuucuuuuucgcuguucugcaugcaauuuacucuuugucguaucccaugagaaggucauaccgguacaagcuccugaacugggccuaucaacaggugcagcagaauaaggaagaugcuuggaucgagcacgacgucuggcgcauggagauauacgugagcuuaggcauuguagggcuggccauccucgcgcuucuggcaguuacaaguauuccuuccgugucugauagcuugaccuggagagaauuucacuauauccaauccaaacuaggaaucgucucacugcuccugggcacgauucaugcccuuauauucgcuuggaacaaguggaucgacauuaaacaguuugugugguacacuccaccgaccuucaugaucgccguguuucugcccauagucguuuugauuuucaagaguauccucuuccugccuuguuuaaggaaaaagauccugaaaauucggcacgguugggaggaugugacaaagaucaauaagacugaaauuugcagccagcuauga

SEQ ID NO: 3532 - RNA, 1020 nt, Artificial Sequence
  derived and/or modified sequence opt4 from STEAP-1__Homo_sapiens__AAD15620
auggagagcagaaaggacaucaccaaccaggaggagcuguggaagaugaagcccagaagaaaccuggaggaggacgacuaccugcacaaggacaccggcgagaccagcaugcugaagagacccgugcugcugcaccugcaccagaccgcccacgccgacgaguucgacugccccagcgagcugcagcacacccaggagcuguucccccaguggcaccugcccaucaagaucgccgccaucaucgccagccugaccuuccuguacacccugcugagagaggugauccacccccuggccaccagccaccagcaguacuucuacaagauccccauccuggugaucaacaaggugcugcccauggugagcaucacccugcuggcccugguguaccugcccggcgugaucgccgccaucgugcagcugcacaacggcaccaaguacaagaaguucccccacuggcuggacaaguggaugcugaccagaaagcaguucggccugcugagcuucuucuucgccgugcugcacgccaucuacagccugagcuaccccaugagaagaagcuacagauacaagcugcugaacugggccuaccagcaggugcagcagaacaaggaggacgccuggaucgagcacgacguguggagaauggagaucuacgugagccugggcaucgugggccuggccauccuggcccugcuggccgugaccagcauccccagcgugagcgacagccugaccuggagagaguuccacuacauccagagcaagcugggcaucgugagccugcugcugggcaccauccacgcccugaucuucgccuggaacaaguggaucgacaucaagcaguucgugugguacaccccccccaccuucaugaucgccguguuccugcccaucguggugcugaucuucaagagcauccuguuccugcccugccugagaaagaagauccugaagaucagacacggcugggaggacgugaccaagaucaacaagaccgagaucugcagccagcuguga

SEQ ID NO: 3533 - RNA, 1020 nt, Artificial Sequence
  derived and/or modified sequence opt5 from STEAP-1__Homo_sapiens__AAD15620
auggagagcagaaaggacaucaccaaccaggaggaacuguggaaaaugaagccccggcgcaaucucgaagaggaugacuaccugcacaaagauacaggcgaaacguccaugcuuaagagaccugugcugcuccaucugcaccaaaccgcccaugcugacgaguucgauugcccgucugagcuucagcacacacaggaacuguuuccccaguggcaucucccuauuaaaaucgccgcgauuaucgcuagccugaccuuccuguauacacuccugcgggaggucauucacccccuugccaccucccaccaacaguacuuuuauaagaucccuauccugguuauuaacaaggugcuccccauggugucuaucacacugcuugcccuggucuaccucccuggggugauugcugccaucguucagcugcauaauggaaccaaauauaagaaauucccgcacuggcuggacaaguggaugcucacgcgcaaacaguuuggccugcuuagcuucuuuuucgcugugcugcaugccauuuacucccucucuuaucccaugagacggagcuaccgcuacaagcugcuuaacugggcguaucaacagguccagcagaauaaggaagaugccuggaucgagcacgacguguggagaauggagauuuacguuucccuggggaucgugggacucgcuauccuggcccugcucgcugucaccagcauuccuucuguguccgauagccugacauggcgggaauuucacuauauccaaucuaaacuuggcauugugucccugcuccuggggaccauccaugcccuuauuuucgcguggaacaaguggaucgacaucaaacaguuugucugguacacacccccuaccuucaugauugccguuuuucugcccaucguggugcucauuuucaagagcauccuguuccugccgugucuccgcaaaaagauucugaaaaucagacacggaugggaggaugucacgaagaucaauaagacagaaauuugcucucagcuuuga

SEQ ID NO: 3534 - protein, 165 aa, Artificial Sequence
  Survivin-2B__Homo_sapiens__O15392-2
MGAPTLPPAWQPFLKDHRISTFKNWPFLEGCACTPERMAEAGFIHCPTENEPDLAQCFFCFKELEGWEPDDDPIGPGTVAYACNTSTLGGRGGRITREEHKKHSSGCAFLSVKKQFEELTLGEFLKLDRERAKNKIAKETNNKKKEFEETAEKVRRAIEQLAAMD

SEQ ID NO: 3535 - RNA, 498 nt, Artificial Sequence
  Survivin-2B__Homo_sapiens__CCDS32752.1
augggugccccgacguugcccccugccuggcagcccuuucucaaggaccaccgcaucucuacauucaagaacuggcccuucuuggagggcugcgccugcaccccggagcggauggccgaggcuggcuucauccacugccccacugagaacgagccagacuuggcccaguguuucuucugcuucaaggagcuggaaggcugggagccagaugacgaccccauugggccgggcacgguggcuuacgccuguaauaccagcacuuugggaggccgaggcgggcggaucacgagagaggaacauaaaaagcauucguccgguugcgcuuuccuuucugucaagaagcaguuugaagaauuaacccuuggugaauuuuugaaacuggacagagaaagagccaagaacaaaauugcaaaggaaaccaacaauaagaagaaagaauuugaggaaacugcggagaaagugcgccgugccaucgagcagcuggcugccauggauuga

SEQ ID NO: 3536 - RNA, 498 nt, Artificial Sequence
  derived and/or modified sequence opt1 from Survivin-2B__Homo_sapiens__CCDS32752.1
augggcgcccccacccugccgcccgccuggcagcccuuccucaaggaccaccgcaucagcaccuucaagaacuggcccuuccuggaggggugcgcgugcacgccggagcggauggccgaggccggcuucauccacugccccaccgagaacgagcccgaccuggcccagugcuucuucugcuucaaggagcucgaggggugggagcccgacgacgacccgaucggccccgggaccguggccuacgcgugcaacaccuccacgcugggcggccgcgggggccggaucacccgcgaggagcacaagaagcacagcuccgggugcgccuuccugagcgucaagaagcaguucgaggagcucacccugggcgaguuccugaagcucgaccgggagcgcgccaagaacaagaucgccaaggagaccaacaacaagaagaaggaguucgaggagacggcggagaaggugcggcgcgccaucgagcagcuggccgccauggacuga

SEQ ID NO: 3537 - RNA, 498 nt, Artificial Sequence
  derived and/or modified sequence opt2 from Survivin-2B__Homo_sapiens__CCDS32752.1
augggcgcccccacccucccccccgccuggcagcccuuccucaaggaccaccgcaucuccaccuucaagaacuggcccuuccucgagggcugcgccugcacccccgagcgcauggccgaggccggcuucauccacugccccaccgagaacgagcccgaccucgcccagugcuucuucugcuucaaggagcucgagggcugggagcccgacgacgaccccaucggccccggcaccgucgccuacgccugcaacaccuccacccucggcggccgcggcggccgcaucacccgcgaggagcacaagaagcacuccuccggcugcgccuuccucuccgucaagaagcaguucgaggagcucacccucggcgaguuccucaagcucgaccgcgagcgcgccaagaacaagaucgccaaggagaccaacaacaagaagaaggaguucgaggagaccgccgagaagguccgccgcgccaucgagcagcucgccgccauggacuga

SEQ ID NO: 3538 - RNA, 498 nt, Artificial Sequence
  derived and/or modified sequence opt3 from Survivin-2B__Homo_sapiens__CCDS32752.1
augggcgcccccacccugccuccagcuuggcagccguuccucaaggaccacagaaucagcacauuuaaaaacuggcccuuccuugaggggugcgcauguacuccugaaaggauggccgaggcgggauuuauucauugcccaacggaaaaugagcccgaucuggcucaauguuucuuuugcuucaaggaauuggaggguugggagccugacgaugacccaauaggccccgggaccguggccuacgcauguaacacauccacuuuaggaggccggggugggcgcaucacccgagaagaacacaaaaagcauucuucaggaugcgccuuucugagugucaaaaagcaguucgaggagcuaacacucggcgaguuucugaaacuugaucgugaaagagcuaagaauaagauugcaaaagagaccaacaauaagaaaaaggaguucgaagaaacugccgagaagguuaggcgggcuaucgagcagcuggccgcgauggacuga

SEQ ID NO: 3539 - RNA, 498 nt, Artificial Sequence
  derived and/or modified sequence opt4 from Survivin-2B__Homo_sapiens__CCDS32752.1
augggcgcccccacccugccccccgccuggcagcccuuccugaaggaccacagaaucagcaccuucaagaacuggcccuuccuggagggcugcgccugcacccccgagagaauggccgaggccggcuucauccacugccccaccgagaacgagcccgaccuggcccagugcuucuucugcuucaaggagcuggagggcugggagcccgacgacgaccccaucggccccggcaccguggccuacgccugcaacaccagcacccugggcggcagaggcggcagaaucaccagagaggagcacaagaagcacagcagcggcugcgccuuccugagcgugaagaagcaguucgaggagcugacccugggcgaguuccugaagcuggacagagagagagccaagaacaagaucgccaaggagaccaacaacaagaagaaggaguucgaggagaccgccgagaaggugagaagagccaucgagcagcuggccgccauggacuga

SEQ ID NO: 3540 - RNA, 498 nt, Artificial Sequence
  derived and/or modified sequence opt5 from Survivin-2B__Homo_sapiens__CCDS32752.1
augggcgcccccacccugccuccggcuuggcagcccuuccucaaggaccacagaaucagcacauuuaaaaacuggccuuuccuggaggggugcgccuguacgcccgaacggauggcggaggcuggauuuauucauugcccuaccgaaaaugagcccgaucuugcccaauguuucuuuugcuucaaggaacuggagggcugggagccugacgaugacccgaucgggcccggaacaguggccuacgcuuguaacaccuccacacucggcgggcgcggaggcagaauuacccgggaagaacacaaaaagcauucuagcggcugcgccuuucuguccgucaaaaagcaguucgaggagcuuacacugggggaguuucucaagcuggaucgcgaaagagcuaaaaauaagaucgccaaagagaccaacaauaagaaaaaggaguucgaagaaacggcggagaagguucggcgcgccauugagcagcuggcugccauggacuga

SEQ ID NO: 3541 - protein, 142 aa, Artificial Sequence
  survivin__Homo_sapiens__O15392
MGAPTLPPAWQPFLKDHRISTFKNWPFLEGCACTPERMAEAGFIHCPTENEPDLAQCFFCFKELEGWEPDDDPIEEHKKHSSGCAFLSVKKQFEELTLGEFLKLDRERAKNKIAKETNNKKKEFEETAKKVRRAIEQLAAMD

SEQ ID NO: 3542 - RNA, 429 nt, Artificial Sequence
  survivin__Homo_sapiens__AAC51660
augggugccccgacguugcccccugccuggcagcccuuucucaaggaccaccgcaucucuacauucaagaacuggcccuucuuggagggcugcgccugcaccccggagcggauggccgaggcuggcuucauccacugccccacugagaacgagccagacuuggcccaguguuucuucugcuucaaggagcuggaaggcugggagccagaugacgaccccauagaggaacauaaaaagcauucguccgguugcgcuuuccuuucugucaagaagcaguuugaagaauuaacccuuggugaauuuuugaaacuggacagagaaagagccaagaacaaaauugcaaaggaaaccaacaauaagaagaaagaauuugaggaaacugcgaagaaagugcgccgugccaucgagcagcuggcugccauggauuga

SEQ ID NO: 3543 - RNA, 429 nt, Artificial Sequence
  derived and/or modified sequence opt1 from survivin__Homo_sapiens__AAC51660
augggcgcccccacccugccgcccgccuggcagcccuuccucaaggaccaccgcaucagcaccuucaagaacuggcccuuccuggaggggugcgcgugcacgccggagcggauggccgaggccggcuucauccacugccccaccgagaacgagcccgaccuggcccagugcuucuucugcuucaaggagcucgaggggugggagcccgacgacgacccgaucgaggagcacaagaagcacuccagcggcugcgccuuccuguccgugaagaagcaguucgaggagcugacccucggggaguuccugaagcuggaccgcgagcgggcgaagaacaagaucgccaaggagaccaacaacaagaagaaggaguucgaggagacggccaagaagguccgccgggccaucgagcagcucgcggccauggacuga

SEQ ID NO: 3544 - RNA, 429 nt, Artificial Sequence
  derived and/or modified sequence opt2 from survivin__Homo_sapiens__AAC51660
augggcgcccccacccucccccccgccuggcagcccuuccucaaggaccaccgcaucuccaccuucaagaacuggcccuuccucgagggcugcgccugcacccccgagcgcauggccgaggccggcuucauccacugccccaccgagaacgagcccgaccucgcccagugcuucuucugcuucaaggagcucgagggcugggagcccgacgacgaccccaucgaggagcacaagaagcacuccuccggcugcgccuuccucuccgucaagaagcaguucgaggagcucacccucggcgaguuccucaagcucgaccgcgagcgcgccaagaacaagaucgccaaggagaccaacaacaagaagaaggaguucgaggagaccgccaagaagguccgccgcgccaucgagcagcucgccgccauggacuga

SEQ ID NO: 3545 - RNA, 429 nt, Artificial Sequence
  derived and/or modified sequence opt3 from survivin__Homo_sapiens__AAC51660
augggcgcccccacccugccuccagcuuggcagccguuccucaaggaccacagaaucagcacauuuaaaaacuggcccuuccuugaggggugcgcauguacuccugaaaggauggccgaggcgggauuuauucauugcccaacggaaaaugagcccgaucuggcucaauguuucuuuugcuucaaggaauuggaggguugggagccugacgaugacccaauagaagaacacaaaaagcauuccucuggcugugccuuuuuaucagugaaaaagcaguucgaggagcugacccuaggggaguuucucaagcuggaucgggaacgcgccaaaaacaagaucgcaaaagagacaaauaacaagaaaaaggaguucgaagaaacugcuaagaaaguccgacgugcaauugagcagcuugccgcuauggacuga

SEQ ID NO: 3546 - RNA, 429 nt, Artificial Sequence
  derived and/or modified sequence opt4 from survivin__Homo_sapiens__AAC51660
augggcgcccccacccugccccccgccuggcagcccuuccugaaggaccacagaaucagcaccuucaagaacuggcccuuccuggagggcugcgccugcacccccgagagaauggccgaggccggcuucauccacugccccaccgagaacgagcccgaccuggcccagugcuucuucugcuucaaggagcuggagggcugggagcccgacgacgaccccaucgaggagcacaagaagcacagcagcggcugcgccuuccugagcgugaagaagcaguucgaggagcugacccugggcgaguuccugaagcuggacagagagagagccaagaacaagaucgccaaggagaccaacaacaagaagaaggaguucgaggagaccgccaagaaggugagaagagccaucgagcagcuggccgccauggacuga

SEQ ID NO: 3547 - RNA, 429 nt, Artificial Sequence
  derived and/or modified sequence opt5 from survivin__Homo_sapiens__AAC51660
augggcgcccccacccugccuccggcuuggcagcccuuccucaaggaccacagaaucagcacauuuaaaaacuggccuuuccuggaggggugcgccuguacgcccgaacggauggcggaggcuggauuuauucauugcccuaccgaaaaugagcccgaucuugcccaauguuucuuuugcuucaaggaacuggagggcugggagccugacgaugacccgaucgaagaacacaaaaagcauuccucugggugugccuuucucagcgugaaaaagcaguucgaggagcugacacuuggagaguuucugaagcucgaucgcgaaagagcuaaaaacaagauugccaaagagaccaauaacaagaaaaaggaguucgaagaaacagcuaagaaaguccggcgcgccaucgagcagcuggcggccauggacuga

SEQ ID NO: 3548 - protein, 976 aa, Artificial Sequence
  SYCP1__Homo_sapiens__A0A024R0I2
MEKQKPFALFVPPRSSSSQVSAVKPQTLGGDSTFFKSFNKCTEDDFEFPFAKTNLSKNGENIDSDPALQKVNFLPVLEQVGNSDCHYQEGLKDSDLENSEGLSRVYSKLYKEAEKIKKWKVSTEAELRQKESKLQENRKIIEAQRKAIQELQFGNEKVSLKLEEGIQENKDLIKENNATRHLCNLLKETCARSAEKTKKYEYEREETRQVYMDLNNNIEKMITAFEELRVQAENSRLEMHFKLKEDYEKIQHLEQEYKKEINDKEKQVSLLLIQITEKENKMKDLTFLLEESRDKVNQLEEKTKLQSENLKQSIEKQHHLTKELEDIKVSLQRSVSTQKALEEDLQIATKTICQLTEEKETQMEESNKARAAHSFVVTEFETTVCSLEELLRTEQQRLEKNEDQLKILTMELQKKSSELEEMTKLTNNKEVELEELKKVLGEKETLLYENKQFEKIAEELKGTEQELIGLLQAREKEVHDLEIQLTAITTSEQYYSKEVKDLKTELENEKLKNTELTSHCNKLSLENKELTQETSDMTLELKNQQEDINNNKKQEERMLKQIENLQETETQLRNELEYVREELKQKRDEVKCKLDKSEENCNNLRKQVENKNKYIEELQQENKALKKKGTAESKQLNVYEIKVNKLELELESAKQKFGEITDTYQKEIEDKKISEENLLEEVEKAKVIADEAVKLQKEIDKRCQHKIAEMVALMEKHKHQYDKIIEERDSELGLYKSKEQEQSSLRASLEIELSNLKAELLSVKKQLEIEREEKEKLKREAKENTATLKEKKDKKTQTFLLETPEIYWKLDSKAVPSQTVSRNFTSVDHGISKDKRDYLWTSAKNTLSTPLPKAYTVKTPTKPKLQQRENLNIPIEESKKKRKMAFEFDINSDSSETTDLLSMVSEEETLKTLYRNNNPPASHLCVKTPKKAPSSLTTPGSTLKFGAIRKMREDRWAVIAKMDRKKKLKEAEKLFV

SEQ ID NO: 3549 - RNA, 2931 nt, Artificial Sequence
  SYCP1__Homo_sapiens__EAW56623
auggaaaagcaaaagcccuuugcauuguucguaccaccgagaucaagcagcagucaggugucugcggugaaaccucagacccugggaggcgauuccacuuucuucaagaguuucaacaaauguacugaagaugauuuugaguuuccauuugcaaagacuaaucucuccaaaaauggggaaaacauugauucagauccugcuuuacaaaaaguuaauuucuugcccgugcuugagcagguugguaauucugacugucacuaucaggaaggacuaaaagacucugauuuggagaauucagagggauugagcagaguguauucaaaacuguauaaggaggcugaaaagauaaaaaaauggaaaguaaguacagaagcugaacugagacagaaagaaaguaaguugcaagaaaacagaaagauaauugaagcacagcgaaaagccauucaggaacugcaauuuggaaaugaaaaaguaaguuugaaauuagaagaaggaauacaagaaaauaaagauuuaauaaaagagaauaaugccacaaggcauuuauguaaucuacucaaagaaaccugugcuagaucugcagaaaagacaaagaaauaugaauaugaacgggaagaaaccaggcaaguuuauauggaucuaaauaauaacauugagaaaaugauaacagcuuuugaggaacuucgugugcaagcugagaauuccagacuggaaaugcauuuuaaguuaaaggaagauuaugaaaaaauccaacaccuugaacaagaauacaagaaggaaauaaaugacaaggaaaagcagguaucacuacuauugauccaaaucacugagaaagaaaauaaaaugaaagauuuaacauuucugcuagaggaauccagagauaaaguuaaucaauuagaggaaaagacaaaauuacagagugaaaacuuaaaacaaucaauugagaaacagcaucauuugacuaaagaacuagaagauauuaaagugucauuacaaagaagugugaguacucaaaaggcuuuagaggaagauuuacagauagcaacaaaaacaauuugucagcuaacugaagaaaaagaaacucaaauggaagaaucuaauaaagcuagagcugcucauucguuugugguuacugaauuugaaacuacugucugcagcuuggaagaauuauugagaacagaacagcaaagauuggaaaaaaaugaagaucaauugaaaauacuuaccauggagcuucaaaagaaaucaagugagcuggaagagaugacuaagcuuacaaauaacaaagaaguagaacuugaagaauugaaaaaagucuugggagaaaaggaaacacuuuuauaugaaaauaaacaauuugagaagauugcugaagaauuaaaaggaacagaacaagaacuaauuggucuucuccaagccagagagaaagaaguacaugauuuggaaauacaguuaacugccauuaccacaagugaacaguauuauucaaaagagguuaaagaucuaaaaacugagcuugaaaacgagaagcuuaagaauacugaauuaacuucacacugcaacaagcuuucacuagaaaacaaagagcucacacaggaaacaagugauaugacccuagaacucaagaaucagcaagaagauauuaauaauaacaaaaagcaagaagaaaggauguugaaacaaauagaaaaucuucaagaaacagaaacccaauuaagaaaugaacuagaauaugugagagaagagcuaaaacagaaaagagaugaaguuaaauguaaauuggacaagagugaagaaaauuguaacaauuuaaggaaacaaguugaaaauaaaaacaaguauauugaagaacuucagcaggagaauaaggccuugaaaaaaaaagguacagcagaaagcaagcaacugaauguuuaugagauaaaggucaauaaauuagaguuagaacuagaaagugccaaacagaaauuuggagaaaucacagacaccuaucagaaagaaauugaggacaaaaagauaucagaagaaaaucuuuuggaagagguugagaaagcaaaaguaauagcugaugaagcaguaaaauuacagaaagaaauugauaagcgaugucaacauaaaauagcugaaaugguagcacuuauggaaaaacauaagcaccaauaugauaagaucauugaagaaagagacucagaauuaggacuuuauaagagcaaagaacaagaacagucaucacugagagcaucuuuggagauugaacuauccaaucucaaagcugaacuuuugucuguuaagaagcaacuugaaauagaaagagaagagaaggaaaaacucaaaagagaggcaaaagaaaacacagcuacucuuaaagaaaaaaaagacaagaaaacacaaacauuuuuauuggaaacaccugaaauuuauuggaaauuggauucuaaagcaguuccuucacaaacuguaucucgaaauuucacaucaguugaucauggcauauccaaagauaaaagagacuaucuguggacaucugccaaaaauacuuuaucuacaccauugccaaaggcauauacagugaagacaccaacaaaaccaaaacuacagcaaagagaaaacuugaauauacccauugaagaaaguaaaaaaaagagaaaaauggccuuugaauuugauauuaauucagauaguucagaaacuacugaucuuuugagcaugguuucagaagaagagacauugaaaacacuguauaggaacaauaauccaccagcuucucaucuuugugucaaaacaccaaaaaaggccccuucaucucuaacaaccccuggaucuacacugaaguuuggagcuauaagaaaaaugcgggaggaccguugggcuguaauugcuaaaauggauagaaaaaaaaaacuaaaagaagcugaaaaguuauuuguuuaa

SEQ ID NO: 3550 - RNA, 2931 nt, Artificial Sequence
  derived and/or modified sequence opt1 from SYCP1__Homo_sapiens__EAW56623
auggagaagcagaagcccuucgcccuguucgugccgccccgcagcuccagcucccaggucagcgccgugaagccccagacccucggcggggacuccaccuucuucaagagcuucaacaagugcacggaggacgacuucgaguuccccuucgcgaagaccaaccuguccaagaacggcgagaacaucgacagcgacccggcccugcagaaggugaacuuccuccccguccuggagcaggucgggaacuccgacugccacuaccaggagggccugaaggacagcgaccucgagaacuccgaggggcugagccggguguacuccaagcuguacaaggaggccgagaagaucaagaaguggaaggugagcaccgaggccgagcuccgccagaaggaguccaagcugcaggagaaccggaagaucaucgaggcccagcgcaaggcgauccaggagcugcaguucggcaacgagaaggugagccucaagcuggaggagggcauccaggagaacaaggaccugaucaaggagaacaacgccacccggcaccucugcaaccugcugaaggagacgugcgcccgcuccgccgagaagaccaagaaguacgaguacgagcgggaggagacccgccagguguacauggaccucaacaacaacaucgagaagaugaucaccgcguucgaggagcugcggguccaggccgagaacagccgccuggagaugcacuucaagcucaaggaggacuacgagaagauccagcaccuggagcaggaguacaagaaggagaucaacgacaaggagaagcaggucucccugcuccugauccagaucacggagaaggagaacaagaugaaggaccugaccuuccuccuggaggagagccgggacaaggugaaccagcuggaggagaagaccaagcuccagagcgagaaccugaagcaguccaucgagaagcagcaccaccugaccaaggagcucgaggacaucaaggugagccugcagcgcuccgugagcacgcagaaggcccuggaggaggaccuccagaucgccaccaagaccaucugccagcugaccgaggagaaggagacgcagauggaggaguccaacaaggcccgggcggcccacagcuucguggucaccgaguucgagaccaccgugugcucccuggaggagcuccugcgcacggagcagcagcggcuggagaagaacgaggaccagcucaagauccugaccauggagcugcagaagaaguccagcgagcucgaggagaugaccaagcugaccaacaacaaggagguggagcuggaggagcucaagaagguccugggggagaaggagacgcugcuguacgagaacaagcaguucgagaagaucgccgaggagcucaagggcaccgagcaggagcugaucgggcugcuccaggcccgcgagaaggaggugcacgaccuggagauccagcugaccgccaucaccacgagcgagcaguacuacuccaaggaggugaaggaccucaagaccgagcuggagaacgagaagcugaagaacaccgagcucaccagccacugcaacaagcugucccuggagaacaaggagcucacgcaggagaccagcgacaugacccuggagcugaagaaccagcaggaggacaucaacaacaacaagaagcaggaggagcggaugcucaagcagaucgagaaccugcaggagaccgagacgcagcugcgcaacgagcucgaguacguccgggaggagcugaagcagaagcgcgacgaggugaagugcaagcuggacaaguccgaggagaacugcaacaaccuccggaagcaggucgagaacaagaacaaguacaucgaggagcugcagcaggagaacaaggcgcugaagaagaagggcaccgccgagagcaagcagcucaacguguacgagaucaaggugaacaagcuggagcuggagcucgaguccgccaagcagaaguucggggagaucaccgacaccuaccagaaggagaucgaggacaagaagaucagcgaggagaaccugcuggaggaggucgagaaggccaaggugaucgccgacgaggcggugaagcuccagaaggagaucgacaagcgcugccagcacaagaucgccgagauggucgcccugauggagaagcacaagcaccaguacgacaagaucaucgaggagcgcgacuccgagcugggccucuacaagagcaaggagcaggagcagagcucccugcgggccagccuggagaucgagcucuccaaccugaaggccgagcugcucagcgugaagaagcagcuggagaucgagcgcgaggagaaggagaagcugaagcgggaggcgaaggagaacaccgccacgcucaaggagaagaaggacaagaagacccagaccuuccugcuggagacccccgagaucuacuggaagcucgacuccaaggccgugcccagccagacggucucccgcaacuucaccagcguggaccacggcaucuccaaggacaagcgggacuaccuguggaccagcgccaagaacacccuguccacgccgcuccccaaggcguacaccgugaagacccccaccaagcccaagcugcagcagcgcgagaaccugaacaucccgaucgaggagagcaagaagaagcggaagauggccuucgaguucgacaucaacuccgacagcuccgagacgaccgaccuccugagcauggucuccgaggaggagacccugaagacccucuaccgcaacaacaacccgcccgccagccaccugugcgugaagacgcccaagaaggcccccagcucccugaccacccccgggagcacccucaaguucggcgccauccggaagaugcgcgaggaccggugggcggugaucgccaagauggaccgcaagaagaagcugaaggaggccgagaagcuguucgucuga

SEQ ID NO: 3551 - RNA, 2931 nt, Artificial Sequence
  derived and/or modified sequence opt2 from SYCP1__Homo_sapiens__EAW56623
auggagaagcagaagcccuucgcccucuucguccccccccgcuccuccuccucccaggucuccgccgucaagccccagacccucggcggcgacuccaccuucuucaaguccuucaacaagugcaccgaggacgacuucgaguuccccuucgccaagaccaaccucuccaagaacggcgagaacaucgacuccgaccccgcccuccagaaggucaacuuccuccccguccucgagcaggucggcaacuccgacugccacuaccaggagggccucaaggacuccgaccucgagaacuccgagggccucucccgcgucuacuccaagcucuacaaggaggccgagaagaucaagaaguggaaggucuccaccgaggccgagcuccgccagaaggaguccaagcuccaggagaaccgcaagaucaucgaggcccagcgcaaggccauccaggagcuccaguucggcaacgagaaggucucccucaagcucgaggagggcauccaggagaacaaggaccucaucaaggagaacaacgccacccgccaccucugcaaccuccucaaggagaccugcgcccgcuccgccgagaagaccaagaaguacgaguacgagcgcgaggagacccgccaggucuacauggaccucaacaacaacaucgagaagaugaucaccgccuucgaggagcuccgcguccaggccgagaacucccgccucgagaugcacuucaagcucaaggaggacuacgagaagauccagcaccucgagcaggaguacaagaaggagaucaacgacaaggagaagcaggucucccuccuccucauccagaucaccgagaaggagaacaagaugaaggaccucaccuuccuccucgaggagucccgcgacaaggucaaccagcucgaggagaagaccaagcuccaguccgagaaccucaagcaguccaucgagaagcagcaccaccucaccaaggagcucgaggacaucaaggucucccuccagcgcuccgucuccacccagaaggcccucgaggaggaccuccagaucgccaccaagaccaucugccagcucaccgaggagaaggagacccagauggaggaguccaacaaggcccgcgccgcccacuccuucgucgucaccgaguucgagaccaccgucugcucccucgaggagcuccuccgcaccgagcagcagcgccucgagaagaacgaggaccagcucaagauccucaccauggagcuccagaagaaguccuccgagcucgaggagaugaccaagcucaccaacaacaaggaggucgagcucgaggagcucaagaagguccucggcgagaaggagacccuccucuacgagaacaagcaguucgagaagaucgccgaggagcucaagggcaccgagcaggagcucaucggccuccuccaggcccgcgagaaggagguccacgaccucgagauccagcucaccgccaucaccaccuccgagcaguacuacuccaaggaggucaaggaccucaagaccgagcucgagaacgagaagcucaagaacaccgagcucaccucccacugcaacaagcucucccucgagaacaaggagcucacccaggagaccuccgacaugacccucgagcucaagaaccagcaggaggacaucaacaacaacaagaagcaggaggagcgcaugcucaagcagaucgagaaccuccaggagaccgagacccagcuccgcaacgagcucgaguacguccgcgaggagcucaagcagaagcgcgacgaggucaagugcaagcucgacaaguccgaggagaacugcaacaaccuccgcaagcaggucgagaacaagaacaaguacaucgaggagcuccagcaggagaacaaggcccucaagaagaagggcaccgccgaguccaagcagcucaacgucuacgagaucaaggucaacaagcucgagcucgagcucgaguccgccaagcagaaguucggcgagaucaccgacaccuaccagaaggagaucgaggacaagaagaucuccgaggagaaccuccucgaggaggucgagaaggccaaggucaucgccgacgaggccgucaagcuccagaaggagaucgacaagcgcugccagcacaagaucgccgagauggucgcccucauggagaagcacaagcaccaguacgacaagaucaucgaggagcgcgacuccgagcucggccucuacaaguccaaggagcaggagcaguccucccuccgcgccucccucgagaucgagcucuccaaccucaaggccgagcuccucuccgucaagaagcagcucgagaucgagcgcgaggagaaggagaagcucaagcgcgaggccaaggagaacaccgccacccucaaggagaagaaggacaagaagacccagaccuuccuccucgagacccccgagaucuacuggaagcucgacuccaaggccguccccucccagaccgucucccgcaacuucaccuccgucgaccacggcaucuccaaggacaagcgcgacuaccucuggaccuccgccaagaacacccucuccaccccccuccccaaggccuacaccgucaagacccccaccaagcccaagcuccagcagcgcgagaaccucaacauccccaucgaggaguccaagaagaagcgcaagauggccuucgaguucgacaucaacuccgacuccuccgagaccaccgaccuccucuccauggucuccgaggaggagacccucaagacccucuaccgcaacaacaacccccccgccucccaccucugcgucaagacccccaagaaggcccccuccucccucaccacccccggcuccacccucaaguucggcgccauccgcaagaugcgcgaggaccgcugggccgucaucgccaagauggaccgcaagaagaagcucaaggaggccgagaagcucuucgucuga

SEQ ID NO: 3552 - RNA, 2931 nt, Artificial Sequence
  derived and/or modified sequence opt3 from SYCP1__Homo_sapiens__EAW56623
auggagaagcagaaacccuucgcccuguuugugccuccaagaagcuccucuucacaagucagugcuguuaagccgcagacccucggcggggacagcacauucuuuaaauccuucaacaagugcacugaagaugacuuugaguuccccuuugcaaaaacgaaucuuucuaagaacggagaaaauaucgauucggacccugcccugcagaaggugaacuucuugccaguauuagaacagguggguaauucagauugucacuaccaagaaggccugaaagacagcgaucuagagaacagugaggggcucuccagggucuauucuaagcuguacaaagaagcggagaagauuaaaaaguggaaggugagcaccgaagcugagcuucggcagaaagaguccaagcugcaggaaaaucgcaaaauaaucgaggcccagcgaaaggcaauucaagaauugcaguuuggaaacgagaaaguuucacucaagcuggaagagggcauccaggagaauaaagaccugauuaaggaaaacaaugccacacgucaucucugcaacuuacugaaggagacuugugcuagaagugcagagaaaaccaagaaauaugaguacgaaagggaggagacacgccagguguauauggaucuuaauaacaauaucgaaaagaugauaaccgccuucgaggaauugcggguccaagcugagaacagcagacuggaaaugcacuuuaaacuaaaggaggacuacgagaagauccagcaucucgaacaggaguauaaaaaggaaauuaacgauaaagagaagcaagugucucugcuucugauccagauuacugagaaagaaaauaagaugaaggacuugacauuccuccuggaggaauccagggauaaaguaaaccaguuagaggaaaagaccaaacugcagucagagaaucucaagcaaagcaucgagaaacagcaccaucuuacgaaggaacuggaggacauaaagguuaguuugcagcggucuguguccacucagaaagcccuagaagaggaccugcaaauugcgaccaagacaaucugccagcucacugaagagaaagagacccagauggaagagagcaacaaggcacgcgccgcucacucguuugucgugacagaguucgaaaccacgguguguucucuggaggaacuucugcgaacugagcagcaaagauuggagaaaaaugaagaucagcucaagauucugacaauggaauuacagaaaaaguccucagagcuggaggaaaugaccaagcuaacuaacaauaaagaggucgaacucgaggaacugaagaaaguucuuggugagaaggagacauugcuguacgaaaacaaacaguucgagaagaucgccgaggaacucaaggggaccgaacaagagcugaucggacuucugcaggcaagggagaaagaagugcacgacuuggagauucagcucacggcuauaaccacaagugaacaauacuauagcaaggagguaaaagaucugaagacugaauuagagaaugagaaacugaagaacaccgaacuaacaucccauugcaauaagcucucucuggagaacaaagaacuuacucaggagaccagcgacaugacauuggagcugaagaaucagcaggaagauaucaacaauaacaaaaagcaagaggaacggaugcucaaacagauugagaaccugcaggaaaccgagacucaguuacguaaugagcuggaauacgugcgcgaggaacuuaagcaaaagagagacgaggucaaauguaaguuggauaaaucagaagagaacugcaauaaccucaggaaacagguggagaauaaaaacaaguauaucgaggaacugcagcaggaaaauaaagcccuaaagaagaaaggcacggcggagaguaagcaacugaacguuuacgaaauaaaagugaauaagcucgagcuggagcuugaauccgccaaacagaaguuuggcgagauuacagacaccuaucagaaggaaaucgaggauaaaaagaucagcgaggaaaacuugcuggaggaagucgagaaagcaaaggugauugcugacgaagccguaaaauuacaaaaggagaucgauaagcggugucagcacaaaauugcugagaugguugcccucauggaaaagcauaaacaccaguacgacaagauaaucgaggaacgagacucugagcuggggcuuuauaaaucaaaggaacaggagcaaaguagccugcgcgcauccuuggagauugaacucucuaaucugaaggccgagcuacugucggugaaaaagcagcucgaaaucgagagagaagagaaagagaagcugaaaagggaagcuaaggagaacacugcgacccuuaaggagaaaaaggauaaaaagacacagaccuucuugcuggaaacucccgagaucuacuggaaauuagacagcaaggcagucccuucccagacagugucacggaauuuuacgagugucgaucacggaauuucuaaagacaagcgcgauuaccucuggaccagcgccaagaacacucuguccacaccacuucccaaggcuuauaccgugaagacaccuacuaaaccaaagcugcaacagagagaaaaucuaaacauaccgaucgaggaaagcaaaaagaagaggaaaauggccuucgaguuugacauuaacucagauucuuccgaaaccacggaccuccugaguaugguuagcgaggaggaaaccuugaagacacuguaccguaauaacaaucccccugcaucucauuuaugcgugaaaacuccaaagaaagcccccuccucacucaccacaccugguaguacucugaaguucggcgcuauccggaagaugcgagaggauagaugggccguaauugcaaaaauggacaggaagaagaaacuuaaagaagcggagaagcuguuugucuga

SEQ ID NO: 3553 - RNA, 2931 nt, Artificial Sequence
  derived and/or modified sequence opt4 from SYCP1__Homo_sapiens__EAW56623
auggagaagcagaagcccuucgcccuguucgugccccccagaagcagcagcagccaggugagcgccgugaagccccagacccugggcggcgacagcaccuucuucaagagcuucaacaagugcaccgaggacgacuucgaguuccccuucgccaagaccaaccugagcaagaacggcgagaacaucgacagcgaccccgcccugcagaaggugaacuuccugcccgugcuggagcaggugggcaacagcgacugccacuaccaggagggccugaaggacagcgaccuggagaacagcgagggccugagcagaguguacagcaagcuguacaaggaggccgagaagaucaagaaguggaaggugagcaccgaggccgagcugagacagaaggagagcaagcugcaggagaacagaaagaucaucgaggcccagagaaaggccauccaggagcugcaguucggcaacgagaaggugagccugaagcuggaggagggcauccaggagaacaaggaccugaucaaggagaacaacgccaccagacaccugugcaaccugcugaaggagaccugcgccagaagcgccgagaagaccaagaaguacgaguacgagagagaggagaccagacagguguacauggaccugaacaacaacaucgagaagaugaucaccgccuucgaggagcugagagugcaggccgagaacagcagacuggagaugcacuucaagcugaaggaggacuacgagaagauccagcaccuggagcaggaguacaagaaggagaucaacgacaaggagaagcaggugagccugcugcugauccagaucaccgagaaggagaacaagaugaaggaccugaccuuccugcuggaggagagcagagacaaggugaaccagcuggaggagaagaccaagcugcagagcgagaaccugaagcagagcaucgagaagcagcaccaccugaccaaggagcuggaggacaucaaggugagccugcagagaagcgugagcacccagaaggcccuggaggaggaccugcagaucgccaccaagaccaucugccagcugaccgaggagaaggagacccagauggaggagagcaacaaggccagagccgcccacagcuucguggugaccgaguucgagaccaccgugugcagccuggaggagcugcugagaaccgagcagcagagacuggagaagaacgaggaccagcugaagauccugaccauggagcugcagaagaagagcagcgagcuggaggagaugaccaagcugaccaacaacaaggagguggagcuggaggagcugaagaaggugcugggcgagaaggagacccugcuguacgagaacaagcaguucgagaagaucgccgaggagcugaagggcaccgagcaggagcugaucggccugcugcaggccagagagaaggaggugcacgaccuggagauccagcugaccgccaucaccaccagcgagcaguacuacagcaaggaggugaaggaccugaagaccgagcuggagaacgagaagcugaagaacaccgagcugaccagccacugcaacaagcugagccuggagaacaaggagcugacccaggagaccagcgacaugacccuggagcugaagaaccagcaggaggacaucaacaacaacaagaagcaggaggagagaaugcugaagcagaucgagaaccugcaggagaccgagacccagcugagaaacgagcuggaguacgugagagaggagcugaagcagaagagagacgaggugaagugcaagcuggacaagagcgaggagaacugcaacaaccugagaaagcagguggagaacaagaacaaguacaucgaggagcugcagcaggagaacaaggcccugaagaagaagggcaccgccgagagcaagcagcugaacguguacgagaucaaggugaacaagcuggagcuggagcuggagagcgccaagcagaaguucggcgagaucaccgacaccuaccagaaggagaucgaggacaagaagaucagcgaggagaaccugcuggaggagguggagaaggccaaggugaucgccgacgaggccgugaagcugcagaaggagaucgacaagagaugccagcacaagaucgccgagaugguggcccugauggagaagcacaagcaccaguacgacaagaucaucgaggagagagacagcgagcugggccuguacaagagcaaggagcaggagcagagcagccugagagccagccuggagaucgagcugagcaaccugaaggccgagcugcugagcgugaagaagcagcuggagaucgagagagaggagaaggagaagcugaagagagaggccaaggagaacaccgccacccugaaggagaagaaggacaagaagacccagaccuuccugcuggagacccccgagaucuacuggaagcuggacagcaaggccgugcccagccagaccgugagcagaaacuucaccagcguggaccacggcaucagcaaggacaagagagacuaccuguggaccagcgccaagaacacccugagcaccccccugcccaaggccuacaccgugaagacccccaccaagcccaagcugcagcagagagagaaccugaacauccccaucgaggagagcaagaagaagagaaagauggccuucgaguucgacaucaacagcgacagcagcgagaccaccgaccugcugagcauggugagcgaggaggagacccugaagacccuguacagaaacaacaacccccccgccagccaccugugcgugaagacccccaagaaggcccccagcagccugaccacccccggcagcacccugaaguucggcgccaucagaaagaugagagaggacagaugggccgugaucgccaagauggacagaaagaagaagcugaaggaggccgagaagcuguucguguga

SEQ ID NO: 3554 - RNA, 2931 nt, Artificial Sequence
  derived and/or modified sequence opt5 from SYCP1__Homo_sapiens__EAW56623
auggagaagcagaaacccuucgcccuguuugugccuccgagaagcuccucuagccaagucuccgcuguuaagccccagacccucggcggggacucuacauucuuuaagagcuucaacaagugcacggaagaugacuuugaguucccuuuugccaaaaccaaucuguccaagaacggagaaaauaucgauucugaccccgcgcuucagaaggugaacuuccugccugugcucgagcaggucggcaauagcgauugucacuaccaagaagggcugaaagacuccgaucuugagaacagcgagggacugucucggguguauuccaagcucuacaaagaagcugagaagauuaaaaaguggaagguuagcacagaagccgagcugcgccagaaagagucuaagcugcaggaaaauagaaaaaucauugaggcccagcggaaggcuauccaagaacuccaguuuggcaacgagaaagugucccugaaacuugaagaggggauucaggagaauaaagaccugaucaaggaaaacaaugccacccgccaucucugcaaccugcuuaaggagacaugugcuagaagcgccgaaaagaccaagaaauaugaguacgaacgggaggagacacgccaggucuauauggaucugaauaacaauaucgaaaagaugauuaccgcguucgaggaacucagagugcaagccgagaacucucggcuggaaaugcacuuuaaacugaaggaggacuacgagaagauccagcaucucgaacaggaguauaaaaaggaaauuaacgauaaagagaagcaaguuucccugcuucugauccagauuacggagaaagaaaauaagaugaaggaccucaccuuccugcuugaggaaagccgcgauaaagugaaccagcuggaggaaaagacaaaacuccaguccgagaaucugaagcaaucuaucgagaaacagcaccaucugaccaaggaacucgaggacauuaaggucagccugcagagauccgugagcacacagaaagcucuugaagaggaccugcaaaucgccaccaagacgaucugccagcucacagaagagaaagagacccagauggaagagucuaacaaggcucgggccgcgcacuccuuuguggucacagaguucgaaaccaccguuuguagccuggaggaacuucugcgcacagagcagcaaagacucgaaaagaaugaggaucagcugaagauucugacgauggaacuccagaaaaagucuagcgagcuggaggaaaugaccaaacuuacaaacaauaaagagguggaacuggaggaacucaagaaagugcugggagagaaggagacccugcuuuacgaaaacaaacaguucgagaagaucgccgaggaacucaagggcacagaacaagagcugauuggccugcuccaggcucgggagaaagaaguccacgaccuggagauccagcuuaccgccauuacgacauccgaacaauacuauucuaaggaggugaaagaucugaagaccgaacucgagaaugagaaacugaagaacaccgaacugacaagccauugcaauaaacuuucccucgagaacaaagaacugacccaggagacaagcgacaugacgcuggagcucaagaaucagcaggaagauaucaacaauaacaaaaagcaagaggaacgcaugcugaaacagaucgagaaccuucaggaaaccgagacacagcugagaaaugagcucgaauacguucgggaggaacugaagcaaaagagagacgaggugaaauguaagcuggauaaaucugaagagaacugcaauaaccuucgcaagcaggucgagaauaaaaacaaguauauugaggaacuccagcaggaaaauaaagcucugaagaagaaagggaccgccgaguccaagcaacugaacguguacgaaaucaaaguuaauaagcucgagcuggagcuugaaagcgccaaacagaaguuuggagagauuacagacaccuaucagaaggaaaucgaggauaaaaagauuucugaggaaaaccugcucgaggaaguggagaaagcuaaggucaucgcggacgaagccgugaaacugcaaaaggagaucgauaagcggugucagcacaaaauugcugagauggucgcccugauggaaaagcauaaacaccaguacgacaagaucauugaggaaagagacuccgagcuuggccucuauaaaagcaaggaacaggagcaauccucucugcgcgccagccuggagaucgaacucuccaaucugaaggcugagcuucugucugugaaaaagcagcucgaaauugagcgggaagagaaagagaagcugaaaagagaagccaaggagaacacggcgacccugaaggaaaagaaggauaaaaagacacagaccuuccuucuggagacacccgagaucuacuggaaacucgacagcaaggcuguuccuucccagaccgugagccgcaauuuuacgucugucgaucacgggauuuccaaagacaagcgggauuaccuguggacaagcgccaagaacacccucucuacaccgcugcccaaagccuauaccgugaagaccccuacaaaacccaaacuucaacagagagaaaaucugaacaucccuaucgaggaauccaaaaagaagcgcaaaauggcuuucgaguuugacauuaacagcgauucuagcgaaacgaccgaccuccuguccaugguuagcgaggaggaaacacugaagacccuuuaccggaauaacaaucccccggccucucaucugugcgugaaaacaccuaagaaagcucccuccagccucaccacgccuggauccacacugaaguucggcgccaucagaaagaugcgcgaggaucggugggcggucauugccaaaauggacagaaagaaaaagcucaaagaagcugagaagcuguuuguguga

SEQ ID NO: 3555 - protein, 976 aa, Artificial Sequence [sequence omitted]

SEQ ID NO: 3556 - RNA, 2931 nt, Artificial Sequence
  SYCP1__Homo_sapiens__AAI44020
auggaaaagcaaaagcccuuugcauuguucguaccaccgagaucaagcagcagucaggugucugcggugaaaccucagacccugggaggcgauuccacuuucuucaagaguuucaacaaauguacugaagaugauuuugaguuuccauuugcaaagacuaaucucuccaaaaauggggaaaacauugauucagauccugcuuuacaaaaaguuaauuucuugcccguguuugagcagguugguaauucugacugucacuaucaggaaggacuaaaagacucugauuuggagaauucagagggauugagcagaguguauucaaaacuguauaaggaggcugaaaagauaaaaaaauggaaaguaaguacagaagcugaacugagacagaaagaaaguaaguugcaagaaaacagaaagauaauugaagcacagcgaaaagccauucaggaacugcaauuuggaaaugaaaaaguaaguuugaaauuagaagaaggaauacaagaaaauaaagauuuaauaaaagagaauaaugccacaaggcauuuauguaaucuacucaaagaaaccugugcuagaucugcagaaaagacaaagaaauaugaauaugaacgggaagaaaccaggcaaguuuauauggaucuaaauaguaacauugagaaaaugauaacagcuuuugaggaacuucgugugcaagcugagaauuccagacuggaaaugcauuuuaaguuaaaggaagauuaugaaaaaauccaacaccuugaacaagaauacaagaaggaaauaaaugacaaggaaaagcagguaucacuacuauugauccaaaucacugagaaagaaaauaaaaugaaagauuuaacauuucugcuagaggaauccagagauaaaguuaaucaauuagaggaaaagacaaaauuacagagugaaaacuuaaaacaaucaauugagaaacagcaucauuugacuaaagaacuagaagauauuaaagugucauuacaaagaagugugaguacucaaaaggcuuuagaggaagauuuacagauagcaacaaaaacaauuugucagcuaacugaagaaaaagaaacucaaauggaagaaucuaauaaagcuagagcugcucauucguuugugguuacugaauuugaaacuacugucugcagcuuggaagaauuauugagaacagaacagcaaagauuggaaaaaaaugaagaucaauugaaaauacuuaccauggagcuucaaaagaaaucaagugagcuggaagagaugacuaagcuuacaaauaacaaagaaguagaacuugaagaauugaaaaaagucuugggagaaaaggaaacacuuuuauaugaaaauaaacaauuugagaagauugcugaagaauuaaaaggaacagaacaagaacuaauuggucuucuccaagccagagagaaagaaguacaugauuuggaaauacaguuaacugccauuaccacaagugaacaguauuauucaaaagagguuaaagaucuaaaaacugagcuugaaaacgagaagcuuaagaauacugaauuaacuucacacugcaacaagcuuucacuagaaaacaaagagcucacacaggaaacaagugauaugacccuagaacucaagaaucagcaagaagauauuaauaauaacaaaaagcaagaagaaaggauguugaaacaaauagaaaaucuucaagaaacagaaacccaauuaagaaaugaacuagaauaugugagagaagagcuaaaacagaaaagagaugaaguuaaauguaaauuggacaagagugaagaaaauuguaacaauuuaaggaaacaaguugaaaauaaaaacaaguauauugaagaacuucagcaggagaauaaggccuugaaaaaaaaagguacagcagaaagcaagcaacugaauguuuaugagauaaaggucaauaaauuagaguuagaacuagaaagugccaaacagaaauuuggagaaaucacagacaccuaucagaaagaaauugaggacaaaaagauaucagaagaaaaucuuuuggaagagguugagaaagcaaaaguaauagcugaugaagcaguaaaauuacagaaagaaauugauaagcgaugucaacauaaaauagcugaaaugguagcacuuauggaaaaacauaagcaccaauaugauaagaucauugaagaaagagacucagaauuaggacuuuauaagagcaaagaacaagaacagucaucacugagagcaucuuuggagauugaacuauccaaucucaaagcugaacuuuugucuguuaagaagcaacuugaaauagaaagagaagagaaggaaaaacucaaaagagaggcaaaagaaaacacagcuacucuuaaagaaaaaaaagacaagaaaacacaaacauuuuuauuggaaacaccugaaauuuauuggaaauuggauucuaaagcaguuccuucacaaacuguaucucgaaauuucacaucaguugaucauggcauauccaaagauaaaagagacuaucuguggacaucugccaaaaauacuuuaucuacaccauugccaaaggcauauacagugaagacaccaacaaaaccaaaacuacagcaaagagaaaacuugaauauacccauugaagaaaguaaaaaaaagagaaaaauggccuuugaauuugauauuaauucagauaguucagaaacuacugaucuuuugagcaugguuucagaagaagagacauugaaaacacuguauaggaacaauaauccaccagcuucucaucuuugugucaaaacaccaaaaaaggccccuucaucucuaacaaccccuggaucuacacugaaguuuggagcuauaagaaaaaugcgggaggaccguugggcuguaauugcuaaaauggauagaaaaaaaaaacuaaaagaagcugaaaaguuauuuguuuaa

SEQ ID NO: 3557 - RNA, 2931 nt, Artificial Sequence
  derived and/or modified sequence opt1 from SYCP1__Homo_sapiens__AAI44020
auggagaagcagaagcccuucgcccuguucgugccgccccgcagcuccagcucccaggucagcgccgugaagccccagacccucggcggggacuccaccuucuucaagagcuucaacaagugcacggaggacgacuucgaguuccccuucgcgaagaccaaccuguccaagaacggcgagaacaucgacagcgacccggcccugcagaaggugaacuuccuccccgucuucgagcaggucgggaacuccgacugccacuaccaggagggccugaaggacagcgaccuggagaacuccgaggggcucagccggguguacuccaagcuguacaaggaggccgagaagaucaagaaguggaaggugagcaccgaggccgagcugcgccagaaggaguccaagcuccaggagaaccggaagaucaucgaggcccagcgcaaggcgauccaggagcugcaguucggcaacgagaaggugagccugaagcucgaggagggcauccaggagaacaaggaccugaucaaggagaacaacgccacccggcaccugugcaaccuccugaaggagacgugcgcccgcuccgccgagaagaccaagaaguacgaguacgagcgggaggagacccgccagguguacauggaccugaacagcaacaucgagaagaugaucaccgcguucgaggagcuccggguccaggccgagaacucccgccuggagaugcacuucaagcugaaggaggacuacgagaagauccagcaccucgagcaggaguacaagaaggagaucaacgacaaggagaagcaggucagccugcugcucauccagaucacggagaaggagaacaagaugaaggaccugaccuuccugcucgaggagagccgggacaaggugaaccagcuggaggagaagaccaagcugcaguccgagaaccucaagcagagcaucgagaagcagcaccaccugaccaaggagcuggaggacaucaaggugucccuccagcgcagcguguccacgcagaaggcccuggaggaggaccugcagaucgccaccaagaccaucugccagcucaccgaggagaaggagacgcagauggaggagagcaacaaggcccgggcggcccacuccuucguggucaccgaguucgagaccaccgugugcagccuggaggagcugcuccgcacggagcagcagcggcuggagaagaacgaggaccagcugaagauccucaccauggagcugcagaagaaguccagcgagcuggaggagaugaccaagcucaccaacaacaaggagguggagcuggaggagcugaagaagguccucggggagaaggagacgcugcuguacgagaacaagcaguucgagaagaucgccgaggagcugaagggcaccgagcaggagcucaucgggcugcugcaggcccgcgagaaggaggugcacgaccucgagauccagcugaccgccaucaccacguccgagcaguacuacagcaaggaggugaaggaccugaagaccgagcucgagaacgagaagcugaagaacaccgagcugaccucccacugcaacaagcucagccuggagaacaaggagcugacgcaggagaccuccgacaugacccucgagcugaagaaccagcaggaggacaucaacaacaacaagaagcaggaggagcggaugcugaagcagaucgagaaccuccaggagaccgagacgcagcugcgcaacgagcuggaguacguccgggaggagcucaagcagaagcgcgacgaggugaagugcaagcuggacaagagcgaggagaacugcaacaaccugcggaagcaggucgagaacaagaacaaguacaucgaggagcuccagcaggagaacaaggcgcugaagaagaagggcaccgccgaguccaagcagcugaacguguacgagaucaaggugaacaagcucgagcuggagcuggagagcgccaagcagaaguucggggagaucaccgacaccuaccagaaggagaucgaggacaagaagaucuccgaggagaaccuccuggaggaggucgagaaggccaaggugaucgccgacgaggcggugaagcugcagaaggagaucgacaagcgcugccagcacaagaucgccgagauggucgcccucauggagaagcacaagcaccaguacgacaagaucaucgaggagcgcgacagcgagcugggccuguacaagagcaaggagcaggagcaguccagccuccgggccucccuggagaucgagcugagcaaccucaaggccgagcugcuguccgugaagaagcagcucgagaucgagcgcgaggagaaggagaagcugaagcgggaggcgaaggagaacaccgccacgcugaaggagaagaaggacaagaagacccagaccuuccuccuggagacccccgagaucuacuggaagcuggacagcaaggccgugcccucccagacggucagccgcaacuucaccuccguggaccacggcaucagcaaggacaagcgggacuaccucuggaccuccgccaagaacacccugagcacgccgcugcccaaggcguacaccgugaagacccccaccaagcccaagcuccagcagcgcgagaaccugaacaucccgaucgaggaguccaagaagaagcggaagauggccuucgaguucgacaucaacagcgacuccagcgagacgaccgaccugcucuccauggucagcgaggaggagacccugaagacccuguaccgcaacaacaacccgcccgccagccaccucugcgugaagacgcccaagaaggcccccuccagccugaccacccccggguccacccugaaguucggcgccauccggaagaugcgcgaggaccggugggcggugaucgccaagauggaccgcaagaagaagcucaaggaggccgagaagcuguucgucuga

SEQ ID NO: 3558 - RNA, 2931 nt, Artificial Sequence
  derived and/or modified sequence opt2 from SYCP1__Homo_sapiens__AAI44020
auggagaagcagaagcccuucgcccucuucguccccccccgcuccuccuccucccaggucuccgccgucaagccccagacccucggcggcgacuccaccuucuucaaguccuucaacaagugcaccgaggacgacuucgaguuccccuucgccaagaccaaccucuccaagaacggcgagaacaucgacuccgaccccgcccuccagaaggucaacuuccuccccgucuucgagcaggucggcaacuccgacugccacuaccaggagggccucaaggacuccgaccucgagaacuccgagggccucucccgcgucuacuccaagcucuacaaggaggccgagaagaucaagaaguggaaggucuccaccgaggccgagcuccgccagaaggaguccaagcuccaggagaaccgcaagaucaucgaggcccagcgcaaggccauccaggagcuccaguucggcaacgagaaggucucccucaagcucgaggagggcauccaggagaacaaggaccucaucaaggagaacaacgccacccgccaccucugcaaccuccucaaggagaccugcgcccgcuccgccgagaagaccaagaaguacgaguacgagcgcgaggagacccgccaggucuacauggaccucaacuccaacaucgagaagaugaucaccgccuucgaggagcuccgcguccaggccgagaacucccgccucgagaugcacuucaagcucaaggaggacuacgagaagauccagcaccucgagcaggaguacaagaaggagaucaacgacaaggagaagcaggucucccuccuccucauccagaucaccgagaaggagaacaagaugaaggaccucaccuuccuccucgaggagucccgcgacaaggucaaccagcucgaggagaagaccaagcuccaguccgagaaccucaagcaguccaucgagaagcagcaccaccucaccaaggagcucgaggacaucaaggucucccuccagcgcuccgucuccacccagaaggcccucgaggaggaccuccagaucgccaccaagaccaucugccagcucaccgaggagaaggagacccagauggaggaguccaacaaggcccgcgccgcccacuccuucgucgucaccgaguucgagaccaccgucugcucccucgaggagcuccuccgcaccgagcagcagcgccucgagaagaacgaggaccagcucaagauccucaccauggagcuccagaagaaguccuccgagcucgaggagaugaccaagcucaccaacaacaaggaggucgagcucgaggagcucaagaagguccucggcgagaaggagacccuccucuacgagaacaagcaguucgagaagaucgccgaggagcucaagggcaccgagcaggagcucaucggccuccuccaggcccgcgagaaggagguccacgaccucgagauccagcucaccgccaucaccaccuccgagcaguacuacuccaaggaggucaaggaccucaagaccgagcucgagaacgagaagcucaagaacaccgagcucaccucccacugcaacaagcucucccucgagaacaaggagcucacccaggagaccuccgacaugacccucgagcucaagaaccagcaggaggacaucaacaacaacaagaagcaggaggagcgcaugcucaagcagaucgagaaccuccaggagaccgagacccagcuccgcaacgagcucgaguacguccgcgaggagcucaagcagaagcgcgacgaggucaagugcaagcucgacaaguccgaggagaacugcaacaaccuccgcaagcaggucgagaacaagaacaaguacaucgaggagcuccagcaggagaacaaggcccucaagaagaagggcaccgccgaguccaagcagcucaacgucuacgagaucaaggucaacaagcucgagcucgagcucgaguccgccaagcagaaguucggcgagaucaccgacaccuaccagaaggagaucgaggacaagaagaucuccgaggagaaccuccucgaggaggucgagaaggccaaggucaucgccgacgaggccgucaagcuccagaaggagaucgacaagcgcugccagcacaagaucgccgagauggucgcccucauggagaagcacaagcaccaguacgacaagaucaucgaggagcgcgacuccgagcucggccucuacaaguccaaggagcaggagcaguccucccuccgcgccucccucgagaucgagcucuccaaccucaaggccgagcuccucuccgucaagaagcagcucgagaucgagcgcgaggagaaggagaagcucaagcgcgaggccaaggagaacaccgccacccucaaggagaagaaggacaagaagacccagaccuuccuccucgagacccccgagaucuacuggaagcucgacuccaaggccguccccucccagaccgucucccgcaacuucaccuccgucgaccacggcaucuccaaggacaagcgcgacuaccucuggaccuccgccaagaacacccucuccaccccccuccccaaggccuacaccgucaagacccccaccaagcccaagcuccagcagcgcgagaaccucaacauccccaucgaggaguccaagaagaagcgcaagauggccuucgaguucgacaucaacuccgacuccuccgagaccaccgaccuccucuccauggucuccgaggaggagacccucaagacccucuaccgcaacaacaacccccccgccucccaccucugcgucaagacccccaagaaggcccccuccucccucaccacccccggcuccacccucaaguucggcgccauccgcaagaugcgcgaggaccgcugggccgucaucgccaagauggaccgcaagaagaagcucaaggaggccgagaagcucuucgucuga

SEQ ID NO: 3559 - RNA, 2931 nt, Artificial Sequence
  derived and/or modified sequence opt3 from SYCP1__Homo_sapiens__AAI44020
auggagaagcagaagcccuucgcccuguuugugccuccaagaagcuccucuucacaagucagugcuguuaagccgcagacccucggcggggacagcacauucuuuaaauccuucaacaagugcacugaagaugacuuugaguuccccuuugcaaaaacgaaccuuucuaagaacggagaaaauaucgauucggacccugcccugcagaaggugaacuucuugccaguauuugaacagguggguaauucagauugucacuaccaagaaggcuuaaaagacagcgaucuggagaacagugaggggcuauccagggucuauucuaagcucuacaaagaagcggagaagauuaaaaaguggaaggugagcaccgaagcugagcugcggcagaaagaguccaaacuucaggaaaaucgcaaaauaaucgaggcccagcgaaaggcaauucaagaacugcaguucggaaacgagaaaguuucauugaagcucgaagagggcauccaggagaauaaagaccugauuaaggaaaacaaugccacacgucaucugugcaaccucuuaaaggagacuugugcuagaagugcagaaaagaccaagaaauaugaguacgaaagggaggagacacgccagguguauauggaucugaauagcaacaucgaaaagaugauaaccgccuuugaggaacuucggguccaagcugaaaauucuagauuggaaaugcacuucaaacugaaggaggacuacgagaagauccagcaucuagaacaggaguauaaaaaggaaauuaacgauaaagagaagcaagugucccuccugcuuauccagauuacugagaaagaaaacaagaugaaggaccugacauuuuugcucgaggaaucaagggauaaaguaaaucagcuggaggaaaagaccaaauuacagagcgagaaccugaagcaaaguaucgagaaacagcaccaucucacgaaggaacuugaggacauaaagguuucucugcagcgguccgugagcacucagaaagccuuggaagaggaccuacaaauugcgaccaagacaaucugccagcugacugaagagaaagagacccagauggaagagucgaauaaggcacgcgccgcucacucuuucgucgugacagaguucgagaccacgguguguucccucgaggagcugcuucgaacugagcagcaaagacuggaaaagaacgaggaucaguugaagauucucacaauggaacugcagaaaaagucaagugaguuagaggaaaugaccaagcugacuaauaacaaagaggucgaacuagaggaacucaagaaaguucugggugagaaggagacacuuuuguacgaaaauaaacaguuugagaagaucgccgaggaacugaaggggaccgaacaagagcucaucggacugcuucaggcaagggagaaagaagugcacgaccuggagauucaguugacggcuauaaccacaagcgaacaauacuauuccaaggagguaaaagaucucaagacugaacuggagaacgagaaauuaaagaauaccgaacugacaucucauugcaacaagcuaagccucgagaauaaagaacugacucaggagaccucagacaugacacuugaguugaagaaccagcaggaagauaucaauaacaauaaaaagcaagaggaacggaugcugaaacagauugagaaccuccaggaaaccgagacucagcugcguaacgaguuagaauacgugcgcgaggaacugaagcaaaagagagacgaggucaaauguaaacuugauaaaagugaagagaauugcaacaauuugaggaaacagguggagaacaaaaauaaguauaucgaggaacuccagcaggaaaacaaagcccugaagaagaaaggcacggcggaguccaagcaacuaaauguuuacgaaauaaaagugaacaagcuggagcucgagcuggaaagcgccaaacagaaguucggcgagauuacagacaccuaucagaaggaaaucgaggauaaaaagaucucugaggaaaaucuuuuggaggaagucgagaaagcaaaggugauugcugacgaagccguaaaacugcaaaaggagaucgauaagcggugucagcacaaaauugcugagaugguugccuuaauggaaaagcauaaacaccaguacgacaagauaaucgaggaacgagacucagagcucgggcuguauaaaaguaaggaacaggagcaaagcucccuucgcgcaucucuggagauugaauugucgaaccucaaggccgagcugcuaagcgugaaaaagcagcuggaaaucgagagagaagagaaagagaagcucaaaagggaagcuaaggagaauacugcgacccugaaggaaaagaaggauaaaaagacacagaccuuucuuuuggagacucccgagaucuacuggaaacuggacuccaaggcagucccuucacagacagugagucggaacuucacgucugucgaucacggaauuagcaaagacaagcgcgauuacuuauggaccuccgccaagaauacucucucaacaccacugcccaaggcuuauaccgugaagacaccuacuaaaccaaaacuucaacagagagaaaaccugaauauaccgaucgaggaaagcaaaaagaagaggaaaauggccuuugaguucgacauuaacucugauuccagugaaaccacggaccuacucagcaugguuucugaggaggaaacccugaagacauuguaccguaacaauaaucccccugcaucccaucugugcgugaaaacuccaaagaaagcccccucaaguuuaaccacaccugguagcacucucaaguuuggcgcuauccggaagaugcgagaggauagaugggccguaauugcaaaaauggacaggaagaaaaagcugaaagaagcggagaaacuuuucgucuga

SEQ ID NO: 3560 - RNA, 2931 nt, Artificial Sequence
  derived and/or modified sequence opt4 from SYCP1__Homo_sapiens__AAI44020
auggagaagcagaagcccuucgcccuguucgugccccccagaagcagcagcagccaggugagcgccgugaagccccagacccugggcggcgacagcaccuucuucaagagcuucaacaagugcaccgaggacgacuucgaguuccccuucgccaagaccaaccugagcaagaacggcgagaacaucgacagcgaccccgcccugcagaaggugaacuuccugcccguguucgagcaggugggcaacagcgacugccacuaccaggagggccugaaggacagcgaccuggagaacagcgagggccugagcagaguguacagcaagcuguacaaggaggccgagaagaucaagaaguggaaggugagcaccgaggccgagcugagacagaaggagagcaagcugcaggagaacagaaagaucaucgaggcccagagaaaggccauccaggagcugcaguucggcaacgagaaggugagccugaagcuggaggagggcauccaggagaacaaggaccugaucaaggagaacaacgccaccagacaccugugcaaccugcugaaggagaccugcgccagaagcgccgagaagaccaagaaguacgaguacgagagagaggagaccagacagguguacauggaccugaacagcaacaucgagaagaugaucaccgccuucgaggagcugagagugcaggccgagaacagcagacuggagaugcacuucaagcugaaggaggacuacgagaagauccagcaccuggagcaggaguacaagaaggagaucaacgacaaggagaagcaggugagccugcugcugauccagaucaccgagaaggagaacaagaugaaggaccugaccuuccugcuggaggagagcagagacaaggugaaccagcuggaggagaagaccaagcugcagagcgagaaccugaagcagagcaucgagaagcagcaccaccugaccaaggagcuggaggacaucaaggugagccugcagagaagcgugagcacccagaaggcccuggaggaggaccugcagaucgccaccaagaccaucugccagcugaccgaggagaaggagacccagauggaggagagcaacaaggccagagccgcccacagcuucguggugaccgaguucgagaccaccgugugcagccuggaggagcugcugagaaccgagcagcagagacuggagaagaacgaggaccagcugaagauccugaccauggagcugcagaagaagagcagcgagcuggaggagaugaccaagcugaccaacaacaaggagguggagcuggaggagcugaagaaggugcugggcgagaaggagacccugcuguacgagaacaagcaguucgagaagaucgccgaggagcugaagggcaccgagcaggagcugaucggccugcugcaggccagagagaaggaggugcacgaccuggagauccagcugaccgccaucaccaccagcgagcaguacuacagcaaggaggugaaggaccugaagaccgagcuggagaacgagaagcugaagaacaccgagcugaccagccacugcaacaagcugagccuggagaacaaggagcugacccaggagaccagcgacaugacccuggagcugaagaaccagcaggaggacaucaacaacaacaagaagcaggaggagagaaugcugaagcagaucgagaaccugcaggagaccgagacccagcugagaaacgagcuggaguacgugagagaggagcugaagcagaagagagacgaggugaagugcaagcuggacaagagcgaggagaacugcaacaaccugagaaagcagguggagaacaagaacaaguacaucgaggagcugcagcaggagaacaaggcccugaagaagaagggcaccgccgagagcaagcagcugaacguguacgagaucaaggugaacaagcuggagcuggagcuggagagcgccaagcagaaguucggcgagaucaccgacaccuaccagaaggagaucgaggacaagaagaucagcgaggagaaccugcuggaggagguggagaaggccaaggugaucgccgacgaggccgugaagcugcagaaggagaucgacaagagaugccagcacaagaucgccgagaugguggcccugauggagaagcacaagcaccaguacgacaagaucaucgaggagagagacagcgagcugggccuguacaagagcaaggagcaggagcagagcagccugagagccagccuggagaucgagcugagcaaccugaaggccgagcugcugagcgugaagaagcagcuggagaucgagagagaggagaaggagaagcugaagagagaggccaaggagaacaccgccacccugaaggagaagaaggacaagaagacccagaccuuccugcuggagacccccgagaucuacuggaagcuggacagcaaggccgugcccagccagaccgugagcagaaacuucaccagcguggaccacggcaucagcaaggacaagagagacuaccuguggaccagcgccaagaacacccugagcaccccccugcccaaggccuacaccgugaagacccccaccaagcccaagcugcagcagagagagaaccugaacauccccaucgaggagagcaagaagaagagaaagauggccuucgaguucgacaucaacagcgacagcagcgagaccaccgaccugcugagcauggugagcgaggaggagacccugaagacccuguacagaaacaacaacccccccgccagccaccugugcgugaagacccccaagaaggcccccagcagccugaccacccccggcagcacccugaaguucggcgccaucagaaagaugagagaggacagaugggccgugaucgccaagauggacagaaagaagaagcugaaggaggccgagaagcuguucguguga

SEQ ID NO: 3561 - RNA, 2931 nt, Artificial Sequence
  derived and/or modified sequence opt5 from SYCP1__Homo_sapiens__AAI44020
auggagaagcagaaacccuucgcccuguuugugccuccgagaagcuccucuagccaagucuccgcuguuaagccccagacccucggcggggacucuacauucuuuaagagcuucaacaagugcacggaagaugacuuugaguucccuuuugccaaaaccaaccuguccaagaacggagaaaauaucgauucugaccccgcgcuucagaaggugaacuuccugccuguguuugagcaggucggcaauagcgauugucacuaccaagaagggcucaaagacuccgaucuggagaacagcgagggacuuucucggguguauuccaagcuguacaaagaagcugagaagauuaaaaaguggaagguuagcacagaagccgagcuccgccagaaagagucuaagcugcaggaaaauagaaaaaucauugaggcccagcggaaggcuauccaagaacugcaguucggcaacgagaaagugucccucaagcuggaagaggggauucaggagaauaaagaccuuaucaaggaaaacaaugccacccgccaucugugcaaccuccugaaggagacaugugcuagaagcgccgagaaaaccaagaaauaugaguacgaacgggaggagacacgccaggucuauauggaucuuaauucuaacaucgaaaagaugauuaccgcguuugaggaacugagagugcaagccgaaaauucccggcucgaaaugcacuucaaacugaaggaggacuacgagaagauccagcaucuggaacaggaguauaaaaaggaaauuaacgauaaagagaagcaaguuagccuccugcuuauccagauuacggagaaagaaaacaagaugaaggaccugaccuuucuccuggaggaaucccgcgauaaagugaaucagcuugaggaaaagacaaaacugcagucugagaaccucaagcaaagcaucgagaaacagcaccaucugaccaaggaacuggaggacauuaaggucucccuccagagaagcgugucuacacagaaagcucuggaagaggaccuucaaaucgccaccaagacgaucugccagcugacagaagagaaagagacccagauggaagaguccaauaaggcucgggccgcgcacagcuucguggucacagaguucgaaaccaccguuuguucucucgaggaacugcuucgcacagagcagcaaagacuggagaaaaacgaagaucagcucaagauucugacgauggaacugcagaaaaagagcuccgagcucgaggaaaugaccaagcugacaaauaacaaagagguggaacuugaggaacugaagaaagugcucggagagaaggagacccugcuguacgaaaauaaacaguuugagaagaucgccgaggaacuuaagggcacagaacaagagcucauuggccugcugcaggcucgggagaaagaaguccacgaccucgagauccagcugaccgccauuacgacaucugaacaauacuauagcaaggaggugaaagaucuuaagaccgaacuggagaacgagaaacucaagaauaccgaacugacaucccauugcaacaagcugagccuugagaauaaagaacucacccaggagacaucugacaugacgcuggagcugaagaaccagcaggaagauaucaauaacaauaaaaagcaagaggaacgcaugcucaaacagaucgagaaccugcaggaaaccgagacacagcuuagaaacgagcuggaauacguucgggaggaacucaagcaaaagagagacgaggugaaauguaagcuggauaaauccgaagagaauugcaacaaucugcgcaagcaggucgagaacaaaaauaaguauauugaggaacuucagcaggaaaacaaagcucucaagaagaaagggaccgccgagagcaagcaacugaauguguacgaaaucaaaguuaacaagcuggagcucgagcuggaaucugccaaacagaaguucggagagauuacagacaccuaucagaaggaaaucgaggauaaaaagauuuccgaggaaaaucuucuggaggaaguggagaaagcuaaggucaucgcggacgaagccgugaaacuccaaaaggagaucgauaagcggugucagcacaaaauugcugagauggucgcccugauggaaaagcauaaacaccaguacgacaagaucauugaggaaagagacagcgagcugggccuuuauaaauccaaggaacaggagcaaucuagccuccgcgccucccuggagaucgaacugucuaaccucaaggcugagcugcuuagcgugaaaaagcagcuggaaauugagcgggaagagaaagagaagcucaaaagagaagccaaggagaauacggcgacccugaaggagaaaaaggauaaaaagacacagaccuuucugcuugaaacacccgagaucuacuggaaacuggacuccaaggcuguuccuagccagaccgugucucgcaacuucacguccgucgaucacgggauuagcaaagacaagcgggauuaccucuggacaucugccaagaauacccuguccacaccgcuccccaaagccuauaccgugaagaccccuacaaaacccaagcugcaacagagagaaaaccuuaauaucccuaucgaggaaagcaaaaagaagcgcaaaauggcuuuugaguucgacauuaacucugauagcuccgaaacgaccgaccugcucagcaugguuucugaggaggaaacacugaagacccuguaccggaacaauaaucccccggccucccaucuuugcgugaaaacaccuaagaaagcucccagcucccugaccacgccuggaucuacacucaaguuuggcgccaucagaaagaugcgcgaggaucggugggcggucauugccaaaauggacagaaagaaaaagcugaaagaagcugagaaacucuucguguga

SEQ ID NO: 3562 - protein, 976 aa, Artificial Sequence; identical to SEQ ID NO: 3548
  SYCP1__Homo_sapiens__Q15431

SEQ ID NO: 3563 - RNA, 2931 nt, Artificial Sequence; identical to SEQ ID NO: 3549
  SYCP1__Homo_sapiens__AAI26267

SEQ ID NO: 3564 - RNA, 2931 nt, Artificial Sequence; identical to SEQ ID NO: 3550
  derived and/or modified sequence opt1 from SYCP1__Homo_sapiens__AAI26267

SEQ ID NO: 3565 - RNA, 2931 nt, Artificial Sequence; identical to SEQ ID NO: 3551
  derived and/or modified sequence opt2 from SYCP1__Homo_sapiens__AAI26267

SEQ ID NO: 3566 - RNA, 2931 nt, Artificial Sequence; identical to SEQ ID NO: 3552
  derived and/or modified sequence opt3 from SYCP1__Homo_sapiens__AAI26267

SEQ ID NO: 3567 - RNA, 2931 nt, Artificial Sequence; identical to SEQ ID NO: 3553
  derived and/or modified sequence opt4 from SYCP1__Homo_sapiens__AAI26267

SEQ ID NO: 3568 - RNA, 2931 nt, Artificial Sequence; identical to SEQ ID NO: 3554
  derived and/or modified sequence opt5 from SYCP1__Homo_sapiens__AAI26267

SEQ ID NO: 3569 - protein, 109 aa, Artificial Sequence [sequence omitted]

SEQ ID NO: 3570 - RNA, 330 nt, Artificial Sequence
  SYCP1__Homo_sapiens__AAI05300
auggaaaagcaaaagcccuuugcauuguucguaccaccgagaucaagcagcagucaggugucugcggugaaaccucagacccugggaggcgauuccacuuucuucaagaguuucaacaaauguacugaagaugauuuugaguuuccauuugcaaagacuaaucucuccaaaaauggggaaaacauugauucagauccugcuuuacaaaacguuaauuucuugcccgugcuugagcagguugguaauucugacugucacuaucaggaaggacuaaaagacucugauuuggagaauucagagggauugagcagaguguauucaaaacuguaa

SEQ ID NO: 3571 - RNA, 330 nt, Artificial Sequence
  derived and/or modified sequence opt1 from SYCP1__Homo_sapiens__AAI05300
auggagaagcagaagcccuucgcccuguucgugccgccccgcagcuccagcucccaggugagcgccgugaagccccagacccucggcggggacuccaccuucuucaagagcuucaacaagugcacggaggacgacuucgaguuccccuucgcgaagaccaaccuguccaagaacggcgagaacaucgacagcgacccggcccugcagaacgugaacuuccuccccguccuggagcaggucgggaacuccgacugccacuaccaggagggccugaaggacagcgaccucgagaacuccgaggggcugagccggguguacuccaagcuguga

SEQ ID NO: 3572 - RNA, 330 nt, Artificial Sequence
  derived and/or modified sequence opt2 from SYCP1__Homo_sapiens__AAI05300
auggagaagcagaagcccuucgcccucuucguccccccccgcuccuccuccucccaggucuccgccgucaagccccagacccucggcggcgacuccaccuucuucaaguccuucaacaagugcaccgaggacgacuucgaguuccccuucgccaagaccaaccucuccaagaacggcgagaacaucgacuccgaccccgcccuccagaacgucaacuuccuccccguccucgagcaggucggcaacuccgacugccacuaccaggagggccucaaggacuccgaccucgagaacuccgagggccucucccgcgucuacuccaagcucuga

SEQ ID NO: 3573 - RNA, 330 nt, Artificial Sequence
  derived and/or modified sequence opt3 from SYCP1__Homo_sapiens__AAI05300
auggagaagcagaaacccuucgcccuguuugugccuccaagaagcuccucuucacaagucagugcuguuaagccgcagacccucggcggggacagcacauucuuuaaauccuucaacaagugcacugaagaugacuuugaguuccccuuugcaaaaacgaaucuuucuaagaacggagaaaauaucgauucggacccugcccugcagaacgugaauuucuugccaguauuagaacagguggguaacucagauugucacuaccaagagggccugaaggacagcgaucuagagaauagugaggggcucuccagggucuauucuaaacuguga

SEQ ID NO: 3574 - RNA, 330 nt, Artificial Sequence
  derived and/or modified sequence opt4 from SYCP1__Homo_sapiens__AAI05300
auggagaagcagaagcccuucgcccuguucgugccccccagaagcagcagcagccaggugagcgccgugaagccccagacccugggcggcgacagcaccuucuucaagagcuucaacaagugcaccgaggacgacuucgaguuccccuucgccaagaccaaccugagcaagaacggcgagaacaucgacagcgaccccgcccugcagaacgugaacuuccugcccgugcuggagcaggugggcaacagcgacugccacuaccaggagggccugaaggacagcgaccuggagaacagcgagggccugagcagaguguacagcaagcuguga

SEQ ID NO: 3575 - RNA, 330 nt, Artificial Sequence
  derived and/or modified sequence opt5 from SYCP1__Homo_sapiens__AAI05300
auggagaagcagaaacccuucgcccuguuugugccuccgagaagcuccucuagccaagucuccgcuguuaagccccagacccucggcggggacucuacauucuuuaagagcuucaacaaaugcacggaagaugacuuugaguucccuuuugccaaaaccaaucuguccaagaacggagaaaauaucgauucugaccccgcgcuucagaacgugaauuuccugccugugcucgagcaggucggcaacagcgauugucacuaccaagaagggcugaaggacuccgaucuugagaauagcgagggacugucucggguguauuccaaacucuga

SEQ ID NO: 3576 - protein, 488 aa, Artificial Sequence
  SYT-SSX-1__Homo_sapiens__A4PIV7
MSVAFAAPRQRGKGEITPAAIQKMLDDNNHLIQCIMDSQNKGKTSECSQYQQMLHTNLVYLATIADSNQNMQSLLPAPPTQNMPMGPGGMNQSGPPPPPRSHNMPSDGMVGGGPPAPHMQNQMNGQMPGPNHMPMQGPGPNQLNMTNSSMNMPSSSHGSMGGYNHSVPSSQSMPVQNQMTMSQGQPMGNYGPRPNMSMQPNQGPMMHQQPPSQQYNMPQGGGQHYQGQQPPMGMMGQVNQGNHMMGQRQIPPYRPPQQGPPQQYSGQEDYYGDQYSHGGQGPPEGMNQQYYPDGHNDYGYQQPSYPEQGYDRPYEDSSQHYYEGGNSQYGQQQDAYQGPPPQQGYPPQQQQYPGQQGYPGQQQGYGPSQGGPGPQYPNYPQGQGQQYGGYRPTQPGPPQPPQQRPYGYDQIMPKKPAEDENDSKGVSEASGPQNDGKQLHPPGKANISEKINKRSGPKRGKHAWTHRLRERKQLVIYEEISDPEEDDE

SEQ ID NO: 3577 - RNA, 1467 nt, Artificial Sequence
  SYT-SSX-1__Homo_sapiens__BAF56181
augucuguggcuuucgcggccccgaggcagcgaggcaagggggagaucacucccgcugcgauucagaagauguuggaugacaauaaccaucuuauucaguguauaauggacucucagaauaaaggaaagaccucagaguguucucaguaucagcagauguugcacacaaacuugguauaccuugcuacaauagcagauucuaaucaaaauaugcagucucuuuuaccagcaccacccacacagaauaugccuauggguccuggagggaugaaucagagcggcccucccccaccuccacgcucucacaacaugccuucagauggaaugguagguggggguccuccugcaccgcacaugcagaaccagaugaacggccagaugccugggccuaaccauaugccuaugcagggaccuggacccaaucaacucaauaugacaaacaguuccaugaauaugccuucaaguagccauggauccaugggagguuacaaccauucugugccaucaucgcagagcaugccaguacagaaucagaugacaaugagucagggacaaccaaugggaaacuauggucccagaccaaauaugaguaugcagccaaaccaagguccaaugaugcaucagcagccuccuucucagcaauacaauaugccacagggaggcggacagcauuaccaaggacagcagccaccuauggggaugaugggucaaguuaaccaaggcaaucauaugaugggucagagacagauuccucccuauagaccuccucaacagggcccaccacagcaguacucaggccaggaagacuauuacggggaccaauacagucaugguggacaagguccuccagaaggcaugaaccagcaauauuacccugauggucauaaugauuacgguuaucagcaaccgucguauccugaacaaggcuacgauaggccuuaugaggauuccucacaacauuacuacgaaggaggaaauucacaguauggccaacagcaagaugcauaccagggaccaccuccacaacagggauauccaccccagcagcagcaguacccagggcagcaagguuacccaggacagcagcagggcuacgguccuucacagggugguccagguccucaguauccuaacuacccacagggacaaggucagcaguauggaggauauagaccaacacagccuggaccaccacagccaccccagcagaggccuuauggauaugaccagaucaugcccaagaagccagcagaggacgaaaaugauucgaagggagugucagaagcaucuggcccacaaaacgaugggaaacaacugcaccccccaggaaaagcaaauauuucugagaagauuaauaagagaucuggacccaaaagggggaaacaugccuggacccacagacugcgugagagaaagcagcuggugauuuaugaagagaucagcgacccugaggaagaugacgaguaa

SEQ ID NO: 3578 - RNA, 1467 nt, Artificial Sequence
  derived and/or modified sequence opt1 from SYT-SSX-1__Homo_sapiens__BAF56181
augagcguggccuucgccgcgccccgccagcggggcaagggggagaucaccccggccgccauccagaagaugcuggacgacaacaaccaccucauccagugcaucauggacucccagaacaagggcaagaccagcgagugcucccaguaccagcagaugcugcacacgaaccuggucuaccucgccaccaucgccgacagcaaccagaacaugcagucccugcugcccgcgccccccacccagaacaugccgauggggcccggcgggaugaaccagagcggcccccccccgcccccccgcucccacaacaugcccagcgacggcaugguggggggcgggccgcccgccccccacaugcagaaccagaugaacggccagaugcccgggccgaaccacaugcccaugcagggccccggccccaaccagcucaacaugaccaacuccagcaugaacaugccguccagcucccacgggagcaugggcggguacaaccacuccgugcccagcucccagagcaugcccguccagaaccagaugacgaugucccagggccagcccaugggcaacuacgggccgcggcccaacaugagcaugcagcccaaccagggccccaugaugcaccagcagccgcccagccagcaguacaacaugccccaggggggcgggcagcacuaccagggccagcagccgcccaugggcaugauggggcaggugaaccagggcaaccacaugauggggcagcgccagaucccccccuaccggccgccccagcagggccccccccagcaguacuccgggcaggaggacuacuacggcgaccaguacagccacggcgggcagggcccgcccgaggggaugaaccagcaguacuaccccgacggccacaacgacuacggguaccagcagcccuccuacccggagcagggcuacgaccgccccuacgaggacagcucccagcacuacuacgagggcgggaacagccaguacggccagcagcaggacgccuaccaggggccccccccgcagcagggcuaccccccccagcagcagcaguaccccggccagcagggguacccgggccagcagcagggguacggccccucccaggggggccccggcccccaguacccgaacuacccccaggggcagggccagcaguacgggggcuaccggcccacccagccggggcccccccagcccccgcagcagcgccccuacggcuacgaccagaucaugcccaagaagcccgccgaggacgagaacgacagcaagggcguguccgaggcgagcgggccgcagaacgacggcaagcagcugcacccccccgggaaggccaacaucuccgagaagaucaacaagcggagcggccccaagcgcgggaagcacgccuggacccaccggcugcgcgagcggaagcagcucgucaucuacgaggagaucuccgacccggaggaggacgacgaguga

SEQ ID NO: 3579 - RNA, 1467 nt, Artificial Sequence
  derived and/or modified sequence opt2 from SYT-SSX-1__Homo_sapiens__BAF56181
auguccgucgccuucgccgccccccgccagcgcggcaagggcgagaucacccccgccgccauccagaagaugcucgacgacaacaaccaccucauccagugcaucauggacucccagaacaagggcaagaccuccgagugcucccaguaccagcagaugcuccacaccaaccucgucuaccucgccaccaucgccgacuccaaccagaacaugcagucccuccuccccgccccccccacccagaacaugcccaugggccccggcggcaugaaccaguccggcccccccccccccccccgcucccacaacaugcccuccgacggcauggucggcggcggcccccccgccccccacaugcagaaccagaugaacggccagaugcccggccccaaccacaugcccaugcagggccccggccccaaccagcucaacaugaccaacuccuccaugaacaugcccuccuccucccacggcuccaugggcggcuacaaccacuccguccccuccucccaguccaugcccguccagaaccagaugaccaugucccagggccagcccaugggcaacuacggcccccgccccaacauguccaugcagcccaaccagggccccaugaugcaccagcagccccccucccagcaguacaacaugccccagggcggcggccagcacuaccagggccagcagccccccaugggcaugaugggccaggucaaccagggcaaccacaugaugggccagcgccagaucccccccuaccgccccccccagcagggccccccccagcaguacuccggccaggaggacuacuacggcgaccaguacucccacggcggccagggcccccccgagggcaugaaccagcaguacuaccccgacggccacaacgacuacggcuaccagcagcccuccuaccccgagcagggcuacgaccgccccuacgaggacuccucccagcacuacuacgagggcggcaacucccaguacggccagcagcaggacgccuaccagggcccccccccccagcagggcuaccccccccagcagcagcaguaccccggccagcagggcuaccccggccagcagcagggcuacggccccucccagggcggccccggcccccaguaccccaacuacccccagggccagggccagcaguacggcggcuaccgccccacccagcccggccccccccagcccccccagcagcgccccuacggcuacgaccagaucaugcccaagaagcccgccgaggacgagaacgacuccaagggcgucuccgaggccuccggcccccagaacgacggcaagcagcuccacccccccggcaaggccaacaucuccgagaagaucaacaagcgcuccggccccaagcgcggcaagcacgccuggacccaccgccuccgcgagcgcaagcagcucgucaucuacgaggagaucuccgaccccgaggaggacgacgaguga

SEQ ID NO: 3580 - RNA, 1467 nt, Artificial Sequence
  derived and/or modified sequence opt3 from SYT-SSX-1__Homo_sapiens__BAF56181
augagcguggccuucgcugcacccagacagaggggcaagggggagaucaccccugccgcgauucagaaaaugcuggacgauaacaaucaccucauacaaugcaucauggacucccagaacaagggaaaaacaucugaauguucacaguaccaacagaugcuucauacuaaucuggucuauuuggcuacgauugccgauaguaaccagaauaugcagagcuuacugccagcaccgcccacccaaaacaugccuauggguccaggcgggaugaaucaguccggacccccuccacccccucggucucacaacaugccaucggacggcaugguuggugggggaccgcccgccccucauaugcagaaucagaugaacggccaaaugccaggccccaaucacaugccuaugcaggggccaggacccaaccagcuaaauaugacaaacucaagcaugaauaugccgaguuccucucaugguagcaugggcggguacaaccacuccgugccuucaagucaaagcaugcccguacagaaccagaugacuaugucucagggacaaccaaugggcaauuaugguccucgccccaacauguccaugcagccaaaucaggggcccaugaugcaccagcaaccuccaucacagcaguacaacaugccgcagggaggcggccaacauuaucaggggcagcagcccccuaugggaaugaugggucaagugaaucagggcaaccacaugauggggcagcgacaaaucccacccuaccguccuccacagcagggacccccgcagcaauauagcggccaggaggauuacuacggugaccaguauagucaugggggccagggaccuccagaaggcaugaaucaacaguacuaucccgaugggcacaacgacuacggauaucagcagccuucuuaccccgagcaagguuaugauagaccauacgaagacuccagccagcacuacuaugagggcggaaauucgcaguacgggcaacagcaggaugcuuaucagggcccucccccacaacaggguuacccgccucagcagcaacaguaucccgggcagcagggcuacccaggacaacagcagggcuaugggcccucucagggagguccuggcccacaauaccccaacuacccucaggggcagggacaacaguauggcgguuacaggccgacccagccagggcccccucagccaccccaacagcggccuuauggcuacgaccagauuaugccgaagaaacccgcagaggaugaaaaugacuccaagggagucucagaggccaguggcccacagaacgacgggaagcaacuccauccucccggaaaagcuaauaucagcgaaaagauaaacaaacgcuccggcccaaagagagguaaacacgccuggacacauaggcugcgggagcgcaagcagcuugugaucuaugaggaaauuucugauccugaggaagacgaugaguga

SEQ ID NO: 3581 - RNA, 1467 nt, Artificial Sequence
  derived and/or modified sequence opt4 from SYT-SSX-1__Homo_sapiens__BAF56181
augagcguggccuucgccgcccccagacagagaggcaagggcgagaucacccccgccgccauccagaagaugcuggacgacaacaaccaccugauccagugcaucauggacagccagaacaagggcaagaccagcgagugcagccaguaccagcagaugcugcacaccaaccugguguaccuggccaccaucgccgacagcaaccagaacaugcagagccugcugcccgccccccccacccagaacaugcccaugggccccggcggcaugaaccagagcggccccccccccccccccagaagccacaacaugcccagcgacggcauggugggcggcggcccccccgccccccacaugcagaaccagaugaacggccagaugcccggccccaaccacaugcccaugcagggccccggccccaaccagcugaacaugaccaacagcagcaugaacaugcccagcagcagccacggcagcaugggcggcuacaaccacagcgugcccagcagccagagcaugcccgugcagaaccagaugaccaugagccagggccagcccaugggcaacuacggccccagacccaacaugagcaugcagcccaaccagggccccaugaugcaccagcagccccccagccagcaguacaacaugccccagggcggcggccagcacuaccagggccagcagccccccaugggcaugaugggccaggugaaccagggcaaccacaugaugggccagagacagaucccccccuacagacccccccagcagggccccccccagcaguacagcggccaggaggacuacuacggcgaccaguacagccacggcggccagggcccccccgagggcaugaaccagcaguacuaccccgacggccacaacgacuacggcuaccagcagcccagcuaccccgagcagggcuacgacagacccuacgaggacagcagccagcacuacuacgagggcggcaacagccaguacggccagcagcaggacgccuaccagggcccccccccccagcagggcuaccccccccagcagcagcaguaccccggccagcagggcuaccccggccagcagcagggcuacggccccagccagggcggccccggcccccaguaccccaacuacccccagggccagggccagcaguacggcggcuacagacccacccagcccggccccccccagcccccccagcagagacccuacggcuacgaccagaucaugcccaagaagcccgccgaggacgagaacgacagcaagggcgugagcgaggccagcggcccccagaacgacggcaagcagcugcacccccccggcaaggccaacaucagcgagaagaucaacaagagaagcggccccaagagaggcaagcacgccuggacccacagacugagagagagaaagcagcuggugaucuacgaggagaucagcgaccccgaggaggacgacgaguga

SEQ ID NO: 3582 - RNA, 1467 nt, Artificial Sequence
  derived and/or modified sequence opt5 from SYT-SSX-1__Homo_sapiens__BAF56181
augagcguggccuucgcugcccccagacagcggggcaagggggagaucaccccugcggcuauucagaaaaugcuggacgauaacaaucaccucauccaaugcauuauggacucccagaacaagggaaaaacaucugaauguagccaguaccaacagaugcugcauacgaaucuugucuaucuggccaccaucgccgauuccaaccagaauaugcagucucuccugccggcucccccuacacaaaacaugcccaugggcccugggggaaugaaucagagcgggcccccuccgcccccucgcucccacaacaugcccucugacgggaugguuggaggcggcccucccgccccgcauaugcagaaucagaugaacgggcaaaugccuggacccaaucacaugccuaugcagggccccgggcccaaccagcuuaauaugaccaacagcuccaugaauaugccuucuagcucccauggaagcaugggcggguacaaccacucugugccguccagccaaucuaugcccgugcagaaccagaugacaaugucccagggacaaccuaugggcaauuauggccccagaccuaacaugagcaugcagcccaaucaggggccgaugaugcaccagcaaccucccucccagcaguacaacaugccucagggaggcgggcaacauuaucagggacagcagcccccuaugggcaugauggggcaagucaaucagggaaaccacaugaugggccagcggcaaauucccccguaccgcccuccccagcaggggcccccucagcaauauucuggccaggaggauuacuacggagaccaguauagccauggcgggcagggaccgcccgaaggcaugaaucaacaguacuauccugaugggcacaacgacuacggcuaucagcagcccuccuacccugagcaaggauaugauagacccuacgaagacagcucucagcacuacuaugagggcggcaauucccaguacggacaacagcaggaugcuuaucagggcccucccccgcaacagggguacccuccccagcagcaacaguauccuggacagcagggcuaccccgggcaacagcagggcuauggaccgagccagggcgggccuggaccccaauacccuaacuacccccagggccaggggcaacaguauggaggcuaccggcccacccagccugggccgccccagccuccccaacagcgcccuuauggcuacgaccagaucaugcccaagaaaccugccgaggaugaaaaugacucuaagggagugagcgaggcguccggcccgcagaacgacgggaagcaacugcaucccccuggaaaagccaauaucucugaaaagauuaacaaaagaagcggccccaagcgggggaaacacgcuuggacacaucgccucagagagcggaagcagcugguuaucuaugaggaaauuuccgauccugaggaagacgaugaguga

SEQ ID NO: 3583 - protein, 457 aa, Artificial Sequence
  SYT-SSX-1__Homo_sapiens__A4PIV8
MSVAFAAPRQRGKGEITPAAIQKMLDDNNHLIQCIMDSQNKGKTSECSQYQQMLHTNLVYLATIADSNQNMQSLLPAPPTQNMPMGPGGMNQSGPPPPPRSHNMPSDGMVGGGPPAPHMQNQMNGQMPGPNHMPMQGPGPNQLNMTNSSMNMPSSSHGSMGGYNHSVPSSQSMPVQNQMTMSQGQPMGNYGPRPNMSMQPNQGPMMHQQPPSQQYNMPQGGGQHYQGQQPPMGMMGQVNQGNHMMGQRQIPPYRPPQQGPPQQYSGQEDYYGDQYSHGGQGPPEGMNQQYYPDGNSQYGQQQDAYQGPPPQQGYPPQQQQYPGQQGYPGQQQGYGPSQGGPGPQYPNYPQGQGQQYGGYRPTQPGPPQPPQQRPYGYDQIMPKKPAEDENDSKGVSEASGPQNDGKQLHPPGKANISEKINKRSGPKRGKHAWTHRLRERKQLVIYEEISDPEEDDE

SEQ ID NO: 3584 - RNA, 1374 nt, Artificial Sequence
  SYT-SSX-1__Homo_sapiens__BAF56182
augucuguggcuuucgcggccccgaggcagcgaggcaagggggagaucacucccgcugcgauucagaagauguuggaugacaauaaccaucuuauucaguguauaauggacucucagaauaaaggaaagaccucagaguguucucaguaucagcagauguugcacacaaacuugguauaccuugcuacaauagcagauucuaaucaaaauaugcagucucuuuuaccagcaccacccacacagaauaugccuauggguccuggagggaugaaucagagcggcccucccccaccuccacgcucucacaacaugccuucagauggaaugguagguggggguccuccugcaccgcacaugcagaaccagaugaacggccagaugccugggccuaaccauaugccuaugcagggaccuggacccaaucaacucaauaugacaaacaguuccaugaauaugccuucaaguagccauggauccaugggagguuacaaccauucugugccaucaucgcagagcaugccaguacagaaucagaugacaaugagucagggacaaccaaugggaaacuauggucccagaccaaauaugaguaugcagccaaaccaagguccaaugaugcaucagcagccuccuucucagcaauacaauaugccacagggaggcggacagcauuaccaaggacagcagccaccuauggggaugaugggucaaguuaaccaaggcaaucauaugaugggucagagacagauuccucccuauagaccuccucaacagggcccaccacagcaguacucaggccaggaagacuauuacggggaccaauacagucaugguggacaagguccuccagaaggcaugaaccagcaauauuacccugauggaaauucacaguauggccaacagcaagaugcauaccagggaccaccuccacaacagggauauccaccccagcagcagcaguacccagggcagcaagguuacccaggacagcagcagggcuacgguccuucacagggugguccagguccucaguauccuaacuacccacagggacaaggucagcaguauggaggauauagaccaacacagccuggaccaccacagccaccccagcagaggccuuauggauaugaccagaucaugcccaagaagccagcagaggacgaaaaugauucgaagggagugucagaagcaucuggcccacaaaacgaugggaaacaacugcaccccccaggaaaagcaaauauuucugagaagauuaauaagagaucuggacccaaaagggggaaacaugccuggacccacagacugcgugagagaaagcagcuggugauuuaugaagagaucagcgacccugaggaagaugacgaguaa

SEQ ID NO: 3585 - RNA, 1374 nt, Artificial Sequence
  derived and/or modified sequence opt1 from SYT-SSX-1__Homo_sapiens__BAF56182
augagcguggccuucgccgcgccccgccagcggggcaagggggagaucaccccggccgccauccagaagaugcuggacgacaacaaccaccucauccagugcaucauggacucccagaacaagggcaagaccagcgagugcucccaguaccagcagaugcugcacacgaaccuggucuaccucgccaccaucgccgacagcaaccagaacaugcagucccugcugcccgcgccccccacccagaacaugccgauggggcccggcgggaugaaccagagcggcccccccccgcccccccgcucccacaacaugcccagcgacggcaugguggggggcgggccgcccgccccccacaugcagaaccagaugaacggccagaugcccgggccgaaccacaugcccaugcagggccccggccccaaccagcucaacaugaccaacuccagcaugaacaugccguccagcucccacgggagcaugggcggguacaaccacuccgugcccagcucccagagcaugcccguccagaaccagaugacgaugucccagggccagcccaugggcaacuacgggccgcggcccaacaugagcaugcagcccaaccagggccccaugaugcaccagcagccgcccagccagcaguacaacaugccccaggggggcgggcagcacuaccagggccagcagccgcccaugggcaugauggggcaggugaaccagggcaaccacaugauggggcagcgccagaucccccccuaccggccgccccagcagggccccccccagcaguacuccgggcaggaggacuacuacggcgaccaguacagccacggcgggcagggcccgcccgaggggaugaaccagcaguacuaccccgacggcaacucccaguacgggcagcagcaggacgccuaccagggccccccgccccagcagggcuaccccccccagcagcagcaguacccggggcagcagggcuaccccgggcagcagcagggcuacggccccagccaggggggccccgggccgcaguaccccaacuacccccagggccaggggcagcaguacggcggcuaccgccccacccagccggggcccccccagccgccccagcagcggcccuacggcuacgaccagaucaugcccaagaagccggccgaggacgagaacgacuccaagggggugagcgaggcguccggcccccagaacgacgggaagcagcugcacccccccggcaaggccaacaucagcgagaagaucaacaagcgcuccggcccgaagcgggggaagcacgccuggacccaccgccugcgggagcgcaagcagcucgucaucuacgaggagaucagcgaccccgaggaggacgacgaguga

SEQ ID NO: 3586 - RNA, 1374 nt, Artificial Sequence
  derived and/or modified sequence opt2 from SYT-SSX-1__Homo_sapiens__BAF56182
auguccgucgccuucgccgccccccgccagcgcggcaagggcgagaucacccccgccgccauccagaagaugcucgacgacaacaaccaccucauccagugcaucauggacucccagaacaagggcaagaccuccgagugcucccaguaccagcagaugcuccacaccaaccucgucuaccucgccaccaucgccgacuccaaccagaacaugcagucccuccuccccgccccccccacccagaacaugcccaugggccccggcggcaugaaccaguccggcccccccccccccccccgcucccacaacaugcccuccgacggcauggucggcggcggcccccccgccccccacaugcagaaccagaugaacggccagaugcccggccccaaccacaugcccaugcagggccccggccccaaccagcucaacaugaccaacuccuccaugaacaugcccuccuccucccacggcuccaugggcggcuacaaccacuccguccccuccucccaguccaugcccguccagaaccagaugaccaugucccagggccagcccaugggcaacuacggcccccgccccaacauguccaugcagcccaaccagggccccaugaugcaccagcagccccccucccagcaguacaacaugccccagggcggcggccagcacuaccagggccagcagccccccaugggcaugaugggccaggucaaccagggcaaccacaugaugggccagcgccagaucccccccuaccgccccccccagcagggccccccccagcaguacuccggccaggaggacuacuacggcgaccaguacucccacggcggccagggcccccccgagggcaugaaccagcaguacuaccccgacggcaacucccaguacggccagcagcaggacgccuaccagggcccccccccccagcagggcuaccccccccagcagcagcaguaccccggccagcagggcuaccccggccagcagcagggcuacggccccucccagggcggccccggcccccaguaccccaacuacccccagggccagggccagcaguacggcggcuaccgccccacccagcccggccccccccagcccccccagcagcgccccuacggcuacgaccagaucaugcccaagaagcccgccgaggacgagaacgacuccaagggcgucuccgaggccuccggcccccagaacgacggcaagcagcuccacccccccggcaaggccaacaucuccgagaagaucaacaagcgcuccggccccaagcgcggcaagcacgccuggacccaccgccuccgcgagcgcaagcagcucgucaucuacgaggagaucuccgaccccgaggaggacgacgaguga

SEQ ID NO: 3587 - RNA, 1374 nt, Artificial Sequence
  derived and/or modified sequence opt3 from SYT-SSX-1__Homo_sapiens__BAF56182
augagcguggccuucgcugcacccagacagaggggcaagggggagaucaccccugccgcgauucagaaaaugcuggacgauaacaaucaccucauacaaugcaucauggacucccagaacaagggaaaaacaucugaauguucacaguaccaacagaugcuucauacuaaucuggucuauuuggcuacgauugccgauaguaaccagaauaugcagagcuuacugccagcaccgcccacccaaaacaugccuauggguccaggcgggaugaaucaguccggacccccuccacccccucggucucacaacaugccaucggacggcaugguuggugggggaccgcccgccccucauaugcagaaucagaugaacggccaaaugccaggccccaaucacaugccuaugcaggggccaggacccaaccagcuaaauaugacaaacucaagcaugaauaugccgaguuccucucaugguagcaugggcggguacaaccacuccgugccuucaagucaaagcaugcccguacagaaccagaugacuaugucucagggacaaccaaugggcaauuaugguccucgccccaacauguccaugcagccaaaucaggggcccaugaugcaccagcaaccuccaucacagcaguacaacaugccgcagggaggcggccaacauuaucaggggcagcagcccccuaugggaaugaugggucaagugaaucagggcaaccacaugauggggcagcgacaaaucccacccuaccguccuccacagcagggacccccgcagcaauauagcggccaggaggauuacuacggugaccaguauagucaugggggccagggaccuccagaaggcaugaaucaacaguacuaucccgaugggaacucucaguacggacagcaacaggacgcuuaucaggguccucccccacaacagggcuacccuccccagcagcaacaguauccagggcagcagggauacccgggccaacagcaggguuacgggccuucccagggcggacccggcccacaauaucccaauuacccucaggggcagggacagcaauaugguggcuacagaccaacccagcccgggccuccgcagccaccccaacagaggccuuauggauacgaucagauuaugccaaagaaacccgcagaggacgaaaacgauagcaagggcgucucggaggccucugguccucagaaugacgggaagcaacuccacccgcccggcaaagcuaacaucuccgagaagauaaauaaacggucaggaccaaagcgcggcaaacacgccuggacacauagacugagggaacggaagcagcuugugaucuaugaggaaauuagugauccugaggaggacgacgaauga

SEQ ID NO: 3588 - RNA, 1374 nt, Artificial Sequence
  derived and/or modified sequence opt4 from SYT-SSX-1__Homo_sapiens__BAF56182
augagcguggccuucgccgcccccagacagagaggcaagggcgagaucacccccgccgccauccagaagaugcuggacgacaacaaccaccugauccagugcaucauggacagccagaacaagggcaagaccagcgagugcagccaguaccagcagaugcugcacaccaaccugguguaccuggccaccaucgccgacagcaaccagaacaugcagagccugcugcccgccccccccacccagaacaugcccaugggccccggcggcaugaaccagagcggccccccccccccccccagaagccacaacaugcccagcgacggcauggugggcggcggcccccccgccccccacaugcagaaccagaugaacggccagaugcccggccccaaccacaugcccaugcagggccccggccccaaccagcugaacaugaccaacagcagcaugaacaugcccagcagcagccacggcagcaugggcggcuacaaccacagcgugcccagcagccagagcaugcccgugcagaaccagaugaccaugagccagggccagcccaugggcaacuacggccccagacccaacaugagcaugcagcccaaccagggccccaugaugcaccagcagccccccagccagcaguacaacaugccccagggcggcggccagcacuaccagggccagcagccccccaugggcaugaugggccaggugaaccagggcaaccacaugaugggccagagacagaucccccccuacagacccccccagcagggccccccccagcaguacagcggccaggaggacuacuacggcgaccaguacagccacggcggccagggcccccccgagggcaugaaccagcaguacuaccccgacggcaacagccaguacggccagcagcaggacgccuaccagggcccccccccccagcagggcuaccccccccagcagcagcaguaccccggccagcagggcuaccccggccagcagcagggcuacggccccagccagggcggccccggcccccaguaccccaacuacccccagggccagggccagcaguacggcggcuacagacccacccagcccggccccccccagcccccccagcagagacccuacggcuacgaccagaucaugcccaagaagcccgccgaggacgagaacgacagcaagggcgugagcgaggccagcggcccccagaacgacggcaagcagcugcacccccccggcaaggccaacaucagcgagaagaucaacaagagaagcggccccaagagaggcaagcacgccuggacccacagacugagagagagaaagcagcuggugaucuacgaggagaucagcgaccccgaggaggacgacgaguga

SEQ ID NO: 3589 - RNA, 1374 nt, Artificial Sequence
  derived and/or modified sequence opt5 from SYT-SSX-1__Homo_sapiens__BAF56182
augagcguggccuucgcugcccccagacagcggggcaagggggagaucaccccugcggcuauucagaaaaugcuggacgauaacaaucaccucauccaaugcauuauggacucccagaacaagggaaaaacaucugaauguagccaguaccaacagaugcugcauacgaaucuugucuaucuggccaccaucgccgauuccaaccagaauaugcagucucuccugccggcucccccuacacaaaacaugcccaugggcccugggggaaugaaucagagcgggcccccuccgcccccucgcucccacaacaugcccucugacggcaugguuggaggcggcccucccgccccgcauaugcagaaucagaugaacgggcaaaugccuggacccaaucacaugccuaugcagggccccgggcccaaccagcuuaauaugaccaacagcuccaugaauaugccuucuagcucccauggaagcaugggcggguacaaccacucugugccguccagccaaucuaugcccgugcagaaccagaugacaaugucccagggacaaccuaugggcaauuauggccccagaccuaacaugagcaugcagcccaaucaggggccgaugaugcaccagcaaccucccucccagcaguacaacaugccucagggaggcgggcaacauuaucagggacagcagcccccuaugggcaugauggggcaagucaaucagggaaaccacaugaugggccagcggcaaauucccccguaccgcccuccccagcaggggcccccucagcaauauucuggccaggaggauuacuacggagaccaguauagccauggcgggcagggaccgcccgaaggcaugaaucaacaguacuauccugaugggaacucccaguacggccagcaacaggacgcuuaucagggacccccuccccaacagggcuacccuccccagcagcaacaguauccggggcagcagggauacccuggccaacagcagggguacggacccagccagggcgggccuggcccccaauauccgaauuacccucagggacagggccagcaauaugggggauacagacccacccagccuggcccuccccagcccccgcaacagcggcccuauggguacgaucagaucaugccuaagaaacccgccgaggacgaaaacgauucuaagggaguguccgaggcgagcggcccucagaaugacgggaagcaacugcaucccccuggcaaagccaacaucucugagaagauuaauaaacgcagcggaccgaagagaggcaaacacgcuuggacacaccggcuccgcgaaagaaagcagcugguuaucuaugaggaaauuuccgaucccgaggaggacgacgaauga

SEQ ID NO: 3590 - protein, 488 aa, Artificial Sequence
  SYT-SSX-2__Homo_sapiens__A4PIV9
MSVAFAAPRQRGKGEITPAAIQKMLDDNNHLIQCIMDSQNKGKTSECSQYQQMLHTNLVYLATIADSNQNMQSLLPAPPTQNMPMGPGGMNQSGPPPPPRSHNMPSDGMVGGGPPAPHMQNQMNGQMPGPNHMPMQGPGPNQLNMTNSSMNMPSSSHGSMGGYNHSVPSSQSMPVQNQMTMSQGQPMGNYGPRPNMSMQPNQGPMMHQQPPSQQYNMPQGGGQHYQGQQPPMGMMGQVNQGNHMMGQRQIPPYRPPQQGPPQQYSGQEDYYGDQYSHGGQGPPEGMNQQYYPDGHNDYGYQQPSYPEQGYDRPYEDSSQHYYEGGNSQYGQQQDAYQGPPPQQGYPPQQQQYPGQQGYPGQQQGYGPSQGGPGPQYPNYPQGQGQQYGGYRPTQPGPPQPPQQRPYGYDQIMPKKPAEEGNDSEEVPEASGPQNDGKELCPPGKPTTSEKIHERSGPKRGEHAWTHRLRERKQLVIYEEISDPEEDDE

SEQ ID NO: 3591 - RNA, 1467 nt, Artificial Sequence
  SYT-SSX-2__Homo_sapiens__BAF56183
augucuguggcuuucgcggccccgaggcagcgaggcaagggggagaucacucccgcugcgauucagaagauguuggaugacaauaaccaucuuauucaguguauaauggacucucagaauaaaggaaagaccucagaguguucucaguaucagcagauguugcacacaaacuugguauaccuugcuacaauagcagauucuaaucaaaauaugcagucucuuuuaccagcaccacccacacagaauaugccuauggguccuggagggaugaaucagagcggcccucccccaccuccacgcucucacaacaugccuucagauggaaugguagguggggguccuccugcaccgcacaugcagaaccagaugaacggccagaugccugggccuaaccauaugccuaugcagggaccuggacccaaucaacucaauaugacaaacaguuccaugaauaugccuucaaguagccauggauccaugggagguuacaaccauucugugccaucaucgcagagcaugccaguacagaaucagaugacaaugagucagggacaaccaaugggaaacuauggucccagaccaaauaugaguaugcagccaaaccaagguccaaugaugcaucagcagccuccuucucagcaauacaauaugccacagggaggcggacagcauuaccaaggacagcagccaccuauggggaugaugggucaaguuaaccaaggcaaucauaugaugggucagagacagauuccucccuauagaccuccucaacagggcccaccacagcaguacucaggccaggaagacuauuacggggaccaauacagucaugguggacaagguccuccagaaggcaugaaccagcaauauuacccugauggucauaaugauuacgguuaucagcaaccgucguauccugaacaaggcuacgauaggccuuaugaggauuccucacaacauuacuacgaaggaggaaauucacaguauggccaacagcaagaugcauaccagggaccaccuccacaacagggauauccaccccagcagcagcaguacccagggcagcaagguuacccaggacagcagcagggcuacgguccuucacagggugguccagguccucaguauccuaacuacccacagggacaaggucagcaguauggaggauauagaccaacacagccuggaccaccacagccaccccagcagaggccuuauggauaugaccagaucaugcccaagaagccagcagaggaaggaaaugauucggaggaagugccagaagcaucuggcccacaaaaugaugggaaagagcugugccccccgggaaaaccaacuaccucugagaagauucacgagagaucuggacccaaaaggggggaacaugccuggacccacagacugcgugagagaaaacagcuggugauuuaugaagagaucagcgacccugaggaagaugacgaguaa

SEQ ID NO: 3592 - RNA, 1467 nt, Artificial Sequence
  derived and/or modified sequence opt1 from SYT-SSX-2__Homo_sapiens__BAF56183
augagcguggccuucgccgcgccccgccagcggggcaagggggagaucaccccggccgccauccagaagaugcuggacgacaacaaccaccucauccagugcaucauggacucccagaacaagggcaagaccagcgagugcucccaguaccagcagaugcugcacacgaaccuggucuaccucgccaccaucgccgacagcaaccagaacaugcagucccugcugcccgcgccccccacccagaacaugccgauggggcccggcgggaugaaccagagcggcccccccccgcccccccgcucccacaacaugcccagcgacggcaugguggggggcgggccgcccgccccccacaugcagaaccagaugaacggccagaugcccgggccgaaccacaugcccaugcagggccccggccccaaccagcucaacaugaccaacuccagcaugaacaugccguccagcucccacgggagcaugggcggguacaaccacuccgugcccagcucccagagcaugcccguccagaaccagaugacgaugucccagggccagcccaugggcaacuacgggccgcggcccaacaugagcaugcagcccaaccagggccccaugaugcaccagcagccgcccagccagcaguacaacaugccccaggggggcgggcagcacuaccagggccagcagccgcccaugggcaugauggggcaggugaaccagggcaaccacaugauggggcagcgccagaucccccccuaccggccgccccagcagggccccccccagcaguacuccgggcaggaggacuacuacggcgaccaguacagccacggcgggcagggcccgcccgaggggaugaaccagcaguacuaccccgacggccacaacgacuacggguaccagcagcccuccuacccggagcagggcuacgaccgccccuacgaggacagcucccagcacuacuacgagggcgggaacagccaguacggccagcagcaggacgccuaccaggggccccccccgcagcagggcuaccccccccagcagcagcaguaccccggccagcagggguacccgggccagcagcagggguacggccccucccaggggggccccggcccccaguacccgaacuacccccaggggcagggccagcaguacgggggcuaccggcccacccagccggggcccccccagcccccgcagcagcgccccuacggcuacgaccagaucaugcccaagaagcccgccgaggagggcaacgacagcgaggaggugccggaggcguccgggccccagaacgacggcaaggagcugugcccccccgggaagccgaccaccagcgagaagauccacgagcgguccggccccaagcgcggggagcacgccuggacgcaccggcugcgcgagcggaagcagcucgucaucuacgaggagaucagcgaccccgaggaggacgacgaguga

SEQ ID NO: 3593 - RNA, 1467 nt, Artificial Sequence
  derived and/or modified sequence opt2 from SYT-SSX-2__Homo_sapiens__BAF56183
auguccgucgccuucgccgccccccgccagcgcggcaagggcgagaucacccccgccgccauccagaagaugcucgacgacaacaaccaccucauccagugcaucauggacucccagaacaagggcaagaccuccgagugcucccaguaccagcagaugcuccacaccaaccucgucuaccucgccaccaucgccgacuccaaccagaacaugcagucccuccuccccgccccccccacccagaacaugcccaugggccccggcggcaugaaccaguccggcccccccccccccccccgcucccacaacaugcccuccgacggcauggucggcggcggcccccccgccccccacaugcagaaccagaugaacggccagaugcccggccccaaccacaugcccaugcagggccccggccccaaccagcucaacaugaccaacuccuccaugaacaugcccuccuccucccacggcuccaugggcggcuacaaccacuccguccccuccucccaguccaugcccguccagaaccagaugaccaugucccagggccagcccaugggcaacuacggcccccgccccaacauguccaugcagcccaaccagggccccaugaugcaccagcagccccccucccagcaguacaacaugccccagggcggcggccagcacuaccagggccagcagccccccaugggcaugaugggccaggucaaccagggcaaccacaugaugggccagcgccagaucccccccuaccgccccccccagcagggccccccccagcaguacuccggccaggaggacuacuacggcgaccaguacucccacggcggccagggcccccccgagggcaugaaccagcaguacuaccccgacggccacaacgacuacggcuaccagcagcccuccuaccccgagcagggcuacgaccgccccuacgaggacuccucccagcacuacuacgagggcggcaacucccaguacggccagcagcaggacgccuaccagggcccccccccccagcagggcuaccccccccagcagcagcaguaccccggccagcagggcuaccccggccagcagcagggcuacggccccucccagggcggccccggcccccaguaccccaacuacccccagggccagggccagcaguacggcggcuaccgccccacccagcccggccccccccagcccccccagcagcgccccuacggcuacgaccagaucaugcccaagaagcccgccgaggagggcaacgacuccgaggagguccccgaggccuccggcccccagaacgacggcaaggagcucugcccccccggcaagcccaccaccuccgagaagauccacgagcgcuccggccccaagcgcggcgagcacgccuggacccaccgccuccgcgagcgcaagcagcucgucaucuacgaggagaucuccgaccccgaggaggacgacgaguga

SEQ ID NO: 3594 - RNA, 1467 nt, Artificial Sequence
  derived and/or modified sequence opt3 from SYT-SSX-2__Homo_sapiens__BAF56183
augagcguggccuucgcugcacccagacagaggggcaagggggagaucaccccugccgcgauucagaaaaugcuggacgauaacaaucaccucauacaaugcaucauggacucccagaacaagggaaaaacaucugaaugcucacaguaccaacagaugcuucauacuaaucuggucuauuuggcuacgauugccgauaguaaccagaauaugcagagcuuacugccagcaccgcccacccaaaacaugccuauggguccaggcgggaugaaucaguccggacccccuccacccccucggucucacaacaugccaucggacggcaugguuggugggggaccgcccgccccucauaugcagaaucagaugaacggccaaaugccaggccccaaucacaugccuaugcaggggccaggacccaaccagcuaaauaugacaaacucaagcaugaauaugccgaguuccucucaugguagcaugggcggguacaaccacuccgugccuucaagucaaagcaugcccguacagaaccagaugacuaugucucagggacaaccaaugggcaauuaugguccucgccccaacauguccaugcagccaaaucaggggcccaugaugcaccagcaaccuccaucacagcaguacaacaugccgcagggaggcggccaacauuaucaggggcagcagcccccuaugggaaugaugggucaagugaaucagggcaaccacaugauggggcagcgacaaaucccacccuaccguccuccacagcagggacccccgcagcaauauagcggccaggaggauuacuacggugaccaguauagucaugggggccagggaccuccagaaggcaugaaucaacaguacuaucccgaugggcacaacgacuacggauaucagcagccuucuuaccccgagcaagguuaugauagaccauacgaagacuccagccagcacuacuaugagggcggaaauucgcaguacgggcaacagcaggaugcuuaucagggcccucccccacaacaggguuacccgccucagcagcaacaguaucccgggcagcagggcuacccaggacaacagcagggcuaugggcccucucagggagguccuggcccacaauaccccaacuacccucaggggcagggacaacaguauggcgguuacaggccgacccagccagggcccccucagccaccccaacagcggccuuauggcuacgaccagauuaugccgaagaaacccgcagaggaaggaaaugauuccgaggaagucccagaggccucaggcccucagaacgacgggaaggagcucugucccccaggaaagccuacaaccagugagaaaauccaugaacgcagcggccccaagagaggugaacacgcuuggacucauaggcugcgggagcgcaaacaacuugugauauaugaagagaucuccgacccagaggaagaugacgaguga

SEQ ID NO: 3595 - RNA, 1467 nt, Artificial Sequence
  derived and/or modified sequence opt4 from SYT-SSX-2__Homo_sapiens__BAF56183
augagcguggccuucgccgcccccagacagagaggcaagggcgagaucacccccgccgccauccagaagaugcuggacgacaacaaccaccugauccagugcaucauggacagccagaacaagggcaagaccagcgagugcagccaguaccagcagaugcugcacaccaaccugguguaccuggccaccaucgccgacagcaaccagaacaugcagagccugcugcccgccccccccacccagaacaugcccaugggccccggcggcaugaaccagagcggccccccccccccccccagaagccacaacaugcccagcgacggcauggugggcggcggcccccccgccccccacaugcagaaccagaugaacggccagaugcccggccccaaccacaugcccaugcagggccccggccccaaccagcugaacaugaccaacagcagcaugaacaugcccagcagcagccacggcagcaugggcggcuacaaccacagcgugcccagcagccagagcaugcccgugcagaaccagaugaccaugagccagggccagcccaugggcaacuacggccccagacccaacaugagcaugcagcccaaccagggccccaugaugcaccagcagccccccagccagcaguacaacaugccccagggcggcggccagcacuaccagggccagcagccccccaugggcaugaugggccaggugaaccagggcaaccacaugaugggccagagacagaucccccccuacagacccccccagcagggccccccccagcaguacagcggccaggaggacuacuacggcgaccaguacagccacggcggccagggcccccccgagggcaugaaccagcaguacuaccccgacggccacaacgacuacggcuaccagcagcccagcuaccccgagcagggcuacgacagacccuacgaggacagcagccagcacuacuacgagggcggcaacagccaguacggccagcagcaggacgccuaccagggcccccccccccagcagggcuaccccccccagcagcagcaguaccccggccagcagggcuaccccggccagcagcagggcuacggccccagccagggcggccccggcccccaguaccccaacuacccccagggccagggccagcaguacggcggcuacagacccacccagcccggccccccccagcccccccagcagagacccuacggcuacgaccagaucaugcccaagaagcccgccgaggagggcaacgacagcgaggaggugcccgaggccagcggcccccagaacgacggcaaggagcugugcccccccggcaagcccaccaccagcgagaagauccacgagagaagcggccccaagagaggcgagcacgccuggacccacagacugagagagagaaagcagcuggugaucuacgaggagaucagcgaccccgaggaggacgacgaguga

SEQ ID NO: 3596 - RNA, 1467 nt, Artificial Sequence
  derived and/or modified sequence opt5 from SYT-SSX-2__Homo_sapiens__BAF56183
augagcguggccuucgcugcccccagacagcggggcaagggggagaucaccccugcggcuauucagaaaaugcuggacgauaacaaucaccucauccaaugcauuauggacucccagaacaagggaaaaacaucugaauguagccaguaccaacagaugcugcauacgaaucuugucuaucuggccaccaucgccgauuccaaccagaauaugcagucucuccugccggcucccccuacacaaaacaugcccaugggcccugggggaaugaaucagagcgggcccccuccgcccccucgcucccacaacaugcccucugacgggaugguuggaggcggcccucccgccccgcauaugcagaaucagaugaacgggcaaaugccuggacccaaucacaugccuaugcagggccccgggcccaaccagcuuaauaugaccaacagcuccaugaauaugccuucuagcucccauggaagcaugggcggguacaaccacucugugccguccagccaaucuaugcccgugcagaaccagaugacaaugucccagggacaaccuaugggcaauuauggccccagaccuaacaugagcaugcagcccaaucaggggccgaugaugcaccagcaaccucccucccagcaguacaacaugccucagggaggcgggcaacauuaucagggacagcagcccccuaugggcaugauggggcaagucaaucagggaaaccacaugaugggccagcggcaaauucccccguaccgcccuccccagcaggggcccccucagcaauauucugggcaggaggauuacuacggagaccaguauagccauggcgggcagggaccgcccgaaggcaugaaucaacaguacuauccugaugggcacaacgacuacggcuaucagcagcccuccuacccugagcaaggauaugauagacccuacgaagacagcucucagcacuacuaugagggcggcaauucccaguacggacaacagcaggaugcuuaucagggcccucccccgcaacagggguacccuccccagcagcaacaguauccuggacagcagggcuaccccgggcaacagcagggcuauggaccgagccagggcgggccuggaccccaauacccuaacuacccccagggccaggggcaacaguauggaggcuaccggcccacccagccugggccgccccagccuccccaacagcgcccuuauggcuacgaccagaucaugcccaagaaaccugccgaggaaggaaaugauucugaggaagugccggaggcgagcggcccccagaacgacgggaaggagcugugcccucccggaaagccuacaaccuccgagaaaauccaugaaagaucuggccccaagcggggcgaacacgccuggacgcaucgccucagagagcggaaacaacugguuauuuaugaagagaucagcgacccggaggaagaugacgaguga

SEQ ID NO: 3597 - protein, 457 aa, Artificial Sequence
  SYT-SSX-2__Homo_sapiens__A4PIW0
MSVAFAAPRQRGKGEITPAAIQKMLDDNNHLIQCIMDSQNKGKTSECSQYQQMLHTNLVYLATIADSNQNMQSLLPAPPTQNMPMGPGGMNQSGPPPPPRSHNMPSDGMVGGGPPAPHMQNQMNGQMPGPNHMPMQGPGPNQLNMTNSSMNMPSSSHGSMGGYNHSVPSSQSMPVQNQMTMSQGQPMGNYGPRPNMSMQPNQGPMMHQQPPSQQYNMPQGGGQHYQGQQPPMGMMGQVNQGNHMMGQRQIPPYRPPQQGPPQQYSGQEDYYGDQYSHGGQGPPEGMNQQYYPDGNSQYGQQQDAYQGPPPQQGYPPQQQQYPGQQGYPGQQQGYGPSQGGPGPQYPNYPQGQGQQYGGYRPTQPGPPQPPQQRPYGYDQIMPKKPAEEGNDSEEVPEASGPQNDGKELCPPGKPTTSEKIHERSGPKRGEHAWTHRLRERKQLVIYEEISDPEEDDE

SEQ ID NO: 3598 - RNA, 1374 nt, Artificial Sequence
  SYT-SSX-2__Homo_sapiens__BAF56184
augucuguggcuuucgcggccccgaggcagcgaggcaagggggagaucacucccgcugcgauucagaagauguuggaugacaauaaccaucuuauucaguguauaauggacucucagaauaaaggaaagaccucagaguguucucaguaucagcagauguugcacacaaacuugguauaccuugcuacaauagcagauucuaaucaaaauaugcagucucuuuuaccagcaccacccacacagaauaugccuauggguccuggagggaugaaucagagcggcccucccccaccuccacgcucucacaacaugccuucagauggaaugguagguggggguccuccugcaccgcacaugcagaaccagaugaacggccagaugccugggccuaaccauaugccuaugcagggaccuggacccaaucaacucaauaugacaaacaguuccaugaauaugccuucaaguagccauggauccaugggagguuacaaccauucugugccaucaucgcagagcaugccaguacagaaucagaugacaaugagucagggacaaccaaugggaaacuauggucccagaccaaauaugaguaugcagccaaaccaagguccaaugaugcaucagcagccuccuucucagcaauacaauaugccacagggaggcggacagcauuaccaaggacagcagccaccuauggggaugaugggucaaguuaaccaaggcaaucauaugaugggucagagacagauuccucccuauagaccuccucaacagggcccaccacagcaguacucaggccaggaagacuauuacggggaccaauacagucaugguggacaagguccuccagaaggcaugaaccagcaauauuacccugauggaaauucacaguauggccaacagcaagaugcauaccagggaccaccuccacaacagggauauccaccccagcagcagcaguacccagggcagcaagguuacccaggacagcagcagggcuacgguccuucacagggugguccagguccucaguauccuaacuacccacagggacaaggucagcaguauggaggauauagaccaacacagccuggaccaccacagccaccccagcagaggccuuauggauaugaccagaucaugcccaagaagccagcagaggaaggaaaugauucggaggaagugccagaagcaucuggcccacaaaaugaugggaaagagcugugccccccgggaaaaccaacuaccucugagaagauucacgagagaucuggacccaaaaggggggaacaugccuggacccacagacugcgugagagaaaacagcuggugauuuaugaagagaucagcgacccugaggaagaugacgaguaa

SEQ ID NO: 3599 - RNA, 1374 nt, Artificial Sequence
  derived and/or modified sequence opt1 from SYT-SSX-2__Homo_sapiens__BAF56184
augagcguggccuucgccgcgccccgccagcggggcaagggggagaucaccccggccgccauccagaagaugcuggacgacaacaaccaccucauccagugcaucauggacucccagaacaagggcaagaccagcgagugcucccaguaccagcagaugcugcacacgaaccuggucuaccucgccaccaucgccgacagcaaccagaacaugcagucccugcugcccgcgccccccacccagaacaugccgauggggcccggcgggaugaaccagagcggcccccccccgcccccccgcucccacaacaugcccagcgacggcaugguggggggcgggccgcccgccccccacaugcagaaccagaugaacggccagaugcccgggccgaaccacaugcccaugcagggccccggccccaaccagcucaacaugaccaacuccagcaugaacaugccguccagcucccacgggagcaugggcggguacaaccacuccgugcccagcucccagagcaugcccguccagaaccagaugacgaugucccagggccagcccaugggcaacuacgggccgcggcccaacaugagcaugcagcccaaccagggccccaugaugcaccagcagccgcccagccagcaguacaacaugccccaggggggcgggcagcacuaccagggccagcagccgcccaugggcaugauggggcaggugaaccagggcaaccacaugauggggcagcgccagaucccccccuaccggccgccccagcagggccccccccagcaguacuccgggcaggaggacuacuacggcgaccaguacagccacggcgggcagggcccgcccgaggggaugaaccagcaguacuaccccgacggcaacucccaguacgggcagcagcaggacgccuaccagggccccccgccccagcagggcuaccccccccagcagcagcaguacccggggcagcagggcuaccccgggcagcagcagggcuacggccccagccaggggggccccgggccgcaguaccccaacuacccccagggccaggggcagcaguacggcggcuaccgccccacccagccggggcccccccagccgccccagcagcggcccuacggcuacgaccagaucaugcccaagaagccggccgaggaggggaacgacuccgaggaggugcccgaggcgagcggcccccagaacgacgggaaggagcugugccccccgggcaagcccaccaccuccgagaagauccacgagcgcagcggccccaagcggggggagcacgccuggacgcaccgccugcgggagcgcaagcagcucgucaucuacgaggagaucuccgaccccgaggaggacgacgaguga

SEQ ID NO: 3600 - RNA, 1374 nt, Artificial Sequence
  derived and/or modified sequence opt2 from SYT-SSX-2__Homo_sapiens__BAF56184
auguccgucgccuucgccgccccccgccagcgcggcaagggcgagaucacccccgccgccauccagaagaugcucgacgacaacaaccaccucauccagugcaucauggacucccagaacaagggcaagaccuccgagugcucccaguaccagcagaugcuccacaccaaccucgucuaccucgccaccaucgccgacuccaaccagaacaugcagucccuccuccccgccccccccacccagaacaugcccaugggccccggcggcaugaaccaguccggcccccccccccccccccgcucccacaacaugcccuccgacggcauggucggcggcggcccccccgccccccacaugcagaaccagaugaacggccagaugcccggccccaaccacaugcccaugcagggccccggccccaaccagcucaacaugaccaacuccuccaugaacaugcccuccuccucccacggcuccaugggcggcuacaaccacuccguccccuccucccaguccaugcccguccagaaccagaugaccaugucccagggccagcccaugggcaacuacggcccccgccccaacauguccaugcagcccaaccagggccccaugaugcaccagcagccccccucccagcaguacaacaugccccagggcggcggccagcacuaccagggccagcagccccccaugggcaugaugggccaggucaaccagggcaaccacaugaugggccagcgccagaucccccccuaccgccccccccagcagggccccccccagcaguacuccggccaggaggacuacuacggcgaccaguacucccacggcggccagggcccccccgagggcaugaaccagcaguacuaccccgacggcaacucccaguacggccagcagcaggacgccuaccagggcccccccccccagcagggcuaccccccccagcagcagcaguaccccggccagcagggcuaccccggccagcagcagggcuacggccccucccagggcggccccggcccccaguaccccaacuacccccagggccagggccagcaguacggcggcuaccgccccacccagcccggccccccccagcccccccagcagcgccccuacggcuacgaccagaucaugcccaagaagcccgccgaggagggcaacgacuccgaggagguccccgaggccuccggcccccagaacgacggcaaggagcucugcccccccggcaagcccaccaccuccgagaagauccacgagcgcuccggccccaagcgcggcgagcacgccuggacccaccgccuccgcgagcgcaagcagcucgucaucuacgaggagaucuccgaccccgaggaggacgacgaguga

SEQ ID NO: 3601 - RNA, 1374 nt, Artificial Sequence
  derived and/or modified sequence opt3 from SYT-SSX-2__Homo_sapiens__BAF56184
augagcguggccuucgcugcacccagacagaggggcaagggggagaucaccccugccgcgauucagaaaaugcuggacgauaacaaucaccucauacaaugcaucauggacucccagaacaagggaaaaacaucugaaugcucacaguaccaacagaugcuucauacuaaucuggucuauuuggcuacgauugccgauaguaaccagaauaugcagagcuuacugccagcaccgcccacccaaaacaugccuauggguccaggcgggaugaaucaguccggacccccuccacccccucggucucacaacaugccaucggacggcaugguuggugggggaccgcccgccccucauaugcagaaucagaugaacggccaaaugccaggccccaaucacaugccuaugcaggggccaggacccaaccagcuaaauaugacaaacucaagcaugaauaugccgaguuccucucaugguagcaugggcggguacaaccacuccgugccuucaagucaaagcaugcccguacagaaccagaugacuaugucucagggacaaccaaugggcaauuaugguccucgccccaacauguccaugcagccaaaucaggggcccaugaugcaccagcaaccuccaucacagcaguacaacaugccgcagggaggcggccaacauuaucaggggcagcagcccccuaugggaaugaugggucaagugaaucagggcaaccacaugauggggcagcgacaaaucccacccuaccguccuccacagcagggacccccgcagcaauauagcggccaggaggauuacuacggugaccaguauagucaugggggccagggaccuccagaaggcaugaaucaacaguacuaucccgaugggaacucucaguacggacagcaacaggacgcuuaucaggguccucccccacaacagggcuacccuccccagcagcaacaguauccagggcagcagggauacccgggccaacagcaggguuacgggccuucccagggcggacccggcccacaauaucccaauuacccucaggggcagggacagcaauaugguggcuacagaccaacccagcccgggccuccgcagccaccccaacagaggccuuauggauacgaucagauuaugccaaagaaacccgcagaggaaggcaacgacagcgaggaggucccugaagccucggguccgcagaaugaugggaaggagcucugucccccaggcaagccuacaaccucugagaaaauccacgaacgguccggacccaagcgcggcgagcacgcuuggacucauagacugagggaacggaaacaacuugugauauaugaggaaaucucagacccagaggaagaugacgaguga

SEQ ID NO: 3602 - RNA, 1374 nt, Artificial Sequence
  derived and/or modified sequence opt4 from SYT-SSX-2__Homo_sapiens__BAF56184
augagcguggccuucgccgcccccagacagagaggcaagggcgagaucacccccgccgccauccagaagaugcuggacgacaacaaccaccugauccagugcaucauggacagccagaacaagggcaagaccagcgagugcagccaguaccagcagaugcugcacaccaaccugguguaccuggccaccaucgccgacagcaaccagaacaugcagagccugcugcccgccccccccacccagaacaugcccaugggccccggcggcaugaaccagagcggccccccccccccccccagaagccacaacaugcccagcgacggcauggugggcggcggcccccccgccccccacaugcagaaccagaugaacggccagaugcccggccccaaccacaugcccaugcagggccccggccccaaccagcugaacaugaccaacagcagcaugaacaugcccagcagcagccacggcagcaugggcggcuacaaccacagcgugcccagcagccagagcaugcccgugcagaaccagaugaccaugagccagggccagcccaugggcaacuacggccccagacccaacaugagcaugcagcccaaccagggccccaugaugcaccagcagccccccagccagcaguacaacaugccccagggcggcggccagcacuaccagggccagcagccccccaugggcaugaugggccaggugaaccagggcaaccacaugaugggccagagacagaucccccccuacagacccccccagcagggccccccccagcaguacagcggccaggaggacuacuacggcgaccaguacagccacggcggccagggcccccccgagggcaugaaccagcaguacuaccccgacggcaacagccaguacggccagcagcaggacgccuaccagggcccccccccccagcagggcuaccccccccagcagcagcaguaccccggccagcagggcuaccccggccagcagcagggcuacggccccagccagggcggccccggcccccaguaccccaacuacccccagggccagggccagcaguacggcggcuacagacccacccagcccggccccccccagcccccccagcagagacccuacggcuacgaccagaucaugcccaagaagcccgccgaggagggcaacgacagcgaggaggugcccgaggccagcggcccccagaacgacggcaaggagcugugcccccccggcaagcccaccaccagcgagaagauccacgagagaagcggccccaagagaggcgagcacgccuggacccacagacugagagagagaaagcagcuggugaucuacgaggagaucagcgaccccgaggaggacgacgaguga

SEQ ID NO: 3603 - RNA, 1374 nt, Artificial Sequence
  derived and/or modified sequence opt5 from SYT-SSX-2__Homo_sapiens__BAF56184
augagcguggccuucgcugcccccagacagcggggcaagggggagaucaccccugcggcuauucagaaaaugcuggacgauaacaaucaccucauccaaugcauuauggacucccagaacaagggaaaaacaucugaauguagccaguaccaacagaugcugcauacgaaucuugucuaucuggccaccaucgccgauuccaaccagaauaugcagucucuccugccggcucccccuacacaaaacaugcccaugggcccugggggaaugaaucagagcgggcccccuccgcccccucgcucccacaacaugcccucugacggcaugguuggaggcggcccucccgccccgcauaugcagaaucagaugaacgggcaaaugccuggacccaaucacaugccuaugcagggccccgggcccaaccagcuuaauaugaccaacagcuccaugaauaugccuucuagcucccauggaagcaugggcggguacaaccacucugugccguccagccaaucuaugcccgugcagaaccagaugacaaugucccagggacaaccuaugggcaauuauggccccagaccuaacaugagcaugcagcccaaucaggggccgaugaugcaccagcaaccucccucccagcaguacaacaugccucagggaggcgggcaacauuaucagggacagcagcccccuaugggcaugauggggcaagucaaucagggaaaccacaugaugggccagcggcaaauucccccguaccgcccuccccagcaggggcccccucagcaauauucuggccaggaggauuacuacggagaccaguauagccauggcgggcagggaccgcccgaaggcaugaaucaacaguacuauccugaugggaacucccaguacggccagcaacaggacgcuuaucagggacccccuccccaacagggcuacccuccccagcagcaacaguauccggggcagcagggauacccuggccaacagcagggguacggacccagccagggcgggccuggcccccaauauccgaauuacccucagggacagggccagcaauaugggggauacagacccacccagccuggcccuccccagcccccgcaacagcggcccuauggguacgaucagaucaugccuaagaaacccgccgaggaaggaaacgacucugaggaggugccugaagcguccggcccccagaaugaugggaaggagcugugcccuccgggcaagcccacaaccagcgagaaaauccacgaacgcucuggaccuaagagaggcgagcacgccuggacgcaucggcuccgcgaaagaaaacaacugguuauuuaugaggaaaucagcgaccccgaggaagaugacgaguga

SEQ ID NO: 3604 - protein, 111 aa, Artificial Sequence
  TARP__Homo_sapiens__Q0VGM3
MKTNDTYMKFSWLTVPEKSLDKEHRCIVRHENNKNGVDQEIIFPPIKTDVITMDPKDNCSKDANDTLLLQLTNTSAYYMYLLLLLKSVVYFAIITCCLLRRTAFCCNGEKS

SEQ ID NO: 3605 - RNA, 336 nt, Artificial Sequence
  TARP__Homo_sapiens__AAI05590
augaagacuaacgacacauacaugaaauuuagcugguuaacggugccagaaaagucacuggacaaagaacacagauguaucgucagacaugagaauaauaaaaacggaguugaucaagaaauuaucuuuccuccaauaaagacagaugucaucacaauggaucccaaagacaauuguucaaaagaugcaaaugauacacuacugcugcagcucacaaacaccucugcauauuacauguaccuccuccugcuccucaagaguguggucuauuuugccaucaucaccugcugucugcuuagaagaacggcuuucugcugcaauggagagaaaucauaa

SEQ ID NO: 3606 - RNA, 336 nt, Artificial Sequence
  derived and/or modified sequence opt1 from TARP__Homo_sapiens__AAI05590
augaagaccaacgacaccuacaugaaguucagcuggcugaccgugcccgagaagucccucgacaaggagcaccgcugcaucguccggcacgagaacaacaagaacggcguggaccaggagaucaucuucccgcccaucaagaccgacgugaucaccauggaccccaaggacaacugcagcaaggacgccaacgacacccugcugcuccagcugacgaacaccuccgccuacuacauguaccugcuccugcugcucaagagcgucguguacuucgcgaucaucacgugcugccugcugcgccggaccgccuucugcugcaacggggagaaguccuga

SEQ ID NO: 3607 - RNA, 336 nt, Artificial Sequence
  derived and/or modified sequence opt2 from TARP__Homo_sapiens__AAI05590
augaagaccaacgacaccuacaugaaguucuccuggcucaccguccccgagaagucccucgacaaggagcaccgcugcaucguccgccacgagaacaacaagaacggcgucgaccaggagaucaucuucccccccaucaagaccgacgucaucaccauggaccccaaggacaacugcuccaaggacgccaacgacacccuccuccuccagcucaccaacaccuccgccuacuacauguaccuccuccuccuccucaaguccgucgucuacuucgccaucaucaccugcugccuccuccgccgcaccgccuucugcugcaacggcgagaaguccuga

SEQ ID NO: 3608 - RNA, 336 nt, Artificial Sequence
  derived and/or modified sequence opt3 from TARP__Homo_sapiens__AAI05590
augaagaccaacgacacauacaugaaauucagcuggcugacugugcccgagaagucccucgauaaagagcacagaugcaucgucaggcaugagaauaacaagaauggcguugaccaggaaauuauauuuccuccaaucaaaacggaugugauuaccauggacccgaaggauaacuguucuaaggacgccaaugauacacuucuguugcaauuaacuaacaccucagcuuauuacauguaucugcuacuccugcuuaaaaguguaguguacuucgcaaucauuacaugcugucuguugcggcgcaccgccuuuugcuguaauggggaaaagagcuga

SEQ ID NO: 3609 - RNA, 336 nt, Artificial Sequence
  derived and/or modified sequence opt4 from TARP__Homo_sapiens__AAI05590
augaagaccaacgacaccuacaugaaguucagcuggcugaccgugcccgagaagagccuggacaaggagcacagaugcaucgugagacacgagaacaacaagaacggcguggaccaggagaucaucuucccccccaucaagaccgacgugaucaccauggaccccaaggacaacugcagcaaggacgccaacgacacccugcugcugcagcugaccaacaccagcgccuacuacauguaccugcugcugcugcugaagagcgugguguacuucgccaucaucaccugcugccugcugagaagaaccgccuucugcugcaacggcgagaagagcuga

SEQ ID NO: 3610 - RNA, 336 nt, Artificial Sequence
  derived and/or modified sequence opt5 from TARP__Homo_sapiens__AAI05590
augaagaccaacgacacauacaugaaauucagcuggcugacggugcccgagaagucccucgauaaagaacacagaugcaucguccggcaugagaauaacaagaauggcguugaccaggaaauuaucuuuccuccgauuaaaaccgaugugaucacaauggaccccaaggauaacuguucuaaggacgccaaugauacccugcuucugcaacucacaaacaccagcgcuuauuacauguaucugcuucugcuccugaaauccguggucuacuucgccauuaucacaugcugucugcuccgcagaaccgcguuuugcuguaauggggagaagucuuga

SEQ ID NO: 3611 - protein, 58 aa, Artificial Sequence
  TCRg__Homo_sapiens__A2JGV3
MQMFPPSPLFFFLQLLKQSSRRLEHTFVFLRNFSLMLLRYIGKKRRATRFWDPRRGTP

SEQ ID NO: 3612 - RNA, 177 nt, Artificial Sequence
  TCRg__Homo_sapiens__AAG29337
augcagauguuucccccaagcccacuauuuuucuuccuucaauugcugaaacaaagcuccagaaggcuggaacauaccuuugucuucuugagaaauuuuucccugauguuauuaagauacauuggcaagaaaagaagagcaacacgauucugggaucccaggaggggaacaccauga

SEQ ID NO: 3613 - RNA, 177 nt, Artificial Sequence
  derived and/or modified sequence opt1 from TCRg__Homo_sapiens__AAG29337
augcagauguucccgcccagcccccuguucuucuuccuccagcugcugaagcaguccagccgccggcucgagcacaccuucguguuccugcgcaacuucucccugaugcuccugcgguacaucggcaagaagcgccgggccacccgcuucugggacccccggcgcgggacgcccuga

SEQ ID NO: 3614 - RNA, 177 nt, Artificial Sequence
  derived and/or modified sequence opt2 from TCRg__Homo_sapiens__AAG29337
augcagauguucccccccuccccccucuucuucuuccuccagcuccucaagcaguccucccgccgccucgagcacaccuucgucuuccuccgcaacuucucccucaugcuccuccgcuacaucggcaagaagcgccgcgccacccgcuucugggacccccgccgcggcacccccuga

SEQ ID NO: 3615 - RNA, 177 nt, Artificial Sequence
  derived and/or modified sequence opt3 from TCRg__Homo_sapiens__AAG29337
augcagauguuucccccuagcccacuguucuucuuucuccaacuucugaagcaguccucuagaagguuggagcacaccuucguguuuuuacggaacuucucacugaugcuacuccgcuacaucggcaaaaagcgacgugccacaagauuuugggacccgaggcgggggacucccuga

SEQ ID NO: 3616 - RNA, 177 nt, Artificial Sequence
  derived and/or modified sequence opt4 from TCRg__Homo_sapiens__AAG29337
augcagauguucccccccagcccccuguucuucuuccugcagcugcugaagcagagcagcagaagacuggagcacaccuucguguuccugagaaacuucagccugaugcugcugagauacaucggcaagaagagaagagccaccagauucugggaccccagaagaggcacccccuga

SEQ ID NO: 3617 - RNA, 177 nt, Artificial Sequence
  derived and/or modified sequence opt5 from TCRg__Homo_sapiens__AAG29337
augcagauguuucccccuagcccgcuguucuucuuucuccaacugcuuaagcaguccucuagacggcuggagcacaccuucguguuucuccgcaacuucagccugaugcuucugagauacaucggcaaaaagcggcgcgccacaagauuuugggacccccggcgcgggacgccuuga

SEQ ID NO: 3618 - protein, 376 aa, Artificial Sequence
  TF2AA__Homo_sapiens__P52655
MANSANTNTVPKLYRSVIEDVINDVRDIFLDDGVDEQVLMELKTLWENKLMQSRAVDGFHSEEQQLLLQVQQQHQPQQQQHHHHHHHQQAQPQQTVPQQAQTQQVLIPASQQATAPQVIVPDSKLIQHMNASNMSAAATAATLALPAGVTPVQQILTNSGQLLQVVRAANGAQYIFQPQQSVVLQQQVIPQMQPGGVQAPVIQQVLAPLPGGISPQTGVIIQPQQILFTGNKTQVIPTTVAAPTPAQAQITATGQQQPQAQPAQTQAPLVLQVDGTGDTSSEEDEDEEEDYDDDEEEDKEKDGAEDGQVEEEPLNSEDDVSDEEGQELFDTENVVVCQYDKIHRSKNKWKFHLKDGIMNLNGRDYIFSKAIGDAEW

SEQ ID NO: 3619 - RNA, 1131 nt, Artificial Sequence
  TF2AA__Homo_sapiens__AAF26776
auggcgaacucggcaaauacaaacaccgugccuaaauuauacagaucugugauugaagaugucauuaaugaugugagagacaucuuucuggaugauggaguggaugaacaaguacugauggaacuaaaaacuuuaugggaaaacaaacuaaugcaguccagggcaguagauggauuucauucagaagagcagcagcuucuacugcaaguucaacagcagcaucaaccccagcagcagcagcaucaccaccaucaccaucaucagcaagcucagccucagcagacaguaccucagcaagcgcagacccagcagguucuuauuccugcaucacagcaagccacagcaccacaaguuauuguuccagauucuaaguugauacagcauaugaaugcaucaaacaugagugcugcugcuacagcugcuaccuuagcacucccugcaggugugacuccuguucagcagauauuaacaaauucaggccagcuucuucagguggucagagcagccaauggugcccaauauaucuuucagccucagcagucagugguucuacaacaacagguuauaccacaaaugcagccugguggaguacaagcuccuguuauacagcaggugcuggcuccucuuccuggagggauuucaccacagacaggugucaucauccagccucagcaaaucuuauuuacaggaaauaagacucaaguuauaccuacgacaguggcagcaccuacaccagcccaagcacagauaacugcaacuggccagcagcaaccgcaggcccagccugcucaaacacaagcuccauuggucuuacaaguugauggaacuggggauacaucaucugaagaagaugaagaugaagaagaagacuaugaugaugaugaggaggaagacaaagagaaagauggagcugaagaugggcagguggaagaagagccccucaauagugaagaugaugugagugaugaggaaggacaggaacucuuugacacagaaaauguuguuguaugccaauaugauaagauacacagaaguaaaaacaaauggaaauuucaucucaaggauggcauuaugaaucuuaauggaagagauuauauauuuuccaaagccauuggagaugcagaaugguga

SEQ ID NO: 3620 - RNA, 1131 nt, Artificial Sequence
  derived and/or modified sequence opt1 from TF2AA__Homo_sapiens__AAF26776
auggccaacagcgccaacaccaacaccgugcccaagcuguaccgcuccgucaucgaggacgugaucaacgacgugcgggacaucuuccucgacgacggcgucgacgagcagguccugauggagcugaagacgcucugggagaacaagcugaugcagagccgcgcgguggacggguuccacuccgaggagcagcagcugcuccuccaggugcagcagcagcaccagccgcagcagcagcagcaccaccaccaccaccaccaccagcaggcccagccccagcagaccgugccccagcaggcccagacccagcagguccugauccccgccagccagcaggccaccgcgccccaggugaucgugccggacuccaagcugauccagcacaugaacgccagcaacauguccgccgccgcgacggccgccacccuggcccugcccgccggcgugacccccguccagcagauccucaccaacagcgggcagcugcuccagguggugcgggcggccaacggcgcccaguacaucuuccagccgcagcaguccgucgugcugcagcagcaggucaucccccagaugcagcccgggggcgugcaggcccccgugauccagcagguccuggccccgcugcccggcgggaucagcccccagacgggcgugaucauccagccccagcagauccucuucaccgggaacaagacccaggugaucccgaccacgguggcggcccccacccccgcccaggcccagaucaccgccaccggccagcagcagccccaggcgcagccggcccagacgcaggcgccccugguccuccagguggacgggaccggcgacaccuccagcgaggaggacgaggacgaggaggaggacuacgacgacgacgaggaggaggacaaggagaaggacggcgccgaggacgggcaggucgaggaggagccccugaacuccgaggacgacgugagcgacgaggagggccaggagcuguucgacaccgagaacguggucgugugccaguacgacaagauccaccgcuccaagaacaaguggaaguuccaccugaaggacgggaucaugaaccucaacggccgggacuacaucuucagcaaggccaucggcgacgccgagugguga

SEQ ID NO: 3621 - RNA, 1131 nt, Artificial Sequence
  derived and/or modified sequence opt2 from TF2AA__Homo_sapiens__AAF26776
auggccaacuccgccaacaccaacaccguccccaagcucuaccgcuccgucaucgaggacgucaucaacgacguccgcgacaucuuccucgacgacggcgucgacgagcagguccucauggagcucaagacccucugggagaacaagcucaugcagucccgcgccgucgacggcuuccacuccgaggagcagcagcuccuccuccagguccagcagcagcaccagccccagcagcagcagcaccaccaccaccaccaccaccagcaggcccagccccagcagaccgucccccagcaggcccagacccagcagguccucauccccgccucccagcaggccaccgccccccaggucaucguccccgacuccaagcucauccagcacaugaacgccuccaacauguccgccgccgccaccgccgccacccucgcccuccccgccggcgucacccccguccagcagauccucaccaacuccggccagcuccuccaggucguccgcgccgccaacggcgcccaguacaucuuccagccccagcaguccgucguccuccagcagcaggucaucccccagaugcagcccggcggcguccaggcccccgucauccagcagguccucgccccccuccccggcggcaucuccccccagaccggcgucaucauccagccccagcagauccucuucaccggcaacaagacccaggucauccccaccaccgucgccgcccccacccccgcccaggcccagaucaccgccaccggccagcagcagccccaggcccagcccgcccagacccaggccccccucguccuccaggucgacggcaccggcgacaccuccuccgaggaggacgaggacgaggaggaggacuacgacgacgacgaggaggaggacaaggagaaggacggcgccgaggacggccaggucgaggaggagccccucaacuccgaggacgacgucuccgacgaggagggccaggagcucuucgacaccgagaacgucgucgucugccaguacgacaagauccaccgcuccaagaacaaguggaaguuccaccucaaggacggcaucaugaaccucaacggccgcgacuacaucuucuccaaggccaucggcgacgccgagugguga

SEQ ID NO: 3622 - RNA, 1131 nt, Artificial Sequence
  derived and/or modified sequence opt3 from TF2AA__Homo_sapiens__AAF26776
auggccaacagcgcuaauaccaacacagugcccaagcuguacagauccgucaucgaggacguuauuaaugaugugagggacauauuccucgaugacggcguagaugaacaggugcuuauggagcugaaaacuuugugggaaaacaaguuaaugcaaucucgggcagucgacggguuucacucagaggaacagcagcugcuacuccaggugcaacagcagcaucagccucaacagcagcagcaccaucaccaucaccaccaucaacaggcccagccacaacagacgguuccgcagcaggcgcaaacccaacaggugcugauccccgcuagucagcaggccacagcaccucaggucauugugccagauagcaaacuuauccagcacaugaaugccuccaacaugucugcugcagccacugcugccacccuggcguugcccgcaggaguaacaccuguucagcaaauucucaccaauucgggucagcugcuccaggugguccgcgccgcuaacggcgcccaguauaucuuccaaccacagcagucaguggugcuccaacagcaggucauaccccagaugcaaccugggggaguucaggcaccagugauccagcagguauuagcuccgcugcccggcgguauuagcccucaaacuggggugaucauucagccacagcagauccuuuuuacaggaaauaagacccaagucauacccacgacuguggccgcgccuaccccagcccaggcacagauuacagcuacuggccaacagcagccccaggcccaaccggcucagacccaggccccuuugguucuacagguggacggcacaggggauaccaguuccgaggaggacgaagaugaggaagaggacuacgaugacgacgaggaagaggauaaagaaaaggacggagcagaggauggucaagucgaagaggagccccugaacucugaagacgaugugagcgacgaggaaggccaggagcuguucgauacggaaaauguaguugugugccaguaugacaagauccaucgauccaaaaacaaguggaaauuucaccugaaggaugggauuaugaaucuuaacggacgugacuacaucuucucaaaagccaucggcgaugcugagugguga

SEQ ID NO: 3623 - RNA, 1131 nt, Artificial Sequence
  derived and/or modified sequence opt4 from TF2AA__Homo_sapiens__AAF26776
auggccaacagcgccaacaccaacaccgugcccaagcuguacagaagcgugaucgaggacgugaucaacgacgugagagacaucuuccuggacgacggcguggacgagcaggugcugauggagcugaagacccugugggagaacaagcugaugcagagcagagccguggacggcuuccacagcgaggagcagcagcugcugcugcaggugcagcagcagcaccagccccagcagcagcagcaccaccaccaccaccaccaccagcaggcccagccccagcagaccgugccccagcaggcccagacccagcaggugcugauccccgccagccagcaggccaccgccccccaggugaucgugcccgacagcaagcugauccagcacaugaacgccagcaacaugagcgccgccgccaccgccgccacccuggcccugcccgccggcgugacccccgugcagcagauccugaccaacagcggccagcugcugcagguggugagagccgccaacggcgcccaguacaucuuccagccccagcagagcguggugcugcagcagcaggugaucccccagaugcagcccggcggcgugcaggcccccgugauccagcaggugcuggccccccugcccggcggcaucagcccccagaccggcgugaucauccagccccagcagauccuguucaccggcaacaagacccaggugauccccaccaccguggccgcccccacccccgcccaggcccagaucaccgccaccggccagcagcagccccaggcccagcccgcccagacccaggccccccuggugcugcagguggacggcaccggcgacaccagcagcgaggaggacgaggacgaggaggaggacuacgacgacgacgaggaggaggacaaggagaaggacggcgccgaggacggccagguggaggaggagccccugaacagcgaggacgacgugagcgacgaggagggccaggagcuguucgacaccgagaacgugguggugugccaguacgacaagauccacagaagcaagaacaaguggaaguuccaccugaaggacggcaucaugaaccugaacggcagagacuacaucuucagcaaggccaucggcgacgccgagugguga

SEQ ID NO: 3624 - RNA, 1131 nt, Artificial Sequence
  derived and/or modified sequence opt5 from TF2AA__Homo_sapiens__AAF26776
auggccaacagcgcuaauaccaacacagugcccaagcuguacagauccgucaucgaggacguuauuaaugaugugcgggacaucuuccucgaugacggcguggaugaacagguccugauggagcuuaaaacgcugugggaaaacaagcucaugcaaucucgcgccguggacggguuucacagcgaggaacagcagcugcuucugcagguucaacagcagcaucagccucaacagcagcagcaccaucaccaucaccaccaucaacaggcgcagccgcaacagaccgugccccagcaggcucaaacacagcagguccucauuccugccucccagcaagccaccgcuccccaggugaucguuccugauucuaaacugauucagcacaugaaugccagcaacauguccgcugccgcgacagccgcuacccuggcccuccccgcuggagugacaccuguccagcaaauccugaccaauucuggccagcuucuccagguggugagagccgcgaacggggcccaguauaucuuccaaccgcagcagagcgucguucuccaacaacaggugauuccccagaugcagccuggaggcgugcaggcucccgucauccaacaggugcuggccccucuucccgggggaauuuccccgcagacgggcguuaucauucagccucagcagauccuguuuaccggcaauaagacacaagugauucccaccacagucgcugccccuacccccgcccaggcucagaucacggcgacagggcaacagcagccccaggcccaaccugcucagacccaggccccgcucgugcugcagguugacggaacaggcgauaccagcucugaggaggacgaagaugaggaagaggacuacgaugacgacgaggaagaggauaaagaaaaggacggggccgaggauggacaaguggaagaggagccccugaacuccgaagacgaugucagcgacgaggaaggccaggagcuguucgauaccgaaaauguggucgugugccaguaugacaagauccaucggucuaaaaacaaguggaaauuucaccugaaggaugggauuaugaaucuuaacggacgcgacuacaucuucuccaaagcuauuggcgaugccgagugguga

SEQ ID NO: 3625 - protein, 567 aa, Artificial Sequence
  TGFR2__Homo_sapiens__P37173
MGRGLLRGLWPLHIVLWTRIASTIPPHVQKSVNNDMIVTDNNGAVKFPQLCKFCDVRFSTCDNQKSCMSNCSITSICEKPQEVCVAVWRKNDENITLETVCHDPKLPYHDFILEDAASPKCIMKEKKKPGETFFMCSCSSDECNDNIIFSEEYNTSNPDLLLVIFQVTGISLLPPLGVAISVIIIFYCYRVNRQQKLSSTWETGKTRKLMEFSEHCAIILEDDRSDISSTCANNINHNTELLPIELDTLVGKGRFAEVYKAKLKQNTSEQFETVAVKIFPYEEYASWKTEKDIFSDINLKHENILQFLTAEERKTELGKQYWLITAFHAKGNLQEYLTRHVISWEDLRKLGSSLARGIAHLHSDHTPCGRPKMPIVHRDLKSSNILVKNDLTCCLCDFGLSLRLDPTLSVDDLANSGQVGTARYMAPEVLESRMNLENVESFKQTDVYSMALVLWEMTSRCNAVGEVKDYEPPFGSKVREHPCVESMKDNVLRDRGRPEIPSFWLNHQGIQMVCETLTECWDHDPEARLTAQCVAERFSELEHLDRLSGRSCSEEKIPEDGSLNTTK

SEQ ID NO: 3626 - RNA, 1704 nt, Artificial Sequence
  TGFR2__Homo_sapiens__AAT70724
augggucgggggcugcucaggggccuguggccgcugcacaucguccuguggacgcguaucgccagcacgaucccaccgcacguucagaagucgguuaauaacgacaugauagucacugacaacaacggugcagucaaguuuccacaacuguguaaauuuugugaugugagauuuuccaccugugacaaccagaaauccugcaugagcaacugcagcaucaccuccaucugugagaagccacaggaagucuguguggcuguauggagaaagaaugacgagaacauaacacuagagacaguuugccaugaccccaagcuccccuaccaugacuuuauucuggaagaugcugcuucuccaaagugcauuaugaaggaaaaaaaaaagccuggugagacuuucuucauguguuccuguagcucugaugagugcaaugacaacaucaucuucucagaagaauauaacaccagcaauccugacuuguugcuagucauauuucaagugacaggcaucagccuccugccaccacugggaguugccauaucugucaucaucaucuucuacugcuaccgcguuaaccggcagcagaagcugaguucaaccugggaaaccggcaagacgcggaagcucauggaguucagcgagcacugugccaucauccuggaagaugaccgcucugacaucagcuccacgugugccaacaacaucaaccacaacacagagcugcugcccauugagcuggacacccugguggggaaaggucgcuuugcugaggucuauaaggccaagcugaagcagaacacuucagagcaguuugagacaguggcagucaagaucuuucccuaugaggaguaugccucuuggaagacagagaaggacaucuucucagacaucaaucugaagcaugagaacauacuccaguuccugacggcugaggagcggaagacggaguuggggaaacaauacuggcugaucaccgccuuccacgccaagggcaaccuacaggaguaccugacgcggcaugucaucagcugggaggaccugcgcaagcugggcagcucccucgcccgggggauugcucaccuccacagugaucacacuccaugugggaggcccaagaugcccaucgugcacagggaccucaagagcuccaauauccucgugaagaacgaccuaaccugcugccugugugacuuugggcuuucccugcgucuggacccuacucugucuguggaugaccuggcuaacagugggcaggugggaacugcaagauacauggcuccagaaguccuagaauccaggaugaauuuggagaauguugaguccuucaagcagaccgaugucuacuccauggcucuggugcucugggaaaugacaucucgcuguaaugcagugggagaaguaaaagauuaugagccuccauuugguuccaaggugcgggagcaccccugugucgaaagcaugaaggacaacguguugagagaucgagggcgaccagaaauucccagcuucuggcucaaccaccagggcauccagauggugugugagacguugacugagugcugggaccacgacccagaggcccgucucacagcccaguguguggcagaacgcuucagugagcuggagcaucuggacaggcucucggggaggagcugcucggaggagaagauuccugaagacggcucccuaaacacuaccaaauag

SEQ ID NO: 3627 - RNA, 1704 nt, Artificial Sequence
  derived and/or modified sequence opt1 from TGFR2__Homo_sapiens__AAT70724
augggccgcgggcugcuccggggccuguggccccugcacaucgugcucuggacccgcaucgccagcaccaucccgccccacguccagaaguccgugaacaacgacaugaucgugacggacaacaacggggccgucaaguucccccagcugugcaaguucugcgacgugcgguucagcacgugcgacaaccagaaguccugcaugagcaacugcuccaucaccagcaucugcgagaagccccaggaggugugcgucgcgguguggcgcaagaacgacgagaacaucacccuggagaccgugugccacgacccgaagcuccccuaccacgacuucauccuggaggacgccgccucccccaagugcaucaugaaggagaagaagaagcccggcgagaccuucuucaugugcagcugcuccagcgacgagugcaacgacaacaucaucuucuccgaggaguacaacaccagcaacccggaccugcuccuggucaucuuccaggugaccgggaucucccugcucccgccccugggcguggccaucagcgucaucaucaucuucuacugcuaccgggugaaccgccagcagaagcuguccagcacgugggagaccggcaagacccggaagcucauggaguucuccgagcacugcgccaucauccuggaggacgaccgcagcgacaucuccagcacgugcgcgaacaacaucaaccacaacaccgagcugcuccccaucgagcuggacacccugguggggaagggccgguucgccgaggucuacaaggccaagcucaagcagaacaccagcgagcaguucgagaccguggccgugaagaucuuccccuacgaggaguacgcguccuggaagacggagaaggacaucuucagcgacaucaaccugaagcacgagaacauccugcaguuccucaccgccgaggagcgcaagaccgagcuggggaagcaguacuggcugaucaccgccuuccacgccaagggcaaccuccaggaguaccugacgcggcacgucaucuccugggaggaccugcgcaagcucgggagcucccuggcccggggcaucgcgcaccuccacagcgaccacacccccugcggccgccccaagaugcccaucgugcaccgggaccugaaguccagcaacauccuggugaagaacgaccugaccugcugccucugcgacuucgggcugucccugcgccucgacccgacccugagcgucgacgaccuggccaacuccggccagguggggacggcccgguacauggcccccgaggugcucgagagccgcaugaaccuggagaacgucgaguccuucaagcagaccgacguguacagcauggcccugguccucugggagaugaccucccggugcaacgcggugggcgaggugaaggacuacgagccgcccuucggcagcaagguccgcgagcaccccugcguggaguccaugaaggacaacgugcugcgggaccgcgggcgccccgagauccccagcuucuggcugaaccaccagggcauccagauggucugcgagacccucacggagugcugggaccacgaccccgaggcccggcugaccgcccagugcguggccgagcgcuucuccgagcuggagcaccuggaccggcucagcgggcgcagcugcuccgaggagaagaucccggaggacggcagccugaacaccaccaaguga

SEQ ID NO: 3628 - RNA, 1704 nt, Artificial Sequence
  derived and/or modified sequence opt2 from TGFR2__Homo_sapiens__AAT70724
augggccgcggccuccuccgcggccucuggccccuccacaucguccucuggacccgcaucgccuccaccauccccccccacguccagaaguccgucaacaacgacaugaucgucaccgacaacaacggcgccgucaaguucccccagcucugcaaguucugcgacguccgcuucuccaccugcgacaaccagaaguccugcauguccaacugcuccaucaccuccaucugcgagaagccccaggaggucugcgucgccgucuggcgcaagaacgacgagaacaucacccucgagaccgucugccacgaccccaagcuccccuaccacgacuucauccucgaggacgccgccucccccaagugcaucaugaaggagaagaagaagcccggcgagaccuucuucaugugcuccugcuccuccgacgagugcaacgacaacaucaucuucuccgaggaguacaacaccuccaaccccgaccuccuccucgucaucuuccaggucaccggcaucucccuccuccccccccucggcgucgccaucuccgucaucaucaucuucuacugcuaccgcgucaaccgccagcagaagcucuccuccaccugggagaccggcaagacccgcaagcucauggaguucuccgagcacugcgccaucauccucgaggacgaccgcuccgacaucuccuccaccugcgccaacaacaucaaccacaacaccgagcuccuccccaucgagcucgacacccucgucggcaagggccgcuucgccgaggucuacaaggccaagcucaagcagaacaccuccgagcaguucgagaccgucgccgucaagaucuuccccuacgaggaguacgccuccuggaagaccgagaaggacaucuucuccgacaucaaccucaagcacgagaacauccuccaguuccucaccgccgaggagcgcaagaccgagcucggcaagcaguacuggcucaucaccgccuuccacgccaagggcaaccuccaggaguaccucacccgccacgucaucuccugggaggaccuccgcaagcucggcuccucccucgcccgcggcaucgcccaccuccacuccgaccacacccccugcggccgccccaagaugcccaucguccaccgcgaccucaaguccuccaacauccucgucaagaacgaccucaccugcugccucugcgacuucggccucucccuccgccucgaccccacccucuccgucgacgaccucgccaacuccggccaggucggcaccgcccgcuacauggcccccgagguccucgagucccgcaugaaccucgagaacgucgaguccuucaagcagaccgacgucuacuccauggcccucguccucugggagaugaccucccgcugcaacgccgucggcgaggucaaggacuacgagccccccuucggcuccaagguccgcgagcaccccugcgucgaguccaugaaggacaacguccuccgcgaccgcggccgccccgagauccccuccuucuggcucaaccaccagggcauccagauggucugcgagacccucaccgagugcugggaccacgaccccgaggcccgccucaccgcccagugcgucgccgagcgcuucuccgagcucgagcaccucgaccgccucuccggccgcuccugcuccgaggagaagauccccgaggacggcucccucaacaccaccaaguga

SEQ ID NO: 3629 - RNA, 1704 nt, Artificial Sequence
  derived and/or modified sequence opt3 from TGFR2__Homo_sapiens__AAT70724
augggcagagggcugcucaggggacuuuggccccugcacaucguguuguggacccggauugccagcacaauaccuccacauguccagaaguccguuaacaaugacaugaucgugacugauaacaauggugcuguaaaauucccgcaauuaugcaaguuuugugacgugcgcuucucuacgugcgauaaccagaaaucauguaugaguaauugcagcauuaccuccaucugugagaagccccaggaagucugcguggcaguuuggcguaaaaacgacgagaauauuacacuggaaacugugugucacgauccuaagcuaccauaccaugacuuuauccucgaggaugccgcgucucccaagugcauaaugaaagaaaagaaaaagccuggcgagaccuucuuuauguguucgugcucaagcgacgaguguaacgauaauaucauuuucagugaagaguauaacacauccaauccagaccugcuucuggucaucuuucaggugaccgggauuucuuugcugcccccucucggaguagcuaucagcguuauaauuaucuucuacugcuaucgagugaacagacaacagaaacuguccucaacuugggaaacaggcaagaccaggaagcucauggaguuuagugagcacugcgccauuaucuuagaagaugaccggagcgauaucucuuccacgugugcaaauaacauuaaucauaacacugagcugcuuccaauagaauuggacacccuggucgguaaagggcgcuucgccgagguguacaaggcuaaacuaaagcagaacacaucagaacaguuugagacuguggcagucaaaaucuucccguaugaggaauacgccagcuggaagaccgagaaagacauuuuuagugauaucaaucucaagcacgaaaacauacugcaauuccuuacagcugaggaaagaaagaccgagcugggaaaacaguauugguugauuacggccuuccacgcgaagggcaaucuccaggaguaccugacuaggcauguuaucucuugggaagacuuacggaaacugggcuccagccucgcacgcgggaucgcccaccuucauucggaucacacacccugcggacgaccuaagaugccaauugugcacagagaccugaaaucuuccaacaucuugguaaagaaugaucuaaccuguugccugugugacuuuggucucucacugaggcuugaucccacucugaguguggacgauuuggcuaacagcggccaggucgggacagcccgguacauggcaccugaggugcucgaaucccguaugaaucuggagaacguugaaucuuucaagcaaaccgacguguauagcauggcuuuaguccugugggagaugacgucacgcugcaaugccgugggagagguaaaagauuacgaaccacccuuuggcaguaagguuagagagcauccguguguggaauccaugaaagacaacguccuaagggaccggggucgaccugagauucccagcuucuggcucaaucaccaggggauacagauggugugcgagacccugacagaauguugggaucaugacccagaggcgcgccuuacugcccaaugcgucgcagaaagauuuucugaguuggaacaccuggauaggcucucaggacggaguuguagcgaggagaagaucccugaagacggcucccugaacaccacaaaauga

SEQ ID NO: 3630 - RNA, 1704 nt, Artificial Sequence
  derived and/or modified sequence opt4 from TGFR2__Homo_sapiens__AAT70724
augggcagaggccugcugagaggccuguggccccugcacaucgugcuguggaccagaaucgccagcaccauccccccccacgugcagaagagcgugaacaacgacaugaucgugaccgacaacaacggcgccgugaaguucccccagcugugcaaguucugcgacgugagauucagcaccugcgacaaccagaagagcugcaugagcaacugcagcaucaccagcaucugcgagaagccccaggaggugugcguggccguguggagaaagaacgacgagaacaucacccuggagaccgugugccacgaccccaagcugcccuaccacgacuucauccuggaggacgccgccagccccaagugcaucaugaaggagaagaagaagcccggcgagaccuucuucaugugcagcugcagcagcgacgagugcaacgacaacaucaucuucagcgaggaguacaacaccagcaaccccgaccugcugcuggugaucuuccaggugaccggcaucagccugcugcccccccugggcguggccaucagcgugaucaucaucuucuacugcuacagagugaacagacagcagaagcugagcagcaccugggagaccggcaagaccagaaagcugauggaguucagcgagcacugcgccaucauccuggaggacgacagaagcgacaucagcagcaccugcgccaacaacaucaaccacaacaccgagcugcugcccaucgagcuggacacccuggugggcaagggcagauucgccgagguguacaaggccaagcugaagcagaacaccagcgagcaguucgagaccguggccgugaagaucuuccccuacgaggaguacgccagcuggaagaccgagaaggacaucuucagcgacaucaaccugaagcacgagaacauccugcaguuccugaccgccgaggagagaaagaccgagcugggcaagcaguacuggcugaucaccgccuuccacgccaagggcaaccugcaggaguaccugaccagacacgugaucagcugggaggaccugagaaagcugggcagcagccuggccagaggcaucgcccaccugcacagcgaccacacccccugcggcagacccaagaugcccaucgugcacagagaccugaagagcagcaacauccuggugaagaacgaccugaccugcugccugugcgacuucggccugagccugagacuggaccccacccugagcguggacgaccuggccaacagcggccaggugggcaccgccagauacauggcccccgaggugcuggagagcagaaugaaccuggagaacguggagagcuucaagcagaccgacguguacagcauggcccuggugcugugggagaugaccagcagaugcaacgccgugggcgaggugaaggacuacgagccccccuucggcagcaaggugagagagcaccccugcguggagagcaugaaggacaacgugcugagagacagaggcagacccgagauccccagcuucuggcugaaccaccagggcauccagauggugugcgagacccugaccgagugcugggaccacgaccccgaggccagacugaccgcccagugcguggccgagagauucagcgagcuggagcaccuggacagacugagcggcagaagcugcagcgaggagaagauccccgaggacggcagccugaacaccaccaaguga

SEQ ID NO: 3631 - RNA, 1704 nt, Artificial Sequence
  derived and/or modified sequence opt5 from TGFR2__Homo_sapiens__AAT70724
augggcagagggcugcuccggggacuguggccccuucacaucgugcuguggacccgcauugccagcacaaucccuccgcauguccagaaguccguuaacaaugacaugauugugacggauaacaauggcgcugugaaauucccccaacucugcaaguuuugugacgucagauucucuaccugcgauaaccagaaaagcuguauguccaauugcucuaucacaagcauuugugagaagccucaggaagugugcguugccguguggcggaaaaacgacgagaauaucacccuggaaacagucugucacgaucccaagcugccuuaccaugacuuuauccuggaggaugcggcuucccccaagugcauuaugaaagaaaagaaaaagccuggggagaccuucuuuauguguucuugcagcuccgacgaguguaacgauaauaucauuuucagcgaagaguauaacacaucuaauccggaccuccugcuggugaucuuucagguuaccggaauuucccuccugcccccucuuggcguggccaucagcgucauuaucaucuucuacugcuaucgcgugaacagacaacagaaacugucuuccacgugggaaaccgggaagacacggaagcucauggaguuuagcgagcacugcgccauuauccuggaagaugaccgcucugauauuuccagcaccugugcuaauaacaucaaucauaacacagagcuucugcccauugaacucgacacccuggugggaaaaggcagauucgccgaggucuacaaggcuaaacugaagcagaacacguccgaacaguuugagacaguugccgugaaaaucuucccuuaugaggaauacgcgucuuggaagaccgagaaagacaucuuuagcgauauuaaucucaagcacgaaaacauccugcaauuccuuacagccgaggaacggaagaccgagcugggcaaacaguauuggcucauuaccgcuuuccacgccaaggggaaucugcaggaguaccuuacacgccaugugaucuccugggaagaccugagaaaacucggaagcucucuggcucggggcauugcccaccuucauuccgaucacacgcccugcgggcgcccgaagaugccuaucguccacagagaccucaaaagcucuaacauccuggugaagaaugaucuuaccuguugccugugugacuuuggacucagccugcggcuugaucccacacuguccguugacgaucucgcgaacucuggccagguggggaccgcccgcuacauggcuccugagguccuggaaagcagaaugaaucuggagaacguggaauccuucaagcaaacagacguuuauagcauggcccucgugcugugggagaugaccucucggugcaaugcugucggagaggugaaagauuacgaaccucccuuuggcuccaaggucagagagcaucccuguguggaaagcaugaaagacaacguucuucgcgaccggggcagaccggagauucccucuuucuggcugaaucaccaggggauccagauggugugcgagacgcucacagaauguugggaucaugacccugaggcccgccugaccgcccaaugcgucgcugaacgguuuuccgagcuggaacaccuugauagacucagcggacgcuccuguucugaggagaagauucccgaagacggcagccugaacaccacaaaauga

SEQ ID NO: 3632 - protein, 684 aa, Artificial Sequence [sequence omitted]

SEQ ID NO: 3633 - RNA, 2055 nt, Artificial Sequence
  TGM-4__Homo_sapiens__BAG35778
augauggaugcaucaaaagagcugcaaguucuccacauugacuucuugaaucaggacaacgccguuucucaccacacaugggaguuccaaacgagcaguccuguguuccggcgaggacagguguuucaccugcggcuggugcugaaccagcccccacaauccuaccaccaacugaaacuggaauucagcacagggccgaauccuagcaucgccaaacacacccugguggugcucgacccgaggacgcccucagaccacuacaacuggcaggcaacccuucaaaaugagucuggcaaagaggucacaguggcugucaccaguucccccaaugccauccugggcaaguaccaacuaaacgugaaaacuggaaaccacauccuuaagucugaagaaaacauccuauaccuucucuucaacccaugguguaaagaggacaugguuuucaugccugaugaggacgagcgcaaagaguacauccucaaugacacgggcugccauuacgugggggcugccagaaguaucaaaugcaaacccuggaacuuuggucaguuugagaaaaauguccuggacugcugcauuucccugcugacugagagcucccucaagcccacagauaggagggaccccgugcuggugugcagggccaugugugcuaugaugagcuuugagaaaggccagggcgugcucauugggaauuggacuggggacuacgaagguggcacagccccauacaaguggacaggcagugccccgauccugcagcaguacuacaacacgaagcaggcugugugcuuuggccagugcuggguguuugcugggauccugacuacagugcugagagcguugggcaucccagcacgcagugugacaggcuucgauucagcucacgacacagaaaggaaccucacgguggacaccuaugugaaugagaauggcgagaaaaucaccaguaugacccacgacucugucuggaauuuccauguguggacggaugccuggaugaagcgaccggaucugcccaagggcuacgacggcuggcaggcuguggacgcaacgccgcaggagcgaagccagggugucuucugcugugggccaucaccacugaccgccauccgcaaaggugacaucuuuauugucuaugacaccagauucgucuucucagaagugaauggugacaggcucaucugguuggugaagauggugaaugggcaggaggaguuacacguaauuucaauggagaccacaagcaucgggaaaaacaucagcaccaaggcagugggccaagacaggcggagagauaucaccuaugaguacaaguauccagaaggcuccucugaggagaggcaggucauggaucaugccuuccuccuucucaguucugagagggagcacagacgaccuguaaaagagaacuuucuucacaugucgguacaaucagaugaugugcugcugggaaacucuguuaauuucaccgugauucuuaaaaggaagaccgcugcccuacagaaugucaacaucuugggcuccuuugaacuacaguuguacacuggcaagaagauggcaaaacugugugaccucaauaagaccucgcagauccaaggucaaguaucagaagugacucugaccuuggacuccaagaccuacaucaacagccuggcuauauuagaugaugagccaguuaucagagguuucaucauugcggaaauuguggagucuaaggaaaucauggccucugaaguauucacgucuuuccaguacccugaguucucuauagaguugccuaacacaggcagaauuggccagcuacuugucugcaauuguaucuucaagaauacccuggccaucccuuugacugacgucaaguucucuuuggaaagccugggcaucuccucacuacagaccucugaccaugggacggugcagccuggugagaccauccaaucccaaauaaaaugcaccccaauaaaaacuggacccaagaaauuuaucgucaaguuaaguuccaaacaagugaaagagauuaaugcucagaagauuguucucaucaccaaguag

SEQ ID NO: 3634 - RNA, 2055 nt, Artificial Sequence
  derived and/or modified sequence opt1 from TGM-4__Homo_sapiens__BAG35778
augauggacgccagcaaggagcuccaggugcuccacaucgacuuccugaaccaggacaacgccgucucccaccacaccugggaguuccagaccagcucccccguguuccgccggggccagguguuccaccuccgccugguccugaaccagccgccccagagcuaccaccagcugaagcucgaguucuccacggggcccaaccccagcaucgcgaagcacacccugguggugcuggacccgcggacccccuccgaccacuacaacuggcaggccacccuccagaacgagagcggcaaggaggucacgguggccgugaccuccagccccaacgccauccuggggaaguaccagcugaacgucaagaccggcaaccacauccucaaguccgaggagaacauccuguaccugcuguucaaccccuggugcaaggaggacaugguguucaugccggacgaggacgagcgcaaggaguacauccugaacgacaccgggugccacuacgugggcgccgcgcggagcaucaagugcaagcccuggaacuucggccaguucgagaagaacguccuggacugcugcaucucccuccugacggagagcucccugaagcccaccgaccgccgggaccccgugcucgugugccgcgccaugugcgccaugaugagcuucgagaaggggcagggcguccugaucgggaacuggaccggcgacuacgagggcgggaccgccccguacaaguggacgggcuccgcgcccauccugcagcaguacuacaacaccaagcaggccgugugcuucgggcagugcuggguguucgccggcauccucaccaccguccugcgggcccuggggauccccgcccgcagcgugacgggcuucgacuccgcgcacgacaccgagcggaaccucaccguggacaccuacgucaacgagaacggcgagaagaucacgagcaugacccacgacagcguguggaacuuccacguguggaccgacgccuggaugaagcgccccgaccugccgaagggguacgacggcuggcaggccgucgacgccacgccccaggagcggucccaggggguguucugcugcggccccagcccccugaccgccauccgcaagggggacaucuucaucgucuacgacacccgguucguguucuccgaggugaacggcgaccgccucaucuggcuggucaagauggugaacggccaggaggagcugcacgugaucagcauggagaccaccuccaucgggaagaacaucagcacgaaggcggucggccaggaccggcgccgggacaucaccuacgaguacaaguacccggagggguccagcgaggagcgccaggugauggaccacgccuuccuccugcuguccagcgagcgggagcaccgccgccccgugaaggagaacuuccuccacauguccguccagagcgacgacgugcugcugggcaacuccgugaacuucaccgucauccucaagcggaagaccgccgcccugcagaacgugaacauccuggggagcuucgagcuccagcuguacacgggcaagaagauggccaagcugugcgaccucaacaagaccucccagauccagggccaggugagcgaggucacccugacccuggacuccaagacguacaucaacagccucgcgauccuggacgacgagcccgugauccgcggguucaucaucgccgagaucguggaguccaaggagaucauggccagcgaggucuucaccagcuuccaguaccccgaguucuccaucgagcugccgaacaccggccggaucgggcagcugcucgugugcaacugcaucuucaagaacacccuggccaucccccugaccgacgugaaguucagccucgagucccugggcaucagcucccugcagacgagcgaccacgggaccguccagcccggcgagaccauccagucccagaucaagugcacccccaucaagacgggcccgaagaaguucaucgugaagcucagcuccaagcaggucaaggagaucaacgcccagaagaucgugcugaucaccaaguga

SEQ ID NO: 3635 - RNA, 2055 nt, Artificial Sequence
  derived and/or modified sequence opt2 from TGM-4__Homo_sapiens__BAG35778
augauggacgccuccaaggagcuccagguccuccacaucgacuuccucaaccaggacaacgccgucucccaccacaccugggaguuccagaccuccucccccgucuuccgccgcggccaggucuuccaccuccgccucguccucaaccagcccccccaguccuaccaccagcucaagcucgaguucuccaccggccccaaccccuccaucgccaagcacacccucgucguccucgacccccgcacccccuccgaccacuacaacuggcaggccacccuccagaacgaguccggcaaggaggucaccgucgccgucaccuccucccccaacgccauccucggcaaguaccagcucaacgucaagaccggcaaccacauccucaaguccgaggagaacauccucuaccuccucuucaaccccuggugcaaggaggacauggucuucaugcccgacgaggacgagcgcaaggaguacauccucaacgacaccggcugccacuacgucggcgccgcccgcuccaucaagugcaagcccuggaacuucggccaguucgagaagaacguccucgacugcugcaucucccuccucaccgaguccucccucaagcccaccgaccgccgcgaccccguccucgucugccgcgccaugugcgccaugauguccuucgagaagggccagggcguccucaucggcaacuggaccggcgacuacgagggcggcaccgcccccuacaaguggaccggcuccgcccccauccuccagcaguacuacaacaccaagcaggccgucugcuucggccagugcugggucuucgccggcauccucaccaccguccuccgcgcccucggcauccccgcccgcuccgucaccggcuucgacuccgcccacgacaccgagcgcaaccucaccgucgacaccuacgucaacgagaacggcgagaagaucaccuccaugacccacgacuccgucuggaacuuccacgucuggaccgacgccuggaugaagcgccccgaccuccccaagggcuacgacggcuggcaggccgucgacgccaccccccaggagcgcucccagggcgucuucugcugcggccccuccccccucaccgccauccgcaagggcgacaucuucaucgucuacgacacccgcuucgucuucuccgaggucaacggcgaccgccucaucuggcucgucaagauggucaacggccaggaggagcuccacgucaucuccauggagaccaccuccaucggcaagaacaucuccaccaaggccgucggccaggaccgccgccgcgacaucaccuacgaguacaaguaccccgagggcuccuccgaggagcgccaggucauggaccacgccuuccuccuccucuccuccgagcgcgagcaccgccgccccgucaaggagaacuuccuccacauguccguccaguccgacgacguccuccucggcaacuccgucaacuucaccgucauccucaagcgcaagaccgccgcccuccagaacgucaacauccucggcuccuucgagcuccagcucuacaccggcaagaagauggccaagcucugcgaccucaacaagaccucccagauccagggccaggucuccgaggucacccucacccucgacuccaagaccuacaucaacucccucgccauccucgacgacgagcccgucauccgcggcuucaucaucgccgagaucgucgaguccaaggagaucauggccuccgaggucuucaccuccuuccaguaccccgaguucuccaucgagcuccccaacaccggccgcaucggccagcuccucgucugcaacugcaucuucaagaacacccucgccaucccccucaccgacgucaaguucucccucgagucccucggcaucuccucccuccagaccuccgaccacggcaccguccagcccggcgagaccauccagucccagaucaagugcacccccaucaagaccggccccaagaaguucaucgucaagcucuccuccaagcaggucaaggagaucaacgcccagaagaucguccucaucaccaaguga

SEQ ID NO: 3636 - RNA, 2055 nt, Artificial Sequence
  derived and/or modified sequence opt3 from TGM-4__Homo_sapiens__BAG35778
augauggacgccagcaaggagcugcaagugcuccacaucgauuuccuuaaccaagacaaugcugucucccaucacaccugggaauuucagacaucuucacccguuuucagaaggggccagguguuucaucugcgguugguauuaaaccagccuccacaaaguuaccaccagcugaaacuagaguucagcacugggccgaaucccuccauugcaaagcauacgcucgugguccuggauccucgcaccccaucugaccacuauaacuggcaggccacacuucagaaugaaucgggaaaagaggugacuguugcggugaccucaagccccaacgcuauacuggguaaguaccaauugaaugucaaaacaggcaaccacauccucaagagugaagagaauauucuguaucugcucuuuaacccuuggugcaaggaggauaugguguucaugccagacgaagaugagcgaaaagaauacaucuuaaaugacaccgggugucauuauguaggagccgcacguuccauuaagugcaaacccuggaacuuuggccaguucgagaagaauguucuggauuguugcaucucucuuuugacugagagcucccugaaaccuacagacagaagggauccagugcuagucugucgggccaugugcgcuaugaugucauuugaaaagggucagggggugcucauaggaaacuggaccggcgacuacgagggcgggacggcaccguauaaguggacuggaagugcccccauccugcagcaauacuacaauaccaaacaggcuguguguuucggucagugcugggucuuugccggcauucuuacaacuguucugcgcgcguuggggaucccugcaagaagcgugaccggauucgauucugcccacgacacagaaaggaaccucaccguagacacguaugugaacgagaauggcgaaaagauuacuuccaugacacaugauucagucuggaacuuucacguguggaccgacgcuuggaugaaacggccagaucugcccaaggguuacgacggguggcaagccguugaugcaacuccucaggagcgcagccagggaguguucuguugcggcccaagucccuuaacagcuauccgaaaaggcgacauauucauugucuaugauaccagauuuguguucucugagguaaauggggacaggcugaucuggcucguuaagauggugaacggacaggaggaacuucacgucauuuccauggaaacgaccagcaucgguaaaaauaucucgacaaaggccgugggccaagaucggcgucgcgacauuacuuacgaguauaaguacccggaagggucuuccgaggagagacaggucauggaucaugcguuucuguugcuaucaagugaaagggagcaccggcgaccugugaaagaaaacuuccugcauaugagcguucaguccgacgacgugcuccugggaaauucuguaaacuuuaccgucauacuuaagcgcaaaacagccgcacugcagaaugugaacaucuugggcagcuucgagcuccaacuguauacugguaagaaaauggcuaaguuaugugaucugaauaagaccucacagauucaggggcagguuagugaagugacacuaacccucgacuccaaaacuuacaucaacagccuggccauacuugaugacgagcccgucauuagaggcuuuaucaucgcugagauuguggaaucuaaggagaucauggccucagaaguauucacgaguuuucaauacccagaguucagcauugaguugccuaauacaggaaggauaggccagcugcucgugugcaacugcaucuuuaaaaauacccuggcaauuccccuuacugauguuaaguucucccuggaaucuuuggggaucucgagccuccagaccuccgaccacggaacaguccagccaggugagaccauccaaucacagauuaaauguacucccauaaagacaggcccuaagaaauuuaucgugaagcugaguucuaaacaggugaaggaaauuaacgcccagaaaaucgucuuaauuacgaaguga

SEQ ID NO: 3637 - RNA, 2055 nt, Artificial Sequence
  derived and/or modified sequence opt4 from TGM-4__Homo_sapiens__BAG35778
augauggacgccagcaaggagcugcaggugcugcacaucgacuuccugaaccaggacaacgccgugagccaccacaccugggaguuccagaccagcagccccguguucagaagaggccagguguuccaccugagacuggugcugaaccagcccccccagagcuaccaccagcugaagcuggaguucagcaccggccccaaccccagcaucgccaagcacacccugguggugcuggaccccagaacccccagcgaccacuacaacuggcaggccacccugcagaacgagagcggcaaggaggugaccguggccgugaccagcagccccaacgccauccugggcaaguaccagcugaacgugaagaccggcaaccacauccugaagagcgaggagaacauccuguaccugcuguucaaccccuggugcaaggaggacaugguguucaugcccgacgaggacgagagaaaggaguacauccugaacgacaccggcugccacuacgugggcgccgccagaagcaucaagugcaagcccuggaacuucggccaguucgagaagaacgugcuggacugcugcaucagccugcugaccgagagcagccugaagcccaccgacagaagagaccccgugcuggugugcagagccaugugcgccaugaugagcuucgagaagggccagggcgugcugaucggcaacuggaccggcgacuacgagggcggcaccgcccccuacaaguggaccggcagcgcccccauccugcagcaguacuacaacaccaagcaggccgugugcuucggccagugcuggguguucgccggcauccugaccaccgugcugagagcccugggcauccccgccagaagcgugaccggcuucgacagcgcccacgacaccgagagaaaccugaccguggacaccuacgugaacgagaacggcgagaagaucaccagcaugacccacgacagcguguggaacuuccacguguggaccgacgccuggaugaagagacccgaccugcccaagggcuacgacggcuggcaggccguggacgccaccccccaggagagaagccagggcguguucugcugcggccccagcccccugaccgccaucagaaagggcgacaucuucaucguguacgacaccagauucguguucagcgaggugaacggcgacagacugaucuggcuggugaagauggugaacggccaggaggagcugcacgugaucagcauggagaccaccagcaucggcaagaacaucagcaccaaggccgugggccaggacagaagaagagacaucaccuacgaguacaaguaccccgagggcagcagcgaggagagacaggugauggaccacgccuuccugcugcugagcagcgagagagagcacagaagacccgugaaggagaacuuccugcacaugagcgugcagagcgacgacgugcugcugggcaacagcgugaacuucaccgugauccugaagagaaagaccgccgcccugcagaacgugaacauccugggcagcuucgagcugcagcuguacaccggcaagaagauggccaagcugugcgaccugaacaagaccagccagauccagggccaggugagcgaggugacccugacccuggacagcaagaccuacaucaacagccuggccauccuggacgacgagcccgugaucagaggcuucaucaucgccgagaucguggagagcaaggagaucauggccagcgagguguucaccagcuuccaguaccccgaguucagcaucgagcugcccaacaccggcagaaucggccagcugcuggugugcaacugcaucuucaagaacacccuggccaucccccugaccgacgugaaguucagccuggagagccugggcaucagcagccugcagaccagcgaccacggcaccgugcagcccggcgagaccauccagagccagaucaagugcacccccaucaagaccggccccaagaaguucaucgugaagcugagcagcaagcaggugaaggagaucaacgcccagaagaucgugcugaucaccaaguga

SEQ ID NO: 3638 - RNA, 2055 nt, Artificial Sequence
  derived and/or modified sequence opt5 from TGM-4__Homo_sapiens__BAG35778
augauggacgccagcaaggagcuccaggugcugcacaucgauuuccugaaccaagacaaugcugucucccaucacaccugggaauuucagacaucuagccccguuuucagacggggccagguguuucaucuucgccuggugcucaaccagccuccgcaauccuaccaccagcugaaacuugaguucucuacggggcccaauccuagcauugccaagcauacccuggucgugcucgaucccagaacaccuuccgaccacuauaacuggcaggcgacccugcagaaugaaucuggaaaagagguuacaguggcugucaccagcucccccaacgccauccugggcaaguaccaacucaaugugaaaacagggaaccacauucugaaaagcgaagagaauauccuuuaucugcucuuuaacccuuggugcaaggaggauaugguuuucaugccggacgaagaugagcggaaagaauacauucugaaugacaccggaugucauuaugugggcgccgcucgcucuaucaagugcaaacccuggaacuuugggcaguucgagaagaauguccuugauuguugcaucucccugcucacggagagcucucugaaaccuaccgacagacgggaucccgugcuggugugucgcgccaugugcgcuaugauguccuuugaaaagggacagggcguccucauuggcaacuggacaggggacuacgagggaggcaccgccccuuauaaguggacagggagcgcgcccauccugcagcaauacuacaauaccaaacaggccguuuguuucggacagugcuggguguuugcuggcauucuuacgacagugcugagagcccucgggaucccggcucggucugucaccggauucgauuccgcccacgacacagaacgcaaccugaccguggacaccuauguuaacgagaauggcgaaaagauuacaagcaugacgcaugauuccguguggaacuuucacgucuggaccgacgcguggaugaaaagaccugaucuucccaagggcuacgacggguggcaagccguggaugcuacaccucaggagcggucucagggaguuuucuguugcggccccagcccccugaccgccauccgcaaaggggacauuuucaucguguaugauacaagauuugucuucuccgaggugaauggagaccggcucaucuggcuggucaagauggugaacggccaggaggaacugcacguuauuagcauggaaaccacgucuaucgggaaaaauauuuccacaaaggcugugggacaagaucgcagacgggacaucaccuacgaguauaaguacccugaaggcagcucugaggagagacaggucauggaucaugccuuucuccugcuuagcuccgaacgcgagcaccggagaccggugaaagaaaacuuccugcauaugucuguucagagcgacgacgugcuccugggcaauuccgucaacuuuaccgugauucuuaagcgcaaaacagccgcucugcagaaugugaacauccucgggagcuucgagcugcaacuguauaccggaaagaaaauggcgaagcucugugaucugaauaagacaucucagauccagggccagguuuccgaagucacgcuuacccuggacagcaaaacauacauuaacucucucgccauccuggaugacgagcccgugauucggggguuuaucauugcugagaucguggaauccaaggagaucauggccagcgaagucuucaccuccuuucaauacccugaguucucuauugagcugcccaauacaggaagaaucggccagcuucucgugugcaacugcauuuuuaaaaauacccuggccaucccucugacggauguuaaguucagccucgaaucccuggggauuucuagccuucagaccuccgaccacggcacagugcagcccggagagaccauccaaagccagauuaaauguacaccgaucaagaccggcccuaagaaauuuaucgucaagcugucuuccaaacaggugaaggaaauuaacgcucaaaagaucguucucauuacgaaguga

SEQ ID NO: 3639 - protein, 1124 aa, Artificial Sequence
  TIE2__Homo_sapiens__Q02763
MDSLASLVLCGVSLLLSGTVEGAMDLILINSLPLVSDAETSLTCIASGWRPHEPITIGRDFEALMNQHQDPLEVTQDVTREWAKKVVWKREKASKINGAYFCEGRVRGEAIRIRTMKMRQQASFLPATLTMTVDKGDNVNISFKKVLIKEEDAVIYKNGSFIHSVPRHEVPDILEVHLPHAQPQDAGVYSARYIGGNLFTSAFTRLIVRRCEAQKWGPECNHLCTACMNNGVCHEDTGECICPPGFMGRTCEKACELHTFGRTCKERCSGQEGCKSYVFCLPDPYGCSCATGWKGLQCNEACHPGFYGPDCKLRCSCNNGEMCDRFQGCLCSPGWQGLQCEREGIQRMTPKIVDLPDHIEVNSGKFNPICKASGWPLPTNEEMTLVKPDGTVLHPKDFNHTDHFSVAIFTIHRILPPDSGVWVCSVNTVAGMVEKPFNISVKVLPKPLNAPNVIDTGHNFAVINISSEPYFGDGPIKSKKLLYKPVNHYEAWQHIQVTNEIVTLNYLEPRTEYELCVQLVRRGEGGEGHPGPVRRFTTASIGLPPPRGLNLLPKSQTTLNLTWQPIFPSSEDDFYVEVERRSVQKSDQQNIKVPGNLTSVLLNNLHPREQYVVRARVNTKAQGEWSEDLTAWTLSDILPPQPENIKISNITHSSAVISWTILDGYSISSITIRYKVQGKNEDQHVDVKIKNATITQYQLKGLEPETAYQVDIFAENNIGSSNPAFSHELVTLPESQAPADLGGGKMLLIAILGSAGMTCLTVLLAFLIILQLKRANVQRRMAQAFQNVREEPAVQFNSGTLALNRKVKNNPDPTIYPVLDWNDIKFQDVIGEGNFGQVLKARIKKDGLRMDAAIKRMKEYASKDDHRDFAGELEVLCKLGHHPNIINLLGACEHRGYLYLAIEYAPHGNLLDFLRKSRVLETDPAFAIANSTASTLSSQQLLHFAADVARGMDYLSQKQFIHRDLAARNILVGENYVAKIADFGLSRGQEVYVKKTMGRLPVRWMAIESLNYSVYTTNSDVWSYGVLLWEIVSLGGTPYCGMTCAELYEKLPQGYRLEKPLNCDDEVYDLMRQCWREKPYERPSFAQILVSLNRMLEERKTYVNTTLYEKFTYAGIDCSAEEAA

SEQ ID NO: 3640 - RNA, 3375 nt, Artificial Sequence
  TIE2__Homo_sapiens__CCDS6519.1
auggacucuuuagccagcuuaguucucuguggagucagcuugcuccuuucuggaacuguggaaggugccauggacuugaucuugaucaauucccuaccucuuguaucugaugcugaaacaucucucaccugcauugccucuggguggcgcccccaugagcccaucaccauaggaagggacuuugaagccuuaaugaaccagcaccaggauccgcuggaaguuacucaagaugugaccagagaaugggcuaaaaaaguuguuuggaagagagaaaaggcuaguaagaucaauggugcuuauuucugugaagggcgaguucgaggagaggcaaucaggauacgaaccaugaagaugcgucaacaagcuuccuuccuaccagcuacuuuaacuaugacuguggacaagggagauaacgugaacauaucuuucaaaaagguauugauuaaagaagaagaugcagugauuuacaaaaaugguuccuucauccauucagugccccggcaugaaguaccugauauucuagaaguacaccugccucaugcucagccccaggaugcuggaguguacucggccagguauauaggaggaaaccucuucaccucggccuucaccaggcugauaguccggagaugugaagcccagaaguggggaccugaaugcaaccaucucuguacugcuuguaugaacaauggugucugccaugaagauacuggagaaugcauuugcccuccuggguuuaugggaaggacgugugagaaggcuugugaacugcacacguuuggcagaacuuguaaagaaaggugcaguggacaagagggaugcaagucuuauguguucugucucccugaccccuauggguguuccugugccacaggcuggaagggucugcagugcaaugaagcaugccacccugguuuuuacgggccagauuguaagcuuaggugcagcugcaacaauggggagaugugugaucgcuuccaaggaugucucugcucuccaggauggcaggggcuccagugugagagagaaggcauacagaggaugaccccaaagauaguggauuugccagaucauauagaaguaaacagugguaaauuuaaucccauuugcaaagcuucuggcuggccgcuaccuacuaaugaagaaaugacccuggugaagccggaugggacagugcuccauccaaaagacuuuaaccauacggaucauuucucaguagccauauucaccauccaccggauccuccccccugacucaggaguuugggucugcagugugaacacaguggcugggaugguggaaaagcccuucaacauuucuguuaaaguucuuccaaagccccugaaugccccaaacgugauugacacuggacauaacuuugcugucaucaacaucagcucugagccuuacuuuggggauggaccaaucaaauccaagaagcuucuauacaaacccguuaaucacuaugaggcuuggcaacauauucaagugacaaaugagauuguuacacucaacuauuuggaaccucggacagaauaugaacucugugugcaacugguccgucguggagaggguggggaagggcauccuggaccugugagacgcuucacaacagcuucuaucggacucccuccuccaagaggucuaaaucuccugccuaaaagucagaccacucuaaauuugaccuggcaaccaauauuuccaagcucggaagaugacuuuuauguugaaguggagagaaggucugugcaaaaaagugaucagcagaauauuaaaguuccaggcaacuugacuucggugcuacuuaacaacuuacaucccagggagcaguacgugguccgagcuagagucaacaccaaggcccagggggaauggagugaagaucucacugcuuggacccuuagugacauucuuccuccucaaccagaaaacaucaagauuuccaacauuacacacuccucagcugugauuucuuggacaauauuggauggcuauucuauuucuucuauuacuauccguuacaagguucaaggcaagaaugaagaccagcacguugaugugaagauaaagaaugccaccaucacucaguaucagcucaagggccuagagccugaaacagcauaccagguggacauuuuugcagagaacaacauagggucaagcaacccagccuuuucucaugaacuggugacccucccagaaucucaagcaccagcggaccucggaggggggaagaugcugcuuauagccauccuuggcucugcuggaaugaccugccugacugugcuguuggccuuucugaucauauugcaauugaagagggcaaaugugcaaaggagaauggcccaagccuuccaaaacgugagggaagaaccagcugugcaguucaacucagggacucuggcccuaaacaggaaggucaaaaacaacccagauccuacaauuuauccagugcuugacuggaaugacaucaaauuucaagaugugauuggggagggcaauuuuggccaaguucuuaaggcgcgcaucaagaaggauggguuacggauggaugcugccaucaaaagaaugaaagaauaugccuccaaagaugaucacagggacuuugcaggagaacuggaaguucuuuguaaacuuggacaccauccaaacaucaucaaucucuuaggagcaugugaacaucgaggcuacuuguaccuggccauugaguacgcgccccauggaaaccuucuggacuuccuucgcaagagccgugugcuggagacggacccagcauuugccauugccaauagcaccgcguccacacuguccucccagcagcuccuucacuucgcugccgacguggcccggggcauggacuacuugagccaaaaacaguuuauccacagggaucuggcugccagaaacauuuuaguuggugaaaacuauguggcaaaaauagcagauuuuggauugucccgaggucaagagguguaugugaaaaagacaaugggaaggcucccagugcgcuggauggccaucgagucacugaauuacaguguguacacaaccaacagugauguaugguccuaugguguguuacuaugggagauuguuagcuuaggaggcacacccuacugcgggaugacuugugcagaacucuacgagaagcugccccagggcuacagacuggagaagccccugaacugugaugaugagguguaugaucuaaugagacaaugcuggcgggagaagccuuaugagaggccaucauuugcccagauauugguguccuuaaacagaauguuagaggagcgaaagaccuacgugaauaccacgcuuuaugagaaguuuacuuaugcaggaauugacuguucugcugaagaagcggccuag

SEQ ID NO: 3641 - RNA, 3375 nt, Artificial Sequence
  derived and/or modified sequence opt1 from TIE2__Homo_sapiens__CCDS6519.1
auggacagccuggccucccucgugcugugcggcgucagccugcuccuguccgggaccguggagggcgccauggaccugauccucaucaacagccugccccugguguccgacgcggagaccagccucacgugcaucgccuccggguggcgcccgcacgagcccaucaccaucggccgggacuucgaggcccugaugaaccagcaccaggacccccuggaggucacccaggacgugacccgcgagugggccaagaagguggucuggaagcgggagaaggccagcaagaucaacggggcguacuucugcgagggccgcgugcggggcgaggccauccgcauccggacgaugaagaugcgccagcaggccuccuuccuccccgccacccugaccaugaccguggacaagggggacaacgucaacaucagcuucaagaaggugcugaucaaggaggaggacgcggugaucuacaagaacggcuccuucauccacagcgucccgcggcacgaggugcccgacauccucgaggugcaccucccccacgcccagccccaggacgccggggucuacuccgcccgcuacaucggcgggaaccuguucacgagcgccuucacccggcucaucgugcgccggugcgaggcgcagaaguggggcccggagugcaaccaccugugcaccgccugcaugaacaacggcgugugccacgaggacaccggggagugcaucugcccgcccggcuucauggggcgcacgugcgagaaggccugcgagcugcacaccuucggccggaccugcaaggagcgcugcuccggccaggaggggugcaagagcuacgucuucugccuccccgaccccuacggcugcuccugcgccaccggguggaagggccugcagugcaacgaggccugccaccccggguucuacggccccgacugcaagcugcggugcagcugcaacaacggcgagaugugcgaccgcuuccaggggugccucugcucccccggcuggcaggggcugcagugcgagcgggagggcauccagcgcaugacgccgaagaucguggaccugcccgaccacaucgaggugaacagcgggaaguucaaccccaucugcaaggcgagcggcuggccccucccgaccaacgaggagaugacccuggucaagcccgacggcaccgugcugcaccccaaggacuucaaccacacggaccacuucuccguggccaucuucaccauccaccggauccugcccccggacagcggggucugggugugcuccgucaacaccguggccggcaugguggagaagcccuucaacaucagcgucaaggugcugcccaagccccugaacgccccgaacgugaucgacaccgggcacaacuucgccgucaucaacaucuccagcgagcccuacuucggcgacgggcccaucaaguccaagaagcuccuguacaagccggugaaccacuacgaggcguggcagcacauccaggugacgaacgagaucgucacccugaacuaccucgagccccgcaccgaguacgagcugugcgugcagcuggugcgccggggcgagggcggggagggccaccccgggcccguccgccgguucaccacggccagcaucggccucccgccgccccgcggccugaaccugcuccccaagucccagaccacccugaaccugaccuggcagcccaucuuccccagcuccgaggacgacuucuacguggagguggagcggcgcagcguccagaaguccgaccagcagaacaucaaggugcccgggaaccucacgagcgugcugcugaacaaccuccacccccgggagcaguacgucgugcgcgcccgggugaacaccaaggcccagggcgagugguccgaggaccugaccgccuggacccugagcgacauccugccgccccagcccgagaacaucaagaucuccaacaucacgcacagcuccgcggucaucagcuggaccauccucgacggguacagcaucuccagcaucaccauccgcuacaaggugcagggcaagaacgaggaccagcacguggacgucaagaucaagaacgccaccaucacccaguaccagcugaaggggcuggagcccgagacggccuaccagguggacaucuucgccgagaacaacaucggcuccagcaacccggcguucucccacgagcucgugacccugcccgagagccaggcccccgccgaccugggcgggggcaagaugcuccugaucgccauccugggguccgccggcaugaccugccucaccguccugcuggcguuccucaucauccugcagcugaagcgggccaacgugcagcgccggauggcccaggccuuccagaacgugcgcgaggagcccgccguccaguucaacagcgggacgcucgcgcugaaccggaaggugaagaacaacccggaccccaccaucuaccccgugcuggacuggaacgacaucaaguuccaggacgucaucggcgagggcaacuucggccaggugcucaaggcccgcaucaagaaggacgggcugcggauggacgccgccaucaagcgcaugaaggaguacgccuccaaggacgaccaccgggacuucgcgggggagcuggaggugcucugcaagcugggccaccaccccaacaucaucaaccugcucggggccugcgagcaccgcggcuaccuguaccuggccaucgaguacgccccgcacggcaaccuccuggacuuccugcgcaagagccggguccucgagaccgaccccgcguucgccaucgccaacuccaccgccagcacgcuguccagccagcagcugcuccacuucgccgcggacguggcccgcgggauggacuaccugucccagaagcaguucauccaccgggaccuggccgcccgcaacauccucgugggcgagaacuacgucgccaagaucgcggacuucgggcugagccggggccaggagguguacgugaagaagaccauggggcgccugcccguccgguggauggccaucgagucccucaacuacagcguguacaccaccaacagcgacgugugguccuacggcguccugcugugggagaucgugagccucggcgggacgccguacugcggcaugaccugcgccgagcuguacgagaagcugccccagggguaccgccucgagaagccccugaacugcgacgacgagguguacgaccugaugcggcagugcuggcgcgagaagcccuacgagcggccguccuucgcccagauccucgucagccugaaccgcaugcuggaggagcggaagaccuacgugaacaccacgcucuacgagaaguucaccuacgccggcaucgacugcuccgcggaggaggccgccuga

SEQ ID NO: 3642 - RNA, 3375 nt, Artificial Sequence
  derived and/or modified sequence opt2 from TIE2__Homo_sapiens__CCDS6519.1
auggacucccucgccucccucguccucugcggcgucucccuccuccucuccggcaccgucgagggcgccauggaccucauccucaucaacucccucccccucgucuccgacgccgagaccucccucaccugcaucgccuccggcuggcgcccccacgagcccaucaccaucggccgcgacuucgaggcccucaugaaccagcaccaggacccccucgaggucacccaggacgucacccgcgagugggccaagaaggucgucuggaagcgcgagaaggccuccaagaucaacggcgccuacuucugcgagggccgcguccgcggcgaggccauccgcauccgcaccaugaagaugcgccagcaggccuccuuccuccccgccacccucaccaugaccgucgacaagggcgacaacgucaacaucuccuucaagaagguccucaucaaggaggaggacgccgucaucuacaagaacggcuccuucauccacuccgucccccgccacgagguccccgacauccucgagguccaccucccccacgcccagccccaggacgccggcgucuacuccgcccgcuacaucggcggcaaccucuucaccuccgccuucacccgccucaucguccgccgcugcgaggcccagaaguggggccccgagugcaaccaccucugcaccgccugcaugaacaacggcgucugccacgaggacaccggcgagugcaucugcccccccggcuucaugggccgcaccugcgagaaggccugcgagcuccacaccuucggccgcaccugcaaggagcgcugcuccggccaggagggcugcaaguccuacgucuucugccuccccgaccccuacggcugcuccugcgccaccggcuggaagggccuccagugcaacgaggccugccaccccggcuucuacggccccgacugcaagcuccgcugcuccugcaacaacggcgagaugugcgaccgcuuccagggcugccucugcucccccggcuggcagggccuccagugcgagcgcgagggcauccagcgcaugacccccaagaucgucgaccuccccgaccacaucgaggucaacuccggcaaguucaaccccaucugcaaggccuccggcuggccccuccccaccaacgaggagaugacccucgucaagcccgacggcaccguccuccaccccaaggacuucaaccacaccgaccacuucuccgucgccaucuucaccauccaccgcauccucccccccgacuccggcgucugggucugcuccgucaacaccgucgccggcauggucgagaagcccuucaacaucuccgucaagguccuccccaagccccucaacgcccccaacgucaucgacaccggccacaacuucgccgucaucaacaucuccuccgagcccuacuucggcgacggccccaucaaguccaagaagcuccucuacaagcccgucaaccacuacgaggccuggcagcacauccaggucaccaacgagaucgucacccucaacuaccucgagccccgcaccgaguacgagcucugcguccagcucguccgccgcggcgagggcggcgagggccaccccggccccguccgccgcuucaccaccgccuccaucggccucccccccccccgcggccucaaccuccuccccaagucccagaccacccucaaccucaccuggcagcccaucuuccccuccuccgaggacgacuucuacgucgaggucgagcgccgcuccguccagaaguccgaccagcagaacaucaagguccccggcaaccucaccuccguccuccucaacaaccuccacccccgcgagcaguacgucguccgcgcccgcgucaacaccaaggcccagggcgagugguccgaggaccucaccgccuggacccucuccgacauccuccccccccagcccgagaacaucaagaucuccaacaucacccacuccuccgccgucaucuccuggaccauccucgacggcuacuccaucuccuccaucaccauccgcuacaagguccagggcaagaacgaggaccagcacgucgacgucaagaucaagaacgccaccaucacccaguaccagcucaagggccucgagcccgagaccgccuaccaggucgacaucuucgccgagaacaacaucggcuccuccaaccccgccuucucccacgagcucgucacccuccccgagucccaggcccccgccgaccucggcggcggcaagaugcuccucaucgccauccucggcuccgccggcaugaccugccucaccguccuccucgccuuccucaucauccuccagcucaagcgcgccaacguccagcgccgcauggcccaggccuuccagaacguccgcgaggagcccgccguccaguucaacuccggcacccucgcccucaaccgcaaggucaagaacaaccccgaccccaccaucuaccccguccucgacuggaacgacaucaaguuccaggacgucaucggcgagggcaacuucggccagguccucaaggcccgcaucaagaaggacggccuccgcauggacgccgccaucaagcgcaugaaggaguacgccuccaaggacgaccaccgcgacuucgccggcgagcucgagguccucugcaagcucggccaccaccccaacaucaucaaccuccucggcgccugcgagcaccgcggcuaccucuaccucgccaucgaguacgccccccacggcaaccuccucgacuuccuccgcaagucccgcguccucgagaccgaccccgccuucgccaucgccaacuccaccgccuccacccucuccucccagcagcuccuccacuucgccgccgacgucgcccgcggcauggacuaccucucccagaagcaguucauccaccgcgaccucgccgcccgcaacauccucgucggcgagaacuacgucgccaagaucgccgacuucggccucucccgcggccaggaggucuacgucaagaagaccaugggccgccuccccguccgcuggauggccaucgagucccucaacuacuccgucuacaccaccaacuccgacgucugguccuacggcguccuccucugggagaucgucucccucggcggcacccccuacugcggcaugaccugcgccgagcucuacgagaagcucccccagggcuaccgccucgagaagccccucaacugcgacgacgaggucuacgaccucaugcgccagugcuggcgcgagaagcccuacgagcgccccuccuucgcccagauccucgucucccucaaccgcaugcucgaggagcgcaagaccuacgucaacaccacccucuacgagaaguucaccuacgccggcaucgacugcuccgccgaggaggccgccuga

SEQ ID NO: 3643 - RNA, 3375 nt, Artificial Sequence
  derived and/or modified sequence opt3 from TIE2__Homo_sapiens__CCDS6519.1
auggacagccuggccucccucgugcuuugcggcgucucucuguuguuaucagggaccguugagggagcuauggaucugauccuaauuaacagucucccccuggugagcgacgcagaaacaucccuuacuuguauagccucugguuggagaccucacgagccaaucacgauuggcagggauuucgaagcgcugaugaaucagcaucaagacccguuggagguaacccaggaugugacacgggaaugggcuaagaaagucguguggaagcgcgagaaagccucgaagaucaacggggcauacuuuugcgagggacgaguucguggcgaagccauuagaaucaggacuaugaaaaugcggcagcaggcuucauuccuccccgcaacccugacaaugaccguggacaagggugauaaugucaacaucagcuuuaagaaagugcugauaaaggaggaagacgccguaauuuauaaaaaugggaguuucauccacuccguuccucgccaugaggugccagauauucucgagguccacuuaccccaugcucaaccucaggacgccggaguguacucugcgagauauaucggcggcaaccuguuuacuagcgcauucacaaggcuuauagugcggcgcugugaagcccagaagugggggccagagugcaaucacuuguguaccgcuugcaugaacaauggagucugucacgaagauacgggugagugcauuugucccccuggcuuuauggggcgaacuugcgaaaaagccugugagcugcauaccuucggaagaacaugcaaggagaggugcuccggccaggaagguuguaagucauacguguuuugccuaccagacccguauggguguaguugcgcaacuggauggaaaggccuccaauguaacgaggcuugccaccccggcuucuacgggccugauuguaagcugcggugcagcuguaauaacggagaaaugugcgaccguuuucaggguugucuuugcucuccaggcuggcaggggcugcagugcgagcgcgaaggaauccaaagaaugacccccaaaauuguugacuugccugaucauaucgagguaaauuccggcaaguucaacccaaucuguaaagccucagguuggccccucccgacaaaugaggaaaugacccuggugaagccugacgggacggucuuacaccccaaagauuuuaaccacacugaccauuucagcguggcgauuuucacaauacacaggauccugccaccugauaguggcguuugggugugcucugucaacaccguggccggaaugguagagaagcccuuuaauauuuccguuaaggugcucccaaaaccccuuaacgcaccuaaugucaucgacacuggccauaacuucgcugugauaaauauuagcucggaaccauauuuuggggauggaccgaucaagucuaaaaagcuguuguacaaacccgucaaccacuacgaggccuggcagcauauccaggugacaaaugaaauuguuacccuaaacuaucuggagccucggacggaguacgaacucugugugcaacugguacgacgcggugagggcggggaaggacacccaggccccgucagaagguucaccacagcuuccaucggucuuccuccaccccgggggcugaauuugcucccgaagucacagacuacccugaacuuaacauggcagccuauuuuuccaaguagcgaggacgauuucuauguggagguugaacgcagauccgugcagaagucugaccaacagaauauaaaaguccccggcaaccugacuagcgugcuacucaauaaccugcacccuagggagcaguacguagugcgugcccggguuaauaccaaggcacagggagaauggucagaggaucuuacagccuggaccuugagugacauccugcccccacaaccugaaaacauuaaaaucuccaacaucacucauagcucugcugucauuucauggacgauacucgacggcuauaguaucagcuccauuacaauccgauacaaggugcaggggaaaaaugaggaucagcacguggacgucaagauuaagaacgcgaccaucacucaguaucaacugaaaggacuugagcccgaaaccgcauaccagguugauauauuugccgagaauaacaucgguucuucgaauccagcuuucagccaugaacuggugacauugccggagucccaggccccugcagaccucggcgggggaaagaugcuguuaauugccauccugggcucagcugguaugaccugccuaacugugcuccuggccuuucuuauuaucuugcagcugaaaagagcaaacguacaaaggcgcauggcgcaggcuuuccagaauguccgggaagaacccgccgugcaauuuaacagugggacacucgcacugaauagaaagguuaaaaacaauccagaucccacgauauacccuguguuagacuggaacgauauuaaguuccaggacgucaucggcgagggaaauuuuggccaggugcugaaggccaggauuaaaaaggaugggcuucgcauggacgcugccaucaaacgaaugaaggaauaugcaucuaaagaugaccaccgggauuucgcuggagaguuggaaguucucuguaagcugggccaccauccaaacauaaucaaucuacugggugccugcgagcaccguggguaccucuaucuggcgauugaauacgcuccccauggaaaccuuuuggacuuccugagaaaaagcaggguguuagagaccgacccugccuuugcaaucgccaacuccacugcuucaacacucagcucucagcaacugcuucacuucgccgcagauguagcgcgcggcauggacuaucugucccagaagcaguuuauucaucgggauuuggccgcuagaaauauccucgucggugagaacuacguggccaagauagcagacuucggccugaguagggggcaggaaguguaugucaaaaagaccaugggacgacuaccgguucgcuggauggcuauugagagccugaauuacucuguguacacaacuaacuccgauguauggucauauggcgugcuccugugggaaaucgucagucuugggggaaccccauacuguggcaugacgugcgccgaguuguaugagaaacugccccaagguuaccgguuagaaaagccucucaauugugacgaugagguguaugaccugaugagacagugcuggagggaaaaaccauacgagcgucccagcuuugcacagauccuuguuucgcugaaccgcaugcuagaggagcggaagaccuaugugaauacaacucucuacgagaaguucaccuacgccgggauugauuguuccgcugaagaggcggccuga

SEQ ID NO: 3644 - RNA, 3375 nt, Artificial Sequence
  derived and/or modified sequence opt4 from TIE2__Homo_sapiens__CCDS6519.1
auggacagccuggccagccuggugcugugcggcgugagccugcugcugagcggcaccguggagggcgccauggaccugauccugaucaacagccugccccuggugagcgacgccgagaccagccugaccugcaucgccagcggcuggagaccccacgagcccaucaccaucggcagagacuucgaggcccugaugaaccagcaccaggacccccuggaggugacccaggacgugaccagagagugggccaagaaggugguguggaagagagagaaggccagcaagaucaacggcgccuacuucugcgagggcagagugagaggcgaggccaucagaaucagaaccaugaagaugagacagcaggccagcuuccugcccgccacccugaccaugaccguggacaagggcgacaacgugaacaucagcuucaagaaggugcugaucaaggaggaggacgccgugaucuacaagaacggcagcuucauccacagcgugcccagacacgaggugcccgacauccuggaggugcaccugccccacgcccagccccaggacgccggcguguacagcgccagauacaucggcggcaaccuguucaccagcgccuucaccagacugaucgugagaagaugcgaggcccagaaguggggccccgagugcaaccaccugugcaccgccugcaugaacaacggcgugugccacgaggacaccggcgagugcaucugcccccccggcuucaugggcagaaccugcgagaaggccugcgagcugcacaccuucggcagaaccugcaaggagagaugcagcggccaggagggcugcaagagcuacguguucugccugcccgaccccuacggcugcagcugcgccaccggcuggaagggccugcagugcaacgaggccugccaccccggcuucuacggccccgacugcaagcugagaugcagcugcaacaacggcgagaugugcgacagauuccagggcugccugugcagccccggcuggcagggccugcagugcgagagagagggcauccagagaaugacccccaagaucguggaccugcccgaccacaucgaggugaacagcggcaaguucaaccccaucugcaaggccagcggcuggccccugcccaccaacgaggagaugacccuggugaagcccgacggcaccgugcugcaccccaaggacuucaaccacaccgaccacuucagcguggccaucuucaccauccacagaauccugccccccgacagcggcgugugggugugcagcgugaacaccguggccggcaugguggagaagcccuucaacaucagcgugaaggugcugcccaagccccugaacgcccccaacgugaucgacaccggccacaacuucgccgugaucaacaucagcagcgagcccuacuucggcgacggccccaucaagagcaagaagcugcuguacaagcccgugaaccacuacgaggccuggcagcacauccaggugaccaacgagaucgugacccugaacuaccuggagcccagaaccgaguacgagcugugcgugcagcuggugagaagaggcgagggcggcgagggccaccccggccccgugagaagauucaccaccgccagcaucggccugcccccccccagaggccugaaccugcugcccaagagccagaccacccugaaccugaccuggcagcccaucuuccccagcagcgaggacgacuucuacguggagguggagagaagaagcgugcagaagagcgaccagcagaacaucaaggugcccggcaaccugaccagcgugcugcugaacaaccugcaccccagagagcaguacguggugagagccagagugaacaccaaggcccagggcgaguggagcgaggaccugaccgccuggacccugagcgacauccugcccccccagcccgagaacaucaagaucagcaacaucacccacagcagcgccgugaucagcuggaccauccuggacggcuacagcaucagcagcaucaccaucagauacaaggugcagggcaagaacgaggaccagcacguggacgugaagaucaagaacgccaccaucacccaguaccagcugaagggccuggagcccgagaccgccuaccagguggacaucuucgccgagaacaacaucggcagcagcaaccccgccuucagccacgagcuggugacccugcccgagagccaggcccccgccgaccugggcggcggcaagaugcugcugaucgccauccugggcagcgccggcaugaccugccugaccgugcugcuggccuuccugaucauccugcagcugaagagagccaacgugcagagaagaauggcccaggccuuccagaacgugagagaggagcccgccgugcaguucaacagcggcacccuggcccugaacagaaaggugaagaacaaccccgaccccaccaucuaccccgugcuggacuggaacgacaucaaguuccaggacgugaucggcgagggcaacuucggccaggugcugaaggccagaaucaagaaggacggccugagaauggacgccgccaucaagagaaugaaggaguacgccagcaaggacgaccacagagacuucgccggcgagcuggaggugcugugcaagcugggccaccaccccaacaucaucaaccugcugggcgccugcgagcacagaggcuaccuguaccuggccaucgaguacgccccccacggcaaccugcuggacuuccugagaaagagcagagugcuggagaccgaccccgccuucgccaucgccaacagcaccgccagcacccugagcagccagcagcugcugcacuucgccgccgacguggccagaggcauggacuaccugagccagaagcaguucauccacagagaccuggccgccagaaacauccuggugggcgagaacuacguggccaagaucgccgacuucggccugagcagaggccaggagguguacgugaagaagaccaugggcagacugcccgugagauggauggccaucgagagccugaacuacagcguguacaccaccaacagcgacguguggagcuacggcgugcugcugugggagaucgugagccugggcggcacccccuacugcggcaugaccugcgccgagcuguacgagaagcugccccagggcuacagacuggagaagccccugaacugcgacgacgagguguacgaccugaugagacagugcuggagagagaagcccuacgagagacccagcuucgcccagauccuggugagccugaacagaaugcuggaggagagaaagaccuacgugaacaccacccuguacgagaaguucaccuacgccggcaucgacugcagcgccgaggaggccgccuga

SEQ ID NO: 3645 - RNA, 3375 nt, Artificial Sequence
  derived and/or modified sequence opt5 from TIE2__Homo_sapiens__CCDS6519.1
auggacagccuggccucccucgugcugugcggcgucucucuucugcucagcgggaccguugagggagcuauggaucugauccuuauuaacucccugccccucgugucugacgccgaaacaagccugacguguaucgcguccggcuggagaccucacgagccgauuaccaucgggcgggauuucgaagcucugaugaaucagcaucaagacccccucgaggugacacaggaugucacccgcgaaugggccaagaaagugguuuggaagagagagaaagccucuaagauuaacggagcuuacuuuugcgagggccgggugcgcggggaagccaucagaauccggacaaugaaaaugcgccagcaggcuagcuuccugccugccacccuuacaaugaccgucgacaagggagauaaugugaacauuuccuuuaagaaaguucugaucaaggaggaagacgcggugauuuauaaaaauggcagcuucauccacucuguccccagacaugaggugccugauauucucgaggugcaucugccccacgcccaaccucaggacgcuggcgucuacuccgcccgguauaucgggggaaaccuuuuuacgagcgcuuucacccgccugauuguuagacggugugaagcccagaaguggggcccggagugcaaucaccucuguacagcgugcaugaacaauggggugugucacgaagauaccggagagugcaucugucccccuggcuuuauggggcgcacaugcgaaaaagccugugagcugcauaccuucggaagaacgugcaaggagcggugcucuggccaggaaggcuguaaguccuacguguuuugccugcccgacccuuauggguguagcugcgcuacaggauggaaaggccuccaauguaacgaggccugccaccccggguucuacggaccggauuguaagcugcgcugcucuuguaauaacggcgaaaugugcgacagauuucaggggugucuuugcuccccuggauggcagggccugcagugcgagcgggaaggcauccaaagaaugacccccaaaauugucgaccucccugaucauaucgaggugaauagcgggaaguucaaccccauuuguaaggcuuccggauggccccugccuacaaaugaggaaaugacccuuguuaaaccggacggcaccgugcugcaccccaaagauuuuaaccacacagaccauuucucugucgccaucuucacgauucaccgcauccucccucccgauagcgggguguggguuugcuccgugaacaccgucgccggaaugguggagaagccuuuuaauaucagcgucaaggugcugcccaaaccgcugaacgcuccuaauguuauugacacaggccauaacuucgcggugaucaauauuucuuccgaacccuauuuuggggauggcccuaucaagagcaaaaagcuccuguacaaacccgucaaccacuacgaggccuggcagcauauucaggugaccaaugaaaucguuacacuuaacuaucuggagccucggaccgaguacgaacucugugugcaacuggucagacgcggagagggcggggaaggacaccccggcccggugcggagauucacgacagcuucuaucgggcuuccuccuccccgcggacugaaucuccugcccaagagccagaccacccugaaccucacauggcagccgauuuuucccuccucugaggacgauuucuauguggagguugaacggagaagcguccagaaguccgaccaacagaauaucaaagugccuggcaaccugaccagcgugcuucugaauaaccuccacccccgcgagcaguacgucgugcgggccagaguuaauacaaaggcccagggggaauggucugaggaucugacggcuuggacccuguccgacauucuuccuccccaaccugaaaacaucaaaauuagcaacaucacacauucuuccgccgugauuagcuggaccauccucgacggcuauuccaucucuagcauuacaauccgcuacaagguccagggcaaaaaugaggaucagcacguggacguuaagauuaagaacgcgaccaucacgcaguaucaacugaaaggacuggagcccgaaaccgcuuaccagguggauauuuuugccgagaauaacaucggguccucuaauccggccuucagccaugaacucgucacacugccugagucccaggcucccgccgaccuuggaggcgggaagaugcugcucaucgcuauucugggaagcgccggcaugaccugccugacagugcuucucgcguuucugaucauucugcagcucaaacgggccaacguucaaagacggauggcucaggccuuccagaaugugcgcgaggaaccugcuguccaauuuaacucugggacccuggcccuuaauagaaaggugaaaaacaaucccgauccgacgaucuacccugugcuggacuggaacgauauuaaguuccaggacgucaucggcgagggaaauuuuggccagguucucaaggcgcggaucaaaaaggaugggcugagaauggacgccgcuauuaaacgcaugaaggaauaugccuccaaagaugaccaccgggauuucgcuggagagcuggaagugcuuuguaagcucggccaccaucccaacaucauuaaucugcugggggccugcgagcacagaggauaccucuaucuggccaucgaauacgcuccucauggcaaccuucuggacuuccuccgcaaaagcagagugcuggagacagaccccgcguuugccauugcuaacucuaccgccuccacacugagcucucagcaacuucuccacuucgccgcugaugucgcccgggggauggacuaucugagccagaagcaguuuauccaucgcgaucuggcggcuagaaauauccucgugggcgagaacuacguugccaagauugccgacuucggacugucccggggccaggaaguguaugucaaaaagaccauggggcgccuucccgugagauggauggcuaucgagagccugaauuacucuguuuacaccacaaacuccgauguguggagcuauggaguccuccugugggaaauugugucccugggcgggacgccuuacuguggaaugaccugcgccgagcuuuaugagaaacugccgcaaggcuaccggcucgaaaagccccugaauugugacgaugagguuuaugaccucaugcgccagugcuggagagaaaaaccuuacgagcggcccucuuuugcgcagauccuggugagccuuaaccgcaugcuggaagagagaaagacauaugucaauaccacacucuacgagaaguucaccuacgcuggcauugauuguuccgccgaagaggccgcuuga

SEQ ID NO: 3646 - protein, 596 aa, Artificial Sequence
  TKTL1__Homo_sapiens__P51854
MADAEARAEFPEEARPDRGTLQVLQDMASRLRIHSIRATCSTSSGHPTSCSSSSEIMSVLFFYIMRYKQSDPENPDNDRFVLAKRLSFVDVATGWLGQGLGVACGMAYTGKYFDRASYRVFCLMSDGESSEGSVWEAMAFASYYSLDNLVAIFDVNRLGHSGALPAEHCINIYQRRCEAFGWNTYVVDGRDVEALCQVFWQASQVKHKPTAVVAKTFKGRGTPSIEDAESWHAKPMPRERADAIIKLIESQIQTSRNLDPQPPIEDSPEVNITDVRMTSPPDYRVGDKIATRKACGLALAKLGYANNRVVVLDGDTRYSTFSEIFNKEYPERFIECFMAEQNMVSVALGCASRGRTIAFASTFAAFLTRAFDHIRIGGLAESNINIIGSHCGVSVGDDGASQMALEDIAMFRTIPKCTIFYPTDAVSTEHAVALAANAKGMCFIRTTRPETMVIYTPQERFEIGQAKVLRHCVSDKVTVIGAGITVYEALAAADELSKQDIFIRVIDLFTIKPLDVATIVSSAKATEGRIITVEDHYPQGGIGEAVCAAVSMDPDIQVHSLAVSGVPQSGKSEELLDMYGISARHIIVAVKCMLLN

SEQ ID NO: 3647 - RNA, 1791 nt, Artificial Sequence
  TKTL1__Homo_sapiens__BAF84950
auggcggaugcugaggcgagggcugaguucccggaggaggccagaccugacaggggcaccuugcagguguugcaagauauggccagccgcuugcgaauccauuccaucagggccacaugcuccacgagcuccggccacccuacaucauguagcaguucuucugagaucaugucugugcuguucuucuacaucaugagguacaagcagucagauccagagaauccggacaacgaccgauuuguccucgcaaagagacugucguuuguggauguggcaacaggauggcucggacaaggacugggaguugcauguggaauggcauauacuggcaaguacuucgacagggccagcuaccggguguucugccucaugagugauggcgaguccucagaaggcucugucugggaggcaauggccuuugcuuccuacuacagucuggacaaucuuguggcaaucuuugaugugaaccgccugggacacaguggugcauugcccgccgagcacugcauaaacaucuaucagaggcgcugcgaagccuuuggguggaacacuuaugugguggacggccgggacguggaggcacugugccagguauucuggcaggcuucucaggugaagcacaagcccacugcugugguggccaagaccuucaagggccggggcaccccaaguauugaggaugcagaaaguuggcaugcaaagccaaugccgagagaaagagcagaugccauuaucaaauuaauugagagccagauacagaccagcaggaaucuugacccacagccccccauugaggacucaccugaagucaacaucacagauguaaggaugaccucuccaccugauuacagaguuggugacaagauagcuacucggaaagcaugcggucuggcucuggcuaagcugggcuacgcgaacaacagagucguugugcuggauggugacaccagguacucuacuuucucugagauauucaacaaggaguacccugagcgcuucaucgagugcuuuauggcugaacaaaacauggugagcguggcucugggcugugccucccguggacggaccauugcuuuugcuagcaccuuugcugccuuucugacucgagcauuugaucacauccggauaggaggccucgcugagagcaacaucaacauuauugguucccacugugggguaucuguuggugacgauggugcuucccagauggcccuggaggauauagccauguuccgaaccauucccaagugcacgaucuucuacccaacugaugccgucuccacggagcaugcuguugcucuggcagccaaugccaaggggaugugcuucauucggaccacccgaccagaaacuaugguuauuuacaccccacaagaacgcuuugagaucggacaggccaagguccuccgccacugugucagugacaaggucacaguuauuggagcuggaauuacuguguaugaagccuuagcagcugcugaugagcuuucgaaacaagauauuuuuauccgugucaucgaccuguuuaccauuaaaccucuggaugucgccaccaucgucuccagugcaaaagccacagagggccggaucauuacaguggaggaucacuacccgcaagguggcaucggggaagcugucugcgcagccgucuccauggauccugacauucagguucauucgcuggcagugucgggagugccccagagugggaaguccgaggaauugcuggauauguauggaauuagugccagacauaucauaguggccgugaaaugcauguugcugaacuaa

SEQ ID NO: 3648 - RNA, 1791 nt, Artificial Sequence
  derived and/or modified sequence opt1 from TKTL1__Homo_sapiens__BAF84950
auggccgacgccgaggcgcgcgccgaguuccccgaggaggcccggccggaccgcggcacccuccaggugcugcaggacauggccagccggcugcgcauccacuccauccgggcgaccugcagcacguccagcgggcaccccaccuccugcagcuccagcuccgagaucaugagcguccuguucuucuacaucaugcgcuacaagcaguccgaccccgagaaccccgacaacgaccgguucgugcucgccaagcgccugagcuucguggacgucgccaccggcuggcuggggcagggccucgggguggccugcggcauggccuacaccggcaaguacuucgaccgggcguccuaccgcguguucugccugaugagcgacggggaguccagcgagggcuccgucugggaggccauggccuucgccagcuacuacucccuggacaaccucguggccaucuucgacgugaaccggcuggggcacagcggcgcgcugccggccgagcacugcaucaacaucuaccagcgccggugcgaggccuucggguggaacacguacgucguggacggccgcgacguggaggcccucugccaggucuucuggcaggccagccaggugaagcacaagcccaccgcgguggucgccaagaccuucaagggccgggggacccccuccaucgaggacgccgagagcuggcacgccaagcccaugccgcgcgagcgggccgacgcgaucaucaagcugaucgagucccagauccagacgagccgcaaccuggacccccagccgcccaucgaggacucccccgaggugaacaucaccgacgugcggaugaccagcccgcccgacuaccgcgucggcgacaagaucgccacccggaaggccugcgggcucgcccuggccaagcugggcuacgcgaacaaccgcguggugguccucgacggcgacacgcgcuacuccaccuucagcgagaucuucaacaaggaguaccccgagcgguucaucgagugcuucauggccgagcagaacaugguguccguggcccuggggugcgccagccgcggccggaccaucgcguucgccuccaccuucgccgccuuccugacgcgcgccuucgaccacauccggaucgggggccucgcggagagcaacaucaacaucaucgggucccacugcggcgucagcgugggcgacgacggggccucccagauggcccuggaggacaucgccauguuccgcaccauccccaagugcaccaucuucuaccccaccgacgccgucagcacggagcacgcgguggcccuggccgccaacgccaagggcaugugcuucauccggaccacccgccccgagaccauggugaucuacacgccccaggagcgguucgagaucgggcaggcgaagguccuccgccacugcguguccgacaaggugaccgucaucggcgccgggaucaccguguacgaggcccuggccgcggccgacgagcugagcaagcaggacaucuucauccgggugaucgaccucuucaccaucaagccgcuggacgucgccacgaucguguccagcgccaaggccaccgagggccgcaucaucaccguggaggaccacuacccccagggcgggaucggcgaggcggucugcgccgccgugagcauggaccccgacauccaggugcacucccuggccgucagcggggugccccaguccggcaagagcgaggagcuccuggacauguacgggaucuccgcccggcacaucaucguggcggucaagugcaugcugcucaacuga

SEQ ID NO: 3649 - RNA, 1791 nt, Artificial Sequence
  derived and/or modified sequence opt2 from TKTL1__Homo_sapiens__BAF84950
auggccgacgccgaggcccgcgccgaguuccccgaggaggcccgccccgaccgcggcacccuccagguccuccaggacauggccucccgccuccgcauccacuccauccgcgccaccugcuccaccuccuccggccaccccaccuccugcuccuccuccuccgagaucauguccguccucuucuucuacaucaugcgcuacaagcaguccgaccccgagaaccccgacaacgaccgcuucguccucgccaagcgccucuccuucgucgacgucgccaccggcuggcucggccagggccucggcgucgccugcggcauggccuacaccggcaaguacuucgaccgcgccuccuaccgcgucuucugccucauguccgacggcgaguccuccgagggcuccgucugggaggccauggccuucgccuccuacuacucccucgacaaccucgucgccaucuucgacgucaaccgccucggccacuccggcgcccuccccgccgagcacugcaucaacaucuaccagcgccgcugcgaggccuucggcuggaacaccuacgucgucgacggccgcgacgucgaggcccucugccaggucuucuggcaggccucccaggucaagcacaagcccaccgccgucgucgccaagaccuucaagggccgcggcacccccuccaucgaggacgccgaguccuggcacgccaagcccaugccccgcgagcgcgccgacgccaucaucaagcucaucgagucccagauccagaccucccgcaaccucgacccccagccccccaucgaggacucccccgaggucaacaucaccgacguccgcaugaccuccccccccgacuaccgcgucggcgacaagaucgccacccgcaaggccugcggccucgcccucgccaagcucggcuacgccaacaaccgcgucgucguccucgacggcgacacccgcuacuccaccuucuccgagaucuucaacaaggaguaccccgagcgcuucaucgagugcuucauggccgagcagaacauggucuccgucgcccucggcugcgccucccgcggccgcaccaucgccuucgccuccaccuucgccgccuuccucacccgcgccuucgaccacauccgcaucggcggccucgccgaguccaacaucaacaucaucggcucccacugcggcgucuccgucggcgacgacggcgccucccagauggcccucgaggacaucgccauguuccgcaccauccccaagugcaccaucuucuaccccaccgacgccgucuccaccgagcacgccgucgcccucgccgccaacgccaagggcaugugcuucauccgcaccacccgccccgagaccauggucaucuacaccccccaggagcgcuucgagaucggccaggccaagguccuccgccacugcgucuccgacaaggucaccgucaucggcgccggcaucaccgucuacgaggcccucgccgccgccgacgagcucuccaagcaggacaucuucauccgcgucaucgaccucuucaccaucaagccccucgacgucgccaccaucgucuccuccgccaaggccaccgagggccgcaucaucaccgucgaggaccacuacccccagggcggcaucggcgaggccgucugcgccgccgucuccauggaccccgacauccagguccacucccucgccgucuccggcgucccccaguccggcaaguccgaggagcuccucgacauguacggcaucuccgcccgccacaucaucgucgccgucaagugcaugcuccucaacuga

SEQ ID NO: 3650 - RNA, 1791 nt, Artificial Sequence
  derived and/or modified sequence opt3 from TKTL1__Homo_sapiens__BAF84950
auggccgacgcugaggcaagagccgaguuccccgaggaagcgaggccugaucggggcacccuccaggugcugcaagacauggcuagccgccuucgaauccacuccauucgugccacaugcucuacuucaagugggcauccaacgagcuguuccucuucgucagagauaaugagcguccuguuuuucuacaucaugagauauaagcagagugauccggaaaaccccgacaaugauagguuuguuuuggcaaaacgguuauccuucguggacguagccaccggauggcugggucagggccuagggguggcuugcggaauggcauacacaggcaaguauuuugaucgcgccucuuacagagucuucugucucaugagcgacggugaguccucagaggggagugugugggaagcuauggccuuugcgagcuauuacucucuggauaaccuuguugcaauuuucgacgugaauaggcugggacacuccggcgccuugccugcugagcauugcaucaacauuuaucagcggcgcugugaagccuuuggcuggaauacuuacgucguggaugggcgagacguagaggcacucugccaaguuuucuggcaggcuucacaggugaaacacaagccaaccgccgucguggcgaaaacauuuaagggaagagguacccccagcaucgaggaugccgaaaguuggcaugcaaagccuaugccaagggagcgggcugacgccauaaucaaacugauugaaucucagauccaaacuucccguaaccuggacccccagccuccaauugaggauagcccggaagugaauaucacagacguccgcaugaccucgcccccugauuacagaguuggcgacaagauagcuacgaggaaagccugugggcucgcauuagccaagcugggauaugcuaacaaucgggugguagugcuugauggcgacacucgauacucuaccuucuccgagauuuuuaacaaagaguauccagaacgcuucaucgagugcuucauggcggaacagaauauggucucaguggcauuggguugugccaguagagggaggacaauugcuuuugccagcacuuucgcagccuuucugacccgggcuuucgaucacauccgcaucggaggccuagccgaguccaacauuaauauaaucggcucucacugcgggguuagcgugggagacgauggugcaucacagauggcgcucgaagacauugcuauguuuagaacaauccccaaguguaccauauucuacccuacggaugccgucaguacugagcaugcaguggcccuggcugccaacgcaaagggcaugugcuuuauuaggacaacccguccagagacuaugguaaucuauacaccccaagaacgguucgagaucgggcaggcuaaaguucuucgacacugcguguccgacaaggucaccgugauuggagccggcaucacggucuacgaagcgcuggccgcugcagacgaguugagcaaacaggauauuuuuauaagagugaucgaccucuucaccauuaagccgcuggauguugccacaaucgugucuucagcuaaagccacugaagguaggaucauuaccguagaggaccauuauccucaagggggcauaggagaggcagucugugcggccgugaguauggaucccgacauccagguucacagcuuagcuguguccggcgucccacagucugggaagucggaagaacugcucgauauguacggaauuagcgcccgccacaucauuguggcaguaaaaugcaugcuucugaauuga

SEQ ID NO: 3651 - RNA, 1791 nt, Artificial Sequence
  derived and/or modified sequence opt4 from TKTL1__Homo_sapiens__BAF84950
auggccgacgccgaggccagagccgaguuccccgaggaggccagacccgacagaggcacccugcaggugcugcaggacauggccagcagacugagaauccacagcaucagagccaccugcagcaccagcagcggccaccccaccagcugcagcagcagcagcgagaucaugagcgugcuguucuucuacaucaugagauacaagcagagcgaccccgagaaccccgacaacgacagauucgugcuggccaagagacugagcuucguggacguggccaccggcuggcugggccagggccugggcguggccugcggcauggccuacaccggcaaguacuucgacagagccagcuacagaguguucugccugaugagcgacggcgagagcagcgagggcagcgugugggaggccauggccuucgccagcuacuacagccuggacaaccugguggccaucuucgacgugaacagacugggccacagcggcgcccugcccgccgagcacugcaucaacaucuaccagagaagaugcgaggccuucggcuggaacaccuacgugguggacggcagagacguggaggcccugugccagguguucuggcaggccagccaggugaagcacaagcccaccgccgugguggccaagaccuucaagggcagaggcacccccagcaucgaggacgccgagagcuggcacgccaagcccaugcccagagagagagccgacgccaucaucaagcugaucgagagccagauccagaccagcagaaaccuggacccccagccccccaucgaggacagccccgaggugaacaucaccgacgugagaaugaccagcccccccgacuacagagugggcgacaagaucgccaccagaaaggccugcggccuggcccuggccaagcugggcuacgccaacaacagagugguggugcuggacggcgacaccagauacagcaccuucagcgagaucuucaacaaggaguaccccgagagauucaucgagugcuucauggccgagcagaacauggugagcguggcccugggcugcgccagcagaggcagaaccaucgccuucgccagcaccuucgccgccuuccugaccagagccuucgaccacaucagaaucggcggccuggccgagagcaacaucaacaucaucggcagccacugcggcgugagcgugggcgacgacggcgccagccagauggcccuggaggacaucgccauguucagaaccauccccaagugcaccaucuucuaccccaccgacgccgugagcaccgagcacgccguggcccuggccgccaacgccaagggcaugugcuucaucagaaccaccagacccgagaccauggugaucuacaccccccaggagagauucgagaucggccaggccaaggugcugagacacugcgugagcgacaaggugaccgugaucggcgccggcaucaccguguacgaggcccuggccgccgccgacgagcugagcaagcaggacaucuucaucagagugaucgaccuguucaccaucaagccccuggacguggccaccaucgugagcagcgccaaggccaccgagggcagaaucaucaccguggaggaccacuacccccagggcggcaucggcgaggccgugugcgccgccgugagcauggaccccgacauccaggugcacagccuggccgugagcggcgugccccagagcggcaagagcgaggagcugcuggacauguacggcaucagcgccagacacaucaucguggccgugaagugcaugcugcugaacuga

SEQ ID NO: 3652 - RNA, 1791 nt, Artificial Sequence
  derived and/or modified sequence opt5 from TKTL1__Homo_sapiens__BAF84950
auggccgacgcugaggccagagcggaauuucccgaggaagcucggccugaucgcggcacccuucaggugcuccaagacauggccagcagacugcggauccacuccauucgcgccacaugcucuacgagcuccgggcauccgaccucuuguagcuccucuagcgagaucauguccguccuuuucuucuacauuaugagauauaagcagagcgaucccgaaaacccugacaaugaucgguuuguucuggcuaaacgccucucuuucguggacguggccacaggauggcugggccaggggcuuggagucgcuugcggcauggccuacaccgggaaguauuuugauagagcguccuaccggguguucugucugaugagcgacggagagucuuccgagggcagcguuugggaagccauggcuuuugccucuuauuacucccucgauaaccugguggcuaucuucgacgucaaucgccugggccacagcggggcccuccccgcggagcauugcauuaacaucuaucagagacggugugaagccuuuggauggaauacauacgugguugauggccgcgacguggaggcucugugccaagucuucuggcaggccucccaggugaaacacaagccuaccgcuguggucgccaaaacauuuaaggggagaggaacccccucuaucgaggaugccgaaagcuggcaugcuaagccuaugccgcgggagcgcgcggacgccauuaucaaacuuauugaaucccagauccaaacgagcagaaaccuggacccccagccucccauugaggauucuccugaaguuaauaucaccgacgugcggaugacauccccgcccgauuacagagugggcgacaagauugcuacccgcaaagccugugggcucgcccuggcuaagcugggauaugccaacaaucgggucgugguucuggauggcgacacaagauacagcaccuucucugagaucuuuaacaaagaguauccugaacgcuucaucgagugcuucauggcggaacagaauauggugagcgucgcucucggcugugccucccgggggagaacgauugccuuugcuucuacauucgccgcuuuucugacccgcgccuucgaucacauccggauuggaggccuggcggagagcaacaucaauauuaucgggucccacugcggagugagcguuggcgacgauggggccucucagauggcucucgaagacaucgccauguuuagaacaauucccaaguguaccaucuucuacccuaccgaugcuguguccacagagcaugccgucgcgcuggccgcuaacgccaagggaaugugcuuuauucgcacgacccggcccgagacaauggugaucuauacaccccaagaaagauucgagauuggccaggcuaaaguccuucgccacugcgugagcgacaagguuaccgugaucggcgccgggaucaccgucuacgaagcccuggcugcggccgacgagcucucuaaacaggauauuuuuauccgggugauugaccuguucacgaucaagccucuugauguugcuacaauuguguccagcgccaaagccaccgaaggaagaaucauuaccgucgaggaccauuauccgcaaggcgggaucggagaggcugugugugccgcgguguccauggaucccgacauccagguucacucucuggcugucagcggcgugccucaguccgggaagucugaggaacuccuggauauguacggcauuagcgcccggcacaucauuguggccgucaaaugcaugcugcucaauuga

SEQ ID NO: 3653 - protein, 286 aa, Artificial Sequence
  TPI/m__Homo_sapiens__P60174
MAEDGEEAEFHFAALYISGQWPRLRADTDLQRLGSSAMAPSRKFFVGGNWKMNGRKQSLGELIGTLNAAKVPADTEVVCAPPTAYIDFARQKLDPKIAVAAQNCYKVTNGAFTGEISPGMIKDCGATWVVLGHSERRHVFGESDELIGQKVAHALAEGLGVIACIGEKLDEREAGITEKVVFEQTKVIADNVKDWSKVVLAYEPVWAIGTGKTATPQQAQEVHEKLRGWLKSNVSDAVAQSTRIIYGGSVTGATCKELASQPDVDGFLVGGASLKPEFVDIINAKQ

SEQ ID NO: 3654 - RNA, 861 nt, Artificial Sequence
  TPI/m__Homo_sapiens__EAW88722
auggcggaggacggcgaggaggcggaguuccacuucgcggcgcucuauauaagugggcaguggccgcgacugcgcgcagacacugaccuucagcgccucggcuccagcgccauggcgcccuccaggaaguucuucguugggggaaacuggaagaugaacgggcggaagcagagucugggggagcucaucggcacucugaacgcggccaaggugccggccgacaccgaggugguuugugcucccccuacugccuauaucgacuucgcccggcagaagcuagaucccaagauugcuguggcugcgcagaacugcuacaaagugacuaauggggcuuuuacuggggagaucagcccuggcaugaucaaagacugcggagccacgugggugguccuggggcacucagagagaaggcaugucuuuggggagucagaugagcugauugggcagaaaguggcccaugcucuggcagagggacucggaguaaucgccugcauuggggagaagcuagaugaaagggaagcuggcaucacugagaagguuguuuucgagcagacaaaggucaucgcagauaacgugaaggacuggagcaaggucguccuggccuaugagccugugugggccauugguacuggcaagacugcaacaccccaacaggcccaggaaguacacgagaagcuccgaggauggcugaaguccaacgucucugaugcgguggcucagagcacccguaucauuuauggaggcucugugacuggggcaaccugcaaggagcuggccagccagccugauguggauggcuuccuuguggguggugcuucccucaagcccgaauucguggacaucaucaaugccaaacaauga

SEQ ID NO: 3655 - RNA, 861 nt, Artificial Sequence
  derived and/or modified sequence opt1 from TPI/m__Homo_sapiens__EAW88722
auggccgaggacggcgaggaggccgaguuccacuucgcggcccuguacaucagcgggcaguggccccgccuccgggccgacaccgaccugcagcgccugggcuccagcgccauggccccgucccggaaguucuucgucgggggcaacuggaagaugaacgggcgcaagcagagccucggcgagcugaucggcacccugaacgcggccaaggugcccgccgacacggagguggugugcgccccgcccaccgcguacaucgacuucgcccggcagaagcucgaccccaagaucgccgucgccgcccagaacugcuacaaggugaccaacggggcguucaccggcgagaucucccccgggaugaucaaggacugcggcgccacgugggugguccuggggcacagcgagcgccggcacguguucggcgaguccgacgagcugaucggccagaagguggcccacgcccucgccgaggggcugggcgucaucgcgugcaucggggagaagcuggacgagcgcgaggccggcaucaccgagaaggugguguucgagcagaccaaggucaucgccgacaacgugaaggacuggagcaaggugguccucgccuacgagcccgugugggccaucggcaccgggaagacggcgaccccgcagcaggcccaggaggugcacgagaagcugcggggcuggcugaaguccaacgucagcgacgccguggcccaguccacccgcaucaucuacgggggcagcgugaccggggccacgugcaaggagcucgcgucccagcccgacgucgacggcuuccuggugggcggggccagccugaagcccgaguucguggacaucaucaacgccaagcaguga

SEQ ID NO: 3656 - RNA, 861 nt, Artificial Sequence
  derived and/or modified sequence opt2 from TPI/m__Homo_sapiens__EAW88722
auggccgaggacggcgaggaggccgaguuccacuucgccgcccucuacaucuccggccaguggccccgccuccgcgccgacaccgaccuccagcgccucggcuccuccgccauggcccccucccgcaaguucuucgucggcggcaacuggaagaugaacggccgcaagcagucccucggcgagcucaucggcacccucaacgccgccaagguccccgccgacaccgaggucgucugcgccccccccaccgccuacaucgacuucgcccgccagaagcucgaccccaagaucgccgucgccgcccagaacugcuacaaggucaccaacggcgccuucaccggcgagaucucccccggcaugaucaaggacugcggcgccaccugggucguccucggccacuccgagcgccgccacgucuucggcgaguccgacgagcucaucggccagaaggucgcccacgcccucgccgagggccucggcgucaucgccugcaucggcgagaagcucgacgagcgcgaggccggcaucaccgagaaggucgucuucgagcagaccaaggucaucgccgacaacgucaaggacugguccaaggucguccucgccuacgagcccgucugggccaucggcaccggcaagaccgccaccccccagcaggcccaggagguccacgagaagcuccgcggcuggcucaaguccaacgucuccgacgccgucgcccaguccacccgcaucaucuacggcggcuccgucaccggcgccaccugcaaggagcucgccucccagcccgacgucgacggcuuccucgucggcggcgccucccucaagcccgaguucgucgacaucaucaacgccaagcaguga

SEQ ID NO: 3657 - RNA, 861 nt, Artificial Sequence
  derived and/or modified sequence opt3 from TPI/m__Homo_sapiens__EAW88722
auggccgaggacggcgaagaggcugaguuccacuuugcagcccuguacaucagcgggcaguggcccagacucagggcggauaccgaccuucaacggcugggauccucugcuauggccccuucacgcaaguucuuuguggguggcaacuggaaaaugaaugggcgaaagcagaguuugggagaauuaauuggcacacugaacgcagccaaagucccagcugauacugaaguugugugcgcaccgcccacggccuauauagacuucgcucgucagaagcuagauccuaaaaucgccguagcggcacagaauuguuacaaggugaccaacggugccuuuacaggggagauuagcccaggaaugaucaaggacugcggcgcuacuugggucgugcucggccauuccgagagaaggcacguuuucggggaaucugaugagcugauuggacaaaaaguggcccaugcacuugcugaaggucugggcgucaucgccuguauaggggagaaguuggacgagcgggaagcgggaaucaccgagaaagugguauuugaacagacaaagguuauugccgauaaugugaaagacuggucgaaggucgugcucgcauaugagcccgugugggcuaucggcaccgguaagacugccacaccucagcaggcucaagaaguccacgagaaacugcgcggguggcugaagucaaacguuagcgaugccguggcacagaguaccagaauuaucuacggaggcuccguaacgggcgccacuugcaaagagcucgcuucucagccagacguggauggguucuuagucggaggugcgagccugaagcccgaauuuguggacauaauuaaugcaaaacaguga

SEQ ID NO: 3658 - RNA, 861 nt, Artificial Sequence
  derived and/or modified sequence opt4 from TPI/m__Homo_sapiens__EAW88722
auggccgaggacggcgaggaggccgaguuccacuucgccgcccuguacaucagcggccaguggcccagacugagagccgacaccgaccugcagagacugggcagcagcgccauggcccccagcagaaaguucuucgugggcggcaacuggaagaugaacggcagaaagcagagccugggcgagcugaucggcacccugaacgccgccaaggugcccgccgacaccgagguggugugcgccccccccaccgccuacaucgacuucgccagacagaagcuggaccccaagaucgccguggccgcccagaacugcuacaaggugaccaacggcgccuucaccggcgagaucagccccggcaugaucaaggacugcggcgccaccuggguggugcugggccacagcgagagaagacacguguucggcgagagcgacgagcugaucggccagaagguggcccacgcccuggccgagggccugggcgugaucgccugcaucggcgagaagcuggacgagagagaggccggcaucaccgagaaggugguguucgagcagaccaaggugaucgccgacaacgugaaggacuggagcaagguggugcuggccuacgagcccgugugggccaucggcaccggcaagaccgccaccccccagcaggcccaggaggugcacgagaagcugagaggcuggcugaagagcaacgugagcgacgccguggcccagagcaccagaaucaucuacggcggcagcgugaccggcgccaccugcaaggagcuggccagccagcccgacguggacggcuuccuggugggcggcgccagccugaagcccgaguucguggacaucaucaacgccaagcaguga

SEQ ID NO: 3659 - RNA, 861 nt, Artificial Sequence
  derived and/or modified sequence opt5 from TPI/m__Homo_sapiens__EAW88722
auggccgaggacggcgaagaggcugaguuccacuuugccgcgcuguacaucagcgggcaguggcccagacuccgggcugauaccgaccugcaacgccuuggauccucugccauggccccuagcagaaaguucuuugugggcgggaacuggaaaaugaauggacggaagcagucccugggcgaacucauugggacacugaacgcugccaaagucccggcugauacggaaguugugugcgcgcccccuaccgccuauaucgacuucgcccgccagaagcuggaucccaaaauugcuguggccgcucagaauuguuacaaggucacaaacggagccuuuaccggcgagaucucuccuggcaugauuaaggacugcggggcgacaugggugguucugggacauagcgagagacggcacguguucggcgaauccgaugagcucaucgggcaaaaagucgcccaugcucuggccgaaggacugggcgugaucgcuuguauuggggagaagcucgacgagcgcgaagccggaaucaccgagaaaguuguguuugaacagacaaaggucauugccgauaaugugaaagacuggucuaaggugguccuggcuuaugagcccguuugggcgaucggcaccggcaagacggccaccccucagcaggcucaagaagugcacgagaaacuuagaggguggcuuaagagcaacguguccgaugccgucgcccagagcacacggauuaucuacggaggcucugugaccggggcuacaugcaaagagcucgccucccagccggacguugauggauuccuggugggcggggcgagccuuaagcccgaauuugucgacauuaucaaugcuaaacaguga

SEQ ID NO: 3660 - protein, 119 aa, Artificial Sequence
  TRGV11__Homo_sapiens__Q99601
MPLVVAVIFFSLWVFALGQLEQPEISISRPANKSAHISWKASIQGFSSKIIHWYWQKPNKGLEYLLHVFLTISAQDCSGGKTKKLEVSKNAHTSTSTLKIKFLEKEDEVVYHCACWIRH

SEQ ID NO: 3661 - RNA, 357 nt, Artificial Sequence
  TRGV11__Homo_sapiens__CAA72108
augccacugguaguagcuguuaucuucuucucccucuggguuuuugcacuugggcaguuggaacaaccugaaauaucuauuuccagaccagcaaauaagagugcccacauaucuuggaaggcauccauccaaggcuuuagcaguaaaaucauacacugguacuggcagaaaccaaacaaaggcuuagaauauuuauuacaugucuucuugacaaucucugcucaagauugcucaggugggaagacuaagaaacuugagguaaguaaaaaugcucacacuuccacuuccacuuugaaaauaaaguucuuagagaaagaagaugaggugguguaccacugugccugcuggauuaggcac

SEQ ID NO: 3662 - RNA, 357 nt, Artificial Sequence
  derived and/or modified sequence opt1 from TRGV11__Homo_sapiens__CAA72108
augccccugguggucgccgugaucuucuucagccucuggguguucgcccugggccagcuggagcagccggagaucuccaucagccgccccgcgaacaaguccgcccacaucagcuggaaggccuccauccagggguucagcuccaagaucauccacugguacuggcagaagcccaacaagggccucgaguaccugcugcacgucuuccucaccaucagcgcccaggacugcuccgggggcaagaccaagaagcuggaggugagcaagaacgcccacacguccaccagcacccugaagaucaaguuccucgagaaggaggacgagguggucuaccacugcgcgugcuggauccggcac

SEQ ID NO: 3663 - RNA, 357 nt, Artificial Sequence
  derived and/or modified sequence opt2 from TRGV11__Homo_sapiens__CAA72108
augccccucgucgucgccgucaucuucuucucccucugggucuucgcccucggccagcucgagcagcccgagaucuccaucucccgccccgccaacaaguccgcccacaucuccuggaaggccuccauccagggcuucuccuccaagaucauccacugguacuggcagaagcccaacaagggccucgaguaccuccuccacgucuuccucaccaucuccgcccaggacugcuccggcggcaagaccaagaagcucgaggucuccaagaacgcccacaccuccaccuccacccucaagaucaaguuccucgagaaggaggacgaggucgucuaccacugcgccugcuggauccgccac

SEQ ID NO: 3664 - RNA, 357 nt, Artificial Sequence
  derived and/or modified sequence opt3 from TRGV11__Homo_sapiens__CAA72108
augccccugguggucgccguuaucuucuuuagccucuggguguucgcucuuggccagcuggagcaaccugaaauuuccauaucuagaccagcaaacaagucagcccacaucaguuggaaagcgagcauucagggguuuuccucuaagaucauucauugguacuggcagaaaccgaauaagggauuggaguauuuacugcacguauuccuaaccaucucggcucaggacugcucagguggcaaaacaaagaagcucgaagugagcaaaaacgcccauacgaguacuuccacccugaagauaaaauuucuugagaaggaagaugaggucguguaccacugugcaugcuggaucaggcau

SEQ ID NO: 3665 - RNA, 357 nt, Artificial Sequence
  derived and/or modified sequence opt4 from TRGV11__Homo_sapiens__CAA72108
augccccuggugguggccgugaucuucuucagccuguggguguucgcccugggccagcuggagcagcccgagaucagcaucagcagacccgccaacaagagcgcccacaucagcuggaaggccagcauccagggcuucagcagcaagaucauccacugguacuggcagaagcccaacaagggccuggaguaccugcugcacguguuccugaccaucagcgcccaggacugcagcggcggcaagaccaagaagcuggaggugagcaagaacgcccacaccagcaccagcacccugaagaucaaguuccuggagaaggaggacgaggugguguaccacugcgccugcuggaucagacac

SEQ ID NO: 3666 - RNA, 357 nt, Artificial Sequence
  derived and/or modified sequence opt5 from TRGV11__Homo_sapiens__CAA72108
augccccugguggucgccguuaucuucuuuagccucuggguguucgcucugggccagcuugagcaaccugaaauuuccaucucuagaccggccaacaagagcgcgcacauuuccuggaaggcuucuauccagggguuuagcuccaaaauuauccauugguacuggcagaaacccaauaagggacuggaguaucuccugcacguguuccuuaccaucucugcccaggacugcagcggcgggaaaacaaagaagcuggaagucuccaaaaacgcccauacgagcaccucuacacucaagauuaaauuucuggagaaggaagaugaggugguuuaccacugugcuugcuggauccggcau

SEQ ID NO: 3667 - protein, 137 aa, Artificial Sequence
  TRGV9__Homo_sapiens__A4D1X2
MLSLLHTSTLAVLGALCVYGAGHLEQPQISSTKTLSKTARLECVVSGITISATSVYWYRERPGEVIQFLVSISYDGTVRKESGIPSGKFEVDRIPETSTSTLTIHNVEKQDIATYYCALWEVHSSRQFEPSHSINVY

SEQ ID NO: 3668 - RNA, 414 nt, Artificial Sequence
  TRGV9__Homo_sapiens__EAL23985
augcugucacugcuccacacaucaacgcuggcaguccuuggggcucuguguguauauggugcaggucaccuagagcaaccucaaauuuccaguacuaaaacgcugucaaaaacagcccgccuggaauguguggugucuggaauaacaauuucugcaacaucuguauauugguaucgagagagaccuggugaagucauacaguuccugguguccauuucauaugacggcacugucagaaaggaauccggcauuccgucaggcaaauuugagguggauaggauaccugaaacgucuacauccacucucaccauucacaauguagagaaacaggacauagcuaccuacuacugugccuugugggaggugcacagcagcagacaguuugagccaucccauucaauaaauguuuauuga

SEQ ID NO: 3669 - RNA, 414 nt, Artificial Sequence
  derived and/or modified sequence opt1 from TRGV9__Homo_sapiens__EAL23985
augcugagccuccugcacaccuccacccuggccgugcucggcgcccugugcgucuacggggcgggccaccuggagcagccccagaucagcuccacgaagacccucagcaagaccgcccgccuggagugcgugguguccgggaucaccaucagcgccacguccgucuacugguaccgggagcgcccgggcgaggugauccaguuccuggugagcaucuccuacgacgggaccguccggaaggagagcggcauccccuccggcaaguucgagguggaccgcauccccgagaccagcaccuccacgcucaccauccacaacguggagaagcaggacaucgccaccuacuacugcgcccugugggagguccacagcucccggcaguucgagcccagccacuccaucaacguguacuga

SEQ ID NO: 3670 - RNA, 414 nt, Artificial Sequence
  derived and/or modified sequence opt2 from TRGV9__Homo_sapiens__EAL23985
augcucucccuccuccacaccuccacccucgccguccucggcgcccucugcgucuacggcgccggccaccucgagcagccccagaucuccuccaccaagacccucuccaagaccgcccgccucgagugcgucgucuccggcaucaccaucuccgccaccuccgucuacugguaccgcgagcgccccggcgaggucauccaguuccucgucuccaucuccuacgacggcaccguccgcaaggaguccggcauccccuccggcaaguucgaggucgaccgcauccccgagaccuccaccuccacccucaccauccacaacgucgagaagcaggacaucgccaccuacuacugcgcccucugggagguccacuccucccgccaguucgagcccucccacuccaucaacgucuacuga

SEQ ID NO: 3671 - RNA, 414 nt, Artificial Sequence
  derived and/or modified sequence opt3 from TRGV9__Homo_sapiens__EAL23985
augcugagccuccuucacaccuccacacuggccguguugggcgcuuuaugcgucuacggggcaggacaucuggagcagccccaaaucucuucaacuaagacgcuaaguaaaaccgccagacucgaauguguugugagcgguauuacaauauccgcgacuucuguauauugguacagggagcggccuggcgaagugauccaguuccuggucucgauuucauaugacgggaccgugcgcaaggagagcggaaucccaaguggcaaauuugaaguugaucguauuccggagacauccaccucuacucuuacaauccacaacguggagaagcaggacauagcuaccuacuauugcgcccugugggaaguccauagcucccgacaguucgagcccucacacaguaucaauguguacuga

SEQ ID NO: 3672 - RNA, 414 nt, Artificial Sequence
  derived and/or modified sequence opt4 from TRGV9__Homo_sapiens__EAL23985
augcugagccugcugcacaccagcacccuggccgugcugggcgcccugugcguguacggcgccggccaccuggagcagccccagaucagcagcaccaagacccugagcaagaccgccagacuggagugcguggugagcggcaucaccaucagcgccaccagcguguacugguacagagagagacccggcgaggugauccaguuccuggugagcaucagcuacgacggcaccgugagaaaggagagcggcauccccagcggcaaguucgagguggacagaauccccgagaccagcaccagcacccugaccauccacaacguggagaagcaggacaucgccaccuacuacugcgcccugugggaggugcacagcagcagacaguucgagcccagccacagcaucaacguguacuga

SEQ ID NO: 3673 - RNA, 414 nt, Artificial Sequence
  derived and/or modified sequence opt5 from TRGV9__Homo_sapiens__EAL23985
augcugagccuccugcacaccuccacacuugccgugcugggcgcucucugcgucuacggggccggacaucuggagcagccccaaaucucuagcacgaagacccuuuccaaaacagcgagacuggaauguguugugucuggcauuaccaucagcgcuacauccguguauugguaccgggagcgcccuggggaagucauucaguuccucgugucuaucagcuaugacggaaccguuagaaaggaguccggcauuccgagcgggaaauuugaaguggaucggauccccgagacaucuaccuccacgcugaccauccacaacgucgagaagcaggacauugccacauacuauugcgcccugugggaagugcauagcucucgccaguucgagccuucccacagcaucaauguuuacuga

SEQ ID NO: 3674 - protein, 122 aa, Artificial Sequence
  TRGV9__Homo_sapiens__Q99603
MLSLLHTSTLAVLGALCVYGAGHLEQPQISSTKTLSKTARLECVVSGITISATSVYWYRERPGEVIQFLVSISYDGTVRKESGIPSGKFEVDRIPETSTSTLTIHNVEKQDIATYYCALWEV

SEQ ID NO: 3675 - RNA, 366 nt, Artificial Sequence
  TRGV9__Homo_sapiens__CAA30181
augcugucacugcuccacacaucaacgcuggcaguccuuggggcucuguguguauauggugcaggucaccuagagcaaccucaaauuuccaguacuaaaacgcugucaaaaacagcccgccuggaauguguggugucuggaauaacaauuucugcaacaucuguauauugguaucgagagagaccuggugaagucauacaguuccugguguccauuucauaugacggcacugucagaaaggaauccggcauuccgucaggcaaauuugagguggauaggauaccugaaacgucuacauccacucucaccauucacaauguagagaaacaggacauagcuaccuacuacugugccuugugggaggug

SEQ ID NO: 3676 - RNA, 366 nt, Artificial Sequence
  derived and/or modified sequence opt1 from TRGV9__Homo_sapiens__CAA30181
augcugagccuccugcacaccuccacccuggccgugcucggcgcccugugcgucuacggggcgggccaccuggagcagccccagaucagcuccacgaagacccucagcaagaccgcccgccuggagugcgugguguccgggaucaccaucagcgccacguccgucuacugguaccgggagcgcccgggcgaggugauccaguuccuggugagcaucuccuacgacgggaccguccggaaggagagcggcauccccuccggcaaguucgagguggaccgcauccccgagaccagcaccuccacgcucaccauccacaacguggagaagcaggacaucgccaccuacuacugcgcccugugggagguc

SEQ ID NO: 3677 - RNA, 366 nt, Artificial Sequence
  derived and/or modified sequence opt2 from TRGV9__Homo_sapiens__CAA30181
augcucucccuccuccacaccuccacccucgccguccucggcgcccucugcgucuacggcgccggccaccucgagcagccccagaucuccuccaccaagacccucuccaagaccgcccgccucgagugcgucgucuccggcaucaccaucuccgccaccuccgucuacugguaccgcgagcgccccggcgaggucauccaguuccucgucuccaucuccuacgacggcaccguccgcaaggaguccggcauccccuccggcaaguucgaggucgaccgcauccccgagaccuccaccuccacccucaccauccacaacgucgagaagcaggacaucgccaccuacuacugcgcccucugggagguc

SEQ ID NO: 3678 - RNA, 366 nt, Artificial Sequence
  derived and/or modified sequence opt3 from TRGV9__Homo_sapiens__CAA30181
augcugagccuccuucacaccuccacacuggccguguugggcgcuuuaugcgucuacggggcaggacaucuggagcagccccaaaucucuucaacuaagacgcuaaguaaaaccgccagacucgaauguguugugagcgguauuacaauauccgcgacuucuguauauugguacagggagcggccuggcgaagugauccaguuccuggucucgauuucauaugacgggaccgugcgcaaggagagcggaaucccaaguggcaaauuugaaguugaucgaaucccggagacauccaccucuacucuuacaauucacaacguggagaagcaggacauagcuaccuacuauugcgcccugugggaaguc

SEQ ID NO: 3679 - RNA, 366 nt, Artificial Sequence
  derived and/or modified sequence opt4 from TRGV9__Homo_sapiens__CAA30181
augcugagccugcugcacaccagcacccuggccgugcugggcgcccugugcguguacggcgccggccaccuggagcagccccagaucagcagcaccaagacccugagcaagaccgccagacuggagugcguggugagcggcaucaccaucagcgccaccagcguguacugguacagagagagacccggcgaggugauccaguuccuggugagcaucagcuacgacggcaccgugagaaaggagagcggcauccccagcggcaaguucgagguggacagaauccccgagaccagcaccagcacccugaccauccacaacguggagaagcaggacaucgccaccuacuacugcgcccugugggaggug

SEQ ID NO: 3680 - RNA, 366 nt, Artificial Sequence
  derived and/or modified sequence opt5 from TRGV9__Homo_sapiens__CAA30181
augcugagccuccugcacaccuccacacuugccgugcugggcgcucucugcgucuacggggccggacaucuggagcagccccaaaucucuagcacgaagacccuuuccaaaacagcgagacuggaauguguugugucuggcauuaccaucagcgcuacauccguguauugguaccgggagcgcccuggggaagucauucaguuccucgugucuaucagcuaugacggaaccguuagaaaggaguccggcauuccgagcgggaaauuugaaguggaucggauccccgagacaucuaccuccacgcugaccauccacaacgucgagaagcaggacauugccacauacuauugcgcccugugggaagug

SEQ ID NO: 3681 - protein, 122 aa, Artificial Sequence
  TRGV9__Homo_sapiens__Q99604
MLSLLHTSTLAVLGALCVYGAGHLEQPQISSTKTLSKTARLECVVSGIKISATSVYWYRERPGEVIQFLVSISYDGTVRKESGIPSGKFEVDRIPETSTSTLTIHNVEKQDIATYYCALWEV

SEQ ID NO: 3682 - RNA, 366 nt, Artificial Sequence
  TRGV9__Homo_sapiens__CAA33345
augcugucacugcuccacacaucaacgcuggcaguccuuggggcucuguguguauauggugcaggucaccuagagcaaccucaaauuuccaguacuaaaacgcugucaaaaacagcccgccuggaauguguggugucuggaauaaaaauuucugcaacaucuguauauugguaucgagagagaccuggugaagucauacaguuccugguguccauuucauaugacggcacugucagaaaggaaucuggcauuccgucaggcaaauuugagguggauaggauaccugaaacgucuacauccacucucaccauucacaauguagagaaacaggacauagcuaccuacuacugugccuugugggaggug

SEQ ID NO: 3683 - RNA, 366 nt, Artificial Sequence
  derived and/or modified sequence opt1 from TRGV9__Homo_sapiens__CAA33345
augcugagccuccugcacaccuccacccuggccgugcucggcgcccugugcgucuacggggcgggccaccuggagcagccccagaucagcuccacgaagacccucagcaagaccgcccgccuggagugcgugguguccgggaucaagaucagcgccaccuccgucuacugguaccgggagcgcccgggcgaggugauccaguuccuggugagcaucuccuacgacgggacgguccggaaggagagcggcauccccuccggcaaguucgagguggaccgcauccccgagaccagcaccuccacccucacgauccacaacguggagaagcaggacaucgccaccuacuacugcgcccugugggagguc

SEQ ID NO: 3684 - RNA, 366 nt, Artificial Sequence
  derived and/or modified sequence opt2 from TRGV9__Homo_sapiens__CAA33345
augcucucccuccuccacaccuccacccucgccguccucggcgcccucugcgucuacggcgccggccaccucgagcagccccagaucuccuccaccaagacccucuccaagaccgcccgccucgagugcgucgucuccggcaucaagaucuccgccaccuccgucuacugguaccgcgagcgccccggcgaggucauccaguuccucgucuccaucuccuacgacggcaccguccgcaaggaguccggcauccccuccggcaaguucgaggucgaccgcauccccgagaccuccaccuccacccucaccauccacaacgucgagaagcaggacaucgccaccuacuacugcgcccucugggagguc

SEQ ID NO: 3685 - RNA, 366 nt, Artificial Sequence
  derived and/or modified sequence opt3 from TRGV9__Homo_sapiens__CAA33345
augcugagccuccuucacaccuccacacuggccguguugggcgcuuuaugcgucuacggggcaggacaucuggagcagccccaaaucucuucaacuaagacgcuaaguaaaaccgccagacucgaauguguugugagcgguauuaagauauccgcgacaucuguauauugguacagggagcggccuggcgaagugauccaguuccuggucucgauuucauaugacgggacugugcgcaaagagagcggaaucccaaguggcaaguuugaaguugaucgaaucccggagaccuccacaucuacccuuacuauucacaacguggagaaacaggacauagcuacauacuauugcgcccugugggaaguc

SEQ ID NO: 3686 - RNA, 366 nt, Artificial Sequence
  derived and/or modified sequence opt4 from TRGV9__Homo_sapiens__CAA33345
augcugagccugcugcacaccagcacccuggccgugcugggcgcccugugcguguacggcgccggccaccuggagcagccccagaucagcagcaccaagacccugagcaagaccgccagacuggagugcguggugagcggcaucaagaucagcgccaccagcguguacugguacagagagagacccggcgaggugauccaguuccuggugagcaucagcuacgacggcaccgugagaaaggagagcggcauccccagcggcaaguucgagguggacagaauccccgagaccagcaccagcacccugaccauccacaacguggagaagcaggacaucgccaccuacuacugcgcccugugggaggug

SEQ ID NO: 3687 - RNA, 366 nt, Artificial Sequence
  derived and/or modified sequence opt5 from TRGV9__Homo_sapiens__CAA33345
augcugagccuccugcacaccuccacacuugccgugcugggcgcucucugcgucuacggggccggacaucuggagcagccccaaaucucuagcacgaagacccuuuccaaaacagcgagacuggaauguguugugucuggcauuaagaucagcgcuaccuccguguauugguaccgggagcgcccuggggaagucauucaguuccucgugucuaucagcuaugacggaacaguuagaaaagaguccggcauuccgagcgggaaguuugaaguggaucggauccccgagaccucuacauccacccugacgauccacaacgucgagaaacaggacauugccaccuacuauugcgcccugugggaagug

SEQ ID NO: 3688 - protein, 793 aa, Artificial Sequence
  TRPC1__Homo_sapiens__P48995
MMAALYPSTDLSGASSSSLPSSPSSSSPNEVMALKDVREVKEENTLNEKLFLLACDKGDYYMVKKILEENSSGDLNINCVDVLGRNAVTITIENENLDILQLLLDYGCQSADALLVAIDSEVVGAVDILLNHRPKRSSRPTIVKLMERIQNPEYSTTMDVAPVILAAHRNNYEILTMLLKQDVSLPKPHAVGCECTLCSAKNKKDSLRHSRFRLDIYRCLASPALIMLTEEDPILRAFELSADLKELSLVEVEFRNDYEELARQCKMFAKDLLAQARNSRELEVILNHTSSDEPLDKRGLLEERMNLSRLKLAIKYNQKEFVSQSNCQQFLNTVWFGQMSGYRRKPTCKKIMTVLTVGIFWPVLSLCYLIAPKSQFGRIIHTPFMKFIIHGASYFTFLLLLNLYSLVYNEDKKNTMGPALERIDYLLILWIIGMIWSDIKRLWYEGLEDFLEESRNQLSFVMNSLYLATFALKVVAHNKFHDFADRKDWDAFHPTLVAEGLFAFANVLSYLRLFFMYTTSSILGPLQISMGQMLQDFGKFLGMFLLVLFSFTIGLTQLYDKGYTSKEQKDCVGIFCEQQSNDTFHSFIGTCFALFWYIFSLAHVAIFVTRFSYGEELQSFVGAVIVGTYNVVVVIVLTKLLVAMLHKSFQLIANHEDKEWKFARAKLWLSYFDDKCTLPPPFNIIPSPKTICYMISSLSKWICSHTSKGKVKRQNSLKEWRNLKQKRDENYQKVMCCLVHRYLTSMRQKMQSTDQATVENLNELRQDLSKFRNEIRDLLGFRTSKYAMFYPRN

SEQ ID NO: 3689 - RNA, 2382 nt, Artificial Sequence
  TRPC1__Homo_sapiens__AAA93251
augauggcggcccuguacccgagcacggaccucucgggcgccuccuccuccucccugccuuccucuccauccucuuccucgccgaacgaggugauggcgcugaaggaugugcgggaggugaaggaggagaauacgcugaaugagaagcuuuucuugcuggcgugcgacaagggugacuauuauaugguuaaaaagauuuuggaggaaaacaguucaggugacuugaacauaaauugcguagaugugcuugggagaaaugcuguuaccauaacuauugaaaacgaaaacuuggauauacugcagcuucuuuuggacuacgguugucagucugcagaugcacuuuugguggcaaucgacucugaaguagugggagcuguugauauacuacuuaaucaucgaccaaaacgaucaucaagaccaacuauaguaaaacuaauggaacgaauucagaauccugaguauucaacaacuauggauguugcaccugucauuuuagcugcucaucguaacaacuaugaaauucuuacaaugcucuuaaaacaggauguaucucuacccaagccccaugcaguuggcugugaaugcacauuguguucugcaaaaaacaaaaaggauagccuccggcauuccagguuucgucuugauauauaucgauguuuggccaguccagcucuaauaauguuaacagaggaggauccaauucugagagcauuugaacuuagugcugauuuaaaagaacuaagucuuguggagguggaauucaggaaugauuaugaggaacuagcccggcaauguaaaauguuugcuaaggauuuacuugcacaagcccggaauucucgugaauuggaaguuauucuaaaccauacgucuagugacgagccucuugacaaacggggauuauuagaagaaagaaugaauuuaagucgucuaaaacuugcuaucaaauauaaccagaaagaguuugucucccagucuaacugccagcaguuccugaacacuguuugguuuggacagaugucggguuaccgacgcaagcccaccuguaagaagauaaugacuguuuugacaguaggcaucuuuuggccaguuuugucacuuuguuauuugauagcucccaaaucucaguuuggcagaaucauucacacaccuuuuaugaaauuuaucauucauggagcaucauauuucacauuucugcuguugcuuaaucuauacucucuugucuacaaugaggauaagaaaaacacaauggggccagcccuugaaagaauagacuaucuucuuauucuguggauuauugggaugauuuggucagacauuaaaagacucugguaugaaggguuggaagacuuuuuagaagaaucucguaaucaacucaguuuugucaugaauucucuuuauuuggcaaccuuugcccucaaagugguugcucacaacaaguuucaugauuuugcugaucggaaggauugggaugcauuccauccuacacugguggcagaagggcuuuuugcauuugcaaauguucuaaguuaucuucgucucuuuuuuauguauacaaccagcucuaucuuggguccauuacagauuucaaugggacagauguuacaagauuuuggaaaauuucuugggauguuucuucuuguuuuguuuucuuucacaauuggacugacacaacuguaugauaaaggauauacuucaaaggagcagaaggacuguguaggcaucuucugugaacagcaaagcaaugauaccuuccauucguucauuggcaccugcuuugcuuuguucugguauauuuucuccuuagcgcauguggcaaucuuugucacaagauuuagcuauggagaagaacugcaguccuuugugggagcugucauuguugguacauacaaugucgugguugugauugugcuuaccaaacugcugguggcaaugcuucauaaaagcuuucaguugauagcaaaucaugaagacaaagaauggaaguuugcucgagcaaaauuauggcuuagcuacuuugaugacaaauguacguuaccuccaccuuucaacaucauucccucaccaaagacuaucugcuauaugauuaguagccucaguaaguggauuugcucucauacaucaaaaggcaaggucaaacggcaaaacaguuuaaaggaauggaggaauuugaaacagaagagagaugaaaacuaucaaaaagugaugugcugccuagugcaucguuacuugacuuccaugagacagaagaugcaaaguacagaucaggcaacuguggaaaaucuaaacgaacugcgccaagaucugucaaaauuccgaaaugaaauaagggauuuacuuggcuuucggacuucuaaauaugcuauguuuuauccaagaaauuaa

SEQ ID NO: 3690 - RNA, 2382 nt, Artificial Sequence
  derived and/or modified sequence opt1 from TRPC1__Homo_sapiens__AAA93251
augauggccgcccuguaccccagcaccgaccucuccggcgcgagcuccagcucccugccgagcucccccagcuccagcucccccaacgaggugauggcccugaaggacguccgcgaggugaaggaggagaacacccucaacgagaagcuguuccugcucgccugcgacaagggggacuacuacauggugaagaagauccuggaggagaacagcuccggcgaccugaacaucaacugcgucgacgugcucgggcggaacgccgugacgaucaccaucgagaacgagaaccuggacauccugcagcuccugcuggacuacggcugccagagcgccgacgcgcuccuggucgccaucgacuccgagguggugggggccgucgacauccugcucaaccaccgccccaagcggagcucccgcccgaccaucgugaagcugauggagcggauccagaaccccgaguacagcaccacgauggacguggcccccgucauccuggcggcccaccgcaacaacuacgagauccucaccaugcugcugaagcaggacgugucccuccccaagccgcacgccgugggcugcgagugcacccugugcagcgccaagaacaagaaggacagccugcggcacucccgcuuccggcucgacaucuaccgcugccuggccagccccgcgcugaucaugcucaccgaggaggaccccauccugcgggccuucgagcuguccgccgaccucaaggagcugagccuggucgagguggaguuccgcaacgacuacgaggagcucgcccggcagugcaagauguucgccaaggaccugcuggcgcaggcccgcaacucccgggagcucgaggugauccugaaccacacgagcuccgacgagccccuggacaagcgcggccuccuggaggagcggaugaaccugagccgccucaagcuggccaucaaguacaaccagaaggaguucgucucccagagcaacugccagcaguuccugaacaccgugugguucgggcagauguccggcuaccggcgcaagccgaccugcaagaagaucaugaccgugcucacggucgggaucuucuggcccgugcugagccugugcuaccugaucgcccccaagucccaguucggccggaucauccacacccccuucaugaaguucaucauccacggggccagcuacuucaccuuccuccugcugcucaaccuguacucccugguguacaacgaggacaagaagaacaccaugggcccggcgcucgagcgcaucgacuaccugcugauccucuggaucaucggcaugaucuggagcgacaucaagcgccugugguacgaggggcuggaggacuuccucgaggagucccggaaccagcugagcuucgucaugaacucccuguaccucgccacguucgcccugaagguggucgcccacaacaaguuccacgacuucgccgaccgcaaggacugggacgcguuccaccccacccugguggccgagggccucuucgccuucgccaacgugcugagcuaccugcgccucuucuucauguacaccaccagcuccauccuggggccccugcagaucagcaugggccagaugcuccaggacuucggcaaguuccuggggauguuccugcucguccuguucuccuucacgaucggccugacccagcucuacgacaagggguacaccagcaaggagcagaaggacugcgugggcaucuucugcgagcagcaguccaacgacaccuuccacagcuucaucgggacgugcuucgcgcuguucugguacaucuucucccuggcccacguggccaucuucgucacccgguucagcuacggcgaggagcuccaguccuucgugggcgccgugaucgucgggaccuacaacgugguggucgugaucgugcugaccaagcugcucgucgccaugcugcacaagagcuuccagcugaucgcgaaccacgaggacaaggaguggaaguucgcccgggccaagcucuggcuguccuacuucgacgacaagugcacgcugcccccgcccuucaacaucauccccagccccaagaccaucugcuacaugaucuccagccucuccaaguggaucugcagccacaccuccaagggcaaggugaagcgccagaacagccugaaggaguggcggaaccugaagcagaagcgcgacgagaacuaccagaaggugaugugcugccucguccaccgguaccugaccagcaugcgccagaagaugcaguccacggaccaggccaccguggagaaccugaacgagcuccggcaggaccugagcaaguuccgcaacgagauccgggaccugcucggguuccgcaccuccaaguacgccauguucuacccgcggaacuga

SEQ ID NO: 3691 - RNA, 2382 nt, Artificial Sequence
  derived and/or modified sequence opt2 from TRPC1__Homo_sapiens__AAA93251
augauggccgcccucuaccccuccaccgaccucuccggcgccuccuccuccucccuccccuccucccccuccuccuccucccccaacgaggucauggcccucaaggacguccgcgaggucaaggaggagaacacccucaacgagaagcucuuccuccucgccugcgacaagggcgacuacuacauggucaagaagauccucgaggagaacuccuccggcgaccucaacaucaacugcgucgacguccucggccgcaacgccgucaccaucaccaucgagaacgagaaccucgacauccuccagcuccuccucgacuacggcugccaguccgccgacgcccuccucgucgccaucgacuccgaggucgucggcgccgucgacauccuccucaaccaccgccccaagcgcuccucccgccccaccaucgucaagcucauggagcgcauccagaaccccgaguacuccaccaccauggacgucgcccccgucauccucgccgcccaccgcaacaacuacgagauccucaccaugcuccucaagcaggacgucucccuccccaagccccacgccgucggcugcgagugcacccucugcuccgccaagaacaagaaggacucccuccgccacucccgcuuccgccucgacaucuaccgcugccucgccucccccgcccucaucaugcucaccgaggaggaccccauccuccgcgccuucgagcucuccgccgaccucaaggagcucucccucgucgaggucgaguuccgcaacgacuacgaggagcucgcccgccagugcaagauguucgccaaggaccuccucgcccaggcccgcaacucccgcgagcucgaggucauccucaaccacaccuccuccgacgagccccucgacaagcgcggccuccucgaggagcgcaugaaccucucccgccucaagcucgccaucaaguacaaccagaaggaguucgucucccaguccaacugccagcaguuccucaacaccgucugguucggccagauguccggcuaccgccgcaagcccaccugcaagaagaucaugaccguccucaccgucggcaucuucuggcccguccucucccucugcuaccucaucgcccccaagucccaguucggccgcaucauccacacccccuucaugaaguucaucauccacggcgccuccuacuucaccuuccuccuccuccucaaccucuacucccucgucuacaacgaggacaagaagaacaccaugggccccgcccucgagcgcaucgacuaccuccucauccucuggaucaucggcaugaucugguccgacaucaagcgccucugguacgagggccucgaggacuuccucgaggagucccgcaaccagcucuccuucgucaugaacucccucuaccucgccaccuucgcccucaaggucgucgcccacaacaaguuccacgacuucgccgaccgcaaggacugggacgccuuccaccccacccucgucgccgagggccucuucgccuucgccaacguccucuccuaccuccgccucuucuucauguacaccaccuccuccauccucggcccccuccagaucuccaugggccagaugcuccaggacuucggcaaguuccucggcauguuccuccucguccucuucuccuucaccaucggccucacccagcucuacgacaagggcuacaccuccaaggagcagaaggacugcgucggcaucuucugcgagcagcaguccaacgacaccuuccacuccuucaucggcaccugcuucgcccucuucugguacaucuucucccucgcccacgucgccaucuucgucacccgcuucuccuacggcgaggagcuccaguccuucgucggcgccgucaucgucggcaccuacaacgucgucgucgucaucguccucaccaagcuccucgucgccaugcuccacaaguccuuccagcucaucgccaaccacgaggacaaggaguggaaguucgcccgcgccaagcucuggcucuccuacuucgacgacaagugcacccuccccccccccuucaacaucauccccucccccaagaccaucugcuacaugaucuccucccucuccaaguggaucugcucccacaccuccaagggcaaggucaagcgccagaacucccucaaggaguggcgcaaccucaagcagaagcgcgacgagaacuaccagaaggucaugugcugccucguccaccgcuaccucaccuccaugcgccagaagaugcaguccaccgaccaggccaccgucgagaaccucaacgagcuccgccaggaccucuccaaguuccgcaacgagauccgcgaccuccucggcuuccgcaccuccaaguacgccauguucuacccccgcaacuga

SEQ ID NO: 3692 - RNA, 2382 nt, Artificial Sequence
  derived and/or modified sequence opt3 from TRPC1__Homo_sapiens__AAA93251
augauggccgcucuguaccccagcaccgaccucuccggcgcaucuucaaguagccuuccuuccucuccaucgucaagcaguccgaacgaggugauggcccugaaggaugucagagaaguuaaagaggaaaauacauugaacgagaaguuauuccugcuagcgugcgacaaaggggauuauuacauggugaagaaaauccucgaagaaaauuccucuggagaccugaacauuaauuguguagaugugcuugguaggaacgcugucacuauaacgaucgagaaugaaaaccuggacauuuugcagcuccugcuggauuauggcugccaaagcgccgacgcacucuuaguggccaucgauuccgagguugugggggcugucgacauucugcuuaaucaccggcccaagcgcucaagucgaccuaccaucgugaaguugauggaacguauacagaacccagaguacagcacaacuauggauguagcacccguuauccuggccgcucauagaaauaacuaugagauucuaaccaugcuccugaaacaggacgugucucuuccuaagccacacgccgucggaugugaaugcacacuguguuccgcgaaaaauaagaaagauucauugaggcauagccgguuucgccucgacaucuacagaugccuggcaagucccgccuuaauuaugcugaccgaggaagacccuauccucagggcuuucgagcuuucugccgaucugaaggaauugucccuaguggagguggaguuucggaacgacuaugaggagcuggcacgccaguguaagauguucgcuaaagaucuccuggcccaagcgcgaaauagcagagaacuugaggucauacugaaccacacuucgucugacgaaccauuggauaagaggggccuccuggaggagcggaugaacuuaucccgucugaaacuagccauuaaguacaaucagaaagaauuuguuucacagaguaacugccagcaauuccucaauacagugugguuuggucagaugagcggguaccgcagaaagccgaccuguaaaaagaucaugacgguacugacugugggaauuuucuggcccguccuuuccuugugcuaucugaucgcaccuaagucucaguuuggcaggaucauucauaccccauucaugaaauuuauaauccacggcgcuagcuacuucacauuucuccugcuucugaacuuguauucacucguguacaaugaggacaagaaaaacacuauggggcccgcccuggaacggauugauuauuuacugauccuauggauaauuggaaugaucuggagugacaucaagcgacucugguacgagggucuggaagauuuccuugaggagucccgcaaucaguugagcuucguuaugaacucucuguaucucgcuaccuuugcccugaaaguggucgcacacaauaaguuccaugacuuugccgauagaaaggacugggacgcuuuccacccuacauuaguggcggaaggccuguuugcauucgccaacguacuuucauacuugaggcucuuuuucauguacaccacgaguagcauucuggggccacuacaaaucuccaugggacagaugcugcaggauuuuggcaaauuccucgguauguuucugcuuguuuuguucucuuuuacuauugggcugacacaauuauaugacaagggauacaccucgaaagagcagaaggauugugugggcauauucugcgaacagcagagcaaugacacuuuccauuccuuuaucggcacaugcuucgcucucuuuugguauauuuucucacuggcccacgucgcaaucuuugugacccgguucaguuacggggaggagcuucaaucuuuugucggagccgugaucguugguacguauaacgugguagucgugauuguucugaccaaauugcucguggcuaugcugcacaagagcuuccagcuaauagccaaucaugaagauaaggaguggaaauuugcacgcgcgaagcuguggcucuccuacuucgacgauaaauguacacugcccccgccuuuuaacaucauucccucaccaaagacuaucugcuauaugauuagcucucuuuccaaauggaucuguagucacaccagcaagggcaaggucaaaagacaaaauucuuugaaggaauggaggaaccugaaacagaagcgugacgagaacuaccagaaagugaugugcuguuuaguacaucgguaccucacauccaugcgacagaagaugcagucaacugaucaggcuaccguggaaaaucugaacgagcuuagacaagaccugaguaaauucaggaaugagauacgcgaucuacucggguuucggacaagcaaguaugccauguucuacccuagaaacuga

SEQ ID NO: 3693 - RNA, 2382 nt, Artificial Sequence
  derived and/or modified sequence opt4 from TRPC1__Homo_sapiens__AAA93251
augauggccgcccuguaccccagcaccgaccugagcggcgccagcagcagcagccugcccagcagccccagcagcagcagccccaacgaggugauggcccugaaggacgugagagaggugaaggaggagaacacccugaacgagaagcuguuccugcuggccugcgacaagggcgacuacuacauggugaagaagauccuggaggagaacagcagcggcgaccugaacaucaacugcguggacgugcugggcagaaacgccgugaccaucaccaucgagaacgagaaccuggacauccugcagcugcugcuggacuacggcugccagagcgccgacgcccugcugguggccaucgacagcgagguggugggcgccguggacauccugcugaaccacagacccaagagaagcagcagacccaccaucgugaagcugauggagagaauccagaaccccgaguacagcaccaccauggacguggcccccgugauccuggccgcccacagaaacaacuacgagauccugaccaugcugcugaagcaggacgugagccugcccaagccccacgccgugggcugcgagugcacccugugcagcgccaagaacaagaaggacagccugagacacagcagauucagacuggacaucuacagaugccuggccagccccgcccugaucaugcugaccgaggaggaccccauccugagagccuucgagcugagcgccgaccugaaggagcugagccugguggagguggaguucagaaacgacuacgaggagcuggccagacagugcaagauguucgccaaggaccugcuggcccaggccagaaacagcagagagcuggaggugauccugaaccacaccagcagcgacgagccccuggacaagagaggccugcuggaggagagaaugaaccugagcagacugaagcuggccaucaaguacaaccagaaggaguucgugagccagagcaacugccagcaguuccugaacaccgugugguucggccagaugagcggcuacagaagaaagcccaccugcaagaagaucaugaccgugcugaccgugggcaucuucuggcccgugcugagccugugcuaccugaucgcccccaagagccaguucggcagaaucauccacacccccuucaugaaguucaucauccacggcgccagcuacuucaccuuccugcugcugcugaaccuguacagccugguguacaacgaggacaagaagaacaccaugggccccgcccuggagagaaucgacuaccugcugauccuguggaucaucggcaugaucuggagcgacaucaagagacugugguacgagggccuggaggacuuccuggaggagagcagaaaccagcugagcuucgugaugaacagccuguaccuggccaccuucgcccugaaggugguggcccacaacaaguuccacgacuucgccgacagaaaggacugggacgccuuccaccccacccugguggccgagggccuguucgccuucgccaacgugcugagcuaccugagacuguucuucauguacaccaccagcagcauccugggcccccugcagaucagcaugggccagaugcugcaggacuucggcaaguuccugggcauguuccugcuggugcuguucagcuucaccaucggccugacccagcuguacgacaagggcuacaccagcaaggagcagaaggacugcgugggcaucuucugcgagcagcagagcaacgacaccuuccacagcuucaucggcaccugcuucgcccuguucugguacaucuucagccuggcccacguggccaucuucgugaccagauucagcuacggcgaggagcugcagagcuucgugggcgccgugaucgugggcaccuacaacguggugguggugaucgugcugaccaagcugcugguggccaugcugcacaagagcuuccagcugaucgccaaccacgaggacaaggaguggaaguucgccagagccaagcuguggcugagcuacuucgacgacaagugcacccugcccccccccuucaacaucauccccagccccaagaccaucugcuacaugaucagcagccugagcaaguggaucugcagccacaccagcaagggcaaggugaagagacagaacagccugaaggaguggagaaaccugaagcagaagagagacgagaacuaccagaaggugaugugcugccuggugcacagauaccugaccagcaugagacagaagaugcagagcaccgaccaggccaccguggagaaccugaacgagcugagacaggaccugagcaaguucagaaacgagaucagagaccugcugggcuucagaaccagcaaguacgccauguucuaccccagaaacuga

SEQ ID NO: 3694 - RNA, 2382 nt, Artificial Sequence
  derived and/or modified sequence opt5 from TRPC1__Homo_sapiens__AAA93251
augauggccgcucuguaccccagcaccgaccucuccggcgccucuagcuccucucugccuagcuccccgucuagcuccagccccaacgaggugauggcgcuuaaggaugucagagaaguuaaagaggaaaauacacugaacgagaagcucuuucugcuugcuugcgacaaaggggauuauuacauggugaagaaaauccuggaagaaaauucuuccggagaccucaacauuaauuguguggauguccugggccggaacgccgugacgaucaccauugagaaugaaaaccuggacauccuccagcugcuucuggauuaugggugccaaagcgccgacgcucuccugguugccauugauucugagguggucggagcuguggacauccuucugaaucaccgcccuaagagauccagccggcccacaaucguuaagcucauggaacgcauucagaacccugaguacucuaccacaauggauguggcccccgucauccuggcggcccauagaaauaacuaugagauucugaccaugcuccugaaacaggacgugucccuuccuaagccgcacgcugugggcugugaaugcacacuguguagcgccaaaaauaagaaagauucccuccggcauucucgcuuuagacuggacaucuaccggugccuugcuagccccgcccugauuaugcucaccgaggaagacccuauccugcgcgcguucgagcuguccgccgaucucaaggaacugagccuugucgagguugaguuuagaaacgacuaugaggagcuggcucggcaguguaagauguucgccaaagaucuccuggcucaagcccgcaauucuagagaacuugaggugauucugaaccacacguccagcgacgaaccccucgauaagcgggggcugcuggaggagcgcaugaaccucucuagacugaaacuugccaucaaguacaaucagaaagaauuugugagccaguccaacugccagcaauuccugaauaccgucugguuuggacagaugucuggcuaccggagaaagccuacauguaaaaagaucaugaccgugcucacaguuggcauuuucuggcccgugcugagccugugcuaucuuaucgcuccgaagucccaguuugggcgcauuauccauaccccuuucaugaaauuuauuauccacggagcgagcuacuucacguuucuccugcugcucaaccuguauucucuugucuacaaugaggacaagaaaaacacaaugggccccgcccuggaacggaucgauuaucuccugauucuguggaucauugggaugaucugguccgacauuaagagacuuugguacgagggacucgaagauuuccuggaggagagccgcaaucagcugucuuucgugaugaacucccucuaucuggcuaccuuugcccuuaaaguuguggcccacaauaaguuccaugacuuugcugaucggaaggacugggacgccuuccacccuacacuggucgcggaaggccucuuugcuuucgccaacgugcugagcuaccugagacuuuucuucauguacaccaccuccucuauccucgggccccugcaaaucagcaugggacagaugcugcaggauuuuggcaaauuccucggcauguuucugcuuguccuguucuccuuuacaauugggcucacgcaacuguaugacaagggauacaccucuaaagagcagaaggauugugugggcaucuucugcgaacagcagagcaaugacacauuccauuccuuuauugggaccugcuucgcccuguuuugguauaucuucagccuugcucacguugccauuuuugugacacgcuucucuuacggagaggagcuccaauccuuugucggcgcugugaucguugggaccuauaacguggucguggugauuguucugacgaaacugcucgucgccaugcugcacaagagcuuccagcuuaucgcgaaucaugaagauaaggaguggaaauuugcccgggcuaagcuguggcucucuuacuucgacgauaaauguacacugcccccuccguuuaacaucauucccuccccuaagaccaucugcuauaugauuagcucucugagcaaauggaucuguucccacaccagcaagggaaaggugaaaagacaaaauucucuuaaggaauggcgcaaccugaaacagaagcgggacgagaacuaccagaaagugaugugcugucucguccauagauaccugacauccaugcgccagaagaugcagagcaccgaucaggccacaguggaaaaucucaacgagcugcggcaagaccuuuccaaauucagaaaugagauucgggaucugcucggcuuucgcacgucuaaguaugcuauguucuaccccagaaacuga

SEQ ID NO: 3695 - protein, 1104 aa, Artificial Sequence
  TRP-p8__Homo_sapiens__Q7Z2W7
MSFRAARLSMRNRRNDTLDSTRTLYSSASRSTDLSYSESDLVNFIQANFKKRECVFFTKDSKATENVCKCGYAQSQHMEGTQINQSEKWNYKKHTKEFPTDAFGDIQFETLGKKGKYIRLSCDTDAEILYELLTQHWHLKTPNLVISVTGGAKNFALKPRMRKIFSRLIYIAQSKGAWILTGGTHYGLMKYIGEVVRDNTISRSSEENIVAIGIAAWGMVSNRDTLIRNCDAEGYFLAQYLMDDFTRDPLYILDNNHTHLLLVDNGCHGHPTVEAKLRNQLEKYISERTIQDSNYGGKIPIVCFAQGGGKETLKAINTSIKNKIPCVVVEGSGQIADVIASLVEVEDALTSSAVKEKLVRFLPRTVSRLPEEETESWIKWLKEILECSHLLTVIKMEEAGDEIVSNAISYALYKAFSTSEQDKDNWNGQLKLLLEWNQLDLANDEIFTNDRRWESADLQEVMFTALIKDRPKFVRLFLENGLNLRKFLTHDVLTELFSNHFSTLVYRNLQIAKNSYNDALLTFVWKLVANFRRGFRKEDRNGRDEMDIELHDVSPITRHPLQALFIWAILQNKKELSKVIWEQTRGCTLAALGASKLLKTLAKVKNDINAAGESEELANEYETRAVELFTECYSSDEDLAEQLLVYSCEAWGGSNCLELAVEATDQHFIAQPGVQNFLSKQWYGEISRDTKNWKIILCLFIIPLVGCGFVSFRKKPVDKHKKLLWYYVAFFTSPFVVFSWNVVFYIAFLLLFAYVLLMDFHSVPHPPELVLYSLVFVLFCDEVRQWYVNGVNYFTDLWNVMDTLGLFYFIAGIVFRLHSSNKSSLYSGRVIFCLDYIIFTLRLIHIFTVSRNLGPKIIMLQRMLIDVFFFLFLFAVWMVAFGVARQGILRQNEQRWRWIFRSVIYEPYLAMFGQVPSDVDGTTYDFAHCTFTGNESKPLCVELDEHNLPRFPEWITIPLVCIYMLSTNILLVNLLVAMFGYTVGTVQENNDQVWKFQRYFLVQEYCSRLNIPFPFIVFAYFYMVVKKCFKCCCKEKNMESSVCCFKNEDNETLAWEGVMKENYLVKINTKANDTSEEMRHRFRQLDTKLNDLKGLLKEIANKIK

SEQ ID NO: 3696 - RNA, 3315 nt, Artificial Sequence
  TRP-p8__Homo_sapiens__AAZ73614
auguccuuucgggcagccaggcucagcaugaggaacagaaggaaugacacucuggacagcacccggacccuguacuccagcgcgucucggagcacagacuugucuuacagugaaagcgacuuggugaauuuuauucaagcaaauuuuaagaaacgagaaugugucuucuuuaccaaagauuccaaggccacggagaaugugugcaaguguggcuaugcccagagccagcacauggaaggcacccagaucaaccaaagugagaaauggaacuacaagaaacacaccaaggaauuuccuaccgacgccuuuggggauauucaguuugagacacuggggaagaaagggaaguauauacgucuguccugcgacacggacgcggaaauccuuuacgagcugcugacccagcacuggcaccugaaaacacccaaccuggucauuucugugaccgggggcgccaagaacuucgcccugaagccgcgcaugcgcaagaucuucagccggcucaucuacaucgcgcaguccaaaggugcuuggauucucacgggaggcacccauuauggccugaugaaguacaucggggagguggugagagauaacaccaucagcaggaguucagaggagaauauuguggccauuggcauagcagcuuggggcauggucuccaaccgggacacccucaucaggaauugcgaugcugagggcuauuuuuuagcccaguaccuuauggaugacuucacaagagauccacuguauauccuggacaacaaccacacacauuugcugcucguggacaauggcugucauggacaucccacugucgaagcaaagcuccggaaucagcuagagaaguauaucucugagcgcacuauucaagauuccaacuaugguggcaagauccccauuguguguuuugcccaaggagguggaaaagagacuuugaaagccaucaauaccuccaucaaaaauaaaauuccuuguguggugguggaaggcucgggccagaucgcugaugugaucgcuagccugguggagguggaggaugcccugacaucuucugccgucaaggagaagcugguacgcuuuuuaccccgcacggugucccggcugccugaggaggagacugagaguuggaucaaauggcucaaagaaauucucgaauguucucaccuauuaacaguuauuaaaauggaagaagcuggggaugaaauugugagcaaugccaucuccuacgcucuauacaaagccuucagcaccagugagcaagacaaggauaacuggaaugggcagcugaagcuucugcuggaguggaaccagcuggacuuagccaaugaugagauuuucaccaaugaccgccgaugggagucugcugaccuucaagaagucauguuuacggcucucauaaaggacagacccaaguuuguccgccucuuucuggagaauggcuugaaccuacggaaguuucucacccaugauguccucacugaacucuucuccaaccacuucagcacgcuuguguaccggaaucugcagaucgccaagaauuccuauaaugaugcccuccucacguuugucuggaaacugguugcgaacuuccgaagaggcuuccggaaggaagacagaaauggccgggacgagauggacauagaacuccacgacgugucuccuauuacucggcacccccugcaagcucucuucaucugggccauucuucagaauaagaaggaacucuccaaagucauuugggagcagaccaggggcugcacucuggcagcccugggagccagcaagcuucugaagacucuggccaaagugaagaacgacaucaaugcugcuggggaguccgaggagcuggcuaaugaguacgagacccgggcuguugagcuguucacugaguguuacagcagcgaugaagacuuggcagaacagcugcuggucuauuccugugaagcuugggguggaagcaacugucuggagcuggcgguggaggccacagaccagcauuucaucgcccagccugggguccagaauuuucuuucuaagcaaugguauggagagauuucccgagacaccaagaacuggaagauuauccugugucuguuuauuauacccuuggugggcuguggcuuuguaucauuuaggaagaaaccugucgacaagcacaagaagcugcuuugguacuauguggcguucuucaccucccccuucguggucuucuccuggaauguggucuucuacaucgccuuccuccugcuguuugccuacgugcugcucauggauuuccauucggugccacacccccccgagcugguccuguacucgcuggucuuuguccucuucugugaugaagugagacagugguacguaaauggggugaauuauuuuacugaccuguggaaugugauggacacgcuggggcuuuuuuacuucauagcaggaauuguauuucggcuccacucuucuaauaaaagcucuuuguauucuggacgagucauuuucugucuggacuacauuauuuucacucuaagauugauccacauuuuuacuguaagcagaaacuuaggacccaagauuauaaugcugcagaggaugcugaucgauguguucuucuuccuguuccucuuugcgguguggaugguggccuuuggcguggccaggcaagggauccuuaggcagaaugagcagcgcuggagguggauauuccguucggucaucuacgagcccuaccuggccauguucggccaggugcccagugacguggaugguaccacguaugacuuugcccacugcaccuucacugggaaugaguccaagccacuguguguggagcuggaugagcacaaccugccccgguuccccgaguggaucaccaucccccuggugugcaucuacauguuauccaccaacauccugcuggucaaccugcuggucgccauguuuggcuacacggugggcaccguccaggagaacaaugaccaggucuggaaguuccagagguacuuccuggugcaggaguacugcagccgccucaauauccccuuccccuucaucgucuucgcuuacuucuacaugguggugaagaagugcuucaaguguugcugcaaggagaaaaacauggagucuucugucugcuguuucaaaaaugaagacaaugagacucuggcaugggagggugucaugaaggaaaacuaccuugucaagaucaacacaaaagccaacgacaccucagaggaaaugaggcaucgauuuagacaacuggauacaaagcuuaaugaucucaagggucuucugaaagagauugcuaauaaaaucaaauaa

SEQ ID NO: 3697 - RNA, 3315 nt, Artificial Sequence
  derived and/or modified sequence opt1 from TRP-p8__Homo_sapiens__AAZ73614
augagcuuccgcgccgcccggcuguccaugcgcaaccggcgcaacgacacccucgacagcacccggacgcuguacuccagcgcgucccgcagcaccgaccuguccuacagcgaguccgaccucgugaacuucauccaggccaacuucaagaagcgggagugcgucuucuucaccaaggacagcaaggccaccgagaacgugugcaagugcggcuacgcccagucccagcacauggaggggacgcagaucaaccagagcgagaaguggaacuacaagaagcacaccaaggaguuccccaccgacgccuucggcgacauccaguucgagacccuggggaagaagggcaaguacauccgccuguccugcgacacggacgcggagauccucuacgagcugcugacccagcacuggcaccucaagaccccgaaccuggugaucagcgucaccgggggcgccaagaacuucgcccugaagccccggaugcgcaagaucuucucccggcucaucuacaucgcccagagcaagggcgcguggauccugaccgggggcacgcacuacgggcugaugaaguacaucggcgagguggugcgcgacaacaccaucucccggagcuccgaggagaacaucgucgccaucgggaucgccgccuggggcauggugagcaaccgcgacacccucauccggaacugcgacgccgagggcuacuuccuggcgcaguaccugauggacgacuucacgcgcgacccccucuacauccuggacaacaaccacacccaccuccuccugguggacaacgggugccacggccaccccaccgucgaggccaagcugcggaaccagcucgagaaguacaucagcgagcgcaccauccaggacuccaacuacgggggcaagaucccgaucgugugcuucgcccagggcgggggcaaggagacgcugaaggccaucaacaccagcaucaagaacaagauccccugcguggucguggagggguccggccagaucgccgacgugaucgcgagccuggucgagguggaggacgcccucaccuccagcgccgugaaggagaagcugguccgguuccugccccgcaccgugucccggcuccccgaggaggagacggagagcuggaucaaguggcugaaggagauccuggagugcucccaccuccugaccgugaucaagauggaggaggccggggacgagaucgucagcaacgccaucuccuacgcgcuguacaaggccuucagcaccuccgagcaggacaaggacaacuggaacggccagcucaagcugcugcucgaguggaaccagcuggaccuggccaacgacgagaucuucaccaacgaccgccgcugggagagcgccgaccuccaggaggugauguucacggcccugaucaaggaccggccgaaguucgugcgccuguuccucgagaacggccugaaccugcggaaguuccucacccacgacguccugaccgagcuguucuccaaccacuucagcacccugguguaccgcaaccuccagaucgcgaagaacuccuacaacgacgcccugcugacguucgucuggaagcucguggccaacuuccggcgcggguuccggaaggaggaccgcaacggccgggacgagauggacaucgagcugcacgacgugagccccaucacccgccacccccugcaggcccucuucaucugggcgauccugcagaacaagaaggagcuguccaaggucaucugggagcagacccgggggugcacccucgccgcccugggcgccagcaagcugcucaagacgcuggccaaggugaagaacgacaucaacgcggccggggagagcgaggagcuggccaacgaguacgagacccgcgccguggagcuguucaccgagugcuacuccagcgacgaggaccuggccgagcagcugcucgucuacuccugcgaggcguggggcggcagcaacugccuggagcuggccguggaggccaccgaccagcacuucaucgcccagcccggggugcagaacuuccucuccaagcagugguacggcgagaucagccgggacaccaagaacuggaagaucauccugugccuguucaucaucccgcucgucgggugcggcuucguguccuuccgcaagaagcccguggacaagcacaagaagcugcugugguacuacgucgccuucuucacgagccccuucgugguguucuccuggaacgucguguucuacaucgcguuccuccugcuguucgccuacgugcuccugauggacuuccacagcgucccccacccgcccgagcuggugcucuacucccugguguucguccuguucugcgacgaggugcggcagugguacgugaacggggucaacuacuucaccgaccucuggaacgugauggacacccugggccuguucuacuucaucgccggcaucguguuccgccuccacagcuccaacaagagcucccuguacagcgggcgggucaucuucugccuggacuacaucaucuucacccuccgccugauccacaucuucacggugucccggaaccugggccccaagaucaucaugcuccagcgcaugcugaucgacguguucuucuuccuguuccucuucgccgucuggaugguggcguucgggguggcccgccagggcauccugcggcagaacgagcagcgcuggcgguggaucuuccgcagcgucaucuacgagcccuaccuggccauguucggccaggugccgagcgacguggacgggaccaccuacgacuucgcccacugcaccuucacgggcaacgaguccaagccccucugcgucgagcuggacgagcacaaccugccccgguuccccgaguggaucaccaucccgcucgugugcaucuacaugcugagcaccaacauccugcucgugaaccugcuggucgccauguucggguacaccgugggcacggugcaggagaacaacgaccaggucuggaaguuccagcgcuacuuccucgugcaggaguacugcucccggcugaacauccccuuccccuucaucguguucgcguacuucuacauggucgugaagaagugcuucaagugcugcugcaaggagaagaacauggagagcuccgugugcugcuucaagaacgaggacaacgagacccuggccugggagggggucaugaaggagaacuaccucgugaagaucaacaccaaggccaacgacaccagcgaggagaugcgccaccgguuccgccagcuggacacgaagcugaacgaccucaagggccugcugaaggagaucgccaacaagaucaaguga

SEQ ID NO: 3698 - RNA, 3315 nt, Artificial Sequence
  derived and/or modified sequence opt2 from TRP-p8__Homo_sapiens__AAZ73614
auguccuuccgcgccgcccgccucuccaugcgcaaccgccgcaacgacacccucgacuccacccgcacccucuacuccuccgccucccgcuccaccgaccucuccuacuccgaguccgaccucgucaacuucauccaggccaacuucaagaagcgcgagugcgucuucuucaccaaggacuccaaggccaccgagaacgucugcaagugcggcuacgcccagucccagcacauggagggcacccagaucaaccaguccgagaaguggaacuacaagaagcacaccaaggaguuccccaccgacgccuucggcgacauccaguucgagacccucggcaagaagggcaaguacauccgccucuccugcgacaccgacgccgagauccucuacgagcuccucacccagcacuggcaccucaagacccccaaccucgucaucuccgucaccggcggcgccaagaacuucgcccucaagccccgcaugcgcaagaucuucucccgccucaucuacaucgcccaguccaagggcgccuggauccucaccggcggcacccacuacggccucaugaaguacaucggcgaggucguccgcgacaacaccaucucccgcuccuccgaggagaacaucgucgccaucggcaucgccgccuggggcauggucuccaaccgcgacacccucauccgcaacugcgacgccgagggcuacuuccucgcccaguaccucauggacgacuucacccgcgacccccucuacauccucgacaacaaccacacccaccuccuccucgucgacaacggcugccacggccaccccaccgucgaggccaagcuccgcaaccagcucgagaaguacaucuccgagcgcaccauccaggacuccaacuacggcggcaagauccccaucgucugcuucgcccagggcggcggcaaggagacccucaaggccaucaacaccuccaucaagaacaagauccccugcgucgucgucgagggcuccggccagaucgccgacgucaucgccucccucgucgaggucgaggacgcccucaccuccuccgccgucaaggagaagcucguccgcuuccucccccgcaccgucucccgccuccccgaggaggagaccgaguccuggaucaaguggcucaaggagauccucgagugcucccaccuccucaccgucaucaagauggaggaggccggcgacgagaucgucuccaacgccaucuccuacgcccucuacaaggccuucuccaccuccgagcaggacaaggacaacuggaacggccagcucaagcuccuccucgaguggaaccagcucgaccucgccaacgacgagaucuucaccaacgaccgccgcugggaguccgccgaccuccaggaggucauguucaccgcccucaucaaggaccgccccaaguucguccgccucuuccucgagaacggccucaaccuccgcaaguuccucacccacgacguccucaccgagcucuucuccaaccacuucuccacccucgucuaccgcaaccuccagaucgccaagaacuccuacaacgacgcccuccucaccuucgucuggaagcucgucgccaacuuccgccgcggcuuccgcaaggaggaccgcaacggccgcgacgagauggacaucgagcuccacgacgucucccccaucacccgccacccccuccaggcccucuucaucugggccauccuccagaacaagaaggagcucuccaaggucaucugggagcagacccgcggcugcacccucgccgcccucggcgccuccaagcuccucaagacccucgccaaggucaagaacgacaucaacgccgccggcgaguccgaggagcucgccaacgaguacgagacccgcgccgucgagcucuucaccgagugcuacuccuccgacgaggaccucgccgagcagcuccucgucuacuccugcgaggccuggggcggcuccaacugccucgagcucgccgucgaggccaccgaccagcacuucaucgcccagcccggcguccagaacuuccucuccaagcagugguacggcgagaucucccgcgacaccaagaacuggaagaucauccucugccucuucaucaucccccucgucggcugcggcuucgucuccuuccgcaagaagcccgucgacaagcacaagaagcuccucugguacuacgucgccuucuucaccucccccuucgucgucuucuccuggaacgucgucuucuacaucgccuuccuccuccucuucgccuacguccuccucauggacuuccacuccgucccccacccccccgagcucguccucuacucccucgucuucguccucuucugcgacgagguccgccagugguacgucaacggcgucaacuacuucaccgaccucuggaacgucauggacacccucggccucuucuacuucaucgccggcaucgucuuccgccuccacuccuccaacaaguccucccucuacuccggccgcgucaucuucugccucgacuacaucaucuucacccuccgccucauccacaucuucaccgucucccgcaaccucggccccaagaucaucaugcuccagcgcaugcucaucgacgucuucuucuuccucuuccucuucgccgucuggauggucgccuucggcgucgcccgccagggcauccuccgccagaacgagcagcgcuggcgcuggaucuuccgcuccgucaucuacgagcccuaccucgccauguucggccagguccccuccgacgucgacggcaccaccuacgacuucgcccacugcaccuucaccggcaacgaguccaagccccucugcgucgagcucgacgagcacaaccucccccgcuuccccgaguggaucaccaucccccucgucugcaucuacaugcucuccaccaacauccuccucgucaaccuccucgucgccauguucggcuacaccgucggcaccguccaggagaacaacgaccaggucuggaaguuccagcgcuacuuccucguccaggaguacugcucccgccucaacauccccuuccccuucaucgucuucgccuacuucuacauggucgucaagaagugcuucaagugcugcugcaaggagaagaacauggaguccuccgucugcugcuucaagaacgaggacaacgagacccucgccugggagggcgucaugaaggagaacuaccucgucaagaucaacaccaaggccaacgacaccuccgaggagaugcgccaccgcuuccgccagcucgacaccaagcucaacgaccucaagggccuccucaaggagaucgccaacaagaucaaguga

SEQ ID NO: 3699 - RNA, 3315 nt, Artificial Sequence
  derived and/or modified sequence opt3 from TRP-p8__Homo_sapiens__AAZ73614
augagcuucagagccgcuaggcuguccaugcggaaccgccgaaaugacacccucgauucuacacguacucuuuacucaagugcaagcagauccacggaccugucuuauucggagucagauuuggugaacuuuauccaggccaauuucaagaaaagggaaugcgucuuuuucaccaaggacagcaaagcgacagagaacguuuguaagugcggcuacgcucaaagucagcacauggaagggacucagauuaaucaguccgagaaauggaacuauaagaagcauaccaaagaauuucccacagaugccuucggagacauacaauuugagaccuuagguaagaaaggcaaguacauccggcugucuugugauacugacgcagagauucuauaugaacuccugacacagcacuggcaucuuaaaaccccuaaucuggugaucagcguaacugggggagccaagaacuucgcuuugaagccacgcaugagaaaaaucuuuuccaggcucauuuacauagcacagucaaagggcgccuggauccugacgggugggacccacuauggacugaugaaauacauuggcgaggugguccgggauaauacaaucagucgcagcucugaagagaacauuguggcuaucggcauagccgcgugggggaugguuuccaaucgagacacucucauuagaaacugcgaugcagagggauacuucuuagcccaguaucugauggacgauuuuaccagggacccgcuuuacaucuuggacaauaaccauacacaccuucuacucguggauaaugguugucacggccaucccaccgucgaagcuaagcugcggaaccaacuugagaaauauauuucagaacguacgauccaggacagcaacuacgggggaaagaucccuauugugugcuucgcccagggcggugggaaagagacucugaaggcaauaaauacaaguaucaagaacaaaauuccauguguaguuguggaaggaucuggccagaucgcugaugucauagccuccuugguggagguggaggacgcgcucaccagcucggccgucaaggaaaaacugguucgcuuuuuacccagaacugugucuaggcugccugaggaagagacagaauccuggauuaaguggcucaaagagauccuugagugcucacaccuguugaccguaaucaagauggaagaggcaggcgaugaaauugugaguaaugcuaucagcuaugcccuauacaaggcuuucuccacgucugagcaagacaaagauaacuggaaugggcagcugaagcuccugcuugaauggaaccagcuggacuuggccaaugaugagauuuucaccaacgaccggcgaugggagagcgcagaucuccaagaagucauguuuacagcccugauaaaagaccgcccaaaguucgugagauuauuucuggagaauggacuaaaccucaggaaauuccugacucaugacguucuuaccgaauuguuuucaaaucacuucaguacacugguguaucggaaccuccagaucgcuaaaaauuccuacaacgaugcgcugcuuacuuuugucuggaagcugguggcaaauuuccgcagagguuuuaggaaggaggaccguaacggccgggaugagauggacauugaauugcacgauguaagccccaucacccgacauccucuccaggcccuguucaucugggcuauuuuacagaacaagaaagagcugucuaagguuauaugggaacaaacaagaggguguacccuagccgcacucggagccucaaaacugcuuaagacuuuggcuaaggugaaaaaugacaucaacgccgcaggcgagagugaggaacuggcgaaugaguacgaaacgagggcugucgagcucuuuacagaaugcuauagcuccgaugaggaccuggccgaacaguuacugguguacucuugugaggcauggggugggucgaacugccuugaguuggccgucgaagcuaccgaucagcacuucauugcccagccaggcgugcaaaauuuucucagcaagcagugguauggagagaucucccgcgacacuaaaaacuggaagauuauccugugccuauucauaaucccgcugguuggcuguggguucgugucauuucggaaaaagcccguagauaaacauaagaagcuccugugguacuaugucgcauucuuuaccaguccuuucgugguguuuucuuggaauguugucuucuacauugcuuuucuuuugcuguucgccuauguguuacucauggacuuucacagcguaccacaucccccugaacuggugcuuuacucccugguuuucgucuuguuuugcgaugaggugagacagugguacgugaacggagucaauuauuucacagaccucuggaacguuauggacacccugggucuauuuuacuucaucgcgggcauuguguucaggcugcacucaagcaauaaaucuucccucuauagugggcgcgugaucuuuugucuggauuacauaauuuucacucuucgauugauccacauuuuuacaguaagccggaaccugggaccaaagaucauaauguuacagcguaugcucaucgacgucuucuuuuuccuguuucuuuucgccguguggaugguugcuuuuggcguggcaagacaagguauucugaggcagaaugaacagcgcuggcgguggaucuucagaucugucauuuaugagcccuaccuagccauguuuggccaggugccguccgauguugacgggacgaccuaugauuucgcucauugcacuuucacaggaaacgagucaaaaccucucuguguggaacuggacgagcacaauuugcccagguuuccagaauggaucaccauaccucugguaugcauuuacauguuaaguacaaacauccuccuggucaaccuucugguggccauguucggcuacacuguggggaccguccaagagaauaacgaucagguuuggaaguuucagcgauauuucuuggugcaagaguacuguagccgccucaauauccccuuuccauucauuguauuugcauauuucuacaugguggucaaaaagugcuuuaaguguugcuguaaagaaaagaacauggagucguccgugugcugcuucaaaaaugaagacaacgagacgcuggcgugggaaggaguuaugaaggagaauuaucuagugaaaaucaacaccaaggccaaugauacaucugaggaaaugcggcauagauuuaggcagcuggacacuaagcugaacgaucucaaaggucuguugaaggagauugcuaauaaaauaaaguga

SEQ ID NO: 3700 - RNA, 3315 nt, Artificial Sequence
  derived and/or modified sequence opt4 from TRP-p8__Homo_sapiens__AAZ73614
augagcuucagagccgccagacugagcaugagaaacagaagaaacgacacccuggacagcaccagaacccuguacagcagcgccagcagaagcaccgaccugagcuacagcgagagcgaccuggugaacuucauccaggccaacuucaagaagagagagugcguguucuucaccaaggacagcaaggccaccgagaacgugugcaagugcggcuacgcccagagccagcacauggagggcacccagaucaaccagagcgagaaguggaacuacaagaagcacaccaaggaguuccccaccgacgccuucggcgacauccaguucgagacccugggcaagaagggcaaguacaucagacugagcugcgacaccgacgccgagauccuguacgagcugcugacccagcacuggcaccugaagacccccaaccuggugaucagcgugaccggcggcgccaagaacuucgcccugaagcccagaaugagaaagaucuucagcagacugaucuacaucgcccagagcaagggcgccuggauccugaccggcggcacccacuacggccugaugaaguacaucggcgagguggugagagacaacaccaucagcagaagcagcgaggagaacaucguggccaucggcaucgccgccuggggcauggugagcaacagagacacccugaucagaaacugcgacgccgagggcuacuuccuggcccaguaccugauggacgacuucaccagagacccccuguacauccuggacaacaaccacacccaccugcugcugguggacaacggcugccacggccaccccaccguggaggccaagcugagaaaccagcuggagaaguacaucagcgagagaaccauccaggacagcaacuacggcggcaagauccccaucgugugcuucgcccagggcggcggcaaggagacccugaaggccaucaacaccagcaucaagaacaagauccccugcguggugguggagggcagcggccagaucgccgacgugaucgccagccugguggagguggaggacgcccugaccagcagcgccgugaaggagaagcuggugagauuccugcccagaaccgugagcagacugcccgaggaggagaccgagagcuggaucaaguggcugaaggagauccuggagugcagccaccugcugaccgugaucaagauggaggaggccggcgacgagaucgugagcaacgccaucagcuacgcccuguacaaggccuucagcaccagcgagcaggacaaggacaacuggaacggccagcugaagcugcugcuggaguggaaccagcuggaccuggccaacgacgagaucuucaccaacgacagaagaugggagagcgccgaccugcaggaggugauguucaccgcccugaucaaggacagacccaaguucgugagacuguuccuggagaacggccugaaccugagaaaguuccugacccacgacgugcugaccgagcuguucagcaaccacuucagcacccugguguacagaaaccugcagaucgccaagaacagcuacaacgacgcccugcugaccuucguguggaagcugguggccaacuucagaagaggcuucagaaaggaggacagaaacggcagagacgagauggacaucgagcugcacgacgugagccccaucaccagacacccccugcaggcccuguucaucugggccauccugcagaacaagaaggagcugagcaaggugaucugggagcagaccagaggcugcacccuggccgcccugggcgccagcaagcugcugaagacccuggccaaggugaagaacgacaucaacgccgccggcgagagcgaggagcuggccaacgaguacgagaccagagccguggagcuguucaccgagugcuacagcagcgacgaggaccuggccgagcagcugcugguguacagcugcgaggccuggggcggcagcaacugccuggagcuggccguggaggccaccgaccagcacuucaucgcccagcccggcgugcagaacuuccugagcaagcagugguacggcgagaucagcagagacaccaagaacuggaagaucauccugugccuguucaucaucccccuggugggcugcggcuucgugagcuucagaaagaagcccguggacaagcacaagaagcugcugugguacuacguggccuucuucaccagccccuucgugguguucagcuggaacgugguguucuacaucgccuuccugcugcuguucgccuacgugcugcugauggacuuccacagcgugccccacccccccgagcuggugcuguacagccugguguucgugcuguucugcgacgaggugagacagugguacgugaacggcgugaacuacuucaccgaccuguggaacgugauggacacccugggccuguucuacuucaucgccggcaucguguucagacugcacagcagcaacaagagcagccuguacagcggcagagugaucuucugccuggacuacaucaucuucacccugagacugauccacaucuucaccgugagcagaaaccugggccccaagaucaucaugcugcagagaaugcugaucgacguguucuucuuccuguuccuguucgccguguggaugguggccuucggcguggccagacagggcauccugagacagaacgagcagagauggagauggaucuucagaagcgugaucuacgagcccuaccuggccauguucggccaggugcccagcgacguggacggcaccaccuacgacuucgcccacugcaccuucaccggcaacgagagcaagccccugugcguggagcuggacgagcacaaccugcccagauuccccgaguggaucaccaucccccuggugugcaucuacaugcugagcaccaacauccugcuggugaaccugcugguggccauguucggcuacaccgugggcaccgugcaggagaacaacgaccagguguggaaguuccagagauacuuccuggugcaggaguacugcagcagacugaacauccccuuccccuucaucguguucgccuacuucuacaugguggugaagaagugcuucaagugcugcugcaaggagaagaacauggagagcagcgugugcugcuucaagaacgaggacaacgagacccuggccugggagggcgugaugaaggagaacuaccuggugaagaucaacaccaaggccaacgacaccagcgaggagaugagacacagauucagacagcuggacaccaagcugaacgaccugaagggccugcugaaggagaucgccaacaagaucaaguga

SEQ ID NO: 3701 - RNA, 3315 nt, Artificial Sequence
  derived and/or modified sequence opt5 from TRP-p8__Homo_sapiens__AAZ73614
augagcuucagagccgcucggcuguccaugcgcaacagacggaaugacacccucgauucuacacgcacgcuguacagcuccgccucuagaagcaccgaccuuuccuauucugagagcgaucuggugaacuuuauccaggcgaauuucaagaaacgggaaugcgucuuuuucacaaaggacuccaaagcuaccgagaacguuuguaagugcggcuacgcccaaagccagcacauggaagggacacagauuaaucagucugagaaauggaacuauaagaagcauaccaaagaauuucccacagaugccuucggagacauccaauuugagacccucggcaagaaagggaaguacauucgccuguccugugauacggacgcugagauccuuuaugaacugcucacccagcacuggcaucugaaaacaccuaaucuggugauuagcgugaccggaggcgccaagaacuucgcucucaagccgagaaugcggaaaaucuuuucucgccugaucuacauugcccaguccaagggggcguggauccuuacaggaggcacccacuauggccugaugaaauacauuggggaggucgugagagauaauacgaucagccggucuuccgaagagaacauuguugccaucggaauugcugccuggggcauggugagcaaucgcgacacacucaucagaaacugcgaugcugagggguacuuccuggcccaguaucuuauggacgauuuuacccgggacccccuguacauccucgacaauaaccauacacaccuucugcucgucgauaauggaugucacggccauccuaccguggaagcgaagcugcgcaaccaacuugagaaauauauuuccgaaagaaccauccaggacucuaacuacgggggaaagauucccaucguuugcuucgcccagggcggcgggaaagagacacugaaggcuauuaauacgagcaucaagaacaaaaucccuuguguggucguggaaggauccggccagauugccgaugugaucgcuagccucgucgagguugaggacgcccugaccucuuccgccgugaaggaaaaacuugugcgguuucugcccagaacagucagccgccucccugaggaagagaccgaaucuuggauuaaguggcugaaagagauccuggagugcagccaccuccugacagugauuaagauggaagaggcuggggaugaaaucguuuccaaugcgaucucuuaugcccuuuacaaggcuuucagcaccuccgagcaagacaaagauaacuggaauggacagcugaagcuccugcuugaauggaaccagcuggaccucgccaaugaugagauuuucacgaacgaccggagaugggagagcgccgaucugcaagaagugauguuuacagcucugaucaaagaccgcccgaaguucguccggcucuuucuggagaauggccuuaaccugagaaaauuccucacccaugacgugcugaccgaacuguuuucuaaucacuucuccacacuuguuuaucgcaaccuccagauugccaagaauagcuacaacgaugcgcugcugaccuuuguguggaagcucgucgcuaauuuccggagaggguuucgcaaagaggaccggaacggaagagaugagauggacaucgaacugcacgaugugucucccauuacacgccauccucuucaggcccuguucaucugggccauucuccagaacaagaaagagcuguccaaggucaucugggaacaaacgcggggcuguacccuggcugcccuuggcgcuagcaaacuccugaagacacuggccaaggugaaaaaugacaucaacgcggccggggaguccgaggaacucgcuaaugaguacgaaaccagagccguugagcuguuuacagaaugcuauucuagcgaugaggaccuugcugaacagcugcucguguacuccugugaggccuggggaggcucuaacugccuggagcuggcggucgaagccaccgaucagcacuucauugcucagcccggggugcaaaauuuucuuagcaagcagugguauggagagaucucccgggacacgaaaaacuggaagauuauccucugccuguucauuaucccucugguuggcuguggguucgugagcuuucgcaaaaagcccgucgauaaacauaagaagcuccugugguacuauguggccuucuuuaccucuccguucguggucuuuuccuggaauguuguguucuacaucgcuuuucuucuucucuucgccuaugugcugcugauggacuuucacagcgucccucaucccccugaacuugugcucuacucucugguuuucgugcuguuuugcgaugaggucagacagugguacgugaacggcguuaauuauuucacagaccucuggaacgugauggacacccugggacuguuuuacuucauugccggcaucgucuuccggcugcacuccagcaauaaaucuagccucuauuccgggagagugaucuuuugucuggauuacauuauuuucacacugcgccuuauccacaucuuuaccguuagccggaaccugggacccaagauuaucaugcuccagagaaugcugauugacguguucuuuuuccucuuucuguucgcugucuggaugguggcguuuggcguggcccgccaagggauccuuagacagaaugaacagcgguggcgcuggauuuucagaucugucaucuaugagcccuaccuggcuauguuuggacagguuccuuccgauguggacggcacgacauaugauuucgcccauugcaccuucacagggaacgagagcaaaccgcucuguguggaacuggacgagcacaaucugccccgguuuccugaauggaucaccauuccccuugucugcaucuacaugcuguccaccaacauucuccuggugaaccuccugguugccauguucggcuacacagugggaacgguccaagagaauaacgaucagguguggaaguuucagcgcuauuuccuuguucaagaguacuguucuagacugaauaucccuuuucccuucauuguguuugcuuauuucuacauggucgugaaaaagugcuuuaaguguugcuguaaagaaaagaacauggagagcuccguuugcugcuucaaaaaugaagacaacgagacccucgccugggaaggcgugaugaaggagaauuaucuggucaaaaucaacacaaaggcgaaugauaccucugaggaaaugcggcaucgcuuuagacagcuggacacaaagcugaacgaucugaaagggcuccugaaggagauugcuaauaaaaucaaguga

SEQ ID NO: 3702 - protein, 698 aa, Artificial Sequence
  TSG10__Homo_sapiens__Q9BZW7
MMRSRSKSPRRPSPTARGANCDVELLKTTTRDREELKCMLEKYERHLAEIQGNVKVLKSERDKIFLLYEQAQEEITRLRREMMKSCKSPKSTTAHAILRRVETERDVAFTDLRRMTTERDSLRERLKIAQETAFNEKAHLEQRIEELECTVHNLDDERMEQMSNMTLMKETISTVEKEMKSLARKAMDTESELGRQKAENNSLRLLYENTEKDLSDTQRHLAKKKYELQLTQEKIMCLDEKIDNFTRQNIAQREEISILGGTLNDLAKEKECLQACLDKKSENIASLGESLAMKEKTISGMKNIIAEMEQASRQCTEALIVCEQDVSRMRRQLDETNDELAQIARERDILAHDNDNLQEQFAKAKQENQALSKKLNDTHNELNDIKQKVQDTNLEVNKLKNILKSEESENRQMMEQLRKANEDAENWENKARQSEADNNTLKLELITAEAEGNRLKEKVDSLNREVEQHLNAERSYKSQISTLHKSVVKMEEELQKVQFEKVSALADLSSTRELCIKLDSSKELLNRQLVAKDQEIEMRENELDSAHSEIELLRSQMANERISMQNLEALLVANRDKEYQSQIALQEKESEIQLLKEHLCLAENKMAIQSRDVAQFRNVVTQLEADLDITKRQLGTERFERERAVQELRRQNYSSNAYHMSSTMKPNTKCHSPERAHHRSPDRGLDRSLEENLCYRDF

SEQ ID NO: 3703 - RNA, 2097 nt, Artificial Sequence
  TSG10__Homo_sapiens__AAK13079
augaugcgaaguaggucuaaaaguccaagacgcccaucaccaacugcccggggugcaaacugugauguagaacuuuugaagacaacaacaagagaucgugaagaacuuaaaugcaugcuggaaaaauaugagcgccauuuggcagaaauucaggguaaugucaagguucuuaaaucugagagagacaagaucuuccuucuuuaugaacaggcacaggaagaaauuacccgacuucgacgagaaaugaugaaaagcuguaagaguccuaaaucaacaacggcacaugcuauucuccggcgaguggagacugaaagagauguagccuuuacugauuuacgaagaaugaccacagaacgagauagucuaagggagaggcuaaagauugcucaagagacagcauuuaaugagaaggcucaccuggaacaaaggauagaggagcuggaguguacaguucauaaucuugaugaugaacguauggagcaaaugucaaauaugacuuugaugaaggaaaccauaagcacuguggaaaaagaaaugaaaucacuagcaagaaaggcaauggauaccgaaagugaacuuggcagacaaaaagcagagaauaauucuuugagacuuuuguaugaaaacacagaaaaagaucuuucugauacucagcgacaccuugcuaagaaaaaauaugagcuacagcuuacucaggagaaaauuaugugcuuggaugaaaaaauugauaacuuuacaaggcaaaauauugcacagcgagaagaaaucagcauucuugguggaacccucaaugaucuggcuaaagaaaaggaaugccugcaagcauguuuggauaaaaaaucugagaauauugcaucccuuggagagaguuuggcaaugaaagaaaagaccauuucaggcaugaagaauaucauugcugagauggaacaggcaucaagacaguguacugaggcccuaauugugugugaacaagacguuuccagaaugcgucggcaauuggaugagacaaaugaugagcuggcccagaucgccagggaaagagauaucuuggcucaugacaaugacaaucuccaggaacaguuugcuaaagcuaaacaagaaaaccaggcacuguccaaaaaauugaaugacacucauaaugaacuuaaugacauaaaacagaagguucaagauacuaauuuggagguuaacaagcugaagaauauauuaaagucugaagaaucugagaaccggcaaaugauggaacaacuucgaaaagccaaugaagaugcugaaaacugggaaaauaaagcccgucaaucagaggcagauaacaauacccucaaacuggaacuuaucacugcugaggcagaggguaacagauuaaaagaaaaaguagauucccucaacagagagguugagcaacacuuaaaugcagaaaggucuuacaagucccagauuucuaccuuacauaaaucuguuguaaaaauggaagaggagcuucagaagguucaguuugaaaaaguguccgcucuugcagauuugucuucuacuagggaacucuguauuaaacuugacucaagcaaagaacuucuuaaucgacagcugguugcuaaagaucaagaaauagaaaugagggagaaugaguuagauucugcucauucugaaauugaacuccugaggagucagauggcaaaugagagaaucuccaugcagaaucuagaagcuuugcugguggccaaucgagacaaagaauaucagucucagauagcacuucaagaaaaagaaucugaaauucagcuucuuaaagaacaccuuuguuuggcagaaaauaaaauggccauccagaguagagauguggcccaguucagaaauguugucacacaauuggaagcugauuuagacauuaccaaaagacaacuaggaacagagcgcuuugaaagggagagggccguacaagaacuucgccgccaaaauuauucaaguaaugcuuaucauaugaguucuacaaugaagccaaauacaaaaugucauucaccagaacgugcucaccaucgaucuccugaccgaggccuagaucgaucauuagaagagaaucuuugcuacagagauuucuga

SEQ ID NO: 3704 - RNA, 2097 nt, Artificial Sequence
  derived and/or modified sequence opt1 from TSG10__Homo_sapiens__AAK13079
augaugcgcagccgguccaagagcccccgccggccgucccccaccgcccgcggcgccaacugcgacguggagcugcucaagaccacgacccgggaccgcgaggagcugaagugcaugcuggagaaguacgagcggcaccucgcggagauccaggggaacgucaaggugcucaagagcgagcgcgacaagaucuuccugcuguacgagcaggcccaggaggagaucacccggcugcgccgggagaugaugaaguccugcaagagccccaaguccaccacggcccacgccauccugcgccggguggagaccgagcgcgacgucgccuucaccgaccuccggcgcaugaccacggagcgggacagccugcgcgagcggcugaagaucgcgcaggagaccgccuucaacgagaaggcccaccucgagcagcgcaucgaggagcuggagugcaccgugcacaaccuggacgacgagcggauggagcagauguccaacaugacccucaugaaggagacgaucagcaccguggagaaggagaugaagucccuggcccgcaaggcgauggacaccgagagcgagcugggccgccagaaggccgagaacaacucccuccggcugcuguacgagaacaccgagaaggaccucagcgacacgcagcgccaccuggccaagaagaaguacgagcugcagcucacccaggagaagaucaugugccuggacgagaagaucgacaacuucacccggcagaacaucgcccagcgcgaggagaucuccauccucgggggcacccugaacgaccuggccaaggagaaggagugccugcaggcgugccucgacaagaaguccgagaacaucgccagccugggggagagccuggccaugaaggagaagacgaucuccggcaugaagaacaucaucgccgagauggagcaggccagccggcagugcaccgaggcgcucaucgucugcgagcaggacgugagccgcaugcggcgccagcuggacgagaccaacgacgagcuggcccagaucgcccgggagcgcgacauccucgcccacgacaacgacaaccugcaggagcaguucgccaaggcgaagcaggagaaccaggcccuguccaagaagcucaacgacacccacaacgagcugaacgacaucaagcagaaggugcaggacacgaaccuggaggucaacaagcucaagaacauccucaagagcgaggaguccgagaaccggcagaugauggagcagcugcgcaaggccaacgaggacgccgagaacugggagaacaaggcccggcagagcgaggcggacaacaacacccugaagcuggagcugaucaccgccgaggccgagggcaaccgccucaaggagaagguggacucccugaaccgggagguggagcagcaccugaacgccgagcgcagcuacaagucccagaucagcacccugcacaaguccgucgugaagauggaggaggagcuccagaaggugcaguucgagaaggucagcgcgcuggccgaccuguccagcacgcgggagcucugcaucaagcuggacuccagcaaggagcugcucaaccgccagcugguggccaaggaccaggagaucgagaugcgggagaacgagcuggacuccgcccacagcgagaucgagcuccugcgcucccagauggccaacgagcgcaucagcaugcagaaccuggaggcgcuccugguggccaaccgggacaaggaguaccagucccagaucgcccugcaggagaaggagagcgagauccagcuccugaaggagcaccugugccucgccgagaacaagauggccauccagagccgcgacgucgcgcaguuccggaacguggugacccagcuggaggccgaccuggacaucaccaagcgccagcucgggaccgagcgguucgagcgcgagcgggccguccaggagcugcgccggcagaacuacuccagcaacgccuaccacauguccagcacgaugaagcccaacaccaagugccacuccccggagcgcgcccaccaccggagccccgaccgcggccuggaccggucccucgaggagaaccugugcuaccgcgacuucuga

SEQ ID NO: 3705 - RNA, 2097 nt, Artificial Sequence
  derived and/or modified sequence opt2 from TSG10__Homo_sapiens__AAK13079
augaugcgcucccgcuccaaguccccccgccgccccucccccaccgcccgcggcgccaacugcgacgucgagcuccucaagaccaccacccgcgaccgcgaggagcucaagugcaugcucgagaaguacgagcgccaccucgccgagauccagggcaacgucaagguccucaaguccgagcgcgacaagaucuuccuccucuacgagcaggcccaggaggagaucacccgccuccgccgcgagaugaugaaguccugcaagucccccaaguccaccaccgcccacgccauccuccgccgcgucgagaccgagcgcgacgucgccuucaccgaccuccgccgcaugaccaccgagcgcgacucccuccgcgagcgccucaagaucgcccaggagaccgccuucaacgagaaggcccaccucgagcagcgcaucgaggagcucgagugcaccguccacaaccucgacgacgagcgcauggagcagauguccaacaugacccucaugaaggagaccaucuccaccgucgagaaggagaugaagucccucgcccgcaaggccauggacaccgaguccgagcucggccgccagaaggccgagaacaacucccuccgccuccucuacgagaacaccgagaaggaccucuccgacacccagcgccaccucgccaagaagaaguacgagcuccagcucacccaggagaagaucaugugccucgacgagaagaucgacaacuucacccgccagaacaucgcccagcgcgaggagaucuccauccucggcggcacccucaacgaccucgccaaggagaaggagugccuccaggccugccucgacaagaaguccgagaacaucgccucccucggcgagucccucgccaugaaggagaagaccaucuccggcaugaagaacaucaucgccgagauggagcaggccucccgccagugcaccgaggcccucaucgucugcgagcaggacgucucccgcaugcgccgccagcucgacgagaccaacgacgagcucgcccagaucgcccgcgagcgcgacauccucgcccacgacaacgacaaccuccaggagcaguucgccaaggccaagcaggagaaccaggcccucuccaagaagcucaacgacacccacaacgagcucaacgacaucaagcagaagguccaggacaccaaccucgaggucaacaagcucaagaacauccucaaguccgaggaguccgagaaccgccagaugauggagcagcuccgcaaggccaacgaggacgccgagaacugggagaacaaggcccgccaguccgaggccgacaacaacacccucaagcucgagcucaucaccgccgaggccgagggcaaccgccucaaggagaaggucgacucccucaaccgcgaggucgagcagcaccucaacgccgagcgcuccuacaagucccagaucuccacccuccacaaguccgucgucaagauggaggaggagcuccagaagguccaguucgagaaggucuccgcccucgccgaccucuccuccacccgcgagcucugcaucaagcucgacuccuccaaggagcuccucaaccgccagcucgucgccaaggaccaggagaucgagaugcgcgagaacgagcucgacuccgcccacuccgagaucgagcuccuccgcucccagauggccaacgagcgcaucuccaugcagaaccucgaggcccuccucgucgccaaccgcgacaaggaguaccagucccagaucgcccuccaggagaaggaguccgagauccagcuccucaaggagcaccucugccucgccgagaacaagauggccauccagucccgcgacgucgcccaguuccgcaacgucgucacccagcucgaggccgaccucgacaucaccaagcgccagcucggcaccgagcgcuucgagcgcgagcgcgccguccaggagcuccgccgccagaacuacuccuccaacgccuaccacauguccuccaccaugaagcccaacaccaagugccacucccccgagcgcgcccaccaccgcucccccgaccgcggccucgaccgcucccucgaggagaaccucugcuaccgcgacuucuga

SEQ ID NO: 3706 - RNA, 2097 nt, Artificial Sequence
  derived and/or modified sequence opt3 from TSG10__Homo_sapiens__AAK13079
augaugagaagcagguccaagucuccccggcgcccuucaccaaccgcccgaggcgcuaacugcgacguggagcugcucaaaacaacuacgcgugauagagaggaacuuaaguguaugcuggaaaaauacgagaggcacuuggcagaaauccaggggaaugucaagguuuuaaaaagugagcgggacaagauuuuccugcuauaugagcaagcccaggaagagauaacccgccucagaagggaaaugaugaaguccugcaaauccccgaagucuacaacugcgcaugcuauccugcggcgcguggagaccgagcgagauguagccuuuacagaccuuagaaggaugaccacugaacgggauucgcugcgugagcgcuugaaaauugcacaggaaacagccuucaacgagaaggcucaccucgaacagagaaucgaggagcuggaauguaccgugcauaaucuggacgaugagaggauggaacaaaugucaaacaugacgcucaugaaagagacuauuagcaccgucgaaaaggagaugaagaguuuagcacggaaagccauggacacagaguccgaacugggacgacagaaggcugagaauaacucucuucgcuugcuguacgaaaauacugagaaagaucuaagcgacacccagagacaccucgccaagaaaaaguaugaacugcagcuuacacaagagaaaaucaugugccuggaugagaagauagacaacuuuaccaggcagaauaucgcgcagcgggaagagauuuccaucuuggguggcacgcucaacgaucuggcaaaggaaaaagaguguuuacaggccugccuggacaagaaaucagagaauauugcuagucucggggaaagccuugccaugaaggagaaaacuaucucuggaaugaagaacauaauugcagaaauggagcaagcuagccgccaguguacagaagcccugaucgugugcgagcaggacguuucaagaaugaggcgucaauuggaugagaccaaugacgaacuagcgcagauugcccgggagcgagauauccuggcacaugacaacgauaaucuccaggaacaguucgcuaaggccaaacaagagaaccaggcucugagcaagaaacuuaacgacacucacaaugaacugaacgauaucaagcagaaagugcaggacacaaauuuggaggucaacaagcucaagaauauucugaaaagugaggaaucugagaacagacaaaugauggaacaguuaaggaaggccaaugaggaugcagaaaacugggagaauaaagcccgccaguccgaggcugacaacaauacccugaagcuagaacucauaacggcggaggcagaaggcaaccggcugaaagagaagguggauagccuuaauagagagguagaacagcacuugaacgccgagaggucguacaagucucaaaucuccacccugcauaaaucaguugugaagauggaagaggaacuccagaaaguccaguuugagaaggugagugcucuggccgaccuuagcuccacacgcgagcuguguauuaaauuggacucuagcaaggaacuccugaaucgacaguuaguggcaaaagaucaagagaucgaaaugcgggagaacgaacuggacucagcccacagugagauagagcuacuccguucccagauggcuaacgaaagaauuagcaugcagaaucuggaggcccuuuuggucgcaaacagggauaaggaauaucaaucucagaucgcgcugcaggagaaggaaucagagauccagcuccugaaagagcauuuaugccuggcugaaaauaagauggccauucaaagucgcgacguugcacaguuccggaacgugguaacucagcuugaggccgauuuggacaucaccaaaagacagcucgguacagaaagguuugagcgagagcgcgcugugcaagaacugcggagacagaauuacagcuccaacgccuaucacaugucuucgacuaugaagcccaauaccaaaugucacagcccugagagggcacaucaccguuccccagaucgcgggcuagaccggucacuggaagagaaccucugcuacagagauuucuga

SEQ ID NO: 3707 - RNA, 2097 nt, Artificial Sequence
  derived and/or modified sequence opt4 from TSG10__Homo_sapiens__AAK13079
augaugagaagcagaagcaagagccccagaagacccagccccaccgccagaggcgccaacugcgacguggagcugcugaagaccaccaccagagacagagaggagcugaagugcaugcuggagaaguacgagagacaccuggccgagauccagggcaacgugaaggugcugaagagcgagagagacaagaucuuccugcuguacgagcaggcccaggaggagaucaccagacugagaagagagaugaugaagagcugcaagagccccaagagcaccaccgcccacgccauccugagaagaguggagaccgagagagacguggccuucaccgaccugagaagaaugaccaccgagagagacagccugagagagagacugaagaucgcccaggagaccgccuucaacgagaaggcccaccuggagcagagaaucgaggagcuggagugcaccgugcacaaccuggacgacgagagaauggagcagaugagcaacaugacccugaugaaggagaccaucagcaccguggagaaggagaugaagagccuggccagaaaggccauggacaccgagagcgagcugggcagacagaaggccgagaacaacagccugagacugcuguacgagaacaccgagaaggaccugagcgacacccagagacaccuggccaagaagaaguacgagcugcagcugacccaggagaagaucaugugccuggacgagaagaucgacaacuucaccagacagaacaucgcccagagagaggagaucagcauccugggcggcacccugaacgaccuggccaaggagaaggagugccugcaggccugccuggacaagaagagcgagaacaucgccagccugggcgagagccuggccaugaaggagaagaccaucagcggcaugaagaacaucaucgccgagauggagcaggccagcagacagugcaccgaggcccugaucgugugcgagcaggacgugagcagaaugagaagacagcuggacgagaccaacgacgagcuggcccagaucgccagagagagagacauccuggcccacgacaacgacaaccugcaggagcaguucgccaaggccaagcaggagaaccaggcccugagcaagaagcugaacgacacccacaacgagcugaacgacaucaagcagaaggugcaggacaccaaccuggaggugaacaagcugaagaacauccugaagagcgaggagagcgagaacagacagaugauggagcagcugagaaaggccaacgaggacgccgagaacugggagaacaaggccagacagagcgaggccgacaacaacacccugaagcuggagcugaucaccgccgaggccgagggcaacagacugaaggagaagguggacagccugaacagagagguggagcagcaccugaacgccgagagaagcuacaagagccagaucagcacccugcacaagagcguggugaagauggaggaggagcugcagaaggugcaguucgagaaggugagcgcccuggccgaccugagcagcaccagagagcugugcaucaagcuggacagcagcaaggagcugcugaacagacagcugguggccaaggaccaggagaucgagaugagagagaacgagcuggacagcgcccacagcgagaucgagcugcugagaagccagauggccaacgagagaaucagcaugcagaaccuggaggcccugcugguggccaacagagacaaggaguaccagagccagaucgcccugcaggagaaggagagcgagauccagcugcugaaggagcaccugugccuggccgagaacaagauggccauccagagcagagacguggcccaguucagaaacguggugacccagcuggaggccgaccuggacaucaccaagagacagcugggcaccgagagauucgagagagagagagccgugcaggagcugagaagacagaacuacagcagcaacgccuaccacaugagcagcaccaugaagcccaacaccaagugccacagccccgagagagcccaccacagaagccccgacagaggccuggacagaagccuggaggagaaccugugcuacagagacuucuga

SEQ ID NO: 3708 - RNA, 2097 nt, Artificial Sequence
  derived and/or modified sequence opt5 from TSG10__Homo_sapiens__AAK13079
augaugagaagccgguccaagucuccccgcagaccuagcccgaccgcccggggcgcuaacugcgacguggagcugcucaaaacaacgacccgcgauagagaggaacugaaguguaugcuugaaaaauacgagcggcaccuggccgaaauccaggggaaugucaagguucucaaauccgagcgcgacaagauuuuccugcuuuaugagcaagcgcaggaagagaucacaagacugcggcgcgaaaugaugaagucuugcaaaagccccaaguccaccacagcucaugccauucucagacggguggagaccgagcgcgauguggccuuuacagaccugagacggaugaccacggaacgcgauucucugagagagcggcucaaaaucgcucaggaaaccgccuucaacgagaaggcucaccuggaacagagaauugaggagcuugaauguacaguccauaaucuggacgaugagcgcauggaacaaaugagcaacaugacccucaugaaagagacaaucuccaccguggaaaaggagaugaaaagccuggcccggaaggcgauggacacggagucugaacuuggaagacagaaggccgagaauaacucccugcgccuccuguacgaaaauacagagaaagaucugagcgacacccagcggcaccucgcuaagaaaaaguaugaacugcagcuuacacaagagaaaaucaugugccuggaugagaagauugacaacuuuaccagacagaauaucgcccagcgcgaagagauuucuauccucggcgggacccugaacgaucuugcuaaggaaaaagagugucugcaggccugccucgacaagaaauccgagaauauugcgagccugggagaaucucuggccaugaaggagaaaacaaucuccggcaugaagaacauuaucgcugaaauggagcaagccagccggcaguguacggaagcucucaucguuugcgagcaggacguguccagaaugcgccggcaacuggaugagaccaaugacgaacuugcccagauugccagagagcgcgauauccuggcucaugacaacgauaaucuccaggaacaguucgcgaaggccaaacaagagaaccaggcucugucuaagaaacuuaacgacacacacaaugaacugaacgauauuaagcagaaaguccaggacaccaaucucgaggugaacaagcugaagaauauccugaaaagcgaggaauccgagaaccggcaaaugauggaacagcucagaaaggccaaugaggaugccgaaaacugggagaauaaagcucggcagagcgaggccgacaacaauacacugaaacuugaacugauuaccgcggaggcugaagggaaccgccucaaggagaagguugauucucugaauagagagguggaacagcaccugaacgccgagcgguccuacaagagccaaaucucuacgcuucauaaaagcgucgugaagauggaagaggaacuccagaaagugcaguuugagaaggucuccgcccuggcugaccugucuagcacaagagagcucuguaucaaacuggacuccagcaaggaacuucugaaucgccagcucguugccaaagaucaagagauugaaaugcgggagaacgaacuggacucugcucacuccgagaucgagcugcuuagaagccagauggccaacgaacgcauuucuaugcagaaucucgaggcgcugcugguggccaacagagauaaggaauaucaaucccagaucgcucuccaggagaaggaaagcgagauucagcugcuuaaagagcaucugugccucgccgaaaauaagauggcuauccaaucccgggacguggcccaguuccgcaacgucgugacccagcuggaggcggaucuggacaucaccaaaagacagcuuggaacagaacgguuugagcgcgagagagccguucaagaacuccggcgccagaauuacucuagcaacgcuuaucacauguccucuaccaugaagccuaauacaaaaugucacagccccgagagagcccaucaccgguccccugaucgcggccuggacagaagccuggaagagaaccucugcuaccgggauuucuga

SEQ ID NO: 3709 - protein, 308 aa, Artificial Sequence
  TSPY1__Homo_sapiens__Q01534
MRPEGSLTYRVPERLRQGFCGVGRAAQALVCASAKEGTAFRMEAVQEGAAGVESEQAALGEEAVLLLDDIMAEVEVVAEEEGLVERREEAQRAQQAVPGPGPMTPESAPEELLAVQVELEPVNAQARKAFSRQREKMERRRKPHLDRRGAVIQSVPGFWANVIANHPQMSALITDEDEDMLSYMVSLEVGEEKHPVHLCKIMLFFRSNPYFQNKVITKEYLVNITEYRASHSTPIEWYPDYEVEAYRRRHHNSSLNFFNWFSDHNFAGSNKIAEILCKDLWRNPLQYYKRMKPPEEGTETSGDSQLLS

SEQ ID NO: 3710 - RNA, 927 nt, Artificial Sequence
  TSPY1__Homo_sapiens__CCDS48205.1
augcgcccugagggcucgcugaccuaccgggugccagagaggcugcggcaggguuucuguggcgugggucgggcagcacaggccuuggugugugcgagugccaaggagggcaccgccuucaggauggaggcugugcaggagggggcggccgggguggagagugagcaggcggcuuugggggaggaggcggugcugcuguuggaugacauaauggcggagguggaggugguggcggaggaggagggccucguggagcggcgggaggaggcccagcgggcacagcaggcugugccuggcccugggcccaugaccccagagucugcaccggaggagcugcuggccguucagguggagcuggagccgguuaaugcccaagccaggaaggccuuuucucggcagcgggaaaagauggagcggaggcgcaagccccaccuagaccgcagaggcgccgucauccagagcgucccuggcuucugggccaauguuauugcaaaccacccccagaugucagcccugaucacugacgaagaugaagacaugcugagcuacauggucagccuggaggugggagaagagaagcauccuguucaucucugcaagaucauguuguucuuucggaguaaccccuacuuccagaauaaagugauuaccaaggaauaucuggugaacaucacagaauacagggcuucucauuccacuccaauugagugguauccggauuaugaaguggaggccuaucgccgcagacaccacaacagcagccuuaacuucuucaacugguucucugaccacaacuucgcaggaucuaacaagauugcugagauccuauguaaggaccuguggcgcaauccccugcaauacuacaagaggaugaagccaccugaagagggaacagagacgucaggggacucccaguuguugaguuga

SEQ ID NO: 3711 - RNA, 927 nt, Artificial Sequence
  derived and/or modified sequence opt1 from TSPY1__Homo_sapiens__CCDS48205.1
augcgccccgagggcagccugaccuaccgggugccggagcgccuccggcagggguucugcggcgucgggcgcgccgcccaggcgcuggugugcgccuccgccaaggagggcaccgccuuccggauggaggccgugcaggagggggcggccggcgucgagagcgagcaggccgcccugggcgaggaggcggugcuccugcuggacgacaucauggccgagguggaggucguggccgaggaggaggggcucguggagcgccgggaggaggcccagcgcgcccagcaggcgguccccggccccgggcccaugacgccggaguccgcccccgaggagcugcuggccguccagguggagcucgagcccgugaacgcccaggcccggaaggcguucagccgccagcgggagaagauggagcgccggcgcaagccccaccuggaccggcgcggcgccgugauccaguccgugccgggguucugggccaacgucaucgccaaccacccccagaugagcgcccugaucaccgacgaggacgaggacaugcucuccuacauggugagccuggaggugggcgaggagaagcaccccguccaccugugcaagaucaugcuguucuuccgguccaaccccuacuuccagaacaaggugaucaccaaggaguaccucgugaacaucaccgaguaccgcgcgagccacuccacgccgaucgagugguaccccgacuacgaggucgaggccuaccggcgccggcaccacaacagcucccugaacuucuucaacugguucagcgaccacaacuucgccggcuccaacaagaucgccgagauccucugcaaggaccuguggcgcaacccccugcaguacuacaagcgcaugaagcccccggaggaggggaccgagaccagcggcgacucccagcuccugagcuga

SEQ ID NO: 3712 - RNA, 927 nt, Artificial Sequence
  derived and/or modified sequence opt2 from TSPY1__Homo_sapiens__CCDS48205.1
augcgccccgagggcucccucaccuaccgcguccccgagcgccuccgccagggcuucugcggcgucggccgcgccgcccaggcccucgucugcgccuccgccaaggagggcaccgccuuccgcauggaggccguccaggagggcgccgccggcgucgaguccgagcaggccgcccucggcgaggaggccguccuccuccucgacgacaucauggccgaggucgaggucgucgccgaggaggagggccucgucgagcgccgcgaggaggcccagcgcgcccagcaggccguccccggccccggccccaugacccccgaguccgcccccgaggagcuccucgccguccaggucgagcucgagcccgucaacgcccaggcccgcaaggccuucucccgccagcgcgagaagauggagcgccgccgcaagccccaccucgaccgccgcggcgccgucauccaguccguccccggcuucugggccaacgucaucgccaaccacccccagauguccgcccucaucaccgacgaggacgaggacaugcucuccuacauggucucccucgaggucggcgaggagaagcaccccguccaccucugcaagaucaugcucuucuuccgcuccaaccccuacuuccagaacaaggucaucaccaaggaguaccucgucaacaucaccgaguaccgcgccucccacuccacccccaucgagugguaccccgacuacgaggucgaggccuaccgccgccgccaccacaacuccucccucaacuucuucaacugguucuccgaccacaacuucgccggcuccaacaagaucgccgagauccucugcaaggaccucuggcgcaacccccuccaguacuacaagcgcaugaagccccccgaggagggcaccgagaccuccggcgacucccagcuccucuccuga

SEQ ID NO: 3713 - RNA, 927 nt, Artificial Sequence
  derived and/or modified sequence opt3 from TSPY1__Homo_sapiens__CCDS48205.1
augagacccgagggcagccugaccuacagggugccugaacggcuccgccagggguucugcggagucggucgagccgcucaagcacuuguuugugccuccgcgaaggagggcacagcuuuucguauggaagccgugcaggagggggcagccggaguagaaucugagcaggcugcacugggcgaggaagccguguuguuacuggacgauaucauggcugaggucgaagugguugccgaggaggaaggucuaguggagagaagggaagaggcgcagcgggcacaacaggccgucccagggccgggacccaugacuccugaaucagcuccagaggagcuccuggccgugcagguagaacuugagcccguuaacgcacaggcucgcaaagccuucaguagacaaagggaaaagauggagcggcgccgaaaaccucaccuggacagaaggggcgcggugauucagagcgucccaggcuuuugggccaaugugauagcaaaccauccccagauguccgcuuugaucacggaugaagacgaggauaugcucucuuauauggugucgcuggaggucggggaagagaagcacccuguucaucugugcaaaauuauguuauucuuucggucaaauccauacuuccagaacaaggugaucaccaaggaauaucucguaaauauuacagaguaccgugccagccacaguacuccgaucgaaugguaucccgacuacgagguggaggcuuaucgcagaaggcaucacaacuccucucugaacuuuuucaauugguuuagcgaucacaauuucgccggauccaacaaaauagcagaaauccuuuguaaggacuuguggcggaauccucugcaauacuacaaacgaaugaagccacccgaggaagguaccgagacaucaggcgauagucagcuacucagcuga

SEQ ID NO: 3714 - RNA, 927 nt, Artificial Sequence
  derived and/or modified sequence opt4 from TSPY1__Homo_sapiens__CCDS48205.1
augagacccgagggcagccugaccuacagagugcccgagagacugagacagggcuucugcggcgugggcagagccgcccaggcccuggugugcgccagcgccaaggagggcaccgccuucagaauggaggccgugcaggagggcgccgccggcguggagagcgagcaggccgcccugggcgaggaggccgugcugcugcuggacgacaucauggccgagguggaggugguggccgaggaggagggccugguggagagaagagaggaggcccagagagcccagcaggccgugcccggccccggccccaugacccccgagagcgcccccgaggagcugcuggccgugcagguggagcuggagcccgugaacgcccaggccagaaaggccuucagcagacagagagagaagauggagagaagaagaaagccccaccuggacagaagaggcgccgugauccagagcgugcccggcuucugggccaacgugaucgccaaccacccccagaugagcgcccugaucaccgacgaggacgaggacaugcugagcuacauggugagccuggaggugggcgaggagaagcaccccgugcaccugugcaagaucaugcuguucuucagaagcaaccccuacuuccagaacaaggugaucaccaaggaguaccuggugaacaucaccgaguacagagccagccacagcacccccaucgagugguaccccgacuacgagguggaggccuacagaagaagacaccacaacagcagccugaacuucuucaacugguucagcgaccacaacuucgccggcagcaacaagaucgccgagauccugugcaaggaccuguggagaaacccccugcaguacuacaagagaaugaagccccccgaggagggcaccgagaccagcggcgacagccagcugcugagcuga

SEQ ID NO: 3715 - RNA, 927 nt, Artificial Sequence
  derived and/or modified sequence opt5 from TSPY1__Homo_sapiens__CCDS48205.1
augagacccgagggcagccugaccuaccgggugccugaacgccucagacagggguucugcggagucggccgggccgcucaagcccugguuugugcguccgcuaaggaggggacagccuuucgcauggaagccgugcaggagggagcugccggcguggaaucugagcaggcugcccuuggggaggaagcgguccugcuccuggacgauaucauggccgagguggaaguuguggcugaggaggaaggacuugucgagagacgggaagaggcccagcgcgcucaacaggccgugccgggccccggcccuaugacgcccgaaagcgcgccugaggagcugcucgccguucagguggaacuggagcccgucaacgcucaggccagaaaagccuucucccggcaacgcgaaaagauggagagacggcgcaaaccucaccuggacagacgcggggcugugauucagucugugccgggauuuugggccaaugucaucgcuaaccauccccagaugagcgcgcucauuaccgaugaagacgaggauaugcuguccuauaugguuucucuugaggugggcgaagagaagcacccugugcaucugugcaaaaucaugcuguucuuucggagcaaucccuacuuccagaacaaggucauuacaaaggaauaucucgugaauaucaccgaguacagagccucccacagcacaccuaucgaaugguaucccgacuacgagguugaggcuuaucggagacgccaucacaacucuucccuuaacuuuuucaauugguuuagcgaucacaauuucgccgggucuaacaaaauugccgaaauccuguguaaggaccucuggcggaauccgcugcaauacuacaaaagaaugaagccucccgaggaaggaaccgagacauccggcgauagccagcugcucucuuga

SEQ ID NO: 3716 - protein, 122 aa, Artificial Sequence
  TVC_(TRGV3)__Homo_sapiens__M13231.1
MRWALLVLLAFLSPASQKSSNLEGRTKSVTRQTGSSAEITCDLTVTNTFYIHWYLHQEGKAPQRLLYYDVSTARDVLESGLSPGKYYTHTPRRWSWILRLQNLIENDSGVYYCATWDRQKLL

SEQ ID NO: 3717 - RNA, 369 nt, Artificial Sequence
  TVC_(TRGV3)__Homo_sapiens__M13231.1
augcggugggcccuacuggugcuucuagcuuuccugucuccugccagucagaaaucuuccaacuuggaagggagaacgaagucagucaccaggcagacugggucaucugcugaaaucacuugcgaucuuacuguaacaaauaccuucuacauccacugguaccuacaccaggaggggaaggccccacagcgucuucuguacuaugacgucuccacugcaagggauguguuggaaucaggacucaguccaggaaaguauuauacucauacacccaggagguggagcuggauauugagacugcaaaaucuaauugaaaaugauucuggggucuauuacugugccaccugggacaggcaaaaauuauuauaa

SEQ ID NO: 3718 - RNA, 369 nt, Artificial Sequence
  derived and/or modified sequence opt1 from TVC_(TRGV3)__Homo_sapiens__M13231.1
augcgcugggcccugcucgugcugcuggccuuccucagccccgcgucccagaaguccagcaaccuggagggccggaccaagagcgucacccgccagacgggguccagcgccgagaucacgugcgaccugaccgugaccaacaccuucuacauccacugguaccuccaccaggagggcaaggccccgcagcggcugcuguacuacgacguguccaccgcccgcgacguccucgagagcgggcugucccccggcaaguacuacacccacacgccccggcgcuggagcuggauccugcggcuccagaaccugaucgagaacgacuccgggguguacuacugcgccaccugggaccgccagaagcugcucuga

SEQ ID NO: 3719 - RNA, 369 nt, Artificial Sequence
  derived and/or modified sequence opt2 from TVC_(TRGV3)__Homo_sapiens__M13231.1
augcgcugggcccuccucguccuccucgccuuccucucccccgccucccagaaguccuccaaccucgagggccgcaccaaguccgucacccgccagaccggcuccuccgccgagaucaccugcgaccucaccgucaccaacaccuucuacauccacugguaccuccaccaggagggcaaggccccccagcgccuccucuacuacgacgucuccaccgcccgcgacguccucgaguccggccucucccccggcaaguacuacacccacaccccccgccgcugguccuggauccuccgccuccagaaccucaucgagaacgacuccggcgucuacuacugcgccaccugggaccgccagaagcuccucuga

SEQ ID NO: 3720 - RNA, 369 nt, Artificial Sequence
  derived and/or modified sequence opt3 from TVC_(TRGV3)__Homo_sapiens__M13231.1
augagaugggcccugcucgugcuucuggcuuucuugagccccgcaucccagaagucuucaaacuuagagggcaggaccaaaagugucacacggcaaacugggagcuccgccgaaaucacgugcgaccugaccguuacaaauacuuuuuacauucacugguaucuacaucaggagggaaaggcgccucagcgccuccuguacuaugaugugucuaccgcucgagacguacuugaaucgggucugucaccaggcaaauacuauacacacaccccgcguagauggagcuggauauugaggcuccagaaccugaucgagaaugauagugggguguacuauugugccacuugggaccggcaaaagcugcucuga

SEQ ID NO: 3721 - RNA, 369 nt, Artificial Sequence
  derived and/or modified sequence opt4 from TVC_(TRGV3)__Homo_sapiens__M13231.1
augagaugggcccugcuggugcugcuggccuuccugagccccgccagccagaagagcagcaaccuggagggcagaaccaagagcgugaccagacagaccggcagcagcgccgagaucaccugcgaccugaccgugaccaacaccuucuacauccacugguaccugcaccaggagggcaaggccccccagagacugcuguacuacgacgugagcaccgccagagacgugcuggagagcggccugagccccggcaaguacuacacccacacccccagaagauggagcuggauccugagacugcagaaccugaucgagaacgacagcggcguguacuacugcgccaccugggacagacagaagcugcuguga

SEQ ID NO: 3722 - RNA, 369 nt, Artificial Sequence
  derived and/or modified sequence opt5 from TVC_(TRGV3)__Homo_sapiens__M13231.1
augagaugggcccugcucgugcugcuugcuuuccugagccccgccucccagaagucuagcaaccucgagggccggaccaaauccgucacacgccaaacggggucuagcgcggaaauuaccugcgaccugacaguuaccaauacauuuuacauccacugguaucuucaucaggagggaaaggcuccucagagacugcucuacuaugauguguccaccgcccgggacgugcuggaaucuggccugagcccggggaaauacuauacacacacgccccgcagaugguccuggauccuccggcugcagaaccuuauugagaaugauagcggagucuacuauugugccaccugggaccgccaaaagcugcucuga

SEQ ID NO: 3723 - protein, 267 aa, Artificial Sequence
  TX101__Homo_sapiens__Q9BY14-2
MGARQIQTSSSQTSPEEAMGTPRIQHLLILLVLGASLLTSGLELYCQKGLSMTVEADPANMFNWTTEEVETCDKGALCQETILIIKAGTETAILATKGCIPEGEEAITIVQHSSPPGLIVTSYSNYCEDSFCNDKDSLSQFWEFSETTASTVSTTLHCPTCVALGTCFSAPSLPCPNGTTRCYQGKLEITGGGIESSVEVKGCTAMIGCRLMSGILAVGPMFVREACPHQLLTQPRKTENGATCLPIPVWGLQLLLPLLLPSFIHFS

SEQ ID NO: 3724 - RNA, 804 nt, Artificial Sequence
  TX101__Homo_sapiens__CCDS12619.1
augggggcgaggcagauccagaccagcuccucccagaccucuccagaagaagccaugggaaccccucguauccagcauuugcugauccuccugguccuaggagccucccuccugaccucgggccuagagcuguauugucaaaagggucuguccaugacuguggaagcagauccagccaauauguuuaacuggaccacagaggaaguggagacuugugacaaaggggcacuuugccaggaaaccauacuaauaauuaaagcagggacugagacagccauuuuggccacgaagggcugcaucccggaaggggaggaggccauaacaauuguccagcacucuucaccucccggccugaucgugaccuccuacaguaacuacugugaggauuccuucuguaaugacaaagacagccugucucaguuuugggaguucagugagaccacagcuuccacugugucaacaacccuccauuguccaaccuguguggcuuuggggaccuguuucagugcuccuucucuucccugucccaaugguacaacucgaugcuaucaaggaaaacuugagaucacuggagguggcauugagucgucuguggaggucaaaggcuguacagccaugauuggcugcaggcugaugucuggaaucuuagcaguaggacccauguuugugagggaagcgugcccacaucagcugcucacucaaccucgaaagacugaaaauggggccaccugucuucccauuccuguuuggggguuacagcuacugcugccauugcugcugccaucauuuauucacuuuuccuaa

SEQ ID NO: 3725 - RNA, 804 nt, Artificial Sequence
  derived and/or modified sequence opt1 from TX101__Homo_sapiens__CCDS12619.1
augggcgcccgccagauccagaccagcuccagccagaccucccccgaggaggccauggggacgccgcggauccagcaccuccugauccugcuggugcucggcgcgagccugcugaccuccgggcucgagcuguacugccagaagggccugagcaugaccgucgaggccgaccccgccaacauguucaacuggaccacggaggagguggagaccugcgacaagggggcccucugccaggagaccauccugaucaucaaggccggcaccgagacggcgauccuggccaccaagggcugcauccccgagggggaggaggccaucaccaucgugcagcacuccagcccgcccggccucaucgucaccuccuacagcaacuacugcgaggacuccuucugcaacgacaaggacagccugucccaguucugggaguucagcgagacgaccgccuccaccgugagcaccacgcugcacugcccgaccugcguggcgcucgggaccugcuucuccgcccccagccugcccugccccaacggcaccacgcgcugcuaccaggggaagcuggagaucaccggcggcgggaucgaguccagcgucgaggugaagggcugcaccgccaugaucgggugccggcucaugagcggcauccuggccgugggccccauguucguccgcgaggccugcccccaccagcugcucacccagccccggaagacggagaacggggcgaccugccugccgauccccguguggggccugcagcuccugcugccccuccugcugcccuccuucauccacuucagcuga

SEQ ID NO: 3726 - RNA, 804 nt, Artificial Sequence
  derived and/or modified sequence opt2 from TX101__Homo_sapiens__CCDS12619.1
augggcgcccgccagauccagaccuccuccucccagaccucccccgaggaggccaugggcaccccccgcauccagcaccuccucauccuccucguccucggcgccucccuccucaccuccggccucgagcucuacugccagaagggccucuccaugaccgucgaggccgaccccgccaacauguucaacuggaccaccgaggaggucgagaccugcgacaagggcgcccucugccaggagaccauccucaucaucaaggccggcaccgagaccgccauccucgccaccaagggcugcauccccgagggcgaggaggccaucaccaucguccagcacuccuccccccccggccucaucgucaccuccuacuccaacuacugcgaggacuccuucugcaacgacaaggacucccucucccaguucugggaguucuccgagaccaccgccuccaccgucuccaccacccuccacugccccaccugcgucgcccucggcaccugcuucuccgcccccucccuccccugccccaacggcaccacccgcugcuaccagggcaagcucgagaucaccggcggcggcaucgaguccuccgucgaggucaagggcugcaccgccaugaucggcugccgccucauguccggcauccucgccgucggccccauguucguccgcgaggccugcccccaccagcuccucacccagccccgcaagaccgagaacggcgccaccugccuccccauccccgucuggggccuccagcuccuccucccccuccuccuccccuccuucauccacuucuccuga

SEQ ID NO: 3727 - RNA, 804 nt, Artificial Sequence
  derived and/or modified sequence opt3 from TX101__Homo_sapiens__CCDS12619.1
augggcgccagacagauccaaaccagcuccucucagacaucaccagaggaagcuauggggacuccuaggauucagcaucugcucauacuucugguguugggagcaaguuuacugacgagcggucuagagcucuacugccagaagggccuguccaugaccgucgaagccgacccagcgaacauguucaauuggacaacugaggaaguugagaccugugauaaaggggcucuuugccaagagacaauccugauuaucaaggccggaaccgaaacugcaauuuuggccacaaaaggcuguaucccggagggugaagaggcuauaaccaucgugcagcacucuucgcccccugggcucauuguaacgucauauagcaacuacugcgaggacaguuuuuguaaugauaaggacucccugucucaguucugggaauuuagcgagacuaccgcauccacagugucaacuacccugcacugcccaacaugugucgcccucggaaccugcuucagugcucccagcuuaccuuguccaaacggcacgacucggugcuaucagggcaaacuggaaaucacagggggagguauugagucuuccguggaaguuaagggcuguaccgccaugaucgggugccgccuuaugucaggaauauuggcggugggccccauguuuguccgagaggcaugcccucaucaacugcuaacucagccacguaagacagagaauggugccaccugucucccgauucccgugugggggcugcagcuucuguugccucuccuguuacccagcuucauccacuuuaguuga

SEQ ID NO: 3728 - RNA, 804 nt, Artificial Sequence
  derived and/or modified sequence opt4 from TX101__Homo_sapiens__CCDS12619.1
augggcgccagacagauccagaccagcagcagccagaccagccccgaggaggccaugggcacccccagaauccagcaccugcugauccugcuggugcugggcgccagccugcugaccagcggccuggagcuguacugccagaagggccugagcaugaccguggaggccgaccccgccaacauguucaacuggaccaccgaggagguggagaccugcgacaagggcgcccugugccaggagaccauccugaucaucaaggccggcaccgagaccgccauccuggccaccaagggcugcauccccgagggcgaggaggccaucaccaucgugcagcacagcagcccccccggccugaucgugaccagcuacagcaacuacugcgaggacagcuucugcaacgacaaggacagccugagccaguucugggaguucagcgagaccaccgccagcaccgugagcaccacccugcacugccccaccugcguggcccugggcaccugcuucagcgcccccagccugcccugccccaacggcaccaccagaugcuaccagggcaagcuggagaucaccggcggcggcaucgagagcagcguggaggugaagggcugcaccgccaugaucggcugcagacugaugagcggcauccuggccgugggccccauguucgugagagaggccugcccccaccagcugcugacccagcccagaaagaccgagaacggcgccaccugccugcccauccccguguggggccugcagcugcugcugccccugcugcugcccagcuucauccacuucagcuga

SEQ ID NO: 3729 - RNA, 804 nt, Artificial Sequence
  derived and/or modified sequence opt5 from TX101__Homo_sapiens__CCDS12619.1
augggcgccagacagauccaaaccagcuccucucagacaagccccgaggaagcuauggggacgccucggauucagcaucugcucauccugcuugugcugggagccucccuccugaccucuggccuugagcuguacugccagaaggggcucagcaugacagucgaagcggacccggcuaacauguucaauuggaccacagaggaaguugagaccugugauaaaggagcccugugccaagagacaauucugaucauuaaggccggcaccgaaacggcuauccucgccaccaaaggguguauccccgagggagaagaggcuauuacaaucgugcagcacuccucuccucccggccugauugugaccagcuauuccaacuacugcgaggacagcuuuuguaaugauaaggacucucuuucccaguucugggaauuuagcgagacaaccgccucuacggucuccacaacccugcacugcccuacauguguggcgcucggaaccugcuucagcgcccccucucugccuuguccgaacgggaccacacgcugcuaucagggaaaacuugaaaucacgggcgggggaauugaguccagcguugaagugaagggcuguaccgcuaugaucgggugcagacugauguccggcauucucgccgucggccccauguuugugcgggaggcuugcccucaucaacugcugacacagccccgcaagaccgagaauggcgccacaugucucccuauccccguuugggggcugcagcuucugcucccgcugcuucugccuucuuucauccacuuuagcuga

SEQ ID NO: 3730 - protein, 529 aa, Artificial Sequence [sequence omitted]

SEQ ID NO: 3731 - RNA, 1590 nt, Artificial Sequence
  tyrosinase__Homo_sapiens__AHZ44440
augcuccuggcuguuuuguacugccugcuguggaguuuccagaccuccgcuggccauuucccuagagccugugucuccucuaagaaccugauggagaaggaaugcuguccaccguggagcggggacaggagucccuguggccagcuuucaggcagagguuccugucagaauauccuucuguccaaugcaccacuugggccucaauuucccuucacagggguggaugaccgggagucguggccuuccgucuuuuauaauaggaccugccagugcucuggcaacuucaugggauucaacuguggaaacugcaaguuuggcuuuuggggaccaaacugcacagagagacgacucuuggugagaagaaacaucuucgauuugagugccccagagaaggacaaauuuuuugccuaccucacuuuagcaaagcauaccaucagcucagacuaugucauccccauagggaccuauggccaaaugaaaaauggaucaacacccauguuuaacgacaucaauauuuaugaccucuuugucuggaugcauuauuaugugucaauggaugcacugcuugggggaucugaaaucuggagagacauugauuuugcccaugaagcaccagcuuuucugccuuggcauagacucuucuuguugcggugggaacaagaaauccagaagcugacaggagaugaaaacuucacuauuccauauugggacuggcgggaugcagaaaagugugacauuugcacagaugaguacaugggaggucagcaccccacaaauccuaacuuacucagcccagcaucauucuucuccucuuggcagauugucuguagccgauuggaggaguacaacagccaucagucuuuaugcaauggaacgcccgagggaccuuuacggcguaauccuggaaaccaugacaaauccagaaccccaaggcuccccucuucagcugauguagaauuuugccugaguuugacccaauaugaaucugguuccauggauaaagcugccaauuucagcuuuagaaauacacuggaaggauuugcuaguccacuuacugggauagcggaugccucucaaagcagcaugcacaaugccuugcacaucuauaugaauggaacaaugucccagguacagggaucugccaacgauccuaucuuccuucuucaccaugcauuuguugacaguauuuuugagcaguggcuccgaaggcaccguccucuucaagaaguuuauccagaagccaaugcacccauuagacauaaccgggaauccuacaugguuccuuuuauaccacuguacagaaauggugauuucuuuauuucauccaaagaucugggcuaugacuauagcuaucuacaagauucagacccagacucuuuucaagacuacauuaaguccuauuuggaacaagcgagucggaucuggucauggcuccuuggggcggcgaugguaggggccguccucacugcccugcuggcagggcuugugagcuugcugugucgucacaagagaaagcagcuuccugaagaaaagcagccacuccucauggagaaagaggauuaccacagcuuguaucagagccauuuauaa

SEQ ID NO: 3732 - RNA, 1590 nt, Artificial Sequence
  derived and/or modified sequence opt1 from tyrosinase__Homo_sapiens__AHZ44440
augcugcucgccgugcuguacugccugcucuggagcuuccagaccuccgccggccacuucccccgcgcgugcgucagcuccaagaaccugauggagaaggagugcugcccgcccuggagcggggaccggucccccugcggccagcugagcgggcgcggcuccugccagaacauccuccugagcaacgcgccccuggggccgcaguuccccuucaccggcguggacgaccgggaguccuggcccagcguguucuacaaccgcacgugccagugcuccggcaacuucaugggguucaacugcggcaacugcaaguucggguucuggggccccaacugcaccgagcggcgccuccugguccggcgcaacaucuucgaccugagcgccccggagaaggacaaguucuucgccuaccucacccuggccaagcacaccaucuccagcgacuacgugauccccaucgggacguacggccagaugaagaacggcuccacccccauguucaacgacaucaacaucuacgaccuguucguguggaugcacuacuacgucagcauggacgcccuccucgggggcuccgagaucuggcgggacaucgacuucgcccacgaggcccccgccuuccugccguggcaccgccuguuccugcugcggugggagcaggagauccagaagcucaccggggacgagaacuucaccauccccuacugggacuggcgcgacgcggagaagugcgacaucugcacggacgaguacaugggcggccagcaccccaccaaccccaaccugcugagcccggccuccuucuucagcagcuggcagaucgugugcucccggcucgaggaguacaacagccaccagucccugugcaacgggacccccgagggcccccugcgccggaaccccgggaaccacgacaagagccgcaccccgcggcuccccuccagcgccgacguggaguucugccugucccugacgcaguacgagagcggcuccauggacaaggccgccaacuucagcuuccgcaacacccucgagggguucgcgagcccccugaccggcaucgccgacgccucccaguccagcaugcacaacgcccugcacaucuacaugaacggcaccaugucccagguccaggggagcgccaacgaccccaucuuccuccugcaccacgcguucguggacuccaucuucgagcaguggcugcggcgccaccggccgcuccaggagguguaccccgaggccaacgcccccauccgccacaaccgcgagagcuacaugguccccuucaucccgcuguaccggaacggcgacuucuucaucuccagcaaggaccugggguacgacuacagcuaccuccaggacuccgaccccgacagcuuccaggacuacaucaaguccuaccuggagcaggccagccgcaucugguccuggcugcucggcgccgcgauggugggggccgugcugacggcccugcucgccggccuggucagccugcucugccggcacaagcgcaagcagcugcccgaggagaagcagccgcugcugauggagaaggaggacuaccacucccucuaccagagccaccuguga

SEQ ID NO: 3733 - RNA, 1590 nt, Artificial Sequence
  derived and/or modified sequence opt2 from tyrosinase__Homo_sapiens__AHZ44440
augcuccucgccguccucuacugccuccucugguccuuccagaccuccgccggccacuucccccgcgccugcgucuccuccaagaaccucauggagaaggagugcugcccccccugguccggcgaccgcucccccugcggccagcucuccggccgcggcuccugccagaacauccuccucuccaacgccccccucggcccccaguuccccuucaccggcgucgacgaccgcgaguccuggcccuccgucuucuacaaccgcaccugccagugcuccggcaacuucaugggcuucaacugcggcaacugcaaguucggcuucuggggccccaacugcaccgagcgccgccuccucguccgccgcaacaucuucgaccucuccgcccccgagaaggacaaguucuucgccuaccucacccucgccaagcacaccaucuccuccgacuacgucauccccaucggcaccuacggccagaugaagaacggcuccacccccauguucaacgacaucaacaucuacgaccucuucgucuggaugcacuacuacgucuccauggacgcccuccucggcggcuccgagaucuggcgcgacaucgacuucgcccacgaggcccccgccuuccuccccuggcaccgccucuuccuccuccgcugggagcaggagauccagaagcucaccggcgacgagaacuucaccauccccuacugggacuggcgcgacgccgagaagugcgacaucugcaccgacgaguacaugggcggccagcaccccaccaaccccaaccuccucucccccgccuccuucuucuccuccuggcagaucgucugcucccgccucgaggaguacaacucccaccagucccucugcaacggcacccccgagggcccccuccgccgcaaccccggcaaccacgacaagucccgcaccccccgccuccccuccuccgccgacgucgaguucugccucucccucacccaguacgaguccggcuccauggacaaggccgccaacuucuccuuccgcaacacccucgagggcuucgccuccccccucaccggcaucgccgacgccucccaguccuccaugcacaacgcccuccacaucuacaugaacggcaccaugucccagguccagggcuccgccaacgaccccaucuuccuccuccaccacgccuucgucgacuccaucuucgagcaguggcuccgccgccaccgcccccuccaggaggucuaccccgaggccaacgcccccauccgccacaaccgcgaguccuacaugguccccuucaucccccucuaccgcaacggcgacuucuucaucuccuccaaggaccucggcuacgacuacuccuaccuccaggacuccgaccccgacuccuuccaggacuacaucaaguccuaccucgagcaggccucccgcaucugguccuggcuccucggcgccgccauggucggcgccguccucaccgcccuccucgccggccucgucucccuccucugccgccacaagcgcaagcagcuccccgaggagaagcagccccuccucauggagaaggaggacuaccacucccucuaccagucccaccucuga

SEQ ID NO: 3734 - RNA, 1590 nt, Artificial Sequence
  derived and/or modified sequence opt3 from tyrosinase__Homo_sapiens__AHZ44440
augcugcucgccgugcuuuacugccuguuguggagcuuccagaccuccgcuggccacuuucccagagcaugugucucuucaaagaacuuaauggagaaagaaugcuguccuccauggaguggggacaggagcccgugcggacaacuguccggucggggcucuugucagaauauccuacucucgaacgcccccuuggggccucaguucccauuuacaggaguugaugaccgcgagucauggcccagcguguucuauaaucgaacuugccaguguaguggcaacuuuauggguuucaauugcgggaacuguaaguuuggauucuggggcccuaauugcacggaacguagacuucugguaaggcggaacauuuuugauuuguccgcgccagagaaagacaaguucuuugcuuaccucacccuggccaaacauacaauaucuagcgauuaugugauccccauuggcacuuacgggcaaaugaagaauggauccaccccuauguucaacgacaucaauauuuaugaucuguuugucuggaugcacuacuaugugucaauggacgcacucuuagguggcagugaaaucuggcgcgauauagacuucgcccaugaggcuccagcauuccugccguggcacagacuuuuucugcugaggugggagcaggaaauccagaagcuaacaggggaugagaacuucaccauucccuacugggacuggcgggaugccgaaaaaugugacaucugcacugacgaguacaugggaggccagcauccuacaaauccaaaccuccugagccccgcuuccuuuuucucuucauggcaaauuguuugcagccgccuugaggaauauaauagucaccagucucuguguaacgguaccccugaggggccauugcgaagaaaccccggaaaucacgauaaguccaggacgccgcggcucccuagcucggccgacguggaauuuugccugucuuuaacucaguacgaguccggcucaauggauaaagcggcaaacuucaguuuucguaauacccuggaaggcuucgccagcccccucacagggaucgcugacgccucccagucuagcaugcauaacgcacuucacauauauaugaauggaacuaugucacaaguccaggguagugcuaacgauccaauuuuucuguugcaucacgccuucguggacuccaucuuugagcaguggcuacgcagacacaggccucugcaagagguauaccccgaagcgaaugccccaauucggcauaaccgagagagcuauaugguucccuucaucccucucuaccgcaauggcgacuuuuucaucucuucaaaggaucugggguaugauuacaguuaccuucaggacagcgauccagacuccuuccaggacuauauuaaaucuuaccuggaacaggcaucgagaauauggagcugguugcucggagcugccauggugggcgcuguccugaccgccuuacuggcaggucuagugucccuccuguguaggcacaagcggaagcaacuuccggaggaaaaacagcccuugcugauggagaaggaggauuaucauucacucuaccagagucaccuguga

SEQ ID NO: 3735 - RNA, 1590 nt, Artificial Sequence
  derived and/or modified sequence opt4 from tyrosinase__Homo_sapiens__AHZ44440
augcugcuggccgugcuguacugccugcuguggagcuuccagaccagcgccggccacuuccccagagccugcgugagcagcaagaaccugauggagaaggagugcugcccccccuggagcggcgacagaagccccugcggccagcugagcggcagaggcagcugccagaacauccugcugagcaacgccccccugggcccccaguuccccuucaccggcguggacgacagagagagcuggcccagcguguucuacaacagaaccugccagugcagcggcaacuucaugggcuucaacugcggcaacugcaaguucggcuucuggggccccaacugcaccgagagaagacugcuggugagaagaaacaucuucgaccugagcgcccccgagaaggacaaguucuucgccuaccugacccuggccaagcacaccaucagcagcgacuacgugauccccaucggcaccuacggccagaugaagaacggcagcacccccauguucaacgacaucaacaucuacgaccuguucguguggaugcacuacuacgugagcauggacgcccugcugggcggcagcgagaucuggagagacaucgacuucgcccacgaggcccccgccuuccugcccuggcacagacuguuccugcugagaugggagcaggagauccagaagcugaccggcgacgagaacuucaccauccccuacugggacuggagagacgccgagaagugcgacaucugcaccgacgaguacaugggcggccagcaccccaccaaccccaaccugcugagccccgccagcuucuucagcagcuggcagaucgugugcagcagacuggaggaguacaacagccaccagagccugugcaacggcacccccgagggcccccugagaagaaaccccggcaaccacgacaagagcagaacccccagacugcccagcagcgccgacguggaguucugccugagccugacccaguacgagagcggcagcauggacaaggccgccaacuucagcuucagaaacacccuggagggcuucgccagcccccugaccggcaucgccgacgccagccagagcagcaugcacaacgcccugcacaucuacaugaacggcaccaugagccaggugcagggcagcgccaacgaccccaucuuccugcugcaccacgccuucguggacagcaucuucgagcaguggcugagaagacacagaccccugcaggagguguaccccgaggccaacgcccccaucagacacaacagagagagcuacauggugcccuucaucccccuguacagaaacggcgacuucuucaucagcagcaaggaccugggcuacgacuacagcuaccugcaggacagcgaccccgacagcuuccaggacuacaucaagagcuaccuggagcaggccagcagaaucuggagcuggcugcugggcgccgccauggugggcgccgugcugaccgcccugcuggccggccuggugagccugcugugcagacacaagagaaagcagcugcccgaggagaagcagccccugcugauggagaaggaggacuaccacagccuguaccagagccaccuguga

SEQ ID NO: 3736 - RNA, 1590 nt, Artificial Sequence
  derived and/or modified sequence opt5 from tyrosinase__Homo_sapiens__AHZ44440
augcugcucgccgugcuguacugccuucuguggagcuuccagaccuccgcuggccacuuucccagagccugugucucuagcaagaaccucauggagaaagaaugcuguccuccgugguccggggaccggucucccugcggacaacugagcggccgcggguccugucagaauauccuucugucuaacgcgccucucggaccccaguucccuuuuacaggcguugaugacagagagagcuggcccuccguguucuauaaucggacgugccaguguagcgggaacuuuaugggauucaauugcggcaacuguaaguuuggcuucugggggccuaauugcaccgaacgcagacugcuggugcggcgcaacauuuuugaucucucugcuccggagaaagacaaguucuuugccuaccugacacuugccaaacauaccaucuccagcgauuaugucauucccaucggaacauacggccaaaugaagaaugggucuaccccuauguucaacgacauuaauaucuaugaucuguuuguguggaugcacuacuauguuuccauggacgcucuccugggaggcagcgaaaucuggagagauauugacuucgcccaugaggcucccgccuuccuuccuuggcaccggcuguuucuccugcgcugggagcaggaaauccagaagcugacaggggaugagaacuucaccauucccuacugggacuggagagaugcggaaaaaugugacaucugcacggacgaguacaugggaggccagcauccgaccaauccuaaccuccugucucccgccuccuuuuucagcuccuggcaaauugugugcucucggcuugaggaauauaauagccaccagucccuguguaacggcacaccugaggggccccuccgcagaaaccccggaaaucacgauaagagccggaccccucgccugccgucuuccgcugacgucgaauuuugccuuagccugacacaguacgagucuggcagcauggauaaagccgcuaacuucuccuuuagaaauacccucgaaggguucgccucuccccugacgggaaucgcggacgccagccaguccagcaugcauaacgcucugcacauuuauaugaauggcacaaugucucaagugcagggguccgccaacgauccuaucuuucuccugcaucacgcuuucguugacagcaucuuugagcaguggcuucggagacaccgcccccugcaagagguguacccugaagccaaugcccccauucggcauaacagagagucuuauauggucccguucaucccucucuaccgcaauggagacuuuuucauuuccagcaaggaucugggcuaugauuacuccuaccuucaggacucugaucccgacagcuuccaggacuauaucaaauccuaccuggaacaggcuucucggauuuggagcuggcuccugggcgcggccauggugggggcugugcugaccgcccuccuggccggacuugucucccugcucuguagacacaagcgcaagcaacugccugaggaaaaacagccccugcuuauggagaaggaggauuaucauagccucuaccagucucaccuguga

SEQ ID NO: 3737 - protein, 529 aa, Artificial Sequence [sequence omitted]

SEQ ID NO: 3738 - RNA, 1590 nt, Artificial Sequence
  tyrosinase__Homo_sapiens__AGV39051
augcuccuggcuguuuuguacugccugcuguggaguuuccagaccuccgcuggccauuucccuagagccugugucuccucuaagaaccugauggagaaggaaugcuguccaccguggagcggggacaggagucccuguggccagcuuucaggcagagguuccugucagaauauccuucuguccaaugcaccacuugggccucaauuucccuucacagggguggaugaccgggagucguggccuuccgucuuuuauaauaggaccugccagugcucuggcaacuucaugggauucaacuguggaaacugcaaguuuggcuuuuggggaccaaacugcacagagagacgacucuuggugagaagaaacaucuucgauuugagugccccagagaaggacaaauuuuuugccuaccucacuuuagcaaagcauaccaucagcucagacuaugucauccccauagggaccuauggccaaaugaaaaauggaucaacacccauguuuaacgacaucaauauuuaugaccucuuugucuggaugcauuauuaugugucaauggaugcacugcuugggggaucugaaaucuggagagacauugauuuugcccaugaagcaccagcuuuucugccuuggcauagacucuucuuguugcggugggaacaagaaauccagaagcugacaggagaugaaaacuucacuauuccauauugggacuggcgggaugcagaaaagugugacauuugcacagaugaguacaugggaggucagcaccccacaaauccuaacuuacucagcccagcaucauucuucuccucuuggcagauugucuguagccgauuggaggaguacaacagccaucagucuuuaugcaauggaacgcccgagggaccuuuacggcguaauccuggaaaccaugacaaauccagaaccccaaggcuccccucuucagcugauguagaauuuugccugaguuugacccaauaugaaucugguuccauggauaaagcugccaauuucagcuuuagaaauacacuggaaggauuugcuaguccacuuacugggauagcggaugccucucaaagcagcaugcacaaugccuugcacaucuauaugaauggaacaaugucccagguacagggaucugccaacgauccuaucuuccuucuucaccaugcauuuguugacaguauuuuugagcaguggcuccgaaggcaccguccucuucaagaaguuuauccagaagccaaugcacccauuggacauaaccgggaauccuacaugguuccuuuuauaccacuguacagaaauggugauuucuuuauuucauccaaagaucugggcuaugacuauagcuaucuacaagauucagacccagacucuuuucaagacuacauuaaguccuauuuggaacaagcgagucggaucuggucauggcuccuuggggcggcgaugguaggggccguccucacugcccugcuggcagggcuugugagcuugcugugucgucacaagagaaagcagcuuccugaagaaaagcagccacuccucauggagaaagaggauuaccacagcuuguaucagagccauuuauaa

SEQ ID NO: 3739 - RNA, 1590 nt, Artificial Sequence
  derived and/or modified sequence opt1 from tyrosinase__Homo_sapiens__AGV39051
augcugcucgccgugcuguacugccugcucuggagcuuccagaccuccgccggccacuucccccgcgcgugcgucagcuccaagaaccugauggagaaggagugcugcccgcccuggagcggggaccggucccccugcggccagcugagcgggcgcggcuccugccagaacauccuccugagcaacgcgccccuggggccgcaguuccccuucaccggcguggacgaccgggaguccuggcccagcguguucuacaaccgcacgugccagugcuccggcaacuucaugggguucaacugcggcaacugcaaguucggguucuggggccccaacugcaccgagcggcgccuccugguccggcgcaacaucuucgaccugagcgccccggagaaggacaaguucuucgccuaccucacccuggccaagcacaccaucuccagcgacuacgugauccccaucgggacguacggccagaugaagaacggcuccacccccauguucaacgacaucaacaucuacgaccuguucguguggaugcacuacuacgucagcauggacgcccuccucgggggcuccgagaucuggcgggacaucgacuucgcccacgaggcccccgccuuccugccguggcaccgccuguuccugcugcggugggagcaggagauccagaagcucaccggggacgagaacuucaccauccccuacugggacuggcgcgacgcggagaagugcgacaucugcacggacgaguacaugggcggccagcaccccaccaaccccaaccugcugagcccggccuccuucuucagcagcuggcagaucgugugcucccggcucgaggaguacaacagccaccagucccugugcaacgggacccccgagggcccccugcgccggaaccccgggaaccacgacaagagccgcaccccgcggcuccccuccagcgccgacguggaguucugccugucccugacgcaguacgagagcggcuccauggacaaggccgccaacuucagcuuccgcaacacccucgagggguucgcgagcccccugaccggcaucgccgacgccucccaguccagcaugcacaacgcccugcacaucuacaugaacggcaccaugucccagguccaggggagcgccaacgaccccaucuuccuccugcaccacgcguucguggacuccaucuucgagcaguggcugcggcgccaccggccgcuccaggagguguaccccgaggccaacgcccccaucggccacaaccgcgagagcuacaugguccccuucaucccgcuguaccgcaacggggacuucuucaucuccagcaaggaccugggcuacgacuacagcuaccuccaggacuccgaccccgacagcuuccaggacuacaucaaguccuaccuggagcaggccagccggaucugguccuggcugcucggggccgcgauggugggcgccgugcugacggcccugcucgccggccuggucagccugcucugccgccacaagcggaagcagcugcccgaggagaagcagccgcugcugauggagaaggaggacuaccacucccucuaccagagccaccuguga

SEQ ID NO: 3740 - RNA, 1590 nt, Artificial Sequence
  derived and/or modified sequence opt2 from tyrosinase__Homo_sapiens__AGV39051
augcuccucgccguccucuacugccuccucugguccuuccagaccuccgccggccacuucccccgcgccugcgucuccuccaagaaccucauggagaaggagugcugcccccccugguccggcgaccgcucccccugcggccagcucuccggccgcggcuccugccagaacauccuccucuccaacgccccccucggcccccaguuccccuucaccggcgucgacgaccgcgaguccuggcccuccgucuucuacaaccgcaccugccagugcuccggcaacuucaugggcuucaacugcggcaacugcaaguucggcuucuggggccccaacugcaccgagcgccgccuccucguccgccgcaacaucuucgaccucuccgcccccgagaaggacaaguucuucgccuaccucacccucgccaagcacaccaucuccuccgacuacgucauccccaucggcaccuacggccagaugaagaacggcuccacccccauguucaacgacaucaacaucuacgaccucuucgucuggaugcacuacuacgucuccauggacgcccuccucggcggcuccgagaucuggcgcgacaucgacuucgcccacgaggcccccgccuuccuccccuggcaccgccucuuccuccuccgcugggagcaggagauccagaagcucaccggcgacgagaacuucaccauccccuacugggacuggcgcgacgccgagaagugcgacaucugcaccgacgaguacaugggcggccagcaccccaccaaccccaaccuccucucccccgccuccuucuucuccuccuggcagaucgucugcucccgccucgaggaguacaacucccaccagucccucugcaacggcacccccgagggcccccuccgccgcaaccccggcaaccacgacaagucccgcaccccccgccuccccuccuccgccgacgucgaguucugccucucccucacccaguacgaguccggcuccauggacaaggccgccaacuucuccuuccgcaacacccucgagggcuucgccuccccccucaccggcaucgccgacgccucccaguccuccaugcacaacgcccuccacaucuacaugaacggcaccaugucccagguccagggcuccgccaacgaccccaucuuccuccuccaccacgccuucgucgacuccaucuucgagcaguggcuccgccgccaccgcccccuccaggaggucuaccccgaggccaacgcccccaucggccacaaccgcgaguccuacaugguccccuucaucccccucuaccgcaacggcgacuucuucaucuccuccaaggaccucggcuacgacuacuccuaccuccaggacuccgaccccgacuccuuccaggacuacaucaaguccuaccucgagcaggccucccgcaucugguccuggcuccucggcgccgccauggucggcgccguccucaccgcccuccucgccggccucgucucccuccucugccgccacaagcgcaagcagcuccccgaggagaagcagccccuccucauggagaaggaggacuaccacucccucuaccagucccaccucuga

SEQ ID NO: 3741 - RNA, 1590 nt, Artificial Sequence
  derived and/or modified sequence opt3 from tyrosinase__Homo_sapiens__AGV39051
augcugcucgccgugcuuuacugccuguuguggagcuuccagaccuccgcuggccacuuucccagagcaugugucucuucaaagaacuuaauggagaaagaaugcuguccuccauggaguggggacaggagcccgugcggacaacuguccggucggggcucuugucagaauauccuacucucgaacgcccccuuggggccucaguucccauuuacaggaguugaugaccgcgagucauggcccagcguguucuauaaucgaacuugccaguguaguggcaacuuuauggguuucaauugcgggaacuguaaguuuggauucuggggcccuaauugcacggaacguagacuucugguaaggcggaacauuuuugauuuguccgcgccagagaaagacaaguucuuugcuuaccucacccuggccaaacauacaauaucuagcgauuaugugauccccauuggcacuuacgggcaaaugaagaauggauccaccccuauguucaacgacaucaauauuuaugaucuguuugucuggaugcacuacuaugugucaauggacgcacucuuagguggcagugaaaucuggcgcgauauagacuucgcccaugaggcuccagcauuccugccguggcacagacuuuuucugcugaggugggagcaggaaauccagaagcuaacaggggaugagaacuucaccauucccuacugggacuggcgggaugccgaaaaaugugacaucugcacugacgaguacaugggaggccagcauccuacaaauccaaaccuccugagccccgcuuccuuuuucucuucauggcaaauuguuugcagccgccuugaggaauauaauagucaccagucucuguguaacgguaccccugaggggccauugcgaagaaaccccggaaaucacgauaaguccaggacgccgcggcucccuagcucggccgacguggaauuuugccugucuuuaacucaguacgaguccggcucaauggauaaagcggcaaacuucaguuuucguaauacccuggaaggcuucgccagcccccucacagggaucgcugacgccucccagucuagcaugcauaacgcacuucacauauauaugaauggaacuaugucacaaguccaggguagugcuaacgauccaauuuuucuguugcaucacgccuucguggacuccaucuuugagcaguggcuacgcagacacaggccucugcaagagguauaccccgaagcgaaugccccaauuggccauaaccgggagagcuauaugguucccuucaucccucucuaccgaaauggggacuuuuucaucucuucaaaggaucugggauaugauuacaguuaccuucaggacagcgauccagacuccuuccaggacuauauuaaaucuuaccuggaacaggcaucgcgcauauggagcugguugcucggcgcugccauggugggugcuguccugaccgccuuacuggcagggcuagugucccuccuguguagacacaagaggaagcaacuuccggaggaaaaacagcccuugcugauggagaaggaggauuaucauucacucuaccagagucaccuguga

SEQ ID NO: 3742 - RNA, 1590 nt, Artificial Sequence
  derived and/or modified sequence opt4 from tyrosinase__Homo_sapiens__AGV39051
augcugcuggccgugcuguacugccugcuguggagcuuccagaccagcgccggccacuuccccagagccugcgugagcagcaagaaccugauggagaaggagugcugcccccccuggagcggcgacagaagccccugcggccagcugagcggcagaggcagcugccagaacauccugcugagcaacgccccccugggcccccaguuccccuucaccggcguggacgacagagagagcuggcccagcguguucuacaacagaaccugccagugcagcggcaacuucaugggcuucaacugcggcaacugcaaguucggcuucuggggccccaacugcaccgagagaagacugcuggugagaagaaacaucuucgaccugagcgcccccgagaaggacaaguucuucgccuaccugacccuggccaagcacaccaucagcagcgacuacgugauccccaucggcaccuacggccagaugaagaacggcagcacccccauguucaacgacaucaacaucuacgaccuguucguguggaugcacuacuacgugagcauggacgcccugcugggcggcagcgagaucuggagagacaucgacuucgcccacgaggcccccgccuuccugcccuggcacagacuguuccugcugagaugggagcaggagauccagaagcugaccggcgacgagaacuucaccauccccuacugggacuggagagacgccgagaagugcgacaucugcaccgacgaguacaugggcggccagcaccccaccaaccccaaccugcugagccccgccagcuucuucagcagcuggcagaucgugugcagcagacuggaggaguacaacagccaccagagccugugcaacggcacccccgagggcccccugagaagaaaccccggcaaccacgacaagagcagaacccccagacugcccagcagcgccgacguggaguucugccugagccugacccaguacgagagcggcagcauggacaaggccgccaacuucagcuucagaaacacccuggagggcuucgccagcccccugaccggcaucgccgacgccagccagagcagcaugcacaacgcccugcacaucuacaugaacggcaccaugagccaggugcagggcagcgccaacgaccccaucuuccugcugcaccacgccuucguggacagcaucuucgagcaguggcugagaagacacagaccccugcaggagguguaccccgaggccaacgcccccaucggccacaacagagagagcuacauggugcccuucaucccccuguacagaaacggcgacuucuucaucagcagcaaggaccugggcuacgacuacagcuaccugcaggacagcgaccccgacagcuuccaggacuacaucaagagcuaccuggagcaggccagcagaaucuggagcuggcugcugggcgccgccauggugggcgccgugcugaccgcccugcuggccggccuggugagccugcugugcagacacaagagaaagcagcugcccgaggagaagcagccccugcugauggagaaggaggacuaccacagccuguaccagagccaccuguga

SEQ ID NO: 3743 - RNA, 1590 nt, Artificial Sequence
  derived and/or modified sequence opt5 from tyrosinase__Homo_sapiens__AGV39051
augcugcucgccgugcuguacugccuucuguggagcuuccagaccuccgcuggccacuuucccagagccugugucucuagcaagaaccucauggagaaagaaugcuguccuccgugguccggggaccggucucccugcggacaacugagcggccgcggguccugucagaauauccuucugucuaacgcgccucucggaccccaguucccuuuuacaggcguugaugacagagagagcuggcccuccguguucuauaaucggacgugccaguguagcgggaacuuuaugggauucaauugcggcaacuguaaguuuggcuucugggggccuaauugcaccgaacgcagacugcuggugcggcgcaacauuuuugaucucucugcuccggagaaagacaaguucuuugccuaccugacacuugccaaacauaccaucuccagcgauuaugucauucccaucggaacauacggccaaaugaagaaugggucuaccccuauguucaacgacauuaauaucuaugaucuguuuguguggaugcacuacuauguuuccauggacgcucuccugggaggcagcgaaaucuggagagauauugacuucgcccaugaggcucccgccuuccuuccuuggcaccggcuguuucuccugcgcugggagcaggaaauccagaagcugacaggggaugagaacuucaccauucccuacugggacuggagagaugcggaaaaaugugacaucugcacggacgaguacaugggaggccagcauccgaccaauccuaaccuccugucucccgccuccuuuuucagcuccuggcaaauugugugcucucggcuugaggaauauaauagccaccagucccuguguaacggcacaccugaggggccccuccgcagaaaccccggaaaucacgauaagagccggaccccucgccugccgucuuccgcugacgucgaauuuugccuuagccugacacaguacgagucuggcagcauggauaaagccgcuaacuucuccuuuagaaauacccucgaaggguucgccucuccccugacgggaaucgcggacgccagccaguccagcaugcauaacgcucugcacauuuauaugaauggcacaaugucucaagugcagggguccgccaacgauccuaucuuucuccugcaucacgcuuucguugacagcaucuuugagcaguggcuucggagacaccgcccccugcaagagguguacccugaagccaaugcccccauuggacauaaccgggagucuuauauggucccguucaucccucucuacagaaauggcgacuuuuucauuuccagcaaggaucugggcuaugauuacuccuaccuucaggacucugaucccgacagcuuccaggacuauaucaaauccuaccuggaacaggcuucucgcauuuggagcuggcuccugggggcggccauggugggagcugugcugaccgcccuccuggccggccuugucucccugcucugucggcacaagagaaagcaacugccugaggaaaaacagccccugcuuauggagaaggaggauuaucauagccucuaccagucucaccuguga

SEQ ID NO: 3744 - protein, 529 aa, Artificial Sequence [sequence omitted]

SEQ ID NO: 3745 - RNA, 1590 nt, Artificial Sequence
  tyrosinase__Homo_sapiens__AGV39049
augcuccuggcuguuuuguacugccugcuguggaguuuccagaccuccgcuggccauuucccuagagccugugucuccucuaagaaccugauggagaaggaaugcuguccaccguggagcggggacaggagucccuguggccagcuuucaggcagagguuccugucagaauauccuucuguccaaugcaccacuugggccucaauuucccuucacagggguggaugaccgggagucguggccuuccgucuuuuauaauaggaccugccagugcucuggcaacuucaugggauucaacuguggaaacugcaaguuuggcuuuuggggaccaaacugcacagagagacgacucuuggugagaagaaacaucuucgauuugagugccccagagaaggacaaauuuuuugccuaccucacuuuagcaaagcauaccaucagcucagacuaugucauccccauagggaccuauggccaaaugaaaaauggaucaacacccauguuuaacgacaucaauauuuaugaccucuuugucuggaugcauuauuaugugucaauggaugcacugcuugggggaucugaaaucuggagagacauugauuuugcccaugaagcaccagcuuuucugccuuggcauagacucuucuuguugcggugggaacaagaaauccagaagcugacaggagaugaaaacuucacuauuccauauugggacuggcgggaugcagaaaagugugacauuugcacagaugaguacaugggaggucagcaccccacaaauccuaacuuacucagcccagcaucauucuucuccucuuggcagauugucuguagccgauuggaggaguacaacagccaucagucuuuaugcaauggaacgcccgagggaccuuuacggcguaauccuggaaaccaugacaaauccagaaccccaaggcuccccucuucagcugauguagaauuuugccugaguuugacccaauaugaaucugguuccauggauaaagcugccaauuucagcuuuagaaauacacuggaaggauuugcuaguccacuuacugggauagcggaugccucucaaagcagcaugcacaaugccuugcacaucuauaugaauggaacaaugucccagguacagggaucugccaacgauccuaucuuccuucuucaccaugcauuuguugacaguauuuuugagcaguggcuccaaaggcaccguccucuucaagaaguuuauccagaagccaaugcacccauuggacauaaccgggaauccuacaugguuccuuuuauaccacuguacagaaauggugauuucuuuauuucauccaaagaucugggcuaugacuauagcuaucuacaagauucagacccagacucuuuucaagacuacauuaaguccuauuuggaacaagcgagucggaucuggucauggcuccuuggggcggcgaugguaggggccguccucacugcccugcuggcagggcuugugagcuugcugugucgucacaagagaaagcagcuuccugaagaaaagcagccacuccucauggagaaagaggauuaccacagcuuguaucagagccauuuauaa

SEQ ID NO: 3746 - RNA, 1590 nt, Artificial Sequence
  derived and/or modified sequence opt1 from tyrosinase__Homo_sapiens__AGV39049
augcugcucgccgugcuguacugccugcucuggagcuuccagaccuccgccggccacuucccccgcgcgugcgucagcuccaagaaccugauggagaaggagugcugcccgcccuggagcggggaccggucccccugcggccagcugagcgggcgcggcuccugccagaacauccuccugagcaacgcgccccuggggccgcaguuccccuucaccggcguggacgaccgggaguccuggcccagcguguucuacaaccgcacgugccagugcuccggcaacuucaugggguucaacugcggcaacugcaaguucggguucuggggccccaacugcaccgagcggcgccuccugguccggcgcaacaucuucgaccugagcgccccggagaaggacaaguucuucgccuaccucacccuggccaagcacaccaucuccagcgacuacgugauccccaucgggacguacggccagaugaagaacggcuccacccccauguucaacgacaucaacaucuacgaccuguucguguggaugcacuacuacgucagcauggacgcccuccucgggggcuccgagaucuggcgggacaucgacuucgcccacgaggcccccgccuuccugccguggcaccgccuguuccugcugcggugggagcaggagauccagaagcucaccggggacgagaacuucaccauccccuacugggacuggcgcgacgcggagaagugcgacaucugcacggacgaguacaugggcggccagcaccccaccaaccccaaccugcugagcccggccuccuucuucagcagcuggcagaucgugugcucccggcucgaggaguacaacagccaccagucccugugcaacgggacccccgagggcccccugcgccggaaccccgggaaccacgacaagagccgcaccccgcggcuccccuccagcgccgacguggaguucugccugucccugacgcaguacgagagcggcuccauggacaaggccgccaacuucagcuuccgcaacacccucgagggguucgcgagcccccugaccggcaucgccgacgccucccaguccagcaugcacaacgcccugcacaucuacaugaacggcaccaugucccagguccaggggagcgccaacgaccccaucuuccuccugcaccacgcguucguggacuccaucuucgagcaguggcugcagcggcaccgcccgcuccaggagguguaccccgaggccaacgcccccaucggccacaaccgggagagcuacaugguccccuucaucccgcuguaccgcaacggggacuucuucaucuccagcaaggaccugggcuacgacuacagcuaccuccaggacuccgaccccgacagcuuccaggacuacaucaaguccuaccuggagcaggccagccgcaucugguccuggcugcucggggccgcgauggugggcgccgugcugacggcccugcucgccggccuggucagccugcucugccggcacaagcgcaagcagcugcccgaggagaagcagccgcugcugauggagaaggaggacuaccacucccucuaccagagccaccuguga

SEQ ID NO: 3747 - RNA, 1590 nt, Artificial Sequence
  derived and/or modified sequence opt2 from tyrosinase__Homo_sapiens__AGV39049
augcuccucgccguccucuacugccuccucugguccuuccagaccuccgccggccacuucccccgcgccugcgucuccuccaagaaccucauggagaaggagugcugcccccccugguccggcgaccgcucccccugcggccagcucuccggccgcggcuccugccagaacauccuccucuccaacgccccccucggcccccaguuccccuucaccggcgucgacgaccgcgaguccuggcccuccgucuucuacaaccgcaccugccagugcuccggcaacuucaugggcuucaacugcggcaacugcaaguucggcuucuggggccccaacugcaccgagcgccgccuccucguccgccgcaacaucuucgaccucuccgcccccgagaaggacaaguucuucgccuaccucacccucgccaagcacaccaucuccuccgacuacgucauccccaucggcaccuacggccagaugaagaacggcuccacccccauguucaacgacaucaacaucuacgaccucuucgucuggaugcacuacuacgucuccauggacgcccuccucggcggcuccgagaucuggcgcgacaucgacuucgcccacgaggcccccgccuuccuccccuggcaccgccucuuccuccuccgcugggagcaggagauccagaagcucaccggcgacgagaacuucaccauccccuacugggacuggcgcgacgccgagaagugcgacaucugcaccgacgaguacaugggcggccagcaccccaccaaccccaaccuccucucccccgccuccuucuucuccuccuggcagaucgucugcucccgccucgaggaguacaacucccaccagucccucugcaacggcacccccgagggcccccuccgccgcaaccccggcaaccacgacaagucccgcaccccccgccuccccuccuccgccgacgucgaguucugccucucccucacccaguacgaguccggcuccauggacaaggccgccaacuucuccuuccgcaacacccucgagggcuucgccuccccccucaccggcaucgccgacgccucccaguccuccaugcacaacgcccuccacaucuacaugaacggcaccaugucccagguccagggcuccgccaacgaccccaucuuccuccuccaccacgccuucgucgacuccaucuucgagcaguggcuccagcgccaccgcccccuccaggaggucuaccccgaggccaacgcccccaucggccacaaccgcgaguccuacaugguccccuucaucccccucuaccgcaacggcgacuucuucaucuccuccaaggaccucggcuacgacuacuccuaccuccaggacuccgaccccgacuccuuccaggacuacaucaaguccuaccucgagcaggccucccgcaucugguccuggcuccucggcgccgccauggucggcgccguccucaccgcccuccucgccggccucgucucccuccucugccgccacaagcgcaagcagcuccccgaggagaagcagccccuccucauggagaaggaggacuaccacucccucuaccagucccaccucuga

SEQ ID NO: 3748 - RNA, 1590 nt, Artificial Sequence
  derived and/or modified sequence opt3 from tyrosinase__Homo_sapiens__AGV39049
augcugcucgccgugcuuuacugccuguuguggagcuuccagaccuccgcuggccacuuucccagagcaugugucucuucaaagaacuuaauggagaaagaaugcuguccuccauggaguggggacaggagcccgugcggacaacuguccggucggggcucuugucagaauauccuacucucgaacgcccccuuggggccucaguucccauuuacaggaguugaugaccgcgagucauggcccagcguguucuauaaucgaacuugccaguguaguggcaacuuuauggguuucaauugcgggaacuguaaguuuggauucuggggcccuaauugcacggaacguagacuucugguaaggcggaacauuuuugauuuguccgcgccagagaaagacaaguucuuugcuuaccucacccuggccaaacauacaauaucuagcgauuaugugauccccauuggcacuuacgggcaaaugaagaauggauccaccccuauguucaacgacaucaauauuuaugaucuguuugucuggaugcacuacuaugugucaauggacgcacucuuagguggcagugaaaucuggcgcgauauagacuucgcccaugaggcuccagcauuccugccguggcacagacuuuuucugcugaggugggagcaggaaauccagaagcuaacaggggaugagaacuucaccauucccuacugggacuggcgggaugccgaaaaaugugacaucugcacugacgaguacaugggaggccagcauccuacaaauccaaaccuccugagccccgcuuccuuuuucucuucauggcaaauuguuugcagccgccuugaggaauauaauagucaccagucucuguguaacgguaccccugaggggccauugcgaagaaaccccggaaaucacgauaaguccaggacgccgcggcucccuagcucggccgacguggaauuuugccugucuuuaacucaguacgaguccggcucaauggauaaagcggcaaacuucaguuuucguaauacccuggaaggcuucgccagcccccucacagggaucgcugacgccucccagucuagcaugcauaacgcacuucacauauauaugaauggaacuaugucacaaguccaggguagugcuaacgauccaauuuuucuguugcaucacgccuucguggacuccaucuuugagcaguggcuacaacgccacagaccucugcaggagguauaccccgaagcgaaugccccaauuggccauaacagggagagcuauaugguucccuucaucccucucuaccggaauggggacuuuuucaucucuucaaaggaucugggauaugauuacaguuaccuucaggacagcgauccagacuccuuccaggacuauauuaaaucuuaccuggaacaagcaucgcgaauauggagcugguugcucggcgcugccauggugggugcuguccugaccgccuuacuggcagggcuagugucccuccugugucgccacaagagaaagcagcuuccggaggaaaaacagcccuugcugauggagaaggaggauuaucauucacucuaccagagucaccuguga

SEQ ID NO: 3749 - RNA, 1590 nt, Artificial Sequence
  derived and/or modified sequence opt4 from tyrosinase__Homo_sapiens__AGV39049
augcugcuggccgugcuguacugccugcuguggagcuuccagaccagcgccggccacuuccccagagccugcgugagcagcaagaaccugauggagaaggagugcugcccccccuggagcggcgacagaagccccugcggccagcugagcggcagaggcagcugccagaacauccugcugagcaacgccccccugggcccccaguuccccuucaccggcguggacgacagagagagcuggcccagcguguucuacaacagaaccugccagugcagcggcaacuucaugggcuucaacugcggcaacugcaaguucggcuucuggggccccaacugcaccgagagaagacugcuggugagaagaaacaucuucgaccugagcgcccccgagaaggacaaguucuucgccuaccugacccuggccaagcacaccaucagcagcgacuacgugauccccaucggcaccuacggccagaugaagaacggcagcacccccauguucaacgacaucaacaucuacgaccuguucguguggaugcacuacuacgugagcauggacgcccugcugggcggcagcgagaucuggagagacaucgacuucgcccacgaggcccccgccuuccugcccuggcacagacuguuccugcugagaugggagcaggagauccagaagcugaccggcgacgagaacuucaccauccccuacugggacuggagagacgccgagaagugcgacaucugcaccgacgaguacaugggcggccagcaccccaccaaccccaaccugcugagccccgccagcuucuucagcagcuggcagaucgugugcagcagacuggaggaguacaacagccaccagagccugugcaacggcacccccgagggcccccugagaagaaaccccggcaaccacgacaagagcagaacccccagacugcccagcagcgccgacguggaguucugccugagccugacccaguacgagagcggcagcauggacaaggccgccaacuucagcuucagaaacacccuggagggcuucgccagcccccugaccggcaucgccgacgccagccagagcagcaugcacaacgcccugcacaucuacaugaacggcaccaugagccaggugcagggcagcgccaacgaccccaucuuccugcugcaccacgccuucguggacagcaucuucgagcaguggcugcagagacacagaccccugcaggagguguaccccgaggccaacgcccccaucggccacaacagagagagcuacauggugcccuucaucccccuguacagaaacggcgacuucuucaucagcagcaaggaccugggcuacgacuacagcuaccugcaggacagcgaccccgacagcuuccaggacuacaucaagagcuaccuggagcaggccagcagaaucuggagcuggcugcugggcgccgccauggugggcgccgugcugaccgcccugcuggccggccuggugagccugcugugcagacacaagagaaagcagcugcccgaggagaagcagccccugcugauggagaaggaggacuaccacagccuguaccagagccaccuguga

SEQ ID NO: 3750 - RNA, 1590 nt, Artificial Sequence
  derived and/or modified sequence opt5 from tyrosinase__Homo_sapiens__AGV39049
augcugcucgccgugcuguacugccuucuguggagcuuccagaccuccgcuggccacuuucccagagccugugucucuagcaagaaccucauggagaaagaaugcuguccuccgugguccggggaccggucucccugcggacaacugagcggccgcggguccugucagaauauccuucugucuaacgcgccucucggaccccaguucccuuuuacaggcguugaugacagagagagcuggcccuccguguucuauaaucggacgugccaguguagcgggaacuuuaugggauucaauugcggcaacuguaaguuuggcuucugggggccuaauugcaccgaacgcagacugcuggugcggcgcaacauuuuugaucucucugcuccggagaaagacaaguucuuugccuaccugacacuugccaaacauaccaucuccagcgauuaugucauucccaucggaacauacggccaaaugaagaaugggucuaccccuauguucaacgacauuaauaucuaugaucuguuuguguggaugcacuacuauguuuccauggacgcucuccugggaggcagcgaaaucuggagagauauugacuucgcccaugaggcucccgccuuccuuccuuggcaccggcuguuucuccugcgcugggagcaggaaauccagaagcugacaggggaugagaacuucaccauucccuacugggacuggagagaugcggaaaaaugugacaucugcacggacgaguacaugggaggccagcauccgaccaauccuaaccuccugucucccgccuccuuuuucagcuccuggcaaauugugugcucucggcuugaggaauauaauagccaccagucccuguguaacggcacaccugaggggccccuccgcagaaaccccggaaaucacgauaagagccggaccccucgccugccgucuuccgcugacgucgaauuuugccuuagccugacacaguacgagucuggcagcauggauaaagccgcuaacuucuccuuuagaaauacccucgaaggguucgccucuccccugacgggaaucgcggacgccagccaguccagcaugcauaacgcucugcacauuuauaugaauggcacaaugucucaagugcagggguccgccaacgauccuaucuuucuccugcaucacgcuuucguugacagcaucuuugagcaguggcuucaacggcacagaccccugcaggagguguacccugaagccaaugcccccauuggacauaaccgcgagucuuauauggucccguucaucccucucuaccggaauggcgacuuuuucauuuccagcaaggaucugggcuaugauuacuccuaccuucaggacucugaucccgacagcuuccaggacuauaucaaauccuaccuggaacaggcuucuagaauuuggagcuggcuccugggggcggccauggugggagcugugcugaccgcccuccuggccggccuugucucccugcucugucgccacaagcggaagcaacugccugaggaaaaacagccccugcuuauggagaaggaggauuaucauagccucuaccagucucaccuguga

SEQ ID NO: 3751 - protein, 529 aa, Artificial Sequence [sequence omitted]

SEQ ID NO: 3752 - RNA, 1590 nt, Artificial Sequence
  tyrosinase__Homo_sapiens__AGV39050
augcuccuggcuguuuuguacugccugcuguggaguuuccagaccuccgcuggccauuucccuagagccugugucuccucuaagaaccugauggagaaggaaugcuguccaccguggagcggggacaggagucccuguggccagcuuucaggcagagguuccugucagaauauccuucuguccaaugcaccacuugggccucaauuucccuucacagggguggaugaccgggagucguggccuuccgucuuuuauaauaggaccugccagugcucuggcaacuucaugggauucaacuguggaaacugcaaguuuggcuuuuggggaccaaacugcacagagagacgacucuuggugagaagaaacaucuucgauuugagugccccagagaaggacaaauuuuuugccuaccucacuuuagcaaagcauaccaucagcucagacuaugucauccccauagggaccuauggccaaaugaaaaauggaucaacacccauguuuaacgacaucaauauuuaugaccucuuugucuggaugcauuauuaugugucaauggaugcacugcuugggggauaugaaaucuggagagacauugauuuugcccaugaagcaccagcuuuucugccuuggcauagacucuucuuguugcggugggaacaagaaauccagaagcugacaggagaugaaaacuucacuauuccauauugggacuggcgggaugcagaaaagugugacauuugcacagaugaguacaugggaggucagcaccccacaaauccuaacuuacucagcccagcaucauucuucuccucuuggcagauugucuguagccgauuggaggaguacaacagccaucagucuuuaugcaauggaacgcccgagggaccuuuacggcguaauccuggaaaccaugacaaauccagaaccccaaggcuccccucuucagcugauguagaauuuugccugaguuugacccaauaugaaucugguuccauggauaaagcugccaauuucagcuuuagaaauacacuggaaggauuugcuaguccacuuacugggauagcggaugccucucaaagcagcaugcacaaugccuugcacaucuauaugaauggaacaaugucccagguacagggaucugccaacgauccuaucuuccuucuucaccaugcauuuguugacaguauuuuugagcaguggcuccgaaggcaccguccucuucaagaaguuuauccagaagccaaugcacccauuggacauaaccgggaauccuacaugguuccuuuuauaccacuguacagaaauggugauuucuuuauuucauccaaagaucugggcuaugacuauagcuaucuacaagauucagacccagacucuuuucaagacuacauuaaguccuauuuggaacaagcgagucggaucuggucauggcuccuuggggcggcgaugguaggggccguccucacugcccugcuggcagggcuugugagcuugcugugucgucacaagagaaagcagcuuccugaagaaaagcagccacuccucauggagaaagaggauuaccacagcuuguaucagagccauuuauaa

SEQ ID NO: 3753 - RNA, 1590 nt, Artificial Sequence
  derived and/or modified sequence opt1 from tyrosinase__Homo_sapiens__AGV39050
augcugcucgccgugcuguacugccugcucuggagcuuccagaccuccgccggccacuucccccgcgcgugcgucagcuccaagaaccugauggagaaggagugcugcccgcccuggagcggggaccggucccccugcggccagcugagcgggcgcggcuccugccagaacauccuccugagcaacgcgccccuggggccgcaguuccccuucaccggcguggacgaccgggaguccuggcccagcguguucuacaaccgcacgugccagugcuccggcaacuucaugggguucaacugcggcaacugcaaguucggguucuggggccccaacugcaccgagcggcgccuccugguccggcgcaacaucuucgaccugagcgccccggagaaggacaaguucuucgccuaccucacccuggccaagcacaccaucuccagcgacuacgugauccccaucgggacguacggccagaugaagaacggcuccacccccauguucaacgacaucaacaucuacgaccuguucguguggaugcacuacuacgucagcauggacgcccuccucgggggcuacgagaucuggcgggacaucgacuucgcccacgaggcccccgccuuccugccguggcaccgccuguuccugcugcggugggagcaggagauccagaagcucaccggggacgagaacuucaccauccccuacugggacuggcgcgacgcggagaagugcgacaucugcacggacgaguacaugggcggccagcaccccaccaaccccaaccugcuguccccggccagcuucuucuccagcuggcagaucgugugcagccggcucgaggaguacaacucccaccagagccugugcaacgggacccccgagggcccccugcgccggaaccccgggaaccacgacaagucccgcaccccgcggcuccccagcuccgccgacguggaguucugccugagccugacgcaguacgaguccggcagcauggacaaggccgccaacuucuccuuccgcaacacccucgagggguucgcgagcccccugaccggcaucgccgacgccucccagagcuccaugcacaacgcccugcacaucuacaugaacggcaccaugagccagguccagggguccgccaacgaccccaucuuccuccugcaccacgcguucguggacagcaucuucgagcaguggcugcggcgccaccggccgcuccaggagguguaccccgaggccaacgcccccaucggccacaaccgcgaguccuacaugguccccuucaucccgcuguaccgcaacggggacuucuucaucagcuccaaggaccugggcuacgacuacagcuaccuccaggacagcgaccccgacuccuuccaggacuacaucaagagcuaccuggagcaggccucccggaucuggagcuggcugcucggggccgcgauggugggcgccgugcugacggcccugcucgccggccuggucucccugcucugccgccacaagcggaagcagcugcccgaggagaagcagccgcugcugauggagaaggaggacuaccacagccucuaccagucccaccuguga

SEQ ID NO: 3754 - RNA, 1590 nt, Artificial Sequence
  derived and/or modified sequence opt2 from tyrosinase__Homo_sapiens__AGV39050
augcuccucgccguccucuacugccuccucugguccuuccagaccuccgccggccacuucccccgcgccugcgucuccuccaagaaccucauggagaaggagugcugcccccccugguccggcgaccgcucccccugcggccagcucuccggccgcggcuccugccagaacauccuccucuccaacgccccccucggcccccaguuccccuucaccggcgucgacgaccgcgaguccuggcccuccgucuucuacaaccgcaccugccagugcuccggcaacuucaugggcuucaacugcggcaacugcaaguucggcuucuggggccccaacugcaccgagcgccgccuccucguccgccgcaacaucuucgaccucuccgcccccgagaaggacaaguucuucgccuaccucacccucgccaagcacaccaucuccuccgacuacgucauccccaucggcaccuacggccagaugaagaacggcuccacccccauguucaacgacaucaacaucuacgaccucuucgucuggaugcacuacuacgucuccauggacgcccuccucggcggcuacgagaucuggcgcgacaucgacuucgcccacgaggcccccgccuuccuccccuggcaccgccucuuccuccuccgcugggagcaggagauccagaagcucaccggcgacgagaacuucaccauccccuacugggacuggcgcgacgccgagaagugcgacaucugcaccgacgaguacaugggcggccagcaccccaccaaccccaaccuccucucccccgccuccuucuucuccuccuggcagaucgucugcucccgccucgaggaguacaacucccaccagucccucugcaacggcacccccgagggcccccuccgccgcaaccccggcaaccacgacaagucccgcaccccccgccuccccuccuccgccgacgucgaguucugccucucccucacccaguacgaguccggcuccauggacaaggccgccaacuucuccuuccgcaacacccucgagggcuucgccuccccccucaccggcaucgccgacgccucccaguccuccaugcacaacgcccuccacaucuacaugaacggcaccaugucccagguccagggcuccgccaacgaccccaucuuccuccuccaccacgccuucgucgacuccaucuucgagcaguggcuccgccgccaccgcccccuccaggaggucuaccccgaggccaacgcccccaucggccacaaccgcgaguccuacaugguccccuucaucccccucuaccgcaacggcgacuucuucaucuccuccaaggaccucggcuacgacuacuccuaccuccaggacuccgaccccgacuccuuccaggacuacaucaaguccuaccucgagcaggccucccgcaucugguccuggcuccucggcgccgccauggucggcgccguccucaccgcccuccucgccggccucgucucccuccucugccgccacaagcgcaagcagcuccccgaggagaagcagccccuccucauggagaaggaggacuaccacucccucuaccagucccaccucuga

SEQ ID NO: 3755 - RNA, 1590 nt, Artificial Sequence
  derived and/or modified sequence opt3 from tyrosinase__Homo_sapiens__AGV39050
augcugcucgccgugcuuuacugccuguuguggagcuuccagaccuccgcuggccacuuucccagagcaugugucucuucaaagaacuuaauggagaaagaaugcuguccuccauggaguggggacaggagcccgugcggacaacuguccggucggggcucuugucagaauauccuacucucgaacgcccccuuggggccucaguucccauuuacaggaguugaugaccgcgagucauggcccagcguguucuauaaucgaacuugccaguguaguggcaacuuuauggguuucaauugcgggaacuguaaguuuggauucuggggcccuaauugcacggaacguagacuucugguaaggcggaacauuuuugauuuguccgcgccagagaaagacaaguucuuugcuuaccucacccuggccaaacauacaauaucuagcgauuaugugauccccauuggcacuuacgggcaaaugaagaauggauccaccccuauguucaacgacaucaauauuuaugaucuguuugucuggaugcacuacuaugugucaauggacgcacucuuagguggcuacgaaaucuggcgcgauauagacuucgcccaugaggcuccagcauuccugccguggcacagacuuuuucugcugaggugggagcaggaaauccagaagcuaacaggggaugagaacuucaccauucccuacugggacuggcgggaugccgaaaaaugugacaucugcacugacgaguauaugggaggccagcauccuacaaauccaaaccuccugagucccgcuagcuuuuucucuuccuggcaaauuguuugcucacgccuugaggaauacaauagccaccagagucuguguaacgguaccccugaggggccauugcgaagaaaccccggaaaucacgauaagucuaggacgccgcggcucccuuccagcgccgacguggaauuuugccugucguuaacucaguaugagucuggcuccauggauaaagcggcaaacuucucauuucguaauacccuggaaggcuucgccaguccccucacagggaucgcugacgccagccaguccucuaugcauaacgcacuucacauauacaugaauggaacuaugagccaaguccaggguucagcuaacgauccaauuuuucuguugcaucacgccuucguggacaguaucuuugagcaguggcuacgcagacacaggccucugcaagagguauaucccgaagcgaaugccccaauuggccauaaccgggaguccuacaugguucccuucaucccucucuaucgaaauggggacuuuuucaucagcucuaaggaucugggauacgauuacucauaucuucaggacagugauccagacagcuuccaggacuacauuaaauccuaucuggaacaggcaucucgcauauggucgugguugcucggcgcugccauggugggugcuguccugaccgccuuacuggcagggcuagugagccuccuguguagacacaagaggaagcaacuuccggaggaaaaacagcccuugcugauggagaaggaggauuaccauucccucuaucagucacaccuguga

SEQ ID NO: 3756 - RNA, 1590 nt, Artificial Sequence
  derived and/or modified sequence opt4 from tyrosinase__Homo_sapiens__AGV39050
augcugcuggccgugcuguacugccugcuguggagcuuccagaccagcgccggccacuuccccagagccugcgugagcagcaagaaccugauggagaaggagugcugcccccccuggagcggcgacagaagccccugcggccagcugagcggcagaggcagcugccagaacauccugcugagcaacgccccccugggcccccaguuccccuucaccggcguggacgacagagagagcuggcccagcguguucuacaacagaaccugccagugcagcggcaacuucaugggcuucaacugcggcaacugcaaguucggcuucuggggccccaacugcaccgagagaagacugcuggugagaagaaacaucuucgaccugagcgcccccgagaaggacaaguucuucgccuaccugacccuggccaagcacaccaucagcagcgacuacgugauccccaucggcaccuacggccagaugaagaacggcagcacccccauguucaacgacaucaacaucuacgaccuguucguguggaugcacuacuacgugagcauggacgcccugcugggcggcuacgagaucuggagagacaucgacuucgcccacgaggcccccgccuuccugcccuggcacagacuguuccugcugagaugggagcaggagauccagaagcugaccggcgacgagaacuucaccauccccuacugggacuggagagacgccgagaagugcgacaucugcaccgacgaguacaugggcggccagcaccccaccaaccccaaccugcugagccccgccagcuucuucagcagcuggcagaucgugugcagcagacuggaggaguacaacagccaccagagccugugcaacggcacccccgagggcccccugagaagaaaccccggcaaccacgacaagagcagaacccccagacugcccagcagcgccgacguggaguucugccugagccugacccaguacgagagcggcagcauggacaaggccgccaacuucagcuucagaaacacccuggagggcuucgccagcccccugaccggcaucgccgacgccagccagagcagcaugcacaacgcccugcacaucuacaugaacggcaccaugagccaggugcagggcagcgccaacgaccccaucuuccugcugcaccacgccuucguggacagcaucuucgagcaguggcugagaagacacagaccccugcaggagguguaccccgaggccaacgcccccaucggccacaacagagagagcuacauggugcccuucaucccccuguacagaaacggcgacuucuucaucagcagcaaggaccugggcuacgacuacagcuaccugcaggacagcgaccccgacagcuuccaggacuacaucaagagcuaccuggagcaggccagcagaaucuggagcuggcugcugggcgccgccauggugggcgccgugcugaccgcccugcuggccggccuggugagccugcugugcagacacaagagaaagcagcugcccgaggagaagcagccccugcugauggagaaggaggacuaccacagccuguaccagagccaccuguga

SEQ ID NO: 3757 - RNA, 1590 nt, Artificial Sequence
  derived and/or modified sequence opt5 from tyrosinase__Homo_sapiens__AGV39050
augcugcucgccgugcuguacugccuucuguggagcuuccagaccuccgcuggccacuuucccagagccugugucucuagcaagaaccucauggagaaagaaugcuguccuccgugguccggggaccggucucccugcggacaacugagcggccgcggguccugucagaauauccuucugucuaacgcgccucucggaccccaguucccuuuuacaggcguugaugacagagagagcuggcccuccguguucuauaaucggacgugccaguguagcgggaacuuuaugggauucaauugcggcaacuguaaguuuggcuucugggggccuaauugcaccgaacgcagacugcuggugcggcgcaacauuuuugaucucucugcuccggagaaagacaaguucuuugccuaccugacacuugccaaacauaccaucuccagcgauuaugucauucccaucggaacauacggccaaaugaagaaugggucuaccccuauguucaacgacauuaauaucuaugaucuguuuguguggaugcacuacuauguuuccauggacgcucuccugggaggcuacgaaaucuggagagauauugacuucgcccaugaggcucccgccuuccuuccuuggcaccggcuguuucuccugcgcugggagcaggaaauccagaagcugacaggggaugagaacuucaccauucccuacugggacuggagagaugcggaaaaaugugacaucugcacggacgaguauaugggaggccagcauccgaccaauccuaaccuccugagccccgccuccuuuuucuccagcuggcaaauugugugcucccggcuugaggaauacaauucucaccagagccuguguaacggcacaccugaggggccccuccgcagaaaccccggaaaucacgauaagucccggaccccucgccugccgagcucugcugacgucgaauuuugccuuucccugacacaguaugagagcggcucuauggauaaagccgcuaacuucagcuuuagaaauacccucgaaggguucgccucuccccugacgggaaucgcggacgccucucagagcuccaugcauaacgcucugcacauuuacaugaauggcacaaugagccaagugcaggggucugccaacgauccuaucuuucuccugcaucacgcuuucguugacuccaucuuugagcaguggcuucggagacaccgcccccugcaagagguguauccugaagccaaugcccccauuggacauaaccgggagagcuacauggucccguucaucccucucuauagaaauggcgacuuuuucauuucuuccaaggaucugggcuacgauuacagcuaucuucaggacuccgaucccgacucuuuccaggacuacaucaaaagcuaucuggaacaggcuucccgcauuuggucuuggcuccugggggcggccauggugggagcugugcugaccgcccuccuggccggccuugucagccugcucugucggcacaagagaaagcaacugccugaggaaaaacagccccugcuuauggagaaggaggauuaccauucccucuaucagagccaccuguga

SEQ ID NO: 3758 - protein, 237 aa, Artificial Sequence [sequence omitted]

SEQ ID NO: 3759 - RNA, 714 nt, Artificial Sequence
  tyrosinase__Homo_sapiens__CAA04137
augagcccccuuugguggggguuucugcucaguugcuugggcugcaaaauccugccaggagcccagggucaguucccccgagucugcaugacgguggacagccuagugaacaaggagugcugcccacgccugggugcagagucggccaaugucuguggcucucagcaaggccgggggcagugcacagaggugcgagccgacacaaggcccuggaguggucccuacauccuacgaaaccaggaugaccgugagcuguggccaagaaaauucuuccaccggaccugcaagugcacaggaaacuuugccggcuauaauuguggagacugcaaguuuggcuggaccggucccaacugcgagcggaagaaaccaccagugauucggcagaacauccauuccuugaguccucaggaaagagagcaguucuugggcgccuuagaucucgcgaagaagagaguacaccccgacuacgugaucaccacacaacacugggugggccugcuugggcccaauggaacccagccgcaguuugccaacugcaguguuuaugauuuuuuuguguggcuccauuauuauucuguuagagauacauuauuagguggguuuuuuccuuggcugaagguauauuauuacagguuugugauuggguugaggguauggcagugggaaguaauuucaugcaaguuaauuaagagagcaaccacaaggcagccuuag

SEQ ID NO: 3760 - RNA, 714 nt, Artificial Sequence
  derived and/or modified sequence opt1 from tyrosinase__Homo_sapiens__CAA04137
augagcccccugugguggggcuuccuccuguccugccuggggugcaagauccucccgggcgcccaggggcaguucccccgcgugugcaugaccgucgacagccuggugaacaaggagugcugcccccggcugggcgccgaguccgcgaacgugugcgggagccagcagggccgcggccagugcaccgagguccgggccgacacgcgccccugguccgggccguacauccuccggaaccaggacgaccgcgagcuguggccccggaaguucuuccaccggaccugcaagugcaccggcaacuucgccggguacaacugcggcgacugcaaguucggguggaccggccccaacugcgagcgcaagaagcccccggugauccgccagaacauccacagccugagcccccaggagcgggagcaguuccucggcgcccuggaccuggccaagaagcgcgugcaccccgacuacgucaucacgacccagcacuggguggggcuccugggccccaacgggacccagccgcaguucgcgaacugcuccguguacgacuucuucgucuggcugcacuacuacuccgugcgggacacccuccugggcggcuucuuccccuggcugaagguguacuacuaccgcuucgucaucgggcuccggguguggcagugggaggugaucagcugcaagcugaucaagcgcgccacgacccggcagcccuga

SEQ ID NO: 3761 - RNA, 714 nt, Artificial Sequence
  derived and/or modified sequence opt2 from tyrosinase__Homo_sapiens__CAA04137
auguccccccucugguggggcuuccuccucuccugccucggcugcaagauccuccccggcgcccagggccaguucccccgcgucugcaugaccgucgacucccucgucaacaaggagugcugcccccgccucggcgccgaguccgccaacgucugcggcucccagcagggccgcggccagugcaccgagguccgcgccgacacccgccccugguccggccccuacauccuccgcaaccaggacgaccgcgagcucuggccccgcaaguucuuccaccgcaccugcaagugcaccggcaacuucgccggcuacaacugcggcgacugcaaguucggcuggaccggccccaacugcgagcgcaagaagccccccgucauccgccagaacauccacucccucuccccccaggagcgcgagcaguuccucggcgcccucgaccucgccaagaagcgcguccaccccgacuacgucaucaccacccagcacugggucggccuccucggccccaacggcacccagccccaguucgccaacugcuccgucuacgacuucuucgucuggcuccacuacuacuccguccgcgacacccuccucggcggcuucuuccccuggcucaaggucuacuacuaccgcuucgucaucggccuccgcgucuggcagugggaggucaucuccugcaagcucaucaagcgcgccaccacccgccagcccuga

SEQ ID NO: 3762 - RNA, 714 nt, Artificial Sequence
  derived and/or modified sequence opt3 from tyrosinase__Homo_sapiens__CAA04137
augagcccccugugguggggcuuccuccuuuccugccugggguguaagaucuugccuggagcccagggucaauuuccaagagugugcaugaccgucgacucuuuaguuaacaaagaguguugcccgaggcugggcgcugaaucagcaaaugugugugggagucagcagggacggggccagugcacagagguacgcgccgauacucgacccuggagcgguccuuacauucuacguaaccaagacgauagagaacucuggccaaggaaguucuuucaccggacguguaaaugcaccgggaauuucgcgggauauaacuguggcgacugcaaguuuggcuggacagggcccaauugugagcgcaaaaagccuccagugauaagacagaacauccauucccugucuccccaggaaagggagcaguuccuuggagcucuggauuuggccaagaaacggguccacccugacuacgugauuacuacccaacauuggguuggucuccugggcccaaaugggacacagccgcaguuugcaaacugcucgguguaugauuucuuugucuggcugcacuacuauucagugcgcgacacccucuuaggaggcuucuuucccuggcugaagguauacuauuaccgauucguuaucggucuuagaguguggcagugggaggucauuagcugcaaauugaucaagagggccacuacacggcaaccuuga

SEQ ID NO: 3763 - RNA, 714 nt, Artificial Sequence
  derived and/or modified sequence opt4 from tyrosinase__Homo_sapiens__CAA04137
augagcccccugugguggggcuuccugcugagcugccugggcugcaagauccugcccggcgcccagggccaguuccccagagugugcaugaccguggacagccuggugaacaaggagugcugccccagacugggcgccgagagcgccaacgugugcggcagccagcagggcagaggccagugcaccgaggugagagccgacaccagacccuggagcggccccuacauccugagaaaccaggacgacagagagcuguggcccagaaaguucuuccacagaaccugcaagugcaccggcaacuucgccggcuacaacugcggcgacugcaaguucggcuggaccggccccaacugcgagagaaagaagccccccgugaucagacagaacauccacagccugagcccccaggagagagagcaguuccugggcgcccuggaccuggccaagaagagagugcaccccgacuacgugaucaccacccagcacugggugggccugcugggccccaacggcacccagccccaguucgccaacugcagcguguacgacuucuucguguggcugcacuacuacagcgugagagacacccugcugggcggcuucuuccccuggcugaagguguacuacuacagauucgugaucggccugagaguguggcagugggaggugaucagcugcaagcugaucaagagagccaccaccagacagcccuga

SEQ ID NO: 3764 - RNA, 714 nt, Artificial Sequence
  derived and/or modified sequence opt5 from tyrosinase__Homo_sapiens__CAA04137
augagcccccugugguggggcuuccuccuguccugccuuggguguaagauccugccuggagcccagggccaauuuccgagagugugcaugaccgucgacucucucguuaacaaagaguguugcccccggcugggggcugaaagcgccaauguguguggaucccagcagggccgcgggcagugcacagaggugagagcggauacgcggccuuggucuggacccuacauucuucgcaaccaagacgauagagaacuguggccucggaaguucuuucaccgcaccuguaaaugcacaggcaauuucgcuggcuauaacuguggggacugcaaguuuggauggaccggccccaauugugagcggaaaaagccuccggucaucagacagaacauucauagccucucuccccaggaacgcgagcaguuccugggggcccuggaucucgccaagaaaagagugcacccugacuacguuaucacaacccaacauugggugggacugcuuggccccaaugggacacagccucaguuugcuaacugcuccgucuaugauuucuuuguguggcugcacuacuauagcguucgggacacccuccugggaggcuucuuucccuggcuuaagguguacuauuaccgcuucgucauuggccugagaguguggcagugggaggugaucuccugcaaacucaucaagcgggccacgacccgccaaccguga

SEQ ID NO: 3765 - protein, 529 aa, Artificial Sequence [sequence omitted]

SEQ ID NO: 3766 - RNA, 1590 nt, Artificial Sequence; identical to SEQ ID NO: 3738
  tyrosinase__Homo_sapiens__AAA61242

SEQ ID NO: 3767 - RNA, 1590 nt, Artificial Sequence; identical to SEQ ID NO: 3739
  derived and/or modified sequence opt1 from tyrosinase__Homo_sapiens__AAA61242

SEQ ID NO: 3768 - RNA, 1590 nt, Artificial Sequence; identical to SEQ ID NO: 3740
  derived and/or modified sequence opt2 from tyrosinase__Homo_sapiens__AAA61242

SEQ ID NO: 3769 - RNA, 1590 nt, Artificial Sequence; identical to SEQ ID NO: 3741
  derived and/or modified sequence opt3 from tyrosinase__Homo_sapiens__AAA61242

SEQ ID NO: 3770 - RNA, 1590 nt, Artificial Sequence; identical to SEQ ID NO: 3742
  derived and/or modified sequence opt4 from tyrosinase__Homo_sapiens__AAA61242

SEQ ID NO: 3771 - RNA, 1590 nt, Artificial Sequence; identical to SEQ ID NO: 3743
  derived and/or modified sequence opt5 from tyrosinase__Homo_sapiens__AAA61242

SEQ ID NO: 3772 - protein, 529 aa, Artificial Sequence [sequence omitted]

SEQ ID NO: 3773 - RNA, 1590 nt, Artificial Sequence
  tyrosinase__Homo_sapiens__AGV39054
augcuccuggcuguuuuguacugccugcuguggaguuuccagaccuccgcuggccauuucccuagagccugugucuccucuaagaaccugauggagaaggaaugcuguccaccguggagcggggacaggagucccuguggccagcuuucaggcagagguuccugucagaauauccuucuguccaaugcaccacuugggccucaauuucccuucacagggguggaugaccgggagucguggccuuccgucuuuuauaauaggaccugccagugcucuggcaacuucaugggauucaacuguggaaacugcaaguuuggcuuuuggggaccaaacugcacagagagacgacucuuggugagaagaaacaucuucgauuugagugccccagagaaggacaaauuuuuugccuaccucacuuuagcaaagcauaccaucagcucagacuaugucauccccauagggaccuauggccaaaugaaaaauggaucaacacccauguuuaacgacaucaauauuuaugaccucuuugucuggaugcauuauuaugugucaauggaugcacugcuugggggaucugaaaucuggagagacauugauuuugcccaugaagcaccagcuuuucugccuuggcauagacucuucuuguugcggugggaacaagaaauccagaagcugacaggagaugaaaacuucacuauuccauauugggacuggcgggaugcagaaaagugugacauuugcacagaugaguacgugggaggucagcaccccacaaauccuaacuuacucagcccagcaucauucuucuccucuuggcagauugucuguagccgauuggaggaguacaacagccaucagucuuuaugcaauggaacgcccgagggaccuuuacggcguaauccuggaaaccaugacaaauccagaaccccaaggcuccccucuucagcugauguagaauuuugccugaguuugacccaauaugaaucugguuccauggauaaagcugccaauuucagcuuuagaaauacacuggaaggauuugcuaguccacuuacugggauagcggaugccucucaaagcagcaugcacaaugccuugcacaucuauaugaauggaacaaugucccagguacagggaucugccaacgauccuaucuuccuucuucaccaugcauuuguugacaguauuuuugagcaguggcuccgaaggcaccguccucuucaagaaguuuauccagaagccaaugcacccauuggacauaaccgggaauccuacaugguuccuuuuauaccacuguacagaaauggugauuucuuuauuucauccaaagaucugggcuaugacuauagcuaucuacaagauucagacccagacucuuuucaagacuacauuaaguccuauuuggaacaagcgagucggaucuggucauggcuccuuggggcggcgaugguaggggccguccucacugcccugcuggcagggcuugugagcuugcugugucgucacaagagaaagcagcuuccugaagaaaagcagccacuccucauggagaaagaggauuaccacagcuuguaucagagccauuuauaa

SEQ ID NO: 3774 - RNA, 1590 nt, Artificial Sequence
  derived and/or modified sequence opt1 from tyrosinase__Homo_sapiens__AGV39054
augcugcucgccgugcuguacugccugcucuggagcuuccagaccuccgccggccacuucccccgcgcgugcgucagcuccaagaaccugauggagaaggagugcugcccgcccuggagcggggaccggucccccugcggccagcugagcgggcgcggcuccugccagaacauccuccugagcaacgcgccccuggggccgcaguuccccuucaccggcguggacgaccgggaguccuggcccagcguguucuacaaccgcacgugccagugcuccggcaacuucaugggguucaacugcggcaacugcaaguucggguucuggggccccaacugcaccgagcggcgccuccugguccggcgcaacaucuucgaccugagcgccccggagaaggacaaguucuucgccuaccucacccuggccaagcacaccaucuccagcgacuacgugauccccaucgggacguacggccagaugaagaacggcuccacccccauguucaacgacaucaacaucuacgaccuguucguguggaugcacuacuacgucagcauggacgcccuccucgggggcuccgagaucuggcgggacaucgacuucgcccacgaggcccccgccuuccugccguggcaccgccuguuccugcugcggugggagcaggagauccagaagcucaccggggacgagaacuucaccauccccuacugggacuggcgcgacgcggagaagugcgacaucugcacggacgaguacgugggcggccagcaccccaccaaccccaaccugcugagcccggccuccuucuucagcagcuggcagaucgugugcucccggcucgaggaguacaacagccaccagucccugugcaacgggacccccgagggcccccugcgccggaaccccgggaaccacgacaagagccgcaccccgcggcuccccuccagcgccgacgucgaguucugccugucccugacgcaguacgagagcggcuccauggacaaggccgccaacuucagcuuccgcaacacccucgagggguucgcgagcccccugaccggcaucgccgacgccucccaguccagcaugcacaacgcccugcacaucuacaugaacggcaccaugucccaggugcaggggagcgccaacgaccccaucuuccuccugcaccacgcguucguggacuccaucuucgagcaguggcugcggcgccaccggccgcuccaggaggucuaccccgaggccaacgcccccaucggccacaaccgcgagagcuacauggugcccuucaucccgcuguaccgcaacggggacuucuucaucuccagcaaggaccugggcuacgacuacagcuaccuccaggacuccgaccccgacagcuuccaggacuacaucaaguccuaccuggagcaggccagccggaucugguccuggcugcucggggccgcgauggugggcgccguccugacggcccugcucgccggccuggugagccugcucugccgccacaagcggaagcagcugcccgaggagaagcagccgcugcugauggagaaggaggacuaccacucccucuaccagagccaccuguga

SEQ ID NO: 3775 - RNA, 1590 nt, Artificial Sequence
  derived and/or modified sequence opt2 from tyrosinase__Homo_sapiens__AGV39054
augcuccucgccguccucuacugccuccucugguccuuccagaccuccgccggccacuucccccgcgccugcgucuccuccaagaaccucauggagaaggagugcugcccccccugguccggcgaccgcucccccugcggccagcucuccggccgcggcuccugccagaacauccuccucuccaacgccccccucggcccccaguuccccuucaccggcgucgacgaccgcgaguccuggcccuccgucuucuacaaccgcaccugccagugcuccggcaacuucaugggcuucaacugcggcaacugcaaguucggcuucuggggccccaacugcaccgagcgccgccuccucguccgccgcaacaucuucgaccucuccgcccccgagaaggacaaguucuucgccuaccucacccucgccaagcacaccaucuccuccgacuacgucauccccaucggcaccuacggccagaugaagaacggcuccacccccauguucaacgacaucaacaucuacgaccucuucgucuggaugcacuacuacgucuccauggacgcccuccucggcggcuccgagaucuggcgcgacaucgacuucgcccacgaggcccccgccuuccuccccuggcaccgccucuuccuccuccgcugggagcaggagauccagaagcucaccggcgacgagaacuucaccauccccuacugggacuggcgcgacgccgagaagugcgacaucugcaccgacgaguacgucggcggccagcaccccaccaaccccaaccuccucucccccgccuccuucuucuccuccuggcagaucgucugcucccgccucgaggaguacaacucccaccagucccucugcaacggcacccccgagggcccccuccgccgcaaccccggcaaccacgacaagucccgcaccccccgccuccccuccuccgccgacgucgaguucugccucucccucacccaguacgaguccggcuccauggacaaggccgccaacuucuccuuccgcaacacccucgagggcuucgccuccccccucaccggcaucgccgacgccucccaguccuccaugcacaacgcccuccacaucuacaugaacggcaccaugucccagguccagggcuccgccaacgaccccaucuuccuccuccaccacgccuucgucgacuccaucuucgagcaguggcuccgccgccaccgcccccuccaggaggucuaccccgaggccaacgcccccaucggccacaaccgcgaguccuacaugguccccuucaucccccucuaccgcaacggcgacuucuucaucuccuccaaggaccucggcuacgacuacuccuaccuccaggacuccgaccccgacuccuuccaggacuacaucaaguccuaccucgagcaggccucccgcaucugguccuggcuccucggcgccgccauggucggcgccguccucaccgcccuccucgccggccucgucucccuccucugccgccacaagcgcaagcagcuccccgaggagaagcagccccuccucauggagaaggaggacuaccacucccucuaccagucccaccucuga

SEQ ID NO: 3776 - RNA, 1590 nt, Artificial Sequence
  derived and/or modified sequence opt3 from tyrosinase__Homo_sapiens__AGV39054
augcugcucgccgugcuuuacugccuguuguggagcuuccagaccuccgcuggccacuuucccagagcaugugucucuucaaagaacuuaauggagaaagaaugcuguccuccauggaguggggacaggagcccgugcggacaacuguccggucggggcucuugucagaauauccuacucucgaacgcccccuuggggccucaguucccauuuacaggaguugaugaccgcgagucauggcccagcguguucuauaaucgaacuugccaguguaguggcaacuuuauggguuucaauugcgggaacuguaaguuuggauucuggggcccuaauugcacggaacguagacuucugguaaggcggaacauuuuugauuuguccgcgccagagaaagacaaguucuuugcuuaccucacccuggccaaacauacaauaucuagcgauuaugugauccccauuggcacuuacgggcaaaugaagaauggauccaccccuauguucaacgacaucaauauuuaugaucuguuugucuggaugcacuacuaugugucaauggacgcacucuuagguggcagugaaaucuggcgcgauauagacuucgcccaugaggcuccagcauuccugccguggcacagacuuuuucugcugaggugggagcaggaaauccagaagcuaacaggggaugagaacuucaccauucccuacugggacuggcgggaugccgaaaaaugugacaucugcacugacgaguacguuggaggccagcauccuacaaauccaaaccuccugagccccgcuuccuuuuucucuucauggcaaauugugugcagccgccuugaggaauauaauagucaccagucucuguguaacgguaccccugaggggccauugcgaagaaaccccggaaaucacgauaaguccaggacgccgcggcucccuagcucggccgacgucgaauuuugccugucuuuaacucaguacgaguccggcucaauggauaaagcggcaaacuucaguuuucguaauacccuggaaggcuucgccagcccccucacagggaucgcugacgccucccagucuagcaugcauaacgcacuucacauauauaugaauggaacuaugucacaagugcaggguagugcuaacgauccaauuuuucuguugcaucacgccuucguagacuccaucuuugagcaguggcuacgcagacacaggccucugcaagagguuuaccccgaagcgaaugccccaauuggccauaaccgggagagcuauauggugcccuucaucccucucuaccgaaauggggacuuuuucaucucuucaaaggaucugggauaugauuacaguuaccuucaggacagcgauccagacuccuuccaggacuauauuaaaucuuaccuggaacaggcaucgcgcauauggagcugguugcucggcgcugccauggucggugcugugcugaccgccuuacuggcagggcuagugucccuccuguguagacacaagaggaagcaacuuccggaggaaaaacagcccuugcugauggagaaggaggauuaucauucacucuaccagagucaccuguga

SEQ ID NO: 3777 - RNA, 1590 nt, Artificial Sequence
  derived and/or modified sequence opt4 from tyrosinase__Homo_sapiens__AGV39054
augcugcuggccgugcuguacugccugcuguggagcuuccagaccagcgccggccacuuccccagagccugcgugagcagcaagaaccugauggagaaggagugcugcccccccuggagcggcgacagaagccccugcggccagcugagcggcagaggcagcugccagaacauccugcugagcaacgccccccugggcccccaguuccccuucaccggcguggacgacagagagagcuggcccagcguguucuacaacagaaccugccagugcagcggcaacuucaugggcuucaacugcggcaacugcaaguucggcuucuggggccccaacugcaccgagagaagacugcuggugagaagaaacaucuucgaccugagcgcccccgagaaggacaaguucuucgccuaccugacccuggccaagcacaccaucagcagcgacuacgugauccccaucggcaccuacggccagaugaagaacggcagcacccccauguucaacgacaucaacaucuacgaccuguucguguggaugcacuacuacgugagcauggacgcccugcugggcggcagcgagaucuggagagacaucgacuucgcccacgaggcccccgccuuccugcccuggcacagacuguuccugcugagaugggagcaggagauccagaagcugaccggcgacgagaacuucaccauccccuacugggacuggagagacgccgagaagugcgacaucugcaccgacgaguacgugggcggccagcaccccaccaaccccaaccugcugagccccgccagcuucuucagcagcuggcagaucgugugcagcagacuggaggaguacaacagccaccagagccugugcaacggcacccccgagggcccccugagaagaaaccccggcaaccacgacaagagcagaacccccagacugcccagcagcgccgacguggaguucugccugagccugacccaguacgagagcggcagcauggacaaggccgccaacuucagcuucagaaacacccuggagggcuucgccagcccccugaccggcaucgccgacgccagccagagcagcaugcacaacgcccugcacaucuacaugaacggcaccaugagccaggugcagggcagcgccaacgaccccaucuuccugcugcaccacgccuucguggacagcaucuucgagcaguggcugagaagacacagaccccugcaggagguguaccccgaggccaacgcccccaucggccacaacagagagagcuacauggugcccuucaucccccuguacagaaacggcgacuucuucaucagcagcaaggaccugggcuacgacuacagcuaccugcaggacagcgaccccgacagcuuccaggacuacaucaagagcuaccuggagcaggccagcagaaucuggagcuggcugcugggcgccgccauggugggcgccgugcugaccgcccugcuggccggccuggugagccugcugugcagacacaagagaaagcagcugcccgaggagaagcagccccugcugauggagaaggaggacuaccacagccuguaccagagccaccuguga

SEQ ID NO: 3778 - RNA, 1590 nt, Artificial Sequence
  derived and/or modified sequence opt5 from tyrosinase__Homo_sapiens__AGV39054
augcugcucgccgugcuguacugccuucuguggagcuuccagaccuccgcuggccacuuucccagagccugugucucuagcaagaaccucauggagaaagaaugcuguccuccgugguccggggaccggucucccugcggacaacugagcggccgcggguccugucagaauauccuucugucuaacgcgccucucggaccccaguucccuuuuacaggcguugaugacagagagagcuggcccuccguguucuauaaucggacgugccaguguagcgggaacuuuaugggauucaauugcggcaacuguaaguuuggcuucugggggccuaauugcaccgaacgcagacugcuggugcggcgcaacauuuuugaucucucugcuccggagaaagacaaguucuuugccuaccugacacuugccaaacauaccaucuccagcgauuaugucauucccaucggaacauacggccaaaugaagaaugggucuaccccuauguucaacgacauuaauaucuaugaucuguuuguguggaugcacuacuauguuuccauggacgcucuccugggaggcagcgaaaucuggagagauauugacuucgcccaugaggcucccgccuuccuuccuuggcaccggcuguuucuccugcgcugggagcaggaaauccagaagcugacaggggaugagaacuucaccauucccuacugggacuggagagaugcggaaaaaugugacaucugcacggacgaguacgugggaggccagcauccgaccaauccuaaccuccugucucccgccuccuuuuucagcuccuggcaaauugucugcucucggcuugaggaauauaauagccaccagucccuguguaacggcacaccugaggggccccuccgcagaaaccccggaaaucacgauaagagccggaccccucgccugccgucuuccgcugacguggaauuuugccuuagccugacacaguacgagucuggcagcauggauaaagccgcuaacuucuccuuuagaaauacccucgaaggguucgccucuccccugacgggaaucgcggacgccagccaguccagcaugcauaacgcucugcacauuuauaugaauggcacaaugucucaaguucagggguccgccaacgauccuaucuuucuccugcaucacgcuuucguggacagcaucuuugagcaguggcuucggagacaccgcccccugcaagaggucuacccugaagccaaugcccccauuggacauaaccgggagucuuauauggugccguucaucccucucuacagaaauggcgacuuuuucauuuccagcaaggaucugggcuaugauuacuccuaccuucaggacucugaucccgacagcuuccaggacuauaucaaauccuaccuggaacaggcuucucgcauuuggagcuggcuccugggggcggccauggugggagcuguccugaccgcccuccuggccggccuuguuucccugcucugucggcacaagagaaagcaacugccugaggaaaaacagccccugcuuauggagaaggaggauuaucauagccucuaccagucucaccuguga

SEQ ID NO: 3779 - protein, 529 aa, Artificial Sequence [sequence omitted]

SEQ ID NO: 3780 - RNA, 1590 nt, Artificial Sequence
  tyrosinase__Homo_sapiens__AGV39162
augcuccuggcuguuuuguacugccugcuguggaguuuccagaccuccgcuggccauuucccuagagccugugucuccucuaagaaccugauggagaaggaaugcuguccaccguggagcggggacaggagucccuguggccagcuuucaggcagagguuccugucagaauauccuucuguccaaugcaccacuugggccucaauuucccuucacagggguggaugaccgggagucguggccuuccgucuuuuauaauaggaccugccagugcucuggcaacuucaugggauucaacuguggaaacugcaaguuuggcuuuuggggaccaaacugcacagagagacgacucuuggugagaagaaacaucuucgauuugagugccccagagaaggacaaauuuuuugccuaccucacuuuagcaaagcauaccaucagcucagacuaugucauccccauagggaccuauggccaaaugaaaaauggaucaacacccauguuuaacgacaucaauauuuaugaccucuuugucuggaugcauuauuaugugucaauggaugcacugcuugggggaucugaaaucuggagagacauugauuuugcccaugaagcaccagcuuuucugccuuggcauagacucuucuuguugcggugggaacaagaaauccagaagcugacaggagaugaaaacuucacuauuccauauugggacuggcgggaugcagaaaagugugacauuugcacagaugaguacaugggaggucagcaccccacaaauccuaacuuacucagcccagcaucauucuucuccucuuggcagauugucuguagccgauuggaggaguacaacagccaucagucuuuaugcaauggaacgcccgagggaccuuuacggcguaauccuggaaaccaugacaaauccagaaccccaaggcuccccucuucagcugauguagaauuuugccugaguuugacccaauaugaaucugguuccauggauaaagcugccaauuucagcuuuagaaauacacuggaaggauuugcuaguccacuuacugggauagcggaugccucucaaagcagcaugcacaaugccuugcacaucuauaugaauggaacaaugucccagguacagggaucugccaacgauccuaucuuccuucuucaccaugcauuuguugacaguauuuuugagcaguggcuccgaaggcaccgucuucuucaagaaguuuauccagaagccaaugcacccauuggacauaaccgggaauccuacaugguuccuuuuauaccacuguacagaaauggugauuucuuuauuucauccaaagaucugggcuaugacuauagcuaucuacaagauucagacccagacucuuuucaagacuacauuaaguccuauuuggaacaagcgagucggaucuggucauggcuccuuggggcggcgaugguaggggccguccucacugcccugcuggcagggcuugugagcuugcugugucgucacaagagaaagcagcuuccugaagaaaagcagccacuccucauggagaaagaggauuaccacagcuuguaucagagccauuuauaa

SEQ ID NO: 3781 - RNA, 1590 nt, Artificial Sequence
  derived and/or modified sequence opt1 from tyrosinase__Homo_sapiens__AGV39162
augcugcucgccgugcuguacugccugcucuggagcuuccagaccuccgccggccacuucccccgcgcgugcgucagcuccaagaaccugauggagaaggagugcugcccgcccuggagcggggaccggucccccugcggccagcugagcgggcgcggcuccugccagaacauccuccugagcaacgcgccccuggggccgcaguuccccuucaccggcguggacgaccgggaguccuggcccagcguguucuacaaccgcacgugccagugcuccggcaacuucaugggguucaacugcggcaacugcaaguucggguucuggggccccaacugcaccgagcggcgccuccugguccggcgcaacaucuucgaccugagcgccccggagaaggacaaguucuucgccuaccucacccuggccaagcacaccaucuccagcgacuacgugauccccaucgggacguacggccagaugaagaacggcuccacccccauguucaacgacaucaacaucuacgaccuguucguguggaugcacuacuacgucagcauggacgcccuccucgggggcuccgagaucuggcgggacaucgacuucgcccacgaggcccccgccuuccugccguggcaccgccuguuccugcugcggugggagcaggagauccagaagcucaccggggacgagaacuucaccauccccuacugggacuggcgcgacgcggagaagugcgacaucugcacggacgaguacaugggcggccagcaccccaccaaccccaaccugcugagcccggccuccuucuucagcagcuggcagaucgugugcucccggcucgaggaguacaacagccaccagucccugugcaacgggacccccgagggcccccugcgccggaaccccgggaaccacgacaagagccgcaccccgcggcuccccuccagcgccgacguggaguucugccugucccugacgcaguacgagagcggcuccauggacaaggccgccaacuucagcuuccgcaacacccucgagggguucgcgagcccccugaccggcaucgccgacgccucccaguccagcaugcacaacgcccugcacaucuacaugaacggcaccaugucccagguccaggggagcgccaacgaccccaucuuccuccugcaccacgcguucguggacuccaucuucgagcaguggcugcggcgccaccggcuccugcaggagguguacccggaggccaacgcccccaucggccacaaccgcgagagcuacaugguccccuucaucccccuguaccgcaacggggacuucuucaucuccagcaaggaccucggcuacgacuacagcuaccugcaggacuccgacccggacagcuuccaggacuacaucaaguccuaccuggagcaggccagccggaucugguccuggcuccugggggccgcgauggugggcgccgugcugacggcccuccuggccggccuggucagccuccugugccgccacaagcggaagcagcugcccgaggagaagcagccccugcucauggagaaggaggacuaccacucccuguaccagagccaccuguga

SEQ ID NO: 3782 - RNA, 1590 nt, Artificial Sequence
  derived and/or modified sequence opt2 from tyrosinase__Homo_sapiens__AGV39162
augcuccucgccguccucuacugccuccucugguccuuccagaccuccgccggccacuucccccgcgccugcgucuccuccaagaaccucauggagaaggagugcugcccccccugguccggcgaccgcucccccugcggccagcucuccggccgcggcuccugccagaacauccuccucuccaacgccccccucggcccccaguuccccuucaccggcgucgacgaccgcgaguccuggcccuccgucuucuacaaccgcaccugccagugcuccggcaacuucaugggcuucaacugcggcaacugcaaguucggcuucuggggccccaacugcaccgagcgccgccuccucguccgccgcaacaucuucgaccucuccgcccccgagaaggacaaguucuucgccuaccucacccucgccaagcacaccaucuccuccgacuacgucauccccaucggcaccuacggccagaugaagaacggcuccacccccauguucaacgacaucaacaucuacgaccucuucgucuggaugcacuacuacgucuccauggacgcccuccucggcggcuccgagaucuggcgcgacaucgacuucgcccacgaggcccccgccuuccuccccuggcaccgccucuuccuccuccgcugggagcaggagauccagaagcucaccggcgacgagaacuucaccauccccuacugggacuggcgcgacgccgagaagugcgacaucugcaccgacgaguacaugggcggccagcaccccaccaaccccaaccuccucucccccgccuccuucuucuccuccuggcagaucgucugcucccgccucgaggaguacaacucccaccagucccucugcaacggcacccccgagggcccccuccgccgcaaccccggcaaccacgacaagucccgcaccccccgccuccccuccuccgccgacgucgaguucugccucucccucacccaguacgaguccggcuccauggacaaggccgccaacuucuccuuccgcaacacccucgagggcuucgccuccccccucaccggcaucgccgacgccucccaguccuccaugcacaacgcccuccacaucuacaugaacggcaccaugucccagguccagggcuccgccaacgaccccaucuuccuccuccaccacgccuucgucgacuccaucuucgagcaguggcuccgccgccaccgccuccuccaggaggucuaccccgaggccaacgcccccaucggccacaaccgcgaguccuacaugguccccuucaucccccucuaccgcaacggcgacuucuucaucuccuccaaggaccucggcuacgacuacuccuaccuccaggacuccgaccccgacuccuuccaggacuacaucaaguccuaccucgagcaggccucccgcaucugguccuggcuccucggcgccgccauggucggcgccguccucaccgcccuccucgccggccucgucucccuccucugccgccacaagcgcaagcagcuccccgaggagaagcagccccuccucauggagaaggaggacuaccacucccucuaccagucccaccucuga

SEQ ID NO: 3783 - RNA, 1590 nt, Artificial Sequence
  derived and/or modified sequence opt3 from tyrosinase__Homo_sapiens__AGV39162
augcugcucgccgugcuuuacugccuguuguggagcuuccagaccuccgcuggccacuuucccagagcaugugucucuucaaagaacuuaauggagaaagaaugcuguccuccauggaguggggacaggagcccgugcggacaacuguccggucggggcucuugucagaauauccuacucucgaacgcccccuuggggccucaguucccauuuacaggaguugaugaccgcgagucauggcccagcguguucuauaaucgaacuugccaguguaguggcaacuuuauggguuucaauugcgggaacuguaaguuuggauucuggggcccuaauugcacggaacguagacuucugguaaggcggaacauuuuugauuuguccgcgccagagaaagacaaguucuuugcuuaccucacccuggccaaacauacaauaucuagcgauuaugugauccccauuggcacuuacgggcaaaugaagaauggauccaccccuauguucaacgacaucaauauuuaugaucuguuugucuggaugcacuacuaugugucaauggacgcacucuuagguggcagugaaaucuggcgcgauauagacuucgcccaugaggcuccagcauuccugccguggcacagacuuuuucugcugaggugggagcaggaaauccagaagcuaacaggggaugagaacuucaccauucccuacugggacuggcgggaugccgaaaaaugugacaucugcacugacgaguacaugggaggccagcauccuacaaauccaaaccuccugagccccgcuuccuuuuucucuucauggcaaauuguuugcagccgccuugaggaauauaauagucaccagucucuguguaacgguaccccugaggggccauugcgaagaaaccccggaaaucacgauaaguccaggacgccgcggcucccuagcucggccgacguggaauuuugccugucuuuaacucaguacgaguccggcucaauggauaaagcggcaaacuucaguuuucguaauacccuggaaggcuucgccagcccccucacagggaucgcugacgccucccagucuagcaugcauaacgcacuucacauauauaugaauggaacuaugucacaaguccaggguagugcuaacgauccaauuuuucuguugcaucacgccuucguggacuccaucuuugagcaguggcuacgcagacacaggcugcuccaagagguauacccugaagcgaaugcccccauuggccauaaccgggagagcuauaugguuccauucaucccccuguaccgaaauggggacuuuuucaucucuucaaaggaucuuggauaugauuacaguuaccugcaggacagcgauccugacuccuuccaggacuauauuaaaucuuacuuggaacaggcaucgcgcauauggagcuggcuccugggcgcugccauggugggugcugucuuaaccgcccugcuagcagggcucgugucccugcuuuguagacacaagaggaagcaauugccagaggaaaaacagccgcugcucauggagaaggaggauuaucauucacuguaccagagucaccuuuga

SEQ ID NO: 3784 - RNA, 1590 nt, Artificial Sequence
  derived and/or modified sequence opt4 from tyrosinase__Homo_sapiens__AGV39162
augcugcuggccgugcuguacugccugcuguggagcuuccagaccagcgccggccacuuccccagagccugcgugagcagcaagaaccugauggagaaggagugcugcccccccuggagcggcgacagaagccccugcggccagcugagcggcagaggcagcugccagaacauccugcugagcaacgccccccugggcccccaguuccccuucaccggcguggacgacagagagagcuggcccagcguguucuacaacagaaccugccagugcagcggcaacuucaugggcuucaacugcggcaacugcaaguucggcuucuggggccccaacugcaccgagagaagacugcuggugagaagaaacaucuucgaccugagcgcccccgagaaggacaaguucuucgccuaccugacccuggccaagcacaccaucagcagcgacuacgugauccccaucggcaccuacggccagaugaagaacggcagcacccccauguucaacgacaucaacaucuacgaccuguucguguggaugcacuacuacgugagcauggacgcccugcugggcggcagcgagaucuggagagacaucgacuucgcccacgaggcccccgccuuccugcccuggcacagacuguuccugcugagaugggagcaggagauccagaagcugaccggcgacgagaacuucaccauccccuacugggacuggagagacgccgagaagugcgacaucugcaccgacgaguacaugggcggccagcaccccaccaaccccaaccugcugagccccgccagcuucuucagcagcuggcagaucgugugcagcagacuggaggaguacaacagccaccagagccugugcaacggcacccccgagggcccccugagaagaaaccccggcaaccacgacaagagcagaacccccagacugcccagcagcgccgacguggaguucugccugagccugacccaguacgagagcggcagcauggacaaggccgccaacuucagcuucagaaacacccuggagggcuucgccagcccccugaccggcaucgccgacgccagccagagcagcaugcacaacgcccugcacaucuacaugaacggcaccaugagccaggugcagggcagcgccaacgaccccaucuuccugcugcaccacgccuucguggacagcaucuucgagcaguggcugagaagacacagacugcugcaggagguguaccccgaggccaacgcccccaucggccacaacagagagagcuacauggugcccuucaucccccuguacagaaacggcgacuucuucaucagcagcaaggaccugggcuacgacuacagcuaccugcaggacagcgaccccgacagcuuccaggacuacaucaagagcuaccuggagcaggccagcagaaucuggagcuggcugcugggcgccgccauggugggcgccgugcugaccgcccugcuggccggccuggugagccugcugugcagacacaagagaaagcagcugcccgaggagaagcagccccugcugauggagaaggaggacuaccacagccuguaccagagccaccuguga

SEQ ID NO: 3785 - RNA, 1590 nt, Artificial Sequence
  derived and/or modified sequence opt5 from tyrosinase__Homo_sapiens__AGV39162
augcugcucgccgugcuguacugccuucuguggagcuuccagaccuccgcuggccacuuucccagagccugugucucuagcaagaaccucauggagaaagaaugcuguccuccgugguccggggaccggucucccugcggacaacugagcggccgcggguccugucagaauauccuucugucuaacgcgccucucggaccccaguucccuuuuacaggcguugaugacagagagagcuggcccuccguguucuauaaucggacgugccaguguagcgggaacuuuaugggauucaauugcggcaacuguaaguuuggcuucugggggccuaauugcaccgaacgcagacugcuggugcggcgcaacauuuuugaucucucugcuccggagaaagacaaguucuuugccuaccugacacuugccaaacauaccaucuccagcgauuaugucauucccaucggaacauacggccaaaugaagaaugggucuaccccuauguucaacgacauuaauaucuaugaucuguuuguguggaugcacuacuauguuuccauggacgcucuccugggaggcagcgaaaucuggagagauauugacuucgcccaugaggcucccgccuuccuuccuuggcaccggcuguuucuccugcgcugggagcaggaaauccagaagcugacaggggaugagaacuucaccauucccuacugggacuggagagaugcggaaaaaugugacaucugcacggacgaguacaugggaggccagcauccgaccaauccuaaccuccugucucccgccuccuuuuucagcuccuggcaaauugugugcucucggcuugaggaauauaauagccaccagucccuguguaacggcacaccugaggggccccuccgcagaaaccccggaaaucacgauaagagccggaccccucgccugccgucuuccgcugacgucgaauuuugccuuagccugacacaguacgagucuggcagcauggauaaagccgcuaacuucuccuuuagaaauacccucgaaggguucgccucuccccugacgggaaucgcggacgccagccaguccagcaugcauaacgcucugcacauuuauaugaauggcacaaugucucaagugcagggguccgccaacgauccuaucuuucuccugcaucacgcuuucguugacagcaucuuugagcaguggcuucggagacaccgccugcuccaagagguguaccccgaagccaaugccccuauuggacauaaccgggagucuuauaugguccccuucaucccgcuguacagaaauggcgacuuuuucauuuccagcaaggaucuuggcuaugauuacuccuaccugcaggacucugauccugacagcuuccaggacuauaucaaauccuaccucgaacaggcuucucgcauuuggagcuggcugcugggggcggccauggugggagcugugcucaccgcccugcuugccggccuggucucccuccugugucggcacaagagaaagcaacugcccgaggaaaaacagccucuucucauggagaaggaggauuaucauagccuguaccagucucaccuguga

SEQ ID NO: 3786 - protein, 529 aa, Artificial Sequence [sequence omitted]

SEQ ID NO: 3787 - RNA, 1590 nt, Artificial Sequence
  tyrosinase__Homo_sapiens__AGV39086
augcuccuggcuguuuuguacugccugcuguggaguuuccagaccuccgcuggccauuucccuagagccugugucuccucuaagaaccugauggagaaggaaugcuguccaccguggagcggggacaggagucccuguggccagcuuucaggcagagguuccugucagaauauccuucuguccaaugcaccacuugggccucaauuucccuucacagggguggaugaccgggagucguggccuuccgucuuuuauaauaggaccugccagugcucuggcaacuucaugggauucaacuguggaaacugcaaguuuggcuuuuggggaccaaacugcacagagagacgacucuuggugagaagaaacaucuucgauuugagugccccagagaaggacaaauuuuuugccuaccucacuuuagcaaagcauaccaucagcucagacuaugucauccccauagggaccuauggccaaaugaaaaauggaucaacacccauguuuaacgacaucaauauuuaugaccucuuugucuggaugcauuauuaugugucaauggaugcacugcuugggggaucugaaaucuggagagacauugauuuugcccaugaagcaccagcuuuucugccuuggcauagacucuucuuguugcggugggaacaagaaauccagaagcugacaggagaugaaaacuucacuauuccauauugggacuggcgggaugcagaaaagugugacauuugcacagaugaguacaugggaggucagcaccccacaaauccuaacuuacucagcccagcaucauucuucuccucuuggcagauugucuguagccgauuggaggaguacaacagccaucagucuuuaugcaauggaacgcccgagggaccuuuacggcguaauccuggaaaccaugacaaauccagaaccccaaggcuccccucuucagcugauguagaauuuugccugaguuugacccaauaugaaucugguuccauggauaaagcugccaauuucagcuuuagaaauacacuggaaggauuugcuaguccacuuacugggauagcggaugccucucaaagcagcaugcacaaugccuugcacaucuauaugaauggaacaaugucccagguacagggaucugccaacgauccuaucuuccuucuucaccaugcauuuguugacaguauguuugagcaguggcuccgaaggcaccguccucuucaagaaguuuauccagaagccaaugcacccauuggacauaaccgggaauccuacaugguuccuuuuauaccacuguacagaaauggugauuucuuuauuucauccaaagaucugggcuaugacuauagcuaucuacaagauucagacccagacucuuuucaagacuacauuaaguccuauuuggaacaagcgagucggaucuggucauggcuccuuggggcggcgaugguaggggccguccucacugcccugcuggcagggcuugugagcuugcugugucgucacaagagaaagcagcuuccugaagaaaagcagccacuccucauggagaaagaggauuaccacagcuuguaucagagccauuuauaa

SEQ ID NO: 3788 - RNA, 1590 nt, Artificial Sequence
  derived and/or modified sequence opt1 from tyrosinase__Homo_sapiens__AGV39086
augcugcucgccgugcuguacugccugcucuggagcuuccagaccuccgccggccacuucccccgcgcgugcgucagcuccaagaaccugauggagaaggagugcugcccgcccuggagcggggaccggucccccugcggccagcugagcgggcgcggcuccugccagaacauccuccugagcaacgcgccccuggggccgcaguuccccuucaccggcguggacgaccgggaguccuggcccagcguguucuacaaccgcacgugccagugcuccggcaacuucaugggguucaacugcggcaacugcaaguucggguucuggggccccaacugcaccgagcggcgccuccugguccggcgcaacaucuucgaccugagcgccccggagaaggacaaguucuucgccuaccucacccuggccaagcacaccaucuccagcgacuacgugauccccaucgggacguacggccagaugaagaacggcuccacccccauguucaacgacaucaacaucuacgaccuguucguguggaugcacuacuacgucagcauggacgcccuccucgggggcuccgagaucuggcgggacaucgacuucgcccacgaggcccccgccuuccugccguggcaccgccuguuccugcugcggugggagcaggagauccagaagcucaccggggacgagaacuucaccauccccuacugggacuggcgcgacgcggagaagugcgacaucugcacggacgaguacaugggcggccagcaccccaccaaccccaaccugcugagcccggccuccuucuucagcagcuggcagaucgugugcucccggcucgaggaguacaacagccaccagucccugugcaacgggacccccgagggcccccugcgccggaaccccgggaaccacgacaagagccgcaccccgcggcuccccuccagcgccgacguggaguucugccugucccugacgcaguacgagagcggcuccauggacaaggccgccaacuucagcuuccgcaacacccucgagggguucgcgagcccccugaccggcaucgccgacgccucccaguccagcaugcacaacgcccugcacaucuacaugaacggcaccaugucccagguccaggggagcgccaacgaccccaucuuccuccugcaccacgcguucguggacuccauguucgagcaguggcugcggcgccaccggccgcuccaggagguguaccccgaggccaacgcccccaucggccacaaccgcgagagcuacaugguccccuucaucccgcuguaccgcaacggggacuucuucaucuccagcaaggaccugggcuacgacuacagcuaccuccaggacuccgaccccgacagcuuccaggacuacaucaaguccuaccuggagcaggccagccggaucugguccuggcugcucggggccgcgauggugggcgccgugcugacggcccugcucgccggccuggucagccugcucugccgccacaagcggaagcagcugcccgaggagaagcagccgcugcugauggagaaggaggacuaccacucccucuaccagagccaccuguga

SEQ ID NO: 3789 - RNA, 1590 nt, Artificial Sequence
  derived and/or modified sequence opt2 from tyrosinase__Homo_sapiens__AGV39086
augcuccucgccguccucuacugccuccucugguccuuccagaccuccgccggccacuucccccgcgccugcgucuccuccaagaaccucauggagaaggagugcugcccccccugguccggcgaccgcucccccugcggccagcucuccggccgcggcuccugccagaacauccuccucuccaacgccccccucggcccccaguuccccuucaccggcgucgacgaccgcgaguccuggcccuccgucuucuacaaccgcaccugccagugcuccggcaacuucaugggcuucaacugcggcaacugcaaguucggcuucuggggccccaacugcaccgagcgccgccuccucguccgccgcaacaucuucgaccucuccgcccccgagaaggacaaguucuucgccuaccucacccucgccaagcacaccaucuccuccgacuacgucauccccaucggcaccuacggccagaugaagaacggcuccacccccauguucaacgacaucaacaucuacgaccucuucgucuggaugcacuacuacgucuccauggacgcccuccucggcggcuccgagaucuggcgcgacaucgacuucgcccacgaggcccccgccuuccuccccuggcaccgccucuuccuccuccgcugggagcaggagauccagaagcucaccggcgacgagaacuucaccauccccuacugggacuggcgcgacgccgagaagugcgacaucugcaccgacgaguacaugggcggccagcaccccaccaaccccaaccuccucucccccgccuccuucuucuccuccuggcagaucgucugcucccgccucgaggaguacaacucccaccagucccucugcaacggcacccccgagggcccccuccgccgcaaccccggcaaccacgacaagucccgcaccccccgccuccccuccuccgccgacgucgaguucugccucucccucacccaguacgaguccggcuccauggacaaggccgccaacuucuccuuccgcaacacccucgagggcuucgccuccccccucaccggcaucgccgacgccucccaguccuccaugcacaacgcccuccacaucuacaugaacggcaccaugucccagguccagggcuccgccaacgaccccaucuuccuccuccaccacgccuucgucgacuccauguucgagcaguggcuccgccgccaccgcccccuccaggaggucuaccccgaggccaacgcccccaucggccacaaccgcgaguccuacaugguccccuucaucccccucuaccgcaacggcgacuucuucaucuccuccaaggaccucggcuacgacuacuccuaccuccaggacuccgaccccgacuccuuccaggacuacaucaaguccuaccucgagcaggccucccgcaucugguccuggcuccucggcgccgccauggucggcgccguccucaccgcccuccucgccggccucgucucccuccucugccgccacaagcgcaagcagcuccccgaggagaagcagccccuccucauggagaaggaggacuaccacucccucuaccagucccaccucuga

SEQ ID NO: 3790 - RNA, 1590 nt, Artificial Sequence
  derived and/or modified sequence opt3 from tyrosinase__Homo_sapiens__AGV39086
augcugcucgccgugcuuuacugccuguuguggagcuuccagaccuccgcuggccacuuucccagagcaugugucucuucaaagaacuuaauggagaaagaaugcuguccuccauggaguggggacaggagcccgugcggacaacuguccggucggggcucuugucagaauauccuacucucgaacgcccccuuggggccucaguucccauuuacaggaguugaugaccgcgagucauggcccagcguguucuauaaucgaacuugccaguguaguggcaacuuuauggguuucaauugcgggaacuguaaguuuggauucuggggcccuaauugcacggaacguagacuucugguaaggcggaacauuuuugauuuguccgcgccagagaaagacaaguucuuugcuuaccucacccuggccaaacauacaauaucuagcgauuaugugauccccauuggcacuuacgggcaaaugaagaauggauccaccccuauguucaacgacaucaauauuuaugaucuguuugucuggaugcacuacuaugugucaauggacgcacucuuagguggcagugaaaucuggcgcgauauagacuucgcccaugaggcuccagcauuccugccguggcacagacuuuuucugcugaggugggagcaggaaauccagaagcuaacaggggaugagaacuucaccauucccuacugggacuggcgggaugccgaaaaaugugacaucugcacugacgaguacaugggaggccagcauccuacaaauccaaaccuccugagccccgcuuccuuuuucucuucauggcaaauuguuugcagccgccuugaggaauauaauagucaccagucucuguguaacgguaccccugaggggccauugcgaagaaaccccggaaaucacgauaaguccaggacgccgcggcucccuagcucggccgacguggaauuuugccugucuuuaacucaguacgaguccggcucaauggauaaagcggcaaacuucaguuuucguaauacccuggaaggcuucgccagcccccucacagggaucgcugacgccucccagucuagcaugcauaacgcacuucacauauauaugaauggaacuaugucacaaguccaggguagugcuaacgauccaauuuuucuguugcaucacgccuucguggacuccauguuugagcaguggcuacgcagacacaggccucugcaagagguauaccccgaagcgaaugccccaaucggccauaaccgggagagcuauaugguucccuucauuccucucuaccgaaauggggacuuuuucaucucuucaaaggaucugggauaugauuacaguuaccuucaggacagcgauccagacuccuuccaggacuauaucaaaucuuaccuggaacaggcaucgcgcauuuggagcugguugcucggcgcugccauggugggugcuguccugaccgccuuacuggcagggcuagugucccuccuguguagacacaagaggaagcaacuuccggaggaaaaacagcccuugcugauggagaaggaggauuaucauucacucuaccagagucaccuguga

SEQ ID NO: 3791 - RNA, 1590 nt, Artificial Sequence
  derived and/or modified sequence opt4 from tyrosinase__Homo_sapiens__AGV39086
augcugcuggccgugcuguacugccugcuguggagcuuccagaccagcgccggccacuuccccagagccugcgugagcagcaagaaccugauggagaaggagugcugcccccccuggagcggcgacagaagccccugcggccagcugagcggcagaggcagcugccagaacauccugcugagcaacgccccccugggcccccaguuccccuucaccggcguggacgacagagagagcuggcccagcguguucuacaacagaaccugccagugcagcggcaacuucaugggcuucaacugcggcaacugcaaguucggcuucuggggccccaacugcaccgagagaagacugcuggugagaagaaacaucuucgaccugagcgcccccgagaaggacaaguucuucgccuaccugacccuggccaagcacaccaucagcagcgacuacgugauccccaucggcaccuacggccagaugaagaacggcagcacccccauguucaacgacaucaacaucuacgaccuguucguguggaugcacuacuacgugagcauggacgcccugcugggcggcagcgagaucuggagagacaucgacuucgcccacgaggcccccgccuuccugcccuggcacagacuguuccugcugagaugggagcaggagauccagaagcugaccggcgacgagaacuucaccauccccuacugggacuggagagacgccgagaagugcgacaucugcaccgacgaguacaugggcggccagcaccccaccaaccccaaccugcugagccccgccagcuucuucagcagcuggcagaucgugugcagcagacuggaggaguacaacagccaccagagccugugcaacggcacccccgagggcccccugagaagaaaccccggcaaccacgacaagagcagaacccccagacugcccagcagcgccgacguggaguucugccugagccugacccaguacgagagcggcagcauggacaaggccgccaacuucagcuucagaaacacccuggagggcuucgccagcccccugaccggcaucgccgacgccagccagagcagcaugcacaacgcccugcacaucuacaugaacggcaccaugagccaggugcagggcagcgccaacgaccccaucuuccugcugcaccacgccuucguggacagcauguucgagcaguggcugagaagacacagaccccugcaggagguguaccccgaggccaacgcccccaucggccacaacagagagagcuacauggugcccuucaucccccuguacagaaacggcgacuucuucaucagcagcaaggaccugggcuacgacuacagcuaccugcaggacagcgaccccgacagcuuccaggacuacaucaagagcuaccuggagcaggccagcagaaucuggagcuggcugcugggcgccgccauggugggcgccgugcugaccgcccugcuggccggccuggugagccugcugugcagacacaagagaaagcagcugcccgaggagaagcagccccugcugauggagaaggaggacuaccacagccuguaccagagccaccuguga

SEQ ID NO: 3792 - RNA, 1590 nt, Artificial Sequence
  derived and/or modified sequence opt5 from tyrosinase__Homo_sapiens__AGV39086
augcugcucgccgugcuguacugccuucuguggagcuuccagaccuccgcuggccacuuucccagagccugugucucuagcaagaaccucauggagaaagaaugcuguccuccgugguccggggaccggucucccugcggacaacugagcggccgcggguccugucagaauauccuucugucuaacgcgccucucggaccccaguucccuuuuacaggcguugaugacagagagagcuggcccuccguguucuauaaucggacgugccaguguagcgggaacuuuaugggauucaauugcggcaacuguaaguuuggcuucugggggccuaauugcaccgaacgcagacugcuggugcggcgcaacauuuuugaucucucugcuccggagaaagacaaguucuuugccuaccugacacuugccaaacauaccaucuccagcgauuaugucauucccaucggaacauacggccaaaugaagaaugggucuaccccuauguucaacgacauuaauaucuaugaucuguuuguguggaugcacuacuauguuuccauggacgcucuccugggaggcagcgaaaucuggagagauauugacuucgcccaugaggcucccgccuuccuuccuuggcaccggcuguuucuccugcgcugggagcaggaaauccagaagcugacaggggaugagaacuucaccauucccuacugggacuggagagaugcggaaaaaugugacaucugcacggacgaguacaugggaggccagcauccgaccaauccuaaccuccugucucccgccuccuuuuucagcuccuggcaaauugugugcucucggcuugaggaauauaauagccaccagucccuguguaacggcacaccugaggggccccuccgcagaaaccccggaaaucacgauaagagccggaccccucgccugccgucuuccgcugacgucgaauuuugccuuagccugacacaguacgagucuggcagcauggauaaagccgcuaacuucuccuuuagaaauacccucgaaggguucgccucuccccugacgggaaucgcggacgccagccaguccagcaugcauaacgcucugcacauuuauaugaauggcacaaugucucaagugcagggguccgccaacgauccuaucuuucuccugcaucacgcuuucguugacagcauguuugagcaguggcuucggagacaccgcccccugcaagagguguacccugaagccaaugcccccaucggacauaaccgggagucuuauauggucccguucauuccucucuacagaaauggcgacuuuuucaucuccagcaaggaucugggcuaugauuacuccuaccuucaggacucugaucccgacagcuuccaggacuauauuaaauccuaccuggaacaggcuucucgcaucuggagcuggcuccugggggcggccauggugggagcugugcugaccgcccuccuggccggccuugucucccugcucugucggcacaagagaaagcaacugccugaggaaaaacagccccugcuuauggagaaggaggauuaucauagccucuaccagucucaccuguga

SEQ ID NO: 3793 - protein, 537 aa, Artificial Sequence
  TYRP1__Homo_sapiens__P17643
MSAPKLLSLGCIFFPLLLFQQARAQFPRQCATVEALRSGMCCPDLSPVSGPGTDRCGSSSGRGRCEAVTADSRPHSPQYPHDGRDDREVWPLRFFNRTCHCNGNFSGHNCGTCRPGWRGAACDQRVLIVRRNLLDLSKEEKNHFVRALDMAKRTTHPLFVIATRRSEEILGPDGNTPQFENISIYNYFVWTHYYSVKKTFLGVGQESFGEVDFSHEGPAFLTWHRYHLLRLEKDMQEMLQEPSFSLPYWNFATGKNVCDICTDDLMGSRSNFDSTLISPNSVFSQWRVVCDSLEDYDTLGTLCNSTEDGPIRRNPAGNVARPMVQRLPEPQDVAQCLEVGLFDTPPFYSNSTNSFRNTVEGYSDPTGKYDPAVRSLHNLAHLFLNGTGGQTHLSPNDPIFVLLHTFTDAVFDEWLRRYNADISTFPLENAPIGHNRQYNMVPFWPPVTNTEMFVTAPDNLGYTYEIQWPSREFSVPEIIAIAVVGALLLVALIFGTASYLIRARRSMDEANQPLLTDQYQCYAEEYEKLQNPNQSVV

SEQ ID NO: 3794 - RNA, 1614 nt, Artificial Sequence
  TYRP1__Homo_sapiens__AAC15468
augagugcuccuaaacuccucucucugggcuguaucuucuuccccuugcuacuuuuucagcaggcccgggcucaauucccaagacagugugccacuguugaggcuuugagaagugguauguguugcccagaccuguccccugugucugggccugggacagaccgcuguggcucaucaucagggaggggcagaugugaggcagugacugcagacucccggccccacagcccucaguauccccaugauggcagagaugaucgggaggucuggcccuugcgcuucuucaauaggacaugucacugcaacggcaauuucucaggacacaacugugggacgugccguccuggcuggagaggagcugccugugaccagaggguucucauagucaggagaaaucuucuggacuuaaguaaagaagaaaagaaccacuuuguccgggcccuggauauggcaaagcgcacaacucacccuuuauuugucauugccaccaggagaucagaagaaauacuggggccagauggcaacacgccacaauuugagaacauuuccauuuauaacuacuuuguuuggacacacuauuacucagucaaaaagacuuuccuugggguaggacaggaaagcuuuggugaaguggauuucucucaugagggaccagcuuuucucacauggcacagguaccaccuccugcgucuggagaaagacaugcaggaaauguugcaagagccuucuuucucccuuccuuacuggaauuuugcaacggggaaaaaugucugugauaucugcacggaugacuugaugggauccagaagcaacuuugauuccacucuaauaagcccaaacucugucuuuucucaauggcgaguggucugugacuccuuggaagauuaugauacccugggaacacuuuguaacagcaccgaggaugggccaauuaggagaaauccagcuggaaauguggccagaccaauggugcaacgucuuccugaaccacaggaugucgcucagugcuuggaaguugguuuauuugacacgccuccuuuuuauuccaacucuacaaacaguuuccgaaacacaguggaagguuacagugaccccacgggaaaguaugacccugcuguucgaagucuucacaauuuggcucaucuauuccugaauggaacagggggacaaacccauuugucuccaaaugauccuauuuuuguccuccugcacaccuucacagaugcagucuuugaugaauggcugaggagauacaaugcugauauauccacauuuccauuggaaaaugccccuauuggacauaauagacaauacaacauggugccauucuggcccccagucaccaacacagaaauguuuguuacugcuccagacaaccugggauacacuuaugaaauucaauggccaagucgggaguuuaguguaccugagauaauugccauagcaguaguuggcgcuuuguuacugguugcacucauuuuugggacugcuucuuaucugauucgugccagacgcaguauggaugaagcuaaccagccucuccucacugaucaguaucaaugcuaugcugaagaauaugaaaaacuccagaauccuaaucagucuguggucuaa

SEQ ID NO: 3795 - RNA, 1614 nt, Artificial Sequence
  derived and/or modified sequence opt1 from TYRP1__Homo_sapiens__AAC15468
augagcgcccccaagcugcucucccugggcugcaucuucuucccgcugcuccuguuccagcaggcccgcgcgcaguucccccggcagugcgccaccguggaggcccugcgcagcgggaugugcugccccgaccucucccccgucagcggcccggggaccgaccggugcggcuccagcuccgggcgcggccggugcgaggccgugacggccgacagccgcccccacagcccccaguacccccacgacggccgggacgaccgcgagguguggccgcugcgguucuucaaccggaccugccacugcaacgggaacuucuccggccacaacugcgggaccugccgccccggcuggcgcggggcggccugcgaccagcggguccugaucgugcgccggaaccuccuggaccuguccaaggaggagaagaaccacuucgugcgcgcccucgacauggccaagcggaccacgcacccccuguucgucaucgcgacccgccggagcgaggagauccugggccccgacggcaacaccccgcaguucgagaacaucuccaucuacaacuacuucguguggacccacuacuacagcgugaagaagacguuccucggggucggccaggaguccuucggggagguggacuucagccacgagggccccgccuuccugaccuggcaccgcuaccaccuccugcggcuggagaaggacaugcaggagaugcugcaggagcccuccuucagccuccccuacuggaacuucgccaccggcaagaacgugugcgacaucugcaccgacgaccugauggggucccgcagcaacuucgacagcacgcugaucuccccgaacagcgucuucucccaguggcgcguggugugcgacagccucgaggacuacgacacccugggcacccugugcaacuccaccgaggacgggcccauccggcgcaaccccgccggcaacgucgcccggcccauggugcagcgccucccggagccccaggacguggcgcagugccuggaggucgggcuguucgacacgccgcccuucuacagcaacuccaccaacagcuuccggaacaccguggagggcuacuccgaccccaccggcaaguacgaccccgccgugcgcagccuccacaaccuggcccaccuguuccucaacgggacgggcgggcagacccaccugucccccaacgaccccaucuucguccugcuccacaccuucaccgacgccguguucgacgaguggcugcggcgcuacaacgccgacaucagcacguucccgcuggagaacgcgcccaucggccacaaccggcaguacaacauggugcccuucuggccgcccgucaccaacaccgagauguucgugaccgcccccgacaaccucggguacacguacgagauccaguggcccucccgcgaguucagcgucccggagaucaucgccaucgccguggugggcgcccugcugcucgucgcgcugaucuucggcaccgccuccuaccugauccgggcccgccggagcauggacgaggccaaccagccccuccugaccgaccaguaccagugcuacgccgaggaguacgagaagcugcagaaccccaaccaguccgugguguga

SEQ ID NO: 3796 - RNA, 1614 nt, Artificial Sequence
  derived and/or modified sequence opt2 from TYRP1__Homo_sapiens__AAC15468
auguccgcccccaagcuccucucccucggcugcaucuucuucccccuccuccucuuccagcaggcccgcgcccaguucccccgccagugcgccaccgucgaggcccuccgcuccggcaugugcugccccgaccucucccccgucuccggccccggcaccgaccgcugcggcuccuccuccggccgcggccgcugcgaggccgucaccgccgacucccgcccccacuccccccaguacccccacgacggccgcgacgaccgcgaggucuggccccuccgcuucuucaaccgcaccugccacugcaacggcaacuucuccggccacaacugcggcaccugccgccccggcuggcgcggcgccgccugcgaccagcgcguccucaucguccgccgcaaccuccucgaccucuccaaggaggagaagaaccacuucguccgcgcccucgacauggccaagcgcaccacccacccccucuucgucaucgccacccgccgcuccgaggagauccucggccccgacggcaacaccccccaguucgagaacaucuccaucuacaacuacuucgucuggacccacuacuacuccgucaagaagaccuuccucggcgucggccaggaguccuucggcgaggucgacuucucccacgagggccccgccuuccucaccuggcaccgcuaccaccuccuccgccucgagaaggacaugcaggagaugcuccaggagcccuccuucucccuccccuacuggaacuucgccaccggcaagaacgucugcgacaucugcaccgacgaccucaugggcucccgcuccaacuucgacuccacccucaucucccccaacuccgucuucucccaguggcgcgucgucugcgacucccucgaggacuacgacacccucggcacccucugcaacuccaccgaggacggccccauccgccgcaaccccgccggcaacgucgcccgccccaugguccagcgccuccccgagccccaggacgucgcccagugccucgaggucggccucuucgacaccccccccuucuacuccaacuccaccaacuccuuccgcaacaccgucgagggcuacuccgaccccaccggcaaguacgaccccgccguccgcucccuccacaaccucgcccaccucuuccucaacggcaccggcggccagacccaccucucccccaacgaccccaucuucguccuccuccacaccuucaccgacgccgucuucgacgaguggcuccgccgcuacaacgccgacaucuccaccuucccccucgagaacgcccccaucggccacaaccgccaguacaacaugguccccuucuggccccccgucaccaacaccgagauguucgucaccgcccccgacaaccucggcuacaccuacgagauccaguggcccucccgcgaguucuccguccccgagaucaucgccaucgccgucgucggcgcccuccuccucgucgcccucaucuucggcaccgccuccuaccucauccgcgcccgccgcuccauggacgaggccaaccagccccuccucaccgaccaguaccagugcuacgccgaggaguacgagaagcuccagaaccccaaccaguccgucgucuga

SEQ ID NO: 3797 - RNA, 1614 nt, Artificial Sequence
  derived and/or modified sequence opt3 from TYRP1__Homo_sapiens__AAC15468
augagcgcccccaagcugcucucccuuggcugcaucuucuuuccucuguuguuauuccagcaagcuagagcacaguuuccaaggcagugugccaccguggaggcgcugcggucugggaugugcuguccggaccuaucacccgucaguggaccugguacagaucgcugcggcagcuccucugggcgaggacguugugaagcuguuacugccgacucgagaccacacucaccccaguacccucaugauggcagggacgaucgggagguguggccacuccgcuucuuuaacagaacgugccacuguaaugguaacuucagcgggcauaauugcggaaccuguaggcccggcuggcggggcgcagccugcgaccaacgcguacugauugugcgaagaaaccuucuggauuugaguaaagaagagaagaaucacuuugucagggcucucgacauggcaaaacggacaacucauccucuguucgugauagccacccgucgcuccgaagagauccuggggccagauggaaacacaccgcaguuugagaauauuucuaucuauaacuacuucguuuggacccacuauuacagcgugaagaaaacuuuucucggugucggccaggaauccuucggggagguggacuuuucacacgaaggacccgcuuucuuaacauggcauagauaucaucugcuuagguuggagaaggauaugcaggagaugcugcaagaaccuaguuucagccuaccauacuggaauuuugccaccggcaagaacguaugugacauuugcacggaugaccucauggguucucgguccaauuucgacucaacucugaucagccccaacaguguguuuucucaguggcgaguugucugcgauucccuugaggacuaugauacccuggggacauuguguaauagcacugaagacggaccuauacgcagaaacccagcgggcaauguggcaaggcccauggugcagcggcucccggagccucaggaugucgcccaaugccuggaaguuggcuuauucgacacacccccauuuuacucgaacucuaccaacuccuuccgcaauaccguggagggguacucagauccuacgggaaaauaugaccccgcuguaagaagucugcacaaccucgcccaccuuuuucugaaugguacuggcgggcagacacacuugagcccaaacgaucccaucuucgugcuacugcauaccuuuacugacgcagucuucgaugaguggcucaggcguuacaaugcugacauuuccacauuuccucuggaaaacgccccaaucggacacaaucggcaguauaacauggugccguucuggcccccuguuaccaauacggagauguuugugaccgcgccagacaaccuuggcuacacauaugaaauucaauggcccucucgagaguucagcgucccugaaaucauagccauugcagugguaggugcucuguugcucguugcccugaucuucgggacugcuucauacuuaauuagagccaggcgcaguauggaugaggcaaaucagccacugcuaaccgaccaguaucaguguuacgccgaggaauacgagaagcuccaaaaccccaaucaguccguggucuga

SEQ ID NO: 3798 - RNA, 1614 nt, Artificial Sequence
  derived and/or modified sequence opt4 from TYRP1__Homo_sapiens__AAC15468
augagcgcccccaagcugcugagccugggcugcaucuucuucccccugcugcuguuccagcaggccagagcccaguuccccagacagugcgccaccguggaggcccugagaagcggcaugugcugccccgaccugagccccgugagcggccccggcaccgacagaugcggcagcagcagcggcagaggcagaugcgaggccgugaccgccgacagcagaccccacagcccccaguacccccacgacggcagagacgacagagagguguggccccugagauucuucaacagaaccugccacugcaacggcaacuucagcggccacaacugcggcaccugcagacccggcuggagaggcgccgccugcgaccagagagugcugaucgugagaagaaaccugcuggaccugagcaaggaggagaagaaccacuucgugagagcccuggacauggccaagagaaccacccacccccuguucgugaucgccaccagaagaagcgaggagauccugggccccgacggcaacaccccccaguucgagaacaucagcaucuacaacuacuucguguggacccacuacuacagcgugaagaagaccuuccugggcgugggccaggagagcuucggcgagguggacuucagccacgagggccccgccuuccugaccuggcacagauaccaccugcugagacuggagaaggacaugcaggagaugcugcaggagcccagcuucagccugcccuacuggaacuucgccaccggcaagaacgugugcgacaucugcaccgacgaccugaugggcagcagaagcaacuucgacagcacccugaucagccccaacagcguguucagccaguggagaguggugugcgacagccuggaggacuacgacacccugggcacccugugcaacagcaccgaggacggccccaucagaagaaaccccgccggcaacguggccagacccauggugcagagacugcccgagccccaggacguggcccagugccuggaggugggccuguucgacaccccccccuucuacagcaacagcaccaacagcuucagaaacaccguggagggcuacagcgaccccaccggcaaguacgaccccgccgugagaagccugcacaaccuggcccaccuguuccugaacggcaccggcggccagacccaccugagccccaacgaccccaucuucgugcugcugcacaccuucaccgacgccguguucgacgaguggcugagaagauacaacgccgacaucagcaccuucccccuggagaacgcccccaucggccacaacagacaguacaacauggugcccuucuggccccccgugaccaacaccgagauguucgugaccgcccccgacaaccugggcuacaccuacgagauccaguggcccagcagagaguucagcgugcccgagaucaucgccaucgccguggugggcgcccugcugcugguggcccugaucuucggcaccgccagcuaccugaucagagccagaagaagcauggacgaggccaaccagccccugcugaccgaccaguaccagugcuacgccgaggaguacgagaagcugcagaaccccaaccagagcgugguguga

SEQ ID NO: 3799 - RNA, 1614 nt, Artificial Sequence
  derived and/or modified sequence opt5 from TYRP1__Homo_sapiens__AAC15468
augagcgcccccaagcugcucucccugggcugcaucuucuuuccucuucuccuguuccagcaagcuagagcccaguuuccgcggcagugugcgaccguggaggcucugcgcucugggaugugcugucccgaccuuagcccugucuccggacccggcacagauagaugcgggucuagcuccggacggggccgcugugaagccguuacggccgacucuagaccucacagcccccaguacccucaugaugggcgggacgaucgcgagguguggccgcugagauucuuuaaccggaccugccacuguaauggaaacuucuccggccauaauugcggcacaugucgccccggguggagaggagcugccugcgaccaacgggugcucauuguccgcagaaaccugcuggaucucagcaaagaagagaagaaucacuuugugcgggcucuggacauggccaaacgcaccacacauccucuuuucguuaucgcgaccagacggucugaagagauucugggccccgaugggaacacaccucaguuugagaauaucuccauuuauaacuacuucguguggacccacuauuacagcgucaagaaaacguuucucggagugggccaggaaucuuucggggagguugacuuuucccacgaaggacccgccuuccugaccuggcauagauaucaccuucugcgccucgagaaggauaugcaggagaugcugcaagaaccgagcuucucucugccuuacuggaauuuugcuacaggcaagaacgugugugacaucugcaccgaugaccucaugggcucccggagcaauuucgacuccacacugaucucucccaacagcgucuuuucccaguggagaguggugugcgauagccuugaggacuaugauacccuggggacgcucuguaauucuacagaagacggaccuauucgccggaaccccgccggcaaugucgcuagacccaugguucagcgccugccugagccgcaggauguggcccaaugccuugaaguggggcuguucgacacacccccuuuuuacuccaacagcaccaacucuuuccggaauaccgucgagggauacagcgaucccaccggcaaauaugacccugcggugagaucccuccauaaccuggcccaccuguuucucaaugggacaggaggccagacgcaccugucucccaacgauccgaucuucguucuucugcauaccuuuacagacgcuguguucgaugaguggcuccgccgguacaaugccgacauuagcaccuuuccucuggaaaacgcucccaucggccacaauagacaguauaacauggucccuuucuggcccccugugacaaauaccgagauguuuguuacggcccccgacaaccuuggguacacauaugaaauucaauggccgucccgcgaguucagcgugccugaaaucauugccaucgcugucgugggagcgcugcuccuggucgcccugaucuucggcaccgcuucuuaccucauucgggccagacgguccauggaugaggccaaucagccccugcuuaccgaccaguaucaguguuacgcugaggaauacgagaagcugcaaaaccccaaucagagcgugguuuga

SEQ ID NO: 3800 - protein, 519 aa, Artificial Sequence
  TYRP2__Homo_sapiens__P40126
MSPLWWGFLLSCLGCKILPGAQGQFPRVCMTVDSLVNKECCPRLGAESANVCGSQQGRGQCTEVRADTRPWSGPYILRNQDDRELWPRKFFHRTCKCTGNFAGYNCGDCKFGWTGPNCERKKPPVIRQNIHSLSPQEREQFLGALDLAKKRVHPDYVITTQHWLGLLGPNGTQPQFANCSVYDFFVWLHYYSVRDTLLGPGRPYRAIDFSHQGPAFVTWHRYHLLCLERDLQRLIGNESFALPYWNFATGRNECDVCTDQLFGAARPDDPTLISRNSRFSSWETVCDSLDDYNHLVTLCNGTYEGLLRRNQMGRNSMKLPTLKDIRDCLSLQKFDNPPFFQNSTFSFRNALEGFDKADGTLDSQVMSLHNLVHSFLNGTNALPHSAANDPIFVVLHSFTDAIFDEWMKRFNPPADAWPQELAPIGHNRMYNMVPFFPPVTNEELFLTSDQLGYSYAIDLPVSVEETPGWPTTLLVVMGTLVALVGLFVLLAFLQYRRLRKGYTPLMETHLSSKRYTEEA

SEQ ID NO: 3801 - RNA, 1560 nt, Artificial Sequence
  TYRP2__Homo_sapiens__AAA20870
augagcccccuuugguggggguuucugcucaguugcuugggcugcaaaauccugccaggagcccagggucaguucccccgagucugcaugacgguggacagccuagugaacaaggagugcugcccacgccugggugcagagucggccaaugucuguggcucucagcaaggccgggggcagugcacagaggugcgagccgacacaaggcccuggaguggucccuacauccuacgaaaccaggaugaccgugagcuguggccaagaaaauucuuccaccggaccugcaagugcacaggaaacuuugccggcuauaauuguggagacugcaaguuuggcuggaccggucccaacugcgagcggaagaaaccaccagugauucggcagaacauccauuccuugaguccucaggaaagagagcaguucuugggcgccuuagaucucgcgaagaagagaguacaccccgacuacgugaucaccacacaacacuggcugggccugcuugggcccaauggaacccagccgcaguuugccaacugcaguguuuaugauuuuuuuguguggcuccauuauuauucuguuagagauacauuauuaggaccaggacgccccuacagggccauagauuucucacaucaaggaccugcauuuguuaccuggcaccgguaccauuuguugugucuggaaagagaucuccagcgacucauuggcaaugagucuuuugcuuugcccuacuggaacuuugccacugggaggaacgagugugauguguguacagaccagcuguuuggggcagcgagaccagacgauccgacucugauuagucggaacucaagauucuccagcugggaaacugucugugauagcuuggaugacuacaaccaccuggucaccuugugcaauggaaccuaugaagguuugcugagaagaaaucaaaugggaagaaacagcaugaaauugccaaccuuaaaagacauacgagauugccugucucuccagaaguuugacaauccucccuucuuccagaacucuaccuucaguuucaggaaugcuuuggaaggguuugauaaagcagaugggacucuggauucucaagugaugagccuucauaauuugguucauuccuuccugaacgggacaaacgcuuugccacauucagccgccaaugaucccauuuuugugguucuucauuccuuuacugaugccaucuuugaugaguggaugaaaagauuuaauccuccugcagaugccuggccucaggagcuggccccuauuggucacaaucggauguacaacaugguuccuuucuucccuccagugacuaaugaagaacucuuuuuaaccucagaccaacuuggcuacagcuaugccaucgaucugccaguuucaguugaagaaacuccagguuggcccacaacucucuuaguagucaugggaacacugguggcuuugguuggucuuuuugugcuguuggcuuuucuucaauauagaagacuucgaaaaggauauacaccccuaauggagacacauuuaagcagcaagagauacacagaagaagccuag

SEQ ID NO: 3802 - RNA, 1560 nt, Artificial Sequence
  derived and/or modified sequence opt1 from TYRP2__Homo_sapiens__AAA20870
augagcccccugugguggggcuuccuccuguccugccuggggugcaagauccucccgggcgcccaggggcaguucccccgcgugugcaugaccgucgacagccuggugaacaaggagugcugcccccggcugggcgccgaguccgcgaacgugugcgggagccagcagggccgcggccagugcaccgagguccgggccgacacgcgccccugguccgggccguacauccuccggaaccaggacgaccgcgagcuguggccccggaaguucuuccaccggaccugcaagugcaccggcaacuucgccggguacaacugcggcgacugcaaguucggguggaccggccccaacugcgagcgcaagaagcccccggugauccgccagaacauccacagccugagcccccaggagcgggagcaguuccucggcgcccuggaccuggccaagaagcgcgugcaccccgacuacgucaucacgacccagcacuggcucgggcugcugggccccaacgggacccagccgcaguucgcgaacugcuccguguacgacuucuucguguggcuccacuacuacuccguccgggacacccugcugggccccggccgccccuaccgggccaucgacuucagccaccaggggcccgccuucgugacguggcaccgcuaccaccuccugugccuggagcgggaccuccagcgccugaucggcaacgaguccuucgcccugccguacuggaacuucgcgaccgggcggaacgagugcgacgugugcaccgaccagcuguucggcgccgcccgccccgacgaccccacccucaucagccggaacucccgcuucagcuccugggagacggucugcgacagccuggacgacuacaaccaccucgugacccugugcaacgggaccuacgagggccugcuccgccggaaccagaugggccgcaacuccaugaagcugcccacccugaaggacauccgggacugccucagccugcagaaguucgacaacccgcccuucuuccagaacuccacguucagcuuccgcaacgcccuggagggguucgacaaggccgacggcacccucgacagccaggugaugucccugcacaaccugguccacagcuuccucaacgggaccaacgcgcugccccacuccgccgccaacgaccccaucuucguggugcugcacagcuucaccgacgccaucuucgacgaguggaugaagcgguucaacccgcccgccgacgcguggccccaggagcucgcccccaucggccacaaccgcauguacaacauggucccguucuucccgcccgugacgaacgaggagcuguuccugaccuccgaccagcucggguacagcuacgccaucgaccugcccguguccgucgaggagacccccggcuggcccaccacgcugcucguggugaugggcacccuggucgcccugguggggcuguucguccuccuggccuuccugcaguaccggcgccuccggaagggcuacacgccccugauggagacccaccugagcuccaagcgcuacaccgaggaggcguga

SEQ ID NO: 3803 - RNA, 1560 nt, Artificial Sequence
  derived and/or modified sequence opt2 from TYRP2__Homo_sapiens__AAA20870
auguccccccucugguggggcuuccuccucuccugccucggcugcaagauccuccccggcgcccagggccaguucccccgcgucugcaugaccgucgacucccucgucaacaaggagugcugcccccgccucggcgccgaguccgccaacgucugcggcucccagcagggccgcggccagugcaccgagguccgcgccgacacccgccccugguccggccccuacauccuccgcaaccaggacgaccgcgagcucuggccccgcaaguucuuccaccgcaccugcaagugcaccggcaacuucgccggcuacaacugcggcgacugcaaguucggcuggaccggccccaacugcgagcgcaagaagccccccgucauccgccagaacauccacucccucuccccccaggagcgcgagcaguuccucggcgcccucgaccucgccaagaagcgcguccaccccgacuacgucaucaccacccagcacuggcucggccuccucggccccaacggcacccagccccaguucgccaacugcuccgucuacgacuucuucgucuggcuccacuacuacuccguccgcgacacccuccucggccccggccgccccuaccgcgccaucgacuucucccaccagggccccgccuucgucaccuggcaccgcuaccaccuccucugccucgagcgcgaccuccagcgccucaucggcaacgaguccuucgcccuccccuacuggaacuucgccaccggccgcaacgagugcgacgucugcaccgaccagcucuucggcgccgcccgccccgacgaccccacccucaucucccgcaacucccgcuucuccuccugggagaccgucugcgacucccucgacgacuacaaccaccucgucacccucugcaacggcaccuacgagggccuccuccgccgcaaccagaugggccgcaacuccaugaagcuccccacccucaaggacauccgcgacugccucucccuccagaaguucgacaacccccccuucuuccagaacuccaccuucuccuuccgcaacgcccucgagggcuucgacaaggccgacggcacccucgacucccaggucaugucccuccacaaccucguccacuccuuccucaacggcaccaacgcccucccccacuccgccgccaacgaccccaucuucgucguccuccacuccuucaccgacgccaucuucgacgaguggaugaagcgcuucaacccccccgccgacgccuggccccaggagcucgcccccaucggccacaaccgcauguacaacaugguccccuucuucccccccgucaccaacgaggagcucuuccucaccuccgaccagcucggcuacuccuacgccaucgaccuccccgucuccgucgaggagacccccggcuggcccaccacccuccucgucgucaugggcacccucgucgcccucgucggccucuucguccuccucgccuuccuccaguaccgccgccuccgcaagggcuacaccccccucauggagacccaccucuccuccaagcgcuacaccgaggaggccuga

SEQ ID NO: 3804 - RNA, 1560 nt, Artificial Sequence
  derived and/or modified sequence opt3 from TYRP2__Homo_sapiens__AAA20870
augagcccccugugguggggcuuccuccuuuccugccugggguguaagaucuugccuggagcccagggucaauuuccaagagugugcaugaccgucgacucuuuaguuaacaaagaguguugcccgaggcugggcgcugaaucagcaaaugugugugggagucagcagggacggggccagugcacagagguacgcgccgauacucgacccuggagcgguccuuacauucuacguaaccaagacgauagagaacucuggccaaggaaguucuuucaccggacguguaaaugcaccgggaauuucgcgggauauaacuguggcgacugcaaguuuggcuggacagggcccaauugugagcgcaaaaagccuccagugauaagacagaacauccauucccugucuccccaggaaagggagcaguuccuuggagcucuggauuuggccaagaaacggguccacccugacuacgugauuacuacccaacauuggcucggucugcugggcccaaaugggacacagccgcaguuugcaaacugcucgguuuaugauuucuuuguguggcuccacuacuauucaguccgcgacaccuuacugggacccggccgaccuuacagagccaucgauuucagccaucaggguccagcuuuugugacuuggcacagguaucaccuuuugugccuggagcgggaccuacaacgucucauugggaaugaaaguuucgcacugcccuacuggaacuuugccacaggacgcaaugagugugauguaugcaccgaccagcuuuucggcgcugccagaccugaugacccaacgcugaucuccaggaacucucgguucagcuccugggaaacuguuugugacucauuggaugacuacaaucaucucgugacccugugcaacggcacauaugagggguuacugcgacgcaaucagaugggaagaaacaguaugaagcuccccacucuuaaagauauaagggacugucugagcuugcaaaaguuugauaacccgccuuucuuucaaaauucuaccuucuccuuucggaacgcgcuagaggguuucgacaaagcagauggcacacuggacucacaggucaugagccuccacaaucuggugcauaguuuucuuaacgggaccaaugcccugccccacucugcugccaacgauccaaucuucguggucuugcacuccuuuacggacgcaauuuucgaugaauggaugaagcgcuuuaauccucccgcugacgccuggccacaggagcucgcgcccaucggacauaacagaauguacaauaugguuccuuucuuuccaccggugacuaacgaggaacuguucuuaacaagcgaccagcugggcuauucguacgccauugaucuacccguaucuguggaagagaccccugguuggccaacuacacuccuggucgugauggggacccuuguugcauuggugggccuguucguccuccuggcuuuucuucaguauaggcgucugcggaagggauacacgcccuugauggagacccaccucuccucaaaacgauauacagaagaggccuga

SEQ ID NO: 3805 - RNA, 1560 nt, Artificial Sequence
  derived and/or modified sequence opt4 from TYRP2__Homo_sapiens__AAA20870
augagcccccugugguggggcuuccugcugagcugccugggcugcaagauccugcccggcgcccagggccaguuccccagagugugcaugaccguggacagccuggugaacaaggagugcugccccagacugggcgccgagagcgccaacgugugcggcagccagcagggcagaggccagugcaccgaggugagagccgacaccagacccuggagcggccccuacauccugagaaaccaggacgacagagagcuguggcccagaaaguucuuccacagaaccugcaagugcaccggcaacuucgccggcuacaacugcggcgacugcaaguucggcuggaccggccccaacugcgagagaaagaagccccccgugaucagacagaacauccacagccugagcccccaggagagagagcaguuccugggcgcccuggaccuggccaagaagagagugcaccccgacuacgugaucaccacccagcacuggcugggccugcugggccccaacggcacccagccccaguucgccaacugcagcguguacgacuucuucguguggcugcacuacuacagcgugagagacacccugcugggccccggcagacccuacagagccaucgacuucagccaccagggccccgccuucgugaccuggcacagauaccaccugcugugccuggagagagaccugcagagacugaucggcaacgagagcuucgcccugcccuacuggaacuucgccaccggcagaaacgagugcgacgugugcaccgaccagcuguucggcgccgccagacccgacgaccccacccugaucagcagaaacagcagauucagcagcugggagaccgugugcgacagccuggacgacuacaaccaccuggugacccugugcaacggcaccuacgagggccugcugagaagaaaccagaugggcagaaacagcaugaagcugcccacccugaaggacaucagagacugccugagccugcagaaguucgacaacccccccuucuuccagaacagcaccuucagcuucagaaacgcccuggagggcuucgacaaggccgacggcacccuggacagccaggugaugagccugcacaaccuggugcacagcuuccugaacggcaccaacgcccugccccacagcgccgccaacgaccccaucuucguggugcugcacagcuucaccgacgccaucuucgacgaguggaugaagagauucaacccccccgccgacgccuggccccaggagcuggcccccaucggccacaacagaauguacaacauggugcccuucuucccccccgugaccaacgaggagcuguuccugaccagcgaccagcugggcuacagcuacgccaucgaccugcccgugagcguggaggagacccccggcuggcccaccacccugcugguggugaugggcacccugguggcccuggugggccuguucgugcugcuggccuuccugcaguacagaagacugagaaagggcuacaccccccugauggagacccaccugagcagcaagagauacaccgaggaggccuga

SEQ ID NO: 3806 - RNA, 1560 nt, Artificial Sequence
  derived and/or modified sequence opt5 from TYRP2__Homo_sapiens__AAA20870
augagcccccugugguggggcuuccuccuguccugccuuggguguaagauccugccuggagcccagggccaauuuccgagagugugcaugaccgucgacucucucguuaacaaagaguguugcccccggcugggggcugaaagcgccaauguguguggaucccagcagggccgcgggcagugcacagaggugagagcggauacgcggccuuggucuggacccuacauucuucgcaaccaagacgauagagaacuguggccucggaaguucuuucaccgcaccuguaaaugcacaggcaauuucgcuggcuauaacuguggggacugcaaguuuggauggaccggccccaauugugagcggaaaaagccuccggucaucagacagaacauucauagccucagcccccaggaacgcgagcaguuccugggggcccuggaucucgccaagaaaagagugcacccugacuacguuaucacaacccaacauuggcugggacuucugggccccaaugggacacagccucaguuugcuaacugcucuguguaugauuucuuugucuggcuccacuacuauagcgugcgggacacccugcuuggacccggccgcccguacagagccauugauuucucccaucagggcccugcuuuuguuacguggcaccgguaucaucugcucugccuggagcgcgaccugcaaagacucaucgggaaugaauccuucgcccugcccuacuggaacuuugcgaccggacggaaugagugugaugugugcacagaccagcuuuucggcgccgcuagaccugaugaccccacccugaucucucgcaacucccgguucagcucuugggaaacagucugugacucccucgaugacuacaaucaccuggugacccuuugcaacgggacguaugagggacugcucagacgcaaucagaugggccggaacagcaugaagcugcccacacugaaagauauuagagacugucucucucugcaaaaguuugauaacccuccguucuuucaaaauuccaccuucagcuuucgcaacgcccuugagggguucgacaaagcugauggaacacuggacucccaggugaugucucuccacaaucugguccauagcuuucuuaacggcaccaaugcccugccccacuccgcggccaacgauccuaucuucguugugcuccacagcuuuaccgacgcuauuuucgaugaauggaugaagcgguuuaaucccccugccgacgcuuggccccaggagcuggccccgaucggccauaacagaauguacaauauggugccuuucuuucccccugucacaaacgaggaacuguuccucacgucugaccagcugggguauuccuacgccauugaucuucccgugagcguugaagagaccccuggauggcccacaacccugcucguggucaugggcacacugguggcucugguugggcuuuucgugcuccuggcguuucugcaguaucgccggcucagaaagggauacaccccgcugauggagacgcaccuuucuagcaaacgcuauacagaagaggccuga

SEQ ID NO: 3807 - protein, 151 aa, Artificial Sequence
  UPA__Homo_sapiens__Q96NZ9
MRRLLLVTSLVVVLLWEAGAVPAPKVPIKMQVKHWPSEQDPEKAWGARVVEPPEKDDQLVVLFPVQKPKLLTTEEKPRGQGRGPILPGTKAWMETEDTLGHVLSPEPDHDSLYHPPPEEDQGEERPRLWVMPNHQVLLGPEEDQDHIYHPQ

SEQ ID NO: 3808 - RNA, 456 nt, Artificial Sequence
  UPA__Homo_sapiens__CCDS7679.1
augaggaggcuccuccuggucaccagccuggugguugugcugcugugggaggcaggugcagucccagcacccaaggucccuaucaagaugcaagucaaacacuggcccucagagcaggacccagagaaggccuggggcgcccgugugguggagccuccggagaaggacgaccagcugguggugcuguucccuguccagaagccgaaacucuugaccaccgaggagaagccacgaggucagggcaggggccccauccuuccaggcaccaaggccuggauggagaccgaggacacccugggccauguccugagucccgagcccgaccaugacagccuguaccacccuccgccugaggaggaccagggcgaggagaggccccgguugugggugaugccaaaucaccaggugcuccugggaccggaggaagaccaagaccacaucuaccacccccaguag

SEQ ID NO: 3809 - RNA, 456 nt, Artificial Sequence
  derived and/or modified sequence opt1 from UPA__Homo_sapiens__CCDS7679.1
augcgccggcugcuccuggugaccagccuggucguggugcuccugugggaggccggcgccguccccgcgcccaaggugcccaucaagaugcaggucaagcacuggcccuccgagcaggaccccgagaaggccuggggcgcccgcgugguggagccgcccgagaaggacgaccagcuggugguccucuuccccgugcagaagcccaagcugcugaccacggaggagaagccgcgggggcaggggcgcggccccauccuccccgggaccaaggccuggauggagaccgaggacacccugggccacgugcugagccccgagccggaccacgacucccucuaccacccgccgcccgaggaggaccagggcgaggagcggccccgccugugggucaugcccaaccaccaggugcugcucgggcccgaggaggaccaggaccacaucuaccacccccaguga

SEQ ID NO: 3810 - RNA, 456 nt, Artificial Sequence
  derived and/or modified sequence opt2 from UPA__Homo_sapiens__CCDS7679.1
augcgccgccuccuccucgucaccucccucgucgucguccuccucugggaggccggcgccguccccgcccccaagguccccaucaagaugcaggucaagcacuggcccuccgagcaggaccccgagaaggccuggggcgcccgcgucgucgagccccccgagaaggacgaccagcucgucguccucuuccccguccagaagcccaagcuccucaccaccgaggagaagccccgcggccagggccgcggccccauccuccccggcaccaaggccuggauggagaccgaggacacccucggccacguccucucccccgagcccgaccacgacucccucuaccaccccccccccgaggaggaccagggcgaggagcgcccccgccucugggucaugcccaaccaccagguccuccucggccccgaggaggaccaggaccacaucuaccacccccaguga

SEQ ID NO: 3811 - RNA, 456 nt, Artificial Sequence
  derived and/or modified sequence opt3 from UPA__Homo_sapiens__CCDS7679.1
augagaaggcugcuccuugugaccagccuggucguuguguuguuaugggaggccggcgcuguacccgcaccuaaagugccaaucaaaaugcaggucaagcacuggccguccgaacaagaccccgagaaagccuggggagcgcgggugguugaaccuccagagaaggaugaccagcuggugguccuauuccccgugcagaaaccuaagcuccugacaacugaagagaagccacgcgggcagggucgaggccccauucuuccugggacgaaggcuuggauggagaccgaagauacacugggacauguauugucuccagagccggaccacgauucacucuaccaucccccuccagaagaggaccaaggcgaggaacgucccagacuguggguuaugccuaaccaccaggugcugcucgguccagaggaagaucaggaccauauauaucacccccaguga

SEQ ID NO: 3812 - RNA, 456 nt, Artificial Sequence
  derived and/or modified sequence opt4 from UPA__Homo_sapiens__CCDS7679.1
augagaagacugcugcuggugaccagccuggugguggugcugcugugggaggccggcgccgugcccgcccccaaggugcccaucaagaugcaggugaagcacuggcccagcgagcaggaccccgagaaggccuggggcgccagagugguggagccccccgagaaggacgaccagcugguggugcuguuccccgugcagaagcccaagcugcugaccaccgaggagaagcccagaggccagggcagaggccccauccugcccggcaccaaggccuggauggagaccgaggacacccugggccacgugcugagccccgagcccgaccacgacagccuguaccaccccccccccgaggaggaccagggcgaggagagacccagacugugggugaugcccaaccaccaggugcugcugggccccgaggaggaccaggaccacaucuaccacccccaguga

SEQ ID NO: 3813 - RNA, 456 nt, Artificial Sequence
  derived and/or modified sequence opt5 from UPA__Homo_sapiens__CCDS7679.1
augagacggcugcuccuggugaccagccuugucguugugcugcucugggaggccggcgcugugcccgccccuaaggucccgaucaaaaugcaagugaagcacuggcccuccgaacaggacccugagaaagcguggggagcucgcguuguggaacccccugagaaggaugaccagcuggucgugcuuuuccccguucagaaaccuaagcugcucacaacggaagagaagccgagagggcagggccgggggcccauucugccuggaaccaaagccuggauggagacagaagauacccugggccaugugcucucucccgagccugaccacgauagccuguaccaucccccgccugaagaggaccaaggggaggaacgccccagacuuugggucaugccuaaccaccaggugcugcucggacccgaggaagaucaggaccauaucuaucacccccaguga

SEQ ID NO: 3814 - protein, 174 aa, Artificial Sequence [sequence omitted]

SEQ ID NO: 3815 - RNA, 525 nt, Artificial Sequence
  VEGFR1__Homo_sapiens__ACF47598
auggucagcuacugggacaccgggguccugcugugcgcgcugcucagcugucugcuucucacaggaucuaguucagguucaaaauuaaaagauccugaacugaguuuaaaaggcacccagcacaucaugcaagcaggccagacacugcaucuccaaugcaggggggaagcagcccauaaauggucuuugccugaaauggugaguaaggaaagcgaaaggcugagcauaacuaaaucugccuguggaagaaauggcaaacaauucugcaguacuuuaaccuugaacacagcucaagcaaaccacacuggcuucuacagcugcaaauaucuagcuguaccuacuucaaagaagaaggaaacagaaucugcaaucuauauauuuauuagugauacagguagaccuuucguagagauguacagugaaauccccgaaauuauacacaugacugaaggaagggagcucgucauucccugccggguuacgucaccuaacaucacuguuacuuuaaaaaagaaaaaggcauaa

SEQ ID NO: 3816 - RNA, 525 nt, Artificial Sequence
  derived and/or modified sequence opt1 from VEGFR1__Homo_sapiens__ACF47598
auggugagcuacugggacaccggcguccugcucugcgcccugcuguccugccuccugcugaccgggagcuccagcggcuccaagcucaaggaccccgagcugagccugaaggggacgcagcacaucaugcaggccggccagacccuccaccuccagugccgcggggaggcggcccacaaguggucccugccggagauggugagcaaggaguccgagcggcugagcaucaccaaguccgccugcggccgcaacggcaagcaguucugcagcacccugacgcugaacaccgcccaggccaaccacaccggguucuacuccugcaaguaccucgcggugcccaccagcaagaagaaggagacggaguccgccaucuacaucuucaucagcgacaccggccggcccuucgucgagauguacuccgagauccccgagaucauccacaugaccgaggggcgcgagcuggugaucccgugccgggugaccagccccaacaucacggucacccugaagaagaagaaggccuga

SEQ ID NO: 3817 - RNA, 525 nt, Artificial Sequence
  derived and/or modified sequence opt2 from VEGFR1__Homo_sapiens__ACF47598
auggucuccuacugggacaccggcguccuccucugcgcccuccucuccugccuccuccucaccggcuccuccuccggcuccaagcucaaggaccccgagcucucccucaagggcacccagcacaucaugcaggccggccagacccuccaccuccagugccgcggcgaggccgcccacaaguggucccuccccgagauggucuccaaggaguccgagcgccucuccaucaccaaguccgccugcggccgcaacggcaagcaguucugcuccacccucacccucaacaccgcccaggccaaccacaccggcuucuacuccugcaaguaccucgccguccccaccuccaagaagaaggagaccgaguccgccaucuacaucuucaucuccgacaccggccgccccuucgucgagauguacuccgagauccccgagaucauccacaugaccgagggccgcgagcucgucauccccugccgcgucaccucccccaacaucaccgucacccucaagaagaagaaggccuga

SEQ ID NO: 3818 - RNA, 525 nt, Artificial Sequence
  derived and/or modified sequence opt3 from VEGFR1__Homo_sapiens__ACF47598
auggugagcuacugggacaccggcguccugcucugcgcccuucuguccuguuuguuacugacagggucuucaaguggaagcaagcuaaaagaucccgagcucucccugaaggguacucagcacaucaugcaagcuggccagacgcuucaucugcagugcagaggggaagcagcccacaaauggucuuugccugagaugguuucgaaggaaucagagaggcucagcauuaccaaaagugcguguggacggaacggcaagcaguucugcuccacacugacucugaauaccgcucaagccaaccauacagguuuuuauucuuguaaguaccucgcagugccaaccagcaaaaagaaagaaacugaguccgccauauauaucuucauuucagacacagggcgcccguuuguagagauguacagugaaauccccgagauuauccacaugaccgaaggacgagaguuagugauaccuugccgugucacgagcccaaauaucacugugacccugaagaaaaagaaggcuuga

SEQ ID NO: 3819 - RNA, 525 nt, Artificial Sequence
  derived and/or modified sequence opt4 from VEGFR1__Homo_sapiens__ACF47598
auggugagcuacugggacaccggcgugcugcugugcgcccugcugagcugccugcugcugaccggcagcagcagcggcagcaagcugaaggaccccgagcugagccugaagggcacccagcacaucaugcaggccggccagacccugcaccugcagugcagaggcgaggccgcccacaaguggagccugcccgagauggugagcaaggagagcgagagacugagcaucaccaagagcgccugcggcagaaacggcaagcaguucugcagcacccugacccugaacaccgcccaggccaaccacaccggcuucuacagcugcaaguaccuggccgugcccaccagcaagaagaaggagaccgagagcgccaucuacaucuucaucagcgacaccggcagacccuucguggagauguacagcgagauccccgagaucauccacaugaccgagggcagagagcuggugauccccugcagagugaccagccccaacaucaccgugacccugaagaagaagaaggccuga

SEQ ID NO: 3820 - RNA, 525 nt, Artificial Sequence
  derived and/or modified sequence opt5 from VEGFR1__Homo_sapiens__ACF47598
auggugagcuacugggacaccggcguccugcucugcgcccugcuuuccugucugcuccugacagggucuagcuccggaucuaaacuuaaggaucccgagcugagccucaagggcacgcagcacaucaugcaagcugggcagacccugcaucugcagugcagaggagaagccgcgcacaaauggucccucccugagaugguuucuaaggaaagcgagcggcuguccauuacaaaaagcgcuuguggccgcaacgggaagcaguucugcucuacccuuacacugaauaccgcccaagccaaccauacaggauuuuauuccuguaaguaccucgcugugccgaccagcaaaaagaaagaaacggagucugccaucuauauuuucaucuccgacaccggcagacccuuuguggagauguacagcgaaauuccugagaucauccacaugacagaaggccgggagcuggucauucccugccgcgugaccucuccuaauaucacaguuacccuuaagaaaaagaaggcuuga

SEQ ID NO: 3821 - protein, 249 aa, Artificial Sequence
  WT1__Homo_sapiens__A0A0H5AUY0
MGSDVRDLNALLPAVPSLGGGGGCALPVSGAAQWAPVLDFAPPGASAYGSLGGPAPPPAPPPPPPPPPHSFIKQEPSWGGAEPHEEQCLSAFTVHFSGQFTGTAGACRYGPFGPPPPSQASSGQARMFPNAPYLPSCLESQPAIRNQGYSTVTFDGTPSYGHTPSHHAAQFPNHSFKHEDPMGQQGSLGEQQYSVPPPVYGCHTPTDSCTGSQALLLRTPYSSDNLYQMTSQLECMTWNQMNLGATLKG

SEQ ID NO: 3822 - RNA, 750 nt, Artificial Sequence
  WT1__Homo_sapiens__BAR92607
augggcuccgacgugcgggaccugaacgcgcugcugcccgccguccccucccuggguggcggcggcggcugugcccugccugugagcggcgcggcgcagugggcgccggugcuggacuuugcgcccccgggcgcuucggcuuacgggucguugggcggccccgcgccgccaccggcuccgccgccacccccgccgccgccgccucacuccuucaucaaacaggagccgagcuggggcggcgcggagccgcacgaggagcagugccugagcgccuucacuguccacuuuuccggccaguucacuggcacagccggagccugucgcuacgggcccuucgguccuccuccgcccagccaggcgucauccggccaggccaggauguuuccuaacgcgcccuaccugcccagcugccucgagagccagcccgcuauucgcaaucaggguuacagcacggucaccuucgacgggacgcccagcuacggucacacgcccucgcaccaugcggcgcaguuccccaaccacucauucaagcaugaggaucccaugggccagcagggcucgcugggugagcagcaguacucggugccgcccccggucuauggcugccacacccccaccgacagcugcaccggcagccaggcuuugcugcugaggacgcccuacagcagugacaauuuauaccaaaugacaucccagcuugaaugcaugaccuggaaucagaugaacuuaggagccaccuuaaagggguaa

SEQ ID NO: 3823 - RNA, 750 nt, Artificial Sequence
  derived and/or modified sequence opt1 from WT1__Homo_sapiens__BAR92607
augggcagcgacgugcgcgaccugaacgcccuccugcccgccguccccucccucgggggcgggggcgggugcgcgcugcccgugagcggcgccgcccagugggcccccgugcuggacuucgcgccgcccggcgccuccgccuacgggagccugggcgggcccgcgcccccgcccgcgcccccgcccccgcccccgcccccgccccacuccuucaucaagcaggagcccagcuggggcggggccgagccccacgaggagcagugccucuccgccuucaccguccacuucagcggccaguucaccggcacggccggggccugccgguacggccccuucgggccgccgccgcccucccaggccagcuccggccaggcccgcauguuccccaacgcccccuaccugcccagcugccuggagucccagcccgccauccggaaccagggcuacagcaccgugaccuucgacgggacccccuccuacggccacacgcccagccaccacgccgcccaguuccccaaccacuccuucaagcacgaggaccccauggggcagcagggcagccucggggagcagcaguacuccgugcccccgcccgucuacggcugccacacccccaccgacagcugcaccggcagccaggcgcugcugcuccgcacgcccuacuccagcgacaaccuguaccagaugaccucccagcuggagugcaugaccuggaaccagaugaaccucggggccacccugaagggcuga

SEQ ID NO: 3824 - RNA, 750 nt, Artificial Sequence
  derived and/or modified sequence opt2 from WT1__Homo_sapiens__BAR92607
augggcuccgacguccgcgaccucaacgcccuccuccccgccguccccucccucggcggcggcggcggcugcgcccuccccgucuccggcgccgcccagugggcccccguccucgacuucgccccccccggcgccuccgccuacggcucccucggcggccccgcccccccccccgccccccccccccccccccccccccccccccacuccuucaucaagcaggagcccuccuggggcggcgccgagccccacgaggagcagugccucuccgccuucaccguccacuucuccggccaguucaccggcaccgccggcgccugccgcuacggccccuucggcccccccccccccucccaggccuccuccggccaggcccgcauguuccccaacgcccccuaccuccccuccugccucgagucccagcccgccauccgcaaccagggcuacuccaccgucaccuucgacggcacccccuccuacggccacacccccucccaccacgccgcccaguuccccaaccacuccuucaagcacgaggaccccaugggccagcagggcucccucggcgagcagcaguacuccguccccccccccgucuacggcugccacacccccaccgacuccugcaccggcucccaggcccuccuccuccgcacccccuacuccuccgacaaccucuaccagaugaccucccagcucgagugcaugaccuggaaccagaugaaccucggcgccacccucaagggcuga

SEQ ID NO: 3825 - RNA, 750 nt, Artificial Sequence
  derived and/or modified sequence opt3 from WT1__Homo_sapiens__BAR92607
augggcagcgacgugagagaucugaacgcccuccuucccgcugucccuucccugggaggggguggcgggugcgcauugccaguuucuggagccgcgcagugggcuccgguguuagacuucgcacccccuggcgccucagccuacgguagucuagggggaccagcucccccuccagcacccccuccaccgcccccuccacccccucacagcuuuaucaagcaagagccauccuggggcggcgccgaaccccaugaggaacagugucugucugcuuucaccguacacuuuucggggcaguucacaggaacugccggugcgugcagguauggcccguuugggccucccccaccuucacaggcaagcaguggacaagcccggauguuccccaaugcuccauaccuccccuccugucuggagucucagccugccauucgcaaccagggcuauagcacggugaccuuugaugguacaccauccuacgggcauacuccgucacaccaugcagcucaguuccccaaucacaguuuuaaacacgaagacccuaugggacaacagggcagccuuggcgagcagcaguauucugucccacccccuguguacgggugccauaccccaacagauuccuguaccggaucacaagcccuguugcuccgaacucccuauagcagugacaaccuguaccagaugacaucucagcuggagugcaugaccuggaaucaaaugaaccucggugcgacguuaaagggcuga

SEQ ID NO: 3826 - RNA, 750 nt, Artificial Sequence
  derived and/or modified sequence opt4 from WT1__Homo_sapiens__BAR92607
augggcagcgacgugagagaccugaacgcccugcugcccgccgugcccagccugggcggcggcggcggcugcgcccugcccgugagcggcgccgcccagugggcccccgugcuggacuucgccccccccggcgccagcgccuacggcagccugggcggccccgcccccccccccgccccccccccccccccccccccccccccccacagcuucaucaagcaggagcccagcuggggcggcgccgagccccacgaggagcagugccugagcgccuucaccgugcacuucagcggccaguucaccggcaccgccggcgccugcagauacggccccuucggcccccccccccccagccaggccagcagcggccaggccagaauguuccccaacgcccccuaccugcccagcugccuggagagccagcccgccaucagaaaccagggcuacagcaccgugaccuucgacggcacccccagcuacggccacacccccagccaccacgccgcccaguuccccaaccacagcuucaagcacgaggaccccaugggccagcagggcagccugggcgagcagcaguacagcgugcccccccccguguacggcugccacacccccaccgacagcugcaccggcagccaggcccugcugcugagaacccccuacagcagcgacaaccuguaccagaugaccagccagcuggagugcaugaccuggaaccagaugaaccugggcgccacccugaagggcuga

SEQ ID NO: 3827 - RNA, 750 nt, Artificial Sequence
  derived and/or modified sequence opt5 from WT1__Homo_sapiens__BAR92607
augggcagcgacgugagagaucugaacgcccuccugcccgcugucccuucccuugggggaggcgggggaugcgcccugccgguuucuggcgcggcucagugggcccccgugcucgacuucgccccucccggggcuagcgccuacggaucccugggcggcccugcucccccuccggcgcccccucccccucccccgccucccccucacucuuuuaucaagcaagagcccagcuggggaggggccgaaccccaugaggaacagugucuuuccgccuucaccgugcacuuuucuggccaguucacagggacggcuggagccugccgguauggcccuuuugggccgcccccucccagccaggcuuccagcggacaagcccgcauguucccuaaugcgcccuaccugccgucuugucucgagucccagccugccauuagaaaccagggcuauagcaccgucacauuugauggcacccccucuuacgggcauacaccuucccaccaugcugcccaguuccccaaucacagcuuuaaacacgaagacccuaugggacaacagggcucucugggggagcagcaguauuccgugcccccgccuguuuacggaugccauacccccacagauagcuguaccggcucccaagcucugcuccugcggacgcccuauucuagcgacaaccuuuaccagaugaccucccagcuggagugcaugacauggaaucaaaugaaccucggggccacccugaagggauga

SEQ ID NO: 3828 - protein, 449 aa, Artificial Sequence
  WT1__Homo_sapiens__P19544
MGSDVRDLNALLPAVPSLGGGGGCALPVSGAAQWAPVLDFAPPGASAYGSLGGPAPPPAPPPPPPPPPHSFIKQEPSWGGAEPHEEQCLSAFTVHFSGQFTGTAGACRYGPFGPPPPSQASSGQARMFPNAPYLPSCLESQPAIRNQGYSTVTFDGTPSYGHTPSHHAAQFPNHSFKHEDPMGQQGSLGEQQYSVPPPVYGCHTPTDSCTGSQALLLRTPYSSDNLYQMTSQLECMTWNQMNLGATLKGVAAGSSSSVKWTEGQSNHSTGYESDNHTTPILCGAQYRIHTHGVFRGIQDVRRVPGVAPTLVRSASETSEKRPFMCAYPGCNKRYFKLSHLQMHSRKHTGEKPYQCDFKDCERRFSRSDQLKRHQRRHTGVKPFQCKTCQRKFSRSDHLKTHTRTHTGKTSEKPFSCRWPSCQKKFARSDELVRHHNMHQRNMTKLQLAL

SEQ ID NO: 3829 - RNA, 1350 nt, Artificial Sequence
  WT1__Homo_sapiens__AAA61299
augggcuccgacgugcgggaccugaacgcgcugcugcccgccguccccucccuggguggcggcggcggcugugcccugccugugagcggcgcggcgcagugggcgccggugcuggacuuugcgcccccgggcgcuucggcuuacgggucguugggcggccccgcgccgccaccggcuccgccgccacccccgccgccgccgccucacuccuucaucaaacaggagccgagcuggggcggcgcggagccgcacgaggagcagugccugagcgccuucacuguccacuuuuccggccaguucacuggcacagccggagccugucgcuacgggcccuucgguccuccuccgcccagccaggcgucauccggccaggccaggauguuuccuaacgcgcccuaccugcccagcugccucgagagccagcccgcuauucgcaaucaggguuacagcacggucaccuucgacgggacgcccagcuacggucacacgcccucgcaccaugcggcgcaguuccccaaccacucauucaagcaugaggaucccaugggccagcagggcucgcugggugagcagcaguacucggugccgcccccggucuauggcugccacacccccaccgacagcugcaccggcagccaggcuuugcugcugaggacgcccuacagcagugacaauuuauaccaaaugacaucccagcuugaaugcaugaccuggaaucagaugaacuuaggagccaccuuaaagggaguugcugcugggagcuccagcucagugaaauggacagaagggcagagcaaccacagcacaggguacgagagcgauaaccacacaacgcccauccucugcggagcccaauacagaauacacacgcacggugucuucagaggcauucaggaugugcgacgugugccuggaguagccccgacucuuguacggucggcaucugagaccagugagaaacgccccuucaugugugcuuacccaggcugcaauaagagauauuuuaagcugucccacuuacagaugcacagcaggaagcacacuggugagaaaccauaccagugugacuucaaggacugugaacgaagguuuucucguucagaccagcucaaaagacaccaaaggagacauacaggugugaaaccauuccaguguaaaacuugucagcgaaaguucucccgguccgaccaccugaagacccacaccaggacucauacagguaaaacaagugaaaagcccuucagcugucgguggccaaguugucagaaaaaguuugcccggucagaugaauuaguccgccaucacaacaugcaucagagaaacaugaccaaacuccagcuggcgcuuuga

SEQ ID NO: 3830 - RNA, 1350 nt, Artificial Sequence
  derived and/or modified sequence opt1 from WT1__Homo_sapiens__AAA61299
augggcagcgacgugcgcgaccugaacgcccuccugcccgccgucccgucccucgggggcgggggcgggugcgcgcugcccgugagcggcgccgcccagugggcccccgugcuggacuucgcgccgcccggcgccuccgccuacgggagccugggcgggcccgcgcccccgcccgcgcccccgcccccgcccccgcccccgccccacuccuucaucaagcaggagcccagcuggggcggggccgagccccacgaggagcagugccucuccgccuucaccguccacuucagcggccaguucaccggcacggccggggccugccgguacggccccuucgggcccccgccgcccucccaggccagcuccggccaggcccgcauguuccccaacgcccccuaccugcccagcugccuggagucccagcccgccauccggaaccagggcuacagcaccgugaccuucgacgggacccccuccuacggccacacgcccagccaccacgccgcccaguuccccaaccacuccuucaagcacgaggaccccauggggcagcagggcagccucggggagcagcaguacuccgugccgccgcccgucuacggcugccacacccccaccgacagcugcaccggcagccaggcgcugcugcuccgcacgcccuacuccagcgacaaccuguaccagaugaccucccagcuggagugcaugaccuggaaccagaugaaccucggggccacccugaagggcguggccgccgggagcuccagcuccgugaaguggacggagggccagagcaaccacuccaccggguacgagagcgacaaccacaccacccccauccugugcggcgcccaguaccggauccacacgcacggcgucuuccgcgggauccaggacgugcggcgcgugcccggcgucgcgcccacccucgugcgguccgccagcgagaccuccgagaagcgccccuucaugugcgccuaccccgggugcaacaagcgguacuucaagcugagccaccuccagaugcacucccgcaagcacaccggcgagaagccguaccagugcgacuucaaggacugcgagcggcgcuucagccgguccgaccagcugaagcgccaccagcggcgccacacgggggugaagcccuuccagugcaagaccugccagcggaaguucagccgcuccgaccaccugaagacccacacccggacgcacaccggcaagaccagcgagaagcccuucagcugccgcuggcccuccugccagaagaaguucgcccgcagcgacgagcugguccggcaccacaacaugcaccagcgcaacaugaccaagcuccagcuggcccuguga

SEQ ID NO: 3831 - RNA, 1350 nt, Artificial Sequence
  derived and/or modified sequence opt2 from WT1__Homo_sapiens__AAA61299
augggcuccgacguccgcgaccucaacgcccuccuccccgccguccccucccucggcggcggcggcggcugcgcccuccccgucuccggcgccgcccagugggcccccguccucgacuucgccccccccggcgccuccgccuacggcucccucggcggccccgcccccccccccgccccccccccccccccccccccccccccccacuccuucaucaagcaggagcccuccuggggcggcgccgagccccacgaggagcagugccucuccgccuucaccguccacuucuccggccaguucaccggcaccgccggcgccugccgcuacggccccuucggcccccccccccccucccaggccuccuccggccaggcccgcauguuccccaacgcccccuaccuccccuccugccucgagucccagcccgccauccgcaaccagggcuacuccaccgucaccuucgacggcacccccuccuacggccacacccccucccaccacgccgcccaguuccccaaccacuccuucaagcacgaggaccccaugggccagcagggcucccucggcgagcagcaguacuccguccccccccccgucuacggcugccacacccccaccgacuccugcaccggcucccaggcccuccuccuccgcacccccuacuccuccgacaaccucuaccagaugaccucccagcucgagugcaugaccuggaaccagaugaaccucggcgccacccucaagggcgucgccgccggcuccuccuccuccgucaaguggaccgagggccaguccaaccacuccaccggcuacgaguccgacaaccacaccacccccauccucugcggcgcccaguaccgcauccacacccacggcgucuuccgcggcauccaggacguccgccgcguccccggcgucgcccccacccucguccgcuccgccuccgagaccuccgagaagcgccccuucaugugcgccuaccccggcugcaacaagcgcuacuucaagcucucccaccuccagaugcacucccgcaagcacaccggcgagaagcccuaccagugcgacuucaaggacugcgagcgccgcuucucccgcuccgaccagcucaagcgccaccagcgccgccacaccggcgucaagcccuuccagugcaagaccugccagcgcaaguucucccgcuccgaccaccucaagacccacacccgcacccacaccggcaagaccuccgagaagcccuucuccugccgcuggcccuccugccagaagaaguucgcccgcuccgacgagcucguccgccaccacaacaugcaccagcgcaacaugaccaagcuccagcucgcccucuga

SEQ ID NO: 3832 - RNA, 1350 nt, Artificial Sequence
  derived and/or modified sequence opt3 from WT1__Homo_sapiens__AAA61299
augggcagcgacgugagagaucugaacgcccuccuucccgcugucccuucccugggaggggguggcgggugcgcauugccaguuucuggagccgcgcagugggcuccgguguuagacuucgcacccccuggcgccucagccuacgguagucuagggggaccagcucccccuccagcacccccuccaccgcccccuccacccccucacagcuuuaucaagcaagagccauccuggggcggcgccgaaccccaugaggaacagugucugucugcuuucaccguacacuuuucggggcaguucacaggaacugccggugcgugcagguauggcccguuugggccucccccaccuucacaggcaagcaguggacaagcccggauguuccccaaugcuccauaccuccccuccugucuggagucucagccugccauucgcaaccagggcuauagcacggugaccuuugaugguacaccauccuacgggcauacuccgucacaccaugcagcucaguuccccaaucacaguuuuaaacacgaagacccuaugggacaacagggcagccuuggcgagcagcaguauucugucccacccccuguguacgggugccauaccccaacagauuccuguaccggaucacaagcccuguugcuccgaacucccuauagcagugacaaccuguaccagaugacaucucagcuggagugcaugaccuggaaucaaaugaaccucggugcgacguuaaagggcguugccgcaggguccagcucgucugugaaauggacugaaggacaguccaaucacucaaccggcuacgagagugauaaccauacaacuccgauacuguguggugcucaguaucguauccacacccacggggucuucagaggcauucaggacgugaggcggguaccuggaguugccccaacacuugugcgcagcgcuuccgaaaccucugagaagagacccuuuaugugcgccuacccuggcuguaauaaaagguauuucaaguugagccaucugcaaaugcacucacggaagcauacgggggagaaacccuaccagugcgauuuuaaggacugugaacgccgauucaguagauccgaucagcuaaaaaggcaccagcggcgucauacuggagucaagccauuccaaugcaaaacaugccagcgcaaguuuagcagaucugaccaccucaagacccacacuaggacacauaccgguaaaacgucagagaagccuuucaguugucgguggcccagcugccagaaaaaguuugcacgauccgaugaacuggugcgccaccauaacaugcaccagagaaauaugaccaaacuucaacuggccuuguga

SEQ ID NO: 3833 - RNA, 1350 nt, Artificial Sequence
  derived and/or modified sequence opt4 from WT1__Homo_sapiens__AAA61299
augggcagcgacgugagagaccugaacgcccugcugcccgccgugcccagccugggcggcggcggcggcugcgcccugcccgugagcggcgccgcccagugggcccccgugcuggacuucgccccccccggcgccagcgccuacggcagccugggcggccccgcccccccccccgccccccccccccccccccccccccccccccacagcuucaucaagcaggagcccagcuggggcggcgccgagccccacgaggagcagugccugagcgccuucaccgugcacuucagcggccaguucaccggcaccgccggcgccugcagauacggccccuucggcccccccccccccagccaggccagcagcggccaggccagaauguuccccaacgcccccuaccugcccagcugccuggagagccagcccgccaucagaaaccagggcuacagcaccgugaccuucgacggcacccccagcuacggccacacccccagccaccacgccgcccaguuccccaaccacagcuucaagcacgaggaccccaugggccagcagggcagccugggcgagcagcaguacagcgugcccccccccguguacggcugccacacccccaccgacagcugcaccggcagccaggcccugcugcugagaacccccuacagcagcgacaaccuguaccagaugaccagccagcuggagugcaugaccuggaaccagaugaaccugggcgccacccugaagggcguggccgccggcagcagcagcagcgugaaguggaccgagggccagagcaaccacagcaccggcuacgagagcgacaaccacaccacccccauccugugcggcgcccaguacagaauccacacccacggcguguucagaggcauccaggacgugagaagagugcccggcguggcccccacccuggugagaagcgccagcgagaccagcgagaagagacccuucaugugcgccuaccccggcugcaacaagagauacuucaagcugagccaccugcagaugcacagcagaaagcacaccggcgagaagcccuaccagugcgacuucaaggacugcgagagaagauucagcagaagcgaccagcugaagagacaccagagaagacacaccggcgugaagcccuuccagugcaagaccugccagagaaaguucagcagaagcgaccaccugaagacccacaccagaacccacaccggcaagaccagcgagaagcccuucagcugcagauggcccagcugccagaagaaguucgccagaagcgacgagcuggugagacaccacaacaugcaccagagaaacaugaccaagcugcagcuggcccuguga

SEQ ID NO: 3834 - RNA, 1350 nt, Artificial Sequence
  derived and/or modified sequence opt5 from WT1__Homo_sapiens__AAA61299
augggcagcgacgugagagaucugaacgcccuccugcccgcugucccuucccuugggggaggcgggggaugcgcccugccgguuucuggcgcggcucagugggcccccgugcucgacuucgccccucccggggcuagcgccuacggaucccugggcggcccugcucccccuccggcgcccccucccccucccccgccucccccucacucuuuuaucaagcaagagcccagcuggggaggggccgaaccccaugaggaacagugucuuuccgccuucaccgugcacuuuucuggccaguucacagggacggcuggagccugccgguauggcccuuuugggccgcccccucccagccaggcuuccagcggacaagcccgcauguucccuaaugcgcccuaccugccgucuugucucgagucccagccugccauuagaaaccagggcuauagcaccgucacauuugauggcacccccucuuacgggcauacaccuucccaccaugcugcccaguuccccaaucacagcuuuaaacacgaagacccuaugggacaacagggcucucugggggagcagcaguauuccgugcccccgccuguuuacggaugccauacccccacagauagcuguaccggcucccaagcucugcuccugcggacgcccuauucuagcgacaaccuuuaccagaugaccucccagcuggagugcaugacauggaaucaaaugaaccucggggccacccugaagggaguggccgcuggcucuagcuccagcgucaaauggacagaaggccagucuaaucacagcaccggguacgaguccgauaaccauacgacaccuauccuuuguggagcgcaguaucgcauucacacccacggcguguucagagggauccaggacguucggcgcgugccgggagucgcccccacacuggugagaucugcuagcgaaaccuccgagaagcggccuuuuaugugcgccuaccccggcuguaauaaacgcuauuucaagcucagccaucugcaaaugcacucuagaaagcauaccggggagaaaccuuaccagugcgauuuuaaggacugugaacggcgcuucuccagaagcgaucagcugaaacggcaccagcgcagacauacaggcgugaagcccuuccaaugcaaaacgugccagcggaaguuuucuagauccgaccaccucaagacccacacacgcacccauacaggaaaaaccagcgagaagccuuucuccugucgguggcccucuugccagaaaaaguuugccagaagcgaugaacugguccgccaccauaacaugcaccagcggaauaugacgaaacuucaacuggcucucuga

SEQ ID NO: 3835 - protein, 92 aa, Artificial Sequence
  WT1__Homo_sapiens__Q06250
MQRRGQPLENHVALIHWQSAGIPASKVHNYCNMKKSRLGRSRAVRISQPLLSPRRCPLHLTERGAGLLQPQPQGPVRTPGPPSGSHPAAADN

SEQ ID NO: 3836 - RNA, 279 nt, Artificial Sequence
  WT1__Homo_sapiens__AAA63269
augcagaggcgaggacagccccuggaaaaccauguggcguugauacacuggcaaagcgcaggcaucccggccucgaaggugcauaauuauugcaauaugaaaaaaucgaggcuggguaggagcagggcagugaggauuucucaacccuuacuuucaccccggcgcuguccacugcaucugacagagcgcggagcugggcugcuacagccgcaaccccagggaccagugcgcacgccugggccgcccuccgggagucacccagcggccgcggacaacuga

SEQ ID NO: 3837 - RNA, 279 nt, Artificial Sequence
  derived and/or modified sequence opt1 from WT1__Homo_sapiens__AAA63269
augcagcgccggggccagccccuggagaaccacguggcccucauccacuggcagagcgccgggaucccggcguccaagguccacaacuacugcaacaugaagaagucccgccugggccggucccgcgccgugcggaucagccagccccugcucagcccccgccggugcccccugcaccugaccgagcgcggggccggccuccugcagccgcagccccaggggcccgugcggacccccggcccgcccagcggcucccaccccgccgccgcggacaacuga

SEQ ID NO: 3838 - RNA, 279 nt, Artificial Sequence
  derived and/or modified sequence opt2 from WT1__Homo_sapiens__AAA63269
augcagcgccgcggccagccccucgagaaccacgucgcccucauccacuggcaguccgccggcauccccgccuccaagguccacaacuacugcaacaugaagaagucccgccucggccgcucccgcgccguccgcaucucccagccccuccucuccccccgccgcugcccccuccaccucaccgagcgcggcgccggccuccuccagccccagccccagggccccguccgcacccccggcccccccuccggcucccaccccgccgccgccgacaacuga

SEQ ID NO: 3839 - RNA, 279 nt, Artificial Sequence
  derived and/or modified sequence opt3 from WT1__Homo_sapiens__AAA63269
augcagagaaggggccaaccccuggagaaccacguggcccucauccauuggcagagcgcugggauuccugcauccaagguccacaauuacugcaacaugaaaaagucucggcuuggacgcucacgagccguucguauaagucagccacuguugagcccgagaaggugucccuuacaucugaccgaacggggugcgggccuacuccagccucaaccacaggggcccgugcgcacaccuggaccacccuccggcucucacccugcugccgcagacaauuga

SEQ ID NO: 3840 - RNA, 279 nt, Artificial Sequence
  derived and/or modified sequence opt4 from WT1__Homo_sapiens__AAA63269
augcagagaagaggccagccccuggagaaccacguggcccugauccacuggcagagcgccggcauccccgccagcaaggugcacaacuacugcaacaugaagaagagcagacugggcagaagcagagccgugagaaucagccagccccugcugagccccagaagaugcccccugcaccugaccgagagaggcgccggccugcugcagccccagccccagggccccgugagaacccccggcccccccagcggcagccaccccgccgccgccgacaacuga

SEQ ID NO: 3841 - RNA, 279 nt, Artificial Sequence
  derived and/or modified sequence opt5 from WT1__Homo_sapiens__AAA63269
augcagagacggggccaaccccuggagaaccacguggcccucauccauuggcagagcgcugggauuccugccuccaagguccacaauuacugcaacaugaaaaagucucgccugggaagaagccgggcgguucgcaucucccagccgcuucugucucccagacgguguccucuccaucugaccgaacgcggcgcugggcuucugcagccccaaccucagggacccgugagaacaccuggcccgcccagcgggucccacccugccgccgcugacaauuga

SEQ ID NO: 3842 - protein, 81 aa, Artificial Sequence
  XAGE1__Homo_sapiens__Q9HD64
MESPKKKNQQLKVGILHLGSRQKKIRIQLRSQCATWKVICKSCISQTPGINLDLGSGVKVKIIPKEEHCKMPEAGEEQPQV

SEQ ID NO: 3843 - RNA, 246 nt, Artificial Sequence
  XAGE1__Homo_sapiens__AAP35763
auggagagccccaaaaagaagaaccagcagcugaaagucgggauccuacaccugggcagcagacagaagaagaucaggauacagcugagaucccagugcgcgacauggaaggugaucugcaagagcugcaucagucaaacaccggggauaaaucuggauuuggguuccggcgucaaggugaagauaauaccuaaagaggaacacuguaaaaugccagaagcaggugaagagcaaccacaaguuuag

SEQ ID NO: 3844 - RNA, 246 nt, Artificial Sequence
  derived and/or modified sequence opt1 from XAGE1__Homo_sapiens__AAP35763
auggagagccccaagaagaagaaccagcagcugaaggugggcauccuccaccuggggucccgccagaagaagauccggauccagcugcgcagccagugcgccaccuggaaggucaucugcaaguccugcaucagccagaccccgggcaucaaccucgaccugggguccggcgugaaggugaagaucauccccaaggaggagcacugcaagaugcccgaggccggggaggagcagccccaggucuga

SEQ ID NO: 3845 - RNA, 246 nt, Artificial Sequence
  derived and/or modified sequence opt2 from XAGE1__Homo_sapiens__AAP35763
auggagucccccaagaagaagaaccagcagcucaaggucggcauccuccaccucggcucccgccagaagaagauccgcauccagcuccgcucccagugcgccaccuggaaggucaucugcaaguccugcaucucccagacccccggcaucaaccucgaccucggcuccggcgucaaggucaagaucauccccaaggaggagcacugcaagaugcccgaggccggcgaggagcagccccaggucuga

SEQ ID NO: 3846 - RNA, 246 nt, Artificial Sequence
  derived and/or modified sequence opt3 from XAGE1__Homo_sapiens__AAP35763
auggagagccccaagaaaaagaaccagcaacugaaagugggcauccuccaccuuggguccagacagaagaaaauuaggauacagcugcggucucagugcgccaccuggaaggucaucuguaagucaugcauuagucaaacaccuggaaucaauuuggacuuagguagcggcguuaaagugaagauuaucccaaaagaggaacauuguaagaugccggaagcuggggaggaacagccccagguauga

SEQ ID NO: 3847 - RNA, 246 nt, Artificial Sequence
  derived and/or modified sequence opt4 from XAGE1__Homo_sapiens__AAP35763
auggagagccccaagaagaagaaccagcagcugaaggugggcauccugcaccugggcagcagacagaagaagaucagaauccagcugagaagccagugcgccaccuggaaggugaucugcaagagcugcaucagccagacccccggcaucaaccuggaccugggcagcggcgugaaggugaagaucauccccaaggaggagcacugcaagaugcccgaggccggcgaggagcagccccagguguga

SEQ ID NO: 3848 - RNA, 246 nt, Artificial Sequence
  derived and/or modified sequence opt5 from XAGE1__Homo_sapiens__AAP35763
auggagagccccaagaaaaagaaccagcaacugaaagugggcauccuccaccugggguccagacagaagaaaauucggauccagcuucgcucucagugcgccaccuggaaggucauuuguaagagcugcaucucccaaacaccuggaauuaaucuggaccucggcucugggguuaaagugaagaucaucccgaaagaggaacauuguaagaugcccgaagcuggagaggaacagccucagguguga

SEQ ID NO: 3849 - protein, 254 aa, Artificial Sequence
  4-1BBL__Homo_sapiens__P41273
MEYASDASLDPEAPWPPAPRARACRVLPWALVAGLLLLLLLAAACAVFLACPWAVSGARASPGSAASPRLREGPELSPDDPAGLLDLRQGMFAQLVAQNVLLIDGPLSWYSDPGLAGVSLTGGLSYKEDTKELVVAKAGVYYVFFQLELRRVVAGEGSGSVSLALHLQPLRSAAGAAALALTVDLPPASSEARNSAFGFQGRLLHLSAGQRLGVHLHTEARARHAWQLTQGATVLGLFRVTPEIPAGLPSPRSE

SEQ ID NO: 3850 - RNA, 765 nt, Artificial Sequence
  4-1BBL__Homo_sapiens__AAA53134
auggaauacgccucugacgcuucacuggaccccgaagccccguggccucccgcgccccgcgcucgcgccugccgcguacugccuugggcccuggucgcggggcugcugcugcugcugcugcucgcugccgccugcgccgucuuccucgccugccccugggccguguccggggcucgcgccucgcccggcuccgcggccagcccgagacuccgcgagggucccgagcuuucgcccgacgaucccgccggccucuuggaccugcggcagggcauguuugcgcagcugguggcccaaaauguucugcugaucgaugggccccugagcugguacagugacccaggccuggcaggcgugucccugacggggggccugagcuacaaagaggacacgaaggagcuggugguggccaaggcuggagucuacuaugucuucuuucaacuagagcugcggcgcgugguggccggcgagggcucaggcuccguuucacuugcgcugcaccugcagccacugcgcucugcugcuggggccgccgcccuggcuuugaccguggaccugccacccgccuccuccgaggcucggaacucggccuucgguuuccagggccgcuugcugcaccugagugccggccagcgccugggcguccaucuucacacugaggccagggcacgccaugccuggcagcuuacccagggcgccacagucuugggacucuuccgggugacccccgaaaucccagccggacucccuucaccgaggucggaauaa

SEQ ID NO: 3851 - RNA, 765 nt, Artificial Sequence
  derived and/or modified sequence opt1 from 4-1BBL__Homo_sapiens__AAA53134
auggaguacgccagcgacgccucccuggaccccgaggcgccguggccgcccgcgccccgcgcccgggccugccgcgugcuccccugggcccuggucgccggccugcuccugcugcuccugcuggccgccgccugcgcgguguuccucgccugccccugggccgugagcggggcccgggccucccccggcagcgcggccagcccccgccugcgggaggggccggagcugucccccgacgaccccgccggccuccuggaccugcgccaggggauguucgcccagcucgucgcccagaacgugcugcugaucgacggcccccucuccugguacagcgacccgggccuggcgggggugucccugaccggcgggcucagcuacaaggaggacaccaaggagcuggucguggccaaggccggcguguacuacgucuucuuccagcuggagcuccggcgcgugguggccggggagggcuccggcagcgucucccuggcccugcaccuccagccccugcggagcgcggccggggccgccgcccuggcgcucacgguggaccugccgcccgccuccagcgaggcccgcaacuccgccuucggcuuccaggggcggcugcuccaccugagcgcgggccagcgccugggcgugcaccuccacaccgaggcccgggcccgccacgccuggcagcugacccagggggccaccguccugggccucuuccgggugacgcccgagauccccgcggggcugcccagcccccgcuccgaguga

SEQ ID NO: 3852 - RNA, 765 nt, Artificial Sequence
  derived and/or modified sequence opt2 from 4-1BBL__Homo_sapiens__AAA53134
auggaguacgccuccgacgccucccucgaccccgaggcccccuggccccccgccccccgcgcccgcgccugccgcguccuccccugggcccucgucgccggccuccuccuccuccuccuccucgccgccgccugcgccgucuuccucgccugccccugggccgucuccggcgcccgcgccucccccggcuccgccgccuccccccgccuccgcgagggccccgagcucucccccgacgaccccgccggccuccucgaccuccgccagggcauguucgcccagcucgucgcccagaacguccuccucaucgacggcccccucuccugguacuccgaccccggccucgccggcgucucccucaccggcggccucuccuacaaggaggacaccaaggagcucgucgucgccaaggccggcgucuacuacgucuucuuccagcucgagcuccgccgcgucgucgccggcgagggcuccggcuccgucucccucgcccuccaccuccagccccuccgcuccgccgccggcgccgccgcccucgcccucaccgucgaccucccccccgccuccuccgaggcccgcaacuccgccuucggcuuccagggccgccuccuccaccucuccgccggccagcgccucggcguccaccuccacaccgaggcccgcgcccgccacgccuggcagcucacccagggcgccaccguccucggccucuuccgcgucacccccgagauccccgccggccuccccuccccccgcuccgaguga

SEQ ID NO: 3853 - RNA, 765 nt, Artificial Sequence
  derived and/or modified sequence opt3 from 4-1BBL__Homo_sapiens__AAA53134
auggaguacgccagcgacgcuucccuggaucccgaagcaccuuggccaccggcccccagagcgagggcuugccgggugcucccuugggcccuugucgcaggccuguuguuacugcuacuccuggccgcugcaugugccguuuuccuugcuugcccaugggccgugucuggggcgcgcgcaucacccggaagugccgcuagcccucgacugcgugaggguccagaauugucccccgacgauccugccggccuccuggaccugagacaggggauguuugcacaacucguagcucagaacguguuacugaucgauggaccacuuucuugguauucggacccgggcuuggccggugucucacugaccgggggacuaagcuacaaggaggauacaaaagaacucgugguugcgaaggccggcguguauuacgucuucuuucagcuggagcuuaggcgggugguagcaggcgaggggaguggauccguuucucuggcuuugcaccuccagccccugcgcagcgccgcuggugccgcagccuuagcucugacuguggaccucccuccagcguccucagaagcaagaaauagugccuucggcuuucaagggaggcuucugcauuugagcgcuggacagcggcuaggcguccaucugcacacggaggcccgcgcacgacacgccuggcagcucacccagggugcuacagugcuggggcuuuucagagugacucccgaaauuccugccggacugccaucucccagguccgaguga

SEQ ID NO: 3854 - RNA, 765 nt, Artificial Sequence
  derived and/or modified sequence opt4 from 4-1BBL__Homo_sapiens__AAA53134
auggaguacgccagcgacgccagccuggaccccgaggcccccuggccccccgcccccagagccagagccugcagagugcugcccugggcccugguggccggccugcugcugcugcugcugcuggccgccgccugcgccguguuccuggccugccccugggccgugagcggcgccagagccagccccggcagcgccgccagccccagacugagagagggccccgagcugagccccgacgaccccgccggccugcuggaccugagacagggcauguucgcccagcugguggcccagaacgugcugcugaucgacggcccccugagcugguacagcgaccccggccuggccggcgugagccugaccggcggccugagcuacaaggaggacaccaaggagcuggugguggccaaggccggcguguacuacguguucuuccagcuggagcugagaagagugguggccggcgagggcagcggcagcgugagccuggcccugcaccugcagccccugagaagcgccgccggcgccgccgcccuggcccugaccguggaccugccccccgccagcagcgaggccagaaacagcgccuucggcuuccagggcagacugcugcaccugagcgccggccagagacugggcgugcaccugcacaccgaggccagagccagacacgccuggcagcugacccagggcgccaccgugcugggccuguucagagugacccccgagauccccgccggccugcccagccccagaagcgaguga

SEQ ID NO: 3855 - RNA, 765 nt, Artificial Sequence
  derived and/or modified sequence opt5 from 4-1BBL__Homo_sapiens__AAA53134
auggaguacgccagcgacgcuucccuggaucccgaagccccuuggccgcccgcgccuagagcucgggccugccgcgugcuccccugggcccuggucgcuggccuucugcuccugcuucugcucgccgcugccugugcgguuuuccuggccugcccuugggcugugucuggggccagagcuagccccggauccgccgcgucuccucggcugcgcgagggcccggaacucagccccgacgauccugccgggcugcuugaccugagacagggaauguuugcucaacucguggcccagaacguccugcuuaucgauggcccccuguccugguauucugacccugggcucgcuggagugagccugaccggcggccuguccuacaaggaggauacaaaagaacucguuguggccaaggccggggucuauuacguguucuuucagcuggagcuucggcgcguuguggcuggagagggcagcgggucugucucccuggcgcuccaucugcagccccuuagaagcgccgcuggagccgccgcucuggcccucacgguggaccugccgccugcgucuuccgaagcucggaauagcgccuucggcuuucaagggcgccugcuccaccugucugccggacagagacuuggcgugcaucugcacaccgaggcucgggcccgccacgcuuggcagcucacacagggcgccaccguccuggggcuuuucagaguuacacccgaaauuccugcgggacugcccagcccccgguccgaguga

SEQ ID NO: 3856 - RNA, 765 nt, Artificial Sequence
  derived and/or modified sequence opt6 from 4-1BBL__Homo_sapiens__AAA53134
auggaauacgcaucagaugcaucacuagauccagaagcaccauggccuccagcuccaagagcaagagccuguagaguacuaccaugggcauuaguugcaggauuauuacuauuauuauuacuagcagcagcaugcgcaguauuucuagcauguccaugggcuguuucuggagcuagagcaagcccgggcucagcagcaagcccuagauuaagagaaggaccagaauuaagcccagaugauccagcaggauuacuugauuuaagacaagguauguuugcacaacuaguagcucaaaauguauuacuaauagauggaccacuaaguugguauucagauccaggauuagcaggaguaagucuaacagguggauuaaguuauaaagaagacacaaaagaacuaguagucgcaaaagcgggaguauacuauguauuuuuccaauuagaguuaagaagaguuguagcgggcgaaggaucaggaucaguaucauuagcuuuacaucuacaaccacuaagaucagccgcuggcgcagcugcauuagcacucacaguagaucuuccaccagcaaguucagaagcaagaaauagugcauucggauuccaaggaagauuauuacaucuuagcgcgggacaacgauuagguguacacuuacacacagaagcacgagcaagacaugcauggcaauuaacacaaggagcaacaguauuaggacuauuuagaguaaccccagaaauaccagcaggauuacccucaccaagaucagaauaa

SEQ ID NO: 3857 - protein, 250 aa, Artificial Sequence [sequence omitted]

SEQ ID NO: 3858 - RNA, 753 nt, Artificial Sequence
  APRIL__Homo_sapiens__AAC61312
augccagccucaucuccuuucuugcuagcccccaaagggccuccaggcaacauggggggcccagucagagagccggcacucucaguugcccucugguugaguuggggggcagcucugggggccguggcuugugccauggcucugcugacccaacaaacagagcugcagagccucaggagagaggugagccggcugcaggggacaggaggccccucccagaauggggaaggguaucccuggcagagucucccggagcagaguuccgaugcccuggaagccugggagaauggggagagaucccggaaaaggagagcagugcucacccaaaaacagaagaagcagcacucuguccugcaccugguucccauuaacgccaccuccaaggaugacuccgaugugacagaggugauguggcaaccagcucuuaggcgugggagaggccuacaggcccaaggauaugguguccgaauccaggaugcuggaguuuaucugcuguauagccagguccuguuucaagacgugacuuucaccaugggucagguggugucucgagaaggccaaggaaggcaggagacucuauuccgauguauaagaaguaugcccucccacccggaccgggccuacaacagcugcuauagcgcaggugucuuccauuuacaccaaggggauauucugagugucauaauuccccgggcaagggcgaaacuuaaccucucuccacauggaaccuuccugggguuugugaaacuguga

SEQ ID NO: 3859 - RNA, 753 nt, Artificial Sequence
  derived and/or modified sequence opt1 from APRIL__Homo_sapiens__AAC61312
augcccgccagcuccccguuccugcucgcccccaagggcccgcccgggaacaugggcgggcccgugcgcgagcccgcgcugagcgucgcccuguggcucuccuggggcgccgcccugggggccguggcgugcgccauggcccugcucacccagcagaccgagcugcagagccugcggcgcgaggugucccggcuccagggcacgggcgggcccagccagaacggcgagggguaccccuggcagucccugccggagcagagcuccgacgcccuggaggcgugggagaacggcgagcgcagccggaagcgccgggccguccucacccagaagcagaagaagcagcacuccgugcugcaccuggugcccaucaacgccaccagcaaggacgacuccgacgucaccgaggugauguggcagcccgcccuccgccgggggcgcggccugcaggcccagggcuacggggugcggauccaggacgcgggcgucuaccugcucuacagccaggugcuguuccaggacgugacguucaccauggggcaggucgugucccgcgagggccagggccggcaggagacccuguuccgcugcauccggagcaugcccucccacccggaccgcgccuacaacagcugcuacuccgccgggguguuccaccuccaccagggcgacauccugagcgucaucaucccccgggcccgcgccaagcugaaccucagcccccacgggaccuuccugggcuucgugaagcuguga

SEQ ID NO: 3860 - RNA, 753 nt, Artificial Sequence
  derived and/or modified sequence opt2 from APRIL__Homo_sapiens__AAC61312
augcccgccuccucccccuuccuccucgcccccaagggcccccccggcaacaugggcggccccguccgcgagcccgcccucuccgucgcccucuggcucuccuggggcgccgcccucggcgccgucgccugcgccauggcccuccucacccagcagaccgagcuccagucccuccgccgcgaggucucccgccuccagggcaccggcggccccucccagaacggcgagggcuaccccuggcagucccuccccgagcaguccuccgacgcccucgaggccugggagaacggcgagcgcucccgcaagcgccgcgccguccucacccagaagcagaagaagcagcacuccguccuccaccucguccccaucaacgccaccuccaaggacgacuccgacgucaccgaggucauguggcagcccgcccuccgccgcggccgcggccuccaggcccagggcuacggcguccgcauccaggacgccggcgucuaccuccucuacucccagguccucuuccaggacgucaccuucaccaugggccaggucgucucccgcgagggccagggccgccaggagacccucuuccgcugcauccgcuccaugcccucccaccccgaccgcgccuacaacuccugcuacuccgccggcgucuuccaccuccaccagggcgacauccucuccgucaucaucccccgcgcccgcgccaagcucaaccucuccccccacggcaccuuccucggcuucgucaagcucuga

SEQ ID NO: 3861 - RNA, 753 nt, Artificial Sequence
  derived and/or modified sequence opt3 from APRIL__Homo_sapiens__AAC61312
augcccgccagcuccccuuuccugcucgcuccaaagggcccgcccgggaacaugggagguccugugagagagccagcacuuucugucgcccugugguugucauggggcgcggcuuuaggggccguugcaugcgccauggcucugcuaacccagcaaacagaacuccagagucugaggcgggaggugagccgccuucagggaacuggcggucccucccagaauggggaaggauacccuuggcaaucucugccagagcagucgucagacgcauuggaagccugggagaacggcgagcgaagccguaaaagaagggcuguacucacgcagaagcagaaaaagcaacacagugugcugcaucugguccccaucaaugccaccuccaaagaugacucugaugugacagaaguuauguggcagccugcgcuccggcgcggcagaggguuacaggcacagggauauggugugaggauucaagacgccggcgucuaccugcuuuauagccagguguuguuucaggauguaacuuucaccauggggcaaguugugucccgggagggacagggccgccaggaaacacuguuucgauguauaagaucaaugccaagucacccggacagggcuuacaacagcugcuauucugccggugucuuccaucuacaccagggggauauccucuccgugauuaucccccgggcacgugcuaagcugaaucuuucaccucauggaaccuuucugggcuucgugaaguuguga

SEQ ID NO: 3862 - RNA, 753 nt, Artificial Sequence
  derived and/or modified sequence opt4 from APRIL__Homo_sapiens__AAC61312
augcccgccagcagccccuuccugcuggcccccaagggcccccccggcaacaugggcggccccgugagagagcccgcccugagcguggcccuguggcugagcuggggcgccgcccugggcgccguggccugcgccauggcccugcugacccagcagaccgagcugcagagccugagaagagaggugagcagacugcagggcaccggcggccccagccagaacggcgagggcuaccccuggcagagccugcccgagcagagcagcgacgcccuggaggccugggagaacggcgagagaagcagaaagagaagagccgugcugacccagaagcagaagaagcagcacagcgugcugcaccuggugcccaucaacgccaccagcaaggacgacagcgacgugaccgaggugauguggcagcccgcccugagaagaggcagaggccugcaggcccagggcuacggcgugagaauccaggacgccggcguguaccugcuguacagccaggugcuguuccaggacgugaccuucaccaugggccagguggugagcagagagggccagggcagacaggagacccuguucagaugcaucagaagcaugcccagccaccccgacagagccuacaacagcugcuacagcgccggcguguuccaccugcaccagggcgacauccugagcgugaucauccccagagccagagccaagcugaaccugagcccccacggcaccuuccugggcuucgugaagcuguga

SEQ ID NO: 3863 - RNA, 753 nt, Artificial Sequence
  derived and/or modified sequence opt5 from APRIL__Homo_sapiens__AAC61312
augcccgccagcuccccuuuccugcucgcuccgaaggggcccccugggaacaugggaggccccgugagagagccugcccugucugucgcgcuuuggcugagcuggggcgcugcccucggagccguugcuugcgccauggcucugcuuacccagcaaacagaacugcagucccuccggcgcgaggugucuagacugcagggcaccgggggacccagccagaauggcgaaggcuacccuuggcaaucccugccggagcagucuagcgacgcccucgaagcgugggagaacggggagcggucccgcaaaagacgggccgugcugacgcagaagcagaaaaagcaacacagcguccuucaucuggugcccaucaaugcuacaucuaaagaugacuccgauguuaccgaagugauguggcagccugcccuccgcagaggacggggccugcaggcucagggguauggaguccgcauucaagacgccggcguguaccuucuguauagccagguucucuuucaggaugugacauucaccauggggcaagucgugucuagagagggacagggccggcaggaaacacuguuucgcuguaucagauccaugcccagccacccugaccgggcguacaacucuugcuauuccgccggcguguuccaucugcaccagggggauauucucagcgucaucauuccccgcgcuagagccaagcugaaucuuuccccgcauggaaccuuucugggcuucguuaagcucuga

SEQ ID NO: 3864 - RNA, 753 nt, Artificial Sequence
  derived and/or modified sequence opt6 from APRIL__Homo_sapiens__AAC61312
augccagcaucaagcccauuuuuauuagcaccaaaaggaccaccaggaaauaugggaggaccaguaagagaaccagcauuaucaguagcauuaugguuaucguggggagcagcauuaggagcaguagcaugcgcaauggcauuauuaacacaacaaacagaauuacaaagcuuaagaagagaaguaucaagauuacaaggaaccggaggaccaagccaaaacggagaaggguaccccuggcaaucauuaccagaacaaucaucagaugcauuagaagcaugggaaaauggagaaagaucaagaaaaagaagagcaguauuaacacaaaaacaaaaaaaacaacauaguguauuacaucucguaccaauaaaugcaacaucaaaagaugauucagacguaacagaaguaauguggcaaccagcacuaagaagaggaagaggauuacaagcacaaggguacggaguaagaauacaagaugcaggaguauauuuauuauauucacaaguacuauuucaagauguaacuuucacaaugggacaaguaguaucaagagaaggacaaggacgacaagaaacauuauuuagaugcauaagaucaaugccaucacacccagacagagcauacaauucauguuauucagcaggaguauuucacuuacaccaaggagauauauuaaguguaauaauaccaagagcaagagcaaaauuaaaucuaucaccacacggaacauucuuaggauuuguaaaauuauaa

SEQ ID NO: 3865 - protein, 184 aa, Artificial Sequence
  BAFF__Homo_sapiens__Q5H8V1
MRRGPRSLRGRDAPAPTPCVPAECFDLLVRHCVACGLLRTPRPKPAGASSPAPRTALQPQESVGAGAGEAALPLPGLLFGAPALLGLALVLALVLVGLVSWRRRQRRLRGASSAEAPDGDKDAPEPLDKVIILSPGISDATAPAWPPPGEDPGTTPPGHSVPVPATELGSTELVTTKTAGPEQQ

SEQ ID NO: 3866 - RNA, 555 nt, Artificial Sequence
  BAFF__Homo_sapiens__AAI05124
augaggcgagggccccggagccugcggggcagggacgcgccagcccccacgcccugcgucccggccgagugcuucgaccugcugguccgccacugcguggccugcgggcuccugcgcacgccgcggccgaaaccggccggggccagcagcccugcgcccaggacggcgcugcagccgcaggagucggugggcgcgggggccggcgaggcggcgcugccccugcccgggcugcucuuuggcgcccccgcgcugcugggccuggcacugguccuggcgcugguccuggugggucuggugagcuggaggcggcgacagcggcggcuucgcggcgcguccuccgcagaggcccccgacggagacaaggacgccccagagccccuggacaaggucaucauucugucuccgggaaucucugaugccacagcuccugccuggccuccuccuggggaagacccaggaaccaccccaccuggccacagugucccugugccagccacagagcugggcuccacugaacuggugaccaccaagacggccggcccugagcaacaauag

SEQ ID NO: 3867 - RNA, 555 nt, Artificial Sequence
  derived and/or modified sequence opt1 from BAFF__Homo_sapiens__AAI05124
augcgccggggcccccgcagccugcgggggcgcgacgccccggcccccacccccugcgugcccgcggagugcuucgaccuccugguccggcacugcguggccugcggccugcuccgcaccccgcggcccaagcccgccggggccuccagccccgccccgcgcacggcgcugcagccccaggaguccgugggcgccggggccggcgaggccgcgcugccccuccccggccugcuguucggggccccggcccuccugggccuggcccucguccuggcccuggugcucguggggcuggucagcuggcggcgccggcagcgccggcugcgcggcgcguccagcgccgaggcccccgacggggacaaggacgcccccgagccccucgacaaggugaucauccuguccccgggcaucagcgacgccaccgcgcccgccuggcccccgcccggcgaggaccccgggaccaccccgcccggccacuccgugcccguccccgccacggagcuggggagcaccgagcucgugaccaccaagacggccggccccgagcagcaguga

SEQ ID NO: 3868 - RNA, 555 nt, Artificial Sequence
  derived and/or modified sequence opt2 from BAFF__Homo_sapiens__AAI05124
augcgccgcggcccccgcucccuccgcggccgcgacgcccccgcccccacccccugcguccccgccgagugcuucgaccuccucguccgccacugcgucgccugcggccuccuccgcaccccccgccccaagcccgccggcgccuccucccccgccccccgcaccgcccuccagccccaggaguccgucggcgccggcgccggcgaggccgcccucccccuccccggccuccucuucggcgcccccgcccuccucggccucgcccucguccucgcccucguccucgucggccucgucuccuggcgccgccgccagcgccgccuccgcggcgccuccuccgccgaggcccccgacggcgacaaggacgcccccgagccccucgacaaggucaucauccucucccccggcaucuccgacgccaccgcccccgccuggcccccccccggcgaggaccccggcaccaccccccccggccacuccguccccguccccgccaccgagcucggcuccaccgagcucgucaccaccaagaccgccggccccgagcagcaguga

SEQ ID NO: 3869 - RNA, 555 nt, Artificial Sequence
  derived and/or modified sequence opt3 from BAFF__Homo_sapiens__AAI05124
augagaaggggcccccggagccugcgcgggcgagacgccccugcuccaaccccgugcgugcccgcagaguguuucgaucuccuuguccgucacugcguugccuguggacuguugagaacaccuaggccaaagcccgcgggugcuuccucuccugccccacggacugcauuacagccccaagaaucagugggcgccggggcuggagaggcagcccugccucuaccaggccuccuguuuggugcuccggcccuucugggguuggcgcucguacuggcacuggugcucgucggauuagugaguuggcgcagaaggcagcggcgccugcgaggcgccagcuccgcugaagcccccgacggcgauaaagacgcaccugagccacuugauaagguuaucauuuugucucccgggauaucggacgcuacggccccugcguggccacccccgggagaagauccugguaccacacccccaggccauucagugccuguccccgccacugagcuggggagcaccgagcuagugacaaccaaaacugcaggaccagaacagcaguga

SEQ ID NO: 3870 - RNA, 555 nt, Artificial Sequence
  derived and/or modified sequence opt4 from BAFF__Homo_sapiens__AAI05124
augagaagaggccccagaagccugagaggcagagacgcccccgcccccacccccugcgugcccgccgagugcuucgaccugcuggugagacacugcguggccugcggccugcugagaacccccagacccaagcccgccggcgccagcagccccgcccccagaaccgcccugcagccccaggagagcgugggcgccggcgccggcgaggccgcccugccccugcccggccugcuguucggcgcccccgcccugcugggccuggcccuggugcuggcccuggugcuggugggccuggugagcuggagaagaagacagagaagacugagaggcgccagcagcgccgaggcccccgacggcgacaaggacgcccccgagccccuggacaaggugaucauccugagccccggcaucagcgacgccaccgcccccgccuggcccccccccggcgaggaccccggcaccaccccccccggccacagcgugcccgugcccgccaccgagcugggcagcaccgagcuggugaccaccaagaccgccggccccgagcagcaguga

SEQ ID NO: 3871 - RNA, 555 nt, Artificial Sequence
  derived and/or modified sequence opt5 from BAFF__Homo_sapiens__AAI05124
augagacggggcccccgcagccugagagggcgggacgccccugcuccgacccccugcgugccugccgaguguuucgaucuccugguccgccacugcguugcguguggacuucugagaacaccccggccuaagcccgcuggcgccuccucuccugccccgcgcacggcucuccagccccaagaaagcgugggggccggagcuggcgaggccgcgcugccucuucccgggcugcucuuuggagccccugcucugcugggccucgcccuggugcuugcucugguccucgugggccugguuuccuggagacggcgccagagacggcuucgcggggccucuagcgcggaagcccccgacggagauaaagacgcuccggagccucuggauaaggugaucauucucucccccggcaucucugacgccaccgcuccugccuggcccccucccggggaagauccgggaacaacacccccuggccauagcguccccgugccugccaccgagcugggguccaccgagcugguuacaaccaaaacggcuggacccgaacagcaguga

SEQ ID NO: 3872 - RNA, 555 nt, Artificial Sequence
  derived and/or modified sequence opt6 from BAFF__Homo_sapiens__AAI05124
augagaagaggaccaagaucauuaagaggaagagaugcaccagcaccaacaccauguguaccagcagaauguuucgaucuauuaguaagacauuguguagcauguggauuauuaagaacaccaagaccaaaaccagcaggagcaucaucaccagcaccaagaacagcauuacaaccacaagaaucaguaggagcuggagccggagaagcagcauuaccacuaccaggauuauuauuuggagcacccgcauuauuaggauuagcauuaguacuagcauuaguauuaguugguuuaguaucauggagaagaagacaaagaagauuaagaggagcuucaucagcagaagcaccugauggagauaaagaugcaccagaaccauuagauaaaguaauaauauuaucaccaggaauaagugaugcaacagcaccagcauggccaccaccaggagaagauccaggaacaacaccaccaggccauagcguaccaguaccagcaacagaauuaggaucaacagaacuaguaacaacaaaaacagcaggaccagaacaacaauaa

SEQ ID NO: 3873 - protein, 285 aa, Artificial Sequence
  BAFF__Homo_sapiens__Q9Y275
MDDSTEREQSRLTSCLKKREEMKLKECVSILPRKESPSVRSSKDGKLLAATLLLALLSCCLTVVSFYQVAALQGDLASLRAELQGHHAEKLPAGAGAPKAGLEEAPAVTAGLKIFEPPAPGEGNSSQNSRNKRAVQGPEETVTQDCLQLIADSETPTIQKGSYTFVPWLLSFKRGSALEEKENKILVKETGYFFIYGQVLYTDKTYAMGHLIQRKKVHVFGDELSLVTLFRCIQNMPETLPNNSCYSAGIAKLEEGDELQLAIPRENAQISLDGDVTFFGALKLL

SEQ ID NO: 3874 - RNA, 858 nt, Artificial Sequence
  BAFF__Homo_sapiens__AAD21092
auggaugacuccacagaaagggagcagucacgccuuacuucuugccuuaagaaaagagaagaaaugaaacugaaggaguguguuuccauccucccacggaaggaaagccccucuguccgauccuccaaagacggaaagcugcuggcugcaaccuugcugcuggcacugcugucuugcugccucacgguggugucuuucuaccagguggccgcccugcaaggggaccuggccagccuccgggcagagcugcagggccaccacgcggagaagcugccagcaggagcaggagcccccaaggccggccuggaggaagcuccagcugucaccgcgggacugaaaaucuuugaaccaccagcuccaggagaaggcaacuccagucagaacagcagaaauaagcgugccguucaggguccagaagaaacagucacucaagacugcuugcaacugauugcagacagugaaacaccaacuauacaaaaaggaucuuacacauuuguuccauggcuucucagcuuuaaaaggggaagugcccuagaagaaaaagagaauaaaauauuggucaaagaaacugguuacuuuuuuauauauggucagguuuuauauacugauaagaccuacgccaugggacaucuaauucagaggaagaagguccaugucuuuggggaugaauugagucuggugacuuuguuucgauguauucaaaauaugccugaaacacuacccaauaauuccugcuauucagcuggcauugcaaaacuggaagaaggagaugaacuccaacuugcaauaccaagagaaaaugcacaaauaucacuggauggagaugucacauuuuuuggugcauugaaacugcuguga

SEQ ID NO: 3875 - RNA, 858 nt, Artificial Sequence
  derived and/or modified sequence opt1 from BAFF__Homo_sapiens__AAD21092
auggacgacagcaccgagcgcgagcagucccggcugaccagcugccucaagaagcgcgaggagaugaagcugaaggagugcguguccauccugccccggaaggagagcccguccguccgcagcuccaaggacggcaagcuccuggccgccacgcugcuccuggcgcugcucagcugcugccugaccgugguguccuucuaccaggucgccgcccugcagggggaccucgccagccugcgggccgagcugcagggccaccacgcggagaagcuccccgccggggccggcgcccccaaggcggggcuggaggaggcccccgccgugaccgccggccugaagaucuucgagccgcccgcccccggcgaggggaacuccagccagaacucccgcaacaagcgggcggugcagggccccgaggagaccgucacgcaggacugccuccagcugaucgccgacagcgagaccccgaccauccagaagggguccuacaccuucgugcccuggcugcucagcuucaagcgcggcuccgcccuggaggagaaggagaacaagauccuggugaaggagacgggguacuucuucaucuacggccagguccucuacaccgacaagaccuacgccaugggccaccugauccagcggaagaaggugcacguguucggggacgagcugagccucgucacccuguuccgcugcauccagaacaugcccgagacgcugcccaacaacuccugcuacagcgccggcaucgcgaagcucgaggagggggacgagcugcagcuggccaucccgcgggagaacgcccagaucagccucgacggcgacgugaccuucuucggcgcccugaagcugcucuga

SEQ ID NO: 3876 - RNA, 858 nt, Artificial Sequence
  derived and/or modified sequence opt2 from BAFF__Homo_sapiens__AAD21092
auggacgacuccaccgagcgcgagcagucccgccucaccuccugccucaagaagcgcgaggagaugaagcucaaggagugcgucuccauccucccccgcaaggagucccccuccguccgcuccuccaaggacggcaagcuccucgccgccacccuccuccucgcccuccucuccugcugccucaccgucgucuccuucuaccaggucgccgcccuccagggcgaccucgccucccuccgcgccgagcuccagggccaccacgccgagaagcuccccgccggcgccggcgcccccaaggccggccucgaggaggcccccgccgucaccgccggccucaagaucuucgagccccccgcccccggcgagggcaacuccucccagaacucccgcaacaagcgcgccguccagggccccgaggagaccgucacccaggacugccuccagcucaucgccgacuccgagacccccaccauccagaagggcuccuacaccuucguccccuggcuccucuccuucaagcgcggcuccgcccucgaggagaaggagaacaagauccucgucaaggagaccggcuacuucuucaucuacggccagguccucuacaccgacaagaccuacgccaugggccaccucauccagcgcaagaagguccacgucuucggcgacgagcucucccucgucacccucuuccgcugcauccagaacaugcccgagacccuccccaacaacuccugcuacuccgccggcaucgccaagcucgaggagggcgacgagcuccagcucgccaucccccgcgagaacgcccagaucucccucgacggcgacgucaccuucuucggcgcccucaagcuccucuga

SEQ ID NO: 3877 - RNA, 858 nt, Artificial Sequence
  derived and/or modified sequence opt3 from BAFF__Homo_sapiens__AAD21092
auggacgauagcaccgagagagaacaguccaggcugacaucuugccucaagaaacgggaggaaaugaaacuuaaggagugugugucaauccugccccgcaaggaaaguccuagcguccgauccucuaaagacggcaaguuguuagccgcuacucugcuacucgcacugcuuucgugcugucugacgguugugucauucuaccaaguagccgcguugcagggggaucucgcuagccugcgugccgagcugcagggacaccaugcagagaagcucccagccggugcuggcgcaccgaaagccggguuagaagaggcucccgccgugaccgcgggacugaagauuuuugaaccuccagcacccggcgaggguaacaguucccaaaauucuagaaacaaaagggccguccaggggccugaggaaacagugacucaggacugccuucaguugauagcugauagcgagaccccaacaauccagaagggauccuauaccuucguucccuggcugcuaucauuuaaacggggcagugcccucgaagagaaggaaaauaagauucuggugaaagagacuggcuacuucuuuaucuaugggcaaguccuuuacacagacaagaccuaugcaaugggacaccugauucagcgcaaaaaggugcauguauucggugaugaguugagccucguuacgcuguuuagauguauccagaacaugccugaaacuuuaccaaauaacucuugcuacuccgcuggcauagccaaacuggaggaaggggacgagcuccagcuugcgaucccgagggaaaaugcccaaauuucacuggauggagacgugaccuucuuuggcgcauugaagcuacuguga

SEQ ID NO: 3878 - RNA, 858 nt, Artificial Sequence
  derived and/or modified sequence opt4 from BAFF__Homo_sapiens__AAD21092
auggacgacagcaccgagagagagcagagcagacugaccagcugccugaagaagagagaggagaugaagcugaaggagugcgugagcauccugcccagaaaggagagccccagcgugagaagcagcaaggacggcaagcugcuggccgccacccugcugcuggcccugcugagcugcugccugaccguggugagcuucuaccagguggccgcccugcagggcgaccuggccagccugagagccgagcugcagggccaccacgccgagaagcugcccgccggcgccggcgcccccaaggccggccuggaggaggcccccgccgugaccgccggccugaagaucuucgagccccccgcccccggcgagggcaacagcagccagaacagcagaaacaagagagccgugcagggccccgaggagaccgugacccaggacugccugcagcugaucgccgacagcgagacccccaccauccagaagggcagcuacaccuucgugcccuggcugcugagcuucaagagaggcagcgcccuggaggagaaggagaacaagauccuggugaaggagaccggcuacuucuucaucuacggccaggugcuguacaccgacaagaccuacgccaugggccaccugauccagagaaagaaggugcacguguucggcgacgagcugagccuggugacccuguucagaugcauccagaacaugcccgagacccugcccaacaacagcugcuacagcgccggcaucgccaagcuggaggagggcgacgagcugcagcuggccauccccagagagaacgcccagaucagccuggacggcgacgugaccuucuucggcgcccugaagcugcuguga

SEQ ID NO: 3879 - RNA, 858 nt, Artificial Sequence
  derived and/or modified sequence opt5 from BAFF__Homo_sapiens__AAD21092
auggacgauagcaccgagagagaacagucccggcugacaucuugccucaagaaacgcgaggaaaugaagcugaaagagugugugagcauccuucccagaaaggaauccccuucuguccggagcuccaaagacggcaagcugcucgccgcuacgcugcuucuggcccuccugucuugcugucugaccguugugagcuucuaccaaguggcggcucuccagggggaucuggccucccuucgcgccgagcugcagggacaccaugcugagaagcucccggccggcgcuggggcccccaaagcgggacuggaagaggccccugcugucacagccggccuuaagauuuuugaacccccugcucccggggagggaaacagcucucaaaauuccagaaacaaacgggccgugcagggcccugaggaaaccguuacacaggacugccugcagcucaucgcggauagcgagaccccgacaauucagaagggcucuuauaccuucgugcccuggcugcuguccuuuaaacgcgggagcgcccucgaagagaaggaaaauaagauccuggucaaagagacgggauacuucuuuauuuauggccaagugcuuuacaccgacaagacauaugcuauggggcaccugauccagagaaagaagguucauguguucggagaugagcucucucuggucacccuuuuucgguguauccagaacaugccugaaacacugcccaauaacuccugcuacagcgccggcauugcuaaacucgaggaaggggacgagcugcagcuggccaucccucgcgaaaaugcccaaauuucccucgauggagacgugaccuucuuuggcgcucugaaacuucuguga

SEQ ID NO: 3880 - RNA, 858 nt, Artificial Sequence
  derived and/or modified sequence opt6 from BAFF__Homo_sapiens__AAD21092
auggacgacucaacagaaagagaacaaucaagacuaacaagcugccuaaaaaaaagagaagaaaugaaacuaaaagaaugcguaagcauacuaccaagaaaagaaucucccucaguaagaucaucaaaagacggaaaacuacuagcagcaacacuacuccuagcacuccuaucaugcugccuaacuguaguaucauucuaccaaguagcagcacuacaaggagaccuagcaagucuaagagcagaauuacaaggacaccacgcugaaaaacucccagcaggagccggagcaccaaaagcagguuuagaagaagcaccagcaguaaccgcaggacuaaaaauauucgaaccaccagcaccaggagaaggaaacuccucacaaaacuccagaaauaaaagagcaguacaaggaccagaagaaacaguaacacaagacugccuacaauuaauagcagacucagaaacaccaaccauacaaaaaggaaguuauacauuuguaccaugguuauuaucauucaaaagaggaagcgcauuagaagaaaaagaaaacaaaauacuaguaaaagaaaccggauacuucuuuauauacggccaaguacuauacacagacaaaacauaugcaaugggacacuuaauacaaagaaaaaaaguacauguauucggcgacgaacuauccuuaguaacacuauucagaugcauacaaaauaugccagaaacacuaccaaacaacucauguuacucagcaggaauagccaaacuagaagaaggugacgaacuacaauuagcaauaccaagagaaaacgcacaaauaucauuagacggcgacguaacuuucuuuggagcauuaaaacuauuauaa

SEQ ID NO: 3881 - protein, 193 aa, Artificial Sequence
  CD27L__Homo_sapiens__P32970
MPEEGSGCSVRRRPYGCVLRAALVPLVAGLVICLVVCIQRFAQAQQQLPLESLGWDVAELQLNHTGPQQDPRLYWQGGPALGRSFLHGPELDKGQLRIHRDGIYMVHIQVTLAICSSTTASRHHPTTLAVGICSPASRSISLLRLSFHQGCTIASQRLTPLARGDTLCTNLTGTLLPSRNTDETFFGVQWVRP

SEQ ID NO: 3882 - RNA, 582 nt, Artificial Sequence
  CD27L__Homo_sapiens__AAB30121
augccggaggaggguucgggcugcucggugcggcgcaggcccuaugggugcguccugcgggcugcuuuggucccauuggucgcgggcuuggugaucugccucguggugugcauccagcgcuucgcacaggcucagcagcagcugccgcucgagucacuugggugggacguagcugagcugcagcugaaucacacaggaccucagcaggaccccaggcuauacuggcaggggggcccagcacugggccgcuccuuccugcauggaccagagcuggacaaggggcagcuacguauccaucgugauggcaucuacaugguacacauccaggugacgcuggccaucugcuccuccacgacggccuccaggcaccaccccaccacccuggccgugggaaucugcucucccgccucccguagcaucagccugcugcgucucagcuuccaccaagguuguaccauugccucccagcgccugacgccccuggcccgaggggacacacucugcaccaaccucacugggacacuuuugccuucccgaaacacugaugagaccuucuuuggagugcagugggugcgccccuga

SEQ ID NO: 3883 - RNA, 582 nt, Artificial Sequence
  derived and/or modified sequence opt1 from CD27L__Homo_sapiens__AAB30121
augcccgaggagggcagcgggugcuccgugcgccggcgcccguacggcugcguccugcgggccgcccucgugccccugguggcggggcuggucaucugccucguggugugcauccagcgcuucgcccaggcccagcagcagcugccccuggagagccucggcugggacgucgccgagcugcagcugaaccacaccgggccccagcaggacccgcggcucuacuggcagggcggccccgcccuggggcgcuccuuccugcacggccccgagcucgacaaggggcagcugcggauccaccgcgacggcaucuacauggugcacauccaggugacccuggcgaucugcagcuccacgaccgccagccggcaccaccccaccacccucgccgucgggaucugcuccccggccagccgcuccaucagccugcugcggcucuccuuccaccagggcugcacgaucgcgagccagcgccugacgccccuggcccggggcgacacccucugcaccaaccugaccgggacccugcuccccucccgcaacaccgacgagaccuucuucggcgugcagugggugcggcccuga

SEQ ID NO: 3884 - RNA, 582 nt, Artificial Sequence
  derived and/or modified sequence opt2 from CD27L__Homo_sapiens__AAB30121
augcccgaggagggcuccggcugcuccguccgccgccgccccuacggcugcguccuccgcgccgcccucgucccccucgucgccggccucgucaucugccucgucgucugcauccagcgcuucgcccaggcccagcagcagcucccccucgagucccucggcugggacgucgccgagcuccagcucaaccacaccggcccccagcaggacccccgccucuacuggcagggcggccccgcccucggccgcuccuuccuccacggccccgagcucgacaagggccagcuccgcauccaccgcgacggcaucuacaugguccacauccaggucacccucgccaucugcuccuccaccaccgccucccgccaccaccccaccacccucgccgucggcaucugcucccccgccucccgcuccaucucccuccuccgccucuccuuccaccagggcugcaccaucgccucccagcgccucaccccccucgcccgcggcgacacccucugcaccaaccucaccggcacccuccuccccucccgcaacaccgacgagaccuucuucggcguccaguggguccgccccuga

SEQ ID NO: 3885 - RNA, 582 nt, Artificial Sequence
  derived and/or modified sequence opt3 from CD27L__Homo_sapiens__AAB30121
augcccgaggaaggcagcgggugcuccgugagaaggcggccuuacggauguguccugcgcgccgcucucguuccacuuguggcaggucugguaaucugcuugguggucuguauucagcgauucgcccaagcgcagcagcaguuaccgcuggagucucuaggcugggacguggcugaacuccaacugaaccacaccgggccccagcaggauccucgucuuuauuggcagggaggcccagcccuggguagaucauuuuugcaugggcccgagcucgacaagggacaacugaggauacaccgggauggcaucuacaugguucauauucaggugacacuggcaaucugcaguagcacuacggccucccgccaccauccuaccacacucgcugucggcauuuguucuccagcaucgagaucaaucagcuuacugaggcuuaguuuccaccaggggugcacuauagccucccagcgguugacaccccuggcucgcggagacacccuauguaccaaucucacugguacacugcuuccuucucgaaacaccgaugaaacguuuuucggcgugcaauggguaagaccauga

SEQ ID NO: 3886 - RNA, 582 nt, Artificial Sequence
  derived and/or modified sequence opt4 from CD27L__Homo_sapiens__AAB30121
augcccgaggagggcagcggcugcagcgugagaagaagacccuacggcugcgugcugagagccgcccuggugccccugguggccggccuggugaucugccugguggugugcauccagagauucgcccaggcccagcagcagcugccccuggagagccugggcugggacguggccgagcugcagcugaaccacaccggcccccagcaggaccccagacuguacuggcagggcggccccgcccugggcagaagcuuccugcacggccccgagcuggacaagggccagcugagaauccacagagacggcaucuacauggugcacauccaggugacccuggccaucugcagcagcaccaccgccagcagacaccaccccaccacccuggccgugggcaucugcagccccgccagcagaagcaucagccugcugagacugagcuuccaccagggcugcaccaucgccagccagagacugaccccccuggccagaggcgacacccugugcaccaaccugaccggcacccugcugcccagcagaaacaccgacgagaccuucuucggcgugcagugggugagacccuga

SEQ ID NO: 3887 - RNA, 582 nt, Artificial Sequence
  derived and/or modified sequence opt5 from CD27L__Homo_sapiens__AAB30121
augcccgaggaaggcagcgggugcuccgugagacggcgcccuuacggauguguccugagagccgcucucguuccgcugguggccggccuugugaucugccuggucguguguauucagcgguucgcgcaagcucagcagcagcucccccuggagucucuugggugggacguugccgaacugcaacucaaccacaccggaccucagcaggauccccgccuguauuggcagggcgggccugcccugggacggagcuuucuccauggccccgagcuggacaagggccaacuucggauccaccgcgaugggauuuacauggugcauauccaggucacacuggcuauuugcuccucuacgaccgccagcagacaccauccuacaacccucgcugugggaaucuguuccccggccucucggagcaucucccugcuucgccugagcuuccaccagggcugcacaauugcgucucagagacucacaccccuggccagaggggacacccuguguaccaaucucacgggaacccugcuuccuucccgcaacacagaugaaaccuuuuucggcguucaaugggugagacccuga

SEQ ID NO: 3888 - RNA, 582 nt, Artificial Sequence
  derived and/or modified sequence opt6 from CD27L__Homo_sapiens__AAB30121
augccagaagaaggcucaggauguucaguacgaagaagaccauacggaugcguacuaagagcagcacuaguaccauuaguagcaggacuaguaauaugcuuaguaguaugcauacaaagauucgcacaagcacaacaacaauuaccacuagaaucacuaggaugggacguagcagaacuacaauuaaaccauacaggaccccaacaagacccaagacuauacuggcaaggaggaccagcauuaggacgaucauucuuacacggaccugaacuagacaaaggacaauuaagaauacacagagacggaauauacaugguacacauacaaguaacacuagcaauauguuccagcacaacagcaaguagacaucauccaacaacacuagcaguaggcauaugcucaccagcaucaagauccauaaguuuacuaagacuaucauuccaucaaggauguacaauagccagccaacgauuaacaccacuagcaagaggagacacauuauguacaaauuuaacaggaacauuacuaccaucaagaaauacagacgaaacauuuuucggaguacaauggguaagaccauaa

SEQ ID NO: 3889 - protein, 234 aa, Artificial Sequence
  CD30L__Homo_sapiens__P32971
MDPGLQQALNGMAPPGDTAMHVPAGSVASHLGTTSRSYFYLTTATLALCLVFTVATIMVLVVQRTDSIPNSPDNVPLKGGNCSEDLLCILKRAPFKKSWAYLQVAKHLNKTKLSWNKDGILHGVRYQDGNLVIQFPGLYFIICQLQFLVQCPNNSVDLKLELLINKHIKKQALVTVCESGMQTKHVYQNLSQFLLDYLQVNTTISVNVDTFQYIDTSTFPLENVLSIFLYSNSD

SEQ ID NO: 3890 - RNA, 705 nt, Artificial Sequence
  CD30L__Homo_sapiens__AAA74594
auggacccagggcugcagcaagcacucaacggaauggccccuccuggagacacagccaugcaugugccggcgggcuccguggccagccaccuggggaccacgagccgcagcuauuucuauuugaccacagccacucuggcucugugccuugucuucacgguggccacuauuaugguguuggucguucagaggacggacuccauucccaacucaccugacaacgucccccucaaaggaggaaauugcucagaagaccucuuauguauccugaaaagagcuccauucaagaagucaugggccuaccuccaaguggcaaagcaucuaaacaaaaccaaguugucuuggaacaaagauggcauucuccauggagucagauaucaggaugggaaucuggugauccaauucccugguuuguacuucaucauuugccaacugcaguuucuuguacaaugcccaaauaauucugucgaucugaaguuggagcuucucaucaacaagcauaucaaaaaacaggcccuggugacagugugugagucuggaaugcaaacgaaacacguauaccagaaucucucucaauucuugcuggauuaccugcaggucaacaccaccauaucagucaauguggauacauuccaguacauagauacaagcaccuuuccucuugagaauguguuguccaucuucuuauacaguaauucagacuga

SEQ ID NO: 3891 - RNA, 705 nt, Artificial Sequence
  derived and/or modified sequence opt1 from CD30L__Homo_sapiens__AAA74594
auggaccccggccugcagcaggcccucaacgggauggccccgcccggcgacaccgcgaugcacgugcccgccgggagcgucgccucccaccugggcaccacgagccgcuccuacuucuaccugaccaccgccacccucgcccugugccugguguucacgguggcgaccaucaugguccucguggugcagcggaccgacagcauccccaacuccccggacaacgucccccugaagggcgggaacugcagcgaggaccugcucugcauccugaagcgcgcccccuucaagaaguccugggccuaccuccagguggccaagcaccugaacaagaccaagcugagcuggaacaaggacggcauccugcacggggugcgguaccaggacggcaaccucgucauccaguuccccgggcuguacuucaucaucugccagcugcaguuccucgugcagugcccgaacaacuccguggaccugaagcuggagcuccugaucaacaagcacaucaagaagcaggcgcuggucacggugugcgagagcggcaugcagaccaagcacguguaccagaaccucucccaguuccugcuggacuaccuccaggucaacaccaccaucagcgugaacguggacacguuccaguacaucgacaccuccaccuucccccuggagaacguccugagcaucuuccucuacuccaacagcgacuga

SEQ ID NO: 3892 - RNA, 705 nt, Artificial Sequence
  derived and/or modified sequence opt2 from CD30L__Homo_sapiens__AAA74594
auggaccccggccuccagcaggcccucaacggcauggccccccccggcgacaccgccaugcacguccccgccggcuccgucgccucccaccucggcaccaccucccgcuccuacuucuaccucaccaccgccacccucgcccucugccucgucuucaccgucgccaccaucaugguccucgucguccagcgcaccgacuccauccccaacucccccgacaacgucccccucaagggcggcaacugcuccgaggaccuccucugcauccucaagcgcgcccccuucaagaaguccugggccuaccuccaggucgccaagcaccucaacaagaccaagcucuccuggaacaaggacggcauccuccacggcguccgcuaccaggacggcaaccucgucauccaguuccccggccucuacuucaucaucugccagcuccaguuccucguccagugccccaacaacuccgucgaccucaagcucgagcuccucaucaacaagcacaucaagaagcaggcccucgucaccgucugcgaguccggcaugcagaccaagcacgucuaccagaaccucucccaguuccuccucgacuaccuccaggucaacaccaccaucuccgucaacgucgacaccuuccaguacaucgacaccuccaccuucccccucgagaacguccucuccaucuuccucuacuccaacuccgacuga

SEQ ID NO: 3893 - RNA, 705 nt, Artificial Sequence
  derived and/or modified sequence opt3 from CD30L__Homo_sapiens__AAA74594
auggaccccggccugcagcaagcccucaacgggauggcuccuccaggagauaccgcaaugcacgugccggccgguagcgucgcgucccaucuuggcacaacuucuagaucauacuucuaucugacgaccgcuacauuggccuuaugccugguuuuuacuguggcaaccaucauggugcuaguaguccagaggacagacaguauucccaauagcccugauaacgugccacucaaagggggaaauuguuccgaggaccugcuuugcauacugaaacgggcccccuucaagaaaucuugggcuuacuugcagguugcaaagcaccucaacaaaaccaagcugucguggaauaaggauggcauccugcauggugugcgcuaucaggacgggaaccucgucauucaauuuccuggauuauacuucaucauuugucagcugcaguuucuugugcagugcccaaauaacucaguagauuugaaacuggaacuacucaucaauaagcacauaaagaagcaagcccugguuacugugugugagagcggcaugcagacaaaacaugucuaucagaaccuuagucaguuccuguuggacuaccuccaagugaauaccacgaucuccgugaacgucgauacuuuucaguauauugacaccucuacauucccccuggaaaauguuuuaagcaucuuucuguacuccaacucagauuga

SEQ ID NO: 3894 - RNA, 705 nt, Artificial Sequence
  derived and/or modified sequence opt4 from CD30L__Homo_sapiens__AAA74594
auggaccccggccugcagcaggcccugaacggcauggccccccccggcgacaccgccaugcacgugcccgccggcagcguggccagccaccugggcaccaccagcagaagcuacuucuaccugaccaccgccacccuggcccugugccugguguucaccguggccaccaucauggugcugguggugcagagaaccgacagcauccccaacagccccgacaacgugccccugaagggcggcaacugcagcgaggaccugcugugcauccugaagagagcccccuucaagaagagcugggccuaccugcagguggccaagcaccugaacaagaccaagcugagcuggaacaaggacggcauccugcacggcgugagauaccaggacggcaaccuggugauccaguuccccggccuguacuucaucaucugccagcugcaguuccuggugcagugccccaacaacagcguggaccugaagcuggagcugcugaucaacaagcacaucaagaagcaggcccuggugaccgugugcgagagcggcaugcagaccaagcacguguaccagaaccugagccaguuccugcuggacuaccugcaggugaacaccaccaucagcgugaacguggacaccuuccaguacaucgacaccagcaccuucccccuggagaacgugcugagcaucuuccuguacagcaacagcgacuga

SEQ ID NO: 3895 - RNA, 705 nt, Artificial Sequence
  derived and/or modified sequence opt5 from CD30L__Homo_sapiens__AAA74594
auggaccccggccugcagcaagcccucaacgggauggcuccuccgggagauaccgccaugcacgugcccgcgggcagcgucgcuucccaucuggggacaacgucuagaagcuacuucuaucuuaccacagccacccuggcccucugccugguuuuuacaguggcuaccaucauggugcuugucgugcagcggacagacuccauuccuaauucucccgauaacguuccucugaagggaggcaauuguagcgaggaccuccugugcauccugaaacgcgcccccuucaagaaauccugggcuuaccuccagguggccaagcaccugaacaaaaccaaacuuucuuggaauaaggaugggauucugcauggagucagauaucaggacggcaaccucgugauccaauuuccuggccuguacuucauuaucugucagcuucaguuucugguucagugcccgaauaacagcguggaucucaagcuggaacugcucaucaauaagcacauuaaaaagcaagcgcuggucacggugugugaguccgggaugcagaccaaacauguguaucagaaccuuagccaguuccugcucgacuaccugcaagucaauacaaccaucucuguuaacguggauacauuucaguauauugacaccuccacguucccccuugaaaaugugcugagcaucuuucucuacucuaacuccgauuga

SEQ ID NO: 3896 - RNA, 705 nt, Artificial Sequence
  derived and/or modified sequence opt6 from CD30L__Homo_sapiens__AAA74594
auggaccccggacuccaacaagcacuaaacggaauggcaccaccaggagacacagcaaugcacguaccagcaggaucagucgcaucacacuuaggaacaacaucuagaucauacuucuaccucacaaccgcaacauuagcacuaugccuaguauucacaguagcaaccauaaugguacuaguaguacaaagaacagacuccauacccaacuccccagauaacgucccauuaaaaggaggaaacugcucagaagaccuccucugcauauuaaaaagagcaccauucaaaaaaucaugggcauaccuacaaguagcaaaacacuuaaacaaaaccaaacuaucauggaacaaagacggaauacuacacggaguaagauaccaagacggaaacuuaguaauacaauucccaggacuauacuucauaauaugucaacuacaauuccuaguacaaugcccaaacaauucaguagaccuaaaauuagaacuacuaaucaacaaacacauaaaaaaacaagcacuaguaaccguaugcgaaucaggaaugcaaaccaaacacguauaccaaaaccuaucacaauuccuucucgacuaccuacaaguaaacacaacaauaucaguaaacguagacacauuccaauacauagacacaucuacauucccacuagaaaacguacuaucaaucuuccucuacuccaacucagacuaa

SEQ ID NO: 3897 - protein, 261 aa, Artificial Sequence
  CD40L_(CD154)__Homo_sapiens__P29965
MIETYNQTSPRSAATGLPISMKIFMYLLTVFLITQMIGSALFAVYLHRRLDKIEDERNLHEDFVFMKTIQRCNTGERSLSLLNCEEIKSQFEGFVKDIMLNKEETKKENSFEMQKGDQNPQIAAHVISEASSKTTSVLQWAEKGYYTMSNNLVTLENGKQLTVKRQGLYYIYAQVTFCSNREASSQAPFIASLCLKSPGRFERILLRAANTHSSAKPCGQQSIHLGGVFELQPGASVFVNVTDPSQVSHGTGFTSFGLLKL

SEQ ID NO: 3898 - RNA, 786 nt, Artificial Sequence
  CD40L_(CD154)__Homo_sapiens__AAA35662
augaucgaaacauacaaccaaacuucuccccgaucugcggccacuggacugcccaucagcaugaaaauuuuuauguauuuacuuacuguuuuucuuaucacccagaugauugggucagcacuuuuugcuguguaucuucauagaagguuggacaagauagaagaugaaaggaaucuucaugaagauuuuguauucaugaaaacgauacagagaugcaacacaggagaaagauccuuauccuuacugaacugugaggagauuaaaagccaguuugaaggcuuugugaaggauauaauguuaaacaaagaggagacgaagaaagaaaacagcuuugaaaugcaaaaaggugaucagaauccucaaauugcggcacaugucauaagugaggccagcaguaaaacaacaucuguguuacagugggcugaaaaaggauacuacaccaugagcaacaacuugguaacccuggaaaaugggaaacagcugaccguuaaaagacaaggacucuauuauaucuaugcccaagucaccuucuguuccaaucgggaagcuucgagucaagcuccauuuauagccagccucugccuaaagucccccgguagauucgagagaaucuuacucagagcugcaaauacccacaguuccgccaaaccuugcgggcaacaauccauucacuugggaggaguauuugaauugcaaccaggugcuucgguguuugucaaugugacugauccaagccaagugagccauggcacuggcuucacguccuuuggcuuacucaaacucuga

SEQ ID NO: 3899 - RNA, 786 nt, Artificial Sequence
  derived and/or modified sequence opt1 from CD40L_(CD154)__Homo_sapiens__AAA35662
augaucgagaccuacaaccagaccagcccccgcuccgccgccacgggccugccgaucagcaugaagaucuucauguaccuccugaccguguuccugaucacccagaugaucggguccgcgcuguucgccgucuaccugcaccggcgccuggacaagaucgaggacgagcggaaccuccacgaggacuucguguucaugaagaccauccagcgcugcaacacgggcgagcggagccugucccugcucaacugcgaggagaucaagagccaguucgagggguucgugaaggacaucaugcugaacaaggaggagaccaagaaggagaacuccuucgagaugcagaagggcgaccagaacccccagaucgccgcccacgucaucagcgaggccuccagcaagaccaccuccgugcugcagugggcggagaagggguacuacacgaugagcaacaaccucgugacccuggagaacggcaagcagcugaccgucaagcgccagggccucuacuacaucuacgcccaggugaccuucugcuccaaccgggaggccagcucccaggcccccuucaucgcgagccugugccugaagucccccgggcgcuucgagcggauccuccugcgcgccgccaacacgcacagcuccgccaagccgugcggccagcagagcauccaccucgggggcguguucgagcuccagcccggggccagcgucuucgugaacgugaccgaccccucccaggucagccacggcaccggcuucaccuccuucgggcugcugaagcucuga

SEQ ID NO: 3900 - RNA, 786 nt, Artificial Sequence
  derived and/or modified sequence opt2 from CD40L_(CD154)__Homo_sapiens__AAA35662
augaucgagaccuacaaccagaccuccccccgcuccgccgccaccggccuccccaucuccaugaagaucuucauguaccuccucaccgucuuccucaucacccagaugaucggcuccgcccucuucgccgucuaccuccaccgccgccucgacaagaucgaggacgagcgcaaccuccacgaggacuucgucuucaugaagaccauccagcgcugcaacaccggcgagcgcucccucucccuccucaacugcgaggagaucaagucccaguucgagggcuucgucaaggacaucaugcucaacaaggaggagaccaagaaggagaacuccuucgagaugcagaagggcgaccagaacccccagaucgccgcccacgucaucuccgaggccuccuccaagaccaccuccguccuccagugggccgagaagggcuacuacaccauguccaacaaccucgucacccucgagaacggcaagcagcucaccgucaagcgccagggccucuacuacaucuacgcccaggucaccuucugcuccaaccgcgaggccuccucccaggcccccuucaucgccucccucugccucaagucccccggccgcuucgagcgcauccuccuccgcgccgccaacacccacuccuccgccaagcccugcggccagcaguccauccaccucggcggcgucuucgagcuccagcccggcgccuccgucuucgucaacgucaccgaccccucccaggucucccacggcaccggcuucaccuccuucggccuccucaagcucuga

SEQ ID NO: 3901 - RNA, 786 nt, Artificial Sequence
  derived and/or modified sequence opt3 from CD40L_(CD154)__Homo_sapiens__AAA35662
augaucgagaccuacaaccagacaagccccagauccgccgcuacuggccugccuauuucuaugaagauauucauguaucuccuuacgguguuucugaucacccaaaugauugggucagcauuguucgccgucuacuuacacaggcggcuggacaaaaucgaagaugagcgcaaucuacaugaagacuuuguuuucaugaagacaauucagcgaugcaacacuggagagcguagucucagccugcuuaauugugaagagaucaaaucccaguuugaggguuucgugaaggauauaaugcugaacaaagaagagaccaagaaggaaaauucuuuugagaugcagaaaggcgaccaaaacccacagaucgcggcucacguaauuucggaggccucaagcaagacaaccaguguguugcagugggcagaaaaaggguauuacacuauguccaauaaccucgucacacuggagaauggaaagcagcugaccgugaaaagacaaggccucuauuacaucuaugcccagguuacguucugcucuaacagggaagcuagcucccaggcaccguuuauugccucauuaugucugaagagucccggucgguucgagcgcauccuuuugagagcugccaauacucauagcucugcgaagccuugcgggcagcaauccauacaccugggaggcguguuugaacuacagccaggcgcaucagucuucgugaacguaaccgaucccagccagguuagucaugggacaggauuuacuucuuucggucuccugaaacuuuga

SEQ ID NO: 3902 - RNA, 786 nt, Artificial Sequence
  derived and/or modified sequence opt4 from CD40L_(CD154)__Homo_sapiens__AAA35662
augaucgagaccuacaaccagaccagccccagaagcgccgccaccggccugcccaucagcaugaagaucuucauguaccugcugaccguguuccugaucacccagaugaucggcagcgcccuguucgccguguaccugcacagaagacuggacaagaucgaggacgagagaaaccugcacgaggacuucguguucaugaagaccauccagagaugcaacaccggcgagagaagccugagccugcugaacugcgaggagaucaagagccaguucgagggcuucgugaaggacaucaugcugaacaaggaggagaccaagaaggagaacagcuucgagaugcagaagggcgaccagaacccccagaucgccgcccacgugaucagcgaggccagcagcaagaccaccagcgugcugcagugggccgagaagggcuacuacaccaugagcaacaaccuggugacccuggagaacggcaagcagcugaccgugaagagacagggccuguacuacaucuacgcccaggugaccuucugcagcaacagagaggccagcagccaggcccccuucaucgccagccugugccugaagagccccggcagauucgagagaauccugcugagagccgccaacacccacagcagcgccaagcccugcggccagcagagcauccaccugggcggcguguucgagcugcagcccggcgccagcguguucgugaacgugaccgaccccagccaggugagccacggcaccggcuucaccagcuucggccugcugaagcuguga

SEQ ID NO: 3903 - RNA, 786 nt, Artificial Sequence
  derived and/or modified sequence opt5 from CD40L_(CD154)__Homo_sapiens__AAA35662
augaucgagaccuacaaccagacaagccccagauccgccgcuacgggccugccuauuucuaugaagaucuucauguaucuccugaccguguuucuuauuacacaaaugaucgggagcgcccuguucgcggucuaccuccaccggcgccuggacaaaauugaagaugagagaaaucuucaugaagacuuuguuuucaugaagaccauccagcggugcaacacaggagagcgcucccugucucuccugaauugugaagagaucaaaagccaguuugagggcuucgugaaggauauuaugcugaacaaagaagagaccaagaaggaaaauuccuuugagaugcagaaaggggaccaaaacccgcagaucgcugcccacgugauuucugaggccagcuccaagacaaccagcguccuccagugggcugaaaaaggauauuacacgaugucuaauaaccuggugacccuugagaauggcaagcagcugacaguuaaaagacaagggcucuauuacaucuaugcccaggugaccuucugcuccaaccgggaagcuagcucucaggcccccuuuauugcgucccugugucuuaagagcccuggacgcuucgagagaauccugcuccgggccgcuaauacacauucuuccgccaagcccugcggccagcaaagcauucaccugggcggggucuuugaacugcagccuggagcuuccguguucguuaacgugaccgaucccucucaggucagccauggcacgggguuuacauccuucggacuccugaaacuuuga

SEQ ID NO: 3904 - RNA, 786 nt, Artificial Sequence
  derived and/or modified sequence opt6 from CD40L_(CD154)__Homo_sapiens__AAA35662
augauagaaacauauaaucaaacaagcccaagaucagcagcaacaggacuaccaauaucaaugaaaauauucauguaccuacucacagucuuccuaauaacacaaaugauaggaucugcccuauuugcaguauaccuacacagaagacuagauaaaauagaagacgaaagaaaccuacaugaagacuucguauucaugaaaacaauacaaagaugcaacaccggagaaagaucccuaucacuacuaaacugcgaagaaauaaaaucacaauucgaaggauucguaaaagacauaaugcuaaacaaagaagaaacaaaaaaagaaaacucuuucgaaaugcaaaaaggagaccaaaacccacaaauagcugcacacgucauaucagaagcaucaucaaaaacaacaucaguacuucaaugggcagaaaaaggauacuauacaaugucaaacaaucuaguaacccuagaaaacggaaaacaacuaacaguaaaaagacaaggacuauacuauauauacgcacaaguaacauucugcucaaacagagaagcaucaucacaagcaccauucaucgcaucacuaugccuaaaauccccaggaagauucgaacgaauccuacuaagagcagcaaacacacacucaucagcaaaaccaugcggccaacaaucaauacaccuaggaggaguauucgaacuacaaccaggagcaucaguauucguaaacguaacagaccccucacaaguaagccacggcacaggauucacaucauuuggacuauuaaaauuauaa

SEQ ID NO: 3905 - protein, 197 aa, Artificial Sequence
  EL-17C__Homo_sapiens__Q9P0M4
MTLLPGLLFLTWLHTCLAHHDPSLRGHPHSHGTPHCYSAEELPLGQAPPHLLARGAKWGQALPVALVSSLEAASHRGRHERPSATTQCPVLRPEEVLEADTHQRSISPWRYRVDTDEDRYPQKLAFAECLCRGCIDARTGRETAALNSVRLLQSLLVLRRRPCSRDGSGLPTPGAFAFHTEFIHVPVGCTCVLPRSV

SEQ ID NO: 3906 - RNA, 594 nt, Artificial Sequence
  EL-17C__Homo_sapiens__AAF28105
augacgcuccuccccggccuccuguuucugaccuggcugcacacaugccuggcccaccaugaccccucccucagggggcacccccacagucacgguaccccacacugcuacucggcugaggaacugccccucggccaggcccccccacaccugcuggcucgaggugccaagugggggcaggcuuugccuguagcccugguguccagccuggaggcagcaagccacagggggaggcacgagaggcccucagcuacgacccagugcccggugcugcggccggaggagguguuggaggcagacacccaccagcgcuccaucucacccuggagauaccguguggacacggaugaggaccgcuauccacagaagcuggccuucgccgagugccugugcagaggcuguaucgaugcacggacgggccgcgagacagcugcgcucaacuccgugcggcugcuccagagccugcuggugcugcgccgccggcccugcucccgcgacggcucggggcuccccacaccuggggccuuugccuuccacaccgaguucauccacguccccgucggcugcaccugcgugcugccccguucaguguga

SEQ ID NO: 3907 - RNA, 594 nt, Artificial Sequence
  derived and/or modified sequence opt1 from EL-17C__Homo_sapiens__AAF28105
augacccugcuccccggccugcuguuccucaccuggcugcacacgugccuggcccaccacgacccgagccuccgcgggcacccccacucccacggcacgccccacugcuacagcgccgaggagcugccccuggggcaggcgccgccccaccuccuggcccggggcgccaagugggggcaggcccugcccguggcccucgucuccagccuggaggcggccucccaccgcggccggcacgagcgccccagcgccaccacccagugcccggugcugcggcccgaggaggugcucgaggccgacacccaccagcgcuccaucagccccuggcgguaccgcgucgacaccgacgaggaccgguacccccagaagcuggcguucgccgagugccugugccgcggcugcaucgacgcccggaccgggcgcgagaccgccgcccucaacuccgugcggcugcugcagagccuccuggugcugcgccggcgcccgugcucccgggacggcagcgggcuccccacccccggcgcguucgccuuccacaccgaguucauccacguccccguggggugcacgugcgugcugccgcgcuccgucuga

SEQ ID NO: 3908 - RNA, 594 nt, Artificial Sequence
  derived and/or modified sequence opt2 from EL-17C__Homo_sapiens__AAF28105
augacccuccuccccggccuccucuuccucaccuggcuccacaccugccucgcccaccacgaccccucccuccgcggccacccccacucccacggcaccccccacugcuacuccgccgaggagcucccccucggccaggcccccccccaccuccucgcccgcggcgccaaguggggccaggcccuccccgucgcccucgucuccucccucgaggccgccucccaccgcggccgccacgagcgccccuccgccaccacccagugccccguccuccgccccgaggagguccucgaggccgacacccaccagcgcuccaucucccccuggcgcuaccgcgucgacaccgacgaggaccgcuacccccagaagcucgccuucgccgagugccucugccgcggcugcaucgacgcccgcaccggccgcgagaccgccgcccucaacuccguccgccuccuccagucccuccucguccuccgccgccgccccugcucccgcgacggcuccggccuccccacccccggcgccuucgccuuccacaccgaguucauccacguccccgucggcugcaccugcguccucccccgcuccgucuga

SEQ ID NO: 3909 - RNA, 594 nt, Artificial Sequence
  derived and/or modified sequence opt3 from EL-17C__Homo_sapiens__AAF28105
augacccugcuccccggccuucuguucuugacaugguuacacacuugccuggcccaucacgacccuagccuaagagggcauccacacucccauggaacgccgcacuguuacucugcugaagaacucccccugggucaggcaccuccacaccuucuggccaggggcgcgaagugggggcaggcuuugcccguggcccucgucucaagucuggaggcagccagccaucggggacgccacgaacgaccuuccgcuaccacacaaugcccaguucugcgucccgaggaagugcucgaggcagauacucaucagagaucuaucucgccuuggagguaucggguagacaccgaugaggaccgcuacccacagaaauuagccuuugcugaaugucugugcagaggcuguauugaugccaggacaggucgggagaccgcggcacuuaacucagugcgcuugcugcaaagccuacucguccugcgaagaaggccgugcagucgggacggguccggacuucccacuccuggcgccuucgcuuuucacacagaguucauacacgugccaguuggcuguaccugcgugcugccccguucugucuga

SEQ ID NO: 3910 - RNA, 594 nt, Artificial Sequence
  derived and/or modified sequence opt4 from EL-17C__Homo_sapiens__AAF28105
augacccugcugcccggccugcuguuccugaccuggcugcacaccugccuggcccaccacgaccccagccugagaggccacccccacagccacggcaccccccacugcuacagcgccgaggagcugccccugggccaggcccccccccaccugcuggccagaggcgccaaguggggccaggcccugcccguggcccuggugagcagccuggaggccgccagccacagaggcagacacgagagacccagcgccaccacccagugccccgugcugagacccgaggaggugcuggaggccgacacccaccagagaagcaucagccccuggagauacagaguggacaccgacgaggacagauacccccagaagcuggccuucgccgagugccugugcagaggcugcaucgacgccagaaccggcagagagaccgccgcccugaacagcgugagacugcugcagagccugcuggugcugagaagaagacccugcagcagagacggcagcggccugcccacccccggcgccuucgccuuccacaccgaguucauccacgugcccgugggcugcaccugcgugcugcccagaagcguguga

SEQ ID NO: 3911 - RNA, 594 nt, Artificial Sequence
  derived and/or modified sequence opt5 from EL-17C__Homo_sapiens__AAF28105
augacccugcuccccggccugcuuuuccugacauggcuccacacgugccuggcccaucacgacccuagccuuagagggcauccgcacucccauggaacaccccacuguuacucugcugaagaacugccucucggccaggcgcccccucaucugcuggcccgcggggcuaaguggggacaagcccuccccguggcccuggucagcucccuugaggcugccucucaccggggcagacacgaacggccuagcgcuaccacccagugcccgguucugcgccccgaggaagugcucgaggccgauacacaucagagauccaucucuccuuggcgguaucgcguggacaccgaugaggacagauacccccagaaacuggcguuugccgaaugucuuugccggggguguauugaugcucgcacaggaagagagaccgccgcucugaacagcguccggcuccugcaaucccugcucgugcugcgcagacggccuugcagccgcgacggcucuggccuucccacgccgggggccuucgcguuucacaccgaguucauccacguuccugugggauguacaugcguccugcccagauccguguga

SEQ ID NO: 3912 - RNA, 594 nt, Artificial Sequence
  derived and/or modified sequence opt6 from EL-17C__Homo_sapiens__AAF28105
augacauuauuaccaggacuauuauuuuuaacaugguuacauacaugucuagcucaucacgauccaucacuaagaggacauccacauucacacggaacaccucacuguuauucagcagaagaauuaccauuaggacaagcaccaccacauuuacuagcaagaggagcaaaauggggacaagcauuaccaguagcauuaguaagcucacuagaagcagcaucacauagaggaagacaugaaagaccaucagcaacaacacaauguccagucuuaagaccagaagaagucuuagaagcagauacacaucaaagaucaauaucaccauggcgauaccgaguagauacagaugaagauagauauccacaaaaacuagcauuugcagaauguuuauguagaggauguauagaugcaagaacaggaagagaaacagcagcauuaaauuccguaagauuacuacaaaguuuacuaguauuaagaagaagaccauguucaagagacggaucaggacuaccaacuccaggagcauucgccuuucauacagaauuuauacacguaccaguaggauguacuuguguauuaccaagaucaguauaa

SEQ ID NO: 3913 - protein, 178 aa, Artificial Sequence
  FLT3_ligand__Homo_sapiens__AAA90950.1
MTVLAPAWSPTTYLLLLLLLSSGLSGTQDCSFQHSPISSDFAVKIRELSDYLLQDYPVTVASNLQDEELCGGLWRLVLAQRWMERLKTVAGSKMQGLLERVNTEIHFVTKCAFQPPPSCLRFVQTNISRLLQETSEQLVALKPWITRQNFSRCLELQCQPVETVFHRVSQDGLDLLTS

SEQ ID NO: 3914 - RNA, 537 nt, Artificial Sequence
  FLT3_ligand__Homo_sapiens__U29874.1
augacagugcuggcgccagccuggagcccaacaaccuaucuccuccugcugcugcugcugagcucgggacucagugggacccaggacugcuccuuccaacacagccccaucuccuccgacuucgcugucaaaauccgugagcugucugacuaccugcuucaagauuacccagucaccguggccuccaaccugcaggacgaggagcucugcgggggccucuggcggcugguccuggcacagcgcuggauggagcggcucaagacugucgcuggguccaagaugcaaggcuugcuggagcgcgugaacacggagauacacuuugucaccaaaugugccuuucagcccccccccagcugucuucgcuucguccagaccaacaucucccgccuccugcaggagaccuccgagcagcugguggcgcugaagcccuggaucacucgccagaacuucucccggugccuggagcugcagugucagcccguagagacgguguuucaccgugucagccaggauggucucgaucuccugaccucguga

SEQ ID NO: 3915 - RNA, 537 nt, Artificial Sequence
  derived and/or modified sequence opt1 from FLT3_ligand__Homo_sapiens__U29874.1
augaccgugcuggcccccgccuggagcccgaccacguaccuccugcugcuccugcugcucuccagcggccuguccgggacccaggacugcagcuuccagcacucccccaucagcuccgacuucgcggucaagauccgcgagcugagcgacuaccuccugcaggacuaccccgugaccguggccuccaaccugcaggacgaggagcucugcggcgggcuguggcggcugguccucgcccagcgcuggauggagcggcugaagaccguggccggcagcaagaugcaggggcugcucgagcgcgugaacacggagauccacuucgucaccaagugcgccuuccagcccccgcccuccugccugcgguucgugcagaccaacaucagccgccugcuccaggagaccuccgagcagcugguggcgcugaagcccuggaucacgcggcagaacuucagccgcugccucgagcugcagugccagcccgucgagaccguguuccaccgggugucccaggacggccuggaccuccugaccagcuga

SEQ ID NO: 3916 - RNA, 537 nt, Artificial Sequence
  derived and/or modified sequence opt2 from FLT3_ligand__Homo_sapiens__U29874.1
augaccguccucgcccccgccuggucccccaccaccuaccuccuccuccuccuccuccucuccuccggccucuccggcacccaggacugcuccuuccagcacucccccaucuccuccgacuucgccgucaagauccgcgagcucuccgacuaccuccuccaggacuaccccgucaccgucgccuccaaccuccaggacgaggagcucugcggcggccucuggcgccucguccucgcccagcgcuggauggagcgccucaagaccgucgccggcuccaagaugcagggccuccucgagcgcgucaacaccgagauccacuucgucaccaagugcgccuuccagcccccccccuccugccuccgcuucguccagaccaacaucucccgccuccuccaggagaccuccgagcagcucgucgcccucaagcccuggaucacccgccagaacuucucccgcugccucgagcuccagugccagcccgucgagaccgucuuccaccgcgucucccaggacggccucgaccuccucaccuccuga

SEQ ID NO: 3917 - RNA, 537 nt, Artificial Sequence
  derived and/or modified sequence opt3 from FLT3_ligand__Homo_sapiens__U29874.1
augaccgugcuggcccccgcuuggagcccuacaacuuaccuccuucuguuguuacugcuauccucuggccucucagggacgcaggacugcaguuuccaacacagcccaaucuccucugauuuugcagucaagauuagagagcugucggacuaucuucugcaggauuacccgguuaccguggccucaaacuugcaggacgaggaacucuguggaggucuguggaggcugguacucgcgcagcgguggauggaacgcuuaaaaacaguggcuggcagcaagaugcaagggcugcuugagcgagucaauacugaaauacauuucgugaccaaaugcgccuuucagcccccuccaaguuguuugcguuucguucagacaaacaucuccagacugcuacaggagaccucugagcaacucguggcacugaagcccuggauuacuaggcagaauuuuagccggugccuugaacugcagugucagccugucgagacaguguuccaccgcguaucccaagauggauuggaccuccugaccucauga

SEQ ID NO: 3918 - RNA, 537 nt, Artificial Sequence
  derived and/or modified sequence opt4 from FLT3_ligand__Homo_sapiens__U29874.1
augaccgugcuggcccccgccuggagccccaccaccuaccugcugcugcugcugcugcugagcagcggccugagcggcacccaggacugcagcuuccagcacagccccaucagcagcgacuucgccgugaagaucagagagcugagcgacuaccugcugcaggacuaccccgugaccguggccagcaaccugcaggacgaggagcugugcggcggccuguggagacuggugcuggcccagagauggauggagagacugaagaccguggccggcagcaagaugcagggccugcuggagagagugaacaccgagauccacuucgugaccaagugcgccuuccagcccccccccagcugccugagauucgugcagaccaacaucagcagacugcugcaggagaccagcgagcagcugguggcccugaagcccuggaucaccagacagaacuucagcagaugccuggagcugcagugccagcccguggagaccguguuccacagagugagccaggacggccuggaccugcugaccagcuga

SEQ ID NO: 3919 - RNA, 537 nt, Artificial Sequence
  derived and/or modified sequence opt5 from FLT3_ligand__Homo_sapiens__U29874.1
augaccgugcuggcccccgcuuggagcccuacaacguaccuccugcuucugcuccugcuuuccucuggccugagcgggacccaggacugcuccuuccaacacucuccgaucagcuccgauuuugccgucaagauuagagagcucucugacuaucugcugcaggauuaccccguuacaguggcgagcaaccuccaggacgaggaacuguguggaggccuuuggcggcuggugcucgcucagcgcuggauggaaagacugaaaaccgucgccggguccaagaugcaaggacuucuggagcgggugaauacagaaauccauuucguuaccaaaugcgccuuucagccucccccuagcugucuccgcuucgugcagacaaacauuucuagacugcugcaggagaccuccgagcaacucgucgcucugaagcccuggaucacgcggcagaauuuuagccgcugccuugaacugcagugucagccuguggagaccguuuuccacagagugucucaagauggccucgaccugcuuacauccuga

SEQ ID NO: 3920 - RNA, 537 nt, Artificial Sequence
  derived and/or modified sequence opt6 from FLT3_ligand__Homo_sapiens__U29874.1
augacaguacucgcaccagcauggucaccaacaacauaccuacuacuauuacuacuauuauccucaggacuaucaggaacacaagacugcucauuccaacacucaccaauauccucagacuucgcaguaaaaauacgagaacuaucagacuacuuacuacaagacuacccaguaacaguagcauccaaccuacaagacgaagaacuauguggaggacucuggagauuaguacuagcacaaagauggauggaaagacuaaaaacaguagcaggcucaaaaaugcaaggacuacuagaaagagucaacacagaaauccacuuuguaacaaaaugcgcauuucaaccacccccaucaugccuaagauucguacaaacaaacauaucaagauuacuacaagaaacaucagaacaacuaguagcauuaaaaccauggauaacaagacaaaacuucucaagaugccuagaacuccaaugccaacccguagaaacaguauuccacagaguaucacaagacggauuagaccuauuaaccucauaa

SEQ ID NO: 3921 - protein, 235 aa, Artificial Sequence
  FLT3_ligand__Homo_sapiens__P49771
MTVLAPAWSPTTYLLLLLLLSSGLSGTQDCSFQHSPISSDFAVKIRELSDYLLQDYPVTVASNLQDEELCGGLWRLVLAQRWMERLKTVAGSKMQGLLERVNTEIHFVTKCAFQPPPSCLRFVQTNISRLLQETSEQLVALKPWITRQNFSRCLELQCQPDSSTLPPPWSPRPLEATAPTAPQPPLLLLLLLPVGLLLLAAAWCLHWQRTRRRTPRPGEQVPPVPSPQDLLLVEH

SEQ ID NO: 3922 - RNA, 708 nt, Artificial Sequence
  FLT3_ligand__Homo_sapiens__CCDS12767.1
augacagugcuggcgccagccuggagcccaacaaccuaucuccuccugcugcugcugcugagcucgggacucagugggacccaggacugcuccuuccaacacagccccaucuccuccgacuucgcugucaaaauccgugagcugucugacuaccugcuucaagauuacccagucaccguggccuccaaccugcaggacgaggagcucugcgggggccucuggcggcugguccuggcacagcgcuggauggagcggcucaagacugucgcuggguccaagaugcaaggcuugcuggagcgcgugaacacggagauacacuuugucaccaaaugugccuuucagcccccccccagcugucuucgcuucguccagaccaacaucucccgccuccugcaggagaccuccgagcagcugguggcgcugaagcccuggaucacucgccagaacuucucccggugccuggagcugcagugucagcccgacuccucaacccugccacccccauggaguccccggccccuggaggccacagccccgacagccccgcagcccccucugcuccuccuacugcugcugcccgugggccuccugcugcuggccgcugccuggugccugcacuggcagaggacgcggcggaggacaccccgcccuggggagcaggugccccccguccccaguccccaggaccugcugcuuguggagcacuga

SEQ ID NO: 3923 - RNA, 708 nt, Artificial Sequence
  derived and/or modified sequence opt1 from FLT3_ligand__Homo_sapiens__CCDS12767.1
augaccgugcuggcccccgccugguccccgaccaccuaccuccugcugcuccugcugcucuccagcggccuguccgggacccaggacugcagcuuccagcacucccccaucagcuccgacuucgcggucaagauccgcgagcugagcgacuaccuccugcaggacuaccccgugaccguggccuccaaccugcaggacgaggagcucugcggcgggcuguggcggcugguccucgcccagcgcuggauggagcggcugaagaccguggccggcagcaagaugcaggggcugcucgagcgcgugaacacggagauccacuucgucaccaagugcgccuuccagcccccgcccuccugccugcgguucgugcagaccaacaucagccgccugcuccaggagaccuccgagcagcugguggcgcugaagcccuggaucacgcggcagaacuucagccgcugccucgagcugcagugccagcccgacuccagcacccugccgccgcccuggagcccccggccccucgaggccaccgcccccaccgcgccccagcccccgcugcugcuccugcugcuccugcccgucggccugcuccugcuggccgccgccuggugccuccacuggcagcgcacgcggcgccggacgccccgccccggcgagcaggucccgcccgugcccagcccccaggaccugcugcucguggagcacuga

SEQ ID NO: 3924 - RNA, 708 nt, Artificial Sequence
  derived and/or modified sequence opt2 from FLT3_ligand__Homo_sapiens__CCDS12767.1
augaccguccucgcccccgccuggucccccaccaccuaccuccuccuccuccuccuccucuccuccggccucuccggcacccaggacugcuccuuccagcacucccccaucuccuccgacuucgccgucaagauccgcgagcucuccgacuaccuccuccaggacuaccccgucaccgucgccuccaaccuccaggacgaggagcucugcggcggccucuggcgccucguccucgcccagcgcuggauggagcgccucaagaccgucgccggcuccaagaugcagggccuccucgagcgcgucaacaccgagauccacuucgucaccaagugcgccuuccagcccccccccuccugccuccgcuucguccagaccaacaucucccgccuccuccaggagaccuccgagcagcucgucgcccucaagcccuggaucacccgccagaacuucucccgcugccucgagcuccagugccagcccgacuccuccacccuccccccccccugguccccccgcccccucgaggccaccgcccccaccgccccccagcccccccuccuccuccuccuccuccuccccgucggccuccuccuccucgccgccgccuggugccuccacuggcagcgcacccgccgccgcaccccccgccccggcgagcaggucccccccguccccuccccccaggaccuccuccucgucgagcacuga

SEQ ID NO: 3925 - RNA, 708 nt, Artificial Sequence
  derived and/or modified sequence opt3 from FLT3_ligand__Homo_sapiens__CCDS12767.1
augaccgugcuggcccccgcuuggagcccuacaacuuaccuccuucuguuguuacugcuauccucuggccucucagggacgcaggacugcaguuuccaacacagcccaaucuccucugauuuugcagucaagauuagagagcugucggacuaucuucugcaggauuacccgguuaccguggccucaaacuugcaggacgaggaacucuguggaggucuguggaggcugguacucgcgcagcgguggauggaacgcuuaaaaacaguggcuggcagcaagaugcaagggcugcuugagcgagucaauacugaaauacauuucgugaccaaaugcgccuuucagcccccuccaaguuguuugcguuucguucagacaaacaucuccagacugcuacaggagaccucugagcaacucguggcacugaagcccuggauuacuaggcagaauuuuagccggugccuugaacugcagugucagccugauuccucaacauugccacccccuuggaguccacgcccgcucgaggccaccgcucccacggcaccucaaccaccccuguuacugcuccuucuguugccugucggacuacugcuccuggccgcugccuggugccuucacuggcagagaacuaggcggcgcaccccacgacccggcgaacaggugccgccuguacccagcccacaagaccuguugcucguugagcauuga

SEQ ID NO: 3926 - RNA, 708 nt, Artificial Sequence
  derived and/or modified sequence opt4 from FLT3_ligand__Homo_sapiens__CCDS12767.1
augaccgugcuggcccccgccuggagccccaccaccuaccugcugcugcugcugcugcugagcagcggccugagcggcacccaggacugcagcuuccagcacagccccaucagcagcgacuucgccgugaagaucagagagcugagcgacuaccugcugcaggacuaccccgugaccguggccagcaaccugcaggacgaggagcugugcggcggccuguggagacuggugcuggcccagagauggauggagagacugaagaccguggccggcagcaagaugcagggccugcuggagagagugaacaccgagauccacuucgugaccaagugcgccuuccagcccccccccagcugccugagauucgugcagaccaacaucagcagacugcugcaggagaccagcgagcagcugguggcccugaagcccuggaucaccagacagaacuucagcagaugccuggagcugcagugccagcccgacagcagcacccugcccccccccuggagccccagaccccuggaggccaccgcccccaccgccccccagcccccccugcugcugcugcugcugcugcccgugggccugcugcugcuggccgccgccuggugccugcacuggcagagaaccagaagaagaacccccagacccggcgagcaggugccccccgugcccagcccccaggaccugcugcugguggagcacuga

SEQ ID NO: 3927 - RNA, 708 nt, Artificial Sequence
  derived and/or modified sequence opt5 from FLT3_ligand__Homo_sapiens__CCDS12767.1
augaccgugcuggcccccgcuuggagcccuaccacguaccuccugcuucugcuccugcuuuccucuggccugagcgggacccaggacugcuccuuccaacacucuccgaucagcuccgauuuugccgucaagauuagagagcucucugacuaucugcugcaggauuaccccguuacaguggcgagcaaccuccaggacgaggaacuguguggaggccuuuggcggcuggugcucgcucagcgcuggauggaaagacugaaaaccgucgccggguccaagaugcaaggacuucuggagcgggugaauacagaaauccauuucguuaccaaaugcgccuuucagccucccccuagcugucuccgcuucgugcagacaaacauuucuagacugcugcaggagaccuccgagcaacucgucgcucugaagcccuggaucacgcggcagaauuuuagccgcugccuugaacugcagugucagccugauucuuccacccucccgcccccuuggagccccagaccucuggaggccacagcucccaccgccccgcaaccuccccuucugcuccugcugcuccugccugugggccuucugcuccuggcggccgcuuggugccuucacuggcagcggacacgcagacggacaccccgccccggggaacagguuccuccggugcccucuccucaagaccugcuccuggucgagcauuga

SEQ ID NO: 3928 - RNA, 708 nt, Artificial Sequence
  derived and/or modified sequence opt6 from FLT3_ligand__Homo_sapiens__CCDS12767.1
augaccguauuagcaccagcauggucuccaacaacauaccuacuacuacuacuauuauuaucuucaggacuaucagguacccaagacugcucauuucaacacuccccaauaucaucagacuucgcuguaaaaauaagagaauuaucagacuacuuacuacaagacuacccaguaacaguagcaucaaaccuacaagaugaagaacuaugcggaggacuauggcgacucguauuagcacaaagauggauggaaagacuaaaaacuguagcaggaucaaaaaugcaaggacuacuagaacgaguaaacacagaaauccacuucguaaccaaaugcgcauuccaaccaccaccauccugcuuaagauucguacaaacaaacauaucaagacuacuacaagaaacaucagaacaacuaguagcauuaaaaccauggauaaccagacaaaacuucuccagaugcuuagaauuacaaugccaaccagacucauccacacuaccaccacccugguccccaagaccccuagaagccacagcaccaacagcaccccaaccacccuuauuauuauuauuacuccuaccagucggacuacuacuucuagcagcugcauggugccuacauuggcaaagaaccagaagacgaacaccaagaccaggagaacaaguaccaccagucccaucaccacaagaccuauuacuaguagaacacuaa

SEQ ID NO: 3929 - protein, 207 aa, Artificial Sequence
  G-CSF__Homo_sapiens__P09919
MAGPATQSPMKLMALQLLLWHSALWTVQEATPLGPASSLPQSFLLKCLEQVRKIQGDGAALQEKLVSECATYKLCHPEELVLLGHSLGIPWAPLSSCPSQALQLAGCLSQLHSGLFLYQGLLQALEGISPELGPTLDTLQLDVADFATTIWQQMEELGMAPALQPTQGAMPAFASAFQRRAGGVLVASHLQSFLEVSYRVLRHLAQP

SEQ ID NO: 3930 - RNA, 624 nt, Artificial Sequence
  G-CSF__Homo_sapiens__AAK62469
auggcuggaccugccacccagagccccaugaagcugauggcccugcagcugcugcuguggcacagugcacucuggacagugcaggaagccaccccccugggcccugccagcucccugccccagagcuuccugcucaagugcuuagagcaagugaggaagauccagggcgauggcgcagcgcuccaggagaagcuggugagugagugugccaccuacaagcugugccaccccgaggagcuggugcugcucggacacucucugggcauccccugggcuccccugagcagcugccccagccaggcccugcagcuggcaggcugcuugagccaacuccauagcggccuuuuccucuaccaggggcuccugcaggcccuggaagggaucucccccgaguugggucccaccuuggacacacugcagcuggacgucgccgacuuugccaccaccaucuggcagcagauggaagaacugggaauggccccugcccugcagcccacccagggugccaugccggccuucgccucugcuuuccagcgccgggcaggagggguccugguugccucccaucugcagagcuuccuggaggugucguaccgcguucuacgccaccuugcccagcccuga

SEQ ID NO: 3931 - RNA, 624 nt, Artificial Sequence
  derived and/or modified sequence opt1 from G-CSF__Homo_sapiens__AAK62469
auggccggccccgccacccagagcccgaugaagcugauggcgcuccagcugcugcucuggcacuccgcccuguggaccgugcaggaggccacgccccuggggcccgccagcucccucccccagagcuuccugcugaagugccucgagcagguccgcaagauccagggcgacggggccgcgcugcaggagaagcugguguccgagugcgccaccuacaagcucugccacccggaggagcuggugcugcucggccacagccuggggauccccugggcgccccuguccagcugccccucccaggcccuccagcuggccggcugccugagccagcuccacuccggccuguuccuguaccaggggcuccugcaggcccuggagggcaucagcccggagcucgggcccacccuggacacccugcagcucgacgucgccgacuucgccacgaccaucuggcagcagauggaggagcugggcauggcccccgcgcugcagcccacccagggggccaugccggccuucgccuccgccuuccagcggcgcgcgggcggcgugcucguggccagccaccuccaguccuuccuggaggucagcuaccgggugcugcgccaccuggcccagcccuga

SEQ ID NO: 3932 - RNA, 624 nt, Artificial Sequence
  derived and/or modified sequence opt2 from G-CSF__Homo_sapiens__AAK62469
auggccggccccgccacccagucccccaugaagcucauggcccuccagcuccuccucuggcacuccgcccucuggaccguccaggaggccaccccccucggccccgccuccucccucccccaguccuuccuccucaagugccucgagcagguccgcaagauccagggcgacggcgccgcccuccaggagaagcucgucuccgagugcgccaccuacaagcucugccaccccgaggagcucguccuccucggccacucccucggcauccccugggccccccucuccuccugccccucccaggcccuccagcucgccggcugccucucccagcuccacuccggccucuuccucuaccagggccuccuccaggcccucgagggcaucucccccgagcucggccccacccucgacacccuccagcucgacgucgccgacuucgccaccaccaucuggcagcagauggaggagcucggcauggcccccgcccuccagcccacccagggcgccaugcccgccuucgccuccgccuuccagcgccgcgccggcggcguccucgucgccucccaccuccaguccuuccucgaggucuccuaccgcguccuccgccaccucgcccagcccuga

SEQ ID NO: 3933 - RNA, 624 nt, Artificial Sequence
  derived and/or modified sequence opt3 from G-CSF__Homo_sapiens__AAK62469
auggccggccccgcuacccagagcccuaugaagcugauggcacuccaacuucuguuguggcacuccgccuuauggacagugcaggaggcgacuccacuggggccggcuucuucacuaccccagaguuuccuccugaaaugccuugaacaggucagaaagauccaaggagacggugccgcacugcaggagaaauugguuagcgaaugugccacguacaagcucugccauccugaggaacuggugcugcucggccacuccuuagggauuccaugggcuccccugucuucguguccuucacaggcacuucaguuggccggaugccugagccaacuacauaguggccucuuucuguaucagggucuucugcaggcuuuggaggggauauccccagagcucggacccacccuggauacauuacagcuggacguagccgauuucgcgacuaccaucuggcaacagauggaggaacucggcauggccccugcacuucagccaacacaaggcgcuaugccggccuuugcaucugcuuuccagaggcgggccgggggagugcuggucgcgagccacuugcaguccuuucuagaagugucauaccgcguucugcgacaucucgcccagcccuga

SEQ ID NO: 3934 - RNA, 624 nt, Artificial Sequence
  derived and/or modified sequence opt4 from G-CSF__Homo_sapiens__AAK62469
auggccggccccgccacccagagccccaugaagcugauggcccugcagcugcugcuguggcacagcgcccuguggaccgugcaggaggccaccccccugggccccgccagcagccugccccagagcuuccugcugaagugccuggagcaggugagaaagauccagggcgacggcgccgcccugcaggagaagcuggugagcgagugcgccaccuacaagcugugccaccccgaggagcuggugcugcugggccacagccugggcauccccugggccccccugagcagcugccccagccaggcccugcagcuggccggcugccugagccagcugcacagcggccuguuccuguaccagggccugcugcaggcccuggagggcaucagccccgagcugggccccacccuggacacccugcagcuggacguggccgacuucgccaccaccaucuggcagcagauggaggagcugggcauggcccccgcccugcagcccacccagggcgccaugcccgccuucgccagcgccuuccagagaagagccggcggcgugcugguggccagccaccugcagagcuuccuggaggugagcuacagagugcugagacaccuggcccagcccuga

SEQ ID NO: 3935 - RNA, 624 nt, Artificial Sequence
  derived and/or modified sequence opt5 from G-CSF__Homo_sapiens__AAK62469
auggccggccccgcuacccagagcccuaugaagcugauggcccuccaacugcuucuguggcacuccgcgcucuggacagugcaggaggcuacgccgcuggggcccgccucuagccuuccucaguccuuccugcucaaaugccuggaacaggucagaaagauccaaggagacggcgccgcucugcaggagaaacucguuucugaaugugccaccuacaagcugugccaucccgaggaacuugugcugcucgggcacagccugggcauuccuugggcuccccuuuccucuuguccuagccaggcccugcagcucgcgggaugccugucccaacugcauagcgggcucuuucuguaucagggacuucugcaggcccucgagggcaucucuccggagcugggccccacacuugauacccugcagcucgacguggcugauuucgccacaaccauuuggcaacagauggaggaacuggggauggcuccugcccugcagcccacacaaggagcgaugccugccuuugcuuccgccuuccagcggcgcgcuggcgggguccucguggccagccaucugcagucuuuucuugaaguuuccuacagagugcugcggcaccucgcccagcccuga

SEQ ID NO: 3936 - RNA, 624 nt, Artificial Sequence
  derived and/or modified sequence opt6 from G-CSF__Homo_sapiens__AAK62469
auggcaggaccagcaacacaaucaccaaugaaauuaauggcacuacaauuacuauuauggcacucagcacuauggacaguacaagaagcaacaccauuaggaccagcauccucauuaccacaauccuuccuacuaaaaugccuagaacaaguaagaaaaauacaaggagacggagcagcauuacaagaaaaauuaguaucugaaugcgcaacauacaaacuaugucacccagaagaacucguacuauuaggacauucccuaggaauaccaugggcaccacuaucauccugcccaucacaagcacuacaauuagcaggauguuuaucacaauuacacucaggacuauuccucuaccaaggacuacuacaagcacuagaaggaauauccccagaacuaggaccaacccuagacacacuacaauuagacguagcagacuucgcaacaacaauauggcaacaaauggaagaacuaggcauggcaccagcauuacaaccaacacaaggagcaaugccagcauucgcaucagcauuccaacgaagagcaggaggaguauuaguagcaucacaccuucaaucauuccuagaaguaucuuaccgaguacuaagacaccuagcacaaccauaa

SEQ ID NO: 3937 - protein, 199 aa, Artificial Sequence
  GITRL__Homo_sapiens__Q9UNG2
MTLHPSPITCEFLFSTALISPKMCLSHLENMPLSHSRTQGAQRSSWKLWLFCSIVMLLFLCSFSWLIFIFLQLETAKEPCMAKFGPLPSKWQMASSEPPCVNKVSDWKLEILQNGLYLIYGQVAPNANYNDVAPFEVRLYKNKDMIQTLTNKSKIQNVGGTYELHVGDTIDLIFNSEHQVLKNNTYWGIILLANPQFIS

SEQ ID NO: 3938 - RNA, 600 nt, Artificial Sequence
  GITRL__Homo_sapiens__CCDS1305.2
augacauugcauccuucacccaucacuugugaauuuuuguuuuccacagcucucauuucuccaaaaauguguuugagccacuuggaaaauaugccuuuaagccauucaagaacucaaggagcucagagaucauccuggaagcuguggcucuuuugcucaauaguuauguugcuauuucuuugcuccuucaguuggcuaaucuuuauuuuucuccaauuagagacugcuaaggagcccuguauggcuaaguuuggaccauuacccucaaaauggcaaauggcaucuucugaaccuccuugcgugaauaaggugucugacuggaagcuggagauacuucagaauggcuuauauuuaauuuauggccaaguggcucccaaugcaaacuacaaugauguagcuccuuuugaggugcggcuguauaaaaacaaagacaugauacaaacucuaacaaacaaaucuaaaauccaaaauguaggagggacuuaugaauugcauguuggggacaccauagacuugauauucaacucugagcaucagguucuaaaaaauaauacauacugggguaucauuuuacuagcaaauccccaauucaucuccuag

SEQ ID NO: 3939 - RNA, 600 nt, Artificial Sequence
  derived and/or modified sequence opt1 from GITRL__Homo_sapiens__CCDS1305.2
augacccugcaccccagcccgaucacgugcgaguuccucuucuccaccgcccugaucagccccaagaugugccugucccaccucgagaacaugccccugagccacucccgcacccagggcgcccagcggagcuccuggaagcuguggcuguucugcagcaucgugaugcuccuguuccucugcuccuucagcuggcugaucuucaucuuccugcagcucgagaccgcgaaggagcccugcauggccaaguucgggccgcugcccuccaaguggcagauggccagcuccgagccgcccugcgucaacaaggugagcgacuggaagcuggagauccuccagaacggccuguaccugaucuacgggcaggucgcccccaacgccaacuacaacgacguggcgcccuucgaggugcgccucuacaagaacaaggacaugauccagacccugacgaacaaguccaagauccagaacgugggcgggaccuacgagcugcacgucggcgacaccaucgaccucaucuucaacagcgagcaccaggugcugaagaacaacaccuacuggggcaucauccugcucgccaacccccaguucaucuccuga

SEQ ID NO: 3940 - RNA, 600 nt, Artificial Sequence
  derived and/or modified sequence opt2 from GITRL__Homo_sapiens__CCDS1305.2
augacccuccaccccucccccaucaccugcgaguuccucuucuccaccgcccucaucucccccaagaugugccucucccaccucgagaacaugccccucucccacucccgcacccagggcgcccagcgcuccuccuggaagcucuggcucuucugcuccaucgucaugcuccucuuccucugcuccuucuccuggcucaucuucaucuuccuccagcucgagaccgccaaggagcccugcauggccaaguucggcccccuccccuccaaguggcagauggccuccuccgagccccccugcgucaacaaggucuccgacuggaagcucgagauccuccagaacggccucuaccucaucuacggccaggucgcccccaacgccaacuacaacgacgucgcccccuucgagguccgccucuacaagaacaaggacaugauccagacccucaccaacaaguccaagauccagaacgucggcggcaccuacgagcuccacgucggcgacaccaucgaccucaucuucaacuccgagcaccagguccucaagaacaacaccuacuggggcaucauccuccucgccaacccccaguucaucuccuga

SEQ ID NO: 3941 - RNA, 600 nt, Artificial Sequence
  derived and/or modified sequence opt3 from GITRL__Homo_sapiens__CCDS1305.2
augacccugcaccccagcccuaucacaugcgaguuccucuuuuccacugcccuuauuucuccaaagaugugucugucacauuuggaaaacaugccguuaagucacagcagaacgcagggcgcucaaagguccucuuggaaacuguggcuauucugcucgauagugaugcuccuguuucuuuguucauucagcuggcugaucuuuauuuucuugcagcucgagaccgcaaaggaacccugcauggccaaauuugggccucugccaaguaaguggcagauggcguccucugagcccccuugugucaauaaaguuagcgacuggaagcuggaaauccuccagaacggauuauaccugauuuauggucaaguggcuccaaaugccaacuacaaugauguagcacccuucgaggugcggcuuuauaagaacaaagacaugauccagacauugacuaauaaguccaaaauacagaacgucggcgggaccuacgagcugcaugugggagauacaaucgaccuaauuuuuaauucagaacaccagguucucaagaacaauaccuauuggggcaucauucugcuugccaacccucaauucaucaguuga

SEQ ID NO: 3942 - RNA, 600 nt, Artificial Sequence
  derived and/or modified sequence opt4 from GITRL__Homo_sapiens__CCDS1305.2
augacccugcaccccagccccaucaccugcgaguuccuguucagcaccgcccugaucagccccaagaugugccugagccaccuggagaacaugccccugagccacagcagaacccagggcgcccagagaagcagcuggaagcuguggcuguucugcagcaucgugaugcugcuguuccugugcagcuucagcuggcugaucuucaucuuccugcagcuggagaccgccaaggagcccugcauggccaaguucggcccccugcccagcaaguggcagauggccagcagcgagccccccugcgugaacaaggugagcgacuggaagcuggagauccugcagaacggccuguaccugaucuacggccagguggcccccaacgccaacuacaacgacguggcccccuucgaggugagacuguacaagaacaaggacaugauccagacccugaccaacaagagcaagauccagaacgugggcggcaccuacgagcugcacgugggcgacaccaucgaccugaucuucaacagcgagcaccaggugcugaagaacaacaccuacuggggcaucauccugcuggccaacccccaguucaucagcuga

SEQ ID NO: 3943 - RNA, 600 nt, Artificial Sequence
  derived and/or modified sequence opt5 from GITRL__Homo_sapiens__CCDS1305.2
augacccugcaccccagcccuaucacaugcgaguuccucuuuuccacggcccugauuucuccgaagaugugucuuagccaucuggaaaacaugccccucucccacucuagaacccagggcgcucaacggagcuccuggaaacuguggcuuuucugcucuaucgugaugcugcucuuucuguguagcuucuccuggcugauuuuuaucuuccuccagcuggagacagccaaggaaccuugcauggcgaaauuugggccccuuccuagcaaguggcagauggcuucuuccgagcccccuugugucaauaaaguuagcgacuggaagcuggaaauucuccagaacggacuguaccuuaucuauggccaaguggccccgaaugccaacuacaaugauguggcucccuucgagguccgccuguauaagaacaaagacaugauccagacccucacaaauaagucuaaaauucagaacguugggggaaccuacgagcugcaugugggcgauacaaucgaccugauuuuuaauuccgaacaccaggugcucaagaacaauaccuauugggggaucauucugcuugccaacccucaauucaucagcuga

SEQ ID NO: 3944 - RNA, 600 nt, Artificial Sequence
  derived and/or modified sequence opt6 from GITRL__Homo_sapiens__CCDS1305.2
augacacuacacccaucacccauaacaugcgaauuccuauucucaacagcccuaauaucaccaaaaaugugccuaucacaccuagaaaacaugccacuaucacacucaagaacacaaggagcacaaagaucaucauggaaacucuggcuauucugcucaaucguaauguuacuauuccuaugcuccuucucauggcuaauauucauauuccuccaacuagaaacagcaaaagaaccaugcauggccaaauucggaccauuaccaucuaaauggcaaauggcaucaucagaacccccaugcguaaacaaaguaucagacuggaaacuagaaauauuacaaaacggacucuauuuaauauacggacaaguagcaccaaacgcaaacuacaacgacguagcaccauucgaaguaagacuauacaaaaauaaagacaugauacaaacacuaacaaacaaaucaaaaauacaaaacguaggaggaacauacgaacuacacguaggagacacaauagaccuaaucuucaacucagaacaccaaguacuaaaaaacaacacauacuggggaauaauacuacuagcaaacccacaauucauaucauaa

SEQ ID NO: 3945 - protein, 144 aa, Artificial Sequence
  GM-CSF__Homo_sapiens__P04141
MWLQSLLLLGTVACSISAPARSPSPSTQPWEHVNAIQEARRLLNLSRDTAAEMNETVEVISEMFDLQEPTCLQTRLELYKQGLRGSLTKLKGPLTMMASHYKQHCPPTPETSCATQIITFESFKENLKDFLLVIPFDCWEPVQE

SEQ ID NO: 3946 - RNA, 435 nt, Artificial Sequence
  GM-CSF__Homo_sapiens__AAA52122
auguggcugcagagccugcugcucuugggcacuguggccugcagcaucucugcacccgcccgcucgcccagccccagcacacagcccugggagcaugugaaugccauccaggaggcccggcgucuccugaaccugaguagagacacugcugcugagaugaaugaaacaguagaagucaucucagaaauguuugaccuccaggagccgaccugccuacagacccgccuggagcuguacaagcagggccugcggggcagccucaccaagcucaagggccccuugaccaugauggccagccacuacaaacagcacugcccuccaaccccggaaacuuccugugcaacccagauuaucaccuuugaaaguuucaaagagaaccugaaggacuuucugcuugucauccccuuugacugcugggagccaguccaggaguga

SEQ ID NO: 3947 - RNA, 435 nt, Artificial Sequence
  derived and/or modified sequence opt1 from GM-CSF__Homo_sapiens__AAA52122
auguggcugcagagccuccugcugcucggcaccguggccugcuccaucagcgcccccgcgcgcuccccgagccccuccacccagcccugggagcacgucaacgccauccaggaggcccggcgccugcugaaccucagccgggacacggccgccgagaugaacgagaccguggaggugaucuccgagauguucgaccugcaggagccgaccugccugcagacccgccucgagcuguacaagcaggggcugcggggcagccucacgaagcugaaggggccccugaccaugauggcgucccacuacaagcagcacugcccgcccacccccgagaccagcugcgccacgcagaucaucaccuucgaguccuucaaggagaaccucaaggacuuccugcuggucauccccuucgacugcugggagcccgugcaggaguga

SEQ ID NO: 3948 - RNA, 435 nt, Artificial Sequence
  derived and/or modified sequence opt2 from GM-CSF__Homo_sapiens__AAA52122
auguggcuccagucccuccuccuccucggcaccgucgccugcuccaucuccgcccccgcccgcucccccucccccuccacccagcccugggagcacgucaacgccauccaggaggcccgccgccuccucaaccucucccgcgacaccgccgccgagaugaacgagaccgucgaggucaucuccgagauguucgaccuccaggagcccaccugccuccagacccgccucgagcucuacaagcagggccuccgcggcucccucaccaagcucaagggcccccucaccaugauggccucccacuacaagcagcacugcccccccacccccgagaccuccugcgccacccagaucaucaccuucgaguccuucaaggagaaccucaaggacuuccuccucgucauccccuucgacugcugggagcccguccaggaguga

SEQ ID NO: 3949 - RNA, 435 nt, Artificial Sequence
  derived and/or modified sequence opt3 from GM-CSF__Homo_sapiens__AAA52122
auguggcugcagagccuccuucuguugggcaccguggccugcuccaucucugcucccgcaagaucaccuaguccaagcacacaaccgugggagcacgucaacgccauucaggaagcgaggcgguuacugaaucuaucccgcgacacugcugccgagaugaacgaaacgguugaggugauaucugaaauguucgaucuccaggagcccaccugucugcagacacgacuugagcuguacaagcaaggguugcguggaucgcucacuaaacugaaggguccucugaccaugauggcaucacauuauaaacagcacugcccacccacaccugaaaccagcugugccacucagaucauuacauuugagaguuucaaggaaaaucucaaagacuuuuuacugguaaucccauucgauugcugggagcccgugcaggaguga

SEQ ID NO: 3950 - RNA, 435 nt, Artificial Sequence
  derived and/or modified sequence opt4 from GM-CSF__Homo_sapiens__AAA52122
auguggcugcagagccugcugcugcugggcaccguggccugcagcaucagcgcccccgccagaagccccagccccagcacccagcccugggagcacgugaacgccauccaggaggccagaagacugcugaaccugagcagagacaccgccgccgagaugaacgagaccguggaggugaucagcgagauguucgaccugcaggagcccaccugccugcagaccagacuggagcuguacaagcagggccugagaggcagccugaccaagcugaagggcccccugaccaugauggccagccacuacaagcagcacugcccccccacccccgagaccagcugcgccacccagaucaucaccuucgagagcuucaaggagaaccugaaggacuuccugcuggugauccccuucgacugcugggagcccgugcaggaguga

SEQ ID NO: 3951 - RNA, 435 nt, Artificial Sequence
  derived and/or modified sequence opt5 from GM-CSF__Homo_sapiens__AAA52122
auguggcugcagagccuccugcuucugggcaccguggccugcuccaucucugcucccgccagaagcccuuccccgucuacacaacccugggagcacgucaacgcgauucaggaagcucggcgccuccugaaucuuagcagagacacggccgccgagaugaacgaaaccguugaggugaucuccgaaauguucgaucugcaggagccuacaugucuccagacccggcuggagcuguacaagcaagggcuccgcggaucucugacaaaacuuaagggcccccugaccaugauggcuagccauuauaaacagcacugcccucccacaccugaaaccuccugugccacgcagauuaucaccuuugagagcuucaaggaaaaucucaaagacuuucugcuugugauuccguucgauugcugggagcccguccaggaguga

SEQ ID NO: 3952 - RNA, 435 nt, Artificial Sequence
  derived and/or modified sequence opt6 from GM-CSF__Homo_sapiens__AAA52122
auguggcuccaaucacuacuacuacuaggaacaguagcaugcucaauaucagcaccagcaagaucaccaucaccaucaacacaaccaugggaacacguaaacgcaauacaagaagcaagaagacuacuaaacuuaucaagagacacagcagcagaaaugaacgaaacaguagaagucauaucagaaauguucgaccuacaagaaccaacaugccuacaaacaagacuagaacuauacaaacaaggacuaagaggaucacuaacaaaacuaaaaggaccacuaacaaugauggcaucacacuacaaacaacacugcccaccaacaccagaaacaucaugcgcaacacaaauaauaacauucgaaucauucaaagaaaaccuaaaagacuuccuacuaguaauaccauucgacugcugggaaccaguacaagaauaa

SEQ ID NO: 3953 - protein, 189 aa, Artificial Sequence [sequence omitted]

SEQ ID NO: 3954 - RNA, 570 nt, Artificial Sequence
  IFNalpha__Homo_sapiens__AET86952
auggccucgcccuuugcuuuacugaugguccugguggugcucagcugcaagucaagcugcucuccgggcugugaucucccugagacccacagccuggauaacaggaggaccuugaugcuccuggcacaaaugagcagaaucucuccuuccuccugucugauggacagacaugacuuuggauuuccccaggaggaguuugauggcaaccaguuccagaaggcuccagccaucucuguccuccaagagcugauccagcagaucuucaaccucuuuaccacaaaagauucaucugcugcuugggaugaggaccuccuagacaaauucugcaccgaacucuaccagcagcugaaugacuuggaagccugugugaugcaggaggagagggugggagaaacuccccugaugaaugcggacuccaucuuggcugugaagaaauacuuccgaagaaucacucucuaucugacggagaagaaauacagcccuugugccugggagguugucagagcagaaaucgugagaucccucucuuuaucaacaaacuugcaagaaagauuaaggaggaaggaauaa

SEQ ID NO: 3955 - RNA, 570 nt, Artificial Sequence
  derived and/or modified sequence opt1 from IFNalpha__Homo_sapiens__AET86952
auggccagccccuucgcccugcucauggugcuggucgugcuguccugcaagagcuccugcagcccgggcugcgaccuccccgagacccacucccuggacaaccgccggacccugaugcuccuggcgcagaugagccgcaucucccccagcuccugccugauggaccggcacgacuucggguucccccaggaggaguucgacggcaaccaguuccagaaggccccggccaucagcgugcuccaggagcugauccagcagaucuucaaccuguucacgaccaaggacuccagcgccgccugggacgaggaccuccuggacaaguucugcaccgagcuguaccagcagcucaacgaccuggaggcgugcgucaugcaggaggagcgcgugggggagacgccccugaugaacgccgacuccauccucgccgugaagaaguacuuccggcgcaucacccuguaccugaccgagaagaaguacagccccugcgccugggaggucgugcgggcggagaucgugcgcucccucagccuguccaccaaccugcaggagcggcuccgccggaaggaguga

SEQ ID NO: 3956 - RNA, 570 nt, Artificial Sequence
  derived and/or modified sequence opt2 from IFNalpha__Homo_sapiens__AET86952
auggccucccccuucgcccuccucaugguccucgucguccucuccugcaaguccuccugcucccccggcugcgaccuccccgagacccacucccucgacaaccgccgcacccucaugcuccucgcccagaugucccgcaucucccccuccuccugccucauggaccgccacgacuucggcuucccccaggaggaguucgacggcaaccaguuccagaaggcccccgccaucuccguccuccaggagcucauccagcagaucuucaaccucuucaccaccaaggacuccuccgccgccugggacgaggaccuccucgacaaguucugcaccgagcucuaccagcagcucaacgaccucgaggccugcgucaugcaggaggagcgcgucggcgagaccccccucaugaacgccgacuccauccucgccgucaagaaguacuuccgccgcaucacccucuaccucaccgagaagaaguacucccccugcgccugggaggucguccgcgccgagaucguccgcucccucucccucuccaccaaccuccaggagcgccuccgccgcaaggaguga

SEQ ID NO: 3957 - RNA, 570 nt, Artificial Sequence
  derived and/or modified sequence opt3 from IFNalpha__Homo_sapiens__AET86952
auggccagccccuucgcucugcucauggugcuugucguucuguccugcaagucuucauguaguccuggcugcgacuugccagagacccacagcuuagauaacagaaggacacugaugcuacucgcacagaugucccggaucucuccgucgucaugucugauggaccgccaugauuuuggguucccccaagaagaguuugacggaaaucaguuccagaaagccccugcgauuagcgugcuucaggaacugauacaacagaucuuuaacuuguucacuacgaaggauaguuccgcugccugggacgaggaucuccuggacaaauuuugcaccgaacuguaccagcagcucaaugauuuagaggcauguguaaugcaagaggaacgagugggugagacaccacugaugaacgccgacucuauucuugcugucaagaaauauuuccguagaaucacuuuguaccugaccgaaaagaaguauagccccugcgcaugggaggugguuagggccgagauugugcggucccuaucacucaguacaaaucugcaggaacgccuuagaaggaaagaguga

SEQ ID NO: 3958 - RNA, 570 nt, Artificial Sequence
  derived and/or modified sequence opt4 from IFNalpha__Homo_sapiens__AET86952
auggccagccccuucgcccugcugauggugcugguggugcugagcugcaagagcagcugcagccccggcugcgaccugcccgagacccacagccuggacaacagaagaacccugaugcugcuggcccagaugagcagaaucagccccagcagcugccugauggacagacacgacuucggcuucccccaggaggaguucgacggcaaccaguuccagaaggcccccgccaucagcgugcugcaggagcugauccagcagaucuucaaccuguucaccaccaaggacagcagcgccgccugggacgaggaccugcuggacaaguucugcaccgagcuguaccagcagcugaacgaccuggaggccugcgugaugcaggaggagagagugggcgagaccccccugaugaacgccgacagcauccuggccgugaagaaguacuucagaagaaucacccuguaccugaccgagaagaaguacagccccugcgccugggagguggugagagccgagaucgugagaagccugagccugagcaccaaccugcaggagagacugagaagaaaggaguga

SEQ ID NO: 3959 - RNA, 570 nt, Artificial Sequence
  derived and/or modified sequence opt5 from IFNalpha__Homo_sapiens__AET86952
auggccagccccuucgcucugcucauggugcuggucguucuuuccugcaagucuagcuguuccccuggcugcgaccugccggagacccacucucucgauaacagacggacacugaugcuucuggcccagaugagccgcaucucccccucuagcugucucauggacagacaugauuuuggguucccucaagaagaguuugacggaaaucaguuccagaaagcgcccgcuauuuccgugcugcaggaacugauccaacagauuuuuaaccucuucacgaccaaggauagcucugccgccugggacgaggaucugcuugacaaauuuugcacagaacuguaccagcagcucaaugaucuggaggcuugugugaugcaagaggaacgggucggcgagaccccucuuaugaacgccgacuccauccuggcugugaagaaauauuuccgcagaauuacacucuaccugaccgaaaagaaguauagccccugcgccugggagguugugcgggcggagaucguccgcucucugucccucagcacaaaucugcaggaaagacuucggcgcaaagaguga

SEQ ID NO: 3960 - RNA, 570 nt, Artificial Sequence
  derived and/or modified sequence opt6 from IFNalpha__Homo_sapiens__AET86952
auggcaucaccauucgcauuacuuaugguacuaguaguauuaucuugcaaaucaucaugcuccccaggaugcgaccuaccagaaacacacucacuagacaacagaagaacauuaaugcuacuagcacaaaugucacgaauaagcccaucaucaugccuaauggacagacacgacuucggauucccacaagaagaauucgacggaaaccaauuucaaaaagccccagcaauaucaguacuacaagaacuaauacaacaaauauucaaccuauucacaacaaaagacagcucagcagcaugggacgaagaccuauuagacaaauucugcacagaacuauaccaacaacuaaacgaccuagaagcaugcguaaugcaagaagaaagaguaggcgaaacaccauuaaugaacgcagacucaauacuagcaguaaaaaaauacuuuagaagaauaacauuauacuuaacagaaaaaaaauacagcccaugugccugggaaguaguaagagcagaaauaguaagaucacuaucacuaucaacaaacuuacaagaaagauuaagaagaaaagaauaa

SEQ ID NO: 3961 - protein, 189 aa, Artificial Sequence
  IFNalpha__Homo_sapiens__P01562
MASPFALLMVLVVLSCKSSCSLGCDLPETHSLDNRRTLMLLAQMSRISPSSCLMDRHDFGFPQEEFDGNQFQKAPAISVLHELIQQIFNLFTTKDSSAAWDEDLLDKFCTELYQQLNDLEACVMQEERVGETPLMNADSILAVKKYFRRITLYLTEKKYSPCAWEVVRAEIMRSLSLSTNLQERLRRKE

SEQ ID NO: 3962 - RNA, 570 nt, Artificial Sequence
  IFNalpha__Homo_sapiens__AAB59403
auggccucgcccuuugcuuuacugaugguccugguggugcucagcugcaagucaagcugcucucugggcugugaucucccugagacccacagccuggauaacaggaggaccuugaugcuccuggcacaaaugagcagaaucucuccuuccuccugucugauggacagacaugacuuuggauuuccccaggaggaguuugauggcaaccaguuccagaaggcuccagccaucucuguccuccaugagcugauccagcagaucuucaaccucuuuaccacaaaagauucaucugcugcuugggaugaggaccuccuagacaaauucugcaccgaacucuaccagcagcugaaugacuuggaagccugugugaugcaggaggagagggugggagaaacuccccugaugaaugcggacuccaucuuggcugugaagaaauacuuccgaagaaucacucucuaucugacagagaagaaauacagcccuugugccugggagguugucagagcagaaaucaugagaucccucucuuuaucaacaaacuugcaagaaagauuaaggaggaaggaauaa

SEQ ID NO: 3963 - RNA, 570 nt, Artificial Sequence
  derived and/or modified sequence opt1 from IFNalpha__Homo_sapiens__AAB59403
auggccagccccuucgcccugcucauggugcuggucgugcuguccugcaagagcuccugcagccucggcugcgaccugccggagacccacucccuggacaaccgccggacccucaugcugcuggcgcagaugagccgcaucucccccagcuccugccucauggaccggcacgacuucggguucccccaggaggaguucgacggcaaccaguuccagaaggcccccgccaucagcgugcugcacgagcugauccagcagaucuucaaccucuucacgaccaaggacuccagcgccgccugggacgaggaccugcuggacaaguucugcaccgagcucuaccagcagcugaacgaccuggaggcgugcgucaugcaggaggagcgcgugggggagaccccgcucaugaacgccgacuccauccuggccgugaagaaguacuuccggcgcaucacgcuguaccucaccgagaagaaguacagccccugcgccugggaggucgugcgggcggagaucaugcgcucccugagccuguccaccaaccuccaggagcggcugcgccggaaggaguga

SEQ ID NO: 3964 - RNA, 570 nt, Artificial Sequence
  derived and/or modified sequence opt2 from IFNalpha__Homo_sapiens__AAB59403
auggccucccccuucgcccuccucaugguccucgucguccucuccugcaaguccuccugcucccucggcugcgaccuccccgagacccacucccucgacaaccgccgcacccucaugcuccucgcccagaugucccgcaucucccccuccuccugccucauggaccgccacgacuucggcuucccccaggaggaguucgacggcaaccaguuccagaaggcccccgccaucuccguccuccacgagcucauccagcagaucuucaaccucuucaccaccaaggacuccuccgccgccugggacgaggaccuccucgacaaguucugcaccgagcucuaccagcagcucaacgaccucgaggccugcgucaugcaggaggagcgcgucggcgagaccccccucaugaacgccgacuccauccucgccgucaagaaguacuuccgccgcaucacccucuaccucaccgagaagaaguacucccccugcgccugggaggucguccgcgccgagaucaugcgcucccucucccucuccaccaaccuccaggagcgccuccgccgcaaggaguga

SEQ ID NO: 3965 - RNA, 570 nt, Artificial Sequence
  derived and/or modified sequence opt3 from IFNalpha__Homo_sapiens__AAB59403
auggccagccccuucgcucugcucauggugcuugucguucuguccugcaagucuucauguaguuugggcugcgacuuaccugagacccacagccuggauaacagaaggacacuaaugcuccuggcacagaugucccggaucucuccaucgucaugucuuauggaccgccaugauuuuggguucccgcaagaagaguuugacggaaaucaguuccagaaagcccccgcgauuagcgugcugcacgaauugauacagcaaaucuuuaaccucuucacuacgaaggauaguuccgcugccugggacgaggaucugcuggacaaauuuugcaccgaacucuaccagcaguuaaaugaucuggaggcauguguaaugcaggaggaacgagugggugagacaccucuuaugaacgccgacucuauuuuggcugucaagaaauauuuccguagaaucacucuguaccuaaccgaaaagaaguauagcccaugcgcaugggaggugguuagggccgagauuaugcggucccucucacugaguacaaaucuucaagaacgccugagaaggaaagaguga

SEQ ID NO: 3966 - RNA, 570 nt, Artificial Sequence
  derived and/or modified sequence opt4 from IFNalpha__Homo_sapiens__AAB59403
auggccagccccuucgcccugcugauggugcugguggugcugagcugcaagagcagcugcagccugggcugcgaccugcccgagacccacagccuggacaacagaagaacccugaugcugcuggcccagaugagcagaaucagccccagcagcugccugauggacagacacgacuucggcuucccccaggaggaguucgacggcaaccaguuccagaaggcccccgccaucagcgugcugcacgagcugauccagcagaucuucaaccuguucaccaccaaggacagcagcgccgccugggacgaggaccugcuggacaaguucugcaccgagcuguaccagcagcugaacgaccuggaggccugcgugaugcaggaggagagagugggcgagaccccccugaugaacgccgacagcauccuggccgugaagaaguacuucagaagaaucacccuguaccugaccgagaagaaguacagccccugcgccugggagguggugagagccgagaucaugagaagccugagccugagcaccaaccugcaggagagacugagaagaaaggaguga

SEQ ID NO: 3967 - RNA, 570 nt, Artificial Sequence
  derived and/or modified sequence opt5 from IFNalpha__Homo_sapiens__AAB59403
auggccagccccuucgcucugcucauggugcuggucguucuuuccugcaagucuagcuguucccugggcugcgaccucccugagacccacucucuggauaacagacggacacuuaugcugcucgcccagaugagccgcaucuccccgucuagcugucugauggacagacaugauuuuggguucccccaagaagaguuugacggaaaucaguuccagaaagcgccugcuauuuccgugcugcacgaacucauccagcaaauuuuuaaccuguucacgaccaaggauagcucugccgccugggacgaggaucuucuggacaaauuuugcacagaacucuaccagcagcugaaugaucuugaggcuugugugaugcaggaggaacgggucggcgagacaccccugaugaacgccgacuccauccucgcugugaagaaauauuuccgcagaauuacccuguaccugaccgaaaagaaguauagcccuugcgccugggagguugugcgggcggagaucaugcgcucucucucccugagcacaaaucuucaagaaagacugcggcgcaaagaguga

SEQ ID NO: 3968 - RNA, 570 nt, Artificial Sequence
  derived and/or modified sequence opt6 from IFNalpha__Homo_sapiens__AAB59403
auggcaucaccauucgcccuacuaaugguccuaguaguacuaucaugcaaaucaucaugcucacuaggaugcgaccuaccagaaacacacucacuagauaacagaagaacacuaaugcuacuagcacaaaugucacgaauaucaccaagcucaugccuaauggacagacacgacuucggauucccacaagaagaauucgauggaaaccaauuccaaaaagcaccagcaauaagcguacuacacgaacuaauacaacaaauauucaaucuauucacaacaaaagacucaucagcagcaugggacgaagaccuacuagacaaauucugcacagaacuauaccaacaauuaaacgacuuagaagcaugcguaaugcaagaagaaagaguaggagaaacaccacuaaugaacgccgacucaauacuagcaguaaaaaaauauuucagaagaaucacauuauaccuaacagaaaaaaaauacucaccaugcgcaugggaaguaguaagagcagaaauaaugagaucauuaucauuaucaacaaaccuacaagaaagauuaagacgaaaagaauaa

SEQ ID NO: 3969 - protein, 188 aa, Artificial Sequence [sequence omitted]

SEQ ID NO: 3970 - RNA, 567 nt, Artificial Sequence
  IFNalpha__Homo_sapiens__AAA59181
auggccuugaccuuugcuuuacugguggcccuccuggugcucagcugcaagucaagcugcucugugggcugugaucugccucaaacccacagccuggguagcaggaggaccuugaugcuccuggcacagaugaggaaaaucucucuuuucuccugcuugaaggacagacaugacuuuggauuuccccaggaggaguuuggcaaccaguuccaaaaggcugaaaccaucccuguccuccaugagaugauccagcagaucuucaaucucuucagcacaaaggacucaucugcugcuugggaugagacccuccuagacaaauucuacacugaacucuaccagcagcugaaugaccuggaagccugugugauacagggggugggggugacagagacuccccugaugaaggaggacuccauucuggcugugaggaaauacuuccaaagaaucacucucuaucugaaagagaagaaauacagcccuugugccugggagguugucagagcagaaaucaugagaucuuuuucuuugucaacaaacuugcaagaaaguuuaagaaguaaggaauga

SEQ ID NO: 3971 - RNA, 567 nt, Artificial Sequence
  derived and/or modified sequence opt1 from IFNalpha__Homo_sapiens__AAA59181
auggcccugaccuucgcccuccugguggcgcugcucguccugagcugcaaguccagcugcuccgugggcugcgaccugccccagacccacagccucgggucccgccggacgcugaugcugcucgcccagaugcgcaagaucagccuguucuccugccugaaggaccggcacgacuucggcuucccgcaggaggaguucgggaaccaguuccagaaggccgagaccauccccgugcuccacgagaugauccagcagaucuucaaccuguucagcaccaaggacuccagcgccgccugggacgagacccugcucgacaaguucuacacggagcuguaccagcagcugaacgaccucgaggcgugcgucauccagggcgugggggugaccgagacgccccugaugaaggaggacuccauccuggccguccgcaaguacuuccagcggaucacccucuaccugaaggagaagaaguacagccccugcgccugggagguggugcgcgccgagaucaugcgguccuucagccuguccaccaaccuccaggagagccugcgcuccaaggaguga

SEQ ID NO: 3972 - RNA, 567 nt, Artificial Sequence
  derived and/or modified sequence opt2 from IFNalpha__Homo_sapiens__AAA59181
auggcccucaccuucgcccuccucgucgcccuccucguccucuccugcaaguccuccugcuccgucggcugcgaccucccccagacccacucccucggcucccgccgcacccucaugcuccucgcccagaugcgcaagaucucccucuucuccugccucaaggaccgccacgacuucggcuucccccaggaggaguucggcaaccaguuccagaaggccgagaccauccccguccuccacgagaugauccagcagaucuucaaccucuucuccaccaaggacuccuccgccgccugggacgagacccuccucgacaaguucuacaccgagcucuaccagcagcucaacgaccucgaggccugcgucauccagggcgucggcgucaccgagaccccccucaugaaggaggacuccauccucgccguccgcaaguacuuccagcgcaucacccucuaccucaaggagaagaaguacucccccugcgccugggaggucguccgcgccgagaucaugcgcuccuucucccucuccaccaaccuccaggagucccuccgcuccaaggaguga

SEQ ID NO: 3973 - RNA, 567 nt, Artificial Sequence
  derived and/or modified sequence opt3 from IFNalpha__Homo_sapiens__AAA59181
auggcccugaccuucgcucuccuuguggcacuguuggucuuaagcugcaaguccucuuguucaguuggcugcgaccugccccagacacacagucuagggagcagaaggacucucaugcugcuugcccaaaugcggaaaaucucccuguuuucuuguuugaaggaucgccaugacuucggauuuccucaggaggaguucgguaaccaguuucagaaagcggaaacgauuccagugcuccacgaaaugauacaacagaucuucaaucuguuuucgaccaaggauucaagcgcugccugggacgagacacugcucgauaaauucuacacugaauuauaucagcagcugaacgaccuugaggcaugcguaauucaaggcgugggggucaccgagacaccguugaugaaggaagauaguauccuggccgugcgaaaguacuuucagcguauuacccuauaucucaaagagaagaaauacucccccugugcuugggaaguugugagagcagagaucaugaggucuuucagccuguccacuaaucuucaggagucacugcggaguaaggaauga

SEQ ID NO: 3974 - RNA, 567 nt, Artificial Sequence
  derived and/or modified sequence opt4 from IFNalpha__Homo_sapiens__AAA59181
auggcccugaccuucgcccugcugguggcccugcuggugcugagcugcaagagcagcugcagcgugggcugcgaccugccccagacccacagccugggcagcagaagaacccugaugcugcuggcccagaugagaaagaucagccuguucagcugccugaaggacagacacgacuucggcuucccccaggaggaguucggcaaccaguuccagaaggccgagaccauccccgugcugcacgagaugauccagcagaucuucaaccuguucagcaccaaggacagcagcgccgccugggacgagacccugcuggacaaguucuacaccgagcuguaccagcagcugaacgaccuggaggccugcgugauccagggcgugggcgugaccgagaccccccugaugaaggaggacagcauccuggccgugagaaaguacuuccagagaaucacccuguaccugaaggagaagaaguacagccccugcgccugggagguggugagagccgagaucaugagaagcuucagccugagcaccaaccugcaggagagccugagaagcaaggaguga

SEQ ID NO: 3975 - RNA, 567 nt, Artificial Sequence
  derived and/or modified sequence opt5 from IFNalpha__Homo_sapiens__AAA59181
auggcccugaccuucgcucuccugguggcccuucugguccucagcugcaaguccucuuguagcguuggcugcgaccugccccagacacacucccuugggucuagacggacgcugaugcuccuggcgcaaaugcgcaaaaucagccuguuuuccugucucaaggauagacaugacuucggauuuccucaggaggaauuuggcaaccaguuucagaaagcugagaccauuccggugcugcacgaaaugauccaacagauuuucaaucuuuucucuacaaaggauagcuccgccgccugggacgagacccugcucgauaaauucuacacagaacuguaucagcagcuuaacgaccuggaggcuugcgugauccaaggggucggagugaccgagacaccccucaugaaggaagauagcauucuggccguucggaaguacuuucagcgcaucacccuguaucucaaagagaagaaauacucuccuugugcuugggaaguggucagagccgagaucaugcgguccuucagccugucuacgaaucuucaggagucccugcgcagcaaggaauga

SEQ ID NO: 3976 - RNA, 567 nt, Artificial Sequence
  derived and/or modified sequence opt6 from IFNalpha__Homo_sapiens__AAA59181
auggcacuaacauucgcacuacuaguagcauuacuaguauuaucaugcaaaucaucaugcucaguaggaugcgaccuaccacaaacacacucauuaggaucaagaagaacacuaaugcuacuagcacaaaugagaaaaauaucacuauucucaugccuaaaagacagacacgacuucggauucccacaagaagaauucggaaaccaauuccaaaaagcagaaacaauaccaguacuacacgaaaugauacaacaaauauucaacuuauucucaacaaaagacucaucagcagcaugggacgaaacccuacuagacaaauucuacacagaacuauaccaacaacuaaacgaccuagaagcaugcguaauacaaggaguaggagucacagaaacaccacuaaugaaagaagacucaauacuagcaguaagaaaauacuuccaacgaauaacacuauaccuaaaagaaaaaaaauacuccccaugcgcaugggaaguaguaagagcagaaauaaugagauccuucucacuauccaccaaccuacaagaaucccuaagaucaaaagaauaa

SEQ ID NO: 3977 - protein, 189 aa, Artificial Sequence
  IFNalpha__Homo_sapiens__P01566
MALSFSLLMAVLVLSYKSICSLGCDLPQTHSLGNRRALILLGQMGRISPFSCLKDRHDFRIPQEEFDGNQFQKAQAISVLHEMIQQTFNLFSTEDSSAAWEQSLLEKFSTELYQQLNDLEACVIQEVGVEETPLMNEDSILAVRKYFQRITLYLIERKYSPCAWEVVRAEIMRSLSFSTNLQKRLRRKD

SEQ ID NO: 3978 - RNA, 570 nt, Artificial Sequence
  IFNalpha__Homo_sapiens__AAH69409
auggcccuguccuuuucuuuacuuauggccgugcuggugcucagcuacaaauccaucuguucucuaggcugugaucugccucagacccacagccuggguaauaggagggccuugauacuccugggacaaaugggaagaaucucuccuuucuccugccugaaggacagacaugauuuccgaaucccccaggaggaguuugauggcaaccaguuccagaaggcucaagccaucucuguccuccaugagaugauccagcagaccuucaaucucuucagcacagaggacucaucugcugcuugggaacagagccuccuagaaaaauuuuccacugaacuuuaccagcaacugaaugaccuggaagcaugugugauacaggagguugggguggaagagacuccccugaugaaugaggacuccauccuggcugugaggaaauacuuccaaagaaucacucuuuaucuaauagagaggaaauacagcccuugugccugggagguugucagagcagaaaucaugagaucccucucguuuucaacaaacuugcaaaaaagauuaaggaggaaggauuga

SEQ ID NO: 3979 - RNA, 570 nt, Artificial Sequence
  derived and/or modified sequence opt1 from IFNalpha__Homo_sapiens__AAH69409
auggcccugagcuucucccuccugauggccgugcugguccucagcuacaaguccaucugcagccugggcugcgaccugccccagacccacucccucgggaaccgccgggcgcugauccugcucggccagauggggcgcaucagcccguucuccugccugaaggaccggcacgacuuccgcaucccccaggaggaguucgacggcaaccaguuccagaaggcccaggccaucagcgugcugcacgagaugauccagcagaccuucaaccucuucuccacggaggacagcuccgccgccugggagcagagccugcuggagaaguucuccaccgagcucuaccagcagcugaacgaccuggaggcgugcgugauccaggaggucgggguggaggagacgccccucaugaacgaggacagcauccuggccgugcggaaguacuuccagcgcaucacccuguaccucaucgagcggaaguacucccccugcgccugggaggucgugcgcgccgagaucaugcggagccuguccuucagcaccaaccugcagaagcgccuccggcgcaaggacuga

SEQ ID NO: 3980 - RNA, 570 nt, Artificial Sequence
  derived and/or modified sequence opt2 from IFNalpha__Homo_sapiens__AAH69409
auggcccucuccuucucccuccucauggccguccucguccucuccuacaaguccaucugcucccucggcugcgaccucccccagacccacucccucggcaaccgccgcgcccucauccuccucggccagaugggccgcaucucccccuucuccugccucaaggaccgccacgacuuccgcaucccccaggaggaguucgacggcaaccaguuccagaaggcccaggccaucuccguccuccacgagaugauccagcagaccuucaaccucuucuccaccgaggacuccuccgccgccugggagcagucccuccucgagaaguucuccaccgagcucuaccagcagcucaacgaccucgaggccugcgucauccaggaggucggcgucgaggagaccccccucaugaacgaggacuccauccucgccguccgcaaguacuuccagcgcaucacccucuaccucaucgagcgcaaguacucccccugcgccugggaggucguccgcgccgagaucaugcgcucccucuccuucuccaccaaccuccagaagcgccuccgccgcaaggacuga

SEQ ID NO: 3981 - RNA, 570 nt, Artificial Sequence
  derived and/or modified sequence opt3 from IFNalpha__Homo_sapiens__AAH69409
auggcccugagcuucucccuccuuauggcugugcuggucuugucuuacaagucaaucugcaguuuaggcugugaccugccccagacccacagccuagggaacagaagggcacucauucugcuuggacaaaugggucggauauccccuuuuucuugccugaaagaucgccaugacuuccgaaucccacaggaggaauuugauggcaaucaguuccagaaggcccaagcgauuucgguuuugcacgagaugauccagcagacauuuaaccucuucucaacugaagacagcagugcugccugggagcagucccugcuggaaaaauuuucuacggagcucuaucaacaguuaaaugaucuggaggcaugugugauucaggaaguagggguggaggaaaccccgcuuaugaacgaggacagcaucuuggccguccguaaguacuuccagagaauaacacuguaucuaaucgagaggaaauacucccccugcgcuugggaagugguucgggcagagauuaugcgcucacucaguuuuagcacuaaucugcaaaagagacuuaggcggaaggauuga

SEQ ID NO: 3982 - RNA, 570 nt, Artificial Sequence
  derived and/or modified sequence opt4 from IFNalpha__Homo_sapiens__AAH69409
auggcccugagcuucagccugcugauggccgugcuggugcugagcuacaagagcaucugcagccugggcugcgaccugccccagacccacagccugggcaacagaagagcccugauccugcugggccagaugggcagaaucagccccuucagcugccugaaggacagacacgacuucagaaucccccaggaggaguucgacggcaaccaguuccagaaggcccaggccaucagcgugcugcacgagaugauccagcagaccuucaaccuguucagcaccgaggacagcagcgccgccugggagcagagccugcuggagaaguucagcaccgagcuguaccagcagcugaacgaccuggaggccugcgugauccaggaggugggcguggaggagaccccccugaugaacgaggacagcauccuggccgugagaaaguacuuccagagaaucacccuguaccugaucgagagaaaguacagccccugcgccugggagguggugagagccgagaucaugagaagccugagcuucagcaccaaccugcagaagagacugagaagaaaggacuga

SEQ ID NO: 3983 - RNA, 570 nt, Artificial Sequence
  derived and/or modified sequence opt5 from IFNalpha__Homo_sapiens__AAH69409
auggcccugagcuucucccuccugauggcugugcuuguccugucuuacaagagcaucugcucccucggcugugaccugccccagacccacucucuugggaacagacgggcccugauucuccugggacaaaugggccgcaucagcccuuuuuccugccugaaagauagacaugacuuccggauuccgcaggaggaauuugaugggaaucaguuccagaaggcgcaagcuaucucuguucuccacgagaugauucagcagacauuuaaccuguucagcacggaagacuccagcgccgccugggagcagucucuucuggaaaaauuuuccaccgagcucuaucaacagcugaaugaucuugaggcuugugugauccaggaagugggagucgaggaaacaccccugaugaacgaggacagcauccucgccgugcgcaaguacuuccagagaauuacccuguaucugaucgagcggaaauacucuccuugcgcuugggaaguugugcgcgccgagauuaugagaucccucagcuuuucuacaaaucugcaaaagcggcuucgcagaaaggauuga

SEQ ID NO: 3984 - RNA, 570 nt, Artificial Sequence
  derived and/or modified sequence opt6 from IFNalpha__Homo_sapiens__AAH69409
auggcacuaucauucucacuacuaauggcaguacuaguacuaucauacaaauccauaugcucacucggaugcgaccuaccacaaacacacucacuaggaaacagaagagcauuaauacuacuaggacaaaugggaagaauaucaccauucucaugccuaaaagacagacacgacuucagaauaccacaagaagaauucgacggaaaccaauuccaaaaagcacaagccauauccguacuacacgaaaugauacaacaaacauucaacuuauucucaacagaagacagcucagcagcaugggaacaaucacuacuagaaaaauucucaacagaacuauaccaacaauuaaacgaccuagaagcaugcguaauccaagaaguagguguagaagaaacaccacucaugaacgaagacucaauauuagcaguaagaaaauacuuccaaagaaucacacuauacuuaauagaaagaaaauacucaccaugcgcaugggaagucguaagagcagaaauaaugagaucauuaucauucucaacaaaccuacaaaaacgacuaagaagaaaagacuaa

SEQ ID NO: 3985 - protein, 189 aa, Artificial Sequence
  IFNalpha__Homo_sapiens__P01567
MARSFSLLMVVLVLSYKSICSLGCDLPQTHSLRNRRALILLAQMGRISPFSCLKDRHEFRFPEEEFDGHQFQKTQAISVLHEMIQQTFNLFSTEDSSAAWEQSLLEKFSTELYQQLNDLEACVIQEVGVEETPLMNEDFILAVRKYFQRITLYLMEKKYSPCAWEVVRAEIMRSFSFSTNLKKGLRRKD

SEQ ID NO: 3986 - RNA, 570 nt, Artificial Sequence
  IFNalpha__Homo_sapiens__AAH74991
auggcccgguccuuuucuuuacugauggucgugcugguacucagcuacaaauccaucugcucucugggcugugaucugccucagacccacagccugcguaauaggagggccuugauacuccuggcacaaaugggaagaaucucuccuuucuccugcuugaaggacagacaugaauucagauucccagaggaggaguuugauggccaccaguuccagaagacucaagccaucucuguccuccaugagaugauccagcagaccuucaaucucuucagcacagaggacucaucugcugcuugggaacagagccuccuagaaaaauuuuccacugaacuuuaccagcaacugaaugaccuggaagcaugugugauacaggagguugggguggaagagacuccccugaugaaugaggacuucauccuggcugugaggaaauacuuccaaagaaucacucuuuaucuaauggagaagaaauacagcccuugugccugggagguugucagagcagaaaucaugagauccuucucuuuuucaacaaacuugaaaaaaggauuaaggaggaaggauuga

SEQ ID NO: 3987 - RNA, 570 nt, Artificial Sequence
  derived and/or modified sequence opt1 from IFNalpha__Homo_sapiens__AAH74991
auggcccgcagcuucucccugcucauggugguccuggugcugagcuacaaguccaucugcagccucggcugcgaccugccccagacccacucccugcggaaccgccgggcccucauccugcuggcgcagauggggcgcaucagcccguucuccugccucaaggaccggcacgaguuccgcuuccccgaggaggaguucgacggccaccaguuccagaagacccaggccaucagcgugcugcacgagaugauccagcagacguucaaccuguucuccaccgaggacagcuccgccgccugggagcagagccuccuggagaaguucuccaccgagcuguaccagcagcucaacgaccuggaggccugcgucauccaggagguggggguggaggagacgccccugaugaacgaggacuucauccucgcgguccggaaguacuuccagcgcaucacccuguaccugauggagaagaaguacagccccugcgccugggagguggugcgggccgagaucaugcgcuccuucagcuucuccaccaaccucaagaagggccugcggcgcaaggacuga

SEQ ID NO: 3988 - RNA, 570 nt, Artificial Sequence
  derived and/or modified sequence opt2 from IFNalpha__Homo_sapiens__AAH74991
auggcccgcuccuucucccuccucauggucguccucguccucuccuacaaguccaucugcucccucggcugcgaccucccccagacccacucccuccgcaaccgccgcgcccucauccuccucgcccagaugggccgcaucucccccuucuccugccucaaggaccgccacgaguuccgcuuccccgaggaggaguucgacggccaccaguuccagaagacccaggccaucuccguccuccacgagaugauccagcagaccuucaaccucuucuccaccgaggacuccuccgccgccugggagcagucccuccucgagaaguucuccaccgagcucuaccagcagcucaacgaccucgaggccugcgucauccaggaggucggcgucgaggagaccccccucaugaacgaggacuucauccucgccguccgcaaguacuuccagcgcaucacccucuaccucauggagaagaaguacucccccugcgccugggaggucguccgcgccgagaucaugcgcuccuucuccuucuccaccaaccucaagaagggccuccgccgcaaggacuga

SEQ ID NO: 3989 - RNA, 570 nt, Artificial Sequence
  derived and/or modified sequence opt3 from IFNalpha__Homo_sapiens__AAH74991
auggccaggagcuucucccugcucauggugguccuuguucugucuuacaagucaaucugcaguuugggcugugacuuaccccagacccacagccugagaaaccggcgcgcucuaauucuccuggcacaaauggggcgaauauccccuuuuucuugccuuaaagaucgucaugaguucagauuuccagaagaggaguucgacggacaccaguuucagaagacacaggccaucucggugcugcaugaaaugauucaacagacuuucaauuuguuuucaacggaagauagcagugcggcuugggagcagucccuccuggagaaauucucuaccgaacuguaucagcaacucaacgacuuagaggccuguguaauccaggaagugggugucgaggagacaccgcugaugaaugaagauuuuauucuugcagugaggaaguacuuccagcggaucacuuuguaucugauggagaaaaaguacagccccugcgccugggaaguugugcgcgcugagauaaugagauccuuuucauucaguaccaaccuaaagaaaggccucaggcggaaggacuga

SEQ ID NO: 3990 - RNA, 570 nt, Artificial Sequence
  derived and/or modified sequence opt4 from IFNalpha__Homo_sapiens__AAH74991
auggccagaagcuucagccugcugaugguggugcuggugcugagcuacaagagcaucugcagccugggcugcgaccugccccagacccacagccugagaaacagaagagcccugauccugcuggcccagaugggcagaaucagccccuucagcugccugaaggacagacacgaguucagauuccccgaggaggaguucgacggccaccaguuccagaagacccaggccaucagcgugcugcacgagaugauccagcagaccuucaaccuguucagcaccgaggacagcagcgccgccugggagcagagccugcuggagaaguucagcaccgagcuguaccagcagcugaacgaccuggaggccugcgugauccaggaggugggcguggaggagaccccccugaugaacgaggacuucauccuggccgugagaaaguacuuccagagaaucacccuguaccugauggagaagaaguacagccccugcgccugggagguggugagagccgagaucaugagaagcuucagcuucagcaccaaccugaagaagggccugagaagaaaggacuga

SEQ ID NO: 3991 - RNA, 570 nt, Artificial Sequence
  derived and/or modified sequence opt5 from IFNalpha__Homo_sapiens__AAH74991
auggcccggagcuucucccugcucauggugguccugguucuuucuuacaagagcaucugcucccugggcugugaccucccccagacccacucucugagaaaccgcagagcucuuauucugcucgcccaaauggggcggaucagcccuuuuuccugccugaaagaucgccaugaguucagauuuccggaagaggaguucgacggacaccaguuucagaagacacaggcgauuucugugcugcaugaaaugauccaacagacguucaaucucuuuagcaccgaagauuccagcgcugccugggagcagucucugcuugagaaauucuccacagaacuguaucagcaacucaacgaccuggaggccugugugauucaggaagucggcguggaggagacaccccuuaugaaugaagauuuuauccuggcuguucggaaguacuuccagcgcaucacccucuaucugauggagaaaaaguacagcccuugcgccugggaaguggucagagcugagauuaugcggucuuuuuccuucagcaccaaccugaagaaagggcuccgcagaaaggacuga

SEQ ID NO: 3992 - RNA, 570 nt, Artificial Sequence
  derived and/or modified sequence opt6 from IFNalpha__Homo_sapiens__AAH74991
auggcacgaagcuucucacuacuaaugguaguacuaguacuaucauacaaaagcauaugcucacucggaugcgaccuaccacaaacacacucacuaagaaacagaagagcacucauacuauuagcacaaaugggacgaauaucaccauucucaugccuaaaagacagacacgaauucagauucccagaagaagaauuugacggacaccaauuucaaaaaacacaagcaauaagcguacuacacgaaaugauacaacaaacauucaacuuauucucaacagaagacagcucagcagcaugggaacaaucacuacuagaaaaauucuccacagaacuauaccaacaacuaaacgaccuagaagcaugcguaauacaagaaguaggaguagaagaaacaccacuaaugaacgaagacuucauauuagcaguaagaaaauacuuccaaagaaucacacuauaccuaauggaaaaaaaauacucaccaugcgcaugggaaguaguaagagcagaaauaaugagaucauucucauucucaacaaacuuaaaaaaaggacuaagaagaaaagacuaa

SEQ ID NO: 3993 - protein, 189 aa, Artificial Sequence
  IFNalpha__Homo_sapiens__P01568
MALSFSLLMAVLVLSYKSICSLGCDLPQTHSLGNRRALILLAQMGRISPFSCLKDRHDFGFPQEEFDGNQFQKAQAISVLHEMIQQTFNLFSTKDSSATWEQSLLEKFSTELNQQLNDLEACVIQEVGVEETPLMNVDSILAVKKYFQRITLYLTEKKYSPCAWEVVRAEIMRSFSLSKIFQERLRRKE

SEQ ID NO: 3994 - RNA, 570 nt, Artificial Sequence
  IFNalpha__Homo_sapiens__AAA52718
auggcccuguccuuuucuuuacugauggccgugcuggugcucagcuacaaauccaucuguucucugggcugugaucugccucagacccacagccuggguaauaggagggccuugauacuccuggcacaaaugggaagaaucucuccuuucuccugccugaaggacagacaugacuuuggauucccccaggaggaguuugauggcaaccaguuccagaaggcucaagccaucucuguccuccaugagaugauccagcagaccuucaaucucuucagcacaaaggacucaucugcuacuugggaacagagccuccuagaaaaauuuuccacugaacuuaaccagcagcugaaugaccuggaagccugcgugauacaggagguugggguggaagagacuccccugaugaauguggacuccauccuggcugugaagaaauacuuccaaagaaucacucuuuaucugacagagaagaaauacagcccuugugccugggagguugucagagcagaaaucaugagauccuucucuuuaucaaaaauuuuucaagaaagauuaaggaggaaggaauga

SEQ ID NO: 3995 - RNA, 570 nt, Artificial Sequence
  derived and/or modified sequence opt1 from IFNalpha__Homo_sapiens__AAA52718
auggcccugagcuucucccuccugauggccgugcugguccucagcuacaaguccaucugcagccugggcugcgaccugccccagacccacucccucgggaaccgccgggcgcugauccugcucgcccagaugggccgcaucagcccguucuccugccugaaggaccggcacgacuucggguucccccaggaggaguucgacggcaaccaguuccagaaggcccaggccaucagcgugcugcacgagaugauccagcagaccuucaaccucuucuccacgaaggacagcuccgccaccugggagcagagccugcuggagaaguucuccaccgagcucaaccagcagcugaacgaccuggaggcgugcgugauccaggaggucgggguggaggagacgccccucaugaacguggacagcauccuggccgucaagaaguacuuccagcgcaucacccuguaccucaccgagaagaaguacucccccugcgccugggagguggugcgggccgagaucaugcgcagcuucucccugagcaagaucuuccaggagcggcugcgccggaaggaguga

SEQ ID NO: 3996 - RNA, 570 nt, Artificial Sequence
  derived and/or modified sequence opt2 from IFNalpha__Homo_sapiens__AAA52718
auggcccucuccuucucccuccucauggccguccucguccucuccuacaaguccaucugcucccucggcugcgaccucccccagacccacucccucggcaaccgccgcgcccucauccuccucgcccagaugggccgcaucucccccuucuccugccucaaggaccgccacgacuucggcuucccccaggaggaguucgacggcaaccaguuccagaaggcccaggccaucuccguccuccacgagaugauccagcagaccuucaaccucuucuccaccaaggacuccuccgccaccugggagcagucccuccucgagaaguucuccaccgagcucaaccagcagcucaacgaccucgaggccugcgucauccaggaggucggcgucgaggagaccccccucaugaacgucgacuccauccucgccgucaagaaguacuuccagcgcaucacccucuaccucaccgagaagaaguacucccccugcgccugggaggucguccgcgccgagaucaugcgcuccuucucccucuccaagaucuuccaggagcgccuccgccgcaaggaguga

SEQ ID NO: 3997 - RNA, 570 nt, Artificial Sequence
  derived and/or modified sequence opt3 from IFNalpha__Homo_sapiens__AAA52718
auggcccugagcuucucccuccuuauggcugugcuggucuugucuuacaagucaaucugcaguuuaggcugugaccugccccagacccacagccuagggaacagaagggcacucauucugcuugcccaaaugggacggauauccccuuuuucuugccugaaagaucgccaugacuucgguuuuccacaggaggaguucgauggcaaucaguuucagaaggcgcaagcuaucucgguuuugcacgaaaugauucagcagacauucaaccucuuuucaacuaaagacagcagugccacgugggaacagucccugcuggagaaguucucuaccgaacucaaucaacaguuaaacgaucuggaggcaugugugauccaggagguagggguggaagagacaccgcuuaugaaugucgacagcauuuuggccgugaaaaaguauuuucagcgaaucacucuguaccuaaccgaaaagaaauauucccccugcgcuugggagguugugcgugcagagauaaugagaucauucagucucagcaagaucuuucaagaaaggcugcggcgcaaagaguga

SEQ ID NO: 3998 - RNA, 570 nt, Artificial Sequence
  derived and/or modified sequence opt4 from IFNalpha__Homo_sapiens__AAA52718
auggcccugagcuucagccugcugauggccgugcuggugcugagcuacaagagcaucugcagccugggcugcgaccugccccagacccacagccugggcaacagaagagcccugauccugcuggcccagaugggcagaaucagccccuucagcugccugaaggacagacacgacuucggcuucccccaggaggaguucgacggcaaccaguuccagaaggcccaggccaucagcgugcugcacgagaugauccagcagaccuucaaccuguucagcaccaaggacagcagcgccaccugggagcagagccugcuggagaaguucagcaccgagcugaaccagcagcugaacgaccuggaggccugcgugauccaggaggugggcguggaggagaccccccugaugaacguggacagcauccuggccgugaagaaguacuuccagagaaucacccuguaccugaccgagaagaaguacagccccugcgccugggagguggugagagccgagaucaugagaagcuucagccugagcaagaucuuccaggagagacugagaagaaaggaguga

SEQ ID NO: 3999 - RNA, 570 nt, Artificial Sequence
  derived and/or modified sequence opt5 from IFNalpha__Homo_sapiens__AAA52718
auggcccugagcuucucccuccugauggcugugcuuguccugucuuacaagagcaucugcucccucggcugugaccugccccagacccacucucuugggaacagacgggcccugauucuccuggcgcaaaugggacgcaucagcccuuuuuccugccugaaagauagacaugacuucggcuuuccgcaggaggaguucgaugggaaucaguuucagaaggcucaagccauuucuguucuccacgaaaugauccagcagacauucaaccuguuuagcacgaaagacuccagcgccaccugggaacagucucuucuggagaaguucuccacagaacucaaucaacagcugaacgaucuugaggcuugugugauucaggaggugggagucgaagagacaccccugaugaauguggacagcauccucgccguuaaaaaguauuuucagcggaucacccuguaccugaccgaaaagaaauauucuccuugcgcuugggaggugguccgcgccgagauuaugagauccuucagccucucuaagaucuuucaagaacggcugcgcagaaaagaguga

SEQ ID NO: 4000 - RNA, 570 nt, Artificial Sequence
  derived and/or modified sequence opt6 from IFNalpha__Homo_sapiens__AAA52718
auggcacuaucauucucacuccuaauggcaguacucguacuaucauacaaaucaauaugcucacuaggaugcgaccuaccacaaacacacucacucggaaaccgaagagcacuaauacuacuagcacaaaugggacgaauaucaccauucucaugccuaaaagaccgacacgacuucggauuuccacaagaagaauucgauggaaaccaauuccaaaaagcccaagcaauaucaguauuacacgaaaugauacaacaaacauucaaccuauuuucaacaaaagacucaucagcaacaugggaacaaucacuauuagaaaaauucucaacagaacuaaaccaacaacuaaacgaccuagaagcaugcguaauacaagaaguaggaguagaagaaacaccacuaaugaacguagacucaauacuagcaguaaaaaaauacuuccaaagaauaacacuauaccuaacagaaaaaaaauacucacccugcgcaugggaaguaguacgagcagaaauaaugagaucauucucauuaucaaaaauauuucaagaaagacuaagaagaaaagaauaa

SEQ ID NO: 4001 - protein, 189 aa, Artificial Sequence
  IFNalpha__Homo_sapiens__P01569
MALPFVLLMALVVLNCKSICSLGCDLPQTHSLSNRRTLMIMAQMGRISPFSCLKDRHDFGFPQEEFDGNQFQKAQAISVLHEMIQQTFNLFSTKDSSATWDETLLDKFYTELYQQLNDLEACMMQEVGVEDTPLMNVDSILTVRKYFQRITLYLTEKKYSPCAWEVVRAEIMRSFSLSANLQERLRRKE

SEQ ID NO: 4002 - RNA, 570 nt, Artificial Sequence
  IFNalpha__Homo_sapiens__AAH93755
auggccuugcccuuuguuuuacugauggcccugguggugcucaacugcaagucaaucuguucucugggcugugaucugccucagacccacagccugaguaacaggaggacuuugaugauaauggcacaaaugggaagaaucucuccuuucuccugccugaaggacagacaugacuuuggauuuccucaggaggaguuugauggcaaccaguuccagaaggcucaagccaucucuguccuccaugagaugauccagcagaccuucaaucucuucagcacaaaggacucaucugcuacuugggaugagacacuucuagacaaauucuacacugaacuuuaccagcagcugaaugaccuggaagccuguaugaugcaggagguuggaguggaagacacuccucugaugaauguggacucuauccugacugugagaaaauacuuucaaagaaucacccucuaucugacagagaagaaauacagcccuugugcaugggagguugucagagcagaaaucaugagauccuucucuuuaucagcaaacuugcaagaaagauuaaggaggaaggaauga

SEQ ID NO: 4003 - RNA, 570 nt, Artificial Sequence
  derived and/or modified sequence opt1 from IFNalpha__Homo_sapiens__AAH93755
auggcccugcccuucgugcuccugauggcccuggucgugcucaacugcaagagcaucugcucccugggcugcgaccugccgcagacccacagccucuccaaccgccggacccugaugaucauggcgcagauggggcgcaucagccccuucuccugccugaaggaccggcacgacuucggcuucccccaggaggaguucgacgggaaccaguuccagaaggcccaggccaucagcgugcuccacgagaugauccagcagacguucaaccuguucuccaccaaggacagcuccgccaccugggacgagacccugcucgacaaguucuacacggagcuguaccagcagcugaacgaccucgaggccugcaugaugcaggaggucggcguggaggacacgccccugaugaacguggacagcauccugaccguccgcaaguacuuccagcggaucacccucuaccugaccgagaagaaguacuccccgugcgcgugggagguggugcgcgccgagaucaugcggagcuucucccugagcgccaaccuccaggagcgccugcggcgcaaggaguga

SEQ ID NO: 4004 - RNA, 570 nt, Artificial Sequence
  derived and/or modified sequence opt2 from IFNalpha__Homo_sapiens__AAH93755
auggcccuccccuucguccuccucauggcccucgucguccucaacugcaaguccaucugcucccucggcugcgaccucccccagacccacucccucuccaaccgccgcacccucaugaucauggcccagaugggccgcaucucccccuucuccugccucaaggaccgccacgacuucggcuucccccaggaggaguucgacggcaaccaguuccagaaggcccaggccaucuccguccuccacgagaugauccagcagaccuucaaccucuucuccaccaaggacuccuccgccaccugggacgagacccuccucgacaaguucuacaccgagcucuaccagcagcucaacgaccucgaggccugcaugaugcaggaggucggcgucgaggacaccccccucaugaacgucgacuccauccucaccguccgcaaguacuuccagcgcaucacccucuaccucaccgagaagaaguacucccccugcgccugggaggucguccgcgccgagaucaugcgcuccuucucccucuccgccaaccuccaggagcgccuccgccgcaaggaguga

SEQ ID NO: 4005 - RNA, 570 nt, Artificial Sequence
  derived and/or modified sequence opt3 from IFNalpha__Homo_sapiens__AAH93755
auggcccugcccuucgugcuccuuauggcucuggucguuuugaacugcaagagcaucuguuccuuaggcugcgaccugccucagacccacucucuaucaaauagaaggacacucaugauuauggcacaaauggggcggauaaguccauuuagcugucugaaagaucgccaugacuucggauuuccgcaggaggaguucgaugguaaccaguuucagaaggcccaagcgaucuccgugcuucacgaaaugauucagcagacuuucaaucuguuuucuacgaaagacucgucagcuaccugggaugaaacauugcucgacaaguucuacacugagcuguaucagcaacugaacgaucucgaagccugcaugaugcaggagguaggcguggaggacacccccuuaaugaaugucgauagcauccugacagugcgaaaauacuuucagcguauuacccuuuauuugacugaaaagaaguacaguccuugugcaugggagguugugagagccgaaaucaugagguccuucucucugagcgcuaaccuacaggagcggcuccgcagaaaagaguga

SEQ ID NO: 4006 - RNA, 570 nt, Artificial Sequence
  derived and/or modified sequence opt4 from IFNalpha__Homo_sapiens__AAH93755
auggcccugcccuucgugcugcugauggcccugguggugcugaacugcaagagcaucugcagccugggcugcgaccugccccagacccacagccugagcaacagaagaacccugaugaucauggcccagaugggcagaaucagccccuucagcugccugaaggacagacacgacuucggcuucccccaggaggaguucgacggcaaccaguuccagaaggcccaggccaucagcgugcugcacgagaugauccagcagaccuucaaccuguucagcaccaaggacagcagcgccaccugggacgagacccugcuggacaaguucuacaccgagcuguaccagcagcugaacgaccuggaggccugcaugaugcaggaggugggcguggaggacaccccccugaugaacguggacagcauccugaccgugagaaaguacuuccagagaaucacccuguaccugaccgagaagaaguacagccccugcgccugggagguggugagagccgagaucaugagaagcuucagccugagcgccaaccugcaggagagacugagaagaaaggaguga

SEQ ID NO: 4007 - RNA, 570 nt, Artificial Sequence
  derived and/or modified sequence opt5 from IFNalpha__Homo_sapiens__AAH93755
auggcccugcccuucgugcuccugauggcucuugucguucugaacugcaagagcaucuguucccucggcugcgaccugccucagacccacucucuuagcaauagacggacacugaugauuauggcccaaauggggcgcaucuccccguuuucuugucucaaagauagacaugacuucggauuuccccaggaggaguucgauggcaaccaguuucagaaggcgcaagcuauuagcgugcugcacgaaaugauccagcagacguucaaucuguuuuccaccaaagacucuagcgccacaugggaugaaacccuccuggacaaguucuacacagagcuuuaucagcaacugaacgaucucgaagccugcaugaugcaggaggugggggucgaggacaccccucugaugaauguggauuccauucuuacaguucggaaauacuuucagcgcaucacccuguaucucacggaaaagaaguacagccccugugcuugggagguggucagagccgaaaucaugcggucuuucucccugagcgcuaaccugcaggagcgccucagacggaaagaguga

SEQ ID NO: 4008 - RNA, 570 nt, Artificial Sequence
  derived and/or modified sequence opt6 from IFNalpha__Homo_sapiens__AAH93755
auggcacuaccauucguacuacuaauggcacuaguaguacucaauugcaaaucaauaugcucacuaggaugcgacuuaccacaaacacacucacuaucaaacagaagaacacuaaugauaauggcacaaaugggacgaauaagcccauucucaugccuaaaagacagacacgauuucggauucccacaagaagaauucgacggaaaccaauuccaaaaagcacaagcaauaucaguauuacacgaaaugauacaacaaacauucaaccuauucucaacaaaagacucaucagcaacaugggacgaaacacuucuagacaaauucuacacagaacuauaucaacaacuaaacgaccuagaagcaugcaugaugcaagaaguaggaguagaagacacaccacuaaugaacguagacucaauucuaacaguacgaaaauacuuccaaagaauaacacuauacuuaacagaaaaaaaauacucaccaugcgcaugggaaguaguaagagccgaaauaaugagaucauucucacuaucagcaaaccuacaagaaagacuaagaagaaaagaauaa

SEQ ID NO: 4009 - protein, 189 aa, Artificial Sequence
  IFNalpha__Homo_sapiens__P01570
MALPFALMMALVVLSCKSSCSLGCNLSQTHSLNNRRTLMLMAQMRRISPFSCLKDRHDFEFPQEEFDGNQFQKAQAISVLHEMMQQTFNLFSTKNSSAAWDETLLEKFYIELFQQMNDLEACVIQEVGVEETPLMNEDSILAVKKYFQRITLYLMEKKYSPCAWEVVRAEIMRSLSFSTNLQKRLRRKD

SEQ ID NO: 4010 - RNA, 570 nt, Artificial Sequence
  IFNalpha__Homo_sapiens__AAH74956
auggcauugcccuuugcuuuaaugauggcccugguggugcucagcugcaagucaagcugcucucugggcuguaaucugucucaaacccacagccugaauaacaggaggacuuugaugcucauggcacaaaugaggagaaucucuccuuucuccugccugaaggacagacaugacuuugaauuuccccaggaggaauuugauggcaaccaguuccagaaagcucaagccaucucuguccuccaugagaugaugcagcagaccuucaaucucuucagcacaaagaacucaucugcugcuugggaugagacccuccuagaaaaauucuacauugaacuuuuccagcaaaugaaugaccuggaagccugugugauacaggagguugggguggaagagacuccccugaugaaugaggacuccauccuggcugugaagaaauacuuccaaagaaucacucuuuaucugauggagaagaaauacagcccuugugccugggagguugucagagcagaaaucaugagaucccucucuuuuucaacaaacuugcaaaaaagauuaaggaggaaggauuga

SEQ ID NO: 4011 - RNA, 570 nt, Artificial Sequence
  derived and/or modified sequence opt1 from IFNalpha__Homo_sapiens__AAH74956
auggcccugcccuucgcccucaugauggcgcuggugguccugagcugcaaguccagcugcucccucggcugcaaccugagccagacccacucccugaacaaccgccggacccucaugcugauggcccagaugcgccggaucagcccguucuccugccugaaggaccgccacgacuucgaguucccccaggaggaguucgacgggaaccaguuccagaaggcccaggccaucagcgugcuccacgagaugaugcagcagacguucaaccuguucuccaccaagaacagcuccgccgcgugggacgagacccugcucgagaaguucuacaucgagcuguuccagcagaugaacgaccuggaggccugcgugauccaggaggucggcguggaggagacgccccucaugaacgaggacagcauccuggccgugaagaaguacuuccagcggaucacccuguaccucauggagaagaaguacucccccugcgccugggaggucgugcgcgcggagaucaugcggagccuguccuucagcaccaaccugcagaagcgccuccggcgcaaggacuga

SEQ ID NO: 4012 - RNA, 570 nt, Artificial Sequence
  derived and/or modified sequence opt2 from IFNalpha__Homo_sapiens__AAH74956
auggcccuccccuucgcccucaugauggcccucgucguccucuccugcaaguccuccugcucccucggcugcaaccucucccagacccacucccucaacaaccgccgcacccucaugcucauggcccagaugcgccgcaucucccccuucuccugccucaaggaccgccacgacuucgaguucccccaggaggaguucgacggcaaccaguuccagaaggcccaggccaucuccguccuccacgagaugaugcagcagaccuucaaccucuucuccaccaagaacuccuccgccgccugggacgagacccuccucgagaaguucuacaucgagcucuuccagcagaugaacgaccucgaggccugcgucauccaggaggucggcgucgaggagaccccccucaugaacgaggacuccauccucgccgucaagaaguacuuccagcgcaucacccucuaccucauggagaagaaguacucccccugcgccugggaggucguccgcgccgagaucaugcgcucccucuccuucuccaccaaccuccagaagcgccuccgccgcaaggacuga

SEQ ID NO: 4013 - RNA, 570 nt, Artificial Sequence
  derived and/or modified sequence opt3 from IFNalpha__Homo_sapiens__AAH74956
auggcccugcccuucgcucucaugauggcacuugugguccugagcugcaaguccucuuguucauugggcugcaacuuaagucagacccacagccugaauaacagaaggacacuaaugcucauggcccaaaugcggcgcaucuccccuuuuucuugucugaaagaccgacaugauuucgaguuuccacaggaagaguucgacgggaaucaguuucagaaggcgcaagcuauuucgguucuucacgaaaugaugcagcagacuuucaaccuguuuucaacgaaaaauagcagugccgcaugggaugagaccuugcucgaaaaguucuacauagagcuguuucagcaaaugaacgaccuggaggccugcgugauccaggaaguaggaguggaggaaacaccgcucaugaaugaggauuccauuuuagcugucaaaaaguauuuccagcguaucacucuguaccuuauggagaagaaauauucucccugugcaugggaagugguuagagccgagauuaugaggagcuuguccuuuucaaccaaccugcagaagcggcuacgcagaaaagacuga

SEQ ID NO: 4014 - RNA, 570 nt, Artificial Sequence
  derived and/or modified sequence opt4 from IFNalpha__Homo_sapiens__AAH74956
auggcccugcccuucgcccugaugauggcccugguggugcugagcugcaagagcagcugcagccugggcugcaaccugagccagacccacagccugaacaacagaagaacccugaugcugauggcccagaugagaagaaucagccccuucagcugccugaaggacagacacgacuucgaguucccccaggaggaguucgacggcaaccaguuccagaaggcccaggccaucagcgugcugcacgagaugaugcagcagaccuucaaccuguucagcaccaagaacagcagcgccgccugggacgagacccugcuggagaaguucuacaucgagcuguuccagcagaugaacgaccuggaggccugcgugauccaggaggugggcguggaggagaccccccugaugaacgaggacagcauccuggccgugaagaaguacuuccagagaaucacccuguaccugauggagaagaaguacagccccugcgccugggagguggugagagccgagaucaugagaagccugagcuucagcaccaaccugcagaagagacugagaagaaaggacuga

SEQ ID NO: 4015 - RNA, 570 nt, Artificial Sequence
  derived and/or modified sequence opt5 from IFNalpha__Homo_sapiens__AAH74956
auggcccugcccuucgcucucaugauggcccuggugguccuuagcugcaaguccucuuguagccugggcugcaaccucucccagacccacucucugaauaacagacggacacuuaugcugauggcgcaaaugcgcagaaucagcccuuuuuccugucucaaagaccggcaugauuucgaguuuccgcaggaagaguucgacgggaaucaguuucagaaggcucaagccauuucuguucugcacgaaaugaugcagcagacguucaaccuguuuagcaccaaaaauuccagcgccgcuugggaugagacacuccuggaaaaguucuacaucgagcuuuuucagcaaaugaacgaccuggaggccugcgugauucaggaagugggagucgaggaaacaccccucaugaaugaggauucuauccuggcugugaaaaaguauuuccagcgcauuacccuuuaccugauggagaagaaauauuccccuugugccugggaaguugugagagcggagaucaugcggagccucucuuuuuccaccaaccugcagaagcgccugagacggaaagacuga

SEQ ID NO: 4016 - RNA, 570 nt, Artificial Sequence
  derived and/or modified sequence opt6 from IFNalpha__Homo_sapiens__AAH74956
auggcacuaccauucgcacuaaugauggcacuaguaguacuaucaugcaaaucaucaugcucacuaggaugcaaccuaucacaaacacacucacucaacaacagaagaacacuaauguuaauggcacaaaugagaagaauaucaccauucucaugccuaaaagacagacacgacuucgaauucccacaagaagaauucgacggaaaccaauuccaaaaagcacaagcaauaucaguacuacacgaaaugaugcaacaaacauucaaccuauucucaacaaaaaacucaucagcagcaugggacgaaacacuauuagaaaaauucuacauagaacuauuccaacaaaugaacgaccuagaagcaugcguaauacaagaaguaggaguagaagaaacaccauuaaugaacgaagacucaauacuagcaguaaaaaaauacuuccaaagaauaacacuauaccuaauggaaaaaaaauacagcccaugcgcaugggaagucguaagagcagaaauaaugagaagccuaagcuucagcacuaaccuacaaaaaagacuacgaagaaaagacuaa

SEQ ID NO: 4017 - protein, 189 aa, Artificial Sequence
  IFNalpha__Homo_sapiens__P01571
MALSFSLLMAVLVLSYKSICSLGCDLPQTHSLGNRRALILLAQMGRISPFSCLKDRHDFGLPQEEFDGNQFQKTQAISVLHEMIQQTFNLFSTEDSSAAWEQSLLEKFSTELYQQLNNLEACVIQEVGMEETPLMNEDSILAVRKYFQRITLYLTEKKYSPCAWEVVRAEIMRSLSFSTNLQKILRRKD

SEQ ID NO: 4018 - RNA, 570 nt, Artificial Sequence
  IFNalpha__Homo_sapiens__AAA52725
auggcccuguccuuuucuuuacugauggccgugcuggugcucagcuacaaauccaucuguucucuaggcugugaucugccucagacccacagccuggguaauaggagggccuugauacuccuggcacaaaugggaagaaucucuccuuucuccugccugaaggacagacaugacuuuggacuuccccaggaggaguuugauggcaaccaguuccagaagacucaagccaucucuguccuccaugagaugauccagcagaccuucaaucucuucagcacagaggacucaucugcugcuugggaacagagccuccuagaaaaauuuuccacugaacuuuaccagcaacugaauaaccuggaagcaugugugauacaggagguugggauggaagagacuccccugaugaaugaggacuccauccuggcugugaggaaauacuuccaaagaaucacucuuuaucuaacagagaagaaauacagcccuugugccugggagguugucagagcagaaaucaugagaucccucucuuuuucaacaaacuugcaaaaaauauuaaggaggaaggauuga

SEQ ID NO: 4019 - RNA, 570 nt, Artificial Sequence
  derived and/or modified sequence opt1 from IFNalpha__Homo_sapiens__AAA52725
auggcccugagcuucucccuccugauggccgugcugguccucagcuacaaguccaucugcagccugggcugcgaccugccccagacccacucccucgggaaccgccgggcgcugauccugcucgcccagaugggccgcaucagcccguucuccugccugaaggaccggcacgacuucgggcugccccaggaggaguucgacggcaaccaguuccagaagacccaggccaucagcgugcuccacgagaugauccagcagacguucaaccuguucuccaccgaggacagcuccgccgccugggagcagagccugcucgagaaguucuccaccgagcuguaccagcagcugaacaaccucgaggcgugcgugauccaggaggucgggauggaggagacgccccugaugaacgaggacagcauccuggccgugcgcaaguacuuccagcggaucacccucuaccugaccgagaagaaguacucccccugcgccugggaggugguccgcgccgagaucaugcggagccuguccuucagcaccaaccuccagaagauccugcgccggaaggacuga

SEQ ID NO: 4020 - RNA, 570 nt, Artificial Sequence
  derived and/or modified sequence opt2 from IFNalpha__Homo_sapiens__AAA52725
auggcccucuccuucucccuccucauggccguccucguccucuccuacaaguccaucugcucccucggcugcgaccucccccagacccacucccucggcaaccgccgcgcccucauccuccucgcccagaugggccgcaucucccccuucuccugccucaaggaccgccacgacuucggccucccccaggaggaguucgacggcaaccaguuccagaagacccaggccaucuccguccuccacgagaugauccagcagaccuucaaccucuucuccaccgaggacuccuccgccgccugggagcagucccuccucgagaaguucuccaccgagcucuaccagcagcucaacaaccucgaggccugcgucauccaggaggucggcauggaggagaccccccucaugaacgaggacuccauccucgccguccgcaaguacuuccagcgcaucacccucuaccucaccgagaagaaguacucccccugcgccugggaggucguccgcgccgagaucaugcgcucccucuccuucuccaccaaccuccagaagauccuccgccgcaaggacuga

SEQ ID NO: 4021 - RNA, 570 nt, Artificial Sequence
  derived and/or modified sequence opt3 from IFNalpha__Homo_sapiens__AAA52725
auggcccugagcuucucccuccuuauggcugugcuggucuugucuuacaagucaaucugcaguuuaggcugugaccugccccagacccacagccuagggaacagaagggcacucauucugcuugcccaaaugggacggauauccccuuuuucuugccugaaagaucgccaugacuucgguuugccacaggaggaauuugauggcaaucaguuccagaagacacaagcgaucucgguucuccacgagaugauucagcagacuuuuaaccuguucucaacggaagacagcagugcugccugggagcagucccugcucgaaaaauuuucuaccgaguuauaucaacagcugaauaaccuugaggcaugugugauccaggaaguagggauggaggaaacaccguugaugaaugaggauagcauucuggccgugcgaaaguacuuccagcguaucacucuauaucucaccgagaaaaaguacucccccugcgcuugggaagucgugagagcagagauaaugaggucacugaguuuuagcacaaaccuucaaaagauccugcggcgcaaagacuga

SEQ ID NO: 4022 - RNA, 570 nt, Artificial Sequence
  derived and/or modified sequence opt4 from IFNalpha__Homo_sapiens__AAA52725
auggcccugagcuucagccugcugauggccgugcuggugcugagcuacaagagcaucugcagccugggcugcgaccugccccagacccacagccugggcaacagaagagcccugauccugcuggcccagaugggcagaaucagccccuucagcugccugaaggacagacacgacuucggccugccccaggaggaguucgacggcaaccaguuccagaagacccaggccaucagcgugcugcacgagaugauccagcagaccuucaaccuguucagcaccgaggacagcagcgccgccugggagcagagccugcuggagaaguucagcaccgagcuguaccagcagcugaacaaccuggaggccugcgugauccaggaggugggcauggaggagaccccccugaugaacgaggacagcauccuggccgugagaaaguacuuccagagaaucacccuguaccugaccgagaagaaguacagccccugcgccugggagguggugagagccgagaucaugagaagccugagcuucagcaccaaccugcagaagauccugagaagaaaggacuga

SEQ ID NO: 4023 - RNA, 570 nt, Artificial Sequence
  derived and/or modified sequence opt5 from IFNalpha__Homo_sapiens__AAA52725
auggcccugagcuucucccuccugauggcugugcuuguccugucuuacaagagcaucugcucccucggcugugaccugccccagacccacucucuugggaacagacgggcccugauucuccuggcgcaaaugggacgcaucagcccuuuuuccugccugaaagauagacaugacuucggccucccgcaggaggaauuugaugggaaucaguuccagaagacacaagcuauuucuguucugcacgagaugauccagcagacguuuaaccuuuucagcaccgaagacuccagcgccgccugggagcagucucugcucgaaaaauuuuccacagagcuguaucaacagcuuaauaaccuggaggcuugugugauucaggaagugggaauggaggaaacaccccucaugaaugaggauagcauccuggccguccggaaguacuuccagcgcaucacccuguaucucaccgagaaaaaguacucuccuugcgcuugggaagugguuagagccgagauuaugcggucccugagcuuuucuacaaaccuucaaaagauccugcgcagaaaagacuga

SEQ ID NO: 4024 - RNA, 570 nt, Artificial Sequence
  derived and/or modified sequence opt6 from IFNalpha__Homo_sapiens__AAA52725
auggcacuaucauucucacuacuaauggcaguacucguacuaucauacaaaucaauaugcucacucggaugcgaccuaccacaaacacacucauuaggaaacagaagagcacucauacuacuagcacaaaugggaagaauaucaccauucucaugccuaaaagacagacaugacuucggauuaccacaagaagaauucgacggaaaccaauuccaaaaaacacaagcaauaucaguacuccacgaaaugauacaacaaacauucaacuuauucucaacagaagacucaucagcagcaugggaacaaucacuacuagaaaaauucucaacagaacuauaccaacaacuaaacaaccuagaagcaugcguaauacaagaaguaggcauggaagaaacaccacuaaugaacgaagacucaauacuagcaguaagaaaauacuuccaaagaauaacacuauacuuaacagaaaaaaaauauucaccaugcgcaugggaaguaguacgcgcagaaauaaugagaagccuaagcuucuccacaaaccuacaaaaaauauuaagaagaaaagacuaa

SEQ ID NO: 4025 - protein, 189 aa, Artificial Sequence
  IFNalpha__Homo_sapiens__P05013
MALPFALLMALVVLSCKSSCSLDCDLPQTHSLGHRRTMMLLAQMRRISLFSCLKDRHDFRFPQEEFDGNQFQKAEAISVLHEVIQQTFNLFSTKDSSVAWDERLLDKLYTELYQQLNDLEACVMQEVWVGGTPLMNEDSILAVRKYFQRITLYLTEKKYSPCAWEVVRAEIMRSFSSSRNLQERLRRKE

SEQ ID NO: 4026 - RNA, 570 nt, Artificial Sequence
  IFNalpha__Homo_sapiens__AAH69471
auggcuuugccuuuugcuuuacugauggcccugguggugcucagcugcaagucaagcugcucucuggacugugaucugccucagacccacagccugggucacaggaggaccaugaugcuccuggcacaaaugaggagaaucucucuuuucuccugucugaaggacagacaugacuucagauuuccccaggaggaguuugauggcaaccaguuccagaaggcugaagccaucucuguccuccaugaggugauucagcagaccuucaaccucuucagcacaaaggacucaucuguugcuugggaugagaggcuucuagacaaacucuauacugaacuuuaccagcagcugaaugaccuggaagccugugugaugcaggaggugugggugggagggacuccccugaugaaugaggacuccauccuggcugugagaaaauacuuccaaagaaucacucucuaccugacagagaaaaaguacagcccuugugccugggagguugucagagcagaaaucaugagauccuucucuucaucaagaaacuugcaagaaagguuaaggaggaaggaauaa

SEQ ID NO: 4027 - RNA, 570 nt, Artificial Sequence
  derived and/or modified sequence opt1 from IFNalpha__Homo_sapiens__AAH69471
auggcccugcccuucgcccuccugauggcgcuggugguccucagcugcaaguccagcugcucccuggacugcgaccugccgcagacccacagccucggccaccgccggaccaugaugcugcuggcccagaugcgccggaucucccucuucagcugccugaaggaccgccacgacuuccgguucccccaggaggaguucgacgggaaccaguuccagaaggccgaggccaucuccgugcugcacgaggugauccagcagacguucaaccucuucagcaccaaggacuccagcgucgccugggacgagcgccugcuggacaagcucuacaccgagcuguaccagcagcugaacgaccucgaggcgugcgugaugcaggaggugugggucggcgggacgccccugaugaacgaggacuccauccuggccgugcggaaguacuuccagcgcaucacccucuaccugaccgagaagaaguacagccccugcgccugggaggugguccgggccgagaucaugcgcuccuucagcuccagccggaaccugcaggagcgccuccggcgcaaggaguga

SEQ ID NO: 4028 - RNA, 570 nt, Artificial Sequence
  derived and/or modified sequence opt2 from IFNalpha__Homo_sapiens__AAH69471
auggcccuccccuucgcccuccucauggcccucgucguccucuccugcaaguccuccugcucccucgacugcgaccucccccagacccacucccucggccaccgccgcaccaugaugcuccucgcccagaugcgccgcaucucccucuucuccugccucaaggaccgccacgacuuccgcuucccccaggaggaguucgacggcaaccaguuccagaaggccgaggccaucuccguccuccacgaggucauccagcagaccuucaaccucuucuccaccaaggacuccuccgucgccugggacgagcgccuccucgacaagcucuacaccgagcucuaccagcagcucaacgaccucgaggccugcgucaugcaggaggucugggucggcggcaccccccucaugaacgaggacuccauccucgccguccgcaaguacuuccagcgcaucacccucuaccucaccgagaagaaguacucccccugcgccugggaggucguccgcgccgagaucaugcgcuccuucuccuccucccgcaaccuccaggagcgccuccgccgcaaggaguga

SEQ ID NO: 4029 - RNA, 570 nt, Artificial Sequence
  derived and/or modified sequence opt3 from IFNalpha__Homo_sapiens__AAH69471
auggcccugcccuucgcucuccuuauggcacugguggucuugagcugcaaguccucuuguucauuagacugcgaucugccucagacccacagucuaggccauagaaggacaaugaugcuccuggcccaaaugcggcgcaucagccuuuucuccugucugaaagaccgacacgauuuccguuuuccacaggaggaauuugacgggaaccaguuucagaaggcggaggcuauuucuguuuugcaugaagugauacaacagacuuucaaucucuuuucgacgaaagauucaagcguagccugggacgagagacugcuggauaagcucuacaccgaauuauaucagcagcugaacgaccuugaggcaugcgugaugcaagaggucugggugggagguacaccguugaugaaugaagauaguauccuggccguuaggaaauacuuccagcggauuacucuauaucucaccgagaagaaguacucccccugugcuugggaagugguccgcgcagagaucaugagaucuuuuagcuccucaaggaaccugcaggagcggcuucgccgaaaagaauga

SEQ ID NO: 4030 - RNA, 570 nt, Artificial Sequence
  derived and/or modified sequence opt4 from IFNalpha__Homo_sapiens__AAH69471
auggcccugcccuucgcccugcugauggcccugguggugcugagcugcaagagcagcugcagccuggacugcgaccugccccagacccacagccugggccacagaagaaccaugaugcugcuggcccagaugagaagaaucagccuguucagcugccugaaggacagacacgacuucagauucccccaggaggaguucgacggcaaccaguuccagaaggccgaggccaucagcgugcugcacgaggugauccagcagaccuucaaccuguucagcaccaaggacagcagcguggccugggacgagagacugcuggacaagcuguacaccgagcuguaccagcagcugaacgaccuggaggccugcgugaugcaggaggugugggugggcggcaccccccugaugaacgaggacagcauccuggccgugagaaaguacuuccagagaaucacccuguaccugaccgagaagaaguacagccccugcgccugggagguggugagagccgagaucaugagaagcuucagcagcagcagaaaccugcaggagagacugagaagaaaggaguga

SEQ ID NO: 4031 - RNA, 570 nt, Artificial Sequence
  derived and/or modified sequence opt5 from IFNalpha__Homo_sapiens__AAH69471
auggcccugcccuucgcucuccugauggcccuugugguccugagcugcaaguccucuuguagccucgacugcgaucugccucagacccacucccuuggccauagacggacaaugaugcugcucgcgcaaaugcgcagaaucucucuguuuagcugucugaaagaccggcacgauuuccgcuuuccgcaggaggaguucgacgggaaccaguuucagaaggcugaagccauuuccguucuccaugaagugauccaacagacguucaaucuguuuucuaccaaagauagcuccguggccugggacgagagacuucuggauaagcucuacacagaacuguaucagcagcuuaacgaccuggaggcuugcgucaugcaagagguguggguuggaggcacaccccucaugaaugaagauagcauucuggccgugcggaaauacuuccagcgcaucacccuguaucucaccgagaagaaguacucuccuugugcuugggaagucgugagagccgagauuaugcgguccuuuucuagcucccgcaaccugcaggagagacuucggcgcaaagaauga

SEQ ID NO: 4032 - RNA, 570 nt, Artificial Sequence
  derived and/or modified sequence opt6 from IFNalpha__Homo_sapiens__AAH69471
auggcauuaccauucgcacuacuaauggcauuaguaguauuaucauguaaaagcucaugcucacuagacugcgaccuaccacaaacacacucauuaggacacagaagaacaaugaugcuccuagcacaaaugagaagaauaucacuauucucaugcuuaaaagacagacacgacuucagauucccacaagaagaauucgacggaaaccaauuccaaaaagcagaagcaauaucaguauuacacgaaguaauacaacaaacauucaaccuauucucaacaaaagacucaucugucgcaugggacgaaagacuacuagacaaacuauacacagaauuauaccaacaacuaaacgacuuagaagcaugcguaaugcaagaaguauggguaggaggaacaccacuaaugaacgaagacucaauacuagcaguaagaaaauacuuccaaagaauaaccuuauaccuaacagaaaaaaaauacucaccaugugcaugggaaguaguaagagcagaaauaaugagaucauucucaucaucaagaaaucuacaagaaagacuacgaagaaaagaauaa

SEQ ID NO: 4033 - protein, 189 aa, Artificial Sequence
  IFNalpha__Homo_sapiens__P05014
MALSFSLLMAVLVLSYKSICSLGCDLPQTHSLGNRRALILLAQMGRISHFSCLKDRHDFGFPEEEFDGHQFQKAQAISVLHEMIQQTFNLFSTEDSSAAWEQSLLEKFSTELYQQLNDLEACVIQEVGVEETPLMNEDSILAVRKYFQRITLYLTEKKYSPCAWEVVRAEIMRSLSFSTNLQKRLRRKD

SEQ ID NO: 4034 - RNA, 570 nt, Artificial Sequence
  IFNalpha__Homo_sapiens__AAA52726
auggcccuguccuuuucuuuacugauggccgugcuggugcucagcuacaaauccaucuguucucugggcugugaucugccucagacccacagccuggguaauaggagggccuugauacuccuggcacaaaugggaagaaucucucauuucuccugccugaaggacagacaugauuucggauuccccgaggaggaguuugauggccaccaguuccagaaggcucaagccaucucuguccuccaugagaugauccagcagaccuucaaucucuucagcacagaggacucaucugcugcuugggaacagagccuccuagaaaaauuuuccacugaacuuuaccagcaacugaaugaccuggaagcaugugugauacaggagguugggguggaagagacuccccugaugaaugaggacuccauccuggcugugaggaaauacuuccaaagaaucacucuuuaucuaacagagaagaaauacagcccuugugccugggagguugucagagcagaaaucaugagaucccucucguuuucaacaaacuugcaaaaaagauuaaggaggaaggauuga

SEQ ID NO: 4035 - RNA, 570 nt, Artificial Sequence
  derived and/or modified sequence opt1 from IFNalpha__Homo_sapiens__AAA52726
auggcccugagcuucucccuccugauggccgugcugguccucagcuacaaguccaucugcagccugggcugcgaccugccccagacccacucccucgggaaccgccgggcgcugauccugcucgcccagaugggccgcaucagccacuucuccugccugaaggaccggcacgacuucggguucccggaggaggaguucgacggccaccaguuccagaaggcccaggccaucagcgugcugcacgagaugauccagcagaccuucaaccucuucuccacggaggacagcuccgccgcgugggagcagagccugcuggagaaguucuccaccgagcucuaccagcagcugaacgaccuggaggccugcgugauccaggaggucgggguggaggagacgccccucaugaacgaggacagcauccuggccgugcgcaaguacuuccagcggaucacccuguaccucaccgagaagaaguacucccccugcgccugggaggucgugcgcgcggagaucaugcggagccuguccuucagcaccaaccugcagaagcgccuccggcgcaaggacuga

SEQ ID NO: 4036 - RNA, 570 nt, Artificial Sequence
  derived and/or modified sequence opt2 from IFNalpha__Homo_sapiens__AAA52726
auggcccucuccuucucccuccucauggccguccucguccucuccuacaaguccaucugcucccucggcugcgaccucccccagacccacucccucggcaaccgccgcgcccucauccuccucgcccagaugggccgcaucucccacuucuccugccucaaggaccgccacgacuucggcuuccccgaggaggaguucgacggccaccaguuccagaaggcccaggccaucuccguccuccacgagaugauccagcagaccuucaaccucuucuccaccgaggacuccuccgccgccugggagcagucccuccucgagaaguucuccaccgagcucuaccagcagcucaacgaccucgaggccugcgucauccaggaggucggcgucgaggagaccccccucaugaacgaggacuccauccucgccguccgcaaguacuuccagcgcaucacccucuaccucaccgagaagaaguacucccccugcgccugggaggucguccgcgccgagaucaugcgcucccucuccuucuccaccaaccuccagaagcgccuccgccgcaaggacuga

SEQ ID NO: 4037 - RNA, 570 nt, Artificial Sequence
  derived and/or modified sequence opt3 from IFNalpha__Homo_sapiens__AAA52726
auggcccugagcuucucccuccuuauggcugugcuggucuugucuuacaagucaaucugcaguuuaggcugugaccugccccagacccacagccuagggaacagaagggcacucauucugcuugcccaaaugggacggauaucccauuuuucuugccugaaagaucgccacgacuucgguuuuccugaggaagaguucgauggccaucaguuucagaaggcgcaggcuaucucgguuuugcacgaaaugauucaacagacauucaaucucuuuucaacugaggacagcagugccgcaugggaacagucccugcuggagaaauucucuacggagcucuaucagcaauuaaacgaucuggaagccugugugauccaggagguagggguggaagagaccccacuuaugaaugaggacagcauuuuggcuguccgaaaguacuuucagcguaucacacuguaucuaacugagaaaaaguacuccccgugcgcaugggaagugguuagagccgaaauaaugaggucacucaguuucagcaccaaccugcagaagcggcuucgcagaaaagauuga

SEQ ID NO: 4038 - RNA, 570 nt, Artificial Sequence
  derived and/or modified sequence opt4 from IFNalpha__Homo_sapiens__AAA52726
auggcccugagcuucagccugcugauggccgugcuggugcugagcuacaagagcaucugcagccugggcugcgaccugccccagacccacagccugggcaacagaagagcccugauccugcuggcccagaugggcagaaucagccacuucagcugccugaaggacagacacgacuucggcuuccccgaggaggaguucgacggccaccaguuccagaaggcccaggccaucagcgugcugcacgagaugauccagcagaccuucaaccuguucagcaccgaggacagcagcgccgccugggagcagagccugcuggagaaguucagcaccgagcuguaccagcagcugaacgaccuggaggccugcgugauccaggaggugggcguggaggagaccccccugaugaacgaggacagcauccuggccgugagaaaguacuuccagagaaucacccuguaccugaccgagaagaaguacagccccugcgccugggagguggugagagccgagaucaugagaagccugagcuucagcaccaaccugcagaagagacugagaagaaaggacuga

SEQ ID NO: 4039 - RNA, 570 nt, Artificial Sequence
  derived and/or modified sequence opt5 from IFNalpha__Homo_sapiens__AAA52726
auggcccugagcuucucccuccugauggcugugcuuguccugucuuacaagagcaucugcucccucggcugugaccugccccagacccacucucuugggaacagacgggcccugauucuccuggcgcaaaugggacgcaucagccauuuuuccugccugaaagauagacacgacuucggcuuuccugaggaagaguucgaugggcaucaguuucagaaggcucaggccauuucuguucuccacgaaaugauccaacagacauucaaucuguuuagcacggaggacuccagcgccgcuugggaacagucucuucuggagaaauucuccaccgagcucuaucagcaacugaacgaucuugaagccugugugauucaggaggugggagucgaagagacaccgcugaugaaugaggacagcauccucgcugugcggaaguacuuucagcgcaucacccuguaucugacagagaaaaaguacucucccugcgccugggaaguugugagagcggaaauuaugcggucccucagcuucucuaccaaccugcagaagcgccuuagacggaaagauuga

SEQ ID NO: 4040 - RNA, 570 nt, Artificial Sequence
  derived and/or modified sequence opt6 from IFNalpha__Homo_sapiens__AAA52726
auggcauuaagcuucucacuacucauggccguacuaguacuaucauacaaaucaauaugcucacuaggaugcgaucuaccacaaacacacucccuaggaaacagaagagcacuaauacuccuagcacaaaugggacgaauaagccacuucucaugccuaaaagacagacacgacuucggauucccagaagaagaauucgacggacaccaauuccaaaaagcacaagcaauaucaguacuacacgaaaugauacaacaaacauucaaccucuucucaacagaagacucaucagcagcaugggaacaaucacuacuagaaaaauucucaacagaacuauaccaacaacuaaacgaccuagaagcaugcguaauacaagaaguaggaguagaagaaacaccacuaaugaacgaagacucaauacuagcaguaagaaaauacuuccaaagaauaacacuauaccuaaccgaaaaaaaauacucaccaugcgcaugggaaguaguaagagcagaaauaaugagaagccuaucauucucaacaaaccuacaaaaaagacuaagacgaaaagacuaa

SEQ ID NO: 4041 - protein, 189 aa, Artificial Sequence
  IFNalpha__Homo_sapiens__P05015
MALSFSLLMAVLVLSYKSICSLGCDLPQTHSLGNRRALILLAQMGRISHFSCLKDRYDFGFPQEVFDGNQFQKAQAISAFHEMIQQTFNLFSTKDSSAAWDETLLDKFYIELFQQLNDLEACVTQEVGVEEIALMNEDSILAVRKYFQRITLYLMGKKYSPCAWEVVRAEIMRSFSFSTNLQKGLRRKD

SEQ ID NO: 4042 - RNA, 570 nt, Artificial Sequence
  IFNalpha__Homo_sapiens__AAA36042
auggcccuguccuuuucuuuacugauggccgugcuggugcucagcuacaaauccaucuguucucugggcugugaucugccucagacucacagccuggguaauaggagggccuugauacuccuggcacaaaugggaagaaucucucauuucuccugccugaaggacagauaugauuucggauucccccaggagguguuugauggcaaccaguuccagaaggcucaagccaucucugccuuccaugagaugauccagcagaccuucaaucucuucagcacaaaggauucaucugcugcuugggaugagacccuccuagacaaauucuacauugaacuuuuccagcaacugaaugaccuagaagccugugugacacaggagguugggguggaagagauugcccugaugaaugaggacuccauccuggcugugaggaaauacuuucaaagaaucacucuuuaucugauggggaagaaauacagcccuugugccugggagguugucagagcagaaaucaugagauccuucucuuuuucaacaaacuugcaaaaaggauuaagaaggaaggauuga

SEQ ID NO: 4043 - RNA, 570 nt, Artificial Sequence
  derived and/or modified sequence opt1 from IFNalpha__Homo_sapiens__AAA36042
auggcccugagcuucucccuccugauggccgugcugguccucagcuacaaguccaucugcagccugggcugcgaccugccccagacccacucccucgggaaccgccgggcgcugauccugcucgcccagaugggccgcaucagccacuucuccugccugaaggaccgguacgacuucggguucccgcaggagguguucgacggcaaccaguuccagaaggcccaggccaucagcgccuuccacgagaugauccagcagaccuucaaccuguucuccacgaaggacagcuccgcggccugggacgagacccuccuggacaaguucuacaucgagcuguuccagcagcucaacgaccuggaggccugcgugacccaggaggucgggguggaggagaucgcccugaugaacgaggacagcauccucgcggugcgcaaguacuuccagcggaucacccuguaccugaugggcaagaaguacucccccugcgccugggaggucgugcgcgccgagaucaugcggagcuucuccuucagcacgaaccuccagaagggccugcgccggaaggacuga

SEQ ID NO: 4044 - RNA, 570 nt, Artificial Sequence
  derived and/or modified sequence opt2 from IFNalpha__Homo_sapiens__AAA36042
auggcccucuccuucucccuccucauggccguccucguccucuccuacaaguccaucugcucccucggcugcgaccucccccagacccacucccucggcaaccgccgcgcccucauccuccucgcccagaugggccgcaucucccacuucuccugccucaaggaccgcuacgacuucggcuucccccaggaggucuucgacggcaaccaguuccagaaggcccaggccaucuccgccuuccacgagaugauccagcagaccuucaaccucuucuccaccaaggacuccuccgccgccugggacgagacccuccucgacaaguucuacaucgagcucuuccagcagcucaacgaccucgaggccugcgucacccaggaggucggcgucgaggagaucgcccucaugaacgaggacuccauccucgccguccgcaaguacuuccagcgcaucacccucuaccucaugggcaagaaguacucccccugcgccugggaggucguccgcgccgagaucaugcgcuccuucuccuucuccaccaaccuccagaagggccuccgccgcaaggacuga

SEQ ID NO: 4045 - RNA, 570 nt, Artificial Sequence
  derived and/or modified sequence opt3 from IFNalpha__Homo_sapiens__AAA36042
auggcccugagcuucucccuccuuauggcugugcuggucuugucuuacaagucaaucugcaguuuaggcugugaccugccccagacccacagccuagggaacagaagggcacucauucugcuugcccaaaugggacggauaucccauuuuucuugccugaaagaucgcuaugacuucgguuuuccucaggagguuuucgauggcaaucaguuucagaaggcgcaagcuaucucggccuuccacgaaaugauucagcagacauuuaacuuguucucaacuaaagacagcagugcagccugggaugagacgcuccuggacaaguuuuacaucgaacuguuccagcaacucaaugauuuagaggcuugugugacccaggaaguagggguggaggagauugcacugaugaacgaagacuccauccuugccguccgaaaauauuuucagcguauaacauuguaccugaugggaaagaaguauucuccaugcgcuugggaggugguuagagccgaaaucaugaggagcuucuccuuuucaacuaaucuacagaaaggccuccggcgcaaggauuga

SEQ ID NO: 4046 - RNA, 570 nt, Artificial Sequence
  derived and/or modified sequence opt4 from IFNalpha__Homo_sapiens__AAA36042
auggcccugagcuucagccugcugauggccgugcuggugcugagcuacaagagcaucugcagccugggcugcgaccugccccagacccacagccugggcaacagaagagcccugauccugcuggcccagaugggcagaaucagccacuucagcugccugaaggacagauacgacuucggcuucccccaggagguguucgacggcaaccaguuccagaaggcccaggccaucagcgccuuccacgagaugauccagcagaccuucaaccuguucagcaccaaggacagcagcgccgccugggacgagacccugcuggacaaguucuacaucgagcuguuccagcagcugaacgaccuggaggccugcgugacccaggaggugggcguggaggagaucgcccugaugaacgaggacagcauccuggccgugagaaaguacuuccagagaaucacccuguaccugaugggcaagaaguacagccccugcgccugggagguggugagagccgagaucaugagaagcuucagcuucagcaccaaccugcagaagggccugagaagaaaggacuga

SEQ ID NO: 4047 - RNA, 570 nt, Artificial Sequence
  derived and/or modified sequence opt5 from IFNalpha__Homo_sapiens__AAA36042
auggcccugagcuucucccuccugauggcugugcuuguccugucuuacaagagcaucugcucccucggcugugaccugccccagacccacucucuugggaacagacgggcccugauucuccuggcgcaaaugggacgcaucagccauuuuuccugccugaaagauagauaugacuucggcuuuccucaggagguuuucgaugggaaucaguuucagaaggcucaagccauuucugccuuccacgaaaugauccagcagacauuuaaccucuucagcacgaaagacuccagcgcugccugggaugagacccugcuugacaaguuuuacauugaacuguuccagcaacucaaugaucuggaggcuugugugacacaggaagugggagucgaggagaucgcccuuaugaacgaagacucuauccuggcggugcggaaauauuuucagcgcauuacccucuaccugaugggcaagaaguauuccccgugcgccugggagguugugagagcugaaaucaugcggagcuucucuuuuuccacaaaucugcagaaagggcuccgcagaaaggauuga

SEQ ID NO: 4048 - RNA, 570 nt, Artificial Sequence
  derived and/or modified sequence opt6 from IFNalpha__Homo_sapiens__AAA36042
auggcacuaagcuuuagcuuacuaauggcaguacuaguacuaucauacaaaaguauaugcucauuaggaugcgaucuaccacaaacacacucacuaggaaacagaagagcacuaauacuauuagcacaaaugggacgaauaagccauuucucaugcuuaaaagauagauaugacuuuggauuuccacaagaaguauucgauggaaaucaauuucaaaaagcacaagcaauaagugcauuccaugaaaugauacaacaaacauucaaucuauuuagcacaaaagauagcucagcagcaugggaugaaacacuauuagacaaauucuauauagaacucuuccaacaacuaaaugacuuagaagcaugcguaacacaagaaguaggaguagaagaaauagcacuaaugaacgaagacucaauauuagcaguaagaaaauacuuucaaagaauaacauuauaucuaaugggaaaaaaauauagcccaugcgcaugggaagucguaagagcagaaauaaugagaagcuuuagcuuuagcacaaacuuacaaaaaggcuuaagaagaaaagauuaa

SEQ ID NO: 4049 - protein, 189 aa, Artificial Sequence
  IFNalpha__Homo_sapiens__P32881
MALTFYLLVALVVLSYKSFSSLGCDLPQTHSLGNRRALILLAQMRRISPFSCLKDRHDFEFPQEEFDDKQFQKAQAISVLHEMIQQTFNLFSTKDSSAALDETLLDEFYIELDQQLNDLESCVMQEVGVIESPLMYEDSILAVRKYFQRITLYLTEKKYSSCAWEVVRAEIMRSFSLSINLQKRLKSKE

SEQ ID NO: 4050 - RNA, 570 nt, Artificial Sequence
  IFNalpha__Homo_sapiens__AAA52716
auggccuugacuuuuuauuuacuggucgcccuaguggugcucagcuacaagucauucagcucucugggcugugaucugccucagacucacagccuggguaacaggagggccuugauacuccuggcacaaaugcgaagaaucucuccuuucuccugccugaaggacagacaugacuuugaauucccccaggaggaguuugaugauaaacaguuccagaaggcucaagccaucucuguccuccaugagaugauccagcagaccuucaaccucuucagcacaaaggacucaucugcugcuuuggaugagacccuucuagaugaauucuacaucgaacuugaccagcagcugaaugaccuggaguccugugugaugcaggaagugggggugauagagucuccccugauguacgaggacuccauccuggcugugaggaaauacuuccaaagaaucacucuauaucugacagagaagaaauacagcucuugugccugggagguugucagagcagaaaucaugagauccuucucuuuaucaaucaacuugcaaaaaagauugaagaguaaggaauga

SEQ ID NO: 4051 - RNA, 570 nt, Artificial Sequence
  derived and/or modified sequence opt1 from IFNalpha__Homo_sapiens__AAA52716
auggcccugaccuucuaccuccugguggcccuggucgugcucagcuacaaguccuucagcucccugggcugcgaccugccccagacccacagccucgggaaccgccgggcgcugauccugcucgcccagaugcgccggaucuccccguucagcugccugaaggaccgccacgacuucgaguucccccaggaggaguucgacgacaagcaguuccagaaggcccaggccaucuccgugcugcacgagaugauccagcagacguucaaccucuucagcaccaaggacuccagcgccgcgcuggacgagacccugcucgacgaguucuacaucgagcuggaccagcagcugaacgaccucgaguccugcgucaugcaggaggugggcgugaucgagagcccccugauguacgaggacuccauccuggccguccggaaguacuuccagcgcaucacccucuaccugacggagaagaaguacagcuccugcgccugggagguggugcgggccgagaucaugcgcagcuucucccugagcaucaaccuccagaagcggcugaaguccaaggaguga

SEQ ID NO: 4052 - RNA, 570 nt, Artificial Sequence
  derived and/or modified sequence opt2 from IFNalpha__Homo_sapiens__AAA52716
auggcccucaccuucuaccuccucgucgcccucgucguccucuccuacaaguccuucuccucccucggcugcgaccucccccagacccacucccucggcaaccgccgcgcccucauccuccucgcccagaugcgccgcaucucccccuucuccugccucaaggaccgccacgacuucgaguucccccaggaggaguucgacgacaagcaguuccagaaggcccaggccaucuccguccuccacgagaugauccagcagaccuucaaccucuucuccaccaaggacuccuccgccgcccucgacgagacccuccucgacgaguucuacaucgagcucgaccagcagcucaacgaccucgaguccugcgucaugcaggaggucggcgucaucgaguccccccucauguacgaggacuccauccucgccguccgcaaguacuuccagcgcaucacccucuaccucaccgagaagaaguacuccuccugcgccugggaggucguccgcgccgagaucaugcgcuccuucucccucuccaucaaccuccagaagcgccucaaguccaaggaguga

SEQ ID NO: 4053 - RNA, 570 nt, Artificial Sequence
  derived and/or modified sequence opt3 from IFNalpha__Homo_sapiens__AAA52716
auggcccugaccuucuaccuccuuguggcucuggucguuuugagcuauaaguccuuuucuucauuaggcugcgaccugccccagacacacagucuagggaacagaagggcacucauccugcuugcccaaaugcggcgcauuagcccuuucuccugucugaaagaucgacaugacuuugaguucccacaggaagaguuugaugacaagcaguuccagaaagcgcaagcuauaucuguguugcacgaaaugauccagcagacuuuuaaucucuucucgacgaaggauucaagcgccgcacuggacgagacccugcucgaugaauuuuacauugaguuagaccagcaacugaacgaucuugagaguugcguaaugcaggaagugggagucaucgaguccccguugauguaugaagacucuauucuggccgugcguaaauacuuccagagaaucacacuauaucucacugagaagaaguacagcuccugugcuugggagguugugagggcagaaauaaugcggucauuuagucugagcaucaaucuucagaaacgccugaagucuaaagaguga

SEQ ID NO: 4054 - RNA, 570 nt, Artificial Sequence
  derived and/or modified sequence opt4 from IFNalpha__Homo_sapiens__AAA52716
auggcccugaccuucuaccugcugguggcccugguggugcugagcuacaagagcuucagcagccugggcugcgaccugccccagacccacagccugggcaacagaagagcccugauccugcuggcccagaugagaagaaucagccccuucagcugccugaaggacagacacgacuucgaguucccccaggaggaguucgacgacaagcaguuccagaaggcccaggccaucagcgugcugcacgagaugauccagcagaccuucaaccuguucagcaccaaggacagcagcgccgcccuggacgagacccugcuggacgaguucuacaucgagcuggaccagcagcugaacgaccuggagagcugcgugaugcaggaggugggcgugaucgagagcccccugauguacgaggacagcauccuggccgugagaaaguacuuccagagaaucacccuguaccugaccgagaagaaguacagcagcugcgccugggagguggugagagccgagaucaugagaagcuucagccugagcaucaaccugcagaagagacugaagagcaaggaguga

SEQ ID NO: 4055 - RNA, 570 nt, Artificial Sequence
  derived and/or modified sequence opt5 from IFNalpha__Homo_sapiens__AAA52716
auggcccugaccuucuaccuccugguggcucuugucguucugagcuauaaguccuuuucuagccucggcugcgaccugccccagacacacucccuugggaacagacgggcccugauccuccuggcgcaaaugcgcagaauuucuccuuucagcugucugaaagaucggcaugacuuugaguucccgcaggaagaguuugaugacaagcaguuccagaaagcucaagccaucuccgugcuccacgaaaugauucagcagacguuuaaucuguucucuaccaaggauagcuccgccgcucuugacgagacacugcucgaugaauuuuacaucgagcuggaccagcaacuuaacgaucuggagagcugcgugaugcaggaagucggagugauugagucuccccucauguaugaagacuccauccuggccguucgcaaauacuuccagagaaucacccuguaucucacagagaagaaguacagcucuugugcuugggaggugguccgggccgaaauuaugcgcuccuuuagccugucuaucaaucuucagaaaagacugaaguccaaagaguga

SEQ ID NO: 4056 - RNA, 570 nt, Artificial Sequence
  derived and/or modified sequence opt6 from IFNalpha__Homo_sapiens__AAA52716
auggcacuaaccuucuacuuacuaguagcccuaguaguacuaucauacaaaucauuuucaucacuaggaugcgaccucccacaaacacacucacuaggaaacagaagagcacucauacuacuagcacaaaugcgaagaauaucaccauucucaugccuaaaagacagacacgacuucgaauucccacaagaagaauucgacgacaaacaauuccaaaaagcacaagcaauauccguacuacacgaaaugauacaacaaacauucaaccuauucucaacaaaagacucaucagcagcacuagacgaaacacuacuagacgaauucuacauagaacuagaccaacaacucaacgacuuagaaucaugcguaaugcaagaaguaggcguaaucgaaucaccacuaauguacgaagacuccauacuagcaguaagaaaauacuuucaacgaauaacacuauaccuaacagaaaaaaaauacucaucaugcgcaugggaaguaguacgagcagaaauaaugagaucauucucauuaagcauaaacuuacaaaaaagacuaaaaucaaaagaauaa

SEQ ID NO: 4057 - protein, 189 aa, Artificial Sequence [sequence omitted]

SEQ ID NO: 4058 - RNA, 570 nt, Artificial Sequence
  IFNalpha__Homo_sapiens__CAA24970
augccccuguccuuuucuuuacugauggccgugcuggugcucagcuacaaauccaucuguucucugggcugugaucugccucagacucacagccuggguaauaggagggccuggauacuccuggcacaaaugggaagaaucucucauuucuccugccugaaggacagauaugauuucggauucccccaggagguguuugauggcaaccaguuccagaaggcucaagccaucucugccuuccaugagaugauccagcagaccuucaaucucuucagcacaaaggauucuucugcugcuugggaugagacccuccuagacaaauucuacauugaacuuuuccagcaacugaaugaccuagaagccugugugacacaggagguugggguggaagagauugcccugaugaaugaggacuccauccuggcugugaggaaauacuuucaaagaaucacucuuuaucugauggggaagaaauacagcccuugugccugggagguugucagagcagaaaucaugagauccuucucuuuuucaacaaacuugcaaaaaggauuaagaaggaaggauuga

SEQ ID NO: 4059 - RNA, 570 nt, Artificial Sequence
  derived and/or modified sequence opt1 from IFNalpha__Homo_sapiens__CAA24970
augccccugagcuucucccuccugauggccgugcugguccucagcuacaaguccaucugcagccugggcugcgaccugccgcagacccacucccucgggaaccgccgggccuggauccugcuggcgcagaugggccgcaucagccacuucuccugccucaaggaccgguacgacuucggguucccccaggagguguucgacggcaaccaguuccagaaggcccaggccaucagcgccuuccacgagaugauccagcagaccuucaaccuguucuccacgaaggacagcuccgccgcgugggacgagacccugcucgacaaguucuacaucgagcuguuccagcagcugaacgaccucgaggccugcgugacccaggaggucgggguggaggagaucgcccugaugaacgaggacagcauccuggccgugcgcaaguacuuccagcggaucacccucuaccugaugggcaagaaguacucccccugcgcgugggaggucgugcgcgccgagaucaugcggagcuucuccuucagcacgaaccugcagaagggccuccgccggaaggacuga

SEQ ID NO: 4060 - RNA, 570 nt, Artificial Sequence
  derived and/or modified sequence opt2 from IFNalpha__Homo_sapiens__CAA24970
augccccucuccuucucccuccucauggccguccucguccucuccuacaaguccaucugcucccucggcugcgaccucccccagacccacucccucggcaaccgccgcgccuggauccuccucgcccagaugggccgcaucucccacuucuccugccucaaggaccgcuacgacuucggcuucccccaggaggucuucgacggcaaccaguuccagaaggcccaggccaucuccgccuuccacgagaugauccagcagaccuucaaccucuucuccaccaaggacuccuccgccgccugggacgagacccuccucgacaaguucuacaucgagcucuuccagcagcucaacgaccucgaggccugcgucacccaggaggucggcgucgaggagaucgcccucaugaacgaggacuccauccucgccguccgcaaguacuuccagcgcaucacccucuaccucaugggcaagaaguacucccccugcgccugggaggucguccgcgccgagaucaugcgcuccuucuccuucuccaccaaccuccagaagggccuccgccgcaaggacuga

SEQ ID NO: 4061 - RNA, 570 nt, Artificial Sequence
  derived and/or modified sequence opt3 from IFNalpha__Homo_sapiens__CAA24970
augccccugagcuucucccuccuuauggccgugcuggucuugucuuacaagucaaucugcaguuuaggcugugaccugccucagacccacagccuagggaacagaagggcuuggauucuccuggcacaaaugggacggauaucccauuuuucuugccuuaaagaucgcuaugacuucgguuuuccacaggagguuuucgauggcaaucaguuucagaaggcccaagcgaucucggcuuuccacgaaaugauucagcagacauuuaaccuguucucaacuaaagacagcagugccgcaugggaugagacguugcucgacaaguuuuacaucgaacuguuccagcaacugaaugaucucgaggccugugugacccaggaaguagggguggaggagauugcuuuaaugaacgaagacuccauccuggcaguccgaaaauauuuucagcguauaacacuuuacuugaugggaaagaaguauucuccgugcgccugggaggugguuagagcugaaaucaugaggagcuucuccuuuucaacuaaucugcagaaaggccuacggcgcaaggauuga

SEQ ID NO: 4062 - RNA, 570 nt, Artificial Sequence
  derived and/or modified sequence opt4 from IFNalpha__Homo_sapiens__CAA24970
augccccugagcuucagccugcugauggccgugcuggugcugagcuacaagagcaucugcagccugggcugcgaccugccccagacccacagccugggcaacagaagagccuggauccugcuggcccagaugggcagaaucagccacuucagcugccugaaggacagauacgacuucggcuucccccaggagguguucgacggcaaccaguuccagaaggcccaggccaucagcgccuuccacgagaugauccagcagaccuucaaccuguucagcaccaaggacagcagcgccgccugggacgagacccugcuggacaaguucuacaucgagcuguuccagcagcugaacgaccuggaggccugcgugacccaggaggugggcguggaggagaucgcccugaugaacgaggacagcauccuggccgugagaaaguacuuccagagaaucacccuguaccugaugggcaagaaguacagccccugcgccugggagguggugagagccgagaucaugagaagcuucagcuucagcaccaaccugcagaagggccugagaagaaaggacuga

SEQ ID NO: 4063 - RNA, 570 nt, Artificial Sequence
  derived and/or modified sequence opt5 from IFNalpha__Homo_sapiens__CAA24970
augccccugagcuucucccuccugauggccgugcuuguccugucuuacaagagcaucugcucccucggcugugaccugccucagacccacucucuugggaacagacgggcuuggauucugcucgcccaaaugggacgcaucagccauuuuuccugccugaaagauagauaugacuucggcuuuccgcaggagguuuucgaugggaaucaguuucagaaggcgcaagcuauuucugccuuccacgaaaugauccagcagacauuuaaccuguucagcacgaaagacuccagcgccgcuugggaugagacccuccuggacaaguuuuacauugaacuuuuccagcaacugaaugaucucgaggccugugugacacaggaagugggagucgaggagaucgcucugaugaacgaagacucuauccuugccgugcggaaauauuuucagcgcauuacccuguaccucaugggcaagaaguauucccccugcgcgugggagguugugagagccgaaaucaugcggagcuucucuuuuuccacaaaucugcagaaagggcugcgcagaaaggauuga

SEQ ID NO: 4064 - RNA, 570 nt, Artificial Sequence
  derived and/or modified sequence opt6 from IFNalpha__Homo_sapiens__CAA24970
augccauuaagcuuuaguuuacuaauggcaguacuaguacuaucauacaaaagcauaugcucacuaggaugcgaucuaccacaaacacacucacuaggaaacagacgagcauggauauuacuagcacaaaugggaagaauaagccauuucucaugccuaaaagauagauaugacuuuggauuuccacaagaaguauucgauggaaaucaauuucaaaaagcacaagcaauaagcgcauuccaugaaaugauacaacaaacauucaaucuauuuaguacaaaagacagcucagcagcaugggaugaaacacuauuagacaaauucuauauagaacuauuucaacaacuaaaugacuuagaagcaugcguaacacaagaaguaggaguagaagaaauagcacuaaugaacgaagacucaauauuagcaguaagaaaauacuuucaaagaauaacacuauauuuaaugggaaaaaaauacagcccaugcgcaugggaaguaguaagagcagaaauaaugagaagcuuuagcuuuagcacaaacuuacaaaaaggauuaagaagaaaagauuaa

SEQ ID NO: 4065 - protein, 166 aa, Artificial Sequence [sequence omitted]

SEQ ID NO: 4066 - RNA, 501 nt, Artificial Sequence
  IFNalpha__Homo_sapiens__AAP20099
augugugaccuaccacaaacccacagccuggguagcaggaggaccuugaugcuccuggcgcagaugaggagaaucucucuuuucuccugcuugaaggacagacaugacuuuggauuuccccaggaggaguuuggcaaccaguuccaaaaggcugaaaccaucccuguccuccaugagaugauccagcagaucuucaaccucuucagcacaaaagacucaucugcugcuugggaugagacccuccuagacaaauucuacacugaacucuaccagcagcugaaugaccuggaagccugugugauacagggggugggggugacagagacuccccugaugaaggaggacuccauucuggcugugaggaaauacuuccaaagaaucacucucuaucugaaagagaagaaauacagcccuugugccugggagguugucagagcagaaaucaugagaucuuuuucuuugucaacaaacuugcaagaaaguuuaagaucuaaagaguaa

SEQ ID NO: 4067 - RNA, 501 nt, Artificial Sequence
  derived and/or modified sequence opt1 from IFNalpha__Homo_sapiens__AAP20099
augugcgaccugccccagacccacagccucggcucccgccggacccugaugcugcucgcccagaugcgccggaucagccuguucuccugccugaaggaccgccacgacuucggguucccgcaggaggaguucggcaaccaguuccagaaggccgagaccauccccgugcuccacgagaugauccagcagaucuucaaccuguucagcaccaaggacuccagcgcggccugggacgagacccugcucgacaaguucuacaccgagcuguaccagcagcugaacgaccucgaggccugcgucauccagggggugggcgugacggagacgccccugaugaaggaggacuccauccuggccguccggaaguacuuccagcgcaucacccucuaccugaaggagaagaaguacagccccugcgccugggagguggugcgggcggagaucaugcgcuccuucagccuguccaccaaccuccaggagagccugcgguccaaggaguga

SEQ ID NO: 4068 - RNA, 501 nt, Artificial Sequence
  derived and/or modified sequence opt2 from IFNalpha__Homo_sapiens__AAP20099
augugcgaccucccccagacccacucccucggcucccgccgcacccucaugcuccucgcccagaugcgccgcaucucccucuucuccugccucaaggaccgccacgacuucggcuucccccaggaggaguucggcaaccaguuccagaaggccgagaccauccccguccuccacgagaugauccagcagaucuucaaccucuucuccaccaaggacuccuccgccgccugggacgagacccuccucgacaaguucuacaccgagcucuaccagcagcucaacgaccucgaggccugcgucauccagggcgucggcgucaccgagaccccccucaugaaggaggacuccauccucgccguccgcaaguacuuccagcgcaucacccucuaccucaaggagaagaaguacucccccugcgccugggaggucguccgcgccgagaucaugcgcuccuucucccucuccaccaaccuccaggagucccuccgcuccaaggaguga

SEQ ID NO: 4069 - RNA, 501 nt, Artificial Sequence
  derived and/or modified sequence opt3 from IFNalpha__Homo_sapiens__AAP20099
augugcgaccugccccagacccacagccucggcuccagaaggacacuuaugcuguuggcccaaaugcggcgcaucucuuuauucucaugucugaaggaucgacaugacuuuggguucccucaggaggaauuuggaaaccaguuccagaaagcugagacuauuccagugcuacacgaaaugauacaacagaucuuuaaucucuucaguacgaaggauagcuccgcagccugggacgagacccugcuugauaaauuuuacacagaacuguaucagcaguugaacgaccucgaggcgugcgucauucaagguguuggcgugacugagaccccgcugaugaaggaagauucuauccuggcuguacguaaauacuuccagagaauuacacucuauuuaaaggagaagaaauacucgcccugugccugggaaguggucagggcagagaucaugcggucauuuagccugaguaccaaucuucaggaguccuugcgcucuaaggaauga

SEQ ID NO: 4070 - RNA, 501 nt, Artificial Sequence
  derived and/or modified sequence opt4 from IFNalpha__Homo_sapiens__AAP20099
augugcgaccugccccagacccacagccugggcagcagaagaacccugaugcugcuggcccagaugagaagaaucagccuguucagcugccugaaggacagacacgacuucggcuucccccaggaggaguucggcaaccaguuccagaaggccgagaccauccccgugcugcacgagaugauccagcagaucuucaaccuguucagcaccaaggacagcagcgccgccugggacgagacccugcuggacaaguucuacaccgagcuguaccagcagcugaacgaccuggaggccugcgugauccagggcgugggcgugaccgagaccccccugaugaaggaggacagcauccuggccgugagaaaguacuuccagagaaucacccuguaccugaaggagaagaaguacagccccugcgccugggagguggugagagccgagaucaugagaagcuucagccugagcaccaaccugcaggagagccugagaagcaaggaguga

SEQ ID NO: 4071 - RNA, 501 nt, Artificial Sequence
  derived and/or modified sequence opt5 from IFNalpha__Homo_sapiens__AAP20099
augugcgaccugccccagacccacagccucggcuccagacggacacugaugcuucuggcccaaaugcgcagaaucucucucuucagcugucugaaggaucggcaugacuuuggguucccucaggaggaauuuggaaaccaguuccagaaagcugagacgauuccggugcuucacgaaaugauccaacagauuuuuaaucuguucuccaccaaggauucuagcgccgcgugggacgagacacuccuggauaaauuuuacaccgaacuguaucagcagcucaacgaccuggaggcuugcgucauccaaggcguuggggugacagagacaccccuuaugaaggaagauuccauucuggccgugcgcaaauacuuccagagaaucacccucuaucugaaggagaagaaauacucuccuugugccugggaagucgugcgggcugagaucaugcgcagcuuuucccuuagcaccaaucugcaggagucucucagauccaaggaauga

SEQ ID NO: 4072 - RNA, 501 nt, Artificial Sequence
  derived and/or modified sequence opt6 from IFNalpha__Homo_sapiens__AAP20099
augugcgaccuaccacaaacacacucacuaggaucaagaagaacacuaaugcuacuagcacaaaugcgaagaauaucauuauucucaugccuaaaagacagacacgacuucggauucccacaagaagaauucggaaaccaauuccaaaaagcagaaacaauaccaguacuacacgaaaugauacaacaaauauucaaccuauucucaacaaaagacucaucagccgcaugggacgaaacacuacuagacaaauucuacacagaauuauaccaacaacuaaacgacuuagaagcaugcguaauacaaggaguaggagucacagaaacaccacuaaugaaagaagacucaauacuagcaguaagaaaauacuuccaaagaauaacacuauaccuaaaagaaaaaaaauacucaccaugcgcaugggaaguaguaagagcagaaauaaugagauccuucucacuaucaacaaaccuacaagaaucacuaagaucaaaagaauaa

SEQ ID NO: 4073 - protein, 187 aa, Artificial Sequence
  IFNB__Homo_sapiens__P01574
MTNKCLLQIALLLCFSTTALSMSYNLLGFLQRSSNFQCQKLLWQLNGRLEYCLKDRMNFDIPEEIKQLQQFQKEDAALTIYEMLQNIFAIFRQDSSSTGWNETIVENLLANVYHQINHLKTVLEEKLEKEDFTRGKLMSSLHLKRYYGRILHYLKAKEYSHCAWTIVRVEILRNFYFINRLTGYLRN

SEQ ID NO: 4074 - RNA, 564 nt, Artificial Sequence
  IFNB__Homo_sapiens__AAA36040
augaccaacaagugucuccuccaaauugcucuccuguugugcuucuccacuacagcucuuuccaugagcuacaacuugcuuggauuccuacaaagaagcagcaauuuucagugucagaagcuccuguggcaauugaaugggaggcuugaauacugccucaaggacaggaugaacuuugacaucccugaggagauuaagcagcugcagcaguuccagaaggaggacgccgcauugaccaucuaugagaugcuccagaacaucuuugcuauuuucagacaagauucaucuagcacuggcuggaaugagacuauuguugagaaccuccuggcuaaugucuaucaucagauaaaccaucugaagacaguccuggaagaaaaacuggagaaagaagauuucaccaggggaaaacucaugagcagucugcaccugaaaagauauuaugggaggauucugcauuaccugaaggccaaggaguacagucacugugccuggaccauagucagaguggaaauccuaaggaacuuuuacuucauuaacagacuuacagguuaccuccgaaacuga

SEQ ID NO: 4075 - RNA, 564 nt, Artificial Sequence
  derived and/or modified sequence opt1 from IFNB__Homo_sapiens__AAA36040
augaccaacaagugccugcuccagaucgcccugcugcucugcuucagcaccacggcccuguccaugagcuacaaccugcucggcuuccugcagcgcuccagcaacuuccagugccagaagcugcucuggcagcugaacgggcggcuggaguacugccucaaggaccgcaugaacuucgacauccccgaggagaucaagcagcugcagcaguuccagaaggaggacgcggcccugaccaucuacgagaugcuccagaacaucuucgccaucuuccggcaggacuccagcuccaccggcuggaacgagaccaucguggagaaccugcuggccaacgucuaccaccagaucaaccaccucaagacggugcuggaggagaagcuggagaaggaggacuucacccgcgggaagcucaugagcucccugcaccugaagcgguacuacggccgcauccuccacuaccugaaggccaaggaguacagccacugcgcguggaccaucgugcgggucgagauccugcgcaacuucuacuucaucaaccggcucaccggguaccugcgcaacuga

SEQ ID NO: 4076 - RNA, 564 nt, Artificial Sequence
  derived and/or modified sequence opt2 from IFNB__Homo_sapiens__AAA36040
augaccaacaagugccuccuccagaucgcccuccuccucugcuucuccaccaccgcccucuccauguccuacaaccuccucggcuuccuccagcgcuccuccaacuuccagugccagaagcuccucuggcagcucaacggccgccucgaguacugccucaaggaccgcaugaacuucgacauccccgaggagaucaagcagcuccagcaguuccagaaggaggacgccgcccucaccaucuacgagaugcuccagaacaucuucgccaucuuccgccaggacuccuccuccaccggcuggaacgagaccaucgucgagaaccuccucgccaacgucuaccaccagaucaaccaccucaagaccguccucgaggagaagcucgagaaggaggacuucacccgcggcaagcucauguccucccuccaccucaagcgcuacuacggccgcauccuccacuaccucaaggccaaggaguacucccacugcgccuggaccaucguccgcgucgagauccuccgcaacuucuacuucaucaaccgccucaccggcuaccuccgcaacuga

SEQ ID NO: 4077 - RNA, 564 nt, Artificial Sequence
  derived and/or modified sequence opt3 from IFNB__Homo_sapiens__AAA36040
augaccaacaagugccugcuccagaucgcccuucuguuguguuucagcacaacugcuuuauccaugucuuacaaucugcuaggcuuucuccaaagaucaaguaacuuccagugccagaaacugcuuuggcagcugaaugggagguuggaguauugucucaaggaccggaugaacuuugauauucccgaagagauaaaacaacugcagcaguuccagaaggaagacgcagcccugacgaucuacgagaugcuccaaaauauuuuugcgaucuuccgccaggauagcuccucuaccggauggaacgaaacaauuguggagaauuuacuggcuaacgucuaucaccagaucaaucaucuuaaaacuguuuuggaggaaaagcuggagaaggaagacuuuacccgagguaaacuaaugucgucacuccaccugaagcguuacuauggcagaauacuucauuaccugaaagccaaggaguauagccacugcgcauggacaaucgugaggguagagauuuugcggaacuucuacuuuaucaaucgccucaccggguaccugagaaacuga

SEQ ID NO: 4078 - RNA, 564 nt, Artificial Sequence
  derived and/or modified sequence opt4 from IFNB__Homo_sapiens__AAA36040
augaccaacaagugccugcugcagaucgcccugcugcugugcuucagcaccaccgcccugagcaugagcuacaaccugcugggcuuccugcagagaagcagcaacuuccagugccagaagcugcuguggcagcugaacggcagacuggaguacugccugaaggacagaaugaacuucgacauccccgaggagaucaagcagcugcagcaguuccagaaggaggacgccgcccugaccaucuacgagaugcugcagaacaucuucgccaucuucagacaggacagcagcagcaccggcuggaacgagaccaucguggagaaccugcuggccaacguguaccaccagaucaaccaccugaagaccgugcuggaggagaagcuggagaaggaggacuucaccagaggcaagcugaugagcagccugcaccugaagagauacuacggcagaauccugcacuaccugaaggccaaggaguacagccacugcgccuggaccaucgugagaguggagauccugagaaacuucuacuucaucaacagacugaccggcuaccugagaaacuga

SEQ ID NO: 4079 - RNA, 564 nt, Artificial Sequence
  derived and/or modified sequence opt5 from IFNB__Homo_sapiens__AAA36040
augaccaacaagugccugcuccagaucgcccugcuucuguguuucagcacaacggcucucuccaugucuuacaaucugcuuggcuuucugcaaagaagcuccaacuuccagugccagaaacuccuguggcagcugaaugggcggcucgaguauugucugaaggaccgcaugaacuuugauauucccgaagagaucaaacaacuucagcaguuccagaaggaagacgccgcgcugaccauuuacgagaugcuccaaaauaucuuugcuauuuucagacaggauucuagcuccacaggauggaacgaaaccaucguggagaaucugcuugccaacgucuaucaccagaucaaucaucugaaaacaguucucgaggaaaagcuggagaaggaagacuuuacccggggcaaacugaugucuagccuccaccugaagcgcuacuaugggcggauucuucauuaccugaaagccaaggaguauucccacugcgcuuggacaaucgugagaguggagauucuccgcaacuucuacuuuaucaauagacugaccggauaccuucggaacuga

SEQ ID NO: 4080 - RNA, 564 nt, Artificial Sequence
  derived and/or modified sequence opt6 from IFNB__Homo_sapiens__AAA36040
augacaaacaaaugccuacuacaaauagcacuacuccuaugcuucuccacaacagcacuaucaaugucauacaaccuacuaggauuccuacaacgauccucaaacuuccaaugccaaaaacuacuauggcaacuaaacggaagacuagaauacugcuuaaaagaccgcaugaacuucgacauaccagaagaaauaaaacaacuacaacaauuccaaaaagaagacgcagcacuaaccauauacgaaaugcuacaaaacauauucgcaauauuccgacaagacucaucaucaacaggauggaacgaaacaauaguagaaaaccuccuagcaaacguauaccaccaaauaaaccacuuaaaaacaguacuagaagaaaaauuagaaaaagaagacuucacaagaggaaaauuaaugucaucacuacaccuaaaacgauacuauggaagaauacuacacuaccuaaaagcaaaagaauacucacauugcgcauggacaauaguacgaguagaaauacuaagaaacuucuacuucauaaacagacuaacaggauaccuacgaaacuaa

SEQ ID NO: 4081 - protein, 187 aa, Artificial Sequence [sequence omitted]

SEQ ID NO: 4082 - RNA, 564 nt, Artificial Sequence
  IFNB__Homo_sapiens__AAC41702
augaccaacaagugucuccuccaaauugcucuccuguugugcuucuccacgacagcucuuuccaugagcuacaacuugcuuggauuccuacaaagaagcagcaauugucagugucagaagcuccuguggcaauugaaugggaggcuugaauacugccucaaggacaggaggaacuuugacaucccugaggagauuaagcagcugcagcaguuccagaaggaggacgccgcagugaccaucuaugagaugcuccagaacaucuuugcuauuuucagacaagauucaucgagcacuggcuggaaugagacuauuguugagaaccuccuggcuaaugucuaucaucagagaaaccaucugaagacaguccuggaagaaaaacuggagaaagaagauuucaccaggggaaaacgcaugagcagucugcaccugaaaagauauuaugggaggauucugcauuaccugaaggccaaggaggacagucacugugccuggaccauagucagaguggaaauccuaaggaacuuuuacgucauuaacagacuuacagguuaccuccgaaacuga

SEQ ID NO: 4083 - RNA, 564 nt, Artificial Sequence
  derived and/or modified sequence opt1 from IFNB__Homo_sapiens__AAC41702
augaccaacaagugccugcuccagaucgcccugcugcucugcuucagcaccacggcccuguccaugagcuacaaccugcucggcuuccugcagcgcuccagcaacugccagugccagaagcugcucuggcagcugaacgggcggcuggaguacugccucaaggaccgccggaacuucgacauccccgaggagaucaagcagcugcagcaguuccagaaggaggacgcggccgugaccaucuacgagaugcugcagaacaucuucgccaucuuccgccaggacuccagcuccaccggcuggaacgagaccaucgucgagaaccuccuggccaacguguaccaccagcggaaccaccugaagacggugcucgaggagaagcuggagaaggaggacuucacccgcgggaagcggaugagcucccugcaccucaagcgcuacuacggccggauccugcacuaccugaaggccaaggaggacagccacugcgcguggaccaucguccgcguggagauccuccggaacuucuacgugaucaaccgccugaccggguaccugcggaacuga

SEQ ID NO: 4084 - RNA, 564 nt, Artificial Sequence
  derived and/or modified sequence opt2 from IFNB__Homo_sapiens__AAC41702
augaccaacaagugccuccuccagaucgcccuccuccucugcuucuccaccaccgcccucuccauguccuacaaccuccucggcuuccuccagcgcuccuccaacugccagugccagaagcuccucuggcagcucaacggccgccucgaguacugccucaaggaccgccgcaacuucgacauccccgaggagaucaagcagcuccagcaguuccagaaggaggacgccgccgucaccaucuacgagaugcuccagaacaucuucgccaucuuccgccaggacuccuccuccaccggcuggaacgagaccaucgucgagaaccuccucgccaacgucuaccaccagcgcaaccaccucaagaccguccucgaggagaagcucgagaaggaggacuucacccgcggcaagcgcauguccucccuccaccucaagcgcuacuacggccgcauccuccacuaccucaaggccaaggaggacucccacugcgccuggaccaucguccgcgucgagauccuccgcaacuucuacgucaucaaccgccucaccggcuaccuccgcaacuga

SEQ ID NO: 4085 - RNA, 564 nt, Artificial Sequence
  derived and/or modified sequence opt3 from IFNB__Homo_sapiens__AAC41702
augaccaacaagugccugcuccagaucgcccuucuguuguguuucagcacaacugcuuuauccaugucuuacaaucugcuaggcuuucuccaaagaucaaguaacugccagugucagaaacugcuuuggcagcugaaugggagguuggaguauugccucaaggaccggcgcaacuucgauauucccgaagagauaaaacaacugcagcaguuucagaaggaagacgcagccgugacgaucuacgagaugcugcaaaauauuuucgcgaucuuucgacaggauagcuccucuaccggauggaacgaaacaauugucgagaaucucuuagcuaacguuuaucaccagcguaaucaucugaaaacugugcuugaggaaaaguuggagaaggaagacuucaccagagguaaaaggaugucgucacugcaccuaaagcgguacuauggccgcauccuccauuaccugaaagccaaggaggauagccacugugcauggacaauaguaagaguggagauccuuaggaacuuuuaugucauuaaucggcugaccggguacuugcgcaacuga

SEQ ID NO: 4086 - RNA, 564 nt, Artificial Sequence
  derived and/or modified sequence opt4 from IFNB__Homo_sapiens__AAC41702
augaccaacaagugccugcugcagaucgcccugcugcugugcuucagcaccaccgcccugagcaugagcuacaaccugcugggcuuccugcagagaagcagcaacugccagugccagaagcugcuguggcagcugaacggcagacuggaguacugccugaaggacagaagaaacuucgacauccccgaggagaucaagcagcugcagcaguuccagaaggaggacgccgccgugaccaucuacgagaugcugcagaacaucuucgccaucuucagacaggacagcagcagcaccggcuggaacgagaccaucguggagaaccugcuggccaacguguaccaccagagaaaccaccugaagaccgugcuggaggagaagcuggagaaggaggacuucaccagaggcaagagaaugagcagccugcaccugaagagauacuacggcagaauccugcacuaccugaaggccaaggaggacagccacugcgccuggaccaucgugagaguggagauccugagaaacuucuacgugaucaacagacugaccggcuaccugagaaacuga

SEQ ID NO: 4087 - RNA, 564 nt, Artificial Sequence
  derived and/or modified sequence opt5 from IFNB__Homo_sapiens__AAC41702
augaccaacaagugccugcuccagaucgcccugcuucuguguuucagcacaacggcucucuccaugucuuacaaucugcuuggcuuucugcaaagaagcuccaacugccagugucagaaacuccuguggcagcugaaugggcggcucgaguauugccugaaggaccgcagaaacuucgauauucccgaagagaucaaacaacuucagcaguuucagaaggaagacgccgcggugaccauuuacgagaugcugcaaaauaucuucgcuauuuuucggcaggauucuagcuccacaggauggaacgaaaccaucgucgagaaucuccuggccaacguuuaucaccagcgcaaucaucuuaaaacagugcuggaggaaaagcucgagaaggaagacuucaccagaggcaaacggaugucuagccugcaccugaagcgcuacuaugggagaauccuccauuaccugaaagccaaggaggauucccacugugcuuggacaauugugcgggucgagauccuucgcaacuuuuaugugauuaauagacugaccggauaccuccggaacuga

SEQ ID NO: 4088 - RNA, 564 nt, Artificial Sequence
  derived and/or modified sequence opt6 from IFNB__Homo_sapiens__AAC41702
augacaaauaaaugccuacuacaaauagcacuacuacuaugcuucuccacaaccgcacuaucaaugucauacaaccuacuaggauuccuccaaagaucaucaaacugccaaugccaaaaacuacuauggcaacuaaacggaagacuagaauacugccuaaaagacagacgaaacuucgacauaccagaagaaauaaaacaacuacaacaauuccaaaaagaagacgcagcaguaacaaucuacgaaaugcuacaaaacauauucgcaauauucagacaagacucaucaucaacaggauggaacgaaacaauaguagaaaacuuacuagcaaauguauaccaccaaagaaaccacuuaaaaacaguacuagaagaaaaacuagaaaaagaagacuucacaagaggaaaaagaaugucaucacuacaccuaaaaagauacuacggcagaauacuacacuaccuaaaagcaaaagaagacucacacugcgcauggacaauaguacgaguagaaauacuaagaaacuucuauguaauaaacagacuaacaggauacuuaagaaacuaa

SEQ ID NO: 4089 - protein, 166 aa, Artificial Sequence
  IFNG__Homo_sapiens__P01579
MKYTSYILAFQLCIVLGSLGCYCQDPYVKEAENLKKYFNAGHSDVADNGTLFLGILKNWKEESDRKIMQSQIVSFYFKLFKNFKDDQSIQKSVETIKEDMNVKFFNSNKKKRDDFEKLTNYSVTDLNVQRKAIHELIQVMAELSPAAKTGKRKRSQMLFRGRRASQ

SEQ ID NO: 4090 - RNA, 501 nt, Artificial Sequence
  IFNG__Homo_sapiens__AAB59534
augaaauauacaaguuauaucuuggcuuuucagcucugcaucguuuuggguucucuuggcuguuacugccaggacccauauguaaaagaagcagaaaaccuuaagaaauauuuuaaugcaggucauucagauguagcggauaauggaacucuuuucuuaggcauuuugaagaauuggaaagaggagagugacagaaaaauaaugcagagccaaauugucuccuuuuacuucaaacuuuuuaaaaacuuuaaagaugaccagagcauccaaaagaguguggagaccaucaaggaagacaugaaugucaaguuuuucaauagcaacaaaaagaaacgagaugacuucgaaaagcugacuaauuauucgguaacugacuugaauguccaacgcaaagcaauacaugaacucauccaagugauggcugaacugucgccagcagcuaaaacagggaagcgaaaaaggagucagaugcuguuucgaggucgaagagcaucccaguaa

SEQ ID NO: 4091 - RNA, 501 nt, Artificial Sequence
  derived and/or modified sequence opt1 from IFNG__Homo_sapiens__AAB59534
augaaguacaccagcuacauccucgccuuccagcucugcaucgugcugggcucccuggggugcuacugccaggaccccuacgucaaggaggccgagaaccucaagaaguacuucaacgcgggccacagcgacguggccgacaacgggacccuguuccugggcauccucaagaacuggaaggaggaguccgaccgcaagaucaugcagagccagaucguguccuucuacuucaagcuguucaagaacuucaaggacgaccagagcauccagaaguccgucgagacgaucaaggaggacaugaacgugaaguucuucaacagcaacaagaagaagcgggacgacuucgagaagcugaccaacuacuccgugaccgaccucaacguccagcgcaaggccauccacgagcugauccaggugauggccgagcugagcccggccgcgaagaccgggaagcggaagcgcucccagaugcuguuccggggccgccgggccagccaguga

SEQ ID NO: 4092 - RNA, 501 nt, Artificial Sequence
  derived and/or modified sequence opt2 from IFNG__Homo_sapiens__AAB59534
augaaguacaccuccuacauccucgccuuccagcucugcaucguccucggcucccucggcugcuacugccaggaccccuacgucaaggaggccgagaaccucaagaaguacuucaacgccggccacuccgacgucgccgacaacggcacccucuuccucggcauccucaagaacuggaaggaggaguccgaccgcaagaucaugcagucccagaucgucuccuucuacuucaagcucuucaagaacuucaaggacgaccaguccauccagaaguccgucgagaccaucaaggaggacaugaacgucaaguucuucaacuccaacaagaagaagcgcgacgacuucgagaagcucaccaacuacuccgucaccgaccucaacguccagcgcaaggccauccacgagcucauccaggucauggccgagcucucccccgccgccaagaccggcaagcgcaagcgcucccagaugcucuuccgcggccgccgcgccucccaguga

SEQ ID NO: 4093 - RNA, 501 nt, Artificial Sequence
  derived and/or modified sequence opt3 from IFNG__Homo_sapiens__AAB59534
augaaguacaccagcuauauccucgccuuccagcucugcauugugcuuggcucccugggguguuacugccaagaccccuaugucaaagaggcugaaaacuugaagaaauacuuuaaugcaggacacucugauguugccgacaacgguacauuauuccugggcauacuaaagaauuggaaagaggaaucagauagaaagaucaugcagagucagauugugagcuuuuauuucaagcucuuuaaaaacuucaaggacgaucaguccauccaaaaaucuguagagacuauuaaggaagacaugaaugugaaauuuuucaacucgaauaagaagaaaagggaugacuuugagaagcugacgaacuacucagucaccgaucuuaaugugcagcggaaagcgauccaugagcugauacagguuauggcugaauugagcccugccgcaaagacagggaaacgcaagcgaagucagaugcuguuccguggaagaagggccucccaauga

SEQ ID NO: 4094 - RNA, 501 nt, Artificial Sequence
  derived and/or modified sequence opt4 from IFNG__Homo_sapiens__AAB59534
augaaguacaccagcuacauccuggccuuccagcugugcaucgugcugggcagccugggcugcuacugccaggaccccuacgugaaggaggccgagaaccugaagaaguacuucaacgccggccacagcgacguggccgacaacggcacccuguuccugggcauccugaagaacuggaaggaggagagcgacagaaagaucaugcagagccagaucgugagcuucuacuucaagcuguucaagaacuucaaggacgaccagagcauccagaagagcguggagaccaucaaggaggacaugaacgugaaguucuucaacagcaacaagaagaagagagacgacuucgagaagcugaccaacuacagcgugaccgaccugaacgugcagagaaaggccauccacgagcugauccaggugauggccgagcugagccccgccgccaagaccggcaagagaaagagaagccagaugcuguucagaggcagaagagccagccaguga

SEQ ID NO: 4095 - RNA, 501 nt, Artificial Sequence
  derived and/or modified sequence opt5 from IFNG__Homo_sapiens__AAB59534
augaaguacaccagcuauauccuggccuuccagcucugcauugugcugggcucccuuggguguuacugccaagaccccuaugucaaagaggcugaaaaccugaagaaauacuuuaaugccggacacucugauguugcggacaacggcacacucuuccuggggauccuuaagaauuggaaagaggaaagcgauagaaagauuaugcagucccagaucgugucuuuuuauuucaagcuguuuaaaaacuucaaggacgaucagagcauucaaaaauccguggagacgaucaaggaagacaugaaugucaaauuuuucaacucuaauaagaagaaacgggaugacuuugagaagcucaccaacuacagcgugacagaucugaauguucagcgcaaagcuauccaugagcugauucaggugauggccgaacucuccccugccgcuaagaccggaaaaagaaagcggagccagaugcuguuccgcggcagacgggccucucaauga

SEQ ID NO: 4096 - RNA, 501 nt, Artificial Sequence
  derived and/or modified sequence opt6 from IFNG__Homo_sapiens__AAB59534
augaaauacacaucauacauauuagcauuccaacuaugcauaguacuaggaucacuaggaugcuacugccaagacccauacguaaaagaagcagaaaaccuaaaaaaauacuucaacgcaggucacucagacguagcagacaacggaacacuauuccuaggaauauuaaaaaacuggaaagaagaaucagacagaaaaauaaugcaaucacaaauaguaucauucuacuucaaacuauucaaaaacuucaaagacgaccaaucaauacaaaaaucaguagaaacaauaaaagaagacaugaacguaaaauucuucaacagcaauaaaaaaaaaagagacgacuucgaaaaacuaacaaacuacucaguaacagaccuaaacguacaaagaaaagcaauacacgaauuaauacaaguaauggcagaacuaucaccagcagcaaaaacaggaaaaagaaaaagaucacaaauguuauucagaggaagaagagcaagccaauaa

SEQ ID NO: 4097 - protein, 144 aa, Artificial Sequence [sequence omitted]

SEQ ID NO: 4098 - RNA, 435 nt, Artificial Sequence
  IFNG__Homo_sapiens__AAP20100
augcaggacccauauguaaaagaagcagaaaaccuuaagaaauauuuuaaugcaggucauucagauguagcggauaauggaacucuuuucuuaggcauuuugaagaauuggaaagaggagagugacagaaaaauaaugcagagccaaauugucuccuuuuacuucaaacuuuuuaaaaacuuuaaagaugaccagagcauccaaaagaguguggagaccaucaaggaagacaugaaugucaaguuuuucaauagcaacaaaaagaaacgagaugacuucgaaaagcugacuaauuauucgguaacugacuugaauguccaacgcaaagcaauacaugaacucauccaagugauggcugaacugucgccagcagcuaaaacagggaagcgaaaaaggagucagaugcuguuucgaggucgaagagcaucccaguaa

SEQ ID NO: 4099 - RNA, 435 nt, Artificial Sequence
  derived and/or modified sequence opt1 from IFNG__Homo_sapiens__AAP20100
augcaggaccccuacgugaaggaggccgagaaccugaagaaguacuucaacgccggccacagcgacgucgcggacaacgggacccucuuccugggcauccugaagaacuggaaggaggaguccgaccgcaagaucaugcagagccagaucguguccuucuacuucaagcuguucaagaacuucaaggacgaccagagcauccagaaguccguggagaccaucaaggaggacaugaacgucaaguucuucaacagcaacaagaagaagcgggacgacuucgagaagcucacgaacuacuccgugaccgaccugaacgugcagcgcaaggccauccacgagcucauccaggucauggccgagcugagcccggccgccaagaccgggaagcggaagcgcucccagaugcuguuccggggccgccgggcgagccaguga

SEQ ID NO: 4100 - RNA, 435 nt, Artificial Sequence
  derived and/or modified sequence opt2 from IFNG__Homo_sapiens__AAP20100
augcaggaccccuacgucaaggaggccgagaaccucaagaaguacuucaacgccggccacuccgacgucgccgacaacggcacccucuuccucggcauccucaagaacuggaaggaggaguccgaccgcaagaucaugcagucccagaucgucuccuucuacuucaagcucuucaagaacuucaaggacgaccaguccauccagaaguccgucgagaccaucaaggaggacaugaacgucaaguucuucaacuccaacaagaagaagcgcgacgacuucgagaagcucaccaacuacuccgucaccgaccucaacguccagcgcaaggccauccacgagcucauccaggucauggccgagcucucccccgccgccaagaccggcaagcgcaagcgcucccagaugcucuuccgcggccgccgcgccucccaguga

SEQ ID NO: 4101 - RNA, 435 nt, Artificial Sequence
  derived and/or modified sequence opt3 from IFNG__Homo_sapiens__AAP20100
augcaggaccccuacgugaaggaggccgaaaaccugaaaaaguauuucaaugcuggccacagcgaugucgcagacaacgggacccucuuucuuggaauccugaaaaauuggaaggaggaauccgauagaaaaauuaugcaaucucagauaguuucauucuacuuuaaguuguucaagaacuuuaaagacgaucagaguauccaaaagagcguggagacaauuaaagaagacaugaauguaaaguucuuuaacuccaauaaaaagaagagggaugacuucgagaaauuaacuaacuauucugugacggaucugaauguccagcggaaggccauccaugagcuaauucaggugauggcggaacucucgccugcugccaaaaccgguaagcgcaaacgaucacagaugcuguuucguggcagaagggcaagccaguga

SEQ ID NO: 4102 - RNA, 435 nt, Artificial Sequence
  derived and/or modified sequence opt4 from IFNG__Homo_sapiens__AAP20100
augcaggaccccuacgugaaggaggccgagaaccugaagaaguacuucaacgccggccacagcgacguggccgacaacggcacccuguuccugggcauccugaagaacuggaaggaggagagcgacagaaagaucaugcagagccagaucgugagcuucuacuucaagcuguucaagaacuucaaggacgaccagagcauccagaagagcguggagaccaucaaggaggacaugaacgugaaguucuucaacagcaacaagaagaagagagacgacuucgagaagcugaccaacuacagcgugaccgaccugaacgugcagagaaaggccauccacgagcugauccaggugauggccgagcugagccccgccgccaagaccggcaagagaaagagaagccagaugcuguucagaggcagaagagccagccaguga

SEQ ID NO: 4103 - RNA, 435 nt, Artificial Sequence
  derived and/or modified sequence opt5 from IFNG__Homo_sapiens__AAP20100
augcaggaccccuacgugaaggaggccgaaaaccugaaaaaguauuucaaugcuggccacagcgaugucgccgacaacgggacccucuuucugggaauccuuaaaaauuggaaggaggaauccgauagaaaaauuaugcaaucucagaucguuagcuucuacuuuaagcuguucaagaacuuuaaagacgaucaguccauucagaagucuguggagacaaucaaagaagacaugaaugugaaguucuuuaacagcaauaaaaagaagcgggaugacuucgagaaacucacgaacuauuccgucaccgaucugaaugugcaacgcaaggcgauucaugagcuuauccagguuauggcugaacugucuccugccgccaaaacaggcaagagaaaacggagccagaugcucuuucgcgggagacgggcuucccaguga

SEQ ID NO: 4104 - RNA, 435 nt, Artificial Sequence
  derived and/or modified sequence opt6 from IFNG__Homo_sapiens__AAP20100
augcaagacccauacguaaaagaagccgaaaaccuaaaaaaauacuucaacgcaggacacucagacguagcagacaacggaacacuauuccuaggaauacuaaaaaacuggaaagaagaaagcgacagaaaaauaaugcaaucacaaauaguaucauucuacuucaaacuauucaaaaacuucaaagacgaccaaucaauacaaaaaucaguagaaacaauaaaagaagacaugaacguaaaauucuucaacagcaacaaaaaaaaaagagacgacuucgaaaaacuaacaaacuacagcguaacagaccuaaacguacaaagaaaagcaauacacgaacuaauacaaguaauggcagaacuaucaccagcagcaaaaacaggaaaaagaaaaagaucacaaaugcuauucagaggaagaagagcaucacaauaa

SEQ ID NO: 4105 - protein, 134 aa, Artificial Sequence [sequence omitted]

SEQ ID NO: 4106 - RNA, 405 nt, Artificial Sequence
  IFNG__Homo_sapiens__CAA44326
augcaagacccauauguaaaagaagcagaaaaccuuaagaaauauuuuaaugcaggucauucagauguagcggauaauggaacucuuuucuuaggcauuuugaagaauuggaaagaggagagugacagaaaaauaaugcagagccaaauugucuccuuuuacuucaaacuuuuuaaaaacuuuaaagaugaccagagcauccaaaagaguguggagaccaucaaggaagacaugaaugucaaguuuuucaauagcaacaaaaagaaacgagaugacuucgaaaagcugacuaauuauucgguaacugacuugaauguccaacgcaaagcaauacaugaacucauccaagugauggcugaacugucgccagcagcuaaaacagggaagcgaaaaaggagucucuag

SEQ ID NO: 4107 - RNA, 405 nt, Artificial Sequence
  derived and/or modified sequence opt1 from IFNG__Homo_sapiens__CAA44326
augcaggaccccuacgugaaggaggccgagaaccugaagaaguacuucaacgccggccacagcgacgucgcggacaacgggacccucuuccugggcauccugaagaacuggaaggaggaguccgaccgcaagaucaugcagagccagaucguguccuucuacuucaagcuguucaagaacuucaaggacgaccagagcauccagaaguccguggagaccaucaaggaggacaugaacgucaaguucuucaacagcaacaagaagaagcgggacgacuucgagaagcucacgaacuacuccgugaccgaccugaacgugcagcgcaaggccauccacgagcucauccaggucauggccgagcugagcccggccgccaagaccgggaagcggaagcgcucccuguga

SEQ ID NO: 4108 - RNA, 405 nt, Artificial Sequence
  derived and/or modified sequence opt2 from IFNG__Homo_sapiens__CAA44326
augcaggaccccuacgucaaggaggccgagaaccucaagaaguacuucaacgccggccacuccgacgucgccgacaacggcacccucuuccucggcauccucaagaacuggaaggaggaguccgaccgcaagaucaugcagucccagaucgucuccuucuacuucaagcucuucaagaacuucaaggacgaccaguccauccagaaguccgucgagaccaucaaggaggacaugaacgucaaguucuucaacuccaacaagaagaagcgcgacgacuucgagaagcucaccaacuacuccgucaccgaccucaacguccagcgcaaggccauccacgagcucauccaggucauggccgagcucucccccgccgccaagaccggcaagcgcaagcgcucccucuga

SEQ ID NO: 4109 - RNA, 405 nt, Artificial Sequence
  derived and/or modified sequence opt3 from IFNG__Homo_sapiens__CAA44326
augcaggaccccuacgugaaggaggccgaaaaccugaaaaaguauuucaaugcuggccacagcgaugucgcagacaacgggacccucuuucuuggaauccugaaaaauuggaaggaggaauccgauagaaaaauuaugcaaucucagauaguuucauucuacuuuaaguuguucaagaacuuuaaagacgaucagaguauccaaaagagcguggagacaauuaaagaagacaugaauguaaaguucuuuaacuccaauaaaaagaagagggaugacuucgagaaauuaacuaacuauucugugacggaucugaauguccagcggaaggccauccaugagcuaauucaggugauggcggaacucucgccugcugccaaaaccgguaagcgcaaacgaucacuguga

SEQ ID NO: 4110 - RNA, 405 nt, Artificial Sequence
  derived and/or modified sequence opt4 from IFNG__Homo_sapiens__CAA44326
augcaggaccccuacgugaaggaggccgagaaccugaagaaguacuucaacgccggccacagcgacguggccgacaacggcacccuguuccugggcauccugaagaacuggaaggaggagagcgacagaaagaucaugcagagccagaucgugagcuucuacuucaagcuguucaagaacuucaaggacgaccagagcauccagaagagcguggagaccaucaaggaggacaugaacgugaaguucuucaacagcaacaagaagaagagagacgacuucgagaagcugaccaacuacagcgugaccgaccugaacgugcagagaaaggccauccacgagcugauccaggugauggccgagcugagccccgccgccaagaccggcaagagaaagagaagccuguga

SEQ ID NO: 4111 - RNA, 405 nt, Artificial Sequence
  derived and/or modified sequence opt5 from IFNG__Homo_sapiens__CAA44326
augcaggaccccuacgugaaggaggccgaaaaccugaaaaaguauuucaaugcuggccacagcgaugucgccgacaacgggacccucuuucugggaauccuuaaaaauuggaaggaggaauccgauagaaaaauuaugcaaucucagaucguuagcuucuacuuuaagcuguucaagaacuuuaaagacgaucaguccauucagaagucuguggagacaaucaaagaagacaugaaugugaaguucuuuaacagcaauaaaaagaagcgggaugacuucgagaaacucacgaacuauuccgucaccgaucugaaugugcaacgcaaggcgauucaugagcuuauccagguuauggcugaacugucuccugccgccaaaacaggcaagagaaaacggagccucuga

SEQ ID NO: 4112 - RNA, 405 nt, Artificial Sequence
  derived and/or modified sequence opt6 from IFNG__Homo_sapiens__CAA44326
augcaagacccauacguaaaagaagcagaaaaccuaaaaaaauacuucaacgcaggacacucagacguagcagacaacggaacacuauuccuaggaauacuaaaaaacuggaaagaagaaucagacagaaaaauaaugcaaucacaaauaguaucauucuacuucaaacuauucaaaaacuucaaagacgaccaaucaauacaaaaaucaguagaaacaauaaaagaagacaugaacguaaaauucuucaacucaaacaaaaaaaaaagagacgacuucgaaaaacuaacaaacuacucaguaacagaccuaaacguacaaagaaaagcaauacacgaacuaauacaaguaauggcagaacuaucaccagcagcaaaaacaggaaaaagaaaaagaucacuauaa

SEQ ID NO: 4113 - protein, 133 aa, Artificial Sequence [sequence omitted]

SEQ ID NO: 4114 - RNA, 402 nt, Artificial Sequence
  IFNG__Homo_sapiens__CAA44330
augcaagacccauauguaaaagaagcagaaaaccuuaagaaauauuuuaaugcaggucauucagauguagcggauaauggaacucuuuucuuaggcauuuugaagaauuggaaagaggagagugacagaaaaauaaugcagagccaaauugucuccuuuuacuucaaacuuuuuaaaaacuuuaaagaugaccagagcauccaaaagaguguggagaccaucaaggaagacaugaaugucaaguuuuucaauagcaacaaaaagaaacgagaugacuucgaaaagcugacuaauuauucgguaacugacuugaauguccaacgcaaagcaauacaugaacucauccaagugauggcugaacugucgccagcagcuaaaacagggaagcgaaaaaggaguuaa

SEQ ID NO: 4115 - RNA, 402 nt, Artificial Sequence
  derived and/or modified sequence opt1 from IFNG__Homo_sapiens__CAA44330
augcaggaccccuacgugaaggaggccgagaaccugaagaaguacuucaacgccggccacagcgacgucgcggacaacgggacccucuuccugggcauccugaagaacuggaaggaggaguccgaccgcaagaucaugcagagccagaucguguccuucuacuucaagcuguucaagaacuucaaggacgaccagagcauccagaaguccguggagaccaucaaggaggacaugaacgucaaguucuucaacagcaacaagaagaagcgggacgacuucgagaagcucacgaacuacuccgugaccgaccugaacgugcagcgcaaggccauccacgagcucauccaggucauggccgagcugagcccggccgccaagaccgggaagcggaagcgcuccuga

SEQ ID NO: 4116 - RNA, 402 nt, Artificial Sequence
  derived and/or modified sequence opt2 from IFNG__Homo_sapiens__CAA44330
augcaggaccccuacgucaaggaggccgagaaccucaagaaguacuucaacgccggccacuccgacgucgccgacaacggcacccucuuccucggcauccucaagaacuggaaggaggaguccgaccgcaagaucaugcagucccagaucgucuccuucuacuucaagcucuucaagaacuucaaggacgaccaguccauccagaaguccgucgagaccaucaaggaggacaugaacgucaaguucuucaacuccaacaagaagaagcgcgacgacuucgagaagcucaccaacuacuccgucaccgaccucaacguccagcgcaaggccauccacgagcucauccaggucauggccgagcucucccccgccgccaagaccggcaagcgcaagcgcuccuga

SEQ ID NO: 4117 - RNA, 402 nt, Artificial Sequence
  derived and/or modified sequence opt3 from IFNG__Homo_sapiens__CAA44330
augcaggaccccuacgugaaggaggccgaaaaccugaaaaaguauuucaaugcuggccacagcgaugucgcagacaacgggacccucuuucuuggaauccugaaaaauuggaaggaggaauccgauagaaaaauuaugcaaucucagauaguuucauucuacuuuaaguuguucaagaacuuuaaagacgaucagaguauccaaaagagcguggagacaauuaaagaagacaugaauguaaaguucuuuaacuccaauaaaaagaagagggaugacuucgagaaauuaacuaacuauucugugacggaucugaauguccagcggaaggccauccaugagcuaauucaggugauggcggaacucucgccugcugccaaaaccgguaagcgcaaacgaucauga

SEQ ID NO: 4118 - RNA, 402 nt, Artificial Sequence
  derived and/or modified sequence opt4 from IFNG__Homo_sapiens__CAA44330
augcaggaccccuacgugaaggaggccgagaaccugaagaaguacuucaacgccggccacagcgacguggccgacaacggcacccuguuccugggcauccugaagaacuggaaggaggagagcgacagaaagaucaugcagagccagaucgugagcuucuacuucaagcuguucaagaacuucaaggacgaccagagcauccagaagagcguggagaccaucaaggaggacaugaacgugaaguucuucaacagcaacaagaagaagagagacgacuucgagaagcugaccaacuacagcgugaccgaccugaacgugcagagaaaggccauccacgagcugauccaggugauggccgagcugagccccgccgccaagaccggcaagagaaagagaagcuga

SEQ ID NO: 4119 - RNA, 402 nt, Artificial Sequence
  derived and/or modified sequence opt5 from IFNG__Homo_sapiens__CAA44330
augcaggaccccuacgugaaggaggccgaaaaccugaaaaaguauuucaaugcuggccacagcgaugucgccgacaacgggacccucuuucugggaauccuuaaaaauuggaaggaggaauccgauagaaaaauuaugcaaucucagaucguuagcuucuacuuuaagcuguucaagaacuuuaaagacgaucaguccauucagaagucuguggagacaaucaaagaagacaugaaugugaaguucuuuaacagcaauaaaaagaagcgggaugacuucgagaaacucacgaacuauuccgucaccgaucugaaugugcaacgcaaggcgauucaugagcuuauccagguuauggcugaacugucuccugccgccaaaacaggcaagagaaaacggagcuga

SEQ ID NO: 4120 - RNA, 402 nt, Artificial Sequence
  derived and/or modified sequence opt6 from IFNG__Homo_sapiens__CAA44330
augcaagacccauacguaaaagaagcagaaaaccuaaaaaaauacuucaacgcaggacacucagacguagcagacaacggaacacuauuccuaggaauacuaaaaaacuggaaagaagaaucagacagaaaaauaaugcaaucacaaauaguaagcuucuacuucaaacuauucaaaaacuucaaagacgaccaaucaauacaaaaaucaguagaaacaauaaaagaagacaugaacguaaaauucuucaacucaaacaaaaaaaaaagagacgacuucgaaaaacuaacaaacuacucaguaacagaccuaaacguacaaagaaaagcaauacacgaacuaauacaaguaauggcagaacuaucaccagcagcaaaaacaggaaaaagaaaaagaucauaa

SEQ ID NO: 4121 - protein, 133 aa, Artificial Sequence [sequence omitted]

SEQ ID NO: 4122 - RNA, 402 nt, Artificial Sequence
  IFNG__Homo_sapiens__CAA44331
augcaagacccauauguaaaagaagcagaaaaccuuaagaaauauuuuaaugcaggucauucagauguagcggauaauggaacucuuuucuuaggcauuuugaagaauuggaaagaggagagugacagaaaaauaaugcagagccaaauugucuccuuuuacuucaaacuuuuuaaaaacuuuaaagaugaccagagcauccaaaagaguguggagaccaucaaggaagacaugaaugucaaguuuuucaauagcaacaaaaagaaacgagaugacuucgaaaagcugacuaauuauucgguaacugacuugaauguccaacgcaaagcaauacaugaacucauccaagugauggcugaacugucgccagcagcuaaaacagggaagcgaaaaaggcucuag

SEQ ID NO: 4123 - RNA, 402 nt, Artificial Sequence
  derived and/or modified sequence opt1 from IFNG__Homo_sapiens__CAA44331
augcaggaccccuacgugaaggaggccgagaaccugaagaaguacuucaacgccggccacagcgacgucgcggacaacgggacccucuuccugggcauccugaagaacuggaaggaggaguccgaccgcaagaucaugcagagccagaucguguccuucuacuucaagcuguucaagaacuucaaggacgaccagagcauccagaaguccguggagaccaucaaggaggacaugaacgucaaguucuucaacagcaacaagaagaagcgggacgacuucgagaagcucacgaacuacuccgugaccgaccugaacgugcagcgcaaggccauccacgagcucauccaggucauggccgagcugagcccggccgccaagaccgggaagcggaagcgccuguga

SEQ ID NO: 4124 - RNA, 402 nt, Artificial Sequence
  derived and/or modified sequence opt2 from IFNG__Homo_sapiens__CAA44331
augcaggaccccuacgucaaggaggccgagaaccucaagaaguacuucaacgccggccacuccgacgucgccgacaacggcacccucuuccucggcauccucaagaacuggaaggaggaguccgaccgcaagaucaugcagucccagaucgucuccuucuacuucaagcucuucaagaacuucaaggacgaccaguccauccagaaguccgucgagaccaucaaggaggacaugaacgucaaguucuucaacuccaacaagaagaagcgcgacgacuucgagaagcucaccaacuacuccgucaccgaccucaacguccagcgcaaggccauccacgagcucauccaggucauggccgagcucucccccgccgccaagaccggcaagcgcaagcgccucuga

SEQ ID NO: 4125 - RNA, 402 nt, Artificial Sequence
  derived and/or modified sequence opt3 from IFNG__Homo_sapiens__CAA44331
augcaggaccccuacgugaaggaggccgaaaaccugaaaaaguauuucaaugcuggccacagcgaugucgcagacaacgggacccucuuucuuggaauccugaaaaauuggaaggaggaauccgauagaaaaauuaugcaaucucagauaguuucauucuacuuuaaguuguucaagaacuuuaaagacgaucagaguauccaaaagagcguggagacaauuaaagaagacaugaauguaaaguucuuuaacuccaauaaaaagaagagggaugacuucgagaaauuaacuaacuauucugugacggaucugaauguccagcggaaggccauccaugagcuaauucaggugauggcggaacucucgccugcugccaaaaccgguaagcgcaaacgacuguga

SEQ ID NO: 4126 - RNA, 402 nt, Artificial Sequence
  derived and/or modified sequence opt4 from IFNG__Homo_sapiens__CAA44331
augcaggaccccuacgugaaggaggccgagaaccugaagaaguacuucaacgccggccacagcgacguggccgacaacggcacccuguuccugggcauccugaagaacuggaaggaggagagcgacagaaagaucaugcagagccagaucgugagcuucuacuucaagcuguucaagaacuucaaggacgaccagagcauccagaagagcguggagaccaucaaggaggacaugaacgugaaguucuucaacagcaacaagaagaagagagacgacuucgagaagcugaccaacuacagcgugaccgaccugaacgugcagagaaaggccauccacgagcugauccaggugauggccgagcugagccccgccgccaagaccggcaagagaaagagacuguga

SEQ ID NO: 4127 - RNA, 402 nt, Artificial Sequence
  derived and/or modified sequence opt5 from IFNG__Homo_sapiens__CAA44331
augcaggaccccuacgugaaggaggccgaaaaccugaaaaaguauuucaaugcuggccacagcgaugucgccgacaacgggacccucuuucugggaauccuuaaaaauuggaaggaggaauccgauagaaaaauuaugcaaucucagaucguuagcuucuacuuuaagcuguucaagaacuuuaaagacgaucaguccauucagaagucuguggagacaaucaaagaagacaugaaugugaaguucuuuaacagcaauaaaaagaagcgggaugacuucgagaaacucacgaacuauuccgucaccgaucugaaugugcaacgcaaggcgauucaugagcuuauccagguuauggcugaacugucuccugccgccaaaacaggcaagagaaaacggcucuga

SEQ ID NO: 4128 - RNA, 402 nt, Artificial Sequence
  derived and/or modified sequence opt6 from IFNG__Homo_sapiens__CAA44331
augcaagacccauacguaaaagaagcagaaaaccuaaaaaaauacuucaacgcaggacacucagacguagcagacaacggaacacuauuccuaggaauacuaaaaaacuggaaagaagaaucagacagaaaaauaaugcaaucacaaauaguaucauucuacuucaaacuauucaaaaacuucaaagacgaucaaucaauacaaaaaucaguagaaacaauaaaagaagacaugaacguaaaauucuucaacucaaacaaaaaaaaaagagacgacuucgaaaaacuaacaaacuacucaguaacagaccuaaacguacaaagaaaagcaauacacgaacuaauacaaguaauggcagaacuaucaccagcagcaaaaacaggaaaaagaaaaagacuauaa

SEQ ID NO: 4129 - protein, 130 aa, Artificial Sequence [sequence omitted]

SEQ ID NO: 4130 - RNA, 393 nt, Artificial Sequence
  IFNG__Homo_sapiens__CAA44329
augcaagacccauauguaaaagaagcagaaaaccuuaagaaauauuuuaaugcaggucauucagauguagcggauaauggaacucuuuucuuaggcauuuugaagaauuggaaagaggagagugacagaaaaauaaugcagagccaaauugucuccuuuuacuucaaacuuuuuaaaaacuuuaaagaugaccagagcauccaaaagaguguggagaccaucaaggaagacaugaaugucaaguuuuucaauagcaacaaaaagaaacgagaugacuucgaaaagcugacuaauuauucgguaacugacuugaauguccaacgcaaagcaauacaugaacucauccaagugauggcugaacugucgccagcagcuaaaacagggaagcucuag

SEQ ID NO: 4131 - RNA, 393 nt, Artificial Sequence
  derived and/or modified sequence opt1 from IFNG__Homo_sapiens__CAA44329
augcaggaccccuacgugaaggaggccgagaaccugaagaaguacuucaacgccggccacagcgacgucgcggacaacgggacccucuuccugggcauccugaagaacuggaaggaggaguccgaccgcaagaucaugcagagccagaucguguccuucuacuucaagcuguucaagaacuucaaggacgaccagagcauccagaaguccguggagaccaucaaggaggacaugaacgucaaguucuucaacagcaacaagaagaagcgggacgacuucgagaagcucacgaacuacuccgugaccgaccugaacgugcagcgcaaggccauccacgagcucauccaggucauggccgagcugagcccggccgccaagaccgggaagcuguga

SEQ ID NO: 4132 - RNA, 393 nt, Artificial Sequence
  derived and/or modified sequence opt2 from IFNG__Homo_sapiens__CAA44329
augcaggaccccuacgucaaggaggccgagaaccucaagaaguacuucaacgccggccacuccgacgucgccgacaacggcacccucuuccucggcauccucaagaacuggaaggaggaguccgaccgcaagaucaugcagucccagaucgucuccuucuacuucaagcucuucaagaacuucaaggacgaccaguccauccagaaguccgucgagaccaucaaggaggacaugaacgucaaguucuucaacuccaacaagaagaagcgcgacgacuucgagaagcucaccaacuacuccgucaccgaccucaacguccagcgcaaggccauccacgagcucauccaggucauggccgagcucucccccgccgccaagaccggcaagcucuga

SEQ ID NO: 4133 - RNA, 393 nt, Artificial Sequence
  derived and/or modified sequence opt3 from IFNG__Homo_sapiens__CAA44329
augcaggaccccuacgugaaggaggccgaaaaccugaaaaaguauuucaaugcuggccacagcgaugucgcagacaacgggacccucuuucuuggaauccugaaaaauuggaaggaggaauccgauagaaaaauuaugcaaucucagauaguuucauucuacuuuaaguuguucaagaacuuuaaagacgaucagaguauccaaaagagcguggagacaauuaaagaagacaugaauguaaaguucuuuaacuccaauaaaaagaagagggaugacuucgagaaauuaacuaacuauucugugacggaucugaauguccagcggaaggccauccaugagcuaauucaggugauggcggaacucucgccugcugccaaaaccgguaagcuguga

SEQ ID NO: 4134 - RNA, 393 nt, Artificial Sequence
  derived and/or modified sequence opt4 from IFNG__Homo_sapiens__CAA44329
augcaggaccccuacgugaaggaggccgagaaccugaagaaguacuucaacgccggccacagcgacguggccgacaacggcacccuguuccugggcauccugaagaacuggaaggaggagagcgacagaaagaucaugcagagccagaucgugagcuucuacuucaagcuguucaagaacuucaaggacgaccagagcauccagaagagcguggagaccaucaaggaggacaugaacgugaaguucuucaacagcaacaagaagaagagagacgacuucgagaagcugaccaacuacagcgugaccgaccugaacgugcagagaaaggccauccacgagcugauccaggugauggccgagcugagccccgccgccaagaccggcaagcuguga

SEQ ID NO: 4135 - RNA, 393 nt, Artificial Sequence
  derived and/or modified sequence opt5 from IFNG__Homo_sapiens__CAA44329
augcaggaccccuacgugaaggaggccgaaaaccugaaaaaguauuucaaugcuggccacagcgaugucgccgacaacgggacccucuuucugggaauccuuaaaaauuggaaggaggaauccgauagaaaaauuaugcaaucucagaucguuagcuucuacuuuaagcuguucaagaacuuuaaagacgaucaguccauucagaagucuguggagacaaucaaagaagacaugaaugugaaguucuuuaacagcaauaaaaagaagcgggaugacuucgagaaacucacgaacuauuccgucaccgaucugaaugugcaacgcaaggcgauucaugagcuuauccagguuauggcugaacugucuccugccgccaaaacaggcaagcucuga

SEQ ID NO: 4136 - RNA, 393 nt, Artificial Sequence
  derived and/or modified sequence opt6 from IFNG__Homo_sapiens__CAA44329
augcaagacccauacguaaaagaagccgaaaaccuaaaaaaauacuucaacgcaggacacucagacguagcagacaacggaacacuauuccucggaauacuaaaaaacuggaaagaagaaucagacagaaaaauaaugcaaucacaaauaguaucauucuauuucaaacuauucaaaaacuucaaagacgaccaaucaauacaaaaaucaguagaaacaauaaaagaagacaugaacguaaaauucuucaacucaaacaaaaaaaaaagagacgacuucgaaaaacuaacaaacuacucaguaacagaccuaaacguacaaagaaaagcaauacacgaacuaauacaaguaauggcagaacuaucaccagcagcaaaaacaggaaaacuauaa

SEQ ID NO: 4137 - protein, 125 aa, Artificial Sequence [sequence omitted]

SEQ ID NO: 4138 - RNA, 378 nt, Artificial Sequence
  IFNG__Homo_sapiens__CAA44328
augcaagacccauauguaaaagaagcagaaaaccuuaagaaauauuuuaaugcaggucauucagauguagcggauaauggaacucuuuucuuaggcauuuugaagaauuggaaagaggagagugacagaaaaauaaugcagagccaaauugucuccuuuuacuucaaacuuuuuaaaaacuuuaaagaugaccagagcauccaaaagaguguggagaccaucaaggaagacaugaaugucaaguuuuucaauagcaacaaaaagaaacgagaugacuucgaaaagcugacuaauuauucgguaacugacuugaauguccaacgcaaagcaauacaugaacucauccaagugauggcugaacugucgccagcacucuag

SEQ ID NO: 4139 - RNA, 378 nt, Artificial Sequence
  derived and/or modified sequence opt1 from IFNG__Homo_sapiens__CAA44328
augcaggaccccuacgugaaggaggccgagaaccugaagaaguacuucaacgccggccacagcgacgucgcggacaacgggacccucuuccugggcauccugaagaacuggaaggaggaguccgaccgcaagaucaugcagagccagaucguguccuucuacuucaagcuguucaagaacuucaaggacgaccagagcauccagaaguccguggagaccaucaaggaggacaugaacgucaaguucuucaacagcaacaagaagaagcgggacgacuucgagaagcucacgaacuacuccgugaccgaccugaacgugcagcgcaaggccauccacgagcucauccaggucauggccgagcugagcccggcccuguga

SEQ ID NO: 4140 - RNA, 378 nt, Artificial Sequence
  derived and/or modified sequence opt2 from IFNG__Homo_sapiens__CAA44328
augcaggaccccuacgucaaggaggccgagaaccucaagaaguacuucaacgccggccacuccgacgucgccgacaacggcacccucuuccucggcauccucaagaacuggaaggaggaguccgaccgcaagaucaugcagucccagaucgucuccuucuacuucaagcucuucaagaacuucaaggacgaccaguccauccagaaguccgucgagaccaucaaggaggacaugaacgucaaguucuucaacuccaacaagaagaagcgcgacgacuucgagaagcucaccaacuacuccgucaccgaccucaacguccagcgcaaggccauccacgagcucauccaggucauggccgagcucucccccgcccucuga

SEQ ID NO: 4141 - RNA, 378 nt, Artificial Sequence
  derived and/or modified sequence opt3 from IFNG__Homo_sapiens__CAA44328
augcaggaccccuacgugaaggaggccgaaaaccugaaaaaguauuucaaugcuggccacagcgaugucgcagacaacgggacccucuuucuuggaauccugaaaaauuggaaggaggaauccgauagaaaaauuaugcaaucucagauaguuucauucuacuuuaaguuguucaagaacuuuaaagacgaucagaguauccaaaagagcguggagacaauuaaagaagacaugaauguaaaguucuuuaacuccaauaaaaagaagagggaugacuucgagaaauuaacuaacuauucugugacggaucugaauguccagcggaaggccauccaugagcuaauucaggugauggcggaacucucgccugcucuguga

SEQ ID NO: 4142 - RNA, 378 nt, Artificial Sequence
  derived and/or modified sequence opt4 from IFNG__Homo_sapiens__CAA44328
augcaggaccccuacgugaaggaggccgagaaccugaagaaguacuucaacgccggccacagcgacguggccgacaacggcacccuguuccugggcauccugaagaacuggaaggaggagagcgacagaaagaucaugcagagccagaucgugagcuucuacuucaagcuguucaagaacuucaaggacgaccagagcauccagaagagcguggagaccaucaaggaggacaugaacgugaaguucuucaacagcaacaagaagaagagagacgacuucgagaagcugaccaacuacagcgugaccgaccugaacgugcagagaaaggccauccacgagcugauccaggugauggccgagcugagccccgcccuguga

SEQ ID NO: 4143 - RNA, 378 nt, Artificial Sequence
  derived and/or modified sequence opt5 from IFNG__Homo_sapiens__CAA44328
augcaggaccccuacgugaaggaggccgaaaaccugaaaaaguauuucaaugcuggccacagcgaugucgccgacaacgggacccucuuucugggaauccuuaaaaauuggaaggaggaauccgauagaaaaauuaugcaaucucagaucguuagcuucuacuuuaagcuguucaagaacuuuaaagacgaucaguccauucagaagucuguggagacaaucaaagaagacaugaaugugaaguucuuuaacagcaauaaaaagaagcgggaugacuucgagaaacucacgaacuauuccgucaccgaucugaaugugcaacgcaaggcgauucaugagcuuauccagguuauggcugaacugucuccugcccucuga

SEQ ID NO: 4144 - RNA, 378 nt, Artificial Sequence
  derived and/or modified sequence opt6 from IFNG__Homo_sapiens__CAA44328
augcaagacccauacguaaaagaagcagaaaacuuaaaaaaauacuucaacgcaggacacucagacguagcagacaacggaacacucuuccuaggaauacuaaaaaacuggaaagaagaaucagacagaaaaauaaugcaaucacaaauaguaucauucuacuucaaacuauucaaaaacuucaaagacgaccaaucaauacaaaaaucaguagaaacaauaaaagaagacaugaacguaaaauucuucaacucaaacaaaaaaaaaagagacgacuucgaaaaacuaacaaacuacucaguaacagaccuaaacguacaaagaaaagcaauacacgaacuaauacaaguaauggcagaacucucaccagcacuauaa

SEQ ID NO: 4145 - protein, 124 aa, Artificial Sequence [sequence omitted]

SEQ ID NO: 4146 - RNA, 375 nt, Artificial Sequence
  IFNG__Homo_sapiens__CAA44327
augcaagacccauauguaaaagaagcagaaaaccuuaagaaauauuuuaaugcaggucauucagauguagcggauaauggaacucuuuucuuaggcauuuugaagaauuggaaagaggagagugacagaaaaauaaugcagagccaaauugucuccuuuuacuucaaacuuuuuaaaaacuuuaaagaugaccagagcauccaaaagaguguggagaccaucaaggaagacaugaaugucaaguuuuucaauagcaacaaaaagaaacgagaugacuucgaaaagcugacuaauuauucgguaacugacuugaauguccaacgcaaagcaauacaugaacucauccaagugauggcugaacugucgccagcauaa

SEQ ID NO: 4147 - RNA, 375 nt, Artificial Sequence
  derived and/or modified sequence opt1 from IFNG__Homo_sapiens__CAA44327
augcaggaccccuacgugaaggaggccgagaaccugaagaaguacuucaacgccggccacagcgacgucgcggacaacgggacccucuuccugggcauccugaagaacuggaaggaggaguccgaccgcaagaucaugcagagccagaucguguccuucuacuucaagcuguucaagaacuucaaggacgaccagagcauccagaaguccguggagaccaucaaggaggacaugaacgucaaguucuucaacagcaacaagaagaagcgggacgacuucgagaagcucacgaacuacuccgugaccgaccugaacgugcagcgcaaggccauccacgagcucauccaggucauggccgagcugagcccggccuga

SEQ ID NO: 4148 - RNA, 375 nt, Artificial Sequence
  derived and/or modified sequence opt2 from IFNG__Homo_sapiens__CAA44327
augcaggaccccuacgucaaggaggccgagaaccucaagaaguacuucaacgccggccacuccgacgucgccgacaacggcacccucuuccucggcauccucaagaacuggaaggaggaguccgaccgcaagaucaugcagucccagaucgucuccuucuacuucaagcucuucaagaacuucaaggacgaccaguccauccagaaguccgucgagaccaucaaggaggacaugaacgucaaguucuucaacuccaacaagaagaagcgcgacgacuucgagaagcucaccaacuacuccgucaccgaccucaacguccagcgcaaggccauccacgagcucauccaggucauggccgagcucucccccgccuga

SEQ ID NO: 4149 - RNA, 375 nt, Artificial Sequence
  derived and/or modified sequence opt3 from IFNG__Homo_sapiens__CAA44327
augcaggaccccuacgugaaggaggccgaaaaccugaaaaaguauuucaaugcuggccacagcgaugucgcagacaacgggacccucuuucuuggaauccugaaaaauuggaaggaggaauccgauagaaaaauuaugcaaucucagauaguuucauucuacuuuaaguuguucaagaacuuuaaagacgaucagaguauccaaaagagcguggagacaauuaaagaagacaugaauguaaaguucuuuaacuccaauaaaaagaagagggaugacuucgagaaauuaacuaacuauucugugacggaucugaauguccagcggaaggccauccaugagcuaauucaggugauggcggaacucucgccugcuuga

SEQ ID NO: 4150 - RNA, 375 nt, Artificial Sequence
  derived and/or modified sequence opt4 from IFNG__Homo_sapiens__CAA44327
augcaggaccccuacgugaaggaggccgagaaccugaagaaguacuucaacgccggccacagcgacguggccgacaacggcacccuguuccugggcauccugaagaacuggaaggaggagagcgacagaaagaucaugcagagccagaucgugagcuucuacuucaagcuguucaagaacuucaaggacgaccagagcauccagaagagcguggagaccaucaaggaggacaugaacgugaaguucuucaacagcaacaagaagaagagagacgacuucgagaagcugaccaacuacagcgugaccgaccugaacgugcagagaaaggccauccacgagcugauccaggugauggccgagcugagccccgccuga

SEQ ID NO: 4151 - RNA, 375 nt, Artificial Sequence
  derived and/or modified sequence opt5 from IFNG__Homo_sapiens__CAA44327
augcaggaccccuacgugaaggaggccgaaaaccugaaaaaguauuucaaugcuggccacagcgaugucgccgacaacgggacccucuuucugggaauccuuaaaaauuggaaggaggaauccgauagaaaaauuaugcaaucucagaucguuagcuucuacuuuaagcuguucaagaacuuuaaagacgaucaguccauucagaagucuguggagacaaucaaagaagacaugaaugugaaguucuuuaacagcaauaaaaagaagcgggaugacuucgagaaacucacgaacuauuccgucaccgaucugaaugugcaacgcaaggcgauucaugagcuuauccagguuauggcugaacugucuccugccuga

SEQ ID NO: 4152 - RNA, 375 nt, Artificial Sequence
  derived and/or modified sequence opt6 from IFNG__Homo_sapiens__CAA44327
augcaagaccccuacguaaaagaagcagaaaaccuaaaaaaauacuucaacgcaggacacagcgacguagcagacaacggaacacuauuccuaggaauacuaaaaaacuggaaagaagaaagcgacagaaaaauaaugcaaucacaaauaguaucauucuacuucaaacuauucaaaaacuucaaagacgaccaaucaauacaaaaaucaguagaaacaauaaaagaagacaugaacguaaaauucuucaacagcaacaaaaaaaaaagagacgacuucgaaaaauuaacaaacuacucaguaacagaccuaaacguacaaagaaaagcaauacacgaacuaauacaaguaauggcagaacuaucaccagcauaa

SEQ ID NO: 4153 - protein, 144 aa, Artificial Sequence [sequence omitted]

SEQ ID NO: 4154 - RNA, 435 nt, Artificial Sequence
  IFNG__Homo_sapiens__AAM28885
augcaggacccauauguaaaagaagcagaaaaccuuaagaaauauuuuaaugcaggucauucagauguagcggauaauggaacucuuuucuuaggcauuuugaagaauuggaaagaggagagugacagaaaaauaaugcagagccaaauugucuccuuuuacuucaaacuuuuuaaaaacuuuaaagaugaccagagcauccaaaagaguguggagaccaucaaggaagacaugaaugucaaguuuuucaauagcaacaaaaagaaacgagaugacuucgaaaagcugacuaauuauucgguaacugacuugaauguccaacgcaaagcaauacaugaacucauccaagugauggcugaacugucgccagcagcuaaaacagggaagcgaacaaggagucagaugcuguuucgaggucgaagagcaucccaguaa

SEQ ID NO: 4155 - RNA, 435 nt, Artificial Sequence
  derived and/or modified sequence opt1 from IFNG__Homo_sapiens__AAM28885
augcaggaccccuacgugaaggaggccgagaaccugaagaaguacuucaacgccggccacagcgacgucgcggacaacgggacccucuuccugggcauccugaagaacuggaaggaggaguccgaccgcaagaucaugcagagccagaucguguccuucuacuucaagcuguucaagaacuucaaggacgaccagagcauccagaaguccguggagaccaucaaggaggacaugaacgucaaguucuucaacagcaacaagaagaagcgggacgacuucgagaagcucacgaacuacuccgugaccgaccugaacgugcagcgcaaggccauccacgagcucauccaggucauggccgagcugagcccggccgccaagaccgggaagcggacccgcucccagaugcuguuccggggccgccgggcgagccaguga

SEQ ID NO: 4156 - RNA, 435 nt, Artificial Sequence
  derived and/or modified sequence opt2 from IFNG__Homo_sapiens__AAM28885
augcaggaccccuacgucaaggaggccgagaaccucaagaaguacuucaacgccggccacuccgacgucgccgacaacggcacccucuuccucggcauccucaagaacuggaaggaggaguccgaccgcaagaucaugcagucccagaucgucuccuucuacuucaagcucuucaagaacuucaaggacgaccaguccauccagaaguccgucgagaccaucaaggaggacaugaacgucaaguucuucaacuccaacaagaagaagcgcgacgacuucgagaagcucaccaacuacuccgucaccgaccucaacguccagcgcaaggccauccacgagcucauccaggucauggccgagcucucccccgccgccaagaccggcaagcgcacccgcucccagaugcucuuccgcggccgccgcgccucccaguga

SEQ ID NO: 4157 - RNA, 435 nt, Artificial Sequence
  derived and/or modified sequence opt3 from IFNG__Homo_sapiens__AAM28885
augcaggaccccuacgugaaggaggccgaaaaccugaaaaaguauuucaaugcuggccacagcgaugucgcagacaacgggacccucuuucuuggaauccugaaaaauuggaaggaggaauccgauagaaaaauuaugcaaucucagauaguuucauucuacuuuaaguuguucaagaacuuuaaagacgaucagaguauccaaaagagcguggagacaauuaaagaagacaugaauguaaaguucuuuaacuccaauaaaaagaagagggaugacuucgagaaauuaacuaacuauucugugacggaucugaauguccagcggaaggccauccaugagcuaauucaggugauggcggaacucucgccugcugccaaaaccgguaagcgcacacgaucacagaugcuguuucguggcagaagggcaagccaguga

SEQ ID NO: 4158 - RNA, 435 nt, Artificial Sequence
  derived and/or modified sequence opt4 from IFNG__Homo_sapiens__AAM28885
augcaggaccccuacgugaaggaggccgagaaccugaagaaguacuucaacgccggccacagcgacguggccgacaacggcacccuguuccugggcauccugaagaacuggaaggaggagagcgacagaaagaucaugcagagccagaucgugagcuucuacuucaagcuguucaagaacuucaaggacgaccagagcauccagaagagcguggagaccaucaaggaggacaugaacgugaaguucuucaacagcaacaagaagaagagagacgacuucgagaagcugaccaacuacagcgugaccgaccugaacgugcagagaaaggccauccacgagcugauccaggugauggccgagcugagccccgccgccaagaccggcaagagaaccagaagccagaugcuguucagaggcagaagagccagccaguga

SEQ ID NO: 4159 - RNA, 435 nt, Artificial Sequence
  derived and/or modified sequence opt5 from IFNG__Homo_sapiens__AAM28885
augcaggaccccuacgugaaggaggccgaaaaccugaaaaaguauuucaaugcuggccacagcgaugucgccgacaacgggacccucuuucugggaauccuuaaaaauuggaaggaggaauccgauagaaaaauuaugcaaucucagaucguuagcuucuacuuuaagcuguucaagaacuuuaaagacgaucaguccauucagaagucuguggagacaaucaaagaagacaugaaugugaaguucuuuaacagcaauaaaaagaagcgggaugacuucgagaaacucacgaacuauuccgucaccgaucugaaugugcaacgcaaggcgauucaugagcuuauccagguuauggcugaacugucuccugccgccaaaacaggcaagagaacccggagccagaugcucuuucgcgggagacgggcuucccaguga

SEQ ID NO: 4160 - RNA, 435 nt, Artificial Sequence
  derived and/or modified sequence opt6 from IFNG__Homo_sapiens__AAM28885
augcaagacccauacguaaaagaagcagaaaaccuaaaaaaauacuucaacgcaggacacucagacguagcagacaacggaacacuauuccuaggaauacuaaaaaacuggaaagaagaaucagacagaaaaauaaugcaaucacaaauaguaucauucuacuucaaacuauucaaaaacuucaaagacgaccaaucaauacaaaaaucagucgaaacaauaaaagaagacaugaacguaaaauucuucaacucaaacaaaaaaaaaagagacgacuucgaaaaacuaacaaacuacucaguaacagaccuaaacguacaaagaaaagcaauacacgaacuaauacaaguaauggcagaacuaucaccagccgcaaaaacaggaaaaagaacaagaucacaaaugcuauucagaggaagaagagcaagccaauaa

SEQ ID NO: 4161 - protein, 195 aa, Artificial Sequence
  IFNomega__Homo_sapiens__P05000
MALLFPLLAALVMTSYSPVGSLGCDLPQNHGLLSRNTLVLLHQMRRISPFLCLKDRRDFRFPQEMVKGSQLQKAHVMSVLHEMLQQIFSLFHTERSSAAWNMTLLDQLHTGLHQQLQHLETCLLQVVGEGESAGAISSPALTLRRYFQGIRVYLKEKKYSDCAWEVVRMEIMKSLFLSTNMQERLRSKDRDLGSS

SEQ ID NO: 4162 - RNA, 588 nt, Artificial Sequence
  IFNomega__Homo_sapiens__AAH69095
auggcccuccuguucccucuacuggcagcccuagugaugaccagcuauagcccuguuggaucucugggcugugaucugccucagaaccauggccuacuuagcaggaacaccuuggugcuucugcaccaaaugaggagaaucuccccuuucuugugucucaaggacagaagagacuucagguucccccaggagaugguaaaagggagccaguugcagaaggcccaugucaugucuguccuccaugagaugcugcagcagaucuucagccucuuccacacagagcgcuccucugcugccuggaacaugacccuccuagaccaacuccacacuggacuucaucagcaacugcaacaccuggagaccugcuugcugcagguagugggagaaggagaaucugcuggggcaauuagcagcccugcacugaccuugaggagguacuuccagggaauccgugucuaccugaaagagaagaaauacagcgacugugccugggaaguugucagaauggaaaucaugaaauccuuguucuuaucaacaaacaugcaagaaagacugagaaguaaagauagagaccugggcucaucuuga

SEQ ID NO: 4163 - RNA, 588 nt, Artificial Sequence
  derived and/or modified sequence opt1 from IFNomega__Homo_sapiens__AAH69095
auggcccuccuguucccccugcuggccgcgcucgugaugaccagcuacuccccggucggcagccuggggugcgaccugccccagaaccacggccuccugucccgcaacacccuggugcuccugcaccagaugcggcgcaucagccccuuccugugccucaaggaccggcgcgacuuccgguucccccaggagauggugaaggggucccagcugcagaaggcccacgucaugagcgugcugcacgagaugcuccagcagaucuucucccuguuccacacggagcgcagcuccgccgccuggaacaugacccugcucgaccagcugcacaccggccugcaccagcagcuccagcaccuggagaccugccugcuccagguggucggggagggcgagagcgccggcgcgaucuccagcccggcccugacgcugcggcgcuacuuccaggggauccggguguaccucaaggagaagaaguacuccgacugcgccugggaggugguccgcauggagaucaugaagucccuguuccugagcaccaacaugcaggagcggcuccgcagcaaggaccgggaccugggcuccagcuga

SEQ ID NO: 4164 - RNA, 588 nt, Artificial Sequence
  derived and/or modified sequence opt2 from IFNomega__Homo_sapiens__AAH69095
auggcccuccucuucccccuccucgccgcccucgucaugaccuccuacucccccgucggcucccucggcugcgaccucccccagaaccacggccuccucucccgcaacacccucguccuccuccaccagaugcgccgcaucucccccuuccucugccucaaggaccgccgcgacuuccgcuucccccaggagauggucaagggcucccagcuccagaaggcccacgucauguccguccuccacgagaugcuccagcagaucuucucccucuuccacaccgagcgcuccuccgccgccuggaacaugacccuccucgaccagcuccacaccggccuccaccagcagcuccagcaccucgagaccugccuccuccaggucgucggcgagggcgaguccgccggcgccaucuccucccccgcccucacccuccgccgcuacuuccagggcauccgcgucuaccucaaggagaagaaguacuccgacugcgccugggaggucguccgcauggagaucaugaagucccucuuccucuccaccaacaugcaggagcgccuccgcuccaaggaccgcgaccucggcuccuccuga

SEQ ID NO: 4165 - RNA, 588 nt, Artificial Sequence
  derived and/or modified sequence opt3 from IFNomega__Homo_sapiens__AAH69095
auggcccuccuguucccccuucuggcugcauuggugaugaccagcuacuccccugucggcucuuuagggugcgaccugccacagaaccacggacuacucucaagaaauacacugguucuucugcaucaaaugaggcggaucaguccguuuuugugucucaaggaucgccgagacuuccguuuuccccaggagauggugaaggguagccagcugcagaaggcccacguaauguccgugcugcaugaaaugcuccaacagauuuucucuuuauuucacacugagagaucgucagcggcuuggaacaugacgcugcuugaucaguugcauaccggccugcaccagcaacuacagcaccucgaaacaugccugcuucaggucgugggggagggagaaagcgccggcgcaauaaguuccccugcccugacuuugaggcgguauuuccaggguauccgcguuuaccucaaagagaagaaauauucugacugugcuugggagguggucagaauggaaauuaugaaaagccuguuuuuauccaccaauaugcaagagaggcugcggucaaaggaucgcgaccucgggaguagcuga

SEQ ID NO: 4166 - RNA, 588 nt, Artificial Sequence
  derived and/or modified sequence opt4 from IFNomega__Homo_sapiens__AAH69095
auggcccugcuguucccccugcuggccgcccuggugaugaccagcuacagccccgugggcagccugggcugcgaccugccccagaaccacggccugcugagcagaaacacccuggugcugcugcaccagaugagaagaaucagccccuuccugugccugaaggacagaagagacuucagauucccccaggagauggugaagggcagccagcugcagaaggcccacgugaugagcgugcugcacgagaugcugcagcagaucuucagccuguuccacaccgagagaagcagcgccgccuggaacaugacccugcuggaccagcugcacaccggccugcaccagcagcugcagcaccuggagaccugccugcugcagguggugggcgagggcgagagcgccggcgccaucagcagccccgcccugacccugagaagauacuuccagggcaucagaguguaccugaaggagaagaaguacagcgacugcgccugggagguggugagaauggagaucaugaagagccuguuccugagcaccaacaugcaggagagacugagaagcaaggacagagaccugggcagcagcuga

SEQ ID NO: 4167 - RNA, 588 nt, Artificial Sequence
  derived and/or modified sequence opt5 from IFNomega__Homo_sapiens__AAH69095
auggcccuccuguucccccugcuugcugcccuggugaugaccagcuacuccccugucggcucucucgggugcgaccugccgcagaaccacggacuucugagcagaaauacacucguucugcugcaucaaaugcggcgcaucucccccuuucucugucugaaggauagacgggacuuccgcuuuccucaggagauggugaagggcucucagcuucagaaggcgcacgugaugagcguccugcaugaaaugcuccaacagauuuucucccuguuucacacggagagaucuagcgcugccuggaacaugacccuucuggaucagcuccauacagggcugcaccagcaacugcagcaccucgaaaccugccugcuucaggugguuggagagggcgaauccgccggggcuaucagcucucccgcccugacacuccggcgcuauuuccagggaauuagaguguaccugaaagagaagaaauauuccgacugugcuugggaggucgugcggauggaaaucaugaaaagccuuuuucugucuaccaauaugcaagagcgccucagauccaaggaucgggaccugggcagcucuuga

SEQ ID NO: 4168 - RNA, 588 nt, Artificial Sequence
  derived and/or modified sequence opt6 from IFNomega__Homo_sapiens__AAH69095
auggcacuacucuucccacuacuagcagcauuagucaugacaucauacucaccaguaggaucacuaggaugcgaccuaccacaaaaccacggauuacuaagcagaaacacacuaguacuacuacaccaaaugagaagaauaucaccauuccuaugcuuaaaagacagaagagacuucagauucccacaagaaaugguaaaaggaucacaauuacaaaaagcacacguaaugucaguacuacacgaaaugcuacaacaaauauucucacuauuccacacagaaagaucaucagccgcauggaacaugacacuauuagaccaacuacacacaggacuccaccaacaacuacaacaccuagaaacaugccuacuacaaguaguaggcgaaggagaaucagcaggagcaauaucaucaccagcacuaacacuaagaagauacuuccaaggaauaagaguauaccuaaaagaaaaaaaauacucagacugcgcaugggaaguaguaagaauggaaauaaugaaaagccuauuccucucaacaaacaugcaagaaagacuacgcucaaaagauagagacuuaggaucaucauaa

SEQ ID NO: 4169 - protein, 178 aa, Artificial Sequence
  IL-10__Homo_sapiens__P22301
MHSSALLCCLVLLTGVRASPGQGTQSENSCTHFPGNLPNMLRDLRDAFSRVKTFFQMKDQLDNLLLKESLLEDFKGYLGCQALSEMIQFYLEEVMPQAENQDPDIKAHVNSLGENLKTLRLRLRRCHRFLPCENKSKAVEQVKNAFNKLQEKGIYKAMSEFDIFINYIEAYMTMKIRN

SEQ ID NO: 4170 - RNA, 537 nt, Artificial Sequence
  IL-10__Homo_sapiens__AAA63207
augcacagcucagcacugcucuguugccugguccuccugacuggggugagggccagcccaggccagggcacccagucugagaacagcugcacccacuucccaggcaaccugccuaacaugcuucgagaucuccgagaugccuucagcagagugaagacuuucuuucaaaugaaggaucagcuggacaacuuguuguuaaaggaguccuugcuggaggacuuuaaggguuaccuggguugccaagccuugucugagaugauccaguuuuaccuggaggaggugaugccccaagcugagaaccaagacccagacaucaaggcgcaugugaacucccugggggagaaccugaagacccucaggcugaggcuacggcgcugucaucgauuucuucccugugaaaacaagagcaaggccguggagcaggugaagaaugccuuuaauaagcuccaagagaaaggcaucuacaaagccaugagugaguuugacaucuucaucaacuacauagaagccuacaugacaaugaagauacgaaacuga

SEQ ID NO: 4171 - RNA, 537 nt, Artificial Sequence
  derived and/or modified sequence opt1 from IL-10__Homo_sapiens__AAA63207
augcacagcuccgcccugcucugcugccuggugcugcucaccggcgugcgcgccagccccgggcagggcacccaguccgagaacagcugcacgcacuucccggggaaccugcccaacaugcugcgggaccuccgcgacgcguucucccgggugaagaccuucuuccagaugaaggaccagcuggacaaccugcuccugaaggagagccugcucgaggacuucaagggcuaccuggggugccaggcccuguccgagaugauccaguucuaccucgaggaggugaugccccaggccgagaaccaggaccccgacaucaaggcccacgucaacagccugggcgagaaccugaagacccuccgccugcggcugcgccggugccaccgcuuccucccgugcgagaacaaguccaaggccguggagcaggucaagaacgcguucaacaagcugcaggagaagggcaucuacaaggccaugagcgaguucgacaucuucaucaacuacaucgaggccuacaugaccaugaagauccggaacuga

SEQ ID NO: 4172 - RNA, 537 nt, Artificial Sequence
  derived and/or modified sequence opt2 from IL-10__Homo_sapiens__AAA63207
augcacuccuccgcccuccucugcugccucguccuccucaccggcguccgcgccucccccggccagggcacccaguccgagaacuccugcacccacuuccccggcaaccuccccaacaugcuccgcgaccuccgcgacgccuucucccgcgucaagaccuucuuccagaugaaggaccagcucgacaaccuccuccucaaggagucccuccucgaggacuucaagggcuaccucggcugccaggcccucuccgagaugauccaguucuaccucgaggaggucaugccccaggccgagaaccaggaccccgacaucaaggcccacgucaacucccucggcgagaaccucaagacccuccgccuccgccuccgccgcugccaccgcuuccuccccugcgagaacaaguccaaggccgucgagcaggucaagaacgccuucaacaagcuccaggagaagggcaucuacaaggccauguccgaguucgacaucuucaucaacuacaucgaggccuacaugaccaugaagauccgcaacuga

SEQ ID NO: 4173 - RNA, 537 nt, Artificial Sequence
  derived and/or modified sequence opt3 from IL-10__Homo_sapiens__AAA63207
augcacagcuccgcccugcucugcugucuugugcuguugaccggcgucagagcuucucccgggcagggaacacaaucagagaacaguugcacucauuucccugguaauuuaccaaacaugcugagggaccuacgggaugcauuuagccgcguuaagacguucuuucagaugaaagaccagcucgauaaucugcuucugaaggaauccuugcucgaggacuucaaaggcuaccuggggugucaggcccugucugaaaugauccaauuuuaucucgaggaagugaugccgcaggcggagaaccaggaucccgacauuaaggcucacguaaauucguuaggagagaaccugaaaacccuucgauugcgucugagaaggugccaucgguuccuaccuugugaaaauaagucaaaggccguggagcaggucaaaaacgcauuuaauaagcuccaagaaaaaggcauauacaaggccaugagcgaguucgauaucuuuauuaacuauaucgaggcuuacaugacaaugaaaauucgcaauuga

SEQ ID NO: 4174 - RNA, 537 nt, Artificial Sequence
  derived and/or modified sequence opt4 from IL-10__Homo_sapiens__AAA63207
augcacagcagcgcccugcugugcugccuggugcugcugaccggcgugagagccagccccggccagggcacccagagcgagaacagcugcacccacuuccccggcaaccugcccaacaugcugagagaccugagagacgccuucagcagagugaagaccuucuuccagaugaaggaccagcuggacaaccugcugcugaaggagagccugcuggaggacuucaagggcuaccugggcugccaggcccugagcgagaugauccaguucuaccuggaggaggugaugccccaggccgagaaccaggaccccgacaucaaggcccacgugaacagccugggcgagaaccugaagacccugagacugagacugagaagaugccacagauuccugcccugcgagaacaagagcaaggccguggagcaggugaagaacgccuucaacaagcugcaggagaagggcaucuacaaggccaugagcgaguucgacaucuucaucaacuacaucgaggccuacaugaccaugaagaucagaaacuga

SEQ ID NO: 4175 - RNA, 537 nt, Artificial Sequence
  derived and/or modified sequence opt5 from IL-10__Homo_sapiens__AAA63207
augcacagcuccgcccugcucugcugucuggugcuucugaccggcgucagagcuucucccgggcagggaacacaaagcgagaacuccugcacgcauuucccuggcaaucucccgaacaugcugcgggaccuucgcgaugccuuuucuagaguuaagaccuucuuucagaugaaagaccagcuggauaaucuccugcugaaggaaagccuccuggaggacuucaaaggguaccuuggaugucaggcgcuguccgaaaugauccaauuuuaucucgaggaagugaugccccaggcugagaaccaggauccugacauuaaggcccacgucaauucucugggcgagaaccuuaaaacacugcggcuccgccugagacggugccaucgcuuccugcccugugaaaauaagagcaaggccguggaacaggugaaaaacgcuuuuaauaagcuccaagagaaagggaucuacaaggccauguccgaguucgauauuuuuaucaacuauauugaggcuuacaugaccaugaaaaucagaaauuga

SEQ ID NO: 4176 - RNA, 537 nt, Artificial Sequence
  derived and/or modified sequence opt6 from IL-10__Homo_sapiens__AAA63207
augcacuccucagcacuacuaugcugccuaguauuacuaacaggaguaagagcaucaccaggacaaggaacacaaucagaaaacucaugcacacacuucccaggaaaccuaccaaacaugcuaagagaccuaagagacgcauucucaagaguaaaaacauucuuccaaaugaaagaccaacuagacaacuuacuacuaaaagaaucacuacuagaagacuucaaaggauaccuaggaugccaagcacuaucagaaaugauacaauucuaccuagaagaagucaugccacaagcagaaaaccaagacccagacauaaaagcacacguaaacucacuaggagaaaacuuaaaaacauuaagacuaagacuaagaagaugccacagauuccuaccaugcgaaaacaaaucaaaagcaguagaacaaguaaaaaacgcauucaacaaacuacaagaaaaaggaauauacaaagcaaugucagaauucgacauauucauaaacuacauagaagcauacaugacaaugaaaauaagaaacuaa

SEQ ID NO: 4177 - protein, 199 aa, Artificial Sequence
  IL-11__Homo_sapiens__P20809
MNCVCRLVLVVLSLWPDTAVAPGPPPGPPRVSPDPRAELDSTVLLTRSLLADTRQLAAQLRDKFPADGDHNLDSLPTLAMSAGALGALQLPGVLTRLRADLLSYLRHVQWLRRAGGSSLKTLEPELGTLQARLDRLLRRLQLLMSRLALPQPPPDPPAPPLAPPSSAWGGIRAAHAILGGLHLTLDWAVRGLLLLKTRL

SEQ ID NO: 4178 - RNA, 600 nt, Artificial Sequence
  IL-11__Homo_sapiens__AAA59132
augaacuguguuugccgccugguccuggucgugcugagccuguggccagauacagcugucgccccugggccaccaccuggccccccucgaguuuccccagacccucgggccgagcuggacagcaccgugcuccugacccgcucucuccuggcggacacgcggcagcuggcugcacagcugagggacaaauucccagcugacggggaccacaaccuggauucccugcccacccuggccaugagugcgggggcacugggagcucuacagcucccaggugugcugacaaggcugcgagcggaccuacuguccuaccugcggcacgugcaguggcugcgccgggcagguggcucuucccugaagacccuggagcccgagcugggcacccugcaggcccgacuggaccggcugcugcgccggcugcagcuccugaugucccgccuggcccugccccagccacccccggacccgccggcgcccccgcuggcgccccccuccucagccugggggggcaucagggccgcccacgccauccugggggggcugcaccugacacuugacugggccgugaggggacugcugcugcugaagacucggcuguga

SEQ ID NO: 4179 - RNA, 600 nt, Artificial Sequence
  derived and/or modified sequence opt1 from IL-11__Homo_sapiens__AAA59132
augaacugcgugugccgccugguccucguggugcugagccuguggcccgacaccgccgucgcccccgggcccccgcccggcccgccccgggugucccccgacccccgcgcggagcucgacagcaccgugcugcugacgcggucccuccuggccgacacccgccagcuggccgcccagcuccgggacaaguuccccgccgacggcgaccacaaccuggacagccugcccacccucgcgauguccgccggggcccugggcgcccugcagcuccccgggguccugacccgccugcgggcggaccuccugagcuaccugcgccacgugcaguggcuccggcgcgccggcggcuccagccugaagacgcuggagcccgagcucgggacccugcaggcccggcuggaccgccuccugcggcgccugcagcuccugaugucccggcuggcccucccccagcccccgcccgacccgcccgccccgccccuggcgccgcccagcuccgccuggggcgggauccgcgccgcccacgccauccugggcgggcuccaccugacccuggacugggcggugcggggccuccugcugcucaagacccgccuguga

SEQ ID NO: 4180 - RNA, 600 nt, Artificial Sequence
  derived and/or modified sequence opt2 from IL-11__Homo_sapiens__AAA59132
augaacugcgucugccgccucguccucgucguccucucccucuggcccgacaccgccgucgcccccggccccccccccggccccccccgcgucucccccgacccccgcgccgagcucgacuccaccguccuccucacccgcucccuccucgccgacacccgccagcucgccgcccagcuccgcgacaaguuccccgccgacggcgaccacaaccucgacucccuccccacccucgccauguccgccggcgcccucggcgcccuccagcuccccggcguccucacccgccuccgcgccgaccuccucuccuaccuccgccacguccaguggcuccgccgcgccggcggcuccucccucaagacccucgagcccgagcucggcacccuccaggcccgccucgaccgccuccuccgccgccuccagcuccucaugucccgccucgcccucccccagcccccccccgacccccccgcccccccccucgccccccccuccuccgccuggggcggcauccgcgccgcccacgccauccucggcggccuccaccucacccucgacugggccguccgcggccuccuccuccucaagacccgccucuga

SEQ ID NO: 4181 - RNA, 600 nt, Artificial Sequence
  derived and/or modified sequence opt3 from IL-11__Homo_sapiens__AAA59132
augaacugcguguguagacugguccucguugugcuuagccuguggcccgacaccgccguagcuccuggcccaccgcccgggccuccaagggugucccccgauccucgggcagaguuggacucuacagucuuacugacucgcucacuacucgccgauacgcgacagcuggcggcucaacuucgugacaaguucccagccgauggagaccacaaucuggauaguuugcccacccucgcaaugagcgccggugcucugggcgcacugcagcucccugggguguuaacaagacugagggccgaccuuuuguccuaccugcggcauguucaguggcuacgcagagcuggagggucuucgcucaaaacucuggaaccagagcuugguacccugcaggccagguuggaucggcuccugcgccgauuacaacugcucaugucaagacuugcgcugccgcagcccccuccagaucccccugcaccacccuuggccccgccuagcagugcuuggggcggaaucagggccgcacacgcuauucuaggcggccugcaucucacacuggacugggccgugcgggggcuucuguugcucaagacccgucuguga

SEQ ID NO: 4182 - RNA, 600 nt, Artificial Sequence
  derived and/or modified sequence opt4 from IL-11__Homo_sapiens__AAA59132
augaacugcgugugcagacuggugcugguggugcugagccuguggcccgacaccgccguggcccccggccccccccccggcccccccagagugagccccgaccccagagccgagcuggacagcaccgugcugcugaccagaagccugcuggccgacaccagacagcuggccgcccagcugagagacaaguuccccgccgacggcgaccacaaccuggacagccugcccacccuggccaugagcgccggcgcccugggcgcccugcagcugcccggcgugcugaccagacugagagccgaccugcugagcuaccugagacacgugcaguggcugagaagagccggcggcagcagccugaagacccuggagcccgagcugggcacccugcaggccagacuggacagacugcugagaagacugcagcugcugaugagcagacuggcccugccccagcccccccccgacccccccgcccccccccuggccccccccagcagcgccuggggcggcaucagagccgcccacgccauccugggcggccugcaccugacccuggacugggccgugagaggccugcugcugcugaagaccagacuguga

SEQ ID NO: 4183 - RNA, 600 nt, Artificial Sequence
  derived and/or modified sequence opt5 from IL-11__Homo_sapiens__AAA59132
augaacugcguguguagacugguccucguugugcugagccuuuggcccgacaccgccguggcuccuggcccgcccccugggcccccucgggucucccccgauccucgcgccgagcuggacucuacagugcuccugacgagaagccuucuggcggauacccggcagcucgcugcccaacugcgcgacaaguucccggccgauggagaccacaaucuggauucccuccccacacuggcuaugucugccggcgcucuuggggcccugcagcucccuggaguucugaccagacuucgggcggaccugcucagcuaccugcgccaugugcaguggcugagacgggccggcggguccucucucaaaacacuggaacccgagcuuggaacccugcaggcucgccucgauagacugcuucggcgccugcaacuccugaugagcagacuggcccucccucagcccccgccugaucccccugcuccuccccuggcgcccccguccagcgccuggggcggcauccgggccgcucacgccauucuugggggacugcaucucacacuggacugggcuguccgcggccuucugcuccugaagaccagacuguga

SEQ ID NO: 4184 - RNA, 600 nt, Artificial Sequence
  derived and/or modified sequence opt6 from IL-11__Homo_sapiens__AAA59132
augaacuguguauguagacuaguauuaguaguauuaucauuauggccagacacagcaguagcaccaggaccaccaccaggaccaccaagaguaucaccagacccaagagcagaauuagacucaacaguucucuuaacaagaucuuuacuagcagacacaagacaauuagcagcacaacuaagagacaaauucccagcagauggagaucauaauuuagauaguuuaccaacauuagcuaugucagcaggagcauuaggagcacuacaacuaccaggaguacuaacaagauuaagagcagacuuauuaucauacuuaagacauguacaaugguuaagaagagcaggaggaucaucucuaaaaacacuagaaccagaacuaggaaccuuacaagcaagauuagaccgauuauuaagaagauuacaauuauuaaugucaagauuagcauuaccacaaccaccaccagauccaccagcaccaccauuagcaccaccaucuucagcauggggaggaauaagagcagcacaugccauauuaggaggacuacaccuaacauuagacugggcaguaagaggacuacuacuacuaaaaacaagacuauaa

SEQ ID NO: 4185 - protein, 219 aa, Artificial Sequence
  IL-12A__Homo_sapiens__P29459
MCPARSLLLVATLVLLDHLSLARNLPVATPDPGMFPCLHHSQNLLRAVSNMLQKARQTLEFYPCTSEEIDHEDITKDKTSTVEACLPLELTKNESCLNSRETSFITNGSCLASRKTSFMMALCLSSIYEDLKMYQVEFKTMNAKLLMDPKRQIFLDQNMLAVIDELMQALNFNSETVPQKSSLEEPDFYKTKIKLCILLHAFRIRAVTIDRVMSYLNAS

SEQ ID NO: 4186 - RNA, 660 nt, Artificial Sequence
  IL-12A__Homo_sapiens__AAK84425
auguguccagcgcgcagccuccuccuuguggcuacccugguccuccuggaccaccucaguuuggccagaaaccuccccguggccacuccagacccaggaauguucccaugccuucaccacucccaaaaccugcugagggccgucagcaacaugcuccagaaggccagacaaacucuagaauuuuacccuugcacuucugaagagauugaucaugaagauaucacaaaagauaaaaccagcacaguggaggccuguuuaccauuggaauuaaccaagaaugagaguugccuaaauuccagagagaccucuuucauaacuaaugggaguugccuggccuccagaaagaccucuuuuaugauggcccugugccuuaguaguauuuaugaagacuugaagauguaccagguggaguucaagaccaugaaugcaaagcuucugauggauccuaagaggcagaucuuucuagaucaaaacaugcuggcaguuauugaugagcugaugcaggcccugaauuucaacagugagacugugccacaaaaauccucccuugaagaaccggauuuuuauaaaacuaaaaucaagcucugcauacuucuucaugcuuucagaauucgggcagugacuauugauagagugaugagcuaucugaaugcuuccuaa

SEQ ID NO: 4187 - RNA, 660 nt, Artificial Sequence
  derived and/or modified sequence opt1 from IL-12A__Homo_sapiens__AAK84425
augugccccgcccgcagccugcuccugguggccacccugguccuccuggaccaccugucccucgcgcggaaccugccgguggccacccccgaccccggcauguuccccugccugcaccacagccagaaccuccugcgcgccguguccaacaugcugcagaaggcccggcagacgcucgaguucuacccgugcaccagcgaggagaucgaccacgaggacaucaccaaggacaagaccuccacggucgaggccugccugccccuggagcucaccaagaacgagagcugccugaacucccgcgagaccagcuucaucaccaacggguccugccuggcgagccggaagacguccuucaugauggcccucugccugagcuccaucuacgaggaccugaagauguaccagguggaguucaagaccaugaacgccaagcuccugauggaccccaagcgccagaucuuccuggaccagaacaugcucgccgugaucgacgagcugaugcaggcgcugaacuucaacagcgagaccgucccccagaaguccagccucgaggagccggacuucuacaagaccaagaucaagcugugcauccugcuccacgccuuccggauccgcgccgugacgaucgaccgggugauguccuaccugaacgccagcuga

SEQ ID NO: 4188 - RNA, 660 nt, Artificial Sequence
  derived and/or modified sequence opt2 from IL-12A__Homo_sapiens__AAK84425
augugccccgcccgcucccuccuccucgucgccacccucguccuccucgaccaccucucccucgcccgcaaccuccccgucgccacccccgaccccggcauguuccccugccuccaccacucccagaaccuccuccgcgccgucuccaacaugcuccagaaggcccgccagacccucgaguucuaccccugcaccuccgaggagaucgaccacgaggacaucaccaaggacaagaccuccaccgucgaggccugccucccccucgagcucaccaagaacgaguccugccucaacucccgcgagaccuccuucaucaccaacggcuccugccucgccucccgcaagaccuccuucaugauggcccucugccucuccuccaucuacgaggaccucaagauguaccaggucgaguucaagaccaugaacgccaagcuccucauggaccccaagcgccagaucuuccucgaccagaacaugcucgccgucaucgacgagcucaugcaggcccucaacuucaacuccgagaccgucccccagaaguccucccucgaggagcccgacuucuacaagaccaagaucaagcucugcauccuccuccacgccuuccgcauccgcgccgucaccaucgaccgcgucauguccuaccucaacgccuccuga

SEQ ID NO: 4189 - RNA, 660 nt, Artificial Sequence
  derived and/or modified sequence opt3 from IL-12A__Homo_sapiens__AAK84425
augugccccgccagaagccugcuccuuguggcuacccuggucuuguuagaccaccugucccuagcaaggaaccucccuguugccacaccagauccgggcauguuccccugucugcaucacucucagaaucuucugcgggcggugucaaacauguugcaaaaggcucgccagacucucgaguuuuacccuugcacgagugaagagaucgaccaugaagauauuaccaaagacaagacaagcacuguagaggccugucugccacuggaacucaccaaaaaugaguccugcuuaaacucucgagagacaucguucauaaccaaugggucaugucuggcaagccguaagacaaguuuuaugauggcccuuugcuuguccucuaucuaugaagaucugaaaauguaccagguggaguucaagacuaugaacgcuaagcuacucauggaccccaaaagacagauuuuucuggaucaaaauaugcuugcagucaucgacgaacugaugcaggccuugaacuucaauagcgagaccgugccucagaaguccucacucgaggaaccagauuuuuauaaaacgaagauuaaacuguguaucuuacugcacgcuuucaggauacgggccguuacuaucgaccgcgugaugaguuaccucaacgcgagcuga

SEQ ID NO: 4190 - RNA, 660 nt, Artificial Sequence
  derived and/or modified sequence opt4 from IL-12A__Homo_sapiens__AAK84425
augugccccgccagaagccugcugcugguggccacccuggugcugcuggaccaccugagccuggccagaaaccugcccguggccacccccgaccccggcauguuccccugccugcaccacagccagaaccugcugagagccgugagcaacaugcugcagaaggccagacagacccuggaguucuaccccugcaccagcgaggagaucgaccacgaggacaucaccaaggacaagaccagcaccguggaggccugccugccccuggagcugaccaagaacgagagcugccugaacagcagagagaccagcuucaucaccaacggcagcugccuggccagcagaaagaccagcuucaugauggcccugugccugagcagcaucuacgaggaccugaagauguaccagguggaguucaagaccaugaacgccaagcugcugauggaccccaagagacagaucuuccuggaccagaacaugcuggccgugaucgacgagcugaugcaggcccugaacuucaacagcgagaccgugccccagaagagcagccuggaggagcccgacuucuacaagaccaagaucaagcugugcauccugcugcacgccuucagaaucagagccgugaccaucgacagagugaugagcuaccugaacgccagcuga

SEQ ID NO: 4191 - RNA, 660 nt, Artificial Sequence
  derived and/or modified sequence opt5 from IL-12A__Homo_sapiens__AAK84425
augugccccgccagaagccugcuccugguggcuacccuuguccugcucgaccaccugucccuugcccggaaccugccuguugcgacaccggaucccggcauguucccuugucuccaucacucucagaaucugcugcgcgcugugagcaacaugcuccaaaaggccagacagacgcuggaguuuuaccccugcaccuccgaagagaucgaccaugaagauauuacaaaagacaagaccucuacaguggaggccugucuuccucuggaacucaccaaaaaugagagcugccugaacucccgggagacaucuuucaucaccaaugggagcugucuugcuucccgcaagacgagcuuuaugauggcccugugccucucuuccauuuaugaagaucugaaaauguaccaggucgaguucaagaccaugaacgcuaagcugcucauggaccccaaaagacagaucuuucuggaucaaaauaugcuugccgugauugacgaacugaugcaggcgcucaacuucaauagcgagacaguuccucagaagucuucccuggaggaaccggauuuuuauaaaaccaagaucaaacuuuguauccugcuccacgccuuccggauucgcgcugugacaaucgacagagucaugagcuaccugaacgccucuuga

SEQ ID NO: 4192 - RNA, 660 nt, Artificial Sequence
  derived and/or modified sequence opt6 from IL-12A__Homo_sapiens__AAK84425
augugcccagcaagaucacuacuacuaguagcaacacuaguacuacuagaccaccuaucacucgccagaaaccucccaguagccacaccagacccaggaauguuccccugccuccaccauucccaaaaccuacuaagagcaguaucaaacaugcuacaaaaagcaagacaaacacuagaauucuauccaugcacaucagaagaaauagaccacgaagacauaacaaaagacaaaacaucaaccguagaagcaugccucccacucgaacucacaaaaaacgaaucaugccuaaacucaagagaaacaucauucauaacaaacggcucaugcuuagccucaagaaaaacaucauucaugauggcacuaugccucucauccauauaugaagacuuaaaaauguaccaaguagaauuuaaaaccaugaacgcaaaauuacuaauggacccaaaaagacaaauauuccuagaccaaaacaugcuagcaguaauagacgaacuaaugcaagcacuaaacuucaacucagaaaccguaccccaaaaaucaucucuagaagaaccagacuucuacaaaacaaaaauaaaacuaugcauacuacuacacgccuucagaauaagagccgucacaauagacagagucaugucauaccuaaacgccucauaa

SEQ ID NO: 4193 - protein, 328 aa, Artificial Sequence
  IL-12__Homo_sapiens__P29460
MCHQQLVISWFSLVFLASPLVAIWELKKDVYVVELDWYPDAPGEMVVLTCDTPEEDGITWTLDQSSEVLGSGKTLTIQVKEFGDAGQYTCHKGGEVLSHSLLLLHKKEDGIWSTDILKDQKEPKNKTFLRCEAKNYSGRFTCWWLTTISTDLTFSVKSSRGSSDPQGVTCGAATLSAERVRGDNKEYEYSVECQEDSACPAAEESLPIEVMVDAVHKLKYENYTSSFFIRDIIKPDPPKNLQLKPLKNSRQVEVSWEYPDTWSTPHSYFSLTFCVQVQGKSKREKKDRVFTDKTSATVICRKNASISVRAQDRYYSSSWSEWASVPCS

SEQ ID NO: 4194 - RNA, 987 nt, Artificial Sequence
  IL-12__Homo_sapiens__AAA35695
augugucaccagcaguuggucaucucuugguuuucccugguuuuucuggcaucuccccucguggccauaugggaacugaagaaagauguuuaugucguagaauuggauugguauccggaugccccuggagaaauggugguccucaccugugacaccccugaagaagaugguaucaccuggaccuuggaccagagcagugaggucuuaggcucuggcaaaacccugaccauccaagucaaagaguuuggagaugcuggccaguacaccugucacaaaggaggcgagguucuaagccauucgcuccugcugcuucacaaaaaggaagauggaauuugguccacugauauuuuaaaggaccagaaagaacccaaaaauaagaccuuucuaagaugcgaggccaagaauuauucuggacguuucaccugcugguggcugacgacaaucaguacugauuugacauucagugucaaaagcagcagaggcucuucugacccccaaggggugacgugcggagcugcuacacucucugcagagagagucagaggggacaacaaggaguaugaguacucaguggagugccaggaggacagugccugcccagcugcugaggagagucugcccauugaggucaugguggaugccguucacaagcucaaguaugaaaacuacaccagcagcuucuucaucagggacaucaucaaaccugacccacccaagaacuugcagcugaagccauuaaagaauucucggcagguggaggucagcugggaguacccugacaccuggaguacuccacauuccuacuucucccugacauucugcguucagguccagggcaagagcaagagagaaaagaaagauagagucuucacggacaagaccucagccacggucaucugccgcaaaaaugccagcauuagcgugcgggcccaggaccgcuacuauagcucaucuuggagcgaaugggcaucugugcccugcaguuag

SEQ ID NO: 4195 - RNA, 987 nt, Artificial Sequence
  derived and/or modified sequence opt1 from IL-12__Homo_sapiens__AAA35695
augugccaccagcagcuggugaucagcugguucucccucgucuuccuggccagcccccugguggccaucugggagcucaagaaggacguguacgucguggagcuggacugguacccggacgcgcccggcgagauggugguccugaccugcgacacccccgaggaggacgggaucacguggacccucgaccaguccagcgaggugcugggcuccgggaagacccugaccauccaggugaaggaguucggcgacgccgggcaguacacgugccacaagggcggcgagguccucagccacucccugcugcuccugcacaagaaggaggacgggaucuggagcaccgacauccugaaggaccagaaggagcccaagaacaagaccuuccuccgcugcgaggccaagaacuacuccggccgguucacgugcugguggcugaccaccaucagcaccgaccugaccuucuccgucaagagcucccgcgggagcuccgacccgcagggcgugacgugcggggccgccacccucagcgcggagcgggugcgcggcgacaacaaggaguacgaguacuccguggagugccaggaggacagcgccugccccgccgccgaggagucccugcccaucgaggugauggucgacgcggugcacaagcugaaguacgagaacuacaccagcagcuucuucauccgggacaucaucaagcccgacccgcccaagaaccuccagcugaagccccugaagaacucccgccagguggaggucagcugggaguaccccgacaccugguccacgccgcacagcuacuucucccucaccuucugcguccaggugcagggcaagagcaagcgggagaagaaggaccgcguguucaccgacaagaccuccgccacggugaucugccggaagaacgccagcaucuccgugcgcgcccaggaccgguacuacagcuccagcugguccgagugggccagcguccccugcuccuga

SEQ ID NO: 4196 - RNA, 987 nt, Artificial Sequence
  derived and/or modified sequence opt2 from IL-12__Homo_sapiens__AAA35695
augugccaccagcagcucgucaucuccugguucucccucgucuuccucgccuccccccucgucgccaucugggagcucaagaaggacgucuacgucgucgagcucgacugguaccccgacgcccccggcgagauggucguccucaccugcgacacccccgaggaggacggcaucaccuggacccucgaccaguccuccgagguccucggcuccggcaagacccucaccauccaggucaaggaguucggcgacgccggccaguacaccugccacaagggcggcgagguccucucccacucccuccuccuccuccacaagaaggaggacggcaucugguccaccgacauccucaaggaccagaaggagcccaagaacaagaccuuccuccgcugcgaggccaagaacuacuccggccgcuucaccugcugguggcucaccaccaucuccaccgaccucaccuucuccgucaaguccucccgcggcuccuccgacccccagggcgucaccugcggcgccgccacccucuccgccgagcgcguccgcggcgacaacaaggaguacgaguacuccgucgagugccaggaggacuccgccugccccgccgccgaggagucccuccccaucgaggucauggucgacgccguccacaagcucaaguacgagaacuacaccuccuccuucuucauccgcgacaucaucaagcccgacccccccaagaaccuccagcucaagccccucaagaacucccgccaggucgaggucuccugggaguaccccgacaccugguccaccccccacuccuacuucucccucaccuucugcguccagguccagggcaaguccaagcgcgagaagaaggaccgcgucuucaccgacaagaccuccgccaccgucaucugccgcaagaacgccuccaucuccguccgcgcccaggaccgcuacuacuccuccuccugguccgagugggccuccguccccugcuccuga

SEQ ID NO: 4197 - RNA, 987 nt, Artificial Sequence
  derived and/or modified sequence opt3 from IL-12__Homo_sapiens__AAA35695
augugccaccagcaacuggugaucagcugguucucccucgucuuucuugccucuccccugguugcuauuugggaguugaagaaagacguguacguaguggaauuagauugguauccugacgcaccaggcgagauggucgugcugaccugugauacaccggaagaggacgggauaacuuggacgcuagaucagucaagugaaguucucggaagcgguaagacccugacaauccaggugaaagaguucggcgacgccgggcaguacacuugccauaagggaggcgagguccuuucccacucucuguugcuccugcauaaaaaggaagaugguauuuggucgaccgacauccugaaggaucaaaaagagcccaagaacaaaacauuucucagaugugaagcgaagaauuauucagggagguuuaccugcuggugguuaacuacaauuagcaccgaccugacguucagugugaaauccucucggggaagcuccgauccucagggcguaacuuguggcgcugccacccuuucagcagagcgcguucgaggggacaacaaggaguacgaauauaguguggagugccaggaagauagcgccuguccagcugcagaggaaucuuugcccaucgaggucaugguggacgccgugcacaagcugaaauacgagaauuauacauccucauucuuuauacgugacaucauuaagccugauccacccaaaaaccuacagcucaagccucugaaaaauagcagacaagucgaaguuaguugggaguacccagacacuuggucuaccccgcauuccuacuucagccuuacauuuugcgugcagguacagggaaagucgaaaagggaaaagaaggaucggguguucaccgacaaaacgucugcuacugucaucugucgcaagaacgccuccauuucagugagagcgcaggauagguauuacaguagcuccuggucugagugggcaagcguucccugcucauga

SEQ ID NO: 4198 - RNA, 987 nt, Artificial Sequence
  derived and/or modified sequence opt4 from IL-12__Homo_sapiens__AAA35695
augugccaccagcagcuggugaucagcugguucagccugguguuccuggccagcccccugguggccaucugggagcugaagaaggacguguacgugguggagcuggacugguaccccgacgcccccggcgagaugguggugcugaccugcgacacccccgaggaggacggcaucaccuggacccuggaccagagcagcgaggugcugggcagcggcaagacccugaccauccaggugaaggaguucggcgacgccggccaguacaccugccacaagggcggcgaggugcugagccacagccugcugcugcugcacaagaaggaggacggcaucuggagcaccgacauccugaaggaccagaaggagcccaagaacaagaccuuccugagaugcgaggccaagaacuacagcggcagauucaccugcugguggcugaccaccaucagcaccgaccugaccuucagcgugaagagcagcagaggcagcagcgacccccagggcgugaccugcggcgccgccacccugagcgccgagagagugagaggcgacaacaaggaguacgaguacagcguggagugccaggaggacagcgccugccccgccgccgaggagagccugcccaucgaggugaugguggacgccgugcacaagcugaaguacgagaacuacaccagcagcuucuucaucagagacaucaucaagcccgacccccccaagaaccugcagcugaagccccugaagaacagcagacagguggaggugagcugggaguaccccgacaccuggagcaccccccacagcuacuucagccugaccuucugcgugcaggugcagggcaagagcaagagagagaagaaggacagaguguucaccgacaagaccagcgccaccgugaucugcagaaagaacgccagcaucagcgugagagcccaggacagauacuacagcagcagcuggagcgagugggccagcgugcccugcagcuga

SEQ ID NO: 4199 - RNA, 987 nt, Artificial Sequence
  derived and/or modified sequence opt5 from IL-12__Homo_sapiens__AAA35695
augugccaccagcaacuggugaucagcugguucucccucgucuuucuggccucuccccuuguugcuauuugggagcugaagaaagacguguacguggucgaacucgauugguauccugacgccccgggcgagauggugguucugaccugugauacacccgaagaggacgggaucacguggacccuugaucagagcuccgaagugcugggaucuggcaagacacucaccauucaggucaaagaguucggggacgcgggacaguacacaugccauaagggcggggaggugcugagccacucccugcuccugcuucauaaaaaggaagauggaaucuggucuaccgacauucugaaggaucaaaaagagccuaagaacaaaacauuucucagaugugaagcuaagaauuauagcggccgguuuaccugcugguggcugacgaccaucuccacagaccuuaccuucagcguuaaaucuucccgcggcagcucugauccccagggggugacauguggagccgccacccuguccgcugagagaguccggggcgacaacaaggaguacgaauauagcguggagugccaggaagauucugccuguccugcugccgaggaaucccuccccaucgaggugauggucgacgcgguucacaagcugaaauacgagaauuauacgagcuccuucuuuauucgcgacaucauuaagccugauccgcccaaaaaccugcagcucaagccucugaaaaauucuagacaaguggaagugagcugggaguaccccgacacaugguccaccccucauagcuacuucucucuuacauuuugcguccaggugcaggggaaguccaaacgggaaaagaaggaucgcguuuucaccgacaaaaccagcgccacagugaucuguagaaagaacgcuucuauuagcguccgggcccaggaucgcuauuacuccucuagcugguccgagugggcuagcgugcccugcucuuga

SEQ ID NO: 4200 - RNA, 987 nt, Artificial Sequence
  derived and/or modified sequence opt6 from IL-12__Homo_sapiens__AAA35695
augugccaccaacaacuaguaauaucaugguucucacuaguauucuuggcaucaccccuaguagcaauaugggaacuaaaaaaagacguauacguaguagaacuagacugguacccagacgcaccaggagaaaugguaguauuaacaugcgacacaccagaagaagauggaauaacuuggacauuagaccaaucaagugaaguauuaggaucaggcaaaacacuaacuauacaaguaaaagaauuuggagacgcaggacaauacaccugccacaaaggaggcgaaguccuaucacauucacuacuauuauuacacaaaaaagaagacggaaucuggagcacagacauauuaaaagaccaaaaagaaccaaaaaacaaaacauuucuaagaugcgaagcuaaaaacuauucaggaagauucacaugcugguggcuaacaaccaucaguaccgacuuaacauucucaguaaaaucaucaagaggaucaucagacccacaaggaguaacauguggagcagcaacacuaagcgcagaaagaguacgaggagacaacaaagaauacgaauauucaguagaaugucaagaagacucagcaugcccugcagcagaagaaucauuaccaauagaaguaauggucgacgcuguacacaaacuaaaauaugaaaauuacacaagcaguuucuucauaagagacauaauaaaacccgacccaccaaaaaaccuacaacuaaaaccauuaaaaaauucaagacaaguagaaguaucaugggaauacccagauacauggagcacaccacacaguuacuucucauuaacauucugcguacaaguacaaggaaaaaguaaaagagaaaaaaaagacagaguauucacagauaagacuucagcaacaguaauaugcagaaaaaacgcaagcauaagcguacgagcacaagacagauauuacucaagcucauggucagaaugggcaucaguaccauguucauaa

SEQ ID NO: 4201 - protein, 146 aa, Artificial Sequence [sequence omitted]

SEQ ID NO: 4202 - RNA, 441 nt, Artificial Sequence
  IL-13__Homo_sapiens__CAA48823
augcauccgcuccucaauccucuccuguuggcacugggccucauggcgcuuuuguugaccacggucauugcucucacuugccuuggcggcuuugccuccccaggcccugugccucccucuacagcccucagggagcucauugaggagcuggucaacaucacccagaaccagaaggcuccgcucugcaauggcagcaugguauggagcaucaaccugacagcuggcauguacugugcagcccuggaaucccugaucaacgugucaggcugcagugccaucgagaagacccagaggaugcugagcggauucugcccgcacaaggucucagcugggcaguuuuccagcuugcauguccgagacaccaaaaucgagguggcccaguuuguaaaggaccugcucuuacauuuaaagaaacuuuuucgcgagggacgguucaacuga

SEQ ID NO: 4203 - RNA, 441 nt, Artificial Sequence
  derived and/or modified sequence opt1 from IL-13__Homo_sapiens__CAA48823
augcacccccugcucaacccgcugcugcucgcccugggccugauggcccuccugcugaccaccgugaucgcgcucacgugccucgggggcuucgccagccccgggcccgugcccccguccaccgcccugcgcgagcucaucgaggagcuggucaacaucacccagaaccagaaggcgccccugugcaacggcagcauggugugguccaucaaccucaccgccgggauguacugcgccgcccuggagagccugaucaacgucuccggcugcagcgccaucgagaagacgcagcggaugcucuccggcuucugcccccacaaggugagcgccgggcaguucuccagccugcacgugcgcgacaccaagaucgaggucgcgcaguucgugaaggaccugcuccugcaccugaagaagcuguuccgggagggccgcuucaacuga

SEQ ID NO: 4204 - RNA, 441 nt, Artificial Sequence
  derived and/or modified sequence opt2 from IL-13__Homo_sapiens__CAA48823
augcacccccuccucaacccccuccuccucgcccucggccucauggcccuccuccucaccaccgucaucgcccucaccugccucggcggcuucgccucccccggccccgucccccccuccaccgcccuccgcgagcucaucgaggagcucgucaacaucacccagaaccagaaggccccccucugcaacggcuccauggucugguccaucaaccucaccgccggcauguacugcgccgcccucgagucccucaucaacgucuccggcugcuccgccaucgagaagacccagcgcaugcucuccggcuucugcccccacaaggucuccgccggccaguucuccucccuccacguccgcgacaccaagaucgaggucgcccaguucgucaaggaccuccuccuccaccucaagaagcucuuccgcgagggccgcuucaacuga

SEQ ID NO: 4205 - RNA, 441 nt, Artificial Sequence
  derived and/or modified sequence opt3 from IL-13__Homo_sapiens__CAA48823
augcacccccugcucaacccucuucuguuggccuuaggccugauggcucuacuccugaccacagugaucgcacuuacuugccuugggggauucgccagcccagguccgguucccccuuccacggcguugagagagcucauugaagaguuggucaauauaacccagaaccaaaaggcuccacuguguaauggcucuaugguguggucaaucaaccucacagccgggauguacugcgcagccuuagaaagucugauuaauguaagcggauguuccgcuaucgagaaaacucagaggaugcuuucuggcuuuugcccccauaaggugucggcaggucaguucucaagccugcacguccgggacaccaaaauugaaguggcccaguuuguuaaggaucugcuacuccaucugaaaaagcuguuccgcgaggggcgauuuaacuga

SEQ ID NO: 4206 - RNA, 441 nt, Artificial Sequence
  derived and/or modified sequence opt4 from IL-13__Homo_sapiens__CAA48823
augcacccccugcugaacccccugcugcuggcccugggccugauggcccugcugcugaccaccgugaucgcccugaccugccugggcggcuucgccagccccggccccgugccccccagcaccgcccugagagagcugaucgaggagcuggugaacaucacccagaaccagaaggccccccugugcaacggcagcaugguguggagcaucaaccugaccgccggcauguacugcgccgcccuggagagccugaucaacgugagcggcugcagcgccaucgagaagacccagagaaugcugagcggcuucugcccccacaaggugagcgccggccaguucagcagccugcacgugagagacaccaagaucgagguggcccaguucgugaaggaccugcugcugcaccugaagaagcuguucagagagggcagauucaacuga

SEQ ID NO: 4207 - RNA, 441 nt, Artificial Sequence
  derived and/or modified sequence opt5 from IL-13__Homo_sapiens__CAA48823
augcacccccugcucaacccucugcuucuggcccucggccugauggcccuucugcucaccacagugaucgcucugacgugccuugggggauucgcgagcccgggccccgucccucccuccaccgcucucagagagcugauugaggaacuuguuaauaucacacagaaccaaaaggccccucuguguaaugggucuaugguguggagcauuaaccucaccgccggaauguacugcgcugcccuggaaucccuuaucaaugugucuggcuguagcgcuauugagaaaacacagcggaugcuguccggguuuugcccccauaaggucucugccggacaguucagcucccuccacgugcgcgacaccaaaaucgaaguugcgcaguuugugaaggaucugcugcuccaucugaaaaagcuguucagagagggccgguuuaacuga

SEQ ID NO: 4208 - RNA, 441 nt, Artificial Sequence
  derived and/or modified sequence opt6 from IL-13__Homo_sapiens__CAA48823
augcacccacuacuaaacccacuacuacuagcacuaggacuaauggcacuacuacuaacaacaguaauagcacuaacaugccuaggaggauucgcaucaccaggaccaguaccaccaucaacagcacuaagagaacuaauagaagaacuaguaaacauaacacaaaaccaaaaagcaccacuaugcaacggaucaaugguauggucaauaaaccuaacagcaggaauguacugcgcagcacuagaaucacuaauaaacguaucaggaugcucagcaauagaaaaaacacaaagaaugcuaucaggauucugcccacacaaaguaucagcaggacaauucucaucacuacacguaagagacacaaaaauagaaguagcacaauucguaaaagaccuacuacuacaccuaaaaaaacuauuccgagaaggaagauucaacuaa

SEQ ID NO: 4209 - protein, 546 aa, Artificial Sequence
  IL-14__Homo_sapiens__P40222
MKNQDKKNGAAKQSNPKSSPGQPEAGPEGAQERPSQAAPAVEAEGPGSSQAPRKPEGAQARTAQSGALRDVSEELSRQLEDILSTYCVDNNQGGPGEDGAQGEPAEPEDAEKSRTYVARNGEPEPTPVVNGEKEPSKGDPNTEEIRQSDEVGDRDHRRPQEKKKAKGLGKEITLLMQTLNTLSTPEEKLAALCKKYAELLEEHRNSQKQMKLLQKKQSQLVQEKDHLRGEHSKAVLARSKLESLCRELQRHNRSLKEEGVQRAREEEEKRKEVTSHFQVTLNDIQLQMEQHNERNSKLRQENMELAERLKKLIEQYELREEHIDKVFKHKDLQQQLVDAKLQQAQEMLKEAEERHQREKDFLLKEAVESQRMCELMKQQETHLKQQLALYTEKFEEFQNTLSKSSEVFTTFKQEMEKMTKKIKKLEKETTMYRSRWESSNKALLEMAEEKTVRDKELEGLQVKIQRLEKLCRALQTERNDLNKRVQDLSAGGQGSLTDSGPERRPEGPGAQAPSSPRVTEAPCYPGAPSTEASGQTGPQEPTSARA

SEQ ID NO: 4210 - RNA, 1641 nt, Artificial Sequence
  IL-14__Homo_sapiens__AAI03824
augaagaaccaagacaaaaagaacggggcugccaaacaauccaauccaaaaagcagcccaggacaaccggaagcaggacccgagggagcccaggagcggcccagccaggcggcuccugcaguagaagcagaaggucccggcagcagccaggcuccucggaagccggagggggcucaagccagaacggcucagucuggggcccuucgugaugucucugaggagcugagccgccaacuggaagacauacugagcacauacuguguggacaauaaccaggggggccccggcgaggauggggcacagggugagccggcugaacccgaagaugcagagaagucccggaccuauguggcaaggaauggggagccugaaccaacuccaguagucaauggagagaaggaacccuccaagggggauccaaacacagaagagauccggcagagugacgaggucggagaccgagaccaucgaaggccacaggagaagaaaaaagccaaggguuuggggaaggagaucacguugcugaugcagacauugaauacucugaguaccccagaggagaagcuggcugcucugugcaagaaguaugcugaacugcuggaggagcaccggaauucacagaagcagaugaagcuccuacagaaaaagcagagccagcuggugcaagagaaggaccaccugcgcggugagcacagcaaggccguccuggcccgcagcaagcuugagagccuaugccgugagcugcagcggcacaaccgcucccucaaggaagaaggugugcagcgggcccgggaggaggaggagaagcgcaaggaggugaccucgcacuuccaggugacacugaaugacauucagcugcagauggaacagcacaaugagcgcaacuccaagcugcgccaagagaacauggagcuggcugagaggcucaagaagcugauugagcaguaugagcugcgcgaggagcauaucgacaaagucuucaaacacaaggaccuacaacagcagcugguggaugccaagcuccagcaggcccaggagaugcuaaaggaggcagaagagcggcaccagcgggagaaggauuuucuccugaaagaggcaguagagucccagaggaugugugagcugaugaagcagcaagagacccaccugaagcaacagcuugcccuauacacagagaaguuugaggaguuccagaacacacuuuccaaaagcagcgagguauucaccacauucaagcaggagauggaaaagaugacuaagaagaucaagaagcuggagaaagaaaccaccauguaccggucccggugggagagcagcaacaaggcccugcuugagauggcugaggagaaaacaguccgggauaaagaacuggagggccugcagguaaaaauccaacggcuggagaagcugugccgggcacugcagacagagcgcaaugaccugaacaagaggguacaggaccugagugcugguggccagggcucccucacugacaguggcccugagaggaggccagaggggccuggggcucaagcacccagcucccccagggucacagaagcgccuugcuacccaggagcaccgagcacagaagcaucaggccagacugggccucaagagcccaccuccgccagggccuag

SEQ ID NO: 4211 - RNA, 1641 nt, Artificial Sequence
  derived and/or modified sequence opt1 from IL-14__Homo_sapiens__AAI03824
augaagaaccaggacaagaagaacggcgccgccaagcagagcaaccccaaguccagcccggggcagcccgaggcgggccccgagggggcccaggagcgccccucccaggccgccccggccguggaggcggagggccccgggagcucccaggcgccccggaagcccgagggcgcccaggcccgcaccgcccagagcggcgcccugcgggacgucuccgaggagcucagccgccagcuggaggacauccuguccaccuacugcguggacaacaaccagggcgggccgggggaggacggcgcccagggggagcccgccgagcccgaggacgccgagaagucccggacguacguggcgcgcaacggcgagcccgagccgacccccgucgugaacggcgagaaggagcccagcaagggggaccccaacaccgaggagauccggcagagcgacgaggugggcgaccgcgaccaccggcgcccgcaggagaagaagaaggccaaggggcucggcaaggagaucacccugcugaugcagacgcucaacacccuguccacccccgaggagaagcuggccgcccucugcaagaaguacgccgagcugcuggaggagcaccggaacagccagaagcagaugaagcuccugcagaagaagcagucccagcugguccaggagaaggaccaccuccgcggcgagcacagcaaggcggugcuggcccgguccaagcuggagagccucugccgcgagcugcagcggcacaaccgcucccugaaggaggagggggugcagcgggcccgcgaggaggaggagaagcggaaggaggucaccagccacuuccaggugacgcucaacgacauccagcugcagauggagcagcacaacgagcgcaacagcaagcugcggcaggagaacauggagcucgccgagcgccugaagaagcugaucgagcaguacgagcuccgcgaggagcacaucgacaagguguucaagcacaaggaccugcagcagcagcuggucgacgccaagcuccagcaggcgcaggagaugcugaaggaggccgaggagcggcaccagcgcgagaaggacuuccugcucaaggaggccguggagucccagcggaugugcgagcugaugaagcagcaggagacccaccugaagcagcagcucgcccuguacaccgagaaguucgaggaguuccagaacacccugagcaaguccagcgagguguucacgaccuucaagcaggagauggagaagaugaccaagaagaucaagaagcucgagaaggagaccacgauguaccgcucccggugggagagcuccaacaaggcccugcuggagauggcggaggagaagaccguccgcgacaaggagcucgagggccuccaggugaagauccagcggcuggagaagcugugccgcgcccugcagaccgagcggaacgaccugaacaagcgcgugcaggaccucagcgccgggggccaggggucccugaccgacagcggccccgagcggcgccccgagggcccgggggcccaggcgcccuccagcccccgggucacggaggcccccugcuacccgggcgcccccuccaccgaggccagcgggcagaccggcccccaggagcccaccuccgcccgcgcguga

SEQ ID NO: 4212 - RNA, 1641 nt, Artificial Sequence
  derived and/or modified sequence opt2 from IL-14__Homo_sapiens__AAI03824
augaagaaccaggacaagaagaacggcgccgccaagcaguccaaccccaaguccucccccggccagcccgaggccggccccgagggcgcccaggagcgccccucccaggccgcccccgccgucgaggccgagggccccggcuccucccaggccccccgcaagcccgagggcgcccaggcccgcaccgcccaguccggcgcccuccgcgacgucuccgaggagcucucccgccagcucgaggacauccucuccaccuacugcgucgacaacaaccagggcggccccggcgaggacggcgcccagggcgagcccgccgagcccgaggacgccgagaagucccgcaccuacgucgcccgcaacggcgagcccgagcccacccccgucgucaacggcgagaaggagcccuccaagggcgaccccaacaccgaggagauccgccaguccgacgaggucggcgaccgcgaccaccgccgcccccaggagaagaagaaggccaagggccucggcaaggagaucacccuccucaugcagacccucaacacccucuccacccccgaggagaagcucgccgcccucugcaagaaguacgccgagcuccucgaggagcaccgcaacucccagaagcagaugaagcuccuccagaagaagcagucccagcucguccaggagaaggaccaccuccgcggcgagcacuccaaggccguccucgcccgcuccaagcucgagucccucugccgcgagcuccagcgccacaaccgcucccucaaggaggagggcguccagcgcgcccgcgaggaggaggagaagcgcaaggaggucaccucccacuuccaggucacccucaacgacauccagcuccagauggagcagcacaacgagcgcaacuccaagcuccgccaggagaacauggagcucgccgagcgccucaagaagcucaucgagcaguacgagcuccgcgaggagcacaucgacaaggucuucaagcacaaggaccuccagcagcagcucgucgacgccaagcuccagcaggcccaggagaugcucaaggaggccgaggagcgccaccagcgcgagaaggacuuccuccucaaggaggccgucgagucccagcgcaugugcgagcucaugaagcagcaggagacccaccucaagcagcagcucgcccucuacaccgagaaguucgaggaguuccagaacacccucuccaaguccuccgaggucuucaccaccuucaagcaggagauggagaagaugaccaagaagaucaagaagcucgagaaggagaccaccauguaccgcucccgcugggaguccuccaacaaggcccuccucgagauggccgaggagaagaccguccgcgacaaggagcucgagggccuccaggucaagauccagcgccucgagaagcucugccgcgcccuccagaccgagcgcaacgaccucaacaagcgcguccaggaccucuccgccggcggccagggcucccucaccgacuccggccccgagcgccgccccgagggccccggcgcccaggcccccuccuccccccgcgucaccgaggcccccugcuaccccggcgcccccuccaccgaggccuccggccagaccggcccccaggagcccaccuccgcccgcgccuga

SEQ ID NO: 4213 - RNA, 1641 nt, Artificial Sequence
  derived and/or modified sequence opt3 from IL-14__Homo_sapiens__AAI03824
augaagaaccaggacaaaaagaauggcgccgcuaaacaaagcaaccccaaguccucuccugggcagccagaggcaggaccggaaggugcccaggagagacccucacaggcggcuccugccguggaagcagagggcccagggaguagccaagcccccaggaaaccugaaggagcucaggcacggaccgcccaguccggcgcucugcgcgaugucucugaggagcucucgcgacagcuugaagacauccugucaacauacugcguugauaauaaccaaggugggccaggagaggacggcgcccagggcgaacccgcggagccugaggaugcagaaaagagccguacuuauguggccagaaauggggagccagaaccgacgcccguagugaacggagagaaggaaccuaguaaaggugacccaaauaccgaggagauuaggcaguccgaugaagucggcgaccgggaucaccgcagaccccaggagaagaaaaaggcuaaaggguugggaaaggaaauaacauuacugaugcaaacucuaaacacccucucuacaccugaggaaaagcuggccgcacuuuguaaaaaguacgcugagcuguuggaggaacauaggaauagccagaaacagaugaagcuccugcagaaaaagcaaucccagcuggugcaggagaaagaccaccuccggggcgaacauucaaaggccguuuuagcgcgcaguaagcuggagagccuuugccgagaauugcaaagacacaacaggucucugaaagaggagggugugcagcgggcccgugaagaggaagagaagcgcaaagaggucaccucccauuuccaggugacucuaaaugauauccagcuccaaauggaacagcacaacgagagaaauucaaagcugaggcaggaaaacauggagcuugcagaacggcugaaaaaguugauugagcaguaugagcuccgagaagaacacaucgacaagguauuuaaacauaaggaucugcaacagcaguuaguugacgcuaaacugcagcaagcccaggaaaugcucaaggaggcugaggagcgccaccagagagagaaagacuuccuucugaaggaagccguggagagccaaaggaugugugaauugaugaagcagcaggagacacaucuaaaacagcaacuggcacucuacaccgaaaaguuugaggaguuccagaauacgcugaguaaaucuuccgaagucuuuacuaccuucaagcaggagauggagaaaaugacaaagaagauuaaaaagcuggaaaaagagacuaccauguaucggagccgcugggaaucgucuaacaaggcccuguuggagauggcugaagagaaaacagugagagauaaggaacucgaggggcuucaggugaaaauccaaagguuagagaagcugugccgugcgcuacagaccgaacggaacgaccucaauaagcgaguccaggaucuguccgcaggaggccagggcucacuuacggacagugggccagagagaaggcccgaaggaccgggugcccaagcuccuagcucuccccgcguuacugaggccccauguuacccuggcgcacccuccacagaagccagcgggcagaccggaccacaggagcccacuucagcucgggccuga

SEQ ID NO: 4214 - RNA, 1641 nt, Artificial Sequence
  derived and/or modified sequence opt4 from IL-14__Homo_sapiens__AAI03824
augaagaaccaggacaagaagaacggcgccgccaagcagagcaaccccaagagcagccccggccagcccgaggccggccccgagggcgcccaggagagacccagccaggccgcccccgccguggaggccgagggccccggcagcagccaggcccccagaaagcccgagggcgcccaggccagaaccgcccagagcggcgcccugagagacgugagcgaggagcugagcagacagcuggaggacauccugagcaccuacugcguggacaacaaccagggcggccccggcgaggacggcgcccagggcgagcccgccgagcccgaggacgccgagaagagcagaaccuacguggccagaaacggcgagcccgagcccacccccguggugaacggcgagaaggagcccagcaagggcgaccccaacaccgaggagaucagacagagcgacgaggugggcgacagagaccacagaagaccccaggagaagaagaaggccaagggccugggcaaggagaucacccugcugaugcagacccugaacacccugagcacccccgaggagaagcuggccgcccugugcaagaaguacgccgagcugcuggaggagcacagaaacagccagaagcagaugaagcugcugcagaagaagcagagccagcuggugcaggagaaggaccaccugagaggcgagcacagcaaggccgugcuggccagaagcaagcuggagagccugugcagagagcugcagagacacaacagaagccugaaggaggagggcgugcagagagccagagaggaggaggagaagagaaaggaggugaccagccacuuccaggugacccugaacgacauccagcugcagauggagcagcacaacgagagaaacagcaagcugagacaggagaacauggagcuggccgagagacugaagaagcugaucgagcaguacgagcugagagaggagcacaucgacaagguguucaagcacaaggaccugcagcagcagcugguggacgccaagcugcagcaggcccaggagaugcugaaggaggccgaggagagacaccagagagagaaggacuuccugcugaaggaggccguggagagccagagaaugugcgagcugaugaagcagcaggagacccaccugaagcagcagcuggcccuguacaccgagaaguucgaggaguuccagaacacccugagcaagagcagcgagguguucaccaccuucaagcaggagauggagaagaugaccaagaagaucaagaagcuggagaaggagaccaccauguacagaagcagaugggagagcagcaacaaggcccugcuggagauggccgaggagaagaccgugagagacaaggagcuggagggccugcaggugaagauccagagacuggagaagcugugcagagcccugcagaccgagagaaacgaccugaacaagagagugcaggaccugagcgccggcggccagggcagccugaccgacagcggccccgagagaagacccgagggccccggcgcccaggcccccagcagccccagagugaccgaggcccccugcuaccccggcgcccccagcaccgaggccagcggccagaccggcccccaggagcccaccagcgccagagccuga

SEQ ID NO: 4215 - RNA, 1641 nt, Artificial Sequence
  derived and/or modified sequence opt5 from IL-14__Homo_sapiens__AAI03824
augaagaaccaggacaaaaagaauggcgccgcuaaacaaagcaaccccaaguccucuccugggcagccggaggccggacccgaaggcgcgcaggagagaccuagccaggcugcccccgccguggaagcugaggggccuggauccucucaagcuccccggaaaccugaaggcgcccaggcccgcaccgcgcagagcggggcccugagagaugucuccgaggagcucucucggcagcuggaagacauccuuagcacauacugcguugauaauaaccaaggaggcccgggcgaggacggggcucagggagaacccgccgagccugaggaugcugaaaagucccgcacguauguggccagaaauggcgagcccgaaccuacccccguggucaacggggagaaggaaccgagcaaaggagacccuaauacagaggagauucggcagucugaugaagugggcgaccgcgaucacagacggccccaggagaagaaaaaggcgaaagggcugggaaaggaaaucacccuccugaugcaaacacuuaacacccuguccacaccugaggaaaagcucgccgcucuguguaaaaaguacgccgagcugcucgaggaacaucgcaauagccagaaacagaugaagcugcuucagaaaaagcaaucucagcugguucaggagaaagaccaccucagaggcgaacauuccaaggcugugcuggcccggagcaaacuugagucucugugccgcgaacuccaaagacacaaccggucccugaaggaggagggcguccagcgcgccagagaagaggaagagaagcggaaagaggugaccagccauuuccagguuacgcugaaugauauucagcuccaaauggaacagcacaacgagagaaauuccaagcugcgccaggaaaacauggagcuugcugaacggcugaaaaagcucaucgagcaguaugagcugagagaggaacacauugacaagguguuuaaacauaaggaucuucaacagcagcuggucgacgcgaaacuccagcaagcccaggaaaugcugaaggaggcugaggaacgccaccagcgggagaaagacuuccugcucaaggaagccguggagucucaaagaaugugugaacugaugaagcagcaggagacccaucuuaaacagcaacuggcccucuacacagaaaaguuugaggaguuccagaauacccugagcaaauccagcgaaguguuuacaaccuucaagcaggagauggagaaaaugacgaagaagaucaagaaacuugaaaaagagacaaccauguaucgcucucggugggaauccagcaacaaggcucugcucgagauggccgaagagaaaacagucagagauaaggaacuggaggggcugcagguuaaaauccaacgccucgagaagcugugccgggcgcuucagaccgaaagaaacgaccugaauaagcgcgugcaggaucucucugcuggaggccaggggagccugaccgacuccggacccgagcggagacccgaaggcccuggggcccaagccccgucuagcccccgggugacagaggcuccuuguuaccccggagccccuuccacggaagcuagcggccagaccggcccccaggagccgacaucugcccgcgcguga

SEQ ID NO: 4216 - RNA, 1641 nt, Artificial Sequence
  derived and/or modified sequence opt6 from IL-14__Homo_sapiens__AAI03824
augaaaaaccaagacaaaaaaaauggcgcagcaaagcaaagcaacccuaaaaguagcccaggccaacccgaagcaggaccggaaggugcacaagaaagaccaagccaagccgcaccagcaguagaagccgaaggcccaggaagcucacaagcaccaaggaaacccgaaggagcgcaagcacggacagcccaaaguggugcacuaagagauguuucagaagaacuaucacgacaacuagaagacaucuuauccaccuauugcguagauaauaaccaaggaggcccaggagaagauggagcccaaggcgaaccagcagaaccggaagacgcggaaaaaucaagaacuuaugucgcacgaaauggagaacccgaacccacgccaguaguaaacggcgaaaaagaaccaagcaaaggggacccgaauacagaagaaauaagacaaagcgacgaaguaggagacagggaucacagaagaccucaagaaaaaaaaaaagccaaaggacugggaaaagaaauuacauugcuaaugcaaacacuaaauacguuaagcacaccagaagagaaacucgcagcauugugcaaaaaauaugccgaauuacuagaagaacacagaaacucacaaaaacaaaugaaauuauuacaaaaaaaacaaagccaauuaguccaagaaaaggaccauuuaagaggagaacacucaaaagcaguacuagcacgaaguaaacucgaaucacuuuguagggaauuacaaaggcacaauagaucacuaaaagaagaaggaguacaaagagcacgagaagaagaggagaaacgaaaagaaguaacgagucauuuccaaguuacauuaaaugauauccaauuacaaauggaacaacacaacgaaagaaauucaaaguuacgacaagaaaauauggaacuagcagaaagauuaaaaaaauuaauagaacaauaugaacuaagagaagaacauauugauaaaguauuuaaacauaaagacuuacaacaacaacuaguagacgccaaacuacaacaagcacaagaaauguugaaagaagccgaagaacgacaccaaagagaaaaagauuucuuauuaaaggaagcaguagaaagucagagaaugugugaauuaaugaaacaacaagaaacccacuuaaaacaacaacuugcauuauacacagaaaaauuugaagaauuccaaaacacauuaucaaagucaagugagguuuuuacaacauuuaaacaagaaauggaaaaaaugaccaaaaagauaaaaaaauuagaaaaagaaaccacaauguauagaagcagaugggaaucaucaaauaaagcacuacuagaaauggcagaagaaaagacaguaagagauaaagaauuagaagguuugcaagugaaaauacaaagacuagaaaaacuaugcagagcacuacaaacagaaaggaacgauuuaaauaaaagaguacaagacuuaucagcaggaggacaaggaagucuaacagacucaggaccagaaagacgaccugaaggaccuggcgcacaagcaccaucaagucccagaguaacagaggcaccaugcuaccccggagcacccaguacagaagcuagcggacagacgggaccacaagaaccaacgucagcaagagcguaa

SEQ ID NO: 4217 - protein, 162 aa, Artificial Sequence
  IL-15__Homo_sapiens__P40933
MRISKPHLRSISIQCYLCLLLNSHFLTEAGIHVFILGCFSAGLPKTEANWVNVISDLKKIEDLIQSMHIDATLYTESDVHPSCKVTAMKCFLLELQVISLESGDASIHDTVENLIILANNSLSSNGNVTESGCKECEELEEKNIKEFLQSFVHIVQMFINTS

SEQ ID NO: 4218 - RNA, 489 nt, Artificial Sequence
  IL-15__Homo_sapiens__AAA21551
augagaauuucgaaaccacauuugagaaguauuuccauccagugcuacuuguguuuacuucuaaacagucauuuucuaacugaagcuggcauucaugucuucauuuugggcuguuucagugcagggcuuccuaaaacagaagccaacugggugaauguaauaagugauuugaaaaaaauugaagaucuuauucaaucuaugcauauugaugcuacuuuauauacggaaagugauguucaccccaguugcaaaguaacagcaaugaagugcuuucucuuggaguuacaaguuauuucacuugaguccggagaugcaaguauucaugauacaguagaaaaucugaucauccuagcaaacaacaguuugucuucuaaugggaauguaacagaaucuggaugcaaagaaugugaggaacuggaggaaaaaaauauuaaagaauuuuugcagaguuuuguacauauuguccaaauguucaucaacacuucuuga

SEQ ID NO: 4219 - RNA, 489 nt, Artificial Sequence
  derived and/or modified sequence opt1 from IL-15__Homo_sapiens__AAA21551
augcgcaucagcaagccccaccuccgguccaucagcauccagugcuaccugugccugcugcucaacucccacuuccugaccgaggccggcauccacguguucauccuggggugcuucagcgccggccucccgaagaccgaggcgaacugggucaacgugaucuccgaccugaagaagaucgaggaccugauccagagcaugcacaucgacgccacgcucuacaccgaguccgacgugcaccccagcugcaaggucaccgccaugaagugcuuccugcuggagcuccaggugaucucccuggagagcggggacgccuccauccacgacaccguggagaaccugaucauccucgccaacaacagccuguccagcaacggcaacgucacggaguccgggugcaaggagugcgaggagcuggaggagaagaacaucaaggaguuccuccagagcuucgugcacaucgugcagauguucaucaacaccuccuga

SEQ ID NO: 4220 - RNA, 489 nt, Artificial Sequence
  derived and/or modified sequence opt2 from IL-15__Homo_sapiens__AAA21551
augcgcaucuccaagccccaccuccgcuccaucuccauccagugcuaccucugccuccuccucaacucccacuuccucaccgaggccggcauccacgucuucauccucggcugcuucuccgccggccuccccaagaccgaggccaacugggucaacgucaucuccgaccucaagaagaucgaggaccucauccaguccaugcacaucgacgccacccucuacaccgaguccgacguccaccccuccugcaaggucaccgccaugaagugcuuccuccucgagcuccaggucaucucccucgaguccggcgacgccuccauccacgacaccgucgagaaccucaucauccucgccaacaacucccucuccuccaacggcaacgucaccgaguccggcugcaaggagugcgaggagcucgaggagaagaacaucaaggaguuccuccaguccuucguccacaucguccagauguucaucaacaccuccuga

SEQ ID NO: 4221 - RNA, 489 nt, Artificial Sequence
  derived and/or modified sequence opt3 from IL-15__Homo_sapiens__AAA21551
augagaaucagcaagccccaccugagguccauuucuauacagugcuaccucugucuucuguugaacucacauuucuuaaccgaagccggcauccacguguuuauucuggggugcuucagugcuggacuaccuaaaacagaagcaaauugggucaacguuaucagcgaccucaagaaaauugaggaucugauccaauccaugcauauagacgccacucuuuauacggaaucugaugugcacccaucguguaagguaaccgcgaugaaaugcuuucuguuggagcuccaggugaucucacuggaaagcggugacgcuaguauucaugauacagucgagaaucugaucauucucgccaacaauuccuuaucuagcaacggcaaugugacugaguccggguguaaggaaugcgaggaacuggaggagaagaacaucaaagaguuccuucagucauuuguucacauagugcagauguucauuaauaccaguuga

SEQ ID NO: 4222 - RNA, 489 nt, Artificial Sequence
  derived and/or modified sequence opt4 from IL-15__Homo_sapiens__AAA21551
augagaaucagcaagccccaccugagaagcaucagcauccagugcuaccugugccugcugcugaacagccacuuccugaccgaggccggcauccacguguucauccugggcugcuucagcgccggccugcccaagaccgaggccaacugggugaacgugaucagcgaccugaagaagaucgaggaccugauccagagcaugcacaucgacgccacccuguacaccgagagcgacgugcaccccagcugcaaggugaccgccaugaagugcuuccugcuggagcugcaggugaucagccuggagagcggcgacgccagcauccacgacaccguggagaaccugaucauccuggccaacaacagccugagcagcaacggcaacgugaccgagagcggcugcaaggagugcgaggagcuggaggagaagaacaucaaggaguuccugcagagcuucgugcacaucgugcagauguucaucaacaccagcuga

SEQ ID NO: 4223 - RNA, 489 nt, Artificial Sequence
  derived and/or modified sequence opt5 from IL-15__Homo_sapiens__AAA21551
augagaaucagcaagccccaucugcgguccauuucuauccagugcuaccucugucugcuucugaacagccacuuccucaccgaagccggcauucacguguuuauccuggggugcuucuccgcuggacuuccuaaaacagaagccaauugggucaacguuauuucugaccugaagaaaaucgaggaucucauccaaagcaugcauauugacgcgacgcuguauaccgaauccgaugugcacccgucuuguaaggugacagcuaugaaaugcuuucugcucgagcugcaggucaucagccuugaauccggcgacgccagcauucaugauaccguggagaaucugaucauucucgccaacaauucucuguccagcaacgggaauguuacagagucuggauguaaggaaugcgaggaacuugaggagaagaacaucaaagaguuccugcaguccuuugugcacauuguccagauguucaucaauaccagcuga

SEQ ID NO: 4224 - RNA, 489 nt, Artificial Sequence
  derived and/or modified sequence opt6 from IL-15__Homo_sapiens__AAA21551
augagaauaucaaaaccacaccucagaucaauaucaauacaaugcuacuuaugccuacuacuaaacucacacuuccuaacagaagcaggaauacacguauucauacucggaugcuucagcgcaggacuaccaaaaacagaagcaaacuggguaaacguaauaucagaccuaaaaaaaauagaagaccuaauacaaucaaugcacauagacgccacacuauacacagaaucagacguacacccaucaugcaaaguaacagcaaugaaaugcuuccuacuagaacuacaaguaauaucacucgaaucaggagacgcaucaauacacgacacaguagaaaaccuaauaauacuagcaaacaacucacuaucaucaaacggaaacguaacagaaucaggaugcaaagaaugcgaagaauuagaagaaaaaaacauaaaagaauuccuacaaucauucguacacauaguacaaauguucauaaacacaucauaa

SEQ ID NO: 4225 - protein, 1332 aa, Artificial Sequence
  IL-16__Homo_sapiens__Q14005
MESHSRAGKSRKSAKFRSISRSLMLCNAKTSDDGSSPDEKYPDPFEISLAQGKEGIFHSSVQLADTSEAGPSSVPDLALASEAAQLQAAGNDRGKTCRRIFFMKESSTASSREKPGKLEAQSSNFLFPKACHQRARSNSTSVNPYCTREIDFPMTKKSAAPTDRQPYSLCSNRKSLSQQLDCPAGKAAGTSRPTRSLSTAQLVQPSGGLQASVISNIVLMKGQAKGLGFSIVGGKDSIYGPIGIYVKTIFAGGAAAADGRLQEGDEILELNGESMAGLTHQDALQKFKQAKKGLLTLTVRTRLTAPPSLCSHLSPPLCRSLSSSTCITKDSSSFALESPSAPISTAKPNYRIMVEVSLQKEAGVGLGIGLCSVPYFQCISGIFVHTLSPGSVAHLDGRLRCGDEIVEISDSPVHCLTLNEVYTILSHCDPGPVPIIVSRHPDPQVSEQQLKEAVAQAVENTKFGKERHQWSLEGVKRLESSWHGRPTLEKEREKNSAPPHRRAQKVMIRSSSDSSYMSGSPGGSPGSGSAEKPSSDVDISTHSPSLPLAREPVVLSIASSRLPQESPPLPESRDSHPPLRLKKSFEILVRKPMSSKPKPPPRKYFKSDSDPQKSLEERENSSCSSGHTPPTCGQEARELLPLLLPQEDTAGRSPSASAGCPGPGIGPQTKSSTEGEPGWRRASPVTQTSPIKHPLLKRQARMDYSFDTTAEDPWVRISDCIKNLFSPIMSENHGHMPLQPNASLNEEEGTQGHPDGTPPKLDTANGTPKVYKSADSSTVKKGPPVAPKPAWFRQSLKGLRNRASDPRGLPDPALSTQPAPASREHLGSHIRASSSSSSIRQRISSFETFGSSQLPDKGAQRLSLQPSSGEAAKPLGKHEEGRFSGLLGRGAAPTLVPQQPEQVLSSGSPAASEARDPGVSESPPPGRQPNQKTLPPGPDPLLRLLSTQAEESQGPVLKMPSQRARSFPLTRSQSCETKLLDEKTSKLYSISSQVSSAVMKSLLCLPSSISCAQTPCIPKEGASPTSSSNEDSAANGSAETSALDTGFSLNLSELREYTEGLTEAKEDDDGDHSSLQSGQSVISLLSSEELKKLIEEVKVLDEATLKQLDGIHVTILHKEEGAGLGFSLAGGADLENKVITVHRVFPNGLASQEGTIQKGNEVLSINGKSLKGTTHHDALAILRQAREPRQAVIVTRKLTPEAMPDLNSSTDSAASASAASDVSVESTAEATVCTVTLEKMSAGLGFSLEGGKGSLHGDKPLTINRIFKGAASEQSETVQPGDEILQLGGTAMQGLTRFEAWNIIKALPDGPVTIVIRRKSLQSKETTAAGDS

SEQ ID NO: 4226 - RNA, 3999 nt, Artificial Sequence
  IL-16__Homo_sapiens__CCDS42069.1
auggagucgcacagccgcgcuggaaagagcagaaaaucugcaaaauuucgguccaucuccaggucccugaugcucuguaaugcuaagaccagugaugauggcucuagcccugaugagaaauauccugaucccuuugagauuuccuuggcccagggcaaggagggaauuuuccacucaucugugcagcuggcagacacaucggaggcugggcccagcaguguuccugaucuagcacuggccucggaggcugcucaacuccaagcagcugggaaugaucgaggcaagaccuguaggaggauauucuucaugaaggaaucuuccacagcuuccucucgagaaaagccuggaaaacuagaagcacaaaguaguaacuuccuguuuccuaaagccugccaccaaagggcacgcagcaacucaaccaguguuaaucccuauugcacaagagaaauugauuuuccaaugaccaagaaaucugcagcgcccacggacaggcagccuuacucucucugcaguaacaggaagucccucucucaacaauuggacuguccagcaggaaaggcugcgggaacuucgagaccaacacggucccugagcacagcucagcucgugcagccaucugggggccuccaggcuucagucaucuccaacaucgugcugaugaagggccaggcuaagggucugggcuucagcaucguugggggaaaagacagcauuuauggccccauugggauuuacgucaaaaccauuuuugcagggggagcagcagcagccgauggaaggcuacaggaaggugaugaaauucuggagcucaauggugaaucaauggcuggacuaacacaucaggaugcuuugcagaaguucaagcaagccaaaaaggggcuccucacccucaccgugagaacccgccugacggcgccuccuucccugugcagccaccugucucccccacugugccgcucccugagcuccagcacuuguaucaccaaggacagcagcuccuucgccuuggaaagccccucggcucccaucagcaccgccaagcccaauuacagaaucaugguggagguuucucugcagaaagaggccggcgugggccugggcaucggccugugcagcguucccuacuuccaaugcaucucuggcauuuucguccacacgcugucaccaggauccguggcgcaccuggacggacgucuccgguguggggacgagauuguggaaaucagugauuccccugugcacugccugacgcucaaugaagucuacacgauccugagucacugugaucccgguccaguccccaucauuguuagccgacauccagacccacaggucucugaacagcaacucaaagaagcuguggcccaggcuguggaaaacaccaaguuuggaaaggagaggcaucaguggagucuggaaggugucaaaaggcuggaaagcaguuggcacgggcggcccaccuuggagaaggaacgagagaagaacucagcacccccgcaucgcagggcucagaaggucaugauccgcuccagcagugacagcagcuacaugucuggguccccagggggaaguccugggaguggcagugcugagaagccguccucugacguggacaucagcacacacagccccagcuugccucuggcacgggagccaguggugcuuucuauagcauccuccaggcugccccaggagagcccaccccucccagagagccgggacagccacccgccgcugagacugaagaaauccuuugagauuuuggugagaaagccuauguccuccaagcccaagccuccacccagaaaauacuuuaaaagugacagugacccucagaagagucuggaagagagagagaacuccucaugcucuucugggcacaccccacccaccuguggccaggaagcgagagagcugcugccacugcugcuaccacaggaagacacagcagggagaagcccuagugccucugccggcugcccaggaccugguaucggcccacagaccaaguccuccacagagggcgagccaggguggagaagagccagcccagugacccaaacauccccgauaaaacacccacugcuuaagaggcaggcucggauggacuauagcuuugauaccacagccgaagacccuuggguuaggauuucugacugcaucaaaaacuuauuuagccccaucaugagugagaaccauggccacaugccucuacagcccaaugccagccugaaugaagaagaagggacacagggccacccagaugggaccccaccaaagcuggacaccgccaauggcacucccaaaguuuacaagucagcagacagcagcacugugaagaaagguccuccuguggcucccaagccagccugguuucgccaaagcuugaaagguuugaggaaucgugcuucagacccaagagggcucccugauccugccuuguccacccagccagcaccugcuuccagggagcaccuaggaucacacauccgggccuccuccuccuccuccuccaucaggcagagaaucagcuccuuugaaaccuuuggcuccucucaacugccugacaaaggagcccagagacugagccuccagcccuccucuggggaggcagcaaaaccucuugggaagcaugaggaaggacgguuuucuggacucuuggggcgaggggcugcacccacucuugugccccagcagccugagcaaguacuguccucgggguccccugcagccuccgaggccagagacccaggugugucugaguccccucccccagggcggcagcccaaucagaaaacucuccccccuggcccggacccgcuccuaaggcugcugucaacacaggcugaggaaucucaaggcccagugcucaagaugccuagccagcgagcacggagcuucccccugaccaggucccaguccugugagacgaagcuacuugacgaaaagaccagcaaacucuauucuaucagcagccaagugucaucggcugucaugaaauccuugcugugccuuccaucuucuaucuccugugcccagacucccugcauccccaaggaaggggcaucuccaacaucaucauccaacgaagacucagcugcaaaugguucugcugaaacaucugccuuggacacaggguucucgcucaaccuuucagagcugagagaauauacagagggucucacggaagccaaggaagacgaugauggggaccacaguucccuucagucuggucaguccguuaucucccugcugagcucagaagaauuaaaaaaacucaucgaggaggugaagguucuggaugaagcaacauuaaagcaauuagacggcauccaugucaccaucuuacacaaggaggaaggugcuggucuuggguucagcuuggcaggaggagcagaucuagaaaacaaggugauuacgguucacagaguguuuccaaaugggcuggccucccaggaagggacuauucagaagggcaaugagguucuuuccaucaacggcaagucucucaaggggaccacgcaccaugaugccuuggccauccuccgccaagcucgagagcccaggcaagcugugauugucacaaggaagcugacuccagaggccaugcccgaccucaacuccuccacugacucugcagccucagccucugcagccagugauguuucuguagaaucuacagcagaggccacagucugcacggugacacuggagaagaugucggcagggcugggcuucagccuggaaggagggaagggcucccuacacggagacaagccucucaccauuaacaggauuuucaaaggagcagccucagaacaaagugagacaguccagccuggagaugaaaucuuacagcuggguggcacugccaugcagggccucacacgguuugaagccuggaacaucaucaaggcacugccugauggaccugucacgauugucaucaggagaaaaagccuccaguccaaggaaaccacagcugcuggagacuccuag

SEQ ID NO: 4227 - RNA, 3999 nt, Artificial Sequence
  derived and/or modified sequence opt1 from IL-16__Homo_sapiens__CCDS42069.1
auggagagccacucccgcgccggcaagagccggaaguccgccaaguuccgcagcaucucccggagccugaugcucugcaacgcgaagaccuccgacgacgggagcucccccgacgagaaguacccggaccccuucgagaucagccuggcccagggcaaggaggggaucuuccacuccagcgugcagcuggccgacaccuccgaggccggccccagcuccguccccgaccucgcccuggcgagcgaggccgcccagcugcaggccgcggggaacgaccgcggcaagacgugccggcgcaucuucuucaugaaggaguccagcaccgccuccagccgggagaagccgggcaagcucgaggcccagagcuccaacuuccuguuccccaaggccugccaccagcgcgcccggagcaacuccaccagcgugaaccccuacugcacccgcgagaucgacuuccccaugacgaagaaguccgcggccccgaccgaccggcagcccuacagccugugcuccaaccgcaagagccucucccagcagcuggacugccccgccgggaaggccgccggcaccagccggcccacccgcucccugagcacggcgcagcucgugcagccguccgggggccugcaggccagcgucaucuccaacaucgugcugaugaaggggcaggccaagggccucggcuucagcaucguggggggcaaggacuccaucuacgggcccaucggcaucuacgucaagaccaucuucgccggcggggccgcggccgccgacggccggcugcaggagggggacgagauccuggagcucaacggcgagagcauggccgggcugacccaccaggacgcccugcagaaguucaagcaggcgaagaagggccuccugacccugacggugcgcacccggcucaccgccccccccucccugugcagccaccugagcccgccccucugccgcucccugagcuccagcaccugcaucacgaaggacuccagcuccuucgcccuggagagccccuccgcccccaucagcaccgcgaagccgaacuaccggaucaugguggaggucucccuccagaaggaggccggcguggggcugggcaucgggcugugcagcgugcccuacuuccagugcaucuccggcaucuucguccacacccucagccccggguccguggcccaccuggacggccgccugcggugcggcgacgagaucguggagaucagcgacucccccguccacugccucacccugaacgagguguacacgauccugagccacugcgacccggggcccgugcccaucaucgucagccgccaccccgacccgcagguguccgagcagcagcucaaggaggccguggcccaggcggucgagaacaccaaguucggcaaggagcgccaccaguggagccuggagggggugaagcggcuggaguccagcuggcacggccgccccacccucgagaaggagcgggagaagaacuccgcccccccgcaccgccgggcccagaaggugaugauccgcagcuccagcgacuccagcuacauguccgggagccccggcggcucccccgggagcggcuccgccgagaagcccagcuccgacgucgacaucagcacccacuccccgagccugccccuggcccgggagcccgugguccucagcaucgcguccagccgccugccccaggaguccccgccccugcccgagagccgggacucccaccccccgcuccgccugaagaagagcuucgagauccuggugcggaagcccauguccagcaagcccaagcccccgccccgcaaguacuucaaguccgacagcgacccccagaagucccuggaggagcgggagaacagcuccugcagcuccgggcacacgcccccgaccugcggccaggaggcccgcgagcuccugccccugcuccugccccaggaggacaccgccggccggagccccuccgccagcgccgggugcccgggccccgggaucggcccccagaccaaguccagcacggagggggagccgggcuggcgccgggcgagccccgugacccagaccucccccaucaagcacccccugcucaagcgccaggcccggauggacuacagcuucgacaccacggccgaggacccguggguccgcaucuccgacugcaucaagaaccuguucagccccaucauguccgagaaccacggccacaugccccugcagcccaacgccagccucaacgaggaggaggggacccagggccacccggacgggaccccccccaagcuggacaccgcgaacggcacgcccaagguguacaaguccgccgacagcuccaccgugaagaaggggccgcccgucgcccccaagcccgccugguuccgccagagccugaagggccuccggaaccgcgccuccgacccgcggggccugcccgaccccgcgcugagcacccagcccgccccggccucccgcgagcaccucgggagccacauccgggccuccagcuccagcuccagcauccgccagcggaucagcuccuucgagaccuucggcagcucccagcugcccgacaagggggcccagcgccugagccuccagcccuccagcggcgaggcggccaagccccuggggaagcacgaggagggccgguucuccggccugcucgggcgcggcgccgccccgacccuggugccccagcagcccgagcaggugcugagcuccgggagccccgccgcguccgaggcccgggacccgggcgucagcgaguccccccccccggggcgccagcccaaccagaagacgcucccccccggcccggacccccugcugcggcuccugagcacccaggccgaggagucccagggccccgugcugaagaugcccagccagcgcgcccgguccuucccgcucacccgcagccaguccugcgagaccaagcugcuggacgagaagacgagcaagcucuacagcaucuccagccagguguccagcgcggucaugaagucccugcugugccuccccagcuccaucagcugcgcccagacccccugcauccccaaggagggggccuccccgaccagcuccagcaacgaggacuccgccgccaacggcagcgcggagaccuccgcccuggacacgggguucagccugaaccucuccgagcugcgggaguacaccgagggccugaccgaggccaaggaggacgacgacggcgaccacagcucccuccagagcgggcagagcgugaucucccugcugagcuccgaggagcucaagaagcugaucgaggaggugaagguccuggacgaggccacccucaagcagcuggacggcauccacgugacgauccugcacaaggaggagggggccggccucggguucagccuggcgggcggcgccgaccuggagaacaaggugaucaccguccaccgcguguuccccaacgggcucgccucccaggagggcaccauccagaaggggaacgaggugcugagcaucaacggcaagucccugaaggggaccacgcaccacgacgcccucgccauccugcggcaggcgcgcgagccccggcaggccgucaucgugacccgcaagcugacccccgaggccaugccggaccucaacagcuccaccgacagcgccgccuccgcgagcgccgccuccgacgugagcgucgaguccacggccgaggcgaccgugugcaccgugacccuggagaagaugagcgccggccugggcuucucccucgaggggggcaaggggagccugcacggcgacaagccccugacgaucaaccgcaucuucaagggggccgccagcgagcaguccgagaccguccagcccggcgacgagauccuccagcugggcgggaccgccaugcagggccugacccgguucgaggcguggaacaucaucaaggcccuccccgacgggccggugacgaucgugauccgccggaagagccugcaguccaaggagaccaccgccgccggcgacagcuga

SEQ ID NO: 4228 - RNA, 3999 nt, Artificial Sequence
  derived and/or modified sequence opt2 from IL-16__Homo_sapiens__CCDS42069.1
auggagucccacucccgcgccggcaagucccgcaaguccgccaaguuccgcuccaucucccgcucccucaugcucugcaacgccaagaccuccgacgacggcuccucccccgacgagaaguaccccgaccccuucgagaucucccucgcccagggcaaggagggcaucuuccacuccuccguccagcucgccgacaccuccgaggccggccccuccuccguccccgaccucgcccucgccuccgaggccgcccagcuccaggccgccggcaacgaccgcggcaagaccugccgccgcaucuucuucaugaaggaguccuccaccgccuccucccgcgagaagcccggcaagcucgaggcccaguccuccaacuuccucuuccccaaggccugccaccagcgcgcccgcuccaacuccaccuccgucaaccccuacugcacccgcgagaucgacuuccccaugaccaagaaguccgccgcccccaccgaccgccagcccuacucccucugcuccaaccgcaagucccucucccagcagcucgacugccccgccggcaaggccgccggcaccucccgccccacccgcucccucuccaccgcccagcucguccagcccuccggcggccuccaggccuccgucaucuccaacaucguccucaugaagggccaggccaagggccucggcuucuccaucgucggcggcaaggacuccaucuacggccccaucggcaucuacgucaagaccaucuucgccggcggcgccgccgccgccgacggccgccuccaggagggcgacgagauccucgagcucaacggcgaguccauggccggccucacccaccaggacgcccuccagaaguucaagcaggccaagaagggccuccucacccucaccguccgcacccgccucaccgccccccccucccucugcucccaccucucccccccccucugccgcucccucuccuccuccaccugcaucaccaaggacuccuccuccuucgcccucgagucccccuccgcccccaucuccaccgccaagcccaacuaccgcaucauggucgaggucucccuccagaaggaggccggcgucggccucggcaucggccucugcuccguccccuacuuccagugcaucuccggcaucuucguccacacccucucccccggcuccgucgcccaccucgacggccgccuccgcugcggcgacgagaucgucgagaucuccgacucccccguccacugccucacccucaacgaggucuacaccauccucucccacugcgaccccggccccguccccaucaucgucucccgccaccccgacccccaggucuccgagcagcagcucaaggaggccgucgcccaggccgucgagaacaccaaguucggcaaggagcgccaccaguggucccucgagggcgucaagcgccucgaguccuccuggcacggccgccccacccucgagaaggagcgcgagaagaacuccgcccccccccaccgccgcgcccagaaggucaugauccgcuccuccuccgacuccuccuacauguccggcucccccggcggcucccccggcuccggcuccgccgagaagcccuccuccgacgucgacaucuccacccacucccccucccucccccucgcccgcgagcccgucguccucuccaucgccuccucccgccucccccaggagucccccccccuccccgagucccgcgacucccaccccccccuccgccucaagaaguccuucgagauccucguccgcaagcccauguccuccaagcccaagccccccccccgcaaguacuucaaguccgacuccgacccccagaagucccucgaggagcgcgagaacuccuccugcuccuccggccacaccccccccaccugcggccaggaggcccgcgagcuccucccccuccuccucccccaggaggacaccgccggccgcucccccuccgccuccgccggcugccccggccccggcaucggcccccagaccaaguccuccaccgagggcgagcccggcuggcgccgcgccucccccgucacccagaccucccccaucaagcacccccuccucaagcgccaggcccgcauggacuacuccuucgacaccaccgccgaggaccccuggguccgcaucuccgacugcaucaagaaccucuucucccccaucauguccgagaaccacggccacaugccccuccagcccaacgccucccucaacgaggaggagggcacccagggccaccccgacggcaccccccccaagcucgacaccgccaacggcacccccaaggucuacaaguccgccgacuccuccaccgucaagaagggcccccccgucgcccccaagcccgccugguuccgccagucccucaagggccuccgcaaccgcgccuccgacccccgcggccuccccgaccccgcccucuccacccagcccgcccccgccucccgcgagcaccucggcucccacauccgcgccuccuccuccuccuccuccauccgccagcgcaucuccuccuucgagaccuucggcuccucccagcuccccgacaagggcgcccagcgccucucccuccagcccuccuccggcgaggccgccaagccccucggcaagcacgaggagggccgcuucuccggccuccucggccgcggcgccgcccccacccucgucccccagcagcccgagcagguccucuccuccggcucccccgccgccuccgaggcccgcgaccccggcgucuccgagucccccccccccggccgccagcccaaccagaagacccucccccccggccccgacccccuccuccgccuccucuccacccaggccgaggagucccagggccccguccucaagaugcccucccagcgcgcccgcuccuucccccucacccgcucccaguccugcgagaccaagcuccucgacgagaagaccuccaagcucuacuccaucuccucccaggucuccuccgccgucaugaagucccuccucugccuccccuccuccaucuccugcgcccagacccccugcauccccaaggagggcgccucccccaccuccuccuccaacgaggacuccgccgccaacggcuccgccgagaccuccgcccucgacaccggcuucucccucaaccucuccgagcuccgcgaguacaccgagggccucaccgaggccaaggaggacgacgacggcgaccacuccucccuccaguccggccaguccgucaucucccuccucuccuccgaggagcucaagaagcucaucgaggaggucaagguccucgacgaggccacccucaagcagcucgacggcauccacgucaccauccuccacaaggaggagggcgccggccucggcuucucccucgccggcggcgccgaccucgagaacaaggucaucaccguccaccgcgucuuccccaacggccucgccucccaggagggcaccauccagaagggcaacgagguccucuccaucaacggcaagucccucaagggcaccacccaccacgacgcccucgccauccuccgccaggcccgcgagccccgccaggccgucaucgucacccgcaagcucacccccgaggccaugcccgaccucaacuccuccaccgacuccgccgccuccgccuccgccgccuccgacgucuccgucgaguccaccgccgaggccaccgucugcaccgucacccucgagaagauguccgccggccucggcuucucccucgagggcggcaagggcucccuccacggcgacaagccccucaccaucaaccgcaucuucaagggcgccgccuccgagcaguccgagaccguccagcccggcgacgagauccuccagcucggcggcaccgccaugcagggccucacccgcuucgaggccuggaacaucaucaaggcccuccccgacggccccgucaccaucgucauccgccgcaagucccuccaguccaaggagaccaccgccgccggcgacuccuga

SEQ ID NO: 4229 - RNA, 3999 nt, Artificial Sequence
  derived and/or modified sequence opt3 from IL-16__Homo_sapiens__CCDS42069.1
auggagagccacuccagagccggcaagucuaggaaaucagcuaaguuccggaguaucagccgcucccugaugcucugcaacgcaaaaaccucugacgaugggucgucacccgacgaaaaguacccugauccauuugagauuagccuugcccagggaaaagaagguauauuccauaguuccgugcaacuggcggacacaucugaggcuggcccgagcuccguccccgauuuggccuuagcaucagaagccgcucagcugcaggcagccgggaaugaccgaggaaagacuugucguagaaucuuuuucaugaaggagaguagcacggcuucuuccagggagaaaccuggcaagcuagaagcccagucaagcaacuuucucuucccaaaagcgugccaccaacgggcacgcaguaauucuaccuccguuaaccccuauuguacaagagagauugauuuuccuaugacuaagaaaagcgccgcuccaaccgacaggcagcccuacucgcugugcucuaaucggaagucccuuucacagcagcuggauuguccugccgguaaggcagcugggacaagucgcccaacccgaagccuuuccacugcccaacucgugcagccgucuggaggccugcaggcgagcguaaucucaaacauugugcugaugaaaggccaggccaaggggcucggauucaguaucgucgguggcaaagacuccauauaugggcccaucggaauuuacgugaagacaaucuuugcaggcggugcugccgcugccgaugggagauuacaagaaggagacgagauucuggagcuuaauggcgaaagcauggcaggcuugacccaucaggaugcccugcagaaauucaagcaagcuaaaaaggggcuacucacgcugacuguuaggacccggcuuacagcgccuccaucucugugcucacacuugagucccccucucugucguagccuguccucuucgacuugcaucaccaaggacagcuccucauuugcauuagagaguccaucugcccccauaagcacagcuaaaccgaacuaucgcauuaugguggaagucucccugcagaaggaggccggagugggucucggcaucgggcuuuguucaguaccuuacuuccagugcauuagcggaaucuuuguucauacccugucucccggcuccguggcacacuuggacgguagacuaagguguggggaugaaaucgucgagauuagugacagcccagugcacugccugacgcucaaugagguguauacuauacugucucauugcgauccuggccccgucccaaucauuguuucccggcaccccgacccucaggugucagaacaacagcuuaaagaggccguagcucaggccguggaaaacacaaaguucggaaaagagcgacaucaguggagucuggaaggcgucaagcgcuuggagagcucguggcacgggagaccaacccucgagaaggaaagggagaaaaauuccgcaccgccccaccggcgcgcgcaaaaggugaugaucagaucuagcucagauaguuccuacaugucuggaagcccugguggcuccccagggucaggaagcgcugaaaaacccaguucugacguugauauauccacucauagcccuucgcugccauuagccagggagcccgugguccugucaauugcaucuagucgucuaccgcaggaauccccuccacuccccgagagccgggacucucacccuccccugcgacuuaagaaauccuucgagaucuuggugagaaagccaaugagcucaaagccuaaacccccaccgaggaaguacuuuaaaagugauagcgacccucagaagucucuggaggagcgcgaaaacuccucauguaguagcggccauacacccccaaccugcggucaggaggcccgggagcuccugccccuucuguugccucaagaagauacggcugggagauccccaucugccucggcaggcugucccggaccuggcaucgggccgcagaccaaaagcucaacagagggagaaccagguuggaggcgcgcuucccccguaacucagaccaguccuauuaagcacccacuccugaagcgacaggcccggauggacuauucuuucgacacaacugcggaggaucccuggguucguaucagcgacugcauuaaaaauuuauuuuccccuauaaugucagaaaaccauggccacaugccgcugcaacccaaugccucucuaaacgaggaggaagggacccagggacacccagauggcacaccucccaagcucgacaccgcuaacgguacuccaaaaguguacaagagcgcagauaguuccacggucaaaaaggggccucccguggccccaaaaccggcuugguucagacagagccugaagggccuuaggaaucgcgccucugacccucggggauugcccgauccagcacugucaacacaacccgcgccugccuccagagagcaucucggcagucacaucagggcuagcucgucuuccagcucaauucgacagcgcaucaguucuuuugaaaccuucggguccagccagcugccagacaagggagcccagcgguuaucacugcaacccaguagcggcgaggcagcuaaaccucuugguaagcaugaagaggggagauuuuccggauugcucggcaggggugccgcaccgacucuggucccacagcagcccgaacaggugcuaucuagcggcuccccugccgcuucagaagcgcgugaucccgggguuucugagaguccaccucccggacgccaaccaaaccagaaaacccugccuccgggccccgacccacuccugcggcuuuugucgacacaggccgaagagagccaggggccugugcugaagaugcccucccaaagagcaaggucuuucccauuaacccgaucacagagcugugaaacuaaacuccuggaugagaagacauccaaguuguauaguaucucuagccagguaucauccgcugucaugaaaagucuguugugccucccuagcucuauuuccugugcccaaacgcccugcauaccgaaggagggagccucaccaaccagcucgucuaaugaagacagugcugcaaacggcuccgccgagacuagcgcgcuggauacagguuuuucacuaaaucuguccgaacuccgggaguacaccgaggggcugacagaagcuaaagaggacgacgauggagaccacucuagccuucagaguggccaguccgugaucagcuugcugucuucagaagaguuaaagaaacucauugaagagguuaaggugcuggaugaggccacucuuaagcagcuggacgguauccacgucaccauucuacauaaagaagagggcgcagggcucggauucagucuggccggcggggcugauuuggaaaacaaggugaucacgguacaccgcguguuuccuaauggacuggcaucccaagagggcaccauacagaaagguaacgaaguuuuaagcaucaaugggaagucucucaaaggaacaacucaucacgacgcccuggcgauucuuagacaggcuagggagccccggcaggccgucaucgugacccgaaagcugacaccagaggcaaugcccgauuugaacucgucaacugacagcgccgcuuccgccagugcagcuucugaugugagcgucgaauccaccgccgaggcgacgguuuguacagugacccucgaaaagaugucagccggccuggguuucagucuagagggcgggaaaggaucucugcauggcgacaagccucuuacuauuaauagaaucuuuaaaggggcagcuagcgaacaauccgagacagugcagccgggagaugagauacuccagcugggcgguaccgccaugcagggguugacucgcuucgaggcuuggaacauuaucaaggcacugcccgacggaccaguaaccauugucaucaggcguaaaucauuacaaagcaaggaaacaacggccgccggcgauucuuga

SEQ ID NO: 4230 - RNA, 3999 nt, Artificial Sequence
  derived and/or modified sequence opt4 from IL-16__Homo_sapiens__CCDS42069.1
auggagagccacagcagagccggcaagagcagaaagagcgccaaguucagaagcaucagcagaagccugaugcugugcaacgccaagaccagcgacgacggcagcagccccgacgagaaguaccccgaccccuucgagaucagccuggcccagggcaaggagggcaucuuccacagcagcgugcagcuggccgacaccagcgaggccggccccagcagcgugcccgaccuggcccuggccagcgaggccgcccagcugcaggccgccggcaacgacagaggcaagaccugcagaagaaucuucuucaugaaggagagcagcaccgccagcagcagagagaagcccggcaagcuggaggcccagagcagcaacuuccuguuccccaaggccugccaccagagagccagaagcaacagcaccagcgugaaccccuacugcaccagagagaucgacuuccccaugaccaagaagagcgccgcccccaccgacagacagcccuacagccugugcagcaacagaaagagccugagccagcagcuggacugccccgccggcaaggccgccggcaccagcagacccaccagaagccugagcaccgcccagcuggugcagcccagcggcggccugcaggccagcgugaucagcaacaucgugcugaugaagggccaggccaagggccugggcuucagcaucgugggcggcaaggacagcaucuacggccccaucggcaucuacgugaagaccaucuucgccggcggcgccgccgccgccgacggcagacugcaggagggcgacgagauccuggagcugaacggcgagagcauggccggccugacccaccaggacgcccugcagaaguucaagcaggccaagaagggccugcugacccugaccgugagaaccagacugaccgccccccccagccugugcagccaccugagccccccccugugcagaagccugagcagcagcaccugcaucaccaaggacagcagcagcuucgcccuggagagccccagcgcccccaucagcaccgccaagcccaacuacagaaucaugguggaggugagccugcagaaggaggccggcgugggccugggcaucggccugugcagcgugcccuacuuccagugcaucagcggcaucuucgugcacacccugagccccggcagcguggcccaccuggacggcagacugagaugcggcgacgagaucguggagaucagcgacagccccgugcacugccugacccugaacgagguguacaccauccugagccacugcgaccccggccccgugcccaucaucgugagcagacaccccgacccccaggugagcgagcagcagcugaaggaggccguggcccaggccguggagaacaccaaguucggcaaggagagacaccaguggagccuggagggcgugaagagacuggagagcagcuggcacggcagacccacccuggagaaggagagagagaagaacagcgcccccccccacagaagagcccagaaggugaugaucagaagcagcagcgacagcagcuacaugagcggcagccccggcggcagccccggcagcggcagcgccgagaagcccagcagcgacguggacaucagcacccacagccccagccugccccuggccagagagcccguggugcugagcaucgccagcagcagacugccccaggagagccccccccugcccgagagcagagacagccaccccccccugagacugaagaagagcuucgagauccuggugagaaagcccaugagcagcaagcccaagcccccccccagaaaguacuucaagagcgacagcgacccccagaagagccuggaggagagagagaacagcagcugcagcagcggccacaccccccccaccugcggccaggaggccagagagcugcugccccugcugcugccccaggaggacaccgccggcagaagccccagcgccagcgccggcugccccggccccggcaucggcccccagaccaagagcagcaccgagggcgagcccggcuggagaagagccagccccgugacccagaccagccccaucaagcacccccugcugaagagacaggccagaauggacuacagcuucgacaccaccgccgaggaccccugggugagaaucagcgacugcaucaagaaccuguucagccccaucaugagcgagaaccacggccacaugccccugcagcccaacgccagccugaacgaggaggagggcacccagggccaccccgacggcaccccccccaagcuggacaccgccaacggcacccccaagguguacaagagcgccgacagcagcaccgugaagaagggcccccccguggcccccaagcccgccugguucagacagagccugaagggccugagaaacagagccagcgaccccagaggccugcccgaccccgcccugagcacccagcccgcccccgccagcagagagcaccugggcagccacaucagagccagcagcagcagcagcagcaucagacagagaaucagcagcuucgagaccuucggcagcagccagcugcccgacaagggcgcccagagacugagccugcagcccagcagcggcgaggccgccaagccccugggcaagcacgaggagggcagauucagcggccugcugggcagaggcgccgcccccacccuggugccccagcagcccgagcaggugcugagcagcggcagccccgccgccagcgaggccagagaccccggcgugagcgagagccccccccccggcagacagcccaaccagaagacccugccccccggccccgacccccugcugagacugcugagcacccaggccgaggagagccagggccccgugcugaagaugcccagccagagagccagaagcuucccccugaccagaagccagagcugcgagaccaagcugcuggacgagaagaccagcaagcuguacagcaucagcagccaggugagcagcgccgugaugaagagccugcugugccugcccagcagcaucagcugcgcccagacccccugcauccccaaggagggcgccagccccaccagcagcagcaacgaggacagcgccgccaacggcagcgccgagaccagcgcccuggacaccggcuucagccugaaccugagcgagcugagagaguacaccgagggccugaccgaggccaaggaggacgacgacggcgaccacagcagccugcagagcggccagagcgugaucagccugcugagcagcgaggagcugaagaagcugaucgaggaggugaaggugcuggacgaggccacccugaagcagcuggacggcauccacgugaccauccugcacaaggaggagggcgccggccugggcuucagccuggccggcggcgccgaccuggagaacaaggugaucaccgugcacagaguguuccccaacggccuggccagccaggagggcaccauccagaagggcaacgaggugcugagcaucaacggcaagagccugaagggcaccacccaccacgacgcccuggccauccugagacaggccagagagcccagacaggccgugaucgugaccagaaagcugacccccgaggccaugcccgaccugaacagcagcaccgacagcgccgccagcgccagcgccgccagcgacgugagcguggagagcaccgccgaggccaccgugugcaccgugacccuggagaagaugagcgccggccugggcuucagccuggagggcggcaagggcagccugcacggcgacaagccccugaccaucaacagaaucuucaagggcgccgccagcgagcagagcgagaccgugcagcccggcgacgagauccugcagcugggcggcaccgccaugcagggccugaccagauucgaggccuggaacaucaucaaggcccugcccgacggccccgugaccaucgugaucagaagaaagagccugcagagcaaggagaccaccgccgccggcgacagcuga

SEQ ID NO: 4231 - RNA, 3999 nt, Artificial Sequence
  derived and/or modified sequence opt5 from IL-16__Homo_sapiens__CCDS42069.1
auggagagccacuccagagccggcaagucucggaaaagcgcuaaguuccgcuccaucucuagaagccugaugcucugcaacgccaaaaccuccgacgaugggucuagccccgacgaaaaguacccugauccguuugagauuucccuggcgcagggaaaagaaggcaucuuccauagcucugugcaacuugcugacacauccgaggccgggcccagcucugucccugaucuggcccucgcuuccgaagccgcucagcugcaggccgcgggaaaugaccggggcaagacgugucgcagaaucuuuuucaugaaggagagcucuaccgccuccagccgggagaaacccgggaaacuugaagcucaguccucuaacuuucuguucccuaaggccugccaccaacgcgcuagaagcaauuccacaagcguuaaccccuauuguacccgggagauugauuuuccuaugacaaagaaaucugccgcgccgaccgaccgccagcccuacucccucugcagcaauagaaagucucugagccagcagcuggauuguccugccggaaaggcugccggcacaucccggcccacccgcucucucagcacggcucaacuggugcagccuuccggcgggcuucaggccagcgugauuucuaacaucguccugaugaaaggacaggccaagggccucggguucuccaucgugggaggcaaagacagcauuuaugggcccaucggaauuuacguuaagaccaucuuugcuggcggcgcggccgcugccgaugggagacugcaagaaggagacgagauucuugagcugaauggcgaaucuauggccgggcucacacaucaggaugcucugcagaaauucaagcaagccaaaaagggacugcucacccugacagugcggacccgccuuacggcgccgccuucccugugcagccaccucuccccuccccuguguagaucucuuagcuccucuacaugcaucaccaaggacagcuccagcuuugcucuggagucucccuccgcccccauuagcacagccaaaccuaacuaucggaucauggucgaagugucucuccagaaggaggcuggcguugggcugggaaucggccuguguuccgugccguacuuccagugcauuagcggcaucuuuguccauacccucucucccgggagcguggcccaccuggacggaagacuucgcuguggcgaugaaauuguggagaucuccgacagcccuguccacugccugacccucaaugagguuuauacaauucugucucauugcgaucccgggccugugcccaucaucgugucccggcacccggacccucaggucagcgaacaacagcuuaaagaggcuguggcccaggcgguugaaaacacgaaguucggaaaagagagacaucaguggucccuggaaggcgugaagcgccucgagucuagcuggcacgggcggcccacccuggagaaggaaagagagaaaaauuccgccccuccccaccgccgggcucaaaaggucaugauuagaucuagcuccgauucuagcuacauguccggcagcccuggaggcucucccggguccggaagcgccgaaaaaccgucuuccgacguggauaucagcacacauucuccuucccugccccucgcucgcgagcccguugugcugagcauugccuccagccggcuuccucaggaaucuccgccccugccugagagcagagacucccaucccccucuccgccugaagaaaucuuucgagauccugguccggaagcccaugagcuccaagccuaaacccccgccuagaaaguacuuuaaaucugauagcgacccccagaagucccuugaggagcgggaaaacucuagcuguuccagcggccacaccccucccacaugcgggcaggaggcgcgcgagcuccugccgcugcuccugccucaagaagauaccgccggaagaucucccuccgcuagcgccggcuguccugggcccggcauuggaccccagacgaaaucuuccacagagggcgaaccuggguggcggagagcuagcccggugacccagaccucccccaucaagcacccucuucugaagcgccaggcccggauggacuauucuuucgacacaaccgccgaggaucccugggucagaaucagcgacugcauuaaaaaucucuuuuccccuaucaugagcgaaaaccauggacacaugccccugcaaccuaaugcuucucugaacgaggaggaaggcacacaggggcacccggauggaacgcccccuaaacuugacaccgcgaacggcacacccaagguguacaaguccgccgauagcucuaccguuaaaaaggggccucccguggcuccgaaaccugccugguuccgccagagccucaagggccugagaaaucgggccuccgacccccgcggacugcccgauccugcucucucuacacaacccgccccugcgagcagagagcaucugggcucccacauucgggcuucuagcuccagcuccuccauccgccagagaauuagcuccuuugaaaccuucgggucuagccagcuuccggacaagggagcccagcggcugucccuccaacccucuagcggcgaggccgcuaaaccucuggggaagcaugaagagggacgcuuuuccggccugcuugggagaggcgccgcgcccacgcucgucccucagcagcccgaacaggugcugagcucuggauccccggcugccagcgaagcccgggauccuggcguuucugagucucccccucccgggcgccaaccuaaccagaaaacccugcccccgggaccugacccccuccugagacuucugagcacacaggcugaagagucucagggccccgugcucaagaugccuagccaacgggccagauccuucccgcugacccgcucucagagcugugaaacaaaacugcuugaugagaagaccuccaagcucuauagcaucuccucucaggucagcuccgcugugaugaaaucucugcugugccuccccagcuccauuucuugugcccaaacgccuugcauccccaaggagggggcgagcccuacauccagcucuaaugaagacuccgccgcuaacggaagcgccgagaccucugcucuggauacaggcuuuucccuuaaucugagcgaacuccgggaguacaccgagggccugaccgaagccaaagaggacgacgauggggaccacucuucccugcagagcggacaguccgugaucagccuucugucuagcgaggaacucaagaaacugauugaagagguuaagguccucgaugaggccacacugaagcagcuugacggcauccacgugacgauucugcauaaagaagagggggcuggacucggcuucucccuggcugggggagccgaucuggaaaacaaggugaucaccguccacagaguguuucccaauggccuugcuucucaagagggcacaauucagaaagggaacgaaguucugagcaucaauggaaagucccucaaaggcaccacacaucacgacgcccuggccauccuccgccaggcucgggagccuagacaggccgugauugucacccgcaagcugacgccggaggcgaugcccgaucuuaacucuagcacagacuccgcugccucugccagcgcugccuccgaugugagcguugaaucuaccgcggaggcuaccguguguacagucacccuggaaaagauguccgccgggcucggauucagccuggagggcgggaaaggaucucugcauggcgacaagccucuuacaaucaaucggauuuuuaaaggcgccgcuuccgaacaaagcgagacggugcagcccggggaugagauccugcagcucggaggcaccgccaugcaggggcugacaagauucgaagcguggaacauuaucaaggcccucccugacggacccguuaccaucgugauucgccggaaaucccugcaaucuaaggagacaaccgcggccggcgauagcuga

SEQ ID NO: 4232 - RNA, 3999 nt, Artificial Sequence
  derived and/or modified sequence opt6 from IL-16__Homo_sapiens__CCDS42069.1
auggaaucacauucaagagcggguaaaucucgaaaaucugcgaaauuccgcuccauuucaagaagucuaauguuaugcaacgcgaaaacaucggaugacggcagcucgccagaugaaaaauauccagaucccuucgaaauuucguuagcccaaggaaaggaaggaaucuuucauagcucaguucaacucgcugauacuucugaagccggaccuagcucaguaccggaccucgcucucgcuagcgaagcugcacaacugcaagccgcaggcaaugaucgaggaaaaacuuguaggagaaucuuuuuuaugaaggagagcaguacugccucaucuagagaaaaaccuggaaaauuagaagcacaaucgucaaauuuuuuguucccuaaagcaugucaccagcgagcucgaucaaauucuacaucagucaacccauacuguacacgagaaauagauuuuccgaugacuaaaaaaucggcagcuccaacugaucgacaaccuuauucacuaugcucaaauagaaaaucucugagucaacaacuugauuguccagccggaaaagccgccggaaccucaaggccgacccgaagccuaucuacugcacaauuaguacaaccaucaggggguuuacaagccucgguaauuucaaauauaguguuaaugaaaggacaagcaaagggguuaggcuucagcauugucgguggaaaggauaguauauauggcccgauagggauauacguaaaaacaauuuuugcugggggugccgccgccgcugauggaagacuccaagaaggagacgagauacuagaacuaaacggcgagagcauggccggauugacccaccaagacgcucuacaaaaauuuaaacaagcuaaaaaagggcucuuaacauuaacgguaaggacaagacuaacagcaccgccuucgcuaugcucacaccuuaguccucccuuauguagaucucucuccaguucaacauguaucacaaaagauaguucaucuuuugcacuagaauccccuagugcucccaucucaacugccaaaccaaauuauagaauuaugguagaaguaagcuuacaaaaagaggcaggggugggacuaggaauaggauuaugcagcguccccuacuuccaaugcauauccggaaucuucguccauacacuaucuccuggcucaguggcacaccucgauggaagacuuagauguggugaugaaauuguagaaauauccgauaguccuguacacugucuaacuuuaaaugaaguuuacacuauacuuucucacugugauccaggaccagugccuaucauaguaucucgacacccagauccacaaguaucagaacaacaauugaaagaagcaguagcacaagcaguggaaaauacuaaauuuggaaaagaaagacaccaguggucauuagaaggcgucaaacgcuuggaaucuagcuggcauggcagaccaacauuagagaaagagagagaaaagaacuccgcaccuccccauagaagagcacagaaaguaaugauccguagcagcagcgacaguucauacaugucagguaguccaggagguaguccaggaaguggauccgcagaaaaaccaucaucagaugucgacauaaguacccauaguccaucacuuccccuagcaagggaaccuguuguauuaucaauagcauccagccgauuaccccaagaaucaccaccacuuccagaaucuagagauucacacccccccuuacgcuuaaaaaaaucguuugaaauuuuaguacgcaaaccaaugucuucuaaaccaaaaccaccaccuagaaaauauuuuaagucagauucagacccacaaaaaucuuuagaagaacgcgaaaauaguucauguucauccggccacacaccacccacguguggacaagaagcuagagaacuauuaccacuucuucuaccccaagaagauacagcagguagaucaccaucugcaucagcgggcuguccaggcccgggaauugguccucaaaccaaaucaaguacagaaggagaaccagguuggagaagagcaaguccagucacacaaacaagcccuauaaaacauccuuuacuaaagcgacaggcgcgaauggacuauuccuuugauacuacagcugaagacccauggguccgaauaucugacugcauaaagaauuuguuuaguccaauaaugucagaaaaccauggacauaugccguuacaaccaaacgcaucauuaaacgaagaagaaggaacucaaggucauccagacgguacuccacccaaauuagauacagcaaauggaacuccaaaaguauauaaaucagcagauucaaguaccguaaaaaaggguccaccaguagcacccaaaccugcaugguucaggcaaaguuugaaaggccuccgaaaccgagccagcgacccuagaggacugccagauccugcucuaucgacucaaccagcuccagcauccagggaacacuuagguucacacauucgagcuucuaguaguuccucauccauuaggcaacgaauaucuaguuucgaaacauuuggaaguucccaacuaccagacaaaggugcucaacgcuugucccuacaacccuccucaggcgaagcagcaaaaccauuaggcaaacacgaagaagguagauucaguggucuacuagggagaggagcagcacccacacucguaccacaacaaccagaacaaguuuuauccagugggucacccgcagcaucagaagcacgagaucccggcguuagugagucuccaccuccaggcagacagccuaaucaaaaaacacuaccuccugguccugauccacuacuaagauuauuaucaacccaagcugaagaaucucaaggcccgguuuugaaaaugccuucgcagagggcaaggucauuuccucuuacccgaucucaaagcugcgagacaaaacuacuagaugaaaaaaccuccaaauuauauuccauaucaucacagguaucuagugcaguuaugaaaucuuuacucugucuaccgaguucaauuucaugcgcucaaacaccauguauccccaaagaaggcgcaucaccgacaucauccaguaaugaagauucugcugcaaacggauccgcagaaacaucugcauuagacaccggcuuuucccuaaauuuaagugaacuaagagaauacacagagggacuaacagaagcaaaggaagacgacgauggugaucauucaucccuacaauccgggcaguccguaauaagucuauuaucaucugaagaauuaaaaaagcuaauugaagaaguaaaaguauuagaugaagcuacacuuaaacaauuagacggaauccacguuaccauuuugcauaaagaagagggugcaggacuagguuucagucuagcagguggcgcagauuuagaaaauaagguuauaaccguacauagagucuucccaaacggcuuagccucucaagaaggaacaauccaaaaaggaaaugaaguucuauccaucaacggaaaaagccuaaaaggaacaacacaccaugacgcacuugccauacuaagacaagcaagagaaccaagacaagcaguaauaguaacgcguaaauuaacuccugaagcaaugcccgaucucaauucgaguacugacucagcggcaagcgccucagccgcaagugaugucucaguagaaucaacagccgaagcgacaguuugcacaguaacacucgaaaaaaugagugcaggacugggauuuucauuagaaggaggcaaggguagccuacacggagauaaaccacuaacaauaaauagaauuuuuaaaggagcugcaucagaacaaagugaaaccguacaaccgggugacgaaauucuacaauuaggugggacagccaugcaaggauuaacuagguucgaagcauggaacauaauuaaagcucucccggacggaccagucacuauaguaauaagaagaaaaucacuccaaucgaaagaaacaacugcggcgggggacuccuga

SEQ ID NO: 4233 - protein, 155 aa, Artificial Sequence
  IL-17A__Homo_sapiens__Q16552
MTPGKTSLVSLLLLLSLEAIVKAGITIPRNPGCPNSEDKNFPRTVMVNLNIHNRNTNTNPKRSSDYYNRSTSPWNLHRNEDPERYPSVIWEAKCRHLGCINADGNVDYHMNSVPIQQEILVLRREPPHCPNSFRLEKILVSVGCTCVTPIVHHVA

SEQ ID NO: 4234 - RNA, 468 nt, Artificial Sequence
  IL-17A__Homo_sapiens__AAC50341
augacuccugggaagaccucauuggugucacugcuacugcugcugagccuggaggccauagugaaggcaggaaucacaaucccacgaaauccaggaugcccaaauucugaggacaagaacuucccccggacugugauggucaaccugaacauccauaaccggaauaccaauaccaaucccaaaagguccucagauuacuacaaccgauccaccucaccuuggaaucuccaccgcaaugaggacccugagagauaucccucugugaucugggaggcaaagugccgccacuugggcugcaucaacgcugaugggaacguggacuaccacaugaacucuguccccauccagcaagagauccugguccugcgcagggagccuccacacugccccaacuccuuccggcuggagaagauacugguguccgugggcugcaccugugucaccccgauuguccaccauguggccuaa

SEQ ID NO: 4235 - RNA, 468 nt, Artificial Sequence
  derived and/or modified sequence opt1 from IL-17A__Homo_sapiens__AAC50341
augacccccggcaagaccagccuggugucccuccugcugcuccugagccuggaggccaucgucaaggccgggaucaccaucccgcgcaaccccggcugccccaacuccgaggacaagaacuucccccggaccgugauggugaaccucaacauccacaaccgcaacaccaacaccaacccgaagcggagcuccgacuacuacaaccgcagcacgucccccuggaaccugcaccggaacgaggaccccgagcgcuaccccagcgucaucugggaggcgaagugccggcaccuggggugcaucaacgccgacggcaacguggacuaccacaugaacuccgugccgauccagcaggagauccucguccugcgccgggagccgccccacugccccaacagcuuccgccuggagaagauccucguguccguggggugcacgugcgucacccccaucgugcaccacguggccuga

SEQ ID NO: 4236 - RNA, 468 nt, Artificial Sequence
  derived and/or modified sequence opt2 from IL-17A__Homo_sapiens__AAC50341
augacccccggcaagaccucccucgucucccuccuccuccuccucucccucgaggccaucgucaaggccggcaucaccaucccccgcaaccccggcugccccaacuccgaggacaagaacuucccccgcaccgucauggucaaccucaacauccacaaccgcaacaccaacaccaaccccaagcgcuccuccgacuacuacaaccgcuccaccucccccuggaaccuccaccgcaacgaggaccccgagcgcuaccccuccgucaucugggaggccaagugccgccaccucggcugcaucaacgccgacggcaacgucgacuaccacaugaacuccguccccauccagcaggagauccucguccuccgccgcgagcccccccacugccccaacuccuuccgccucgagaagauccucgucuccgucggcugcaccugcgucacccccaucguccaccacgucgccuga

SEQ ID NO: 4237 - RNA, 468 nt, Artificial Sequence
  derived and/or modified sequence opt3 from IL-17A__Homo_sapiens__AAC50341
augacccccggcaagacaagccuggugucccuccuucuguuguuaucucuggaggccaucgucaaagcugggauuacuauaccuagaaacccaggaugccccaauucagaagacaagaacuucccgaggacgguuauggugaaucuaaacauccacaaucggaacaccaauacaaacccuaaacgcaguagcgauuacuauaaucgauccacuucuccauggaaccuccaucguaaugaggaccccgaaagauacccuucgguaauuugggaggcaaaguguaggcaccuggguugcaucaacgccgauggcaauguggacuaucauaugaacucagucccaauucagcaagaaauccuugugcugcggcgcgagcccccucacuguccaaauagcuuuagauuggagaaaauacucguuaguguggggugcaccugugucacaccgaucgugcaucacguagcguga

SEQ ID NO: 4238 - RNA, 468 nt, Artificial Sequence
  derived and/or modified sequence opt4 from IL-17A__Homo_sapiens__AAC50341
augacccccggcaagaccagccuggugagccugcugcugcugcugagccuggaggccaucgugaaggccggcaucaccauccccagaaaccccggcugccccaacagcgaggacaagaacuuccccagaaccgugauggugaaccugaacauccacaacagaaacaccaacaccaaccccaagagaagcagcgacuacuacaacagaagcaccagccccuggaaccugcacagaaacgaggaccccgagagauaccccagcgugaucugggaggccaagugcagacaccugggcugcaucaacgccgacggcaacguggacuaccacaugaacagcgugcccauccagcaggagauccuggugcugagaagagagcccccccacugccccaacagcuucagacuggagaagauccuggugagcgugggcugcaccugcgugacccccaucgugcaccacguggccuga

SEQ ID NO: 4239 - RNA, 468 nt, Artificial Sequence
  derived and/or modified sequence opt5 from IL-17A__Homo_sapiens__AAC50341
augacccccggcaagacaagccuggugucccuccugcuucugcucucucuggaggccaucgucaaagcugggauuacgaucccuagaaacccgggaugccccaauagcgaagacaagaacuucccucggaccguuauggugaaucuuaacauucacaaucgcaacacaaauaccaaccccaaaagauccucugauuacuauaaucggagcacauccccuuggaaccugcaucgcaaugaggaccccgaaagauacccuucugugaucugggaggccaagugucggcaccucggcugcauuaacgcggaugggaaugucgacuaucauaugaacagcgugccgauccagcaagaaauccugguucugcgcagagagcccccucacugucccaauuccuuucggcucgagaaaauucuggugagcgucggaugcaccugugugacaccuaucguucaucacguggcuuga

SEQ ID NO: 4240 - RNA, 468 nt, Artificial Sequence
  derived and/or modified sequence opt6 from IL-17A__Homo_sapiens__AAC50341
augacaccaggaaaaacaucacuaguaucccuauuacuacuacuaucacuagaagcaauaguaaaagcaggaauaacaauaccaagaaauccaggaugcccaaacucagaagacaaaaacuucccaagaacaguaaugguaaaccuaaacauacacaacagaaacacaaacacaaacccaaaaagaucauccgacuauuacaacagaucaacauccccauggaaccuacacagaaacgaagacccagaaagauacccaucaguaauaugggaagcaaaaugcagacaccuaggaugcauaaacgcagacggaaacguagacuaccacaugaacuccguaccaauacaacaagaaauacuaguauuaagacgagaaccaccacacugcccaaacucauucagacuagaaaaaauacuaguaucaguaggaugcacaugcguaacaccaauaguacaccacguagcauaa

SEQ ID NO: 4241 - protein, 502 aa, Artificial Sequence
  IL-17B__Homo_sapiens__Q9NRM6
MSLVLLSLAALCRSAVPREPTVQCGSETGPSPEWMLQHDLIPGDLRDLRVEPVTTSVATGDYSILMNVSWVLRADASIRLLKATKICVTGKSNFQSYSCVRCNYTEAFQTQTRPSGGKWTFSYIGFPVELNTVYFIGAHNIPNANMNEDGPSMSVNFTSPGCLDHIMKYKKKCVKAGSLWDPNITACKKNEETVEVNFTTTPLGNRYMALIQHSTIIGFSQVFEPHQKKQTRASVVIPVTGDSEGATVQLTPYFPTCGSDCIRHKGTVVLCPQTGVPFPLDNNKSKPGGWLPLLLLSLLVATWVLVAGIYLMWRHERIKKTSFSTTTLLPPIKVLVVYPSEICFHHTICYFTEFLQNHCRSEVILEKWQKKKIAEMGPVQWLATQKKAADKVVFLLSNDVNSVCDGTCGKSEGSPSENSQDLFPLAFNLFCSDLRSQIHLHKYVVVYFREIDTKDDYNALSVCPKYHLMKDATAFCAELLHVKQQVSAGKRSQACHDGCCSL

SEQ ID NO: 4242 - RNA, 1509 nt, Artificial Sequence
  IL-17B__Homo_sapiens__AAH00980
augucgcucgugcugcuaagccuggccgcgcugugcaggagcgccguaccccgagagccgaccguucaauguggcucugaaacugggccaucuccagaguggaugcuacaacaugaucuaaucccgggagacuugagggaccuccgaguagaaccuguuacaacuaguguugcaacaggggacuauucaauuuugaugaauguaagcuggguacuccgggcagaugccagcauccgcuuguugaaggccaccaagauuugugugacgggcaaaagcaacuuccaguccuacagcugugugaggugcaauuacacagaggccuuccagacucagaccagacccucuggugguaaauggacauuuuccuacaucggcuucccuguagagcugaacacagucuauuucauuggggcccauaauauuccuaaugcaaauaugaaugaagauggcccuuccaugucugugaauuucaccucaccaggcugccuagaccacauaaugaaauauaaaaaaaagugugucaaggccggaagccugugggauccgaacaucacugcuuguaagaagaaugaggagacaguagaagugaacuucacaaccacuccccugggaaacagauacauggcucuuauccaacacagcacuaucaucggguuuucucagguguuugagccacaccagaagaaacaaacgcgagcuucaguggugauuccagugacuggggauagugaaggugcuacggugcagcugacuccauauuuuccuacuuguggcagcgacugcauccgacauaaaggaacaguugugcucugcccacaaacaggcgucccuuucccucuggauaacaacaaaagcaagccgggaggcuggcugccucuccuccugcugucucugcugguggccacaugggugcugguggcagggaucuaucuaauguggaggcacgaaaggaucaagaagacuuccuuuucuaccaccacacuacugccccccauuaagguucuugugguuuacccaucugaaauauguuuccaucacacaauuuguuacuucacugaauuucuucaaaaccauugcagaagugaggucauccuugaaaaguggcagaaaaagaaaauagcagagauggguccagugcaguggcuugccacucaaaagaaggcagcagacaaagucgucuuccuucuuuccaaugacgucaacagugugugcgaugguaccuguggcaagagcgagggcagucccagugagaacucucaagaccucuucccccuugccuuuaaccuuuucugcagugaucuaagaagccagauucaucugcacaaauacgugguggucuacuuuagagagauugauacaaaagacgauuacaaugcucucagugucugccccaaguaccaccucaugaaggaugccacugcuuucugugcagaacuucuccaugucaagcagcaggugucagcaggaaaaagaucacaagccugccacgauggcugcugcuccuuguag

SEQ ID NO: 4243 - RNA, 1509 nt, Artificial Sequence
  derived and/or modified sequence opt1 from IL-17B__Homo_sapiens__AAH00980
augagccuggugcuccugucccuggccgcccucugccgcagcgcggugccccgggagccgaccgugcagugcggcuccgagaccgggcccagccccgaguggaugcugcagcacgaccugauccccggcgaccuccgcgaccugcggguggagccggucacgaccuccguggccaccggggacuacagcauccugaugaacguguccuggguccuccgcgccgacgccagcauccggcugcugaaggccaccaagaucugcgugacgggcaaguccaacuuccagagcuacuccugcgugcgcugcaacuacaccgaggcguuccagacccagacccggcccagcgggggcaaguggacguucuccuacaucggcuuccccgucgagcucaacaccguguacuucaucggggcccacaacauccccaacgccaacaugaacgaggacggcccgagcauguccgugaacuucaccagccccgggugccuggaccacaucaugaaguacaagaagaagugcgucaaggccggcucccugugggaccccaacaucaccgcgugcaagaagaacgaggagacgguggaggugaacuucaccaccacgccccucgggaaccgcuacauggcccugauccagcacagcaccaucaucggcuucucccaggucuucgagccgcaccagaagaagcagacccgggccagcguggugauccccgucaccggcgacagcgagggggccaccgugcagcugacgcccuacuucccgaccugcggcuccgacugcauccgccacaaggggaccgugguccucugcccccagaccggcgugcccuucccccuggacaacaacaagagcaagcccggcggguggcugccgcuccugcugcucucccugcugguggccacguggguccucguggcgggcaucuaccugauguggcggcacgagcgcaucaagaagaccagcuucuccaccaccacgcugcucccgcccaucaagguccuggugguguaccccagcgagaucugcuuccaccacaccaucugcuacuucaccgaguuccugcagaaccacugccgguccgaggucauccucgagaaguggcagaagaagaagaucgccgagauggggcccgugcaguggcuggccacccagaagaaggccgccgacaagguggucuuccugcucagcaacgacgugaacuccgugugcgacggcacgugcggcaagagcgaggggucccccagcgagaacucccaggaccuguucccccuggcguucaaccucuucugcagcgaccugcgcucccagauccaccuccacaaguacgucgugguguacuuccgggagaucgacaccaaggacgacuacaacgcccugagcgucugccccaaguaccaccugaugaaggacgccaccgccuucugcgccgagcugcuccacgugaagcagcaggucuccgcgggcaagcgcagccaggccugccacgacgggugcugcucccuguga

SEQ ID NO: 4244 - RNA, 1509 nt, Artificial Sequence
  derived and/or modified sequence opt2 from IL-17B__Homo_sapiens__AAH00980
augucccucguccuccucucccucgccgcccucugccgcuccgccgucccccgcgagcccaccguccagugcggcuccgagaccggccccucccccgaguggaugcuccagcacgaccucauccccggcgaccuccgcgaccuccgcgucgagcccgucaccaccuccgucgccaccggcgacuacuccauccucaugaacgucuccuggguccuccgcgccgacgccuccauccgccuccucaaggccaccaagaucugcgucaccggcaaguccaacuuccaguccuacuccugcguccgcugcaacuacaccgaggccuuccagacccagacccgccccuccggcggcaaguggaccuucuccuacaucggcuuccccgucgagcucaacaccgucuacuucaucggcgcccacaacauccccaacgccaacaugaacgaggacggccccuccauguccgucaacuucaccucccccggcugccucgaccacaucaugaaguacaagaagaagugcgucaaggccggcucccucugggaccccaacaucaccgccugcaagaagaacgaggagaccgucgaggucaacuucaccaccaccccccucggcaaccgcuacauggcccucauccagcacuccaccaucaucggcuucucccaggucuucgagccccaccagaagaagcagacccgcgccuccgucgucauccccgucaccggcgacuccgagggcgccaccguccagcucacccccuacuuccccaccugcggcuccgacugcauccgccacaagggcaccgucguccucugcccccagaccggcguccccuucccccucgacaacaacaaguccaagcccggcggcuggcucccccuccuccuccucucccuccucgucgccaccuggguccucgucgccggcaucuaccucauguggcgccacgagcgcaucaagaagaccuccuucuccaccaccacccuccucccccccaucaagguccucgucgucuaccccuccgagaucugcuuccaccacaccaucugcuacuucaccgaguuccuccagaaccacugccgcuccgaggucauccucgagaaguggcagaagaagaagaucgccgagaugggccccguccaguggcucgccacccagaagaaggccgccgacaaggucgucuuccuccucuccaacgacgucaacuccgucugcgacggcaccugcggcaaguccgagggcucccccuccgagaacucccaggaccucuucccccucgccuucaaccucuucugcuccgaccuccgcucccagauccaccuccacaaguacgucgucgucuacuuccgcgagaucgacaccaaggacgacuacaacgcccucuccgucugccccaaguaccaccucaugaaggacgccaccgccuucugcgccgagcuccuccacgucaagcagcaggucuccgccggcaagcgcucccaggccugccacgacggcugcugcucccucuga

SEQ ID NO: 4245 - RNA, 1509 nt, Artificial Sequence
  derived and/or modified sequence opt3 from IL-17B__Homo_sapiens__AAH00980
augagccuggugcuccuuucccuggccgcuuugugcagaucugcaguccccagggagccuaccguucaguguggcucagaaacagggccaaguccggaguggauguuacaacacgaccugauccccggagaucuacgggaccuccgcguggaaccuguaacuacgagcguggccaccggugauuacuccauucugaugaacgucucuugggugcuucgagcggacgcuucgauacgucuguugaaggccacaaaaaucugcguuacuggcaagucaaauuuccagagcuauaguugugugagaugcaacuacaccgaggcauuucagacacagaccaggccauccgggggaaaauggacuuucucuuauauuggcuuucccgucgaacucaauacaguguacuucaucggugcccauaacauuccuaaugcuaacaugaaugaggaugggccaagcauguccguaaacuuuaccucacccggaugucuggaccacaucaugaaguauaaaaagaagugcguuaaagcaggcagucugugggauccuaauauaacggccuguaagaaaaacgaggaaacuguggaggucaauuucaccacaacuccacucggcaaccgguacauggcuuuaauccaacauagcaccauuaucggguuuucucagguguucgaaccgcaccagaagaaacagacacgcgccuccguggucauucccguuaccggagacucagagggugcgacggugcaacugacuccuuauuuuccaacaugcggcagcgauuguaucagacauaaggggaccguagugcuuugcccccagacuggagucccuuucccauuggacaauaacaagaguaaacccggcgguuggcugccgcuacuccugcuuucucuguugguggcaacauggguucucguggccgggauauaccugauguggaggcacgagcggauuaagaaaaccuccuuuagcacgaccacauuacugccucccaucaagguccucgugguauacccaucggaaauuuguuuccaccauacuaucugcuauuuuaccgaguuccuucagaaucacugccgcucugaaguuauccuggagaaauggcagaagaaaaagauugcugaaaugggaccugugcaaugguuggccacacagaagaaagcagcugauaaggucguguuccuacuguccaacgacgucaacucagugugugauggcacuugcggcaaaagugaggggagccccuccgaaaauucucaggaccucuuuccacuggccuucaaccuguuuuguagcgaccuucgaucacaaauacauuugcacaaguacguugugguauauuucagagagaucgauaccaaagacgauuacaaugcgcucagugucugccccaaguaucaccugaugaaggacgccacagcauuuugugcugaguuacugcaugugaaacagcagguuuccgccggaaagaggagccaggcuugccacgaugguuguugcucucuauga

SEQ ID NO: 4246 - RNA, 1509 nt, Artificial Sequence
  derived and/or modified sequence opt4 from IL-17B__Homo_sapiens__AAH00980
augagccuggugcugcugagccuggccgcccugugcagaagcgccgugcccagagagcccaccgugcagugcggcagcgagaccggccccagccccgaguggaugcugcagcacgaccugauccccggcgaccugagagaccugagaguggagcccgugaccaccagcguggccaccggcgacuacagcauccugaugaacgugagcugggugcugagagccgacgccagcaucagacugcugaaggccaccaagaucugcgugaccggcaagagcaacuuccagagcuacagcugcgugagaugcaacuacaccgaggccuuccagacccagaccagacccagcggcggcaaguggaccuucagcuacaucggcuuccccguggagcugaacaccguguacuucaucggcgcccacaacauccccaacgccaacaugaacgaggacggccccagcaugagcgugaacuucaccagccccggcugccuggaccacaucaugaaguacaagaagaagugcgugaaggccggcagccugugggaccccaacaucaccgccugcaagaagaacgaggagaccguggaggugaacuucaccaccaccccccugggcaacagauacauggcccugauccagcacagcaccaucaucggcuucagccagguguucgagccccaccagaagaagcagaccagagccagcguggugauccccgugaccggcgacagcgagggcgccaccgugcagcugacccccuacuuccccaccugcggcagcgacugcaucagacacaagggcaccguggugcugugcccccagaccggcgugcccuucccccuggacaacaacaagagcaagcccggcggcuggcugccccugcugcugcugagccugcugguggccaccugggugcugguggccggcaucuaccugauguggagacacgagagaaucaagaagaccagcuucagcaccaccacccugcugccccccaucaaggugcuggugguguaccccagcgagaucugcuuccaccacaccaucugcuacuucaccgaguuccugcagaaccacugcagaagcgaggugauccuggagaaguggcagaagaagaagaucgccgagaugggccccgugcaguggcuggccacccagaagaaggccgccgacaaggugguguuccugcugagcaacgacgugaacagcgugugcgacggcaccugcggcaagagcgagggcagccccagcgagaacagccaggaccuguucccccuggccuucaaccuguucugcagcgaccugagaagccagauccaccugcacaaguacguggugguguacuucagagagaucgacaccaaggacgacuacaacgcccugagcgugugccccaaguaccaccugaugaaggacgccaccgccuucugcgccgagcugcugcacgugaagcagcaggugagcgccggcaagagaagccaggccugccacgacggcugcugcagccuguga

SEQ ID NO: 4247 - RNA, 1509 nt, Artificial Sequence
  derived and/or modified sequence opt5 from IL-17B__Homo_sapiens__AAH00980
augagccuggugcuccugucccuugccgcucugugcagaucugccgucccccgggagccuaccguucaguguggcagcgaaacagggccgucccccgaguggaugcuccaacacgaccugaucccuggagaucuucgcgaccugagaguggaacccgugacgaccucugucgcgacaggcgauuacagcauucucaugaacguguccuggguucugcgggcugacgccucuauccgccugcucaaggccaccaaaauuugcgugacaggcaagagcaauuuccaguccuauagcugugucagaugcaacuacaccgaggcuuuucagacacagacccggccuucuggaggcaaauggacguucuccuauaucggguuucccguggaacugaauaccguuuacuucauuggagcccauaacaucccuaaugcuaacaugaaugaggauggcccgagcaugucugugaacuuuacaucccccggcugucuugaccacaucaugaaguauaaaaagaagugcgucaaagccgggagccugugggauccuaauauuaccgcguguaagaaaaacgaggaaacaguggaggugaauuucaccacgacaccccucggaaaccgcuacauggcccugauccaacauucuaccauuaucggcuuuucccaggucuucgaaccucaccagaagaaacagacaagagcuagcguugugauucccgugaccggggacuccgagggagccaccguccaacuuacaccguauuuuccuacgugcggcucugauuguauccggcauaaggggaccgugguucugugcccccagacaggagugccuuucccccucgacaauaacaagagcaaacccggcggcuggcugccucugcuccugcuuucccugcucgucgcuaccugggugcugguugccgggauuuaccuuauguggcgccacgagagaaucaagaaaacauccuuuucuaccacgacacugcucccgcccaucaaggugcuggucguguacccuuccgaaauuuguuuccaccauaccaucugcuauuuuaccgaguuccugcagaaucacugccggagcgaagucauucucgagaaauggcagaagaaaaagaucgcggaaaugggacccgugcaauggcuggccacacagaagaaagcugccgauaagguuguguuccuucugucuaacgacgucaacagcgugugugaugggaccugcgggaaauccgagggaucuccuagcgagaauagccaggaccucuuuccccuggcuuucaaccuguuuuguagcgaccuucgcucucaaauucaucuccacaaguacguuguggucuauuucagagaaaucgauacaaaagacgauuacaaugcccuguccgugugcccgaaguaucaccugaugaaggacgccacggcuuuuugugcggagcuccugcaugugaaacagcagguuagcgccggcaagcggucucaggcuugccacgauggguguugcucccuuuga

SEQ ID NO: 4248 - RNA, 1509 nt, Artificial Sequence
  derived and/or modified sequence opt6 from IL-17B__Homo_sapiens__AAH00980
augucauuaguauuauuaucacuagccgcacuaugucgaucggcuguuccaagagaaccaaccguacaaugcggaucagaaacagguccaucaccagaauggauguuacaacacgacuuaauaccgggcgaucuuagagauuuaagaguagaaccaguuacaacaucuguagcuacaggugauuacucaauuuuaaugaacguaagcuggguacuaagagcugacgccucaauacgccugcuaaaagcaacaaaaauuugcgucaccggaaaauccaacuuucaauccuacucauguguaagaugcaauuauaccgaagcuuuucaaacacaaacacgcccauccggaggaaaauggacauuuucauacauaggauuuccuguagaauuaaacacagucuacuuuauaggugcacauaacauuccaaacgcaaacaugaaugaagauggaccaucaaugucagucaacuucacaucaccuggaugucuagaccauauaaugaaauauaaaaaaaaaugcguaaaagcuggaucccuaugggacccaaacauaacugcaugcaaaaaaaaugaagaaacaguagaagucaauuucacaacuacaccacuuggaaauagauauauggcucuaauacaacacucaacaauaaucggauucucccaaguauuugaaccacaccaaaaaaaacaaacacgagccucaguaguaaucccagucacaggagacuccgaaggagcaacuguacaauuaacccccuacuuucccacauguggcuccgacuguauaagacauaaaggaacaguugucuuaugcccacaaacagguguacccuucccccuggacaauaauaaaagcaaacccgguggauggcuuccauuacucuuacuaucacuacuagucgccacauggguauuaguagcaggaaucuacuuaauguggcgucaugaacgaauaaaaaaaacaucuuucuccacuacaacauuacuuccaccaauaaaaguguuaguaguauaccccuccgaaauaugcuuucaccacacaauaugcuauuuuacagaauuccuacaaaaccauugcagaagugaaguaauacucgaaaaauggcaaaaaaaaaagaucgcagaaaugggaccaguccaaugguuagcaacacaaaaaaaagcagcagacaaaguaguauuccuuuuaucaaaugacguaaacucggucugugacgguacauguggaaaaucagaaggaucaccaucagaaaacucacaagaccuauucccacuagcauucaauuuauuuugcucagacuuaagaucacaaauacacuuacacaaauauguaguagucuacuuuagagaaauagacacaaaagacgauuauaacgcauuaagugucuguccaaaauaccacuuaaugaaagacgcaacagcauuuugugcugaauuacuacacguuaaacagcaaguaucugccgguaaaagaucacaagcaugucacgacggaugcuguucccuauaa

SEQ ID NO: 4249 - protein, 180 aa, Artificial Sequence
  IL-17B__Homo_sapiens__Q9UHF5
MDWPHNLLFLLTISIFLGLGQPRSPKSKRKGQGRPGPLAPGPHQVPLDLVSRMKPYARMEEYERNIEEMVAQLRNSSELAQRKCEVNLQLWMSNKRSLSPWGYSINHDPSRIPVDLPEARCLCLGCVNPFTMQEDRSMVSVPVFSQVPVRRRLCPPPPRTGPCRQRAVMETIAVGCTCIF

SEQ ID NO: 4250 - RNA, 543 nt, Artificial Sequence
  IL-17B__Homo_sapiens__AAF01318
auggacuggccucacaaccugcuguuucuucuuaccauuuccaucuuccuggggcugggccagcccaggagccccaaaagcaagaggaaggggcaagggcggccugggccccuggccccuggcccucaccaggugccacuggaccuggugucacggaugaaaccguaugcccgcauggaggaguaugagaggaacaucgaggagaugguggcccagcugaggaacagcucagagcuggcccagagaaagugugaggucaacuugcagcuguggauguccaacaagaggagccugucucccuggggcuacagcaucaaccacgaccccagccguauccccguggaccugccggaggcacggugccugugucugggcugugugaaccccuucaccaugcaggaggaccgcagcauggugagcgugccgguguucagccagguuccugugcgccgccgccucugcccgccaccgccccgcacagggccuugccgccagcgcgcagucauggagaccaucgcugugggcugcaccugcaucuucuga

SEQ ID NO: 4251 - RNA, 543 nt, Artificial Sequence
  derived and/or modified sequence opt1 from IL-17B__Homo_sapiens__AAF01318
auggacuggccccacaaccuccuguuccugcugaccaucagcaucuuccucggccuggggcagccccgcucccccaagagcaagcggaagggccaggggcgccccggcccccuggccccggggccccaccaggugccccucgaccuggucucccggaugaagcccuacgcccgcauggaggaguacgagcggaacaucgaggagaugguggcgcagcugcgcaacagcuccgagcucgcccagcggaagugcgaggugaaccugcagcuguggaugagcaacaagcgcucccucagcccguggggcuacuccaucaaccacgaccccagccggauccccgucgaccugcccgaggcccgcugccugugccucggcugcgugaacccguucaccaugcaggaggaccgguccauggugagcguccccguguucucccaggugcccguccgccggcgccugugcccgcccccgccccggaccgggcccugccgccagcgggccgugauggagaccaucgccgugggcugcacgugcaucuucuga

SEQ ID NO: 4252 - RNA, 543 nt, Artificial Sequence
  derived and/or modified sequence opt2 from IL-17B__Homo_sapiens__AAF01318
auggacuggccccacaaccuccucuuccuccucaccaucuccaucuuccucggccucggccagccccgcucccccaaguccaagcgcaagggccagggccgccccggcccccucgcccccggcccccaccaggucccccucgaccucgucucccgcaugaagcccuacgcccgcauggaggaguacgagcgcaacaucgaggagauggucgcccagcuccgcaacuccuccgagcucgcccagcgcaagugcgaggucaaccuccagcucuggauguccaacaagcgcucccucucccccuggggcuacuccaucaaccacgaccccucccgcauccccgucgaccuccccgaggcccgcugccucugccucggcugcgucaaccccuucaccaugcaggaggaccgcuccauggucuccguccccgucuucucccagguccccguccgccgccgccucugccccccccccccccgcaccggccccugccgccagcgcgccgucauggagaccaucgccgucggcugcaccugcaucuucuga

SEQ ID NO: 4253 - RNA, 543 nt, Artificial Sequence
  derived and/or modified sequence opt3 from IL-17B__Homo_sapiens__AAF01318
auggacuggccccacaaccuguuguuccuucugaccaucagcauuuuucucggcuuagggcagccuagauccccaaagucuaaaaggaagggacaaggucggccgggcccccuggccccugggccacaucaggugccccuagaucucgucucacgcaugaaaccuuacgcucgaauggaggaauaugagcguaauauagaagagaugguugcacagcugagaaacaguagcgaacuugcccagaggaagugcgaggugaaucugcaauuguggauguccaacaaacggucucucucgccauggggauacucaaucaaucacgaccccagccgcauuccuguagaucugccagaggcgagaugucugugccucggcugugugaacccguucacaaugcaggaagacaggaguauggucuccgugcccguguuuucucagguuccuguccggcgccgauuaugcccacccccuccaagaacuggucccuguaggcagcgggcugugauggagacgaucgccguagggugcaccuguauuuucuga

SEQ ID NO: 4254 - RNA, 543 nt, Artificial Sequence
  derived and/or modified sequence opt4 from IL-17B__Homo_sapiens__AAF01318
auggacuggccccacaaccugcuguuccugcugaccaucagcaucuuccugggccugggccagcccagaagccccaagagcaagagaaagggccagggcagacccggcccccuggcccccggcccccaccaggugccccuggaccuggugagcagaaugaagcccuacgccagaauggaggaguacgagagaaacaucgaggagaugguggcccagcugagaaacagcagcgagcuggcccagagaaagugcgaggugaaccugcagcuguggaugagcaacaagagaagccugagccccuggggcuacagcaucaaccacgaccccagcagaauccccguggaccugcccgaggccagaugccugugccugggcugcgugaaccccuucaccaugcaggaggacagaagcauggugagcgugcccguguucagccaggugcccgugagaagaagacugugcccccccccccccagaaccggccccugcagacagagagccgugauggagaccaucgccgugggcugcaccugcaucuucuga

SEQ ID NO: 4255 - RNA, 543 nt, Artificial Sequence
  derived and/or modified sequence opt5 from IL-17B__Homo_sapiens__AAF01318
auggacuggccccacaaccuccuguuccugcuuaccaucagcauuuuucugggccucgggcagccuagauccccgaagucuaaacggaagggacaaggccgccccgggccucuggcccccggaccucaucaggugccccuugaucuggucagcagaaugaaaccuuacgcucggauggaggaauaugagcgcaauaucgaagagaugguugcccagcucagaaacuccucugaacuggcgcagcggaagugcgaggugaaucugcaacucuggaugagcaacaaacgcucccugucuccguggggcuacagcauuaaucacgaccccuccagaaucccuguggaucuucccgaggcucggugucugugccucgggugugucaacccuuucacaaugcaggaagaccgcagcauggugucuguucccguguuuucccaggucccggugagacggcgccugugcccucccccucccagaacgggacccugucggcagcgcgccguuauggagaccauugccgugggcugcacauguaucuucuga

SEQ ID NO: 4256 - RNA, 543 nt, Artificial Sequence
  derived and/or modified sequence opt6 from IL-17B__Homo_sapiens__AAF01318
auggacuggccacauaacuuacuauuuuuauuaacaauaaguauauucuuaggauuaggacaaccaagaagcccaaaaucaaaaagaaaaggacaaggaagaccaggaccacuagcaccaggaccacaucaaguaccauuagacuuagucucaagaaugaaaccauacgcaagaauggaagaauacgaaagaaauauagaagaaaugguagcacaauuaagaaauagcucagaauuagcacaaagaaaaugcgaaguaaaucuacaacuauggaugucaaacaaaagaucgcuaucaccauggggauauagcauaaaccaugacccaucaagaauaccaguagacuuaccagaagcaagaugucuaugucuaggaugcguaaacccauucacaaugcaagaagauagaucaaugguaagcguaccaguauucucacaaguaccaguaagaagaagauuaugcccaccaccaccaagaacaggaccaugcagacaaagagcagucauggaaacaauagcaguaggaugcacaugcauauuuuaa

SEQ ID NO: 4257 - protein, 202 aa, Artificial Sequence
  IL-17D__Homo_sapiens__Q8TAD2
MLVAGFLLALPPSWAAGAPRAGRRPARPRGCADRPEELLEQLYGRLAAGVLSAFHHTLQLGPREQARNASCPAGGRPADRRFRPPTNLRSVSPWAYRISYDPARYPRYLPEAYCLCRGCLTGLFGEEDVRFRSAPVYMPTVVLRRTPACAGGRSVYTEAYVTIPVGCTCVPEPEKDADSINSSIDKQGAKLLLGPNDAPAGP

SEQ ID NO: 4258 - RNA, 609 nt, Artificial Sequence
  IL-17D__Homo_sapiens__AAH36243
augcugguagccggcuuccugcuggcgcugccgccgagcugggccgcgggcgccccgagggcgggcaggcgccccgcgcggccgcggggcugcgcggaccggccggaggagcuacuggagcagcuguacgggcgccuggcggccggcgugcucagugccuuccaccacacgcugcagcuggggccgcgugagcaggcgcgcaacgcgagcugcccggcagggggcaggcccgccgaccgccgcuuccggccgcccaccaaccugcgcagcgugucgcccugggccuacagaaucuccuacgacccggcgagguaccccagguaccugccugaagccuacugccugugccggggcugccugaccgggcuguucggcgaggaggacgugcgcuuccgcagcgccccugucuacaugcccaccgucguccugcgccgcacccccgccugcgccggcggccguuccgucuacaccgaggccuacgucaccauccccgugggcugcaccugcguccccgagccggagaaggacgcagacagcaucaacuccagcaucgacaaacagggcgccaagcuccugcugggccccaacgacgcgcccgcuggccccuga

SEQ ID NO: 4259 - RNA, 609 nt, Artificial Sequence
  derived and/or modified sequence opt1 from IL-17D__Homo_sapiens__AAH36243
augcugguggccggcuuccuccuggcccugcccccgagcugggcggccggggcgccccgcgccggccggcgccccgcccggccccgcgggugcgccgaccggccggaggagcuccuggagcagcuguacggccgccucgccgccgggguccuguccgccuuccaccacacccugcagcucggcccccgggagcaggcgcgcaacgccagcugccccgccggcgggcggcccgccgaccgccgguuccgcccgcccaccaaccugcgguccgugagccccugggccuaccgcaucuccuacgaccccgcgcgguacccgcgcuaccugcccgaggccuacugccucugccggggcugccugaccgggcuguucggcgaggaggacgugcgcuuccggagcgcccccgucuacaugcccaccguggugcuccgccggaccccggccugcgccgggggccgcuccgucuacaccgaggcguacgugacgauccccgugggcugcacgugcguccccgagcccgagaaggacgccgacagcaucaacuccagcaucgacaagcagggggccaagcugcugcucggcccgaacgacgcccccgccgggcccuga

SEQ ID NO: 4260 - RNA, 609 nt, Artificial Sequence
  derived and/or modified sequence opt2 from IL-17D__Homo_sapiens__AAH36243
augcucgucgccggcuuccuccucgcccucccccccuccugggccgccggcgccccccgcgccggccgccgccccgcccgcccccgcggcugcgccgaccgccccgaggagcuccucgagcagcucuacggccgccucgccgccggcguccucuccgccuuccaccacacccuccagcucggcccccgcgagcaggcccgcaacgccuccugccccgccggcggccgccccgccgaccgccgcuuccgcccccccaccaaccuccgcuccgucucccccugggccuaccgcaucuccuacgaccccgcccgcuacccccgcuaccuccccgaggccuacugccucugccgcggcugccucaccggccucuucggcgaggaggacguccgcuuccgcuccgcccccgucuacaugcccaccgucguccuccgccgcacccccgccugcgccggcggccgcuccgucuacaccgaggccuacgucaccauccccgucggcugcaccugcguccccgagcccgagaaggacgccgacuccaucaacuccuccaucgacaagcagggcgccaagcuccuccucggccccaacgacgcccccgccggccccuga

SEQ ID NO: 4261 - RNA, 609 nt, Artificial Sequence
  derived and/or modified sequence opt3 from IL-17D__Homo_sapiens__AAH36243
augcugguggccggcuuccuccuugcucugcccccuagcugggcagccggggcgccaagagcuggaaggcggccggcccgcccccgagguugcgcagaccguccugaggaauuguuagagcagcuguacggcagacuagccgcugggguccucuccgcauuucaccauacccugcaacuuggaccaagggaacaggcccggaacgcuucuugucccgccggcggucgcccugcggauagaagguuccggccacccacaaaucugcgcucaguuaguccuugggcauaucgaaucagcuacgacccagccagauauccgagguacuugcccgaggcuuauugccucugucgggggugccugacuggacuguuuggcgaagaggaugugcguuuccgcuccgccccuguauacaugccaacggugguccucagaaggacccccgcaugugcuggcgggcggucuguguauacagaggccuacguuacuauuccugugggaugcaccugugucccagaacccgagaaggacgcggauucgauaaacucaagcaucgacaaacagggugccaaguuacugcuuggcccgaaugaugcuccugcagggcccuga

SEQ ID NO: 4262 - RNA, 609 nt, Artificial Sequence
  derived and/or modified sequence opt4 from IL-17D__Homo_sapiens__AAH36243
augcugguggccggcuuccugcuggcccugccccccagcugggccgccggcgcccccagagccggcagaagacccgccagacccagaggcugcgccgacagacccgaggagcugcuggagcagcuguacggcagacuggccgccggcgugcugagcgccuuccaccacacccugcagcugggccccagagagcaggccagaaacgccagcugccccgccggcggcagacccgccgacagaagauucagaccccccaccaaccugagaagcgugagccccugggccuacagaaucagcuacgaccccgccagauaccccagauaccugcccgaggccuacugccugugcagaggcugccugaccggccuguucggcgaggaggacgugagauucagaagcgcccccguguacaugcccaccguggugcugagaagaacccccgccugcgccggcggcagaagcguguacaccgaggccuacgugaccauccccgugggcugcaccugcgugcccgagcccgagaaggacgccgacagcaucaacagcagcaucgacaagcagggcgccaagcugcugcugggccccaacgacgcccccgccggccccuga

SEQ ID NO: 4263 - RNA, 609 nt, Artificial Sequence
  derived and/or modified sequence opt5 from IL-17D__Homo_sapiens__AAH36243
augcugguggccggcuuccuccuggcccuucccccuagcugggcugcgggggcuccgagagccggacggcgccccgccagaccucggggcugcgcugaccgccccgaggaacugcucgagcagcuguacgggagacuugccgcuggaguccuguccgccuuucaccauacccuccaacugggcccucgggaacaggcgcgcaacgccucuugucccgcugggggaagaccugccgaucggcgcuucagaccgcccacaaaucugcggagcguuuccccuugggcuuaucgcaucucuuacgaccccgccagauauccucgguaccuccccgaggcguauugccugugucgcggcugccuuacgggccuguuuggggaagaggaugugagauuccggagcgccccgguguacaugccuaccgucgugcucagacgcacacccgcuugugccggaggccgguccguuuauaccgaggcuuacgugacaauuccugucgggugcaccugugugcccgaacccgagaaggacgccgauucuaucaacagcuccauugacaaacagggagccaagcugcuucugggcccuaaugaugcuccggcggggcccuga

SEQ ID NO: 4264 - RNA, 609 nt, Artificial Sequence
  derived and/or modified sequence opt6 from IL-17D__Homo_sapiens__AAH36243
augcuaguagcaggcuuuuuacuagcauuaccaccaaguugggcagcaggagcaccaagagcaggaagaagaccagcaagaccacgaggaugcgcagauagaccagaagaauuauuagaacaauuauauggaagauuagcagcaggaguauuaucagcauuucaucauacauuacaauuaggaccaagagaacaagcaagaaaugcaucauguccagcaggaggaagaccagcagacagaagauuuagaccaccaacaaaucuaagaaguguaucaccaugggcauauagaauaucauacgauccagcaagauauccuagauacuuaccagaagcauacuguuuauguagaggauguuuaacuggacuauuuggagaagaagauguaagauuuagaucagcaccaguauauaugccaacaguaguauuaagaagaacaccagcaugugcaggagguagaucaguauauacagaagcauauguuacaauaccaguaggaugcacauguguaccagaaccagaaaaagaugcagauaguauaaauucaucaauagacaaacaaggagcaaaauuauuauuaggaccuaacgaugcaccagcaggaccauaa

SEQ ID NO: 4265 - protein, 163 aa, Artificial Sequence [sequence omitted]

SEQ ID NO: 4266 - RNA, 492 nt, Artificial Sequence
  IL-17F__Homo_sapiens__ADY18335
augacagugaagacccugcauggcccagccauggucaaguacuugcugcugucgauauuggggcuugccuuucugagugaggcggcagcucggaaaauccccaaaguaggacauacuuuuuuccaaaagccugagaguugcccgccugugccaggagguaguaugaagcuugacauuggcaucaucaaugaaaaccagcgcguuuccaugucacguaacaucgagagccgcuccaccucccccuggaauuacacugucacuugggaccccaaccgguaccccuuggaaguuguacaggcccaguguaggaacuugggcugcaucaaugcucaaggaaaggaagacaucuccaugaauuccguucccauccagcaagagacccuggucguccggaggaagcaccaaggcugcucuguuucuuuccaguuggagaaggugcuggugacuguuggcugcaccugcgucaccccugucauccaccaugugcaguaa

SEQ ID NO: 4267 - RNA, 492 nt, Artificial Sequence
  derived and/or modified sequence opt1 from IL-17F__Homo_sapiens__ADY18335
augaccgugaagacccugcacggccccgccauggucaaguaccuccugcugagcauccucgggcuggccuuccuguccgaggcggccgcccgcaagaucccgaaggugggccacaccuucuuccagaagcccgagagcugcccgcccgugcccgggggcuccaugaagcucgacaucgggaucaucaacgagaaccagcgggucagcaugucccgcaacaucgagagccgguccaccagccccuggaacuacaccgugaccugggaccccaaccgcuacccccuggaggugguccaggcccagugccggaaccugggcugcaucaacgcccagggcaaggaggacaucuccaugaacagcgugccgauccagcaggagacgcucgugguccgccggaagcaccaggggugcuccgugagcuuccagcuggagaaggugcuggucaccgugggcugcacgugcgugacccccgucauccaccacgugcaguga

SEQ ID NO: 4268 - RNA, 492 nt, Artificial Sequence
  derived and/or modified sequence opt2 from IL-17F__Homo_sapiens__ADY18335
augaccgucaagacccuccacggccccgccauggucaaguaccuccuccucuccauccucggccucgccuuccucuccgaggccgccgcccgcaagauccccaaggucggccacaccuucuuccagaagcccgaguccugcccccccguccccggcggcuccaugaagcucgacaucggcaucaucaacgagaaccagcgcgucuccaugucccgcaacaucgagucccgcuccaccucccccuggaacuacaccgucaccugggaccccaaccgcuacccccucgaggucguccaggcccagugccgcaaccucggcugcaucaacgcccagggcaaggaggacaucuccaugaacuccguccccauccagcaggagacccucgucguccgccgcaagcaccagggcugcuccgucuccuuccagcucgagaagguccucgucaccgucggcugcaccugcgucacccccgucauccaccacguccaguga

SEQ ID NO: 4269 - RNA, 492 nt, Artificial Sequence
  derived and/or modified sequence opt3 from IL-17F__Homo_sapiens__ADY18335
augaccgugaagacacugcacggccccgccauggucaaauaccuccuucugagcaucuugggguuagcuuuccuguccgaggcagccgcgagaaagauuccuaaaguuggacauacguuuuuccagaagccagaaucuugcccgcccgugccugguggcucaaugaaacuagacauagggaucauuaacgagaaucaaaggguaaguaugagccggaacaucgaaucccgcucuacuucgccauggaauuauaccgugacaugggaucccaaccgauacccucucgaggucgugcaggcucagugucguaaucugggaugcauuaacgcccagggcaaggaagacaucucaaugaauagcguuccaauacaacaggagacucuuguggucagaaggaagcaccaggguuguaguguguccuuucagcuggagaaaguauugguuaccguggggugcacaugugucacccccgugauccaucacgugcaauga

SEQ ID NO: 4270 - RNA, 492 nt, Artificial Sequence
  derived and/or modified sequence opt4 from IL-17F__Homo_sapiens__ADY18335
augaccgugaagacccugcacggccccgccauggugaaguaccugcugcugagcauccugggccuggccuuccugagcgaggccgccgccagaaagauccccaaggugggccacaccuucuuccagaagcccgagagcugcccccccgugcccggcggcagcaugaagcuggacaucggcaucaucaacgagaaccagagagugagcaugagcagaaacaucgagagcagaagcaccagccccuggaacuacaccgugaccugggaccccaacagauacccccuggagguggugcaggcccagugcagaaaccugggcugcaucaacgcccagggcaaggaggacaucagcaugaacagcgugcccauccagcaggagacccugguggugagaagaaagcaccagggcugcagcgugagcuuccagcuggagaaggugcuggugaccgugggcugcaccugcgugacccccgugauccaccacgugcaguga

SEQ ID NO: 4271 - RNA, 492 nt, Artificial Sequence
  derived and/or modified sequence opt5 from IL-17F__Homo_sapiens__ADY18335
augaccgugaagacacugcacggccccgccauggucaaauaccuccugcuuagcauccuggggcucgcuuuccuguccgaggccgcggcuagaaagauuccuaaaguuggacauacguuuuuccagaagccggaaucuugucccccugugcccggcgggagcaugaaacuugacaucggaauuaucaaugagaaucaacggguguccaugucucgcaacauugaaagcagauccaccucuccuuggaauuauacagucaccugggaucccaaccgguacccucuggaggugguucaggcccagugccgcaaucucggcugcaucaacgcccaggggaaggaagacaucagcaugaacuccgugccgauucaacaggagacacuggucgugagacggaagcaccagggauguagcguuucuuuucagcuggagaaagugcucgucaccgugggcugcacaugugugacccccgucauccaucacguucaauga

SEQ ID NO: 4272 - RNA, 492 nt, Artificial Sequence
  derived and/or modified sequence opt6 from IL-17F__Homo_sapiens__ADY18335
augacaguaaaaacccuacacggaccagcaaugguaaaauaccuacuacuaucaauacuaggauuagcauuucuaucagaagcagcagcaagaaaaauaccaaaaguaggacacacauuuuuccaaaaaccagaaucaugcccacccguaccaggaggaucaaugaaacuagacauaggaauaauaaacgaaaaccaaagaguaucaaugucaagaaacauagaaucacgaucaacaucaccauggaacuacacaguaacaugggacccaaacagauacccacuagaaguaguacaagcacaaugcagaaaccuaggaugcauaaacgcacaaggaaaagaagacauaucaaugaacucaguuccaauacaacaagaaacauuaguaguaagaagaaaacaccaaggaugcucaguaucauuccaacuagaaaaaguacuaguaacaguaggaugcacaugcguaacaccagucauacaccacguacaauaa

SEQ ID NO: 4273 - protein, 163 aa, Artificial Sequence
  IL-17F__Homo_sapiens__Q96PD4
MTVKTLHGPAMVKYLLLSILGLAFLSEAAARKIPKVGHTFFQKPESCPPVPGGSMKLDIGIINENQRVSMSRNIESRSTSPWNYTVTWDPNRYPSEVVQAQCRNLGCINAQGKEDISMNSVPIQQETLVVRRKHQGCSVSFQLEKVLVTVGCTCVTPVIHHVQ

SEQ ID NO: 4274 - RNA, 492 nt, Artificial Sequence
  IL-17F__Homo_sapiens__AAK83350
augacagugaagacccugcauggcccagccauggucaaguacuugcugcugucgauauuggggcuugccuuucugagugaggcggcagcucggaaaauccccaaaguaggacauacuuuuuuccaaaagccugagaguugcccgccugugccaggagguaguaugaagcuugacauuggcaucaucaaugaaaaccagcgcguuuccaugucacguaacaucgagagccgcuccaccucccccuggaauuacacugucacuugggaccccaaccgguaccccucggaaguuguacaggcccaguguaggaacuugggcugcaucaaugcucaaggaaaggaagacaucuccaugaauuccguucccauccagcaagagacccuggucguccggaggaagcaccaaggcugcucuguuucuuuccaguuggagaaggugcuggugacuguuggcugcaccugcgucaccccugucauccaccaugugcaguaa

SEQ ID NO: 4275 - RNA, 492 nt, Artificial Sequence
  derived and/or modified sequence opt1 from IL-17F__Homo_sapiens__AAK83350
augaccgugaagacccugcacggccccgccauggucaaguaccuccugcugagcauccucgggcuggccuuccuguccgaggcggccgcccgcaagaucccgaaggugggccacaccuucuuccagaagcccgagagcugcccgcccgugcccgggggcuccaugaagcucgacaucgggaucaucaacgagaaccagcgggucagcaugucccgcaacaucgagagccgguccaccagccccuggaacuacaccgugaccugggaccccaaccgcuaccccuccgaggugguccaggcccagugccggaaccugggcugcaucaacgcccagggcaaggaggacaucagcaugaacuccgugccgauccagcaggagacgcuggugguccgccggaagcaccaggggugcagcguguccuuccagcucgagaaggugcuggucaccgugggcugcacgugcgugacccccgucauccaccacgugcaguga

SEQ ID NO: 4276 - RNA, 492 nt, Artificial Sequence
  derived and/or modified sequence opt2 from IL-17F__Homo_sapiens__AAK83350
augaccgucaagacccuccacggccccgccauggucaaguaccuccuccucuccauccucggccucgccuuccucuccgaggccgccgcccgcaagauccccaaggucggccacaccuucuuccagaagcccgaguccugcccccccguccccggcggcuccaugaagcucgacaucggcaucaucaacgagaaccagcgcgucuccaugucccgcaacaucgagucccgcuccaccucccccuggaacuacaccgucaccugggaccccaaccgcuaccccuccgaggucguccaggcccagugccgcaaccucggcugcaucaacgcccagggcaaggaggacaucuccaugaacuccguccccauccagcaggagacccucgucguccgccgcaagcaccagggcugcuccgucuccuuccagcucgagaagguccucgucaccgucggcugcaccugcgucacccccgucauccaccacguccaguga

SEQ ID NO: 4277 - RNA, 492 nt, Artificial Sequence
  derived and/or modified sequence opt3 from IL-17F__Homo_sapiens__AAK83350
augaccgugaagacacugcacggccccgccauggucaaauaccuccuucugagcaucuugggguuagcuuuccuguccgaggcagccgcgagaaagauuccuaaaguuggacauacguuuuuccagaagccagaaucuugcccgcccgugccugguggcucaaugaaacuagacauagggaucauuaacgagaaucaaaggguaaguaugagccggaacaucgaaucccgcucuacuucgccauggaauuauaccgugacaugggaucccaaccgauacccuucagaggucgugcaggcucagugucguaaucucggaugcauuaacgcccagggcaaggaagacaucagcaugaauaguguuccaauacaacaggagacucugguggucagaaggaagcaccaggguuguuccgugucuuuucagcuugagaaaguacugguuaccguggggugcacaugugucacccccgugauccaucacgugcaauga

SEQ ID NO: 4278 - RNA, 492 nt, Artificial Sequence
  derived and/or modified sequence opt4 from IL-17F__Homo_sapiens__AAK83350
augaccgugaagacccugcacggccccgccauggugaaguaccugcugcugagcauccugggccuggccuuccugagcgaggccgccgccagaaagauccccaaggugggccacaccuucuuccagaagcccgagagcugcccccccgugcccggcggcagcaugaagcuggacaucggcaucaucaacgagaaccagagagugagcaugagcagaaacaucgagagcagaagcaccagccccuggaacuacaccgugaccugggaccccaacagauaccccagcgagguggugcaggcccagugcagaaaccugggcugcaucaacgcccagggcaaggaggacaucagcaugaacagcgugcccauccagcaggagacccugguggugagaagaaagcaccagggcugcagcgugagcuuccagcuggagaaggugcuggugaccgugggcugcaccugcgugacccccgugauccaccacgugcaguga

SEQ ID NO: 4279 - RNA, 492 nt, Artificial Sequence
  derived and/or modified sequence opt5 from IL-17F__Homo_sapiens__AAK83350
augaccgugaagacacugcacggccccgccauggucaaauaccuccugcuuagcauccuggggcucgcuuuccuguccgaggccgcggcuagaaagauuccuaaaguuggacauacguuuuuccagaagccggaaucuugucccccugugcccggcgggagcaugaaacuugacaucggaauuaucaacgagaaucaacggguguccaugucucgcaacauugaaagcagauccaccucuccuuggaauuauacagucaccugggaucccaaccgguacccuagcgaggugguucaggcccagugccgcaaucugggcugcaucaacgcccaggggaaggaagacaucuccaugaauagcgugccgauucaacaggagacacucgucgugagacggaagcaccagggauguucuguuuccuuucagcuggagaaagugcuggucaccgugggcugcacaugugugacccccgucauccaucacguucaauga

SEQ ID NO: 4280 - RNA, 492 nt, Artificial Sequence
  derived and/or modified sequence opt6 from IL-17F__Homo_sapiens__AAK83350
augacaguaaaaacacuacacggaccagcaauggucaaauaccuacuacuaucaauacuaggacuagcauuccuaucagaagcagcagcaagaaaaauaccaaaaguaggacacacauucuuccaaaaaccagaauccugcccaccaguaccaggaggaucaaugaaacuagacauaggaauaauaaacgaaaaccaaagaguaagcaugucaagaaacauagaauccagaucaacauccccauggaacuacacaguaaccugggacccaaacagauacccaucagaaguaguacaagcacaaugcagaaaccuaggcugcauaaacgcacaaggaaaagaagacauaucaaugaacucaguaccaauacaacaagaaacauuaguaguaagaagaaaacaccaaggaugcucaguaucauuccaacuagaaaaaguacuaguaacaguaggaugcacaugcguaacuccaguaauacaccacguacaauaa

SEQ ID NO: 4281 - protein, 189 aa, Artificial Sequence
  IL-18__Homo_sapiens__A0A024R3E0
MAAEPVEDNCINFVAMKFIDNTLYFIENLESDYFGKLESKLSVIRNLNDQVLFIDQGNRPLFEDMTDSDCRDNAPRTIFIISMYKDSQPRGMAVTISVKCEKISTLSCENKIISFKEMNPPDNIKDTKSDIIFFQRSVPGHDNKMQFESSSYEGYFLACEKERDLFKLILKKEDELGDRSIMFTVQNED

SEQ ID NO: 4282 - RNA, 570 nt, Artificial Sequence
  IL-18__Homo_sapiens__EAW67185
auggcugcugaaccaguagaagacaauugcaucaacuuuguggcaaugaaauuuauugacaauacgcuuuacuuuauagaaaaccuggaauccgauuacuuuggcaagcuugaaucuaaauuaucagucauaagaaauuugaaugaccaaguucucuucauugaccaaggaaaucggccucuauuugaagauaugacugauucugacuguagagauaaugcaccccggaccauauuuauuauaaguauguauaaagauagccagccuagagguauggcuguaacuaucucugugaagugugagaaaauuucaacucucuccugugagaacaaaauuauuuccuuuaaggaaaugaauccuccugauaacaucaaggauacaaaaagugacaucauauucuuucagagaagugucccaggacaugauaauaagaugcaauuugaaucuucaucauacgaaggauacuuucuagcuugugaaaaagagagagaccuuuuuaaacucauuuugaaaaaagaggaugaauugggggauagaucuauaauguucacuguucaaaacgaagacuag

SEQ ID NO: 4283 - RNA, 570 nt, Artificial Sequence
  derived and/or modified sequence opt1 from IL-18__Homo_sapiens__EAW67185
auggccgccgagcccguggaggacaacugcaucaacuucgucgccaugaaguucaucgacaacacccuguacuucaucgagaaccucgagagcgacuacuucggcaagcuggaguccaagcugagcgugauccgcaaccucaacgaccaggugcuguucaucgaccaggggaaccggccgcuguucgaggacaugaccgacuccgacugccgcgacaacgcgccccggacgaucuucaucaucagcauguacaaggacucccagccccgcggcauggccgucaccaucagcgugaagugcgagaagaucuccacccucagcugcgagaacaagaucaucuccuucaaggagaugaacccgcccgacaacaucaaggacaccaagagcgacaucaucuucuuccagcgguccgugcccgggcacgacaacaagaugcaguucgagagcuccagcuacgagggcuacuuccuggccugcgagaaggagcgcgaccuguucaagcucauccugaagaaggaggacgagcugggggaccgguccaucauguucacgguccagaacgaggacuga

SEQ ID NO: 4284 - RNA, 570 nt, Artificial Sequence
  derived and/or modified sequence opt2 from IL-18__Homo_sapiens__EAW67185
auggccgccgagcccgucgaggacaacugcaucaacuucgucgccaugaaguucaucgacaacacccucuacuucaucgagaaccucgaguccgacuacuucggcaagcucgaguccaagcucuccgucauccgcaaccucaacgaccagguccucuucaucgaccagggcaaccgcccccucuucgaggacaugaccgacuccgacugccgcgacaacgccccccgcaccaucuucaucaucuccauguacaaggacucccagccccgcggcauggccgucaccaucuccgucaagugcgagaagaucuccacccucuccugcgagaacaagaucaucuccuucaaggagaugaacccccccgacaacaucaaggacaccaaguccgacaucaucuucuuccagcgcuccguccccggccacgacaacaagaugcaguucgaguccuccuccuacgagggcuacuuccucgccugcgagaaggagcgcgaccucuucaagcucauccucaagaaggaggacgagcucggcgaccgcuccaucauguucaccguccagaacgaggacuga

SEQ ID NO: 4285 - RNA, 570 nt, Artificial Sequence
  derived and/or modified sequence opt3 from IL-18__Homo_sapiens__EAW67185
auggccgcugagcccguggaagacaacugcaucaauuucgucgcaaugaaguuuauugauaacacccuguacuucauagagaaucucgaaagcgacuauuuuggcaaacuugaguccaagcugucuguuaucagaaacuugaaugaucagguguuauucauugaccaagggaacaggccucuguuugaagauaugacagacucagauugucgggacaaugccccacgcacuaucuucauuaucaguauguacaaagauagccagccgcgaggaauggcgguaacgauauccgugaagugcgagaaaaucucuacccuaucgugugagaacaagauuaucucauuuaaggaaaugaaucccccugacaacauuaaagauacaaagagcgacaucauauucuuucagcguagugucccaggucacgauaauaaaaugcaguucgaguccucuagcuaugaaggcuacuuucucgcuugcgagaaggagagagaccuguucaaacuuauucugaagaaggaagacgaguugggggauagguccaucauguuuacugugcaaaacgaagacuga

SEQ ID NO: 4286 - RNA, 570 nt, Artificial Sequence
  derived and/or modified sequence opt4 from IL-18__Homo_sapiens__EAW67185
auggccgccgagcccguggaggacaacugcaucaacuucguggccaugaaguucaucgacaacacccuguacuucaucgagaaccuggagagcgacuacuucggcaagcuggagagcaagcugagcgugaucagaaaccugaacgaccaggugcuguucaucgaccagggcaacagaccccuguucgaggacaugaccgacagcgacugcagagacaacgcccccagaaccaucuucaucaucagcauguacaaggacagccagcccagaggcauggccgugaccaucagcgugaagugcgagaagaucagcacccugagcugcgagaacaagaucaucagcuucaaggagaugaacccccccgacaacaucaaggacaccaagagcgacaucaucuucuuccagagaagcgugcccggccacgacaacaagaugcaguucgagagcagcagcuacgagggcuacuuccuggccugcgagaaggagagagaccuguucaagcugauccugaagaaggaggacgagcugggcgacagaagcaucauguucaccgugcagaacgaggacuga

SEQ ID NO: 4287 - RNA, 570 nt, Artificial Sequence
  derived and/or modified sequence opt5 from IL-18__Homo_sapiens__EAW67185
auggccgcugagcccguggaagacaacugcaucaauuucgucgccaugaaguuuauugauaacacccuguacuucaucgagaaucucgaaagcgacuauuuuggcaaacuggaguccaagcucucuguuauuagaaaccugaaugaucaggugcuuuucaucgaccaagggaaccggccucuguuugaagauaugacagacagcgauugucgcgacaaugcgccgagaacgauuuucaucaucuccauguacaaagauucucagccccggggaauggcugugaccauuagcgucaagugcgagaaaaucuccacacuuucuugugagaacaagauuaucagcuuuaaggaaaugaauccucccgacaacauuaaagauaccaaguccgacaucauuuucuuucagcgcagcgugccuggccacgauaauaaaaugcaguucgagucuuccagcuaugaaggguacuuucuggccugcgagaaggagagagaccucuucaaacugauccugaagaaggaagacgagcucggagaucggucuaucauguuuacaguucaaaacgaagacuga

SEQ ID NO: 4288 - RNA, 570 nt, Artificial Sequence
  derived and/or modified sequence opt6 from IL-18__Homo_sapiens__EAW67185
auggcagcagaaccaguagaagacaacugcauaaacuucguagcaaugaaauucauagacaacacauuauacuucauagaaaaccuagaaucagacuacuucggaaaacuagaaucaaaacuaucaguaauacgcaacuuaaacgaccaaguacuauucauagaccaaggaaacagaccccuauucgaagacaugacagacucagacugcagagacaacgcaccaagaacaauauucauaauaucaauguacaaagacagccaaccaagaggaauggcaguaacaauaucaguaaaaugugaaaaaauaucaacacuaagcugcgaaaacaaaauaauaagcuucaaagaaaugaacccaccagacaacauaaaagacacaaaauccgacauaauauucuuccaaagaucaguacccggacacgacaacaaaaugcaauucgaaucaucaucauacgaaggauacuuccuagcaugcgaaaaagaacgagaccuauucaaacuaauacuaaaaaaagaagaugaacuaggagacagaucaauaauguucacaguacaaaacgaagacuaa

SEQ ID NO: 4289 - protein, 193 aa, Artificial Sequence [sequence omitted]

SEQ ID NO: 4290 - RNA, 582 nt, Artificial Sequence
  IL-18__Homo_sapiens__ACA06006
auggcugcugaaccaguagaagacaauugcaucaacuuuguggcaaugaaauuuauugacaauacgcuuuacuuuauaggugaacuauuaaaaaaccuggaaucagauuacuuuggcaagcuugaaucuaaauuaucagucauaagaaauuugaaugaccaaguucucuucauugaccaaggaaaucggccucuauuugaagauaugacugauucugacuguagagauaaugcaccccggaccauauuuauuauaaguauguauaaagauagccagccuagagguauggcuguaacuaucucugugaagugugagaaaauuucaacucucuccugugagaacaaaauuauuuccuuuaaggaaaugaauccuccugauaacaucaaggauacaaaaagugacaucauauucuuucagagaagugucccaggacaugauaauaagaugcaauuugaaucuucaucauacgaaggauacuuucuagcuugugaaaaagagagagaccuuuuuaaacucauuuugaaaaaagaggaugaauugggggauagaucuauaauguucacuguucaaaacgaagacuag

SEQ ID NO: 4291 - RNA, 582 nt, Artificial Sequence
  derived and/or modified sequence opt1 from IL-18__Homo_sapiens__ACA06006
auggccgccgagcccguggaggacaacugcaucaacuucgucgccaugaaguucaucgacaacacccuguacuucaucggcgagcuccugaagaaccuggagagcgacuacuucgggaagcucgaguccaagcugagcgugauccgcaaccugaacgaccagguccucuucaucgaccagggcaaccggccgcuguucgaggacaugaccgacuccgacugccgcgacaacgcgccccggacgaucuucaucaucagcauguacaaggacucccagccccgcgggauggccgugaccaucagcgugaagugcgagaagaucuccacccugagcugcgagaacaagaucaucuccuucaaggagaugaacccgcccgacaacaucaaggacaccaagagcgacaucaucuucuuccagcgguccgugcccggccacgacaacaagaugcaguucgagagcuccagcuacgagggguacuuccucgccugcgagaaggagcgcgaccuguucaagcugauccucaagaaggaggacgagcugggcgaccgguccaucauguucacgguccagaacgaggacuga

SEQ ID NO: 4292 - RNA, 582 nt, Artificial Sequence
  derived and/or modified sequence opt2 from IL-18__Homo_sapiens__ACA06006
auggccgccgagcccgucgaggacaacugcaucaacuucgucgccaugaaguucaucgacaacacccucuacuucaucggcgagcuccucaagaaccucgaguccgacuacuucggcaagcucgaguccaagcucuccgucauccgcaaccucaacgaccagguccucuucaucgaccagggcaaccgcccccucuucgaggacaugaccgacuccgacugccgcgacaacgccccccgcaccaucuucaucaucuccauguacaaggacucccagccccgcggcauggccgucaccaucuccgucaagugcgagaagaucuccacccucuccugcgagaacaagaucaucuccuucaaggagaugaacccccccgacaacaucaaggacaccaaguccgacaucaucuucuuccagcgcuccguccccggccacgacaacaagaugcaguucgaguccuccuccuacgagggcuacuuccucgccugcgagaaggagcgcgaccucuucaagcucauccucaagaaggaggacgagcucggcgaccgcuccaucauguucaccguccagaacgaggacuga

SEQ ID NO: 4293 - RNA, 582 nt, Artificial Sequence
  derived and/or modified sequence opt3 from IL-18__Homo_sapiens__ACA06006
auggccgcugagcccguggaagacaacugcaucaauuucgucgcaaugaaguuuauugauaacacccuguacuucauaggcgagcuccuuaaaaaucuggaaagcgacuauuuugggaaguuggaguccaaauuaucuguuaucagaaaccugaaugaucaggugcuauucauugaccaaggaaacaggccucucuuugaagauaugacagacucagauugucgggacaaugccccacgcacuaucuucauuaucaguauguacaaggauagccagccgcgagguauggcgguaacgauauccgugaaaugcgagaagaucucuacccugucgugugagaacaagauuaucucauuuaaagaaaugaaucccccugacaacauuaaggauacaaaaagcgacaucauauucuuucagcguagugucccaggccacgauaauaagaugcaguucgaguccucuagcuaugaaggguacuuucuugcuugcgagaaagagagagaccuguucaaguugauucucaagaaagaagacgagcugggagauagguccaucauguuuacugugcaaaacgaagacuga

SEQ ID NO: 4294 - RNA, 582 nt, Artificial Sequence
  derived and/or modified sequence opt4 from IL-18__Homo_sapiens__ACA06006
auggccgccgagcccguggaggacaacugcaucaacuucguggccaugaaguucaucgacaacacccuguacuucaucggcgagcugcugaagaaccuggagagcgacuacuucggcaagcuggagagcaagcugagcgugaucagaaaccugaacgaccaggugcuguucaucgaccagggcaacagaccccuguucgaggacaugaccgacagcgacugcagagacaacgcccccagaaccaucuucaucaucagcauguacaaggacagccagcccagaggcauggccgugaccaucagcgugaagugcgagaagaucagcacccugagcugcgagaacaagaucaucagcuucaaggagaugaacccccccgacaacaucaaggacaccaagagcgacaucaucuucuuccagagaagcgugcccggccacgacaacaagaugcaguucgagagcagcagcuacgagggcuacuuccuggccugcgagaaggagagagaccuguucaagcugauccugaagaaggaggacgagcugggcgacagaagcaucauguucaccgugcagaacgaggacuga

SEQ ID NO: 4295 - RNA, 582 nt, Artificial Sequence
  derived and/or modified sequence opt5 from IL-18__Homo_sapiens__ACA06006
auggccgcugagcccguggaagacaacugcaucaauuucgucgccaugaaguuuauugauaacacccuguacuucaucggcgagcuccugaaaaaucuugaaagcgacuauuuugggaagcuggaguccaaacucucuguuauuagaaaccugaaugaucaggugcuuuucaucgaccaaggaaaccggccucuguuugaagauaugacagacagcgauugucgcgacaaugcgccgagaacgauuuucaucaucuccauguacaaggauucucagccccggggcauggcugugaccauuagcgucaaaugcgagaagaucuccacacucucuugugagaacaagauuaucagcuuuaaagaaaugaauccucccgacaacauuaaggauaccaaauccgacaucauuuucuuucagcgcagcgugccugggcacgauaauaagaugcaguucgagucuuccagcuaugaaggauacuuucuggccugcgagaaagagagagaccuguucaagcucauccugaagaaagaagacgagcuuggcgaucggucuaucauguuuacaguucaaaacgaagacuga

SEQ ID NO: 4296 - RNA, 582 nt, Artificial Sequence
  derived and/or modified sequence opt6 from IL-18__Homo_sapiens__ACA06006
auggcagcagaaccaguagaagacaacugcauaaacuucguagcaaugaaauucauagacaacacacuauacuucauaggagaacuacuaaaaaaccuagaaucagacuacuucggaaaacuagaaucaaaacuauccguaauaagaaaccuaaacgaccaaguacuauucauagaccaaggaaacagaccacucuucgaagacaugacagacucagacugcagagacaacgcaccaagaacaauauucauaauaucaauguacaaagacucacaaccaagaggaauggcaguaaccauaucaguaaaaugcgaaaaaauaucaacacuaucaugcgaaaacaaaauaauaucauucaaagaaaugaacccaccagacaacauaaaagacacaaaaucagacauaauauucuuccaaagaucaguaccaggacacgacaacaaaaugcaauucgaaagcucaucauacgaaggauacuuccuagcaugcgaaaaagaaagagaccuauucaaauuaauacuaaaaaaagaagacgaacuaggagacagaucaauaauguucacaguccaaaacgaagacuaa

SEQ ID NO: 4297 - protein, 193 aa, Artificial Sequence
  IL-18__Homo_sapiens__Q14116
MAAEPVEDNCINFVAMKFIDNTLYFIAEDDENLESDYFGKLESKLSVIRNLNDQVLFIDQGNRPLFEDMTDSDCRDNAPRTIFIISMYKDSQPRGMAVTISVKCEKISTLSCENKIISFKEMNPPDNIKDTKSDIIFFQRSVPGHDNKMQFESSSYEGYFLACEKERDLFKLILKKEDELGDRSIMFTVQNED

SEQ ID NO: 4298 - RNA, 582 nt, Artificial Sequence
  IL-18__Homo_sapiens__AAH07007
auggcugcugaaccaguagaagacaauugcaucaacuuuguggcaaugaaauuuauugacaauacgcuuuacuuuauagcugaagaugaugaaaaccuggaauccgauuacuuuggcaagcuugaaucuaaauuaucagucauaagaaauuugaaugaccaaguucucuucauugaccaaggaaaucggccucuauuugaagauaugacugauucugacuguagagauaaugcaccccggaccauauuuauuauaaguauguauaaagauagccagccuagagguauggcuguaacuaucucugugaagugugagaaaauuucaacucucuccugugagaacaaaauuauuuccuuuaaggaaaugaauccuccugauaacaucaaggauacaaaaagugacaucauauucuuucagagaagugucccaggacaugauaauaagaugcaauuugaaucuucaucauacgaaggauacuuucuagcuugugaaaaagagagagaccuuuuuaaacucauuuugaaaaaagaggaugaauugggggauagaucuauaauguucacuguucaaaacgaagacuag

SEQ ID NO: 4299 - RNA, 582 nt, Artificial Sequence
  derived and/or modified sequence opt1 from IL-18__Homo_sapiens__AAH07007
auggccgccgagcccguggaggacaacugcaucaacuucgucgccaugaaguucaucgacaacacccuguacuucaucgccgaggacgacgagaaccucgagagcgacuacuucggcaagcuggaguccaagcugagcgugauccgcaaccucaacgaccaggugcuguucaucgaccaggggaaccggccgcuguucgaggacaugaccgacuccgacugccgcgacaacgcgccccggacgaucuucaucaucagcauguacaaggacucccagccccgcggcauggccgucaccaucagcgugaagugcgagaagaucuccacccucagcugcgagaacaagaucaucuccuucaaggagaugaacccgcccgacaacaucaaggacaccaagagcgacaucaucuucuuccagcgguccgugcccgggcacgacaacaagaugcaguucgagagcuccagcuacgagggcuacuuccuggccugcgagaaggagcgcgaccuguucaagcucauccugaagaaggaggacgagcugggggaccgguccaucauguucacgguccagaacgaggacuga

SEQ ID NO: 4300 - RNA, 582 nt, Artificial Sequence
  derived and/or modified sequence opt2 from IL-18__Homo_sapiens__AAH07007
auggccgccgagcccgucgaggacaacugcaucaacuucgucgccaugaaguucaucgacaacacccucuacuucaucgccgaggacgacgagaaccucgaguccgacuacuucggcaagcucgaguccaagcucuccgucauccgcaaccucaacgaccagguccucuucaucgaccagggcaaccgcccccucuucgaggacaugaccgacuccgacugccgcgacaacgccccccgcaccaucuucaucaucuccauguacaaggacucccagccccgcggcauggccgucaccaucuccgucaagugcgagaagaucuccacccucuccugcgagaacaagaucaucuccuucaaggagaugaacccccccgacaacaucaaggacaccaaguccgacaucaucuucuuccagcgcuccguccccggccacgacaacaagaugcaguucgaguccuccuccuacgagggcuacuuccucgccugcgagaaggagcgcgaccucuucaagcucauccucaagaaggaggacgagcucggcgaccgcuccaucauguucaccguccagaacgaggacuga

SEQ ID NO: 4301 - RNA, 582 nt, Artificial Sequence
  derived and/or modified sequence opt3 from IL-18__Homo_sapiens__AAH07007
auggccgcugagcccguggaagacaacugcaucaauuucgucgcaaugaaguuuauugauaacacccuguacuucauagccgaggacgaugaaaaucucgagagcgacuauuuuggcaaacuugaauccaagcugucuguuaucagaaacuugaaugaucagguguuauucauugaccaagggaacaggccucuguuugaggauaugacagacucagauugucgggacaaugcgccacgcacuaucuucauuaucaguauguacaaagauagccagccgcgaggaauggcuguaacgauauccgugaagugcgagaaaaucucuacccuaucgugugaaaacaagauuaucucauuuaaggagaugaaucccccugacaacauuaaagauacaaagagcgacaucauauucuuucagcguagugucccaggucacgacaauaaaaugcaguucgaauccucuagcuaugagggcuacuuucucgccugcgagaaggaaagagaucuguucaaacuuauucugaagaaggaggacgaauugggggauagguccaucauguuuacugugcaaaacgaggacuga

SEQ ID NO: 4302 - RNA, 582 nt, Artificial Sequence
  derived and/or modified sequence opt4 from IL-18__Homo_sapiens__AAH07007
auggccgccgagcccguggaggacaacugcaucaacuucguggccaugaaguucaucgacaacacccuguacuucaucgccgaggacgacgagaaccuggagagcgacuacuucggcaagcuggagagcaagcugagcgugaucagaaaccugaacgaccaggugcuguucaucgaccagggcaacagaccccuguucgaggacaugaccgacagcgacugcagagacaacgcccccagaaccaucuucaucaucagcauguacaaggacagccagcccagaggcauggccgugaccaucagcgugaagugcgagaagaucagcacccugagcugcgagaacaagaucaucagcuucaaggagaugaacccccccgacaacaucaaggacaccaagagcgacaucaucuucuuccagagaagcgugcccggccacgacaacaagaugcaguucgagagcagcagcuacgagggcuacuuccuggccugcgagaaggagagagaccuguucaagcugauccugaagaaggaggacgagcugggcgacagaagcaucauguucaccgugcagaacgaggacuga

SEQ ID NO: 4303 - RNA, 582 nt, Artificial Sequence
  derived and/or modified sequence opt5 from IL-18__Homo_sapiens__AAH07007
auggccgcugagcccguggaagacaacugcaucaauuucgucgccaugaaguuuauugauaacacccuguacuucaucgcggaggacgaugaaaaucucgagagcgacuauuuuggcaaacuggaauccaagcucucuguuauuagaaaccugaaugaucaggugcuuuucaucgaccaagggaaccggccucuguuugaggauaugacagacagcgauugucgcgacaaugcuccgagaacgauuuucaucaucuccauguacaaagauucucagccccggggaauggccgugaccauuagcgucaagugcgagaaaaucuccacacuuucuugugaaaacaagauuaucagcuuuaaggagaugaauccucccgacaacauuaaagauaccaaguccgacaucauuuucuuucagcgcagcgugccuggccacgacaauaaaaugcaguucgaaucuuccagcuaugagggguacuuucuggccugcgagaaggaaagagaucucuucaaacugauccugaagaaggaggacgaacucggagaucggucuaucauguuuacaguucaaaacgaggacuga

SEQ ID NO: 4304 - RNA, 582 nt, Artificial Sequence
  derived and/or modified sequence opt6 from IL-18__Homo_sapiens__AAH07007
auggcagcagaaccaguagaagacaacugcauaaacuucguagcaaugaaauucaucgacaacacacuauacuucauagcagaagacgaugaaaaccuagaaagcgacuacuucggaaaauuagaaucaaaacuaucaguaauaagaaaccuaaacgaccaaguacuauucauagaccaaggaaacagaccacuauucgaagacaugacagacucagacugcagagacaacgcaccaagaacaauauucauaauaucaauguacaaagacagccaaccacgaggaauggcaguaacaauaagcguaaaaugcgaaaaaauaucaacacuaucaugcgaaaacaaaauaauaucauucaaagaaaugaacccaccagauaacauaaaagacacaaaaucagauauaauauucuuccaaagaucaguaccaggacacgacaacaaaaugcaauucgaaucaucaucauacgaaggauacuuccuagcaugcgaaaaagaacgagaccuauucaaacuaauacuaaaaaaagaagacgaauuaggagacagaucaauaauguucacaguacaaaacgaagacuaa

SEQ ID NO: 4305 - protein, 177 aa, Artificial Sequence
  IL-19__Homo_sapiens__Q9UHD0
MKLQCVSLWLLGTILILCSVDNHGLRRCLISTDMHHIEESFQEIKRAIQAKDTFPNVTILSTLETLQIIKPLDVCCVTKNLLAFYVDRVFKDHQEPNPKILRKISSIANSFLYMQKTLRQCQEQRQCHCRQEATNATRVIHDNYDQLEVHAAAIKSLGELDVFLAWINKNHEVMFSA

SEQ ID NO: 4306 - RNA, 534 nt, Artificial Sequence
  IL-19__Homo_sapiens__CCDS1469.1
augaaguuacaguguguuucccuuuggcuccuggguacaauacugauauugugcucaguagacaaccacggucucaggagaugucugauuuccacagacaugcaccauauagaagagaguuuccaagaaaucaaaagagccauccaagcuaaggacaccuucccaaaugucacuauccuguccacauuggagacucugcagaucauuaagcccuuagaugugugcugcgugaccaagaaccuccuggcguucuacguggacaggguguucaaggaucaucaggagccaaaccccaaaaucuugagaaaaaucagcagcauugccaacucuuuccucuacaugcagaaaacucugcggcaaugucaggaacagaggcagugucacugcaggcaggaagccaccaaugccaccagagucauccaugacaacuaugaucagcuggagguccacgcugcugccauuaaaucccugggagagcucgacgucuuucuagccuggauuaauaagaaucaugaaguaauguucucagcuuga

SEQ ID NO: 4307 - RNA, 534 nt, Artificial Sequence
  derived and/or modified sequence opt1 from IL-19__Homo_sapiens__CCDS1469.1
augaagcugcagugcgugagccucuggcugcugggcaccauccucauccugugcuccgucgacaaccacgggcugcgccggugccucaucagcaccgacaugcaccacaucgaggaguccuuccaggagaucaagcgcgccauccaggccaaggacacguuccccaacgugaccauccugagcacccuggagacccuccagaucaucaagccgcuggacgugugcugcgucacgaagaaccugcucgcguucuacguggaccggguguucaaggaccaccaggagcccaaccccaagauccugcgcaagaucuccagcaucgccaacuccuuccuguacaugcagaagacccuccggcagugccaggagcagcgccagugccacugccggcaggaggccaccaacgccacccgcgucauccacgacaacuacgaccagcuggaggugcacgccgcggccaucaagagccugggcgagcucgacguguuccuggccuggaucaacaagaaccacgaggucauguucuccgccuga

SEQ ID NO: 4308 - RNA, 534 nt, Artificial Sequence
  derived and/or modified sequence opt2 from IL-19__Homo_sapiens__CCDS1469.1
augaagcuccagugcgucucccucuggcuccucggcaccauccucauccucugcuccgucgacaaccacggccuccgccgcugccucaucuccaccgacaugcaccacaucgaggaguccuuccaggagaucaagcgcgccauccaggccaaggacaccuuccccaacgucaccauccucuccacccucgagacccuccagaucaucaagccccucgacgucugcugcgucaccaagaaccuccucgccuucuacgucgaccgcgucuucaaggaccaccaggagcccaaccccaagauccuccgcaagaucuccuccaucgccaacuccuuccucuacaugcagaagacccuccgccagugccaggagcagcgccagugccacugccgccaggaggccaccaacgccacccgcgucauccacgacaacuacgaccagcucgagguccacgccgccgccaucaagucccucggcgagcucgacgucuuccucgccuggaucaacaagaaccacgaggucauguucuccgccuga

SEQ ID NO: 4309 - RNA, 534 nt, Artificial Sequence
  derived and/or modified sequence opt3 from IL-19__Homo_sapiens__CCDS1469.1
augaagcugcagugcgugagccucuggcuucugggcaccaucuugauuuuauguuccgucgacaaccacgggcugagaaggugccuaauaucuacagauaugcaucacaucgaggaaucauuccaagagauuaaacgggccauccaggcuaaggacacuuuucccaauguuacgauucucaguacccuggaaacacuucagaucauaaaaccucuggauguguguugcguaacuaagaacuugcucgcauucuacguggaccgcgucuuuaaagaucaucaggagccaaauccgaagauccugcgaaagauuagcuccaucgccaacucuuuccuguauaugcagaaaacccuccgucaaugucaggaacagagacaaugccacuguaggcaggaggcgacaaaugcuacccgggugauucaugacaacuacgaucaguuagagguucacgccgcagccaucaagucgcugggagaacuugacguguuuuuggcuuggauaaauaaaaaccacgaggucauguucucagcauga

SEQ ID NO: 4310 - RNA, 534 nt, Artificial Sequence
  derived and/or modified sequence opt4 from IL-19__Homo_sapiens__CCDS1469.1
augaagcugcagugcgugagccuguggcugcugggcaccauccugauccugugcagcguggacaaccacggccugagaagaugccugaucagcaccgacaugcaccacaucgaggagagcuuccaggagaucaagagagccauccaggccaaggacaccuuccccaacgugaccauccugagcacccuggagacccugcagaucaucaagccccuggacgugugcugcgugaccaagaaccugcuggccuucuacguggacagaguguucaaggaccaccaggagcccaaccccaagauccugagaaagaucagcagcaucgccaacagcuuccuguacaugcagaagacccugagacagugccaggagcagagacagugccacugcagacaggaggccaccaacgccaccagagugauccacgacaacuacgaccagcuggaggugcacgccgccgccaucaagagccugggcgagcuggacguguuccuggccuggaucaacaagaaccacgaggugauguucagcgccuga

SEQ ID NO: 4311 - RNA, 534 nt, Artificial Sequence
  derived and/or modified sequence opt5 from IL-19__Homo_sapiens__CCDS1469.1
augaagcugcagugcgugagccucuggcugcuuggcaccauccugauucucuguuccgucgacaaccacgggcugagacggugccuuaucucuacagauaugcaucacauugaggagagcuuccaagaaaucaaacgcgccauucaggcuaaggacacguuucccaauguuaccauccuguccacacucgaaacccugcagaucauuaaaccucuggauguguguugcgugacaaagaaccuccuggccuucuacgucgacagaguguuuaaagaucaucaggagccgaaucccaagauccuucggaagauuucuagcaucgcgaacuccuuccuguauaugcagaaaacccuccgccaaugucaggaacagagacaaugccacugucggcaggaggcuacaaaugccacccgcguuauucaugacaacuacgaucagcuggaggugcacgccgcugccaucaagucucuuggagaacuggacgucuuucucgcuuggauuaauaaaaaccacgaggugauguucagcgccuga

SEQ ID NO: 4312 - RNA, 534 nt, Artificial Sequence
  derived and/or modified sequence opt6 from IL-19__Homo_sapiens__CCDS1469.1
augaaacuacaaugcguaucacuauggcuacuaggaacaauacuaauacuaugcucaguagacaaucacggacuaagaagaugccuaauaucaacagacaugcaccacauagaagaaucauuucaagaaauaaaaagagcaauacaagcaaaagacacauucccaaacguaacaauacuaucaacacuagaaacacuacaaauaauaaaaccacucgacguaugcugcguaacaaaaaacuuacuagcauucuacguagacagagucuucaaagaccaccaagaaccaaacccaaaaauacuaagaaaaauaucaagcauagccaacucauuccuauacaugcaaaaaacacuaagacaaugccaagaacaaagacaaugccacugcagacaagaagcaacaaacgcaacaagaguaauacacgacaacuacgaccaauuagaaguacacgcagcagcaauaaaaucacuaggagaacuagacguauuccuagcauggauaaacaaaaaccaugaaguaauguucucagcauaa

SEQ ID NO: 4313 - protein, 271 aa, Artificial Sequence
  IL-1_alpha__Homo_sapiens__P01583
MAKVPDMFEDLKNCYSENEEDSSSIDHLSLNQKSFYHVSYGPLHEGCMDQSVSLSISETSKTSKLTFKESMVVVATNGKVLKKRRLSLSQSITDDDLEAIANDSEEEIIKPRSAPFSFLSNVKYNFMRIIKYEFILNDALNQSIIRANDQYLTAAALHNLDEAVKFDMGAYKSSKDDAKITVILRISKTQLYVTAQDEDQPVLLKEMPEIPKTITGSETNLLFFWETHGTKNYFTSVAHPNLFIATKQDYWVCLAGGPPSITDFQILENQA

SEQ ID NO: 4314 - RNA, 816 nt, Artificial Sequence
  IL-1_alpha__Homo_sapiens__AAA59133
auggccaaaguuccagacauguuugaagaccugaagaacuguuacagugaaaaugaagaagacaguuccuccauugaucaucugucucugaaucagaaauccuucuaucauguaagcuauggcccacuccaugaaggcugcauggaucaaucugugucucugaguaucucugaaaccucuaaaacauccaagcuuaccuucaaggagagcauggugguaguagcaaccaacgggaagguucugaagaagagacgguugaguuuaagccaauccaucacugaugaugaccuggaggccaucgccaaugacucagaggaagaaaucaucaagccuaggucagcaccuuuuagcuuccugagcaaugugaaauacaacuuuaugaggaucaucaaauacgaauucauccugaaugacgcccucaaucaaaguauaauucgagccaaugaucaguaccucacggcugcugcauuacauaaucuggaugaagcagugaaauuugacaugggugcuuauaagucaucaaaggaugaugcuaaaauuaccgugauucuaagaaucucaaaaacucaauuguaugugacugcccaagaugaagaccaaccagugcugcugaaggagaugccugagauacccaaaaccaucacagguagugagaccaaccuccucuucuucugggaaacucacggcacuaagaacuauuucacaucaguugcccauccaaacuuguuuauugccacaaagcaagacuacugggugugcuuggcaggggggccacccucuaucacugacuuucagauacuggaaaaccaggcguag

SEQ ID NO: 4315 - RNA, 816 nt, Artificial Sequence
  derived and/or modified sequence opt1 from IL-1_alpha__Homo_sapiens__AAA59133
auggccaaggugcccgacauguucgaggaccugaagaacugcuacagcgagaacgaggaggacuccagcuccaucgaccaccucagccugaaccagaaguccuucuaccacgucagcuacggcccgcugcacgagggcugcauggaccaguccgugagccucuccaucagcgagaccuccaagaccagcaagcugacguucaaggaguccaugguggucguggccaccaacggcaaggugcugaagaagcgccggcucagccugucccagagcaucaccgacgacgaccuggaggcgaucgccaacgacuccgaggaggagaucaucaagccccgcagcgcccccuucuccuuccucagcaacgucaaguacaacuucaugcggaucaucaaguacgaguucauccugaacgacgcccugaaccagagcaucauccgcgccaacgaccaguaccucaccgcggccgcccugcacaaccuggacgaggccgugaaguucgacaugggggcguacaaguccagcaaggacgacgccaagaucacggugauccuccggaucuccaagacccagcuguacgucaccgcccaggacgaggaccagcccgugcugcucaaggagaugccggagauccccaagaccaucacgggcagcgagaccaaccugcuguucuucugggagacccacgggaccaagaacuacuucacguccguggcccaccccaaccucuucaucgccaccaagcaggacuacugggucugccuggcgggcgggcccccgagcaucaccgacuuccagauccuggagaaccaggccuga

SEQ ID NO: 4316 - RNA, 816 nt, Artificial Sequence
  derived and/or modified sequence opt2 from IL-1_alpha__Homo_sapiens__AAA59133
auggccaagguccccgacauguucgaggaccucaagaacugcuacuccgagaacgaggaggacuccuccuccaucgaccaccucucccucaaccagaaguccuucuaccacgucuccuacggcccccuccacgagggcugcauggaccaguccgucucccucuccaucuccgagaccuccaagaccuccaagcucaccuucaaggaguccauggucgucgucgccaccaacggcaagguccucaagaagcgccgccucucccucucccaguccaucaccgacgacgaccucgaggccaucgccaacgacuccgaggaggagaucaucaagccccgcuccgcccccuucuccuuccucuccaacgucaaguacaacuucaugcgcaucaucaaguacgaguucauccucaacgacgcccucaaccaguccaucauccgcgccaacgaccaguaccucaccgccgccgcccuccacaaccucgacgaggccgucaaguucgacaugggcgccuacaaguccuccaaggacgacgccaagaucaccgucauccuccgcaucuccaagacccagcucuacgucaccgcccaggacgaggaccagcccguccuccucaaggagaugcccgagauccccaagaccaucaccggcuccgagaccaaccuccucuucuucugggagacccacggcaccaagaacuacuucaccuccgucgcccaccccaaccucuucaucgccaccaagcaggacuacugggucugccucgccggcggcccccccuccaucaccgacuuccagauccucgagaaccaggccuga

SEQ ID NO: 4317 - RNA, 816 nt, Artificial Sequence
  derived and/or modified sequence opt3 from IL-1_alpha__Homo_sapiens__AAA59133
auggccaaggugcccgacauguucgaggaucugaaaaacugcuacagcgaaaaugaggaagacuccucuucaaucgaucaccucagucuuaaccaaaagagcuuuuaucaugucuccuacggcccucugcacgagggguguauggaccagucuguuucguugucaauuagcgaaaccaguaaaacauccaaguuaacuuucaaagagucuauggugguaguggcuacgaauggaaagguccugaagaaaagaaggcuaagccucucccagucaauaaccgaugacgaucuggaggcaaucgccaacgacagugaagaggaaauuaucaagccacggagcgcgccguuuucuuuccuuuccaaugugaaauauaacuuuaugcgcauuaucaaguacgaguucauacugaaugaugcuuugaaccagucaaucauucgagccaaugaccaguaucucacagcagccgcucugcauaaccuggaugaggcaguuaaauuugacaugggugccuacaagagcaguaaggaugacgcuaaaaucacugugauucuccguaucucuaagacccaauuauaugucacagcccaggacgaagaucagcccgugcugcuuaaagagaugccugaaauaccaaagaccauuacuggcuccgagacaaauuugcuguucuuuugggaaacccacgggacgaaaaacuacuucacuagcguagcgcaucccaaucuauuuaucgcaaccaagcaggacuacuggguuugccucgccggaggcccuccaucgauuacagauuuccaaauccuggagaaccaggcuuga

SEQ ID NO: 4318 - RNA, 816 nt, Artificial Sequence
  derived and/or modified sequence opt4 from IL-1_alpha__Homo_sapiens__AAA59133
auggccaaggugcccgacauguucgaggaccugaagaacugcuacagcgagaacgaggaggacagcagcagcaucgaccaccugagccugaaccagaagagcuucuaccacgugagcuacggcccccugcacgagggcugcauggaccagagcgugagccugagcaucagcgagaccagcaagaccagcaagcugaccuucaaggagagcaugguggugguggccaccaacggcaaggugcugaagaagagaagacugagccugagccagagcaucaccgacgacgaccuggaggccaucgccaacgacagcgaggaggagaucaucaagcccagaagcgcccccuucagcuuccugagcaacgugaaguacaacuucaugagaaucaucaaguacgaguucauccugaacgacgcccugaaccagagcaucaucagagccaacgaccaguaccugaccgccgccgcccugcacaaccuggacgaggccgugaaguucgacaugggcgccuacaagagcagcaaggacgacgccaagaucaccgugauccugagaaucagcaagacccagcuguacgugaccgcccaggacgaggaccagcccgugcugcugaaggagaugcccgagauccccaagaccaucaccggcagcgagaccaaccugcuguucuucugggagacccacggcaccaagaacuacuucaccagcguggcccaccccaaccuguucaucgccaccaagcaggacuacugggugugccuggccggcggcccccccagcaucaccgacuuccagauccuggagaaccaggccuga

SEQ ID NO: 4319 - RNA, 816 nt, Artificial Sequence
  derived and/or modified sequence opt5 from IL-1_alpha__Homo_sapiens__AAA59133
auggccaaggugcccgacauguucgaggaucugaaaaacugcuacagcgaaaaugaggaagacuccucuagcaucgaucaccucucccugaaccagaagucuuuuuaucaugucagcuacggcccucuucacgagggguguauggaccaauccguuucucugagcauuuccgaaaccagcaaaacaucuaagcucacguucaaagaguccauggugguggucgcuaccaauggaaaggugcugaagaaaagacggcuuagccugucucaguccaucacagaugacgaucucgaggccauugcgaacgacagcgaagaggaaaucauuaagccgcgcucugcucccuuuuccuuccugagcaauguuaaauauaacuuuaugagaaucaucaaguacgaguucauucugaaugaugcccucaaccaguccaucauucgggccaaugaccaguaucugaccgcugccgcccuucauaaccuggaugaggcugugaaauuugacaugggcgcguacaagucuagcaaggaugacgccaaaaucacagucauucuccgcaucuccaagacccaacuguaugugacagcucaggacgaagaucagccuguucuucugaaagagaugcccgaaauuccuaagaccaucacggggagcgagaccaaucuccuguucuuuugggaaacacacggaaccaaaaacuacuucacaucuguggcccaucccaaucuguuuaucgcuaccaagcaggacuacugggucugccucgccggcgggccuccguccauuacggauuuccaaauccuggagaaccaggcguga

SEQ ID NO: 4320 - RNA, 816 nt, Artificial Sequence
  derived and/or modified sequence opt6 from IL-1_alpha__Homo_sapiens__AAA59133
auggcaaaaguaccagacauguucgaagacuuaaaaaauugcuacucagaaaacgaagaagacucaucauccauagaccaccuaucacuaaaccaaaaauccuucuaucacguaucauacggaccacuacacgaaggaugcauggaccaaucaguaucacuaucuauaucagaaacaucaaaaacaucaaaacuaacauucaaagaaucaaugguaguaguagcaacaaacggaaaaguauuaaaaaaaagaagauuaucacuaucacaauccauaacagacgacgaccuagaagccauagcaaaugacucagaagaagaaauaauaaaaccacgaucagcaccauuuucauuccuaucaaauguaaaauacaauuucaugcgaauaauaaaauacgaauucauauuaaacgacgcacuaaaccaaucaauaauaagagccaacgaccaauaccuaacugcagcagcacuacacaaccucgacgaagcaguaaaauucgacaugggagccuauaaaucaucaaaagacgacgcaaaaauaacagucauauuaagaauaucaaaaacacaauuauacguaacagcacaagacgaagaccaaccaguacuacuaaaagaaaugccugaaauaccaaaaacaauaacaggaucagaaacaaacuuauuauucuucugggaaacacacggaacaaaaaacuacuucacaucuguagcacacccaaaccuauucauagcaaccaaacaagacuacuggguaugccuagcuggaggcccaccauccaucacagacuuccaaauacuagaaaaccaagcauaa

SEQ ID NO: 4321 - protein, 269 aa, Artificial Sequence
  IL-1_beta__Homo_sapiens__P01584
MAEVPELASEMMAYYSGNEDDLFFEADGPKQMKCSFQDLDLCPLDGGIQLRISDHHYSKGFRQAASVVVAMDKLRKMLVPCPQTFQENDLSTFFPFIFEEEPIFFDTWDNEAYVHDAPVRSLNCTLRDSQQKSLVMSGPYELKALHLQGQDMEQQVVFSMSFVQGEESNDKIPVALGLKEKNLYLSCVLKDDKPTLQLESVDPKNYPKKKMEKRFVFNKIEINNKLEFESAQFPNWYISTSQAENMPVFLGGTKGGQDITDFTMQFVSS

SEQ ID NO: 4322 - RNA, 810 nt, Artificial Sequence
  IL-1_beta__Homo_sapiens__AAA59135
auggcagaaguaccugagcucgccagugaaaugauggcuuauuacaguggcaaugaggaugacuuguucuuugaagcugauggcccuaaacagaugaagugcuccuuccaggaccuggaccucugcccucuggauggcggcauccagcuacgaaucuccgaccaccacuacagcaagggcuucaggcaggccgcgucaguuguuguggccauggacaagcugaggaagaugcugguucccugcccacagaccuuccaggagaaugaccugagcaccuucuuucccuucaucuuugaagaagaaccuaucuucuucgacacaugggauaacgaggcuuaugugcacgaugcaccuguacgaucacugaacugcacgcuccgggacucacagcaaaaaagcuuggugaugucugguccauaugaacugaaagcucuccaccuccagggacaggauauggagcaacaagugguguucuccauguccuuuguacaaggagaagaaaguaaugacaaaauaccuguggccuugggccucaaggaaaagaaucuguaccuguccugcguguugaaagaugauaagcccacucuacagcuggagaguguagaucccaaaaauuacccaaagaagaagauggaaaagcgauuugucuucaacaagauagaaaucaauaacaagcuggaauuugagucugcccaguuccccaacugguacaucagcaccucucaagcagaaaacaugcccgucuuccugggagggaccaaaggcggccaggauauaacugacuucaccaugcaauuugugucuuccuaa

SEQ ID NO: 4323 - RNA, 810 nt, Artificial Sequence
  derived and/or modified sequence opt1 from IL-1_beta__Homo_sapiens__AAA59135
auggccgaggugcccgagcuggccagcgagaugauggcguacuacuccggcaacgaggacgaccucuucuucgaggccgacgggccgaagcagaugaagugcagcuuccaggaccuggaccugugcccccucgacggcgggauccagcugcgcaucuccgaccaccacuacagcaagggcuuccggcaggccgccuccgucgugguggccauggacaagcugcgcaagaugcucguccccugcccccagaccuuccaggagaacgaccugagcaccuucuucccguucaucuucgaggaggagcccaucuucuucgacacgugggacaacgaggcguacgugcacgacgcccccgugcggucccugaacugcacccuccgcgacagccagcagaagucccuggucaugagcgggcccuacgagcugaaggcccuccaccuccagggccaggacauggagcagcaggucguguucuccaugagcuucgugcagggcgaggaguccaacgacaagaucccgguggcccuggggcugaaggagaagaaccuguaccugagcugcgugcucaaggacgacaagcccacccugcagcuggaguccgucgaccccaagaacuaccccaagaagaagauggagaagcgguucguguucaacaagaucgagaucaacaacaagcucgaguucgagagcgcgcaguucccgaacugguacaucuccaccagccaggccgagaacaugcccguguuccugggcgggacgaagggcgggcaggacaucaccgacuucaccaugcaguucgucuccagcuga

SEQ ID NO: 4324 - RNA, 810 nt, Artificial Sequence
  derived and/or modified sequence opt2 from IL-1_beta__Homo_sapiens__AAA59135
auggccgagguccccgagcucgccuccgagaugauggccuacuacuccggcaacgaggacgaccucuucuucgaggccgacggccccaagcagaugaagugcuccuuccaggaccucgaccucugcccccucgacggcggcauccagcuccgcaucuccgaccaccacuacuccaagggcuuccgccaggccgccuccgucgucgucgccauggacaagcuccgcaagaugcucguccccugcccccagaccuuccaggagaacgaccucuccaccuucuuccccuucaucuucgaggaggagcccaucuucuucgacaccugggacaacgaggccuacguccacgacgcccccguccgcucccucaacugcacccuccgcgacucccagcagaagucccucgucauguccggccccuacgagcucaaggcccuccaccuccagggccaggacauggagcagcaggucgucuucuccauguccuucguccagggcgaggaguccaacgacaagauccccgucgcccucggccucaaggagaagaaccucuaccucuccugcguccucaaggacgacaagcccacccuccagcucgaguccgucgaccccaagaacuaccccaagaagaagauggagaagcgcuucgucuucaacaagaucgagaucaacaacaagcucgaguucgaguccgcccaguuccccaacugguacaucuccaccucccaggccgagaacaugcccgucuuccucggcggcaccaagggcggccaggacaucaccgacuucaccaugcaguucgucuccuccuga

SEQ ID NO: 4325 - RNA, 810 nt, Artificial Sequence
  derived and/or modified sequence opt3 from IL-1_beta__Homo_sapiens__AAA59135
auggccgaggugcccgaacuggcuagcgagaugauggcauacuauuccggcaacgaagacgaucucuucuuugaggccgacgggccuaagcagaugaaaugcucuuuccaagaucuugaccuguguccauuggauggagguauccaguuaagaauuucagaccaccauuacaguaagggcuuuaggcaggcggcuagcgucguuguggccauggauaaacugcggaagaugcuaguaccgugcccccagaccuuccaagaaaaugaccucuccacauuuuucccuuuuauauucgaggaggaaccaaucuuuuucgauacuugggacaacgaggcauaugugcacgaugcccccguccgcucucugaauuguacgcuucgagacucgcagcagaaaucacuggugaugagcgggccuuacgaauugaaggcucuccaucugcagggacaagauauggagcagcagguuguguuuaguauguccuucguccagggcgaggaaucuaacgacaagauuccaguggcacugggucucaaagagaagaauuuauaucugagcugcguacuuaaagacgauaagcccaccuugcaacuggaauccguugacccuaaaaacuacccaaagaagaaaauggagaagcguuuuguguucaauaaaaucgaaauuaacaauaagcuagaguucgagucagcccaguuuccgaacugguauaucaguacaagccaggcugaaaauaugcccgucuuccucgggggaacuaaaggcggccaagauauaaccgacuuuacaaugcaguucgugucuuccuga

SEQ ID NO: 4326 - RNA, 810 nt, Artificial Sequence
  derived and/or modified sequence opt4 from IL-1_beta__Homo_sapiens__AAA59135
auggccgaggugcccgagcuggccagcgagaugauggccuacuacagcggcaacgaggacgaccuguucuucgaggccgacggccccaagcagaugaagugcagcuuccaggaccuggaccugugcccccuggacggcggcauccagcugagaaucagcgaccaccacuacagcaagggcuucagacaggccgccagcguggugguggccauggacaagcugagaaagaugcuggugcccugcccccagaccuuccaggagaacgaccugagcaccuucuuccccuucaucuucgaggaggagcccaucuucuucgacaccugggacaacgaggccuacgugcacgacgcccccgugagaagccugaacugcacccugagagacagccagcagaagagccuggugaugagcggccccuacgagcugaaggcccugcaccugcagggccaggacauggagcagcaggugguguucagcaugagcuucgugcagggcgaggagagcaacgacaagauccccguggcccugggccugaaggagaagaaccuguaccugagcugcgugcugaaggacgacaagcccacccugcagcuggagagcguggaccccaagaacuaccccaagaagaagauggagaagagauucguguucaacaagaucgagaucaacaacaagcuggaguucgagagcgcccaguuccccaacugguacaucagcaccagccaggccgagaacaugcccguguuccugggcggcaccaagggcggccaggacaucaccgacuucaccaugcaguucgugagcagcuga

SEQ ID NO: 4327 - RNA, 810 nt, Artificial Sequence
  derived and/or modified sequence opt5 from IL-1_beta__Homo_sapiens__AAA59135
auggccgaggugcccgaacuggcuagcgagaugauggccuacuauuccggcaacgaagacgaucucuucuuugaggcggacgggccuaagcagaugaaaugcucuuuccaagaucuggaccuuuguccgcuggauggaggcauccagcucagaauuagcgaccaccauuacuccaagggguuucggcaggcugccucugucguuguggccauggauaaacugcgcaagaugcuugugcccugcccucagaccuuccaagaaaaugaccugagcacauuuuuccccuuuaucuucgaggaggaaccuaucuuuuucgauacgugggacaacgaggcuuauguccacgaugcccccgugagaucccucaauuguacccugcgggacucucagcagaaaagccugguuauguccggaccuuacgaacucaaggcucugcaucuucagggccaagauauggagcaacagguggucuuuagcaugucuuucgugcagggggaggaauccaacgacaagauuccgguugcccugggacucaaagagaagaaucuguaucuuagcugcgugcugaaagacgauaagcccacacuccagcuggaaucugucgacccuaaaaacuaccccaagaagaaaauggagaagcgcuuuguguucaauaaaauugaaaucaacaauaagcuggaguucgaguccgcgcaguuuccuaacugguauaucagcaccucucaggccgaaaauaugcccguguuccucggcggcacaaaagggggacaagauauuaccgacuuuacaaugcaguucgucuccagcuga

SEQ ID NO: 4328 - RNA, 810 nt, Artificial Sequence
  derived and/or modified sequence opt6 from IL-1_beta__Homo_sapiens__AAA59135
auggcagaaguaccagaauuagcaucagaaaugauggcauauuacucaggaaacgaagaugaucuauucuucgaagcagacggaccaaaacaaaugaaauguagcuuccaagaccuagaccuauguccacuagauggcggaauacaacuaagaauaucagaccaccacuacucaaaaggauuccgacaagcagcaucaguaguaguagcuauggacaaauuaagaaaaaugcuaguaccaugcccacaaacauuccaagaaaacgaccuaucaacauucuucccauucauauucgaagaagaaccaauauucuucgacaccugggacaacgaagccuauguacacgacgcaccaguaagaucacuaaacugcacauuacgagacucacaacaaaaaucacuagucaugucaggacccuacgaacuaaaagcacuacacuuacaaggacaagacauggaacaacaaguaguauucucaaugucauuuguacaaggagaagaaucaaacgauaaaauaccaguagcacuaggacucaaagaaaaaaaccuauaucuaucauguguauuaaaagaugacaaaccaacauuacaacuagaaucagucgauccaaaaaacuacccaaaaaaaaaaauggaaaaaagauucguauucaacaaaauagaaauaaacaauaaacuagaauucgaauccgcacaauucccaaacugguacauaucaacaucccaagcagaaaacaugccaguauuccuaggaggaacaaaaggaggacaagacauaacagacuucacaaugcaauucguaucaucauaa

SEQ ID NO: 4329 - protein, 159 aa, Artificial Sequence
  IL-1ra_(antagonist)__Homo_sapiens__P18510-2
MALETICRPSGRKSSKMQAFRIWDVNQKTFYLRNNQLVAGYLQGPNVNLEEKIDVVPIEPHALFLGIHGGKMCLSCVKSGDETRLQLEAVNITDLSENRKQDKRFAFIRSDSGPTTSFESAACPGWFLCTAMEADQPVSLTNMPDEGVMVTKFYFQEDE

SEQ ID NO: 4330 - RNA, 480 nt, Artificial Sequence
  IL-1ra_(antagonist)__Homo_sapiens__CCDS2113.1
auggcuuuagagacgaucugccgacccucugggagaaaauccagcaagaugcaagccuucagaaucugggauguuaaccagaagaccuucuaucugaggaacaaccaacuaguugcuggauacuugcaaggaccaaaugucaauuuagaagaaaagauagaugugguacccauugagccucaugcucuguucuugggaauccauggagggaagaugugccuguccugugucaagucuggugaugagaccagacuccagcuggaggcaguuaacaucacugaccugagcgagaacagaaagcaggacaagcgcuucgccuucauccgcucagacaguggccccaccaccaguuuugagucugccgccugccccgguugguuccucugcacagcgauggaagcugaccagcccgucagccucaccaauaugccugacgaaggcgucauggucaccaaauucuacuuccaggaggacgaguag

SEQ ID NO: 4331 - RNA, 480 nt, Artificial Sequence
  derived and/or modified sequence opt1 from IL-1ra_(antagonist)__Homo_sapiens__CCDS2113.1
auggcccuggagaccaucugccgccccagcggccggaaguccagcaagaugcaggccuuccgcaucugggacgugaaccagaagaccuucuaccuccggaacaaccagcuggucgcgggguaccugcagggcccgaacgugaaccucgaggagaagaucgacgugguccccaucgagccccacgcccuguuccuggggauccacggcgggaagaugugccucuccugcgucaagagcggcgacgagacgcgccugcagcuggaggccgugaacaucaccgaccucuccgagaaccggaagcaggacaagcgcuucgccuucauccggagcgacuccggccccaccaccagcuucgaguccgccgcgugcccggggugguuccugugcacggccauggaggccgaccagcccgugagccugaccaacaugcccgacgagggcgugauggugaccaaguucuacuuccaggaggacgaguga

SEQ ID NO: 4332 - RNA, 480 nt, Artificial Sequence
  derived and/or modified sequence opt2 from IL-1ra_(antagonist)__Homo_sapiens__CCDS2113.1
auggcccucgagaccaucugccgccccuccggccgcaaguccuccaagaugcaggccuuccgcaucugggacgucaaccagaagaccuucuaccuccgcaacaaccagcucgucgccggcuaccuccagggccccaacgucaaccucgaggagaagaucgacgucguccccaucgagccccacgcccucuuccucggcauccacggcggcaagaugugccucuccugcgucaaguccggcgacgagacccgccuccagcucgaggccgucaacaucaccgaccucuccgagaaccgcaagcaggacaagcgcuucgccuucauccgcuccgacuccggccccaccaccuccuucgaguccgccgccugccccggcugguuccucugcaccgccauggaggccgaccagcccgucucccucaccaacaugcccgacgagggcgucauggucaccaaguucuacuuccaggaggacgaguga

SEQ ID NO: 4333 - RNA, 480 nt, Artificial Sequence
  derived and/or modified sequence opt3 from IL-1ra_(antagonist)__Homo_sapiens__CCDS2113.1
auggcccuggagaccaucugcagacccagcggcaggaaguccucuaaaaugcaggcuuuccggauuugggacgugaaccaaaagacauuuuaccuccgcaauaaccagcuugucgcaggguaucugcagggaccuaauguuaacuuggaagagaaaauagaugugguaccaaucgaaccgcacgccuuauuccuggguauucauggcgggaagaugugucuaucaugcgugaaaaguggagacgagacucgacuccagcuggaagcggucaauaucacggaucuuagcgagaaccguaagcaagacaagagauuugcuuucauuagguccgauucuggccccaccacaucguuugagucagccgcauguccugguugguuccugugcacugccauggaagcugaccagccagugagcuugaccaauaugcccgaugaggggguuauggugacaaaauuuuacuuccaggaagacgaguga

SEQ ID NO: 4334 - RNA, 480 nt, Artificial Sequence
  derived and/or modified sequence opt4 from IL-1ra_(antagonist)__Homo_sapiens__CCDS2113.1
auggcccuggagaccaucugcagacccagcggcagaaagagcagcaagaugcaggccuucagaaucugggacgugaaccagaagaccuucuaccugagaaacaaccagcugguggccggcuaccugcagggccccaacgugaaccuggaggagaagaucgacguggugcccaucgagccccacgcccuguuccugggcauccacggcggcaagaugugccugagcugcgugaagagcggcgacgagaccagacugcagcuggaggccgugaacaucaccgaccugagcgagaacagaaagcaggacaagagauucgccuucaucagaagcgacagcggccccaccaccagcuucgagagcgccgccugccccggcugguuccugugcaccgccauggaggccgaccagcccgugagccugaccaacaugcccgacgagggcgugauggugaccaaguucuacuuccaggaggacgaguga

SEQ ID NO: 4335 - RNA, 480 nt, Artificial Sequence
  derived and/or modified sequence opt5 from IL-1ra_(antagonist)__Homo_sapiens__CCDS2113.1
auggcccuggagaccaucugcagacccagcggccggaaguccucuaaaaugcaggcuuuccgcauuugggacgugaaccaaaagacauuuuaccucagaaauaaccagcuggucgccggguaucuucagggaccuaauguuaaccuggaagagaaaaucgauguggugccgauugaaccccacgcucucuuccugggcauccaugggggaaagaugugucuuagcugcgucaaauccggcgacgagacgcggcugcagcucgaagcggugaauauuaccgaucugucugagaaccgcaagcaagacaagagauuugccuucauccggagcgauuccgggccuacaaccucuuuugagagcgccgcuugucccggaugguuccugugcacagccauggaagcugaccagccuguuucccucaccaauaugcccgaugagggcgugauggucacaaaauuuuacuuccaggaagacgaguga

SEQ ID NO: 4336 - RNA, 480 nt, Artificial Sequence
  derived and/or modified sequence opt6 from IL-1ra_(antagonist)__Homo_sapiens__CCDS2113.1
auggcacuagaaacaauaugcagaccaucaggaagaaaaucaucaaaaaugcaagcauucagaauaugggacguaaaccaaaaaacauucuauuuaagaaacaaccaacuaguagcaggauacuuacaaggaccaaacguaaaccuagaagaaaaaauagacguaguaccaauagaaccacacgcacuauuccuaggaauacacggaggaaaaaugugccuaagcugcguaaaaucaggagacgaaacaagauuacaauuagaagccguaaacauaacagaccuaucagaaaacagaaaacaagacaaaagauucgcauucauaagaucagacucaggaccaacaacaucauucgaaucagcagcaugcccaggaugguuccuauguacagcaauggaagcagaccaaccaguaucacuaacaaacaugccagacgaaggaguaaugguaacaaaauucuacuuccaagaagacgaauaa

SEQ ID NO: 4337 - protein, 180 aa, Artificial Sequence
  IL-1ra_(antagonist)__Homo_sapiens__P18510-3
MALADLYEEGGGGGGEGEDNADSKETICRPSGRKSSKMQAFRIWDVNQKTFYLRNNQLVAGYLQGPNVNLEEKIDVVPIEPHALFLGIHGGKMCLSCVKSGDETRLQLEAVNITDLSENRKQDKRFAFIRSDSGPTTSFESAACPGWFLCTAMEADQPVSLTNMPDEGVMVTKFYFQEDE

SEQ ID NO: 4338 - RNA, 543 nt, Artificial Sequence
  IL-1ra_(antagonist)__Homo_sapiens__CCDS2114.1
auggcuuuagcugacuuguaugaagaaggagguggaggaggaggagaaggugaagacaaugcugacucaaaggagacgaucugccgacccucugggagaaaauccagcaagaugcaagccuucagaaucugggauguuaaccagaagaccuucuaucugaggaacaaccaacuaguugcuggauacuugcaaggaccaaaugucaauuuagaagaaaagauagaugugguacccauugagccucaugcucuguucuugggaauccauggagggaagaugugccuguccugugucaagucuggugaugagaccagacuccagcuggaggcaguuaacaucacugaccugagcgagaacagaaagcaggacaagcgcuucgccuucauccgcucagacaguggccccaccaccaguuuugagucugccgccugccccgguugguuccucugcacagcgauggaagcugaccagcccgucagccucaccaauaugccugacgaaggcgucauggucaccaaauucuacuuccaggaggacgaguag

SEQ ID NO: 4339 - RNA, 543 nt, Artificial Sequence
  derived and/or modified sequence opt1 from IL-1ra_(antagonist)__Homo_sapiens__CCDS2114.1
auggcccuggccgaccucuacgaggagggcgggggcgggggcggggagggcgaggacaacgcggacagcaaggagaccaucugccgccccuccggccgcaagagcuccaagaugcaggccuuccggaucugggacgugaaccagaagaccuucuaccugcggaacaaccagcuggucgccggguaccuccagggcccgaacgugaaccuggaggagaagaucgacgugguccccaucgagccccacgcccuguuccucgggauccacggcgggaagaugugccugagcugcgugaaguccggcgacgagacgcgccugcagcucgaggccgugaacaucaccgaccugagcgagaaccggaagcaggacaagcgcuucgcguucauccgguccgacagcggccccaccaccuccuucgagagcgccgccugcccggggugguuccugugcacggccauggaggcggaccagcccgucucccucaccaacaugcccgacgagggcgugauggugaccaaguucuacuuccaggaggacgaguga

SEQ ID NO: 4340 - RNA, 543 nt, Artificial Sequence
  derived and/or modified sequence opt2 from IL-1ra_(antagonist)__Homo_sapiens__CCDS2114.1
auggcccucgccgaccucuacgaggagggcggcggcggcggcggcgagggcgaggacaacgccgacuccaaggagaccaucugccgccccuccggccgcaaguccuccaagaugcaggccuuccgcaucugggacgucaaccagaagaccuucuaccuccgcaacaaccagcucgucgccggcuaccuccagggccccaacgucaaccucgaggagaagaucgacgucguccccaucgagccccacgcccucuuccucggcauccacggcggcaagaugugccucuccugcgucaaguccggcgacgagacccgccuccagcucgaggccgucaacaucaccgaccucuccgagaaccgcaagcaggacaagcgcuucgccuucauccgcuccgacuccggccccaccaccuccuucgaguccgccgccugccccggcugguuccucugcaccgccauggaggccgaccagcccgucucccucaccaacaugcccgacgagggcgucauggucaccaaguucuacuuccaggaggacgaguga

SEQ ID NO: 4341 - RNA, 543 nt, Artificial Sequence
  derived and/or modified sequence opt3 from IL-1ra_(antagonist)__Homo_sapiens__CCDS2114.1
auggcccuggcugaccucuacgaggaaggcgggggagguggcggggagggagaagauaacgcagacagcaaggagaccaucugcagacccuccggcaggaaaucuucaaagaugcaggccuuccggauuugggaugugaaucaaaagacauuuuaucuucgcaacaaucagcuggucgcggguuacuugcaggggccuaacguuaauuuagaagagaagauagacgugguaccaaucgagccgcacgcucuguuccuaggcauucauggaggcaaaaugugucucaguugcgugaaaagcggggaugaaacucgacugcagcuugaggccgucaacaucacggaccuguccgaaaaucguaagcaagauaaaagauuugcauucauuaggucugacucgggacccaccacaucauuugagagcgccgcuuguccugguugguucuugugcacugcaauggaggccgaucagccagugagucucaccaacaugcccgacgaaggcguuauggugacaaaguuuuauuuccaggaggaugaauga

SEQ ID NO: 4342 - RNA, 543 nt, Artificial Sequence
  derived and/or modified sequence opt4 from IL-1ra_(antagonist)__Homo_sapiens__CCDS2114.1
auggcccuggccgaccuguacgaggagggcggcggcggcggcggcgagggcgaggacaacgccgacagcaaggagaccaucugcagacccagcggcagaaagagcagcaagaugcaggccuucagaaucugggacgugaaccagaagaccuucuaccugagaaacaaccagcugguggccggcuaccugcagggccccaacgugaaccuggaggagaagaucgacguggugcccaucgagccccacgcccuguuccugggcauccacggcggcaagaugugccugagcugcgugaagagcggcgacgagaccagacugcagcuggaggccgugaacaucaccgaccugagcgagaacagaaagcaggacaagagauucgccuucaucagaagcgacagcggccccaccaccagcuucgagagcgccgccugccccggcugguuccugugcaccgccauggaggccgaccagcccgugagccugaccaacaugcccgacgagggcgugauggugaccaaguucuacuuccaggaggacgaguga

SEQ ID NO: 4343 - RNA, 543 nt, Artificial Sequence
  derived and/or modified sequence opt5 from IL-1ra_(antagonist)__Homo_sapiens__CCDS2114.1
auggcccuggcugaccucuacgaggaaggcgggggaggcgggggagagggcgaagauaacgccgacagcaaggagaccaucugcagacccuccgggcggaaaucuagcaagaugcaggcguuccgcauuugggaugugaaucagaaaacauuuuaucugagaaacaaucaacuugucgcuggauaccugcagggcccuaacguuaaucucgaagagaagaucgacguggugccgauugagccccacgcccuguuccuuggcauccaugggggaaaaaugugucuguccugcgucaagucuggcgaugaaacgcggcuccagcuggaggccgugaacauuaccgaccugagcgaaaaucgcaagcaagauaaaagauuugcuuucauccgguccgacucugggccuacaaccagcuuugaguccgccgcuugucccggaugguuccucugcacagccauggaggcggaucagccuguuagccugaccaacaugcccgacgaaggcgugauggucacaaaguuuuauuuccaggaggaugaauga

SEQ ID NO: 4344 - RNA, 543 nt, Artificial Sequence
  derived and/or modified sequence opt6 from IL-1ra_(antagonist)__Homo_sapiens__CCDS2114.1
auggcacuagcagacuuauacgaagaaggaggaggaggaggaggagaaggagaagauaaugcagacagcaaagaaacaauauguagaccaagcggaagaaaaagcucaaaaaugcaagcauucagaauaugggacguaaaccaaaaaacauucuaucuaagaaacaaucaauuaguagcaggauauuuacaaggaccaaacguaaacuuagaagaaaaaauagacguaguaccaauagaaccacaugcauuauucuuaggaauacacggaggaaaaaugugucuaucaugcguaaaaucaggagaugaaacaagauuacaauuagaagcaguaaauauaacagaccuaagugaaaacagaaaacaagacaaaagauuugcauuuauaagaagcgacagcggaccaacaacaaguuucgaaagcgcagcauguccaggaugguuucuauguacagcaauggaagcagaucaaccaguaucacuaacaaacaugccagaugaaggaguaaugguaacaaaauuuuacuuucaagaagacgaauaa

SEQ ID NO: 4345 - protein, 177 aa, Artificial Sequence
  IL-1ra_(antagonist)__Homo_sapiens__P18510
MEICRGLRSHLITLLLFLFHSETICRPSGRKSSKMQAFRIWDVNQKTFYLRNNQLVAGYLQGPNVNLEEKIDVVPIEPHALFLGIHGGKMCLSCVKSGDETRLQLEAVNITDLSENRKQDKRFAFIRSDSGPTTSFESAACPGWFLCTAMEADQPVSLTNMPDEGVMVTKFYFQEDE

SEQ ID NO: 4346 - RNA, 534 nt, Artificial Sequence
  IL-1ra_(antagonist)__Homo_sapiens__CCDS46396.1
auggaaaucugcagaggccuccgcagucaccuaaucacucuccuccucuuccuguuccauucagagacgaucugccgacccucugggagaaaauccagcaagaugcaagccuucagaaucugggauguuaaccagaagaccuucuaucugaggaacaaccaacuaguugcuggauacuugcaaggaccaaaugucaauuuagaagaaaagauagaugugguacccauugagccucaugcucuguucuugggaauccauggagggaagaugugccuguccugugucaagucuggugaugagaccagacuccagcuggaggcaguuaacaucacugaccugagcgagaacagaaagcaggacaagcgcuucgccuucauccgcucagacaguggccccaccaccaguuuugagucugccgccugccccgguugguuccucugcacagcgauggaagcugaccagcccgucagccucaccaauaugccugacgaaggcgucauggucaccaaauucuacuuccaggaggacgaguag

SEQ ID NO: 4347 - RNA, 534 nt, Artificial Sequence
  derived and/or modified sequence opt1 from IL-1ra_(antagonist)__Homo_sapiens__CCDS46396.1
auggagaucugccgcggccugcggagccaccucaucacccugcuccucuuccuguuccacuccgagaccaucugccgccccagcgggcggaaguccagcaagaugcaggccuuccgcaucugggacgugaaccagaagacguucuaccugcggaacaaccagcucgucgccggcuaccugcaggggccgaacgugaaccuggaggagaagaucgacgugguccccaucgagccccacgcgcuguuccugggcauccacgggggcaagaugugccuguccugcgucaagagcggcgacgagacccgccuccagcuggaggccgugaacaucaccgaccuguccgagaaccggaagcaggacaagcgcuucgccuucauccggagcgacuccgggcccaccacgagcuucgaguccgccgccugcccgggcugguuccucugcaccgcgauggaggccgaccagcccgugagccugaccaacaugcccgacgagggggugauggugaccaaguucuacuuccaggaggacgaguga

SEQ ID NO: 4348 - RNA, 534 nt, Artificial Sequence
  derived and/or modified sequence opt2 from IL-1ra_(antagonist)__Homo_sapiens__CCDS46396.1
auggagaucugccgcggccuccgcucccaccucaucacccuccuccucuuccucuuccacuccgagaccaucugccgccccuccggccgcaaguccuccaagaugcaggccuuccgcaucugggacgucaaccagaagaccuucuaccuccgcaacaaccagcucgucgccggcuaccuccagggccccaacgucaaccucgaggagaagaucgacgucguccccaucgagccccacgcccucuuccucggcauccacggcggcaagaugugccucuccugcgucaaguccggcgacgagacccgccuccagcucgaggccgucaacaucaccgaccucuccgagaaccgcaagcaggacaagcgcuucgccuucauccgcuccgacuccggccccaccaccuccuucgaguccgccgccugccccggcugguuccucugcaccgccauggaggccgaccagcccgucucccucaccaacaugcccgacgagggcgucauggucaccaaguucuacuuccaggaggacgaguga

SEQ ID NO: 4349 - RNA, 534 nt, Artificial Sequence
  derived and/or modified sequence opt3 from IL-1ra_(antagonist)__Homo_sapiens__CCDS46396.1
auggagaucugcagaggccugaggagccaccucauuacccuucuguuguucuuauuucauuccgaaacaauaugucggcccucugggcgcaagucaaguaaaaugcaggccuuccgaaucugggacgugaaccaaaagacuuuuuaccugcguaauaaccagcuagucgcuggauaucuccaggguccuaauguuaaccuggaggagaaaauugaugugguaccaaucgaaccgcacgcacuuuuccugggcauucaugggggaaagaugugcuugagcugugugaaauccggcgacgaaacgagacuccagcuggaggccgucaauaucaccgaucugucugagaacaggaagcaagacaagcgguuugcguucauacgcucggauucaggucccacaacuagcuuugaaagugcugccugcccugggugguuccucuguaccgcaauggaggccgaccagccaguguccuuaacaaauaugcccgaugaaggaguuauggugaccaaauuuuacuuccaggaggacgaguga

SEQ ID NO: 4350 - RNA, 534 nt, Artificial Sequence
  derived and/or modified sequence opt4 from IL-1ra_(antagonist)__Homo_sapiens__CCDS46396.1
auggagaucugcagaggccugagaagccaccugaucacccugcugcuguuccuguuccacagcgagaccaucugcagacccagcggcagaaagagcagcaagaugcaggccuucagaaucugggacgugaaccagaagaccuucuaccugagaaacaaccagcugguggccggcuaccugcagggccccaacgugaaccuggaggagaagaucgacguggugcccaucgagccccacgcccuguuccugggcauccacggcggcaagaugugccugagcugcgugaagagcggcgacgagaccagacugcagcuggaggccgugaacaucaccgaccugagcgagaacagaaagcaggacaagagauucgccuucaucagaagcgacagcggccccaccaccagcuucgagagcgccgccugccccggcugguuccugugcaccgccauggaggccgaccagcccgugagccugaccaacaugcccgacgagggcgugauggugaccaaguucuacuuccaggaggacgaguga

SEQ ID NO: 4351 - RNA, 534 nt, Artificial Sequence
  derived and/or modified sequence opt5 from IL-1ra_(antagonist)__Homo_sapiens__CCDS46396.1
auggagaucugcagaggccugcggagccaccucauuacccugcuucuguuccucuuucauuccgaaacaaucugucgccccucugggagaaagagcuccaaaaugcaggccuuccggauuugggacgugaaccaaaagacguuuuaccugcgcaauaaccagcuugucgcuggauaucugcagggcccuaauguuaaccucgaggagaaaaucgauguggugccgauugaaccccacgcccuguuccuggggauccauggaggcaagaugugccucucuugugucaaaagcggggacgaaaccagacugcagcuugaggcggugaauaucacagaucuguccgagaaccggaagcaagacaagcgcuuugcuuucauuagaucugauagcggaccuaccacauccuuugaaagcgccgccugccccggcugguuccucuguaccgcuauggaggccgaccagccuguuucucugacaaauaugcccgaugaaggcgugauggucaccaaauuuuacuuccaggaggacgaguga

SEQ ID NO: 4352 - RNA, 534 nt, Artificial Sequence
  derived and/or modified sequence opt6 from IL-1ra_(antagonist)__Homo_sapiens__CCDS46396.1
auggaaauaugccgaggacuaagaucacacuuaauaacacuacuacuauuccuauuccacagcgaaacaauaugcagaccaucaggaagaaaaucaucaaaaaugcaagcauucagaauaugggacguaaaccaaaaaacauucuaccuaagaaacaaccaacuaguagcaggauaccuacaaggaccaaacguaaaccuagaagaaaaaauagacguaguaccaauagaaccacacgcacuauuccuaggaauacacggaggaaaaaugugccuaucaugcguaaaaucaggagacgaaacaagacuacaacuagaagcaguaaacauaacagaucuaucagaaaacagaaaacaagacaaaagauucgcauucauaagaucagacucaggaccaacaacaucauuugaaucagcagcaugcccaggaugguucuuaugcacagccauggaagcagaucaaccaguaucauuaacaaacaugccagacgaaggaguaaugguaacaaaauucuacuuccaagaagacgaauaa

SEQ ID NO: 4353 - protein, 176 aa, Artificial Sequence
  IL-20__Homo_sapiens__Q9NYY1
MKASSLAFSLLSAAFYLLWTPSTGLKTLNLGSCVIATNLQEIRNGFSEIRGSVQAKDGNIDIRILRRTESLQDTKPANRCCLLRHLLRLYLDRVFKNYQTPDHYTLRKISSLANSFLTIKKDLRLCHAHMTCHCGEEAMKKYSQILSHFEKLEPQAAVVKALGELDILLQWMEETE

SEQ ID NO: 4354 - RNA, 531 nt, Artificial Sequence
  IL-20__Homo_sapiens__AAH69311
augaaagccucuagucuugccuucagccuucucucugcugcguuuuaucuccuauggacuccuuccacuggacugaagacacucaauuugggaagcugugugaucgccacaaaccuucaggaaauacgaaauggauuuucugagauacggggcagugugcaagccaaagauggaaacauugacaucagaaucuuaaggaggacugagucuuugcaagacacaaagccugcgaaucgaugcugccuccugcgccauuugcuaagacucuaucuggacaggguauuuaaaaacuaccagaccccugaccauuauacucuccggaagaucagcagccucgccaauuccuuucuuaccaucaagaaggaccuccggcucugucaugcccacaugacaugccauuguggggaggaagcaaugaagaaauacagccagauucugagucacuuugaaaagcuggaaccucaggcagcaguugugaaggcuuugggggaacuagacauucuucugcaauggauggaggagacagaauag

SEQ ID NO: 4355 - RNA, 531 nt, Artificial Sequence
  derived and/or modified sequence opt1 from IL-20__Homo_sapiens__AAH69311
augaaggccagcucccuggccuucagccuccuguccgcggccuucuaccugcucuggacccccagcaccggccugaagacgcugaaccucggguccugcgugaucgccaccaaccugcaggagauccgcaacggcuucagcgagauccggggguccguccaggccaaggacggcaacaucgacauccgcauccugcggcgcaccgagagccuccaggacaccaagccggccaaccggugcugccugcugcgccaccuccugcggcuguaccucgaccgcguguucaagaacuaccagacgcccgaccacuacacccugcggaagaucuccagccuggcgaacuccuuccucaccaucaagaaggaccugcgccugugccacgcccacaugaccugccacugcggggaggaggccaugaagaaguacagccagauccucucccacuucgagaagcuggagccccaggccgcgguggucaaggcccugggcgagcucgacauccugcugcaguggauggaggagacggaguga

SEQ ID NO: 4356 - RNA, 531 nt, Artificial Sequence
  derived and/or modified sequence opt2 from IL-20__Homo_sapiens__AAH69311
augaaggccuccucccucgccuucucccuccucuccgccgccuucuaccuccucuggacccccuccaccggccucaagacccucaaccucggcuccugcgucaucgccaccaaccuccaggagauccgcaacggcuucuccgagauccgcggcuccguccaggccaaggacggcaacaucgacauccgcauccuccgccgcaccgagucccuccaggacaccaagcccgccaaccgcugcugccuccuccgccaccuccuccgccucuaccucgaccgcgucuucaagaacuaccagacccccgaccacuacacccuccgcaagaucuccucccucgccaacuccuuccucaccaucaagaaggaccuccgccucugccacgcccacaugaccugccacugcggcgaggaggccaugaagaaguacucccagauccucucccacuucgagaagcucgagccccaggccgccgucgucaaggcccucggcgagcucgacauccuccuccaguggauggaggagaccgaguga

SEQ ID NO: 4357 - RNA, 531 nt, Artificial Sequence
  derived and/or modified sequence opt3 from IL-20__Homo_sapiens__AAH69311
augaaggccagcucccuggcuuucucucuccuuucagcagccuuuuaccuguuguggacccccaguacaggcuuaaaaacucugaaccuagggagcugcgugaucgcgacgaaucuccaggagauuagaaacggauucuccgaaauaagggguucuguccaagcuaaggacggcaauaucgauauucggauccugcgccgaaccgagucgcuucaggacacaaaaccugccaaccguuguugccuguugagacaccuccugaggcuguaucucgaucggguuuuuaagaauuaccagacuccagaccauuauaccuuacgcaaaauuucaagccuggcaaacaguuuccuuacaaucaagaaggauuugagacugugucacgcccauaugaccugccacuguggggaagaggcuaugaaaaaguacucccagauacuaucucauuuugaaaaacucgagccgcaagcagccgugguaaaggcucugggagagcuugacauccuguugcaguggauggaagagacugaauga

SEQ ID NO: 4358 - RNA, 531 nt, Artificial Sequence
  derived and/or modified sequence opt4 from IL-20__Homo_sapiens__AAH69311
augaaggccagcagccuggccuucagccugcugagcgccgccuucuaccugcuguggacccccagcaccggccugaagacccugaaccugggcagcugcgugaucgccaccaaccugcaggagaucagaaacggcuucagcgagaucagaggcagcgugcaggccaaggacggcaacaucgacaucagaauccugagaagaaccgagagccugcaggacaccaagcccgccaacagaugcugccugcugagacaccugcugagacuguaccuggacagaguguucaagaacuaccagacccccgaccacuacacccugagaaagaucagcagccuggccaacagcuuccugaccaucaagaaggaccugagacugugccacgcccacaugaccugccacugcggcgaggaggccaugaagaaguacagccagauccugagccacuucgagaagcuggagccccaggccgccguggugaaggcccugggcgagcuggacauccugcugcaguggauggaggagaccgaguga

SEQ ID NO: 4359 - RNA, 531 nt, Artificial Sequence
  derived and/or modified sequence opt5 from IL-20__Homo_sapiens__AAH69311
augaaggccagcucccuggcuuucucucuccugagcgccgcguuuuaccuucuguggacccccuccacaggccucaaaacgcugaaccuugggucuugcgugaucgcuaccaaucugcaggagauuagaaacggauucagcgaaauccggggcuccguccaagccaaggacgggaauauugauauccgcauucucagacggacagagucucugcaggacaccaaaccugccaaccgcuguugccugcucagacaucugcuucggcuguaucucgaucgcguuuuuaagaauuaccagacaccggaccacuauacccugagaaaaaucagcucccuugcuaacagcuuccugacaaucaagaaggaucuccggcugugucacgcccauaugaccugccacuguggagaagaggcuaugaaaaaguacucucagauucugucccauuuugaaaaacucgagccccaagccgcgguggugaaggcccugggcgagcuugacauccugcuccaguggauggaagagacggaauga

SEQ ID NO: 4360 - RNA, 531 nt, Artificial Sequence
  derived and/or modified sequence opt6 from IL-20__Homo_sapiens__AAH69311
augaaagcaucaucacuagcauucucauuauuaucagcagcauucuaccuacuauggacaccaucaacaggacuaaaaacacuaaacuuaggaucaugcguaauagcaacaaaccuacaagaaauaagaaacggauucucagaaauaagaggaucaguacaagcaaaagacggaaacauagacauaagaauacuaagaagaacagaaucacuacaagacacaaaaccagcaaacagaugcugccuacuaagacaccuacuaagacuauaucuagacagaguauucaaaaacuaccaaacaccagaccacuacacacuaagaaaaauauccucacuagcaaacucauuccuaacaauaaaaaaagaccuaagacuaugccacgcccacaugacaugccacugcggagaagaagcaaugaaaaaauacucacaaauacuaucacacuucgaaaaacuagaaccacaagccgcaguaguaaaagcacuaggagaacuagacauacuacuacaauggauggaagaaacagaauaa

SEQ ID NO: 4361 - protein, 153 aa, Artificial Sequence
  IL-21__Homo_sapiens__NP_001193935.1
MRSSPGNMERIVICLMVIFLGTLVHKSSSQGQDRHMIRMRQLIDIVDQLKNYVNDLVPEFLPAPEDVETNCEWSAFSCFQKAQLKSANTGNNERIINVSIKKLKRKPPSTNAGRRQKHRLTCPSCDSYEKKPPKEFLERFKSLLQKVSTLSFI

SEQ ID NO: 4362 - RNA, 462 nt, Artificial Sequence
  IL-21__Homo_sapiens__CCDS75189.1
augagauccaguccuggcaacauggagaggauugucaucugucugauggucaucuucuuggggacacugguccacaaaucaagcucccaaggucaagaucgccacaugauuagaaugcgucaacuuauagauauuguugaucagcugaaaaauuaugugaaugacuuggucccugaauuucugccagcuccagaagauguagagacaaacugugaguggucagcuuuuuccugcuuucagaaggcccaacuaaagucagcaaauacaggaaacaaugaaaggauaaucaauguaucaauuaaaaagcugaagaggaaaccaccuuccacaaaugcagggagaagacagaaacacagacuaacaugcccuucaugugauucuuaugagaaaaaaccacccaaagaauuccuagaaagauucaaaucacuucuccaaaagguaucuaccuuaaguuucauuuga

SEQ ID NO: 4363 - RNA, 462 nt, Artificial Sequence
  derived and/or modified sequence opt1 from IL-21__Homo_sapiens__CCDS75189.1
augcgcagcucccccggcaacauggagcggaucgugaucugccugauggucaucuuccucgggacccuggugcacaagagcuccagccagggccaggaccgccacaugauccggaugcgccagcugaucgacaucguggaccagcucaagaacuacgucaacgaccuggugcccgaguuccugcccgcccccgaggacguggagaccaacugcgagugguccgccuucagcugcuuccagaaggcgcagcucaaguccgccaacacggggaacaacgagcggaucaucaacgucagcaucaagaagcugaagcgcaagcccccguccaccaacgccggccggcgccagaagcaccggcugaccugccccagcugcgacuccuacgagaagaagccgcccaaggaguuccucgagcgcuucaagagccugcugcagaagguguccacccucagcuucaucuga

SEQ ID NO: 4364 - RNA, 462 nt, Artificial Sequence
  derived and/or modified sequence opt2 from IL-21__Homo_sapiens__CCDS75189.1
augcgcuccucccccggcaacauggagcgcaucgucaucugccucauggucaucuuccucggcacccucguccacaaguccuccucccagggccaggaccgccacaugauccgcaugcgccagcucaucgacaucgucgaccagcucaagaacuacgucaacgaccucguccccgaguuccuccccgcccccgaggacgucgagaccaacugcgagugguccgccuucuccugcuuccagaaggcccagcucaaguccgccaacaccggcaacaacgagcgcaucaucaacgucuccaucaagaagcucaagcgcaagccccccuccaccaacgccggccgccgccagaagcaccgccucaccugccccuccugcgacuccuacgagaagaagccccccaaggaguuccucgagcgcuucaagucccuccuccagaaggucuccacccucuccuucaucuga

SEQ ID NO: 4365 - RNA, 462 nt, Artificial Sequence
  derived and/or modified sequence opt3 from IL-21__Homo_sapiens__CCDS75189.1
augagaagcucccccggcaacauggagaggaucgugauuugccugauggucauauuccucgggacccuuguucacaagucuucaagucagggacaagaccggcauaugauccgcaugcgacagcugauugauaucguggaccaguugaaaaauuacguaaacgauuuagugccugaauuucugccagccccggaggacgucgaaacaaauugugaguggagcgcuuucuccugcuuucagaaggcacaacuaaaaucugccaacacugguaauaacgaacguauuaucaaugugucgauaaagaaacucaagagaaagcccccuucaacgaacgcgggcaggcggcagaaacaccgccugaccuguccaagcugcgauaguuaugagaagaaacccccuaaggaguuccuugaaagauuuaaaucccuguugcagaagguuucuacacucagcuucaucuga

SEQ ID NO: 4366 - RNA, 462 nt, Artificial Sequence
  derived and/or modified sequence opt4 from IL-21__Homo_sapiens__CCDS75189.1
augagaagcagccccggcaacauggagagaaucgugaucugccugauggugaucuuccugggcacccuggugcacaagagcagcagccagggccaggacagacacaugaucagaaugagacagcugaucgacaucguggaccagcugaagaacuacgugaacgaccuggugcccgaguuccugcccgcccccgaggacguggagaccaacugcgaguggagcgccuucagcugcuuccagaaggcccagcugaagagcgccaacaccggcaacaacgagagaaucaucaacgugagcaucaagaagcugaagagaaagccccccagcaccaacgccggcagaagacagaagcacagacugaccugccccagcugcgacagcuacgagaagaagccccccaaggaguuccuggagagauucaagagccugcugcagaaggugagcacccugagcuucaucuga

SEQ ID NO: 4367 - RNA, 462 nt, Artificial Sequence
  derived and/or modified sequence opt5 from IL-21__Homo_sapiens__CCDS75189.1
augagaagcucccccggcaacauggagcggaucgugauuugccugauggucaucuuccucgggacccugguucacaagucuagcucccagggacaagaccgccauaugauuagaaugcggcagcuuaucgauauuguggaccagcugaaaaauuacgugaacgaucucgucccugaauuucugccggcccccgaggacguggaaacaaauugugaguggucugcuuucagcugcuuucagaaggcccaacuuaaauccgcgaacacgggcaauaacgaacgcaucaucaauguuucuauuaagaaacugaagagaaagccucccagcaccaacgcugggcggcgccagaaacacagacucacauguccuuccugcgauagcuaugagaagaaacccccuaaggaguuccuggaacgguuuaaaucucugcuccagaagguguccacccugagcuucaucuga

SEQ ID NO: 4368 - RNA, 462 nt, Artificial Sequence
  derived and/or modified sequence opt6 from IL-21__Homo_sapiens__CCDS75189.1
augagaucaagcccaggaaacauggaaagaauaguaauaugcuuaaugguaauauuccuaggaacacuaguacacaaaucaucaucacaaggacaagacagacacaugauaagaaugagacaacuaauagacauaguagaccaacuaaaaaacuacguaaacgaccuaguaccagaauuccuaccagcaccagaagacguagaaacaaacugcgaauggucagcauucucaugcuuccaaaaagcacaacuaaaaagcgcaaacacaggaaacaacgaaagaauaauaaacguaucaauaaaaaaacuaaaaagaaaaccaccaucaacaaacgcaggaagaagacaaaaacacagacuaacaugcccaagcugcgacucauacgaaaaaaaaccaccaaaagaauucuuagaaagauucaaaagccuacuacaaaaaguaagcacacuaucauucauauaa

SEQ ID NO: 4369 - protein, 162 aa, Artificial Sequence
  IL-21__Homo_sapiens__NP_068575.1
MRSSPGNMERIVICLMVIFLGTLVHKSSSQGQDRHMIRMRQLIDIVDQLKNYVNDLVPEFLPAPEDVETNCEWSAFSCFQKAQLKSANTGNNERIINVSIKKLKRKPPSTNAGRRQKHRLTCPSCDSYEKKPPKEFLERFKSLLQKMIHQHLSSRTHGSEDS

SEQ ID NO: 4370 - RNA, 489 nt, Artificial Sequence
  IL-21__Homo_sapiens__CCDS3727.1
augagauccaguccuggcaacauggagaggauugucaucugucugauggucaucuucuuggggacacugguccacaaaucaagcucccaaggucaagaucgccacaugauuagaaugcgucaacuuauagauauuguugaucagcugaaaaauuaugugaaugacuuggucccugaauuucugccagcuccagaagauguagagacaaacugugaguggucagcuuuuuccugcuuucagaaggcccaacuaaagucagcaaauacaggaaacaaugaaaggauaaucaauguaucaauuaaaaagcugaagaggaaaccaccuuccacaaaugcagggagaagacagaaacacagacuaacaugcccuucaugugauucuuaugagaaaaaaccacccaaagaauuccuagaaagauucaaaucacuucuccaaaagaugauucaucagcaucuguccucuagaacacacggaagugaagauuccuga

SEQ ID NO: 4371 - RNA, 489 nt, Artificial Sequence
  derived and/or modified sequence opt1 from IL-21__Homo_sapiens__CCDS3727.1
augcgcagcucccccggcaacauggagcggaucgugaucugccugauggucaucuuccucgggacccuggugcacaagagcuccagccagggccaggaccgccacaugauccggaugcgccagcugaucgacaucguggaccagcucaagaacuacgucaacgaccuggugcccgaguuccugcccgcccccgaggacguggagaccaacugcgagugguccgccuucagcugcuuccagaaggcgcagcucaaguccgccaacacggggaacaacgagcggaucaucaacgucagcaucaagaagcugaagcgcaagcccccguccaccaacgccggccggcgccagaagcaccggcugaccugccccagcugcgacuccuacgagaagaagccgcccaaggaguuccucgagcgcuucaagagccugcugcagaagaugauccaccagcaccucuccagccggacccacggguccgaggacagcuga

SEQ ID NO: 4372 - RNA, 489 nt, Artificial Sequence
  derived and/or modified sequence opt2 from IL-21__Homo_sapiens__CCDS3727.1
augcgcuccucccccggcaacauggagcgcaucgucaucugccucauggucaucuuccucggcacccucguccacaaguccuccucccagggccaggaccgccacaugauccgcaugcgccagcucaucgacaucgucgaccagcucaagaacuacgucaacgaccucguccccgaguuccuccccgcccccgaggacgucgagaccaacugcgagugguccgccuucuccugcuuccagaaggcccagcucaaguccgccaacaccggcaacaacgagcgcaucaucaacgucuccaucaagaagcucaagcgcaagccccccuccaccaacgccggccgccgccagaagcaccgccucaccugccccuccugcgacuccuacgagaagaagccccccaaggaguuccucgagcgcuucaagucccuccuccagaagaugauccaccagcaccucuccucccgcacccacggcuccgaggacuccuga

SEQ ID NO: 4373 - RNA, 489 nt, Artificial Sequence
  derived and/or modified sequence opt3 from IL-21__Homo_sapiens__CCDS3727.1
augagaagcucccccggcaacauggagaggaucgugauuugccugauggucauauuccucgggacccuuguucacaagucuucaagucagggacaagaccggcauaugauccgcaugcgacagcugauugauaucguggaccaguugaaaaauuacguaaacgauuuagugccugaauuucugccagccccggaggacgucgaaacaaauugugaguggagcgcuuucuccugcuuucagaaggcacaacuaaaaucugccaacacugguaauaacgaacguauuaucaaugugucgauaaagaaacucaagagaaagcccccuucaacgaacgcgggcaggcggcagaaacaccgccugaccuguccaagcugcgauaguuaugagaagaaacccccuaaggaguuccuugaaagauuuaaaucccuguugcagaagaugauccaucagcaccucucuagcaggacacauggguccgaggacucauga

SEQ ID NO: 4374 - RNA, 489 nt, Artificial Sequence
  derived and/or modified sequence opt4 from IL-21__Homo_sapiens__CCDS3727.1
augagaagcagccccggcaacauggagagaaucgugaucugccugauggugaucuuccugggcacccuggugcacaagagcagcagccagggccaggacagacacaugaucagaaugagacagcugaucgacaucguggaccagcugaagaacuacgugaacgaccuggugcccgaguuccugcccgcccccgaggacguggagaccaacugcgaguggagcgccuucagcugcuuccagaaggcccagcugaagagcgccaacaccggcaacaacgagagaaucaucaacgugagcaucaagaagcugaagagaaagccccccagcaccaacgccggcagaagacagaagcacagacugaccugccccagcugcgacagcuacgagaagaagccccccaaggaguuccuggagagauucaagagccugcugcagaagaugauccaccagcaccugagcagcagaacccacggcagcgaggacagcuga

SEQ ID NO: 4375 - RNA, 489 nt, Artificial Sequence
  derived and/or modified sequence opt5 from IL-21__Homo_sapiens__CCDS3727.1
augagaagcucccccggcaacauggagcggaucgugauuugccugauggucaucuuccucgggacccugguucacaagucuagcucccagggacaagaccgccauaugauuagaaugcggcagcuuaucgauauuguggaccagcugaaaaauuacgugaacgaucucgucccugaauuucugccggcccccgaggacguggaaacaaauugugaguggucugcuuucagcugcuuucagaaggcccaacuuaaauccgcgaacacgggcaauaacgaacgcaucaucaauguuucuauuaagaaacugaagagaaagccucccagcaccaacgcugggcggcgccagaaacacagacucacauguccuuccugcgauagcuaugagaagaaacccccuaaggaguuccuggaacgguuuaaaucucugcuccagaagaugauccaucagcaccuguccagccgcacccauggaucugaggacuccuga

SEQ ID NO: 4376 - RNA, 489 nt, Artificial Sequence
  derived and/or modified sequence opt6 from IL-21__Homo_sapiens__CCDS3727.1
augagaucaucaccaggaaacauggaaagaauaguaauaugccuaaugguaauauuccucggaacacuaguacacaaaucaucaucacaaggacaagacagacacaugauaagaaugagacaacuaauagacauaguagaccaacuaaaaaacuacguaaacgaccuaguaccagaauuccuaccagcaccagaagacguagaaacaaacugcgaauggucagcauucucaugcuuccaaaaagcacaacuaaaaucagcaaacacaggaaacaacgaaagaauaauaaacguaucaauaaaaaaauuaaaaagaaaaccaccaucaacaaacgcaggacgaagacaaaaacacagacucacaugcccaucaugcgacucauacgaaaaaaaaccaccaaaagaauuccuagaaagauucaaaucacuacuacaaaaaaugauacaccaacaccuaucaucaagaacacacggaucagaagacagcuaa

SEQ ID NO: 4377 - protein, 179 aa, Artificial Sequence
  IL-22__Homo_sapiens__Q9GZX6
MAALQKSVSSFLMGTLATSCLLLLALLVQGGAAAPISSHCRLDKSNFQQPYITNRTFMLAKEASLADNNTDVRLIGEKLFHGVSMSERCYLMKQVLNFTLEEVLFPQSDRFQPYMQEVVPFLARLSNRLSTCHIEGDDLHIQRNVQKLKDTVKKLGESGEIKAIGELDLLFMSLRNACI

SEQ ID NO: 4378 - RNA, 540 nt, Artificial Sequence
  IL-22__Homo_sapiens__AAG22064
auggccgcccugcagaaaucugugagcucuuuccuuauggggacccuggccaccagcugccuccuucucuuggcccucuugguacagggaggagcagcugcgcccaucagcucccacugcaggcuugacaaguccaacuuccagcagcccuauaucaccaaccgcaccuucaugcuggcuaaggaggcuagcuuggcugauaacaacacagacguucgucucauuggggagaaacuguuccacggagucaguaugagugagcgcugcuaucugaugaagcaggugcugaacuucacccuugaagaagugcuguucccucaaucugauagguuccagccuuauaugcaggagguggugcccuuccuggccaggcucagcaacaggcuaagcacaugucauauugaaggugaugaccugcauauccagaggaaugugcaaaagcugaaggacacagugaaaaagcuuggagagaguggagagaucaaagcaauuggagaacuggauuugcuguuuaugucucugagaaaugccugcauuuga

SEQ ID NO: 4379 - RNA, 540 nt, Artificial Sequence
  derived and/or modified sequence opt1 from IL-22__Homo_sapiens__AAG22064
auggccgcccugcagaaguccgugagcagcuuccucaugggcacccuggcgaccuccugccugcuccugcuggcccuccugguccagggcggggccgccgcccccaucagcucccacugccgccuggacaagagcaacuuccagcagccguacaucacgaaccggaccuucaugcucgcgaaggaggccucccuggccgacaacaacaccgacgugcgccugaucggggagaagcuguuccacggcgugagcauguccgagcggugcuaccucaugaagcagguccugaacuucacccucgaggaggugcuguucccccagagcgaccgcuuccagcccuacaugcaggaggugguccccuuccuggcccggcucuccaaccgccugagcacgugccacaucgagggggacgaccugcacauccagcggaacgugcagaagcucaaggacaccgugaagaagcugggcgaguccggcgagaucaaggcgaucggggagcuggaccuccuguucaugagccugcgcaacgccugcaucuga

SEQ ID NO: 4380 - RNA, 540 nt, Artificial Sequence
  derived and/or modified sequence opt2 from IL-22__Homo_sapiens__AAG22064
auggccgcccuccagaaguccgucuccuccuuccucaugggcacccucgccaccuccugccuccuccuccucgcccuccucguccagggcggcgccgccgcccccaucuccucccacugccgccucgacaaguccaacuuccagcagcccuacaucaccaaccgcaccuucaugcucgccaaggaggccucccucgccgacaacaacaccgacguccgccucaucggcgagaagcucuuccacggcgucuccauguccgagcgcugcuaccucaugaagcagguccucaacuucacccucgaggagguccucuucccccaguccgaccgcuuccagcccuacaugcaggaggucguccccuuccucgcccgccucuccaaccgccucuccaccugccacaucgagggcgacgaccuccacauccagcgcaacguccagaagcucaaggacaccgucaagaagcucggcgaguccggcgagaucaaggccaucggcgagcucgaccuccucuucaugucccuccgcaacgccugcaucuga

SEQ ID NO: 4381 - RNA, 540 nt, Artificial Sequence
  derived and/or modified sequence opt3 from IL-22__Homo_sapiens__AAG22064
auggccgcucugcagaaaagcguguccucuuuccucaugggcacccuugcaacaucaugccuguuguuacuggcccuacucguccaagggggagcggcugcccccaucaguagccacuguagacuggacaaguccaacuuucagcagccuuacauuacuaauaggacguucaugcuugcaaaggaggccucucuggcugauaacaauaccgacguucgguugauaggugaaaaacucuuucauggcgugucgaugucagagcgcugcuaucugaugaagcagguacugaacuucacacucgaagagguguuauuuccacaaagcgaucgauuccagccguacaugcaggaagucgugcccuuucuggcacgucuuaguaauagauuguccacuugucacaucgagggggacgaucugcauauucagaggaacguucaaaaacuaaaggacaccgugaagaaacucggagagucuggcgaaaucaaggccauuggugagcuggaucuucuguucaugagcuugcggaaugcuugcaucuga

SEQ ID NO: 4382 - RNA, 540 nt, Artificial Sequence
  derived and/or modified sequence opt4 from IL-22__Homo_sapiens__AAG22064
auggccgcccugcagaagagcgugagcagcuuccugaugggcacccuggccaccagcugccugcugcugcuggcccugcuggugcagggcggcgccgccgcccccaucagcagccacugcagacuggacaagagcaacuuccagcagcccuacaucaccaacagaaccuucaugcuggccaaggaggccagccuggccgacaacaacaccgacgugagacugaucggcgagaagcuguuccacggcgugagcaugagcgagagaugcuaccugaugaagcaggugcugaacuucacccuggaggaggugcuguucccccagagcgacagauuccagcccuacaugcaggagguggugcccuuccuggccagacugagcaacagacugagcaccugccacaucgagggcgacgaccugcacauccagagaaacgugcagaagcugaaggacaccgugaagaagcugggcgagagcggcgagaucaaggccaucggcgagcuggaccugcuguucaugagccugagaaacgccugcaucuga

SEQ ID NO: 4383 - RNA, 540 nt, Artificial Sequence
  derived and/or modified sequence opt5 from IL-22__Homo_sapiens__AAG22064
auggccgcucugcagaaaagcguguccucuuuccucaugggcacccuggccacaagcugccuucugcuccuggcgcuucugguccaagggggagcugccgcccccaucuccucucacuguagacucgacaagagcaacuuucagcagccuuacauuacgaaucggaccuucaugcuggcuaaggaggccucccuggcugauaacaauacagacguucgccucaucggcgaaaaacuguuucauggggugucuaugagcgagagaugcuaucuuaugaaacaggugcugaacuucacccucgaagagguccuguuuccgcaauccgaucgguuccagcccuacaugcaggaagugguuccuuuucuugcccgccugagcaauagacucucuacaugucacauugagggagacgaucugcauauccagcggaacgugcaaaagcugaaggacaccgucaagaaacucggcgaguccggggaaauuaaggcgaucggagagcuggaucuucuguucaugagccuccgcaaugccugcaucuga

SEQ ID NO: 4384 - RNA, 540 nt, Artificial Sequence
  derived and/or modified sequence opt6 from IL-22__Homo_sapiens__AAG22064
auggcagcacuacaaaaaucaguaucaucauuccuaaugggaacacuagcaacaucaugccuacuacuacuagcacuacuaguacaaggaggagcagcagcaccaauaucaucacacugcagauuagacaaaucaaacuuccaacaaccauacauaacaaacagaacauucaugcuagcaaaagaagcaucacuagcagacaacaacacagacguaagauuaauaggagaaaaacuuuuccacggaguaucaaugucagaaagaugcuaccuaaugaaacaaguacuaaacuucacauuagaagaaguacuauucccacaaagcgacagauuccaaccauacaugcaagaaguaguaccauuccuagcaagacuaucaaacagacuauccacaugccacauagaaggagacgaccuacacauacaaagaaacguacaaaaacuaaaagacacaguaaaaaaacuaggagaaucaggagaaauaaaagcaauaggagaacuagaccuacuauucaugucacuaagaaacgcaugcauauaa

SEQ ID NO: 4385 - protein, 189 aa, Artificial Sequence
  IL-23__Homo_sapiens__Q9NPF7
MLGSRAVMLLLLLPWTAQGRAVPGGSSPAWTQCQQLSQKLCTLAWSAHPLVGHMDLREEGDEETTNDVPHIQCGDGCDPQGLRDNSQFCLQRIHQGLIFYEKLLGSDIFTGEPSLLPDSPVGQLHASLLGLSQLLQPEGHHWETQQIPSLSPSQPWQRLLLRFKILRSLQAFVAVAARVFAHGAATLSP

SEQ ID NO: 4386 - RNA, 570 nt, Artificial Sequence
  IL-23__Homo_sapiens__AAH66268
augcuggggagcagagcuguaaugcugcuguugcuacugcccuggacagcucagggcagagcugugccugggggcagcagcccugccuggacucagugccagcagcuuucacagaagcucugcacacuggccuggagugcacauccacuagugggacacauggaucuaagagaagagggagaugaagagacuacaaaugauguuccccauauccaguguggagauggcugugacccccaaggacucagggacaacagucaguucugcuugcaaaggauccaccagggucugauuuuuuaugagaagcugcuaggaucggauauuuucacaggggagccuucucugcucccugauagcccugugggccagcuucaugccucccuacugggccucagccaacuccugcagccugagggucaccacugggagacucagcagauuccaagccucagucccagccagccauggcagcgucuccuucuccgcuucaagauccuucgcagccuccaggccuuuguggccguagccgcccgggucuuugcccauggagcagcaacccugagucccuaa

SEQ ID NO: 4387 - RNA, 570 nt, Artificial Sequence
  derived and/or modified sequence opt1 from IL-23__Homo_sapiens__AAH66268
augcugggcagccgcgccgugaugcuccugcugcuccugcccuggaccgcccaggggcgggcggucccgggcggguccagccccgccuggacccagugccagcagcugucccagaagcucugcacgcuggccuggagcgcccacccccuggugggccacauggaccuccgcgaggagggggacgaggagaccaccaacgacgugccccacauccagugcggcgacggcugcgacccgcaggggcugcgggacaacucccaguucugccugcagcgcauccaccagggccucaucuucuacgagaagcugcuggggagcgacaucuucaccggcgagcccucccuccugcccgacagccccgucgggcagcugcacgccucccuccugggccugagccagcuccugcagccggagggccaccacugggagacgcagcagauccccucccugagccccucccagcccuggcagcggcuccugcugcgcuucaagauccuccggagccugcaggcguucguggccguggccgcccgcgucuucgcgcacggggccgccacccuguccccguga

SEQ ID NO: 4388 - RNA, 570 nt, Artificial Sequence
  derived and/or modified sequence opt2 from IL-23__Homo_sapiens__AAH66268
augcucggcucccgcgccgucaugcuccuccuccuccuccccuggaccgcccagggccgcgccguccccggcggcuccucccccgccuggacccagugccagcagcucucccagaagcucugcacccucgccugguccgcccacccccucgucggccacauggaccuccgcgaggagggcgacgaggagaccaccaacgacgucccccacauccagugcggcgacggcugcgacccccagggccuccgcgacaacucccaguucugccuccagcgcauccaccagggccucaucuucuacgagaagcuccucggcuccgacaucuucaccggcgagcccucccuccuccccgacucccccgucggccagcuccacgccucccuccucggccucucccagcuccuccagcccgagggccaccacugggagacccagcagauccccucccucucccccucccagcccuggcagcgccuccuccuccgcuucaagauccuccgcucccuccaggccuucgucgccgucgccgcccgcgucuucgcccacggcgccgccacccucucccccuga

SEQ ID NO: 4389 - RNA, 570 nt, Artificial Sequence
  derived and/or modified sequence opt3 from IL-23__Homo_sapiens__AAH66268
augcugggcagcagagccgugaugcuccuucuguuguuacccuggaccgcucaggggagggcagucccuggagguuccucuccagccuggacacaaugccagcagcugucacagaagcuauguacucucgcguggagugcucacccgcugguuggccauauggaccuucgggaggaaggggaugaggaaacgaccaacgacgugccccacauccaaugcggagauggcugugacccucagggucugcgcgauaauagccaguucugcuugcagcguauucaucaagggcucauauuuuacgagaaacugcugggauccgacaucuucacaggcgaaccaucucucuuacccgauucgccuguaggccagcugcacgccucacuuuuggggcugagccagcuacuccagccagagggacaucacugggagacucaacagauucccagucuguccccuucucagccauggcaacgacuucuguugagauuuaagauccucaggagccugcaggcauucguggccgucgcugcacggguguuugcccacggugcugccaccuuauccccguga

SEQ ID NO: 4390 - RNA, 570 nt, Artificial Sequence
  derived and/or modified sequence opt4 from IL-23__Homo_sapiens__AAH66268
augcugggcagcagagccgugaugcugcugcugcugcugcccuggaccgcccagggcagagccgugcccggcggcagcagccccgccuggacccagugccagcagcugagccagaagcugugcacccuggccuggagcgcccacccccuggugggccacauggaccugagagaggagggcgacgaggagaccaccaacgacgugccccacauccagugcggcgacggcugcgacccccagggccugagagacaacagccaguucugccugcagagaauccaccagggccugaucuucuacgagaagcugcugggcagcgacaucuucaccggcgagcccagccugcugcccgacagccccgugggccagcugcacgccagccugcugggccugagccagcugcugcagcccgagggccaccacugggagacccagcagauccccagccugagccccagccagcccuggcagagacugcugcugagauucaagauccugagaagccugcaggccuucguggccguggccgccagaguguucgcccacggcgccgccacccugagccccuga

SEQ ID NO: 4391 - RNA, 570 nt, Artificial Sequence
  derived and/or modified sequence opt5 from IL-23__Homo_sapiens__AAH66268
augcugggcagcagagccgugaugcuccugcuucugcuccccuggaccgcucaggggcgggccgucccuggaggcuccucuccggcguggacacaaugccagcagcugagccagaagcuguguacgcuugcuugguccgcccacccccucguugggcauauggaccugcgcgaggaaggagaugaggaaaccacaaacgacgugccucacauccaaugcggcgaugggugugacccccagggacugagagauaauucucaguucugccuccagcggauucaucaaggccugaucuuuuacgagaaacuucugggcagcgacauuuucaccggggaaccuucccuccugcccgauucuccugugggacagcuucacgccagccugcucggccugucccagcugcuccagccggaggggcaucacugggagacacaacagauccccagccugucuccuucccagcccuggcaacgccuucugcucagauuuaagauucugcggagccuucaggcuuucgucgccguggcugcccgcguuuuugcgcacggagccgcuacccugucuccuuga

SEQ ID NO: 4392 - RNA, 570 nt, Artificial Sequence
  derived and/or modified sequence opt6 from IL-23__Homo_sapiens__AAH66268
augcuaggaucaagagcaguaaugcuacuauuauuacuaccauggacagcucaaggaagagcaguaccaggaggaucaucaccagcauggacacaaugccaacaacuaucacaaaaauuauguacacuagcauggucagcacacccacuaguaggacacauggacuuaagagaagaaggagacgaagaaacaacaaacgacguaccacacauacaaugcggagacggaugcgacccacaaggacuaagagacaacucacaauucugucuacaaagaauacaccaaggccuaauauucuacgaaaaacuauuaggaucagacauauucacaggagaaccaucacuauuacccgacucaccaguaggacaauuacacgcaucacuuuuaggacuaucacaacuacuacaaccagaaggacaucacugggaaacccaacaaaucccaucauuaucacccucacaaccauggcaaagacuacuacuaagauuuaaaauacuaagaucacuacaagcauucguagcaguagcagcaagaguauucgcacacggagcagcaacacuaucaccauaa

SEQ ID NO: 4393 - protein, 206 aa, Artificial Sequence
  IL-24__Homo_sapiens__Q13007
MNFQQRLQSLWTLARPFCPPLLATASQMQMVVLPCLGFTLLLWSQVSGAQGQEFHFGPCQVKGVVPQKLWEAFWAVKDTMQAQDNITSARLLQQEVLQNVSDAESCYLVHTLLEFYLKTVFKNYHNRTVEVRTLKSFSTLANNFVLIVSQLQPSQENEMFSIRDSAHRRFLLFRRAFKQLDVEAALTKALGEVDILLTWMQKFYKL

SEQ ID NO: 4394 - RNA, 621 nt, Artificial Sequence
  IL-24__Homo_sapiens__AAA91780
augaauuuucaacagaggcugcaaagccuguggacuuuagccagacccuucugcccuccuuugcuggcgacagccucucaaaugcagaugguugugcucccuugccuggguuuuacccugcuucucuggagccagguaucaggggcccagggccaagaauuccacuuugggcccugccaagugaaggggguuguuccccagaaacugugggaagccuucugggcugugaaagacacuaugcaagcucaggauaacaucacgagugcccggcugcugcagcaggagguucugcagaacgucucggaugcugagagcuguuaccuuguccacacccugcuggaguucuacuugaaaacuguuuucaaaaacuaccacaauagaacaguugaagucaggacucugaagucauucucuacucuggccaacaacuuuguucucaucgugucacaacugcaacccagucaagaaaaugagauguuuuccaucagagacagugcacacaggcgguuucugcuauuccggagagcauucaaacaguuggacguagaagcagcucugaccaaagcccuuggggaaguggacauucuucugaccuggaugcagaaauucuacaagcucuga

SEQ ID NO: 4395 - RNA, 621 nt, Artificial Sequence
  derived and/or modified sequence opt1 from IL-24__Homo_sapiens__AAA91780
augaacuuccagcagcgccugcagagccucuggacccuggcccggcccuucugcccgccccugcucgccaccgcgucccagaugcagauggugguccugcccugccugggcuucacgcuccugcuguggagccagguguccggggcccagggccaggaguuccacuucgggcccugccaggugaagggcgucgugccgcagaagcucugggaggccuucugggccgugaaggacaccaugcaggcccaggacaacaucaccagcgcgcgccugcugcagcaggagguccuccagaacguguccgacgccgagagcugcuaccuggugcacacccugcucgaguucuaccugaagacggucuucaagaacuaccacaaccggaccguggaggugcgcacccugaaguccuucagcacccucgccaacaacuucguccugaucgugucccagcugcagcccagccaggagaacgagauguucuccauccgggacagcgcccaccgccgguuccuccuguuccgccgggcguucaagcagcuggacguggaggccgcccucacgaaggcccugggggaggucgacauccugcucaccuggaugcagaaguucuacaagcuguga

SEQ ID NO: 4396 - RNA, 621 nt, Artificial Sequence
  derived and/or modified sequence opt2 from IL-24__Homo_sapiens__AAA91780
augaacuuccagcagcgccuccagucccucuggacccucgcccgccccuucugccccccccuccucgccaccgccucccagaugcagauggucguccuccccugccucggcuucacccuccuccucuggucccaggucuccggcgcccagggccaggaguuccacuucggccccugccaggucaagggcgucgucccccagaagcucugggaggccuucugggccgucaaggacaccaugcaggcccaggacaacaucaccuccgcccgccuccuccagcaggagguccuccagaacgucuccgacgccgaguccugcuaccucguccacacccuccucgaguucuaccucaagaccgucuucaagaacuaccacaaccgcaccgucgagguccgcacccucaaguccuucuccacccucgccaacaacuucguccucaucgucucccagcuccagcccucccaggagaacgagauguucuccauccgcgacuccgcccaccgccgcuuccuccucuuccgccgcgccuucaagcagcucgacgucgaggccgcccucaccaaggcccucggcgaggucgacauccuccucaccuggaugcagaaguucuacaagcucuga

SEQ ID NO: 4397 - RNA, 621 nt, Artificial Sequence
  derived and/or modified sequence opt3 from IL-24__Homo_sapiens__AAA91780
augaacuuccagcaaagacugcagagccucuggacccuugccaggcccuuuugcccuccacuguuggcuacagcaucccagaugcagaugguggucuuaccgugucugggcuucacucuacuccuguggucucaaguuucaggggcccagggacaggaguuucacuucggucccugccaggugaagggcguagugccucaaaaacuuugggaagcguuuugggcugucaaggacacgaugcaggcccaggauaauaucaccagugcacggcuguugcagcaagaggugcuccagaacguuagcgacgccgaauccuguuaccuggugcauacacugcucgaguucuauuuaaaaacugucuuuaagaauuaccacaaccgcaccguggaaguacgaacacugaaaucuuucucgacccuugcuaauaacuuuguuuugauugugucacagcugcaaccaagccaggagaaugagauguucaguauacgugauuccgcacauagaagguuucuacucuuccggcgcgccuuuaagcagcuggacgucgaagcugcccuuacuaaggcgcugggggagguggauaucuugcucacauggaugcagaaauucuauaagcuguga

SEQ ID NO: 4398 - RNA, 621 nt, Artificial Sequence
  derived and/or modified sequence opt4 from IL-24__Homo_sapiens__AAA91780
augaacuuccagcagagacugcagagccuguggacccuggccagacccuucugccccccccugcuggccaccgccagccagaugcagaugguggugcugcccugccugggcuucacccugcugcuguggagccaggugagcggcgcccagggccaggaguuccacuucggccccugccaggugaagggcguggugccccagaagcugugggaggccuucugggccgugaaggacaccaugcaggcccaggacaacaucaccagcgccagacugcugcagcaggaggugcugcagaacgugagcgacgccgagagcugcuaccuggugcacacccugcuggaguucuaccugaagaccguguucaagaacuaccacaacagaaccguggaggugagaacccugaagagcuucagcacccuggccaacaacuucgugcugaucgugagccagcugcagcccagccaggagaacgagauguucagcaucagagacagcgcccacagaagauuccugcuguucagaagagccuucaagcagcuggacguggaggccgcccugaccaaggcccugggcgagguggacauccugcugaccuggaugcagaaguucuacaagcuguga

SEQ ID NO: 4399 - RNA, 621 nt, Artificial Sequence
  derived and/or modified sequence opt5 from IL-24__Homo_sapiens__AAA91780
augaacuuccagcaaagacugcagagccucuggacccuggcccggcccuuuugcccuccgcuucuggcuacagccucccagaugcagauggugguccuccccugucugggcuucacgcuucugcucuggucucaaguuagcggggcgcagggacaggaguuucacuucggcccuugccaggugaaggggguggucccccaaaaacugugggaggcuuuuugggccgugaaggacaccaugcaggcccaggauaauaucacauccgcucgccugcuccagcaagaaguucugcagaacgugucugacgccgaaagcuguuaccuuguccauacccugcucgaguucuaucugaaaacaguguuuaagaauuaccacaacagaaccguugaagugcggacacuuaaauccuucucuacccuggcuaauaacuuuguccucauugugagccagcugcaaccuucccaggagaaugagauguucagcauccgcgauucugcccauagacgguuucuucucuuccgcagagcguuuaagcagcuggacguggaagccgcucuuacgaaggcccugggagaggucgauauucuccugaccuggaugcagaaauucuauaagcuguga

SEQ ID NO: 4400 - RNA, 621 nt, Artificial Sequence
  derived and/or modified sequence opt6 from IL-24__Homo_sapiens__AAA91780
augaacuuccaacaaagacuacaaucacuauggacauuagcaagaccauucugcccaccacuacuagcaacagcaucacaaaugcaaaugguaguacucccaugccuaggauucacauuacuauuauggucacaaguauccggagcccaaggacaagaauuccacuucggaccaugccaaguaaaaggaguaguaccacaaaaacuaugggaagcauucugggcaguaaaagauacaaugcaagcacaagacaacauaacaucagccagacuacuacaacaagaaguacuacaaaacguaucagacgcagaaucaugcuaccuaguacacacacuccuagaauucuaccuaaaaacaguauucaaaaacuaucacaacagaacaguagaaguaagaacacuaaaaucauucucaacacuagcaaacaacuucguauuaauaguuucacaacuacaaccaucccaagaaaacgaaauguucucaauaagagauuccgcacacagaagauuccuacuauucagaagagcauucaaacaacuagacgucgaagcagcacuaacaaaagcacuaggagaaguagacauacuacuaacauggaugcaaaaauucuacaaauuauaa

SEQ ID NO: 4401 - protein, 51 aa, Artificial Sequence [sequence omitted]

SEQ ID NO: 4402 - RNA, 156 nt, Artificial Sequence
  IL-24__Homo_sapiens__AAV52800
augaauuuucaacagaggcugcaaagccuguggacuuuagccagcaagcucaggauaacaucacgagugcccggcugcugcaacaggagguucugcagaacgucucggaugcugagggcuguuaccuuguccacacccugcuggaguucuacuuga

SEQ ID NO: 4403 - RNA, 156 nt, Artificial Sequence
  derived and/or modified sequence opt1 from IL-24__Homo_sapiens__AAV52800
augaacuuccagcagcgccugcagagccucuggacccuggccuccaagcugcggaucaccagccgcgugcccggcugcugcaaccggcgcuucugccggacgucccgcaugcuccgggccgucacccugagcaccccgugcugguccagcaccuga

SEQ ID NO: 4404 - RNA, 156 nt, Artificial Sequence
  derived and/or modified sequence opt2 from IL-24__Homo_sapiens__AAV52800
augaacuuccagcagcgccuccagucccucuggacccucgccuccaagcuccgcaucaccucccgcguccccggcugcugcaaccgccgcuucugccgcaccucccgcaugcuccgcgccgucacccucuccacccccugcugguccuccaccuga

SEQ ID NO: 4405 - RNA, 156 nt, Artificial Sequence
  derived and/or modified sequence opt3 from IL-24__Homo_sapiens__AAV52800
augaacuuccagcaaagacugcagagccucuggacccuugccuccaagcugaggaucacaucucgggugcccggcugcuguaaucgccgauuuugccguacuucaagaauguugagggcugucacguuaaguaccccuuguuggagcuccacauga

SEQ ID NO: 4406 - RNA, 156 nt, Artificial Sequence
  derived and/or modified sequence opt4 from IL-24__Homo_sapiens__AAV52800
augaacuuccagcagagacugcagagccuguggacccuggccagcaagcugagaaucaccagcagagugcccggcugcugcaacagaagauucugcagaaccagcagaaugcugagagccgugacccugagcacccccugcuggagcagcaccuga

SEQ ID NO: 4407 - RNA, 156 nt, Artificial Sequence
  derived and/or modified sequence opt5 from IL-24__Homo_sapiens__AAV52800
augaacuuccagcaaagacugcagagccucuggacccuggccuccaagcugcggaucacaucucgcgugcccggcugcuguaauagacgguuuugccgcacgagcagaaugcuucgggcugucacccucuccacaccuuguuggucuagcaccuga

SEQ ID NO: 4408 - RNA, 156 nt, Artificial Sequence
  derived and/or modified sequence opt6 from IL-24__Homo_sapiens__AAV52800
augaacuuucaacaaagacuacaaucacuauggacauuagcaucaaaauuaagaauaacaucaagaguaccaggaugcuguaacagaagauucugcagaacaucaagaaugcuaagagcaguaacauuaagcacaccaugcuggucaagcacauaa

SEQ ID NO: 4409 - protein, 173 aa, Artificial Sequence
  IL-25__Homo_sapiens__Q969H8
MAAPSGGWNGVGASLWAALLLGAVALRPAEAVSEPTTVAFDVRPGGVVHSFSHNVGPGDKYTCMFTYASQGGTNEQWQMSLGTSEDHQHFTCTIWRPQGKSYLYFTQFKAEVRGAEIEYAMAYSKAAFERESDVPLKTEEFEVTKTAVAHRPGAFKAELSKLVIVAKASRTEL

SEQ ID NO: 4410 - RNA, 522 nt, Artificial Sequence
  IL-25__Homo_sapiens__AAH10129
auggcggcgcccagcggaggguggaacggcgucggcgcgagcuugugggccgcgcugcuccuaggggccguggcgcugaggccggcggaggcgguguccgagcccacgacgguggcguuugacgugcggcccggcggcgucgugcauuccuucucccauaacgugggcccgggggacaaauauacguguauguucacuuacgccucucaaggagggaccaaugagcaauggcagaugagucuggggaccagcgaagaccaccagcacuucaccugcaccaucuggaggccccaggggaaguccuaucuguacuucacacaguucaaggcagaggugcggggcgcugagauugaguacgccauggccuacucuaaagccgcauuugaaagggaaagugaugucccucugaaaacugaggaauuugaagugaccaaaacagcaguggcucacaggcccggggcauucaaagcugagcuguccaagcuggugauuguggccaaggcaucgcgcacugagcuguga

SEQ ID NO: 4411 - RNA, 522 nt, Artificial Sequence
  derived and/or modified sequence opt1 from IL-25__Homo_sapiens__AAH10129
auggccgcccccagcggcggguggaacggcgugggggcgucccugugggccgcccuccugcugggcgccgucgcccuccgcccggcggaggccgugagcgagcccaccaccguggccuucgacguccggcccgggggcguggugcacuccuucagccacaacgucggccccggggacaaguacacgugcauguucaccuacgccucccagggcgggaccaacgagcaguggcagaugagccugggcaccuccgaggaccaccagcacuucacgugcaccaucuggcgcccgcaggggaaguccuaccuguacuucacccaguucaaggcggaggugcggggcgccgagaucgaguacgccauggccuacagcaaggccgcguucgagcgcgagagcgacgugccccucaagaccgaggaguucgaggucacgaagaccgccguggcccaccggcccggcgccuucaaggccgagcuguccaagcuggugaucgucgcgaaggccagccgcaccgagcucuga

SEQ ID NO: 4412 - RNA, 522 nt, Artificial Sequence
  derived and/or modified sequence opt2 from IL-25__Homo_sapiens__AAH10129
auggccgcccccuccggcggcuggaacggcgucggcgccucccucugggccgcccuccuccucggcgccgucgcccuccgccccgccgaggccgucuccgagcccaccaccgucgccuucgacguccgccccggcggcgucguccacuccuucucccacaacgucggccccggcgacaaguacaccugcauguucaccuacgccucccagggcggcaccaacgagcaguggcagaugucccucggcaccuccgaggaccaccagcacuucaccugcaccaucuggcgcccccagggcaaguccuaccucuacuucacccaguucaaggccgagguccgcggcgccgagaucgaguacgccauggccuacuccaaggccgccuucgagcgcgaguccgacgucccccucaagaccgaggaguucgaggucaccaagaccgccgucgcccaccgccccggcgccuucaaggccgagcucuccaagcucgucaucgucgccaaggccucccgcaccgagcucuga

SEQ ID NO: 4413 - RNA, 522 nt, Artificial Sequence
  derived and/or modified sequence opt3 from IL-25__Homo_sapiens__AAH10129
auggccgcucccagcggcggguggaacggagugggugcaucccugugggccgcgcuccuucugggcgcugucgccuugagaccugcagaggccguuucugaaccaaccacaguggcuuucgacguaaggcccgggggagugguccacucauuuagucauaaugugggcccgggugauaaguacacuugcauguucacguaugcaagccaagggggaaccaacgagcaguggcagauguccuuaggcacaucugaagaccaccagcauuuuacuuguaccaucuggcggccucagggcaaaucguaccuguauuucacacaauuuaaggccgagguucgcggggcugaaauugaguacgccauggcguauucaaaagcagccuucgagcgagaaagcgaugugccacuaaagaccgaggaauuugaggucacuaaaacagcuguggcccaccgucccggagcauucaaggcugagcucaguaagcugguaauaguugccaaagcguccagaaccgaacuuuga

SEQ ID NO: 4414 - RNA, 522 nt, Artificial Sequence
  derived and/or modified sequence opt4 from IL-25__Homo_sapiens__AAH10129
auggccgcccccagcggcggcuggaacggcgugggcgccagccugugggccgcccugcugcugggcgccguggcccugagacccgccgaggccgugagcgagcccaccaccguggccuucgacgugagacccggcggcguggugcacagcuucagccacaacgugggccccggcgacaaguacaccugcauguucaccuacgccagccagggcggcaccaacgagcaguggcagaugagccugggcaccagcgaggaccaccagcacuucaccugcaccaucuggagaccccagggcaagagcuaccuguacuucacccaguucaaggccgaggugagaggcgccgagaucgaguacgccauggccuacagcaaggccgccuucgagagagagagcgacgugccccugaagaccgaggaguucgaggugaccaagaccgccguggcccacagacccggcgccuucaaggccgagcugagcaagcuggugaucguggccaaggccagcagaaccgagcuguga

SEQ ID NO: 4415 - RNA, 522 nt, Artificial Sequence
  derived and/or modified sequence opt5 from IL-25__Homo_sapiens__AAH10129
auggccgcucccagcggcggguggaacggagugggcgccucccugugggcggcucuccugcuuggggccgucgcccugagaccugcugaggccguuucugaaccgaccacaguggcuuucgacgugcggcccggaggcgucgugcacagcuuuucccauaauguugggccuggagauaaguacacgugcauguucaccuaugccucucagggcggcacaaacgagcaauggcagaugagccucgggaccuccgaagaccaccagcauuuuacauguaccaucuggcgcccccagggaaaaucuuaccuguauuucacacaauuuaaggcggaggugagaggcgccgaaauugaguacgcuauggccuauagcaaagcugccuucgagcgggaauccgaugucccucuuaagaccgaggaauuugaggugacgaaaaccgcgguugcccaccgccccggggcuuucaaggccgagcugagcaagcucgugaucgucgcuaaagccucuagaacagaacuguga

SEQ ID NO: 4416 - RNA, 522 nt, Artificial Sequence
  derived and/or modified sequence opt6 from IL-25__Homo_sapiens__AAH10129
auggcagcaccaucaggaggauggaauggaguaggcgcaucauuaugggcagcauuauuauuaggagcaguagcauuaagaccagcagaagcaguaucagaaccaacaacaguagcauucgauguaagaccaggaggaguuguacauucauuuucacauaacguaggaccaggagauaaauauacauguauguuuacauaugcaucacaaggaggaacaaacgaacaauggcaaaugucauuaggaacaucagaagaucaucaacauuucacaugcacaauauggagaccacaaggaaaaucauauuuauacuuuacacaauucaaagcagaaguaagaggagcagaaauagaauaugcaauggcauauucaaaagcagcauucgaaagagaaucagauguaccacuaaaaacagaagaauuugaaguaacaaaaacagcaguagcacacagaccaggagcauuuaaagcagaauuaucaaaacuaguaauaguagcaaaagcaucaagaacagaacuauaa

SEQ ID NO: 4417 - protein, 177 aa, Artificial Sequence
  IL-25__Homo_sapiens__Q9H293
MRERPRLGEDSSLISLFLQVVAFLAMVMGTHTYSHWPSCCPSKGQDTSEELLRWSTVPVPPLEPARPNRHPESCRASEDGPLNSRAISPWRYELDRDLNRLPQDLYHARCLCPHCVSLQTGSHMDPRGNSELLYHNQTVFYRRPCHGEKGTHKGYCLERRLYRVSLACVCVRPRVMG

SEQ ID NO: 4418 - RNA, 534 nt, Artificial Sequence
  IL-25__Homo_sapiens__AAG40848
augagggagcgacccagauuaggugaggacaguucucucauuagccuuuuccuacaggugguugcauucuuggcaauggucaugggaacccacaccuacagccacuggcccagcugcugccccagcaaagggcaggacaccucugaggagcugcugagguggagcacugugccugugccuccccuagagccugcuaggcccaaccgccacccagaguccuguagggccagugaagauggaccccucaacagcagggccaucucccccuggagauaugaguuggacagagacuugaaccggcucccccaggaccuguaccacgcccguugccugugcccgcacugcgucagccuacagacaggcucccacauggacccccggggcaacucggagcugcucuaccacaaccagacugucuucuacaggcggccaugccauggcgagaagggcacccacaagggcuacugccuggagcgcaggcuguaccguguuuccuuagcuugugugugugugcggccccgugugaugggcuag

SEQ ID NO: 4419 - RNA, 534 nt, Artificial Sequence
  derived and/or modified sequence opt1 from IL-25__Homo_sapiens__AAG40848
augcgcgagcggccccgccugggcgaggacagcucccucaucagccuguuccugcaggucgucgccuuccucgccauggugauggggacccacaccuacucccacuggccgagcugcugccccuccaagggccaggacacgagcgaggagcugcugcggugguccaccgugcccgugcccccgcucgagcccgcgcgccccaaccggcaccccgagagcugccgcgccuccgaggacgggccgcugaacagccgggccaucucccccuggcgcuacgagcuggaccgggaccucaaccgccugccccaggaccuguaccacgcccggugccucugcccccacugcgugagccugcagaccggcucccacauggacccgcgcgggaacagcgagcugcucuaccacaaccagaccguguucuaccggcgccccugccacggcgagaagggcacgcacaagggguacugccuggagcggcgccuguaccgggucucccucgccugcgugugcgugcgcccccgggucaugggcuga

SEQ ID NO: 4420 - RNA, 534 nt, Artificial Sequence
  derived and/or modified sequence opt2 from IL-25__Homo_sapiens__AAG40848
augcgcgagcgcccccgccucggcgaggacuccucccucaucucccucuuccuccaggucgucgccuuccucgccauggucaugggcacccacaccuacucccacuggcccuccugcugccccuccaagggccaggacaccuccgaggagcuccuccgcugguccaccguccccguccccccccucgagcccgcccgccccaaccgccaccccgaguccugccgcgccuccgaggacggcccccucaacucccgcgccaucucccccuggcgcuacgagcucgaccgcgaccucaaccgccucccccaggaccucuaccacgcccgcugccucugcccccacugcgucucccuccagaccggcucccacauggacccccgcggcaacuccgagcuccucuaccacaaccagaccgucuucuaccgccgccccugccacggcgagaagggcacccacaagggcuacugccucgagcgccgccucuaccgcgucucccucgccugcgucugcguccgcccccgcgucaugggcuga

SEQ ID NO: 4421 - RNA, 534 nt, Artificial Sequence
  derived and/or modified sequence opt3 from IL-25__Homo_sapiens__AAG40848
augagagagaggccccggcugggcgaagacagcucccucaucucucuuuuccugcaaguggucgccuuuuuggcuaugguuauggggacccacacauacucacauuggccuaguugcuguccaagcaagggacaggauacuuccgaggaauuacugcgcuggucuacggugccgguacccccucuagagccagcacgacccaaccgucacccugaaucgugcagagccucagaggacgguccacucaauagcagggcgauuagucccuggcgguaugagcuggaucgcgaccuuaacagacugccucaggauuuguaccaugcuaggugucucugcccacacugugugucccugcagaccggcucucauauggacccgcgggggaauagcgaacugcucuaucacaaccagacagucuucuaccgccgacccugccacggagagaaaggcacucauaaggguuauuguuuagaaagaaggcuguaccgggugucccuugccugcguuugugugcguccucgcgucaugggguga

SEQ ID NO: 4422 - RNA, 534 nt, Artificial Sequence
  derived and/or modified sequence opt4 from IL-25__Homo_sapiens__AAG40848
augagagagagacccagacugggcgaggacagcagccugaucagccuguuccugcaggugguggccuuccuggccauggugaugggcacccacaccuacagccacuggcccagcugcugccccagcaagggccaggacaccagcgaggagcugcugagauggagcaccgugcccgugcccccccuggagcccgccagacccaacagacaccccgagagcugcagagccagcgaggacggcccccugaacagcagagccaucagccccuggagauacgagcuggacagagaccugaacagacugccccaggaccuguaccacgccagaugccugugcccccacugcgugagccugcagaccggcagccacauggaccccagaggcaacagcgagcugcuguaccacaaccagaccguguucuacagaagacccugccacggcgagaagggcacccacaagggcuacugccuggagagaagacuguacagagugagccuggccugcgugugcgugagacccagagugaugggcuga

SEQ ID NO: 4423 - RNA, 534 nt, Artificial Sequence
  derived and/or modified sequence opt5 from IL-25__Homo_sapiens__AAG40848
augagagagcggccccgccugggcgaagacagcucccucaucucucuguuccuucagguggucgccuuucuggcuaugguuauggggacccacacauacagccauuggccuuccugcuguccgucuaagggacaagauacgagcgaggaacuccugagaugguccaccgugcccgugccuccccuugagccugcccggcccaaccgccacccugaaucuugcagagcgagcgaggacggcccgcucaauucccgggcuauuagccccuggcgcuaugagcuggauagagaccugaaccggcugccucaggaucucuaccaugcccgcugucugugcccccacugugucucucuucagacagggucccauauggacccuagaggaaauagcgaacugcucuaucacaaccagaccguguucuaccggcgccccugccacggcgagaaagggacacauaagggauauugucuggaaagacggcuuuaccgcguuucucuggccugcgugugugucagaccgcgggugaugggcuga

SEQ ID NO: 4424 - RNA, 534 nt, Artificial Sequence
  derived and/or modified sequence opt6 from IL-25__Homo_sapiens__AAG40848
augagagaaagaccaagauuaggagaagacucaucacuaauaucacuauuucuacaaguaguagcauuuuuagcaaugguaaugggaacacauacauauucacauuggccaucauguugcccaagcaaaggacaagacacaagcgaagaacuacuaagauggucaacaguaccaguaccaccacuagaaccagcaagaccaaacagacacccagaaucaugcagagcaucagaagauggaccauuaaauucaagagcaauaucaccauggagauacgaacuagauagagauuuaaauagauuaccacaagacuuauaccaugcaagaugcuuaugcccacacuguguaucacuacaaacaggaucacauauggauccaagaggaaauucagaauuacuauaccauaaccaaacaguauuuuauagaagaccaugucacggagaaaaaggaacacacaaaggauauugcuuagaaagaagauuauacagaguaucacuagcaugcguaugcguaagaccaagaguaaugggauaa

SEQ ID NO: 4425 - protein, 171 aa, Artificial Sequence
  IL-26__Homo_sapiens__Q9NPH9
MLVNFILRCGLLLVTLSLAIAKHKQSSFTKSCYPRGTLSQAVDALYIKAAWLKATIPEDRIKNIRLLKKKTKKQFMKNCQFQEQLLSFFMEDVFGQLQLQGCKKIRFVEDFHSLRQKLSHCISCASSAREMKSITRMKRIFYRIGNKGIYKAISELDILLSWIKKLLESSQ

SEQ ID NO: 4426 - RNA, 516 nt, Artificial Sequence
  IL-26__Homo_sapiens__AAH66270
augcuggugaauuucauuuugagguguggguugcuguuagucacucugucucuugccauugccaagcacaagcaaucuuccuucaccaaaaguuguuacccaaggggaacauugucccaagcuguugacgcucucuauaucaaagcagcauggcucaaagcaacgauuccagaagaccgcauaaaaaauauacgauuauuaaaaaagaaaacaaaaaagcaguuuaugaaaaacugucaauuucaagaacagcuucuguccuucuucauggaagacguuuuuggucaacugcaauugcaaggcugcaagaaaauacgcuuuguggaggacuuucauagccuuaggcagaaauugagccacuguauuuccugugcuucaucagcuagagagaugaaauccauuaccaggaugaaaagaauauuuuauaggauuggaaacaaaggaaucuacaaagccaucagugaacuggauauucuucuuuccuggauuaaaaaauuauuggaaagcagucaguaa

SEQ ID NO: 4427 - RNA, 516 nt, Artificial Sequence
  derived and/or modified sequence opt1 from IL-26__Homo_sapiens__AAH66270
augcuggugaacuucauccuccgcugcggccugcugcucgucacccugagccuggccaucgccaagcacaagcaguccagcuucaccaaguccugcuacccccgggggacgcucagccaggcgguggacgcccuguacaucaaggccgccuggcugaaggccaccaucccggaggaccgcaucaagaacauccggcuccugaagaagaagaccaagaagcaguucaugaagaacugccaguuccaggagcagcugcucuccuucuucauggaggacguguucggccagcugcagcugcaggggugcaagaagauccgcuucgucgaggacuuccacagccuccggcagaagcugucccacugcaucagcugcgcguccagcgcccgcgagaugaaguccaucacccggaugaagcgcaucuucuaccggaucggcaacaaggggaucuacaaggccaucagcgagcuggacauccuccuguccuggaucaagaagcugcucgagagcucccaguga

SEQ ID NO: 4428 - RNA, 516 nt, Artificial Sequence
  derived and/or modified sequence opt2 from IL-26__Homo_sapiens__AAH66270
augcucgucaacuucauccuccgcugcggccuccuccucgucacccucucccucgccaucgccaagcacaagcaguccuccuucaccaaguccugcuacccccgcggcacccucucccaggccgucgacgcccucuacaucaaggccgccuggcucaaggccaccauccccgaggaccgcaucaagaacauccgccuccucaagaagaagaccaagaagcaguucaugaagaacugccaguuccaggagcagcuccucuccuucuucauggaggacgucuucggccagcuccagcuccagggcugcaagaagauccgcuucgucgaggacuuccacucccuccgccagaagcucucccacugcaucuccugcgccuccuccgcccgcgagaugaaguccaucacccgcaugaagcgcaucuucuaccgcaucggcaacaagggcaucuacaaggccaucuccgagcucgacauccuccucuccuggaucaagaagcuccucgaguccucccaguga

SEQ ID NO: 4429 - RNA, 516 nt, Artificial Sequence
  derived and/or modified sequence opt3 from IL-26__Homo_sapiens__AAH66270
augcuggugaacuucauacucagaugcggccuucuguuggucaccuuaagccuggccauugcuaagcacaaacaguccucuuuuacaaagucauguuaccccagggggacucuaagucaagcaguugacgcccucuauauaaaagcggcuuggcugaaggccacgaucccugaggaucggauuaaaaauauccgccuucugaagaagaaaaccaagaaacaguucaugaagaacugccaguuucaggaacaauugcucagcuucuuuauggaggacguguucggacagcugcagcugcaggguuguaaaaagauucgauuuguagaagauuuccauucccuccgucaaaaguuaucucacugcaucucgugugcaucaagcgccagagagaugaaaaguauaacaaggaugaagcggaucuuuuaccgcauuggcaauaaagggaucuauaaggcuauuuccgaacuggacauccuuuugucuuggaucaaaaagcugcuagagagcucccaguga

SEQ ID NO: 4430 - RNA, 516 nt, Artificial Sequence
  derived and/or modified sequence opt4 from IL-26__Homo_sapiens__AAH66270
augcuggugaacuucauccugagaugcggccugcugcuggugacccugagccuggccaucgccaagcacaagcagagcagcuucaccaagagcugcuaccccagaggcacccugagccaggccguggacgcccuguacaucaaggccgccuggcugaaggccaccauccccgaggacagaaucaagaacaucagacugcugaagaagaagaccaagaagcaguucaugaagaacugccaguuccaggagcagcugcugagcuucuucauggaggacguguucggccagcugcagcugcagggcugcaagaagaucagauucguggaggacuuccacagccugagacagaagcugagccacugcaucagcugcgccagcagcgccagagagaugaagagcaucaccagaaugaagagaaucuucuacagaaucggcaacaagggcaucuacaaggccaucagcgagcuggacauccugcugagcuggaucaagaagcugcuggagagcagccaguga

SEQ ID NO: 4431 - RNA, 516 nt, Artificial Sequence
  derived and/or modified sequence opt5 from IL-26__Homo_sapiens__AAH66270
augcuggugaacuucauccucagaugcggccugcuucuggucacccucagccuggccauugcuaagcacaaacaguccucuuuuacaaagagcuguuacccccgggggacgcuuucccaagccguugacgcgcuguauaucaaagcugccuggcucaaggccaccauuccugaggaucgcaucaaaaauauuagacugcugaagaagaaaacaaagaaacaguucaugaagaacugccaguuucaggaacaacuccugucuuucuuuauggaggacguguucggacagcuucagcugcagggcuguaaaaagauccgguuuguggaagauuuccauagccuccgccaaaagcugucccacugcaucucuugugcuagcuccgccagagagaugaaaagcauuacccggaugaagcgcaucuuuuacagaauugggaauaaaggaaucuauaaggcuauuucugaacuugacauccugcucuccuggauuaaaaagcugcuggagagcucucaguga

SEQ ID NO: 4432 - RNA, 516 nt, Artificial Sequence
  derived and/or modified sequence opt6 from IL-26__Homo_sapiens__AAH66270
augcuaguaaacuucauacuaagaugcggacuacuacuaguaacccuaucacuagcaauagcaaaacacaaacaaucaucauucacaaaauccugcuacccaagaggaaccuuaucacaagcaguagacgcauuauacauaaaagcagcauggcuaaaagcaaccauaccagaagacagaauaaaaaacauaagacuacuaaaaaaaaaaacaaaaaaacaauucaugaaaaacugccaauuccaagaacaacuacuaucauucuucauggaagacguauucggacaacuacaacuacaaggaugcaaaaaaauaagauucguagaagacuuccacucacuaagacaaaaacuaucccacugcauaucaugcgcaagcucagcaagagaaaugaaaucaauaacaagaaugaaaagaauauucuacagaauaggaaacaaaggaauauacaaagcaauaucagaacuagacauacuacuaucauggaucaaaaaacuacucgaaucaucacaauaa

SEQ ID NO: 4433 - protein, 243 aa, Artificial Sequence
  IL-27A__Homo_sapiens__Q8NEV9
MGQTAGDLGWRLSLLLLPLLLVQAGVWGFPRPPGRPQLSLQELRREFTVSLHLARKLLSEVRGQAHRFAESHLPGVNLYLLPLGEQLPDVSLTFQAWRRLSDPERLCFISTTLQPFHALLGGLGTQGRWTNMERMQLWAMRLDLRDLQRHLRFQVLAAGFNLPEEEEEEEEEEEEERKGLLPGALGSALQGPAQVSWPQLLSTYRLLHSLELVLSRAVRELLLLSKAGHSVWPLGFPTLSPQP

SEQ ID NO: 4434 - RNA, 732 nt, Artificial Sequence
  IL-27A__Homo_sapiens__ABK41903
augggccagacggcaggcgaccuuggcuggcggcucagccuguugcugcuucccuugcuccugguucaagcuggugucuggggauucccaaggcccccagggaggccccagcugagccugcaggagcugcggagggaguucacagucagccugcaucucgccaggaagcugcucuccgagguucggggccaggcccaccgcuuugcggaaucucaccugccaggagugaaccuguaccuccugccccugggagagcagcucccugauguuucccugaccuuccaggccuggcgccgccucucugacccggagcgucucugcuucaucuccaccacgcuucagcccuuccaugcccugcugggagggcuggggacccagggccgcuggaccaacauggagaggaugcagcugugggccaugaggcuggaccuccgcgaucugcagcggcaccuccgcuuccaggugcuggcugcaggauucaaccucccggaggaggaggaggaggaagaggaggaggaggaggaggagaggaaggggcugcucccaggggcacugggcagcgccuuacagggcccggcccagguguccuggccccagcuccucuccaccuaccgccugcugcacuccuuggagcucgucuuaucucgggccgugcgggaguugcugcugcuguccaaggcugggcacucagucuggcccuugggguucccaacauugagcccccagcccuga

SEQ ID NO: 4435 - RNA, 732 nt, Artificial Sequence
  derived and/or modified sequence opt1 from IL-27A__Homo_sapiens__ABK41903
augggccagaccgccggggaccugggcuggcgccucucccugcugcuccugccccugcuccuggugcaggccggggucuggggcuucccgcggccgcccgggcgcccccagcugucccuccaggagcugcggcgcgaguucaccgugagccugcaccucgcgcggaagcugcuguccgaggugcgcggccaggcccaccgguucgccgagagccaccuccccggcgucaaccuguaccugcucccccugggggagcagcugcccgacgugucccucacguuccaggccuggcgccggcugagcgaccccgagcgccugugcuucaucuccaccacccuccagccguuccacgcccugcugggcgggcucggcacccaggggcgguggacgaacauggagcgcaugcagcugugggcgaugcggcuggaccuccgcgaccugcagcggcaccuccgcuuccaggugcuggccgccggcuucaaccugcccgaggaggaggaggaggaggaggaggaggaggaggaggagcggaagggccugcuccccggggcccugggcagcgcgcugcaggggcccgcccaggucuccuggccgcagcuccugagcaccuaccgccugcuccacucccuggagcuggugcucagccgggccgugcgcgagcugcugcuccuguccaaggccggccacagcgucuggccccugggcuuccccacccugagcccccagccguga

SEQ ID NO: 4436 - RNA, 732 nt, Artificial Sequence
  derived and/or modified sequence opt2 from IL-27A__Homo_sapiens__ABK41903
augggccagaccgccggcgaccucggcuggcgccucucccuccuccuccucccccuccuccucguccaggccggcgucuggggcuucccccgcccccccggccgcccccagcucucccuccaggagcuccgccgcgaguucaccgucucccuccaccucgcccgcaagcuccucuccgagguccgcggccaggcccaccgcuucgccgagucccaccuccccggcgucaaccucuaccuccucccccucggcgagcagcuccccgacgucucccucaccuuccaggccuggcgccgccucuccgaccccgagcgccucugcuucaucuccaccacccuccagcccuuccacgcccuccucggcggccucggcacccagggccgcuggaccaacauggagcgcaugcagcucugggccaugcgccucgaccuccgcgaccuccagcgccaccuccgcuuccagguccucgccgccggcuucaaccuccccgaggaggaggaggaggaggaggaggaggaggaggaggagcgcaagggccuccuccccggcgcccucggcuccgcccuccagggccccgcccaggucuccuggccccagcuccucuccaccuaccgccuccuccacucccucgagcucguccucucccgcgccguccgcgagcuccuccuccucuccaaggccggccacuccgucuggccccucggcuuccccacccucuccccccagcccuga

SEQ ID NO: 4437 - RNA, 732 nt, Artificial Sequence
  derived and/or modified sequence opt3 from IL-27A__Homo_sapiens__ABK41903
augggccagaccgccggggaccugggauggagacucagccuucuguuguuaccccugcuacucgugcaagcuggugucuggggcuucccuaggccaccggggcggccccagcugucccuucaggagcugcgccgagaauuuacaguuucuuugcaccucgcacguaagcugcugucagaggugagaggacaggcccauagguucgcggaaagucaccucccuggcguaaacuuauaccugcuuccauugggugagcaacugcccgaugugagccuaacuuuucaggcuuggcggcgccucuccgacccugaaagacugugcuucaucucuacgacccuucagccauuucaugcccuguugggcggacucggcacacaggggagguggacuaauauggagcggaugcaacugugggcaaugcgcuuagaucugcgagaccuccagagacaccuuagguuccagguccuggccgcuggguuuaacuugcccgaggaagaggaagaggaggaagaggaagaggaagaggagcggaaaggacuacugccuggugcacucggcucggcccugcaggggccagcucaagugucauggccgcagcuucugagcaccuaucguuugcuccauagucuggaauuaguucugucccgcgccgugagagagcuacuccugcuuucuaaggcgggacacagcgucuggcccuugggcuucccuacacuguccccacagcccuga

SEQ ID NO: 4438 - RNA, 732 nt, Artificial Sequence
  derived and/or modified sequence opt4 from IL-27A__Homo_sapiens__ABK41903
augggccagaccgccggcgaccugggcuggagacugagccugcugcugcugccccugcugcuggugcaggccggcguguggggcuuccccagaccccccggcagaccccagcugagccugcaggagcugagaagagaguucaccgugagccugcaccuggccagaaagcugcugagcgaggugagaggccaggcccacagauucgccgagagccaccugcccggcgugaaccuguaccugcugccccugggcgagcagcugcccgacgugagccugaccuuccaggccuggagaagacugagcgaccccgagagacugugcuucaucagcaccacccugcagcccuuccacgcccugcugggcggccugggcacccagggcagauggaccaacauggagagaaugcagcugugggccaugagacuggaccugagagaccugcagagacaccugagauuccaggugcuggccgccggcuucaaccugcccgaggaggaggaggaggaggaggaggaggaggaggaggagagaaagggccugcugcccggcgcccugggcagcgcccugcagggccccgcccaggugagcuggccccagcugcugagcaccuacagacugcugcacagccuggagcuggugcugagcagagccgugagagagcugcugcugcugagcaaggccggccacagcguguggccccugggcuuccccacccugagcccccagcccuga

SEQ ID NO: 4439 - RNA, 732 nt, Artificial Sequence
  derived and/or modified sequence opt5 from IL-27A__Homo_sapiens__ABK41903
augggccagaccgccggggaccugggauggagacucagccugcuucugcucccccugcuucuggugcaagcuggcgucuggggguucccucggccgcccggacgcccucagcucucccugcaggagcugagacgggaauuuacaguuucucuccaccuggcccgcaagcugcugagcgaggugagaggccaggcgcaucgguucgcugaaucccaccuccccggggugaaccuguaccuucugccucucggagagcaacugcccgaugucucucugacguuucaggccuggcgcagacucagcgacccugaacggcugugcuucaucuccaccacacuucagccguuucaugcccugcucggcggccuggggacccagggacgcuggacaaauauggagagaaugcaacuuugggcuaugcggcuggaucuccgcgaccugcagagacaccuucgguuccaggugcucgccgcuggcuuuaaccugcccgaggaagaggaagaggaggaagaggaagaggaagaggagcgcaaagggcuucugccuggagcccucggcucugcgcugcaggggcccgcccaaguuagcuggccucagcuucuguccaccuauagacuccugcauagccuggaacucgugcugucucgggcugucagagagcuucugcuccuguccaaggccggacacagcguguggccccugggcuucccgacacuuucuccucagcccuga

SEQ ID NO: 4440 - RNA, 732 nt, Artificial Sequence
  derived and/or modified sequence opt6 from IL-27A__Homo_sapiens__ABK41903
augggacaaacagcaggagacuuaggauggagauuaucacuacucuuauuaccacuccuacuaguacaagcuggaguuuggggauucccuagaccaccaggaagaccacaauuaagcuuacaagaacuaagaagagaauuuacuguaucacuacaucuagcaagaaaauuauuaucagaaguaagaggacaagcacacagauucgcagaaucccaucuaccaggaguaaacuuauacuuacuaccacuaggcgaacaacuaccagacguuucauuaaccuuucaagcuuggagaagauuaucagauccagaaagauuaugcuuuauauccacaacacuacaacccuuucacgcacuauuaggaggucuaggaacacaaggaagauggacuaacauggaaagaaugcaauuaugggccaugagauuagacuuaagagaucuacaaagacauuuaagauuccaaguacuagcagcaggauuuaaccuaccagaagaagaagaagaagaagaagaagaagaagaagaagaaagaaaaggccuucuaccaggagcacuaggaagcgcacuacaaggaccagcccaaguaucauggccccaauuacuaucaacauauagauuacuacauagccuagaauuaguauuaucaagagcaguaagagaacuauuacuauuaagcaaagcaggacacucuguauggccacuagguuuuccaacacuaucuccacaaccauaa

SEQ ID NO: 4441 - protein, 229 aa, Artificial Sequence
  IL-27B__Homo_sapiens__Q14213
MTPQLLLALVLWASCPPCSGRKGPPAALTLPRVQCRASRYPIAVDCSWTLPPAPNSTSPVSFIATYRLGMAARGHSWPCLQQTPTSTSCTITDVQLFSMAPYVLNVTAVHPWGSSSSFVPFITEHIIKPDPPEGVRLSPLAERQLQVQWEPPGSWPFPEIFSLKYWIRYKRQGAARFHRVGPIEATSFILRAVRPRARYYVQVAAQDLTDYGELSDWSLPATATMSLGK

SEQ ID NO: 4442 - RNA, 690 nt, Artificial Sequence
  IL-27B__Homo_sapiens__AAC33488
augaccccgcagcuucuccuggcccuuguccucugggccagcugcccgcccugcaguggaaggaaagggcccccagcagcucugacacugccccgggugcaaugccgagccucucgguacccgaucgccguggauugcuccuggacccugccgccugcuccaaacuccaccagccccguguccuucauugccacguacaggcucggcauggcugcccggggccacagcuggcccugccugcagcagacgccaacguccaccagcugcaccaucacggauguccagcuguucuccauggcucccuacgugcucaaugucaccgccguccaccccuggggcuccagcagcagcuucgugccuuucauaacagagcacaucaucaagcccgacccuccagaaggcgugcgccuaagcccccucgcugagcgccagcuacaggugcagugggagccucccggguccuggcccuucccagagaucuucucacugaaguacuggauccguuacaagcgucagggagcugcgcgcuuccaccggguggggcccauugaagccacguccuucauccucagggcugugcggccccgagccagguacuacguccaaguggcggcucaggaccucacagacuacggggaacugagugacuggagucuccccgccacugccacaaugagccugggcaaguag

SEQ ID NO: 4443 - RNA, 690 nt, Artificial Sequence
  derived and/or modified sequence opt1 from IL-27B__Homo_sapiens__AAC33488
augacgccccagcugcuccuggcccuggugcucugggccagcugcccgcccugcuccggccgcaaggggccgcccgcggcccugacccugccccggguccagugccgcgccagccgguaccccaucgccguggacugcuccuggacccucccgcccgcccccaacagcaccucccccgugagcuucaucgcgaccuaccgccugggcauggccgcccgggggcacuccuggcccugccugcagcagacccccacgagcaccuccugcaccaucaccgacguccagcuguucagcauggccccguacgugcucaacgugacggcgguccaccccuggggcuccagcuccagcuucgugcccuucaucaccgagcacaucaucaagcccgacccgcccgagggggugcgccugagcccccucgccgagcggcagcugcagguccagugggagcccccgggcuccuggcccuuccccgagaucuucucccugaaguacuggauccgcuacaagcggcagggcgccgcccgcuuccaccggguggggcccaucgaggccaccagcuucauccuccgcgcggugcggccgcgcgcccgguacuacguccagguggccgcccaggaccugaccgacuacggcgagcuguccgacuggagccuccccgccacggcgaccaugagccuggggaaguga

SEQ ID NO: 4444 - RNA, 690 nt, Artificial Sequence
  derived and/or modified sequence opt2 from IL-27B__Homo_sapiens__AAC33488
augaccccccagcuccuccucgcccucguccucugggccuccugcccccccugcuccggccgcaagggcccccccgccgcccucacccucccccgcguccagugccgcgccucccgcuaccccaucgccgucgacugcuccuggacccucccccccgcccccaacuccaccucccccgucuccuucaucgccaccuaccgccucggcauggccgcccgcggccacuccuggcccugccuccagcagacccccaccuccaccuccugcaccaucaccgacguccagcucuucuccauggcccccuacguccucaacgucaccgccguccaccccuggggcuccuccuccuccuucguccccuucaucaccgagcacaucaucaagcccgacccccccgagggcguccgccucuccccccucgccgagcgccagcuccagguccagugggagccccccggcuccuggcccuuccccgagaucuucucccucaaguacuggauccgcuacaagcgccagggcgccgcccgcuuccaccgcgucggccccaucgaggccaccuccuucauccuccgcgccguccgcccccgcgcccgcuacuacguccaggucgccgcccaggaccucaccgacuacggcgagcucuccgacuggucccuccccgccaccgccaccaugucccucggcaaguga

SEQ ID NO: 4445 - RNA, 690 nt, Artificial Sequence
  derived and/or modified sequence opt3 from IL-27B__Homo_sapiens__AAC33488
augacaccccagcugcuccuugcccugguguugugggcuagcugcccuccauguuccggcagaaaggggccgcccgcagccuuaacccugccuaggguccaaugccgggcgucucgcuacccaaucgcuguugacuguucauggacucuacccccugccccaaacaguacgagccccguguccuucauugcaaccuaucgacucggaauggccgcucguggucacucuuggccuugccugcagcagacaccaacuucgaccucauguacaauaaccgauguacagcuuuuuagcauggcaccguacgugcugaaugucacugccgugcaucccuggggcaguuccucuagcuucguuccuuuuaucacagagcacauuaucaaaccagaucccccugaaggggugagauuguccccacucgcugagaggcaacugcagguccagugggaacccccgggaucauggccuuuccccgagauuuuuagucugaaguauuggauccgguacaaacgccagggcgccgcgagauuccauaggguggguccaauagaagcaaccagcuuuauccuccgggccguacgcccucgagcuagauauuacguucaaguggccgcacaggacuuaacggacuauggggagcugucugauuggucccuucccgcuacugccaccaugucauugggaaaguga

SEQ ID NO: 4446 - RNA, 690 nt, Artificial Sequence
  derived and/or modified sequence opt4 from IL-27B__Homo_sapiens__AAC33488
augaccccccagcugcugcuggcccuggugcugugggccagcugcccccccugcagcggcagaaagggcccccccgccgcccugacccugcccagagugcagugcagagccagcagauaccccaucgccguggacugcagcuggacccugccccccgcccccaacagcaccagccccgugagcuucaucgccaccuacagacugggcauggccgccagaggccacagcuggcccugccugcagcagacccccaccagcaccagcugcaccaucaccgacgugcagcuguucagcauggcccccuacgugcugaacgugaccgccgugcaccccuggggcagcagcagcagcuucgugcccuucaucaccgagcacaucaucaagcccgacccccccgagggcgugagacugagcccccuggccgagagacagcugcaggugcagugggagccccccggcagcuggcccuuccccgagaucuucagccugaaguacuggaucagauacaagagacagggcgccgccagauuccacagagugggccccaucgaggccaccagcuucauccugagagccgugagacccagagccagauacuacgugcagguggccgcccaggaccugaccgacuacggcgagcugagcgacuggagccugcccgccaccgccaccaugagccugggcaaguga

SEQ ID NO: 4447 - RNA, 690 nt, Artificial Sequence
  derived and/or modified sequence opt5 from IL-27B__Homo_sapiens__AAC33488
augacaccccagcugcuccuggcccuugugcugugggcuagcugcccuccguguuccggcagaaaggggcccccugccgcgcucacccugccccggguccaaugccgcgcuucuagauacccuaucgccguugacuguagcuggacgcuucccccugccccgaacuccaccucucccgugagcuucauugcuacauaucggcugggaauggccgcucgcggccacuccuggccuugccuccagcagacccccacaucuaccagcuguacaaucaccgaugugcagcuguuuuccauggccccuuacguccugaaugugacggcgguucaucccugggggucuagcuccagcuucgugccguuuauuaccgagcacaucauuaaaccugaucccccugaaggagucagacucucuccccuggccgagcggcaacuucaggugcagugggaacccccuggcuccuggccguuccccgagaucuuuagccugaaguauuggauccgcuacaaaagacagggggcugcccgguuccaucgcguuggaccuauugaagcuacaucuuuuauccucagagccgugcggccccgcgcgagauauuacguccaaguggccgcucaggaccugaccgacuauggcgagcuuuccgauuggagccugccugccacagcuaccaugucccucggcaaguga

SEQ ID NO: 4448 - RNA, 690 nt, Artificial Sequence
  derived and/or modified sequence opt6 from IL-27B__Homo_sapiens__AAC33488
augacaccacaacuauuauuagcacuaguacuaugggcaucaugcccaccaugcucaggaagaaaaggacccccagcugcauuaacacuaccaagaguacaaugcagagcaucaagauacccaauagcaguagacugcucauggacacuaccaccagccccaaacucaacaucaccaguaucauucaucgcaacauacagacuaggaauggcagcaagaggacacucauggccaugccuacaacaaacaccuacaucaacauccugcacaauaacagacguacaauuauuuucaauggcaccauacguacuaaacguaacagcaguacacccauggggaucaucaagcucauucgucccauucauaacagaacacauaauaaaaccagacccacccgaaggagucagacuaucaccauuagcagaaagacaauuacaaguacaaugggaaccaccaggaucuuggccauucccagaaauauucucccuaaaauauuggauacgauacaaaagacaaggagcagcaagauuucauagaguaggaccaauagaagcaacaucauucauauuaagagcaguaagaccaagagcaagauacuacguccaaguagcugcacaagaccuaacagacuacggagaacuaucagacuggucauuaccugcaacagcaacaaugucccuaggaaaauaa

SEQ ID NO: 4449 - protein, 200 aa, Artificial Sequence
  IL-28A__Homo_sapiens__Q8IZJ0
MKLDMTGDCTPVLVLMAAVLTVTGAVPVARLHGALPDARGCHIAQFKSLSPQELQAFKRAKDALEESLLLKDCRCHSRLFPRTWDLRQLQVRERPMALEAELALTLKVLEATADTDPALVDVLDQPLHTLHHILSQFRACIQPQPTAGPRTRGRLHHWLYRLQEAPKKESPGCLEASVTFNLFRLLTRDLNCVASGDLCV

SEQ ID NO: 4450 - RNA, 603 nt, Artificial Sequence
  IL-28A__Homo_sapiens__AAI13582
augaaacuagacaugacuggggacugcacgccagugcuggugcugauggccgcagugcugaccgugacuggagcaguuccugucgccaggcuccacggggcucucccggaugcaaggggcugccacauagcccaguucaagucccugucuccacaggagcugcaggccuuuaagagggccaaagaugccuuagaagagucgcuucugcugaaggacugcaggugccacucccgccucuuccccaggaccugggaccugaggcagcugcaggugagggagcgccccauggcuuuggaggcugagcuggcccugacgcugaagguucuggaggccaccgcugacacugacccagcccugguggacgucuuggaccagccccuucacacccugcaccauauccucucccaguuccgggccuguauccagccucagcccacggcagggcccaggacccggggccgccuccaccauuggcuguaccggcuccaggaggccccaaaaaaggaguccccuggcugccucgaggccucugucaccuucaaccucuuccgccuccucacgcgagaccugaauuguguugccaguggggaccugugugucuga

SEQ ID NO: 4451 - RNA, 603 nt, Artificial Sequence
  derived and/or modified sequence opt1 from IL-28A__Homo_sapiens__AAI13582
augaagcuggacaugaccggcgacugcacccccgugcucguccugauggccgccgugcugacggugaccggggcggucccgguggcccgccuccacggcgcccugcccgacgcccgggggugccacaucgcccaguucaagagccugagcccccaggagcuccaggcguucaagcgcgccaaggacgcccuggaggagucccugcuccugaaggacugccggugccacucccgccuguucccccggaccugggaccuccgccagcuccaggugcgggagcgcccgauggcccuggaggcggagcuggcccugacccugaagguccucgaggccacggccgacaccgaccccgcccugguggacgugcuggaccagccccuccacacccugcaccacauccugagccaguuccgggcgugcauccagccccagccgaccgccggcccccgcacgcgggggcgccuccaccacuggcuguaccggcugcaggaggcccccaagaaggagucccccggcugccucgaggccagcgucaccuucaaccuguuccgccugcucacccgggaccugaacugcguggccuccggcgaccugugcguguga

SEQ ID NO: 4452 - RNA, 603 nt, Artificial Sequence
  derived and/or modified sequence opt2 from IL-28A__Homo_sapiens__AAI13582
augaagcucgacaugaccggcgacugcacccccguccucguccucauggccgccguccucaccgucaccggcgccguccccgucgcccgccuccacggcgcccuccccgacgcccgcggcugccacaucgcccaguucaagucccucuccccccaggagcuccaggccuucaagcgcgccaaggacgcccucgaggagucccuccuccucaaggacugccgcugccacucccgccucuucccccgcaccugggaccuccgccagcuccagguccgcgagcgccccauggcccucgaggccgagcucgcccucacccucaagguccucgaggccaccgccgacaccgaccccgcccucgucgacguccucgaccagccccuccacacccuccaccacauccucucccaguuccgcgccugcauccagccccagcccaccgccggcccccgcacccgcggccgccuccaccacuggcucuaccgccuccaggaggcccccaagaaggagucccccggcugccucgaggccuccgucaccuucaaccucuuccgccuccucacccgcgaccucaacugcgucgccuccggcgaccucugcgucuga

SEQ ID NO: 4453 - RNA, 603 nt, Artificial Sequence
  derived and/or modified sequence opt3 from IL-28A__Homo_sapiens__AAI13582
augaagcuggacaugaccggcgauugcacacccgugcucguccuuauggccgcuguucugacugugacgggggcaguaccuguggccagauugcacggagcguuaccagacgcuagggguugucauaucgcccaguucaaaagccuguccccgcaagagcuacaggcauuuaagcgggccaaagaugcucucgaagagucucugcuucugaaggacugccgcugucacucacgauuguucccccguaccugggaucucagacagcugcaggucagggaacggccuauggcacuggaggccgaacucgcuuuaacacugaaagugcuugaggccacugcggacaccgauccagcauugguugacgugcuggaucaaccccuacauacacuccaccauauucugagucaguuucgcgccugcauacagccucagccaaccgcuggccccagaacuagggggcggcuucaccacuggcuguaccgcuugcaagaggccccuaagaaggaaagcccaggaugucucgaggcauccgucacauucaaccuguuucgauuacugaccagagaccucaauugcguggcuucuggcgaucuuuguguauga

SEQ ID NO: 4454 - RNA, 603 nt, Artificial Sequence
  derived and/or modified sequence opt4 from IL-28A__Homo_sapiens__AAI13582
augaagcuggacaugaccggcgacugcacccccgugcuggugcugauggccgccgugcugaccgugaccggcgccgugcccguggccagacugcacggcgcccugcccgacgccagaggcugccacaucgcccaguucaagagccugagcccccaggagcugcaggccuucaagagagccaaggacgcccuggaggagagccugcugcugaaggacugcagaugccacagcagacuguuccccagaaccugggaccugagacagcugcaggugagagagagacccauggcccuggaggccgagcuggcccugacccugaaggugcuggaggccaccgccgacaccgaccccgcccugguggacgugcuggaccagccccugcacacccugcaccacauccugagccaguucagagccugcauccagccccagcccaccgccggccccagaaccagaggcagacugcaccacuggcuguacagacugcaggaggcccccaagaaggagagccccggcugccuggaggccagcgugaccuucaaccuguucagacugcugaccagagaccugaacugcguggccagcggcgaccugugcguguga

SEQ ID NO: 4455 - RNA, 603 nt, Artificial Sequence
  derived and/or modified sequence opt5 from IL-28A__Homo_sapiens__AAI13582
augaagcuggacaugaccggcgauugcacacccgugcucguccugauggccgcuguucuuacggugaccggggccgugccugucgcgagacugcacggagcucucccggacgcccggggcugucauaucgcccaguucaaaagccugucuccccaagagcuucaggcuuuuaagcgcgccaaagaugcucuggaagagucccuccugcugaaggacugcagaugucacagccgccucuucccucggacaugggaucugagacagcuucaggugcgggaacgccccauggcccuggaggcggaacucgcccugacccuuaaaguucuggaggcuacagccgacaccgauccugcucucguggacguccuggaucaaccccugcauacacuccaccauauucugucccaguuuagagccugcauccagccucagccgaccgcggggccccggacgcgcggaagacuucaccacuggcuguaccggcuccaagaggccccuaagaaggaaucucccggcugucuggaggcuagcgugaccuucaaccuuuuucgccugcucacaagagaccugaauugcguugccuccggggaucuguguguguga

SEQ ID NO: 4456 - RNA, 603 nt, Artificial Sequence
  derived and/or modified sequence opt6 from IL-28A__Homo_sapiens__AAI13582
augaaauuagacaugacaggagacuguacaccaguacucguacuaauggcagcaguacuaacaguuacaggagcaguaccaguagcaagacuacacggagcacuaccagacgcaagaggaugucacauagcacaauucaaaucauuaucaccacaagaacuccaagcauuuaaaagagccaaagacgcacuagaagaaucauuacuauuaaaagacugcagaugccacucacgacuauucccaagaacaugggaccuaagacaacuacaaguaagagaaagaccaauggcauuagaagccgaacuagcauuaacauuaaaaguacuagaagcaacagcagacacagauccagcccuagucgacguacuagaccaaccacuacacacacuacaccacauacuaucacaauuuagagccugcauacaaccacaaccaacagcaggaccacgaacaagaggcagacuacaccacuggcuauacagacuacaagaagccccaaaaaaagaaucaccaggaugccuagaagcaucaguaacauucaaccuauucagacuauuaacaagagaccuaaacugcguagcaucaggagaccuaugcguauaa

SEQ ID NO: 4457 - protein, 196 aa, Artificial Sequence
  IL-28B__Homo_sapiens__Q8IZI9
MTGDCMPVLVLMAAVLTVTGAVPVARLRGALPDARGCHIAQFKSLSPQELQAFKRAKDALEESLLLKDCKCRSRLFPRTWDLRQLQVRERPVALEAELALTLKVLEATADTDPALGDVLDQPLHTLHHILSQLRACIQPQPTAGPRTRGRLHHWLHRLQEAPKKESPGCLEASVTFNLFRLLTRDLNCVASGDLCV

SEQ ID NO: 4458 - RNA, 591 nt, Artificial Sequence
  IL-28B__Homo_sapiens__AAI30315
augaccggggacugcaugccagugcuggugcugauggccgcagugcugaccgugacuggagcaguuccugucgccaggcuccgcggggcucucccggaugcaaggggcugccacauagcccaguucaagucccugucuccacaggagcugcaggccuuuaagagggccaaagaugccuuagaagagucgcuucugcugaaggacugcaagugccgcucccgccucuuccccaggaccugggaccugaggcagcugcaggugagggagcgccccguggcuuuggaggcugagcuggcccugacgcugaagguucuggaggccaccgcugacacugacccagcccugggggaugucuuggaccagccccuucacacccugcaccauauccucucccagcuccgggccuguauccagccucagcccacggcagggcccaggacccggggccgccuccaccauuggcugcaccggcuccaggaggccccaaaaaaggaguccccuggcugccucgaggccucugucaccuucaaccucuuccgccuccucacgcgagaccugaauuguguugccagcggggaccugugugucuga

SEQ ID NO: 4459 - RNA, 591 nt, Artificial Sequence
  derived and/or modified sequence opt1 from IL-28B__Homo_sapiens__AAI30315
augaccggcgacugcaugcccgugcugguccucauggccgccgugcugaccgugacgggggcggucccgguggcccgccugcggggcgcccuccccgacgcccgcgggugccacaucgcccaguucaagagccugagcccccaggagcugcaggcguucaagcgggccaaggacgcccucgaggagucccugcugcucaaggacugcaagugccgcucccggcuguucccccgcaccugggaccugcggcagcuccaggugcgcgagcggccggucgcccuggaggcggagcuggcccucacccugaaggugcuggaggccaccgccgacacggaccccgcccucggcgacgugcuggaccagccccugcacacccuccaccacauccugagccagcugcgcgcgugcauccagccccagccgaccgccgggccccggacccgcggccggcuccaccacuggcugcaccgccugcaggaggcccccaagaaggagucccccggcugccucgaggccagcgucacguucaaccuguuccggcugcucacccgcgaccugaacugcguggccuccggggaccugugcguguga

SEQ ID NO: 4460 - RNA, 591 nt, Artificial Sequence
  derived and/or modified sequence opt2 from IL-28B__Homo_sapiens__AAI30315
augaccggcgacugcaugcccguccucguccucauggccgccguccucaccgucaccggcgccguccccgucgcccgccuccgcggcgcccuccccgacgcccgcggcugccacaucgcccaguucaagucccucuccccccaggagcuccaggccuucaagcgcgccaaggacgcccucgaggagucccuccuccucaaggacugcaagugccgcucccgccucuucccccgcaccugggaccuccgccagcuccagguccgcgagcgccccgucgcccucgaggccgagcucgcccucacccucaagguccucgaggccaccgccgacaccgaccccgcccucggcgacguccucgaccagccccuccacacccuccaccacauccucucccagcuccgcgccugcauccagccccagcccaccgccggcccccgcacccgcggccgccuccaccacuggcuccaccgccuccaggaggcccccaagaaggagucccccggcugccucgaggccuccgucaccuucaaccucuuccgccuccucacccgcgaccucaacugcgucgccuccggcgaccucugcgucuga

SEQ ID NO: 4461 - RNA, 591 nt, Artificial Sequence
  derived and/or modified sequence opt3 from IL-28B__Homo_sapiens__AAI30315
augaccggcgacugcaugcccgugcugguccucauggccgcuguucuuacagugacuggggcaguaccuguggccagacugaggggagcguugccagaugcucgggguugucacaucgcccaguucaagagcuuauccccgcaagagcugcaggcauuuaaacgcgccaaggacgcucuagaagagucucuccugcuuaaagauugcaagugucgaucacgucuguuccccagaacgugggacuugaggcagcuccagguccgggaacgcccuguggcacuggaggccgaacuggcucucaccuuaaaaguucuggaggccacagcggauacugacccagcacuuggcgauguguuggaccaaccccugcauacccuacaccauauucucagucagcugagagccugcauacagccucagccaacagcugggcccaggacccggggacgccuucaccauuggcugcaccgauugcaagaggccccuaagaaggaaagcccaggcugucucgaggcauccgucacuuuuaaccuguucagauuacugacaagggaucucaauugcguggcuucuggugaccuuuguguauga

SEQ ID NO: 4462 - RNA, 591 nt, Artificial Sequence
  derived and/or modified sequence opt4 from IL-28B__Homo_sapiens__AAI30315
augaccggcgacugcaugcccgugcuggugcugauggccgccgugcugaccgugaccggcgccgugcccguggccagacugagaggcgcccugcccgacgccagaggcugccacaucgcccaguucaagagccugagcccccaggagcugcaggccuucaagagagccaaggacgcccuggaggagagccugcugcugaaggacugcaagugcagaagcagacuguuccccagaaccugggaccugagacagcugcaggugagagagagacccguggcccuggaggccgagcuggcccugacccugaaggugcuggaggccaccgccgacaccgaccccgcccugggcgacgugcuggaccagccccugcacacccugcaccacauccugagccagcugagagccugcauccagccccagcccaccgccggccccagaaccagaggcagacugcaccacuggcugcacagacugcaggaggcccccaagaaggagagccccggcugccuggaggccagcgugaccuucaaccuguucagacugcugaccagagaccugaacugcguggccagcggcgaccugugcguguga

SEQ ID NO: 4463 - RNA, 591 nt, Artificial Sequence
  derived and/or modified sequence opt5 from IL-28B__Homo_sapiens__AAI30315
augaccggcgacugcaugcccgugcugguccucauggccgcuguucugacagugacgggggccgugccugucgcgagacuucggggagcucugccggaugcccgcggcugucacaucgcccaguucaagagccucucuccccaagagcugcaggcuuuuaaaagagccaaggacgcucuugaagagucccugcuccugaaagauugcaagugucggagccgccuguucccuagaaccugggaccuccggcagcuucaggugcgcgaaagacccguugcccuggaggcggaacuggcccucacacugaaagugcuugaggcuaccgccgauacagacccugcucugggggauguccucgaccaaccccugcauacccugcaccauauucucucccagcugcgggccugcauccagccucagccgacagcgggaccccgcaccagaggccggcuucaccauuggcugcaccgccuccaagaggccccuaagaaggaaucucccgggugucuggaggcuagcgugacguuuaaccuuuucagacugcucacccgggaucugaauugcguugccuccggagaccuguguguguga

SEQ ID NO: 4464 - RNA, 591 nt, Artificial Sequence
  derived and/or modified sequence opt6 from IL-28B__Homo_sapiens__AAI30315
augacaggagacuguaugccaguacuaguauuaauggcagcaguauuaacaguaacaggagcaguaccaguagcaagacuaagaggagcauuaccagacgcaagaggaugccacauagcacaauucaaaagucuaucaccacaagaacuacaagcauucaaaagagcaaaagacgcacuagaagaaucacuauuacuaaaagacuguaaaugcagaucaagacuauucccaagaacaugggaucuaagacaauuacaaguaagagaaagaccaguagcacuagaagcagaauuagcacuaacauuaaaaguacuagaagcaacagcagacacagaccccgcauuaggagacguacuagaccaaccauuacacacacuacaccacauauuaucacaacuuagagcaugcauacaaccacaaccaacagcaggaccaagaacaagaggaagacuacaccacuggcuacacagacuacaagaagcaccaaaaaaagaaagcccaggaugccuagaagcaucagucacauucaaccucuucagacuacuaacaagagacuuaaacugcguagcauccggagaccuauguguauaa

SEQ ID NO: 4465 - protein, 200 aa, Artificial Sequence
  IL-29__Homo_sapiens__Q8IU54
MAAAWTVVLVTLVLGLAVAGPVPTSKPTTTGKGCHIGRFKSLSPQELASFKKARDALEESLKLKNWSCSSPVFPGNWDLRLLQVRERPVALEAELALTLKVLEAAAGPALEDVLDQPLHTLHHILSQLQACIQPQPTAGPRPRGRLHHWLHRLQEAPKKESAGCLEASVTFNLFRLLTRDLKYVADGNLCLRTSTHPEST

SEQ ID NO: 4466 - RNA, 603 nt, Artificial Sequence
  IL-29__Homo_sapiens__AAH74985
auggcugcagcuuggaccguggugcuggugacuuuggugcuaggcuuggccguggcaggcccuguccccacuuccaagcccaccacaacugggaagggcugccacauuggcagguucaaaucucugucaccacaggagcuagcgagcuucaagaaggccagggacgccuuggaagagucacucaagcugaaaaacuggaguugcagcucuccugucuuccccgggaauugggaccugaggcuucuccaggugagggagcgcccuguggccuuggaggcugagcuggcccugacgcugaagguccuggaggccgcugcuggcccagcccuggaggacguccuagaccagccccuucacacccugcaccacauccucucccagcuccaggccuguauccagccucagcccacagcagggcccaggccccggggccgccuccaccacuggcugcaccggcuccaggaggcccccaaaaaggaguccgcuggcugccuggaggcaucugucaccuucaaccucuuccgccuccucacgcgagaccucaaauauguggccgaugggaaccugugucugagaacgucaacccacccugaguccaccuga

SEQ ID NO: 4467 - RNA, 603 nt, Artificial Sequence
  derived and/or modified sequence opt1 from IL-29__Homo_sapiens__AAH74985
auggccgccgcguggaccgugguccuggugacccucgugcugggccuggccgucgccgggcccgugccgacgagcaagcccaccaccaccggcaaggggugccacaucggccgcuucaagucccucagcccccaggagcuggccuccuucaagaaggcccgggacgcgcuggaggagagccucaagcugaagaacugguccugcagcucccccguguucccggggaacugggaccugcgccuccugcagguccgggagcgccccguggcccuggaggccgagcucgcccugacgcugaaggugcucgaggcggccgccggccccgcccuggaggacguccuggaccagccccuccacacccugcaccacauccugagccagcuccaggccugcauccagccgcagcccaccgcgggcccccggccccgcgggcggcugcaccacuggcugcaccgccuccaggaggccccgaagaaggaguccgccggcugccuggaggccagcgugaccuucaaccuguuccggcuccugacgcgcgaccugaaguacguggccgacgggaaccucugccugcggaccuccacccaccccgagagcaccuga

SEQ ID NO: 4468 - RNA, 603 nt, Artificial Sequence
  derived and/or modified sequence opt2 from IL-29__Homo_sapiens__AAH74985
auggccgccgccuggaccgucguccucgucacccucguccucggccucgccgucgccggccccguccccaccuccaagcccaccaccaccggcaagggcugccacaucggccgcuucaagucccucuccccccaggagcucgccuccuucaagaaggcccgcgacgcccucgaggagucccucaagcucaagaacugguccugcuccucccccgucuuccccggcaacugggaccuccgccuccuccagguccgcgagcgccccgucgcccucgaggccgagcucgcccucacccucaagguccucgaggccgccgccggccccgcccucgaggacguccucgaccagccccuccacacccuccaccacauccucucccagcuccaggccugcauccagccccagcccaccgccggcccccgcccccgcggccgccuccaccacuggcuccaccgccuccaggaggcccccaagaaggaguccgccggcugccucgaggccuccgucaccuucaaccucuuccgccuccucacccgcgaccucaaguacgucgccgacggcaaccucugccuccgcaccuccacccaccccgaguccaccuga

SEQ ID NO: 4469 - RNA, 603 nt, Artificial Sequence
  derived and/or modified sequence opt3 from IL-29__Homo_sapiens__AAH74985
auggccgcugcauggaccgugguccugguuacacucgugcuuggccuggccguagcggggcccgugccuacuagcaagccaacgaccacaggaaaagguugccacaucggcagauucaaguccuugucuccgcaggaguuagcuucauuuaaaaaggccagggacgcacuggaagagagucuaaaacucaagaacuggagcuguuccucucccgucuucccugggaauugggaucugcggcuucugcaagugcgcgaacgaccaguugccuuggaggcugaacucgcacugacucugaaggugcucgaggccgcugccggacccgcguuagaggacguccuggaucagccucuucauaccuugcaccauauucugucgcagcuacaggcaugcauacaaccacagcccacagccggcccucguccaagagguaggcuccaccauuggcugcaccggcuucaggaagcuccgaaaaaggagucagccgggugucuggaagcaagcgugaccuuuaacuuguuccgccuccugacuagagacuuaaaauacguagcugauggaaaucugugccucaggacaaguacccaccccgaguccacguga

SEQ ID NO: 4470 - RNA, 603 nt, Artificial Sequence
  derived and/or modified sequence opt4 from IL-29__Homo_sapiens__AAH74985
auggccgccgccuggaccguggugcuggugacccuggugcugggccuggccguggccggccccgugcccaccagcaagcccaccaccaccggcaagggcugccacaucggcagauucaagagccugagcccccaggagcuggccagcuucaagaaggccagagacgcccuggaggagagccugaagcugaagaacuggagcugcagcagccccguguuccccggcaacugggaccugagacugcugcaggugagagagagacccguggcccuggaggccgagcuggcccugacccugaaggugcuggaggccgccgccggccccgcccuggaggacgugcuggaccagccccugcacacccugcaccacauccugagccagcugcaggccugcauccagccccagcccaccgccggccccagacccagaggcagacugcaccacuggcugcacagacugcaggaggcccccaagaaggagagcgccggcugccuggaggccagcgugaccuucaaccuguucagacugcugaccagagaccugaaguacguggccgacggcaaccugugccugagaaccagcacccaccccgagagcaccuga

SEQ ID NO: 4471 - RNA, 603 nt, Artificial Sequence
  derived and/or modified sequence opt5 from IL-29__Homo_sapiens__AAH74985
auggccgcugccuggaccgugguccugguuacacucgugcugggccuugcgguggcugggcccgucccuacgagcaagccgaccacaaccggaaaaggcugccacaucgggagauucaagucccugucuccccaggagcucgccagcuuuaaaaaggcccgggacgcucuggaagagucccuuaaacugaagaacuggucuuguagcuccccuguguuccccggaaauugggaucuccgccugcugcaaguuagagaacggccuguggcccucgaggcugaacuggcccuuacacugaagguccucgaggcggccgcuggccccgcccuggaggacgugcuugaucagccucugcauacccuccaccauauucugucucagcugcaggcuugcauccaaccgcagcccacagccgggccucgccccagaggacggcuccaccauuggcugcaccgccuucaggaagcgccuaaaaaggagagcgccggcugucuggaggcuuccguuaccuuuaaccucuucagacugcuuacgcgggaccugaaauacguggccgauggcaaucucugccugcgcaccagcacacaccccgaaucuaccuga

SEQ ID NO: 4472 - RNA, 603 nt, Artificial Sequence
  derived and/or modified sequence opt6 from IL-29__Homo_sapiens__AAH74985
auggcagcagcauggacaguaguacuaguaacacuaguauuaggacuagcaguagcaggaccaguaccaacaucaaaaccaacaacaacuggaaaaggaugucacauaggaagauucaaaucauuaucaccacaagaacuagcaaguuucaaaaaagcaagagacgcacuagaagaaucacuaaaauuaaaaaacuggagcugcaguucacccguauucccaggaaacugggaucuaagacuacuacaaguaagagaacgaccaguagcacuagaagcagaacuagcacuaacauuaaaaguauuagaagcagcagccggcccagccuuagaagacguauuagaccaaccacuacauacacuacaccauauacuaucucaacuacaagcaugcauacaaccacaaccaacagcaggaccaagaccacgaggaagacuacaccacugguuacacagacuacaagaagcaccaaaaaaagaaucagcaggauguuuagaagcaucagucacauucaaccuauucagacuacuaacaagagaccuaaaauacguagcagacggaaacuuaugccuaagaaccucaacacaucccgaaucaacauaa

SEQ ID NO: 4473 - protein, 153 aa, Artificial Sequence
  IL-2__Homo_sapiens__P60568
MYRMQLLSCIALSLALVTNSAPTSSSTKKTQLQLEHLLLDLQMILNGINNYKNPKLTRMLTFKFYMPKKATELKHLQCLEEELKPLEEVLNLAQSKNFHLRPRDLISNINVIVLELKGSETTFMCEYADETATIVEFLNRWITFCQSIISTLT

SEQ ID NO: 4474 - RNA, 462 nt, Artificial Sequence
  IL-2__Homo_sapiens__AAA98792
auguacaggaugcaacuccugucuugcauugcacuaagucuugcacuugucacaaacagugcaccuacuucaaguucuacaaagaaaacacagcuacaacuggagcauuuacugcuggauuuacagaugauuuugaauggaauuaauaauuacaagaaucccaaacucaccaggaugcucacauuuaaguuuuacaugcccaagaaggccacagaacugaaacaucuucagugucuagaagaagaacucaaaccucuggaggaagugcuaaauuuagcucaaagcaaaaacuuucacuuaagacccagggacuuaaucagcaauaucaacguaauaguucuggaacuaaagggaucugaaacaacauucaugugugaauaugcugaugagacagcaaccauuguagaauuucugaacagauggauuaccuuuugucaaagcaucaucucaacacugacuuga

SEQ ID NO: 4475 - RNA, 462 nt, Artificial Sequence
  derived and/or modified sequence opt1 from IL-2__Homo_sapiens__AAA98792
auguaccgcaugcagcugcucagcugcaucgcccugucccuggcccucgugaccaacagcgcgcccaccuccagcuccacgaagaagacccagcugcagcuggagcaccuccugcuggaccuccagaugauccugaacggcaucaacaacuacaagaacccgaagcugacccggaugcucaccuucaaguucuacaugcccaagaaggccacggagcugaagcaccuccagugccuggaggaggagcugaagccccuggaggagguccucaaccuggcccagagcaagaacuuccaccuccgcccccgggaccugaucuccaacaucaacgugaucgugcuggagcugaaggggagcgagaccaccuucaugugcgaguacgccgacgagaccgccacgaucgucgaguuccucaaccgcuggaucaccuucugccaguccaucaucagcacccugaccuga

SEQ ID NO: 4476 - RNA, 462 nt, Artificial Sequence
  derived and/or modified sequence opt2 from IL-2__Homo_sapiens__AAA98792
auguaccgcaugcagcuccucuccugcaucgcccucucccucgcccucgucaccaacuccgcccccaccuccuccuccaccaagaagacccagcuccagcucgagcaccuccuccucgaccuccagaugauccucaacggcaucaacaacuacaagaaccccaagcucacccgcaugcucaccuucaaguucuacaugcccaagaaggccaccgagcucaagcaccuccagugccucgaggaggagcucaagccccucgaggagguccucaaccucgcccaguccaagaacuuccaccuccgcccccgcgaccucaucuccaacaucaacgucaucguccucgagcucaagggcuccgagaccaccuucaugugcgaguacgccgacgagaccgccaccaucgucgaguuccucaaccgcuggaucaccuucugccaguccaucaucuccacccucaccuga

SEQ ID NO: 4477 - RNA, 462 nt, Artificial Sequence
  derived and/or modified sequence opt3 from IL-2__Homo_sapiens__AAA98792
auguacagaaugcagcugcucagcugcaucgcccuuucccuggcuuuggugaccaacucugcacccacaucaaguagcacuaagaaaacgcaauuacagcuggagcaccuacuccuggaccuucagaugauucugaauggcauaaacaauuauaagaacccuaaauugaccaggaugcucacauucaaguuuuacaugccgaaaaaggccacugaacugaagcaucugcagugucucgaggaagaguuaaaaccacuggaagagguccuuaauuuggcgcaauccaagaacuuccaccuacggccccgcgaucugaucucuaauauuaacguuaucgugcucgagcugaaagggucggaaaccacauuuaugugcgaguaugcugacgaaaccgccacuauuguagaguuccuuaaucgauggaucacauuuugucagucaauaaucagcacccugacguga

SEQ ID NO: 4478 - RNA, 462 nt, Artificial Sequence
  derived and/or modified sequence opt4 from IL-2__Homo_sapiens__AAA98792
auguacagaaugcagcugcugagcugcaucgcccugagccuggcccuggugaccaacagcgcccccaccagcagcagcaccaagaagacccagcugcagcuggagcaccugcugcuggaccugcagaugauccugaacggcaucaacaacuacaagaaccccaagcugaccagaaugcugaccuucaaguucuacaugcccaagaaggccaccgagcugaagcaccugcagugccuggaggaggagcugaagccccuggaggaggugcugaaccuggcccagagcaagaacuuccaccugagacccagagaccugaucagcaacaucaacgugaucgugcuggagcugaagggcagcgagaccaccuucaugugcgaguacgccgacgagaccgccaccaucguggaguuccugaacagauggaucaccuucugccagagcaucaucagcacccugaccuga

SEQ ID NO: 4479 - RNA, 462 nt, Artificial Sequence
  derived and/or modified sequence opt5 from IL-2__Homo_sapiens__AAA98792
auguacagaaugcagcugcucagcugcaucgcccugucccuugcucuggugaccaacucugcccccacaagcuccucuacgaagaaaacccaacuccagcuggagcaccuucugcucgaccugcagaugauucugaauggcaucaacaauuauaagaacccuaaacucacacggaugcugaccuucaaguuuuacaugccgaaaaaggcgacagaacuuaagcaucugcagugucucgaggaggaacugaaaccccuugaagagguccugaaucucgcucaaagcaagaacuuccaccuccgcccuagagaucugauuuccaauaucaacguuauugugcuggagcugaaagggucugaaaccacauuuaugugcgaguaugccgacgaaaccgccacgaucguggaguuccuuaaucgguggaucaccuuuugucagagcauuaucuccacacugaccuga

SEQ ID NO: 4480 - RNA, 462 nt, Artificial Sequence
  derived and/or modified sequence opt6 from IL-2__Homo_sapiens__AAA98792
auguacagaaugcaacuacuaucaugcauagcacuaucacuagcacuaguaacaaacucagcaccaacaucaucaucaaccaaaaaaacacaacuacaacucgaacaccuccuccucgaccuacaaaugauacuaaacggaauaaacaacuacaaaaacccaaaacuaacaagaaugcuaacauucaaauucuacaugccaaaaaaagcaacagaacuaaaacaccuacaaugccuagaagaagaacucaaaccacuagaagaaguacuaaaccucgcacaaucaaaaaacuuccaccuacgaccaagagaccuaauaucaaacauaaacgucauaguacuagaacuaaaaggaucagaaacaacauucaugugcgaauaugcagacgaaacagcaacaauaguagaauuccuaaacagauggauaacauucugccaaucaauaauaucaacacuaacauaa

SEQ ID NO: 4481 - protein, 153 aa, Artificial Sequence; identical to SEQ ID NO: 4473
  IL-2__Homo_sapiens__Q0GK43

SEQ ID NO: 4482 - RNA, 462 nt, Artificial Sequence; identical to SEQ ID NO: 4474
  IL-2__Homo_sapiens__ABI20697

SEQ ID NO: 4483 - RNA, 462 nt, Artificial Sequence; identical to SEQ ID NO: 4475
  derived and/or modified sequence opt1 from IL-2__Homo_sapiens__ABI20697

SEQ ID NO: 4484 - RNA, 462 nt, Artificial Sequence; identical to SEQ ID NO: 4476
  derived and/or modified sequence opt2 from IL-2__Homo_sapiens__ABI20697

SEQ ID NO: 4485 - RNA, 462 nt, Artificial Sequence; identical to SEQ ID NO: 4477
  derived and/or modified sequence opt3 from IL-2__Homo_sapiens__ABI20697

SEQ ID NO: 4486 - RNA, 462 nt, Artificial Sequence; identical to SEQ ID NO: 4478
  derived and/or modified sequence opt4 from IL-2__Homo_sapiens__ABI20697

SEQ ID NO: 4487 - RNA, 462 nt, Artificial Sequence; identical to SEQ ID NO: 4479
  derived and/or modified sequence opt5 from IL-2__Homo_sapiens__ABI20697

SEQ ID NO: 4488 - RNA, 462 nt, Artificial Sequence
  derived and/or modified sequence opt6 from IL-2__Homo_sapiens__ABI20697
auguacagaaugcaacuccuaucaugcauagcacucucacuagcacucguaacaaacucagcaccaacaucaucaucaacaaaaaaaacacaacuccaacuagaacaccuacuacuagaccuacaaaugauacuaaacggaauaaacaacuacaaaaacccaaaacuaacaagaaugcuaaccuucaaauucuacaugccaaaaaaagcaacagaacuaaaacaccuccaaugccuagaagaagaacucaaaccacuagaagaaguacuaaaccuagcacaaucaaaaaacuuccaccuaagaccaagagaccuaauaucaaacauaaacgucauaguacucgaacuaaaaggaucagaaacaacauucaugugcgaauacgccgacgaaacagcaacaauaguagaauuccuaaacagauggauaacauucugccaaucaauaauaucaacacuaacauaa

SEQ ID NO: 4489 - protein, 156 aa, Artificial Sequence
  IL-2__Homo_sapiens__Q13169
MYRMQLLSCIALILALVTNSAPTSSSTKKTKKTQLQLEHLLLDLQMILNGINNYKNPKLTRMLTFKFYMPKKATELKQLQCLEEELKPLEEVLNLAQSKNFHLRPRDLISNINVIVLELKGSETTFMCEYADETATIVEFLNRWITFCQSIISTLT

SEQ ID NO: 4490 - RNA, 471 nt, Artificial Sequence
  IL-2__Homo_sapiens__AAA70092
auguacaggaugcaacuccugucuugcauugcacuaauucuugcacuugucacaaacagugcaccuacuucaaguucgacaaagaaaacaaagaaaacacagcuacaacuggagcauuuacugcuggauuuacagaugauuuugaauggaauuaauaauuacaagaaucccaaacucaccaggaugcucacauuuaaguuuuacaugcccaagaaggccacagaacugaaacagcuucagugucuagaagaagaacucaaaccucuggaggaagugcugaauuuagcucaaagcaaaaacuuucacuuaagacccagggacuuaaucagcaauaucaacguaauaguucuggaacuaaagggaucugaaacaacauucaugugugaauaugcagaugagacagcaaccauuguagaauuucugaacagauggauuaccuuuugucaaagcaucaucucaacacuaacuuga

SEQ ID NO: 4491 - RNA, 471 nt, Artificial Sequence
  derived and/or modified sequence opt1 from IL-2__Homo_sapiens__AAA70092
auguaccgcaugcagcugcucagcugcaucgcccugauccuggcccucgugaccaacuccgcgcccaccagcuccagcacgaagaagaccaagaagacccagcugcagcuggagcaccuccugcuggaccuccagaugauccugaacggcaucaacaacuacaagaacccgaagcugacccggaugcucacguucaaguucuacaugcccaagaaggccaccgagcugaagcagcugcagugccucgaggaggagcugaagccccuggaggagguccucaaccuggcccaguccaagaacuuccaccuccgcccccgggaccugaucagcaacaucaacgugaucgugcuggagcugaagggguccgagaccaccuucaugugcgaguacgccgacgagacggccaccaucgucgaguuccucaaccgcuggaucaccuucugccagagcaucaucuccacccugacguga

SEQ ID NO: 4492 - RNA, 471 nt, Artificial Sequence
  derived and/or modified sequence opt2 from IL-2__Homo_sapiens__AAA70092
auguaccgcaugcagcuccucuccugcaucgcccucauccucgcccucgucaccaacuccgcccccaccuccuccuccaccaagaagaccaagaagacccagcuccagcucgagcaccuccuccucgaccuccagaugauccucaacggcaucaacaacuacaagaaccccaagcucacccgcaugcucaccuucaaguucuacaugcccaagaaggccaccgagcucaagcagcuccagugccucgaggaggagcucaagccccucgaggagguccucaaccucgcccaguccaagaacuuccaccuccgcccccgcgaccucaucuccaacaucaacgucaucguccucgagcucaagggcuccgagaccaccuucaugugcgaguacgccgacgagaccgccaccaucgucgaguuccucaaccgcuggaucaccuucugccaguccaucaucuccacccucaccuga

SEQ ID NO: 4493 - RNA, 471 nt, Artificial Sequence
  derived and/or modified sequence opt3 from IL-2__Homo_sapiens__AAA70092
auguacagaaugcagcugcucagcugcaucgcccuuauucuggcuuuggugaccaacuccgcacccacaucuucaaguacuaagaaaacgaagaaaacccaauuacagcuggagcaccuacuccuggaccuucagaugauacugaauggcaucaacaauuauaagaacccuaaauugacaaggaugcucacuuucaaguuuuacaugccaaagaaagccaccgaacugaagcagcugcaaugucucgaggaagaguuaaaaccgcuggaagagguccuuaauuuggcgcagagcaagaacuuccaucugcggccccgcgaucuaauuuccaauaucaacguuauugugcucgagcugaaagggucugaaacaaccuuuaugugcgaguaugcugacgaaacugccacaaucguagaguuccuuaaucgauggauaaccuuuugucagucgaucauuucaacgcugacuuga

SEQ ID NO: 4494 - RNA, 471 nt, Artificial Sequence
  derived and/or modified sequence opt4 from IL-2__Homo_sapiens__AAA70092
auguacagaaugcagcugcugagcugcaucgcccugauccuggcccuggugaccaacagcgcccccaccagcagcagcaccaagaagaccaagaagacccagcugcagcuggagcaccugcugcuggaccugcagaugauccugaacggcaucaacaacuacaagaaccccaagcugaccagaaugcugaccuucaaguucuacaugcccaagaaggccaccgagcugaagcagcugcagugccuggaggaggagcugaagccccuggaggaggugcugaaccuggcccagagcaagaacuuccaccugagacccagagaccugaucagcaacaucaacgugaucgugcuggagcugaagggcagcgagaccaccuucaugugcgaguacgccgacgagaccgccaccaucguggaguuccugaacagauggaucaccuucugccagagcaucaucagcacccugaccuga

SEQ ID NO: 4495 - RNA, 471 nt, Artificial Sequence
  derived and/or modified sequence opt5 from IL-2__Homo_sapiens__AAA70092
auguacagaaugcagcugcucagcugcaucgcccugauucuugcucuggugaccaacuccgcccccacaucuagcuccacgaagaaaaccaagaaaacacaacuccagcuggagcaccuucugcucgaccugcagaugauccugaauggcauuaacaauuauaagaacccuaaacucacccggaugcugacauucaaguuuuacaugccgaagaaagcgaccgaacuuaagcagcugcaaugucucgaggaggaacugaaaccccuugaagagguccugaaucucgcucagucuaagaacuuccaucugcgcccuagagaucugaucagcaauauuaacguuaucgugcucgagcugaaaggguccgaaacaaccuuuaugugcgaguaugccgacgaaacggccaccaucguggaguuccuuaaucgguggauuacauuuugucagucuaucauuagcacccugacauga

SEQ ID NO: 4496 - RNA, 471 nt, Artificial Sequence
  derived and/or modified sequence opt6 from IL-2__Homo_sapiens__AAA70092
auguacagaaugcaacuacuaucaugcauagcacuaauacuagcacuaguaaccaacucagcaccaacaucaucaucaacaaaaaaaaccaaaaaaacacaacuacaacuagaacaccuacuacuagaccuacaaaugauacucaacggaauaaacaacuacaaaaaccccaaacuaacaagaaugcuaacauucaaauucuacaugccaaaaaaagcaacagaacuaaaacaacuacaaugcuuagaagaagaacuaaaaccacuagaagaaguacuaaaccuagcccaaucaaaaaacuuccaccuaagaccaagagaccucauaucaaacauaaacguaauaguacuagaacuaaaaggaucagaaacaacauucaugugcgaauacgcagacgaaaccgcaacaauaguagaauuccuaaacagauggauaacauucugccaaucaauaauaucaacauuaacauaa

SEQ ID NO: 4497 - protein, 153 aa, Artificial Sequence [sequence omitted]

SEQ ID NO: 4498 - RNA, 462 nt, Artificial Sequence
  IL-2__Homo_sapiens__AAH66256
auguacaggaugcaacuccugucuugcauugcacuaagucuugcacuugucacaaacagugcacuuacuucaaguucuacaaagaaaacacagcuacaacuggagcauuuacugcuggauuuacagaugauuuugaauggaauuaauaauuacaagaaucccaaacucaccaggaugcucacauuuaaguuuuacaugcccaagaaggccacagaacugaaacaucuucagugucuagaagaagaacucaaaccucuggaggaagugcuaaauuuagcucaaagcaaaaacuuucacuuaagacccagggacuuaaucagcaauaucaacguaauaguucuggaacuaaagggaucugaaacaacauucaugugugaauaugcugaugagacagcaaccauuguagaauuucugaacagauggauuaccuuuugucaaagcaucaucucaacacugacuuga

SEQ ID NO: 4499 - RNA, 462 nt, Artificial Sequence
  derived and/or modified sequence opt1 from IL-2__Homo_sapiens__AAH66256
auguaccgcaugcagcugcucagcugcaucgcccugucccuggcccucgugaccaacagcgcgcugaccuccagcuccacgaagaagacccagcugcagcucgagcaccuccugcuggaccugcagaugauccugaacggcaucaacaacuacaagaaccccaagcucacccggaugcugaccuucaaguucuacaugccgaagaaggccacggagcugaagcaccuccagugccuggaggaggagcugaagccccucgaggagguccugaaccuggcccagagcaagaacuuccaccuccgcccccgggaccugaucuccaacaucaacgugaucgugcuggagcucaaggggagcgagaccaccuucaugugcgaguacgccgacgagaccgccacgaucgucgaguuccugaaccgcuggaucaccuucugccaguccaucaucagcacccugaccuga

SEQ ID NO: 4500 - RNA, 462 nt, Artificial Sequence
  derived and/or modified sequence opt2 from IL-2__Homo_sapiens__AAH66256
auguaccgcaugcagcuccucuccugcaucgcccucucccucgcccucgucaccaacuccgcccucaccuccuccuccaccaagaagacccagcuccagcucgagcaccuccuccucgaccuccagaugauccucaacggcaucaacaacuacaagaaccccaagcucacccgcaugcucaccuucaaguucuacaugcccaagaaggccaccgagcucaagcaccuccagugccucgaggaggagcucaagccccucgaggagguccucaaccucgcccaguccaagaacuuccaccuccgcccccgcgaccucaucuccaacaucaacgucaucguccucgagcucaagggcuccgagaccaccuucaugugcgaguacgccgacgagaccgccaccaucgucgaguuccucaaccgcuggaucaccuucugccaguccaucaucuccacccucaccuga

SEQ ID NO: 4501 - RNA, 462 nt, Artificial Sequence
  derived and/or modified sequence opt3 from IL-2__Homo_sapiens__AAH66256
auguacagaaugcagcugcucagcugcaucgcccuuucccuggcuuuggugaccaacucugcauuaacaucaaguagcacuaagaaaacgcaacugcagcuagagcaccuccugcuugaccugcagaugauuuugaauggcauaaacaauuauaagaaccccaaacucaccaggaugcugacauucaaguuuuacaugccuaaaaaggccacugaacugaagcaucuccaguguuuagaggaggaacugaaaccacuugaagaggucuugaaucuggcgcaauccaagaacuuccaccuacggccgcgcgaucucaucucuaauauuaacguuaucgugcuggagcuuaaagggucggaaaccacauuuaugugcgaguaugcugacgaaaccgccacuauuguagaguuccugaaucgauggaucacauuuugucagucaauaaucagcaccuugacguga

SEQ ID NO: 4502 - RNA, 462 nt, Artificial Sequence
  derived and/or modified sequence opt4 from IL-2__Homo_sapiens__AAH66256
auguacagaaugcagcugcugagcugcaucgcccugagccuggcccuggugaccaacagcgcccugaccagcagcagcaccaagaagacccagcugcagcuggagcaccugcugcuggaccugcagaugauccugaacggcaucaacaacuacaagaaccccaagcugaccagaaugcugaccuucaaguucuacaugcccaagaaggccaccgagcugaagcaccugcagugccuggaggaggagcugaagccccuggaggaggugcugaaccuggcccagagcaagaacuuccaccugagacccagagaccugaucagcaacaucaacgugaucgugcuggagcugaagggcagcgagaccaccuucaugugcgaguacgccgacgagaccgccaccaucguggaguuccugaacagauggaucaccuucugccagagcaucaucagcacccugaccuga

SEQ ID NO: 4503 - RNA, 462 nt, Artificial Sequence
  derived and/or modified sequence opt5 from IL-2__Homo_sapiens__AAH66256
auguacagaaugcagcugcucagcugcaucgcccugucccuugcucuggugaccaacucugcccucacaagcuccucuacgaagaaaacccaacugcagcuugagcaccuccugcuggaccugcagaugauucucaauggcaucaacaauuauaagaaccccaaacugacacggaugcuuaccuucaaguuuuacaugccuaaaaaggcgacagaacugaagcaccuccagugucuggaggaggaacuuaaaccgcuggaagagguccucaaucuggcucaaagcaagaacuuccaucugcgccccagagaucucauuuccaauaucaacguuauugugcuggagcuuaaagggucugaaaccacauuuaugugcgaguaugccgacgaaaccgccacgaucguggaguuccugaaucgguggaucaccuuuugucagagcauuaucuccacacucaccuga

SEQ ID NO: 4504 - RNA, 462 nt, Artificial Sequence
  derived and/or modified sequence opt6 from IL-2__Homo_sapiens__AAH66256
auguaccgaaugcaacuacuaucaugcauagcacuaucccuagccuuaguaacaaacucagcacuaacaucauccuccacaaaaaaaacacaacuacaacuagaacaccuacuccuagaccuacaaaugauacuaaacggaauaaacaacuacaaaaacccaaaacucacaagaaugcuaacauucaaauucuacaugccaaaaaaagcaacagaacuaaaacaccuacaaugccuagaagaagaacuaaaaccacuagaagaaguacuaaaccuagcacaaucaaaaaacuuccaccuaagaccaagagaccuaauaucaaacauaaacguaauaguacuagaacuaaaaggaucagaaacaacauucaugugcgaauacgcagacgaaacagcaacaauaguagaauuccuaaaccgauggauaacauucugccaaucaauaauaucaacacuaacauaa

SEQ ID NO: 4505 - protein, 153 aa, Artificial Sequence [sequence omitted]

SEQ ID NO: 4506 - RNA, 462 nt, Artificial Sequence
  IL-2__Homo_sapiens__AAH66254
auguacaggaugcaacuccugucuugcauugcacuaagucuugcacuugucgcaaacagugcaccuacuucaaguucuacaaagaaaacacagcuacaacuggagcauuuacugcuggauuuacagaugauuuugaauggaauuaauaauuacaagaaucccaaacucaccaggaugcucacauuuaaguuuuacaugcccaagaaggccacagaacugaaacaucuucagugucuagaagaagaacucaaaccucuggaggaagugcuaaauuuagcucaaagcaaaaacuuucacuuaagacccagggacuuaaucagcaauaucaacguaauaguucuggaacuaaagggaucugaaacaacauucaugugugaauaugcugaugagacagcaaccauuguagaauuucugaacagauggauuaccuuuugucaaagcaucaucucaacacugacuuga

SEQ ID NO: 4507 - RNA, 462 nt, Artificial Sequence
  derived and/or modified sequence opt1 from IL-2__Homo_sapiens__AAH66254
auguaccgcaugcagcugcucagcugcaucgcccugucccuggcccucguggcgaacagcgcccccaccuccagcuccaccaagaagacgcagcugcagcuggagcaccuccugcuggaccuccagaugauccugaacggcaucaacaacuacaagaacccgaagcugacccggaugcucaccuucaaguucuacaugcccaagaaggccaccgagcugaagcaccuccagugccuggaggaggagcugaagccccuggaggagguccucaaccuggcccagagcaagaacuuccaccuccgcccccgggaccugaucuccaacaucaacgugaucgugcuggagcugaaggggagcgagacgaccuucaugugcgaguacgccgacgagaccgcgaccaucgucgaguuccucaaccgcuggaucacguucugccaguccaucaucagcacccugaccuga

SEQ ID NO: 4508 - RNA, 462 nt, Artificial Sequence
  derived and/or modified sequence opt2 from IL-2__Homo_sapiens__AAH66254
auguaccgcaugcagcuccucuccugcaucgcccucucccucgcccucgucgccaacuccgcccccaccuccuccuccaccaagaagacccagcuccagcucgagcaccuccuccucgaccuccagaugauccucaacggcaucaacaacuacaagaaccccaagcucacccgcaugcucaccuucaaguucuacaugcccaagaaggccaccgagcucaagcaccuccagugccucgaggaggagcucaagccccucgaggagguccucaaccucgcccaguccaagaacuuccaccuccgcccccgcgaccucaucuccaacaucaacgucaucguccucgagcucaagggcuccgagaccaccuucaugugcgaguacgccgacgagaccgccaccaucgucgaguuccucaaccgcuggaucaccuucugccaguccaucaucuccacccucaccuga

SEQ ID NO: 4509 - RNA, 462 nt, Artificial Sequence
  derived and/or modified sequence opt3 from IL-2__Homo_sapiens__AAH66254
auguacagaaugcagcugcucagcugcaucgcccuuucccuggcuuugguggcaaacucugcccccaccucaaguagcacaaagaaaacucaauuacagcuggagcaccuacuccuggaccuucagaugauucugaauggcauaaacaauuauaagaacccuaaauugacgaggaugcucaccuucaaguuuuacaugccgaaaaaggcgacagaacugaagcaucugcagugucucgaggaagaguuaaaaccacuggaagagguccuuaauuuggcucaauccaagaacuuccaccuacggccccgcgaucugaucucuaauauuaacguuaucgugcucgagcugaaagggucggaaacuaccuuuaugugcgaguaugccgacgaaacagcaaccauuguagaguuccuuaaucgauggaucacuuuuugucagucaauaaucagcacacugaccuga

SEQ ID NO: 4510 - RNA, 462 nt, Artificial Sequence
  derived and/or modified sequence opt4 from IL-2__Homo_sapiens__AAH66254
auguacagaaugcagcugcugagcugcaucgcccugagccuggcccugguggccaacagcgcccccaccagcagcagcaccaagaagacccagcugcagcuggagcaccugcugcuggaccugcagaugauccugaacggcaucaacaacuacaagaaccccaagcugaccagaaugcugaccuucaaguucuacaugcccaagaaggccaccgagcugaagcaccugcagugccuggaggaggagcugaagccccuggaggaggugcugaaccuggcccagagcaagaacuuccaccugagacccagagaccugaucagcaacaucaacgugaucgugcuggagcugaagggcagcgagaccaccuucaugugcgaguacgccgacgagaccgccaccaucguggaguuccugaacagauggaucaccuucugccagagcaucaucagcacccugaccuga

SEQ ID NO: 4511 - RNA, 462 nt, Artificial Sequence
  derived and/or modified sequence opt5 from IL-2__Homo_sapiens__AAH66254
auguacagaaugcagcugcucagcugcaucgcccugucccuugcucugguggccaacucugcgcccaccagcuccucuacaaagaaaacgcaacuccagcuggagcaccuucugcucgaccugcagaugauucugaauggcaucaacaauuauaagaacccuaaacucacccggaugcugacauucaaguuuuacaugccgaaaaaggcuaccgaacuuaagcaucugcagugucucgaggaggaacugaaaccccuugaagagguccugaaucucgcccaaagcaagaacuuccaccuccgcccuagagaucugauuuccaauaucaacguuauugugcuggagcugaaagggucugaaacaaccuuuaugugcgaguaugccgacgaaacagcuaccaucguggaguuccuuaaucgguggaucacguuuugucagagcauuaucuccacccugacauga

SEQ ID NO: 4512 - RNA, 462 nt, Artificial Sequence
  derived and/or modified sequence opt6 from IL-2__Homo_sapiens__AAH66254
auguacagaaugcaacuacuaucaugcauagcacucucacuagcacuaguagcaaacucagcaccaacaucaucaucaacaaaaaaaacacaacuacaacuagaacaccuacuacuagaccuacaaaugauccuaaacggaauaaacaacuacaaaaacccaaaacuaacaagaaugcuaacauucaaauucuacaugcccaaaaaagcaacagaacuaaaacaccuacaaugccuagaagaagaacuaaaaccacuagaagaaguacuaaaccuagcacaauccaaaaacuuccaccuaagaccaagagaccuaauaucaaacauaaacguaauaguacuagaacuaaaaggaucagaaacaacauucaugugcgaauacgcagacgaaacagccacaauaguagaauuccuaaacagauggauaacauucugccaaucaauaauaucaacacuaaccuaa

SEQ ID NO: 4513 - protein, 164 aa, Artificial Sequence
  IL-31__Homo_sapiens__Q6EBC2
MASHSGPSTSVLFLFCCLGGWLASHTLPVRLLRPSDDVQKIVEELQSLSKMLLKDVEEEKGVLVSQNYTLPCLSPDAQPPNNIHSPAIRAYLKTIRQLDNKSVIDEIIEHLDKLIFQDAPETNISVPTDTHECKRFILTISQQFSECMDLALKSLTSGAQQATT

SEQ ID NO: 4514 - RNA, 495 nt, Artificial Sequence
  IL-31__Homo_sapiens__AAI32999
auggccucucacucaggccccucgacgucugugcucuuucuguucugcugccugggaggcuggcuggccucccacacguugcccguccguuuacuacgaccaagugaugauguacagaaaauagucgaggaauuacagucccucucgaagaugcuuuugaaagauguggaggaagagaagggcgugcucgugucccagaauuacacgcugccgugucucagcccugacgcccagccgccaaacaacauccacagcccagccauccgggcauaucucaagacaaucagacagcuagacaacaaaucuguuauugaugagaucauagagcaccucgacaaacucauauuucaagaugcaccagaaacaaacauuucugugccaacagacacccaugaauguaaacgcuucauccugacuauuucucaacaguuuucagagugcauggaccucgcacuaaaaucauugaccucuggagcccaacaggccaccacuuaa

SEQ ID NO: 4515 - RNA, 495 nt, Artificial Sequence
  derived and/or modified sequence opt1 from IL-31__Homo_sapiens__AAI32999
auggccagccacuccggccccagcaccuccgugcuguuccucuucugcugccucgggggcuggcuggccagccacacccugccgguccgccugcugcggcccuccgacgacgugcagaagaucguggaggagcuccagagccuguccaagaugcugcucaaggacgucgaggaggagaagggggugcuggugagccagaacuacacgcugcccugccucucccccgacgcgcagccgcccaacaacauccacagccccgccauccgcgccuaccugaagaccauccggcagcuggacaacaaguccgucaucgacgagaucaucgagcaccucgacaagcugaucuuccaggacgcccccgagaccaacaucagcgugccgaccgacacgcacgagugcaagcgcuucauccugaccaucucccagcaguucagcgagugcauggaccucgcccugaagucccugaccagcggcgcgcagcaggccaccacguga

SEQ ID NO: 4516 - RNA, 495 nt, Artificial Sequence
  derived and/or modified sequence opt2 from IL-31__Homo_sapiens__AAI32999
auggccucccacuccggccccuccaccuccguccucuuccucuucugcugccucggcggcuggcucgccucccacacccuccccguccgccuccuccgccccuccgacgacguccagaagaucgucgaggagcuccagucccucuccaagaugcuccucaaggacgucgaggaggagaagggcguccucgucucccagaacuacacccuccccugccucucccccgacgcccagccccccaacaacauccacucccccgccauccgcgccuaccucaagaccauccgccagcucgacaacaaguccgucaucgacgagaucaucgagcaccucgacaagcucaucuuccaggacgcccccgagaccaacaucuccguccccaccgacacccacgagugcaagcgcuucauccucaccaucucccagcaguucuccgagugcauggaccucgcccucaagucccucaccuccggcgcccagcaggccaccaccuga

SEQ ID NO: 4517 - RNA, 495 nt, Artificial Sequence
  derived and/or modified sequence opt3 from IL-31__Homo_sapiens__AAI32999
auggccagccacuccggccccucuaccucagugcuguuccucuuuugcugucuugggggauggcuggcuagucauacauugccugucagauuacugaggccaagcgacgauguucagaagaucguggaggaacuacaaucccucucuaaaaugcugcuuaaggacguagaggaagagaaaggugugcuggucucgcagaacuacacuuugccgugccucucacccgaugcacagccuccaaauaacauucacagccccgccauacgggcguaucugaagacgauccgccagcuggacaauaaaagugugauugaugaaaucauugagcaucucgacaaguuaaucuuccaagaugcuccugagaccaacauauccguuccaacagacacucacgaauguaagcgauuuauccugaccauuucucagcaguucagcgagugcauggaucuugccuugaaaucccugacaucaggcgcacagcaagccaccacuuga

SEQ ID NO: 4518 - RNA, 495 nt, Artificial Sequence
  derived and/or modified sequence opt4 from IL-31__Homo_sapiens__AAI32999
auggccagccacagcggccccagcaccagcgugcuguuccuguucugcugccugggcggcuggcuggccagccacacccugcccgugagacugcugagacccagcgacgacgugcagaagaucguggaggagcugcagagccugagcaagaugcugcugaaggacguggaggaggagaagggcgugcuggugagccagaacuacacccugcccugccugagccccgacgcccagccccccaacaacauccacagccccgccaucagagccuaccugaagaccaucagacagcuggacaacaagagcgugaucgacgagaucaucgagcaccuggacaagcugaucuuccaggacgcccccgagaccaacaucagcgugcccaccgacacccacgagugcaagagauucauccugaccaucagccagcaguucagcgagugcauggaccuggcccugaagagccugaccagcggcgcccagcaggccaccaccuga

SEQ ID NO: 4519 - RNA, 495 nt, Artificial Sequence
  derived and/or modified sequence opt5 from IL-31__Homo_sapiens__AAI32999
auggccagccacuccggccccucuaccagcgugcuguuccucuuuugcugucuugggggauggcuggcuucccauacacugccugucagacuccugcggccgucugacgauguucagaagaucguggaggaacuucaaagccuguccaaaaugcuccugaaggacguggaggaagagaaaggcguccuggugucucagaacuacacgcuccccugccugagcccugaugcccagcccccuaauaacauucacucccccgcgauccgcgcuuaucuuaagaccauuagacagcuggacaauaaaagcguuaucgaugaaauuaucgagcaucucgacaagcugaucuuccaagaugccccugagacaaacauuucugugccgaccgacacacacgaauguaagcgguuuauccuuaccauuucccagcaguucagcgagugcauggaucuggcccucaaaucucugacauccggggcucagcaagccaccacguga

SEQ ID NO: 4520 - RNA, 495 nt, Artificial Sequence
  derived and/or modified sequence opt6 from IL-31__Homo_sapiens__AAI32999
auggcaucacacucaggaccaucaaccucaguauuauuccuauucugcugcuuaggaggauggcucgcaucacacacacuaccaguaagacuacuaagaccauccgacgacguacaaaaaauaguagaagaacuacaaucacuaucaaaaaugcuacucaaagacguagaagaagaaaaaggaguacuaguaucacaaaacuacacacuaccaugccuaucaccagacgcacaaccaccaaacaacauacacuccccagcaauaagagcauacuuaaaaacaauaagacaacuagacaacaaaucaguaauagacgaaauaauagaacaccuagacaaacuaauauuccaagacgcaccagaaacaaacauaucuguaccaacagacacacacgaaugcaaaagauucauacuaacaauaucacaacaauucucagaauguauggacuuagcacuaaaauccuuaacaucaggagcacaacaagcaacaacauaa

SEQ ID NO: 4521 - protein, 234 aa, Artificial Sequence
  IL-32__Homo_sapiens__P24001
MCFPKVLSDDMKKLKARMVMLLPTSAQGLGAWVSACDTEDTVGHLGPWRDKDPALWCQLCLSSQHQAIERFYDKMQNAESGRGQVMSSLAELEDDFKEGYLETVAAYYEEQHPELTPLLEKERDGLRCRGNRSPVPDVEDPATEEPGESFCDKVMRWFQAMLQRLQTWWHGVLAWVKEKVVALVHAVQALWKQFQSFCCSLSELFMSSFQSYGAPRGDKEELTPQKCSEPQSSK

SEQ ID NO: 4522 - RNA, 705 nt, Artificial Sequence
  IL-32__Homo_sapiens__AAH09401
augugcuucccgaagguccucucugaugacaugaagaagcugaaggcccgaaugguaaugcuccucccuacuucugcucagggguugggggccugggucucagcgugugacacugaggacacugugggacaccugggacccuggagggacaaggauccggcccuuuggugccaacucugccucucuucacagcaccaggccauagaaagauuuuaugauaaaaugcaaaaugcagaaucaggacguggacaggugaugucgagccuggcagagcuggaggacgacuucaaagagggcuaccuggagacaguggcggcuuauuaugaggagcagcacccagagcucacuccucuacuugaaaaagaaagagauggauuacggugccgaggcaacagauccccugucccggauguugaggaucccgcaaccgaggagccuggggagagcuuuugugacaaggucaugagaugguuccaggccaugcugcagcggcugcagaccugguggcacgggguucuggccugggugaaggagaaggugguggcccugguccaugcagugcaggcccucuggaaacaguuccagaguuucugcugcucucugucagagcucuucauguccucuuuccaguccuacggagccccacggggggacaaggaggagcugacaccccagaagugcucugaaccccaauccucaaaauga

SEQ ID NO: 4523 - RNA, 705 nt, Artificial Sequence
  derived and/or modified sequence opt1 from IL-32__Homo_sapiens__AAH09401
augugcuuccccaaggugcugagcgacgacaugaagaagcucaaggcccgcauggucaugcugcugccgaccuccgcccagggccucggggcgugggugagcgccugcgacaccgaggacaccgugggccaccuggggcccuggcgggacaaggaccccgcccuguggugccagcucugccuguccagccagcaccaggccaucgagcgcuucuacgacaagaugcagaacgccgaguccggccgggggcaggucaugagcucccuggcggagcucgaggacgacuucaaggagggcuaccuggagaccguggccgccuacuacgaggagcagcaccccgagcugaccccgcuccuggagaaggagcgcgacggccugcggugccgcgggaaccggagccccgugcccgacgucgaggaccccgccaccgaggagccgggcgaguccuucugcgacaaggugaugcgcugguuccaggcgaugcuccagcggcugcagacgugguggcacggggugcuggccugggucaaggagaaggugguggcccucguccacgccgugcaggcccuguggaagcaguuccagagcuucugcugcucccugagcgagcuguucauguccagcuuccaguccuacggcgcgccccgcggggacaaggaggagcucacgccccagaagugcagcgagccccaguccagcaaguga

SEQ ID NO: 4524 - RNA, 705 nt, Artificial Sequence
  derived and/or modified sequence opt2 from IL-32__Homo_sapiens__AAH09401
augugcuuccccaagguccucuccgacgacaugaagaagcucaaggcccgcauggucaugcuccuccccaccuccgcccagggccucggcgccugggucuccgccugcgacaccgaggacaccgucggccaccucggccccuggcgcgacaaggaccccgcccucuggugccagcucugccucuccucccagcaccaggccaucgagcgcuucuacgacaagaugcagaacgccgaguccggccgcggccaggucauguccucccucgccgagcucgaggacgacuucaaggagggcuaccucgagaccgucgccgccuacuacgaggagcagcaccccgagcucaccccccuccucgagaaggagcgcgacggccuccgcugccgcggcaaccgcucccccguccccgacgucgaggaccccgccaccgaggagcccggcgaguccuucugcgacaaggucaugcgcugguuccaggccaugcuccagcgccuccagaccugguggcacggcguccucgccugggucaaggagaaggucgucgcccucguccacgccguccaggcccucuggaagcaguuccaguccuucugcugcucccucuccgagcucuucauguccuccuuccaguccuacggcgccccccgcggcgacaaggaggagcucaccccccagaagugcuccgagccccaguccuccaaguga

SEQ ID NO: 4525 - RNA, 705 nt, Artificial Sequence
  derived and/or modified sequence opt3 from IL-32__Homo_sapiens__AAH09401
augugcuuccccaaggugcugagcgacgauaugaaaaagcucaaagccagaauggucaugcuucugccuaccuccgcucagggcuugggggcauggguuucugccugugacacagaggauacugugggacacuuagguccauggagggacaaggauccggcgcuguggugccaacuaugucucucaagucagcaucaggcuaucgaacgguuuuacgacaaaaugcagaacgccgagagcggccgcgggcaaguaauguccucucuggcagaacuugaggaugacuucaaggaaggauaucuggagacgguggccgcuuacuaugaggaacagcaccccgaguugaccccucuccuggaaaaggagcgagauggccugcguugcagagguaauaggucgccaguccccgacguggaggauccugcaacagaggaaccaggggaaucauuuugugacaaaguuaugcggugguuccaggccaugcuccagcgcuuacaaacuugguggcauggagugcuggcuugggucaaggagaaagugguagcccuuguucacgcggugcaggcauuguggaagcaguuucagagcuucugcuguagucuguccgaacuauuuaugucuagcuuccaauccuacggcgcccccagaggcgauaaagaggagcucaccccucagaagugcucagaaccacagaguagcaaguga

SEQ ID NO: 4526 - RNA, 705 nt, Artificial Sequence
  derived and/or modified sequence opt4 from IL-32__Homo_sapiens__AAH09401
augugcuuccccaaggugcugagcgacgacaugaagaagcugaaggccagaauggugaugcugcugcccaccagcgcccagggccugggcgccugggugagcgccugcgacaccgaggacaccgugggccaccugggccccuggagagacaaggaccccgcccuguggugccagcugugccugagcagccagcaccaggccaucgagagauucuacgacaagaugcagaacgccgagagcggcagaggccaggugaugagcagccuggccgagcuggaggacgacuucaaggagggcuaccuggagaccguggccgccuacuacgaggagcagcaccccgagcugaccccccugcuggagaaggagagagacggccugagaugcagaggcaacagaagccccgugcccgacguggaggaccccgccaccgaggagcccggcgagagcuucugcgacaaggugaugagaugguuccaggccaugcugcagagacugcagaccugguggcacggcgugcuggccugggugaaggagaaggugguggcccuggugcacgccgugcaggcccuguggaagcaguuccagagcuucugcugcagccugagcgagcuguucaugagcagcuuccagagcuacggcgcccccagaggcgacaaggaggagcugaccccccagaagugcagcgagccccagagcagcaaguga

SEQ ID NO: 4527 - RNA, 705 nt, Artificial Sequence
  derived and/or modified sequence opt5 from IL-32__Homo_sapiens__AAH09401
augugcuuccccaaggugcugagcgacgauaugaaaaagcucaaagccagaauggucaugcugcuuccuaccuccgcccagggccugggggccuggguuucugcgugugacacagaggauacggugggacaccucggcccguggcgggacaaggaucccgcucuguggugccaacuuugucugagcucccagcaucaggccaucgaacgcuuuuacgacaaaaugcagaacgccgagucugggagaggacaagugaugagcucccucgcugaacuggaggaugacuucaaggaaggcuaucuggagaccgucgccgcuuacuaugaggaacagcacccugagcucacaccccugcuugaaaaggagcgggaugggcugcgcugcagaggaaaucggucuccugugcccgacguugaggauccugccaccgaagaaccgggcgagagcuuuugugacaaagugaugcgcugguuccaggcgaugcuccagagacugcaaacaugguggcauggcguccuugccugggugaaggagaaaguuguggcucugguccacgccgugcaggcucucuggaagcaguuucaguccuucugcuguagccugucugaacuguuuauguccagcuuccaaucuuacggggcuccccggggagauaaagaggagcucaccccucagaagugcuccgaaccccagagcucuaaguga

SEQ ID NO: 4528 - RNA, 705 nt, Artificial Sequence
  derived and/or modified sequence opt6 from IL-32__Homo_sapiens__AAH09401
auguguuucccaaaaguauuaucagacgauaugaaaaaauuaaaagcuagaaugguaaugcuauuaccaacaucagcacaaggauuaggagcauggguaucagcaugugauacagaagauacaguaggacaucuaggaccauggagagauaaagauccagcauuauggugccaauuaugucuaucaucacaacaccaagccauagaaagauucuaugauaaaaugcaaaacgcagaaaguggaaggggacaaguaaugagcucacuagcagaauuagaagaugacuucaaagaaggauaucuagaaacaguagccgcauacuaugaagaacaacauccagaacuaacaccauuacuagaaaaagaaagagauggauuaagaugucgaggaaauagaagcccaguaccagacguagaagauccagcaacagaagaaccaggagaaagcuuuugcgauaaaguuaugcgaugguuucaagcaauguuacaaagacuacaaaccugguggcauggcguucucgcauggguaaaagaaaaaguaguagcacuaguacacgcaguacaagcacuauggaaacaauuucaaucauucuguugcucauuaagcgaauuauucaugagcaguuuccaaagcuauggagcaccaagaggagauaaagaagaauuaacaccacaaaaaugcucagaaccacaaucaagcaaauaa

SEQ ID NO: 4529 - protein, 270 aa, Artificial Sequence
  IL-33__Homo_sapiens__O95760
MKPKMKYSTNKISTAKWKNTASKALCFKLGKSQQKAKEVCPMYFMKLRSGLMIKKEACYFRRETTKRPSLKTGRKHKRHLVLAACQQQSTVECFAFGISGVQKYTRALHDSSITGISPITEYLASLSTYNDQSITFALEDESYEIYVEDLKKDEKKDKVLLSYYESQHPSNESGDGVDGKMLMVTLSPTKDFWLHANNKEHSVELHKCEKPLPDQAFFVLHNMHSNCVSFECKTDPGVFIGVKDNHLALIKVDSSENLCTENILFKLSET

SEQ ID NO: 4530 - RNA, 813 nt, Artificial Sequence
  IL-33__Homo_sapiens__AAH47085
augaagccuaaaaugaaguauucaaccaacaaaauuuccacagcaaaguggaagaacacagcaagcaaagccuuguguuucaagcugggaaaaucccaacagaaggccaaagaaguuugccccauguacuuuaugaagcuccgcucuggccuuaugauaaaaaaggaggccuguuacuuuaggagagaaaccaccaaaaggccuucacugaaaacagguagaaagcacaaaagacaucugguacucgcugccugucaacagcagucuacuguggagugcuuugccuuugguauaucagggguccagaaauauacuagagcacuucaugauucaaguaucacaggaauuucaccuauuacagaguaucuugcuucucuaagcacauacaaugaucaauccauuacuuuugcuuuggaggaugaaaguuaugagauauauguugaagacuugaaaaaagaugaaaagaaagauaagguguuacugaguuacuaugagucucaacaccccucaaaugaaucaggugacgguguugaugguaagauguuaaugguaacccugaguccuacaaaagacuucugguugcaugccaacaacaaggaacacucuguggagcuccauaagugugaaaaaccacugccagaccaggccuucuuuguccuucauaauaugcacuccaacuguguuucauuugaaugcaagacugauccuggaguguuuauagguguaaaggauaaucaucuugcucugauuaaaguagacucuucugagaauuuguguacugaaaauaucuuguuuaagcucucugaaacuuag

SEQ ID NO: 4531 - RNA, 813 nt, Artificial Sequence
  derived and/or modified sequence opt1 from IL-33__Homo_sapiens__AAH47085
augaagcccaagaugaaguacagcaccaacaagaucuccaccgccaaguggaagaacacggccagcaaggcgcugugcuucaagcucggcaagucccagcagaaggccaaggaggugugcccgauguacuucaugaagcugcgcagcgggcugaugaucaagaaggaggccugcuacuuccggcgcgagaccaccaagcggcccucccucaagaccggccgcaagcacaagcggcaccugguccuggccgccugccagcagcagagcacgguggagugcuucgcguucgggaucuccggcgugcagaaguacacccgcgcccuccacgacagcuccaucaccgggaucagccccaucaccgaguaccuggccucccugagcacguacaacgaccaguccaucaccuucgcccucgaggacgagagcuacgagaucuacgucgaggaccugaagaaggacgagaagaaggacaaggugcugcucuccuacuacgagagccagcaccccuccaacgagagcggcgacggcguggacgggaagaugcugauggucacccuguccccgaccaaggacuucuggcuccacgcgaacaacaaggagcacagcguggagcugcacaagugcgagaagccccugcccgaccaggccuucuucgugcuccacaacaugcacagcaacugcgucuccuucgagugcaagacggaccccggcguguucaucggggugaaggacaaccaccuggcccugaucaaggucgacagcuccgagaaccucugcaccgagaacauccuguucaagcugagcgagaccuga

SEQ ID NO: 4532 - RNA, 813 nt, Artificial Sequence
  derived and/or modified sequence opt2 from IL-33__Homo_sapiens__AAH47085
augaagcccaagaugaaguacuccaccaacaagaucuccaccgccaaguggaagaacaccgccuccaaggcccucugcuucaagcucggcaagucccagcagaaggccaaggaggucugccccauguacuucaugaagcuccgcuccggccucaugaucaagaaggaggccugcuacuuccgccgcgagaccaccaagcgccccucccucaagaccggccgcaagcacaagcgccaccucguccucgccgccugccagcagcaguccaccgucgagugcuucgccuucggcaucuccggcguccagaaguacacccgcgcccuccacgacuccuccaucaccggcaucucccccaucaccgaguaccucgccucccucuccaccuacaacgaccaguccaucaccuucgcccucgaggacgaguccuacgagaucuacgucgaggaccucaagaaggacgagaagaaggacaagguccuccucuccuacuacgagucccagcaccccuccaacgaguccggcgacggcgucgacggcaagaugcucauggucacccucucccccaccaaggacuucuggcuccacgccaacaacaaggagcacuccgucgagcuccacaagugcgagaagccccuccccgaccaggccuucuucguccuccacaacaugcacuccaacugcgucuccuucgagugcaagaccgaccccggcgucuucaucggcgucaaggacaaccaccucgcccucaucaaggucgacuccuccgagaaccucugcaccgagaacauccucuucaagcucuccgagaccuga

SEQ ID NO: 4533 - RNA, 813 nt, Artificial Sequence
  derived and/or modified sequence opt3 from IL-33__Homo_sapiens__AAH47085
augaagcccaaaaugaaguacagcaccaacaaaaucuccacagccaaguggaaaaauacugcuucuaaggcacugugcuucaagcucggcaaaucacagcaaaaggccaaagagguguguccuauguauuuuaugaaguugagaagugggcugaugauuaaaaaggaagcgugcuacuucaggcgggagacgaccaagcgcccaagccuuaaaacaggacgaaagcacaaacgucauuuaguccuggcugccugucagcagcaguccacuguugaaugcuuugcauucgguauaucuggcgugcaaaaguauaccagagcccuacacgacucgucaaucacagggauuagcccgaucaccgaguaccucgcuagucuguccacuuauaacgaucagucuauuacauuugcacuugaagacgagagcuacgagaucuauguagaagaucugaaaaaggacgagaaaaaggauaagguguugcucuccuacuacgaaucacagcaucccaguaaugagagcggagacggcgucgaugguaaaaugcugauggugacccugucuccuacgaaggacuucuggcuccacgccaacaauaaagagcauuccguugaauuacacaagugugagaaaccacugcccgaucaggccuuuuucgugcuucacaacaugcauucaaauugcgucagcuuugaauguaagacugacccugggguguucauaggaguaaaggauaaccacuuggcucugaucaaaguugacaguucugagaaucuaugcaccgaaaacauucucuuuaagcuguccgagacauga

SEQ ID NO: 4534 - RNA, 813 nt, Artificial Sequence
  derived and/or modified sequence opt4 from IL-33__Homo_sapiens__AAH47085
augaagcccaagaugaaguacagcaccaacaagaucagcaccgccaaguggaagaacaccgccagcaaggcccugugcuucaagcugggcaagagccagcagaaggccaaggaggugugccccauguacuucaugaagcugagaagcggccugaugaucaagaaggaggccugcuacuucagaagagagaccaccaagagacccagccugaagaccggcagaaagcacaagagacaccuggugcuggccgccugccagcagcagagcaccguggagugcuucgccuucggcaucagcggcgugcagaaguacaccagagcccugcacgacagcagcaucaccggcaucagccccaucaccgaguaccuggccagccugagcaccuacaacgaccagagcaucaccuucgcccuggaggacgagagcuacgagaucuacguggaggaccugaagaaggacgagaagaaggacaaggugcugcugagcuacuacgagagccagcaccccagcaacgagagcggcgacggcguggacggcaagaugcugauggugacccugagccccaccaaggacuucuggcugcacgccaacaacaaggagcacagcguggagcugcacaagugcgagaagccccugcccgaccaggccuucuucgugcugcacaacaugcacagcaacugcgugagcuucgagugcaagaccgaccccggcguguucaucggcgugaaggacaaccaccuggcccugaucaagguggacagcagcgagaaccugugcaccgagaacauccuguucaagcugagcgagaccuga

SEQ ID NO: 4535 - RNA, 813 nt, Artificial Sequence
  derived and/or modified sequence opt5 from IL-33__Homo_sapiens__AAH47085
augaagcccaaaaugaaguacagcaccaacaaaaucuccacagccaaguggaaaaauacggcuucuaaggcccugugcuucaagcucggcaaaagccagcaaaaggcgaaagagguguguccuauguauuuuaugaagcugagauccgggcuuaugauuaaaaaggaggcuugcuacuuccggcgcgaaaccacaaagagaccgucucugaaaaccggacggaagcacaaacgccaucucguccuggccgccugucagcagcagagcacaguugaaugcuuugcuuucggcaucuccggggugcaaaaguauaccagagcccuucacgacucuagcauuacaggaaucucccccauuaccgaguaccuggcuagccucucuacguauaacgaucaguccaucaccuuugcccuggaagacgagagcuacgagaucuauguggaagaucugaaaaaggacgagaaaaaggauaagguccuccugucuuacuacgaaucccagcauccuagcaaugagucuggcgacgggguggauggaaaaaugcuuaugguuacacugucccccaccaaggacuucuggcuccacgcgaacaauaaagagcauagcguggaacugcacaagugugagaaaccucuucccgaucaggccuuuuucguccugcacaacaugcauuccaauugcgugucuuuugaauguaagacagacccuggcguuuucauuggcgugaaggauaaccaccucgcucugaucaaagucgacagcuccgagaaucugugcaccgaaaacauucucuuuaagcugagcgagacguga

SEQ ID NO: 4536 - RNA, 813 nt, Artificial Sequence
  derived and/or modified sequence opt6 from IL-33__Homo_sapiens__AAH47085
augaaaccaaaaaugaaauacucaacaaacaaaauaucaacagcaaaauggaaaaacacagcaucaaaagcacuaugcuucaaauuaggaaaaucacaacaaaaagcaaaagaagucugcccaauguauuucaugaaacuaagaucaggacuaaugauaaaaaaagaagcuugcuauuucagaagagaaacaacaaaaagaccaucacuaaaaacaggaagaaaacacaaacgacaccuaguacuagcagccugccaacaacaauccacaguagaaugcuucgcauucggaauaucaggcguacaaaaauacacaagagcacuccacgacucauccauaacaggaauaucaccaaucacagaauaccuagcaucccuaucaacauacaacgaucaaucuauaacauucgcacucgaagacgaaucauacgaaauauacguagaagaccuaaaaaaagacgaaaaaaaagacaaaguauuauuaagcuacuacgaaagccaacacccaucaaacgaaucaggagacggaguagacggaaaaaugcuaaugguaacauuaucaccaacaaaagauuucugguuacaugcaaacaacaaagaacacucagucgaauuacacaaaugcgaaaaaccacuaccagaccaagcauucuucguauuacacaacaugcacucaaacugcguaucauucgaaugcaaaacagacccaggaguauucauaggaguaaaagauaaccacuuagcauuaauaaaaguagacucaucagaaaaccuaugcacagaaaacauacuauucaaauuaucagaaacauaa

SEQ ID NO: 4537 - protein, 218 aa, Artificial Sequence
  IL-37__Homo_sapiens__Q9NZH6
MSFVGENSGVKMGSEDWEKDEPQCCLEDPAGSPLEPGPSLPTMNFVHTSPKVKNLNPKKFSIHDQDHKVLVLDSGNLIAVPDKNYIRPEIFFALASSLSSASAEKGSPILLGVSKGEFCLYCDKDKGQSHPSLQLKKEKLMKLAAQKESARRPFIFYRAQVGSWNMLESAAHPGWFICTSCNCNEPVGVTDKFENRKHIEFSFQPVCKAEMSPSEVSD

SEQ ID NO: 4538 - RNA, 657 nt, Artificial Sequence
  IL-37__Homo_sapiens__AAF69252
auguccuuugugggggagaacucaggagugaaaaugggcucugaggacugggaaaaagaugaaccccagugcugcuuagaagacccggcuggaagcccccuggaaccaggcccaagccuccccaccaugaauuuuguucacacaaguccaaaggugaagaacuuaaacccgaagaaauucagcauucaugaccaggaucacaaaguacugguccuggacucugggaaucucauagcaguuccagauaaaaacuacauacgcccagagaucuucuuugcauuagccucauccuugagcucagccucugcggagaaaggaaguccgauucuccugggggucucuaaaggggaguuuugucucuacugugacaaggauaaaggacaaagucauccaucccuucagcugaagaaggagaaacugaugaagcuggcugcccaaaaggaaucagcacgccggcccuucaucuuuuauagggcucaggugggcuccuggaacaugcuggagucggcggcucaccccggaugguucaucugcaccuccugcaauuguaaugagccuguuggggugacagauaaauuugagaacaggaaacacauugaauuuucauuucaaccaguuugcaaagcugaaaugagccccagugaggucagcgauuag

SEQ ID NO: 4539 - RNA, 657 nt, Artificial Sequence
  derived and/or modified sequence opt1 from IL-37__Homo_sapiens__AAF69252
augagcuucgugggcgagaacuccggggucaagaugggcagcgaggacugggagaaggacgagccccagugcugccuggaggacccggccgggagcccccucgagcccggccccucccugccgaccaugaacuucgugcacaccucccccaaggugaagaaccugaaccccaagaaguucagcauccacgaccaggaccacaagguccucgugcuggacuccgggaaccugaucgccgugcccgacaagaacuacauccgcccggagaucuucuucgcgcucgccagcucccugagcuccgccagcgccgagaagggcucccccauccugcucggcgucagcaagggggaguucugccuguacugcgacaaggacaagggccagucccaccccagccugcagcucaagaaggagaagcugaugaagcuggccgcgcagaaggaguccgcccggcgccccuucaucuucuaccgggcccagguggggagcuggaacaugcucgaguccgccgcgcacccgggcugguucaucugcacgagcugcaacugcaacgagcccgugggggucaccgacaaguucgagaaccgcaagcacaucgaguucagcuuccagcccgugugcaaggccgagaugucccccagcgagguguccgacuga

SEQ ID NO: 4540 - RNA, 657 nt, Artificial Sequence
  derived and/or modified sequence opt2 from IL-37__Homo_sapiens__AAF69252
auguccuucgucggcgagaacuccggcgucaagaugggcuccgaggacugggagaaggacgagccccagugcugccucgaggaccccgccggcuccccccucgagcccggccccucccuccccaccaugaacuucguccacaccucccccaaggucaagaaccucaaccccaagaaguucuccauccacgaccaggaccacaagguccucguccucgacuccggcaaccucaucgccguccccgacaagaacuacauccgccccgagaucuucuucgcccucgccuccucccucuccuccgccuccgccgagaagggcucccccauccuccucggcgucuccaagggcgaguucugccucuacugcgacaaggacaagggccagucccaccccucccuccagcucaagaaggagaagcucaugaagcucgccgcccagaaggaguccgcccgccgccccuucaucuucuaccgcgcccaggucggcuccuggaacaugcucgaguccgccgcccaccccggcugguucaucugcaccuccugcaacugcaacgagcccgucggcgucaccgacaaguucgagaaccgcaagcacaucgaguucuccuuccagcccgucugcaaggccgagaugucccccuccgaggucuccgacuga

SEQ ID NO: 4541 - RNA, 657 nt, Artificial Sequence
  derived and/or modified sequence opt3 from IL-37__Homo_sapiens__AAF69252
augagcuucgugggcgagaacuccggggucaagaugggaucugaagacugggagaaagaugaaccccagugcugucuggaggacccugccgguucaccacucgaaccgggccccagucuuccuaccaugaauuuuguucacacaagcccaaaggugaaaaaccugaaucccaagaaauucuccauccaugaucaagaccacaagguauugguguuagauucugggaaccugauugcugucccugacaagaauuacauaagaccagagaucuuuuucgcacuagccucgucacucagcagugcguccgcugagaaaggaucucccauucugcuuggcgugagcaagggugaauuuugccuguauugugauaaagacaaggggcagucccauccuucauugcagcucaaaaaggagaagcugaugaaacuggccgcacagaaggaaagugccaggcggccauucaucuuuuaccgcgcucaaguuggaagcuggaacaugcucgagucugcagcccacccgggcugguucauuugcacuuccuguaauugcaacgagcccgugggcgucacggauaaauuugaaaaucgaaagcauaucgaguucucauuucagccuguguguaaagcugaaaugagcccaagugagguaucugacuga

SEQ ID NO: 4542 - RNA, 657 nt, Artificial Sequence
  derived and/or modified sequence opt4 from IL-37__Homo_sapiens__AAF69252
augagcuucgugggcgagaacagcggcgugaagaugggcagcgaggacugggagaaggacgagccccagugcugccuggaggaccccgccggcagcccccuggagcccggccccagccugcccaccaugaacuucgugcacaccagccccaaggugaagaaccugaaccccaagaaguucagcauccacgaccaggaccacaaggugcuggugcuggacagcggcaaccugaucgccgugcccgacaagaacuacaucagacccgagaucuucuucgcccuggccagcagccugagcagcgccagcgccgagaagggcagccccauccugcugggcgugagcaagggcgaguucugccuguacugcgacaaggacaagggccagagccaccccagccugcagcugaagaaggagaagcugaugaagcuggccgcccagaaggagagcgccagaagacccuucaucuucuacagagcccaggugggcagcuggaacaugcuggagagcgccgcccaccccggcugguucaucugcaccagcugcaacugcaacgagcccgugggcgugaccgacaaguucgagaacagaaagcacaucgaguucagcuuccagcccgugugcaaggccgagaugagccccagcgaggugagcgacuga

SEQ ID NO: 4543 - RNA, 657 nt, Artificial Sequence
  derived and/or modified sequence opt5 from IL-37__Homo_sapiens__AAF69252
augagcuucgugggcgagaacuccggggucaagaugggaucugaagacugggagaaagaugaaccccagugcugucuggaggacccugccggcagcccgcucgaacccgggccuucccugcccaccaugaauuuuguucacacaucuccuaaggugaaaaaccuuaaucccaagaaauucagcauccaugaucaagaccacaaggugcugguccucgauuccggaaaccugauugcugugccugacaagaauuacaucagaccggagaucuuuuucgcccuugcgucuagccuguccagcgcuucugccgagaaaggcucccccauucuccuggggguuagcaagggagaauuuugccuguauugugauaaagacaagggccagucucauccuucccuccagcugaaaaaggagaaacuuaugaagcuggccgcucagaaggaaagcgcccggcgccccuucaucuuuuacagagcucaagugggcucuuggaacaugcucgaguccgccgcgcacccugggugguucauuugcacgagcuguaauugcaacgagcccgucggagugaccgauaaauuugaaaaucggaagcauaucgaguucuccuuucagccgguuuguaaagccgaaaugucuccuagcgagguguccgacuga

SEQ ID NO: 4544 - RNA, 657 nt, Artificial Sequence
  derived and/or modified sequence opt6 from IL-37__Homo_sapiens__AAF69252
augucauucguaggagaaaauucaggaguaaaaaugggaucagaagacugggaaaaagacgaaccacaaugcugccuagaagacccugcaggcucaccacuagaaccaggaccaucauuaccaacaaugaacuucguacacacauccccaaaaguaaaaaaccuaaacccaaaaaaauucucaauacacgaucaagaccacaaaguacuaguacuagacucaggaaaccuaauagcaguaccagauaaaaacuacauaagaccagaaauauucuucgcacuagcaucaucacuaucaagcgcaucagcagaaaaaggaucaccaauacuacuaggaguaucaaaaggagaauucugcuuauacugcgacaaagacaaaggacaaucacacccaucacuacaacuaaaaaaagaaaaauuaaugaaacuagcagcacaaaaagaaucagcaagaagaccauucauauucuauagagcacaaguaggaucauggaacauguuagaaucagcagcccacccaggaugguucauauguacaucaugcaacugcaacgaaccaguaggaguaacagacaaauucgaaaacagaaaacacauagaauucucauuccaaccaguaugcaaagcagaaaugucaccaagugaaguaucagacuaa

SEQ ID NO: 4545 - protein, 152 aa, Artificial Sequence
  IL-3__Homo_sapiens__P08700
MSRLPVLLLLQLLVRPGLQAPMTQTTPLKTSWVNCSNMIDEIITHLKQPPLPLLDFNNLNGEDQDILMENNLRRPNLEAFNRAVKSLQNASAIESILKNLLPCLPLATAAPTRHPIHIKDGDWNEFRRKLTFYLKTLENAQAQQTTLSLAIF

SEQ ID NO: 4546 - RNA, 459 nt, Artificial Sequence
  IL-3__Homo_sapiens__AAA35725
augagccgccugcccguccugcuccugcuccaacuccugguccgccccggacuccaagcucccaugacccagacaacgcccuugaagacaagcuggguuaacugcucuaacaugaucgaugaaauuauaacacacuuaaagcagccaccuuugccuuugcuggacuucaacaaccucaauggggaagaccaagacauucugauggaaaauaaccuucgaaggccaaaccuggaggcauucaacagggcugucaagaguuuacagaacgcaucagcaauugagagcauucuuaaaaaucuccugccaugucugccccuggccacggccgcacccacgcgacauccaauccauaucaaggacggugacuggaaugaauuccggaggaaacugacguucuaucugaaaacccuugagaaugcgcaggcucaacagacgacuuugagccucgcgaucuuuuga

SEQ ID NO: 4547 - RNA, 459 nt, Artificial Sequence
  derived and/or modified sequence opt1 from IL-3__Homo_sapiens__AAA35725
augagccgccugcccgugcuccugcugcuccagcugcugguccggccgggccuccaggcccccaugacccagaccacgccccugaagaccuccugggugaacugcagcaacaugaucgacgagaucaucacccaccugaagcagcccccgcucccccugcuggacuucaacaaccucaacggggaggaccaggacauccugauggagaacaaccugcgccggcccaaccucgaggccuucaaccgcgcggugaagucccugcagaacgccagcgccaucgaguccauccugaagaaccuccugcccugccugccgcucgccaccgccgcgcccacgcggcaccccauccacaucaaggacggcgacuggaacgaguuccgccggaagcugaccuucuaccugaagacccucgagaacgcccaggcccagcagaccacgcugagccuggccaucuucuga

SEQ ID NO: 4548 - RNA, 459 nt, Artificial Sequence
  derived and/or modified sequence opt2 from IL-3__Homo_sapiens__AAA35725
augucccgccuccccguccuccuccuccuccagcuccucguccgccccggccuccaggcccccaugacccagaccaccccccucaagaccuccugggucaacugcuccaacaugaucgacgagaucaucacccaccucaagcagcccccccucccccuccucgacuucaacaaccucaacggcgaggaccaggacauccucauggagaacaaccuccgccgccccaaccucgaggccuucaaccgcgccgucaagucccuccagaacgccuccgccaucgaguccauccucaagaaccuccuccccugccucccccucgccaccgccgcccccacccgccaccccauccacaucaaggacggcgacuggaacgaguuccgccgcaagcucaccuucuaccucaagacccucgagaacgcccaggcccagcagaccacccucucccucgccaucuucuga

SEQ ID NO: 4549 - RNA, 459 nt, Artificial Sequence
  derived and/or modified sequence opt3 from IL-3__Homo_sapiens__AAA35725
augagcagacugcccgugcuccuucuguugcaguuacuggucaggccuggccuacaagccccaaugacccagacaacuccgcucaagacguccuggguuaacugcucuaauaugaucgacgagauuauaacccaccugaaacagcccccucuuccacuguuggauuucaacaaucucaacggggaagaccaggauauccugauggagaauaaccugcggcgccccaaucucgaggcuuuuaaccgagcagugaagucauuacaaaaugccagugcgauugaaagcauccugaaaaaccuuuugccuugucugccacuagcuacagccgcacccacucgucauccuauucacaucaaggacggagauuggaaugaguucagaaggaaacucaccuuuuaccugaagacacuugaaaacgcccaggcucagcagaccacucuguccuuggcaauauucuga

SEQ ID NO: 4550 - RNA, 459 nt, Artificial Sequence
  derived and/or modified sequence opt4 from IL-3__Homo_sapiens__AAA35725
augagcagacugcccgugcugcugcugcugcagcugcuggugagacccggccugcaggcccccaugacccagaccaccccccugaagaccagcugggugaacugcagcaacaugaucgacgagaucaucacccaccugaagcagcccccccugccccugcuggacuucaacaaccugaacggcgaggaccaggacauccugauggagaacaaccugagaagacccaaccuggaggccuucaacagagccgugaagagccugcagaacgccagcgccaucgagagcauccugaagaaccugcugcccugccugccccuggccaccgccgcccccaccagacaccccauccacaucaaggacggcgacuggaacgaguucagaagaaagcugaccuucuaccugaagacccuggagaacgcccaggcccagcagaccacccugagccuggccaucuucuga

SEQ ID NO: 4551 - RNA, 459 nt, Artificial Sequence
  derived and/or modified sequence opt5 from IL-3__Homo_sapiens__AAA35725
augagcagacugcccgugcuccugcuucugcagcuccuggugcggccuggccuucaagccccgaugacccagacaacgccccugaagaccuccuggguuaacugcucuaauaugaucgacgagauuaucacacaccucaaacagccuccccugccucugcucgauuucaacaaucugaacggggaagaccaggauauucuuauggagaauaaccugcgcagacccaaucucgaggcuuuuaaccgggccgucaagagccugcaaaaugcguccgcuaucgaaucuauucuuaaaaaccugcucccuugucugccgcuggccaccgccgcucccacacgccauccuauccacaucaaggacggagauuggaaugaguucagacggaaacucaccuuuuaccugaagacacuugaaaacgcccaggcucagcagaccacgcugagccucgccauuuucuga

SEQ ID NO: 4552 - RNA, 459 nt, Artificial Sequence
  derived and/or modified sequence opt6 from IL-3__Homo_sapiens__AAA35725
augucaagacuacccguacuacuacuacuacaacuacuaguaagaccaggacuacaagcaccaaugacacaaacaacaccacuaaaaacauccuggguaaacugcucaaacaugauagacgaaauaaucacacaccuaaaacaaccaccacuaccacuacuagacuucaacaaccuaaacggagaagaccaagacauacucauggaaaacaaccuaagaagaccaaaccuagaagcauucaacagagccguaaaaucacuacaaaacgcaucagcaauagaaucaauacuaaaaaaccuacuaccaugccucccacuagcaacagcagcaccaacaagacacccaauacacauaaaagacggagacuggaacgaauucagaagaaaacuaacauucuaccuaaaaacacuagaaaacgcacaagcacaacaaacaacacucucacuagcaauauucuaa

SEQ ID NO: 4553 - protein, 152 aa, Artificial Sequence [sequence omitted]

SEQ ID NO: 4554 - RNA, 459 nt, Artificial Sequence
  IL-3__Homo_sapiens__AAH66275
augagccgccugcccguccugcuccugcuccaacuccugguccgccccggacuccaagcucccaugacccagacaacguccuugaagacaagcuggguuaacugcucuaacaugaucgaugaaauuauaacacacuuaaagcagccaccuuugccuuugcuggacuucaacagccucaauggggaagaccaagacauucugauggaaaauaaccuucgaaggccaaaccuggaggcauucaacagggcugucaagaguuuacagaacgcaucagcaauugagagcauucuuaaaaaucuccugccaugucugccccuggccacggccgcacccacgcgacauccaauccauaucaaggacggugacuggaaugaauuccggaggaaacugacguucuaucugaaaacccuugagaaugcgcaggcucaacagacgacuuugagccucgcgaucuuuuga

SEQ ID NO: 4555 - RNA, 459 nt, Artificial Sequence
  derived and/or modified sequence opt1 from IL-3__Homo_sapiens__AAH66275
augagccgccugcccgugcuccugcugcuccagcugcugguccggccgggccuccaggcccccaugacccagaccacgucccugaagaccagcugggugaacugcuccaacaugaucgacgagaucaucacccaccugaagcagccgccccucccccugcuggacuucaacagccucaacggggaggaccaggacauccugauggagaacaaccugcgccggcccaaccucgaggccuucaaccgcgcggugaagucccugcagaacgccagcgccaucgaguccauccugaagaaccuccugcccugccugccccucgccaccgccgcgccgacgcggcaccccauccacaucaaggacggcgacuggaacgaguuccgccggaagcugaccuucuaccugaagacccucgagaacgcccaggcccagcagaccacgcugagccuggccaucuucuga

SEQ ID NO: 4556 - RNA, 459 nt, Artificial Sequence
  derived and/or modified sequence opt2 from IL-3__Homo_sapiens__AAH66275
augucccgccuccccguccuccuccuccuccagcuccucguccgccccggccuccaggcccccaugacccagaccaccucccucaagaccuccugggucaacugcuccaacaugaucgacgagaucaucacccaccucaagcagcccccccucccccuccucgacuucaacucccucaacggcgaggaccaggacauccucauggagaacaaccuccgccgccccaaccucgaggccuucaaccgcgccgucaagucccuccagaacgccuccgccaucgaguccauccucaagaaccuccuccccugccucccccucgccaccgccgcccccacccgccaccccauccacaucaaggacggcgacuggaacgaguuccgccgcaagcucaccuucuaccucaagacccucgagaacgcccaggcccagcagaccacccucucccucgccaucuucuga

SEQ ID NO: 4557 - RNA, 459 nt, Artificial Sequence
  derived and/or modified sequence opt3 from IL-3__Homo_sapiens__AAH66275
augagcagacugcccgugcuccuucuguugcaguuacuggugaggccuggccuacaagccccaaugacccagacaacuucccucaagacgucuuggguuaacugcucaaauaugaucgacgagauuauaacccaccugaaacagccgccccuuccucuguuggauuucaacagucucaauggggaagaccaggauauccugauggagaacaaucugcggcgcccaaaccucgaggcuuuuaaucgagcagucaagagcuuacaaaacgccuccgcgauugaaucuauccugaaaaaucuuuugcccugucugccucuagcuacagccgcaccaacucgucaucccauucacaucaaggacggagauuggaacgaguucagaaggaaacucaccuuuuaccugaagacacuugaaaaugcccaggcucagcagaccacucugucguuggcaauauucuga

SEQ ID NO: 4558 - RNA, 459 nt, Artificial Sequence
  derived and/or modified sequence opt4 from IL-3__Homo_sapiens__AAH66275
augagcagacugcccgugcugcugcugcugcagcugcuggugagacccggccugcaggcccccaugacccagaccaccagccugaagaccagcugggugaacugcagcaacaugaucgacgagaucaucacccaccugaagcagcccccccugccccugcuggacuucaacagccugaacggcgaggaccaggacauccugauggagaacaaccugagaagacccaaccuggaggccuucaacagagccgugaagagccugcagaacgccagcgccaucgagagcauccugaagaaccugcugcccugccugccccuggccaccgccgcccccaccagacaccccauccacaucaaggacggcgacuggaacgaguucagaagaaagcugaccuucuaccugaagacccuggagaacgcccaggcccagcagaccacccugagccuggccaucuucuga

SEQ ID NO: 4559 - RNA, 459 nt, Artificial Sequence
  derived and/or modified sequence opt5 from IL-3__Homo_sapiens__AAH66275
augagcagacugcccgugcuccugcuucugcagcuccugguccggccuggccuucaagccccgaugacccagacaacgucccugaagaccucuuggguuaacugcagcaauaugaucgacgagauuaucacacaccucaaacagcccccucugccccugcucgauuucaacucccugaauggggaagaccaggauauucuuauggagaacaaucugcgcagaccuaaccucgaggcuuuuaaucgggccgugaagucucugcaaaacgcgagcgcuaucgaauccauucuuaaaaaucugcuccccugucugccucuggccaccgccgcuccgacacgccaucccauccacaucaaggacggagauuggaacgaguucagacggaaacucaccuuuuaccugaagacacuugaaaaugcccaggcucagcagaccacgcugucucucgccauuuucuga

SEQ ID NO: 4560 - RNA, 459 nt, Artificial Sequence
  derived and/or modified sequence opt6 from IL-3__Homo_sapiens__AAH66275
augucaagacuaccaguacuacuacuccuacaauuacuaguaagaccaggacuacaagcaccaaugacacaaaccacaucccuaaaaacaucauggguaaacugcucaaacaugaucgacgaaauaauaacacacuuaaaacaaccaccacuaccacuacuagacuucaacucacuaaacggagaagaccaagacauacucauggaaaacaaccuaagaagaccaaaccuagaagcauucaacagagcaguaaaaucacuacaaaacgcaucagcaauagaauccauacuaaaaaaccuacucccaugccuaccacuagcaacagcagcaccaacaagacacccaauacacauaaaagacggagacuggaacgaauucagacgaaaacuaacauucuaccuaaaaacacuagaaaacgcacaagcacaacaaacaacacuaucacuagcaauauucuaa

SEQ ID NO: 4561 - protein, 152 aa, Artificial Sequence [sequence omitted]

SEQ ID NO: 4562 - RNA, 459 nt, Artificial Sequence
  IL-3__Homo_sapiens__AAH66274
augagccgccugcccguccugcuccugcuccaacuccugguccgccccggacuccaagcucccaugacccagacaacguccuugaagacaagcuggguuaacugcucuaacaugaucgaugaaauuauaacacgcuuaaagcagccaccuuugccuuugcuggacuucaacaaccucaauggggaagaccaagacauucugauggaaaauaaccuucgaaggccaaaccuggaggcauucaacagggcugucaagaguuuacagaacgcaucagcaauugagagcauucuuaaaaaucuccugccaugucugccccuggccacggccgcacccacgcgacauccaauccauaucaaggacggugacuggaaugaauuccggaggaaacugacguucuaucugaaaacccuugagaaugcgcaggcucaacagacgacuuugagccucgcgaucuuuuga

SEQ ID NO: 4563 - RNA, 459 nt, Artificial Sequence
  derived and/or modified sequence opt1 from IL-3__Homo_sapiens__AAH66274
augagccgccugcccgugcuccugcugcuccagcugcuggugcggccgggccuccaggcccccaugacccagaccacgucccugaagaccagcugggugaacugcuccaacaugaucgacgagaucaucacccgccugaagcagccgccccucccccugcuggacuucaacaaccucaacggggaggaccaggacauccugauggagaacaaccugcggcgccccaaccucgaggccuucaaccgggcggucaagagccugcagaacgccuccgccaucgagagcauccugaagaaccuccugcccugccugccccucgccaccgccgcgccgacgcgccaccccauccacaucaaggacggcgacuggaacgaguuccggcgcaagcugaccuucuaccugaagacccucgagaacgcccaggcccagcagaccacgcugucccuggccaucuucuga

SEQ ID NO: 4564 - RNA, 459 nt, Artificial Sequence
  derived and/or modified sequence opt2 from IL-3__Homo_sapiens__AAH66274
augucccgccuccccguccuccuccuccuccagcuccucguccgccccggccuccaggcccccaugacccagaccaccucccucaagaccuccugggucaacugcuccaacaugaucgacgagaucaucacccgccucaagcagcccccccucccccuccucgacuucaacaaccucaacggcgaggaccaggacauccucauggagaacaaccuccgccgccccaaccucgaggccuucaaccgcgccgucaagucccuccagaacgccuccgccaucgaguccauccucaagaaccuccuccccugccucccccucgccaccgccgcccccacccgccaccccauccacaucaaggacggcgacuggaacgaguuccgccgcaagcucaccuucuaccucaagacccucgagaacgcccaggcccagcagaccacccucucccucgccaucuucuga

SEQ ID NO: 4565 - RNA, 459 nt, Artificial Sequence
  derived and/or modified sequence opt3 from IL-3__Homo_sapiens__AAH66274
augagcagacugcccgugcuccuucuguugcaguuacuggucaggccuggccuacaagccccaaugacccagacaacuucccucaagacgucuuggguuaacugcucaaauaugaucgacgagauuauaacccggcugaaacagccgccccuuccucuguuggauuucaacaaucucaacggggaagaccaggauauccugauggagaauaaccugcgccgaccaaaucucgaggcuuuuaaccgugcagugaagaguuuacaaaaugccagcgcgauugaauccauccugaaaaaccuuuugcccugucugccucuagcuacagccgcaccaacuagacaccccauucauaucaaggacggagauuggaaugaguucaggcggaaacucaccuuuuaccugaagacacuugaaaacgcccaggcucagcagaccacucugucuuuggcaauauucuga

SEQ ID NO: 4566 - RNA, 459 nt, Artificial Sequence
  derived and/or modified sequence opt4 from IL-3__Homo_sapiens__AAH66274
augagcagacugcccgugcugcugcugcugcagcugcuggugagacccggccugcaggcccccaugacccagaccaccagccugaagaccagcugggugaacugcagcaacaugaucgacgagaucaucaccagacugaagcagcccccccugccccugcuggacuucaacaaccugaacggcgaggaccaggacauccugauggagaacaaccugagaagacccaaccuggaggccuucaacagagccgugaagagccugcagaacgccagcgccaucgagagcauccugaagaaccugcugcccugccugccccuggccaccgccgcccccaccagacaccccauccacaucaaggacggcgacuggaacgaguucagaagaaagcugaccuucuaccugaagacccuggagaacgcccaggcccagcagaccacccugagccuggccaucuucuga

SEQ ID NO: 4567 - RNA, 459 nt, Artificial Sequence
  derived and/or modified sequence opt5 from IL-3__Homo_sapiens__AAH66274
augagcagacugcccgugcuccugcuucugcagcuccugguccggccuggccuucaagccccgaugacccagacaacgucccugaagaccucuuggguuaacugcagcaauaugaucgacgagauuaucacacgccucaaacagcccccucugccccugcucgauuucaacaaucugaacggggaagaccaggauauucuuauggagaauaaccugagacggccuaaucucgaggcuuuuaaccgcgccgugaagucccugcaaaaugcgucugcuaucgaaagcauucuuaaaaaccugcuccccugucugccucuggccaccgccgcuccgacaagacaccccauccauaucaaggacggagauuggaaugaguuccggcgcaaacucaccuuuuaccugaagacacuugaaaacgcccaggcucagcagaccacgcugucccucgccauuuucuga

SEQ ID NO: 4568 - RNA, 459 nt, Artificial Sequence
  derived and/or modified sequence opt6 from IL-3__Homo_sapiens__AAH66274
augucaagacuaccaguacuacuacuacuacaacuacuaguaagaccaggacuacaagcaccaaugacccaaacaacaucacuaaaaacauccuggguaaacugcucaaacaugauagacgaaauaauaacaagacuaaaacaaccaccacuaccacuacuagacuucaacaaccuaaacggagaagaccaagacauacuaauggaaaacaaccuaagaagaccaaaccuagaagcauucaaccgagcaguaaaaucacuacaaaacgcaucagcaauagaauccauacuaaaaaaccuacuaccaugccuaccacuagcaacagcagcaccaacaagacacccaauacacauaaaagacggagacuggaacgaauucagaagaaaacuaacauucuaccuaaaaacacuagaaaacgcacaagcacaacaaacaacacucucacuagcaauauucuaa

SEQ ID NO: 4569 - protein, 137 aa, Artificial Sequence
  IL-4__Homo_sapiens__P05112-2
MGLTSQLLPPLFFLLACAGNFVHGHKCDITLQEIIKTLNSLTEQKNTTEKETFCRAATVLRQFYSHHEKDTRCLGATAQQFHRHKQLIRFLKRLDRNLWGLAGLNSCPVKEANQSTLENFLERLKTIMREKYSKCSS

SEQ ID NO: 4570 - RNA, 414 nt, Artificial Sequence
  IL-4__Homo_sapiens__CCDS4159.1
augggucucaccucccaacugcuucccccucuguucuuccugcuagcaugugccggcaacuuuguccacggacacaagugcgauaucaccuuacaggagaucaucaaaacuuugaacagccucacagagcagaagaacacaacugagaaggaaaccuucugcagggcugcgacugugcuccggcaguucuacagccaccaugagaaggacacucgcugccugggugcgacugcacagcaguuccacaggcacaagcagcugauccgauuccugaaacggcucgacaggaaccucuggggccuggcgggcuugaauuccuguccugugaaggaagccaaccagaguacguuggaaaacuucuuggaaaggcuaaagacgaucaugagagagaaauauucaaaguguucgagcuga

SEQ ID NO: 4571 - RNA, 414 nt, Artificial Sequence
  derived and/or modified sequence opt1 from IL-4__Homo_sapiens__CCDS4159.1
augggccugaccagccagcuccugcccccgcuguucuuccuccuggccugcgccgggaacuucgugcacggccacaagugcgacaucacccugcaggagaucaucaagacgcucaacucccugaccgagcagaagaacaccaccgagaaggagacguucugccgcgcggccaccguccugcggcaguucuacagccaccacgagaaggacacccgcugccucggggccaccgcccagcaguuccaccggcacaagcagcugauccgcuuccugaagcggcucgaccgcaaccuguggggccuggccgggcucaacuccugccccgugaaggaggcgaaccagagcacgcuggagaacuuccuggagcggcucaagaccaucaugcgcgagaaguacuccaagugcagcuccuga

SEQ ID NO: 4572 - RNA, 414 nt, Artificial Sequence
  derived and/or modified sequence opt2 from IL-4__Homo_sapiens__CCDS4159.1
augggccucaccucccagcuccuccccccccucuucuuccuccucgccugcgccggcaacuucguccacggccacaagugcgacaucacccuccaggagaucaucaagacccucaacucccucaccgagcagaagaacaccaccgagaaggagaccuucugccgcgccgccaccguccuccgccaguucuacucccaccacgagaaggacacccgcugccucggcgccaccgcccagcaguuccaccgccacaagcagcucauccgcuuccucaagcgccucgaccgcaaccucuggggccucgccggccucaacuccugccccgucaaggaggccaaccaguccacccucgagaacuuccucgagcgccucaagaccaucaugcgcgagaaguacuccaagugcuccuccuga

SEQ ID NO: 4573 - RNA, 414 nt, Artificial Sequence
  derived and/or modified sequence opt3 from IL-4__Homo_sapiens__CCDS4159.1
augggccugaccagccagcuccuucccccucuguucuuuuuguuagccugcgcugggaacuucgugcacggacauaagugugacaucacacugcaagagauuauaaaaacucuaaauucccucacggaacagaagaacaccacagagaaagaaacuuuuugcagagcagccaccguccugaggcaguucuacucucaccaugagaaggauacacggugucuuggugcgaccgcucagcaauuucaccgccauaaacagcugauccgauucuugaagcgucucgacagaaaucuguggggccuggccgggcucaacucaugcccaguuaaggaagcaaaucagaguacuuuagagaacuuucuggagaggcuuaaaacaauuaugcgggaaaaguauagcaaauguuccucuuga

SEQ ID NO: 4574 - RNA, 414 nt, Artificial Sequence
  derived and/or modified sequence opt4 from IL-4__Homo_sapiens__CCDS4159.1
augggccugaccagccagcugcugcccccccuguucuuccugcuggccugcgccggcaacuucgugcacggccacaagugcgacaucacccugcaggagaucaucaagacccugaacagccugaccgagcagaagaacaccaccgagaaggagaccuucugcagagccgccaccgugcugagacaguucuacagccaccacgagaaggacaccagaugccugggcgccaccgcccagcaguuccacagacacaagcagcugaucagauuccugaagagacuggacagaaaccuguggggccuggccggccugaacagcugccccgugaaggaggccaaccagagcacccuggagaacuuccuggagagacugaagaccaucaugagagagaaguacagcaagugcagcagcuga

SEQ ID NO: 4575 - RNA, 414 nt, Artificial Sequence
  derived and/or modified sequence opt5 from IL-4__Homo_sapiens__CCDS4159.1
augggccugaccagccagcuccugcccccucuuuucuuucugcucgccugcgcugggaacuucgugcacggacauaagugugacaucacacugcaagagauuaucaaaacgcuuaauucccugaccgaacagaagaacacaaccgagaaagaaacauuuugcagagccgcgaccguccuccggcaguucuacucucaccaugagaaggauacacgcugucugggcgcuaccgcccagcaauuucacagacauaaacagcugauucgguuccucaagcgccuggacagaaaucuuugggggcuggccggacucaacagcugcccgguuaaggaagcuaaucaguccacgcuggagaacuuucuugagcggcugaaaaccaucaugcgcgaaaaguauucuaaauguagcuccuga

SEQ ID NO: 4576 - RNA, 414 nt, Artificial Sequence
  derived and/or modified sequence opt6 from IL-4__Homo_sapiens__CCDS4159.1
augggacuaacaagccaacuacuaccaccacuauucuuccuacucgcaugcgcaggaaacuucguacacggacacaaaugcgacauaacacuacaagaaauaauaaaaacacuaaacucacuaacagaacaaaaaaacacaacagaaaaagaaacauucugcagagcagcaacaguauuaagacaauucuacagccaccacgaaaaagacacaagaugccuaggagcaacagcacaacaauuccacagacacaaacaacuaauacgauuccucaaaagacuagacagaaaccuauggggacuagcaggacuaaacucaugcccaguaaaagaagcaaaccaaagcacacuagaaaacuuucuagaaagacuaaaaacaauaaugagagaaaaauacagcaaaugcucaagcuaa

SEQ ID NO: 4577 - protein, 153 aa, Artificial Sequence [sequence omitted]

SEQ ID NO: 4578 - RNA, 462 nt, Artificial Sequence
  IL-4__Homo_sapiens__CCDS4158.1
augggucucaccucccaacugcuucccccucuguucuuccugcuagcaugugccggcaacuuuguccacggacacaagugcgauaucaccuuacaggagaucaucaaaacuuugaacagccucacagagcagaagacucugugcaccgaguugaccguaacagacaucuuugcugccuccaagaacacaacugagaaggaaaccuucugcagggcugcgacugugcuccggcaguucuacagccaccaugagaaggacacucgcugccugggugcgacugcacagcaguuccacaggcacaagcagcugauccgauuccugaaacggcucgacaggaaccucuggggccuggcgggcuugaauuccuguccugugaaggaagccaaccagaguacguuggaaaacuucuuggaaaggcuaaagacgaucaugagagagaaauauucaaaguguucgagcuga

SEQ ID NO: 4579 - RNA, 462 nt, Artificial Sequence
  derived and/or modified sequence opt1 from IL-4__Homo_sapiens__CCDS4158.1
augggccugaccagccagcuccugcccccgcuguucuuccuccuggccugcgccgggaacuucgugcacggccacaagugcgacaucacccugcaggagaucaucaagacgcucaacucccugaccgagcagaagacccugugcaccgagcucacggucaccgacaucuucgcggccagcaagaacaccaccgagaaggagacguucugccgcgccgccaccgugcugcggcaguucuacucccaccacgagaaggacacccgcugccugggggccaccgcgcagcaguuccaccggcacaagcagcucauccgcuuccugaagcggcuggaccgcaaccucuggggccuggccgggcugaacagcugccccgugaaggaggccaaccaguccacgcucgagaacuuccuggagcggcugaagaccaucaugcgcgagaaguacagcaagugcuccagcuga

SEQ ID NO: 4580 - RNA, 462 nt, Artificial Sequence
  derived and/or modified sequence opt2 from IL-4__Homo_sapiens__CCDS4158.1
augggccucaccucccagcuccuccccccccucuucuuccuccucgccugcgccggcaacuucguccacggccacaagugcgacaucacccuccaggagaucaucaagacccucaacucccucaccgagcagaagacccucugcaccgagcucaccgucaccgacaucuucgccgccuccaagaacaccaccgagaaggagaccuucugccgcgccgccaccguccuccgccaguucuacucccaccacgagaaggacacccgcugccucggcgccaccgcccagcaguuccaccgccacaagcagcucauccgcuuccucaagcgccucgaccgcaaccucuggggccucgccggccucaacuccugccccgucaaggaggccaaccaguccacccucgagaacuuccucgagcgccucaagaccaucaugcgcgagaaguacuccaagugcuccuccuga

SEQ ID NO: 4581 - RNA, 462 nt, Artificial Sequence
  derived and/or modified sequence opt3 from IL-4__Homo_sapiens__CCDS4158.1
augggccugaccagccagcuccuucccccucuguucuuuuuguuagccugcgcugggaacuucgugcacggacauaagugcgacaucacacugcaagagauuauaaaaacucuaaauucccucacggaacagaagacccugugcacagagcuuacugucaccgauaucuuugcagccucuaaaaacacaaccgaaaaggagacuuucuguagagcggcuacaguucugaggcaguuuuacucacaccaugaaaaagacacccggugcuugggugccacggcacagcaauuccaccgccauaagcagcucauucgauuucugaagcgucuggauagaaaucucuggggcuuagccgggcugaacaguuguccagugaaagaggcuaaucagagcacucuugagaacuucuuggaaaggcugaagaccaucaugcgggagaaauauuccaaguguucuucguga

SEQ ID NO: 4582 - RNA, 462 nt, Artificial Sequence
  derived and/or modified sequence opt4 from IL-4__Homo_sapiens__CCDS4158.1
augggccugaccagccagcugcugcccccccuguucuuccugcuggccugcgccggcaacuucgugcacggccacaagugcgacaucacccugcaggagaucaucaagacccugaacagccugaccgagcagaagacccugugcaccgagcugaccgugaccgacaucuucgccgccagcaagaacaccaccgagaaggagaccuucugcagagccgccaccgugcugagacaguucuacagccaccacgagaaggacaccagaugccugggcgccaccgcccagcaguuccacagacacaagcagcugaucagauuccugaagagacuggacagaaaccuguggggccuggccggccugaacagcugccccgugaaggaggccaaccagagcacccuggagaacuuccuggagagacugaagaccaucaugagagagaaguacagcaagugcagcagcuga

SEQ ID NO: 4583 - RNA, 462 nt, Artificial Sequence
  derived and/or modified sequence opt5 from IL-4__Homo_sapiens__CCDS4158.1
augggccugaccagccagcuccugcccccucuuuucuuucugcucgccugcgcugggaacuucgugcacggacauaagugugacaucacacugcaagagauuaucaaaacgcuuaauucccugaccgaacagaagacacucugcaccgagcugacagucaccgauauuuuugccgcgucuaaaaacacaaccgaaaaggagacguucuguagagcugccaccguucugcggcaguuuuacagccaccaugaaaaagacacacgcugccucggcgccaccgcucagcaauuccacagacauaagcagcugauccgguuucuuaagcgccuggauagaaaucucugggggcuggccggacuuaacuccuguccggugaaagaggcuaaucagucuacacuggagaacuuccucgaacggcugaagaccauuaugcgcgagaaauauagcaagugcuccucuuga

SEQ ID NO: 4584 - RNA, 462 nt, Artificial Sequence
  derived and/or modified sequence opt6 from IL-4__Homo_sapiens__CCDS4158.1
augggacuaacaucacaacuacuaccaccacuauucuuccuacuagcaugcgcaggaaacuucguccacggacacaaaugcgacauaacacuacaagaaauaauaaaaacacuaaacucacuaacagaacaaaaaacacuaugcacagaacuaacaguaacagacauauucgcagcaucaaaaaacacaacagaaaaagaaacauucugcagagcagcaacaguauuacgacaauucuacucacaccacgaaaaagacacaagaugccuaggagcaacagcacaacaauuccaccgacacaaacaacuaauaagauuccuaaaaagacuagacagaaaccuauggggacuagcaggauuaaacucaugcccaguaaaagaagcaaaccaaagcacacuagaaaacuuccuagaaagacuaaaaacaauaaugagagaaaaauacucaaaaugcucaucauaa

SEQ ID NO: 4585 - protein, 134 aa, Artificial Sequence
  IL-5__Homo_sapiens__P05113
MRMLLHLSLLALGAAYVYAIPTEIPTSALVKETLALLSTHRTLLIANETLRIPVPVHKNHQLCTEEIFQGIGTLESQTVQGGTVERLFKNLSLIKKYIDGQKKKCGEERRRVNQFLDYLQEFLGVMNTEWIIES

SEQ ID NO: 4586 - RNA, 405 nt, Artificial Sequence
  IL-5__Homo_sapiens__AAA74469
augaggaugcuucugcauuugaguuugcuagcucuuggagcugccuacguguaugccauccccacagaaauucccacaagugcauuggugaaagagaccuuggcacugcuuucuacucaucgaacucugcugauagccaaugagacucugaggauuccuguuccuguacauaaaaaucaccaacugugcacugaagaaaucuuucagggaauaggcacacuggagagucaaacugugcaaggggguacuguggaaagacuauucaaaaacuuguccuuaauaaagaaauacauugacggccaaaaaaaaaaguguggagaagaaagacggagaguaaaccaauuccuagacuaccugcaagaguuucuugguguaaugaacaccgaguggauaauagaaaguuga

SEQ ID NO: 4587 - RNA, 405 nt, Artificial Sequence
  derived and/or modified sequence opt1 from IL-5__Homo_sapiens__AAA74469
augcgcaugcugcuccaccugagccugcucgcccugggcgccgcguacguguacgccauccccaccgagaucccgaccuccgcccuggucaaggagacgcucgcccugcugagcacccaccggacccuccugaucgccaacgagacccugcgcauccccgugcccgugcacaagaaccaccagcucugcacggaggagaucuuccaggggaucggcacccuggagucccagaccguccagggcgggaccguggagcggcuguucaagaaccucagccugaucaagaaguacaucgacgggcagaagaagaagugcggcgaggagcgccggcgcgugaaccaguuccuggacuaccuccaggaguuccugggcgucaugaacacggaguggaucaucgaguccuga

SEQ ID NO: 4588 - RNA, 405 nt, Artificial Sequence
  derived and/or modified sequence opt2 from IL-5__Homo_sapiens__AAA74469
augcgcaugcuccuccaccucucccuccucgcccucggcgccgccuacgucuacgccauccccaccgagauccccaccuccgcccucgucaaggagacccucgcccuccucuccacccaccgcacccuccucaucgccaacgagacccuccgcauccccguccccguccacaagaaccaccagcucugcaccgaggagaucuuccagggcaucggcacccucgagucccagaccguccagggcggcaccgucgagcgccucuucaagaaccucucccucaucaagaaguacaucgacggccagaagaagaagugcggcgaggagcgccgccgcgucaaccaguuccucgacuaccuccaggaguuccucggcgucaugaacaccgaguggaucaucgaguccuga

SEQ ID NO: 4589 - RNA, 405 nt, Artificial Sequence
  derived and/or modified sequence opt3 from IL-5__Homo_sapiens__AAA74469
augagaaugcugcuccaccuuagccuguuggccuuaggcgcugcauacguguaugccauccccaccgagauuccuacauccgcgcuggucaaggaaacucuagcucuccugucuacgcauaggacccuucugauagccaacgagacauugcggaucccaguuccggugcacaaaaaucaucagcucugcacugaagagauuuuccaagggaucggaacccuggaaucacagacaguacaggguggcaccguggagcgccuguuuaagaaccucaguuuaauuaaaaaguacaucgacgggcagaaaaagaaguguggagaggaacgacguagagucaaucaauuccuggauuaucuucaggaguuuuugggcgugaugaacacugaauggauaaucgagagcuga

SEQ ID NO: 4590 - RNA, 405 nt, Artificial Sequence
  derived and/or modified sequence opt4 from IL-5__Homo_sapiens__AAA74469
augagaaugcugcugcaccugagccugcuggcccugggcgccgccuacguguacgccauccccaccgagauccccaccagcgcccuggugaaggagacccuggcccugcugagcacccacagaacccugcugaucgccaacgagacccugagaauccccgugcccgugcacaagaaccaccagcugugcaccgaggagaucuuccagggcaucggcacccuggagagccagaccgugcagggcggcaccguggagagacuguucaagaaccugagccugaucaagaaguacaucgacggccagaagaagaagugcggcgaggagagaagaagagugaaccaguuccuggacuaccugcaggaguuccugggcgugaugaacaccgaguggaucaucgagagcuga

SEQ ID NO: 4591 - RNA, 405 nt, Artificial Sequence
  derived and/or modified sequence opt5 from IL-5__Homo_sapiens__AAA74469
augagaaugcugcuccaccugagccuucuggcccucggcgcugccuacguguaugcgauccccaccgagauuccuacauccgcucuggucaaggaaacgcuugcccugcucucuacccaucggacacugcugaucgccaacgagacccuccgcauuccgguucccgugcacaaaaaucaucagcugugcacagaagagaucuuccaagggauuggaacccuugaaagccagacagugcagggcgggaccgucgagagacuguuuaagaaccucucccugaucaaaaaguacaucgacggacagaaaaagaaguguggcgaggaacggcgcagagugaaucaauuccuugauuaucugcaggaguuucucgggguuaugaacacggaauggauuaucgagucuuga

SEQ ID NO: 4592 - RNA, 405 nt, Artificial Sequence
  derived and/or modified sequence opt6 from IL-5__Homo_sapiens__AAA74469
augagaaugcuacuacaccuaucacuacuagcacuaggagcagcauacguauacgcaauaccaacagaaauaccaacaucagcacuagucaaagaaacacuagcacuacuaucaacacacagaacacuauuaauagcaaacgaaacccuaagaauaccaguaccaguacacaaaaaccaccaacuaugcacagaagaaauauuccaaggaauaggaacacuagaaucacaaacaguacaaggaggaacaguagaaagacuauucaaaaaccuaucauuaauaaaaaaauacauagacggacaaaaaaaaaaaugcggagaagaaagacgaagaguaaaccaauuccuagacuacuuacaagaauuccuaggaguaaugaacacagaauggauaauagaaucauaa

SEQ ID NO: 4593 - protein, 212 aa, Artificial Sequence
  IL-6__Homo_sapiens__P05231
MNSFSTSAFGPVAFSLGLLLVLPAAFPAPVPPGEDSKDVAAPHRQPLTSSERIDKQIRYILDGISALRKETCNKSNMCESSKEALAENNLNLPKMAEKDGCFQSGFNEETCLVKIITGLLEFEVYLEYLQNRFESSEEQARAVQMSTKVLIQFLQKKAKNLDAITTPDPTTNASLLTKLQAQNQWLQDMTTHLILRSFKEFLQSSLRALRQM

SEQ ID NO: 4594 - RNA, 639 nt, Artificial Sequence
  IL-6__Homo_sapiens__AAA52728
augaacuccuucuccacaagcgccuucgguccaguugccuucucccuggggcugcuccugguguugccugcugccuucccugccccaguacccccaggagaagauuccaaagauguagccgccccacacagacagccacucaccucuucagaacgaauugacaaacaaauucgguacauccucgacggcaucucagcccugagaaaggagacauguaacaagaguaacaugugugaaagcagcaaagaggcacuggcagaaaacaaccugaaccuuccaaagauggcugaaaaagauggaugcuuccaaucuggauucaaugaggagacuugccuggugaaaaucaucacuggucuuuuggaguuugagguauaccuagaguaccuccagaacagauuugagaguagugaggaacaagccagagcuguccagaugaguacaaaaguccugauccaguuccugcagaaaaaggcaaagaaucuagaugcaauaaccaccccugacccaaccacaaaugccagccugcugacgaagcugcaggcacagaaccaguggcugcaggacaugacaacucaucucauucugcgcagcuuuaaggaguuccugcaguccagccugagggcucuucggcaaauguag

SEQ ID NO: 4595 - RNA, 639 nt, Artificial Sequence
  derived and/or modified sequence opt1 from IL-6__Homo_sapiens__AAA52728
augaacagcuucuccaccagcgccuucggccccguggccuucucccuggggcuccugcugguccucccggcggccuuccccgcccccgugcccccgggcgaggacagcaaggacguggccgcgccccaccgccagccccugaccuccagcgagcggaucgacaagcagauccgcuacauccuggacgggaucuccgcccuccggaaggagacgugcaacaagagcaacaugugcgaguccagcaaggaggcccuggccgagaacaaccugaaccuccccaagauggccgagaaggacggcugcuuccaguccggguucaacgaggagaccugccuggucaagaucaucaccggccugcucgaguucgagguguaccuggaguaccugcagaaccgcuucgagagcuccgaggagcaggcgcgggccgugcagaugagcaccaagguccucauccaguuccugcagaagaaggccaagaaccuggacgccaucacgaccccggaccccaccaccaacgccucccuccugacgaagcugcaggcgcagaaccaguggcuccaggacaugaccacccaccugauccugcgcagcuucaaggaguuccuccaguccagccugcgggcccugcgccagauguga

SEQ ID NO: 4596 - RNA, 639 nt, Artificial Sequence
  derived and/or modified sequence opt2 from IL-6__Homo_sapiens__AAA52728
augaacuccuucuccaccuccgccuucggccccgucgccuucucccucggccuccuccucguccuccccgccgccuuccccgcccccgucccccccggcgaggacuccaaggacgucgccgccccccaccgccagccccucaccuccuccgagcgcaucgacaagcagauccgcuacauccucgacggcaucuccgcccuccgcaaggagaccugcaacaaguccaacaugugcgaguccuccaaggaggcccucgccgagaacaaccucaaccuccccaagauggccgagaaggacggcugcuuccaguccggcuucaacgaggagaccugccucgucaagaucaucaccggccuccucgaguucgaggucuaccucgaguaccuccagaaccgcuucgaguccuccgaggagcaggcccgcgccguccagauguccaccaagguccucauccaguuccuccagaagaaggccaagaaccucgacgccaucaccacccccgaccccaccaccaacgccucccuccucaccaagcuccaggcccagaaccaguggcuccaggacaugaccacccaccucauccuccgcuccuucaaggaguuccuccaguccucccuccgcgcccuccgccagauguga

SEQ ID NO: 4597 - RNA, 639 nt, Artificial Sequence
  derived and/or modified sequence opt3 from IL-6__Homo_sapiens__AAA52728
augaacagcuucuccaccucugccuuuggccccguggcuuucucacuggggcuccuucuggucuugccugcagccuuuccagcgccgguucccccuggagaggacaguaaggauguggcugccccacacagacagcccuuaacaagcuccgaaaggaucgacaaacaaauucgguacauacuggaugguaucucugcacuacgcaaggagacuugcaauaaaucgaacaugugugaaucaagcaaggaggcccucgcugaaaauaaccugaaucuuccuaaaauggcagagaaggacggcugcuuccagaguggguuuaacgaggaaacgugucugguaaagauuaucaccggauugcucgaguucgaaguguaucuggaguaccugcagaaucgauuugaguccucugaagaacaggcccgugcuguccaaaugagcacaaaagugcucauucaguucuuacagaagaaagccaagaaccuggaugcgaucacuaccccagaccccacaaccaaugcaucccuuuugacuaaacugcaggcccaaaaccaguggcuacaggauaugacaacccaucucauacugagaucauuuaaggaguuccuucagaguagccugagggcuuugcggcaaauguga

SEQ ID NO: 4598 - RNA, 639 nt, Artificial Sequence
  derived and/or modified sequence opt4 from IL-6__Homo_sapiens__AAA52728
augaacagcuucagcaccagcgccuucggccccguggccuucagccugggccugcugcuggugcugcccgccgccuuccccgcccccgugccccccggcgaggacagcaaggacguggccgccccccacagacagccccugaccagcagcgagagaaucgacaagcagaucagauacauccuggacggcaucagcgcccugagaaaggagaccugcaacaagagcaacaugugcgagagcagcaaggaggcccuggccgagaacaaccugaaccugcccaagauggccgagaaggacggcugcuuccagagcggcuucaacgaggagaccugccuggugaagaucaucaccggccugcuggaguucgagguguaccuggaguaccugcagaacagauucgagagcagcgaggagcaggccagagccgugcagaugagcaccaaggugcugauccaguuccugcagaagaaggccaagaaccuggacgccaucaccacccccgaccccaccaccaacgccagccugcugaccaagcugcaggcccagaaccaguggcugcaggacaugaccacccaccugauccugagaagcuucaaggaguuccugcagagcagccugagagcccugagacagauguga

SEQ ID NO: 4599 - RNA, 639 nt, Artificial Sequence
  derived and/or modified sequence opt5 from IL-6__Homo_sapiens__AAA52728
augaacagcuucuccaccucugccuuuggccccguggcuuucagccuggggcuccugcuuguccugccugccgcguuuccggcucccguuccucccggagaggacuccaaggauguggccgccccucacagacagccccucacaucuagcgaacggaucgacaaacaaauucgcuacauccuggauggcauuuccgcucuuagaaaggagacgugcaauaaaucuaacaugugugaaagcuccaaggaggcccuggcugaaaauaaccucaaucugccuaaaauggccgagaaggacgggugcuuccagagcggauuuaacgaggaaaccugucuggugaagaucauuacaggccuccuggaguucgaagucuaucuugaguaccugcagaaucgguuugagucuuccgaagaacaggcgcgcgccgugcaaaugagcaccaaaguucucauccaguuccugcagaagaaagcuaagaaccuugaugccaucacaaccccggaccccacaaccaaugcuucucugcucacgaaacugcaggcccaaaaccaguggcugcaggauaugaccacacaucucauucugagauccuuuaaggaguuccuucagagcucucugcgggcgcuccgccaaauguga

SEQ ID NO: 4600 - RNA, 639 nt, Artificial Sequence
  derived and/or modified sequence opt6 from IL-6__Homo_sapiens__AAA52728
augaacuccuucucaacaucagcauucggaccaguagcauucucccucggacuauuacuaguauuacccgcagcauucccagcaccaguacccccaggagaagauucaaaagauguagcagcaccacaucgacaaccacuaacaucauccgaaagaauagacaaacaaauaagauacauccuagauggaaucuccgcucuaagaaaagaaaccugcaauaaauccaacaugugcgaaucaucaaaagaagcauuagcagaaaacaaccuaaaucuaccaaaaauggcagaaaaagacggaugcuuccaaucaggauucaacgaagaaacaugccuaguaaaaauaauaacaggauuauuagaauucgaaguauaccuagaauaccuacaaaacagauucgaaucuucagaagaacaagcaagagcaguacaaauguccaccaaaguacuaauacaauucuuacaaaaaaaagcaaaaaacuuagacgcaauaacaaccccagaccccacaacaaacgcaucacuacucacaaaauuacaagcccaaaaccaauggcuacaagacaugacaacacacuuaauacuaagaucauucaaagaauuccuacaauccucacuaagagcacuaagacaaauguaa

SEQ ID NO: 4601 - protein, 177 aa, Artificial Sequence [sequence omitted]

SEQ ID NO: 4602 - RNA, 534 nt, Artificial Sequence
  IL-7__Homo_sapiens__BAF84227
auguuccauguuucuuuuagguauaucuuuggacuuccuccccugauccuuguucuguugccaguagcaucaucugauugugauauugaagguaaagauagcaaacaauaugagaguguucuaauggucagcaucgaucaauuauuggacagcaugaaagaaauugguagcaauugccugaauaaugaauuuaacuuuuuuaaaagacauaucugugaugcuaauaaggaagguauguuuuuauuccgugcugcucgcaaguugaggcaauuucuuaaaaugaauagcacuggugauuuugaucuccacuuauuaaaaguuucagaaggcacaacaauacuguugaacugcacuggccagguuaaaggaagaaaaccagcugcccugggugaagcccaaccaacaaagaguuuggaagaaaauaaaucuuuaaaggaacagaaaaaacugaaugacuuguguuuccuaaagagacuauuacaagagauaaaaacuuguuggaauaaaauuuugaugggcacuaaagaacacuga

SEQ ID NO: 4603 - RNA, 534 nt, Artificial Sequence
  derived and/or modified sequence opt1 from IL-7__Homo_sapiens__BAF84227
auguuccacgugagcuuccgcuacaucuucggccugcccccgcucauccugguccugcuccccguggccuccagcgacugcgacaucgaggggaaggacuccaagcaguacgagagcgugcugauggucuccaucgaccagcugcucgacagcaugaaggagaucggcuccaacugccugaacaacgaguucaacuucuucaagcggcacaucugcgacgccaacaaggaggggauguuccuguuccgcgcggcccggaagcuccgccaguuccugaagaugaacagcaccggcgacuucgaccugcaccuccugaagguguccgaggggaccacgauccugcucaacugcaccggccaggugaagggccggaagcccgccgcccugggggaggcccagcccaccaagagccuggaggagaacaagucccucaaggagcagaagaagcugaacgaccugugcuuccucaagcgccugcugcaggagaucaagaccugcuggaacaagauccucaugggcacgaaggagcacuga

SEQ ID NO: 4604 - RNA, 534 nt, Artificial Sequence
  derived and/or modified sequence opt2 from IL-7__Homo_sapiens__BAF84227
auguuccacgucuccuuccgcuacaucuucggccuccccccccucauccucguccuccuccccgucgccuccuccgacugcgacaucgagggcaaggacuccaagcaguacgaguccguccucauggucuccaucgaccagcuccucgacuccaugaaggagaucggcuccaacugccucaacaacgaguucaacuucuucaagcgccacaucugcgacgccaacaaggagggcauguuccucuuccgcgccgcccgcaagcuccgccaguuccucaagaugaacuccaccggcgacuucgaccuccaccuccucaaggucuccgagggcaccaccauccuccucaacugcaccggccaggucaagggccgcaagcccgccgcccucggcgaggcccagcccaccaagucccucgaggagaacaagucccucaaggagcagaagaagcucaacgaccucugcuuccucaagcgccuccuccaggagaucaagaccugcuggaacaagauccucaugggcaccaaggagcacuga

SEQ ID NO: 4605 - RNA, 534 nt, Artificial Sequence
  derived and/or modified sequence opt3 from IL-7__Homo_sapiens__BAF84227
auguuccacgugagcuuuagauacaucuucggccugcccccucucauucuuguccuguugccaguugccuccucugacugcgauauagaggggaaggacucaaaacaguaugaaaguguguuaaugguaagcaucgaucaacugcuagacuccaugaaggagauuggaucuaacugucucaauaacgaauuuaauuucuuuaaaaggcauaucugcgaugcuaacaaggaggguauguuccuguuucgggcagcccgcaaacuucgacaguuccugaagaugaacucgaccggcgacuuugauuugcaccuccugaaggugucagaagggacaacuauucugcucaauuguacgggacaggucaaaggccguaagccggcggcuuuaggugaggcccagcccaccaaaagccuggaggaaaauaagagucuuaaagagcaaaagaaguugaacgaccugugcuuccuaaaaagacuccugcaggaaaucaagacauguuggaauaaaauacuuauggggacuaaggagcauuga

SEQ ID NO: 4606 - RNA, 534 nt, Artificial Sequence
  derived and/or modified sequence opt4 from IL-7__Homo_sapiens__BAF84227
auguuccacgugagcuucagauacaucuucggccugcccccccugauccuggugcugcugcccguggccagcagcgacugcgacaucgagggcaaggacagcaagcaguacgagagcgugcugauggugagcaucgaccagcugcuggacagcaugaaggagaucggcagcaacugccugaacaacgaguucaacuucuucaagagacacaucugcgacgccaacaaggagggcauguuccuguucagagccgccagaaagcugagacaguuccugaagaugaacagcaccggcgacuucgaccugcaccugcugaaggugagcgagggcaccaccauccugcugaacugcaccggccaggugaagggcagaaagcccgccgcccugggcgaggcccagcccaccaagagccuggaggagaacaagagccugaaggagcagaagaagcugaacgaccugugcuuccugaagagacugcugcaggagaucaagaccugcuggaacaagauccugaugggcaccaaggagcacuga

SEQ ID NO: 4607 - RNA, 534 nt, Artificial Sequence
  derived and/or modified sequence opt5 from IL-7__Homo_sapiens__BAF84227
auguuccacgugagcuuuagauacaucuucggccugcccccucucauucugguccuucugccgguugccuccucugacugcgauaucgaggggaaggacagcaaacaguaugaauccgugcucauggugucuauugaucaacugcuugacagcaugaaggagaucggauccaacugucugaauaacgaauuuaauuucuuuaaacggcauauuugcgaugcuaacaaggagggcauguuccucuuucgcgccgcgagaaaacugcggcaguuccugaagaugaacucuaccggggacuuugaucuccaucugcuuaaggucagcgaaggaacaacgauccugcucaauuguaccggccaggugaaagggcgcaagcccgcugcccugggagaggcccagccuacaaaaucccuugaggaaaauaagagccugaaagagcaaaagaagcucaacgaccugugcuuccugaaaagacuccugcaggaaaucaagaccuguuggaauaaaauucuuaugggcacaaaggagcacuga

SEQ ID NO: 4608 - RNA, 534 nt, Artificial Sequence
  derived and/or modified sequence opt6 from IL-7__Homo_sapiens__BAF84227
auguuccacguaucauuuagauacauauucggacuacccccacuaauacuaguacuacuaccaguagcaucaucagacugcgacauagaaggaaaagacuccaaacaauacgaaagcguacuaaugguaucaauagaucaacuacuagacucaaugaaagaaauaggaucaaacugccuaaacaacgaauucaacuucuucaaaagacacaucugcgacgcaaacaaagaaggaauguuccuauucagagcagcaagaaaacuacgacaauuccuaaaaaugaacucaacaggagacuucgaccuacaccuacuaaaaguaucagaaggaacaacaauacuauuaaacugcacaggacaaguaaaaggaagaaaaccagcagcacuaggagaagcacaaccaacaaaaucacuagaagaaaacaaaagccucaaagaacaaaaaaaacuaaacgaccuaugcuuccuaaaaagacuauuacaagaaauaaaaacaugcuggaacaaaauacuaaugggaacaaaagaacacuaa

SEQ ID NO: 4609 - protein, 177 aa, Artificial Sequence
  IL-7__Homo_sapiens__P13232
MFHVSFRYIFGLPPLILVLLPVASSDCDIEGKDGKQYESVLMVSIDQLLDSMKEIGSNCLNNEFNFFKRHICDANKEGMFLFRAARKLRQFLKMNSTGDFDLHLLKVSEGTTILLNCTGQVKGRKPAALGEAQPTKSLEENKSLKEQKKLNDLCFLKRLLQEIKTCWNKILMGTKEH

SEQ ID NO: 4610 - RNA, 534 nt, Artificial Sequence
  IL-7__Homo_sapiens__AAA59156
auguuccauguuucuuuuagguauaucuuuggacuuccuccccugauccuuguucuguugccaguagcaucaucugauugugauauugaagguaaagauggcaaacaauaugagaguguucuaauggucagcaucgaucaauuauuggacagcaugaaagaaauugguagcaauugccugaauaaugaauuuaacuuuuuuaaaagacauaucugugaugcuaauaaggaagguauguuuuuauuccgugcugcucgcaaguugaggcaauuucuuaaaaugaauagcacuggugauuuugaucuccacuuauuaaaaguuucagaaggcacaacaauacuguugaacugcacuggccagguuaaaggaagaaaaccagcugcccugggugaagcccaaccaacaaagaguuuggaagaaaauaaaucuuuaaaggaacagaaaaaacugaaugacuuguguuuccuaaagagacuauuacaagagauaaaaacuuguuggaauaaaauuuugaugggcacuaaagaacacuga

SEQ ID NO: 4611 - RNA, 534 nt, Artificial Sequence
  derived and/or modified sequence opt1 from IL-7__Homo_sapiens__AAA59156
auguuccacgugagcuuccgcuacaucuucggccugcccccgcucauccugguccugcuccccguggccuccagcgacugcgacaucgaggggaaggacggcaagcaguacgaguccgugcugauggucagcaucgaccagcugcucgacuccaugaaggagaucgggagcaacugccugaacaacgaguucaacuucuucaagcggcacaucugcgacgccaacaaggagggcauguuccuguuccgcgcggcccggaagcuccgccaguuccugaagaugaacuccaccggggacuucgaccugcaccuccugaaggugagcgagggcaccacgauccugcucaacugcaccggccaggugaaggggcggaagcccgccgcccugggcgaggcccagcccaccaagucccuggaggagaacaagagccucaaggagcagaagaagcugaacgaccugugcuuccucaagcgccugcugcaggagaucaagaccugcuggaacaagauccucauggggacgaaggagcacuga

SEQ ID NO: 4612 - RNA, 534 nt, Artificial Sequence
  derived and/or modified sequence opt2 from IL-7__Homo_sapiens__AAA59156
auguuccacgucuccuuccgcuacaucuucggccuccccccccucauccucguccuccuccccgucgccuccuccgacugcgacaucgagggcaaggacggcaagcaguacgaguccguccucauggucuccaucgaccagcuccucgacuccaugaaggagaucggcuccaacugccucaacaacgaguucaacuucuucaagcgccacaucugcgacgccaacaaggagggcauguuccucuuccgcgccgcccgcaagcuccgccaguuccucaagaugaacuccaccggcgacuucgaccuccaccuccucaaggucuccgagggcaccaccauccuccucaacugcaccggccaggucaagggccgcaagcccgccgcccucggcgaggcccagcccaccaagucccucgaggagaacaagucccucaaggagcagaagaagcucaacgaccucugcuuccucaagcgccuccuccaggagaucaagaccugcuggaacaagauccucaugggcaccaaggagcacuga

SEQ ID NO: 4613 - RNA, 534 nt, Artificial Sequence
  derived and/or modified sequence opt3 from IL-7__Homo_sapiens__AAA59156
auguuccacgugagcuuuagauacaucuucggccugcccccucucauucuuguccuguugccaguugccuccucugacugcgauauagaggggaaggacggaaaacaguaugaaucaguguuaaugguaaguaucgaucaacugcuagacagcaugaaggagauugguuccaacugucucaauaacgaauuuaauuucuuuaaaaggcauaucugcgaugcuaacaaggagggcauguuccuguuucgggcagcccgcaaacuucgacaguuccugaagaugaacucuaccggggacuuugauuugcaccuccugaaggugucggaaggaacaacuauucugcucaauuguacgggccaggucaaaggucguaagccggcggcuuuaggggaggcccagcccaccaaaucacuggaggaaaauaagagccuuaaagagcaaaagaaguugaacgaccugugcuuccuaaaaagacuccugcaggaaaucaagacauguuggaauaaaauacuuaugggaacuaaggagcauuga

SEQ ID NO: 4614 - RNA, 534 nt, Artificial Sequence
  derived and/or modified sequence opt4 from IL-7__Homo_sapiens__AAA59156
auguuccacgugagcuucagauacaucuucggccugcccccccugauccuggugcugcugcccguggccagcagcgacugcgacaucgagggcaaggacggcaagcaguacgagagcgugcugauggugagcaucgaccagcugcuggacagcaugaaggagaucggcagcaacugccugaacaacgaguucaacuucuucaagagacacaucugcgacgccaacaaggagggcauguuccuguucagagccgccagaaagcugagacaguuccugaagaugaacagcaccggcgacuucgaccugcaccugcugaaggugagcgagggcaccaccauccugcugaacugcaccggccaggugaagggcagaaagcccgccgcccugggcgaggcccagcccaccaagagccuggaggagaacaagagccugaaggagcagaagaagcugaacgaccugugcuuccugaagagacugcugcaggagaucaagaccugcuggaacaagauccugaugggcaccaaggagcacuga

SEQ ID NO: 4615 - RNA, 534 nt, Artificial Sequence
  derived and/or modified sequence opt5 from IL-7__Homo_sapiens__AAA59156
auguuccacgugagcuuuagauacaucuucggccugcccccucucauucugguccuucugccgguugccuccucugacugcgauaucgaggggaaggacggaaaacaguaugaaagcgugcucaugguguccauugaucaacugcuugacucuaugaaggagaucggcagcaacugucugaauaacgaauuuaauuucuuuaaacggcauauuugcgaugcuaacaaggaggggauguuccucuuucgcgccgcgagaaaacugcggcaguuccugaagaugaacuccaccggagacuuugaucuccaucugcuuaaggucucugaaggcacaacgauccugcucaauuguaccggacaggugaaagggcgcaagcccgcugcccugggcgaggcccagccuacaaaaagccuugaggaaaauaagucccugaaagagcaaaagaagcucaacgaccugugcuuccugaaaagacuccugcaggaaaucaagaccuguuggaauaaaauucuuaugggcacaaaggagcacuga

SEQ ID NO: 4616 - RNA, 534 nt, Artificial Sequence
  derived and/or modified sequence opt6 from IL-7__Homo_sapiens__AAA59156
auguuccacguaucauucagauacauauucggacuaccaccacuaauacuaguacuacuaccaguagcaucaucagacugcgacauagaaggaaaagacggcaaacaauacgaaucaguacuaauggucucaauagaucaauuacuagacucaaugaaagaaauaggaucaaacugccuaaacaacgaauucaacuucuucaaaagacacauaugcgacgcaaacaaagaaggaauguuccuauucagagcagcaagaaaacuaagacaauuccuaaaaaugaacucaacaggagacuucgaccuacacuuacuaaaaguaucagaaggaacaacaauacuacuaaacugcacaggacaaguaaaaggaagaaaaccagcagcacucggagaagcacaaccaacaaaaucauuagaagaaaacaaaucacuaaaagaacaaaaaaaacuaaacgauuuaugcuucuuaaaaagacuacuacaagaaauaaaaacaugcuggaacaaaauacuaaugggaacaaaagaacacuaa

SEQ ID NO: 4617 - protein, 144 aa, Artificial Sequence
  IL-9__Homo_sapiens__P15248
MLLAMVLTSALLLCSVAGQGCPTLAGILDINFLINKMQEDPASKCHCSANVTSCLCLGIPSDNCTRPCFSERLSQMTNTTMQTRYPLIFSRVKKSVEVLKNNKCPYFSCEQPCNQTTAGNALTFLKSLLEIFQKEKMRGMRGKI

SEQ ID NO: 4618 - RNA, 435 nt, Artificial Sequence
  IL-9__Homo_sapiens__AAA35887
augcuucuggccaugguccuuaccucugcccugcuccugugcuccguggcaggccagggguguccaaccuuggcggggauccuggacaucaacuuccucaucaacaagaugcaggaagauccagcuuccaagugccacugcagugcuaaugugaccaguugucucuguuugggcauucccucugacaacugcaccagaccaugcuucagugagagacugucucagaugaccaauaccaccaugcaaacaagauacccacugauuuucagucgggugaaaaaaucaguugaaguacuaaagaacaacaaguguccauauuuuuccugugaacagccaugcaaccaaaccacggcaggcaacgcgcugacauuucugaagagucuucuggaaauuuuccagaaagaaaagaugagagggaugagaggcaagauauga

SEQ ID NO: 4619 - RNA, 435 nt, Artificial Sequence
  derived and/or modified sequence opt1 from IL-9__Homo_sapiens__AAA35887
augcugcucgccauggugcugaccagcgcccugcuccugugcuccgucgcgggccaggggugccccacccuggccggcauccucgacaucaacuuccugaucaacaagaugcaggaggacccggccagcaagugccacugcuccgccaacgugacgagcugccugugccucgggauccccuccgacaacugcacccgccccugcuucagcgagcggcugucccagaugaccaacaccacgaugcagacccgcuacccccugaucuucagccgggugaagaaguccgucgaggugcucaagaacaacaagugcccguacuucagcugcgagcagcccugcaaccagaccaccgccggcaacgcgcugacguuccugaagucccuccuggagaucuuccagaaggagaagaugcgcgggaugcggggcaagaucuga

SEQ ID NO: 4620 - RNA, 435 nt, Artificial Sequence
  derived and/or modified sequence opt2 from IL-9__Homo_sapiens__AAA35887
augcuccucgccaugguccucaccuccgcccuccuccucugcuccgucgccggccagggcugccccacccucgccggcauccucgacaucaacuuccucaucaacaagaugcaggaggaccccgccuccaagugccacugcuccgccaacgucaccuccugccucugccucggcauccccuccgacaacugcacccgccccugcuucuccgagcgccucucccagaugaccaacaccaccaugcagacccgcuacccccucaucuucucccgcgucaagaaguccgucgagguccucaagaacaacaagugccccuacuucuccugcgagcagcccugcaaccagaccaccgccggcaacgcccucaccuuccucaagucccuccucgagaucuuccagaaggagaagaugcgcggcaugcgcggcaagaucuga

SEQ ID NO: 4621 - RNA, 435 nt, Artificial Sequence
  derived and/or modified sequence opt3 from IL-9__Homo_sapiens__AAA35887
augcugcucgccauggugcuuaccagcgcucuguuguuaugcuccgucgcaggccaggggugucccacacuggccggaauccuagacauuaacuuccucauaaauaagaugcaagaagauccugcgucuaaaugccacuguucagcuaacguuacgaguugccugugucuugguaucccaagcgacaauugcacuagaccguguuuuuccgaaaggcugucucagaugaccaacacaacuaugcagacccgguaccccuugauuuucucgcgcgugaagaaaucaguagaggugcucaagaauaacaaaugcccuuauuuuagcugugaacagccaugcaaucaaacaaccgccggcaacgcacugacuuuccugaagagucucuuagagaucuuucagaaggagaaaaugcgagggaugcguggaaagauuuga

SEQ ID NO: 4622 - RNA, 435 nt, Artificial Sequence
  derived and/or modified sequence opt4 from IL-9__Homo_sapiens__AAA35887
augcugcuggccauggugcugaccagcgcccugcugcugugcagcguggccggccagggcugccccacccuggccggcauccuggacaucaacuuccugaucaacaagaugcaggaggaccccgccagcaagugccacugcagcgccaacgugaccagcugccugugccugggcauccccagcgacaacugcaccagacccugcuucagcgagagacugagccagaugaccaacaccaccaugcagaccagauacccccugaucuucagcagagugaagaagagcguggaggugcugaagaacaacaagugccccuacuucagcugcgagcagcccugcaaccagaccaccgccggcaacgcccugaccuuccugaagagccugcuggagaucuuccagaaggagaagaugagaggcaugagaggcaagaucuga

SEQ ID NO: 4623 - RNA, 435 nt, Artificial Sequence
  derived and/or modified sequence opt5 from IL-9__Homo_sapiens__AAA35887
augcugcucgccauggugcugaccagcgcucugcugcucugcuccgucgccggccaggggugucccacacuggcgggaauccuugacauuaacuuccugaucaauaagaugcaagaagauccugcuucuaaaugccacuguagcgccaacguuacguccugccucugucugggcauuccgucugacaauugcaccagacccuguuuuagcgaacggcugucccagaugacaaacaccacaaugcagacccgcuacccucucaucuucucuagagugaagaaaagcguggagguccugaagaauaacaaaugccccuauuuuuccugugaacagccuugcaaucaaacaaccgccgggaacgcucuuacguuccuuaagagccuccuggagauuuuucagaaggagaaaaugcggggaaugcgcggcaagaucuga

SEQ ID NO: 4624 - RNA, 435 nt, Artificial Sequence
  derived and/or modified sequence opt6 from IL-9__Homo_sapiens__AAA35887
augcuacuagcaaugguacuaacaucagcacuacuacuaugcucaguagcaggacaaggaugcccaacauuagcaggaauauuagacauaaacuuccuaauaaacaaaaugcaagaagacccagcaucaaaaugccacugcucagcaaacguaacaucaugccuaugccuaggaauaccaucagacaacugcacaagaccaugcuucuccgaaagacuaucacaaaugacaaacacaacaaugcaaacacgauacccacuaauauucucaagaguaaaaaaaucaguagaaguacuaaaaaacaacaaaugcccauacuucucaugcgaacaaccaugcaaccaaacaacagcaggaaacgcacuaacauuccuaaaaucacuacuagaaaucuuccaaaaagaaaaaaugagaggaaugagaggaaaaauauaa

SEQ ID NO: 4625 - protein, 202 aa, Artificial Sequence
  LIF__Homo_sapiens__P15018
MKVLAAGVVPLLLVLHWKHGAGSPLPITPVNATCAIRHPCHNNLMNQIRSQLAQLNGSANALFILYYTAQGEPFPNNLDKLCGPNVTDFPPFHANGTEKAKLVELYRIVVYLGTSLGNITRDQKILNPSALSLHSKLNATADILRGLLSNVLCRLCSKYHVGHVDVTYGPDTSGKDVFQKKKLGCQLLGKYKQIIAVLAQAF

SEQ ID NO: 4626 - RNA, 609 nt, Artificial Sequence
  LIF__Homo_sapiens__AAA51699
augaaggucuuggcggcaggaguugugccccugcuguugguucugcacuggaaacauggggcggggagcccccuccccaucaccccugucaacgccaccugugccauacgccacccaugucacaacaaccucaugaaccagaucaggagccaacuggcacagcucaauggcagugccaaugcccucuuuauucucuauuacacagcccagggggagccguuccccaacaaccuggacaagcuauguggccccaacgugacggacuucccgcccuuccacgccaacggcacggagaaggccaagcugguggagcuguaccgcauagucguguaccuuggcaccucccugggcaacaucacccgggaccagaagauccucaaccccagugcccucagccuccacagcaagcucaacgccaccgccgacauccugcgaggccuccuuagcaacgugcugugccgccugugcagcaaguaccacgugggccauguggacgugaccuacggcccugacaccucggguaaggaugucuuccagaagaagaagcugggcugucaacuccuggggaaguauaagcagaucaucgccguguuggcccaggccuucuag

SEQ ID NO: 4627 - RNA, 609 nt, Artificial Sequence
  derived and/or modified sequence opt1 from LIF__Homo_sapiens__AAA51699
augaaggugcuggccgccggcgucgugccccuccugcuggugcuccacuggaagcacggggcgggcagcccgcugcccaucacccccgucaacgcgaccugcgccauccgccaccccugccacaacaaccugaugaaccagauccggucccagcucgcccagcugaacgggagcgccaacgcccuguucauccucuacuacacggcccagggcgagccguuccccaacaaccuggacaagcugugcgggcccaacgugaccgacuucccgcccuuccacgccaacggcaccgagaaggccaagcucguggagcuguaccgcaucgucguguaccugggcaccucccucgggaacaucacgcgggaccagaagauccugaaccccagcgcgcugucccuccacagcaagcugaacgccaccgccgacauccugcgcggccuccuguccaacgugcugugccggcucugcagcaaguaccacgucgggcacguggacgugaccuacggccccgacaccuccgggaaggacgucuuccagaagaagaagcugggcugccagcugcucggcaaguacaagcagaucaucgccgugcuggcccaggcguucuga

SEQ ID NO: 4628 - RNA, 609 nt, Artificial Sequence
  derived and/or modified sequence opt2 from LIF__Homo_sapiens__AAA51699
augaagguccucgccgccggcgucgucccccuccuccucguccuccacuggaagcacggcgccggcuccccccuccccaucacccccgucaacgccaccugcgccauccgccaccccugccacaacaaccucaugaaccagauccgcucccagcucgcccagcucaacggcuccgccaacgcccucuucauccucuacuacaccgcccagggcgagcccuuccccaacaaccucgacaagcucugcggccccaacgucaccgacuucccccccuuccacgccaacggcaccgagaaggccaagcucgucgagcucuaccgcaucgucgucuaccucggcaccucccucggcaacaucacccgcgaccagaagauccucaaccccuccgcccucucccuccacuccaagcucaacgccaccgccgacauccuccgcggccuccucuccaacguccucugccgccucugcuccaaguaccacgucggccacgucgacgucaccuacggccccgacaccuccggcaaggacgucuuccagaagaagaagcucggcugccagcuccucggcaaguacaagcagaucaucgccguccucgcccaggccuucuga

SEQ ID NO: 4629 - RNA, 609 nt, Artificial Sequence
  derived and/or modified sequence opt3 from LIF__Homo_sapiens__AAA51699
augaaggugcuggccgcuggcgucguuccccuccuucugguguugcacuggaaacauggggcaggaagcccuuuaccaaucaccccgguaaacgccacaugcgcgauuagacaccccugucauaauaaccugaugaaucagauaaggucccaacuagcucagcucaacgguucugccaaugcacuguucauccuuuacuauacugcccagggcgagccuuuuccaaacaaucuggacaaguugugcgggcccaacgugacggauuucccuccauuucacgcuaauggaaccgaaaaagcaaagcucgucgagcuguaccggauugugguuuaucugggcacaucacucgguaacaucacucgcgaccagaaaauuuuaaaucccagugcccugagccuucauuccaaguugaacgcuaccgccgauauccugcgagggcuacucucuaaugugcugugucgucuuugcucgaaguaccacgucggacacguggacguaacauauggcccugauaccucaggcaaagacguuuuccaaaagaaaaagcuggggugucaguugcucggaaaauacaagcagauaaucgcggugcuggcacaggccuuuuga

SEQ ID NO: 4630 - RNA, 609 nt, Artificial Sequence
  derived and/or modified sequence opt4 from LIF__Homo_sapiens__AAA51699
augaaggugcuggccgccggcguggugccccugcugcuggugcugcacuggaagcacggcgccggcagcccccugcccaucacccccgugaacgccaccugcgccaucagacaccccugccacaacaaccugaugaaccagaucagaagccagcuggcccagcugaacggcagcgccaacgcccuguucauccuguacuacaccgcccagggcgagcccuuccccaacaaccuggacaagcugugcggccccaacgugaccgacuucccccccuuccacgccaacggcaccgagaaggccaagcugguggagcuguacagaaucgugguguaccugggcaccagccugggcaacaucaccagagaccagaagauccugaaccccagcgcccugagccugcacagcaagcugaacgccaccgccgacauccugagaggccugcugagcaacgugcugugcagacugugcagcaaguaccacgugggccacguggacgugaccuacggccccgacaccagcggcaaggacguguuccagaagaagaagcugggcugccagcugcugggcaaguacaagcagaucaucgccgugcuggcccaggccuucuga

SEQ ID NO: 4631 - RNA, 609 nt, Artificial Sequence
  derived and/or modified sequence opt5 from LIF__Homo_sapiens__AAA51699
augaaggugcuggccgcuggcgucguuccccuccugcuugugcugcacuggaaacauggggccggaagcccucucccgaucacccccgugaacgcgacaugcgcuauuagacacccuugucauaauaaccugaugaaucagauccggucccaacuugcccagcugaacggcucugccaaugcucucuucauucuguacuauacggcccagggggagcccuuuccuaacaaucuggacaagcucugcggacccaacgucaccgauuucccuccguuucacgcuaauggcacagaaaaagccaagcugguggagcuuuaccgcaucguuguguaucuggggaccagccucggaaacauuacaagagaccagaaaauccugaaucccuccgcgcuuucucugcauagcaagcucaacgccaccgcugauauccugcggggccugcucuccaauguccugugucgccuuugcucuaaguaccacgugggccacguugacgugacauaugggccugauaccagcggaaaagacgucuuccaaaagaaaaagcugggcugucagcuccuggggaaauacaagcagauuaucgccgugcuugcucaggccuuuuga

SEQ ID NO: 4632 - RNA, 609 nt, Artificial Sequence
  derived and/or modified sequence opt6 from LIF__Homo_sapiens__AAA51699
augaaaguacuagcagccggagucguaccacuacuauuaguacuacacuggaaacacggagcaggaucaccucuaccaauaacaccaguaaacgcaacuugcgcaauaagacacccaugccacaacaaccuaaugaaccaaauaagaucacaacuagcacaacuaaacggaucagcaaacgcacuauucauauuauacuacacagcacaaggagaaccauucccaaacaaccuagacaaacuaugcggaccaaacguaacagacuucccaccauuucacgcaaacggaacagaaaaagcaaaauuaguagaacuauacagaauaguaguauaccuaggaacaucacuaggaaacauaacaagagaccaaaaaauauuaaacccaucagcacuaucacuacacucaaaacuaaacgcaacagcagacauauuaagaggacuacuauccaacguauuaugcagacuaugcucaaaauaccacguaggacauguagacguaacauacggaccagacacaucagguaaagacguauuccaaaaaaaaaaauuaggaugccaauuacuaggaaaauacaaacaaauaauagcaguacuagcacaagcauuuuaa

SEQ ID NO: 4633 - protein, 240 aa, Artificial Sequence
  LIGHT__Homo_sapiens__O43557
MEESVVRPSVFVVDGQTDIPFTRLGRSHRRQSCSVARVGLGLLLLLMGAGLAVQGWFLLQLHWRLGEMVTRLPDGPAGSWEQLIQERRSHEVNPAAHLTGANSSLTGSGGPLLWETQLGLAFLRGLSYHDGALVVTKAGYYYIYSKVQLGGVGCPLGLASTITHGLYKRTPRYPEELELLVSQQSPCGRATSSSRVWWDSSFLGGVVHLEAGEKVVVRVLDERLVRLRDGTRSYFGAFMV

SEQ ID NO: 4634 - RNA, 723 nt, Artificial Sequence
  LIGHT__Homo_sapiens__AAC25169
auggaggagagugucguacggcccucaguguuugugguggauggacagaccgacaucccauucacgaggcugggacgaagccaccggagacagucgugcaguguggcccgggugggucugggucucuugcuguugcugaugggggcugggcuggccguccaaggcugguuccuccugcagcugcacuggcgucuaggagagauggucacccgccugccugacggaccugcaggcuccugggagcagcugauacaagagcgaaggucucacgaggucaacccagcagcgcaucucacaggggccaacuccagcuugaccggcagcggggggccgcuguuaugggagacucagcugggccuggccuuccugaggggccucagcuaccacgauggggcccuuguggucaccaaagcuggcuacuacuacaucuacuccaaggugcagcugggcggugugggcugcccgcugggccuggccagcaccaucacccacggccucuacaagcgcacaccccgcuaccccgaggagcuggagcuguuggucagccagcagucacccugcggacgggccaccagcagcucccgggucuggugggacagcagcuuccuggguggugugguacaccuggaggcuggggagaagguggucguccgugugcuggaugaacgccugguucgacugcgugaugguacccggucuuacuucggggcuuucaugguguga

SEQ ID NO: 4635 - RNA, 723 nt, Artificial Sequence
  derived and/or modified sequence opt1 from LIGHT__Homo_sapiens__AAC25169
auggaggagagcgugguccgccccuccguguucguggucgacggccagaccgacaucccguucacccggcuggggcgcagccaccggcgccaguccugcagcguggcccgggugggccucgggcugcugcuccugcugaugggcgccgggcucgcgguccagggcugguuccugcugcagcuccacuggcgccugggcgagauggugacgcggcugcccgacgggcccgccggcuccugggagcagcucauccaggagcgccggagccacgaggugaaccccgccgcccaccugaccggggccaacuccagccugaccggcuccgggggcccgcuccugugggagacccagcugggccucgcguuccugcgcgggcugagcuaccacgacggcgcccucgucgugacgaaggccggguacuacuacaucuacuccaaggugcagcugggcggcgucgggugcccccugggccucgccagcaccaucacccacgggcuguacaagcggacgccccgcuaccccgaggagcuggagcuccuggugucccagcagagcccgugcggccgggcgaccuccagcucccgcguguggugggacagcuccuuccucgggggcgucgugcaccuggaggccggcgagaagguggucgugcgggugcuggacgagcgccugguccggcuccgcgacgggacccggagcuacuucggcgccuucaugguguga

SEQ ID NO: 4636 - RNA, 723 nt, Artificial Sequence
  derived and/or modified sequence opt2 from LIGHT__Homo_sapiens__AAC25169
auggaggaguccgucguccgccccuccgucuucgucgucgacggccagaccgacauccccuucacccgccucggccgcucccaccgccgccaguccugcuccgucgcccgcgucggccucggccuccuccuccuccucaugggcgccggccucgccguccagggcugguuccuccuccagcuccacuggcgccucggcgagauggucacccgccuccccgacggccccgccggcuccugggagcagcucauccaggagcgccgcucccacgaggucaaccccgccgcccaccucaccggcgccaacuccucccucaccggcuccggcggcccccuccucugggagacccagcucggccucgccuuccuccgcggccucuccuaccacgacggcgcccucgucgucaccaaggccggcuacuacuacaucuacuccaagguccagcucggcggcgucggcugcccccucggccucgccuccaccaucacccacggccucuacaagcgcaccccccgcuaccccgaggagcucgagcuccucgucucccagcagucccccugcggccgcgccaccuccuccucccgcgucuggugggacuccuccuuccucggcggcgucguccaccucgaggccggcgagaaggucgucguccgcguccucgacgagcgccucguccgccuccgcgacggcacccgcuccuacuucggcgccuucauggucuga

SEQ ID NO: 4637 - RNA, 723 nt, Artificial Sequence
  derived and/or modified sequence opt3 from LIGHT__Homo_sapiens__AAC25169
auggaggaaagcguggucagacccuccguuuucgugguagacggccagaccgauaucccuuuuacaaggcuggggcggucucaccgccgacaaucaugcaguguggcccgugucggacucggucuucuguuguuacugaugggcgcugggcuagcagugcagggaugguuccuccugcagcuucauuggagacugggcgagaugguuacuagguugccagacgguccggccgggagcugggaacagcucauucaagagcggcgcucccacgaagugaaccccgcggcucaucugacgggagccaauucuucgcugaccggcucaggcgggccucucuuaugggagacacagcugggacuugcauuuuugagaggucugagcuaccacgauggcgcccuagucgugacuaaggcuggguauuacuauauauacaguaaaguacagcucggaggcguugguuguccacuggggcuugcauccaccaucacacauggacuguauaagaggacuccccgguacccugaggaauuggagcuccuggugucucagcaaagcccaugcggccgcgccaccuccucaagucgagucuggugggacagcucuuucuuaggcgggguggugcaccuggaagcuggagagaaagucguugugagaguacucgaugagaggcuugugcggcugcgugacgguacacgcuccuauuuuggcgccuucauggucuga

SEQ ID NO: 4638 - RNA, 723 nt, Artificial Sequence
  derived and/or modified sequence opt4 from LIGHT__Homo_sapiens__AAC25169
auggaggagagcguggugagacccagcguguucgugguggacggccagaccgacauccccuucaccagacugggcagaagccacagaagacagagcugcagcguggccagagugggccugggccugcugcugcugcugaugggcgccggccuggccgugcagggcugguuccugcugcagcugcacuggagacugggcgagauggugaccagacugcccgacggccccgccggcagcugggagcagcugauccaggagagaagaagccacgaggugaaccccgccgcccaccugaccggcgccaacagcagccugaccggcagcggcggcccccugcugugggagacccagcugggccuggccuuccugagaggccugagcuaccacgacggcgcccugguggugaccaaggccggcuacuacuacaucuacagcaaggugcagcugggcggcgugggcugcccccugggccuggccagcaccaucacccacggccuguacaagagaacccccagauaccccgaggagcuggagcugcuggugagccagcagagccccugcggcagagccaccagcagcagcagaguguggugggacagcagcuuccugggcggcguggugcaccuggaggccggcgagaaggugguggugagagugcuggacgagagacuggugagacugagagacggcaccagaagcuacuucggcgccuucaugguguga

SEQ ID NO: 4639 - RNA, 723 nt, Artificial Sequence
  derived and/or modified sequence opt5 from LIGHT__Homo_sapiens__AAC25169
auggaggaaagcguggucagacccuccguuuucgugguggacggccagaccgauaucccuuuuacacggcuggggcgcucucacagacggcaaagcugcuccgucgcccgcgugggacucggccugcuucugcuccugaugggggcuggacuugccguucagggcugguuccugcuccagcugcauuggagacugggggagauggugacgcggcucccggacggacccgcgggcucuugggaacagcugauucaagagcgcagaagccacgaagucaacccugcugcccaucuuaccggcgccaauuccucucugacagggagcggaggcccccuccugugggagacccagcuugggcuggcuuuucuccggggacuguccuaccacgauggcgcccuggugguuacaaaggcuggguauuacuauaucuacagcaaagugcagcucggaggcgucggcuguccucuggggcuugccucuaccauuacacauggacuguauaagcgcacccccagauacccugaggaacucgagcugcuugugucccagcaaagcccgugcggccgggcgacgucuuccagccgcguguggugggacucuuccuuccucgggggagucguucaccuggaagccggcgagaaagugguggucagagugcuggaugagcggcugguucgccucagagacgggacccggagcuauuuuggagcuuucaugguguga

SEQ ID NO: 4640 - RNA, 723 nt, Artificial Sequence
  derived and/or modified sequence opt6 from LIGHT__Homo_sapiens__AAC25169
auggaagaaaguguaguaagaccaaguguuuuuguaguagauggacaaacagauauaccauuuacaagauuaggaagaucacaucgaagacaaaguuguaguguggcaagaguaggauuaggauuauuauuauuacuaaugggugcgggauuagcaguacaaggaugguuuuuauuacaauugcauuggagguuaggugaaauggugacuagauuaccggacggaccugcaggaaguugggaacaacuaauacaagaaagaagaucacacgaaguaaauccagcagcacaccuaacaggagcaaauaguucauuaacaggaaguggagguccauuguuaugggaaacacaauuagguuuagcauuuuuaagaggauuaaguuaucaugauggagcauuaguaguaacaaaagcaggauauuauuauauauauucaaaaguacaauuaggaggaguuggguguccauuaggauuagcgagcacgauaacacauggauuauacaaaaggacaccaagauauccugaagaauuagaauuacuaguaagucaacaaucaccauguggaagagcaacaaguucaaguagaguauggugggauaguucauuucuaggaggaguaguacauuuagaagcaggagaaaaaguaguuguaagaguauuagaugaaagguuaguaagacuaagagaugguacaagaucauauuuuggagcauuuaugguauaa

SEQ ID NO: 4641 - protein, 561 aa, Artificial Sequence [sequence omitted]

SEQ ID NO: 4642 - RNA, 1686 nt, Artificial Sequence
  LTalpha__Homo_sapiens__BAG62860
augcccgagauaguggauacaaaggaccuuacaauagaaaaaguagugaucaauggacaagaagucaaauaugcucuuggagaaagacaaaguuacaagggaucgccaauggaaaucucucuuccuaucgcuuugagcaaaaaucaagaaauuguuauagaaauuucuuuugagaccucuccaaaaucuucugcucuccaguggcucacuccugaacagacuucugggaaggaacacccauaucucuuuagucagugccaggccauccacugcagagcaauccuuccuugucaggacacuccuucugugaaauuaaccuauacugcagaggugucugucccuaaagaacugguggcacuuaugagugcuauucgugauggagaaacaccugacccagaagacccaagcaggaaaauauacaaauucauccaaaaaguuccaauacccugcuaccugauugcuuuaguuguuggagcuuuagaaagcaggcaaauuggcccaagaacuuugguguggucugagaaagagcagguggaaaagucugcuuaugaguuuucugagacugaaucuaugcuuaaaauagcagaagaucugggaggaccguauguauggggacaguaugaccuauugguccugccaccauccuucccuuaugguggcauggagaauccuugccuuacuuuuguaacuccuacucuacuggcaggcgacaagucacucuccaaugucauugcacaugaaauaucucauagcuggacagggaaucuagugaccaacaaaacuugggaucacuuuugguuaaaugagggacauacuguguacuuggaacgccacauuugcggacgauuguuuggugaaaaguucagacauuuuaaugcucugggaggauggggagaacuacagaauucgguaaagacauuuggggagacacauccuuucaccaaacuugugguugaucugacagauauagacccugauguagcuuauucuucaguucccuaugagaagggcuuugcuuuacuuuuuuaccuugaacaacugcuuggaggaccagagauuuuccuaggauucuuaaaagcuuauguugagaaguuuuccuauaagagcauaacuacugaugacuggaaggauuuccuguauuccuauuuuaaagauaagguugauguucucaaucaaguugauuggaaugccuggcucuacucuccuggacugccucccauaaagcccaauuaugauaugacucugacaaaugcuuguauugccuuaagucaaagauggauuacugccaaagaagaugauuuaaauucauucaaugccacagaccugaaggaucucucuucucaucaauugaaugaguuuuuagcacagacgcuccagagggcaccucuuccauuggggcacauaaagcgaaugcaagagguguacaacuucaaugccauuaacaauucugaaauacgauucagauggcugcggcucugcauucaauccaagugggaggacgcaauuccuuuggcgcuaaagauggcaacugaacaaggaagaaugaaguuuacccggcccuuauucaaggaucuugcugccuuugacaaaucccaugaucaagcuguccgaaccuaccaagagcacaaagcaagcaugcaucccgugacugcaaugcugguggggaaagacuuaaaaguggauuaa

SEQ ID NO: 4643 - RNA, 1686 nt, Artificial Sequence
  derived and/or modified sequence opt1 from LTalpha__Homo_sapiens__BAG62860
augcccgagaucguggacaccaaggaccugaccaucgagaaggucgugaucaacggccaggaggugaaguacgcccucggggagcgccagagcuacaagggcuccccgauggagaucagccugcccaucgcccuguccaagaaccaggagaucgucaucgagaucagcuucgagacgucccccaagagcuccgcgcuccaguggcugacccccgagcagaccagcgggaaggagcacccguaccuguucucccagugccaggccauccacugccgggccauccuccccugccaggacacccccagcgugaagcugacguacaccgccgagguguccguccccaaggagcugguggcccucaugagcgcgauccgcgacggcgagaccccggaccccgaggaccccucccggaagaucuacaaguucauccagaaggugcccaucccgugcuaccugaucgcccuggucgugggggcccucgagagccgccagaucggcccccggacccuggugugguccgagaaggagcaggucgagaaguccgccuacgaguucagcgagacggagagcaugcugaagaucgcggaggaccucggcgggcccuacguguggggccaguacgaccugcuggugcugcccccguccuuccccuacgggggcauggagaaccccugccugaccuucgucacccccacccugcucgccggggacaagagccugagcaacgugaucgcccacgagaucucccacagcuggacgggcaaccuggugaccaacaagaccugggaccacuucuggcucaacgagggccacaccgucuaccuggagcgccacaucugcgggcggcuguucggcgagaaguuccgccacuucaacgcccucgggggcuggggcgagcugcagaacuccgugaagacguucggggagacccacccguucaccaagcugguggucgaccucaccgacaucgaccccgacguggccuacagcuccgugcccuacgagaagggcuucgcgcugcuguucuaccucgagcagcugcucgggggccccgagaucuuccucggguuccugaaggccuacgucgagaaguucagcuacaaguccaucacgaccgacgacuggaaggacuuccuguacagcuacuucaaggacaagguggacguccucaaccagguggacuggaacgccuggcuguacuccccgggccugccgcccaucaagcccaacuacgacaugacccucaccaacgccugcaucgcccugagccagcgguggaucacggcgaaggaggacgaccugaacuccuucaacgccaccgaccucaaggaccugagcucccaccagcugaacgaguuccucgcccagacccugcagcgcgcgccccugccccugggccacaucaagcggaugcaggagguguacaacuucaacgccaucaacaacagcgagauccgcuuccgguggcuccgccugugcauccaguccaagugggaggacgccaucccccuggcccucaagauggccaccgagcaggggcggaugaaguucacgcgcccgcuguucaaggaccuggccgccuucgacaagagccacgaccaggcgguccggaccuaccaggagcacaaggccuccaugcaccccgugaccgccaugcucgugggcaaggaccugaaggucgacuga

SEQ ID NO: 4644 - RNA, 1686 nt, Artificial Sequence
  derived and/or modified sequence opt2 from LTalpha__Homo_sapiens__BAG62860
augcccgagaucgucgacaccaaggaccucaccaucgagaaggucgucaucaacggccaggaggucaaguacgcccucggcgagcgccaguccuacaagggcucccccauggagaucucccuccccaucgcccucuccaagaaccaggagaucgucaucgagaucuccuucgagaccucccccaaguccuccgcccuccaguggcucacccccgagcagaccuccggcaaggagcaccccuaccucuucucccagugccaggccauccacugccgcgccauccuccccugccaggacacccccuccgucaagcucaccuacaccgccgaggucuccguccccaaggagcucgucgcccucauguccgccauccgcgacggcgagacccccgaccccgaggaccccucccgcaagaucuacaaguucauccagaagguccccauccccugcuaccucaucgcccucgucgucggcgcccucgagucccgccagaucggcccccgcacccucgucugguccgagaaggagcaggucgagaaguccgccuacgaguucuccgagaccgaguccaugcucaagaucgccgaggaccucggcggccccuacgucuggggccaguacgaccuccucguccucccccccuccuuccccuacggcggcauggagaaccccugccucaccuucgucacccccacccuccucgccggcgacaagucccucuccaacgucaucgcccacgagaucucccacuccuggaccggcaaccucgucaccaacaagaccugggaccacuucuggcucaacgagggccacaccgucuaccucgagcgccacaucugcggccgccucuucggcgagaaguuccgccacuucaacgcccucggcggcuggggcgagcuccagaacuccgucaagaccuucggcgagacccaccccuucaccaagcucgucgucgaccucaccgacaucgaccccgacgucgccuacuccuccguccccuacgagaagggcuucgcccuccucuucuaccucgagcagcuccucggcggccccgagaucuuccucggcuuccucaaggccuacgucgagaaguucuccuacaaguccaucaccaccgacgacuggaaggacuuccucuacuccuacuucaaggacaaggucgacguccucaaccaggucgacuggaacgccuggcucuacucccccggccucccccccaucaagcccaacuacgacaugacccucaccaacgccugcaucgcccucucccagcgcuggaucaccgccaaggaggacgaccucaacuccuucaacgccaccgaccucaaggaccucuccucccaccagcucaacgaguuccucgcccagacccuccagcgcgccccccucccccucggccacaucaagcgcaugcaggaggucuacaacuucaacgccaucaacaacuccgagauccgcuuccgcuggcuccgccucugcauccaguccaagugggaggacgccaucccccucgcccucaagauggccaccgagcagggccgcaugaaguucacccgcccccucuucaaggaccucgccgccuucgacaagucccacgaccaggccguccgcaccuaccaggagcacaaggccuccaugcaccccgucaccgccaugcucgucggcaaggaccucaaggucgacuga

SEQ ID NO: 4645 - RNA, 1686 nt, Artificial Sequence
  derived and/or modified sequence opt3 from LTalpha__Homo_sapiens__BAG62860
augcccgagaucguggacaccaaggaucugacaauugaaaaagucguuauaaacggccaggaggugaaguacgcccucggggaaagacaaagcuauaaaggauccccuauggagaucucucuuccaauugcucugucaaagaaucaggaaaucguaauugagaucaguuucgagacuagcccgaaauccucugcauugcagugguuaacgcccgaacagaccucggguaaggagcacccuuaccuguuuucacaaugccaggccauacauuguagggcgauccuaccaugccaggacacacccagcgugaagcucacuuauaccgcugaagucagugugccuaaagagcugguugcccuuauguccgcaauucgggauggcgagacaccagaccccgaagauccuucucgcaagaucuacaaauucauucagaaggugccaaucccguguuaucugauagccuuggucgugggggcucucgagagccgacaaauuggaccccguacccugguaugguccgaaaaagagcagguugaaaagucagcauacgaguuuagugagacugaaagcaugcugaagaucgccgaggaccucggcgguccuuaugugugggggcaguacgauuuacugguccuuccacccucuuucccuuacggaggcauggaaaacccaugcuugacauuugugacccccacgcugcuagcuggcgacaaaucccucucaaaugugauugcccacgagaucagccauaguuggacugggaaccuggucaccaauaagacaugggaucacuucuggcuuaacgaaggacauacuguuuaucuggagagacacaucugugguagguuguuuggcgagaaauuccggcacuuuaaugcgcucgggggauggggcgaacugcagaacucugugaagaccuucggugagacacauccguuuaccaaauuaguaguggaccugacggauauugacccugaugucgcauacuccagcgugcccuaugaaaagggguucgcccuccuguuuuaccuugagcaauugcuaggaggcccagaaauauuccugggcuuccucaaggcuuauguugagaaauuuucguacaagucuaucacuacagacgacuggaaagauuuccuguauuccuacuuuaaggacaaaguggauguccuuaaucagguggacuggaacgccuggcuguacucaccuggguugcccccaauuaagcccaauuaugauaugacccucacuaacgcaugcaucgcucugagucagcgcuggauaacagccaaagaggacgauuuaaauagcuucaacgcgaccgaccugaaggaucuauccucucaccaacucaaugaauuucuggcccagacgcuucagagagcaccuuugccacugggacauauuaagaggaugcaggagguauacaacuucaacgcuaucaauaacagcgaaauccgguuucgcuggcuccgacuguguauucaaucaaaaugggaggacgccaucccgcuugcucugaagauggccaccgagcaggguagaaugaaauucacaaggcccuuguuuaaggaucucgcagccuucgacaaaagucacgaccaggcuguucggacuuaucaggaacacaaggcguccaugcauccugugaccgcaaugcuggucggcaaggauuuaaaaguggacuga

SEQ ID NO: 4646 - RNA, 1686 nt, Artificial Sequence
  derived and/or modified sequence opt4 from LTalpha__Homo_sapiens__BAG62860
augcccgagaucguggacaccaaggaccugaccaucgagaagguggugaucaacggccaggaggugaaguacgcccugggcgagagacagagcuacaagggcagccccauggagaucagccugcccaucgcccugagcaagaaccaggagaucgugaucgagaucagcuucgagaccagccccaagagcagcgcccugcaguggcugacccccgagcagaccagcggcaaggagcaccccuaccuguucagccagugccaggccauccacugcagagccauccugcccugccaggacacccccagcgugaagcugaccuacaccgccgaggugagcgugcccaaggagcugguggcccugaugagcgccaucagagacggcgagacccccgaccccgaggaccccagcagaaagaucuacaaguucauccagaaggugcccauccccugcuaccugaucgcccugguggugggcgcccuggagagcagacagaucggccccagaacccugguguggagcgagaaggagcagguggagaagagcgccuacgaguucagcgagaccgagagcaugcugaagaucgccgaggaccugggcggccccuacguguggggccaguacgaccugcuggugcugccccccagcuuccccuacggcggcauggagaaccccugccugaccuucgugacccccacccugcuggccggcgacaagagccugagcaacgugaucgcccacgagaucagccacagcuggaccggcaaccuggugaccaacaagaccugggaccacuucuggcugaacgagggccacaccguguaccuggagagacacaucugcggcagacuguucggcgagaaguucagacacuucaacgcccugggcggcuggggcgagcugcagaacagcgugaagaccuucggcgagacccaccccuucaccaagcuggugguggaccugaccgacaucgaccccgacguggccuacagcagcgugcccuacgagaagggcuucgcccugcuguucuaccuggagcagcugcugggcggccccgagaucuuccugggcuuccugaaggccuacguggagaaguucagcuacaagagcaucaccaccgacgacuggaaggacuuccuguacagcuacuucaaggacaagguggacgugcugaaccagguggacuggaacgccuggcuguacagccccggccugccccccaucaagcccaacuacgacaugacccugaccaacgccugcaucgcccugagccagagauggaucaccgccaaggaggacgaccugaacagcuucaacgccaccgaccugaaggaccugagcagccaccagcugaacgaguuccuggcccagacccugcagagagccccccugccccugggccacaucaagagaaugcaggagguguacaacuucaacgccaucaacaacagcgagaucagauucagauggcugagacugugcauccagagcaagugggaggacgccaucccccuggcccugaagauggccaccgagcagggcagaaugaaguucaccagaccccuguucaaggaccuggccgccuucgacaagagccacgaccaggccgugagaaccuaccaggagcacaaggccagcaugcaccccgugaccgccaugcuggugggcaaggaccugaagguggacuga

SEQ ID NO: 4647 - RNA, 1686 nt, Artificial Sequence
  derived and/or modified sequence opt5 from LTalpha__Homo_sapiens__BAG62860
augcccgagaucguggacaccaaggaucugacaauugaaaaagucguuaucaacggccaggaggugaaguacgcccucggggaaagacaaagcuauaaaggauccccuauggagauuucucugccgaucgcucuuagcaagaaucaggaaauugugaucgagaucuccuucgagacgucucccaaaagcuccgcccugcaguggcucaccccugaacagacaucuggcaaggagcaccccuaccuguuuagccaaugccaggcgauucauugucgggcuauccuuccuugccaggacacccccuccgucaagcugacauauaccgccgaagugagcguuccuaaagagcucguggcccugaugucugcuauucgcgauggggagacaccggaccccgaagauccuuccagaaagaucuacaaauucauucagaagguccccaucccuuguuaucugauugcccucgugguuggagcucuggagagccggcaaaucggcccccgcacccuuguguggucugaaaaagagcaggucgaaaaguccgccuacgaguuuagcgagacggaaucuaugcugaagaucgcggaggaccucgggggaccguauguguggggccaguacgaucugcuugugcugccucccuccuucccuuacggcgggauggaaaaccccugccucaccuuugucacacccacccugcuggccggagacaaaagccucuccaauguuauugcucacgagaucucucauagcuggacaggcaaccuggugaccaauaagacgugggaucacuucuggcuuaacgaagggcauacaguguaucuggagagacacauuuguggacggcucuuuggcgagaaauuccgccacuuuaaugcccuugggggauggggcgaacugcagaacuccgucaagaccuucggcgagacacauccuuuuaccaaacuggugguugaccucaccgauaucgacccggauguggcuuacagcucuguccccuaugaaaagggguucgcccugcuguuuuaccucgagcaacugcuuggaggcccugaaauuuuccugggguuccucaaagcguauguggagaaguuuuccuacaagagcaucacaacggacgacuggaaagauuuccuguauucuuacuuuaaggacaaaguugaugugcuuaaucaggucgacuggaacgccuggcuguacagccccggacucccucccaucaagccgaauuaugauaugacccugacaaacgcuugcauugcccugucccagagauggaucaccgcuaaagaggacgaucucaauucuuucaacgccacagaccugaaggaucuuagcucccaccaacugaaugaauuucucgcccagacccugcagcgggcuccucugccccuuggccauauuaagcgcaugcaggagguguacaacuucaacgcgaucaauaacagcgaaauuagauuucgguggcuccgccuguguauccaaucuaaaugggaggacgccaucccucuggcucucaagauggccacggagcaggggagaaugaaauucacacggccccuguuuaaggaucuugccgcuuucgacaaaucccacgaccaggccguccgcaccuaucaggaacacaaggcgagcaugcauccugugaccgcuaugcugguuggaaaggaucucaaaguggacuga

SEQ ID NO: 4648 - RNA, 1686 nt, Artificial Sequence
  derived and/or modified sequence opt6 from LTalpha__Homo_sapiens__BAG62860
augccagaaauaguagacacaaaagaccucacaauagaaaaaguugucauaaauggacaagaagucaaauaugcacucggagaaagacaaucauacaaaggaucaccaauggaaauaucauuaccaauagcauuaaguaaaaaccaagaaaucguaauagaaauaaguuucgaaacaucuccaaaaucauccgccuuacaauggcugaccccggaacaaacaucaggaaaagaacauccauaccuauuuucacaaugucaagcaauacacugcagagcuauacuaccaugccaagacacaccaucaguaaaacuaacauauaccgcagaagucucagucccaaaagaauuaguugcacuaauguccgcaauaagagacggugaaacaccugauccagaagacccaucucgaaaaauauacaaauucauacaaaaaguaccaaucccaugcuauuuaauagcacucguaguaggagcacucgaaagccgacagauaggcccacgaacacuaguauggucagaaaaagaacaaguagaaaaaucagcauacgaauuuucagaaacagaaucaaugcuaaaaauagcagaagaccucgggggaccauacguguggggacaauacgaccuucuaguacuaccaccaaguuucccauacggaggaauggaaaaucccugucucaccuuuguaacaccaaccuuauuagcaggagauaaaucacugagcaauguaauagcgcaugaaauaucacacucauggacaggaaaucucguaacaaauaaaacaugggaucauuuuuggcuaaacgaaggucacacaguuuaucuugaacgacauauuugcggacgucuauucggagaaaaauuuagacacuucaaugcauuaggaggauggggagaacuucaaaacucgguaaaaaccuuuggagaaacacacccauucaccaaacuaguagucgauuuaacagauauagauccagacguagcauauucaaguguaccauacgaaaaaggauucgcacuccuauucuaccucgagcaacuccucgguggcccugaaauauuucuaggauucuuaaaagcauauguagaaaaauuuagcuacaaaucgauaacaacagaugauuggaaagauuuccuuuauuccuacuucaaagacaaaguagacguauuaaaccaagucgauuggaacgcauggcuauacuccccagguuuaccaccuauaaaaccaaacuacgauaugacucucacaaacgcuugcauagcacucucacaaagauggaucacugcaaaagaagacgaccuaaauuccuucaacgcaacagacuuaaaagaccucagcucacaccaauuaaacgaauuccucgcacaaacgcuccaaagagcacccuuaccauugggucacauaaaacgaaugcaagaaguauacaacuucaacgcuauaaacaacuccgaaaucagauuccgauggcuaagauuauguauccaaucaaaaugggaagacgcaauaccacuagccuuaaaaauggcaacugaacaaggacgaaugaaauucacuagacccuuauucaaagacuuagcagcauucgacaaaucacaugaccaggcaguaagaacauaccaagaacacaaagcuucuaugcaccccguaacugcaauguuaguaggaaaagaucucaaagucgacuaa

SEQ ID NO: 4649 - protein, 205 aa, Artificial Sequence
  LTalpha__Homo_sapiens__P01374
MTPPERLFLPRVCGTTLHLLLLGLLLVLLPGAQGLPGVGLTPSAAQTARQHPKMHLAHSTLKPAAHLIGDPSKQNSLLWRANTDRAFLQDGFSLSNNSLLVPTSGIYFVYSQVVFSGKAYSPKATSSPLYLAHEVQLFSSQYPFHVPLLSSQKMVYPGLQEPWLHSMYHGAAFQLTQGDQLSTHTDGIPHLVLSPSTVFFGAFAL

SEQ ID NO: 4650 - RNA, 618 nt, Artificial Sequence
  LTalpha__Homo_sapiens__AAA61199
augacaccaccugaacgucucuuccucccaaggguguguggcaccacccuacaccuccuccuucuggggcugcugcugguucugcugccuggggcccaggggcucccugguguuggccucacaccuucagcugcccagacugcccgucagcaccccaagaugcaucuugcccacagcacccucaaaccugcugcucaccucauuggagaccccagcaagcagaacucacugcucuggagagcaaacacggaccgugccuuccuccaggaugguuucuccuugagcaacaauucucuccugguccccaccaguggcaucuacuucgucuacucccagguggucuucucugggaaagccuacucucccaaggccaccuccuccccacucuaccuggcccaugagguccagcucuucuccucccaguaccccuuccaugugccucuccucagcucccagaagaugguguauccagggcugcaggaacccuggcugcacucgauguaccacggggcugcguuccagcucacccagggagaccagcuauccacccacacagauggcaucccccaccuaguccucagcccuaguacugucuucuuuggagccuucgcucuguag

SEQ ID NO: 4651 - RNA, 618 nt, Artificial Sequence
  derived and/or modified sequence opt1 from LTalpha__Homo_sapiens__AAA61199
augacgcccccggagcgccuguuccucccccgggugugcggcaccacccugcaccuccuccugcuggggcuccugcugguccuccugcccggcgcccaggggcugcccggcguggggcucaccccgagcgccgcgcagaccgcccgccagcaccccaagaugcaccuggcccacuccacccugaagcccgccgcccaccucaucggcgaccccagcaagcagaacucccugcuguggcgggcgaacacggaccgcgccuuccuccaggacggcuucagccuguccaacaacagccugcucgugccgaccuccgggaucuacuucgucuacagccaggugguguucuccggcaaggccuacagccccaaggccaccuccagcccccuguaccuggcgcacgagguccagcuguucuccagccaguaccccuuccacgugccgcugcuguccagccagaagaugguguaccccgggcuccaggagcccuggcugcacuccauguaccacggcgccgccuuccagcugacccagggggaccagcucagcacgcacaccgacggcaucccccaccugguccuguccccgagcaccguguucuucggcgccuucgcccucuga

SEQ ID NO: 4652 - RNA, 618 nt, Artificial Sequence
  derived and/or modified sequence opt2 from LTalpha__Homo_sapiens__AAA61199
augaccccccccgagcgccucuuccucccccgcgucugcggcaccacccuccaccuccuccuccucggccuccuccucguccuccuccccggcgcccagggccuccccggcgucggccucacccccuccgccgcccagaccgcccgccagcaccccaagaugcaccucgcccacuccacccucaagcccgccgcccaccucaucggcgaccccuccaagcagaacucccuccucuggcgcgccaacaccgaccgcgccuuccuccaggacggcuucucccucuccaacaacucccuccucguccccaccuccggcaucuacuucgucuacucccaggucgucuucuccggcaaggccuacucccccaaggccaccuccuccccccucuaccucgcccacgagguccagcucuucuccucccaguaccccuuccacgucccccuccucuccucccagaagauggucuaccccggccuccaggagcccuggcuccacuccauguaccacggcgccgccuuccagcucacccagggcgaccagcucuccacccacaccgacggcaucccccaccucguccucucccccuccaccgucuucuucggcgccuucgcccucuga

SEQ ID NO: 4653 - RNA, 618 nt, Artificial Sequence
  derived and/or modified sequence opt3 from LTalpha__Homo_sapiens__AAA61199
augacacccccugagagacuguuccucccaagggugugcggcaccacucuucaccuguuguuacuggggcuacuccugguccuucugccgggagcccaggguuugcccggcguugggcucacgccuagcgcugcacaaaccgcccggcagcauccaaagaugcaccuggcgcauuccacacugaaacccgcugcccaccucaucggagacccuucuaagcagaacucauuacuguggcgcgcaaauacugaucgagccuuucuucaggacggcuucaguuugagcaacaauucccugcuagugccaaccucugguauuuacuuuguauauucgcaaguggucuucucagggaaggcuuacagccccaaagcaacaaguuccccucucuaucuggcccaugaagugcagcuguuuucuagccaguacccauuccacguuccgcuuuuguccucacagaaaaugguguaucccggacuccaagagccuuggcugcacaguauguaccauggcgcugccuuucaguuaacccagggcgaucagcugagcacucacacagacgggauaccacaucucguccuuucucccuccaccguguucuuuggagcguucgcacuguga

SEQ ID NO: 4654 - RNA, 618 nt, Artificial Sequence
  derived and/or modified sequence opt4 from LTalpha__Homo_sapiens__AAA61199
augaccccccccgagagacuguuccugcccagagugugcggcaccacccugcaccugcugcugcugggccugcugcuggugcugcugcccggcgcccagggccugcccggcgugggccugacccccagcgccgcccagaccgccagacagcaccccaagaugcaccuggcccacagcacccugaagcccgccgcccaccugaucggcgaccccagcaagcagaacagccugcuguggagagccaacaccgacagagccuuccugcaggacggcuucagccugagcaacaacagccugcuggugcccaccagcggcaucuacuucguguacagccaggugguguucagcggcaaggccuacagccccaaggccaccagcagcccccuguaccuggcccacgaggugcagcuguucagcagccaguaccccuuccacgugccccugcugagcagccagaagaugguguaccccggccugcaggagcccuggcugcacagcauguaccacggcgccgccuuccagcugacccagggcgaccagcugagcacccacaccgacggcaucccccaccuggugcugagccccagcaccguguucuucggcgccuucgcccuguga

SEQ ID NO: 4655 - RNA, 618 nt, Artificial Sequence
  derived and/or modified sequence opt5 from LTalpha__Homo_sapiens__AAA61199
augacacccccugagagacuguuccucccgcgggugugcggcaccacgcugcaccuucugcuccuggggcuucugcucguccugcugcccggagcccagggccucccugggguuggacugacccccagcgcugcccaaacagcgcgccagcauccuaagaugcaccuugcucauuccacccugaaacccgccgcccaccucaucggcgacccuucuaagcagaacagccugcuuuggagagcuaauacagaucgggccuuucugcaggacggguucucccucucuaacaauagccugcuggugccgaccuccggaauuuacuuuguguauucucaagucguguucagcggcaaggcuuacucccccaaagccacaagcucuccucucuaucuggcgcaugaaguucagcuguuuuccagccaguaccccuuccacgugccucuucucucuucccagaaaauggucuaucccggccugcaagagccguggcuucacagcauguaccauggggccgcuuuucagcugacccagggagaucagcucucuacgcacaccgacggcaucccucaucuggugcugucccccagcacaguuuucuuuggggccuucgcucucuga

SEQ ID NO: 4656 - RNA, 618 nt, Artificial Sequence
  derived and/or modified sequence opt6 from LTalpha__Homo_sapiens__AAA61199
augacaccaccagaaagacuauuccuaccacgcgucugcggaacaacauuacaccucuuacuacuaggacuacuauuaguauuacuaccaggagcacaaggccuaccaggaguaggacuaacaccaucagcugcacaaacagcacgccaacacccaaaaaugcacuuagcacacucaacuuuaaaaccagcagcacaucuaauaggagacccaucaaaacaaaacucacuauuauggagagcaaacacagacagagcauuccuacaagacggauucuccuuaucaaacaacucacuccuaguaccaacaucaggaauauacuucguauacucacaaguaguauuuucaggaaaagcauacucacccaaagcaacaucaucaccccuauaccuagcacacgaaguacaacuauucucaucucaauacccauuccacguacccuuacuaucuucacaaaaaaugguauacccaggccuacaagaaccaugguuacacucaauguaccacggagcagcauuccaacuaacacaaggcgaccaauuaucaacacacacagacggaauaccacaccuaguacuaucaccaucaacagucuucuucggagcauucgcacuauaa

SEQ ID NO: 4657 - protein, 611 aa, Artificial Sequence
  LTalpha__Homo_sapiens__P09960
MPEIVDTCSLASPASVCRTKHLHLRCSVDFTRRTLTGTAALTVQSQEDNLRSLVLDTKDLTIEKVVINGQEVKYALGERQSYKGSPMEISLPIALSKNQEIVIEISFETSPKSSALQWLTPEQTSGKEHPYLFSQCQAIHCRAILPCQDTPSVKLTYTAEVSVPKELVALMSAIRDGETPDPEDPSRKIYKFIQKVPIPCYLIALVVGALESRQIGPRTLVWSEKEQVEKSAYEFSETESMLKIAEDLGGPYVWGQYDLLVLPPSFPYGGMENPCLTFVTPTLLAGDKSLSNVIAHEISHSWTGNLVTNKTWDHFWLNEGHTVYLERHICGRLFGEKFRHFNALGGWGELQNSVKTFGETHPFTKLVVDLTDIDPDVAYSSVPYEKGFALLFYLEQLLGGPEIFLGFLKAYVEKFSYKSITTDDWKDFLYSYFKDKVDVLNQVDWNAWLYSPGLPPIKPNYDMTLTNACIALSQRWITAKEDDLNSFNATDLKDLSSHQLNEFLAQTLQRAPLPLGHIKRMQEVYNFNAINNSEIRFRWLRLCIQSKWEDAIPLALKMATEQGRMKFTRPLFKDLAAFDKSHDQAVRTYQEHKASMHPVTAMLVGKDLKVD

SEQ ID NO: 4658 - RNA, 1836 nt, Artificial Sequence
  LTalpha__Homo_sapiens__AAA36176
augcccgagauaguggauaccuguucguuggccucuccggcuuccgucugccggaccaagcaccugcaccugcgcugcagcgucgacuuuacucgccggacgcugaccgggacugcugcucucacgguccagucucaggaggacaaucugcgcagccugguuuuggauacaaaggaccuuacaauagaaaaaguagugaucaauggacaagaagucaaauaugcucuuggagaaagacaaaguuacaagggaucgccaauggaaaucucucuuccuaucgcuuugagcaaaaaucaagaaauuguuauagaaauuucuuuugagaccucuccaaaaucuucugcucuccaguggcucacuccugaacagacuucugggaaggaacacccauaucucuuuagucagugccaggccauccacugcagagcaauccuuccuugucaggacacuccuucugugaaauuaaccuauacugcagaggugucugucccuaaagaacugguggcacuuaugagugcuauucgugauggagaaacaccugacccagaagacccaagcaggaaaauauacaaauucauccaaaaaguuccaauacccugcuaccugauugcuuuaguuguuggagcuuuagaaagcaggcaaauuggcccaagaacuuugguguggucugagaaagagcagguggaaaagucugcuuaugaguuuucugagacugaaucuaugcuuaaaauagcagaagaucugggaggaccguauguauggggacaguaugaccuauugguccugccaccauccuucccuuaugguggcauggagaauccuugccuuacuuuuguaacuccuacucuacuggcaggcgacaagucacucuccaaugucauugcacaugaaauaucucauagcuggacagggaaucuagugaccaacaaaacuugggaucacuuuugguuaaaugagggacauacuguguacuuggaacgccacauuugcggacgauuguuuggugaaaaguucagacauuuuaaugcucugggaggauggggagaacuacagaauucgguaaagacauuuggggagacacauccuuucaccaaacuugugguugaucugacagauauagacccugauguagcuuauucuucaguucccuaugagaagggcuuugcuuuacuuuuuuaccuugaacaacugcuuggaggaccagagauuuuccuaggauucuuaaaagcuuauguugagaaguuuuccuauaagagcauaacuacugaugacuggaaggauuuccuguauuccuauuuuaaagauaagguugauguucucaaucaaguugauuggaaugccuggcucuacucuccuggacugccucccauaaagcccaauuaugauaugacucugacaaaugcuuguauugccuuaagucaaagauggauuacugccaaagaagaugauuuaaauucauucaaugccacagaccugaaggaucucucuucucaucaauugaaugaguuuuuagcacagacgcuccagagggcaccucuuccauuggggcacauaaagcgaaugcaagagguguacaacuucaaugccauuaacaauucugaaauacgauucagauggcugcggcucugcauucaauccaagugggaggacgcaauuccuuuggcgcuaaagauggcaacugaacaaggaagaaugaaguuuacccggcccuuauucaaggaucuugcugccuuugacaaaucccaugaucaagcuguccgaaccuaccaagagcacaaagcaagcaugcaucccgugacugcaaugcugguggggaaagacuuaaaaguggauuaa

SEQ ID NO: 4659 - RNA, 1836 nt, Artificial Sequence
  derived and/or modified sequence opt1 from LTalpha__Homo_sapiens__AAA36176
augcccgagaucguggacacgugcagccuggccuccccggccagcgucugccgcaccaagcaccuccaccuccggugcuccguggacuucacccgccggacccugaccggcaccgcggcccugacggugcagagccaggaggacaaccugcgcucccugguccucgacaccaaggaccugaccaucgagaagguggugaucaacgggcaggaggucaaguacgcccugggcgagcggcagagcuacaaggggucccccauggagaucagccuccccaucgcccuguccaagaaccaggagaucgugaucgagaucagcuucgagaccucccccaagagcuccgcccugcaguggcucacgccggagcagaccagcggcaaggagcaccccuaccuguucucccagugccaggcgauccacugccgcgccauccugcccugccaggacacccccagcgugaagcucaccuacacggccgaggucuccgugccgaaggagcugguggcccugaugagcgcgauccgggacggggagacccccgaccccgaggaccccucccgcaagaucuacaaguucauccagaaggucccgauccccugcuaccucaucgcccugguggugggcgcccuggagagccggcagaucggcccccgcacccucgucuggagcgagaaggagcaggucgagaaguccgccuacgaguucagcgagaccgaguccaugcugaagaucgccgaggaccucgggggccccuacgugugggggcaguacgaccugcuggugcugccgcccagcuuccccuacggcgggauggagaaccccugccucacguucgugaccccgacccugcuggcgggcgacaagucccucagcaacgugaucgcccacgagaucucccacagcuggaccggcaaccuggucacgaacaagaccugggaccacuucuggcugaacgaggggcacaccguguaccucgagcggcacaucugcggccgccuguucggggagaaguuccggcacuucaacgcccugggcggcuggggcgagcuccagaacuccgugaagaccuucggggagacgcaccccuucaccaagcuggucguggaccugaccgacaucgaccccgacgucgccuacagcuccgugcccuacgagaagggguucgcccuccuguucuaccuggagcagcuccugggcgggccggagaucuuccugggcuuccucaaggcguacguggagaaguucagcuacaaguccaucaccacggacgacuggaaggacuuccuguacagcuacuucaaggacaaggucgacgugcugaaccagguggacuggaacgccuggcucuacucccccggccugccgcccaucaagcccaacuacgacaugacccugaccaacgccugcaucgcccugagccagcgcuggaucaccgccaaggaggacgaccucaacuccuucaacgcgacggaccugaaggaccugagcucccaccagcucaacgaguuccuggcccagacccugcagcgggcgccccucccccuggggcacaucaagcgcaugcaggaggucuacaacuucaacgccaucaacaacagcgagauccgguuccgcuggcugcggcucugcauccagagcaagugggaggacgccaucccgcuggcccugaagauggccaccgagcagggccgcaugaaguucacccggccccucuucaaggaccuggccgccuucgacaagucccacgaccaggcggugcgcacguaccaggagcacaaggccagcaugcaccccgugaccgccaugcuggucgggaaggaccucaagguggacuga

SEQ ID NO: 4660 - RNA, 1836 nt, Artificial Sequence
  derived and/or modified sequence opt2 from LTalpha__Homo_sapiens__AAA36176
augcccgagaucgucgacaccugcucccucgccucccccgccuccgucugccgcaccaagcaccuccaccuccgcugcuccgucgacuucacccgccgcacccucaccggcaccgccgcccucaccguccagucccaggaggacaaccuccgcucccucguccucgacaccaaggaccucaccaucgagaaggucgucaucaacggccaggaggucaaguacgcccucggcgagcgccaguccuacaagggcucccccauggagaucucccuccccaucgcccucuccaagaaccaggagaucgucaucgagaucuccuucgagaccucccccaaguccuccgcccuccaguggcucacccccgagcagaccuccggcaaggagcaccccuaccucuucucccagugccaggccauccacugccgcgccauccuccccugccaggacacccccuccgucaagcucaccuacaccgccgaggucuccguccccaaggagcucgucgcccucauguccgccauccgcgacggcgagacccccgaccccgaggaccccucccgcaagaucuacaaguucauccagaagguccccauccccugcuaccucaucgcccucgucgucggcgcccucgagucccgccagaucggcccccgcacccucgucugguccgagaaggagcaggucgagaaguccgccuacgaguucuccgagaccgaguccaugcucaagaucgccgaggaccucggcggccccuacgucuggggccaguacgaccuccucguccucccccccuccuuccccuacggcggcauggagaaccccugccucaccuucgucacccccacccuccucgccggcgacaagucccucuccaacgucaucgcccacgagaucucccacuccuggaccggcaaccucgucaccaacaagaccugggaccacuucuggcucaacgagggccacaccgucuaccucgagcgccacaucugcggccgccucuucggcgagaaguuccgccacuucaacgcccucggcggcuggggcgagcuccagaacuccgucaagaccuucggcgagacccaccccuucaccaagcucgucgucgaccucaccgacaucgaccccgacgucgccuacuccuccguccccuacgagaagggcuucgcccuccucuucuaccucgagcagcuccucggcggccccgagaucuuccucggcuuccucaaggccuacgucgagaaguucuccuacaaguccaucaccaccgacgacuggaaggacuuccucuacuccuacuucaaggacaaggucgacguccucaaccaggucgacuggaacgccuggcucuacucccccggccucccccccaucaagcccaacuacgacaugacccucaccaacgccugcaucgcccucucccagcgcuggaucaccgccaaggaggacgaccucaacuccuucaacgccaccgaccucaaggaccucuccucccaccagcucaacgaguuccucgcccagacccuccagcgcgccccccucccccucggccacaucaagcgcaugcaggaggucuacaacuucaacgccaucaacaacuccgagauccgcuuccgcuggcuccgccucugcauccaguccaagugggaggacgccaucccccucgcccucaagauggccaccgagcagggccgcaugaaguucacccgcccccucuucaaggaccucgccgccuucgacaagucccacgaccaggccguccgcaccuaccaggagcacaaggccuccaugcaccccgucaccgccaugcucgucggcaaggaccucaaggucgacuga

SEQ ID NO: 4661 - RNA, 1836 nt, Artificial Sequence
  derived and/or modified sequence opt3 from LTalpha__Homo_sapiens__AAA36176
augcccgagaucguggauaccugcagccuggccuccccugcuucugucuguagaacaaagcaccuccaucuuaggugcucaguugacuucacucggcgcacgcugaccggcacagcagccuugacugugcagagucaagaagacaacuuacgaagccugguacuagauaccaaagaccucacaauugagaagguggucauaaaugggcaggaagugaaauacgcgcugggagagcgucaguccuauaaggguucuccaauggaaaucucgcuuccgauugcucugucaaagaaccaggagaucguuauugagaucagcuuugaaaccagucccaaguccucugccuugcaauggcucacuccugagcagacaagcggcaaggaacacccauaccuguucucccagugucaggcaauacauugcagagccauccugcccugucaagauaccccuucagugaaacucacguauacugcugaggucagugugccaaaggaguuaguagcacugaugagcgccauuagggacggggaaacccccgauccugaggacccaucucggaaaaucuacaaguuuauucagaaaguuccgauccccugcuaucuuauagcuuugguggucggagcccuggaaucccgccagauuggcccuagaacacuuguguggucagagaaggaacagguggagaaaagcgcguacgaguucagugaaacugagucuaugcucaaaaucgcagaagaucugggugggccauaugucuggggacaauacgaccuucugguuuugcccccuuccuuuccauacggcggcauggagaaucccugucucaccuucgugacaccgacccuguuagccggggauaagagccugucgaacguaauugcucacgaaaucucucauuccuggacgggaaaucucgugacuaacaaaacaugggaccacuuuuggcuuaaugagggucacaccgucuaucuggagaggcauaucugcggccgguuguucggggaaaaguuucgccacuucaacgcccuaggaggcuggggugagcugcaaaauucagugaaaacuuuuggggaaacacauccuuucaccaagcucguuguggaucugacggacauugaccccgaugucgcauacaguagcgugccauaugagaaaggauuugcucuacuguucuacuuggaacagcuccugggcggcccugagauauucuuaggguuucugaaggccuauguagagaaguucuccuacaaaucuaucaccacagacgauuggaaggacuuucuauauagcuacuucaaagauaagguugacgugcucaaccaggucgauuggaaugcguggcuguacucacccggacuuccacccauuaaaccuaacuaugacaugacuuugaccaaugccuguaucgcacugagucagcgauggauaacagcuaaggaagaugaccucaacuccuuuaaugccacugaucugaaggaccuuagcucucaccagcugaacgaguucuuggcucagacccuccaaagagccccacugccguuaggucacauuaaaaggaugcaggaaguguacaacuuuaaugcaaucaacaauucagagauccgguuccguuggcugcgccuaugcauucagaguaagugggaggacgccaucccccucgcucugaaaauggcgacagaacagggcagaaugaaguuuaccaggccucuuuucaaagauuuggcagccuuugacaagagccaugaucaagcuguccggacuuaucaggagcacaaggccuccaugcauccagugacggcaaugcugguugggaaagaccucaagguggauuga

SEQ ID NO: 4662 - RNA, 1836 nt, Artificial Sequence
  derived and/or modified sequence opt4 from LTalpha__Homo_sapiens__AAA36176
augcccgagaucguggacaccugcagccuggccagccccgccagcgugugcagaaccaagcaccugcaccugagaugcagcguggacuucaccagaagaacccugaccggcaccgccgcccugaccgugcagagccaggaggacaaccugagaagccuggugcuggacaccaaggaccugaccaucgagaagguggugaucaacggccaggaggugaaguacgcccugggcgagagacagagcuacaagggcagccccauggagaucagccugcccaucgcccugagcaagaaccaggagaucgugaucgagaucagcuucgagaccagccccaagagcagcgcccugcaguggcugacccccgagcagaccagcggcaaggagcaccccuaccuguucagccagugccaggccauccacugcagagccauccugcccugccaggacacccccagcgugaagcugaccuacaccgccgaggugagcgugcccaaggagcugguggcccugaugagcgccaucagagacggcgagacccccgaccccgaggaccccagcagaaagaucuacaaguucauccagaaggugcccauccccugcuaccugaucgcccugguggugggcgcccuggagagcagacagaucggccccagaacccugguguggagcgagaaggagcagguggagaagagcgccuacgaguucagcgagaccgagagcaugcugaagaucgccgaggaccugggcggccccuacguguggggccaguacgaccugcuggugcugccccccagcuuccccuacggcggcauggagaaccccugccugaccuucgugacccccacccugcuggccggcgacaagagccugagcaacgugaucgcccacgagaucagccacagcuggaccggcaaccuggugaccaacaagaccugggaccacuucuggcugaacgagggccacaccguguaccuggagagacacaucugcggcagacuguucggcgagaaguucagacacuucaacgcccugggcggcuggggcgagcugcagaacagcgugaagaccuucggcgagacccaccccuucaccaagcuggugguggaccugaccgacaucgaccccgacguggccuacagcagcgugcccuacgagaagggcuucgcccugcuguucuaccuggagcagcugcugggcggccccgagaucuuccugggcuuccugaaggccuacguggagaaguucagcuacaagagcaucaccaccgacgacuggaaggacuuccuguacagcuacuucaaggacaagguggacgugcugaaccagguggacuggaacgccuggcuguacagccccggccugccccccaucaagcccaacuacgacaugacccugaccaacgccugcaucgcccugagccagagauggaucaccgccaaggaggacgaccugaacagcuucaacgccaccgaccugaaggaccugagcagccaccagcugaacgaguuccuggcccagacccugcagagagccccccugccccugggccacaucaagagaaugcaggagguguacaacuucaacgccaucaacaacagcgagaucagauucagauggcugagacugugcauccagagcaagugggaggacgccaucccccuggcccugaagauggccaccgagcagggcagaaugaaguucaccagaccccuguucaaggaccuggccgccuucgacaagagccacgaccaggccgugagaaccuaccaggagcacaaggccagcaugcaccccgugaccgccaugcuggugggcaaggaccugaagguggacuga

SEQ ID NO: 4663 - RNA, 1836 nt, Artificial Sequence
  derived and/or modified sequence opt5 from LTalpha__Homo_sapiens__AAA36176
augcccgagaucguggauaccugcagccuggccuccccugcuucugucuguagaacaaagcaccuccaucugcggugcagcguugacuucacgcgcagaacccuuacaggcaccgccgcgcugacagugcagucccaagaagacaaccuccggucucuggugcuugauaccaaagaccugacaauugagaaggucgugaucaaugggcaggaaguuaaauacgcucucggagagcgccagagcuauaagggcuccccgauggaaauuucucugcccaucgcccugagcaaaaaccaggagauugugaucgagaucuccuuugaaaccagcccuaagucuuccgcccuccaauggcugacgcccgagcagaccagcgggaaggaacacccuuaccuuuucucucagugucaggcuauucauugcagagccauccugcccugucaagauacaccuuccgucaaacucaccuauacagcugaggugagcguuccgaaggagcugguggcccuuaugucugcgauucgggacggagaaacccccgauccugaggaccccucccgcaaaaucuacaaguuuauucagaaagucccuauccccugcuaucugauugcccucguggugggcgcucuggaaagcagacagaucgggccgcggacgcuggucugguccgagaaggaacagguugagaagucugccuacgaguucagcgaaacagaguccaugcucaaaaucgcugaagaucugggaggcccuuauguguggggccaauacgaccuucuggugcugcccccuagcuuucccuacgggggaauggagaaucccugucucaccuucgucacaccuacccuucuggccggcgauaagucucucuccaacgugauugcgcacgaaaucagccauucuuggaccgggaaucugguuacaaacaaaacgugggaccacuuuuggcugaaugagggacacaccguguaucucgagcgccauauuugcggcagacuguucggggaaaaguuucggcacuucaacgcccuuggaggcuggggcgagcugcagaauagcgucaaaacauuuggggaaacccauccguucacaaagcucgugguugaucugaccgacaucgaccccgauguggcuuacuccucugucccuuaugagaaaggauuugcccuucuguucuaccucgaacagcugcugggcgggcccgagauuuuccucggauuucugaaggcuuauguggagaaguucagcuacaaauccaucacgacagacgauuggaaggacuuucuuuauagcuacuucaaagauaaggucgacgugcugaaccaaguugauuggaaugccuggcucuacucuccuggccugcccccgaucaaaccuaacuaugacaugacccugaccaaugccuguauugcucuuucccagcgcuggaucacagcgaaggaagaugaccucaacagcuuuaaugccaccgaucugaaggaccugucuucccaccagcucaacgaguuccuggcucagacacuucaaagagcuccccugccucucgggcacauuaaacggaugcaggaaguguacaacuuuaaugccaucaacaauagcgagauucgcuucagauggcugcggcugugcauccaguccaagugggaggacgccaucccccuugcccucaaaauggcgacggaacagggaagaaugaaguuuacccgcccucuguucaaagaucuggcugccuuugacaagucucaugaucaagccguccggacauaucaggagcacaaggcuagcaugcaucccgugaccgccaugcucguuggcaaagaccugaagguggauuga

SEQ ID NO: 4664 - RNA, 1836 nt, Artificial Sequence
  derived and/or modified sequence opt6 from LTalpha__Homo_sapiens__AAA36176
augccagaaauaguagauacuuguucacuagcaagcccagcaucugucuguagaacuaaacaccuacaccucaggugcucuguagauuucacacgacgaacauuaacaggcacagcugcacuuacaguacaaucacaagaagauaacuuaagaagcuuaguacuagacacaaaagacuuaacuauagagaaaguuguaauaaauggucaagaaguaaaauaugcacuuggugaacgucaaucauacaaaggaucuccuauggaaauaucauuacccaucgcuuuaagcaaaaaccaagaaauugucauugaaaucuccuucgaaacaagcccaaaaucaucagcacuacaauggcuaaccccugagcaaacuucaggcaaagaacaccccuacuuauucucacaaugucaagcaauacacuguagggcaauauuaccaugucaagacacaccaucaguuaaacuaacuuauaccgcagaaguaucaguacccaaagaauuaguagccuuaaugucagcaauaagagauggagaaacucccgacccagaagaucccagccguaaaauuuauaaauucauucagaaaguaccuauaccuuguuaccuaauugcccuagucgucggagcccuagaaagcagacaaauaggaccaagaacacuaguauggagugagaaagaacaaguagaaaaauccgccuaugaauuuucagaaacagaaucaauguuaaaaauagcagaggaucucggaggaccauacguuuggggucaauacgaucuccuaguauuaccuccaucauuccccuacggaggaauggaaaaucccugucuaacauucguaaccccaacauuacuagcaggagauaaaucgcuauccaacguaauugcacaugaaauaucacauucauggacagguaaccuaguaacaaacaaaacaugggaucacuucugguuaaaugaaggacauacaguauaccuagaacgucauauaugcggcagacuuuucggagaaaaguuucgacacuuuaacgcacuagguggcuggggggaacuccaaaacucaguuaaaacauuuggagaaacacaucccuucacaaaacuaguaguagaucuaaccgauauugacccagacguugcuuauucaucaguuccauacgaaaaaggauucgcacuacuauuuuaccuagaacaacuuuuaggcggaccugaaauuuucuuaggcuuucuaaaagcauacguagaaaaauuuaguuauaaaucaaucacaacagaugacuggaaagauuucuuauauucguacuucaaggauaaaguagacguacuaaaucaaguagacuggaacgcauggcuauacucuccaggacucccuccaauuaaacccaacuacgauaugacauuaacaaacgcauguauagcacuaucacaaagauggauuacagcuaaagaagacgaccuuaauucauucaacgcaacagauuuaaaagaccuaucaucucaucaacucaacgaauuccuagcacaaaccuuacaaagagcaccacuaccacuaggacacauaaaaagaaugcaagaagucuauaacuuuaacgcaauaaauaacucagaaauuagauuuagauggcucagacucuguauacaaucaaaaugggaggaugcaauaccauuagcacuaaaaauggcaacagaacaagguagaaugaaauuuacaagaccucuuuuuaaagaccucgccgcauucgacaaaucacacgaccaagcaguaagaacuuaucaagaacacaaggccucaaugcauccaguaacagcaaugcuaguuggaaaagauuuaaaagucgauuaa

SEQ ID NO: 4665 - protein, 205 aa, Artificial Sequence
  LTalpha__Homo_sapiens__Q5ST95
MTPPERLFLPRVCGTTLHLLLLGLLLVLLPGAQGLPGVGLTPSAAQTARQHPKMHLAHSNLKPAAHLIGDPSKQNSLLWRANTDRAFLQDGFSLSNNSLLVPTSGIYFVYSQVVFSGKAYSPKATSSPLYLAHEVQLFSSQYPFHVPLLSSQKMVYPGLQEPWLHSMYHGAAFQLTQGDQLSTHTDGIPHLVLSPSTVFFGAFAL

SEQ ID NO: 4666 - RNA, 618 nt, Artificial Sequence
  LTalpha__Homo_sapiens__BAE78638
augacaccaccugaacgucucuuccucccaaggguguguggcaccacccuacaccuccuccuucuggggcugcugcugguucugcugccuggggcccaggggcucccugguguuggccucacaccuucagcugcccagacugcccgucagcaccccaagaugcaucuugcccacagcaaccucaaaccugcugcucaccucauuggagaccccagcaagcagaacucacugcucuggagagcaaacacggaccgugccuuccuccaggaugguuucuccuugagcaacaauucucuccugguccccaccaguggcaucuacuucgucuacucccagguggucuucucugggaaagccuacucucccaaggccaccuccuccccacucuaccuggcccaugagguccagcucuucuccucccaguaccccuuccaugugccucuccucagcucccagaagaugguguauccagggcugcaggaacccuggcugcacucgauguaccacggggcugcguuccagcucacccagggagaccagcuauccacccacacagauggcaucccccaccuaguccucagcccuaguacugucuucuuuggagccuucgcucuguag

SEQ ID NO: 4667 - RNA, 618 nt, Artificial Sequence
  derived and/or modified sequence opt1 from LTalpha__Homo_sapiens__BAE78638
augacgcccccggagcgccuguuccucccccgggugugcggcaccacccugcaccuccuccugcuggggcuccugcugguccuccugcccggcgcccaggggcugcccggcguggggcucaccccgagcgccgcgcagaccgcccgccagcaccccaagaugcaccuggcccacuccaaccugaagcccgccgcccaccucaucggcgaccccagcaagcagaacucccugcuguggcgggcgaacaccgaccgcgccuuccuccaggacggcuucagccuguccaacaacagccugcucgugccgacguccgggaucuacuucgucuacagccaggugguguucuccggcaaggccuacagccccaaggccaccuccagcccccuguaccuggcgcacgagguccagcuguucuccagccaguaccccuuccacgugccgcugcuguccagccagaagaugguguaccccgggcuccaggagcccuggcugcacuccauguaccacggcgccgccuuccagcugacccagggggaccagcucagcacccacacggacggcaucccccaccugguccuguccccgagcaccguguucuucggcgccuucgcccucuga

SEQ ID NO: 4668 - RNA, 618 nt, Artificial Sequence
  derived and/or modified sequence opt2 from LTalpha__Homo_sapiens__BAE78638
augaccccccccgagcgccucuuccucccccgcgucugcggcaccacccuccaccuccuccuccucggccuccuccucguccuccuccccggcgcccagggccuccccggcgucggccucacccccuccgccgcccagaccgcccgccagcaccccaagaugcaccucgcccacuccaaccucaagcccgccgcccaccucaucggcgaccccuccaagcagaacucccuccucuggcgcgccaacaccgaccgcgccuuccuccaggacggcuucucccucuccaacaacucccuccucguccccaccuccggcaucuacuucgucuacucccaggucgucuucuccggcaaggccuacucccccaaggccaccuccuccccccucuaccucgcccacgagguccagcucuucuccucccaguaccccuuccacgucccccuccucuccucccagaagauggucuaccccggccuccaggagcccuggcuccacuccauguaccacggcgccgccuuccagcucacccagggcgaccagcucuccacccacaccgacggcaucccccaccucguccucucccccuccaccgucuucuucggcgccuucgcccucuga

SEQ ID NO: 4669 - RNA, 618 nt, Artificial Sequence
  derived and/or modified sequence opt3 from LTalpha__Homo_sapiens__BAE78638
augacacccccugagagacuguuccucccaagggugugcggcaccacucuucaccuguuguuacuggggcuacuccugguccuucugccgggagcccaggguuugcccggcguugggcucacgccuagcgcugcacaaaccgcccggcagcauccaaagaugcaccuggcgcauuccaaccugaaacccgcugcccaccucaucggagacccuucuaagcagaacucauuacuguggcgcgcaaauacagaucgagccuuucuucaggacggcuucaguuugagcaauaacucccugcuagugccaacuucugguauuuacuuuguauauucgcaaguggucuucucagggaaggcuuacagccccaaagcaaccaguuccccucucuaucuggcccaugaagugcagcuguuuucuagccaguacccauuccacguuccgcuuuuguccucacagaaaaugguguaucccggacuccaagagccuuggcugcacaguauguaccauggcgcugccuuucaguuaacacagggcgaucagcugagcacccacacugacgggauaccacaucucguccuuucucccuccacaguguucuuuggagcguucgcacuguga

SEQ ID NO: 4670 - RNA, 618 nt, Artificial Sequence
  derived and/or modified sequence opt4 from LTalpha__Homo_sapiens__BAE78638
augaccccccccgagagacuguuccugcccagagugugcggcaccacccugcaccugcugcugcugggccugcugcuggugcugcugcccggcgcccagggccugcccggcgugggccugacccccagcgccgcccagaccgccagacagcaccccaagaugcaccuggcccacagcaaccugaagcccgccgcccaccugaucggcgaccccagcaagcagaacagccugcuguggagagccaacaccgacagagccuuccugcaggacggcuucagccugagcaacaacagccugcuggugcccaccagcggcaucuacuucguguacagccaggugguguucagcggcaaggccuacagccccaaggccaccagcagcccccuguaccuggcccacgaggugcagcuguucagcagccaguaccccuuccacgugccccugcugagcagccagaagaugguguaccccggccugcaggagcccuggcugcacagcauguaccacggcgccgccuuccagcugacccagggcgaccagcugagcacccacaccgacggcaucccccaccuggugcugagccccagcaccguguucuucggcgccuucgcccuguga

SEQ ID NO: 4671 - RNA, 618 nt, Artificial Sequence
  derived and/or modified sequence opt5 from LTalpha__Homo_sapiens__BAE78638
augacacccccugagagacuguuccucccgcgggugugcggcaccacgcugcaccuucugcuccuggggcuucugcucguccugcugcccggagcccagggccucccugggguuggacugacccccagcgcugcccaaacagcgcgccagcauccuaagaugcaccuugcucauuccaaccugaaacccgccgcccaccucaucggcgacccuucuaagcagaauagccugcuuuggagagcuaacaccgaucgggccuuucugcaggacggguucucccucucuaauaacagccugcuggugccgacauccggaauuuacuuuguguauucucaagucguguucagcggcaaggcuuacucccccaaagccaccagcucuccucucuaucuggcgcaugaaguucagcuguuuuccagccaguaccccuuccacgugccucuucucucuucccagaaaauggucuaucccggccugcaagagccguggcuucacagcauguaccauggggccgcuuuucagcugacacagggagaucagcucucuacccacacggacggcaucccucaucuggugcugucccccagcaccguuuucuuuggggccuucgcucucuga

SEQ ID NO: 4672 - RNA, 618 nt, Artificial Sequence
  derived and/or modified sequence opt6 from LTalpha__Homo_sapiens__BAE78638
augacaccaccagaaagacuauuccuaccaagaguaugcggaacaacauuacaccuacuacuacuaggauuacuacuaguauuauuacccggagcacaaggccuaccaggaguuggacuaacaccaucagcagcacaaacagcaagacaacacccaaaaaugcaccuagcacacucaaaucuaaaacccgcagcacaccuaaucggagaccccuccaaacaaaacucacuucuauggagagcaaauacagauagagcauuccuacaagacggcuucucauuaucaaacaacucacuacuaguaccaacaucuggaauauacuucguauauucccaaguaguauucucaggaaaagcauacucaccaaaagcaacaucauccccacuauacuuagcacacgaaguacaauuauuuucaucccaauacccauuucacgucccacuacuaucaucccaaaaaaugguauauccaggacuacaagaaccauggcuacacucaauguaccacggcgcagcauuucaauuaacacaaggcgaccaacuaucaacacacacagacggcauaccacaccuaguacuaucaccaucaacaguauucuucggcgcauucgcacuauaa

SEQ ID NO: 4673 - protein, 205 aa, Artificial Sequence; identical to SEQ ID NO: 4649
  LTalpha__Homo_sapiens__Q5STV3

SEQ ID NO: 4674 - RNA, 618 nt, Artificial Sequence; identical to SEQ ID NO: 4650
  LTalpha__Homo_sapiens__BAC54943

SEQ ID NO: 4675 - RNA, 618 nt, Artificial Sequence; identical to SEQ ID NO: 4651
  derived and/or modified sequence opt1 from LTalpha__Homo_sapiens__BAC54943

SEQ ID NO: 4676 - RNA, 618 nt, Artificial Sequence; identical to SEQ ID NO: 4652
  derived and/or modified sequence opt2 from LTalpha__Homo_sapiens__BAC54943

SEQ ID NO: 4677 - RNA, 618 nt, Artificial Sequence; identical to SEQ ID NO: 4653
  derived and/or modified sequence opt3 from LTalpha__Homo_sapiens__BAC54943

SEQ ID NO: 4678 - RNA, 618 nt, Artificial Sequence; identical to SEQ ID NO: 4654
  derived and/or modified sequence opt4 from LTalpha__Homo_sapiens__BAC54943

SEQ ID NO: 4679 - RNA, 618 nt, Artificial Sequence; identical to SEQ ID NO: 4655
  derived and/or modified sequence opt5 from LTalpha__Homo_sapiens__BAC54943

SEQ ID NO: 4680 - RNA, 618 nt, Artificial Sequence
  derived and/or modified sequence opt6 from LTalpha__Homo_sapiens__BAC54943
augacaccaccagaacgccuauuuuuaccaagaguaugcggaacaacacuacaucuacuacuacuaggacuacuacuaguauuacuaccaggagcacaaggauuaccaggaguaggacuaacaccaucagcagcacaaacagcaagacaacacccaaaaaugcaucuagcacacucuacacuaaaaccagcagcacaccucauaggagacccaucaaaacaaaacucacuauuauggagagcaaacacagacagagcauuccuacaagacggauuuucacuaucaaacaacucacuacuagucccaacaucaggaauauacuucguauacucacaaguaguauucucaggcaaagcauauucaccaaaagcaaccucaucaccacuauaccuagcacacgaaguccaacuauucucaucacaauacccauuccacguaccauuacuaucaucacaaaaaaugguauauccaggacuacaagaaccauggcuacacucaauguaccacggagccgcauuccaacuaacacaaggcgaccaacuaucaacacacacagauggaauaccacacuuaguauuaucacccucaaccgucuucuucggagcauucgcacuauaa

SEQ ID NO: 4681 - protein, 205 aa, Artificial Sequence
  LTalpha__Homo_sapiens__Q6FG55
MTPPERLFLPRVRGTTLHLLLLGLLLVLLPGAQGLPGVGLTPSAAQTARQHPKMHLAHSTLKPAAHLIGDPSKQNSLLWRANTDRAFLQDGFSLSNNSLLVPTSGIYFVYSQVVFSGKAYSPKATSSPLYLAHEVQLFSSQYPFHVPLLSSQKMVYPGLQEPWLHSMYHGAAFQLTQGDQLSTHTDGIPHLVLSPSTVFFGAFAL

SEQ ID NO: 4682 - RNA, 618 nt, Artificial Sequence
  LTalpha__Homo_sapiens__CAG47049
augacaccaccugaacgucucuuccucccaagggugcguggcaccacccuacaccuccuccuucuggggcugcugcugguucugcugccuggggcccaggggcucccugguguuggccucacaccuucagcugcccagacugcccgucagcaccccaagaugcaucuugcccacagcacccucaaaccugcugcucaccucauuggagaccccagcaagcagaacucacugcucuggagagcaaacacggaccgugccuuccuccaggaugguuucuccuugagcaacaauucucuccugguccccaccaguggcaucuacuucgucuacucccagguggucuucucugggaaagccuacucucccaaggccaccuccuccccacucuaccuggcccaugagguccagcucuucuccucccaguaccccuuccaugugccucuccucagcucccagaagaugguguauccagggcugcaggaacccuggcugcacucgauguaccacggggcugcguuccagcucacccagggagaccagcuauccacccacacagauggcaucccccaccuaguccucagcccuaguacugucuucuuuggagccuucgcucuguag

SEQ ID NO: 4683 - RNA, 618 nt, Artificial Sequence
  derived and/or modified sequence opt1 from LTalpha__Homo_sapiens__CAG47049
augacgcccccggagcgccuguuccucccccgggugcgcggcaccacccugcaccuccuccugcuggggcuccugcugguccuccugcccggcgcccaggggcugcccggcguggggcucaccccgagcgccgcgcagaccgcccggcagcaccccaagaugcaccuggcccacuccacccugaagcccgccgcccaccucaucggcgaccccagcaagcagaacucccugcuguggcgcgcgaacacggaccgggccuuccuccaggacggcuucagccuguccaacaacagccugcucgugccgaccuccgggaucuacuucgucuacagccaggugguguucuccggcaaggccuacagccccaaggccaccuccagcccccuguaccuggcgcacgagguccagcuguucuccagccaguaccccuuccacgugccgcugcuguccagccagaagaugguguaccccgggcuccaggagcccuggcugcacuccauguaccacggcgccgccuuccagcugacccagggggaccagcucagcacgcacaccgacggcaucccccaccugguccuguccccgagcaccguguucuucggcgccuucgcccucuga

SEQ ID NO: 4684 - RNA, 618 nt, Artificial Sequence
  derived and/or modified sequence opt2 from LTalpha__Homo_sapiens__CAG47049
augaccccccccgagcgccucuuccucccccgcguccgcggcaccacccuccaccuccuccuccucggccuccuccucguccuccuccccggcgcccagggccuccccggcgucggccucacccccuccgccgcccagaccgcccgccagcaccccaagaugcaccucgcccacuccacccucaagcccgccgcccaccucaucggcgaccccuccaagcagaacucccuccucuggcgcgccaacaccgaccgcgccuuccuccaggacggcuucucccucuccaacaacucccuccucguccccaccuccggcaucuacuucgucuacucccaggucgucuucuccggcaaggccuacucccccaaggccaccuccuccccccucuaccucgcccacgagguccagcucuucuccucccaguaccccuuccacgucccccuccucuccucccagaagauggucuaccccggccuccaggagcccuggcuccacuccauguaccacggcgccgccuuccagcucacccagggcgaccagcucuccacccacaccgacggcaucccccaccucguccucucccccuccaccgucuucuucggcgccuucgcccucuga

SEQ ID NO: 4685 - RNA, 618 nt, Artificial Sequence
  derived and/or modified sequence opt3 from LTalpha__Homo_sapiens__CAG47049
augacacccccugagagacuguuccucccaagggugcggggcaccacucuucaccuguuguuacuggggcuacuccugguccuucugccgggagcccaggguuugcccggcguugggcucacgccuagcgcugcacaaaccgcccgccagcauccaaagaugcaccuggcgcauuccacacugaaacccgcugcccaccucaucggagacccuucuaagcagaacucauuacuguggcgagcaaauacugaucgugccuuucuucaggacggcuucaguuugagcaacaauucccugcuagugccaaccucugguauuuacuuuguauauucgcaaguggucuucucagggaaggcuuacagccccaaagcaacaaguuccccucucuaucuggcccaugaagugcagcuguuuucuagccaguacccauuccacguuccgcuuuuguccucacagaaaaugguguaucccggacuccaagagccuuggcugcacaguauguaccauggcgcugccuuucaguuaacccagggcgaucagcugagcacucacacagacgggauaccacaucucguccuuucucccuccaccguguucuuuggagcguucgcacuguga

SEQ ID NO: 4686 - RNA, 618 nt, Artificial Sequence
  derived and/or modified sequence opt4 from LTalpha__Homo_sapiens__CAG47049
augaccccccccgagagacuguuccugcccagagugagaggcaccacccugcaccugcugcugcugggccugcugcuggugcugcugcccggcgcccagggccugcccggcgugggccugacccccagcgccgcccagaccgccagacagcaccccaagaugcaccuggcccacagcacccugaagcccgccgcccaccugaucggcgaccccagcaagcagaacagccugcuguggagagccaacaccgacagagccuuccugcaggacggcuucagccugagcaacaacagccugcuggugcccaccagcggcaucuacuucguguacagccaggugguguucagcggcaaggccuacagccccaaggccaccagcagcccccuguaccuggcccacgaggugcagcuguucagcagccaguaccccuuccacgugccccugcugagcagccagaagaugguguaccccggccugcaggagcccuggcugcacagcauguaccacggcgccgccuuccagcugacccagggcgaccagcugagcacccacaccgacggcaucccccaccuggugcugagccccagcaccguguucuucggcgccuucgcccuguga

SEQ ID NO: 4687 - RNA, 618 nt, Artificial Sequence
  derived and/or modified sequence opt5 from LTalpha__Homo_sapiens__CAG47049
augacacccccugagagacuguuccucccgcgggugcgcggcaccacgcugcaccuucugcuccuggggcuucugcucguccugcugcccggagcccagggccucccugggguuggacugacccccagcgcugcccaaacagcgagacagcauccuaagaugcaccuugcucauuccacccugaaacccgccgcccaccucaucggcgacccuucuaagcagaacagccugcuuuggcgggcuaauacagaucgcgccuuucugcaggacggguucucccucucuaacaauagccugcuggugccgaccuccggaauuuacuuuguguauucucaagucguguucagcggcaaggcuuacucccccaaagccacaagcucuccucucuaucuggcgcaugaaguucagcuguuuuccagccaguaccccuuccacgugccucuucucucuucccagaaaauggucuaucccggccugcaagagccguggcuucacagcauguaccauggggccgcuuuucagcugacccagggagaucagcucucuacgcacaccgacggcaucccucaucuggugcugucccccagcacaguuuucuuuggggccuucgcucucuga

SEQ ID NO: 4688 - RNA, 618 nt, Artificial Sequence
  derived and/or modified sequence opt6 from LTalpha__Homo_sapiens__CAG47049
augaccccaccagaaagacuauuucuaccaagaguaagaggaacaacacuacaucuacuacuacuaggacuacuacuaguauuacuaccaggagcacaaggucuaccaggaguaggauuaacaccuucagcagcccaaacagcaagacaacacccaaaaaugcaccuagcacacucaacacuaaaaccagcagcacacuuaauaggagacccaucaaaacaaaacucccuccuauggagagcaaacacagacagagcauuccuacaagauggauucucacucucaaauaacucauuacuagucccaacaucaggaauauacuucguauacucacaaguaguauucucaggaaaagcauacucaccaaaagcaacaucaucaccacuauaccuagcccacgaaguacaacuauuuucaucccaauacccauuucacguaccacuacuaucaucacaaaaaaugguauacccaggacuacaagaaccauggcuacacucaauguaccacggugcagcauuccaauuaacccaaggagaccaauuaucaacacauacagacggaaucccacaccuaguccuaucaccaucaacagucuucuucggagcauucgcauuauaa

SEQ ID NO: 4689 - protein, 244 aa, Artificial Sequence
  LTbeta__Homo_sapiens__Q06643
MGALGLEGRGGRLQGRGSLLLAVAGATSLVTLLLAVPITVLAVLALVPQDQGGLVTETADPGAQAQQGLGFQKLPEEEPETDLSPGLPAAHLIGAPLKGQGLGWETTKEQAFLTSGTQFSDAEGLALPQDGLYYLYCLVGYRGRAPPGGGDPQGRSVTLRSSLYRAGGAYGPGTPELLLEGAETVTPVLDPARRQGYGPLWYTSVGFGGLVQLRRGERVYVNISHPDMVDFARGKTFFGAVMVG

SEQ ID NO: 4690 - RNA, 735 nt, Artificial Sequence
  LTbeta__Homo_sapiens__AAA36191
augggggcacuggggcuggagggcaggggugggaggcuccaggggagggguucccuccugcuagcuguggcaggagccacuucucuggugaccuuguugcuggcggugccuaucacuguccuggcugugcuggccuuagugccccaggaucagggaggacugguaacggagacggccgaccccggggcacaggcccagcaaggacugggguuucagaagcugccagaggaggagccagaaacagaucucagccccgggcucccagcugcccaccucauaggcgcuccgcugaaggggcaggggcuaggcugggagacgacgaaggaacaggcguuucugacgagcgggacgcaguucucggacgccgaggggcuggcgcucccgcaggacggccucuauuaccucuacugucucgucggcuaccggggccgggcgcccccuggcggcggggacccccagggccgcucggucacgcugcgcagcucucuguaccgggcggggggcgccuacgggccgggcacucccgagcugcugcucgagggcgccgagacggugacuccagugcuggacccggccaggagacaaggguacgggccucucugguacacgagcgugggguucggcggccuggugcagcuccggaggggcgagaggguguacgucaacaucagucaccccgauaugguggacuucgcgagagggaagaccuucuuuggggccgugauggugggguga

SEQ ID NO: 4691 - RNA, 735 nt, Artificial Sequence
  derived and/or modified sequence opt1 from LTbeta__Homo_sapiens__AAA36191
augggcgcccuggggcucgagggccgcgggggccggcugcaggggcgcggcagccugcuccuggccguggcgggcgccaccucccuggucacccuccugcuggccgugcccaucacggugcucgccguccuggcccuggugccgcaggaccagggcgggcucgugaccgagaccgcggaccccggggcccaggcccagcagggccugggguuccagaagcugcccgaggaggagcccgagaccgaccucagcccgggccugcccgccgcgcaccugaucggcgcgccccucaaggggcagggccuggggugggagacgaccaaggagcaggccuuccugaccuccggcacccaguucagcgacgccgagggccucgcccugccccaggacgggcuguacuaccucuacugccuggucggcuaccgggggcgcgccccgcccggcgggggcgacccccagggccgguccgugacgcugcgcagcucccucuaccgggccgggggcgccuacgggcccggcaccccggagcugcugcucgagggggccgagaccgugacccccguccuggaccccgcccgccggcagggcuacggcccccugugguacacgagcgugggguucggcgggcucgugcagcugcgccggggcgagcgcgucuacgugaacaucucccacccggacaugguggacuucgcgcgggggaagaccuucuucggcgccgucauggugggcuga

SEQ ID NO: 4692 - RNA, 735 nt, Artificial Sequence
  derived and/or modified sequence opt2 from LTbeta__Homo_sapiens__AAA36191
augggcgcccucggccucgagggccgcggcggccgccuccagggccgcggcucccuccuccucgccgucgccggcgccaccucccucgucacccuccuccucgccguccccaucaccguccucgccguccucgcccucgucccccaggaccagggcggccucgucaccgagaccgccgaccccggcgcccaggcccagcagggccucggcuuccagaagcuccccgaggaggagcccgagaccgaccucucccccggccuccccgccgcccaccucaucggcgccccccucaagggccagggccucggcugggagaccaccaaggagcaggccuuccucaccuccggcacccaguucuccgacgccgagggccucgcccucccccaggacggccucuacuaccucuacugccucgucggcuaccgcggccgcgccccccccggcggcggcgacccccagggccgcuccgucacccuccgcuccucccucuaccgcgccggcggcgccuacggccccggcacccccgagcuccuccucgagggcgccgagaccgucacccccguccucgaccccgcccgccgccagggcuacggcccccucugguacaccuccgucggcuucggcggccucguccagcuccgccgcggcgagcgcgucuacgucaacaucucccaccccgacauggucgacuucgcccgcggcaagaccuucuucggcgccgucauggucggcuga

SEQ ID NO: 4693 - RNA, 735 nt, Artificial Sequence
  derived and/or modified sequence opt3 from LTbeta__Homo_sapiens__AAA36191
augggcgcccuggggcucgagggaagagguggcaggcuucaggggcggggaagccuguuguuagcuguggcaggcgccaccucccuggucacacuacuccuggcgguucccaucacugugcuugcuguacuggccuuggugccucaagaccagggugggcucgucacggaaaccgcagauccaggagcccaggcucagcaaggccugggcuuccagaagcugccggaggaggaacccgaaacagaccucucuccuggguuaccagcagcccaccugauuggagcuccccuuaaaggucagggcuuggggugggagacuaccaaggagcaggccuuucugacaucaggaacccaauucagugaugcggaaggccuagcacucccucaggacggucuguacuaucuuuacugccuggugggguaucgcggacgagccccacccggcggcggggauccucagggacguagcguuacuuugagauccucucucuacagggcugguggcgccuaugggccaggaacaccggagcuguuacuggaaggcgcagagaccgugacgcccguccucgacccugcucggcgccaggguuacgggccacuuugguauacuucggugggcuuuggaggccugguacaauugagaaggggagagcggguuuacgugaacauaucacaucccgauauggucgacuucgcccgcgggaaaaccuuuuucggugcggugauggugggcuga

SEQ ID NO: 4694 - RNA, 735 nt, Artificial Sequence
  derived and/or modified sequence opt4 from LTbeta__Homo_sapiens__AAA36191
augggcgcccugggccuggagggcagaggcggcagacugcagggcagaggcagccugcugcuggccguggccggcgccaccagccuggugacccugcugcuggccgugcccaucaccgugcuggccgugcuggcccuggugccccaggaccagggcggccuggugaccgagaccgccgaccccggcgcccaggcccagcagggccugggcuuccagaagcugcccgaggaggagcccgagaccgaccugagccccggccugcccgccgcccaccugaucggcgccccccugaagggccagggccugggcugggagaccaccaaggagcaggccuuccugaccagcggcacccaguucagcgacgccgagggccuggcccugccccaggacggccuguacuaccuguacugccuggugggcuacagaggcagagccccccccggcggcggcgacccccagggcagaagcgugacccugagaagcagccuguacagagccggcggcgccuacggccccggcacccccgagcugcugcuggagggcgccgagaccgugacccccgugcuggaccccgccagaagacagggcuacggcccccugugguacaccagcgugggcuucggcggccuggugcagcugagaagaggcgagagaguguacgugaacaucagccaccccgacaugguggacuucgccagaggcaagaccuucuucggcgccgugauggugggcuga

SEQ ID NO: 4695 - RNA, 735 nt, Artificial Sequence
  derived and/or modified sequence opt5 from LTbeta__Homo_sapiens__AAA36191
augggcgcccuggggcucgagggaagaggcgggcggcugcagggacgcggcagccuucugcucgcuguggccggggcgaccucccuggucacacuucugcucgcuguucccaucacggugcuggccgugcuggcccucgucccucaagaccagggaggccuggugaccgaaacagcugauccgggcgcccaggcucagcaagggcuuggauuccagaagcugcccgaggaggaaccugaaaccgaccucucucccggccugccugccgcgcaccuuauuggggcgccccugaaaggacagggccucgggugggagacaaccaaggagcaggcuuuucugacaagcggaacccaauucuccgaugccgaaggccuggcucucccucaggacggccuguacuaucuuuacugccugguuggguauagaggacgggccccgcccggcgggggagauccucagggccgcucugugacgcucagaagcucccuguaccgggccgggggagccuauggccccggcaccccugagcuucugcucgaaggggcugagacagucacccccgugcuggacccggcccgcagacagggauacggcccucugugguauacaucuguuggguuuggaggccucgugcaacugcggcgcggggagagagucuacgugaacaucagccaucccgauaugguggacuucgcucggggcaaaaccuuuuucggagccgucaugguuggcuga

SEQ ID NO: 4696 - RNA, 735 nt, Artificial Sequence
  derived and/or modified sequence opt6 from LTbeta__Homo_sapiens__AAA36191
augggagcauuaggauuagaagguagaggaggaagauuacaaggaagaggaagucugcuucuagcaguugcaggagcaacaaguuuaguaacacuacuauuagcaguaccaauuacaguauuagcaguauuagcacuaguaccacaagaucaaggaggauuaguaacagaaacagcagauccaggugcacaagcacaacagggucuaggauuucaaaaauuaccagaagaagaaccagaaacagauuuaaguccgggauuaccugcagcucauuuaauaggugcaccauuaaaaggacaaggauuaggaugggaaacaacaaaagaacaagcauuuuuaacaagugguacacaauuuagugaugcagaagguuuagcauuaccucaagacggauuauauuauuuauauugcuuaguuggauauagaggaagagcaccaccagguggaggagauccacaaggaagaaguguaacauuaagaucaucauuauauagagcaggaggagcauacggaccaggaacaccagaacuacuuuuagaaggagcagaaacaguaacaccaguauuagauccagcaagaagacaaggauauggaccauuaugguauacaaguguaggauuuggaggauuaguucaauuaagaagaggagaaagaguauauguaaauauaagccauccugauaugguagauuuugcaagaggaaaaacauuuuuuggagcaguaaugguaggauaa

SEQ ID NO: 4697 - protein, 244 aa, Artificial Sequence; identical to SEQ ID NO: 4689
  LTbeta__Homo_sapiens__Q5STB2

SEQ ID NO: 4698 - RNA, 735 nt, Artificial Sequence; identical to SEQ ID NO: 4690
  LTbeta__Homo_sapiens__BAC54938

SEQ ID NO: 4699 - RNA, 735 nt, Artificial Sequence; identical to SEQ ID NO: 4691
  derived and/or modified sequence opt1 from LTbeta__Homo_sapiens__BAC54938

SEQ ID NO: 4700 - RNA, 735 nt, Artificial Sequence; identical to SEQ ID NO: 4692
  derived and/or modified sequence opt2 from LTbeta__Homo_sapiens__BAC54938

SEQ ID NO: 4701 - RNA, 735 nt, Artificial Sequence; identical to SEQ ID NO: 4693
  derived and/or modified sequence opt3 from LTbeta__Homo_sapiens__BAC54938

SEQ ID NO: 4702 - RNA, 735 nt, Artificial Sequence; identical to SEQ ID NO: 4694
  derived and/or modified sequence opt4 from LTbeta__Homo_sapiens__BAC54938

SEQ ID NO: 4703 - RNA, 735 nt, Artificial Sequence; identical to SEQ ID NO: 4695
  derived and/or modified sequence opt5 from LTbeta__Homo_sapiens__BAC54938

SEQ ID NO: 4704 - RNA, 735 nt, Artificial Sequence
  derived and/or modified sequence opt6 from LTbeta__Homo_sapiens__BAC54938
augggugcacuaggauuagaaggaagaggagguagauuacaaggaagaggaaguuuacuauuagcaguagcaggggcaacaagucuaguaacuuuauuacuagcaguaccaauaacaguauuagcaguauuagcauugguaccacaagaucaagguggauuaguaacagaaacugcagauccaggagcacaagcacaacaaggauuaggauuucaaaaauuaccagaagaagaaccugaaacugauuuaaguccaggauuaccagcagcacauuuaauaggagcaccacuaaaaggacaaggauuaggaugggaaacaacaaaagaacaagcauuucuaacaaguggaacacaauucucagaugcagaaggauuagcauuaccacaagauggauuauacuauuuauacuguuuaguaggauauagaggaagagcaccgccuggaggaggagauccacaaggaagaucaguaacacuacgcaguagcuuauauagagcaggaggagcauacgguccaggaacaccagaauuauuguuagaaggagccgaaacaguaacaccaguuuuagauccagcaagaagacaaggauaugguccauuaugguauacaaguguagguuuugguggauuaguacaacuaagaagaggagaaagaguauauguaaauauaucacauccagauauggucgauuuugcaagaggaaaaacauuuuuuggagcaguaaugguaggauaa

SEQ ID NO: 4705 - protein, 554 aa, Artificial Sequence
  M-CSF__Homo_sapiens__P09603
MTAPGAAGRCPPTTWLGSLLLLVCLLASRSITEEVSEYCSHMIGSGHLQSLQRLIDSQMETSCQITFEFVDQEQLKDPVCYLKKAFLLVQDIMEDTMRFRDNTPNAIAIVQLQELSLRLKSCFTKDYEEHDKACVRTFYETPLQLLEKVKNVFNETKNLLDKDWNIFSKNCNNSFAECSSQDVVTKPDCNCLYPKAIPSSDPASVSPHQPLAPSMAPVAGLTWEDSEGTEGSSLLPGEQPLHTVDPGSAKQRPPRSTCQSFEPPETPVVKDSTIGGSPQPRPSVGAFNPGMEDILDSAMGTNWVPEEASGEASEIPVPQGTELSPSRPGGGSMQTEPARPSNFLSASSPLPASAKGQQPADVTGTALPRVGPVRPTGQDWNHTPQKTDHPSALLRDPPEPGSPRISSLRPQGLSNPSTLSAQPQLSRSHSSGSVLPLGELEGRRSTRDRRSPAEPEGGPASEGAARPLPRFNSVPLTDTGHERQSEGSFSPQLQESVFHLLVPSVILVLLAVGGLLFYRWRRRSHQEPQRADSPLEQPEGSPLTQDDRQVELPV

SEQ ID NO: 4706 - RNA, 1665 nt, Artificial Sequence
  M-CSF__Homo_sapiens__CCDS816.1
augaccgcgccgggcgccgccgggcgcugcccucccacgacauggcugggcucccugcuguuguuggucugucuccuggcgagcaggaguaucaccgaggaggugucggaguacuguagccacaugauugggaguggacaccugcagucucugcagcggcugauugacagucagauggagaccucgugccaaauuacauuugaguuuguagaccaggaacaguugaaagauccagugugcuaccuuaagaaggcauuucuccugguacaagacauaauggaggacaccaugcgcuucagagauaacacccccaaugccaucgccauugugcagcugcaggaacucucuuugaggcugaagagcugcuucaccaaggauuaugaagagcaugacaaggccugcguccgaacuuucuaugagacaccucuccaguugcuggagaaggucaagaaugucuuuaaugaaacaaagaaucuccuugacaaggacuggaauauuuucagcaagaacugcaacaacagcuuugcugaaugcuccagccaagauguggugaccaagccugauugcaacugccuguaccccaaagccaucccuagcagugacccggccucugucuccccucaucagccccucgcccccuccauggccccuguggcuggcuugaccugggaggacucugagggaacugagggcagcucccucuugccuggugagcagccccugcacacaguggauccaggcagugccaagcagcggccacccaggagcaccugccagagcuuugagccgccagagaccccaguugucaaggacagcaccaucgguggcucaccacagccucgccccucugucggggccuucaaccccgggauggaggauauucuugacucugcaaugggcacuaauugggucccagaagaagccucuggagaggccagugagauucccguaccccaagggacagagcuuucccccuccaggccaggagggggcagcaugcagacagagcccgccagacccagcaacuuccucucagcaucuucuccacucccugcaucagcaaagggccaacagccggcagauguaacugguaccgccuugcccagggugggccccgugaggcccacuggccaggacuggaaucacaccccccagaagacagaccauccaucugcccugcucagagaccccccggagccaggcucucccaggaucucaucacugcgcccccagggccucagcaaccccuccacccucucugcucagccacagcuuuccagaagccacuccucgggcagcgugcugccccuuggggagcuggagggcaggaggagcaccagggaucggaggagccccgcagagccagaaggaggaccagcaagugaaggggcagccaggccccugccccguuuuaacuccguuccuuugacugacacaggccaugagaggcaguccgagggauccuucagcccgcagcuccaggagucugucuuccaccugcuggugcccagugucauccuggucuugcuggccgucggaggccucuuguucuacagguggaggcggcggagccaucaagagccucagagagcggauucucccuuggagcaaccagagggcagcccccugacucaggaugacagacagguggaacugccaguguag

SEQ ID NO: 4707 - RNA, 1665 nt, Artificial Sequence
  derived and/or modified sequence opt1 from M-CSF__Homo_sapiens__CCDS816.1
augaccgcccccggcgccgcggggcgcugcccgcccaccacguggcugggcagccuccugcugcucgugugccugcuggccucccggagcaucaccgaggaggucuccgaguacugcagccacaugaucggguccggccaccuccagagccugcagcgccugaucgacucccagauggagaccagcugccagaucaccuucgaguucguggaccaggagcagcucaaggaccccgugugcuaccugaagaaggccuuccugcucguccaggacaucauggaggacacgaugcgguuccgcgacaacacccccaacgccaucgccaucgugcagcugcaggagcugucccuccggcugaaguccugcuucaccaaggacuacgaggagcacgacaaggcgugcgugcgcaccuucuacgagacgccgcugcagcuccuggagaaggucaagaacguguucaacgagaccaagaaccugcucgacaaggacuggaacaucuucuccaagaacugcaacaacagcuucgccgagugcuccagccaggacguggucaccaagcccgacugcaacugccuguaccccaaggccauccccuccagcgacccggccuccgugagcccccaccagccccuggcgcccuccauggccccgguggccgggcucaccugggaggacagcgagggcacggagggcagcucccugcugcccggggagcagccccuccacaccgucgaccccggcagcgccaagcagcggccgccccgcuccacgugccagagcuucgagccgcccgagacccccguggugaaggacuccaccaucgggggcagcccccagccccggcccuccgucggggccuucaacccgggcauggaggacauccuggacagcgcgaugggcaccaacugggugcccgaggaggccuccggggaggccagcgagauccccgugccccagggcaccgagcuguccccgagccgccccgggggcggcuccaugcagaccgagcccgcccggccgagcaacuuccucuccgccagcuccccgcugcccgcgagcgccaaggggcagcagcccgccgacgucacgggcaccgcccugccccgcguggggcccgugcggcccaccggccaggacuggaaccacacgccccagaagaccgaccacccguccgcccuccugcgcgacccgcccgagcccgggagcccccggaucagcucccugcgcccccagggccucagcaaccccuccacccugagcgcgcagccccagcugucccggagccacuccagcggcuccguccucccgcugggggagcuggagggccgccggagcacccgcgaccggcgcucccccgccgagcccgagggcgggcccgccagcgagggggccgcccgcccgcucccccgguucaacuccgugccccugaccgacacgggccacgagcgccagagcgagggcuccuucagcccccagcugcaggaguccguguuccaccuccuggucccgagcgugauccugguccuccuggcggucgggggccugcuguucuaccgguggcgccggcgcagccaccaggagccccagcgggccgacagcccccucgagcagccggaggggagcccccugacccaggacgaccgccagguggagcugcccguguga

SEQ ID NO: 4708 - RNA, 1665 nt, Artificial Sequence
  derived and/or modified sequence opt2 from M-CSF__Homo_sapiens__CCDS816.1
augaccgcccccggcgccgccggccgcugcccccccaccaccuggcucggcucccuccuccuccucgucugccuccucgccucccgcuccaucaccgaggaggucuccgaguacugcucccacaugaucggcuccggccaccuccagucccuccagcgccucaucgacucccagauggagaccuccugccagaucaccuucgaguucgucgaccaggagcagcucaaggaccccgucugcuaccucaagaaggccuuccuccucguccaggacaucauggaggacaccaugcgcuuccgcgacaacacccccaacgccaucgccaucguccagcuccaggagcucucccuccgccucaaguccugcuucaccaaggacuacgaggagcacgacaaggccugcguccgcaccuucuacgagaccccccuccagcuccucgagaaggucaagaacgucuucaacgagaccaagaaccuccucgacaaggacuggaacaucuucuccaagaacugcaacaacuccuucgccgagugcuccucccaggacgucgucaccaagcccgacugcaacugccucuaccccaaggccauccccuccuccgaccccgccuccgucuccccccaccagccccucgcccccuccauggcccccgucgccggccucaccugggaggacuccgagggcaccgagggcuccucccuccuccccggcgagcagccccuccacaccgucgaccccggcuccgccaagcagcgccccccccgcuccaccugccaguccuucgagccccccgagacccccgucgucaaggacuccaccaucggcggcuccccccagccccgccccuccgucggcgccuucaaccccggcauggaggacauccucgacuccgccaugggcaccaacuggguccccgaggaggccuccggcgaggccuccgagauccccgucccccagggcaccgagcucucccccucccgccccggcggcggcuccaugcagaccgagcccgcccgccccuccaacuuccucuccgccuccuccccccuccccgccuccgccaagggccagcagcccgccgacgucaccggcaccgcccucccccgcgucggccccguccgccccaccggccaggacuggaaccacaccccccagaagaccgaccaccccuccgcccuccuccgcgacccccccgagcccggcuccccccgcaucuccucccuccgcccccagggccucuccaaccccuccacccucuccgcccagccccagcucucccgcucccacuccuccggcuccguccucccccucggcgagcucgagggccgccgcuccacccgcgaccgccgcucccccgccgagcccgagggcggccccgccuccgagggcgccgcccgcccccucccccgcuucaacuccgucccccucaccgacaccggccacgagcgccaguccgagggcuccuucuccccccagcuccaggaguccgucuuccaccuccucguccccuccgucauccucguccuccucgccgucggcggccuccucuucuaccgcuggcgccgccgcucccaccaggagccccagcgcgccgacuccccccucgagcagcccgagggcuccccccucacccaggacgaccgccaggucgagcuccccgucuga

SEQ ID NO: 4709 - RNA, 1665 nt, Artificial Sequence
  derived and/or modified sequence opt3 from M-CSF__Homo_sapiens__CCDS816.1
augaccgcccccggcgcugcagggagaugcccuccaacaacuuggcugggaagccuccuucuguugguguguuuacuggccuccaggucuaucacggaggaagucucagaguacugcagucacaugauugguagcggccaucuacagucccuccaacggcugauagacucucagauggaaaccucgugucagaucacauucgaguuuguugaucaggaacaacuuaaggacccggugugcuaucugaaaaaggcguucuugcucguacaggauauuauggaggacacuaugcgcuuucgagauaacacccccaaugcuaucgccauugugcagcugcaggagcugucacuccguuuaaaaagcuguuucacaaaggacuacgaagaacacgauaaagcaugcgucagaaccuuuuaugaaacuccucugcaacuuuuggagaaggugaagaacguuuucaaugagaccaaaaaccugcuagacaaggauuggaauaucuuuaguaaaaacuguaauaacuccuucgccgaaugcucuagccaggacguggucacaaagccagauuguaauugccucuaccccaaagcuauaccuuccucagacccagcaagugugagcccccaucagccucuggccccaucuauggcuccgguagccgggcuuacgugggaggauuccgaaggaacugagggcucaagccuguugcccggugaacagccucuccacaccguugacccagggagugcgaagcaaaggcccccucggucuacaugucaguccuuugagccacccgagacuccgguggucaaggacagcaccaucggaggcucgccucagccccgcccaucugugggcgcauucaacccugggauggaagauauucuggacuccgccaugggaacaaauugggugcccgaggaggcuucaggugaggccagugaaaucccagucccccaaggcaccgaguuaagcccuuccagaccagggggaggcucuaugcagacggagccggcaaggcccagcaacuuucugucagcuaguuccccucucccagccagcgcgaaaggucagcagcccgccgauguuacugggacagcacuuccucgggugggaccaguacgccccaccggccaagacuggaaucauacuccgcagaagacagaucacccuucugcucuguugcgagacccacccgaaccuggcucacccagaauuaguagccuaaggccacaggggcuguccaacccuucuacccucucggcccagccccaacugagccggucccacucaaguggaucugugcuuccacugggugaguuggaaggccgucgcagcacgagagauaggcgguccccggcugagccugaagggggacccgccucagagggcgcagcccgaccacucccccgcuucaauagcgucccucugaccgacacaggucaugagagacagucugaaggguccuuuaguccacaguuacaggagagcguguuccaucugcuaguucccucugugauccucguccugcuugcugugggcggauugcuguucuauagguggcggcgcagaucccaccaagaaccucagagggcggauucaccgcucgagcagccagagggcaguccccugacucaggacgaucgucaaguagaacuuccuguuuga

SEQ ID NO: 4710 - RNA, 1665 nt, Artificial Sequence
  derived and/or modified sequence opt4 from M-CSF__Homo_sapiens__CCDS816.1
augaccgcccccggcgccgccggcagaugcccccccaccaccuggcugggcagccugcugcugcuggugugccugcuggccagcagaagcaucaccgaggaggugagcgaguacugcagccacaugaucggcagcggccaccugcagagccugcagagacugaucgacagccagauggagaccagcugccagaucaccuucgaguucguggaccaggagcagcugaaggaccccgugugcuaccugaagaaggccuuccugcuggugcaggacaucauggaggacaccaugagauucagagacaacacccccaacgccaucgccaucgugcagcugcaggagcugagccugagacugaagagcugcuucaccaaggacuacgaggagcacgacaaggccugcgugagaaccuucuacgagaccccccugcagcugcuggagaaggugaagaacguguucaacgagaccaagaaccugcuggacaaggacuggaacaucuucagcaagaacugcaacaacagcuucgccgagugcagcagccaggacguggugaccaagcccgacugcaacugccuguaccccaaggccauccccagcagcgaccccgccagcgugagcccccaccagccccuggcccccagcauggcccccguggccggccugaccugggaggacagcgagggcaccgagggcagcagccugcugcccggcgagcagccccugcacaccguggaccccggcagcgccaagcagagaccccccagaagcaccugccagagcuucgagccccccgagacccccguggugaaggacagcaccaucggcggcagcccccagcccagacccagcgugggcgccuucaaccccggcauggaggacauccuggacagcgccaugggcaccaacugggugcccgaggaggccagcggcgaggccagcgagauccccgugccccagggcaccgagcugagccccagcagacccggcggcggcagcaugcagaccgagcccgccagacccagcaacuuccugagcgccagcagcccccugcccgccagcgccaagggccagcagcccgccgacgugaccggcaccgcccugcccagagugggccccgugagacccaccggccaggacuggaaccacaccccccagaagaccgaccaccccagcgcccugcugagagacccccccgagcccggcagccccagaaucagcagccugagaccccagggccugagcaaccccagcacccugagcgcccagccccagcugagcagaagccacagcagcggcagcgugcugccccugggcgagcuggagggcagaagaagcaccagagacagaagaagccccgccgagcccgagggcggccccgccagcgagggcgccgccagaccccugcccagauucaacagcgugccccugaccgacaccggccacgagagacagagcgagggcagcuucagcccccagcugcaggagagcguguuccaccugcuggugcccagcgugauccuggugcugcuggccgugggcggccugcuguucuacagauggagaagaagaagccaccaggagccccagagagccgacagcccccuggagcagcccgagggcagcccccugacccaggacgacagacagguggagcugcccguguga

SEQ ID NO: 4711 - RNA, 1665 nt, Artificial Sequence
  derived and/or modified sequence opt5 from M-CSF__Homo_sapiens__CCDS816.1
augaccgcccccggcgcugccgggagaugcccuccgacaacguggcugggaagccuccugcuucuggugugucuccuggcgucccggucuaucaccgaggaagucagcgaguacugcucccacaugauuggcucugggcaucuucagagccugcaacgccucaucgacucccagauggaaacaucuugucagauuaccuucgaguuuguugaucaggaacaacugaaggaccccgugugcuaucugaaaaaggcuuuccuccuggugcaggauaucauggaggacacaaugagauuucgggauaacaccccuaaugccauugccaucguccagcuucaggagcugagccuccgccugaaauccuguuucacaaaggacuacgaggaacacgauaaggcuugcgugagaaccuuuuaugaaacgccccuucaacugcucgagaaaguuaagaacguguucaaugagaccaaaaaccugcuggacaaggauuggaauaucuuuagcaaaaacuguaauaacucuuucgccgaaugcuccagccaggacgucgugacaaagccugauuguaauugccucuaccccaaagcuauuccuucuuccgacccggccagcguuucuccccaucagccucuggcgcccuccauggccccuguggcuggacuuaccugggaggauagcgaaggcacagagggguccucucugcuccccggagaacagccgcugcacaccgucgacccuggcagcgccaagcaacggcccccucgcuccacgugucagagcuuugagccucccgagacacccguggugaaggacucuaccaucggcggguccccgcagcccagaccuagcgucggagcuuucaaccccggcauggaagauauucuugacucugccauggggacaaauuggguuccugaggaagcgagcggagaggccuccgaaauccccgugccgcaaggcaccgagcugucuccuagccggcccgggggaggcuccaugcagaccgagccugcucgccccagcaacuuucucucugccuccagcccucugcccgcuucugccaaaggccagcagccggccgaugugacagggacggcucugccuagagucggacccgugcggcccaccggccaagacuggaaucauacaccucagaagaccgaucacccguccgcgcuccugcgcgaucccccugaacccgggagcccuagaauuuccucucuucggccccagggacugagcaacccuuccacacucucugcccagccccaacugagccgcucccacagcucuggcuccguucuuccgcugggggagcucgaaggaagacggagcaccagagaccgccggucuccugcugagcccgaaggcggcccugccuccgagggggccgcuagaccccugccgcgcuucaauagcgugccucugacggacacaggacaugagcggcagucugaaggcagcuuuagcccccagcuccaggaguccgucuuccaucugcuugugccuucuguuauccuggugcuccuggccgucgggggacugcuuuucuauagauggcgccggagaucccaccaagaaccccagcgcgcggauagcccccucgagcagccugagggcuccccgcugacccaggacgaucggcaaguggaacugcccgucuga

SEQ ID NO: 4712 - RNA, 1665 nt, Artificial Sequence
  derived and/or modified sequence opt6 from M-CSF__Homo_sapiens__CCDS816.1
augacggcaccaggagcagccggcagaugcccuccaacuacauggcuaggaucauuauuauuacucguaugcuugcuagcuucaagaucaaucacugaagaaguauccgaauauuguucacauaugauuggauccggccaucuacaaagcuuacaaagacuuauagauucacaaauggaaacaaguugccaaauaacauuugaauuuguagaccaagaacaauuaaaagauccaguuuguuaucucaaaaaggcauuuuuauuaguacaagacauaauggaagacacaaugagauucagagauaacacaccaaacgcuauagcuauaguacaacuacaagaacuaucucuucgccuuaaaucauguuuuacaaaagauuacgaagaacaugauaaagcauguguaagaaccuuuuacgaaacaccacuacaacuauuagaaaaaguuaaaaacguauucaacgaaacaaaaaaucuuuuagauaaagacuggaacauuuuuucaaaaaacugcaauaauucauucgcagaauguucaucacaagacguaguaaccaaaccagacuguaacugccuauaccccaaagcuauaccaaguucugauccagccagcguuucaccucaccaaccacuagcaccuucaauggcaccugucgcaggccuaacaugggaagacucagagggaaccgaaggaaguucucuacuaccaggagaacaaccuuuacauaccguagacccuggcucagcaaaacaaagaccuccacgaucuacaugccaaucauuugagccaccagaaacaccuguaguaaaagauucuacaauaggcggaagcccacaaccacguccaucugucggugccuucaaucccggaauggaagacauuuuagauucagcaauggguacaaauuggguaccagaagaagcauccggagaagcauccgaaauaccaguuccacaaggaacagaacuuaguccaucuagaccaggaggaggauccaugcaaacugaacccgcaagaccaucaaacuuuuuaucagcaucauccccauuaccagcauccgcaaaaggccaacaaccagcagacgucacaggaacugcuuuaccacgaguaggaccaguaagaccuacaggucaagauuggaaucauaccccacaaaaaacagaucaucccucagcccuacuaagagacccaccagaaccagguucaccaagaauuucuagucuaagaccacaaggauuaucaaauccuucaacauuauccgcucaaccucaauuaucuagaucucauagcucaggaagcguucucccccuuggagaacucgaaggaagaagaucuacacgagaucgaagaucaccagcagaaccugaaggcggcccagcaucagaaggugcagcacguccacuaccaagauuuaacucuguaccacuaacugauacaggacaugaaagacaaucagaaggaaguuucucaccccaacuacaagaaucaguauuccauuuacuuguaccaaguguaauucuaguccuucuagcaguuggaggcuuacucuucuacagauggagacgacguucccaucaagaaccacaacgagcagauucaccacuagaacaaccugaaggaucaccacuaacccaagacgacagacaaguagaacugccaguauaa

SEQ ID NO: 4713 - protein, 113 aa, Artificial Sequence [sequence omitted]

SEQ ID NO: 4714 - RNA, 342 nt, Artificial Sequence
  MIF__Homo_sapiens__ABR12395
auguucaucguaaacaccaacgugccccgcgccuccgugccggacggguuccucuccgagcucacccagcagcuggcgcaggccaccggcaagcccccccaguacauugcggugcaaguggucccggaccagcucauggccuuugggggguccagcgaaccgugggcguuuugcagccugcacagcauuggcaaaaucggcggcgcgcagaaccgcuccuacagcaagcugcuguucggccugcuggccgagcgccugcgcaucagcccggacaggguuuacaucaacuauuacgacaugaacgcggccaaugugggguggaacaacucccccuuugccuaa

SEQ ID NO: 4715 - RNA, 342 nt, Artificial Sequence
  derived and/or modified sequence opt1 from MIF__Homo_sapiens__ABR12395
auguucaucgugaacaccaacgucccccgcgccagcgugccggacggcuuccuguccgagcucacccagcagcuggcccaggcgacggggaagccgccccaguacaucgccgugcaggucgugcccgaccagcugauggccuucggcgggagcuccgagcccugggccuucugcagccuccacuccaucggcaagaucgggggcgcccagaaccggagcuacuccaagcugcuguucggccuccuggcggagcgccugcggaucagccccgaccgcguguacaucaacuacuacgacaugaacgccgccaacgucggguggaacaacucccccuucgccuga

SEQ ID NO: 4716 - RNA, 342 nt, Artificial Sequence
  derived and/or modified sequence opt2 from MIF__Homo_sapiens__ABR12395
auguucaucgucaacaccaacgucccccgcgccuccguccccgacggcuuccucuccgagcucacccagcagcucgcccaggccaccggcaagcccccccaguacaucgccguccaggucguccccgaccagcucauggccuucggcggcuccuccgagcccugggccuucugcucccuccacuccaucggcaagaucggcggcgcccagaaccgcuccuacuccaagcuccucuucggccuccucgccgagcgccuccgcaucucccccgaccgcgucuacaucaacuacuacgacaugaacgccgccaacgucggcuggaacaacucccccuucgccuga

SEQ ID NO: 4717 - RNA, 342 nt, Artificial Sequence
  derived and/or modified sequence opt3 from MIF__Homo_sapiens__ABR12395
auguucaucgugaacaccaauguccccagagccagcguuccugacggcuuucuguccgagcucacacagcaacuugcucaggcaacugggaagccaccgcaguacauugccgugcagguagugcccgaucaacugauggcguucggagguucuucagaaccuugggcuuuuugcaguuugcacagcauaggcaaaaucgggggagcccagaacagguccuauucuaaguuacuguucggccuacucgcagagcggcugcgcauuucgccagaccgagucuacaucaauuauuacgauaugaacgccgcuaauguggguuggaacaauucacccuuugcauga

SEQ ID NO: 4718 - RNA, 342 nt, Artificial Sequence
  derived and/or modified sequence opt4 from MIF__Homo_sapiens__ABR12395
auguucaucgugaacaccaacgugcccagagccagcgugcccgacggcuuccugagcgagcugacccagcagcuggcccaggccaccggcaagcccccccaguacaucgccgugcagguggugcccgaccagcugauggccuucggcggcagcagcgagcccugggccuucugcagccugcacagcaucggcaagaucggcggcgcccagaacagaagcuacagcaagcugcuguucggccugcuggccgagagacugagaaucagccccgacagaguguacaucaacuacuacgacaugaacgccgccaacgugggcuggaacaacagccccuucgccuga

SEQ ID NO: 4719 - RNA, 342 nt, Artificial Sequence
  derived and/or modified sequence opt5 from MIF__Homo_sapiens__ABR12395
auguucaucgugaacaccaauguccccagagccagcguuccugacggcuuucuguccgagcucacacagcaacuggcucaggccacggggaagccgccccaguacauugcgguccagguggugccugaucaacuuauggcuuucggaggcucuagcgaacccugggccuuuugcucccugcacucuaucgggaaaauuggaggcgcccagaaccggagcuauuccaagcuccuguucgggcuucuggcugagcgccucagaaucucuccugaccggguguacauuaauuauuacgauaugaacgccgcuaauguuggauggaacaauagccccuuugccuga

SEQ ID NO: 4720 - RNA, 342 nt, Artificial Sequence
  derived and/or modified sequence opt6 from MIF__Homo_sapiens__ABR12395
auguucauaguaaauacaaauguaccaagagcaagcguaccagauggauuucuaucagaauuaacacaacaauuagcacaagcaacaggaaaaccaccacaauauauagcaguacaaguaguaccagaucaauuaauggcauucggaggaucaagcgaaccaugggcauuuugcucacuacauagcauaggaaaaauaggaggagcacaaaauagaucauacucaaaauuacuauuuggauuacuagcagaaagacuaagaauaucaccagauagaguuuacauaaacuauuacgauaugaaugcagcaaacguaggauggaacaauagcccauucgcauaa

SEQ ID NO: 4721 - protein, 115 aa, Artificial Sequence
  MIF__Homo_sapiens__P14174
MPMFIVNTNVPRASVPDGFLSELTQQLAQATGKPPQYIAVHVVPDQLMAFGGSSEPCALCSLHSIGKIGGAQNRSYSKLLCGLLAERLRISPDRVYINYYDMNAANVGWNNSTFA

SEQ ID NO: 4722 - RNA, 348 nt, Artificial Sequence
  MIF__Homo_sapiens__AAA21814
augccgauguucaucguaaacaccaacgugccccgcgccuccgugccggacggguuccucuccgagcucacccagcagcuggcgcaggccaccggcaagcccccccaguacaucgcggugcacguggucccggaccagcucauggccuucggcggcuccagcgagccgugcgcgcucugcagccugcacagcaucggcaagaucggcggcgcgcagaaccgcuccuacagcaagcugcugugcggccugcuggccgagcgccugcgcaucagcccggacagggucuacaucaacuauuacgacaugaacgcggccaaugugggcuggaacaacuccaccuucgccuaa

SEQ ID NO: 4723 - RNA, 348 nt, Artificial Sequence
  derived and/or modified sequence opt1 from MIF__Homo_sapiens__AAA21814
augcccauguucaucgugaacaccaacgucccgcgcgccagcgugcccgacggcuuccuguccgagcucacccagcagcuggcccaggcgacggggaagccgccccaguacaucgccgugcacgucgugcccgaccagcugauggccuucggcgggagcuccgagcccugcgcccucugcagccugcacuccaucggcaagaucgggggcgcccagaaccggagcuacuccaagcugcucugcggccugcuggcggagcgccuccggaucagccccgaccgcguguacaucaacuacuacgacaugaacgccgccaacgucggguggaacaacuccaccuucgccuga

SEQ ID NO: 4724 - RNA, 348 nt, Artificial Sequence
  derived and/or modified sequence opt2 from MIF__Homo_sapiens__AAA21814
augcccauguucaucgucaacaccaacgucccccgcgccuccguccccgacggcuuccucuccgagcucacccagcagcucgcccaggccaccggcaagcccccccaguacaucgccguccacgucguccccgaccagcucauggccuucggcggcuccuccgagcccugcgcccucugcucccuccacuccaucggcaagaucggcggcgcccagaaccgcuccuacuccaagcuccucugcggccuccucgccgagcgccuccgcaucucccccgaccgcgucuacaucaacuacuacgacaugaacgccgccaacgucggcuggaacaacuccaccuucgccuga

SEQ ID NO: 4725 - RNA, 348 nt, Artificial Sequence
  derived and/or modified sequence opt3 from MIF__Homo_sapiens__AAA21814
augcccauguucaucgugaacaccaaugucccuagagccagcguuccagacggcuuucuguccgagcucacacagcaacuugcucaggcaacugggaagccgccccaguacauugccgugcacguagugccugaucagcugauggcguucggagguucuucagaaccaugcgcuuuguguaguuuacauagcauaggcaaaaucgggggagcccaaaacagguccuauucuaagcugcuaugcggccuccuggcagagcggcuucgcauuucgcccgaccgagucuacaucaauuauuacgauaugaacgccgcuaauguggguuggaacaauucaacguuugcauga

SEQ ID NO: 4726 - RNA, 348 nt, Artificial Sequence
  derived and/or modified sequence opt4 from MIF__Homo_sapiens__AAA21814
augcccauguucaucgugaacaccaacgugcccagagccagcgugcccgacggcuuccugagcgagcugacccagcagcuggcccaggccaccggcaagcccccccaguacaucgccgugcacguggugcccgaccagcugauggccuucggcggcagcagcgagcccugcgcccugugcagccugcacagcaucggcaagaucggcggcgcccagaacagaagcuacagcaagcugcugugcggccugcuggccgagagacugagaaucagccccgacagaguguacaucaacuacuacgacaugaacgccgccaacgugggcuggaacaacagcaccuucgccuga

SEQ ID NO: 4727 - RNA, 348 nt, Artificial Sequence
  derived and/or modified sequence opt5 from MIF__Homo_sapiens__AAA21814
augcccauguucaucgugaacaccaaugucccuagagccagcguuccggacggcuuucuguccgagcucacacagcaacuggcucaggccacggggaagcccccucaguacauugcggugcacgugguccccgaucagcuuauggcuuucggaggcucuagcgaaccuugcgcccuguguucccuccauucuaucgggaaaauuggaggcgcccaaaaccggagcuauuccaagcugcuuugcgggcugcucgcugagcgccugagaaucucucccgaccggguguacauuaauuauuacgauaugaacgccgcuaauguuggauggaacaauagcaccuuugccuga

SEQ ID NO: 4728 - RNA, 348 nt, Artificial Sequence
  derived and/or modified sequence opt6 from MIF__Homo_sapiens__AAA21814
augccaauguucauaguaaacacaaauguaccaagagcaucaguaccagacggauuccuaucagaauuaacacaacaacuagcacaagcaacaggaaaaccaccacaauacauagcaguacacguaguaccagaccaacuaauggcauucggaggaucaucagaaccaugcgcacuaugcucacuacacucaauaggaaaaauaggaggagcacaaaacagaucauacucaaaauuacuaugcggacuacuagcagaaagacuaagaauaucaccagacagaguauacauaaacuauuacgacaugaacgcagcaaacguaggauggaacaauucaacauucgcauaa

SEQ ID NO: 4729 - protein, 252 aa, Artificial Sequence
  OSM__Homo_sapiens__P13725
MGVLLTQRTLLSLVLALLFPSMASMAAIGSCSKEYRVLLGQLQKQTDLMQDTSRLLDPYIRIQGLDVPKLREHCRERPGAFPSEETLRGLGRRGFLQTLNATLGCVLHRLADLEQRLPKAQDLERSGLNIEDLEKLQMARPNILGLRNNIYCMAQLLDNSDTAEPTKAGRGASQPPTPTPASDAFQRKLEGCRFLHGYHRFMHSVGRVFSKWGESPNRSRRHSPHQALRKGVRRTRPSRKGKRLMTRGQLPR

SEQ ID NO: 4730 - RNA, 759 nt, Artificial Sequence
  OSM__Homo_sapiens__AAA36388
auggggguacugcucacacagaggacgcugcucagucugguccuugcacuccuguuuccaagcauggcgagcauggcggcuauaggcagcugcucgaaagaguaccgcgugcuccuuggccagcuccagaagcagacagaucucaugcaggacaccagcagacuccuggaccccuauauacguauccaaggccuggauguuccuaaacugagagagcacugcagggagcgccccggggccuuccccagugaggagacccugagggggcugggcaggcggggcuuccugcagacccucaaugccacacugggcugcguccugcacagacuggccgacuuagagcagcgccuccccaaggcccaggauuuggagaggucugggcugaacaucgaggacuuggagaagcugcagauggcgaggccgaacauccucgggcucaggaacaacaucuacugcauggcccagcugcuggacaacucagacacggcugagcccacgaaggcuggccggggggccucucagccgcccacccccaccccugccucggaugcuuuucagcgcaagcuggagggcugcagguuccugcauggcuaccaucgcuucaugcacucaguggggcgggucuucagcaaguggggggagagcccgaaccggagccggagacacagcccccaccaggcccugaggaagggggugcgcaggaccagacccuccaggaaaggcaagagacucaugaccaggggacagcugccccgguag

SEQ ID NO: 4731 - RNA, 759 nt, Artificial Sequence
  derived and/or modified sequence opt1 from OSM__Homo_sapiens__AAA36388
augggcgugcugcucacccagcgcacccugcugagccucguccuggcccuccuguuccccuccauggccagcauggcggccaucggguccugcagcaaggaguaccgggugcugcugggccagcuccagaagcagacggaccugaugcaggacaccucccgccugcucgacccguacauccggauccaggggcuggacgugcccaagcugcgcgagcacugccgggagcgccccggcgccuuccccagcgaggagacccuccgggggcugggccgccggggcuuccugcagacccucaacgccacgcuggggugcguccugcaccgccucgccgaccuggagcagcggcugccgaaggcgcaggaccucgagcgcuccggccugaacaucgaggaccuggagaagcuccagauggcccggcccaacauccuggggcugcgcaacaacaucuacugcauggcccagcuccuggacaacagcgacaccgccgagcccaccaaggcgggccgcggggccucccagcccccgacccccacgcccgccagcgacgccuuccagcggaagcuggagggcugccgguuccuccacggcuaccaccgcuucaugcacuccguggggcggguguucagcaaguggggcgagucccccaaccgcagccggcgccacuccccgcaccaggcccugcgcaaggggguccggcgcacccggcccagccgcaagggcaagcggcugaugacccgcggccagcucccccgguga

SEQ ID NO: 4732 - RNA, 759 nt, Artificial Sequence
  derived and/or modified sequence opt2 from OSM__Homo_sapiens__AAA36388
augggcguccuccucacccagcgcacccuccucucccucguccucgcccuccucuuccccuccauggccuccauggccgccaucggcuccugcuccaaggaguaccgcguccuccucggccagcuccagaagcagaccgaccucaugcaggacaccucccgccuccucgaccccuacauccgcauccagggccucgacguccccaagcuccgcgagcacugccgcgagcgccccggcgccuuccccuccgaggagacccuccgcggccucggccgccgcggcuuccuccagacccucaacgccacccucggcugcguccuccaccgccucgccgaccucgagcagcgccuccccaaggcccaggaccucgagcgcuccggccucaacaucgaggaccucgagaagcuccagauggcccgccccaacauccucggccuccgcaacaacaucuacugcauggcccagcuccucgacaacuccgacaccgccgagcccaccaaggccggccgcggcgccucccagccccccacccccacccccgccuccgacgccuuccagcgcaagcucgagggcugccgcuuccuccacggcuaccaccgcuucaugcacuccgucggccgcgucuucuccaaguggggcgagucccccaaccgcucccgccgccacuccccccaccaggcccuccgcaagggcguccgccgcacccgccccucccgcaagggcaagcgccucaugacccgcggccagcucccccgcuga

SEQ ID NO: 4733 - RNA, 759 nt, Artificial Sequence
  derived and/or modified sequence opt3 from OSM__Homo_sapiens__AAA36388
augggcgugcugcucacccagagaacacuucugagcuuggucuuagcccugcuauuccccuccauggcuucuauggcagccaucgggucaugcaguaaggaguacaggguucuccugggacaacuucagaaacagacugaccugaugcaggauacgagccgguugcucgacccuuauauucgcauacaaggucuggaugugccaaagcugcgagaacacugucgugagagaccgggcgcguuucccuccgaagagacccucaggggguuaggacggcgcggcuuccugcagacacuuaacgcuacuuuggguugcguacugcauagacuagccgaccucgaacagaggcugccuaaagcacaggaucuugagcggucugggcugaauaucgaggacuuggaaaagcuccaaauggcccgcccaaacauucugggauuacgaaauaacaucuacuguauggcucagcugcucgauaauucggacaccgcagagcccacaaaagccggcagaggcgcuucacagccuccaacccccacuccugccagcgaugcguuucagaggaaacuugaagggugccgguuccugcacggauaucaucguuuuaugcacagugugggucgcgucuucuccaaguggggcgagucuccaaacagaagcaggcggcauuccccgcaccaagcauugcgaaagggggugcgcagaacaaggcccucacggaagggaaaacgccuaaugaccagaggccagcugccuagguga

SEQ ID NO: 4734 - RNA, 759 nt, Artificial Sequence
  derived and/or modified sequence opt4 from OSM__Homo_sapiens__AAA36388
augggcgugcugcugacccagagaacccugcugagccuggugcuggcccugcuguuccccagcauggccagcauggccgccaucggcagcugcagcaaggaguacagagugcugcugggccagcugcagaagcagaccgaccugaugcaggacaccagcagacugcuggaccccuacaucagaauccagggccuggacgugcccaagcugagagagcacugcagagagagacccggcgccuuccccagcgaggagacccugagaggccugggcagaagaggcuuccugcagacccugaacgccacccugggcugcgugcugcacagacuggccgaccuggagcagagacugcccaaggcccaggaccuggagagaagcggccugaacaucgaggaccuggagaagcugcagauggccagacccaacauccugggccugagaaacaacaucuacugcauggcccagcugcuggacaacagcgacaccgccgagcccaccaaggccggcagaggcgccagccagccccccacccccacccccgccagcgacgccuuccagagaaagcuggagggcugcagauuccugcacggcuaccacagauucaugcacagcgugggcagaguguucagcaaguggggcgagagccccaacagaagcagaagacacagcccccaccaggcccugagaaagggcgugagaagaaccagacccagcagaaagggcaagagacugaugaccagaggccagcugcccagauga

SEQ ID NO: 4735 - RNA, 759 nt, Artificial Sequence
  derived and/or modified sequence opt5 from OSM__Homo_sapiens__AAA36388
augggcgugcugcucacccagagaacacugcuuagccugguccucgcccugcuuuuccccuccauggcuucuauggccgcgaucgggagcugcuccaaggaguaccggguucugcucggacaacugcagaaacagacggaccugaugcaggauaccucucgccuccuggacccuuauauuagaauccaaggccuugaugugccgaagcugcgggaacacugucgcgagagacccggggcuuuuccuagcgaagagacacuccggggacugggccgcagaggguuccuucagacccugaacgccacacucggaugcgugcugcaucggcuggccgaccucgaacagcgccugcccaaagcucaggaucuugagagauccggccugaauauugaggaccucgaaaagcugcaaauggcccggccuaacauccuuggccugcgcaauaacauuuacuguauggcucagcuccuggauaauucugacaccgccgagcccacaaaagcggggagaggagccagccagccuccgacccccacgccugcuuccgaugccuuucagcggaagcuggaaggcugccgcuuccuccacggguaucauagauuuaugcacagcgucggacggguguucucuaaguggggcgagucccccaacagaagccgccggcauucuccucaccaagcucugagaaaagggguucgccggaccagacccucccgcaagggaaaacggcuuaugacaagaggccagcugccgcgcuga

SEQ ID NO: 4736 - RNA, 759 nt, Artificial Sequence
  derived and/or modified sequence opt6 from OSM__Homo_sapiens__AAA36388
augggcguauuauuaacacaaagaacauuacuaucacuaguacuagcauuauuauuccccucaauggccucaauggcagcaauaggcucaugcucaaaagaauacagaguacuauuaggacaacuacaaaaacaaacagacuuaaugcaagacacaagcagacuucuagauccauauauaagaauacaaggauuagacgucccaaaacuaagagaacacugcagagaaagaccaggagcauucccaucagaagaaacacuaagaggauuaggacgaagaggauucuuacaaacacuaaacgcaacacuaggauguguauuacauagauuagccgaccuagaacaaagacuaccaaaagcacaagaccuagaacgaucaggacuaaacauagaagacuuagaaaaauuacaaauggcaagaccaaacauacucggauuacgaaacaauauauauugcauggcacaacuauuagacaacucagauacagcagaacccacaaaagcaggacgaggagcaucacaaccaccaacaccaacaccagcaucagacgcauuccaacgaaaacuagaaggauguagauuccuacauggauaccacagauuuaugcacucagucggaagaguauucucaaaauggggagaaaguccaaacagaucaagaagacacucaccacaccaagcacucagaaaaggaguaagaagaacaagaccaucaagaaaaggaaaacgacuaaugacaaggggccaacuaccaagauaa

SEQ ID NO: 4737 - protein, 183 aa, Artificial Sequence
  OX40L__Homo_sapiens__P23510
MERVQPLEENVGNAARPRFERNKLLLVASVIQGLGLLLCFTYICLHFSALQVSHRYPRIQSIKVQFTEYKKEKGFILTSQKEDEIMKVQNNSVIINCDGFYLISLKGYFSQEVNISLHYQKDEEPLFQLKKVRSVNSLMVASLTYKDKVYLNVTTDNTSLDDFHVNGGELILIHQNPGEFCVL

SEQ ID NO: 4738 - RNA, 552 nt, Artificial Sequence
  OX40L__Homo_sapiens__BAA14259
auggaaaggguccaaccccuggaagagaaugugggaaaugcagccaggccaagauucgagaggaacaagcuauugcugguggccucuguaauucagggacuggggcugcuccugugcuucaccuacaucugccugcacuucucugcucuucagguaucacaucgguauccucgaauucaaaguaucaaaguacaauuuaccgaauauaagaaggagaaagguuucauccucacuucccaaaaggaggaugaaaucaugaaggugcagaacaacucagucaucaucaacugugauggguuuuaucucaucucccugaagggcuacuucucccaggaagucaacauuagccuucauuaccagaaggaugaggagccccucuuccaacugaagaaggucaggucugucaacuccuugaugguggccucucugacuuacaaagacaaagucuacuugaaugugaccacugacaauaccucccuggaugacuuccaugugaauggcggagaacugauucuuauccaucaaaauccuggugaauucuguguccuuuga

SEQ ID NO: 4739 - RNA, 552 nt, Artificial Sequence
  derived and/or modified sequence opt1 from OX40L__Homo_sapiens__BAA14259
auggagcgcgugcagccccuggaggagaacgucggcaacgccgcccggccgcgcuucgagcggaacaagcuccugcugguggcgagcgugauccaggggcucggccugcugcucugcuucaccuacaucugccugcacuucuccgcccugcaggucagccaccgcuacccccggauccaguccaucaaggugcaguucaccgaguacaagaaggagaagggguucauccucacgagccagaaggaggacgagaucaugaaggugcagaacaacuccgucaucaucaacugcgacggcuucuaccugaucagccugaagggguacuucucccaggaggugaacaucagccuccacuaccagaaggacgaggagccccuguuccagcugaagaaggugcgcuccgucaacagccucaugguggccucccugaccuacaaggacaagguguaccugaacgucaccaccgacaacacgagccucgacgacuuccacgugaacggcggcgagcugauccugauccaccagaaccccggggaguucugcgugcucuga

SEQ ID NO: 4740 - RNA, 552 nt, Artificial Sequence
  derived and/or modified sequence opt2 from OX40L__Homo_sapiens__BAA14259
auggagcgcguccagccccucgaggagaacgucggcaacgccgcccgcccccgcuucgagcgcaacaagcuccuccucgucgccuccgucauccagggccucggccuccuccucugcuucaccuacaucugccuccacuucuccgcccuccaggucucccaccgcuacccccgcauccaguccaucaagguccaguucaccgaguacaagaaggagaagggcuucauccucaccucccagaaggaggacgagaucaugaagguccagaacaacuccgucaucaucaacugcgacggcuucuaccucaucucccucaagggcuacuucucccaggaggucaacaucucccuccacuaccagaaggacgaggagccccucuuccagcucaagaagguccgcuccgucaacucccucauggucgccucccucaccuacaaggacaaggucuaccucaacgucaccaccgacaacaccucccucgacgacuuccacgucaacggcggcgagcucauccucauccaccagaaccccggcgaguucugcguccucuga

SEQ ID NO: 4741 - RNA, 552 nt, Artificial Sequence
  derived and/or modified sequence opt3 from OX40L__Homo_sapiens__BAA14259
auggagagagugcagccccuggaagagaacgucggcaaugccgcuaggccucgguucgaacgcaacaagcuccuucugguugcaagcgugauccaaggguugggauuacugcuaugcuuuaccuacauuugucuccacuucuccgcccugcagguaucucaucgauauccacguauacagucaaucaaagugcaguuuacagaguacaagaaagaaaaggguuucauucuuacgagucaaaaagaggacgagaucaugaagguccagaauaacagcgugauuaucaauugcgauggcuuuuaucugauauccuugaagggguacuucucucaggaaguuaacaucucgcuccacuaucagaaagacgaggaaccgcuguuucaacugaagaaagugagaucagucaauagccucaugguggcgaguuuaacuuacaaggauaaaguauaucugaacguuaccacagacaauacuucccuugaugacuuccaugugaacggaggcgaguugauucugauccaccagaaucccggugaguuuuguguccuauga

SEQ ID NO: 4742 - RNA, 552 nt, Artificial Sequence
  derived and/or modified sequence opt4 from OX40L__Homo_sapiens__BAA14259
auggagagagugcagccccuggaggagaacgugggcaacgccgccagacccagauucgagagaaacaagcugcugcugguggccagcgugauccagggccugggccugcugcugugcuucaccuacaucugccugcacuucagcgcccugcaggugagccacagauaccccagaauccagagcaucaaggugcaguucaccgaguacaagaaggagaagggcuucauccugaccagccagaaggaggacgagaucaugaaggugcagaacaacagcgugaucaucaacugcgacggcuucuaccugaucagccugaagggcuacuucagccaggaggugaacaucagccugcacuaccagaaggacgaggagccccuguuccagcugaagaaggugagaagcgugaacagccugaugguggccagccugaccuacaaggacaagguguaccugaacgugaccaccgacaacaccagccuggacgacuuccacgugaacggcggcgagcugauccugauccaccagaaccccggcgaguucugcgugcuguga

SEQ ID NO: 4743 - RNA, 552 nt, Artificial Sequence
  derived and/or modified sequence opt5 from OX40L__Homo_sapiens__BAA14259
auggagagagugcagccccuggaagagaacgucggcaaugccgcucggccucgcuucgaaagaaacaagcuccugcuuguugccagcgugauccaagggcugggacuccugcuuugcuuuaccuacauuugucugcacuucuccgcgcuccaggugucucaucgguauccgcgcauccagagcauuaaaguccaguuuacagaguacaagaaagaaaagggcuucauccugacgucccaaaaagaggacgagauuaugaaggugcagaauaacucuguuaucaucaauugcgauggguuuuaucugauuagccucaagggauacuucucccaggaagugaacaucucucugcacuaucagaaagacgaggaaccccuuuuucaacugaagaaagucagaagcguuaauucccucaugguggcuagccugaccuacaaggauaaaguguaucuuaacgucacaaccgacaauacaucucuggaugacuuccaugugaacggcggggagcucauucugauccaccagaauccuggagaguuuugugugcuguga

SEQ ID NO: 4744 - RNA, 552 nt, Artificial Sequence
  derived and/or modified sequence opt6 from OX40L__Homo_sapiens__BAA14259
auggaaagaguacaaccacuagaagaaaacguaggaaacgcagcaagaccaagauucgaaagaaacaaauuacuacuaguagcaucaguaauacaaggacuaggacuacuauuaugcuucacauacauaugccuacacuucucagcacuacaaguaucccacagauacccaagaauacaaucaauaaaaguacaauucaccgaauacaaaaaagaaaaaggcuucauacuaacaucccaaaaagaagacgaaauaaugaaaguacaaaacaacucaguaauaauaaacugcgauggauucuaccuaauaucacuaaaaggauacuucucacaagaaguaaacauaucccuacacuaccaaaaagacgaagaaccacuauuccaacuaaaaaaaguaagaucaguaaacucacuaauggucgcaucacuaacauacaaagacaaaguauaucuaaacgucacaaccgacaacacaucccuagacgacuuccacguaaacggaggagaacuaauacuaauacaccaaaacccaggagaauucugcguacucuaa

SEQ ID NO: 4745 - protein, 277 aa, Artificial Sequence
  OX40L__Homo_sapiens__P43489
MCVGARRLGRGPCAALLLLGLGLSTVTGLHCVGDTYPSNDRCCHECRPGNGMVSRCSRSQNTVCRPCGPGFYNDVVSSKPCKPCTWCNLRSGSERKQLCTATQDTVCRCRAGTQPLDSYKPGVDCAPCPPGHFSPGDNQACKPWTNCTLAGKHTLQPASNSSDAICEDRDPPATQPQETQGPPARPITVQPTEAWPRTSQGPSTRPVEVPGGRAVAAILGLGLVLGLLGPLAILLALYLLRRDQRLPPDAHKPPGGGSFRTPIQEEQADAHSTLAKI

SEQ ID NO: 4746 - RNA, 834 nt, Artificial Sequence
  OX40L__Homo_sapiens__AAI05071
augugcgugggggcucggcggcugggccgcgggccgugugcggcucugcuccuccugggccuggggcugagcaccgugacggggcuccacugugucggggacaccuaccccagcaacgaccggugcugccacgagugcaggccaggcaacgggauggugagccgcugcagccgcucccagaacacggugugccguccgugcgggccgggcuucuacaacgacguggucagcuccaagccgugcaagcccugcacgugguguaaccucagaagugggagugagcggaagcagcugugcacggccacacaggacacagucugccgcugccgggcgggcacccagccccuggacagcuacaagccuggaguugacugugcccccugcccuccagggcacuucuccccaggcgacaaccaggccugcaagcccuggaccaacugcaccuuggcugggaagcacacccugcagccggccagcaauagcucggacgcaaucugugaggacagggaccccccagccacgcagccccaggagacccagggccccccggccaggcccaucacuguccagcccacugaagccuggcccagaaccucacagggacccuccacccggcccguggagguccccgggggccgugcgguugccgccauccugggccugggccuggugcuggggcugcugggcccccuggccauccugcuggcccuguaccugcuccggagggaccagaggcugccccccgaugcccacaagcccccugggggaggcaguuuccggacccccauccaagaggagcaggccgacgcccacuccacccuggccaagaucuga

SEQ ID NO: 4747 - RNA, 834 nt, Artificial Sequence
  derived and/or modified sequence opt1 from OX40L__Homo_sapiens__AAI05071
augugcgugggcgcccgccggcuggggcgcggccccugcgccgcgcuccugcugcucgggcugggccugagcaccgucaccgggcuccacugcgugggcgacacguaccccuccaacgaccggugcugccacgagugccgccccggcaacgggauggugagccggugcucccgcagccagaacaccgucugccggcccugcggccccggguucuacaacgacgugguguccagcaagccgugcaagcccugcaccuggugcaaccugcgcuccggcagcgagcggaagcagcugugcaccgccacgcaggacaccgucugccgcugccgggccgggacccagccccucgacuccuacaagcccggcguggacugcgccccgugcccgcccggccacuucagccccggggacaaccaggccugcaagcccuggaccaacugcacgcuggcgggcaagcacacccugcagcccgccuccaacagcuccgacgccaucugcgaggaccgcgacccgcccgccacccagccccaggagacccaggggccgcccgcgcggcccaucacggugcagcccaccgaggccuggccccgcaccagccagggccccuccacccggcccgucgaggugccgggcgggcgcgccguggccgccauccucggccuggggcugguccucggccugcuggggccccucgcgauccugcuggcccucuaccugcugcggcgcgaccagcggcucccgcccgacgcccacaagccgcccggcggcgggagcuuccgcacgcccauccaggaggagcaggccgacgcccacuccacccuggcgaagaucuga

SEQ ID NO: 4748 - RNA, 834 nt, Artificial Sequence
  derived and/or modified sequence opt2 from OX40L__Homo_sapiens__AAI05071
augugcgucggcgcccgccgccucggccgcggccccugcgccgcccuccuccuccucggccucggccucuccaccgucaccggccuccacugcgucggcgacaccuaccccuccaacgaccgcugcugccacgagugccgccccggcaacggcauggucucccgcugcucccgcucccagaacaccgucugccgccccugcggccccggcuucuacaacgacgucgucuccuccaagcccugcaagcccugcaccuggugcaaccuccgcuccggcuccgagcgcaagcagcucugcaccgccacccaggacaccgucugccgcugccgcgccggcacccagccccucgacuccuacaagcccggcgucgacugcgcccccugcccccccggccacuucucccccggcgacaaccaggccugcaagcccuggaccaacugcacccucgccggcaagcacacccuccagcccgccuccaacuccuccgacgccaucugcgaggaccgcgacccccccgccacccagccccaggagacccagggcccccccgcccgccccaucaccguccagcccaccgaggccuggccccgcaccucccagggccccuccacccgccccgucgagguccccggcggccgcgccgucgccgccauccucggccucggccucguccucggccuccucggcccccucgccauccuccucgcccucuaccuccuccgccgcgaccagcgccucccccccgacgcccacaagccccccggcggcggcuccuuccgcacccccauccaggaggagcaggccgacgcccacuccacccucgccaagaucuga

SEQ ID NO: 4749 - RNA, 834 nt, Artificial Sequence
  derived and/or modified sequence opt3 from OX40L__Homo_sapiens__AAI05071
augugcgugggcgccagaaggcuggggcggggacccugugcugcacuccuucuguuggguuuaggccugagcaccgucacagggcuacacugcguuggagacacuuacccuuccaacgaucgcuguugccaugagugucgaccaggcaaugguauggugucucguugcucaagaagucagaacacgguauguaggccgugcgggcccggauucuauaaugacguggucagcuccaagccuuguaaaccaugcaccugguguaaccuccggucuggcucggaacgcaagcaacugugcacagccacucaggauaccgugugcagauguagggcgggcacacagccccuugacucauacaaaccugggguugauugcgcuccaugucccccuggacacuuuagcccaggugacaaucaggccugcaagccguggaccaacuguacucuggcaggcaaacauacauugcaacccgccaguaauuccucugaugcuaucugcgaggaccgggauccuccagcaacccagccccaggaaacgcaggggccuccagcccgccccauuacugugcaaccgaccgaggcuuggccucgaacaagccagggacccuccacuagaccagucgaagugccuggcgguagggccguagcggcaauacucgggcugggacugguucucggcuuacugggcccccuugccaucuugcuggcucuauaucuccugcggcgugaccagcgccuuccacccgaugcccacaagccuccagggggagguucauucagaaccccgauucaggaggagcaagcagacgcucauaguacacuggccaagaucuga

SEQ ID NO: 4750 - RNA, 834 nt, Artificial Sequence
  derived and/or modified sequence opt4 from OX40L__Homo_sapiens__AAI05071
augugcgugggcgccagaagacugggcagaggccccugcgccgcccugcugcugcugggccugggccugagcaccgugaccggccugcacugcgugggcgacaccuaccccagcaacgacagaugcugccacgagugcagacccggcaacggcauggugagcagaugcagcagaagccagaacaccgugugcagacccugcggccccggcuucuacaacgacguggugagcagcaagcccugcaagcccugcaccuggugcaaccugagaagcggcagcgagagaaagcagcugugcaccgccacccaggacaccgugugcagaugcagagccggcacccagccccuggacagcuacaagcccggcguggacugcgcccccugcccccccggccacuucagccccggcgacaaccaggccugcaagcccuggaccaacugcacccuggccggcaagcacacccugcagcccgccagcaacagcagcgacgccaucugcgaggacagagacccccccgccacccagccccaggagacccagggcccccccgccagacccaucaccgugcagcccaccgaggccuggcccagaaccagccagggccccagcaccagacccguggaggugcccggcggcagagccguggccgccauccugggccugggccuggugcugggccugcugggcccccuggccauccugcuggcccuguaccugcugagaagagaccagagacugccccccgacgcccacaagccccccggcggcggcagcuucagaacccccauccaggaggagcaggccgacgcccacagcacccuggccaagaucuga

SEQ ID NO: 4751 - RNA, 834 nt, Artificial Sequence
  derived and/or modified sequence opt5 from OX40L__Homo_sapiens__AAI05071
augugcgugggcgccagacggcuggggcgcggacccugugcugcccuccugcuucugggccucgggcugagcaccgucacaggacuucacugcguuggcgacacguacccuuccaacgauagauguugccaugagugucggccggggaauggaauggugucucgcugcagcagaucccagaacaccgugugucggcccugcggcccuggcuucuauaaugacgucgugucuagcaagcccuguaaaccuugcacaugguguaaccugcgcuccgggucugaaagaaagcaacucugcaccgcgacacaggauaccguuugccggugucgcgcuggaacacagccccuggacagcuacaaaccuggcguggauugcgccccgugucccccugggcacuuuucccccggagacaaucaggccugcaagccuuggaccaacuguacgcuggcuggcaaacauacccuccaacccgccagcaauucuuccgaugcuaucugcgaggacagagauccgccugccacacagccccaggaaacccaggggccucccgcgcggcccauuacaguccaaccuaccgaggccuggccgcgcacgagccagggacccucuacaagaccuguggaaguucccggcggccgggcuguggccgcuauccuggggcuuggacugguccucggccugcuugggccucuggccauucuccuggcgcuguaucuccugcgcagagaccagcggcuucccccggaugcccacaagccucccggaggcggguccuucagaaccccuauccaggaggagcaagcugacgcccauagcacacuggcuaagauuuga

SEQ ID NO: 4752 - RNA, 834 nt, Artificial Sequence
  derived and/or modified sequence opt6 from OX40L__Homo_sapiens__AAI05071
auguguguuggagcacguagauuaggaagaggaccaugugcagcauuacuacuacuaggauuaggauuaucaacaguaacaggucuacauugcguuggagauacauacccaucaaacgacagauguugccaugaauguagaccuggaaauggaaugguauccagauguagcagaagccaaaacacaguaugcagaccaugcggcccaggauuuuauaacgauguaguauccucuaaaccauguaaacccuguacaugguguaauuuacgaucaggaagcgaaagaaaacaauuauguacagcaacacaagauacaguaugcagaugcagagcaggaacacaaccacuagauucauacaaaccagguguagauugcgcuccauguccuccaggacacuucucacccggagacaaucaagcauguaaaccauggacaaauugcacauuagcaggaaaacauacucuacaaccagcaucaaauaguucagaugcaauaugugaagauagagauccaccagcaacccaaccacaagaaacacaaggaccaccagcacgaccaauaacaguacaaccgacagaagcauggccaagaacaucacaaggaccaucaacaagaccagucgaaguaccaggaggaagagcaguagcagcaauauuaggauuaggacuaguauuaggacuacuaggcccacuagcaauauuacuagcacuauaucuauuaagaagagaccaaagauuaccaccagacgcacacaaaccaccaggcggaggcucauucaggacuccaauacaagaagaacaagcagacgcacacucaacauuggcaaaaauauaa

SEQ ID NO: 4753 - protein, 317 aa, Artificial Sequence
  RANK_ligand__Homo_sapiens__O14788
MRRASRDYTKYLRGSEEMGGGPGAPHEGPLHAPPPPAPHQPPAASRSMFVALLGLGLGQVVCSVALFFYFRAQMDPNRISEDGTHCIYRILRLHENADFQDTTLESQDTKLIPDSCRRIKQAFQGAVQKELQHIVGSQHIRAEKAMVDGSWLDLAKRSKLEAQPFAHLTINATDIPSGSHKVSLSSWYHDRGWAKISNMTFSNGKLIVNQDGFYYLYANICFRHHETSGDLATEYLQLMVYVTKTSIKIPSSHTLMKGGSTKYWSGNSEFHFYSINVGGFFKLRSGEEISIEVSNPSLLDPDQDATYFGAFKVRDID

SEQ ID NO: 4754 - RNA, 954 nt, Artificial Sequence
  RANK_ligand__Homo_sapiens__CCDS9384.1
augcgccgcgccagcagagacuacaccaaguaccugcguggcucggaggagaugggcggcggccccggagccccgcacgagggcccccugcacgccccgccgccgccugcgccgcaccagcccccugccgccucccgcuccauguucguggcccuccuggggcuggggcugggccagguugucugcagcgucgcccuguucuucuauuucagagcgcagauggauccuaauagaauaucagaagauggcacucacugcauuuauagaauuuugagacuccaugaaaaugcagauuuucaagacacaacucuggagagucaagauacaaaauuaauaccugauucauguaggagaauuaaacaggccuuucaaggagcugugcaaaaggaauuacaacauaucguuggaucacagcacaucagagcagagaaagcgaugguggauggcucaugguuagaucuggccaagaggagcaagcuugaagcucagccuuuugcucaucucacuauuaaugccaccgacaucccaucugguucccauaaagugagucuguccucuugguaccaugaucgggguugggccaagaucuccaacaugacuuuuagcaauggaaaacuaauaguuaaucaggauggcuuuuauuaccuguaugccaacauuugcuuucgacaucaugaaacuucaggagaccuagcuacagaguaucuucaacuaaugguguacgucacuaaaaccagcaucaaaaucccaaguucucauacccugaugaaaggaggaagcaccaaguauuggucagggaauucugaauuccauuuuuauuccauaaacguugguggauuuuuuaaguuacggucuggagaggaaaucagcaucgaggucuccaaccccuccuuacuggauccggaucaggaugcaacauacuuuggggcuuuuaaaguucgagauauagauuga

SEQ ID NO: 4755 - RNA, 954 nt, Artificial Sequence
  derived and/or modified sequence opt1 from RANK_ligand__Homo_sapiens__CCDS9384.1
augcgccgggccagccgcgacuacaccaaguaccugcggggcuccgaggagaugggcggcgggcccggcgccccgcacgaggggccccuccacgcgcccccgccgcccgcgccccaccagcccccggccgccagccgcuccauguucguggcccugcugggccucggccuggggcaggucgugugcagcguggcccuguucuucuacuuccgggcccagauggaccccaaccgcaucuccgaggacggcacccacugcaucuaccggauccuccgccugcacgagaacgccgacuuccaggacacgacccuggagagccaggacaccaagcucauccccgacuccugccggcgcaucaagcaggccuuccagggggcgguccagaaggagcugcagcacaucguggggagccagcacauccgggccgagaaggccaugguggacggguccuggcuggaccucgccaagcgcagcaagcuggaggcccagcccuucgcgcaccugaccaucaacgccacggacauccccuccggcagccacaaggucucccucagcuccugguaccacgaccggggcugggccaagaucagcaacaugaccuucuccaacgggaagcugaucgugaaccaggacggcuucuacuaccuguacgccaacaucugcuuccgccaccacgagaccagcggggaccucgccaccgaguaccugcagcugaugguguacgucacgaagaccuccaucaagauccccagcagccacacccucaugaagggcggcuccaccaaguacuggagcgggaacuccgaguuccacuucuacagcaucaacgugggcggguucuucaagcugcgguccggcgaggagaucagcaucgagguguccaaccccagccugcucgaccccgaccaggacgcgacguacuucggggccuucaagguccgcgacaucgacuga

SEQ ID NO: 4756 - RNA, 954 nt, Artificial Sequence
  derived and/or modified sequence opt2 from RANK_ligand__Homo_sapiens__CCDS9384.1
augcgccgcgccucccgcgacuacaccaaguaccuccgcggcuccgaggagaugggcggcggccccggcgccccccacgagggcccccuccacgccccccccccccccgccccccaccagccccccgccgccucccgcuccauguucgucgcccuccucggccucggccucggccaggucgucugcuccgucgcccucuucuucuacuuccgcgcccagauggaccccaaccgcaucuccgaggacggcacccacugcaucuaccgcauccuccgccuccacgagaacgccgacuuccaggacaccacccucgagucccaggacaccaagcucauccccgacuccugccgccgcaucaagcaggccuuccagggcgccguccagaaggagcuccagcacaucgucggcucccagcacauccgcgccgagaaggccauggucgacggcuccuggcucgaccucgccaagcgcuccaagcucgaggcccagcccuucgcccaccucaccaucaacgccaccgacauccccuccggcucccacaaggucucccucuccuccugguaccacgaccgcggcugggccaagaucuccaacaugaccuucuccaacggcaagcucaucgucaaccaggacggcuucuacuaccucuacgccaacaucugcuuccgccaccacgagaccuccggcgaccucgccaccgaguaccuccagcucauggucuacgucaccaagaccuccaucaagauccccuccucccacacccucaugaagggcggcuccaccaaguacugguccggcaacuccgaguuccacuucuacuccaucaacgucggcggcuucuucaagcuccgcuccggcgaggagaucuccaucgaggucuccaaccccucccuccucgaccccgaccaggacgccaccuacuucggcgccuucaagguccgcgacaucgacuga

SEQ ID NO: 4757 - RNA, 954 nt, Artificial Sequence
  derived and/or modified sequence opt3 from RANK_ligand__Homo_sapiens__CCDS9384.1
augagaagggccagccgggacuacaccaaguaucugcgcggcuccgaggaaaugggagggggucccggcgcuccucacgaggggccacuccaugcaccgcccccuccagcgccccaccagccuccagccgcuucucgaucaauguucguggcccuucugggauugggcuuaggucaagucguuugcaguguggcacuguuuuucuacuuucgugcccagauggaucccaacagaaucagcgaagacgggacacauuguauuuauaggauacuacggcuccacgagaaugcugauuuccaggacacuacgcuggaaucccaggauaccaaacuuaucccugacucuugccgcagaauuaagcaagcauuucagggagccguacagaaagagcugcagcauaucgugggcucgcaacacauuagggcugagaaggccauggucgauggcucaugguuggaccucgcgaaacggagcaagcuggaagcacagccauucgcccaccugacaaucaacgcuacugauauaccgagugggucccauaaggugucucucagcuccugguaccacgaccgcggaugggccaaaaucucaaauaugaccuuuaguaacgguaaguuaauuguuaaucaggauggcuucuauuaccuguaugcaaacaucuguuuucgacaucacgagacaagcggggaccuugcuaccgaauacuugcagcugaugguguacgucacuaaaacaucuauuaagauccccuccucacacacccuaaugaaaggaggcagcacgaaguauuggagugguaauucugaguuccauuuuuacuccauaaacguagggggauucuuuaagcucagaagcggcgaggaaauuucgaucgaggugucuaauccuucccugcuugauccagaccaagacgccacuuauuucggcgcguucaaaguuagggauauugacuga

SEQ ID NO: 4758 - RNA, 954 nt, Artificial Sequence
  derived and/or modified sequence opt4 from RANK_ligand__Homo_sapiens__CCDS9384.1
augagaagagccagcagagacuacaccaaguaccugagaggcagcgaggagaugggcggcggccccggcgccccccacgagggcccccugcacgccccccccccccccgccccccaccagccccccgccgccagcagaagcauguucguggcccugcugggccugggccugggccagguggugugcagcguggcccuguucuucuacuucagagcccagauggaccccaacagaaucagcgaggacggcacccacugcaucuacagaauccugagacugcacgagaacgccgacuuccaggacaccacccuggagagccaggacaccaagcugauccccgacagcugcagaagaaucaagcaggccuuccagggcgccgugcagaaggagcugcagcacaucgugggcagccagcacaucagagccgagaaggccaugguggacggcagcuggcuggaccuggccaagagaagcaagcuggaggcccagcccuucgcccaccugaccaucaacgccaccgacauccccagcggcagccacaaggugagccugagcagcugguaccacgacagaggcugggccaagaucagcaacaugaccuucagcaacggcaagcugaucgugaaccaggacggcuucuacuaccuguacgccaacaucugcuucagacaccacgagaccagcggcgaccuggccaccgaguaccugcagcugaugguguacgugaccaagaccagcaucaagauccccagcagccacacccugaugaagggcggcagcaccaaguacuggagcggcaacagcgaguuccacuucuacagcaucaacgugggcggcuucuucaagcugagaagcggcgaggagaucagcaucgaggugagcaaccccagccugcuggaccccgaccaggacgccaccuacuucggcgccuucaaggugagagacaucgacuga

SEQ ID NO: 4759 - RNA, 954 nt, Artificial Sequence
  derived and/or modified sequence opt5 from RANK_ligand__Homo_sapiens__CCDS9384.1
augagacgggccagccgcgacuacaccaaguaucugagaggcuccgaggaaaugggagggggccccggggcuccucacgagggaccgcuccaugcgcccccucccccugcuccccaccagccuccggccgccucucggagcauguucguggcccugcuuggccuggggcucggacaagucguuugcuccguggcucuguuuuucuacuuucgcgcccagauggaucccaacagaaucucugaagacggcacacauuguauuuaucggauccuucgccugcacgagaaugcugauuuccaggacacgacccucgaaagccaggauacaaaacugauuccugacuccugcagacggaucaagcaagccuuucagggcgcggugcagaaagagcugcagcauauugucgggucucaacacauccgcgccgagaaggcuaugguggauggaagcuggcucgaccuggccaaaagauccaaacuugaagcucagcccuucgcccaccugaccaucaacgcgacagauauuccuagcggcucucauaagguuucccucagcucuugguaccacgaccgggggugggccaagaucuccaauaugaccuuuagcaacggaaagcugauugugaaucaggauggcuucuauuaccuuuaugcuaacaucuguuuucgccaucacgagacaucuggggaccuggccaccgaauaccuccagcugauggucuacgugacgaaaaccuccauuaagauccccagcucccacacacugaugaaaggaggcucuaccaaguauuggagcggcaauuccgaguuccauuuuuacagcauuaacguugggggauucuuuaagcucagaucuggcgaggaaaucuccaucgaggugagcaauccgucucugcuugauccugaccaagacgcuacauauuucggggccuucaaaguccgggauauugacuga

SEQ ID NO: 4760 - RNA, 954 nt, Artificial Sequence
  derived and/or modified sequence opt6 from RANK_ligand__Homo_sapiens__CCDS9384.1
augagaagagcaagcagagacuacacaaaauacuuaagaggaagcgaagaaaugggaggagguccaggagcaccacaugaaggaccauuacaugcgccuccaccaccagcaccacaccaaccaccagcagcaucaagaucaauguuuguagcacuauuaggacuaggacuuggacaaguagucuguucaguagcacuauuuuucuacuucagagcacaaauggacccaaacagaauaucagaagacggaacacacugcauauaccgaauauuaagacuacacgaaaacgcagacuuucaagauacaacauuagaaucacaagacacaaaacuaauaccugacaguugcagaagaauaaaacaagcauuccaaggagcaguacaaaaagaauuacaacauauaguaggaucacaacacauaagagcagaaaaagcaaugguagacggaucaugguuagaccuagccaaaagaucaaaacuagaagcacaaccauucgcccacuuaacaauaaacgcaacagacaucccaaguggaagucacaaaguaucacuaucaucaugguaccacgacagagguugggcaaaaauaaguaauaugacauucucaaacggaaaauuaauaguaaaccaagacggauuuuacuacuuauaugcaaacauaugcuucagacaucacgaaaccucaggcgaccuagcaacagaauaccuacaauuaaugguauacguaacaaaaacaucaauaaaaauaccaaguucacauacacuaaugaaaggcggaucaaccaaauacuggucugguaauucagaauuccacuuuuacucuaucaacguaggaggauuuuucaaacuacgaucaggggaagaaauaagcauagaaguaucaaauccuucacuauuagaccccgaccaagaugcuacauacuucggcgcauucaaaguaagagacauagacuaa

SEQ ID NO: 4761 - protein, 245 aa, Artificial Sequence
  Stem_Cell_Factor__Homo_sapiens__P21583-2
MKKTQTWILTCIYLQLLLFNPLVKTEGICRNRVTNNVKDVTKLVANLPKDYMITLKYVPGMDVLPSHCWISEMVVQLSDSLTDLLDKFSNISEGLSNYSIIDKLVNIVDDLVECVKENSSKDLKKSFKSPEPRLFTPEEFFRIFNRSIDAFKDFVVASETSDCVVSSTLSPEKGKAKNPPGDSSLHWAAMALPALFSLIIGFAFGALYWKKRQPSLTRAVENIQINEEDNEISMLQEKEREFQEV

SEQ ID NO: 4762 - RNA, 738 nt, Artificial Sequence
  Stem_Cell_Factor__Homo_sapiens__CCDS31867.1
augaagaagacacaaacuuggauucucacuugcauuuaucuucagcugcuccuauuuaauccucucgucaaaacugaagggaucugcaggaaucgugugacuaauaauguaaaagacgucacuaaauugguggcaaaucuuccaaaagacuacaugauaacccucaaauauguccccgggauggauguuuugccaagucauuguuggauaagcgagaugguaguacaauugucagacagcuugacugaucuucuggacaaguuuucaaauauuucugaaggcuugaguaauuauuccaucauagacaaacuugugaauauaguggaugaccuuguggagugcgugaaagaaaacucaucuaaggaucuaaaaaaaucauucaagagcccagaacccaggcucuuuacuccugaagaauucuuuagaauuuuuaauagauccauugaugccuucaaggacuuuguaguggcaucugaaacuagugauugugugguuucuucaacauuaaguccugagaaagggaaggccaaaaaucccccuggagacuccagccuacacugggcagccauggcauugccagcauuguuuucucuuauaauuggcuuugcuuuuggagccuuauacuggaagaagagacagccaagucuuacaagggcaguugaaaauauacaaauuaaugaagaggauaaugagauaaguauguugcaagagaaagagagagaguuucaagaaguguaa

SEQ ID NO: 4763 - RNA, 738 nt, Artificial Sequence
  derived and/or modified sequence opt1 from Stem_Cell_Factor__Homo_sapiens__CCDS31867.1
augaagaagacccagaccuggauccugacgugcaucuaccuccagcugcuccucuucaacccccuggugaagaccgagggcaucugccgcaaccgggucaccaacaacgugaaggacgugaccaagcuggucgccaaccucccgaaggacuacaugaucacgcugaaguacgugcccgggauggacgugcugcccagccacugcuggaucuccgagauggucgugcagcucagcgacucccugaccgaccugcucgacaaguucagcaacaucuccgagggccugagcaacuacuccaucaucgacaagcuggugaacaucgucgacgaccucguggagugcgugaaggagaacagcuccaaggaccugaagaaguccuucaagagccccgagccgcgccuguucacccccgaggaguucuuccggaucuucaaccgcagcaucgacgccuucaaggacuucgucguggcguccgagaccagcgacugcguggucuccagcacgcucucccccgagaaggggaaggccaagaacccgcccggcgacagcucccugcacugggccgccauggcccugcccgcgcuguucagccugaucaucggguucgccuucggcgcccuguacuggaagaagcggcagcccagccucacccgcgccguggagaacauccagaucaacgaggaggacaacgagaucuccaugcugcaggagaaggagcgggaguuccaggagguguga

SEQ ID NO: 4764 - RNA, 738 nt, Artificial Sequence
  derived and/or modified sequence opt2 from Stem_Cell_Factor__Homo_sapiens__CCDS31867.1
augaagaagacccagaccuggauccucaccugcaucuaccuccagcuccuccucuucaacccccucgucaagaccgagggcaucugccgcaaccgcgucaccaacaacgucaaggacgucaccaagcucgucgccaaccuccccaaggacuacaugaucacccucaaguacguccccggcauggacguccuccccucccacugcuggaucuccgagauggucguccagcucuccgacucccucaccgaccuccucgacaaguucuccaacaucuccgagggccucuccaacuacuccaucaucgacaagcucgucaacaucgucgacgaccucgucgagugcgucaaggagaacuccuccaaggaccucaagaaguccuucaagucccccgagccccgccucuucacccccgaggaguucuuccgcaucuucaaccgcuccaucgacgccuucaaggacuucgucgucgccuccgagaccuccgacugcgucgucuccuccacccucucccccgagaagggcaaggccaagaacccccccggcgacuccucccuccacugggccgccauggcccuccccgcccucuucucccucaucaucggcuucgccuucggcgcccucuacuggaagaagcgccagcccucccucacccgcgccgucgagaacauccagaucaacgaggaggacaacgagaucuccaugcuccaggagaaggagcgcgaguuccaggaggucuga

SEQ ID NO: 4765 - RNA, 738 nt, Artificial Sequence
  derived and/or modified sequence opt3 from Stem_Cell_Factor__Homo_sapiens__CCDS31867.1
augaagaaaacccagacauggauccugacuugcauuuaccuccaacuucuguuguucaaccccuuagugaagacggagggcauauguagaaauagggucaccaacaauguuaaagacgugacaaagcugguagccaaccuaccuaaagauuauaugaucacucucaaguacgugccagggauggacguccugccgagccacugcuggauuuccgaaauggugguucagcuuucugauucacugaccgacuugcucgauaaguuuaguaauaucagcgagggacuguccaacuauucuauuaucgacaaacuggugaauauagucgaugaccucguggaauguguaaaggagaacucgucaaaagauuuaaagaaaaguuucaagagccccgaaccucggcuguuuacaccagaggaguucuuucgcaucuucaaucgauccauugacgcuuuuaaggauuucguuguggcaucugaaaccagcgacugcgucguguccucaacucuuagucccgagaaagguaaggccaaaaacccuccaggcgauagcucuuugcauugggcggcuauggcccugcccgcacuauuuucccucaucauuggguucgccuuuggagcucuguacuggaagaaacgucagccuucacuuacaagagcaguggaaaauauccagauaaacgaggaggacaaugaaauuagcaugcugcaagagaaggaaagggaguuccaggaagucuga

SEQ ID NO: 4766 - RNA, 738 nt, Artificial Sequence
  derived and/or modified sequence opt4 from Stem_Cell_Factor__Homo_sapiens__CCDS31867.1
augaagaagacccagaccuggauccugaccugcaucuaccugcagcugcugcuguucaacccccuggugaagaccgagggcaucugcagaaacagagugaccaacaacgugaaggacgugaccaagcugguggccaaccugcccaaggacuacaugaucacccugaaguacgugcccggcauggacgugcugcccagccacugcuggaucagcgagaugguggugcagcugagcgacagccugaccgaccugcuggacaaguucagcaacaucagcgagggccugagcaacuacagcaucaucgacaagcuggugaacaucguggacgaccugguggagugcgugaaggagaacagcagcaaggaccugaagaagagcuucaagagccccgagcccagacuguucacccccgaggaguucuucagaaucuucaacagaagcaucgacgccuucaaggacuucgugguggccagcgagaccagcgacugcguggugagcagcacccugagccccgagaagggcaaggccaagaacccccccggcgacagcagccugcacugggccgccauggcccugcccgcccuguucagccugaucaucggcuucgccuucggcgcccuguacuggaagaagagacagcccagccugaccagagccguggagaacauccagaucaacgaggaggacaacgagaucagcaugcugcaggagaaggagagagaguuccaggagguguga

SEQ ID NO: 4767 - RNA, 738 nt, Artificial Sequence
  derived and/or modified sequence opt5 from Stem_Cell_Factor__Homo_sapiens__CCDS31867.1
augaagaaaacccagacauggauccugacgugcauuuaccuccaacugcuucuguucaacccccucgugaagaccgagggcaucuguagaaaucgggucacaaacaauguuaaagacgugaccaagcugguggccaaccuuccuaaagauuauaugauuacacugaaguacgucccggggauggacgugcuccccagccacugcuggaucuccgaaaugguugugcagcugucugauagccugaccgaccuccuggauaaguuuuccaauauuucugagggacuuagcaacuauuccaucaucgacaaacuggucaauauuguggaugaccucguugaaugugugaaggagaacucuagcaaagaucugaagaaauccuucaagagcccugaaccccgccuuuuuacaccugaggaguucuuuagaaucuucaaucggucuauugacgcuuuuaaggauuucgucguggccuccgaaaccagcgacugcguggucucuuccacgcugagccccgagaaaggcaaggcgaaaaacccuccgggggauucuucccuccauugggcugccauggcccugcccgcucuguuuagccucaucauuggauucgccuuuggcgcucuguacuggaagaaacgccagccuucccuuaccagagccguugaaaauauccagauuaacgaggaggacaaugaaaucucuaugcugcaagagaaggaacgggaguuccaggaaguguga

SEQ ID NO: 4768 - RNA, 738 nt, Artificial Sequence
  derived and/or modified sequence opt6 from Stem_Cell_Factor__Homo_sapiens__CCDS31867.1
augaaaaaaacacaaaccuggauacuaacaugcauauaucuacaauuauuauuauucaacccacuaguaaaaacagaaggaauaugccgaaacagagucacaaacaacguaaaagacguaacaaaacuaguagcaaacuuaccaaaagacuacaugauaacacuaaaauacguaccaggaauggacguacuaccaucacacugcuggauaucagaaaugguaguacaacuaucagauuccuuaacagaccuauuagacaaauucucaaacauaucagaaggauuaucaaacuauucaauaauagacaaacuaguaaacauaguagacgaccuaguagaaugcguaaaagaaaacucaucaaaagacuuaaaaaaaucauucaaaucaccagaaccaagacuauuuacaccagaagaauucuucagaauauucaacagaucaauagacgcauuuaaagacuucguaguagcuucagaaacaucagacugcguaguaucaucaacacuaucaccagaaaaaggcaaagcaaaaaacccaccaggagacucaucauuacacugggcagcaauggcacuacccgcacuauucucacuaauaauaggauucgccuuuggugcauuauacuggaaaaaaagacaaccaucacucacaagagcaguagaaaacauacaaaucaacgaagaagacaacgaaauaucaaugcuacaagaaaaagaacgagaauuccaagaaguauaa

SEQ ID NO: 4769 - protein, 273 aa, Artificial Sequence
  Stem_Cell_Factor__Homo_sapiens__P21583
MKKTQTWILTCIYLQLLLFNPLVKTEGICRNRVTNNVKDVTKLVANLPKDYMITLKYVPGMDVLPSHCWISEMVVQLSDSLTDLLDKFSNISEGLSNYSIIDKLVNIVDDLVECVKENSSKDLKKSFKSPEPRLFTPEEFFRIFNRSIDAFKDFVVASETSDCVVSSTLSPEKDSRVSVTKPFMLPPVAASSLRNDSSSSNRKAKNPPGDSSLHWAAMALPALFSLIIGFAFGALYWKKRQPSLTRAVENIQINEEDNEISMLQEKEREFQEV

SEQ ID NO: 4770 - RNA, 822 nt, Artificial Sequence
  Stem_Cell_Factor__Homo_sapiens__CCDS31868.1
augaagaagacacaaacuuggauucucacuugcauuuaucuucagcugcuccuauuuaauccucucgucaaaacugaagggaucugcaggaaucgugugacuaauaauguaaaagacgucacuaaauugguggcaaaucuuccaaaagacuacaugauaacccucaaauauguccccgggauggauguuuugccaagucauuguuggauaagcgagaugguaguacaauugucagacagcuugacugaucuucuggacaaguuuucaaauauuucugaaggcuugaguaauuauuccaucauagacaaacuugugaauauaguggaugaccuuguggagugcgugaaagaaaacucaucuaaggaucuaaaaaaaucauucaagagcccagaacccaggcucuuuacuccugaagaauucuuuagaauuuuuaauagauccauugaugccuucaaggacuuuguaguggcaucugaaacuagugauugugugguuucuucaacauuaaguccugagaaagauuccagagucagugucacaaaaccauuuauguuacccccuguugcagccagcucccuuaggaaugacagcaguagcaguaauaggaaggccaaaaaucccccuggagacuccagccuacacugggcagccauggcauugccagcauuguuuucucuuauaauuggcuuugcuuuuggagccuuauacuggaagaagagacagccaagucuuacaagggcaguugaaaauauacaaauuaaugaagaggauaaugagauaaguauguugcaagagaaagagagagaguuucaagaaguguaa

SEQ ID NO: 4771 - RNA, 822 nt, Artificial Sequence
  derived and/or modified sequence opt1 from Stem_Cell_Factor__Homo_sapiens__CCDS31868.1
augaagaagacccagaccuggauccugacgugcaucuaccuccagcugcuccuguucaacccccuggugaagaccgagggcaucugccgcaaccgggucaccaacaacgugaaggacgugaccaagcuggucgccaaccucccgaaggacuacaugaucacgcugaaguacgugcccgggauggacgugcugcccagccacugcuggaucuccgagauggucgugcagcucagcgacucccugaccgaccugcucgacaaguucagcaacaucuccgagggccugagcaacuacuccaucaucgacaagcuggugaacaucgucgacgaccucguggagugcgugaaggagaacagcuccaaggaccugaagaaguccuucaagagccccgagccgcgccuguucacccccgaggaguucuuccggaucuucaaccgcagcaucgacgccuucaaggacuucgucguggcguccgagaccagcgacugcguggucuccagcacgcucucccccgagaaggacagccggguguccgugaccaagcccuucaugcugccgcccgucgccgccagcagccugcgcaacgacuccagcuccagcaaccggaaggccaagaacccgcccggggacuccagccuccacugggccgcgauggcccugcccgcccuguucucccucaucaucggcuucgccuucggggcgcuguacuggaagaagcgccagcccagccugacccgggccguggagaacauccagaucaacgaggaggacaacgagaucuccaugcuccaggagaaggagcgcgaguuccaggagguguga

SEQ ID NO: 4772 - RNA, 822 nt, Artificial Sequence
  derived and/or modified sequence opt2 from Stem_Cell_Factor__Homo_sapiens__CCDS31868.1
augaagaagacccagaccuggauccucaccugcaucuaccuccagcuccuccucuucaacccccucgucaagaccgagggcaucugccgcaaccgcgucaccaacaacgucaaggacgucaccaagcucgucgccaaccuccccaaggacuacaugaucacccucaaguacguccccggcauggacguccuccccucccacugcuggaucuccgagauggucguccagcucuccgacucccucaccgaccuccucgacaaguucuccaacaucuccgagggccucuccaacuacuccaucaucgacaagcucgucaacaucgucgacgaccucgucgagugcgucaaggagaacuccuccaaggaccucaagaaguccuucaagucccccgagccccgccucuucacccccgaggaguucuuccgcaucuucaaccgcuccaucgacgccuucaaggacuucgucgucgccuccgagaccuccgacugcgucgucuccuccacccucucccccgagaaggacucccgcgucuccgucaccaagcccuucaugcucccccccgucgccgccuccucccuccgcaacgacuccuccuccuccaaccgcaaggccaagaacccccccggcgacuccucccuccacugggccgccauggcccuccccgcccucuucucccucaucaucggcuucgccuucggcgcccucuacuggaagaagcgccagcccucccucacccgcgccgucgagaacauccagaucaacgaggaggacaacgagaucuccaugcuccaggagaaggagcgcgaguuccaggaggucuga

SEQ ID NO: 4773 - RNA, 822 nt, Artificial Sequence
  derived and/or modified sequence opt3 from Stem_Cell_Factor__Homo_sapiens__CCDS31868.1
augaagaaaacccagacauggauccugacuugcauuuaccuccaacuucuguuguucaaccccuuagugaagacggagggcauauguagaaauagggucaccaacaauguuaaagacgugacaaagcugguagccaaccuaccuaaagauuauaugaucacucucaaguacgugccagggauggacguccugccgagccacugcuggauuuccgaaauggugguucagcuuucugauucacugaccgacuugcucgauaaguuuaguaauaucagcgagggacuguccaacuauucuauuaucgacaaacuggugaauauagucgaugaccucguggaauguguaaaggagaacucgucaaaagauuuaaagaaaaguuucaagagccccgaaccucggcuguuuacaccagaggaguucuuucgcaucuucaaucgauccauugacgcuuuuaaggauuucguuguggcaucugaaaccagcgacugcgucguguccucaacucuuagucccgagaaagauagccgugugucugucacaaagccuuuuauguugccacccguugccgcguccucacugagaaacgacagcaguucuuccaauaggaaagcuaagaacccuccaggugacagcucgcuacauugggccgcaauggcccucccggcucuguucucucuuaucauuggcuuugcauucggggcccuguacuggaaaaagcggcagcccuccuugacccgcgcuguggaaaauauccagauaaacgaggaggauaaugaaauuucaaugcuccaagagaaagaaagagaguuucaggaaguauga

SEQ ID NO: 4774 - RNA, 822 nt, Artificial Sequence
  derived and/or modified sequence opt4 from Stem_Cell_Factor__Homo_sapiens__CCDS31868.1
augaagaagacccagaccuggauccugaccugcaucuaccugcagcugcugcuguucaacccccuggugaagaccgagggcaucugcagaaacagagugaccaacaacgugaaggacgugaccaagcugguggccaaccugcccaaggacuacaugaucacccugaaguacgugcccggcauggacgugcugcccagccacugcuggaucagcgagaugguggugcagcugagcgacagccugaccgaccugcuggacaaguucagcaacaucagcgagggccugagcaacuacagcaucaucgacaagcuggugaacaucguggacgaccugguggagugcgugaaggagaacagcagcaaggaccugaagaagagcuucaagagccccgagcccagacuguucacccccgaggaguucuucagaaucuucaacagaagcaucgacgccuucaaggacuucgugguggccagcgagaccagcgacugcguggugagcagcacccugagccccgagaaggacagcagagugagcgugaccaagcccuucaugcugccccccguggccgccagcagccugagaaacgacagcagcagcagcaacagaaaggccaagaacccccccggcgacagcagccugcacugggccgccauggcccugcccgcccuguucagccugaucaucggcuucgccuucggcgcccuguacuggaagaagagacagcccagccugaccagagccguggagaacauccagaucaacgaggaggacaacgagaucagcaugcugcaggagaaggagagagaguuccaggagguguga

SEQ ID NO: 4775 - RNA, 822 nt, Artificial Sequence
  derived and/or modified sequence opt5 from Stem_Cell_Factor__Homo_sapiens__CCDS31868.1
augaagaaaacccagacauggauccugacgugcauuuaccuccaacugcuucuguucaacccccucgugaagaccgagggcaucuguagaaaucgggucacaaacaauguuaaagacgugaccaagcugguggccaaccuuccuaaagauuauaugauuacacugaaguacgucccggggauggacgugcuccccagccacugcuggaucuccgaaaugguugugcagcugucugauagccugaccgaccuccuggauaaguuuuccaauauuucugagggacuuagcaacuauuccaucaucgacaaacuggucaauauuguggaugaccucguugaaugugugaaggagaacucuagcaaagaucugaagaaauccuucaagagcccugaaccccgccuuuuuacaccugaggaguucuuuagaaucuucaaucggucuauugacgcuuuuaaggauuucgucguggccuccgaaaccagcgacugcguggucucuuccacgcugagccccgagaaagauucucgcguuuccgugaccaagccuuuuaugcucccgcccguggcggcuagcucccugagaaacgacucuagcuccagcaaucggaaagccaagaacccucccggcgacucuucccugcauugggccgcuauggcccucccugcucuguucagccuuaucauuggguuugccuucggagcgcuguacuggaaaaagcgccagcccucucucacaagagccgucgaaaauauccagauuaacgaggaggauaaugaaaucagcaugcugcaagagaaagaacgggaguuucaggaaguguga

SEQ ID NO: 4776 - RNA, 822 nt, Artificial Sequence
  derived and/or modified sequence opt6 from Stem_Cell_Factor__Homo_sapiens__CCDS31868.1
augaaaaaaacacaaacauggauccucacaugcauauaccuacaacuacuacuauucaacccauuaguaaaaacagaaggaaucugcagaaacagaguaacaaacaacgucaaagacguaacaaaacuaguagcaaaucuacccaaagacuacaugauaacacuaaaauacguaccaggaauggacguacucccaucccacugcuggauauccgaaaugguaguacaacuaucagauucacuaacagaccuauuagacaaauucucaaacauaucagaaggauuaucaaacuacucuauaauagacaaauuaguaaacauaguagacgaccuagucgaauguguuaaagaaaacuccucaaaagaccuaaaaaaaagcuucaaaucaccagaaccucgacuauucacacccgaagaauucuucagaauauucaacagaucaauagacgcauucaaagacuucguuguagcaucagaaacaucugacuguguaguaagcucaacacuaucaccagaaaaagacucacgaguauccgucacaaaaccauuuaugcuaccaccaguagcugcaucaucauuaagaaacgacucaucaucauccaacagaaaagcaaaaaacccaccaggagacucaucacuacacugggcagcaauggcacuaccagcauuauuuucauuaauaauaggauucgcauucggagcacuauacuggaaaaaacgucaaccaucauuaacacgagcaguagaaaacauacaaauaaacgaagaagauaacgaaauaucaaugcuacaagaaaaagaaagagaauuucaagaaguuuaa

SEQ ID NO: 4777 - protein, 390 aa, Artificial Sequence
  TGFbeta1__Homo_sapiens__A0A024R0P8
MPPSGLRLLLLLLPLLWLLVLTPGRPAAGLSTCKTIDMELVKRKRIEAIRGQILSKLRLASPPSQGEVPPGPLPEAVLALYNSTRDRVAGESAEPEPEPEADYYAKEVTRVLMVETHNEIYDKFKQSTHSIYMFFNTSELREAVPEPVLLSRAELRLLRLKLKVEQHVELYQKYSNNSWRYLSNRLLAPSDSPEWLSFDVTGVVRQWLSRGGEIEGFRLSAHCSCDSRDNTLQVDINGFTTGRRGDLATIHGMNRPFLLLMATPLERAQHLQSSRHRRALDTNYCFSSTEKNCCVRQLYIDFRKDLGWKWIHEPKGYHANFCLGPCPYIWSLDTQYSKVLALYNQHNPGASAAPCCVPQALEPLPIVYYVGRKPKVEQLSNMIVRSCKCS

SEQ ID NO: 4778 - RNA, 1173 nt, Artificial Sequence
  TGFbeta1__Homo_sapiens__EAW57033
augccgcccuccgggcugcggcugcugcugcugcugcuaccgcugcuguggcuacuggugcugacgccuggccggccggccgcgggacuauccaccugcaagacuaucgacauggagcuggugaagcggaagcgcaucgaggccauccgcggccagauccuguccaagcugcggcucgccagccccccgagccagggggaggugccgcccggcccgcugcccgaggccgugcucgcccuguacaacagcacccgcgaccggguggccggggagagugcagaaccggagcccgagccugaggccgacuacuacgccaaggaggucacccgcgugcuaaugguggaaacccacaacgaaaucuaugacaaguucaagcagaguacacacagcauauauauguucuucaacacaucagagcuccgagaagcgguaccugaacccguguugcucucccgggcagagcugcgucugcugaggcucaaguuaaaaguggagcagcacguggagcuguaccagaaauacagcaacaauuccuggcgauaccucagcaaccggcugcuggcacccagcgacucgccagagugguuaucuuuugaugucaccggaguugugcggcagugguugagccguggaggggaaauugagggcuuucgccuuagcgcccacugcuccugugacagcagggauaacacacugcaaguggacaucaacggguucacuaccggccgccgaggugaccuggccaccauucauggcaugaaccggccuuuccugcuucucauggccaccccgcuggagagggcccagcaucugcaaagcucccggcaccgccgagcccuggacaccaacuauugcuucagcuccacggagaagaacugcugcgugcggcagcuguacauugacuuccgcaaggaccucggcuggaaguggauccacgagcccaagggcuaccaugccaacuucugccucgggcccugccccuacauuuggagccuggacacgcaguacagcaagguccuggcccuguacaaccagcauaacccgggcgccucggcggcgccgugcugcgugccgcaggcgcuggagccgcugcccaucguguacuacgugggccgcaagcccaagguggagcagcuguccaacaugaucgugcgcuccugcaagugcagcuga

SEQ ID NO: 4779 - RNA, 1173 nt, Artificial Sequence
  derived and/or modified sequence opt1 from TGFbeta1__Homo_sapiens__EAW57033
augcccccgagcggccugcgccuccugcugcuccugcugccccuccuguggcugcucgugcugacccccgggcggcccgccgccggccuguccacgugcaagaccaucgacauggagcucgucaagcgcaagcggaucgaggcgauccgcgggcagauccugagcaagcugcggcucgccuccccgcccagccagggcgaggugccgcccgggccccugcccgaggccgugcuggcccucuacaacuccacccgcgaccgggucgccggcgagagcgcggagcccgagcccgagccggaggccgacuacuacgccaaggaggugacccgcgugcugauggucgagacccacaacgagaucuacgacaaguucaagcaguccacgcacagcaucuacauguucuucaacaccuccgagcugcgggaggccgugcccgagcccgugcuccugagccgcgcggagcugcggcuccugcgccugaagcucaaggucgagcagcacguggagcuguaccagaaguacuccaacaacagcuggcgguaccuguccaaccgccuccuggcccccagcgacuccccggaguggcugagcuucgacgugaccggcgucgugcggcaguggcucucccgcgggggcgagaucgagggguuccggcugagcgcccacugcuccugcgacagccgcgacaacacccuccagguggacaucaacggcuucacgaccgggcggcgcggcgaccuggccaccauccacggcaugaaccggcccuuccugcugcucauggccacgccccuggagcgcgcgcagcaccuccagagcucccgccaccggcgcgcccuggacaccaacuacugcuucagcuccaccgagaagaacugcugcguccggcagcuguacaucgacuuccgcaaggaccugggguggaaguggauccacgagcccaagggcuaccacgccaacuucugccucgggccgugccccuacaucuggagccuggacacccaguacuccaaggugcuggcccucuacaaccagcacaaccccggcgccagcgcggcccccugcugcgugccgcaggcccuggagccccugcccaucgucuacuacgugggccggaagcccaagguggagcagcuguccaacaugaucguccgcagcugcaagugcuccuga

SEQ ID NO: 4780 - RNA, 1173 nt, Artificial Sequence
  derived and/or modified sequence opt2 from TGFbeta1__Homo_sapiens__EAW57033
augccccccuccggccuccgccuccuccuccuccuccucccccuccucuggcuccucguccucacccccggccgccccgccgccggccucuccaccugcaagaccaucgacauggagcucgucaagcgcaagcgcaucgaggccauccgcggccagauccucuccaagcuccgccucgccuccccccccucccagggcgaggucccccccggcccccuccccgaggccguccucgcccucuacaacuccacccgcgaccgcgucgccggcgaguccgccgagcccgagcccgagcccgaggccgacuacuacgccaaggaggucacccgcguccucauggucgagacccacaacgagaucuacgacaaguucaagcaguccacccacuccaucuacauguucuucaacaccuccgagcuccgcgaggccguccccgagcccguccuccucucccgcgccgagcuccgccuccuccgccucaagcucaaggucgagcagcacgucgagcucuaccagaaguacuccaacaacuccuggcgcuaccucuccaaccgccuccucgcccccuccgacucccccgaguggcucuccuucgacgucaccggcgucguccgccaguggcucucccgcggcggcgagaucgagggcuuccgccucuccgcccacugcuccugcgacucccgcgacaacacccuccaggucgacaucaacggcuucaccaccggccgccgcggcgaccucgccaccauccacggcaugaaccgccccuuccuccuccucauggccaccccccucgagcgcgcccagcaccuccaguccucccgccaccgccgcgcccucgacaccaacuacugcuucuccuccaccgagaagaacugcugcguccgccagcucuacaucgacuuccgcaaggaccucggcuggaaguggauccacgagcccaagggcuaccacgccaacuucugccucggccccugccccuacaucuggucccucgacacccaguacuccaagguccucgcccucuacaaccagcacaaccccggcgccuccgccgcccccugcugcgucccccaggcccucgagccccuccccaucgucuacuacgucggccgcaagcccaaggucgagcagcucuccaacaugaucguccgcuccugcaagugcuccuga

SEQ ID NO: 4781 - RNA, 1173 nt, Artificial Sequence
  derived and/or modified sequence opt3 from TGFbeta1__Homo_sapiens__EAW57033
augcccccuagcggccugagacuccuucuguuguuacugccacuacucuggcugcuugugcugaccccggggaggcccgccgcuggauuguccacaugcaagacuaucgacauggagcucgucaaacggaagcgcauugaagcaauacgaggucagauccugucuaaacugcgucucgccucaccuccaagucaaggcgagguucccccugggccauuacccgaagcggugcuggcucuuuacaacagcacgagagauaggguagccggagaguccgcagaaccugagccagagccggaagccgacuauuacgcuaaggaggugacccgggucuugaugguggaaacacacaaugagauuuaugauaaauucaagcagucuacucauucgaucuacauguuuuucaacaccucagagcugcgcgaagcaguucccgagccugugcuacucagcagagccgaacugaggcuucugcgguugaagcucaaagucgagcagcacguggaacuguaucagaaguacaguaauaacuccuggcgcuauuuaucuaaucgacugcucgcuccaagcgacucccccgaguggcuuucauuugauguaacaggcguugugagacaauggcugaguagggguggggagauugaaggauuccgguugagcgcccauuguucuugcgacucccgugauaacacccuacaggucgacaucaauggcuuuacuacaggccgcagaggggaucuggcgaccauacacggaaugaacaggccuuuccuccugcuuauggcaacgccacuggagcgggcccagcauuugcagucaagccgacaccgcagagcucucgacacuaauuacuguuuuaguucuaccgagaaaaacugcugugugaggcaacuguacaucgauuuccggaaggacuuagguuggaaauggauucacgaacccaagggcuaucaugccaauuuuugccuggggccguguccuuacaucuggucccuagauacacaguauagcaaggugcucgcacuguacaaccagcacaaucccggagcuucggccgcgccaugcugugucccucaggcccuugaacccuugccaauuguuuauuacgugggccgcaaacccaagguagagcaacugucuaacaugaucgugagauccugcaaauguucauga

SEQ ID NO: 4782 - RNA, 1173 nt, Artificial Sequence
  derived and/or modified sequence opt4 from TGFbeta1__Homo_sapiens__EAW57033
augccccccagcggccugagacugcugcugcugcugcugccccugcuguggcugcuggugcugacccccggcagacccgccgccggccugagcaccugcaagaccaucgacauggagcuggugaagagaaagagaaucgaggccaucagaggccagauccugagcaagcugagacuggccagcccccccagccagggcgaggugccccccggcccccugcccgaggccgugcuggcccuguacaacagcaccagagacagaguggccggcgagagcgccgagcccgagcccgagcccgaggccgacuacuacgccaaggaggugaccagagugcugaugguggagacccacaacgagaucuacgacaaguucaagcagagcacccacagcaucuacauguucuucaacaccagcgagcugagagaggccgugcccgagcccgugcugcugagcagagccgagcugagacugcugagacugaagcugaagguggagcagcacguggagcuguaccagaaguacagcaacaacagcuggagauaccugagcaacagacugcuggcccccagcgacagccccgaguggcugagcuucgacgugaccggcguggugagacaguggcugagcagaggcggcgagaucgagggcuucagacugagcgcccacugcagcugcgacagcagagacaacacccugcagguggacaucaacggcuucaccaccggcagaagaggcgaccuggccaccauccacggcaugaacagacccuuccugcugcugauggccaccccccuggagagagcccagcaccugcagagcagcagacacagaagagcccuggacaccaacuacugcuucagcagcaccgagaagaacugcugcgugagacagcuguacaucgacuucagaaaggaccugggcuggaaguggauccacgagcccaagggcuaccacgccaacuucugccugggccccugccccuacaucuggagccuggacacccaguacagcaaggugcuggcccuguacaaccagcacaaccccggcgccagcgccgcccccugcugcgugccccaggcccuggagccccugcccaucguguacuacgugggcagaaagcccaagguggagcagcugagcaacaugaucgugagaagcugcaagugcagcuga

SEQ ID NO: 4783 - RNA, 1173 nt, Artificial Sequence
  derived and/or modified sequence opt5 from TGFbeta1__Homo_sapiens__EAW57033
augcccccuagcggccugagacuccugcuucugcuccugccgcuucuguggcuccuggugcugacccccgggcggccugccgcuggacucuccacaugcaagacgaucgacauggagcuggucaaacgcaagagaauugaagccauccggggccagauucuuucuaaacugcgccucgcgagcccucccucccaaggggagguucccccuggaccgcugcccgaagcugugcuugcccuguacaacucuaccagagaucggguggccggcgagagcgcugaaccugagcccgagccugaagccgacuauuacgcuaaggaggucacacgcgugcucaugguugaaacccacaaugagaucuaugauaaauucaagcaguccacacauucuauuuacauguuuuucaacaccagcgagcugagagaagccgugcccgagccgguccugcucucccgggcggaacugcgccuucugagacucaagcugaaaguggagcagcacguugaacuuuaucagaaguacagcaauaacucuuggcgguaucuguccaaucgccuccuggccccuagcgacucucccgaguggcuguccuuugaugugacaggggucgugagacaauggcucagccggggaggcgagaucgaaggcuuccgccugucugcucauuguuccugcgacagcagagauaacacccuucagguggacaucaauggguuuacgaccggacggagaggcgaucuggccacaauucacgggaugaaccgcccuuuccuccugcuuauggcuacaccccuggagcgggcccagcaucuccaguccucuagacaccgccgggcgcuggacaccaauuacuguuuuagcuccaccgagaaaaacugcugugucagacaacuguacaucgauuuccgcaaggaccucggauggaaauggauucacgaacccaagggcuaucaugccaauuuuugccuggggccuuguccguacaucuggagccuugauacgcaguauucuaagguucuggcucucuacaaccagcacaaucccggagccuccgcugccccuugcugugugccccaggcccuggaaccucugcccauuguguauuacgucggccggaaaccgaagguggagcaacuuagcaacaugaucguuagaucuugcaaauguagcuga

SEQ ID NO: 4784 - RNA, 1173 nt, Artificial Sequence
  derived and/or modified sequence opt6 from TGFbeta1__Homo_sapiens__EAW57033
augccaccaucuggacuaagacuuuuauuacuacuacuaccacuauuauggcuuuuaguucuaacaccaggaaggccagcagcaggacuaucaacaugcaaaaccauugauauggaauuaguaaaacgaaaaagaaucgaagccauacgaggacaaauacuaucaaaacuuagacuugcaagcccaccuucccaaggcgaaguaccucccggaccauuaccugaagcaguauuagcucuauacaacuccacucgagaccgaguagccggagaauccgccgaaccagaaccagaaccagaagcagauuacuacgcaaaagaaguaacaagaguuuugaugguagaaacgcacaacgaaauauaugacaaauucaaacaauccacacauucuauauacauguucuucaauacaucugaacuaagagaagcaguacccgaaccaguacuauuaucacgagccgaacuaagacuucuccgacuaaaacuaaaaguagaacaacacguugaacuuuaucaaaaauacucaaauaauucauggagauauuuaucaaauagauuauuagcaccaucagacucuccagaauggcuaucauuugacguaaccggaguaguaagacaaugguuaucuagaggaggagaaauagaagguuuccgauuaucagcacacugcucaugcgauucccgagacaauacauuacaagucgacauaaauggauucacaacaggcagaagaggagaccuagcaacaauacacggaaugaauagaccauuccuauuauuaauggcaacaccauuagaaagagcacaacaccuacaaucuucaagacacagaagagcacuagacacaaacuacuguuucucaucuacagaaaaaaacugcugcgucagacaauuauauauagauuucagaaaagaccuuggauggaaauggauucaugaaccaaaaggauaccacgcaaacuucuguuuaggaccauguccauacauauggucacuagauacacaauacucaaaaguucuagcacucuacaaucaacacaacccaggagcuucagccgcaccaugcuguguaccacaagcucuagaaccacuuccaauaguuuacuauguaggaagaaaaccaaaaguagaacaauuaucaaacaugaucguacgaucauguaaaugcucauaa

SEQ ID NO: 4785 - protein, 390 aa, Artificial Sequence; identical to SEQ ID NO: 4777
  TGFbeta1__Homo_sapiens__P01137

SEQ ID NO: 4786 - RNA, 1173 nt, Artificial Sequence; identical to SEQ ID NO: 4778
  TGFbeta1__Homo_sapiens__AAH00125

SEQ ID NO: 4787 - RNA, 1173 nt, Artificial Sequence; identical to SEQ ID NO: 4779
  derived and/or modified sequence opt1 from TGFbeta1__Homo_sapiens__AAH00125

SEQ ID NO: 4788 - RNA, 1173 nt, Artificial Sequence; identical to SEQ ID NO: 4780
  derived and/or modified sequence opt2 from TGFbeta1__Homo_sapiens__AAH00125

SEQ ID NO: 4789 - RNA, 1173 nt, Artificial Sequence; identical to SEQ ID NO: 4781
  derived and/or modified sequence opt3 from TGFbeta1__Homo_sapiens__AAH00125

SEQ ID NO: 4790 - RNA, 1173 nt, Artificial Sequence; identical to SEQ ID NO: 4782
  derived and/or modified sequence opt4 from TGFbeta1__Homo_sapiens__AAH00125

SEQ ID NO: 4791 - RNA, 1173 nt, Artificial Sequence; identical to SEQ ID NO: 4783
  derived and/or modified sequence opt5 from TGFbeta1__Homo_sapiens__AAH00125

SEQ ID NO: 4792 - RNA, 1173 nt, Artificial Sequence
  derived and/or modified sequence opt6 from TGFbeta1__Homo_sapiens__AAH00125
augccaccaucaggauuaagauuacuacuauuacuacuaccacuucuaugguuauuaguacuaacaccaggaagacccgccgcaggacuaucaacaugcaaaacaauagacauggaauuaguaaaaagaaaacgcauagaagcaauaagaggacaaauauuaucaaaauuaagacuagcauccccacccucacaaggagaagucccaccaggcccacuaccagaagcaguacuagcacuauacaacucaacaagagacagaguagcaggagaaucagcagaaccugaaccggaaccagaagcagacuacuacgcaaaagaaguaacaagaguacuaaugguugaaacucauaacgaaauauaugacaaauucaaacaaucaacacauucaauuuauauguucuuuaacacaucagaacuaagagaagcaguuccugaaccaguccuauuauccagagcagaauuaagacuauuaagauuaaaauuaaaaguagaacaacauguagaacuauaucaaaaauacucaaacaauucuuggagauaccuauccaaucgucuccuagccccaucagauuccccagaauggcuaucauucgaugucacaggaguaguaaggcaaugguuauccagaggaggagaaauagaaggauuuagacuaucagcacacugcaguugcgacucuagagacaauacucuacaaguagauauaaauggcuuuacaacaggacguaggggagauuuagcaacuauacacgguaugaaucgaccauuucuauuacuaauggcaacaccacuugaacgugcucaacacuuacaaucuucacgccacagaagagcacucgacacaaauuacugcuucucaagcacagaaaaaaacugcugcguuagacaauuauacauagacuucagaaaagauuuaggauggaaauggauccacgaaccaaaaggauaccaugccaacuucuguuuaggaccaugcccauacauauggucacuagacacacaauacucaaaaguccuagcucuauauaaucaacauaacccaggugccuccgcagccccuuguuguguaccccaagcacuagaaccauuaccaauaguauauuacguaggaagaaaaccaaaaguagaacaacuaucaaauaugauaguaagaagcugcaaauguucauaa

SEQ ID NO: 4793 - protein, 414 aa, Artificial Sequence
  TGFbeta2__Homo_sapiens__P61812
MHYCVLSAFLILHLVTVALSLSTCSTLDMDQFMRKRIEAIRGQILSKLKLTSPPEDYPEPEEVPPEVISIYNSTRDLLQEKASRRAAACERERSDEEYYAKEVYKIDMPPFFPSENAIPPTFYRPYFRIVRFDVSAMEKNASNLVKAEFRVFRLQNPKARVPEQRIELYQILKSKDLTSPTQRYIDSKVVKTRAEGEWLSFDVTDAVHEWLHHKDRNLGFKISLHCPCCTFVPSNNYIIPNKSEELEARFAGIDGTSTYTSGDQKTIKSTRKKNSGKTPHLLLMLLPSYRLESQQTNRRKKRALDAAYCFRNVQDNCCLRPLYIDFKRDLGWKWIHEPKGYNANFCAGACPYLWSSDTQHSRVLSLYNTINPEASASPCCVSQDLEPLTILYYIGKTPKIEQLSNMIVKSCKCS

SEQ ID NO: 4794 - RNA, 1245 nt, Artificial Sequence
  TGFbeta2__Homo_sapiens__AAH96235
augcacuacugugugcugagcgcuuuucugauccugcaucuggucacggucgcgcucagccugucuaccugcagcacacucgauauggaccaguucaugcgcaagaggaucgaggcgauccgcgggcagauccugagcaagcugaagcucaccagucccccagaagacuauccugagcccgaggaaguccccccggaggugauuuccaucuacaacagcaccagggacuugcuccaggagaaggcgagccggagggcggccgccugcgagcgcgagaggagcgacgaagaguacuacgccaaggagguuuacaaaauagacaugccgcccuucuuccccuccgaaaaugccaucccgcccacuuucuacagacccuacuucagaauuguucgauuugacgucucagcaauggagaagaaugcuuccaauuuggugaaagcagaguucagagucuuucguuugcagaacccaaaagccagagugccugaacaacggauugagcuauaucagauucucaaguccaaagauuuaacaucuccaacccagcgcuacaucgacagcaaaguugugaaaacaagagcagaaggcgaauggcucuccuucgauguaacugaugcuguucaugaauggcuucaccauaaagacaggaaccugggauuuaaaauaagcuuacacugucccugcugcacuuuuguaccaucuaauaauuacaucaucccaaauaaaagugaagaacuagaagcaagauuugcagguauugauggcaccuccacauauaccaguggugaucagaaaacuauaaaguccacuaggaaaaaaaacagugggaagaccccacaucuccugcuaauguuauugcccuccuacagacuugagucacaacagaccaaccggcggaagaagcgugcuuuggaugcggccuauugcuuuagaaaugugcaggauaauugcugccuacguccacuuuacauugauuucaagagggaucuaggguggaaauggauacacgaacccaaaggguacaaugccaacuucugugcuggagcaugcccguauuuauggaguucagacacucagcacagcaggguccugagcuuauauaauaccauaaauccagaagcaucugcuucuccuugcugcgugucccaagauuuagaaccucuaaccauucucuacuacauuggcaaaacacccaagauugaacagcuuucuaauaugauuguaaagucuugcaaaugcagcuaa

SEQ ID NO: 4795 - RNA, 1245 nt, Artificial Sequence
  derived and/or modified sequence opt1 from TGFbeta2__Homo_sapiens__AAH96235
augcacuacugcgugcugagcgccuuccucauccugcaccuggucaccguggcccucucccugagcacgugcuccacccuggacauggaccaguucaugcgcaagcggaucgaggcgauccgcggccagauccucagcaagcugaagcugaccagcccgcccgaggacuaccccgagcccgaggaggugcccccggaggucaucuccaucuacaacuccacccgggaccuccugcaggagaaggccagccgccgggccgccgccugcgagcgcgagcgguccgacgaggaguacuacgcgaaggagguguacaagaucgacaugccgcccuucuuccccagcgagaacgccaucccgcccaccuucuaccgccccuacuuccggaucgugcgcuucgacgucuccgccauggagaagaacgccagcaaccuggugaaggcggaguuccggguguuccgccuccagaaccccaaggcccggguccccgagcagcgcaucgagcuguaccagauccugaaguccaaggaccucacgagccccacccagcgguacaucgacuccaagguggugaagacccgcgccgagggggaguggcugagcuucgacgucaccgacgccgugcacgaguggcugcaccacaaggaccggaaccucggcuucaagaucucccugcacugccccugcugcacguucgugcccagcaacaacuacaucaucccgaacaaguccgaggagcuggaggcccgcuucgcggggaucgacggcaccagcaccuacaccagcggggaccagaagacgaucaaguccacccggaagaagaacagcggcaagacgccccaccuccugcugaugcuccugcccuccuaccgccuggagagccagcagaccaaccggcgcaagaagcgcgcccucgacgccgccuacugcuuccggaacguccaggacaacugcugccugcgcccccuguacaucgacuucaagcgggaccucggcuggaaguggauccacgagccgaagggguacaacgccaacuucugcgcgggcgccugccccuaccugugguccagcgacacccagcacucccgcgugcugagccucuacaacaccaucaaccccgaggccuccgccagccccugcugcgugucccaggaccuggagccgcugaccauccucuacuacaucgggaagacccccaagaucgagcagcugagcaacaugaucgucaaguccugcaagugcagcuga

SEQ ID NO: 4796 - RNA, 1245 nt, Artificial Sequence
  derived and/or modified sequence opt2 from TGFbeta2__Homo_sapiens__AAH96235
augcacuacugcguccucuccgccuuccucauccuccaccucgucaccgucgcccucucccucuccaccugcuccacccucgacauggaccaguucaugcgcaagcgcaucgaggccauccgcggccagauccucuccaagcucaagcucaccuccccccccgaggacuaccccgagcccgaggaggucccccccgaggucaucuccaucuacaacuccacccgcgaccuccuccaggagaaggccucccgccgcgccgccgccugcgagcgcgagcgcuccgacgaggaguacuacgccaaggaggucuacaagaucgacaugccccccuucuuccccuccgagaacgccaucccccccaccuucuaccgccccuacuuccgcaucguccgcuucgacgucuccgccauggagaagaacgccuccaaccucgucaaggccgaguuccgcgucuuccgccuccagaaccccaaggcccgcguccccgagcagcgcaucgagcucuaccagauccucaaguccaaggaccucaccucccccacccagcgcuacaucgacuccaaggucgucaagacccgcgccgagggcgaguggcucuccuucgacgucaccgacgccguccacgaguggcuccaccacaaggaccgcaaccucggcuucaagaucucccuccacugccccugcugcaccuucguccccuccaacaacuacaucauccccaacaaguccgaggagcucgaggcccgcuucgccggcaucgacggcaccuccaccuacaccuccggcgaccagaagaccaucaaguccacccgcaagaagaacuccggcaagaccccccaccuccuccucaugcuccuccccuccuaccgccucgagucccagcagaccaaccgccgcaagaagcgcgcccucgacgccgccuacugcuuccgcaacguccaggacaacugcugccuccgcccccucuacaucgacuucaagcgcgaccucggcuggaaguggauccacgagcccaagggcuacaacgccaacuucugcgccggcgccugccccuaccucugguccuccgacacccagcacucccgcguccucucccucuacaacaccaucaaccccgaggccuccgccucccccugcugcgucucccaggaccucgagccccucaccauccucuacuacaucggcaagacccccaagaucgagcagcucuccaacaugaucgucaaguccugcaagugcuccuga

SEQ ID NO: 4797 - RNA, 1245 nt, Artificial Sequence
  derived and/or modified sequence opt3 from TGFbeta2__Homo_sapiens__AAH96235
augcacuacugcgugcugagcgccuuccucauccuucaucuggucaccguugcuuuguccuuaucuacauguucaacucuggacauggaucaguuuaugagaaagaggauugaggcaauacggggccaaauccuaaguaaacucaagcugacgagcccucccgaagacuauccagagccggaagaggugcccccugaaguaauuuccaucuacaacucuacccgcgaucuucugcaggagaaagccucgcgacgugcggcugccugcgagagagaaaggucagacgaggaauauuacgcaaaggagguguauaaaauugauaugccacccuucuuuccuagcgagaaugccaucccacccacauucuaccggccuuauuuucgcauagucagauucgacgugagugcuauggaaaagaacgcauccaauuugguuaaggccgaguuuaggguguuccggcuccagaacccaaaagcucgcgucccggaacagcgaaucgagcuguaccaaauucugaagucuaaagaucucacuagccccacccagagauacaucgacuccaaggugguaaaaacaagggccgaaggggagugguuaucauuugauguuaccgacgcggugcacgaguggcugcaucacaaggaucggaaucuuggauucaagauuaguuugcauuguccuugcuguacuuuugucccaagcaacaauuauaucauacccaacaaaucugaggaacuggaagcacguuucgccgguauugacggcacauccaccuacacgucaggggaucagaagacuaucaaaagcacccgcaagaaaaauaguggaaagacaccucaccuacuccugaugcuucugccaucuuauagauuggagucccagcaaacuaacaggcggaaaaagcgagcucucgacgccgcauacugcuuucgcaaugugcaggacaacuguugccugagacccuuauauauugauuucaagagggaccugggcuggaaauggauccacgaaccgaaggguuacaaugcuaacuucugugccggggcgugcccuuaucucuggagcucggauacccagcauucucgggugcuuucccuguacaauacaaucaaccccgaggccucagcaaguccauguugcgucagccaggacuuggagccucuaaccauucuguacuauauaggaaaaacgcccaagaucgaacaacucuccaacaugauuguuaaaucuugcaaguguagcuga

SEQ ID NO: 4798 - RNA, 1245 nt, Artificial Sequence
  derived and/or modified sequence opt4 from TGFbeta2__Homo_sapiens__AAH96235
augcacuacugcgugcugagcgccuuccugauccugcaccuggugaccguggcccugagccugagcaccugcagcacccuggacauggaccaguucaugagaaagagaaucgaggccaucagaggccagauccugagcaagcugaagcugaccagcccccccgaggacuaccccgagcccgaggaggugccccccgaggugaucagcaucuacaacagcaccagagaccugcugcaggagaaggccagcagaagagccgccgccugcgagagagagagaagcgacgaggaguacuacgccaaggagguguacaagaucgacaugccccccuucuuccccagcgagaacgccaucccccccaccuucuacagacccuacuucagaaucgugagauucgacgugagcgccauggagaagaacgccagcaaccuggugaaggccgaguucagaguguucagacugcagaaccccaaggccagagugcccgagcagagaaucgagcuguaccagauccugaagagcaaggaccugaccagccccacccagagauacaucgacagcaagguggugaagaccagagccgagggcgaguggcugagcuucgacgugaccgacgccgugcacgaguggcugcaccacaaggacagaaaccugggcuucaagaucagccugcacugccccugcugcaccuucgugcccagcaacaacuacaucauccccaacaagagcgaggagcuggaggccagauucgccggcaucgacggcaccagcaccuacaccagcggcgaccagaagaccaucaagagcaccagaaagaagaacagcggcaagaccccccaccugcugcugaugcugcugcccagcuacagacuggagagccagcagaccaacagaagaaagaagagagcccuggacgccgccuacugcuucagaaacgugcaggacaacugcugccugagaccccuguacaucgacuucaagagagaccugggcuggaaguggauccacgagcccaagggcuacaacgccaacuucugcgccggcgccugccccuaccuguggagcagcgacacccagcacagcagagugcugagccuguacaacaccaucaaccccgaggccagcgccagccccugcugcgugagccaggaccuggagccccugaccauccuguacuacaucggcaagacccccaagaucgagcagcugagcaacaugaucgugaagagcugcaagugcagcuga

SEQ ID NO: 4799 - RNA, 1245 nt, Artificial Sequence
  derived and/or modified sequence opt5 from TGFbeta2__Homo_sapiens__AAH96235
augcacuacugcgugcugagcgccuuccucauccugcaucuugucaccguugcucugucccucucuacauguagcacgcuggacauggaucaguuuaugagaaagcggauugaggccauccgcggccaaauucuuuccaaacugaagcucaccucucccccugaagacuauccggagcccgaagaggugccucccgaagugaucagcauuuacaacuccacaagagaucugcugcaggagaaagcgucucggcgcgcugccgccugcgagagagaacggagcgacgaggaauauuacgcuaaggaggucuauaaaaucgauaugccucccuucuuuccuuccgagaaugccaucccgcccaccuucuaccgcccuuauuuuagaauugugcgguucgacguuagcgcuauggaaaagaacgccucuaaucucgugaaggcggaguuucgcgucuucagacugcagaaccccaaagcccgggugccugaacagcgcaucgagcuuuaccaaauucugaaguccaaagaucucacaagccccacccagagauacaucgacucuaagguugugaaaacacgggcugaaggggaguggcuguccuuugaugucaccgacgccgugcacgaguggcuucaucacaaggaucgcaaucugggauucaagauuagccuccauuguccgugcuguacguuugugccuucuaacaauuauaucauucccaacaaauccgaggaacuggaagcuagauucgccggcaucgacgggaccagcacauacaccuccggagaucagaagacaaucaaaucuacccggaagaaaaauagcggcaagacgccucaucugcuccugaugcuucugcccuccuauagacucgagagccagcaaacaaaccgccggaaaaagagagcgcuggacgccgcuuacugcuuucgcaauguccaggacaacuguugccuucggccccuguauauugauuucaagagagaccucggguggaaauggauccacgaaccuaagggauacaaugccaacuucugugcuggcgccugcccguaucuguggucuuccgauacccagcacagccgcguucugucucucuacaauacaauuaaccccgaggccagcgcuuccccuuguugcgugucucaggaccuggagccccuuaccauccuguacuauauuggcaaaaccccuaagaucgaacaacucagcaacaugaucgugaaauccugcaaguguagcuga

SEQ ID NO: 4800 - RNA, 1245 nt, Artificial Sequence
  derived and/or modified sequence opt6 from TGFbeta2__Homo_sapiens__AAH96235
augcacuacugcguacuaucagccuucuuaauacuacaccuaguaacaguagcauuauccuuaucaacaugcucaacauuagacauggaucaauucaugcguaaaagaaucgaagcuauuagaggacaaauacuuucaaaacucaaacucaccucuccaccagaagauuacccagaaccagaagaaguacccccagaaguaauuucaauauacaauucaacaagagaucuacuccaagaaaaagcaucacgaagagcagcagccugcgaaagagaacguucagaugaagaauacuaugcaaaagaaguauacaaaauagacaugccaccauucuuuccaucugaaaacgcaauaccaccaaccuucuacagaccauauuuccgcauagucagauucgacgucucagcaauggaaaaaaaugcauccaaccuaguaaaagcagaauuccgaguauucagacuccaaaaccccaaagcccgagucccagaacaacgcauagaacucuaucaaauacuaaaauccaaagacuuaacauccccaacccaaagauauauugacucaaaaguaguaaaaacaagagccgaaggagaaugguuaucauuugacguaaccgacgccguacaugaauggcuacaccacaaagacagaaacuuaggauucaaaauaucccuacacugcccauguugcacauucguaccuagcaacaauuacauaaucccaaacaaaucagaagaacuagaagcaagauucgccgguauagacggaacaucuacuuacacauccggagaccaaaaaacaauaaaaucaacaagaaaaaaaaacucaggcaaaacaccacacuuacuccucaugcuauuaccaucauauagauuagaaucccaacaaacaaauagaagaaaaaaacgcgcccuagaugcagcauauuguuuucgaaacguacaagauaauugcugucuaagaccacucuacauugacuuuaaacgagaccuaggauggaaauggauccacgaaccaaaaggauauaacgcaaacuucugcgcaggugcaugucccuaccuaugguccucagacacacaacacucaagaguacucucacuauauaacacaauaaaucccgaagcaucggcaagcccaugcugcguaucacaagaucuagaaccacucacaauacuguauuacauaggaaaaacacccaaaauagaacaacucucaaacaugauaguaaaauccuguaaaugcucauaa

SEQ ID NO: 4801 - protein, 412 aa, Artificial Sequence
  TGFbeta3__Homo_sapiens__A5YM40
MKMHLQRALVVLALLNFATVSLSLSTCTTLDFGHIKKKRVEAIRGQILSKLRLTSPPEPTVMTHVPYQVLALYNSTRELLEEMHGEREEGCTQENTESEYYAKEIHKFDMIQGLAEHNELAVCPKGITSKVFRFNVSSVEKNRTNLFRAEFRVLRVPNPSSKRNEQRIELFQILRPDEHIAKQRYIGGKNLPTRGTAEWLSFDVTDTVREWLLRRESNLGLEISIHCPCHTFQPNGDILENIHEVMEIKFKGVDNEDDHGRGDLGRLKKQKDHHNPHLILMMIPPHRLDNPGQGGQRKKRALDTNYCFRNLEENCCVRPLYIDFRQDLGWKWVHEPKGYYANFCSGPCPYLRSADTTHSTVLGLYNTLNPEASASPCCVPQDLEPLTILYYVGRTPKVEQLSNMVVKSCKCS

SEQ ID NO: 4802 - RNA, 1239 nt, Artificial Sequence
  TGFbeta3__Homo_sapiens__ABQ59024
augaagaugcacuugcaaagggcucuggugguccuggcccugcugaacuuugccacggucagccucucucuguccacuugcaccaccuuggacuucggccacaucaagaagaagaggguggaagccauuaggggacagaucuugagcaagcucaggcucaccagccccccugagccaacggugaugacccacguccccuaucagguccuggcccuuuacaacagcacccgggagcugcuggaggagaugcauggggagagggaggaaggcugcacccaggaaaacaccgagucggaauacuaugccaaagaaauccauaaauucgacaugauccaggggcuggcggagcacaacgaacuggcugucugcccuaaaggaauuaccuccaagguuuuccgcuucaauguguccucaguggagaaaaauagaaccaaccuauuccgagcagaauuccgggucuugcgggugcccaaccccagcucuaagcggaaugagcagaggaucgagcucuuccagauccuucggccagaugagcacauugccaaacagcgcuauaucgguggcaagaaucugcccacacggggcacugccgaguggcuguccuuugaugucacugacacugugcgugaguggcuguugagaagagaguccaacuuaggucuagaaaucagcauucacuguccaugucacaccuuucagcccaauggagauauccuggaaaacauucacgaggugauggaaaucaaauucaaaggcguggacaaugaggaugaccauggccguggagaucuggggcgccucaagaagcagaaggaucaccacaacccucaucuaauccucaugaugauucccccacaccggcucgacaacccgggccaggggggucagaggaagaagcgggcuuuggacaccaauuacugcuuccgcaacuuggaggagaacugcugugugcgcccccucuacauugacuuccgacaggaucugggcuggaaguggguccaugaaccuaagggcuacuaugccaacuucugcucaggcccuugcccauaccuccgcagugcagacacaacccacagcacggugcugggacuguacaacacucugaacccugaagcaucugccucgccuugcugcgugccccaggaccuggagccccugaccauccuguacuauguugggaggacccccaaaguggagcagcucuccaacaugguggugaagucuuguaaauguagcuga

SEQ ID NO: 4803 - RNA, 1239 nt, Artificial Sequence
  derived and/or modified sequence opt1 from TGFbeta3__Homo_sapiens__ABQ59024
augaagaugcaccuccagcgcgcccucguggugcuggcccugcucaacuucgcgaccgugagccugucccugagcacgugcaccacccucgacuucggccacaucaagaagaagcggguggaggccauccgcgggcagauccuguccaagcugcggcucaccagcccgcccgagcccaccgucaugacgcacgugcccuaccaggugcuggcccuguacaacuccacccgcgagcuccuggaggagaugcacggcgagcgggaggaggggugcacccaggagaacaccgagagcgaguacuacgccaaggagauccacaaguucgacaugauccagggccuggccgagcacaacgagcucgcggucugccccaaggggaucacguccaagguguuccgcuucaacgugagcuccgucgagaagaaccggaccaaccuguuccgcgccgaguuccgggugcugcgcgugccgaaccccagcuccaagcggaacgagcagcgcaucgagcuguuccagauccugcggcccgacgagcacaucgccaagcagcgcuacaucggcggcaagaaccugcccacccgggggaccgccgaguggcucagcuucgacgucacggacaccgugcgcgaguggcugcugcggcgcgaguccaaccucggccuggagaucagcauccacugcccgugccacaccuuccagcccaacggggacauccuggagaacauccacgaggugauggagaucaaguucaagggcgucgacaacgaggacgaccacgggcggggcgaccucggccgccugaagaagcagaaggaccaccacaacccccaccugauccucaugaugaucccgccccaccggcuggacaaccccgggcagggcgggcagcgcaagaagcgcgcgcuggacaccaacuacugcuuccggaaccucgaggagaacugcugcgugcgcccccuguacaucgacuuccggcaggaccugggcuggaagugggugcacgagcccaagggcuacuacgccaacuucugcuccgggccgugccccuaccuccgcagcgccgacacgacccacuccaccguccugggccuguacaacacccucaaccccgaggccagcgccucccccugcugcgugccgcaggaccuggagccccugacgauccucuacuacguggggcggacccccaaggucgagcagcugagcaacaugguggucaagagcugcaagugcuccuga

SEQ ID NO: 4804 - RNA, 1239 nt, Artificial Sequence
  derived and/or modified sequence opt2 from TGFbeta3__Homo_sapiens__ABQ59024
augaagaugcaccuccagcgcgcccucgucguccucgcccuccucaacuucgccaccgucucccucucccucuccaccugcaccacccucgacuucggccacaucaagaagaagcgcgucgaggccauccgcggccagauccucuccaagcuccgccucaccuccccccccgagcccaccgucaugacccacguccccuaccagguccucgcccucuacaacuccacccgcgagcuccucgaggagaugcacggcgagcgcgaggagggcugcacccaggagaacaccgaguccgaguacuacgccaaggagauccacaaguucgacaugauccagggccucgccgagcacaacgagcucgccgucugccccaagggcaucaccuccaaggucuuccgcuucaacgucuccuccgucgagaagaaccgcaccaaccucuuccgcgccgaguuccgcguccuccgcguccccaaccccuccuccaagcgcaacgagcagcgcaucgagcucuuccagauccuccgccccgacgagcacaucgccaagcagcgcuacaucggcggcaagaaccuccccacccgcggcaccgccgaguggcucuccuucgacgucaccgacaccguccgcgaguggcuccuccgccgcgaguccaaccucggccucgagaucuccauccacugccccugccacaccuuccagcccaacggcgacauccucgagaacauccacgaggucauggagaucaaguucaagggcgucgacaacgaggacgaccacggccgcggcgaccucggccgccucaagaagcagaaggaccaccacaacccccaccucauccucaugaugauccccccccaccgccucgacaaccccggccagggcggccagcgcaagaagcgcgcccucgacaccaacuacugcuuccgcaaccucgaggagaacugcugcguccgcccccucuacaucgacuuccgccaggaccucggcuggaaguggguccacgagcccaagggcuacuacgccaacuucugcuccggccccugccccuaccuccgcuccgccgacaccacccacuccaccguccucggccucuacaacacccucaaccccgaggccuccgccucccccugcugcgucccccaggaccucgagccccucaccauccucuacuacgucggccgcacccccaaggucgagcagcucuccaacauggucgucaaguccugcaagugcuccuga

SEQ ID NO: 4805 - RNA, 1239 nt, Artificial Sequence
  derived and/or modified sequence opt3 from TGFbeta3__Homo_sapiens__ABQ59024
augaagaugcaucugcagagagcccucgugguccuugcucuguugaacuucgcaaccguuagcuuaucccugucuacaugcacuacgcuagacuuuggccacaucaaaaagaaaaggguggaggccauucgggggcaaauacucucaaagcugcgccuuaccagucccccugaaccaacaguaaugacucacgugccguaccagguccuggcguuguauaauagcacccgagagcuccuggaagagaugcauggagaacgugaggaggguuguacacaggaaaacaccgaguccgaauacuaugcuaaagagauccacaaguucgauaugauucagggccuggccgagcauaaugaacucgcagugugccccaaggggaucacuucuaaaguuuuuagauucaacgugucgucagucgagaagaauaggacaaacuuauuucgggccgaguuccgcgugcugagaguaccuaauccaagcaguaaaaggaacgaacaacggauugaacuuuuucagaucuugcgccccgacgagcacauagcuaagcagcgauacaucggaggcaaaaaucugccuaccagagguacggcagaguggcuauccuucgauguuacugacaccgugagggaauggcuccugcggcgugagucuaaccuugggcuggaaauuagcauccacuguccaugccauacauuucagcccaauggagauauuuuggagaacauccacgaagucauggagauaaaguucaagggcguggacaaugaggaugaccauggccgcggggaucucggaagacugaaaaagcaaaaagaccaccacaacccucauuuaauucugaugaugaucccaccgcacaggcucgauaaucccggucagggcgggcagcggaagaaacgagcccuugacacuaacuauuguuuucgcaaccuggaagagaauugcugugugagaccuuuguacauugauuucaggcaggaccuaggauggaaguggguccaugaaccaaaaggcuauuacgcuaacuuuugcuccggucccuguccuuaccugcggucagccgacaccacacacaguaccguucucgggcuguauaauacgcuuaacccagaggcgagcgcaucucccugcugugugccgcaagaucuggaaccuuugacuauccucuacuauguaggacgcacacccaagguggagcagcuguccaauauggucgugaagucaugcaaaugcagcuga

SEQ ID NO: 4806 - RNA, 1239 nt, Artificial Sequence
  derived and/or modified sequence opt4 from TGFbeta3__Homo_sapiens__ABQ59024
augaagaugcaccugcagagagcccugguggugcuggcccugcugaacuucgccaccgugagccugagccugagcaccugcaccacccuggacuucggccacaucaagaagaagagaguggaggccaucagaggccagauccugagcaagcugagacugaccagcccccccgagcccaccgugaugacccacgugcccuaccaggugcuggcccuguacaacagcaccagagagcugcuggaggagaugcacggcgagagagaggagggcugcacccaggagaacaccgagagcgaguacuacgccaaggagauccacaaguucgacaugauccagggccuggccgagcacaacgagcuggccgugugccccaagggcaucaccagcaagguguucagauucaacgugagcagcguggagaagaacagaaccaaccuguucagagccgaguucagagugcugagagugcccaaccccagcagcaagagaaacgagcagagaaucgagcuguuccagauccugagacccgacgagcacaucgccaagcagagauacaucggcggcaagaaccugcccaccagaggcaccgccgaguggcugagcuucgacgugaccgacaccgugagagaguggcugcugagaagagagagcaaccugggccuggagaucagcauccacugccccugccacaccuuccagcccaacggcgacauccuggagaacauccacgaggugauggagaucaaguucaagggcguggacaacgaggacgaccacggcagaggcgaccugggcagacugaagaagcagaaggaccaccacaacccccaccugauccugaugaugauccccccccacagacuggacaaccccggccagggcggccagagaaagaagagagcccuggacaccaacuacugcuucagaaaccuggaggagaacugcugcgugagaccccuguacaucgacuucagacaggaccugggcuggaagugggugcacgagcccaagggcuacuacgccaacuucugcagcggccccugccccuaccugagaagcgccgacaccacccacagcaccgugcugggccuguacaacacccugaaccccgaggccagcgccagccccugcugcgugccccaggaccuggagccccugaccauccuguacuacgugggcagaacccccaagguggagcagcugagcaacaugguggugaagagcugcaagugcagcuga

SEQ ID NO: 4807 - RNA, 1239 nt, Artificial Sequence
  derived and/or modified sequence opt5 from TGFbeta3__Homo_sapiens__ABQ59024
augaagaugcaccuucagagagcccucgugguccuggcucugcugaacuucgccaccguuagccucucccugucuacaugcacgacccuugacuuuggccauaucaaaaagaaacggguggaggcgauucgcgggcaaauccugagcaagcucagacugacaucucccccugaaccgaccgugaugacacacguccccuaccaggugcuggcucucuauaauuccacccgggagcugcuugaagagaugcauggagaacgcgaggagggcuguacacaggaaaacaccgagagcgaauacuaugccaaagagauucacaaguucgauaugauccaggggcuggccgagcauaaugaacucgcuguuugcccuaagggaauuacguccaaaguguuuagauucaacgucucuagcguggagaagaaucggaccaaccuguuucgcgccgaguucagaguucuucgggugcccaauccuuccagcaaacgcaacgaacaaagaaucgaacuguuucagauccuccggcccgacgagcacauugcuaagcagcgcuacaucggcgggaaaaaucugccuacaagaggaaccgccgaguggcugucuuucgaugucacagacaccgugcgggaauggcuccugcgcagagaguccaaccuuggccuggaaauuagcauccacuguccgugccauacguuucagcccaauggcgauauucucgagaacauccacgaagugauggagauuaaguucaagggggucgacaaugaggaugaccauggacggggcgaucuggggagacuuaaaaagcaaaaagaccaccacaacccucaucugauccucaugaugauucccccucaccgccuggauaaucccggacagggcgggcagcggaagaaaagagcgcuggacacaaacuauuguuuucgcaaccucgaagagaauugcuguguucggccgcuguacaucgauuucagacaggaccuuggauggaagugggugcaugaaccuaaaggcuauuacgccaacuuuugcucuggccccuguccuuaccugcgcuccgcugacaccacacacagcaccgugcucgggcuguauaauacccuuaaccccgaggccucugcuucccccugcugugucccucaagaucuggaaccgcucacaauccuguacuaugugggacggacgcccaagguugagcagcugagcaauaugguggucaaguccugcaaaugcucuuga

SEQ ID NO: 4808 - RNA, 1239 nt, Artificial Sequence
  derived and/or modified sequence opt6 from TGFbeta3__Homo_sapiens__ABQ59024
augaaaaugcaccuacaacgagcacuaguaguacuagcacuacucaauuucgccacaguaucacuaucacuaucaacaugcacaacccuagacuuuggacacauaaaaaaaaaaaggguagaagcaaucagaggacaaauuuuaucaaaacucagauuaacaucaccaccagaaccaacaguuaugacacacguaccauaccaaguccucgcauuauauaacagcacacgagaacuauuagaagaaaugcacggugaaagagaagaaggaugcacacaagaaaacacugaaucagaauacuacgcaaaagaaauccauaaauucgacaugauccaaggacuagcagaacauaacgaauuagccguaugcccaaaaggcauaaccucaaaaguauucagauucaacgucucaagcguagaaaaaaaccguacaaacuuauuccgagcggaauucagaguucuaagaguaccaaauccuucaucaaaaagaaacgaacagagaauagaauuauuucaaauacuccgaccagacgaacacauagcaaaacaaagauacauaggaggaaaaaaccuaccaacaagaggaaccgcagaauggcuaagcuuugacguaacagacacaguaagagaauggcuauuaaggagagaaucaaaccuaggacucgaaauaaguauacacugcccaugccacacauuccaaccaaacggagacauacuagaaaacauacacgaaguuauggaaauaaaauucaaaggagucgacaaugaagaugaucacggaaggggagaccuaggaagauuaaaaaaacaaaaagaccaccauaacccucaucuaauauuaaugaugauaccaccucacagauuagauaacccaggacaaggaggccaacgcaaaaaaagagcacucgauacaaacuauugcuucagaaaccuagaagaaaacugcugcguacgaccauuauauauagacuuuagacaagaccuaggauggaaauggguacacgaaccaaaaggauacuaugcaaacuucuguucuggacccugccccuaccucagaucagcagacacaacacauucaacaguacuaggcuuauacaacacauuaaaucccgaagcaucugcaucaccaugcugcgucccacaagacuuagaaccauuaaccauacuauacuacguaggacgaacaccaaaaguagaacaauuaucaaacauggucguaaaaucaugcaagugcuccuaa

SEQ ID NO: 4809 - protein, 412 aa, Artificial Sequence; identical to SEQ ID NO: 4801
  TGFbeta3__Homo_sapiens__P10600

SEQ ID NO: 4810 - RNA, 1239 nt, Artificial Sequence; identical to SEQ ID NO: 4802
  TGFbeta3__Homo_sapiens__AAC79727

SEQ ID NO: 4811 - RNA, 1239 nt, Artificial Sequence; identical to SEQ ID NO: 4803
  derived and/or modified sequence opt1 from TGFbeta3__Homo_sapiens__AAC79727

SEQ ID NO: 4812 - RNA, 1239 nt, Artificial Sequence; identical to SEQ ID NO: 4804
  derived and/or modified sequence opt2 from TGFbeta3__Homo_sapiens__AAC79727

SEQ ID NO: 4813 - RNA, 1239 nt, Artificial Sequence; identical to SEQ ID NO: 4805
  derived and/or modified sequence opt3 from TGFbeta3__Homo_sapiens__AAC79727

SEQ ID NO: 4814 - RNA, 1239 nt, Artificial Sequence; identical to SEQ ID NO: 4806
  derived and/or modified sequence opt4 from TGFbeta3__Homo_sapiens__AAC79727

SEQ ID NO: 4815 - RNA, 1239 nt, Artificial Sequence; identical to SEQ ID NO: 4807
  derived and/or modified sequence opt5 from TGFbeta3__Homo_sapiens__AAC79727

SEQ ID NO: 4816 - RNA, 1239 nt, Artificial Sequence
  derived and/or modified sequence opt6 from TGFbeta3__Homo_sapiens__AAC79727
augaaaaugcaccuacaacgagcacuaguaguauuagcauuacuaaauuucgcaaccguaagccuaucauuaucaacuugcacaacacuagauuucggacauaucaaaaaaaaacguguagaagcgauucgaggacaaauacuauccaaacuacgacuaacaaguccaccagaaccaacaguaaugacacacguaccauaccaaguacuagcauuauacaacucaaccagggaacuacuagaagaaaugcacggagaaagagaagaaggaugcacacaagaaaacacagaaucagaauacuacgccaaagaaauacacaaauuugacaugauccaaggauuagcagaacacaacgaauuagcugucugccccaaaggaauaacaucaaaagucuuuagauuuaauguaagcagcguugaaaaaaacagaacaaaccuauuccgagcagaauuuagaguacuaaggguaccaaaccccaguucaaaaagaaaugaacaaagaauagaacuauuucaaauauuacgaccagaugaacacauagcaaaacaaagauacauaggcggaaaaaaccuaccaacaagaggaacagcagaauggcuaucauuugacguaacagacacuguacgagaaugguuacuaagaagagaaucaaacuuaggacuagaaauaagcauacacugcccaugucacaccuuccaaccgaacggagacauauuagaaaacauacacgaaguaauggaaauaaaauucaaaggaguagacaaugaagaugaccauggaagaggagacuuagggagauuaaaaaaacaaaaagaccaucacaacccacauuuaauacuaaugaugaucccaccacacagacuagacaaccccggacaaggaggacaaagaaaaaaaagagcccuagauacaaauuacugcuuuagaaaccuagaagaaaacuguugcguacgaccauuauacauagacuucagacaagacuuaggauggaaauggguacacgaaccuaaaggauacuacgcaaacuuuugcagcggaccaugcccauaccuuagaucagcugacacaacccacuccacagucuuaggacuauauaacacauuaaauccagaagcaucagcaucaccauguuguguaccacaagaccuagaaccgcuaacaauacucuauuacguaggaagaacaccaaaaguagaacaacuaaguaacauggugguaaaaucaugcaaauguucauaa

SEQ ID NO: 4817 - protein, 251 aa, Artificial Sequence
  TL1A__Homo_sapiens__O95150
MAEDLGLSFGETASVEMLPEHGSCRPKARSSSARWALTCCLVLLPFLAGLTTYLLVSQLRAQGEACVQFQALKGQEFAPSHQQVYAPLRADGDKPRAHLTVVRQTPTQHFKNQFPALHWEHELGLAFTKNRMNYTNKFLLIPESGDYFIYSQVTFRGMTSECSEIRQAGRPNKPDSITVVITKVTDSYPEPTQLLMGTKSVCEVGSNWFQPIYLGAMFSLQEGDKLMVNVSDISLVDYTKEDKTFFGAFLL

SEQ ID NO: 4818 - RNA, 756 nt, Artificial Sequence
  TL1A__Homo_sapiens__AAH69435
auggccgaggaucugggacugagcuuuggggaaacagccaguguggaaaugcugccagagcacggcagcugcaggcccaaggccaggagcagcagcgcacgcugggcucucaccugcugccugguguugcuccccuuccuugcaggacucaccacauaccugcuugucagccagcuccgggcccagggagaggccugugugcaguuccaggcucuaaaaggacaggaguuugcaccuucacaucagcaaguuuaugcaccucuuagagcagacggagauaagccaagggcacaccugacaguugugagacaaacucccacacagcacuuuaaaaaucaguucccagcucugcacugggaacaugaacuaggccuggccuucaccaagaaccgaaugaacuauaccaacaaauuccugcugaucccagagucgggagacuacuucauuuacucccaggucacauuccgugggaugaccucugagugcagugaaaucagacaagcaggccgaccaaacaagccagacuccaucacuguggucaucaccaagguaacagacagcuacccugagccaacccagcuccucauggggaccaagucugugugcgaaguagguagcaacugguuccagcccaucuaccucggagccauguucuccuugcaagaaggggacaagcuaauggugaacgucagugacaucucuuugguggauuacacaaaagaagauaaaaccuucuuuggagccuucuuacuauag

SEQ ID NO: 4819 - RNA, 756 nt, Artificial Sequence
  derived and/or modified sequence opt1 from TL1A__Homo_sapiens__AAH69435
auggccgaggaccugggccucagcuucggggagaccgccuccguggagaugcugcccgagcacggcagcugccgcccgaaggcgcgguccagcuccgcccgcugggcccugaccugcugccucguccugcugcccuuccucgccgggcugacgaccuaccugcucgugagccagcugcgggcccagggcgaggcgugcgugcaguuccaggcccugaaggggcaggaguucgcccccucccaccagcaggucuacgcgccccuccgcgccgacggcgacaagccgcgggcccaccugaccguggugcgccagacccccacgcagcacuucaagaaccaguuccccgcccugcacugggagcacgagcucggccuggccuucaccaagaaccggaugaacuacaccaacaaguuccugcucauccccgagagcggggacuacuucaucuacucccaggucaccuuccgcggcaugacgagcgagugcuccgagauccggcaggccgggcgcccgaacaagcccgacagcaucaccguggugaucaccaaggucaccgacuccuaccccgagcccacgcagcugcugaugggcaccaagagcgugugcgaggugggguccaacugguuccagccgaucuaccucggcgcgauguucagccugcaggagggcgacaagcugauggucaacguguccgacaucagccucguggacuacaccaaggaggacaagaccuucuucggggccuuccugcuguga

SEQ ID NO: 4820 - RNA, 756 nt, Artificial Sequence
  derived and/or modified sequence opt2 from TL1A__Homo_sapiens__AAH69435
auggccgaggaccucggccucuccuucggcgagaccgccuccgucgagaugcuccccgagcacggcuccugccgccccaaggcccgcuccuccuccgcccgcugggcccucaccugcugccucguccuccuccccuuccucgccggccucaccaccuaccuccucgucucccagcuccgcgcccagggcgaggccugcguccaguuccaggcccucaagggccaggaguucgcccccucccaccagcaggucuacgccccccuccgcgccgacggcgacaagccccgcgcccaccucaccgucguccgccagacccccacccagcacuucaagaaccaguuccccgcccuccacugggagcacgagcucggccucgccuucaccaagaaccgcaugaacuacaccaacaaguuccuccucauccccgaguccggcgacuacuucaucuacucccaggucaccuuccgcggcaugaccuccgagugcuccgagauccgccaggccggccgccccaacaagcccgacuccaucaccgucgucaucaccaaggucaccgacuccuaccccgagcccacccagcuccucaugggcaccaaguccgucugcgaggucggcuccaacugguuccagcccaucuaccucggcgccauguucucccuccaggagggcgacaagcucauggucaacgucuccgacaucucccucgucgacuacaccaaggaggacaagaccuucuucggcgccuuccuccucuga

SEQ ID NO: 4821 - RNA, 756 nt, Artificial Sequence
  derived and/or modified sequence opt3 from TL1A__Homo_sapiens__AAH69435
auggccgaggaccugggccucagcuucggggaaaccgcuuccguggagaugcuucccgaacacggaucuugcagaccuaaggcaaggucaaguagcgcccggugggcgcugacauguugcuuggucuuacugccauuucuagcuggucucacuacguaccugcuuguuucccagcugcgcgcccaaggcgaggcaugugugcaguuccaggccuugaaagggcaggaauuugcuccgucucaucaacagguauaugcaccccuccgagccgauggagacaagccucgugcucaccugaccguggucagacagacaccaacucagcauuucaaaaaccaauuucccgcccugcacugggagcaugagcucggcuuagcguucaccaagaauaggaugaacuacacaaauaaauuucugcuuaucccugaaucgggugauuauuucauuuacucacaggugaccuuucgggggaugacuagcgagugcagugaaauacgccaggcaggaagaccaaacaagcccgacuccaucacaguugugauuaccaaggucacggauucuuauccugagccaacucaguugcugaugggcaccaaaagcgugugugagguaggcuccaauugguuccaaccgaucuaccuaggggccauguuuucacuccaggaaggagacaagcugaugguuaacgugagugauauuagccuugucgacuauacaaaagaggauaagacuuucuuuggugcuuuccuguuguga

SEQ ID NO: 4822 - RNA, 756 nt, Artificial Sequence
  derived and/or modified sequence opt4 from TL1A__Homo_sapiens__AAH69435
auggccgaggaccugggccugagcuucggcgagaccgccagcguggagaugcugcccgagcacggcagcugcagacccaaggccagaagcagcagcgccagaugggcccugaccugcugccuggugcugcugcccuuccuggccggccugaccaccuaccugcuggugagccagcugagagcccagggcgaggccugcgugcaguuccaggcccugaagggccaggaguucgcccccagccaccagcagguguacgccccccugagagccgacggcgacaagcccagagcccaccugaccguggugagacagacccccacccagcacuucaagaaccaguuccccgcccugcacugggagcacgagcugggccuggccuucaccaagaacagaaugaacuacaccaacaaguuccugcugauccccgagagcggcgacuacuucaucuacagccaggugaccuucagaggcaugaccagcgagugcagcgagaucagacaggccggcagacccaacaagcccgacagcaucaccguggugaucaccaaggugaccgacagcuaccccgagcccacccagcugcugaugggcaccaagagcgugugcgaggugggcagcaacugguuccagcccaucuaccugggcgccauguucagccugcaggagggcgacaagcugauggugaacgugagcgacaucagccugguggacuacaccaaggaggacaagaccuucuucggcgccuuccugcuguga

SEQ ID NO: 4823 - RNA, 756 nt, Artificial Sequence
  derived and/or modified sequence opt5 from TL1A__Homo_sapiens__AAH69435
auggccgaggaccugggccucagcuucggggaaaccgcuuccguggagaugcugcccgaacacggaucuugcagaccuaaggcccggagcuccucugcgcgcugggcucuuacauguugccugguccuccugccguuucuugccggccugacgaccuaccuccugguuagccagcugagagcccaaggggaggcuugugugcaguuccaggcccucaaaggacaggaauuugcucccucccaucaacagguguaugccccucugcgggcggauggcgacaagccccgcgcccaccuuacagucgugagacagaccccuacacagcauuucaaaaaccaauuucccgcucugcacugggagcaugagcucgggcuggccuucaccaagaaucggaugaacuacacaaauaaauuucuucugaucccugaaucuggagauuauuucauuuacagccagguuaccuuucgcggcaugacguccgagugcagcgaaaucagacaggcuggccggccgaacaagcccgacucuauuaccguggucaucacaaaggugaccgauuccuauccugagcccacacagcuccugauggggaccaaaagcguuugugaggugggaucuaauugguuccaaccuauuuaccugggcgccauguuuucccuccaggaaggggacaagcugauggucaacgugagcgauaucucucuuguggacuauacgaaagaggauaagacauucuuuggagcguuccugcucuga

SEQ ID NO: 4824 - RNA, 756 nt, Artificial Sequence
  derived and/or modified sequence opt6 from TL1A__Homo_sapiens__AAH69435
auggcagaagaccuaggacuaucauucggagaaacagcaucaguagaaaugcuacccgaacacgguucaugcagaccaaaagcaagaucaucauccgcaagaugggcacuaacaugcugccuaguacuacuuccauuccuagcaggauuaacaacauaccuauuagucagccaacuacgagcacaaggagaagcaugcguacaauuccaagcacuaaaaggacaagaauucgcucccucacaccaacaaguauacgcaccacuaagagcagacggagacaaaccaagagcacaucuaacaguagucagacaaacaccuacacaacacuucaaaaaucaauuccccgcucuacacugggaacacgaacuaggauuagcauucacaaaaaauagaaugaacuacacaaacaaauuccuauuaauaccagaaucaggcgacuacuuuauauacucacaaguaacuuucagaggaaugacaucagaaugcucagaaauaagacaagcaggaagaccaaacaaaccagacuccauaacaguaguaauaacaaaaguaacagacucauaccccgaaccuacucaauuacuaaugggaacaaaaucaguaugcgaaguaggcucaaacugguuccaaccaauauacuuaggagcuauguucaguuuacaagaaggagauaaauuaaugguaaacguuuccgacauaucacuaguagacuacacaaaagaagauaaaacauucuucggagcauucuuacuauaa

SEQ ID NO: 4825 - protein, 249 aa, Artificial Sequence
  TWEAK__Homo_sapiens__Q4ACW9
MAARRSQRRRGRRGEPGTALLVPLALGLGLALACLGLLLAVVSLGSRASLSAQEPAQEELVAEEDQDPSELNPQTEESQDPAPFLNRLVRPRRSAPKGRKTRARRAIAAHYEVHPRPGQDGAQAGVDGTVSGWEEARINSSSPLRYNRQIGEFIVTRAGLYYLYCQVHFDEGKAVYLKLDLLVDGVLALRCLEEFSATAASSLGPQLRLCQVSGLLALRPGSSLRIRTLPWAHLKAAPFLTYFGLFQVH

SEQ ID NO: 4826 - RNA, 750 nt, Artificial Sequence
  TWEAK__Homo_sapiens__AAI04421
auggccgcccgucggagccagaggcggagggggcgccggggggagccgggcaccgcccugcuggucccgcucgcgcugggccugggccuggcgcuggccugccucggccuccugcuggccguggucaguuuggggagccgggcaucgcuguccgcccaggagccugcccaggaggagcugguggcagaggaggaccaggacccgucggaacugaauccccagacagaagaaagccaggauccugcgccuuuccugaaccgacuaguucggccucgcagaagugcaccuaaaggccggaaaacacgggcucgaagagcgaucgcagcccauuaugaaguucauccacgaccuggacaggacggagcgcaggcagguguggacgggacagugaguggcugggaggaagccagaaucaacagcuccagcccucugcgcuacaaccgccagaucggggaguuuauagucacccgggcugggcucuacuaccuguacugucaggugcacuuugaugaggggaaggcugucuaccugaagcuggacuugcugguggauggugugcuggcccugcgcugccuggaggaauucucagccacugcggcgaguucccucgggccccagcuccgccucugccaggugucugggcuguuggcccugcggccaggguccucccugcggauccgcacccuccccugggcccaucucaaggcugcccccuuccucaccuacuucggacucuuccagguucacuga

SEQ ID NO: 4827 - RNA, 750 nt, Artificial Sequence
  derived and/or modified sequence opt1 from TWEAK__Homo_sapiens__AAI04421
auggccgcccgccggagccagcgccggcgcgggcggcgcggggagcccggcaccgcgcugcucgugccgcuggcccuggggcucggccuggcccuggccugccucgggcugcugcucgccgucgugucccugggcagccgggcgucccugagcgcccaggagcccgcccaggaggagcucguggccgaggaggaccaggaccccuccgagcugaacccccagaccgaggagagccaggacccggcgcccuuccugaaccgccucguccggccccgccgguccgcccccaagggccgcaagacgcgggcccgccgggccaucgccgcgcacuacgaggugcacccgcgccccgggcaggacggcgcccaggccgggguggacggcaccgucagcgggugggaggaggcccggaucaacuccagcagcccccugcgcuacaaccggcagaucggcgaguucaucgugacccgcgccggccuguacuaccucuacugccaggugcacuucgacgaggggaaggcggucuaccugaagcuggaccuccugguggacggcgugcuggcccuccggugccuggaggaguucuccgccaccgccgccuccagccuggggccccagcuccgccugugccaggucuccggccugcucgcgcugcgcccgggcagcucccugcggauccgcacgcuccccugggcccaccugaaggccgcccccuuccugaccuacuucggccucuuccaggugcacuga

SEQ ID NO: 4828 - RNA, 750 nt, Artificial Sequence
  derived and/or modified sequence opt2 from TWEAK__Homo_sapiens__AAI04421
auggccgcccgccgcucccagcgccgccgcggccgccgcggcgagcccggcaccgcccuccucgucccccucgcccucggccucggccucgcccucgccugccucggccuccuccucgccgucgucucccucggcucccgcgccucccucuccgcccaggagcccgcccaggaggagcucgucgccgaggaggaccaggaccccuccgagcucaacccccagaccgaggagucccaggaccccgcccccuuccucaaccgccucguccgcccccgccgcuccgcccccaagggccgcaagacccgcgcccgccgcgccaucgccgcccacuacgagguccacccccgccccggccaggacggcgcccaggccggcgucgacggcaccgucuccggcugggaggaggcccgcaucaacuccuccuccccccuccgcuacaaccgccagaucggcgaguucaucgucacccgcgccggccucuacuaccucuacugccagguccacuucgacgagggcaaggccgucuaccucaagcucgaccuccucgucgacggcguccucgcccuccgcugccucgaggaguucuccgccaccgccgccuccucccucggcccccagcuccgccucugccaggucuccggccuccucgcccuccgccccggcuccucccuccgcauccgcacccuccccugggcccaccucaaggccgcccccuuccucaccuacuucggccucuuccagguccacuga

SEQ ID NO: 4829 - RNA, 750 nt, Artificial Sequence
  derived and/or modified sequence opt3 from TWEAK__Homo_sapiens__AAI04421
auggccgcuagaaggagccagcggcgccgaggccguagaggggagcccggaaccgcacugcucgugccucuugcccuggguuugggcuuagcgcuggcuugccuagggcuccugcuugccgucguuucccugggaucuagggcaucauugagugcccaagaaccagcucaggaggaacucguggcagaggaagaccaggauccgagcgagcugaacccccagacagaggaaucccaagacccugccccauuccugaaucggcucguacgccccagaaggucugcuccuaagggccggaaaacucgcgccagacgagcgaucgcagcccacuacgaggugcauccaaggcccggucaggauggggcucaggccggagucgacggcacggugucgggcugggaagaggcacggauuaacucaagcaguccuuuacguuauaaucgccagauaggggaguuuaucguuaccagagcuggacuguacuaucuuuacugucaagugcacuucgaugaagguaaggccgucuauuugaaacuggaccuacucguggauggcguacuggcgcuuaggugccuggaggaauuuuccgccacagcagcuucuagcuuggggccacagcuccggcugugucagguuuccggauuacuggcccuccgaccgggcucaagucuucgcauuagaacucugcccugggcucauuugaaggccgcaccuuuccuaaccuacuuuggucuguuccaggugcacuga

SEQ ID NO: 4830 - RNA, 750 nt, Artificial Sequence
  derived and/or modified sequence opt4 from TWEAK__Homo_sapiens__AAI04421
auggccgccagaagaagccagagaagaagaggcagaagaggcgagcccggcaccgcccugcuggugccccuggcccugggccugggccuggcccuggccugccugggccugcugcuggccguggugagccugggcagcagagccagccugagcgcccaggagcccgcccaggaggagcugguggccgaggaggaccaggaccccagcgagcugaacccccagaccgaggagagccaggaccccgcccccuuccugaacagacuggugagacccagaagaagcgcccccaagggcagaaagaccagagccagaagagccaucgccgcccacuacgaggugcaccccagacccggccaggacggcgcccaggccggcguggacggcaccgugagcggcugggaggaggccagaaucaacagcagcagcccccugagauacaacagacagaucggcgaguucaucgugaccagagccggccuguacuaccuguacugccaggugcacuucgacgagggcaaggccguguaccugaagcuggaccugcugguggacggcgugcuggcccugagaugccuggaggaguucagcgccaccgccgccagcagccugggcccccagcugagacugugccaggugagcggccugcuggcccugagacccggcagcagccugagaaucagaacccugcccugggcccaccugaaggccgcccccuuccugaccuacuucggccuguuccaggugcacuga

SEQ ID NO: 4831 - RNA, 750 nt, Artificial Sequence
  derived and/or modified sequence opt5 from TWEAK__Homo_sapiens__AAI04421
auggccgcuagacggagccagcgcagacggggccgcagaggggagcccggaaccgcccugcucgugccucuggcgcuuggccuggggcucgcucuggccugccuuggacugcuccuggccgucguuucccugggcucucgggcuagccucuccgcccaagaaccggcucaggaggaacugguggccgaggaagaccaggaucccucugagcuuaacccucagacagaggaaagccaagaccccgcgccuuuccugaaucgccucgugagaccccggcgcuccgccccuaaggggagaaaaacgcgggcucgcagagccaucgcugcccacuacgagguccauccgcggcccggacaggauggcgcgcaggccggcguggacgggaccguuucuggaugggaagaggcucgcauuaacagcuccagcccucugagauauaaucggcagaucggcgaguuuauugugacaagagccgggcuuuacuaucuguacugucaaguccacuucgaugaaggaaaggcuguguaucucaaacuggaccugcucguugauggcgugcuggcccuucgcugccuggaggaauuuucugccaccgcugcguccagccucgggccccagcugcggcuuugucaggucucuggacugcucgcccugagaccuggcuccagccugcgcauccggacacuccccugggcucaucugaaggccgccccguuccuuaccuacuuuggccuguuccaggugcacuga

SEQ ID NO: 4832 - RNA, 750 nt, Artificial Sequence
  derived and/or modified sequence opt6 from TWEAK__Homo_sapiens__AAI04421
auggcagccagaagaucacaaagaagaagaggaagaagaggagaaccagguacagcacuuuuaguaccauuagcauuaggauuaggauuagcauuggcuugccuaggacuauuacuagcagucguaaguuuaggaucaagagcaagcuuaagugcacaagaaccagcucaagaagaauuaguagcagaagaagaccaagacccaagcgaacuaaauccacaaacagaagaaucgcaagauccagcgccauuuuuaaauagacuagucaggccacgaagaucugcaccuaaaggaagaaaaacaagagcaagaagagcaauagcagcacauuaugaaguacacccaagaccaggacaagauggcgcucaagcagguguagauggaacaguaaguggaugggaagaagcaagaauaaacucaaguucaccauugagauauaacagacaaauuggagaauucauaguaacaagagcuggauuauauuaucuauauugccaaguacauuucgaugaaggaaaagcugucuaucuaaaacuagaucuauuaguugauggcguauuagcuuuaaggugcuuagaagaauucucagcaacugcagcaucaucauuaggaccacaauuaagauuaugucaaguaagcggacuauuagcauuaagaccaggcucaagucuaagaauaagaacacuaccaugggcacauuuaaaagcagcaccauucuuaacauauuuugguuuauuucaaguacacuaa

SEQ ID NO: 4833 - protein, 97 aa, Artificial Sequence
  CCL11__Homo_sapiens__P51671
MKVSAALLWLLLIAAAFSPQGLAGPASVPTTCCFNLANRKIPLQRLESYRRITSGKCPQKAVIFKTKLAKDICADPKKKWVQDSMKYLDQKSPTPKP

SEQ ID NO: 4834 - RNA, 294 nt, Artificial Sequence
  CCL11__Homo_sapiens__AAA98957
augaaggucuccgcagcacuucuguggcugcugcucauagcagcugccuucagcccccaggggcucgcugggccagcuucugucccaaccaccugcugcuuuaaccuggccaauaggaagauaccccuucagcgacuagagagcuacaggagaaucaccaguggcaaauguccccagaaagcugugaucuucaagaccaaacuggccaaggauaucugugccgaccccaagaagaagugggugcaggauuccaugaaguaucuggaccaaaaaucuccaacuccaaagccauaa

SEQ ID NO: 4835 - RNA, 294 nt, Artificial Sequence
  derived and/or modified sequence opt1 from CCL11__Homo_sapiens__AAA98957
augaaggugagcgccgcccugcucuggcugcugcucaucgcggccgccuucagcccccagggccuggccgggccggccagcguccccacgaccugcugcuucaaccuggcgaaccgcaagaucccccuccagcggcuggaguccuaccgccggaucaccagcggcaagugcccccagaaggccgugaucuucaagaccaagcuggccaaggacaucugcgccgacccgaagaagaagugggugcaggacuccaugaaguaccucgaccagaagucccccacccccaagcccuga

SEQ ID NO: 4836 - RNA, 294 nt, Artificial Sequence
  derived and/or modified sequence opt2 from CCL11__Homo_sapiens__AAA98957
augaaggucuccgccgcccuccucuggcuccuccucaucgccgccgccuucuccccccagggccucgccggccccgccuccguccccaccaccugcugcuucaaccucgccaaccgcaagaucccccuccagcgccucgaguccuaccgccgcaucaccuccggcaagugcccccagaaggccgucaucuucaagaccaagcucgccaaggacaucugcgccgaccccaagaagaaguggguccaggacuccaugaaguaccucgaccagaagucccccacccccaagcccuga

SEQ ID NO: 4837 - RNA, 294 nt, Artificial Sequence
  derived and/or modified sequence opt3 from CCL11__Homo_sapiens__AAA98957
augaaggugagcgccgcucugcucuggcuucuguugaucgcagccgcguucaguccccagggcuuagcugggccugccucugucccaaccacaugcuguuuuaaccuggcaaauagaaaaauuccgcuacaaaggcucgagucauaccggcgcauaacuuccggaaagugcccccagaaagccguuaucuucaagacgaaacuggcuaaggacauuugugcagauccuaagaaaaagugggugcaggacagcaugaaauaucuugaucagaaguccccaacccccaaaccuuga

SEQ ID NO: 4838 - RNA, 294 nt, Artificial Sequence
  derived and/or modified sequence opt4 from CCL11__Homo_sapiens__AAA98957
augaaggugagcgccgcccugcuguggcugcugcugaucgccgccgccuucagcccccagggccuggccggccccgccagcgugcccaccaccugcugcuucaaccuggccaacagaaagaucccccugcagagacuggagagcuacagaagaaucaccagcggcaagugcccccagaaggccgugaucuucaagaccaagcuggccaaggacaucugcgccgaccccaagaagaagugggugcaggacagcaugaaguaccuggaccagaagagccccacccccaagcccuga

SEQ ID NO: 4839 - RNA, 294 nt, Artificial Sequence
  derived and/or modified sequence opt5 from CCL11__Homo_sapiens__AAA98957
augaaggugagcgccgcucugcucuggcugcuucugaucgccgcggcuuucagcccccagggccucgccgggccugccucugucccgaccacaugcuguuuuaaccuggcuaauagaaaaauuccccuucaacggcuggagagcuaccgcagaaucacguccggaaagugcccucagaaagccguuauuuucaagaccaaacucgcuaaggacaucugugccgaucccaagaaaaagugggugcaggacucuaugaaauaucuggaucagaaguccccuacacccaaaccuuga

SEQ ID NO: 4840 - RNA, 294 nt, Artificial Sequence
  derived and/or modified sequence opt6 from CCL11__Homo_sapiens__AAA98957
augaaaguaucagcagcacuacuauggcuacuacuaauagcagcagcauucucaccacaaggacuagcaggaccagcaucaguaccaacaacaugcugcuucaaccuagcaaacagaaaaauaccacuacaaagacuagaaucauacagaagaauaacaucaggaaaaugcccacaaaaagcaguaauauucaaaacaaaacuagcaaaagacauaugcgcagacccaaaaaaaaaauggguacaagacucaaugaaauaccuagaccaaaaaucaccaacaccaaaaccauaa

SEQ ID NO: 4841 - protein, 97 aa, Artificial Sequence; identical to SEQ ID NO: 4833
  CCL11__Homo_sapiens__Q6I9T4

SEQ ID NO: 4842 - RNA, 294 nt, Artificial Sequence; identical to SEQ ID NO: 4834
  CCL11__Homo_sapiens__ABK41951

SEQ ID NO: 4843 - RNA, 294 nt, Artificial Sequence; identical to SEQ ID NO: 4835
  derived and/or modified sequence opt1 from CCL11__Homo_sapiens__ABK41951

SEQ ID NO: 4844 - RNA, 294 nt, Artificial Sequence; identical to SEQ ID NO: 4836
  derived and/or modified sequence opt2 from CCL11__Homo_sapiens__ABK41951

SEQ ID NO: 4845 - RNA, 294 nt, Artificial Sequence; identical to SEQ ID NO: 4837
  derived and/or modified sequence opt3 from CCL11__Homo_sapiens__ABK41951

SEQ ID NO: 4846 - RNA, 294 nt, Artificial Sequence; identical to SEQ ID NO: 4838
  derived and/or modified sequence opt4 from CCL11__Homo_sapiens__ABK41951

SEQ ID NO: 4847 - RNA, 294 nt, Artificial Sequence; identical to SEQ ID NO: 4839
  derived and/or modified sequence opt5 from CCL11__Homo_sapiens__ABK41951

SEQ ID NO: 4848 - RNA, 294 nt, Artificial Sequence
  derived and/or modified sequence opt6 from CCL11__Homo_sapiens__ABK41951
augaaaguaucagccgcacuacuauggcuacuacuaauagcagcagcauucucaccacaaggacuagcaggaccagcaucaguaccaacaacaugcugcuucaaccuagcaaacagaaaaauaccauuacaaagacuagaaucauacagaagaauaacaucaggaaaaugcccacaaaaagcaguaauauucaaaacaaaacucgcaaaagacauaugcgcagacccaaaaaaaaaauggguacaagacucaaugaaauaccuagaccaaaaaucaccaacaccaaaaccauaa

SEQ ID NO: 4849 - protein, 104 aa, Artificial Sequence
  CCL12__Mus_musculus__Q62401
MKISTLLCLLLIATTISPQVLAGPDAVSTPVTCCYNVVKQKIHVRKLKSYRRITSSQCPREAVIFRTILDKEICADPKEKWVKNSINHLDKTSQTFILEPSCLG

SEQ ID NO: 4850 - RNA, 315 nt, Artificial Sequence
  CCL12__Mus_musculus__AAB49424
augaagauuuccacacuucuaugccuccugcucauagcuaccaccaucaguccucagguauuggcuggaccagaugcggugagcaccccagucacgugcuguuauaauguuguuaagcagaagauucacguccggaagcugaagagcuacaggagaaucacaagcagccaguguccccgggaagcugugaucuucaggaccauacuggauaaggagaucugugcugaccccaaggagaaguggguuaagaauuccauaaaccacuuggauaagacgucucaaaccuucauccuugaaccuucaugucuaggcuga

SEQ ID NO: 4851 - RNA, 315 nt, Artificial Sequence
  derived and/or modified sequence opt1 from CCL12__Mus_musculus__AAB49424
augaagaucagcacccugcucugccugcugcucaucgccaccacgaucagcccccaggugcuggccggcccggacgcggucuccacccccgugaccugcugcuacaacguggucaagcagaagauccacgugcgcaagcugaaguccuaccggcgcaucaccagcucccagugcccccgggaggccgugaucuuccgcacgauccucgacaaggagaucugcgccgaccccaaggagaagugggucaagaacagcaucaaccaccuggacaagaccucccagaccuucauccuggagccgagcugccucggguga

SEQ ID NO: 4852 - RNA, 315 nt, Artificial Sequence
  derived and/or modified sequence opt2 from CCL12__Mus_musculus__AAB49424
augaagaucuccacccuccucugccuccuccucaucgccaccaccaucuccccccagguccucgccggccccgacgccgucuccacccccgucaccugcugcuacaacgucgucaagcagaagauccacguccgcaagcucaaguccuaccgccgcaucaccuccucccagugcccccgcgaggccgucaucuuccgcaccauccucgacaaggagaucugcgccgaccccaaggagaagugggucaagaacuccaucaaccaccucgacaagaccucccagaccuucauccucgagcccuccugccucggcuga

SEQ ID NO: 4853 - RNA, 315 nt, Artificial Sequence
  derived and/or modified sequence opt3 from CCL12__Mus_musculus__AAB49424
augaagaucagcacccugcucugccuucuguugauugccacaacuauaucuccccagguguuagcuggcccugacgcagucuccacgccaguuaccuguugcuacaacgugguaaaacaaaagauccacgugagaaaacugaagucauauaggcggauuacaaguagccaguguccgcgcgaggccgucaucuuccgaacuauucuagauaaagaaaucugcgcggaccccaaggagaagugggugaaaaauuccauaaaccaucucgauaagaccucucagacauuuauccuggaaccuucgugucuuggguga

SEQ ID NO: 4854 - RNA, 315 nt, Artificial Sequence
  derived and/or modified sequence opt4 from CCL12__Mus_musculus__AAB49424
augaagaucagcacccugcugugccugcugcugaucgccaccaccaucagcccccaggugcuggccggccccgacgccgugagcacccccgugaccugcugcuacaacguggugaagcagaagauccacgugagaaagcugaagagcuacagaagaaucaccagcagccagugccccagagaggccgugaucuucagaaccauccuggacaaggagaucugcgccgaccccaaggagaagugggugaagaacagcaucaaccaccuggacaagaccagccagaccuucauccuggagcccagcugccugggcuga

SEQ ID NO: 4855 - RNA, 315 nt, Artificial Sequence
  derived and/or modified sequence opt5 from CCL12__Mus_musculus__AAB49424
augaagaucagcacccugcucugccugcuucugauugccacaacgaucagcccccaggugcucgcuggcccugacgccgucucuaccccgguuacauguugcuacaacguggugaaacaaaagauucacgucagaaaacugaaguccuaucggcgcaucaccuccucucagugucccagagaggcggugauuuuccggacaauccuugauaaagaaaucugcgcugacccuaaggagaaguggguuaaaaauagcauuaaccaucuggauaagaccucccagacauuuauccucgaacccucuugucugggguga

SEQ ID NO: 4856 - RNA, 315 nt, Artificial Sequence
  derived and/or modified sequence opt6 from CCL12__Mus_musculus__AAB49424
augaaaauaagcacacuacuaugccuacuacuaauagcaacaacaauaucaccacaaguacuagcaggaccagacgcaguaucaacaccaguaacaugcugcuacaacguaguaaaacaaaaaauacacguaagaaaacuaaaaucauacagaagaauaacaucaucacaaugcccaagagaagcaguaauauucagaacaauacuagacaaagaaauaugcgcagacccaaaagaaaaauggguaaaaaacucaauaaaccaccuagacaaaacaucacaaacauucauacuagaaccaucaugccuaggauaa

SEQ ID NO: 4857 - protein, 98 aa, Artificial Sequence
  CCL13__Homo_sapiens__Q99616
MKVSAVLLCLLLMTAAFNPQGLAQPDALNVPSTCCFTFSSKKISLQRLKSYVITTSRCPQKAVIFRTKLGKEICADPKEKWVQNYMKHLGRKAHTLKT

SEQ ID NO: 4858 - RNA, 297 nt, Artificial Sequence
  CCL13__Homo_sapiens__AAB38703
augaaagucucugcagugcuucugugccugcugcucaugacagcagcuuucaacccccagggacuugcucagccagaugcacucaacgucccaucuacuugcugcuucacauuuagcaguaagaagaucuccuugcagaggcugaagagcuaugugaucaccaccagcagguguccccagaaggcugucaucuucagaaccaaacugggcaaggagaucugugcugacccaaaggagaaguggguccagaauuauaugaaacaccugggccggaaagcucacacccugaagacuuga

SEQ ID NO: 4859 - RNA, 297 nt, Artificial Sequence
  derived and/or modified sequence opt1 from CCL13__Homo_sapiens__AAB38703
augaaggugagcgccguccugcucugccugcugcucaugaccgccgcguucaacccccagggccuggcccagccggacgcccugaacgugcccuccacgugcugcuucaccuucagcuccaagaagaucagccuccagcgccugaaguccuacgugaucaccaccagccggugcccccagaaggccgucaucuuccgcaccaagcuggggaaggagaucugcgccgaccccaaggagaagugggugcagaacuacaugaagcaccucggccggaaggcgcacacgcugaagaccuga

SEQ ID NO: 4860 - RNA, 297 nt, Artificial Sequence
  derived and/or modified sequence opt2 from CCL13__Homo_sapiens__AAB38703
augaaggucuccgccguccuccucugccuccuccucaugaccgccgccuucaacccccagggccucgcccagcccgacgcccucaacguccccuccaccugcugcuucaccuucuccuccaagaagaucucccuccagcgccucaaguccuacgucaucaccaccucccgcugcccccagaaggccgucaucuuccgcaccaagcucggcaaggagaucugcgccgaccccaaggagaaguggguccagaacuacaugaagcaccucggccgcaaggcccacacccucaagaccuga

SEQ ID NO: 4861 - RNA, 297 nt, Artificial Sequence
  derived and/or modified sequence opt3 from CCL13__Homo_sapiens__AAB38703
augaaggugagcgccguccugcucugccuucuguugaugaccgcugcauucaacccccagggcuuagcccaaccugacgcgcugaauguuccauccacauguugcuuuacuuucucuaguaaaaagaucucacuacagagacucaaaagcuacgugauuacgaccuccagguguccgcagaaggcuguaauauuucggacaaaacuggggaaggagaucugcgccgaucccaaggaaaaaugggugcagaacuauaugaagcaccuuggacgcaaagcacauacucugaagaccuga

SEQ ID NO: 4862 - RNA, 297 nt, Artificial Sequence
  derived and/or modified sequence opt4 from CCL13__Homo_sapiens__AAB38703
augaaggugagcgccgugcugcugugccugcugcugaugaccgccgccuucaacccccagggccuggcccagcccgacgcccugaacgugcccagcaccugcugcuucaccuucagcagcaagaagaucagccugcagagacugaagagcuacgugaucaccaccagcagaugcccccagaaggccgugaucuucagaaccaagcugggcaaggagaucugcgccgaccccaaggagaagugggugcagaacuacaugaagcaccugggcagaaaggcccacacccugaagaccuga

SEQ ID NO: 4863 - RNA, 297 nt, Artificial Sequence
  derived and/or modified sequence opt5 from CCL13__Homo_sapiens__AAB38703
augaaggugagcgccguccugcucugccugcuucugaugaccgcugccuucaacccccagggccucgcgcaaccugacgcucugaauguuccguccacauguugcuuuacguucucuagcaaaaagaucucccuucagagacugaaaucuuacgugauuaccacaagccgguguccccagaaggccgugaucuuucgcaccaaacucgggaaggagauuugcgccgauccuaaggaaaaauggguccagaacuauaugaagcaccugggaagaaaagcucauacacugaagaccuga

SEQ ID NO: 4864 - RNA, 297 nt, Artificial Sequence
  derived and/or modified sequence opt6 from CCL13__Homo_sapiens__AAB38703
augaaaguaucagcaguacuacuaugccuacuacuaaugacagcagcauucaacccacaaggacuagcacaaccagacgcacuaaacguaccaucaacaugcugcuucacauucucaucaaaaaaaauaucacuacaaagacuaaaaucauacguaauaacaacaucaagaugcccacaaaaagcaguaauauucagaacaaaacuaggaaaagaaauaugcgcagacccaaaagaaaaauggguacaaaacuacaugaaacaccuaggaagaaaagcacacacacuaaaaacauaa

SEQ ID NO: 4865 - protein, 93 aa, Artificial Sequence
  CCL14__Homo_sapiens__Q16627
MKISVAAIPFFLLITIALGTKTESSSRGPYHPSECCFTYTTYKIPRQRIMDYYETNSQCSKPGIVFITKRGHSVCTNPSDKWVQDYIKDMKEN

SEQ ID NO: 4866 - RNA, 282 nt, Artificial Sequence
  CCL14__Homo_sapiens__AAC63329
augaagaucuccguggcugccauucccuucuuccuccucaucaccaucgcccuagggaccaagacugaauccuccucacggggaccuuaccaccccucagagugcugcuucaccuacacuaccuacaagaucccgcgucagcggauuauggauuacuaugagaccaacagccagugcuccaagcccggaauugucuucaucaccaaaaggggccauuccgucuguaccaaccccagugacaaguggguccaggacuauaucaaggacaugaaggagaacuga

SEQ ID NO: 4867 - RNA, 282 nt, Artificial Sequence
  derived and/or modified sequence opt1 from CCL14__Homo_sapiens__AAC63329
augaagaucagcguggccgccauccccuucuuccugcucaucaccaucgcgcugggcaccaagacggaguccagcucccgcgggccguaccaccccagcgagugcugcuucaccuacaccaccuacaagaucccccggcagcgcaucauggacuacuacgagacgaacucccagugcagcaagcccggcaucgucuucaucaccaagcgggggcacuccgugugcaccaacccgagcgacaagugggugcaggacuacaucaaggacaugaaggagaacuga

SEQ ID NO: 4868 - RNA, 282 nt, Artificial Sequence
  derived and/or modified sequence opt2 from CCL14__Homo_sapiens__AAC63329
augaagaucuccgucgccgccauccccuucuuccuccucaucaccaucgcccucggcaccaagaccgaguccuccucccgcggccccuaccaccccuccgagugcugcuucaccuacaccaccuacaagaucccccgccagcgcaucauggacuacuacgagaccaacucccagugcuccaagcccggcaucgucuucaucaccaagcgcggccacuccgucugcaccaaccccuccgacaaguggguccaggacuacaucaaggacaugaaggagaacuga

SEQ ID NO: 4869 - RNA, 282 nt, Artificial Sequence
  derived and/or modified sequence opt3 from CCL14__Homo_sapiens__AAC63329
augaagaucagcguggccgcuauucccuucuuucugcucauaaccaucgcacuuggcacaaaaacugaguccucuucaagagggccuuaccacccaagugaaugcuguuucacguauaccacauacaagauuccgaggcagcggaucauggacuauuacgagacuaacagccaaugcuccaaacccggaauugucuuuaucaccaagcgcggucauucuguuuguacaaauccuucggauaaaugggugcaggacuauauaaaggauaugaaggaaaacuga

SEQ ID NO: 4870 - RNA, 282 nt, Artificial Sequence
  derived and/or modified sequence opt4 from CCL14__Homo_sapiens__AAC63329
augaagaucagcguggccgccauccccuucuuccugcugaucaccaucgcccugggcaccaagaccgagagcagcagcagaggccccuaccaccccagcgagugcugcuucaccuacaccaccuacaagauccccagacagagaaucauggacuacuacgagaccaacagccagugcagcaagcccggcaucguguucaucaccaagagaggccacagcgugugcaccaaccccagcgacaagugggugcaggacuacaucaaggacaugaaggagaacuga

SEQ ID NO: 4871 - RNA, 282 nt, Artificial Sequence
  derived and/or modified sequence opt5 from CCL14__Homo_sapiens__AAC63329
augaagaucagcguggccgcuauucccuucuuucugcucaucaccauugcccugggcacaaaaacggaguccucuagcagagggccuuaccacccguccgaaugcuguuucaccuauacaaccuacaagaucccccggcagcgcauuauggacuauuacgagacaaacucucaaugcagcaaaccuggaaucgucuuuaucaccaagagaggccauuccguuuguacaaaucccucugauaaaugggugcaggacuauauuaaggauaugaaggaaaacuga

SEQ ID NO: 4872 - RNA, 282 nt, Artificial Sequence
  derived and/or modified sequence opt6 from CCL14__Homo_sapiens__AAC63329
augaaaauaucaguagcagcaauaccauucuuccuacuaauaacaauagcacuaggaacaaaaacagaaucaucaucaagaggaccauaccacccaucagaaugcugcuucacauacacaacauacaaaauaccaagacaaagaauaauggacuacuacgaaacaaacucacaaugcucaaaaccaggaauaguauucauaacaaaaagaggacacucaguaugcacaaacccaucagacaaauggguacaagacuacauaaaagacaugaaagaaaacuaa

SEQ ID NO: 4873 - protein, 113 aa, Artificial Sequence
  CCL15__Homo_sapiens__Q16663
MKVSVAALSCLMLVAVLGSQAQFINDAETELMMSKLPLENPVVLNSFHFAADCCTSYISQSIPCSLMKSYFETSSECSKPGVIFLTKKGRQVCAKPSGPGVQDCMKKLKPYSI

SEQ ID NO: 4874 - RNA, 342 nt, Artificial Sequence
  CCL15__Homo_sapiens__AAB94617
augaaggucuccguggcugcccucuccugccucaugcuuguugcuguccuuggaucccaggcccaguucauaaaugaugcagagacagaguuaaugaugucaaagcuuccacuggaaaauccaguaguucugaacagcuuucacuuugcugcugacugcugcaccuccuacaucucacaaagcaucccguguucacucaugaaaaguuauuuugaaacgagcagcgagugcuccaagccaggugucauauuccucaccaagaaggggaggcaagucugugccaaacccagugguccgggaguucaggauugcaugaaaaagcugaagcccuacucaauauaa

SEQ ID NO: 4875 - RNA, 342 nt, Artificial Sequence
  derived and/or modified sequence opt1 from CCL15__Homo_sapiens__AAB94617
augaaggugagcgucgccgcccuguccugccucaugcugguggcggugcugggcagccaggcccaguucaucaacgacgccgagaccgagcucaugauguccaagcugccccuggagaacccggucgugcucaacagcuuccacuucgccgccgacugcugcaccuccuacaucagccaguccauccccugcagccugaugaaguccuacuucgagacgagcuccgagugcagcaagcccggggugaucuuccugaccaagaagggccgccaggucugcgcgaagcccuccgggccgggcgugcaggacugcaugaagaagcucaagcccuacagcaucuga

SEQ ID NO: 4876 - RNA, 342 nt, Artificial Sequence
  derived and/or modified sequence opt2 from CCL15__Homo_sapiens__AAB94617
augaaggucuccgucgccgcccucuccugccucaugcucgucgccguccucggcucccaggcccaguucaucaacgacgccgagaccgagcucaugauguccaagcucccccucgagaaccccgucguccucaacuccuuccacuucgccgccgacugcugcaccuccuacaucucccaguccauccccugcucccucaugaaguccuacuucgagaccuccuccgagugcuccaagcccggcgucaucuuccucaccaagaagggccgccaggucugcgccaagcccuccggccccggcguccaggacugcaugaagaagcucaagcccuacuccaucuga

SEQ ID NO: 4877 - RNA, 342 nt, Artificial Sequence
  derived and/or modified sequence opt3 from CCL15__Homo_sapiens__AAB94617
augaaggugagcgucgccgcucuguccugccucaugcuuguugcagugcugggcucucaggcccaauucaucaacgacgcggagaccgaauugaugaugucaaaauuaccccuggagaauccuguagugcuaaacaguuuucacuucgcugccgauuguugcacaagcuacauuucccagucuauaccauguucgcucaugaagucauauuuugaaacuagcagugagugcuccaaaccgggggucaucuuccugacgaagaaaggaagacaggugugugcaaagcccucugguccuggcguucaggacugcaugaagaaacuuaagccauacagcauuuga

SEQ ID NO: 4878 - RNA, 342 nt, Artificial Sequence
  derived and/or modified sequence opt4 from CCL15__Homo_sapiens__AAB94617
augaaggugagcguggccgcccugagcugccugaugcugguggccgugcugggcagccaggcccaguucaucaacgacgccgagaccgagcugaugaugagcaagcugccccuggagaaccccguggugcugaacagcuuccacuucgccgccgacugcugcaccagcuacaucagccagagcauccccugcagccugaugaagagcuacuucgagaccagcagcgagugcagcaagcccggcgugaucuuccugaccaagaagggcagacaggugugcgccaagcccagcggccccggcgugcaggacugcaugaagaagcugaagcccuacagcaucuga

SEQ ID NO: 4879 - RNA, 342 nt, Artificial Sequence
  derived and/or modified sequence opt5 from CCL15__Homo_sapiens__AAB94617
augaaggugagcgucgccgcucuguccugccucaugcugguugccgugcuuggcucucaggcgcaauucaucaacgacgcugagaccgaacugaugaugagcaaacucccccuggagaauccugugguccuuaacuccuuucacuucgccgccgauuguugcacaucuuacauuagccaguccaucccguguucucugaugaaaagcuauuuugaaacguccagcgagugcucuaagcccggggugauuuuccucaccaagaaaggaagacagguuugugcuaagccuuccggccccggggugcaggacugcaugaagaaacugaagccuuacagcaucuga

SEQ ID NO: 4880 - RNA, 342 nt, Artificial Sequence
  derived and/or modified sequence opt6 from CCL15__Homo_sapiens__AAB94617
augaaaguaucaguagcagcacuaucaugccuaauguuaguagcaguacuaggaucacaagcacaauucauaaacgacgcagaaacagaacuaaugaugagcaaacuaccacuagaaaacccaguaguacuaaacucauuccacuucgcagcagacugcugcacaucauacauaucacaaucaauaccaugcucacuaaugaaaucauacuucgaaacaucaucagaaugcucaaaaccaggaguaauauuccuaacaaaaaaaggaagacaaguaugcgcaaaaccaucaggaccaggaguacaagacugcaugaaaaaacuaaaaccauacucaauauaa

SEQ ID NO: 4881 - protein, 120 aa, Artificial Sequence
  CCL16__Homo_sapiens__O15467
MKVSEAALSLLVLILIITSASRSQPKVPEWVNTPSTCCLKYYEKVLPRRLVVGYRKALNCHLPAIIFVTKRNREVCTNPNDDWVQEYIKDPNLPLLPTRNLSTVKIITAKNGQPQLLNSQ

SEQ ID NO: 4882 - RNA, 363 nt, Artificial Sequence
  CCL16__Homo_sapiens__AAC05587
augaaggucuccgaggcugcccugucucuccuuguccucauccuuaucauuacuucggcuucucgcagccagccaaaaguuccugagugggugaacaccccauccaccugcugccugaaguauuaugagaaaguguugccaaggagacuaguggugggauacagaaaggcccucaacugucaccugccagcaaucaucuucgucaccaagaggaaccgagaagucugcaccaaccccaaugacgacuggguccaagaguacaucaaggaucccaaccuaccuuugcugccuaccaggaacuuguccacgguuaaaauuauuacagcaaagaauggucaaccccagcuccucaacucccaguga

SEQ ID NO: 4883 - RNA, 363 nt, Artificial Sequence
  derived and/or modified sequence opt1 from CCL16__Homo_sapiens__AAC05587
augaaggugagcgaggccgcccugucccuccugguccugauccucaucaucaccagcgcgucccgcagccagcccaaggugccggagugggugaacacccccuccacgugcugccugaaguacuacgagaagguccugccccggcgccucguggugggcuaccggaaggcccugaacugccaccuccccgccaucaucuucgucaccaagcgcaaccgggaggugugcaccaacccgaacgacgacugggugcaggaguacaucaaggaccccaaccugccccugcugcccacccgcaaccucagcacggucaagaucaucaccgccaagaacgggcagccgcagcugcugaacucccaguga

SEQ ID NO: 4884 - RNA, 363 nt, Artificial Sequence
  derived and/or modified sequence opt2 from CCL16__Homo_sapiens__AAC05587
augaaggucuccgaggccgcccucucccuccucguccucauccucaucaucaccuccgccucccgcucccagcccaagguccccgagugggucaacacccccuccaccugcugccucaaguacuacgagaagguccucccccgccgccucgucgucggcuaccgcaaggcccucaacugccaccuccccgccaucaucuucgucaccaagcgcaaccgcgaggucugcaccaaccccaacgacgacuggguccaggaguacaucaaggaccccaaccucccccuccuccccacccgcaaccucuccaccgucaagaucaucaccgccaagaacggccagccccagcuccucaacucccaguga

SEQ ID NO: 4885 - RNA, 363 nt, Artificial Sequence
  derived and/or modified sequence opt3 from CCL16__Homo_sapiens__AAC05587
augaaggugagcgaggccgcucugucccuccuuguccugaucuugauuauaaccucugcaucaagaagucagcccaaaguuccugaaugggugaacacaccaagcacuugcuguuuaaaguacuaugagaaaguacugccgaggcggcuaguggucggcuaccgcaaggcccucaauugccaccuucccgcgaucauuuucgugacgaaacgaaaccgugaaguuuguaccaauccuaacgacgauugggugcaagaguauaucaaggacccaaaucugccccuguugccuacaagaaaccucuccacugucaagauuaucaccgcuaaaaaugggcagccacagcugcugaacucucaguga

SEQ ID NO: 4886 - RNA, 363 nt, Artificial Sequence
  derived and/or modified sequence opt4 from CCL16__Homo_sapiens__AAC05587
augaaggugagcgaggccgcccugagccugcuggugcugauccugaucaucaccagcgccagcagaagccagcccaaggugcccgagugggugaacacccccagcaccugcugccugaaguacuacgagaaggugcugcccagaagacugguggugggcuacagaaaggcccugaacugccaccugcccgccaucaucuucgugaccaagagaaacagagaggugugcaccaaccccaacgacgacugggugcaggaguacaucaaggaccccaaccugccccugcugcccaccagaaaccugagcaccgugaagaucaucaccgccaagaacggccagccccagcugcugaacagccaguga

SEQ ID NO: 4887 - RNA, 363 nt, Artificial Sequence
  derived and/or modified sequence opt5 from CCL16__Homo_sapiens__AAC05587
augaaggugagcgaggccgcucugucccuccugguccuuauccugauuaucaccucugccagcagaucccagcccaaaguuccugaaugggugaacacaccgucuacgugcugucucaaguacuaugagaaagugcugccccggcgccuugucgugggcuacagaaaggcgcugaauugccaccucccugcuauuaucuucguuaccaaacggaaccgcgaaguguguacaaaucccaacgacgauuggguccaagaguauauuaaggacccuaaucugccccugcucccuaccagaaaccugagcacagugaagaucaucaccgccaaaaaugggcagccgcagcuucugaacucccaguga

SEQ ID NO: 4888 - RNA, 363 nt, Artificial Sequence
  derived and/or modified sequence opt6 from CCL16__Homo_sapiens__AAC05587
augaaaguaucagaagcagcacuaucacuacuaguacuaauacuaauaauaacaucagcaucaagaucacaaccaaaagucccagaauggguaaacacaccaucaacaugcugccuaaaauacuacgaaaaaguacuaccaagaagacuaguaguaggauacagaaaagcacuaaacugccaccuaccagcaauaauauucguaacaaaaagaaacagagaaguaugcacaaacccaaacgacgacuggguacaagaauacauaaaagacccaaaccuaccacuacuaccaacaagaaaccuaucaacagucaaaauaauaacagcaaaaaacggacaaccacaacuacuaaacucacaauaa

SEQ ID NO: 4889 - protein, 94 aa, Artificial Sequence
  CCL17__Homo_sapiens__Q92583
MAPLKMLALVTLLLGASLQHIHAARGTNVGRECCLEYFKGAIPLRKLKTWYQTSEDCSRDAIVFVTVQGRAICSDPNNKRVKNAVKYLQSLERS

SEQ ID NO: 4890 - RNA, 285 nt, Artificial Sequence
  CCL17__Homo_sapiens__AAH69107
auggccccacugaagaugcuggcccuggucacccuccuccugggggcuucucugcagcacauccacgcagcucgagggaccaaugugggccgggagugcugccuggaguacuucaagggagccauuccccuuagaaagcugaagacgugguaccagacaucugaggacugcuccagggaugccaucguuuuuguaacugugcagggcagggccaucuguucggaccccaacaacaagagagugaagaaugcaguuaaauaccugcaaagccuugagaggucuuga

SEQ ID NO: 4891 - RNA, 285 nt, Artificial Sequence
  derived and/or modified sequence opt1 from CCL17__Homo_sapiens__AAH69107
auggcgccccugaagaugcucgcccuggugacccugcuccugggcgccagccugcagcacauccacgccgcccgcgggaccaacgucggccgggagugcugccucgaguacuucaagggggccaucccgcugcgcaagcugaagacgugguaccagaccuccgaggacugcagccgggacgccaucguguucgugaccguccagggccgcgcgaucugcuccgaccccaacaacaagcgggugaagaacgccgugaaguaccuccagagccuggagcgcuccuga

SEQ ID NO: 4892 - RNA, 285 nt, Artificial Sequence
  derived and/or modified sequence opt2 from CCL17__Homo_sapiens__AAH69107
auggccccccucaagaugcucgcccucgucacccuccuccucggcgccucccuccagcacauccacgccgcccgcggcaccaacgucggccgcgagugcugccucgaguacuucaagggcgccaucccccuccgcaagcucaagaccugguaccagaccuccgaggacugcucccgcgacgccaucgucuucgucaccguccagggccgcgccaucugcuccgaccccaacaacaagcgcgucaagaacgccgucaaguaccuccagucccucgagcgcuccuga

SEQ ID NO: 4893 - RNA, 285 nt, Artificial Sequence
  derived and/or modified sequence opt3 from CCL17__Homo_sapiens__AAH69107
auggcuccccugaagaugcucgcccuugugacccuguuguuaggcgcaagccugcagcacauccaugccgcgagagggacaaacgucggaagggagugcugucuagaauacuucaaaggugcuauuccucuccggaagcugaaaacuugguaucaaacguccgaggacugcucucgcgaugccauaguuuuugugaccguacagggccgagcaaucuguucagacccaaauaacaagcgugugaaaaaugccgucaaguaccuucagagucuggaaagaagcuga

SEQ ID NO: 4894 - RNA, 285 nt, Artificial Sequence
  derived and/or modified sequence opt4 from CCL17__Homo_sapiens__AAH69107
auggccccccugaagaugcuggcccuggugacccugcugcugggcgccagccugcagcacauccacgccgccagaggcaccaacgugggcagagagugcugccuggaguacuucaagggcgccaucccccugagaaagcugaagaccugguaccagaccagcgaggacugcagcagagacgccaucguguucgugaccgugcagggcagagccaucugcagcgaccccaacaacaagagagugaagaacgccgugaaguaccugcagagccuggagagaagcuga

SEQ ID NO: 4895 - RNA, 285 nt, Artificial Sequence
  derived and/or modified sequence opt5 from CCL17__Homo_sapiens__AAH69107
auggcuccccugaagaugcucgcccuggugacccuucugcucggcgccagccugcagcacauccaugcggcuagagggacaaacgucggacgggagugcugucuugaauacuucaaaggcgccauuccucugcgcaagcucaaaacgugguaucaaaccuccgaggacugcucuagagaugccaucguuuuugugacagugcaggggcgggcuauuuguagcgacccgaauaacaagcgcgucaaaaaugccgugaaguaccugcagucccuggaaagaucuuga

SEQ ID NO: 4896 - RNA, 285 nt, Artificial Sequence
  derived and/or modified sequence opt6 from CCL17__Homo_sapiens__AAH69107
auggcaccacuaaaaaugcuagcacuaguaacacuauuauuaggagcaucacuacaacacauacacgcagcaagaggaacaaacguaggaagagaaugcugccuagaauacuucaaaggagcaauaccacuaagaaaacuaaaaacaugguaccaaacaucagaagacugcucaagagacgcaauaguauucguaacaguacaaggaagagcaauaugcucagacccaaacaacaaaagaguaaaaaacgcaguaaaauaccuacaaucacuagaaagaucauaa

SEQ ID NO: 4897 - protein, 89 aa, Artificial Sequence
  CCL18__Homo_sapiens__P55774
MKGLAAALLVLVCTMALCSCAQVGTNKELCCLVYTSWQIPQKFIVDYSETSPQCPKPGVILLTKRGRQICADPNKKWVQKYISDLKLNA

SEQ ID NO: 4898 - RNA, 270 nt, Artificial Sequence
  CCL18__Homo_sapiens__AAC32287
augaagggccuugcagcugcccuccuuguccucgucugcaccauggcccucugcuccugugcacaaguugguaccaacaaagagcucugcugccucgucuauaccuccuggcagauuccacaaaaguucauaguugacuauucugaaaccagcccccagugccccaagccaggugucauccuccuaaccaagagaggccggcagaucugugcugaccccaauaagaaguggguccagaaauacaucagcgaccugaagcugaaugccuga

SEQ ID NO: 4899 - RNA, 270 nt, Artificial Sequence
  derived and/or modified sequence opt1 from CCL18__Homo_sapiens__AAC32287
augaagggccuggccgccgcgcuccuggugcuggucugcaccauggcccucugcagcugcgcccagguggggaccaacaaggagcugugcugccugguguacacguccuggcagaucccccagaaguucaucgucgacuacagcgagaccuccccgcagugccccaagcccggcgugauccuccugaccaagcgcgggcggcagaucugcgccgaccccaacaagaagugggugcagaaguacaucagcgaccugaagcucaacgccuga

SEQ ID NO: 4900 - RNA, 270 nt, Artificial Sequence
  derived and/or modified sequence opt2 from CCL18__Homo_sapiens__AAC32287
augaagggccucgccgccgcccuccucguccucgucugcaccauggcccucugcuccugcgcccaggucggcaccaacaaggagcucugcugccucgucuacaccuccuggcagaucccccagaaguucaucgucgacuacuccgagaccuccccccagugccccaagcccggcgucauccuccucaccaagcgcggccgccagaucugcgccgaccccaacaagaaguggguccagaaguacaucuccgaccucaagcucaacgccuga

SEQ ID NO: 4901 - RNA, 270 nt, Artificial Sequence
  derived and/or modified sequence opt3 from CCL18__Homo_sapiens__AAC32287
augaagggccuggccgcugcacuccuugugcuggucugcaccauggccuuguguagcugcgcgcagguugggacaaacaaagaguuauguugccugguguacacuuccuggcaaaucccccagaaguucauuguagacuauucugaaacgucaccucaguguccaaaaccgggagugauacuacucaccaagagagguaggcagaucugcgcugaucccaauaaaaaguggguccaaaaguacauuagugaccugaaacuuaacgccuga

SEQ ID NO: 4902 - RNA, 270 nt, Artificial Sequence
  derived and/or modified sequence opt4 from CCL18__Homo_sapiens__AAC32287
augaagggccuggccgccgcccugcuggugcuggugugcaccauggcccugugcagcugcgcccaggugggcaccaacaaggagcugugcugccugguguacaccagcuggcagaucccccagaaguucaucguggacuacagcgagaccagcccccagugccccaagcccggcgugauccugcugaccaagagaggcagacagaucugcgccgaccccaacaagaagugggugcagaaguacaucagcgaccugaagcugaacgccuga

SEQ ID NO: 4903 - RNA, 270 nt, Artificial Sequence
  derived and/or modified sequence opt5 from CCL18__Homo_sapiens__AAC32287
augaagggccuggccgcugcccuccuggugcuugucugcaccauggcgcuguguagcugcgcucagguugggacaaacaaagagcucuguugccugguguacacguccuggcaaaucccccagaaguucauuguggacuauucugaaaccagcccucaguguccgaaacccggagucauccuucugacaaagagaggccggcagauuugcgccgauccuaauaaaaagugggugcaaaaguacaucuccgaccucaaacugaacgccuga

SEQ ID NO: 4904 - RNA, 270 nt, Artificial Sequence
  derived and/or modified sequence opt6 from CCL18__Homo_sapiens__AAC32287
augaaaggacuagcagcagcacuacuaguacuaguaugcacaauggcacuaugcucaugcgcacaaguaggaacaaacaaagaacuaugcugccuaguauacacaucauggcaaauaccacaaaaauucauaguagacuacucagaaacaucaccacaaugcccaaaaccaggaguaauacuacuaacaaaaagaggaagacaaauaugcgcagacccaaacaaaaaauggguacaaaaauacauaucagaccuaaaacuaaacgcauaa

SEQ ID NO: 4905 - protein, 98 aa, Artificial Sequence
  CCL19__Homo_sapiens__Q6IBD6
MALLLALSLLVLWTSPAPTLSGTNDAEDCCLSVTQKPIPGYIVRNFHYLLIKDGCRVPAVVFTTLRGRQLCAPPDQPWVERIIQRLQRTSAKMKRRSS

SEQ ID NO: 4906 - RNA, 297 nt, Artificial Sequence
  CCL19__Homo_sapiens__ABK41949
auggcccugcuacuggcccucagccugcugguucucuggacuuccccagccccaacucugaguggcaccaaugaugcugaagacugcugccugucugugacccagaaacccaucccuggguacaucgugaggaacuuccacuaccuucucaucaaggauggcugcagggugccugcuguaguguucaccacacugaggggccgccagcucugugcacccccagaccagcccuggguagaacgcaucauccagagacugcagaggaccucagccaagaugaagcgccgcagcaguuaa

SEQ ID NO: 4907 - RNA, 297 nt, Artificial Sequence
  derived and/or modified sequence opt1 from CCL19__Homo_sapiens__ABK41949
auggcccugcuccuggcccugagccuccuggugcuguggaccucccccgcgccgacccucagcggcacgaacgacgccgaggacugcugccuguccgucacccagaagcccauccccggguacaucgugcgcaacuuccacuaccugcucaucaaggacggcugccgggugcccgccgucguguucaccacccugcgcgggcggcagcugugcgccccgcccgaccagcccuggguggagcgcaucauccagcggcuccagcgcacgagcgccaagaugaagcggcgcuccagcuga

SEQ ID NO: 4908 - RNA, 297 nt, Artificial Sequence
  derived and/or modified sequence opt2 from CCL19__Homo_sapiens__ABK41949
auggcccuccuccucgcccucucccuccucguccucuggaccucccccgcccccacccucuccggcaccaacgacgccgaggacugcugccucuccgucacccagaagcccauccccggcuacaucguccgcaacuuccacuaccuccucaucaaggacggcugccgcguccccgccgucgucuucaccacccuccgcggccgccagcucugcgccccccccgaccagcccugggucgagcgcaucauccagcgccuccagcgcaccuccgccaagaugaagcgccgcuccuccuga

SEQ ID NO: 4909 - RNA, 297 nt, Artificial Sequence
  derived and/or modified sequence opt3 from CCL19__Homo_sapiens__ABK41949
auggcccugcuccuugcucugagcuuguuagugcuguggacuucccccgcaccuacacuaucuggcacuaacgacgccgaggauugcugucucucagucacgcagaagccaaucccgggguacauuguuagaaauuuccacuaucugcuuauaaaagacggaugcagggugcccgcgguaguguuuaccacacugcggggucgccaauugugugcuccuccagaucagcccugggucgaacgaaucauucagcgucuccagagaaccagugccaagaugaaaaggcggagcuccuga

SEQ ID NO: 4910 - RNA, 297 nt, Artificial Sequence
  derived and/or modified sequence opt4 from CCL19__Homo_sapiens__ABK41949
auggcccugcugcuggcccugagccugcuggugcuguggaccagccccgcccccacccugagcggcaccaacgacgccgaggacugcugccugagcgugacccagaagcccauccccggcuacaucgugagaaacuuccacuaccugcugaucaaggacggcugcagagugcccgccgugguguucaccacccugagaggcagacagcugugcgccccccccgaccagcccuggguggagagaaucauccagagacugcagagaaccagcgccaagaugaagagaagaagcagcuga

SEQ ID NO: 4911 - RNA, 297 nt, Artificial Sequence
  derived and/or modified sequence opt5 from CCL19__Homo_sapiens__ABK41949
auggcccugcuccuggcccuuagccugcucgugcuguggaccucccccgccccuacacuuucuggcacgaacgacgcggaggauugcugucugagcgucacccagaagccgauccccggguacauuguuagaaauuuccacuaucuccugaucaaagacggaugccgggugccugcuguggucuuuacaacccugcgcggcagacaacucugugcucccccugaucagcccuggguggaacggauuauccagcgccugcagagaacauccgccaagaugaaacggcgcucuagcuga

SEQ ID NO: 4912 - RNA, 297 nt, Artificial Sequence
  derived and/or modified sequence opt6 from CCL19__Homo_sapiens__ABK41949
auggcauuacuauuagcauuaagcuuacuaguacuauggacaucaccagcaccaacacuaucaggaacaaacgaugcagaagacuguugcuuaagcguaacacaaaaaccaauaccaggauauauaguaagaaauuuccauuacuuacuaauaaaagauggauguagaguaccagcaguaguauucacaacauuaagaggaagacaacuaugugcaccaccagaucaaccauggguagaaagaauaauacaaagauuacaaagaacaagcgcaaaaaugaaaagaagaucaagcuaa

SEQ ID NO: 4913 - protein, 98 aa, Artificial Sequence; identical to SEQ ID NO: 4905
  CCL19__Homo_sapiens__Q99731

SEQ ID NO: 4914 - RNA, 297 nt, Artificial Sequence; identical to SEQ ID NO: 4906
  CCL19__Homo_sapiens__AAC50944

SEQ ID NO: 4915 - RNA, 297 nt, Artificial Sequence; identical to SEQ ID NO: 4907
  derived and/or modified sequence opt1 from CCL19__Homo_sapiens__AAC50944

SEQ ID NO: 4916 - RNA, 297 nt, Artificial Sequence; identical to SEQ ID NO: 4908
  derived and/or modified sequence opt2 from CCL19__Homo_sapiens__AAC50944

SEQ ID NO: 4917 - RNA, 297 nt, Artificial Sequence; identical to SEQ ID NO: 4909
  derived and/or modified sequence opt3 from CCL19__Homo_sapiens__AAC50944

SEQ ID NO: 4918 - RNA, 297 nt, Artificial Sequence; identical to SEQ ID NO: 4910
  derived and/or modified sequence opt4 from CCL19__Homo_sapiens__AAC50944

SEQ ID NO: 4919 - RNA, 297 nt, Artificial Sequence; identical to SEQ ID NO: 4911
  derived and/or modified sequence opt5 from CCL19__Homo_sapiens__AAC50944

SEQ ID NO: 4920 - RNA, 297 nt, Artificial Sequence
  derived and/or modified sequence opt6 from CCL19__Homo_sapiens__AAC50944
auggcauuacuauuagcauuaucauuacuaguacuauggacaucaccagcaccaacacuaucaggaacaaacgaugcagaagacuguugcuuaagcguaacacaaaaaccaauaccaggauauauaguaagaaauuuccauuacuuacuaauaaaagauggauguagaguaccagcaguaguauucacaacauuaagaggaagacaacuaugugcaccaccagaucaaccauggguagaaagaauaauacaaagacuacaaagaacaagcgcaaaaaugaaaagaagaucaagcuaa

SEQ ID NO: 4921 - protein, 96 aa, Artificial Sequence
  CCL1__Homo_sapiens__P22362
MQIITTALVCLLLAGMWPEDVDSKSMQVPFSRCCFSFAEQEIPLRAILCYRNTSSICSNEGLIFKLKRGKEACALDTVGWVQRHRKMLRHCPSKRK

SEQ ID NO: 4922 - RNA, 291 nt, Artificial Sequence
  CCL1__Homo_sapiens__AAA52705
augcagaucaucaccacagcccuggugugcuugcugcuagcugggauguggccggaagauguggacagcaagagcaugcagguacccuucuccagauguugcuucucauuugcggagcaagagauuccccugagggcaauccuguguuacagaaauaccagcuccaucugcuccaaugagggcuuaauauucaagcugaagagaggcaaagaggccugcgccuuggacacaguuggauggguucagaggcacagaaaaaugcugaggcacugcccgucaaaaagaaaauga

SEQ ID NO: 4923 - RNA, 291 nt, Artificial Sequence
  derived and/or modified sequence opt1 from CCL1__Homo_sapiens__AAA52705
augcagaucaucaccaccgcccuggugugccuccugcuggccggcauguggcccgaggacgucgacagcaaguccaugcaggucccguucagccgcugcugcuucuccuucgcggagcaggagaucccccuccgggccauccugugcuaccgcaacacgagcuccaucugcagcaacgaggggcugaucuucaagcucaagcggggcaaggaggccugcgcccuggacaccguggggugggugcagcgccaccggaagaugcugcgccacugccccuccaagcggaaguga

SEQ ID NO: 4924 - RNA, 291 nt, Artificial Sequence
  derived and/or modified sequence opt2 from CCL1__Homo_sapiens__AAA52705
augcagaucaucaccaccgcccucgucugccuccuccucgccggcauguggcccgaggacgucgacuccaaguccaugcagguccccuucucccgcugcugcuucuccuucgccgagcaggagaucccccuccgcgccauccucugcuaccgcaacaccuccuccaucugcuccaacgagggccucaucuucaagcucaagcgcggcaaggaggccugcgcccucgacaccgucggcuggguccagcgccaccgcaagaugcuccgccacugccccuccaagcgcaaguga

SEQ ID NO: 4925 - RNA, 291 nt, Artificial Sequence
  derived and/or modified sequence opt3 from CCL1__Homo_sapiens__AAA52705
augcagaucauuaccacagcccuggugugccuccuucuggcuggcauguggcccgaggacgucgauagcaaguccaugcaaguuccuuucucuagauguugcuuuucauucgcagaacaggagauaccauugagggccaucuuauguuaccggaacacgaguagcauuugcuccaaugaagggcugaucuuuaaacuaaagcgcggaaaagaggcgugugcucucgacacuguggguuggguacagcgacaccguaagaugcugagacauugcccgucuaaaaggaaguga

SEQ ID NO: 4926 - RNA, 291 nt, Artificial Sequence
  derived and/or modified sequence opt4 from CCL1__Homo_sapiens__AAA52705
augcagaucaucaccaccgcccuggugugccugcugcuggccggcauguggcccgaggacguggacagcaagagcaugcaggugcccuucagcagaugcugcuucagcuucgccgagcaggagaucccccugagagccauccugugcuacagaaacaccagcagcaucugcagcaacgagggccugaucuucaagcugaagagaggcaaggaggccugcgcccuggacaccgugggcugggugcagagacacagaaagaugcugagacacugccccagcaagagaaaguga

SEQ ID NO: 4927 - RNA, 291 nt, Artificial Sequence
  derived and/or modified sequence opt5 from CCL1__Homo_sapiens__AAA52705
augcagaucauuaccacagcccuggugugccuccugcuugcuggcauguggcccgaggacgucgauagcaaguccaugcaaguuccuuucucuagauguugcuuuagcuucgccgaacaggagaucccgcugcgggcgauucucuguuaccgcaacacguccucuaucugcagcaaugaagggcugauuuuuaaacuuaagagaggaaaagaggcuugugcccuggacaccgugggcugggugcagcggcaccgcaagaugcucagacauugccccuccaaacggaaguga

SEQ ID NO: 4928 - RNA, 291 nt, Artificial Sequence
  derived and/or modified sequence opt6 from CCL1__Homo_sapiens__AAA52705
augcaaauaauaacaacagcauuaguaugucuauuacuagcaggaauguggccagaagauguagauagcaaaagcaugcaaguaccauuuagcagaugcuguuucucauucgcagaacaagaaauaccauuaagagcaauauuaugcuauagaaauacaucaagcauaugcucaaacgaaggauuaauauuuaaauuaaaaagaggaaaagaagcaugcgcacuagauacaguaggauggguacaaagacauagaaaaauguuaagacauugcccaagcaaaagaaaauaa

SEQ ID NO: 4929 - protein, 96 aa, Artificial Sequence
  CCL20__Homo_sapiens__P78556
MCCTKSLLLAALMSVLLLHLCGESEAASNFDCCLGYTDRILHPKFIVGFTRQLANEGCDINAIIFHTKKKLSVCANPKQTWVKYIVRLLSKKVKNM

SEQ ID NO: 4930 - RNA, 291 nt, Artificial Sequence
  CCL20__Homo_sapiens__AAC50943
augugcuguaccaagaguuugcuccuggcugcuuugaugucagugcugcuacuccaccucugcggcgaaucagaagcagcaagcaacuuugacugcugucuuggauacacagaccguauucuucauccuaaauuuauugugggcuucacacggcagcuggccaaugaaggcugugacaucaaugcuaucaucuuucacacaaagaaaaaguugucugugugcgcaaauccaaaacagacuugggugaaauauauugugcgucuccucaguaaaaaagucaagaacauguaa

SEQ ID NO: 4931 - RNA, 291 nt, Artificial Sequence
  derived and/or modified sequence opt1 from CCL20__Homo_sapiens__AAC50943
augugcugcaccaagagccugcuccuggccgcccugauguccgugcuccugcugcaccucugcggcgagagcgaggcggccuccaacuucgacugcugccugggguacaccgaccgcauccugcaccccaaguucaucgucggcuucacgcggcagcucgccaacgaggggugcgacaucaacgccaucaucuuccacaccaagaagaagcugagcgugugcgccaacccgaagcagaccugggugaaguacaucguccgccugcucuccaagaaggugaagaacauguga

SEQ ID NO: 4932 - RNA, 291 nt, Artificial Sequence
  derived and/or modified sequence opt2 from CCL20__Homo_sapiens__AAC50943
augugcugcaccaagucccuccuccucgccgcccucauguccguccuccuccuccaccucugcggcgaguccgaggccgccuccaacuucgacugcugccucggcuacaccgaccgcauccuccaccccaaguucaucgucggcuucacccgccagcucgccaacgagggcugcgacaucaacgccaucaucuuccacaccaagaagaagcucuccgucugcgccaaccccaagcagaccugggucaaguacaucguccgccuccucuccaagaaggucaagaacauguga

SEQ ID NO: 4933 - RNA, 291 nt, Artificial Sequence
  derived and/or modified sequence opt3 from CCL20__Homo_sapiens__AAC50943
augugcuguaccaagagccugcuccuugccgcucugauguccguguuguuacugcaccuaugcggcgagucugaagcagccucaaacuucgacuguugccucggguacacagauagaauccugcaucccaaauuuauugucggauucacuaggcagcuugcgaaugaggguugugacauaaacgcuaucauuuuucacacgaagaaaaagcugaguguuugcgccaauccuaaacaaaccugggugaaguauaucguacgguugcucagcaagaaagugaagaacauguga

SEQ ID NO: 4934 - RNA, 291 nt, Artificial Sequence
  derived and/or modified sequence opt4 from CCL20__Homo_sapiens__AAC50943
augugcugcaccaagagccugcugcuggccgcccugaugagcgugcugcugcugcaccugugcggcgagagcgaggccgccagcaacuucgacugcugccugggcuacaccgacagaauccugcaccccaaguucaucgugggcuucaccagacagcuggccaacgagggcugcgacaucaacgccaucaucuuccacaccaagaagaagcugagcgugugcgccaaccccaagcagaccugggugaaguacaucgugagacugcugagcaagaaggugaagaacauguga

SEQ ID NO: 4935 - RNA, 291 nt, Artificial Sequence
  derived and/or modified sequence opt5 from CCL20__Homo_sapiens__AAC50943
augugcuguaccaagagccugcuccuggccgcucuuauguccgugcugcuccugcaccuuugcggcgagucugaagccgcgagcaacuucgacuguugccugggguacacagauagaauccuccaucccaaauuuauugucggauucacgcggcagcuggcuaaugagggcugugacaucaacgccauuaucuuucacaccaagaaaaagcuguccguuugcgccaauccuaaacaaacaugggugaaguauauugugcgccuccugucuaagaaagucaagaacauguga

SEQ ID NO: 4936 - RNA, 291 nt, Artificial Sequence
  derived and/or modified sequence opt6 from CCL20__Homo_sapiens__AAC50943
augugcugcacaaaaucacuacuacuagcagcacuaaugucaguacuauuacuacaccuaugcggagaaucagaagcagcaucaaacuucgacugcugccuaggauacacagacagaauacuacacccaaaauucauaguaggauucacaagacaacuagcaaacgaaggaugcgacauaaacgcaauaauauuccacacaaaaaaaaaacuaucaguaugcgcaaacccaaaacaaacauggguaaaauacauaguaagacuacuaucaaaaaaaguaaaaaacauguaa

SEQ ID NO: 4937 - protein, 134 aa, Artificial Sequence
  CCL21__Homo_sapiens__O00585
MAQSLALSLLILVLAFGIPRTQGSDGGAQDCCLKYSQRKIPAKVVRSYRKQEPSLGCSIPAILFLPRKRSQAELCADPKELWVQQLMQHLDKTPSPQKPAQGCRKDRGASKTGKKGKGSKGCKRTERSQTPKGP

SEQ ID NO: 4938 - RNA, 405 nt, Artificial Sequence
  CCL21__Homo_sapiens__AAB86594
auggcucagucacuggcucugagccuccuuauccugguucuggccuuuggaauccccaggacccaaggcagugauggaggggcucaggacuguugccucaaguacagccaaaggaagauucccgccaagguuguccgcagcuaccggaagcaggaaccaagcuuaggcugcuccaucccagcuauccuguucuugccccgcaagcgcucucaggcagagcuaugugcagacccaaaggagcucugggugcagcagcugaugcagcaucuggacaagacaccauccccacagaaaccagcccagggcugcaggaaggacaggggggccuccaagacuggcaagaaaggaaagggcuccaaaggcugcaagaggacugagcggucacagaccccuaaagggccauag

SEQ ID NO: 4939 - RNA, 405 nt, Artificial Sequence
  derived and/or modified sequence opt1 from CCL21__Homo_sapiens__AAB86594
auggcccagagccuggcccucucccugcugauccucgugcuggcguucggcaucccccgcacccaggggagcgacggcggggcccaggacugcugccugaaguacucccagcggaagaucccggccaaggucgugcgcagcuaccggaagcaggagcccucccucggcugcagcauccccgccauccuguuccugccccgcaagcggucccaggccgagcucugcgcggacccgaaggagcugugggugcagcagcugaugcagcaccucgacaagacccccagcccccagaagcccgcccaggggugccgcaaggaccggggcgccuccaagacgggcaagaaggggaagggcagcaaggggugcaagcgcaccgagcggucccagaccccgaagggccccuga

SEQ ID NO: 4940 - RNA, 405 nt, Artificial Sequence
  derived and/or modified sequence opt2 from CCL21__Homo_sapiens__AAB86594
auggcccagucccucgcccucucccuccucauccucguccucgccuucggcaucccccgcacccagggcuccgacggcggcgcccaggacugcugccucaaguacucccagcgcaagauccccgccaaggucguccgcuccuaccgcaagcaggagcccucccucggcugcuccauccccgccauccucuuccucccccgcaagcgcucccaggccgagcucugcgccgaccccaaggagcucuggguccagcagcucaugcagcaccucgacaagacccccuccccccagaagcccgcccagggcugccgcaaggaccgcggcgccuccaagaccggcaagaagggcaagggcuccaagggcugcaagcgcaccgagcgcucccagacccccaagggccccuga

SEQ ID NO: 4941 - RNA, 405 nt, Artificial Sequence
  derived and/or modified sequence opt3 from CCL21__Homo_sapiens__AAB86594
auggcccagagccuggcucucucccuucugaucuugguguuagcauucggcauucccagaacccaagggucugacggaggugcccaggauugcugucugaaguacucacagaggaaaauaccugcgaaggucguucggaguuaucgcaaacaggagccaagccuaggcugcuccaucccggcuauucucuuucugccccgaaagcguucucaagccgaacuuugugcagacccuaaagagcugugggugcagcaguugaugcagcaccucgauaagacaccaucgccccaaaagccugcccaggggugcagaaaagacaggggagcuucaaagacuggcaaaaaggguaaagggagcaagggauguaagcggacggaacgcagucagaccccaaaaggccccuga

SEQ ID NO: 4942 - RNA, 405 nt, Artificial Sequence
  derived and/or modified sequence opt4 from CCL21__Homo_sapiens__AAB86594
auggcccagagccuggcccugagccugcugauccuggugcuggccuucggcauccccagaacccagggcagcgacggcggcgcccaggacugcugccugaaguacagccagagaaagauccccgccaagguggugagaagcuacagaaagcaggagcccagccugggcugcagcauccccgccauccuguuccugcccagaaagagaagccaggccgagcugugcgccgaccccaaggagcugugggugcagcagcugaugcagcaccuggacaagacccccagcccccagaagcccgcccagggcugcagaaaggacagaggcgccagcaagaccggcaagaagggcaagggcagcaagggcugcaagagaaccgagagaagccagacccccaagggccccuga

SEQ ID NO: 4943 - RNA, 405 nt, Artificial Sequence
  derived and/or modified sequence opt5 from CCL21__Homo_sapiens__AAB86594
auggcccagagccuggcucucucccugcuuauccuggugcucgccuucggcauucccagaacccaagggucugacggaggcgcgcaggauugcugucugaaguacagccagcggaaaaucccugcuaaggucguucgcuccuauagaaaacaggagccgucucuugggugcagcauucccgccauccuguuucucccucggaagcgcucccaagccgaacugugugcugaccccaaagagcugugggugcagcagcucaugcagcaccuggauaagacaccuucuccccaaaagccugcccagggaugcagaaaagaccggggcgcuagcaagacggggaaaaagggaaaaggcuccaagggcuguaagcgcaccgaaagaagccagacaccgaaagggcccuga

SEQ ID NO: 4944 - RNA, 405 nt, Artificial Sequence
  derived and/or modified sequence opt6 from CCL21__Homo_sapiens__AAB86594
auggcacaaucauuagcacuaucacuacuaauacuaguauuagcauucggaauaccaagaacacaaggaucagacggaggagcacaagacugcugccuaaaauacucacaaagaaaaauaccagcaaaaguaguaagaucauacagaaaacaagaaccaucacuaggaugcucaauaccagcaauacuauuccuaccaagaaaaagaucacaagcagaacuaugcgcagacccaaaagaacuauggguacaacaacucaugcaacacuuagacaaaacaccaagcccacaaaaaccagcacaaggaugcagaaaagacagaggagcaucaaaaacaggaaaaaaaggaaaaggaucaaaaggaugcaaaagaacagaacgaucacaaacaccaaaaggaccauaa

SEQ ID NO: 4945 - protein, 93 aa, Artificial Sequence
  CCL22__Homo_sapiens__O00626
MDRLQTALLVVLVLLAVALQATEAGPYGANMEDSVCCRDYVRYRLPLRVVKHFYWTSDSCPRPGVVLLTFRDKEICADPRVPWVKMILNKLSQ

SEQ ID NO: 4946 - RNA, 282 nt, Artificial Sequence
  CCL22__Homo_sapiens__BAG34909
auggaucgccuacagacugcacuccugguuguccucguccuccuugcuguggcgcuucaagcaacugaggcaggccccuacggcgccaacauggaagacagcgucugcugccgugauuacguccguuaccgucugccccugcgcguggugaaacacuucuacuggaccucagacuccugcccgaggccuggcgugguguugcuaaccuucagggauaaggagaucugugccgaucccagagugcccugggugaagaugauucucaauaagcugagccaauga

SEQ ID NO: 4947 - RNA, 282 nt, Artificial Sequence
  derived and/or modified sequence opt1 from CCL22__Homo_sapiens__BAG34909
auggaccgccugcagaccgcccuccuggugguccuggugcuccuggccguggcgcugcaggccaccgaggccggccccuacggggccaacauggaggacagcgucugcugccgggacuacgugcgcuaccggcucccgcugcgcguggucaagcacuucuacuggacguccgacagcugcccccggcccggcguggugcugcucaccuuccgcgacaaggagaucugcgccgacccccgggucccgugggugaagaugauccugaacaagcugucccaguga

SEQ ID NO: 4948 - RNA, 282 nt, Artificial Sequence
  derived and/or modified sequence opt2 from CCL22__Homo_sapiens__BAG34909
auggaccgccuccagaccgcccuccucgucguccucguccuccucgccgucgcccuccaggccaccgaggccggccccuacggcgccaacauggaggacuccgucugcugccgcgacuacguccgcuaccgccucccccuccgcgucgucaagcacuucuacuggaccuccgacuccugcccccgccccggcgucguccuccucaccuuccgcgacaaggagaucugcgccgacccccgcguccccugggucaagaugauccucaacaagcucucccaguga

SEQ ID NO: 4949 - RNA, 282 nt, Artificial Sequence
  derived and/or modified sequence opt3 from CCL22__Homo_sapiens__BAG34909
auggacagacugcagaccgcccuccuugugguccugguuuuguuagcuguggcacugcaagccacagaggcgggccccuacggggcuaacauggaagauagcguaugcuguagggacuaugugcgguaccgccuaccucuccgagucgugaagcacuucuauuggacuuccgauucuugcccacguccgggaguugugcugcuuacguuuagagacaaagagaucugugccgaucccagggucccuugggugaagaugauucugaauaaauugucacaguga

SEQ ID NO: 4950 - RNA, 282 nt, Artificial Sequence
  derived and/or modified sequence opt4 from CCL22__Homo_sapiens__BAG34909
auggacagacugcagaccgcccugcugguggugcuggugcugcuggccguggcccugcaggccaccgaggccggccccuacggcgccaacauggaggacagcgugugcugcagagacuacgugagauacagacugccccugagaguggugaagcacuucuacuggaccagcgacagcugccccagacccggcguggugcugcugaccuucagagacaaggagaucugcgccgaccccagagugcccugggugaagaugauccugaacaagcugagccaguga

SEQ ID NO: 4951 - RNA, 282 nt, Artificial Sequence
  derived and/or modified sequence opt5 from CCL22__Homo_sapiens__BAG34909
auggacagacugcagaccgcccuccuggugguccuuguucugcucgcuguggcccugcaagcgacagaggcuggccccuacggggccaacauggaagauagcgugugcugucgggacuauguccgcuacagacuuccucugcgggugguuaagcacuucuauuggacguccgauucuugcccgcgccccggagugguccuccugaccuuuagagacaaagagaucugugccgauccucgggugcccuggguuaagaugauucugaauaaacucagccaguga

SEQ ID NO: 4952 - RNA, 282 nt, Artificial Sequence
  derived and/or modified sequence opt6 from CCL22__Homo_sapiens__BAG34909
auggacagacuacaaacagcacuauuaguaguacuaguacuauuagcaguagcauuacaagcaacagaagcaggaccauauggagcaaacauggaagauagcguaugcuguagagauuacguaagauauagauuaccauuaagaguaguaaaacacuuuuacuggacaucagacucaugcccaagaccaggaguaguauuacuaacauucagagacaaagaaauaugcgcagacccaagaguaccauggguaaaaaugauacuaaauaaauuaagccaauaa

SEQ ID NO: 4953 - protein, 119 aa, Artificial Sequence
  CCL24__Homo_sapiens__O00175
MAGLMTIVTSLLFLGVCAHHIIPTGSVVIPSPCCMFFVSKRIPENRVVSYQLSSRSTCLKAGVIFTTKKGQQFCGDPKQEWVQRYMKNLDAKQKKASPRARAVAVKGPVQRYPGNQTTC

SEQ ID NO: 4954 - RNA, 360 nt, Artificial Sequence
  CCL24__Homo_sapiens__AAD15410
auggcaggccugaugaccauaguaaccagccuucuguuccuuggugucugugcccaccacaucaucccuacgggcucuguggucauccccucucccugcugcauguucuuuguuuccaagagaauuccugagaaccgaguggucagcuaccagcuguccagcaggagcacaugccucaaggcaggagugaucuucaccaccaagaagggccagcaguucuguggcgaccccaagcaggaguggguccagagguacaugaagaaccuggacgccaagcagaagaaggcuuccccuagggccagggcaguggcugucaagggcccuguccagagauauccuggcaaccaaaccaccugcuaa

SEQ ID NO: 4955 - RNA, 360 nt, Artificial Sequence
  derived and/or modified sequence opt1 from CCL24__Homo_sapiens__AAD15410
auggccggccugaugaccaucgugaccagccuccuguuccugggggucugcgcccaccacaucauccccacgggcuccguggugaucccgagccccugcugcauguucuucgucuccaagcgcauccccgagaaccggguggugagcuaccagcucuccagccgcuccaccugccugaaggcgggggucaucuucaccaccaagaagggccagcaguucugcggggaccccaagcaggagugggugcagcgguacaugaagaaccuggacgccaagcagaagaaggccagcccgcgcgcccgggccguggcggucaagggccccgugcagcgcuaccccggcaaccagacgaccugcuga

SEQ ID NO: 4956 - RNA, 360 nt, Artificial Sequence
  derived and/or modified sequence opt2 from CCL24__Homo_sapiens__AAD15410
auggccggccucaugaccaucgucaccucccuccucuuccucggcgucugcgcccaccacaucauccccaccggcuccgucgucauccccucccccugcugcauguucuucgucuccaagcgcauccccgagaaccgcgucgucuccuaccagcucuccucccgcuccaccugccucaaggccggcgucaucuucaccaccaagaagggccagcaguucugcggcgaccccaagcaggaguggguccagcgcuacaugaagaaccucgacgccaagcagaagaaggccuccccccgcgcccgcgccgucgccgucaagggccccguccagcgcuaccccggcaaccagaccaccugcuga

SEQ ID NO: 4957 - RNA, 360 nt, Artificial Sequence
  derived and/or modified sequence opt3 from CCL24__Homo_sapiens__AAD15410
auggccggccugaugaccaucgugacaagccuccuuuuccugggggucugcgcucaccauauuauacccacuggauccguugugaucccuucuccauguugcauguuuuucguaucaaagaggauuccggagaacagaguggucaguuaccaguugagcucccggucuacguguuuaaaagccggugugaucuuuaccacaaagaaaggccaacaguucugcggggaccccaagcaggaauggguucagcgcuauaugaaaaaucuggaugcaaagcaaaagaaagcgucgccucgagcucgugccguggcagucaagggaccagugcagagauaccccggcaaccagacuaccuguuga

SEQ ID NO: 4958 - RNA, 360 nt, Artificial Sequence
  derived and/or modified sequence opt4 from CCL24__Homo_sapiens__AAD15410
auggccggccugaugaccaucgugaccagccugcuguuccugggcgugugcgcccaccacaucauccccaccggcagcguggugauccccagccccugcugcauguucuucgugagcaagagaauccccgagaacagaguggugagcuaccagcugagcagcagaagcaccugccugaaggccggcgugaucuucaccaccaagaagggccagcaguucugcggcgaccccaagcaggagugggugcagagauacaugaagaaccuggacgccaagcagaagaaggccagccccagagccagagccguggccgugaagggccccgugcagagauaccccggcaaccagaccaccugcuga

SEQ ID NO: 4959 - RNA, 360 nt, Artificial Sequence
  derived and/or modified sequence opt5 from CCL24__Homo_sapiens__AAD15410
auggccggccugaugaccaucgugacaagccuccuguuccuuggggucugcgcucaccauauuauccccacgggauccguugugauuccuucuccguguugcauguuuuucgugagcaagagaauccccgagaaccgggucguguccuaccagcugucuagccgcuccaccugucucaaagccggcguuauuuuuacaaccaagaaagggcaacaguucugcggagacccuaagcaggaaugggugcagagauauaugaaaaaucuggaugcgaagcaaaagaaggcuucuccccgggcccgcgccgucgcugugaaaggcccuguucagagauaccccgggaaccagacaaccuguuga

SEQ ID NO: 4960 - RNA, 360 nt, Artificial Sequence
  derived and/or modified sequence opt6 from CCL24__Homo_sapiens__AAD15410
auggcaggauuaaugacaauaguaacaucacuauuauucuuaggaguaugcgcacaccauauaauaccaacaggaucaguaguaauaccaagcccaugcuguauguuuuucguaagcaaaagaauaccagaaaacagaguaguaagcuaucaauuaagcucaagaucaacaugucuaaaagcaggaguaauauucacaacaaaaaaaggacaacaauucuguggagacccaaaacaagaauggguacaaagauacaugaaaaaucuagacgcaaaacaaaaaaaagcaagcccaagagcaagagcaguagcaguaaaaggaccaguacaaagauauccaggaaaccaaacaacaugcuaa

SEQ ID NO: 4961 - protein, 150 aa, Artificial Sequence
  CCL25__Homo_sapiens__O15444
MNLWLLACLVAGFLGAWAPAVHTQGVFEDCCLAYHYPIGWAVLRRAWTYRIQEVSGSCNLPAAIFYLPKRHRKVCGNPKSREVQRAMKLLDARNKVFAKLHHNTQTFQAGPHAVKKLSSGNSKLSSSKFSNPISSSKRNVSLLISANSGL

SEQ ID NO: 4962 - RNA, 453 nt, Artificial Sequence
  CCL25__Homo_sapiens__AAI30562
augaaccuguggcuccuggccugccugguggccggcuuccugggagccugggcccccgcuguccacacccaaggugucuuugaggacugcugccuggccuaccacuaccccauugggugggcugugcuccggcgcgccuggacuuaccggauccaggaggugagcgggagcugcaaucugccugcugcgauauucuaccuccccaagagacacaggaaggugugugggaaccccaaaagcagggaggugcagagagccaugaagcuccuggaugcucgaaauaagguuuuugcaaagcuccaccacaacacgcagaccuuccaagcaggcccucaugcuguaaagaaguugaguucuggaaacuccaaguuaucaucauccaaguuuagcaaucccaucagcagcagcaagaggaaugucucccuccugauaucagcuaauucaggacuguga

SEQ ID NO: 4963 - RNA, 453 nt, Artificial Sequence
  derived and/or modified sequence opt1 from CCL25__Homo_sapiens__AAI30562
augaaccuguggcuccuggccugccugguggccggcuuccucggggcgugggcccccgccguccacacccagggcguguucgaggacugcugccuggccuaccacuacccgaucgggugggccgugcugcgccgggcguggaccuaccgcauccaggaggucagcggcuccugcaaccuccccgccgccaucuucuaccugcccaagcggcaccgcaaggugugcgggaaccccaagagccgggaggugcagcgcgccaugaagcugcucgacgcgcggaacaaggucuucgccaagcugcaccacaacacgcagaccuuccaggccggcccgcacgccgugaagaagcuguccagcggcaacuccaagcucagcuccagcaaguucuccaaccccaucagcuccagcaagcgcaacgugucccugcugaucagcgccaacuccgggcucuga

SEQ ID NO: 4964 - RNA, 453 nt, Artificial Sequence
  derived and/or modified sequence opt2 from CCL25__Homo_sapiens__AAI30562
augaaccucuggcuccucgccugccucgucgccggcuuccucggcgccugggcccccgccguccacacccagggcgucuucgaggacugcugccucgccuaccacuaccccaucggcugggccguccuccgccgcgccuggaccuaccgcauccaggaggucuccggcuccugcaaccuccccgccgccaucuucuaccuccccaagcgccaccgcaaggucugcggcaaccccaagucccgcgagguccagcgcgccaugaagcuccucgacgcccgcaacaaggucuucgccaagcuccaccacaacacccagaccuuccaggccggcccccacgccgucaagaagcucuccuccggcaacuccaagcucuccuccuccaaguucuccaaccccaucuccuccuccaagcgcaacgucucccuccucaucuccgccaacuccggccucuga

SEQ ID NO: 4965 - RNA, 453 nt, Artificial Sequence
  derived and/or modified sequence opt3 from CCL25__Homo_sapiens__AAI30562
augaaccuguggcuccuugccugccugguggcuggcuucuugggggcaugggcccccgcgguccacacccagggaguuuuugaggacuguugcuuagcuuaccauuauccuaucgguugggccgugcugagaagggcauggacauaccggauucaagaaguaagcggcuccuguaaucuaccagccgcuauauucuaucucccgaagcgccaccgaaaagugugcgggaaccccaagucucgugagguccagagagcaaugaaacugcuugaugccaggaauaagguguuugcuaaacugcaucacaacacucagacguuccaggccggaccucaugcgguuaagaaguugucaaguggcaauagcaaacucuccucuucgaaguuuucaaacccaaucagcaguuccaaacggaaugugucucugcugauuagcgcaaacuccggucucuga

SEQ ID NO: 4966 - RNA, 453 nt, Artificial Sequence
  derived and/or modified sequence opt4 from CCL25__Homo_sapiens__AAI30562
augaaccuguggcugcuggccugccugguggccggcuuccugggcgccugggcccccgccgugcacacccagggcguguucgaggacugcugccuggccuaccacuaccccaucggcugggccgugcugagaagagccuggaccuacagaauccaggaggugagcggcagcugcaaccugcccgccgccaucuucuaccugcccaagagacacagaaaggugugcggcaaccccaagagcagagaggugcagagagccaugaagcugcuggacgccagaaacaagguguucgccaagcugcaccacaacacccagaccuuccaggccggcccccacgccgugaagaagcugagcagcggcaacagcaagcugagcagcagcaaguucagcaaccccaucagcagcagcaagagaaacgugagccugcugaucagcgccaacagcggccuguga

SEQ ID NO: 4967 - RNA, 453 nt, Artificial Sequence
  derived and/or modified sequence opt5 from CCL25__Homo_sapiens__AAI30562
augaaccuguggcuccuggccugccuuguggcuggcuuccugggggccugggcgcccgcuguccacacccagggaguuuuugaggacuguugccucgccuaccauuauccuaucggcugggccgugcugagacgggcuuggacauaccgcauucaagaagugagcggguccuguaaucuuccggccgcuaucuucuaucugcccaagagacaccggaaagucugcggaaacccuaagucucgcgaggugcagagagccaugaaacuccuggaugcgcggaauaagguuuuugccaaacugcaucacaacacgcagaccuuccaggcuggcccccaugccgugaagaagcucagcuccggaaauucuaaacugagcuccucuaaguuuagcaacccuauuuccagcucuaaacgcaaugucucccuucugaucagcgcuaacucugggcucuga

SEQ ID NO: 4968 - RNA, 453 nt, Artificial Sequence
  derived and/or modified sequence opt6 from CCL25__Homo_sapiens__AAI30562
augaaucuauggcuacuagccugccuaguagcaggauuccuaggagcaugggcaccagcaguacacacacaaggaguauucgaagacugcugccuagcauaccacuacccaauaggaugggcaguacuaagaagagcauggacauacagaauacaagaaguaucaggaucaugcaacuuaccagcagcaauauucuaccuaccaaaaagacacagaaaaguaugcggaaacccaaaaucaagagaaguacaaagagcaaugaaacuacuagacgcaagaaacaaaguauucgcaaaacuacaccacaacacacaaacauuccaagcaggaccacacgcaguaaaaaaauuaucaucaggcaacuccaaacuaucaucaucaaaauucucaaacccaauaucaucaucaaaaagaaacguaucacuacuaauaucagcaaacucaggacuauaa

SEQ ID NO: 4969 - protein, 94 aa, Artificial Sequence
  CCL26__Homo_sapiens__Q9Y258
MMGLSLASAVLLASLLSLHLGTATRGSDISKTCCFQYSHKPLPWTWVRSYEFTSNSCSQRAVIFTTKRGKKVCTHPRKKWVQKYISLLKTPKQL

SEQ ID NO: 4970 - RNA, 285 nt, Artificial Sequence
  CCL26__Homo_sapiens__AAD15411
augaugggccucuccuuggccucugcugugcuccuggccucccuccugagucuccaccuuggaacugccacacgugggagugacauauccaagaccugcugcuuccaauacagccacaagccccuucccuggaccugggugcgaagcuaugaauucaccaguaacagcugcucccagcgggcugugauauucacuaccaaaagaggcaagaaagucuguacccauccaaggaaaaaaugggugcaaaaauacauuucuuuacugaaaacuccgaaacaauuguga

SEQ ID NO: 4971 - RNA, 285 nt, Artificial Sequence
  derived and/or modified sequence opt1 from CCL26__Homo_sapiens__AAD15411
augaugggccugagccucgccuccgccgugcugcuggcgagccuccugucccugcaccucgggaccgccacccgcggcagcgacaucuccaagacgugcugcuuccaguacagccacaagccccugccguggaccuggguccgguccuacgaguucaccagcaacuccugcagccagcgcgccgugaucuucaccacgaagcgggggaagaaggugugcacccacccccgcaagaaguggguccagaaguacaucucccugcucaagacccccaagcagcuguga

SEQ ID NO: 4972 - RNA, 285 nt, Artificial Sequence
  derived and/or modified sequence opt2 from CCL26__Homo_sapiens__AAD15411
augaugggccucucccucgccuccgccguccuccucgccucccuccucucccuccaccucggcaccgccacccgcggcuccgacaucuccaagaccugcugcuuccaguacucccacaagccccuccccuggaccuggguccgcuccuacgaguucaccuccaacuccugcucccagcgcgccgucaucuucaccaccaagcgcggcaagaaggucugcacccacccccgcaagaaguggguccagaaguacaucucccuccucaagacccccaagcagcucuga

SEQ ID NO: 4973 - RNA, 285 nt, Artificial Sequence
  derived and/or modified sequence opt3 from CCL26__Homo_sapiens__AAD15411
augaugggccugagccucgccuccgcugugcuucuggcaucuuuguuaucacugcaccuagggaccgccacaagaggaagugacaucagcaagacuugcuguuuccaguacucccauaaaccccucccuuggacgugggucaggucuuaugaguuuaccucgaacucaugcagccaacgggcgguuauuuucacaacuaagcgcgguaaaaagguguguacccacccacgaaagaaauggguacagaaguacauaagucugcuuaaaacaccgaagcagcuguga

SEQ ID NO: 4974 - RNA, 285 nt, Artificial Sequence
  derived and/or modified sequence opt4 from CCL26__Homo_sapiens__AAD15411
augaugggccugagccuggccagcgccgugcugcuggccagccugcugagccugcaccugggcaccgccaccagaggcagcgacaucagcaagaccugcugcuuccaguacagccacaagccccugcccuggaccugggugagaagcuacgaguucaccagcaacagcugcagccagagagccgugaucuucaccaccaagagaggcaagaaggugugcacccaccccagaaagaagugggugcagaaguacaucagccugcugaagacccccaagcagcuguga

SEQ ID NO: 4975 - RNA, 285 nt, Artificial Sequence
  derived and/or modified sequence opt5 from CCL26__Homo_sapiens__AAD15411
augaugggccugagccucgccuccgcugugcugcuugccucucugcucagccugcaccuugggaccgcgacaagaggauccgacaucucuaagacgugcuguuuccaguacagccauaaaccccugccuuggaccuggguccgguccuaugaguuuacaucuaacagcugcucccaacgcgcuguuauuuucaccacaaagagaggcaaaaagguguguacccacccgcggaaaaagugggugcagaaguacaucagccuccugaaaacacccaagcagcuguga

SEQ ID NO: 4976 - RNA, 285 nt, Artificial Sequence
  derived and/or modified sequence opt6 from CCL26__Homo_sapiens__AAD15411
augaugggacuaucacuagcaucagcaguacuacuagcaucacuacuaucacuacaccuaggaacagcaacaagaggaucagacauaucaaaaacaugcugcuuccaauacucacacaaaccacuaccauggacauggguaagaucauacgaauucacaucaaacucaugcucacaaagagcaguaauauucacaacaaaaagaggaaaaaaaguaugcacacacccaagaaaaaaauggguacaaaaauacauaucacuacuaaaaacaccaaaacaacuauaa

SEQ ID NO: 4977 - protein, 112 aa, Artificial Sequence
  CCL27__Homo_sapiens__Q5VZ77
MKGPPTFCSLLLLSLLLSPDPTAAFLLPPSTACCTQLYRKPLSDKLLRKVIQVELQEADGDCHLQAFVLHLAQRSICIHPQNPSLSQWFEHQERKLHGTLPKLNFGMLRKMG

SEQ ID NO: 4978 - RNA, 339 nt, Artificial Sequence
  CCL27__Homo_sapiens__AAI48264
augaaggggcccccaaccuucugcagccuccugcugcugucauugcuccugagcccagacccuacagcagcauuccuacugccacccagcacugccugcuguacucagcucuaccgaaagccacucucagacaagcuacugaggaaggucauccagguggaacugcaggaggcugacggggacugucaccuccaggcuuucgugcuucaccuggcucaacgcagcaucugcauccacccccagaaccccagccugucacagugguuugagcaccaagagagaaagcuccaugggacucugcccaagcugaauuuugggaugcuaaggaaaaugggcuag

SEQ ID NO: 4979 - RNA, 339 nt, Artificial Sequence
  derived and/or modified sequence opt1 from CCL27__Homo_sapiens__AAI48264
augaaggggcccccgaccuucugcagccugcuccugcugucccuccugcugagccccgaccccaccgccgccuuccuccugcccccguccacggcgugcugcacccagcuguaccgcaagccccucagcgacaagcugcugcggaaggugauccaggucgagcuccaggaggccgacggcgacugccaccuccaggccuucgugcugcaccuggcccagcgcuccaucugcauccacccccagaaccccagccugucccagugguucgagcaccaggagcggaagcugcacggcacccucccgaagcugaacuucgggaugcugcgcaagaugggcuga

SEQ ID NO: 4980 - RNA, 339 nt, Artificial Sequence
  derived and/or modified sequence opt2 from CCL27__Homo_sapiens__AAI48264
augaagggcccccccaccuucugcucccuccuccuccucucccuccuccucucccccgaccccaccgccgccuuccuccucccccccuccaccgccugcugcacccagcucuaccgcaagccccucuccgacaagcuccuccgcaaggucauccaggucgagcuccaggaggccgacggcgacugccaccuccaggccuucguccuccaccucgcccagcgcuccaucugcauccacccccagaaccccucccucucccagugguucgagcaccaggagcgcaagcuccacggcacccuccccaagcucaacuucggcaugcuccgcaagaugggcuga

SEQ ID NO: 4981 - RNA, 339 nt, Artificial Sequence
  derived and/or modified sequence opt3 from CCL27__Homo_sapiens__AAI48264
augaaggggcccccuaccuucugcagccugcuccuucuguccuuguuacugucuccagacccgacagccgcuuuucuacugcccccuucaacugcauguugcacgcagcuguacagaaaaccacuuagugauaagcuguugaggaaagugauccaagucgagcuccaggaagccgacggcgauugucaccuccaggcguucguucugcaucucgcucagcggagcauuugcauacacccccaaaacccuuccuuaucucagugguuugagcaucaggaacgcaagcugcacggaacccuuccaaaauugaauuucgguaugcugcgaaagaugggcuga

SEQ ID NO: 4982 - RNA, 339 nt, Artificial Sequence
  derived and/or modified sequence opt4 from CCL27__Homo_sapiens__AAI48264
augaagggcccccccaccuucugcagccugcugcugcugagccugcugcugagccccgaccccaccgccgccuuccugcugccccccagcaccgccugcugcacccagcuguacagaaagccccugagcgacaagcugcugagaaaggugauccagguggagcugcaggaggccgacggcgacugccaccugcaggccuucgugcugcaccuggcccagagaagcaucugcauccacccccagaaccccagccugagccagugguucgagcaccaggagagaaagcugcacggcacccugcccaagcugaacuucggcaugcugagaaagaugggcuga

SEQ ID NO: 4983 - RNA, 339 nt, Artificial Sequence
  derived and/or modified sequence opt5 from CCL27__Homo_sapiens__AAI48264
augaaggggcccccuaccuucugcagccugcuccugcuuucccugcuccugucuccggaccccacagccgcuuuucuucugccucccagcacggccuguugcacccagcucuacagaaaaccucuguccgauaagcugcuccggaaagugauccaagucgagcugcaggaagcggacggcgauugucaccuucaggcuuucguucugcaucucgcccagcgcucuauuugcauccacccccaaaacccuagccugucccagugguuugagcaucaggaaagaaaacuucacggaacacugccgaagcucaauuucggcaugcugcggaagaugggguga

SEQ ID NO: 4984 - RNA, 339 nt, Artificial Sequence
  derived and/or modified sequence opt6 from CCL27__Homo_sapiens__AAI48264
augaaaggaccaccaacauucugcucacuacuacuacuaucacuacuacuaucacccgacccaacagcagcauuccuauuaccaccaucaacagcaugcugcacacaacuauacagaaaaccacuaucagacaaacuacuaagaaaaguaauacaaguagaacuacaagaagcagacggagacugccaccuacaagcauucguacuacaccuagcacaaagaucaauaugcauacacccacaaaacccaucacuaucacaaugguucgaacaccaagaaagaaaacuacacggaacacuaccaaaacuaaacuucggaaugcuaagaaaaaugggauaa

SEQ ID NO: 4985 - protein, 127 aa, Artificial Sequence
  CCL28__Homo_sapiens__A0N0Q3
MQQRGLAIVALAVCAALHASEAILPIASSCCTEVSHHISRRLLERVNMCRIQRADGDCDLAAVILHVKRRRICVSPHNHTVKQWMKVQAAKKNGKGNVCHRKKHHGKRNSNRAHQGKHETYGHKTPY

SEQ ID NO: 4986 - RNA, 384 nt, Artificial Sequence
  CCL28__Homo_sapiens__ABK41944
augcagcagagaggacucgccaucguggccuuggcugucugugcggcccuacaugccucagaagccauacuucccauugccuccagcuguugcacggagguuucacaucauauuuccagaaggcuccuggaaagagugaauaugugucgcauccagagagcugauggggauugugacuuggcugcugucauccuucaugucaagcgcagaagaaucugugucagcccgcacaaccauacuguuaagcaguggaugaaagugcaagcugccaagaaaaaugguaaaggaaauguuugccacaggaagaaacaccauggcaagaggaacaguaacagggcacaucaggggaaacacgaaacauacggccauaaaacuccuuauuag

SEQ ID NO: 4987 - RNA, 384 nt, Artificial Sequence
  derived and/or modified sequence opt1 from CCL28__Homo_sapiens__ABK41944
augcagcagcgcggccuggccaucguggcccucgcggucugcgccgcccugcacgccagcgaggccauccugcccaucgcguccagcugcugcaccgaggugucccaccacaucagccggcgccuccuggagcgggugaacaugugccgcauccagcgggccgacggggacugcgaccuggccgccgucauccuccacgugaagcgccggcgcaucugcguguccccgcacaaccacaccgucaagcaguggaugaaggugcaggcggccaagaagaacggcaaggggaacgugugccaccggaagaagcaccacggcaagcgcaacagcaaccgggcccaccaggggaagcacgagacguacggccacaagacccccuacuga

SEQ ID NO: 4988 - RNA, 384 nt, Artificial Sequence
  derived and/or modified sequence opt2 from CCL28__Homo_sapiens__ABK41944
augcagcagcgcggccucgccaucgucgcccucgccgucugcgccgcccuccacgccuccgaggccauccuccccaucgccuccuccugcugcaccgaggucucccaccacaucucccgccgccuccucgagcgcgucaacaugugccgcauccagcgcgccgacggcgacugcgaccucgccgccgucauccuccacgucaagcgccgccgcaucugcgucuccccccacaaccacaccgucaagcaguggaugaagguccaggccgccaagaagaacggcaagggcaacgucugccaccgcaagaagcaccacggcaagcgcaacuccaaccgcgcccaccagggcaagcacgagaccuacggccacaagacccccuacuga

SEQ ID NO: 4989 - RNA, 384 nt, Artificial Sequence
  derived and/or modified sequence opt3 from CCL28__Homo_sapiens__ABK41944
augcagcaaagaggccuggccaucguggcucucgcagucugcgccgcgcuucacgcuagcgaggccauucugcccauagcauccucuuguugcaccgaaguuucacaucacaucaguaggcgguuguuagagcgcgugaacaugugucguauucagcgagccgacggggauugcgaccuggcugcaguaauccuacaugugaagagaaggcggauuugugucagcccucacaaucauacagugaaacaguggaugaagguucaggccgcuaaaaagaacggaaaagguaaugugugccaccgcaagaagcaccauggcaaaagaaacuccaauagggcccaccaagggaagcaugaaacuuacggacacaaaacgccauauuga

SEQ ID NO: 4990 - RNA, 384 nt, Artificial Sequence
  derived and/or modified sequence opt4 from CCL28__Homo_sapiens__ABK41944
augcagcagagaggccuggccaucguggcccuggccgugugcgccgcccugcacgccagcgaggccauccugcccaucgccagcagcugcugcaccgaggugagccaccacaucagcagaagacugcuggagagagugaacaugugcagaauccagagagccgacggcgacugcgaccuggccgccgugauccugcacgugaagagaagaagaaucugcgugagcccccacaaccacaccgugaagcaguggaugaaggugcaggccgccaagaagaacggcaagggcaacgugugccacagaaagaagcaccacggcaagagaaacagcaacagagcccaccagggcaagcacgagaccuacggccacaagacccccuacuga

SEQ ID NO: 4991 - RNA, 384 nt, Artificial Sequence
  derived and/or modified sequence opt5 from CCL28__Homo_sapiens__ABK41944
augcagcaaagaggccuggccaucguggcucucgccgucugcgcggcucugcacgccagcgaggccauucuucccaucgcuuccucuuguugcaccgaaguuagccaucacauuucccggcgccugcucgagagagugaacaugugucggauccagcgcgccgacggggauugcgaccuggcugccgugauucuucaugucaagagacggcgcaucugugugucuccucacaaucauacaguuaaacaguggaugaaggugcaggcggccaaaaagaacggaaaaggcaaugucugccacagaaagaagcaccaugggaaacggaacagcaaucgcgcucaccaaggaaagcaugaaacguacggccacaaaaccccguauuga

SEQ ID NO: 4992 - RNA, 384 nt, Artificial Sequence
  derived and/or modified sequence opt6 from CCL28__Homo_sapiens__ABK41944
augcaacaaagaggacuagcaauaguagcauuagcaguaugcgcagcauuacacgcgagcgaagcaauacuaccaauagcaagcaguugcuguacagaaguaucacaccauauaucaagaagacuauuagaaagaguaaauauguguagaauacaaagagcagauggagauugcgaucuagcagcaguaauauuacacguaaaaagaagaagaauauguguaucaccacauaaccauacaguaaaacaauggaugaaaguacaagcagcaaaaaaaaauggaaaaggaaauguaugucacagaaaaaaacaccauggaaaaagaaauagcaauagagcacaccaaggaaaacacgaaacauacggacauaaaacaccauauuaa

SEQ ID NO: 4993 - protein, 127 aa, Artificial Sequence; identical to SEQ ID NO: 4985
  CCL28__Homo_sapiens__Q9NRJ3

SEQ ID NO: 4994 - RNA, 384 nt, Artificial Sequence; identical to SEQ ID NO: 4986
  CCL28__Homo_sapiens__AAF87205

SEQ ID NO: 4995 - RNA, 384 nt, Artificial Sequence; identical to SEQ ID NO: 4987
  derived and/or modified sequence opt1 from CCL28__Homo_sapiens__AAF87205

SEQ ID NO: 4996 - RNA, 384 nt, Artificial Sequence; identical to SEQ ID NO: 4988
  derived and/or modified sequence opt2 from CCL28__Homo_sapiens__AAF87205

SEQ ID NO: 4997 - RNA, 384 nt, Artificial Sequence; identical to SEQ ID NO: 4989
  derived and/or modified sequence opt3 from CCL28__Homo_sapiens__AAF87205

SEQ ID NO: 4998 - RNA, 384 nt, Artificial Sequence; identical to SEQ ID NO: 4990
  derived and/or modified sequence opt4 from CCL28__Homo_sapiens__AAF87205

SEQ ID NO: 4999 - RNA, 384 nt, Artificial Sequence; identical to SEQ ID NO: 4991
  derived and/or modified sequence opt5 from CCL28__Homo_sapiens__AAF87205

SEQ ID NO: 5000 - RNA, 384 nt, Artificial Sequence
  derived and/or modified sequence opt6 from CCL28__Homo_sapiens__AAF87205
augcaacaaagaggacuagcaauaguagcauuagcaguaugcgcagcauuacacgcaagcgaagcaauacuaccaauagcaagcucaugcuguacagaaguaucacaccauauaucaagaagacuauuagaaagaguaaauaugugcagaauacaaagagcagauggagacugcgaccucgcagcaguaauauuacacguaaaaagaagaagaauauguguaucaccacauaaccauacaguaaaacaauggaugaaaguacaagcagcaaaaaaaaauggaaaaggaaauguaugucacagaaaaaaacaccauggaaaaagaaauagcaauagagcacaccaaggaaaacacgaaacauacggacauaaaacaccauauuaa

SEQ ID NO: 5001 - protein, 99 aa, Artificial Sequence
  CCL2__Homo_sapiens__P13500
MKVSAALLCLLLIAATFIPQGLAQPDAINAPVTCCYNFTNRKISVQRLASYRRITSSKCPKEAVIFKTIVAKEICADPKQKWVQDSMDHLDKQTQTPKT

SEQ ID NO: 5002 - RNA, 300 nt, Artificial Sequence
  CCL2__Homo_sapiens__AAA18102
augaaagucucugccgcccuucugugccugcugcucauagcagccaccuucauuccccaagggcucgcucagccagaugcaaucaaugccccagucaccugcugcuauaacuucaccaauaggaagaucucagugcagaggcucgcgagcuauagaagaaucaccagcagcaagugucccaaagaagcugugaucuucaagaccauuguggccaaggagaucugugcugaccccaagcagaaguggguucaggauuccauggaccaccuggacaagcaaacccaaacuccgaagacuuga

SEQ ID NO: 5003 - RNA, 300 nt, Artificial Sequence
  derived and/or modified sequence opt1 from CCL2__Homo_sapiens__AAA18102
augaaggugagcgccgcccugcucugccugcugcucaucgcggccaccuucaucccccagggccuggcccagccggacgccaucaacgcccccgugaccugcugcuacaacuucacgaaccgcaagaucuccguccagcggcuggcgagcuaccgccggaucaccuccagcaagugccccaaggaggccgugaucuucaagaccaucgucgccaaggagaucugcgccgaccccaagcagaagugggugcaggacuccauggaccaccucgacaagcagacccagacgccgaagaccuga

SEQ ID NO: 5004 - RNA, 300 nt, Artificial Sequence
  derived and/or modified sequence opt2 from CCL2__Homo_sapiens__AAA18102
augaaggucuccgccgcccuccucugccuccuccucaucgccgccaccuucaucccccagggccucgcccagcccgacgccaucaacgcccccgucaccugcugcuacaacuucaccaaccgcaagaucuccguccagcgccucgccuccuaccgccgcaucaccuccuccaagugccccaaggaggccgucaucuucaagaccaucgucgccaaggagaucugcgccgaccccaagcagaaguggguccaggacuccauggaccaccucgacaagcagacccagacccccaagaccuga

SEQ ID NO: 5005 - RNA, 300 nt, Artificial Sequence
  derived and/or modified sequence opt3 from CCL2__Homo_sapiens__AAA18102
augaaggugagcgccgcucugcucugccuucuguugaucgcagccaccuucauuccccagggcuuagcgcaaccugacgcuauaaacgccccagucacauguugcuacaauuuuacuaacagaaaaaucuccguucagaggcuggcaucuuaucggcgcauuacgucaaguaaguguccgaaagaggccgugaucuucaagaccauuguagcuaaagaaaucugcgcagaucccaagcagaagugggugcaggacagcauggaucaccuagacaaacaaacacagacuccuaagaccuga

SEQ ID NO: 5006 - RNA, 300 nt, Artificial Sequence
  derived and/or modified sequence opt4 from CCL2__Homo_sapiens__AAA18102
augaaggugagcgccgcccugcugugccugcugcugaucgccgccaccuucaucccccagggccuggcccagcccgacgccaucaacgcccccgugaccugcugcuacaacuucaccaacagaaagaucagcgugcagagacuggccagcuacagaagaaucaccagcagcaagugccccaaggaggccgugaucuucaagaccaucguggccaaggagaucugcgccgaccccaagcagaagugggugcaggacagcauggaccaccuggacaagcagacccagacccccaagaccuga

SEQ ID NO: 5007 - RNA, 300 nt, Artificial Sequence
  derived and/or modified sequence opt5 from CCL2__Homo_sapiens__AAA18102
augaaggugagcgccgcucugcucugccugcuucugaucgccgcgaccuucauuccccagggccucgcucaaccugacgccaucaacgccccggucacauguugcuacaauuuuacgaacagaaaaauuuccguucagcggcuggcuucuuaucgcagaaucaccagcuccaagugucccaaagaggccgugauuuucaagacaaucguggcuaaagaaaucugcgccgauccuaagcagaaguggguccaggacucuauggaucaccuugacaaacaaacccagacacccaagaccuga

SEQ ID NO: 5008 - RNA, 300 nt, Artificial Sequence
  derived and/or modified sequence opt6 from CCL2__Homo_sapiens__AAA18102
augaaaguaucagcagcacuacuaugccuacuacuaauagcagcaacauucauaccacaaggauuagcacaaccagacgcaauaaacgcaccaguaacaugcugcuacaacuucacaaacagaaaaauaucaguacaaagacuagcaucauacagaagaauaacaucaucaaaaugcccaaaagaagcaguaauauucaaaacaauaguagcaaaagaaauaugcgcagacccaaaacaaaaauggguacaagacucaauggaccaccuagacaaacaaacacaaacaccaaaaacauaa

SEQ ID NO: 5009 - protein, 92 aa, Artificial Sequence
  CCL3__Homo_sapiens__A0N0R1
MQVSTAALAVLLCTMALCNQFSASLAADTPTACCFSYTSRQIPQNFIADYFETSSQCSKPGVIFLTKRSRQVCADPSEEWVQKYVSDLELSA

SEQ ID NO: 5010 - RNA, 279 nt, Artificial Sequence
  CCL3__Homo_sapiens__AAI71831
augcaggucuccacugcugcccuugcuguccuccucugcaccauggcucucugcaaccaguucucugcaucacuugcugcugacacgccgaccgccugcugcuucagcuacaccucccggcagauuccacagaauuucauagcugacuacuuugagacgagcagccagugcuccaagccuggugucaucuuccuaaccaagcgaagccggcaggucugugcugaccccagugaggaguggguccagaaauaugucagcgaccuggagcugagugccuga

SEQ ID NO: 5011 - RNA, 279 nt, Artificial Sequence
  derived and/or modified sequence opt1 from CCL3__Homo_sapiens__AAI71831
augcaggucagcaccgccgcccuggcggugcuccugugcaccauggcccugugcaaccaguucuccgccagccucgccgccgacacgcccaccgcgugcugcuucuccuacaccagccgccagaucccgcagaacuucaucgccgacuacuucgagaccuccagccagugcuccaagcccggcgugaucuuccugacgaagcggagccgccaggugugcgccgaccccuccgaggaguggguccagaaguacgugagcgaccuggagcucuccgccuga

SEQ ID NO: 5012 - RNA, 279 nt, Artificial Sequence
  derived and/or modified sequence opt2 from CCL3__Homo_sapiens__AAI71831
augcaggucuccaccgccgcccucgccguccuccucugcaccauggcccucugcaaccaguucuccgccucccucgccgccgacacccccaccgccugcugcuucuccuacaccucccgccagaucccccagaacuucaucgccgacuacuucgagaccuccucccagugcuccaagcccggcgucaucuuccucaccaagcgcucccgccaggucugcgccgaccccuccgaggaguggguccagaaguacgucuccgaccucgagcucuccgccuga

SEQ ID NO: 5013 - RNA, 279 nt, Artificial Sequence
  derived and/or modified sequence opt3 from CCL3__Homo_sapiens__AAI71831
augcaagugagcaccgccgcucuggcaguccuccuuugcacaauggcccuguguaaccaguucuccgcgucuuuggcugccgacacucccacggcaugcuguuuuucauacaccaguagacagaucccucagaauuucauugccgauuauuuugagacaagcucccagugcucuaagccaggcguuauauucuuaacuaaaaggucgcggcaagugugugcugacccgucagaagaguggguacagaaguacgugagcgaucuggaacuaagugcauga

SEQ ID NO: 5014 - RNA, 279 nt, Artificial Sequence
  derived and/or modified sequence opt4 from CCL3__Homo_sapiens__AAI71831
augcaggugagcaccgccgcccuggccgugcugcugugcaccauggcccugugcaaccaguucagcgccagccuggccgccgacacccccaccgccugcugcuucagcuacaccagcagacagaucccccagaacuucaucgccgacuacuucgagaccagcagccagugcagcaagcccggcgugaucuuccugaccaagagaagcagacaggugugcgccgaccccagcgaggagugggugcagaaguacgugagcgaccuggagcugagcgccuga

SEQ ID NO: 5015 - RNA, 279 nt, Artificial Sequence
  derived and/or modified sequence opt5 from CCL3__Homo_sapiens__AAI71831
augcaagugagcaccgccgcucuggccguccuccugugcacaauggcgcuuuguaaccaguucuccgcuucucuggccgccgacacgcccaccgcuugcuguuuuagcuacacauccagacagaucccucagaauuucauugccgauuauuuugagaccucuagccagugcuccaagccgggcguuaucuuccucacaaaacggucucgccaagugugugcugaccccagcgaagagugggugcagaaguacgucuccgaucuggaacuuagcgccuga

SEQ ID NO: 5016 - RNA, 279 nt, Artificial Sequence
  derived and/or modified sequence opt6 from CCL3__Homo_sapiens__AAI71831
augcaaguaucaacagcagcacuagcaguacuacuaugcacaauggcacuaugcaaccaauucucagcaucacuagcagcagacacaccaacagcaugcugcuucucauacacaucaagacaaauaccacaaaacuucauagcagacuacuucgaaacaucaucacaaugcucaaaaccaggaguaauauuccuaacaaaaagaucaagacaaguaugcgcagacccaucagaagaauggguacaaaaauacguaucagaccuagaacuaucagcauaa

SEQ ID NO: 5017 - protein, 92 aa, Artificial Sequence; identical to SEQ ID NO: 5009
  CCL3__Homo_sapiens__P10147

SEQ ID NO: 5018 - RNA, 279 nt, Artificial Sequence
  CCL3__Homo_sapiens__AAA35858
augcaggucuccacugcugcccuugcuguccuccucugcaccauggcucucugcaaccaguucucugcaucacuugcugcugacacgccgaccgccugcugcuucagcuacaccucccggcagauuccacagaauuucauagcugacuacuuugagacgagcagccagugcuccaagcccggugucaucuuccuaaccaagcgaagccggcaggucugugcugaccccagugaggaguggguccagaaauaugucagcgaccuggagcugagugccuga

SEQ ID NO: 5019 - RNA, 279 nt, Artificial Sequence; identical to SEQ ID NO: 5011
  derived and/or modified sequence opt1 from CCL3__Homo_sapiens__AAA35858

SEQ ID NO: 5020 - RNA, 279 nt, Artificial Sequence; identical to SEQ ID NO: 5012
  derived and/or modified sequence opt2 from CCL3__Homo_sapiens__AAA35858

SEQ ID NO: 5021 - RNA, 279 nt, Artificial Sequence; identical to SEQ ID NO: 5013
  derived and/or modified sequence opt3 from CCL3__Homo_sapiens__AAA35858

SEQ ID NO: 5022 - RNA, 279 nt, Artificial Sequence; identical to SEQ ID NO: 5014
  derived and/or modified sequence opt4 from CCL3__Homo_sapiens__AAA35858

SEQ ID NO: 5023 - RNA, 279 nt, Artificial Sequence; identical to SEQ ID NO: 5015
  derived and/or modified sequence opt5 from CCL3__Homo_sapiens__AAA35858

SEQ ID NO: 5024 - RNA, 279 nt, Artificial Sequence
  derived and/or modified sequence opt6 from CCL3__Homo_sapiens__AAA35858
augcaaguaucaacagcagcacuagcaguacuacuaugcacaauggcacuaugcaaccaauucucagcaucacuagcagcagacacaccaacagcaugcugcuucucauacacaucaagacaaauaccacaaaacuucauagcagacuacuucgaaacaucaucacaaugcucaaaaccaggaguaauauucuuaacaaaaagaucaagacaaguaugcgcagacccaucagaagaauggguacaaaaauacguaucagaccuagaacuaucagcauaa

SEQ ID NO: 5025 - protein, 92 aa, Artificial Sequence
  CCL4__Homo_sapiens__P13236
MKLCVTVLSLLMLVAAFCSPALSAPMGSDPPTACCFSYTARKLPRNFVVDYYETSSLCSQPAVVFQTKRSKQVCADPSESWVQEYVYDLELN

SEQ ID NO: 5026 - RNA, 279 nt, Artificial Sequence
  CCL4__Homo_sapiens__AAA51576
augaagcucugcgugacuguccugucucuccucaugcuaguagcugccuucugcucuccagcgcucucagcaccaaugggcucagacccucccaccgccugcugcuuuucuuacaccgcgaggaagcuuccucgcaacuuugugguagauuacuaugagaccagcagccucugcucccagccagcugugguauuccaaaccaaaagaagcaagcaagucugugcugaucccagugaauccuggguccaggaguacguguaugaccuggaacugaacuga

SEQ ID NO: 5027 - RNA, 279 nt, Artificial Sequence
  derived and/or modified sequence opt1 from CCL4__Homo_sapiens__AAA51576
augaagcugugcgugaccguccucagccugcugaugcucguggccgccuucugcucccccgcgcugagcgccccgaugggcuccgacccgcccaccgccugcugcuucagcuacacggcccgcaagcugccccggaacuucguggucgacuacuacgagaccuccagccucugcucccagcccgccgugguguuccagaccaagcgcagcaagcaggucugcgcggaccccuccgagagcugggugcaggaguacguguacgaccuggagcugaacuga

SEQ ID NO: 5028 - RNA, 279 nt, Artificial Sequence
  derived and/or modified sequence opt2 from CCL4__Homo_sapiens__AAA51576
augaagcucugcgucaccguccucucccuccucaugcucgucgccgccuucugcucccccgcccucuccgcccccaugggcuccgacccccccaccgccugcugcuucuccuacaccgcccgcaagcucccccgcaacuucgucgucgacuacuacgagaccuccucccucugcucccagcccgccgucgucuuccagaccaagcgcuccaagcaggucugcgccgaccccuccgaguccuggguccaggaguacgucuacgaccucgagcucaacuga

SEQ ID NO: 5029 - RNA, 279 nt, Artificial Sequence
  derived and/or modified sequence opt3 from CCL4__Homo_sapiens__AAA51576
augaagcugugcgugaccguccucagccuucugauguugguugccgcuuucuguucccccgcauuaucugccccuaugggcucagacccaccgacagcgugcuguuuuaguuacacugcuagaaaacugcccaggaacuucgugguagauuauuacgagacgagcucccuaugcucucagccugccguggucuuucaaaccaagcggucgaaacaggugugugcagacccaucagaaagcuggguucaggaguauguguacgaucucgaacugaauuga

SEQ ID NO: 5030 - RNA, 279 nt, Artificial Sequence
  derived and/or modified sequence opt4 from CCL4__Homo_sapiens__AAA51576
augaagcugugcgugaccgugcugagccugcugaugcugguggccgccuucugcagccccgcccugagcgcccccaugggcagcgacccccccaccgccugcugcuucagcuacaccgccagaaagcugcccagaaacuucgugguggacuacuacgagaccagcagccugugcagccagcccgccgugguguuccagaccaagagaagcaagcaggugugcgccgaccccagcgagagcugggugcaggaguacguguacgaccuggagcugaacuga

SEQ ID NO: 5031 - RNA, 279 nt, Artificial Sequence
  derived and/or modified sequence opt5 from CCL4__Homo_sapiens__AAA51576
augaagcugugcgugaccguccucagccugcuuaugcugguugccgcuuucuguucccccgcccucucugcgccuaugggcagcgacccgcccacagcuugcuguuuuuccuacacggccagaaaacugccucggaacuucgugguggauuauuacgagaccucuagccuuugcucccagcccgccgucguguuucaaacaaagcgcucuaaacagguuugugcugacccuagcgaauccugggugcaggaguaugucuacgaucuggaacucaauuga

SEQ ID NO: 5032 - RNA, 279 nt, Artificial Sequence
  derived and/or modified sequence opt6 from CCL4__Homo_sapiens__AAA51576
augaaacuaugcguaacaguacuaucacuacuaaugcuaguagcagcauucugcucaccagcacuaucagcaccaaugggaucagacccaccaacagcaugcugcuucucauacacagcaagaaaacuaccaagaaacuucguaguagacuacuacgaaacaucaucacuaugcucacaaccagcaguaguauuccaaacaaaaagaucaaaacaaguaugcgcagacccaucagaaucauggguacaagaauacguauacgaccuagaacuaaacuaa

SEQ ID NO: 5033 - protein, 52 aa, Artificial Sequence
  CCL4__Homo_sapiens__Q7M4M2
MKLCVTVLSLLMLVAAFCSPALSAPNSKPKEASKSVLIPVNPGSRSTCMTWN

SEQ ID NO: 5034 - RNA, 159 nt, Artificial Sequence
  CCL4__Homo_sapiens__AAX07293
augaagcucugcgugacuguccugucucuccucaugcuaguagcugccuucugcucuccagcgcucucagcaccaaauuccaaaccaaaagaagcaagcaagucugugcugaucccagugaauccuggguccaggaguacguguaugaccuggaacuga

SEQ ID NO: 5035 - RNA, 159 nt, Artificial Sequence
  derived and/or modified sequence opt1 from CCL4__Homo_sapiens__AAX07293
augaagcugugcgugaccguccucagccugcugaugcucguggccgccuucugcucccccgcgcugagcgccccgaacuccaagcccaaggaggccagcaaguccgugcugauccccgucaaccccggcagccgcuccacgugcaugaccuggaacuga

SEQ ID NO: 5036 - RNA, 159 nt, Artificial Sequence
  derived and/or modified sequence opt2 from CCL4__Homo_sapiens__AAX07293
augaagcucugcgucaccguccucucccuccucaugcucgucgccgccuucugcucccccgcccucuccgcccccaacuccaagcccaaggaggccuccaaguccguccucauccccgucaaccccggcucccgcuccaccugcaugaccuggaacuga

SEQ ID NO: 5037 - RNA, 159 nt, Artificial Sequence
  derived and/or modified sequence opt3 from CCL4__Homo_sapiens__AAX07293
augaagcugugcgugaccguccucagccuucugauguugguugccgcuuucuguucccccgcauuaucugccccuaacucaaaaccaaaggaggcgaguaaaagcgugcugaucccgguaaaucccggcuccagaucuacaugcaugacuuggaacuga

SEQ ID NO: 5038 - RNA, 159 nt, Artificial Sequence
  derived and/or modified sequence opt4 from CCL4__Homo_sapiens__AAX07293
augaagcugugcgugaccgugcugagccugcugaugcugguggccgccuucugcagccccgcccugagcgcccccaacagcaagcccaaggaggccagcaagagcgugcugauccccgugaaccccggcagcagaagcaccugcaugaccuggaacuga

SEQ ID NO: 5039 - RNA, 159 nt, Artificial Sequence
  derived and/or modified sequence opt5 from CCL4__Homo_sapiens__AAX07293
augaagcugugcgugaccguccucagccugcuuaugcugguugccgcuuucuguucccccgcccucucugcgccuaacagcaaaccgaaggaggcuuccaaaucugugcugauccccgugaauccuggcagcagauccacaugcaugacguggaacuga

SEQ ID NO: 5040 - RNA, 159 nt, Artificial Sequence
  derived and/or modified sequence opt6 from CCL4__Homo_sapiens__AAX07293
augaaacuaugcguaacaguacuaucacuacuaaugcuaguagcagcauucugcucaccagcacuaucagcaccaaacucaaaaccaaaagaagcaucaaaaucaguacuaauaccaguaaacccaggaucaagaucaacaugcaugacauggaacuaa

SEQ ID NO: 5041 - protein, 91 aa, Artificial Sequence
  CCL5__Homo_sapiens__D0EI67
MKVSAAALAVILIATALCAPASASPYSSDTTPCCFAYIARPLPRAHIKEYFYTSGKCSNPAVVFVTRKNRQVCANPEKKWVREYINSLEMS

SEQ ID NO: 5042 - RNA, 276 nt, Artificial Sequence
  CCL5__Homo_sapiens__ACW84342
augaaggucuccgcggcagcccucgcugucauccucauugcuacugcccucugcgcuccugcaucugccuccccauauuccucggacaccacacccugcugcuuugccuacauugcccgcccacugccccgugcccacaucaaggaguauuucuacaccaguggcaagugcuccaacccagcagucgucuuugucacccgaaagaaccgccaagugugugccaacccagagaagaaauggguucgggaguacaucaacucuuuggagaugagcuag

SEQ ID NO: 5043 - RNA, 276 nt, Artificial Sequence
  derived and/or modified sequence opt1 from CCL5__Homo_sapiens__ACW84342
augaaggugagcgccgccgcgcuggccgucauccucaucgccaccgcccugugcgcccccgcguccgccagcccguacuccagcgacaccacgcccugcugcuucgccuacaucgcccgcccccugccccgggcgcacaucaaggaguacuucuacaccuccggcaagugcagcaacccggccgugguguucgucacccgcaagaaccgccaggugugcgccaaccccgagaagaagugggugcgggaguacaucaacucccucgagaugagcuga

SEQ ID NO: 5044 - RNA, 276 nt, Artificial Sequence
  derived and/or modified sequence opt2 from CCL5__Homo_sapiens__ACW84342
augaaggucuccgccgccgcccucgccgucauccucaucgccaccgcccucugcgcccccgccuccgccucccccuacuccuccgacaccacccccugcugcuucgccuacaucgcccgcccccucccccgcgcccacaucaaggaguacuucuacaccuccggcaagugcuccaaccccgccgucgucuucgucacccgcaagaaccgccaggucugcgccaaccccgagaagaaguggguccgcgaguacaucaacucccucgagauguccuga

SEQ ID NO: 5045 - RNA, 276 nt, Artificial Sequence
  derived and/or modified sequence opt3 from CCL5__Homo_sapiens__ACW84342
augaaggugagcgccgcugcacuggccgucauccucauugcgaccgcucuuugcgcccccgcauccgccucuccuuacucaagugacacaacuccauguugcuucgcuuauauagcaagaccgcugcccagggcccacaucaaagaguacuuuuauacgagcggcaaguguuccaacccugcuguuguguucguaacccggaaaaaucgccaggugugcgccaacccagaaaagaaauggguccgagaguacauuaauucuuuggaaaugucguga

SEQ ID NO: 5046 - RNA, 276 nt, Artificial Sequence
  derived and/or modified sequence opt4 from CCL5__Homo_sapiens__ACW84342
augaaggugagcgccgccgcccuggccgugauccugaucgccaccgcccugugcgcccccgccagcgccagccccuacagcagcgacaccacccccugcugcuucgccuacaucgccagaccccugcccagagcccacaucaaggaguacuucuacaccagcggcaagugcagcaaccccgccgugguguucgugaccagaaagaacagacaggugugcgccaaccccgagaagaagugggugagagaguacaucaacagccuggagaugagcuga

SEQ ID NO: 5047 - RNA, 276 nt, Artificial Sequence
  derived and/or modified sequence opt5 from CCL5__Homo_sapiens__ACW84342
augaaggugagcgccgcugcccuggcggucauccucauugcuaccgcccugugcgcccccgcuuccgccucuccuuacagcuccgacacaacgccguguugcuucgcuuauaucgccagaccccuuccucgggcgcacauuaaagaguacuuuuauaccucuggcaaguguagcaaccccgccguuguguucgugacacgcaaaaauagacaggucugcgcuaacccugaaaagaaaugggugcgggaguacaucaauucccuggaaaugucuuga

SEQ ID NO: 5048 - RNA, 276 nt, Artificial Sequence
  derived and/or modified sequence opt6 from CCL5__Homo_sapiens__ACW84342
augaaaguaagcgcagcagcacuagcaguaauacuaauagcaacagcauuaugcgcaccagcaagcgcaagcccauacucaagcgauacaacaccauguugcuuugcauauauagcaagaccacuaccaagagcacacauaaaagaauacuuuuacacaagcggaaaauguagcaauccagcaguaguauucguaacaagaaaaaauagacaaguaugugcaaauccagaaaaaaaauggguaagagaauacauaaacucacuagaaaugucauaa

SEQ ID NO: 5049 - protein, 91 aa, Artificial Sequence; identical to SEQ ID NO: 5041
  CCL5__Homo_sapiens__P13501

SEQ ID NO: 5050 - RNA, 276 nt, Artificial Sequence; identical to SEQ ID NO: 5042
  CCL5__Homo_sapiens__AAC03541

SEQ ID NO: 5051 - RNA, 276 nt, Artificial Sequence; identical to SEQ ID NO: 5043
  derived and/or modified sequence opt1 from CCL5__Homo_sapiens__AAC03541

SEQ ID NO: 5052 - RNA, 276 nt, Artificial Sequence; identical to SEQ ID NO: 5044
  derived and/or modified sequence opt2 from CCL5__Homo_sapiens__AAC03541

SEQ ID NO: 5053 - RNA, 276 nt, Artificial Sequence; identical to SEQ ID NO: 5045
  derived and/or modified sequence opt3 from CCL5__Homo_sapiens__AAC03541

SEQ ID NO: 5054 - RNA, 276 nt, Artificial Sequence; identical to SEQ ID NO: 5046
  derived and/or modified sequence opt4 from CCL5__Homo_sapiens__AAC03541

SEQ ID NO: 5055 - RNA, 276 nt, Artificial Sequence; identical to SEQ ID NO: 5047
  derived and/or modified sequence opt5 from CCL5__Homo_sapiens__AAC03541

SEQ ID NO: 5056 - RNA, 276 nt, Artificial Sequence
  derived and/or modified sequence opt6 from CCL5__Homo_sapiens__AAC03541
augaaaguaagcgcagcagcacucgcaguaauacuaauagcaacagcauuaugcgcaccagcaagcgcaagcccauacucaagcgauacaacaccauguugcuuugcauauauagcaagaccacuaccaagagcacacauaaaagaauacuuuuacacaagcggaaaauguagcaauccagcaguaguauucguaacaagaaaaaauagacaaguaugugcaaauccagaaaaaaaauggguaagagaauacauaaacucacuagaaaugucauaa

SEQ ID NO: 5057 - protein, 116 aa, Artificial Sequence
  CCL6__Mus_musculus__P27784
MRNSKTAISFFILVAVLGSQAGLIQEMEKEDRRYNPPIIHQGFQDTSSDCCFSYATQIPCKRFIYYFPTSGGCIKPGIIFISRRGTQVCADPSDRRVQRCLSTLKQGPRSGNKVIA

SEQ ID NO: 5058 - RNA, 351 nt, Artificial Sequence
  CCL6__Mus_musculus__AAA37329
augagaaacuccaagacugccauuucauucuuuauccuuguggcuguccuugggucccaggcuggccucauacaagaaauggaaaaagaagaucgucgcuauaacccuccaauaauucaucaaggcuuucaagacacuucuucagacugcugcuucucuuaugccacacagaucccauguaaaagauuuauauauuauuuccccaccaguggugggugcaucaagccgggcaucaucuuuaucagcaggaggggaacccaggucugugccgaccccagcgaucggagaguucagaggugccuaagcacccugaagcaaggcccaagaucugggaacaaggucauugcuuga

SEQ ID NO: 5059 - RNA, 351 nt, Artificial Sequence
  derived and/or modified sequence opt1 from CCL6__Mus_musculus__AAA37329
augcgcaacagcaagaccgccaucuccuucuucauccugguggccguccucggcagccaggcggggcugauccaggagauggagaaggaggaccggcgcuacaacccgcccaucauccaccagggcuuccaggacaccuccagcgacugcugcuucuccuacgccacgcagauccccugcaagcgguucaucuacuacuuccccaccagcgggggcugcaucaagcccgggaucaucuucaucucccgccggggcacccaggugugcgccgacccgagcgaccgccgggugcagcgcugccuguccacccucaagcagggcccccggagcgggaacaaggucaucgccuga

SEQ ID NO: 5060 - RNA, 351 nt, Artificial Sequence
  derived and/or modified sequence opt2 from CCL6__Mus_musculus__AAA37329
augcgcaacuccaagaccgccaucuccuucuucauccucgucgccguccucggcucccaggccggccucauccaggagauggagaaggaggaccgccgcuacaacccccccaucauccaccagggcuuccaggacaccuccuccgacugcugcuucuccuacgccacccagauccccugcaagcgcuucaucuacuacuuccccaccuccggcggcugcaucaagcccggcaucaucuucaucucccgccgcggcacccaggucugcgccgaccccuccgaccgccgcguccagcgcugccucuccacccucaagcagggcccccgcuccggcaacaaggucaucgccuga

SEQ ID NO: 5061 - RNA, 351 nt, Artificial Sequence
  derived and/or modified sequence opt3 from CCL6__Mus_musculus__AAA37329
augagaaacagcaagaccgccaucuccuucuuuauucugguggcuguccucggcucucaggcagggcuuauacaagagauggaaaaagaggacaggcgguacaaucccccuaucauucaccagggauuccaggauacaucaagugacugcuguuuuagcuaugccacucagaucccaugcaagcgcuucauuuacuauuuuccgacguccgguggcuguaucaaacccgggauaaucuucauuucucgacguggaacccaaguuugcgcggauccuucggacagaagggugcagcggugucugucaacauugaagcagggcccacgcagcgguaacaaaguaaucgcuuga

SEQ ID NO: 5062 - RNA, 351 nt, Artificial Sequence
  derived and/or modified sequence opt4 from CCL6__Mus_musculus__AAA37329
augagaaacagcaagaccgccaucagcuucuucauccugguggccgugcugggcagccaggccggccugauccaggagauggagaaggaggacagaagauacaacccccccaucauccaccagggcuuccaggacaccagcagcgacugcugcuucagcuacgccacccagauccccugcaagagauucaucuacuacuuccccaccagcggcggcugcaucaagcccggcaucaucuucaucagcagaagaggcacccaggugugcgccgaccccagcgacagaagagugcagagaugccugagcacccugaagcagggccccagaagcggcaacaaggugaucgccuga

SEQ ID NO: 5063 - RNA, 351 nt, Artificial Sequence
  derived and/or modified sequence opt5 from CCL6__Mus_musculus__AAA37329
augagaaacagcaagaccgccaucuccuucuuuauucugguggcuguccucggcucucaggccgggcugauccaagagauggaaaaagaggaccggcgcuacaaucccccuauuauccaccagggauuccaggauacaagcuccgacugcuguuuuucuuaugcgacgcagauuccgugcaagagauucaucuacuauuuucccaccagcggcggguguaucaaaccuggaauuaucuucauuucccggcgcggcacacaaguuugcgcugaucccucugacagacgggugcagcgcugucuuagcacccugaagcaggggccuagauccggaaacaaagugaucgccuga

SEQ ID NO: 5064 - RNA, 351 nt, Artificial Sequence
  derived and/or modified sequence opt6 from CCL6__Mus_musculus__AAA37329
augagaaacucaaaaacagcaauaucauucuucauacuaguagcaguacuaggaucacaagcaggacuaauacaagaaauggaaaaagaagacagaagauacaacccaccaauaauacaccaaggauuccaagacacaucaucagacugcugcuucucauacgcaacacaaauaccaugcaaaagauucauauacuacuucccaacaucaggaggaugcauaaaaccaggaauaauauucauaucaagaagaggaacacaaguaugcgcagacccaucagacagaagaguacaaagaugccuaucaacacuaaaacaaggaccaagaucaggaaacaaaguaauagcauaa

SEQ ID NO: 5065 - protein, 99 aa, Artificial Sequence
  CCL7__Homo_sapiens__P80098
MKASAALLCLLLTAAAFSPQGLAQPVGINTSTTCCYRFINKKIPKQRLESYRRTTSSHCPREAVIFKTKLDKEICADPTQKWVQDFMKHLDKKTQTPKL

SEQ ID NO: 5066 - RNA, 300 nt, Artificial Sequence
  CCL7__Homo_sapiens__AAH92436
augaaagccucugcagcacuucugugucugcugcucacagcagcugcuuucagcccccaggggcuugcucagccaguugggauuaauacuucaacuaccugcugcuacagauuuaucaauaagaaaaucccuaagcagaggcuggagagcuacagaaggaccaccaguagccacuguccccgggaagcuguaaucuucaagaccaaacuggacaaggagaucugugcugaccccacacagaaguggguccaggacuuuaugaagcaccuggacaagaaaacccaaacuccaaagcuuuga

SEQ ID NO: 5067 - RNA, 300 nt, Artificial Sequence
  derived and/or modified sequence opt1 from CCL7__Homo_sapiens__AAH92436
augaaggccagcgccgcgcugcucugccugcugcucaccgccgccgccuucagcccccagggccuggcccagccgguggggaucaacaccuccacgaccugcugcuaccgcuucaucaacaagaagauccccaagcagcggcuggaguccuaccgccggaccaccagcucccacugcccccgcgaggcggucaucuucaagacgaagcucgacaaggagaucugcgccgaccccacccagaagugggugcaggacuucaugaagcaccuggacaagaagacccagaccccgaagcuguga

SEQ ID NO: 5068 - RNA, 300 nt, Artificial Sequence
  derived and/or modified sequence opt2 from CCL7__Homo_sapiens__AAH92436
augaaggccuccgccgcccuccucugccuccuccucaccgccgccgccuucuccccccagggccucgcccagcccgucggcaucaacaccuccaccaccugcugcuaccgcuucaucaacaagaagauccccaagcagcgccucgaguccuaccgccgcaccaccuccucccacugcccccgcgaggccgucaucuucaagaccaagcucgacaaggagaucugcgccgaccccacccagaaguggguccaggacuucaugaagcaccucgacaagaagacccagacccccaagcucuga

SEQ ID NO: 5069 - RNA, 300 nt, Artificial Sequence
  derived and/or modified sequence opt3 from CCL7__Homo_sapiens__AAH92436
augaaggccagcgcugcacugcucugccuucuguugaccgccgcggcuuucucuccccagggcuuagcccaaccuguggggaucaacacauccacuacguguugcuacagauuuauuaauaaaaagauaccaaaacagaggcuggagucauaucggcgcaccacaaguagccacuguccgcgagaagcagucaucuucaagacuaaacuagacaaggagauuugcgccgaucccacccagaaguggguucaggacuuuaugaaacaucucgauaagaaaacacaaaccccuaagcuguga

SEQ ID NO: 5070 - RNA, 300 nt, Artificial Sequence
  derived and/or modified sequence opt4 from CCL7__Homo_sapiens__AAH92436
augaaggccagcgccgcccugcugugccugcugcugaccgccgccgccuucagcccccagggccuggcccagcccgugggcaucaacaccagcaccaccugcugcuacagauucaucaacaagaagauccccaagcagagacuggagagcuacagaagaaccaccagcagccacugccccagagaggccgugaucuucaagaccaagcuggacaaggagaucugcgccgaccccacccagaagugggugcaggacuucaugaagcaccuggacaagaagacccagacccccaagcuguga

SEQ ID NO: 5071 - RNA, 300 nt, Artificial Sequence
  derived and/or modified sequence opt5 from CCL7__Homo_sapiens__AAH92436
augaaggccagcgcugcccugcucugccugcuucugaccgcggcugccuucucuccccagggccucgcccaaccuguggggaucaacacauccacgaccuguugcuacagauuuauuaauaaaaagaucccgaaacagcggcuggagagcuaucgcagaacaaccuccucucacuguccccgggaagcugucauuuucaagacaaaacuugacaaggagaucugcgccgauccuacccagaaguggguucaggacuuuaugaaacaucuggauaagaaaacacaaacccccaagcucuga

SEQ ID NO: 5072 - RNA, 300 nt, Artificial Sequence
  derived and/or modified sequence opt6 from CCL7__Homo_sapiens__AAH92436
augaaagcaucagcagcacuacuaugccuauuacuaacagcagcagcauucucaccacaaggacuagcacaaccaguaggaauaaacacaucaacaacaugcugcuacagauucauaaacaaaaaaauaccaaaacaaagacuagaaucauacagaagaacaacaucaucacacugcccaagagaagcaguaauauucaaaacaaaacuagacaaagaaauaugcgcagacccaacacaaaaauggguacaagacuucaugaaacaccuagacaaaaaaacacaaacaccaaaacuauaa

SEQ ID NO: 5073 - protein, 109 aa, Artificial Sequence
  CCL7__Homo_sapiens__Q7Z7Q8
MWKPMPSPSNMKASAALLCLLLTAAAFSPQGLAQPVGINTSTTCCYRFINKKIPKQRLESYRRTTSSHCPREAVIFKTKLDKEICADPTQKWVQDFMKHLDKKTQTPKL

SEQ ID NO: 5074 - RNA, 330 nt, Artificial Sequence
  CCL7__Homo_sapiens__EAW80210
auguggaagcccaugcccucacccuccaacaugaaagccucugcagcacuucugugucugcugcucacagcagcugcuuucagcccccaggggcuugcucagccaguugggauuaauacuucaacuaccugcugcuacagauuuaucaauaagaaaaucccuaagcagaggcuggagagcuacagaaggaccaccaguagccacuguccccgggaagcuguaaucuucaagaccaaacuggacaaggagaucugugcugaccccacacagaaguggguccaggacuuuaugaagcaccuggacaagaaaacccaaacuccaaagcuuuga

SEQ ID NO: 5075 - RNA, 330 nt, Artificial Sequence
  derived and/or modified sequence opt1 from CCL7__Homo_sapiens__EAW80210
auguggaagcccaugccgagccccuccaacaugaaggccagcgccgcgcugcucugccugcugcucaccgccgccgccuucagcccccagggccuggcccagcccguggggaucaacaccuccacgaccugcugcuaccgcuucaucaacaagaagaucccgaagcagcggcuggaguccuaccgccggaccaccagcucccacugcccccgcgaggcggucaucuucaagacgaagcucgacaaggagaucugcgccgaccccacccagaagugggugcaggacuucaugaagcaccuggacaagaagacccagacccccaagcuguga

SEQ ID NO: 5076 - RNA, 330 nt, Artificial Sequence
  derived and/or modified sequence opt2 from CCL7__Homo_sapiens__EAW80210
auguggaagcccaugcccucccccuccaacaugaaggccuccgccgcccuccucugccuccuccucaccgccgccgccuucuccccccagggccucgcccagcccgucggcaucaacaccuccaccaccugcugcuaccgcuucaucaacaagaagauccccaagcagcgccucgaguccuaccgccgcaccaccuccucccacugcccccgcgaggccgucaucuucaagaccaagcucgacaaggagaucugcgccgaccccacccagaaguggguccaggacuucaugaagcaccucgacaagaagacccagacccccaagcucuga

SEQ ID NO: 5077 - RNA, 330 nt, Artificial Sequence
  derived and/or modified sequence opt3 from CCL7__Homo_sapiens__EAW80210
auguggaagcccaugccuagcccauccaacaugaaagccucugcugcacugcucugccuucuguugaccgccgcggcuuucucaccgcagggcuuagcccaacccguggggaucaauacaaguacuacguguugcuacagauuuauuaacaagaaaauaccuaagcagaggcuggagagcuaucggcgcaccacauccucucacuguccacgagaagcagucaucuucaaaacuaagcuagacaaggagauuugcgccgaucccacccagaaauggguucaggacuuuaugaagcaucucgauaaaaagacacaaaccccuaaacuguga

SEQ ID NO: 5078 - RNA, 330 nt, Artificial Sequence
  derived and/or modified sequence opt4 from CCL7__Homo_sapiens__EAW80210
auguggaagcccaugcccagccccagcaacaugaaggccagcgccgcccugcugugccugcugcugaccgccgccgccuucagcccccagggccuggcccagcccgugggcaucaacaccagcaccaccugcugcuacagauucaucaacaagaagauccccaagcagagacuggagagcuacagaagaaccaccagcagccacugccccagagaggccgugaucuucaagaccaagcuggacaaggagaucugcgccgaccccacccagaagugggugcaggacuucaugaagcaccuggacaagaagacccagacccccaagcuguga

SEQ ID NO: 5079 - RNA, 330 nt, Artificial Sequence
  derived and/or modified sequence opt5 from CCL7__Homo_sapiens__EAW80210
auguggaagcccaugccuagcccguccaacaugaaagccucugcugcccugcucugccugcuucugaccgcggcugccuucagcccccagggccucgcccaaccuguggggaucaauacauccacgaccuguugcuacagauuuauuaacaagaaaauccccaagcagcggcuggagucuuaucgcagaacaaccagcucccacuguccucgggaagcugucauuuucaaaacaaaacuugacaaggagaucugcgccgaucccacccagaaguggguucaggacuuuaugaagcaucuggauaaaaagacacaaaccccuaaacucuga

SEQ ID NO: 5080 - RNA, 330 nt, Artificial Sequence
  derived and/or modified sequence opt6 from CCL7__Homo_sapiens__EAW80210
auguggaaaccaaugccaucaccaucaaacaugaaagcaucagcagcacuacuaugccuacuacuaacagcagcagcauucucaccacaaggacuagcacaaccaguaggaauaaacacaucaacaacaugcugcuacagauucauaaacaaaaaaauaccaaaacaaagacuagaaucauacagaagaacaacaucaucacacugccccagagaagcaguaauauucaaaacaaaacuagacaaagaaauaugcgcagacccaacacaaaaauggguacaagacuucaugaaacaccuagacaaaaaaacacaaacaccaaaacuauaa

SEQ ID NO: 5081 - protein, 109 aa, Artificial Sequence
  CCL8__Homo_sapiens__H0UIC7
MLKLTPLPSKMKVSAALLCLLLMAATFSPQGLAQPDSVSIPITCCFNVINRKIPIQRLESYTRITNIQCPKEAVIFKTKRGKEVCADPKERWVRDSMKHLDQIFQNLKP

SEQ ID NO: 5082 - RNA, 330 nt, Artificial Sequence
  CCL8__Homo_sapiens__EAW80207
augcugaagcucacacccuugcccuccaagaugaagguuucugcagcgcuucugugccugcugcucauggcagccacuuucagcccucagggacuugcucagccagauucaguuuccauuccaaucaccugcugcuuuaacgugaucaauaggaaaauuccuauccagaggcuggagagcuacacaagaaucaccaacauccaaugucccaaggaagcugugaucuucaagaccaaacggggcaaggaggucugugcugaccccaaggagagaugggucagggauuccaugaagcaucuggaccaaauauuucaaaaucugaagccauga

SEQ ID NO: 5083 - RNA, 330 nt, Artificial Sequence
  derived and/or modified sequence opt1 from CCL8__Homo_sapiens__EAW80207
augcugaagcucaccccgcugcccagcaagaugaagguguccgccgcccugcucugccugcugcucauggcggccaccuucagcccccagggccuggcccagcccgacuccgucagcauccccaucacgugcugcuucaacgugaucaaccgcaagaucccgauccagcggcuggaguccuacacccgcaucaccaacauccagugccccaaggaggccgugaucuucaagaccaagcgggggaaggaggucugcgccgaccccaaggagcgcugggugcgggacagcaugaagcaccucgaccagaucuuccagaaccugaagcccuga

SEQ ID NO: 5084 - RNA, 330 nt, Artificial Sequence
  derived and/or modified sequence opt2 from CCL8__Homo_sapiens__EAW80207
augcucaagcucaccccccuccccuccaagaugaaggucuccgccgcccuccucugccuccuccucauggccgccaccuucuccccccagggccucgcccagcccgacuccgucuccauccccaucaccugcugcuucaacgucaucaaccgcaagauccccauccagcgccucgaguccuacacccgcaucaccaacauccagugccccaaggaggccgucaucuucaagaccaagcgcggcaaggaggucugcgccgaccccaaggagcgcuggguccgcgacuccaugaagcaccucgaccagaucuuccagaaccucaagcccuga

SEQ ID NO: 5085 - RNA, 330 nt, Artificial Sequence
  derived and/or modified sequence opt3 from CCL8__Homo_sapiens__EAW80207
augcugaagcucacaccccuuccuagcaaaaugaagguguccgccgcucuguugugcuuacugcuaauggcagccaccuucucuccacagggccucgcgcaaccggacucagucaguauccccauuacuuguugcuuuaacguuauaaauagaaaaaucccuauucagaggcuggagagcuacacgcggaucaccaacauucaguguccaaaggaagcugugaucuucaaaacaaagcgcgggaaggagguaugcgccgaucccaaagaacgaugggugcgugacuccaugaagcaccuugaucagauauuucaaaaucugaaaccuuga

SEQ ID NO: 5086 - RNA, 330 nt, Artificial Sequence
  derived and/or modified sequence opt4 from CCL8__Homo_sapiens__EAW80207
augcugaagcugaccccccugcccagcaagaugaaggugagcgccgcccugcugugccugcugcugauggccgccaccuucagcccccagggccuggcccagcccgacagcgugagcauccccaucaccugcugcuucaacgugaucaacagaaagauccccauccagagacuggagagcuacaccagaaucaccaacauccagugccccaaggaggccgugaucuucaagaccaagagaggcaaggaggugugcgccgaccccaaggagagaugggugagagacagcaugaagcaccuggaccagaucuuccagaaccugaagcccuga

SEQ ID NO: 5087 - RNA, 330 nt, Artificial Sequence
  derived and/or modified sequence opt5 from CCL8__Homo_sapiens__EAW80207
augcugaagcucacaccccugccuagcaaaaugaagguguccgccgcccuucugugccuccugcuuauggcugcgaccuucucuccgcagggccuggcucaacccgacagcgucuccaucccuauuacguguugcuuuaacguuaucaauagaaaaauucccauccagcggcucgagucuuacacccgcauuacaaacauccaguguccuaaggaagccgugaucuucaaaaccaagagagggaaggaggugugcgccgaucccaaagaacgguggguccgcgacagcaugaagcaccuggaucagauuuuucaaaaucugaaaccuuga

SEQ ID NO: 5088 - RNA, 330 nt, Artificial Sequence
  derived and/or modified sequence opt6 from CCL8__Homo_sapiens__EAW80207
augcuaaaacuaacaccacuaccaucaaaaaugaaaguaucagcagcacuacuaugccuacuacuaauggcagcaacauucucaccacaaggacuagcacaaccagacucaguaucaauaccaauaacaugcugcuucaacguaauaaacagaaaaauaccaauacaaagacuagaaucauacacaagaauaacaaacauacaaugcccaaaagaagcaguaauauucaaaacaaaaagaggaaaagaaguaugcgcagacccaaaagaaagauggguaagagacucaaugaaacaccuagaccaaauauuccaaaaccuaaaaccauaa

SEQ ID NO: 5089 - protein, 99 aa, Artificial Sequence
  CCL8__Homo_sapiens__P80075
MKVSAALLCLLLMAATFSPQGLAQPDSVSIPITCCFNVINRKIPIQRLESYTRITNIQCPKEAVIFKTKRGKEVCADPKERWVRDSMKHLDQIFQNLKP

SEQ ID NO: 5090 - RNA, 300 nt, Artificial Sequence
  CCL8__Homo_sapiens__CAA76341
augaagguuucugcagcgcuucugugccugcugcucauggcagccacuuucagcccucagggacuugcucagccagauucaguuuccauuccaaucaccugcugcuuuaacgugaucaauaggaaaauuccuauccagaggcuggagagcuacacaagaaucaccaacauccaaugucccaaggaagcugugaucuucaagaccaaacggggcaaggaggucugugcugaccccaaggagagaugggucagggauuccaugaagcaucuggaccaaauauuucaaaaucugaagccauga

SEQ ID NO: 5091 - RNA, 300 nt, Artificial Sequence
  derived and/or modified sequence opt1 from CCL8__Homo_sapiens__CAA76341
augaaggugagcgccgcccugcucugccugcugcucauggcggccaccuucagcccccagggccuggcccagccggacuccgucuccauccccaucacgugcugcuucaacgugaucaaccgcaagauccccauccagcggcuggagagcuacacccgcaucaccaacauccagugccccaaggaggccgugaucuucaagaccaagcgggggaaggaggucugcgccgacccgaaggagcgcugggugcgggacuccaugaagcaccucgaccagaucuuccagaaccugaagcccuga

SEQ ID NO: 5092 - RNA, 300 nt, Artificial Sequence
  derived and/or modified sequence opt2 from CCL8__Homo_sapiens__CAA76341
augaaggucuccgccgcccuccucugccuccuccucauggccgccaccuucuccccccagggccucgcccagcccgacuccgucuccauccccaucaccugcugcuucaacgucaucaaccgcaagauccccauccagcgccucgaguccuacacccgcaucaccaacauccagugccccaaggaggccgucaucuucaagaccaagcgcggcaaggaggucugcgccgaccccaaggagcgcuggguccgcgacuccaugaagcaccucgaccagaucuuccagaaccucaagcccuga

SEQ ID NO: 5093 - RNA, 300 nt, Artificial Sequence
  derived and/or modified sequence opt3 from CCL8__Homo_sapiens__CAA76341
augaaggugagcgccgcucugcucugccuucuguugauggcagccaccuucucuccccagggcuuagcgcaaccugacuccgucucaaucccaauuacauguugcuuuaacguuauaaauagaaaaaucccgauucagaggcuggagaguuacacucggaucacgaacauucagugucccaaggaagcugugaucuucaaaaccaagcgcgggaaagagguaugcgccgauccuaaggaacgaugggugcgugacagcaugaagcaccuagaucagauauuucaaaaucucaaaccauga

SEQ ID NO: 5094 - RNA, 300 nt, Artificial Sequence
  derived and/or modified sequence opt4 from CCL8__Homo_sapiens__CAA76341
augaaggugagcgccgcccugcugugccugcugcugauggccgccaccuucagcccccagggccuggcccagcccgacagcgugagcauccccaucaccugcugcuucaacgugaucaacagaaagauccccauccagagacuggagagcuacaccagaaucaccaacauccagugccccaaggaggccgugaucuucaagaccaagagaggcaaggaggugugcgccgaccccaaggagagaugggugagagacagcaugaagcaccuggaccagaucuuccagaaccugaagcccuga

SEQ ID NO: 5095 - RNA, 300 nt, Artificial Sequence
  derived and/or modified sequence opt5 from CCL8__Homo_sapiens__CAA76341
augaaggugagcgccgcucugcucugccugcuucugauggccgcgaccuucucuccccagggccucgcucaaccugacuccgucagcaucccgauuacauguugcuuuaacguuaucaauagaaaaauucccauccagcggcuggaguccuacacgcgcauuaccaacauccaguguccuaaggaagccgugaucuucaaaacaaagagagggaaagaggugugcgccgaucccaaggaacgguggguccgcgacucuaugaagcaccuugaucagauuuuucaaaaucugaaaccuuga

SEQ ID NO: 5096 - RNA, 300 nt, Artificial Sequence
  derived and/or modified sequence opt6 from CCL8__Homo_sapiens__CAA76341
augaaaguaucagcagcacuacuaugccuacuacuaauggcagcaacauucucaccacaaggacuagcacaaccagacucaguaucaauaccaauaacaugcugcuucaacguaauaaacagaaaaauaccaauacaaagauuagaaucauacacaagaauaacaaacauacaaugcccaaaagaagcaguaauauucaaaacaaaaagaggaaaagaaguaugcgcagacccaaaagaaagauggguaagagacucaaugaaacaccuagaccaaauauuccaaaacuuaaaaccauaa

SEQ ID NO: 5097 - protein, 122 aa, Artificial Sequence
  CCL9__Mus_musculus__P51670
MKPFHTALSFLILTTALGIWAQITHATETKEVQSSLKAQQGLEIEMFHMGFQDSSDCCLSYNSRIQCSRFIGYFPTSGGCTRPGIIFISKRGFQVCANPSDRRVQRCIERLEQNSQPRTYKQ

SEQ ID NO: 5098 - RNA, 369 nt, Artificial Sequence
  CCL9__Mus_musculus__AAA92583
augaagccuuuucauacugcccucuccuuccucauucuuacaacugcucuuggaaucugggcccagaucacacaugcaacagagacaaaagaaguccagagcagucugaaggcacagcaagggcuugaaauugaaauguuucacaugggcuuucaagacucuucagauugcugccuguccuauaacucacggauucaguguucaagauuuauagguuauuuucccaccagugguggguguaccaggccgggcaucaucuuuaucagcaagaggggguuccaggucugugccaaccccagugaucggagaguucagagaugcauugaaagauuggagcaaaacucacaaccacggaccuacaaacaauaa

SEQ ID NO: 5099 - RNA, 369 nt, Artificial Sequence
  derived and/or modified sequence opt1 from CCL9__Mus_musculus__AAA92583
augaagcccuuccacaccgcccugagcuuccucauccugaccacggcccugggcaucugggcgcagaucacccacgccaccgagaccaaggaggugcaguccagccucaaggcccagcaggggcuggagaucgagauguuccacaugggcuuccaggacuccagcgacugcugccuguccuacaacagccgcauccagugcucccgguucaucggguacuucccgacgagcggcgggugcacccgccccggcaucaucuucaucuccaagcggggcuuccaggucugcgccaaccccagcgaccgccgggugcagcgcugcaucgagcggcucgagcagaacucccagccccgcaccuacaagcaguga

SEQ ID NO: 5100 - RNA, 369 nt, Artificial Sequence
  derived and/or modified sequence opt2 from CCL9__Mus_musculus__AAA92583
augaagcccuuccacaccgcccucuccuuccucauccucaccaccgcccucggcaucugggcccagaucacccacgccaccgagaccaaggagguccaguccucccucaaggcccagcagggccucgagaucgagauguuccacaugggcuuccaggacuccuccgacugcugccucuccuacaacucccgcauccagugcucccgcuucaucggcuacuuccccaccuccggcggcugcacccgccccggcaucaucuucaucuccaagcgcggcuuccaggucugcgccaaccccuccgaccgccgcguccagcgcugcaucgagcgccucgagcagaacucccagccccgcaccuacaagcaguga

SEQ ID NO: 5101 - RNA, 369 nt, Artificial Sequence
  derived and/or modified sequence opt3 from CCL9__Mus_musculus__AAA92583
augaagcccuuccacaccgcccugagcuuucucauccuuacaacugcucugggcauuugggcacagauaacgcaugccaccgagacaaaagaagugcaauccucuuugaaggcgcagcagggguuagagaucgaaauguuccacaugggauuucaggacucaagugauugcugucugagcuacaacuccaggauucaaugcucuagauucaucgguuauuuuccuacuucgggcggguguacccggccaggaauuaucuucauaucaaaacgcggcuuucaggucugcgcuaauccgagcgaccgacguguucagagauguaucgagaggcuagaacagaacagucaaccccggacauacaagcaguga

SEQ ID NO: 5102 - RNA, 369 nt, Artificial Sequence
  derived and/or modified sequence opt4 from CCL9__Mus_musculus__AAA92583
augaagcccuuccacaccgcccugagcuuccugauccugaccaccgcccugggcaucugggcccagaucacccacgccaccgagaccaaggaggugcagagcagccugaaggcccagcagggccuggagaucgagauguuccacaugggcuuccaggacagcagcgacugcugccugagcuacaacagcagaauccagugcagcagauucaucggcuacuuccccaccagcggcggcugcaccagacccggcaucaucuucaucagcaagagaggcuuccaggugugcgccaaccccagcgacagaagagugcagagaugcaucgagagacuggagcagaacagccagcccagaaccuacaagcaguga

SEQ ID NO: 5103 - RNA, 369 nt, Artificial Sequence
  derived and/or modified sequence opt5 from CCL9__Mus_musculus__AAA92583
augaagcccuuccacaccgcccugagcuuucucauccugacaacggcucuuggcauuugggcccagaucacccaugcgacagagaccaaagaagugcaauccucucugaaggcucagcaggggcucgagauugaaauguuccacaugggauuucaggacagcuccgauugcugucugucuuacaacagcagaauccaaugcucccgguucauuggcuauuuuccuacaucugggggauguacccgcccgggcaucaucuucauuagcaaaagaggguuucaggucugcgccaaucccuccgaccggcgcguucagagauguaucgagcggcuugaacagaacagccaaccucgcacauacaagcaguga

SEQ ID NO: 5104 - RNA, 369 nt, Artificial Sequence
  derived and/or modified sequence opt6 from CCL9__Mus_musculus__AAA92583
augaaaccauuccacacagcacuaucauuccuaauacuaacaacagcacuaggaauaugggcacaaauaacacacgcaacagaaacaaaagaaguacaaucaucacuaaaagcacaacaaggacuagaaauagaaauguuccacaugggauuccaagacucaucagacugcugcuuaucauacaacucaagaauacaaugcucaagauucauaggauacuucccaacaucaggaggaugcacaagaccaggaauaauauucauaucaaaaagaggauuccaaguaugcgcaaaccccucagacagaagaguacaaagaugcauagaaagacuagaacaaaacucacaaccaagaacauacaaacaauaa

SEQ ID NO: 5105 - protein, 397 aa, Artificial Sequence
  CX3CL1__Homo_sapiens__A0N0N7
MAPISLSWLLRLATFCHLTVLLAGQHHGVTKCNITCSKMTSKIPVALLIHYQQNQASCGKRAIILETRQHRLFCADPKEQWVKDAMQHLDRQAAALTRNGGTFEKQIGEVKPRTTPAAGGMDESVVLEPEATGESSSLEPTPSSQEAQRALGTSPELPTGVTGSSGTRLPPTPKAQDGGPVGTELFRVPPVSTAATWQSSAPHQPGPSLWAEAKTSEAPSTQDPSTQASTASSPAPEENAPSEGQRVWGQGQSPRPENSLEREEMGPVPAHTDAFQDWGPGSMAHVSVVPVSSEGTPSREPVASGSWTPKAEEPIHATMDPQRLGVLITPVPDAQAATRRQAVGLLAFLGLLFCLGVAMFTYQSLQGCPRKMAGEMAEGLRYIPRSCGSNSYVLVPV

SEQ ID NO: 5106 - RNA, 1194 nt, Artificial Sequence
  CX3CL1__Homo_sapiens__ABK41928
auggcuccgauaucucugucguggcugcuccgcuuggccaccuucugccaucugacuguccugcuggcuggacagcaccacggugugacgaaaugcaacaucacgugcagcaagaugacaucaaagauaccuguagcuuugcucauccacuaucaacagaaccaggcaucaugcggcaaacgcgcaaucaucuuggagacgagacagcacaggcuguucugugccgacccgaaggagcaaugggucaaggacgcgaugcagcaucuggaccgccaggcugcugcccuaacucgaaauggcggcaccuucgagaagcagaucggcgaggugaagcccaggaccaccccugccgccgggggaauggacgagucugugguccuggagcccgaagccacaggcgaaagcaguagccuggagccgacuccuucuucccaggaagcacagagggcccuggggaccuccccagagcugccgacgggcgugacugguuccucagggaccaggcuccccccgacgccaaaggcucaggauggagggccugugggcacggagcuuuuccgagugccucccgucuccacugccgccacguggcagaguucugcuccccaccaaccugggcccagccucugggcugaggcaaagaccucugaggccccguccacccaggaccccuccacccaggccuccacugcguccuccccagccccagaggagaaugcuccgucugaaggccagcguguguggggucagggacagagccccaggccagagaacucucuggagcgggaggagaugggucccgugccagcgcacacggaugccuuccaggacugggggccuggcagcauggcccacgucucuguggucccugucuccucagaagggacccccagcagggagccaguggcuucaggcagcuggaccccuaaggcugaggaacccauccaugccaccauggacccccagaggcugggcguccuuaucacuccugucccugacgcccaggcugccacccggaggcaggcgguggggcugcuggccuuccuuggccuccucuucugccuggggguggccauguucaccuaccagagccuccagggcugcccucgaaagauggcaggagagauggcggagggccuucgcuacaucccccggagcugugguaguaauucauauguccuggugcccguguga

SEQ ID NO: 5107 - RNA, 1194 nt, Artificial Sequence
  derived and/or modified sequence opt1 from CX3CL1__Homo_sapiens__ABK41928
auggcccccaucagccuguccuggcuccugcgccuggccaccuucugccaccucaccgugcugcuggcgggccagcaccacggggucacgaagugcaacaucacgugcagcaagaugaccuccaagaucccgguggcccuccugauccacuaccagcagaaccaggccagcugcggcaagcgggccaucauccuggagacccgccagcaccgccucuucugcgccgaccccaaggagcagugggugaaggacgcgaugcagcaccuggaccggcaggccgccgcccugacccggaacgggggcaccuucgagaagcagaucggggaggucaagccccgcaccacccccgcggccggcggcauggacgaguccguggugcucgagccggaggccacgggggagagcuccagccuggagcccacccccuccagccaggaggcccagcgggcccugggcaccucccccgagcucccgaccggggucacgggcagcuccgggacccgccugccgcccacccccaaggcgcaggacggcggccccguggggaccgagcuguuccgggugccgcccgucagcacggccgccaccuggcaguccagcgcgccccaccagcccggccccucccucugggccgaggccaagaccagcgaggcccccuccacccaggaccccagcacgcaggccagcaccgccuccagcccggcccccgaggagaacgcgcccuccgaggggcagcgcguguggggccagggccagagcccccggccggagaacucccuggagcgcgaggagauggggcccgugcccgcccacaccgacgccuuccaggacuggggccccgggagcauggcccacgucuccguggugccggucagcuccgagggcacccccagccgggagcccguggccuccgggagcuggacgccgaaggcggaggagcccauccacgccaccauggacccccagcgccugggcgugcucaucacccccgucccggacgcccaggccgcgacccggcgccaggccgugggccugcuggccuuccucgggcugcuguucugccucggcguggccauguucacguaccagucccugcaggggugcccccggaagauggccggcgagauggcggaggggcugcgcuacaucccccggagcugcggcuccaacagcuacguccucgugcccguguga

SEQ ID NO: 5108 - RNA, 1194 nt, Artificial Sequence
  derived and/or modified sequence opt2 from CX3CL1__Homo_sapiens__ABK41928
auggcccccaucucccucuccuggcuccuccgccucgccaccuucugccaccucaccguccuccucgccggccagcaccacggcgucaccaagugcaacaucaccugcuccaagaugaccuccaagauccccgucgcccuccucauccacuaccagcagaaccaggccuccugcggcaagcgcgccaucauccucgagacccgccagcaccgccucuucugcgccgaccccaaggagcagugggucaaggacgccaugcagcaccucgaccgccaggccgccgcccucacccgcaacggcggcaccuucgagaagcagaucggcgaggucaagccccgcaccacccccgccgccggcggcauggacgaguccgucguccucgagcccgaggccaccggcgaguccuccucccucgagcccacccccuccucccaggaggcccagcgcgcccucggcaccucccccgagcuccccaccggcgucaccggcuccuccggcacccgccucccccccacccccaaggcccaggacggcggccccgucggcaccgagcucuuccgcgucccccccgucuccaccgccgccaccuggcaguccuccgccccccaccagcccggccccucccucugggccgaggccaagaccuccgaggcccccuccacccaggaccccuccacccaggccuccaccgccuccucccccgcccccgaggagaacgcccccuccgagggccagcgcgucuggggccagggccaguccccccgccccgagaacucccucgagcgcgaggagaugggccccguccccgcccacaccgacgccuuccaggacuggggccccggcuccauggcccacgucuccgucguccccgucuccuccgagggcacccccucccgcgagcccgucgccuccggcuccuggacccccaaggccgaggagcccauccacgccaccauggacccccagcgccucggcguccucaucacccccguccccgacgcccaggccgccacccgccgccaggccgucggccuccucgccuuccucggccuccucuucugccucggcgucgccauguucaccuaccagucccuccagggcugcccccgcaagauggccggcgagauggccgagggccuccgcuacaucccccgcuccugcggcuccaacuccuacguccucguccccgucuga

SEQ ID NO: 5109 - RNA, 1194 nt, Artificial Sequence
  derived and/or modified sequence opt3 from CX3CL1__Homo_sapiens__ABK41928
auggcccccaucagccuguccuggcuccuuagacuggcuaccuucugccacuugacaguguuacuggcaggccagcaucacggggucacuaaguguaacauuacgugcucuaaaaugaccucaaagauaccuguugcccuacucauccauuaccaacagaaucaggcgaguuguggaaaaagggcuauuauccuggagacacggcagcaccgccuguuuugcgccgacccaaaggaacaaugggugaaagaugcaaugcagcaucuugaccgacaggccgcugcauugacucguaacgguggcaccuucgagaagcagauuggggaaguaaagccgagaacaacccccgccgcuggaggcauggaugagagcgugguccucgaaccugaggccacuggugaguccucuucgcuggaaccaacacccucaagccaagaggcgcagagggcacuggggaccaguccugaacucccaacgggagugacuggcuccucuggcacccgguuacccccuacaccaaaagcccaggacgggggaccgguugguacugagcuguuucgcgugcccccugucagcaccgcugccacauggcaguccucagcaccacaccaacccggcccuagucuuugggcugaggccaagaccagcgaagcgccaucuacgcaggaucccuccacucaggccucaacagcaagcaguccggcuccugaggaaaaugcccccucugaggggcaaagaguguggggacagggccaguccccaaggccugaaaacagcuuggagcgggaggaaaugggucccguaccagcucacaccgacgccuuccaggauugggggcccggaucgauggcacauguuucuguggucccuguguccucagagggcacuccaagucgcgaaccgguggccagcggcuccuggacacccaaagcugaggaaccuauccacgcgaccauggacccacaacgacuggggguccuaauaacgcccguuccugaugcacaggccgcuaccagaaggcaggccgugggacuccuggcauuucuuggucuguuguucugucucggcguagccauguuuacauaucagucucugcaagggugcccacggaagauggcuggagagauggccgagggcuuacguuacaucccccgcagcugugguucaaauaguuaugugcuggucccgguguga

SEQ ID NO: 5110 - RNA, 1194 nt, Artificial Sequence
  derived and/or modified sequence opt4 from CX3CL1__Homo_sapiens__ABK41928
auggcccccaucagccugagcuggcugcugagacuggccaccuucugccaccugaccgugcugcuggccggccagcaccacggcgugaccaagugcaacaucaccugcagcaagaugaccagcaagauccccguggcccugcugauccacuaccagcagaaccaggccagcugcggcaagagagccaucauccuggagaccagacagcacagacuguucugcgccgaccccaaggagcagugggugaaggacgccaugcagcaccuggacagacaggccgccgcccugaccagaaacggcggcaccuucgagaagcagaucggcgaggugaagcccagaaccacccccgccgccggcggcauggacgagagcguggugcuggagcccgaggccaccggcgagagcagcagccuggagcccacccccagcagccaggaggcccagagagcccugggcaccagccccgagcugcccaccggcgugaccggcagcagcggcaccagacugccccccacccccaaggcccaggacggcggccccgugggcaccgagcuguucagagugccccccgugagcaccgccgccaccuggcagagcagcgccccccaccagcccggccccagccugugggccgaggccaagaccagcgaggcccccagcacccaggaccccagcacccaggccagcaccgccagcagccccgcccccgaggagaacgcccccagcgagggccagagaguguggggccagggccagagccccagacccgagaacagccuggagagagaggagaugggccccgugcccgcccacaccgacgccuuccaggacuggggccccggcagcauggcccacgugagcguggugcccgugagcagcgagggcacccccagcagagagcccguggccagcggcagcuggacccccaaggccgaggagcccauccacgccaccauggacccccagagacugggcgugcugaucacccccgugcccgacgcccaggccgccaccagaagacaggccgugggccugcuggccuuccugggccugcuguucugccugggcguggccauguucaccuaccagagccugcagggcugccccagaaagauggccggcgagauggccgagggccugagauacauccccagaagcugcggcagcaacagcuacgugcuggugcccguguga

SEQ ID NO: 5111 - RNA, 1194 nt, Artificial Sequence
  derived and/or modified sequence opt5 from CX3CL1__Homo_sapiens__ABK41928
auggcccccaucagccuguccuggcuccugagacuugcuaccuucugccaccugacagugcuccuggccggccagcaucacggggucacgaaguguaacauuaccugcucuaaaaugacaagcaagaucccuguugcgcuucugauucauuaccaacagaaucaggcuuccuguggaaaacgggccaucauucucgagacccgccagcacagacuguuuugcgccgacccgaaggaacaaugggugaaagaugcuaugcagcaucuggaccggcaggccgcugcccucacacgcaacggcgggaccuucgagaagcagaucggagaagugaagcccagaacaaccccugcggccggcgggauggaugagucugucgugcuggaacccgaggcuacgggagagagcuccucucuugaaccuacccccagcucccaagaggcccagcgggcucugggcacaagcccugaacucccgaccggcguuacagggucuuccggaacccgccugcccccuacgcccaaagcccaggacggcgggccugugggaacagagcuuuuuagagugcccccggucagcaccgcggccacauggcagucuuccgcuccucaccaacccggcccuagccugugggccgaggcuaagaccucugaagcccccuccacccaggaucccagcacacaggccuccacggcuucuagcccugcgccggaggaaaaugcccccuccgaggggcaacggguuuggggacagggccagagcccucgccccgaaaacucucucgagagagaggaaaugggcccugugcccgcucacaccgacgccuuccaggauugggggccgggauccauggcccaugucagcguggugccugucucuagcgagggcacacccucccgggaaccuguugcuucugggagcuggacccccaaagccgaggaaccuauccacgcgacaauggacccccaacgccugggagugcugauuaccccggugccugaugcucaggccgccacgagacggcaggcugucggccuccuggccuuucuugggcuccuguucugucugggaguggcuauguuuacauaucagucccuucaaggcugcccccgcaagauggccggcgagauggcggaggggcugagauacaucccccggagcuguggaucuaauuccuauguucucgugccugucuga

SEQ ID NO: 5112 - RNA, 1194 nt, Artificial Sequence
  derived and/or modified sequence opt6 from CX3CL1__Homo_sapiens__ABK41928
auggcaccuauaagucucaguuggcuacuacgacucgccacauuuugucauuuaacaguacuacuagcaggacaacaucauggaguaacaaaauguaacauaacaugcucaaaaaugacaucaaaaauaccaguagcauuauuaauacauuaccaacaaaaucaggcuucauguggaaaacgagcaauaauacuagaaacacgucaacauagacuuuuuugugcagauccaaaagaacaaugggucaaagacgcaaugcaacauuuagauagacaagcagcagcacuaacaagaaacggcggaacauuugaaaaacaaauaggagaaguaaaaccuagaacaacaccagcagcagguggcauggaugaaucuguaguacuagaaccagaagcaacaggagaaucaucaaguuuagaaccaacaccaaguucucaagaagcacaaagagcccuaggaacaaguccagaacuaccaacaggaguaacaggaaguucaggaacaagacuuccaccaacuccuaaagcacaagauggaggaccaguagguacagaacuauucagaguaccaccaguaucaacagcugcaacauggcaaucaagugccccucaccaaccagggccaucacuaugggcugaagcgaaaacuucagaagcaccuucuacacaagacccuucuacucaagcaucaaccgcauccagcccagcaccagaagaaaacgcaccaucggaaggucaaagaguauggggacaaggacaaucaccaagacccgaaaacucacuagaaagagaagaaaugggaccagucccagcacauacugaugcuuuucaagauuggggaccaggaagcauggcccauguaucagucguaccaguaucaagugaaggaacaccaagcagagaaccaguagcaaguggaucauggaccccuaaagcugaagaaccaauacaugcuacaauggacccacaaagauuaggaguauuaauuacaccuguucccgaugcacaagccgcaacuagaagacaagcaguuggacucuuagcauuuuugggauuacucuucuguuuaggaguagcuauguuuacauaucaaucauuacaaggauguccacgaaaaauggcaggcgaaauggcagaaggauuaagauauauacccagaucaugugguucaaauucauacguauuaguaccaguauaa

SEQ ID NO: 5113 - protein, 397 aa, Artificial Sequence; identical to SEQ ID NO: 5105
  CX3CL1__Homo_sapiens__P78423

SEQ ID NO: 5114 - RNA, 1194 nt, Artificial Sequence; identical to SEQ ID NO: 5106
  CX3CL1__Homo_sapiens__AAB49679

SEQ ID NO: 5115 - RNA, 1194 nt, Artificial Sequence; identical to SEQ ID NO: 5107
  derived and/or modified sequence opt1 from CX3CL1__Homo_sapiens__AAB49679

SEQ ID NO: 5116 - RNA, 1194 nt, Artificial Sequence; identical to SEQ ID NO: 5108
  derived and/or modified sequence opt2 from CX3CL1__Homo_sapiens__AAB49679

SEQ ID NO: 5117 - RNA, 1194 nt, Artificial Sequence; identical to SEQ ID NO: 5109
  derived and/or modified sequence opt3 from CX3CL1__Homo_sapiens__AAB49679

SEQ ID NO: 5118 - RNA, 1194 nt, Artificial Sequence; identical to SEQ ID NO: 5110
  derived and/or modified sequence opt4 from CX3CL1__Homo_sapiens__AAB49679

SEQ ID NO: 5119 - RNA, 1194 nt, Artificial Sequence; identical to SEQ ID NO: 5111
  derived and/or modified sequence opt5 from CX3CL1__Homo_sapiens__AAB49679

SEQ ID NO: 5120 - RNA, 1194 nt, Artificial Sequence
  derived and/or modified sequence opt6 from CX3CL1__Homo_sapiens__AAB49679
auggcaccaauuucacuaagcuggcuauuaagauuagcaacauuuugucauuuaaccguacuacucgcaggacaacaucacggaguaacaaaaugcaacauaacauguucuaaaaugacaucuaaaauaccaguagcacuuuuaauacacuaucaacaaaaucaagcaucauguggaaaacgcgcaauaauacuagaaaccagacaacaucguuuauuuugcgcagacccaaaagaacaauggguaaaagaugcaaugcaacauuuagauagacaagcagcagcauuaacaagaaauggagguacauuugaaaaacaaauaggagaaguaaaaccuagaacaacaccugcagcaggaggcauggaugaaucaguaguauuagaaccagaagcaacaggcgaaaguaguucauuagaaccaacaccaaguagucaagaagcacaaagagcauuaggaacaucaccagaauuaccaaccggcguaacgggaucgucaggaacacguuuaccaccaacaccaaaagcacaagauggcggaccaguaggcacagaauuauucagaguuccaccaguuaguacugcagcaaccuggcaaucuagcgccccacaucaaccagguccaucccuaugggcagaagccaaaacaagcgaagcuccaucaacacaagaucccucaacacaagcaucaacagcaaguucucccgcaccagaagaaaaugcuccaagugaaggacagcgaguauggggacaaggacaauccccaagaccagaaaauucuuuagaaagagaagaaaugggaccaguaccagcucauacagaugcauuccaagacuggggaccaggaucaauggcucaugucucuguagucccuguaaguucagaaggaacaccaucaagagaaccaguagcauccggaagcuggacaccaaaagcagaagagccaauacaugcuacaauggauccgcaacgccuaggaguucuaauuacaccuguaccagaugcacaagcagcuacaagacgacaagcaguuggauuacuagcauuuuuaggacuacuauuuugucuaggaguagcaauguucacauaucaaucuuuacaaggauguccaagaaagauggcaggagaaauggcagaaggauuaagauacauacccagauccuguggaaguaacucauauguauuaguaccaguauaa

SEQ ID NO: 5121 - protein, 397 aa, Artificial Sequence [sequence omitted]

SEQ ID NO: 5122 - RNA, 1194 nt, Artificial Sequence
  CX3CL1__Homo_sapiens__CAG33707
auggcuccgauaucucugucguggcugcuccgcuuggccaccuucugccaucugacuguccugcuggcuggacagcaccacggugugacgaaaugcaacaucacgugcagcaagaugacaucaaagauaccuguagcuuugcucauccacuaucaacagaaccaggcaucaugcggcaaacgcgcaaucaucuuggagacgagacagcacaggcuguucugugccgacccgaaggagcaaugggucaaggacgcgaugcagcaucuggaccgccaggcugcugcccuaacucgaaauggcggcaccuucgagaagcagaucggcgaggugaagcccaggaccaccccugccgccgggggaauggacgagucugugguccuggagcccgaagccacaggcgaaagcaguagcccggagccgacuccuucuucccaggaagcacagagggcccuggggaccuccccagagcugccgacgggcgugacugguuccucagggaccaggcuccccccgacgccaaaggcucaggauggagggccugugggcacggagcuuuuccgagugccucccgucuccacugccgccacguggcagaguucugcuccccaccaaccugggcccagccucugggcugaggcaaagaccucugaggccccguccacccaggaccccuccacccaggccuccacugcguccuccccagccccagaggagaaugcuccgucugaaggccagcguguguggggucagggacagagccccaggccagagaacucucuggagcgggaggagaugggucccgugccagcgcacacggaugccuuccaggacugggggccuggcagcauggcccacgucucuguggucccugucuccucagaagggacccccagcagggagccaguggcuucaggcagcuggaccccuaaggcugaggaacccauccaugccaccauggacccccagaggcugggcguccuuaucacuccugucccugacgcccaggcugccacccggaggcaggcgguggggcugcuggccuuccuuggccuccucuucugccuggggguggccauguucaccuaccagagccuccagggcugcccucgaaagauggcaggagagauggcggagggccuucgcuacaucccccggagcugugguaguaauucauauguccuggugcccguuuaa

SEQ ID NO: 5123 - RNA, 1194 nt, Artificial Sequence
  derived and/or modified sequence opt1 from CX3CL1__Homo_sapiens__CAG33707
auggcccccaucagccuguccuggcuccugcgccuggccaccuucugccaccucaccgugcugcuggcgggccagcaccacggggucacgaagugcaacaucacgugcagcaagaugaccuccaagaucccgguggcccuccugauccacuaccagcagaaccaggccagcugcggcaagcgggccaucauccuggagacccgccagcaccgccucuucugcgccgaccccaaggagcagugggugaaggacgcgaugcagcaccuggaccggcaggccgccgcccugacccggaacgggggcaccuucgagaagcagaucggggaggucaagccccgcaccacccccgcggccggcggcauggacgaguccguggugcucgagccggaggccacgggggagagcuccagccccgagcccacccccuccagccaggaggcccagcgggcccugggcaccuccccggagcugcccaccggggucacgggcagcuccgggacccgccucccgcccacccccaaggcgcaggacggcggccccguggggaccgagcuguuccgggugccgcccgucagcacggccgccaccuggcaguccagcgcgccccaccagcccggccccucccugugggccgaggccaagaccagcgaggcccccuccacccaggacccgagcacgcaggccagcaccgccuccagccccgcccccgaggagaacgcgcccuccgaggggcagcgcguguggggccagggccagagcccgcggcccgagaacucccucgagcgcgaggagauggggcccgugcccgcccacaccgacgccuuccaggacuggggcccggggagcauggcccacgucuccguggugcccgucagcuccgagggcacccccagccgggagccgguggccuccgggagcuggacgcccaaggcggaggagcccauccacgccaccauggacccccagcgccugggcgugcugaucaccccgguccccgacgcccaggccgcgacccggcgccaggccgugggccuccuggccuuccuggggcuccuguucugccugggcguggccauguucacguaccagucccuccaggggugcccccggaagauggccggcgagauggcggaggggcugcgcuacaucccccggagcugcggcuccaacagcuacguccuggugccgguguga

SEQ ID NO: 5124 - RNA, 1194 nt, Artificial Sequence
  derived and/or modified sequence opt2 from CX3CL1__Homo_sapiens__CAG33707
auggcccccaucucccucuccuggcuccuccgccucgccaccuucugccaccucaccguccuccucgccggccagcaccacggcgucaccaagugcaacaucaccugcuccaagaugaccuccaagauccccgucgcccuccucauccacuaccagcagaaccaggccuccugcggcaagcgcgccaucauccucgagacccgccagcaccgccucuucugcgccgaccccaaggagcagugggucaaggacgccaugcagcaccucgaccgccaggccgccgcccucacccgcaacggcggcaccuucgagaagcagaucggcgaggucaagccccgcaccacccccgccgccggcggcauggacgaguccgucguccucgagcccgaggccaccggcgaguccuccucccccgagcccacccccuccucccaggaggcccagcgcgcccucggcaccucccccgagcuccccaccggcgucaccggcuccuccggcacccgccucccccccacccccaaggcccaggacggcggccccgucggcaccgagcucuuccgcgucccccccgucuccaccgccgccaccuggcaguccuccgccccccaccagcccggccccucccucugggccgaggccaagaccuccgaggcccccuccacccaggaccccuccacccaggccuccaccgccuccucccccgcccccgaggagaacgcccccuccgagggccagcgcgucuggggccagggccaguccccccgccccgagaacucccucgagcgcgaggagaugggccccguccccgcccacaccgacgccuuccaggacuggggccccggcuccauggcccacgucuccgucguccccgucuccuccgagggcacccccucccgcgagcccgucgccuccggcuccuggacccccaaggccgaggagcccauccacgccaccauggacccccagcgccucggcguccucaucacccccguccccgacgcccaggccgccacccgccgccaggccgucggccuccucgccuuccucggccuccucuucugccucggcgucgccauguucaccuaccagucccuccagggcugcccccgcaagauggccggcgagauggccgagggccuccgcuacaucccccgcuccugcggcuccaacuccuacguccucguccccgucuga

SEQ ID NO: 5125 - RNA, 1194 nt, Artificial Sequence
  derived and/or modified sequence opt3 from CX3CL1__Homo_sapiens__CAG33707
auggcccccaucagccuguccuggcuccuuagacuggcuaccuucugccacuugacaguguuacuggcaggccagcaucacggggucacuaaguguaacauuacgugcucuaaaaugaccucaaagauaccuguugcccuacucauccauuaccaacagaaucaggcgaguuguggaaaaagggcuauuauccuggagacacggcagcaccgccuguuuugcgccgacccaaaggaacaaugggugaaagaugcaaugcagcaucuugaccgacaggccgcugcauugacucguaacgguggcaccuucgagaagcagauuggggaaguaaagccgagaacaacccccgccgcuggaggcauggaugagagcgugguccucgaaccugaggccacuggugaguccucuucgccagaacccacaccuucaagccaagaggcgcagagggcacuggggaccaguccagaacugcccacgggagugacuggcuccucuggcacccggcucccuccaacaccgaaagcccaggacgggggacccguugguacugaguuauuucgcgugccuccagucagcaccgcugccacauggcaguccucagcaccccaccaaccuggcccaagucugugggcugaggccaagaccagcgaagcgcccucuacgcaggauccguccacucaggccucaacagcaagcaguccugcucccgaggaaaaugccccaucugaggggcaaagaguguggggacagggccaguccccuaggcccgaaaacagccuugagcgggaggaaauggguccaguacccgcucacaccgacgccuuccaggauugggggccuggaucgauggcacauguuucuguggucccaguguccucagagggcacuccgagucgcgaacccguggccagcggcuccuggacaccuaaagcugaggaaccaauccacgcgaccauggacccccaacgauuggggguccugauaacgccuguuccagaugcacaggccgcuaccagaaggcaggccgugggacuacucgcauuucugggucuucuguucuguuugggcguagccauguuuacauaucagucucuccaagggugcccccggaagauggcuggagagauggccgagggccugcguuacaucccgcgcagcugugguucaaauaguuauguguuagucccuguguga

SEQ ID NO: 5126 - RNA, 1194 nt, Artificial Sequence
  derived and/or modified sequence opt4 from CX3CL1__Homo_sapiens__CAG33707
auggcccccaucagccugagcuggcugcugagacuggccaccuucugccaccugaccgugcugcuggccggccagcaccacggcgugaccaagugcaacaucaccugcagcaagaugaccagcaagauccccguggcccugcugauccacuaccagcagaaccaggccagcugcggcaagagagccaucauccuggagaccagacagcacagacuguucugcgccgaccccaaggagcagugggugaaggacgccaugcagcaccuggacagacaggccgccgcccugaccagaaacggcggcaccuucgagaagcagaucggcgaggugaagcccagaaccacccccgccgccggcggcauggacgagagcguggugcuggagcccgaggccaccggcgagagcagcagccccgagcccacccccagcagccaggaggcccagagagcccugggcaccagccccgagcugcccaccggcgugaccggcagcagcggcaccagacugccccccacccccaaggcccaggacggcggccccgugggcaccgagcuguucagagugccccccgugagcaccgccgccaccuggcagagcagcgccccccaccagcccggccccagccugugggccgaggccaagaccagcgaggcccccagcacccaggaccccagcacccaggccagcaccgccagcagccccgcccccgaggagaacgcccccagcgagggccagagaguguggggccagggccagagccccagacccgagaacagccuggagagagaggagaugggccccgugcccgcccacaccgacgccuuccaggacuggggccccggcagcauggcccacgugagcguggugcccgugagcagcgagggcacccccagcagagagcccguggccagcggcagcuggacccccaaggccgaggagcccauccacgccaccauggacccccagagacugggcgugcugaucacccccgugcccgacgcccaggccgccaccagaagacaggccgugggccugcuggccuuccugggccugcuguucugccugggcguggccauguucaccuaccagagccugcagggcugccccagaaagauggccggcgagauggccgagggccugagauacauccccagaagcugcggcagcaacagcuacgugcuggugcccguguga

SEQ ID NO: 5127 - RNA, 1194 nt, Artificial Sequence
  derived and/or modified sequence opt5 from CX3CL1__Homo_sapiens__CAG33707
auggcccccaucagccuguccuggcuccugagacuugcuaccuucugccaccugacagugcuccuggccggccagcaucacggggucacgaaguguaacauuaccugcucuaaaaugacaagcaagaucccuguugcgcuucugauucauuaccaacagaaucaggcuuccuguggaaaacgggccaucauucucgagacccgccagcacagacuguuuugcgccgacccgaaggaacaaugggugaaagaugcuaugcagcaucuggaccggcaggccgcugcccucacacgcaacggcgggaccuucgagaagcagaucggagaagugaagcccagaacaaccccugcggccggcgggauggaugagucugucgugcuggaacccgaggcuacgggagagagcuccucuccugaacccaccccuagcucccaagaggcccagcgggcucuuggcacaagcccggaacugcccaccggcguuacagggucuuccggaacccgccucccucccacgccuaaagcccaggacggcgggcccgugggaacagagcuguuuagagucccgccugugagcaccgcggccacauggcagucuuccgcuccccaccaaccuggccccagccuuugggccgaggcuaagaccucugaagcccccuccacccaggauccuagcacacaggccuccacggcuucuagcccggcgcccgaggaaaaugccccuuccgaggggcaacggguuuggggacagggccagagcccccgcccugaaaacucucuggagagagaggaaaugggccccgugccggcucacaccgacgccuuccaggauugggggccuggauccauggcccaugucagcguggugcccgucucuagcgagggcacaccuucccgggaacccguugcuucugggagcuggaccccuaaagccgaggaacccauccacgcgacaauggacccgcaacgccucggagugcugauuaccccugugcccgaugcucaggccgccacgagacggcaggcugucggccugcucgccuuucuggggcuucuguucugucucggaguggcuauguuuacauaucagucccugcaaggcugcccccgcaagauggccggcgagauggcggaggggcuuagauacaucccucggagcuguggaucuaauuccuauguucuggugccggucuga

SEQ ID NO: 5128 - RNA, 1194 nt, Artificial Sequence
  derived and/or modified sequence opt6 from CX3CL1__Homo_sapiens__CAG33707
auggcaccuauaagcuuaagcugguuacuaagauuagcaaccuucugucaucuaacaguuuuacuagcaggacaacaucauggaguaacuaaauguaacauaacauguucaaaaaugacuaguaaaauaccaguagcuuuauuaauacacuaucaacaaaaucaagcaaguuguggcaaaagagcaauaauccuagaaacaagacaacauagauuauucugugcagauccaaaagaacaauggguaaaagaugcaaugcaacauuuagauagacaagcagcagccuuaacuagaaauggagguacauuugaaaaacaaauaggagaaguaaaaccaaggacaacaccugcagcaggaggaauggaugaaucaguaguuuuagaaccagaagccacaggugaaucuucaucaccagaaccaacaccauccucacaagaagcacaaagagcauuaggaacaucaccagaauuacccacaggaguuacagggaguagugguacaagguuaccuccuacaccaaaagcccaagaugguggacccguugguacagaacuuuuuagaguacccccuguaucaacagcagcaacauggcaaucaucagcaccacaucaaccaggaccaucauuaugggcagaagcaaaaacaucagaagcaccuucuacacaagacccaucaacacaagcuucaacagcaucaucuccagcucccgaagaaaacgcuccuucagaaggacaaagaguauggggacaaggacaaucaccaagaccagaaaauucacuugaacgagaagaaaugggaccaguaccagcacacaccgaugcauuucaagauuggggaccaggaaguauggcacauguaaguguaguaccaguaaguucagaagguacaccaucaagagaaccagucgcaucaggaagcuggacaccaaaagcagaagaaccaauacacgcgacaauggacccccaaagacuaggaguauuaauaacaccaguccccgaugcccaagcagcuacaagaagacaagcuguaggccuucuagcuuuucuaggauuauuauuuuguuuggguguugcaauguuuacauaucaauccuuacaaggaugcccacgaaaaauggcaggagaaauggcagaaggacuaagauauauaccccgaucaugcggaucaaauucauacguacuuguaccaguauaa

SEQ ID NO: 5129 - protein, 98 aa, Artificial Sequence
  CXCL10__Homo_sapiens__A0A024RDA4
MNQTAILICCLIFLTLSGIQGVPLSRTVRCTCISISNQPVNPRSLEKLEIIPASQFCPRVEIIATMKKKGEKRCLNPESKAIKNLLKAVSKERSKRSP

SEQ ID NO: 5130 - RNA, 297 nt, Artificial Sequence
  CXCL10__Homo_sapiens__EAX05772
augaaucaaacugccauucugauuugcugccuuaucuuucugacucuaaguggcauucaaggaguaccucucucuagaacuguacgcuguaccugcaucagcauuaguaaucaaccuguuaauccaaggucuuuagaaaaacuugaaauuauuccugcaagccaauuuuguccacguguugagaucauugcuacaaugaaaaagaagggugagaagagaugucugaauccagaaucgaaggccaucaagaauuuacugaaagcaguuagcaaggaaaggucuaaaagaucuccuuaa

SEQ ID NO: 5131 - RNA, 297 nt, Artificial Sequence
  derived and/or modified sequence opt1 from CXCL10__Homo_sapiens__EAX05772
augaaccagaccgccauccugaucugcugccucaucuuccugacccugagcggcauccagggggugccccucucccgcaccguccggugcacgugcaucagcaucuccaaccagccggugaacccccgcagccuggagaagcuggagaucauccccgccucccaguucugcccccggguggagaucaucgcgaccaugaagaagaagggcgagaagcgcugccucaacccggagagcaaggccaucaagaaccugcugaaggccgucuccaaggagcggagcaagcgcucccccuga

SEQ ID NO: 5132 - RNA, 297 nt, Artificial Sequence
  derived and/or modified sequence opt2 from CXCL10__Homo_sapiens__EAX05772
augaaccagaccgccauccucaucugcugccucaucuuccucacccucuccggcauccagggcgucccccucucccgcaccguccgcugcaccugcaucuccaucuccaaccagcccgucaacccccgcucccucgagaagcucgagaucauccccgccucccaguucugcccccgcgucgagaucaucgccaccaugaagaagaagggcgagaagcgcugccucaaccccgaguccaaggccaucaagaaccuccucaaggccgucuccaaggagcgcuccaagcgcucccccuga

SEQ ID NO: 5133 - RNA, 297 nt, Artificial Sequence
  derived and/or modified sequence opt3 from CXCL10__Homo_sapiens__EAX05772
augaaccagaccgccauccugauuugcugucucauauuccuuacacugagcggcauccaaggggugcccuuguccagaacugucaggugcacguguauuucuaucucaaaucagccuguuaacccacggaguuuagagaagcuggaaauuaucccggcuagccaguuuugcccccgcguggagauaaucgcaaccaugaaaaagaaaggagaaaagcgaugucuaaauccugaguccaaagccauuaagaaccuccugaaggcgguaucuaaagaacguucgaagagaucaccauga

SEQ ID NO: 5134 - RNA, 297 nt, Artificial Sequence
  derived and/or modified sequence opt4 from CXCL10__Homo_sapiens__EAX05772
augaaccagaccgccauccugaucugcugccugaucuuccugacccugagcggcauccagggcgugccccugagcagaaccgugagaugcaccugcaucagcaucagcaaccagcccgugaaccccagaagccuggagaagcuggagaucauccccgccagccaguucugccccagaguggagaucaucgccaccaugaagaagaagggcgagaagagaugccugaaccccgagagcaaggccaucaagaaccugcugaaggccgugagcaaggagagaagcaagagaagccccuga

SEQ ID NO: 5135 - RNA, 297 nt, Artificial Sequence
  derived and/or modified sequence opt5 from CXCL10__Homo_sapiens__EAX05772
augaaccagaccgccauccugauuugcugucucaucuuccugacacuuagcggcauucaaggggugccccuguccagaacgguccggugcaccuguaucucuauuagcaaucagccuguuaacccgcgcucccucgagaagcuggaaaucauccccgcuucucaguuuugcccuagaguggagauuaucgccacaaugaaaaagaaaggagaaaagcggugucuuaaucccgagagcaaagcgauuaagaaccugcucaaggcuguguccaaagaacgcucuaagagaagcccuuga

SEQ ID NO: 5136 - RNA, 297 nt, Artificial Sequence
  derived and/or modified sequence opt6 from CXCL10__Homo_sapiens__EAX05772
augaaccaaacagcaauacuaauaugcugccuaauauuccuaacacuaucaggaauacaaggaguaccacuaucaagaacaguaagaugcacaugcauaucaauaucaaaccaaccaguaaacccaagaucacuagaaaaacuagaaauaauaccagcaucacaauucugcccaagaguagaaauaauagcaacaaugaaaaaaaaaggagaaaaaagaugccuaaacccagaaucaaaagcaauaaaaaaccuacuaaaagcaguaucaaaagaaagaucaaaaagaucaccauaa

SEQ ID NO: 5137 - protein, 98 aa, Artificial Sequence; identical to SEQ ID NO: 5129
  CXCL10__Homo_sapiens__P02778

SEQ ID NO: 5138 - RNA, 297 nt, Artificial Sequence; identical to SEQ ID NO: 5130
  CXCL10__Homo_sapiens__AAH10954

SEQ ID NO: 5139 - RNA, 297 nt, Artificial Sequence; identical to SEQ ID NO: 5131
  derived and/or modified sequence opt1 from CXCL10__Homo_sapiens__AAH10954

SEQ ID NO: 5140 - RNA, 297 nt, Artificial Sequence; identical to SEQ ID NO: 5132
  derived and/or modified sequence opt2 from CXCL10__Homo_sapiens__AAH10954

SEQ ID NO: 5141 - RNA, 297 nt, Artificial Sequence; identical to SEQ ID NO: 5133
  derived and/or modified sequence opt3 from CXCL10__Homo_sapiens__AAH10954

SEQ ID NO: 5142 - RNA, 297 nt, Artificial Sequence; identical to SEQ ID NO: 5134
  derived and/or modified sequence opt4 from CXCL10__Homo_sapiens__AAH10954

SEQ ID NO: 5143 - RNA, 297 nt, Artificial Sequence; identical to SEQ ID NO: 5135
  derived and/or modified sequence opt5 from CXCL10__Homo_sapiens__AAH10954

SEQ ID NO: 5144 - RNA, 297 nt, Artificial Sequence
  derived and/or modified sequence opt6 from CXCL10__Homo_sapiens__AAH10954
augaaccaaacagcaauacucauaugcugccuaauauuccuaacacuaucaggaauacaaggaguaccacuaucaagaacaguaagaugcacaugcauaucaauaucaaaccaaccaguaaacccaagaucacuagaaaaacuagaaauaauaccagcaucacaauucugcccacgaguagaaauaauagcaacaaugaaaaaaaaaggagaaaaaagaugccuaaacccagaaucaaaagcaauaaaaaaccuacuaaaagcaguaucaaaagaaagaucaaaacgaucaccauaa

SEQ ID NO: 5145 - protein, 94 aa, Artificial Sequence
  CXCL11__Homo_sapiens__O14625
MSVKGMAIALAVILCATVVQGFPMFKRGRCLCIGPGVKAVKVADIEKASIMYPSNNCDKIEVIITLKENKGQRCLNPKSKQARLIIKKVERKNF

SEQ ID NO: 5146 - RNA, 285 nt, Artificial Sequence
  CXCL11__Homo_sapiens__AAC39775
augagugugaagggcauggcuauagccuuggcugugauauugugugcuacaguuguucaaggcuuccccauguucaaaagaggacgcugucuuugcauaggcccugggguaaaagcagugaaaguggcagauauugagaaagccuccauaauguacccaaguaacaacugugacaaaauagaagugauuauuacccugaaagaaaauaaaggacaacgaugccuaaaucccaaaucgaagcaagcaaggcuuauaaucaaaaaaguugaaagaaagaauuuuuaa

SEQ ID NO: 5147 - RNA, 285 nt, Artificial Sequence
  derived and/or modified sequence opt1 from CXCL11__Homo_sapiens__AAC39775
augagcgugaagggcauggccaucgcccuggcggucauccucugcgccaccguggugcagggguuccccauguucaagcgcggccggugccugugcaucgggccgggcgucaaggccgugaagguggccgacaucgagaaggccuccaucauguaccccagcaacaacugcgacaagaucgaggucaucaucacccugaaggagaacaaggggcagcgcugccucaaccccaaguccaagcaggcgcggcugaucaucaagaagguggagcgcaagaacuucuga

SEQ ID NO: 5148 - RNA, 285 nt, Artificial Sequence
  derived and/or modified sequence opt2 from CXCL11__Homo_sapiens__AAC39775
auguccgucaagggcauggccaucgcccucgccgucauccucugcgccaccgucguccagggcuuccccauguucaagcgcggccgcugccucugcaucggccccggcgucaaggccgucaaggucgccgacaucgagaaggccuccaucauguaccccuccaacaacugcgacaagaucgaggucaucaucacccucaaggagaacaagggccagcgcugccucaaccccaaguccaagcaggcccgccucaucaucaagaaggucgagcgcaagaacuucuga

SEQ ID NO: 5149 - RNA, 285 nt, Artificial Sequence
  derived and/or modified sequence opt3 from CXCL11__Homo_sapiens__AAC39775
augagcgugaaaggcauggccaucgcucuggcagucauucucugcgccaccguugugcagggguuccccauguuuaaaagaggaaggugucuuugcauagguccuggcguaaaggcggugaaagucgcugacaucgagaaggccuccauuauguacccaucuaacaauugugauaaaaucgaagugauuaucacacugaaggagaacaaggggcaacggugcuugaauccgaaaucaaagcaggcacgcuuaauaaucaaaaagguugaacgaaagaacuucuga

SEQ ID NO: 5150 - RNA, 285 nt, Artificial Sequence
  derived and/or modified sequence opt4 from CXCL11__Homo_sapiens__AAC39775
augagcgugaagggcauggccaucgcccuggccgugauccugugcgccaccguggugcagggcuuccccauguucaagagaggcagaugccugugcaucggccccggcgugaaggccgugaagguggccgacaucgagaaggccagcaucauguaccccagcaacaacugcgacaagaucgaggugaucaucacccugaaggagaacaagggccagagaugccugaaccccaagagcaagcaggccagacugaucaucaagaagguggagagaaagaacuucuga

SEQ ID NO: 5151 - RNA, 285 nt, Artificial Sequence
  derived and/or modified sequence opt5 from CXCL11__Homo_sapiens__AAC39775
augagcgugaagggcauggccaucgcucuggccgucauucucugcgcgaccguugugcagggguuccccauguuuaaaagaggacggugucugugcaucggcccuggggugaaggcugucaaaguggccgacauugagaaggccuccaucauguacccgucuaacaauugugauaaaauugaaguuaucaucacacuuaaggagaacaagggacaacgcugccugaaucccaaaagcaagcaggcuagacucauuaucaaaaagguggaacggaaaaacuucuga

SEQ ID NO: 5152 - RNA, 285 nt, Artificial Sequence
  derived and/or modified sequence opt6 from CXCL11__Homo_sapiens__AAC39775
augucaguaaaaggaauggcaauagcacuagcaguaauacuaugcgcaacaguaguacaaggauucccaauguucaaaagaggaagaugccuaugcauaggaccaggaguaaaagcaguaaaaguagcagacauagaaaaagcaagcauaauguauccaucaaacaauugcgacaaaauagaaguaauaauaacauuaaaagaaaacaaaggacaaagaugccuaaauccaaaaagcaaacaagcaagacuaauaauaaaaaaaguagaaagaaaaaacuuuuaa

SEQ ID NO: 5153 - protein, 93 aa, Artificial Sequence
  CXCL12__Homo_sapiens__P48061
MNAKVVVVLVLVLTALCLSDGKPVSLSYRCPCRFFESHVARANVKHLKILNTPNCALQIVARLKNNNRQVCIDPKLKWIQEYLEKALNKRFKM

SEQ ID NO: 5154 - RNA, 282 nt, Artificial Sequence
  CXCL12__Homo_sapiens__AAA97434
augaacgccaaggucguggucgugcugguccucgugcugaccgcgcucugccucagcgacgggaagcccgucagccugagcuacagaugcccaugccgauucuucgaaagccauguugccagagccaacgucaagcaucucaaaauucucaacacuccaaacugugcccuucagauuguagcccggcugaagaacaacaacagacaagugugcauugacccgaagcuaaaguggauucaggaguaccuggagaaagcuuuaaacaagagguucaagauguga

SEQ ID NO: 5155 - RNA, 282 nt, Artificial Sequence
  derived and/or modified sequence opt1 from CXCL12__Homo_sapiens__AAA97434
augaacgccaagguggucguggugcugguccucgugcugaccgcccugugccucagcgacggcaagcccgugucccugagcuaccgcugcccgugccgguucuucgagucccacgucgcgcgcgccaacgugaagcaccugaagauccucaacacccccaacugcgcccugcagaucguggcccggcugaagaacaacaaccgccaggucugcaucgaccccaagcucaaguggauccaggaguaccuggagaaggcccugaacaagcgguucaagauguga

SEQ ID NO: 5156 - RNA, 282 nt, Artificial Sequence
  derived and/or modified sequence opt2 from CXCL12__Homo_sapiens__AAA97434
augaacgccaaggucgucgucguccucguccucguccucaccgcccucugccucuccgacggcaagcccgucucccucuccuaccgcugccccugccgcuucuucgagucccacgucgcccgcgccaacgucaagcaccucaagauccucaacacccccaacugcgcccuccagaucgucgcccgccucaagaacaacaaccgccaggucugcaucgaccccaagcucaaguggauccaggaguaccucgagaaggcccucaacaagcgcuucaagauguga

SEQ ID NO: 5157 - RNA, 282 nt, Artificial Sequence
  derived and/or modified sequence opt3 from CXCL12__Homo_sapiens__AAA97434
augaacgccaagguggucguugugcugguacucgugcuuaccgcucugugcuugagcgacggcaaacccgucuccuuaucuuacagauguccuugcagguucuuugagucacacguggcacgggccaauguuaagcaucugaaaauccuaaacacaccaaauugugcgcuccagauuguggcucgccugaagaacaauaaccgacaagucugcauagauccgaaacuuaaguggauccaggaauaucuggagaaggccuugaauaaacguuucaagauguga

SEQ ID NO: 5158 - RNA, 282 nt, Artificial Sequence
  derived and/or modified sequence opt4 from CXCL12__Homo_sapiens__AAA97434
augaacgccaagguggugguggugcuggugcuggugcugaccgcccugugccugagcgacggcaagcccgugagccugagcuacagaugccccugcagauucuucgagagccacguggccagagccaacgugaagcaccugaagauccugaacacccccaacugcgcccugcagaucguggccagacugaagaacaacaacagacaggugugcaucgaccccaagcugaaguggauccaggaguaccuggagaaggcccugaacaagagauucaagauguga

SEQ ID NO: 5159 - RNA, 282 nt, Artificial Sequence
  derived and/or modified sequence opt5 from CXCL12__Homo_sapiens__AAA97434
augaacgccaagguggucguugugcuggugcucguccugaccgcucuuugccugagcgacggcaaacccgugucccucucuuacagauguccuugccgguucuuugagagccacguugcccgcgcgaaugugaagcaucugaaaauccuuaacacaccgaauugugcucugcagauugucgccagacucaagaacaauaaccggcaagugugcaucgaucccaaacugaaguggauucaggaauaucuggagaaggcccucaauaaacgcuucaagauguga

SEQ ID NO: 5160 - RNA, 282 nt, Artificial Sequence
  derived and/or modified sequence opt6 from CXCL12__Homo_sapiens__AAA97434
augaacgcaaaaguaguaguaguacuaguacuaguacuaacagcacuaugcuuaagcgacggaaaaccaguaagccuaagcuacagaugcccaugcagauucuucgaaagccacguagcaagagcaaacguaaaacaccuaaaaauacuaaacacaccaaacugcgcacuacaaauaguagcaagacuaaaaaacaacaacagacaaguaugcauagacccaaaacuaaaauggauacaagaauaccuagaaaaagcacuaaacaaaagauucaaaauguaa

SEQ ID NO: 5161 - protein, 62 aa, Artificial Sequence [sequence omitted]

SEQ ID NO: 5162 - RNA, 189 nt, Artificial Sequence
  CXCL13__Homo_sapiens__CCQ42936
auguacacauguauccuuucacacauuugccuugacaaacuucuuucacucacaucuuuuucacugacuuuuuuuguggggggcggggccggggggacucugguaucuaauucuuuaaugauuccuauaaaucuaaugacauucaauaaaguugagcaaacauuuuacuuaaaaaaaaaaaaaaaauaa

SEQ ID NO: 5163 - RNA, 189 nt, Artificial Sequence
  derived and/or modified sequence opt1 from CXCL13__Homo_sapiens__CCQ42936
auguacacgugcauccugagccacaucugccucgacaagcugcugucccucaccagcuucucccugaccuucuucgugggcgggggcgccgggggcacccuggucagcaacucccucaugauccccaucaaccugaugaccuucaacaagguggagcagaccuucuaccugaagaagaagaagaaguga

SEQ ID NO: 5164 - RNA, 189 nt, Artificial Sequence
  derived and/or modified sequence opt2 from CXCL13__Homo_sapiens__CCQ42936
auguacaccugcauccucucccacaucugccucgacaagcuccucucccucaccuccuucucccucaccuucuucgucggcggcggcgccggcggcacccucgucuccaacucccucaugauccccaucaaccucaugaccuucaacaaggucgagcagaccuucuaccucaagaagaagaagaaguga

SEQ ID NO: 5165 - RNA, 189 nt, Artificial Sequence
  derived and/or modified sequence opt3 from CXCL13__Homo_sapiens__CCQ42936
auguacacuugcauccugagccacauuugucucgacaaacuucuguccuugacaucuuucucauuaaccuuuuucgugggcgggggagccgguggcacgcuggucaguaacagccuaaugauacccaucaaucucaugaccuuuaacaagguugagcagacauucuaucugaagaaaaagaaaaaguga

SEQ ID NO: 5166 - RNA, 189 nt, Artificial Sequence
  derived and/or modified sequence opt4 from CXCL13__Homo_sapiens__CCQ42936
auguacaccugcauccugagccacaucugccuggacaagcugcugagccugaccagcuucagccugaccuucuucgugggcggcggcgccggcggcacccuggugagcaacagccugaugauccccaucaaccugaugaccuucaacaagguggagcagaccuucuaccugaagaagaagaagaaguga

SEQ ID NO: 5167 - RNA, 189 nt, Artificial Sequence
  derived and/or modified sequence opt5 from CXCL13__Homo_sapiens__CCQ42936
auguauaccugcauccugagccacauuugucucgacaagcugcuuucccugacaucuuucagccucacguuuuucgugggcgggggagccggcgggacccuggucuccaacucucuuaugauccccauuaaucugaugacauuuaacaaaguugagcagaccuucuaccucaagaaaaagaaaaaguga

SEQ ID NO: 5168 - RNA, 189 nt, Artificial Sequence
  derived and/or modified sequence opt6 from CXCL13__Homo_sapiens__CCQ42936
auguacacaugcauacuaucacacauaugccuagacaaacuacuaucacuaacaucauucucacuaacauucuucguaggaggaggagcaggaggaacacuaguaucaaacucacuaaugauaccaauaaaccuaaugacauucaacaaaguagaacaaacauucuaccuaaaaaaaaaaaaaaaauaa

SEQ ID NO: 5169 - protein, 109 aa, Artificial Sequence
  CXCL13__Homo_sapiens__O43927
MKFISTSLLLMLLVSSLSPVQGVLEVYYTSLRCRCVQESSVFIPRRFIDRIQILPRGNGCPRKEIIVWKKNKSIVCVDPQAEWIQRMMEVLRKRSSSTLPVPVFKRKIP

SEQ ID NO: 5170 - RNA, 330 nt, Artificial Sequence
  CXCL13__Homo_sapiens__AAC14402
augaaguucaucucgacaucucugcuucucaugcugcuggucagcagccucucuccaguccaagguguucuggaggucuauuacacaagcuugagguguagauguguccaagagagcucagucuuuaucccuagacgcuucauugaucgaauucaaaucuugccccgugggaaugguuguccaagaaaagaaaucauagucuggaagaagaacaagucaauuguguguguggacccucaagcugaauggauacaaagaaugauggaaguauugagaaaaagaaguucuucaacucuaccaguuccaguguuuaagagaaagauucccuga

SEQ ID NO: 5171 - RNA, 330 nt, Artificial Sequence
  derived and/or modified sequence opt1 from CXCL13__Homo_sapiens__AAC14402
augaaguucaucagcaccucccugcuccugaugcugcucgugagcucccugagccccguccagggcgugcuggagguguacuacaccucccuccgcugccggugcguccaggagagcuccguguucaucccgcgccgguucaucgaccgcauccagauccugccccgggggaacggcugcccccgcaaggagaucaucguguggaagaagaacaagagcaucgucugcguggacccccaggccgaguggauccagcggaugauggaggugcugcgcaagcgguccagcuccacgcucccgguccccguguucaagcgcaagauccccuga

SEQ ID NO: 5172 - RNA, 330 nt, Artificial Sequence
  derived and/or modified sequence opt2 from CXCL13__Homo_sapiens__AAC14402
augaaguucaucuccaccucccuccuccucaugcuccucgucuccucccucucccccguccagggcguccucgaggucuacuacaccucccuccgcugccgcugcguccaggaguccuccgucuucaucccccgccgcuucaucgaccgcauccagauccucccccgcggcaacggcugcccccgcaaggagaucaucgucuggaagaagaacaaguccaucgucugcgucgacccccaggccgaguggauccagcgcaugauggagguccuccgcaagcgcuccuccuccacccuccccguccccgucuucaagcgcaagauccccuga

SEQ ID NO: 5173 - RNA, 330 nt, Artificial Sequence
  derived and/or modified sequence opt3 from CXCL13__Homo_sapiens__AAC14402
augaaguucaucagcaccucccugcuccuuaugcuguuggugucuucauuaagucccguccagggcguucuggagguguacuauacaagccuaagauguaggugcguacaagaauccucuguguuuauuccucggcgcuucauagaccgaauccagauucucccacgugggaacggaugcccgagaaaagagaucauugucuggaagaaaaauaagucgaucguguguguugauccccaggccgaauggauacagaggaugauggaggugcugcggaaacgcucaagcaguacucuuccugucccaguguuuaagagaaagauccccuga

SEQ ID NO: 5174 - RNA, 330 nt, Artificial Sequence
  derived and/or modified sequence opt4 from CXCL13__Homo_sapiens__AAC14402
augaaguucaucagcaccagccugcugcugaugcugcuggugagcagccugagccccgugcagggcgugcuggagguguacuacaccagccugagaugcagaugcgugcaggagagcagcguguucauccccagaagauucaucgacagaauccagauccugcccagaggcaacggcugccccagaaaggagaucaucguguggaagaagaacaagagcaucgugugcguggacccccaggccgaguggauccagagaaugauggaggugcugagaaagagaagcagcagcacccugcccgugcccguguucaagagaaagauccccuga

SEQ ID NO: 5175 - RNA, 330 nt, Artificial Sequence
  derived and/or modified sequence opt5 from CXCL13__Homo_sapiens__AAC14402
augaaguucaucagcaccucccugcuccugaugcuucuggugucuagccucucccccguccagggcguucuggagguguacuauacaucucuuagaugccggugugugcaagaaagcuccgucuuuauuccucgcagauucaucgaccggauucagauccugccgcgcgggaacggaugccccagaaaagagauuaucguguggaagaaaaauaagucuaucguuuguguggauccucaggccgaauggauucagcggaugauggagguccuccgcaaaagaagcuccagcacgcugcccgugccuguuuuuaagcggaagauccccuga

SEQ ID NO: 5176 - RNA, 330 nt, Artificial Sequence
  derived and/or modified sequence opt6 from CXCL13__Homo_sapiens__AAC14402
augaaauuuauaucaacaucacuacuacuaaugcuauuaguaucaagccuaagcccaguacaaggaguacucgaaguauauuacacaagcuuaagauguagauguguacaagaaucaagcguauucauaccaagaagauuuauagacagaauacaaauacuaccaagaggaaacggaugcccaagaaaagaaauaauaguauggaaaaaaaauaaaucaauaguaugcguagacccacaagcagaauggauacaaagaaugauggaaguauuaagaaaaagaucaagcucaacauuaccaguaccaguauucaaaagaaaaauaccauaa

SEQ ID NO: 5177 - protein, 111 aa, Artificial Sequence
  CXCL14__Homo_sapiens__O95715
MSLLPRRAPPVSMRLLAAALLLLLLALYTARVDGSKCKCSRKGPKIRYSDVKKLEMKPKYPHCEEKMVIITTKSVSRYRGQEHCLHPKLQSTKRFIKWYNAWNEKRRVYEE

SEQ ID NO: 5178 - RNA, 336 nt, Artificial Sequence
  CXCL14__Homo_sapiens__AAP35743
augucccugcucccacgccgcgccccuccggucagcaugaggcuccuggcggccgcgcugcuccugcugcugcuggcgcuguacaccgcgcguguggacggguccaaaugcaagugcucccggaagggacccaagauccgcuacagcgacgugaagaagcuggaaaugaagccaaaguacccgcacugcgaggagaagaugguuaucaucaccaccaagagcguguccagguaccgaggucaggagcacugccugcaccccaagcugcagagcaccaagcgcuucaucaagugguacaacgccuggaacgagaagcgcagggucuacgaagaauag

SEQ ID NO: 5179 - RNA, 336 nt, Artificial Sequence
  derived and/or modified sequence opt1 from CXCL14__Homo_sapiens__AAP35743
augagccugcucccccgccgggccccgcccguguccaugcgccugcuggccgcggcccuccugcugcuccugcuggcccucuacaccgcccgggucgacggcagcaagugcaagugcucccgcaaggggcccaagauccgguacagcgacgugaagaagcuggagaugaagcccaaguacccgcacugcgaggagaagauggugaucaucaccacgaaguccgucagccgcuaccggggccaggagcacugccugcaccccaagcuccaguccaccaagcgcuucaucaagugguacaacgccuggaacgagaagcggcgcguguacgaggaguga

SEQ ID NO: 5180 - RNA, 336 nt, Artificial Sequence
  derived and/or modified sequence opt2 from CXCL14__Homo_sapiens__AAP35743
augucccuccucccccgccgcgccccccccgucuccaugcgccuccucgccgccgcccuccuccuccuccuccucgcccucuacaccgcccgcgucgacggcuccaagugcaagugcucccgcaagggccccaagauccgcuacuccgacgucaagaagcucgagaugaagcccaaguacccccacugcgaggagaagauggucaucaucaccaccaaguccgucucccgcuaccgcggccaggagcacugccuccaccccaagcuccaguccaccaagcgcuucaucaagugguacaacgccuggaacgagaagcgccgcgucuacgaggaguga

SEQ ID NO: 5181 - RNA, 336 nt, Artificial Sequence
  derived and/or modified sequence opt3 from CXCL14__Homo_sapiens__AAP35743
augagccugcuccccagaagggccccuccaguguccaugcggcuucuggcugcagccuuguuacugcuacuccuggcgcuuuacaccgcucgcgucgacggcucuaagugcaaauguucacgaaaggggccgaaaauccguuauagugauguuaagaaacuggagaugaagcccaaguacccucacugcgaagagaaaauggugauuauaacaacuaagagcguauccagauauaggggacaggaacauuguuugcacccaaaacuccaaucuacgaagcgguucaucaaaugguacaacgccuggaaugagaagcgcagaguguaugaagaguga

SEQ ID NO: 5182 - RNA, 336 nt, Artificial Sequence
  derived and/or modified sequence opt4 from CXCL14__Homo_sapiens__AAP35743
augagccugcugcccagaagagccccccccgugagcaugagacugcuggccgccgcccugcugcugcugcugcuggcccuguacaccgccagaguggacggcagcaagugcaagugcagcagaaagggccccaagaucagauacagcgacgugaagaagcuggagaugaagcccaaguacccccacugcgaggagaagauggugaucaucaccaccaagagcgugagcagauacagaggccaggagcacugccugcaccccaagcugcagagcaccaagagauucaucaagugguacaacgccuggaacgagaagagaagaguguacgaggaguga

SEQ ID NO: 5183 - RNA, 336 nt, Artificial Sequence
  derived and/or modified sequence opt5 from CXCL14__Homo_sapiens__AAP35743
augagccugcuccccagacgggccccuccgguguccaugcgccugcuugcugccgcgcugcuccugcuucugcucgcucuguacaccgccagagucgacggcucuaagugcaaauguagccggaaggggcccaaaauccgcuauuccgauguuaagaaacuggagaugaagccuaaguacccccacugcgaagagaaaauggugauuaucacaacgaagucugugagcagauaucggggacaggaacauugucuccacccuaaacugcaauccaccaagcgcuucauuaaaugguacaacgccuggaaugagaagagacgggucuaugaagaguga

SEQ ID NO: 5184 - RNA, 336 nt, Artificial Sequence
  derived and/or modified sequence opt6 from CXCL14__Homo_sapiens__AAP35743
augucacuacuaccaagaagagcaccaccaguaucaaugagacuacuagcagcagcacuacuacuacuauuacuagcacuauacacagcaagaguagacggaagcaaaugcaaaugcucaagaaaaggaccaaaaauaagauacucagacguaaaaaaauuagaaaugaaaccaaaauacccacacugcgaagaaaaaaugguaauaauaacaacaaaaucaguaucaagauacagaggacaagaacacugccuacacccaaaacuacaaagcacaaaaagauucauaaaaugguacaacgcauggaacgaaaaaagaagaguauacgaagaauaa

SEQ ID NO: 5185 - protein, 167 aa, Artificial Sequence
  CXCL15__Mus_musculus__Q9WVL7
MAAQGWSMLLLAVLNLGIFVRPCDTQELRCLCIQEHSEFIPLKLIKNIMVIFETIYCNRKEVIAVPKNGSMICLDPDAPWVKATVGPITNRFLPEDLKQKEFPPAMKLLYSVEHEKPLYLSFGRPENKRIFPFPIRETSRHFADLAHNSDRNFLRDSSEVSLTGSDA

SEQ ID NO: 5186 - RNA, 504 nt, Artificial Sequence
  CXCL15__Mus_musculus__AAD38079
auggcugcucaaggcugguccaugcuccugcuggcuguccuuaaccuaggcaucuucguccgucccugugacacucaagagcuacgaugucuguguauucaggaacacucugaauucauuccucucaaacucauuaaaaauauaauggugauauucgagaccauuuacugcaacagaaaggaagugauagcagucccaaaaaaugggaguaugauuuguuuggauccugaugcuccaugggugaaggcuacuguuggcccaauuacuaacagguuccuaccugaggaccucaaacaaaaggaauuuccaccggcaaugaagcuucuguauaguguugagcaugaaaagccucuauaucuuucauuugggagaccugagaacaagagaauauuucccuuuccaauucgggagaccucuagacacuuugcugauuuagcucacaacagugauaggaauuuucuacgggacuccagugaagucagcuugacaggcagugaugccuaa

SEQ ID NO: 5187 - RNA, 504 nt, Artificial Sequence
  derived and/or modified sequence opt1 from CXCL15__Mus_musculus__AAD38079
auggccgcccagggcuggagcaugcugcuccuggcggugcugaaccucgggaucuucguccgccccugcgacacccaggagcugcggugccugugcauccaggagcacuccgaguucaucccgcucaagcugaucaagaacaucauggugaucuucgagaccaucuacugcaaccgcaaggaggugaucgccguccccaagaacggcagcaugaucugccuggaccccgacgcccccugggugaaggccacgguggggccgaucaccaaccgguuccuccccgaggaccugaagcagaaggaguucccgcccgccaugaagcugcucuacuccgucgagcacgagaagccccuguaccugagcuucggccgccccgagaacaagcggaucuuccccuuccccauccgcgagaccucccggcacuucgcggaccucgcccacaacagcgaccgcaacuuccugcgggacuccagcgaggugucccugaccgggagcgacgccuga

SEQ ID NO: 5188 - RNA, 504 nt, Artificial Sequence
  derived and/or modified sequence opt2 from CXCL15__Mus_musculus__AAD38079
auggccgcccagggcugguccaugcuccuccucgccguccucaaccucggcaucuucguccgccccugcgacacccaggagcuccgcugccucugcauccaggagcacuccgaguucaucccccucaagcucaucaagaacaucauggucaucuucgagaccaucuacugcaaccgcaaggaggucaucgccguccccaagaacggcuccaugaucugccucgaccccgacgcccccugggucaaggccaccgucggccccaucaccaaccgcuuccuccccgaggaccucaagcagaaggaguucccccccgccaugaagcuccucuacuccgucgagcacgagaagccccucuaccucuccuucggccgccccgagaacaagcgcaucuuccccuuccccauccgcgagaccucccgccacuucgccgaccucgcccacaacuccgaccgcaacuuccuccgcgacuccuccgaggucucccucaccggcuccgacgccuga

SEQ ID NO: 5189 - RNA, 504 nt, Artificial Sequence
  derived and/or modified sequence opt3 from CXCL15__Mus_musculus__AAD38079
auggccgcucagggcuggagcaugcugcuccuugcagugcugaacuuggggaucuucgucagacccugcgacacccaagaguuaaggugucugugcauucaggaacacuccgaguuuauaccucuaaagcucaucaaaaauauuaugguuaucuucgaaacaauuuacuguaaccggaaggaggugaucgccguaccgaaaaauggaucuaugauaugccuggauccagacgcgcccugggugaaggcuacugucgguccuaucacgaaccgcuuucuuccagaagaucugaaacagaaggaguuucccccugccaugaaguugcucuauucaguggagcaugaaaaaccacuguaccugaguuuuggccgacccgagaauaagcguauuuucccuuuuccaaucagagaaaccagcaggcacuucgcagaccucgcccauaacuccgaucggaauuucuuacgcgacucuucggagguuucacugacagggagcgaugcuuga

SEQ ID NO: 5190 - RNA, 504 nt, Artificial Sequence
  derived and/or modified sequence opt4 from CXCL15__Mus_musculus__AAD38079
auggccgcccagggcuggagcaugcugcugcuggccgugcugaaccugggcaucuucgugagacccugcgacacccaggagcugagaugccugugcauccaggagcacagcgaguucaucccccugaagcugaucaagaacaucauggugaucuucgagaccaucuacugcaacagaaaggaggugaucgccgugcccaagaacggcagcaugaucugccuggaccccgacgcccccugggugaaggccaccgugggccccaucaccaacagauuccugcccgaggaccugaagcagaaggaguucccccccgccaugaagcugcuguacagcguggagcacgagaagccccuguaccugagcuucggcagacccgagaacaagagaaucuuccccuuccccaucagagagaccagcagacacuucgccgaccuggcccacaacagcgacagaaacuuccugagagacagcagcgaggugagccugaccggcagcgacgccuga

SEQ ID NO: 5191 - RNA, 504 nt, Artificial Sequence
  derived and/or modified sequence opt5 from CXCL15__Mus_musculus__AAD38079
auggccgcucagggcuggagcaugcugcuccuggccgugcuuaaccuggggaucuucgucagacccugcgacacccaagagcuccggugucugugcauucaggaacacuccgaguuuaucccucuuaagcugauuaaaaauaucaugguuauuuucgaaacaaucuacuguaaccgcaaggaggugaucgcggugccgaaaaauggaucuaugauuugccucgaucccgacgcuccuugggucaaggccacggugggccccaucaccaacagauuucugccugaagaucugaaacagaaggaguuucccccugccaugaagcuccuguauagcguugagcaugaaaaaccgcuuuaccuguccuucgggcggcccgagaauaagcgcauuuucccuuuucccaucagagaaacaucucggcacuucgcugaccucgcccauaacagcgaucgcaauuuucugagagacuccucugaggugagccuuaccggauccgaugcuuga

SEQ ID NO: 5192 - RNA, 504 nt, Artificial Sequence
  derived and/or modified sequence opt6 from CXCL15__Mus_musculus__AAD38079
auggcagcacaaggauggucaaugcuacuacuagcaguacuaaaccuaggaauauucguaagacccugcgacacacaagaacuaagaugccuaugcauacaagaacacucagaauucauaccacuaaaacuaauaaaaaacaucaugguaauauucgaaacaauauacugcaacagaaaagaaguaauagcaguaccaaaaaacggcucaaugauaugccuagaccccgacgcaccauggguaaaagcaacagucggaccaauaacaaacagauuccuaccagaagaccuaaaacaaaaagaauucccaccagcaaugaaacuacuauacucaguagaacacgaaaaaccauuauaucuaucauucggaagaccagaaaacaaaagaauauucccauucccaauaagagaaacauccagacacuucgcagaccuagcacacaacucagauagaaacuuccuaagagacucaucagaaguaucacuaacaggaucagacgcauaa

SEQ ID NO: 5193 - protein, 107 aa, Artificial Sequence
  CXCL1__Homo_sapiens__P09341
MARAALSAAPSNPRLLRVALLLLLLVAAGRRAAGASVATELRCQCLQTLQGIHPKNIQSVNVKSPGPHCAQTEVIATLKNGRKACLNPASPIVKKIIEKMLNSDKSN

SEQ ID NO: 5194 - RNA, 324 nt, Artificial Sequence
  CXCL1__Homo_sapiens__AAA35933
auggcccgcgcugcucucuccgccgcccccagcaauccccggcuccugcgaguggcacugcugcuccugcuccugguagccgcuggccggcgcgcagcaggagcguccguggccacugaacugcgcugccagugcuugcagacccugcagggaauucaccccaagaacauccaaagugugaacgugaagucccccggaccccacugcgcccaaaccgaagucauagccacacucaagaaugggcggaaagcuugccucaauccugcaucccccauaguuaagaaaaucaucgaaaagaugcugaacagugacaaauccaacuga

SEQ ID NO: 5195 - RNA, 324 nt, Artificial Sequence
  derived and/or modified sequence opt1 from CXCL1__Homo_sapiens__AAA35933
auggcccgcgccgcgcugagcgccgcccccuccaacccgcggcuccugcgcguggcccugcuccugcugcuccuggucgccgcgggccggcgcgccgccggggccagcguggcgaccgagcugcggugccagugccuccagacccugcagggcauccaccccaagaacauccaguccgugaacgucaagagccccgggccccacugcgcccagacggaggugaucgccacccugaagaacggccgcaaggccugccucaacccggccucccccaucgugaagaagaucaucgagaagaugcugaacagcgacaaguccaacuga

SEQ ID NO: 5196 - RNA, 324 nt, Artificial Sequence
  derived and/or modified sequence opt2 from CXCL1__Homo_sapiens__AAA35933
auggcccgcgccgcccucuccgccgcccccuccaacccccgccuccuccgcgucgcccuccuccuccuccuccucgucgccgccggccgccgcgccgccggcgccuccgucgccaccgagcuccgcugccagugccuccagacccuccagggcauccaccccaagaacauccaguccgucaacgucaagucccccggcccccacugcgcccagaccgaggucaucgccacccucaagaacggccgcaaggccugccucaaccccgccucccccaucgucaagaagaucaucgagaagaugcucaacuccgacaaguccaacuga

SEQ ID NO: 5197 - RNA, 324 nt, Artificial Sequence
  derived and/or modified sequence opt3 from CXCL1__Homo_sapiens__AAA35933
auggccagagcugcacugagcgccgcgcccuccaacccuaggcugcuucggguggcucuguuguuacugcuacucgucgccgcaggccgccgagccgcuggggcaucuguugccaccgagcugcguugccagugucuucaaacacugcagggaauccacccaaagaauauucagucagugaacguaaaaaguccggguccccauugcgcucagacugaagugauagccacguugaagaauggcagaaaagcgugucucaacccugcaagcccaaucgucaagaaaauuaucgagaagaugcucaauuccgacaagucuaacuga

SEQ ID NO: 5198 - RNA, 324 nt, Artificial Sequence
  derived and/or modified sequence opt4 from CXCL1__Homo_sapiens__AAA35933
auggccagagccgcccugagcgccgcccccagcaaccccagacugcugagaguggcccugcugcugcugcugcugguggccgccggcagaagagccgccggcgccagcguggccaccgagcugagaugccagugccugcagacccugcagggcauccaccccaagaacauccagagcgugaacgugaagagccccggcccccacugcgcccagaccgaggugaucgccacccugaagaacggcagaaaggccugccugaaccccgccagccccaucgugaagaagaucaucgagaagaugcugaacagcgacaagagcaacuga

SEQ ID NO: 5199 - RNA, 324 nt, Artificial Sequence
  derived and/or modified sequence opt5 from CXCL1__Homo_sapiens__AAA35933
auggccagagcugcccugagcgcggcucccuccaacccucggcuccugcgcguggcccuucugcuccugcuucuggucgccgcuggcagacgggccgcuggggccucuguugcgaccgagcuccgcugccagugucugcaaacacugcagggaauccacccgaagaauauucagagcgugaacgugaaaucccccggcccucauugcgcccagacggaagucaucgcuacccucaagaaugggagaaaagccugucugaaccccgcuucuccuauugugaagaaaaucauugagaagaugcuuaauagcgacaaguccaacuga

SEQ ID NO: 5200 - RNA, 324 nt, Artificial Sequence
  derived and/or modified sequence opt6 from CXCL1__Homo_sapiens__AAA35933
auggcaagagcagcacuaagcgcagcaccaagcaacccaagacuacuaagaguagcacuacuauuacuacuacuaguagcagcaggaagaagagcagcaggagcaucaguagcaacagaacuaagaugccaaugccuacaaacacuacaaggaauacacccaaaaaacauacaaagcguaaacguaaaaucaccaggaccacacugcgcacaaacagaaguaauagcaacacuaaaaaacggaagaaaagcaugccuaaacccagcaucaccaauaguaaaaaaaauaauagaaaaaaugcuaaacagcgacaaaucaaacuaa

SEQ ID NO: 5201 - protein, 107 aa, Artificial Sequence
  CXCL2__Homo_sapiens__A0A024RDD9
MARATLSAAPSNPRLLRVALLLLLLVAASRRAAGAPLATELRCQCLQTLQGIHLKNIQSVKVKSPGPHCAQTEVIATLKNGQKACLNPASPMVKKIIEKMLKNGKSN

SEQ ID NO: 5202 - RNA, 324 nt, Artificial Sequence
  CXCL2__Homo_sapiens__EAX05701
auggcccgcgccacgcucuccgccgcccccagcaauccccggcuccugcggguggcgcugcugcuccugcuccugguggccgccagccggcgcgcagcaggagcgccccuggccacugaacugcgcugccagugcuugcagacccugcagggaauucaccucaagaacauccaaagugugaaggugaagucccccggaccccacugcgcccaaaccgaagucauagccacacucaagaaugggcagaaagcuugucucaaccccgcaucgcccaugguuaagaaaaucaucgaaaagaugcugaaaaauggcaaauccaacuga

SEQ ID NO: 5203 - RNA, 324 nt, Artificial Sequence
  derived and/or modified sequence opt1 from CXCL2__Homo_sapiens__EAX05701
auggcccgcgccacccugagcgcggcccccuccaacccgcggcuccugcgcguggcccugcuccugcugcuccuggucgccgccagccggcgcgcggccggcgcgccccuggccaccgagcuccggugccagugccugcagacgcugcaggggauccaccucaagaacauccaguccgugaaggucaagagccccggcccccacugcgcccagaccgaggugaucgccacccugaagaacgggcagaaggccugccugaacccggccucccccauggugaagaagaucaucgagaagaugcucaagaacggcaagagcaacuga

SEQ ID NO: 5204 - RNA, 324 nt, Artificial Sequence
  derived and/or modified sequence opt2 from CXCL2__Homo_sapiens__EAX05701
auggcccgcgccacccucuccgccgcccccuccaacccccgccuccuccgcgucgcccuccuccuccuccuccucgucgccgccucccgccgcgccgccggcgccccccucgccaccgagcuccgcugccagugccuccagacccuccagggcauccaccucaagaacauccaguccgucaaggucaagucccccggcccccacugcgcccagaccgaggucaucgccacccucaagaacggccagaaggccugccucaaccccgccucccccauggucaagaagaucaucgagaagaugcucaagaacggcaaguccaacuga

SEQ ID NO: 5205 - RNA, 324 nt, Artificial Sequence
  derived and/or modified sequence opt3 from CXCL2__Homo_sapiens__EAX05701
auggccagagcuacccugagcgcagcccccuccaacccuaggcuccuucggguggcgcuguuguuacugcuacucgucgcugccucucgccgagcagccggcgcuccacuggcaacagagcuucguugccagugucugcaaacuuugcaggggauccaccucaagaauauucagucaguuaaagugaagaguccgggaccccauugcgcccagacggaaguaauagcuacccugaaaaacggucaaaaggccugucugaauccugcgagcccaauggugaaaaagaucauugagaagaugcucaaaaacggcaaguccaauuga

SEQ ID NO: 5206 - RNA, 324 nt, Artificial Sequence
  derived and/or modified sequence opt4 from CXCL2__Homo_sapiens__EAX05701
auggccagagccacccugagcgccgcccccagcaaccccagacugcugagaguggcccugcugcugcugcugcugguggccgccagcagaagagccgccggcgccccccuggccaccgagcugagaugccagugccugcagacccugcagggcauccaccugaagaacauccagagcgugaaggugaagagccccggcccccacugcgcccagaccgaggugaucgccacccugaagaacggccagaaggccugccugaaccccgccagccccauggugaagaagaucaucgagaagaugcugaagaacggcaagagcaacuga

SEQ ID NO: 5207 - RNA, 324 nt, Artificial Sequence
  derived and/or modified sequence opt5 from CXCL2__Homo_sapiens__EAX05701
auggccagagcuacccugagcgccgcgcccuccaacccucggcuccugcgcguggcccuucugcuccugcuucuggucgcugccucuagacgggcugccggggcuccgcucgccacagagcugcgcugccagugucugcaaacgcuccaggggauccaccugaagaauauucagagcguuaaagugaagucccccggaccucauugcgcgcagaccgaagugaucgccacacuuaaaaacggccaaaaggcuugucugaaucccgccucuccuauggucaaaaagauuaucgagaagaugcucaaaaacggcaagagcaauuga

SEQ ID NO: 5208 - RNA, 324 nt, Artificial Sequence
  derived and/or modified sequence opt6 from CXCL2__Homo_sapiens__EAX05701
auggcaagagcaacacuaagcgcagcaccaagcaacccaagacuacuaagaguagcacuacuacuacuauuacuaguagcagcaagcagaagagcagcaggagcaccacuagcaacagaacucagaugccaaugccuacaaacacuacaaggaauacaccuaaaaaacauacaaagcguaaaaguaaaaucaccaggaccacacugcgcacaaacagaaguaauagcaacacuaaaaaacggacaaaaagcaugccuaaacccagcaucaccaauggucaaaaaaauaauagaaaaaaugcuaaaaaacggaaaaucaaacuaa

SEQ ID NO: 5209 - protein, 107 aa, Artificial Sequence; identical to SEQ ID NO: 5201
  CXCL2__Homo_sapiens__P19875

SEQ ID NO: 5210 - RNA, 324 nt, Artificial Sequence
  CXCL2__Homo_sapiens__AAA63182
auggcccgcgccacgcucuccgccgcccccagcaauccccggcuccugcgaguggcgcugcugcuccugcuccugguggccgccagccggcgcgcagcaggagcgccccuggccacugaacugcgcugccagugcuugcagacccugcagggaauucaccucaagaacauccaaagugugaaggugaagucccccggaccccacugcgcccaaaccgaagucauagccacacucaagaaugggcagaaagcuugucucaaccccgcaucgcccaugguuaagaaaaucaucgaaaagaugcugaaaaauggcaaauccaacuga

SEQ ID NO: 5211 - RNA, 324 nt, Artificial Sequence; identical to SEQ ID NO: 5203
  derived and/or modified sequence opt1 from CXCL2__Homo_sapiens__AAA63182

SEQ ID NO: 5212 - RNA, 324 nt, Artificial Sequence; identical to SEQ ID NO: 5204
  derived and/or modified sequence opt2 from CXCL2__Homo_sapiens__AAA63182

SEQ ID NO: 5213 - RNA, 324 nt, Artificial Sequence; identical to SEQ ID NO: 5205
  derived and/or modified sequence opt3 from CXCL2__Homo_sapiens__AAA63182

SEQ ID NO: 5214 - RNA, 324 nt, Artificial Sequence; identical to SEQ ID NO: 5206
  derived and/or modified sequence opt4 from CXCL2__Homo_sapiens__AAA63182

SEQ ID NO: 5215 - RNA, 324 nt, Artificial Sequence; identical to SEQ ID NO: 5207
  derived and/or modified sequence opt5 from CXCL2__Homo_sapiens__AAA63182

SEQ ID NO: 5216 - RNA, 324 nt, Artificial Sequence
  derived and/or modified sequence opt6 from CXCL2__Homo_sapiens__AAA63182
auggcaagagcaacacuaagcgcagcaccaagcaacccaagacuacuaagaguagcacuacuacuacuacuacuaguagcagcaagcagaagagcagcaggagccccacuagcaacagaacuaagaugccaaugccuacaaacacuacaaggaauacaccuaaaaaacauacaaagcguaaaaguaaaaucaccaggaccacacugcgcacaaacagaaguaauagcaacacuaaaaaacggacaaaaagcaugccuaaacccagcaucaccaaugguaaaaaaaauaauagaaaaaaugcuaaaaaacggaaaaucaaacuaa

SEQ ID NO: 5217 - protein, 107 aa, Artificial Sequence
  CXCL3__Homo_sapiens__P19876
MAHATLSAAPSNPRLLRVALLLLLLVAASRRAAGASVVTELRCQCLQTLQGIHLKNIQSVNVRSPGPHCAQTEVIATLKNGKKACLNPASPMVQKIIEKILNKGSTN

SEQ ID NO: 5218 - RNA, 324 nt, Artificial Sequence
  CXCL3__Homo_sapiens__AAH16308
auggcccacgccacgcucuccgccgcccccagcaauccccggcuccugcggguggcgcugcugcuccugcuccugguggccgccagccggcgcgcagcaggagcguccguggucacugaacugcgcugccagugcuugcagacacugcagggaauucaccucaagaacauccaaagugugaauguaaggucccccggaccccacugcgcccaaaccgaagucauagccacacucaagaaugggaagaaagcuugucucaaccccgcaucccccaugguucagaaaaucaucgaaaagauacugaacaaggggagcaccaacuga

SEQ ID NO: 5219 - RNA, 324 nt, Artificial Sequence
  derived and/or modified sequence opt1 from CXCL3__Homo_sapiens__AAH16308
auggcccacgccacccugagcgcggcccccuccaacccgcgccuccugcggguggcccugcuccugcugcuccuggucgccgccagccgccgggcggccggcgccuccguggugaccgagcugcgcugccagugccuccagacgcugcaggggauccaccugaagaacauccagagcgucaacgugcggucccccggcccccacugcgcccagaccgaggugaucgcgacccucaagaacgggaagaaggccugccugaaccccgccagcccgaugguccagaagaucaucgagaagauccugaacaagggcuccaccaacuga

SEQ ID NO: 5220 - RNA, 324 nt, Artificial Sequence
  derived and/or modified sequence opt2 from CXCL3__Homo_sapiens__AAH16308
auggcccacgccacccucuccgccgcccccuccaacccccgccuccuccgcgucgcccuccuccuccuccuccucgucgccgccucccgccgcgccgccggcgccuccgucgucaccgagcuccgcugccagugccuccagacccuccagggcauccaccucaagaacauccaguccgucaacguccgcucccccggcccccacugcgcccagaccgaggucaucgccacccucaagaacggcaagaaggccugccucaaccccgccucccccaugguccagaagaucaucgagaagauccucaacaagggcuccaccaacuga

SEQ ID NO: 5221 - RNA, 324 nt, Artificial Sequence
  derived and/or modified sequence opt3 from CXCL3__Homo_sapiens__AAH16308
auggcccacgcuacccugagcgcagcccccuccaacccuagacuccuuaggguggcgcuguuguuacugcuacucgucgcugccucucggcgcgcagccggcgcuucaguugugacagagcugcgaugccagugucuucaaacucugcaggggauccauuugaagaauauucagaguguaaacgugcguagcccaggaccgcacugcgcacagacggaagucauagccacccucaaaaaugguaagaaagccugucugaaccccgcuuccccuauggugcaaaagaucauugagaaaauccugaauaagggcucuacaaacuga

SEQ ID NO: 5222 - RNA, 324 nt, Artificial Sequence
  derived and/or modified sequence opt4 from CXCL3__Homo_sapiens__AAH16308
auggcccacgccacccugagcgccgcccccagcaaccccagacugcugagaguggcccugcugcugcugcugcugguggccgccagcagaagagccgccggcgccagcguggugaccgagcugagaugccagugccugcagacccugcagggcauccaccugaagaacauccagagcgugaacgugagaagccccggcccccacugcgcccagaccgaggugaucgccacccugaagaacggcaagaaggccugccugaaccccgccagccccauggugcagaagaucaucgagaagauccugaacaagggcagcaccaacuga

SEQ ID NO: 5223 - RNA, 324 nt, Artificial Sequence
  derived and/or modified sequence opt5 from CXCL3__Homo_sapiens__AAH16308
auggcccacgcuacccugagcgccgcgcccuccaacccuagacuccugcggguggcccuucugcuccugcuucuggucgcugccucucgcagagcugccggcgcuagcguugugacagagcuccggugccagugucugcaaacgcugcaggggauccaucucaagaauauucaguccgugaacguccgcucuccgggaccccacugcgcccagaccgaagugaucgcgacacugaaaaauggcaagaaagccugucuuaacccugcuagccccaugguucaaaagauuaucgagaaaauucugaauaagggguccaccaacuga

SEQ ID NO: 5224 - RNA, 324 nt, Artificial Sequence
  derived and/or modified sequence opt6 from CXCL3__Homo_sapiens__AAH16308
auggcacacgcaacacuaagcgcagcaccaagcaacccaagacuacuaagaguagcacuacuacuacuacuacuaguagcagcaagcagaagagcagcaggagcaucaguaguaacagaacuaagaugccaaugcuuacaaacacuacaaggaauacaccuaaaaaacauacaaagcguaaacguaagaucaccaggaccacacugcgcacaaacagaaguaauagcaacacuaaaaaacggaaaaaaagcaugccuaaacccagcaucaccaaugguacaaaaaauaauagaaaaaauacuaaacaaaggaagcacaaacuaa

SEQ ID NO: 5225 - protein, 101 aa, Artificial Sequence
  CXCL4__Homo_sapiens__P02776
MSSAAGFCASRPGLLFLGLLLLPLVVAFASAEAEEDGDLQCLCVKTTSQVRPRHITSLEVIKAGPHCPTAQLIATLKNGRKICLDLQAPLYKKIIKKLLES

SEQ ID NO: 5226 - RNA, 306 nt, Artificial Sequence
  CXCL4__Homo_sapiens__AAA60066
augagcuccgcagccggguucugcgccucacgccccgggcugcuguuccugggguugcugcuccugccacuuguggucgccuucgccagcgcugaagcugaagaagauggggaccugcagugccugugugugaagaccaccucccagguccgucccaggcacaucaccagccuggaggugaucaaggccggaccccacugccccacugcccaacugauagccacgcugaagaauggaaggaaaauuugcuuggaccugcaagccccgcuguacaagaaaauaauuaagaaacuuuuggagaguuag

SEQ ID NO: 5227 - RNA, 306 nt, Artificial Sequence
  derived and/or modified sequence opt1 from CXCL4__Homo_sapiens__AAA60066
augagcuccgccgccggcuucugcgcgagccgccccgggcuccuguuccugggccugcuccugcugccgcucguggucgccuucgccuccgccgaggccgaggaggacggggaccugcagugccugugcgugaagaccaccagccaggugcggccccgccacaucacgucccucgaggucaucaaggcgggcccccacugccccaccgcccagcugaucgccacccugaagaacgggcggaagaucugccucgaccugcaggccccgcuguacaagaagaucaucaagaagcuccuggagagcuga

SEQ ID NO: 5228 - RNA, 306 nt, Artificial Sequence
  derived and/or modified sequence opt2 from CXCL4__Homo_sapiens__AAA60066
auguccuccgccgccggcuucugcgccucccgccccggccuccucuuccucggccuccuccuccucccccucgucgucgccuucgccuccgccgaggccgaggaggacggcgaccuccagugccucugcgucaagaccaccucccagguccgcccccgccacaucaccucccucgaggucaucaaggccggcccccacugccccaccgcccagcucaucgccacccucaagaacggccgcaagaucugccucgaccuccaggccccccucuacaagaagaucaucaagaagcuccucgaguccuga

SEQ ID NO: 5229 - RNA, 306 nt, Artificial Sequence
  derived and/or modified sequence opt3 from CXCL4__Homo_sapiens__AAA60066
augagcuccgccgcuggcuucugcgcaucuagacccgggcugcucuuucuuggacuguuguuacugccucuaguggucgccuucgcgucagcugaggccgaagaggacggugaucuccagugucugugcguuaagaccacaagucaagugaggccacggcacaucacuagccuugaaguaauuaaagcaggcccgcauugucccacggcccagcugauagcuaccuugaagaacgggcgcaaaaucugccucgaccugcaggcaccucuguacaagaaaauuaucaagaagcucuuagaguccuga

SEQ ID NO: 5230 - RNA, 306 nt, Artificial Sequence
  derived and/or modified sequence opt4 from CXCL4__Homo_sapiens__AAA60066
augagcagcgccgccggcuucugcgccagcagacccggccugcuguuccugggccugcugcugcugccccuggugguggccuucgccagcgccgaggccgaggaggacggcgaccugcagugccugugcgugaagaccaccagccaggugagacccagacacaucaccagccuggaggugaucaaggccggcccccacugccccaccgcccagcugaucgccacccugaagaacggcagaaagaucugccuggaccugcaggccccccuguacaagaagaucaucaagaagcugcuggagagcuga

SEQ ID NO: 5231 - RNA, 306 nt, Artificial Sequence
  derived and/or modified sequence opt5 from CXCL4__Homo_sapiens__AAA60066
augagcuccgccgccggcuucugcgccucuagacccgggcugcucuuucugggacuucugcuccugccucuuguggucgcguucgcuagcgccgaggccgaagaggacggcgaucugcagugucucugcguuaagaccacaucccaagugcggccgcgccacaucacgucucuggaagugauuaaagcugggccccauuguccuaccgcccagcugaucgcuacacucaagaacggaagaaaaauuugccuggaccuucaggcuccccuguacaagaaaaucauuaagaagcuccuggagagcuga

SEQ ID NO: 5232 - RNA, 306 nt, Artificial Sequence
  derived and/or modified sequence opt6 from CXCL4__Homo_sapiens__AAA60066
augucaucagcagcaggauucugcgcaucaagaccaggacuacuauuccuaggacuacuacuacuaccauuaguaguagcauucgcaucagcagaagcagaagaagacggagaccuacaaugccuaugcguaaaaacaacaucacaaguaagaccaagacacauaacaucacuagaaguaauaaaagcaggaccacacugcccaacagcacaacuaauagcaacacuaaaaaacggaagaaaaauaugccuagaccuacaagcaccacuauacaaaaaaauaauaaaaaaacuacuagaaucauaa

SEQ ID NO: 5233 - protein, 114 aa, Artificial Sequence
  CXCL5__Homo_sapiens__P42830
MSLLSSRAARVPGPSSSLCALLVLLLLLTQPGPIASAGPAAAVLRELRCVCLQTTQGVHPKMISNLQVFAIGPQCSKVEVVASLKNGKEICLDPEAPFLKKVIQKILDGGNKEN

SEQ ID NO: 5234 - RNA, 345 nt, Artificial Sequence
  CXCL5__Homo_sapiens__AAA86426
augagccuccuguccagccgcgcggcccguguccccgguccuucgagcuccuugugcgcgcuguuggugcugcugcugcugcugacgcagccagggcccaucgccagcgcugguccugccgcugcuguguugagagagcugcguugcguuuguuuacagaccacgcaaggaguucaucccaaaaugaucaguaaucugcaaguguucgccauaggcccacagugcuccaagguggaagugguagccucccugaagaacgggaaggaaauuugucuugauccagaagccccuuuucuaaagaaagucauccagaaaauuuuggacgguggaaacaaggaaaacuga

SEQ ID NO: 5235 - RNA, 345 nt, Artificial Sequence
  derived and/or modified sequence opt1 from CXCL5__Homo_sapiens__AAA86426
augagccugcucuccagccgcgccgcccgggugcccggcccguccagcucccugugcgcgcugcucguccugcugcuccugcugacccagcccgggcccaucgccagcgccggccccgccgccgcggugcuccgcgagcugcggugcgugugccugcagaccacgcaggggguccacccgaagaugaucuccaaccuccagguguucgccaucggcccccagugcagcaagguggaggucguggccucccugaagaacgggaaggagaucugccuggaccccgaggcccccuuccucaagaaggugauccagaagauccuggacggcggcaacaaggagaacuga

SEQ ID NO: 5236 - RNA, 345 nt, Artificial Sequence
  derived and/or modified sequence opt2 from CXCL5__Homo_sapiens__AAA86426
augucccuccucuccucccgcgccgcccgcguccccggccccuccuccucccucugcgcccuccucguccuccuccuccuccucacccagcccggccccaucgccuccgccggccccgccgccgccguccuccgcgagcuccgcugcgucugccuccagaccacccagggcguccaccccaagaugaucuccaaccuccaggucuucgccaucggcccccagugcuccaaggucgaggucgucgccucccucaagaacggcaaggagaucugccucgaccccgaggcccccuuccucaagaaggucauccagaagauccucgacggcggcaacaaggagaacuga

SEQ ID NO: 5237 - RNA, 345 nt, Artificial Sequence
  derived and/or modified sequence opt3 from CXCL5__Homo_sapiens__AAA86426
augagccugcucuccucuagagccgcuagggugcccggcccuucaaguagccuuugcgcacuguuggucuuacugcuacuccugacccagccagggccgaucgccuccgcgggacccgcugccgcaguucuucgggagcugcgcugugugugcuugcaaacaacucaggguguacacccuaagaugauuucuaaccuccagguguucgccauaggcccacaguguucgaaagucgaagugguugcuucacugaagaaugggaaagagaucugccuggaccccgaagcaccuuuucucaagaaagugauucaaaagaucuuagauggaggcaacaaggagaauuga

SEQ ID NO: 5238 - RNA, 345 nt, Artificial Sequence
  derived and/or modified sequence opt4 from CXCL5__Homo_sapiens__AAA86426
augagccugcugagcagcagagccgccagagugcccggccccagcagcagccugugcgcccugcuggugcugcugcugcugcugacccagcccggccccaucgccagcgccggccccgccgccgccgugcugagagagcugagaugcgugugccugcagaccacccagggcgugcaccccaagaugaucagcaaccugcagguguucgccaucggcccccagugcagcaagguggaggugguggccagccugaagaacggcaaggagaucugccuggaccccgaggcccccuuccugaagaaggugauccagaagauccuggacggcggcaacaaggagaacuga

SEQ ID NO: 5239 - RNA, 345 nt, Artificial Sequence
  derived and/or modified sequence opt5 from CXCL5__Homo_sapiens__AAA86426
augagccugcucuccucuagagccgcucgggugcccggcccuagcuccucucugugcgcccuucugguccuccugcuucugcucacccagccggggcccaucgcgagcgcuggaccugccgccgcuguucugcgcgagcugagaugugugugccuccaaacaacgcagggcgugcaccccaagaugauuuccaaccugcaggucuucgccaucgggccucaguguucuaaaguggaaguuguggcuagccuuaagaauggaaaagagauuugccuggaccccgaagccccuuuucucaagaaagucauccaaaagauucuggauggcgggaacaaggagaauuga

SEQ ID NO: 5240 - RNA, 345 nt, Artificial Sequence
  derived and/or modified sequence opt6 from CXCL5__Homo_sapiens__AAA86426
augucacuacuaucaucaagagcagcaagaguaccaggaccaucaucaucacuaugcgcacuacuaguacuacuauuacuacuaacacaaccaggaccaauagcaucagcaggaccagcagcagcaguacuaagagaacuaagaugcguaugccuacaaacaacacaaggaguacacccaaaaaugauaucaaaccuacaaguauucgcaauaggaccacaaugcucaaaaguagaaguaguagcaucacuaaaaaacggaaaagaaauaugccuagacccagaagcaccauucuuaaaaaaaguaauacaaaaaauacuagacggaggaaacaaagaaaacuaa

SEQ ID NO: 5241 - protein, 114 aa, Artificial Sequence; identical to SEQ ID NO: 5233
  CXCL5__Homo_sapiens__Q6I9S7

SEQ ID NO: 5242 - RNA, 345 nt, Artificial Sequence
  CXCL5__Homo_sapiens__AAP35453
augagccuccuguccagccgcgcggcccguguccccgguccuucgagcuccuugugcgcgcuguuggugcugcugcugcugcugacgcagccagggcccaucgccagcgcugguccugccgcugcuguguugagagagcugcguugcguuuguuuacagaccacgcaaggaguucaucccaaaaugaucaguaaucugcaaguguucgccauaggcccacagugcuccaagguggaagugguagccucccugaagaacgggaaggaaauuugucuugauccagaagccccuuuucuaaagaaagucauccagaaaauuuuggacgguggaaacaaggaaaacuag

SEQ ID NO: 5243 - RNA, 345 nt, Artificial Sequence; identical to SEQ ID NO: 5235
  derived and/or modified sequence opt1 from CXCL5__Homo_sapiens__AAP35453

SEQ ID NO: 5244 - RNA, 345 nt, Artificial Sequence; identical to SEQ ID NO: 5236
  derived and/or modified sequence opt2 from CXCL5__Homo_sapiens__AAP35453

SEQ ID NO: 5245 - RNA, 345 nt, Artificial Sequence; identical to SEQ ID NO: 5237
  derived and/or modified sequence opt3 from CXCL5__Homo_sapiens__AAP35453

SEQ ID NO: 5246 - RNA, 345 nt, Artificial Sequence; identical to SEQ ID NO: 5238
  derived and/or modified sequence opt4 from CXCL5__Homo_sapiens__AAP35453

SEQ ID NO: 5247 - RNA, 345 nt, Artificial Sequence; identical to SEQ ID NO: 5239
  derived and/or modified sequence opt5 from CXCL5__Homo_sapiens__AAP35453

SEQ ID NO: 5248 - RNA, 345 nt, Artificial Sequence
  derived and/or modified sequence opt6 from CXCL5__Homo_sapiens__AAP35453
augucacuacuaucaucaagagcagcaagaguaccaggaccaucaucaucacuaugcgcacuacuaguacuacuacuauuauuaacacaaccaggaccaauagcaucagcaggaccagcagcagcaguacuaagagaacuaagaugcguaugccuacaaacaacacaaggaguacacccaaaaaugauaucaaaccuacaaguauucgcaauaggaccacaaugcucaaaaguagaaguaguagcaucacuaaaaaacggaaaagaaauaugccuagacccagaagcaccauuccuaaaaaaaguaauacaaaaaauacuagacggaggaaacaaagaaaacuaa

SEQ ID NO: 5249 - protein, 114 aa, Artificial Sequence
  CXCL6__Homo_sapiens__P80162
MSLPSSRAARVPGPSGSLCALLALLLLLTPPGPLASAGPVSAVLTELRCTCLRVTLRVNPKTIGKLQVFPAGPQCSKVEVVASLKNGKQVCLDPEAPFLKKVIQKILDSGNKKN

SEQ ID NO: 5250 - RNA, 345 nt, Artificial Sequence
  CXCL6__Homo_sapiens__AAC51338
augagccucccguccagccgcgcggcccgugucccggguccuucgggcuccuugugcgcgcugcucgcgcugcugcuccugcugacgccgccggggccccucgccagcgcugguccugucucugcugugcugacagagcugcguugcacuuguuuacgcguuacgcugagaguaaaccccaaaacgauugguaaacugcagguguuccccgcaggcccgcagugcuccaagguggaagugguagccucccugaagaacgggaagcaaguuugucuggacccggaagccccuuuucuaaagaaagucauccagaaaauuuuggacaguggaaacaagaaaaacuga

SEQ ID NO: 5251 - RNA, 345 nt, Artificial Sequence
  derived and/or modified sequence opt1 from CXCL6__Homo_sapiens__AAC51338
augagccugcccuccagccgcgccgcccgggugccgggccccuccgggagccucugcgcgcugcuggcccuccugcugcuccugaccccgcccggcccccuggccuccgccgggcccgucagcgccgugcucaccgagcugcgcugcacgugccugcgggugacccuccgcgucaaccccaagaccaucggcaagcuccagguguuccccgcggggccgcagugcuccaagguggaggucguggccagccugaagaacggcaagcaggucugccuggaccccgaggcccccuuccugaagaaggugauccagaagauccuggacuccggcaacaagaagaacuga

SEQ ID NO: 5252 - RNA, 345 nt, Artificial Sequence
  derived and/or modified sequence opt2 from CXCL6__Homo_sapiens__AAC51338
augucccuccccuccucccgcgccgcccgcguccccggccccuccggcucccucugcgcccuccucgcccuccuccuccuccucaccccccccggcccccucgccuccgccggccccgucuccgccguccucaccgagcuccgcugcaccugccuccgcgucacccuccgcgucaaccccaagaccaucggcaagcuccaggucuuccccgccggcccccagugcuccaaggucgaggucgucgccucccucaagaacggcaagcaggucugccucgaccccgaggcccccuuccucaagaaggucauccagaagauccucgacuccggcaacaagaagaacuga

SEQ ID NO: 5253 - RNA, 345 nt, Artificial Sequence
  derived and/or modified sequence opt3 from CXCL6__Homo_sapiens__AAC51338
augagccugcccuccucuagagccgcuagggugccuggcccaucagggagucucugcgcacuucuggccuuguuacugcuacucaccccgcccggaccucuggcgagcgcugguccagucuccgccguucuuacagagcugcgguguacuugcuugcgcgugacgcuccgaguaaaccccaagaccaucggcaaauuacagguguucccugcagggccacaauguucuaaggucgaagugguugccucgcugaaaaauggaaaacaggugugccucgaccccgaggcuccuuuucugaagaaggucauucagaagauacuggauucaggcaacaaaaagaauuga

SEQ ID NO: 5254 - RNA, 345 nt, Artificial Sequence
  derived and/or modified sequence opt4 from CXCL6__Homo_sapiens__AAC51338
augagccugcccagcagcagagccgccagagugcccggccccagcggcagccugugcgcccugcuggcccugcugcugcugcugaccccccccggcccccuggccagcgccggccccgugagcgccgugcugaccgagcugagaugcaccugccugagagugacccugagagugaaccccaagaccaucggcaagcugcagguguuccccgccggcccccagugcagcaagguggaggugguggccagccugaagaacggcaagcaggugugccuggaccccgaggcccccuuccugaagaaggugauccagaagauccuggacagcggcaacaagaagaacuga

SEQ ID NO: 5255 - RNA, 345 nt, Artificial Sequence
  derived and/or modified sequence opt5 from CXCL6__Homo_sapiens__AAC51338
augagccugcccuccucuagagccgcucgggugccuggcccgagcgggucccucugcgcccugcuugcgcugcuccugcuucugacacccccuggaccccucgcuucugccggcccugucagcgccguucugaccgagcugcgcuguacgugccucagagugacccugcgggugaaccccaagacaaucgggaaacuucaggucuucccugcuggaccgcaauguuccaagguggaaguuguggccucucugaaaaauggcaagcaggucugccucgaccccgaggcuccuuuucugaaaaaggugauucagaagauccuugauagcgggaacaaaaagaauuga

SEQ ID NO: 5256 - RNA, 345 nt, Artificial Sequence
  derived and/or modified sequence opt6 from CXCL6__Homo_sapiens__AAC51338
augucacuaccaucaucaagagcagcaagaguaccaggaccaucaggaagccuaugcgcauuacuagcacuacuacuacuacuaacaccaccaggaccacuagcaucagcaggaccaguaucagcaguacuaacagaacuaagaugcacaugccuaagaguaacacuaagaguaaacccaaaaacaauaggaaaacuacaaguauucccagcaggaccacaaugcucaaaaguagaaguaguagcaucacuaaaaaacggaaaacaaguaugccuagacccagaagcaccauuccuaaaaaaaguaauacaaaaaauacuagacucaggaaacaaaaaaaacuaa

SEQ ID NO: 5257 - protein, 128 aa, Artificial Sequence
  CXCL7__Homo_sapiens__P02775
MSLRLDTTPSCNSARPLHALQVLLLLSLLLTALASSTKGQTKRNLAKGKEESLDSDLYAELRCMCIKTTSGIHPKNIQSLEVIGKGTHCNQVEVIATLKDGRKICLDPDAPRIKKIVQKKLAGDESAD

SEQ ID NO: 5258 - RNA, 387 nt, Artificial Sequence
  CXCL7__Homo_sapiens__AAA62836
augagccucagacuugauaccaccccuuccuguaacagugcgagaccacuucaugccuugcaggugcugcugcuucugucauugcugcugacugcucuggcuuccuccaccaaaggacaaacuaagagaaacuuggcgaaaggcaaagaggaaagucuagacagugacuuguaugcugaacuccgcugcauguguauaaagacaaccucuggaauucaucccaaaaacauccaaaguuuggaagugaucgggaaaggaacccauugcaaccaagucgaagugauagccacacugaaggaugggaggaaaaucugccuggacccagaugcucccagaaucaagaaaauuguacagaaaaaauuggcaggugaugaaucugcugauuaa

SEQ ID NO: 5259 - RNA, 387 nt, Artificial Sequence
  derived and/or modified sequence opt1 from CXCL7__Homo_sapiens__AAA62836
augagccugcgccucgacaccacccccuccugcaacagcgcccggccgcugcacgcccuccaggugcugcugcugcucucccugcugcucacggcgcuggccagcuccaccaagggccagaccaagcgcaaccuggccaaggggaaggaggagagccucgacuccgaccuguacgccgagcugcggugcaugugcaucaagaccacgagcggcauccaccccaagaacauccagucccucgaggucaucgggaagggcacccacugcaaccagguggaggugaucgccacccugaaggacgggcgcaagaucugccuggaccccgacgcgccccggaucaagaagaucguccagaagaagcucgccggcgacgagagcgccgacuga

SEQ ID NO: 5260 - RNA, 387 nt, Artificial Sequence
  derived and/or modified sequence opt2 from CXCL7__Homo_sapiens__AAA62836
augucccuccgccucgacaccacccccuccugcaacuccgcccgcccccuccacgcccuccagguccuccuccuccucucccuccuccucaccgcccucgccuccuccaccaagggccagaccaagcgcaaccucgccaagggcaaggaggagucccucgacuccgaccucuacgccgagcuccgcugcaugugcaucaagaccaccuccggcauccaccccaagaacauccagucccucgaggucaucggcaagggcacccacugcaaccaggucgaggucaucgccacccucaaggacggccgcaagaucugccucgaccccgacgccccccgcaucaagaagaucguccagaagaagcucgccggcgacgaguccgccgacuga

SEQ ID NO: 5261 - RNA, 387 nt, Artificial Sequence
  derived and/or modified sequence opt3 from CXCL7__Homo_sapiens__AAA62836
augagccugagacucgacaccacacccuccugcaacucugccaggccucuucacgcucugcaaguguuguuacugcuaucacuccugcuuacugcacuggccaguagcacgaagggccagaccaaacggaauuuggcgaaggggaaagaggaaucccucgauucugaccuguacgcugagcugcgcuguaugugcaucaagacaacuucggguauucauccgaaaaacauacagucacucgaagucaucggaaagggcacccacuguaaucagguugaggugauugccacauuaaaggaugggcgaaaaaucugccuggacccagaugcaccccguauuaagaaaaucguacagaagaaacuugccggagacgaaagcgcugauuga

SEQ ID NO: 5262 - RNA, 387 nt, Artificial Sequence
  derived and/or modified sequence opt4 from CXCL7__Homo_sapiens__AAA62836
augagccugagacuggacaccacccccagcugcaacagcgccagaccccugcacgcccugcaggugcugcugcugcugagccugcugcugaccgcccuggccagcagcaccaagggccagaccaagagaaaccuggccaagggcaaggaggagagccuggacagcgaccuguacgccgagcugagaugcaugugcaucaagaccaccagcggcauccaccccaagaacauccagagccuggaggugaucggcaagggcacccacugcaaccagguggaggugaucgccacccugaaggacggcagaaagaucugccuggaccccgacgcccccagaaucaagaagaucgugcagaagaagcuggccggcgacgagagcgccgacuga

SEQ ID NO: 5263 - RNA, 387 nt, Artificial Sequence
  derived and/or modified sequence opt5 from CXCL7__Homo_sapiens__AAA62836
augagccugagacucgacaccacacccuccugcaacucugcccggccucugcacgcccuucaggugcugcuccugcuuagccugcuccugacggcucuggcguccucuaccaagggccaaacaaaacgcaaucucgcuaaggggaaagaggaaagccuggauuccgaccuuuacgccgagcugagauguaugugcaucaagaccacaucuggcauucauccgaaaaacauccagagccucgaagucauuggaaaggggacccacuguaaucagguugaggugaucgccacacugaaggauggacggaaaauuugccuugaccccgaugcuccucgcaucaagaaaaucgugcagaagaaacuggccggcgacgaauccgcugauuga

SEQ ID NO: 5264 - RNA, 387 nt, Artificial Sequence
  derived and/or modified sequence opt6 from CXCL7__Homo_sapiens__AAA62836
augucacuaagacucgacacaacaccaucaugcaacucagcaagaccacuacacgcacuacaaguacuacuacuacuaagccuacuacuaacagcacuagcaagcucaacaaaaggacaaacaaaaagaaaccuagcaaaaggaaaagaagaaucacuagacagcgaccuauacgcagaacuaagaugcaugugcauaaaaacaacaucaggaauacacccaaaaaacauacaaagcuuagaaguaauaggaaaaggaacacacugcaaccaaguagaaguaauagcaacacuaaaagacggaagaaaaauaugccuagacccagacgcaccaagaauaaaaaaaauaguacaaaaaaaacuagcaggagacgaaucagcagacuaa

SEQ ID NO: 5265 - protein, 99 aa, Artificial Sequence
  CXCL8__Homo_sapiens__P10145
MTSKLAVALLAAFLISAALCEGAVLPRSAKELRCQCIKTYSKPFHPKFIKELRVIESGPHCANTEIIVKLSDGRELCLDPKENWVQRVVEKFLKRAENS

SEQ ID NO: 5266 - RNA, 300 nt, Artificial Sequence
  CXCL8__Homo_sapiens__AAA35611
augacuuccaagcuggccguggcucucuuggcagccuuccugauuucugcagcucugugugaaggugcaguuuugccaaggagugcuaaagaacuuagaugucagugcauaaagacauacuccaaaccuuuccaccccaaauuuaucaaagaacugagagugauugagaguggaccacacugcgccaacacagaaauuauuguaaagcuuucugauggaagagagcucugucuggaccccaaggaaaacugggugcagaggguuguggagaaguuuuugaagagggcugagaauucauaa

SEQ ID NO: 5267 - RNA, 300 nt, Artificial Sequence
  derived and/or modified sequence opt1 from CXCL8__Homo_sapiens__AAA35611
augaccagcaagcuggccguggcccuccuggcggccuuccugaucuccgccgcccucugcgagggcgccguccugccccgcagcgcgaaggagcugcggugccagugcaucaagaccuacuccaagccguuccaccccaaguucaucaaggagcuccgcgugaucgagagcgggccccacugcgccaacacggagaucaucgugaagcuguccgacggccgggagcugugccucgaccccaaggagaacuggguccagcgcgugguggagaaguuccugaagcgggccgagaacagcuga

SEQ ID NO: 5268 - RNA, 300 nt, Artificial Sequence
  derived and/or modified sequence opt2 from CXCL8__Homo_sapiens__AAA35611
augaccuccaagcucgccgucgcccuccucgccgccuuccucaucuccgccgcccucugcgagggcgccguccucccccgcuccgccaaggagcuccgcugccagugcaucaagaccuacuccaagcccuuccaccccaaguucaucaaggagcuccgcgucaucgaguccggcccccacugcgccaacaccgagaucaucgucaagcucuccgacggccgcgagcucugccucgaccccaaggagaacuggguccagcgcgucgucgagaaguuccucaagcgcgccgagaacuccuga

SEQ ID NO: 5269 - RNA, 300 nt, Artificial Sequence
  derived and/or modified sequence opt3 from CXCL8__Homo_sapiens__AAA35611
augaccagcaagcuggccguggcucuccuugcagccuuccugaucuccgcggcuuugugcgagggcgccgucuuacccagaucugcaaaagaacugaggugucagugcauuaagacauacucaaaaccuuuucacccaaaguucauaaaagagcuacggguuaucgaaagugggccgcauugugccaacacugagauuaucgugaagcucagcgacggacgcgaacugugccuugaucccaaggagaauuggguacaacgaguggucgagaaauuucugaagcgugcugaaaacuccuga

SEQ ID NO: 5270 - RNA, 300 nt, Artificial Sequence
  derived and/or modified sequence opt4 from CXCL8__Homo_sapiens__AAA35611
augaccagcaagcuggccguggcccugcuggccgccuuccugaucagcgccgcccugugcgagggcgccgugcugcccagaagcgccaaggagcugagaugccagugcaucaagaccuacagcaagcccuuccaccccaaguucaucaaggagcugagagugaucgagagcggcccccacugcgccaacaccgagaucaucgugaagcugagcgacggcagagagcugugccuggaccccaaggagaacugggugcagagagugguggagaaguuccugaagagagccgagaacagcuga

SEQ ID NO: 5271 - RNA, 300 nt, Artificial Sequence
  derived and/or modified sequence opt5 from CXCL8__Homo_sapiens__AAA35611
augaccagcaagcuggccguggcucuccuggccgcguuccuuaucuccgcugcccugugcgagggcgccguccuccccagaucugcuaaagaacugcggugucagugcauuaagacauacagcaaaccuuuucacccgaaguucaucaaagagcuucgcguuauugaauccgggccccauugugccaacacggagaucauugugaagcugucugacggaagagaacucugccuggauccuaaggagaauugggugcaacgggucguggagaaauuucugaagcgcgcugaaaacagcuga

SEQ ID NO: 5272 - RNA, 300 nt, Artificial Sequence
  derived and/or modified sequence opt6 from CXCL8__Homo_sapiens__AAA35611
augacaucaaaacuagcaguagcacuacuagcagcauuccuaauaucagcagcacuaugcgaaggagcaguacuaccaagaucagcaaaagaauuaagaugccaaugcauaaaaacauacucaaaaccauuccacccaaaauucauaaaagaacuaagaguaauagaaucaggaccacacugcgcaaacacagaaauaauaguaaaacuaucagacggaagagaacuaugccuagacccaaaagaaaacuggguacaaagaguaguagaaaaauuccuaaaaagagcagaaaacucauaa

SEQ ID NO: 5273 - protein, 52 aa, Artificial Sequence
  CXCL9__Homo_sapiens__L8E8X0
MMQHPCLFMTGCLLSFSNNKKHVVKHLRIFWTVFKKYTVYRKSYNLTMKRTL

SEQ ID NO: 5274 - RNA, 159 nt, Artificial Sequence
  CXCL9__Homo_sapiens__CCQ43176
augaugcaacauccuugucuuuuuaugacaggauguuugcucagcuucuccaacaauaagaagcacgugguaaaacacuugcggauauucuggacuguuuuuaaaaaauauacaguuuaccgaaaaucauauaaucuuacaaugaaaaggacuuuauag

SEQ ID NO: 5275 - RNA, 159 nt, Artificial Sequence
  derived and/or modified sequence opt1 from CXCL9__Homo_sapiens__CCQ43176
augaugcagcaccccugccuguucaugaccggcugccuccugagcuucuccaacaacaagaagcacguggucaagcaccuccgcaucuucuggaccguguucaagaaguacacgguguaccgcaagagcuacaaccugaccaugaagcggacccuguga

SEQ ID NO: 5276 - RNA, 159 nt, Artificial Sequence
  derived and/or modified sequence opt2 from CXCL9__Homo_sapiens__CCQ43176
augaugcagcaccccugccucuucaugaccggcugccuccucuccuucuccaacaacaagaagcacgucgucaagcaccuccgcaucuucuggaccgucuucaagaaguacaccgucuaccgcaaguccuacaaccucaccaugaagcgcacccucuga

SEQ ID NO: 5277 - RNA, 159 nt, Artificial Sequence
  derived and/or modified sequence opt3 from CXCL9__Homo_sapiens__CCQ43176
augaugcagcaccccugccuguucaugaccggcugucuccuuagcuuuuccaacaauaagaaacauguggucaagcaccugagaaucuucuggacaguuuuuaaaaaguacacuguguauaggaaaucuuacaacuugacgaugaagcggaccuuauga

SEQ ID NO: 5278 - RNA, 159 nt, Artificial Sequence
  derived and/or modified sequence opt4 from CXCL9__Homo_sapiens__CCQ43176
augaugcagcaccccugccuguucaugaccggcugccugcugagcuucagcaacaacaagaagcacguggugaagcaccugagaaucuucuggaccguguucaagaaguacaccguguacagaaagagcuacaaccugaccaugaagagaacccuguga

SEQ ID NO: 5279 - RNA, 159 nt, Artificial Sequence
  derived and/or modified sequence opt5 from CXCL9__Homo_sapiens__CCQ43176
augaugcagcaccccugccuguucaugaccggcugucuccugagcuuuuccaacaauaagaaacauguggucaagcaccuuagaaucuucuggacaguuuuuaaaaaguacacgguguaucggaaaucuuacaaccugaccaugaagcgcacacucuga

SEQ ID NO: 5280 - RNA, 159 nt, Artificial Sequence
  derived and/or modified sequence opt6 from CXCL9__Homo_sapiens__CCQ43176
augaugcaacacccaugccuauucaugaccggaugccuacuaucauucucaaacaacaaaaaacacguagucaaacaccuaagaauauucuggacaguauucaaaaaauacacaguauacagaaaaucauacaaccuaacaaugaaaagaacacuauaa

SEQ ID NO: 5281 - protein, 125 aa, Artificial Sequence
  CXCL9__Homo_sapiens__Q07325
MKKSGVLFLLGIILLVLIGVQGTPVVRKGRCSCISTNQGTIHLQSLKDLKQFAPSPSCEKIEIIATLKNGVQTCLNPDSADVKELIKKWEKQVSQKKKQKNGKKHQKKKVLKVRKSQRSRQKKTT

SEQ ID NO: 5282 - RNA, 378 nt, Artificial Sequence
  CXCL9__Homo_sapiens__AAH63122
augaagaaaagugguguucuuuuccucuugggcaucaucuugcugguucugauuggagugcaaggaaccccaguagugagaaagggucgcuguuccugcaucagcaccaaccaagggacuauccaccuacaauccuugaaagaccuuaaacaauuugccccaagcccuuccugcgagaaaauugaaaucauugcuacacugaagaauggaguucaaacaugucuaaacccagauucagcagaugugaaggaacugauuaaaaagugggagaaacaggucagccaaaagaaaaagcaaaagaaugggaaaaaacaucaaaaaaagaaaguucugaaaguucgaaaaucucaacguucucgucaaaagaagacuacauaa

SEQ ID NO: 5283 - RNA, 378 nt, Artificial Sequence
  derived and/or modified sequence opt1 from CXCL9__Homo_sapiens__AAH63122
augaagaaguccggcgugcuguuccuccuggggaucauccugcucguccugaucggcgugcaggggacccccgugguccgcaagggccggugcagcugcaucagcaccaaccaggggacgauccaccuccagucccugaaggaccugaagcaguucgccccgagccccuccugcgagaagaucgagaucaucgccacccugaagaacggcgugcagaccugccucaaccccgacagcgcggacgugaaggagcugaucaagaagugggagaagcaggucucccagaagaagaagcagaagaacggcaagaagcaccagaagaagaaggugcugaaggugcgcaagagccagcggucccgccagaagaagaccacguga

SEQ ID NO: 5284 - RNA, 378 nt, Artificial Sequence
  derived and/or modified sequence opt2 from CXCL9__Homo_sapiens__AAH63122
augaagaaguccggcguccucuuccuccucggcaucauccuccucguccucaucggcguccagggcacccccgucguccgcaagggccgcugcuccugcaucuccaccaaccagggcaccauccaccuccagucccucaaggaccucaagcaguucgcccccucccccuccugcgagaagaucgagaucaucgccacccucaagaacggcguccagaccugccucaaccccgacuccgccgacgucaaggagcucaucaagaagugggagaagcaggucucccagaagaagaagcagaagaacggcaagaagcaccagaagaagaagguccucaagguccgcaagucccagcgcucccgccagaagaagaccaccuga

SEQ ID NO: 5285 - RNA, 378 nt, Artificial Sequence
  derived and/or modified sequence opt3 from CXCL9__Homo_sapiens__AAH63122
augaagaaaagcggcgugcuguuccuccuugggauaauucuguuggucuuaauaggaguucaggguacccccgugguaagaaaggggaggugcuccuguaucucuacaaaccaaggcacuauucaucugcagucacuaaaagaccucaagcaguuugccccuaguccaagcugcgagaaaaucgaaauuaucgcuacgcugaagaauggagugcagaccugucuuaacccggauuccgcagacgucaaggagcugaucaaaaagugggaaaaacaagugucucagaagaaaaagcagaagaauggcaaaaagcaccagaaaaagaaaguuuugaaggugcggaaaucgcaacgcucacgacagaagaagacaacuuga

SEQ ID NO: 5286 - RNA, 378 nt, Artificial Sequence
  derived and/or modified sequence opt4 from CXCL9__Homo_sapiens__AAH63122
augaagaagagcggcgugcuguuccugcugggcaucauccugcuggugcugaucggcgugcagggcacccccguggugagaaagggcagaugcagcugcaucagcaccaaccagggcaccauccaccugcagagccugaaggaccugaagcaguucgcccccagccccagcugcgagaagaucgagaucaucgccacccugaagaacggcgugcagaccugccugaaccccgacagcgccgacgugaaggagcugaucaagaagugggagaagcaggugagccagaagaagaagcagaagaacggcaagaagcaccagaagaagaaggugcugaaggugagaaagagccagagaagcagacagaagaagaccaccuga

SEQ ID NO: 5287 - RNA, 378 nt, Artificial Sequence
  derived and/or modified sequence opt5 from CXCL9__Homo_sapiens__AAH63122
augaagaaaagcggcgugcuguuccuccuggggaucauucuucugguccucaucggaguucagggcacccccguggugagaaaggggcggugcuccuguauuucuacaaaccaaggaacgauccaucugcagagccuuaaagaccugaagcaguuugccccuuccccgucuugcgagaaaauugaaaucaucgcuacccucaagaauggcguccagacaugucugaaccccgauagcgccgacgugaaggagcugauuaaaaagugggaaaaacaaguuucccagaagaaaaagcagaagaaugggaaaaagcaccagaaaaagaaagugcucaagguccgcaaaucucaaagaagccggcagaagaagaccacauga

SEQ ID NO: 5288 - RNA, 378 nt, Artificial Sequence
  derived and/or modified sequence opt6 from CXCL9__Homo_sapiens__AAH63122
augaaaaaaucaggaguacuauuccuacuaggaauaauacuacuaguacuaauaggaguacaaggaacaccaguaguaagaaaaggaagaugcagcugcauaucaacaaaccaaggaacaauacaccuacaaucacuaaaagaccuaaaacaauucgcaccaucaccaucaugcgaaaaaauagaaauaauagcaacacuaaaaaacggaguacaaacaugccuaaacccagacucagcagacguaaaagaauuaauaaaaaaaugggaaaaacaaguaagccaaaaaaaaaaacaaaaaaauggaaaaaaacaccaaaaaaaaaaaguacuaaaaguaagaaaaagccaaagaucaagacaaaaaaaaaccacauaa

SEQ ID NO: 5289 - protein, 114 aa, Artificial Sequence
  XCL1__Homo_sapiens__P47992
MRLLILALLGICSLTAYIVEGVGSEVSDKRTCVSLTTQRLPVSRIKTYTITEGSLRAVIFITKRGLKVCADPQATWVRDVVRSMDRKSNTRNNMIQTKPTGTQQSTNTAVTLTG

SEQ ID NO: 5290 - RNA, 345 nt, Artificial Sequence
  XCL1__Homo_sapiens__AAC50164
augagacuucucauccuggcccuccuuggcaucugcucucucacugcauacauuguggaagguguagggagugaagucucagauaagaggaccugugugagccucacuacccagcgacugccgguuagcagaaucaagaccuacaccaucacggaaggcuccuugagagcaguaauuuuuauuaccaaacguggccuaaaagucugugcugauccacaagccacgugggugagagacguggucaggagcauggacaggaaauccaacaccagaaauaacaugauccagaccaagccaacaggaacccagcaaucgaccaauacagcugugacccugacuggcuag

SEQ ID NO: 5291 - RNA, 345 nt, Artificial Sequence
  derived and/or modified sequence opt1 from XCL1__Homo_sapiens__AAC50164
augcgccugcucauccuggcccugcucggcaucugcagccugaccgccuacaucguggagggggucggcuccgaggugagcgacaagcggaccugcgugucccugacgacccagcgccuccccgucagccggaucaagaccuacaccaucacggaggggucccugcgcgcggugaucuucaucaccaagcggggccugaaggugugcgccgacccgcaggccaccuggguccgcgacguggugcggagcauggaccgcaaguccaacacccggaacaacaugauccagacgaagcccaccgggacccagcagagcaccaacacggccgucacccucaccggcuga

SEQ ID NO: 5292 - RNA, 345 nt, Artificial Sequence
  derived and/or modified sequence opt2 from XCL1__Homo_sapiens__AAC50164
augcgccuccucauccucgcccuccucggcaucugcucccucaccgccuacaucgucgagggcgucggcuccgaggucuccgacaagcgcaccugcgucucccucaccacccagcgccuccccgucucccgcaucaagaccuacaccaucaccgagggcucccuccgcgccgucaucuucaucaccaagcgcggccucaaggucugcgccgacccccaggccaccuggguccgcgacgucguccgcuccauggaccgcaaguccaacacccgcaacaacaugauccagaccaagcccaccggcacccagcaguccaccaacaccgccgucacccucaccggcuga

SEQ ID NO: 5293 - RNA, 345 nt, Artificial Sequence
  derived and/or modified sequence opt3 from XCL1__Homo_sapiens__AAC50164
augagacugcucauccuugcccuguugggcauuugcagcuuaaccgcuuacauaguggagggggucggauccgaaguuucugacaagaggacaugugugucacugacuacgcagcggcuacccguaagucgcaucaaaaccuauacaauuacugaggguagccuccgagcagugaucuucauuaccaagcguggccugaaagucugcgccgauccucaagcgacaugggugagagacguugugagguccauggaucggaagucuaacacccgcaauaacaugauccagacuaaaccaacagggacccagcagucgacgaauacugcugucacccuuacaggauga

SEQ ID NO: 5294 - RNA, 345 nt, Artificial Sequence
  derived and/or modified sequence opt4 from XCL1__Homo_sapiens__AAC50164
augagacugcugauccuggcccugcugggcaucugcagccugaccgccuacaucguggagggcgugggcagcgaggugagcgacaagagaaccugcgugagccugaccacccagagacugcccgugagcagaaucaagaccuacaccaucaccgagggcagccugagagccgugaucuucaucaccaagagaggccugaaggugugcgccgacccccaggccaccugggugagagacguggugagaagcauggacagaaagagcaacaccagaaacaacaugauccagaccaagcccaccggcacccagcagagcaccaacaccgccgugacccugaccggcuga

SEQ ID NO: 5295 - RNA, 345 nt, Artificial Sequence
  derived and/or modified sequence opt5 from XCL1__Homo_sapiens__AAC50164
augagacugcucauccuggcccuucugggcauuugcagccucaccgcuuacaucguggagggggucggauccgaaguuucugacaagcggacaugugugagccugacgacccagcgccuucccguguccagaauuaaaacauauaccaucacagagggcucucugcgggccgucauuuucaucaccaagcgcgggcucaaagugugcgcggauccucaagcuacauggguuagagacgugguccggagcauggaucgcaaguccaacaccagaaauaacaugauccagacgaaaccgaccggaacacagcagucuaccaauacagccgugacccugacgggcuga

SEQ ID NO: 5296 - RNA, 345 nt, Artificial Sequence
  derived and/or modified sequence opt6 from XCL1__Homo_sapiens__AAC50164
augagacuacuaauacuagcauuacuaggaauaugcucacuaacagcauacauaguagaaggaguaggaagcgaaguaucagacaaaagaacaugcguaagccuaacaacacaaagacuaccaguaucaagaauaaaaacauacacaauaacagaaggaagccuaagagcaguaauauucauaacaaaaagaggacuaaaaguaugcgcagacccacaagcaacauggguaagagacguaguaagaucaauggacagaaaaagcaacacaagaaacaacaugauacaaacaaaaccaacaggaacacaacaaucaacaaacacagcaguaacacuaacaggauaa

SEQ ID NO: 5297 - protein, 114 aa, Artificial Sequence
  XCL2__Homo_sapiens__Q9UBD3
MRLLILALLGICSLTAYIVEGVGSEVSHRRTCVSLTTQRLPVSRIKTYTITEGSLRAVIFITKRGLKVCADPQATWVRDVVRSMDRKSNTRNNMIQTKPTGTQQSTNTAVTLTG

SEQ ID NO: 5298 - RNA, 345 nt, Artificial Sequence
  XCL2__Homo_sapiens__AAH69360
augagacuucucauccuggcccuccuuggcaucugcucucucacugcauacauuguggaagguguagggagugaagucucacauaggaggaccugugugagccucacuacccagcgacugccaguuagcagaaucaagaccuacaccaucacggaaggcuccuugagagcaguaauuuuuauuaccaaacguggccuaaaagucugugcugauccacaagccacgugggugagagacguggucaggagcauggacaggaaauccaacaccagaaauaacaugauccagaccaagccaacaggaacccagcaaucgaccaauacagcugugacccugacuggcuag

SEQ ID NO: 5299 - RNA, 345 nt, Artificial Sequence
  derived and/or modified sequence opt1 from XCL2__Homo_sapiens__AAH69360
augcgccugcucauccuggcccugcucggcaucugcagccugaccgccuacaucguggagggggucggcuccgaggugagccaccggcggaccugcgugucccugacgacccagcgccuccccgucagccgcaucaagaccuacaccaucacggaggggucccugcgggcggugaucuucaucaccaagcgcggccugaaggugugcgccgacccgcaggccaccuggguccgggacguggugcgcagcauggaccggaaguccaacacccgcaacaacaugauccagacgaagcccaccgggacccagcagagcaccaacacggccgucacccucaccggcuga

SEQ ID NO: 5300 - RNA, 345 nt, Artificial Sequence
  derived and/or modified sequence opt2 from XCL2__Homo_sapiens__AAH69360
augcgccuccucauccucgcccuccucggcaucugcucccucaccgccuacaucgucgagggcgucggcuccgaggucucccaccgccgcaccugcgucucccucaccacccagcgccuccccgucucccgcaucaagaccuacaccaucaccgagggcucccuccgcgccgucaucuucaucaccaagcgcggccucaaggucugcgccgacccccaggccaccuggguccgcgacgucguccgcuccauggaccgcaaguccaacacccgcaacaacaugauccagaccaagcccaccggcacccagcaguccaccaacaccgccgucacccucaccggcuga

SEQ ID NO: 5301 - RNA, 345 nt, Artificial Sequence
  derived and/or modified sequence opt3 from XCL2__Homo_sapiens__AAH69360
augagacugcucauccuugcccuguugggcauuugcagcuuaaccgcuuacauaguggagggggucggauccgaaguuucucacaggcggacaugugugucacugacuacgcagcgccuacccguaagucgaaucaagaccuauacaauuacugaggguagccuccgugcagugaucuucauuaccaaaagaggccugaaggucugcgccgacccucaagcgacaugggugagggauguugugcgguccauggaccgcaaaucuaacaccagaaauaacaugauccagacuaagccaacagggacccagcagucgacgaauacugcugucacccuuacaggauga

SEQ ID NO: 5302 - RNA, 345 nt, Artificial Sequence
  derived and/or modified sequence opt4 from XCL2__Homo_sapiens__AAH69360
augagacugcugauccuggcccugcugggcaucugcagccugaccgccuacaucguggagggcgugggcagcgaggugagccacagaagaaccugcgugagccugaccacccagagacugcccgugagcagaaucaagaccuacaccaucaccgagggcagccugagagccgugaucuucaucaccaagagaggccugaaggugugcgccgacccccaggccaccugggugagagacguggugagaagcauggacagaaagagcaacaccagaaacaacaugauccagaccaagcccaccggcacccagcagagcaccaacaccgccgugacccugaccggcuga

SEQ ID NO: 5303 - RNA, 345 nt, Artificial Sequence
  derived and/or modified sequence opt5 from XCL2__Homo_sapiens__AAH69360
augagacugcucauccuggcccuucugggcauuugcagccucaccgcuuacaucguggagggggucggauccgaaguuucucaccggcgcacaugugugagccugacgacccagagacuucccgugucccggauuaagacauauaccaucacagagggcucucugcgcgccgucauuuucaucaccaaaagagggcucaaggugugcgcggacccucaagcuacauggguucgggaugugguccgcagcauggacagaaaauccaacacccggaauaacaugauccagacgaagccgaccggaacacagcagucuaccaauacagccgugacccugacgggcuga

SEQ ID NO: 5304 - RNA, 345 nt, Artificial Sequence
  derived and/or modified sequence opt6 from XCL2__Homo_sapiens__AAH69360
augagacuacuaauacuagcacuauuaggaauaugcucacuaacagcauacauaguagaaggaguaggaagcgaaguaucacacagaagaacaugcguaagucuaacaacacaaagacuaccaguaucaagaauaaaaacauacacaauaacagaaggaagucuaagagcaguaauauucauaacaaaaagaggacuaaaaguaugcgcagacccacaagcaacauggguaagagacguaguaagaucaauggacagaaaaagcaacacaagaaacaacaugauacaaacaaaaccaacaggaacacaacaaucaacaaacacagcaguaacacuaacaggauaa

SEQ ID NO: 5305 - protein, 432 aa, Artificial Sequence
  Cytosine_Deaminase_codA__Escherichia_coli__A0A024KS17
MWRLTVSNNALQTIINARLPGKEGLWQIHLQDGKISAIDAQSGVMPITENSLDAEQGLVIPPFVEPHIHLDTTQTAGQPNWNQSGTLFEGIERWAERKALLTHDDVKQRAWQTLKWQIANGIQHVRTHVDVSDATLTALKAMLEVKQEVAPWIDLQIVAFPQEGILSYPNGEALLEEALRLGADVVGAIPHFEFTREYGVESLHKTFALAQKYDRLIDVHCDEIDDEQSRFVETVAALAYREGMGARVTASHTTAMHSYNGAYTSRLFRLLKMSGINFVANPLVNIHLQGRFDTYPKRRGITRVKEMLESGINVCFGHDDVFDPWYPLGTANMLQVLHMGLHVCQLMGYGQINDGLNLITHHSARTLNLQDYGIAAGNSANLIILPAENGFDALRRQVPIRYSVRGGKVIASTQPAQTTVYLEQPEAIDYKR

SEQ ID NO: 5306 - RNA, 1299 nt, Artificial Sequence
  Cytosine_Deaminase_codA__Escherichia_coli__CDU35197
auguggaggcuaacagugucgaauaacgcuuuacaaacaauuauuaacgcccgguuaccaggcaaagaggggcuguggcagauucaucugcaggacggaaaaaucagcgccauugaugcgcaauccggcgugaugcccauaacugaaaacagccuggaugccgaacaagguuuaguuauaccgccguuuguggagccacauauucaccuggacaccacgcaaaccgccggacaaccaaacuggaaucaguccggcacgcuguuugaaggcauugaacgcugggccgagcgcaaagcguuauuaacccaugacgacgugaaacaacgcgcauggcaaacgcugaaauggcagauugccaacggcauucagcaugugcguacccaugucgaugucuccgacgcaacgcugacugcguugaaagcgaugcuggaagugaaacaggaaguugcgccguggauugaucugcaaaucgucgccuucccgcaggaagggauuuugucguaucccaacggugaagcguugcuggaagaggcgcuacgcuuaggggcagauguuguuggggcgauuccgcauuuugaauuuacccgugaauacggcguggagucgcugcauaaaaccuucgcccuggcgcaaaaauacgaccgucucaucgacguucacugugaugagaucgaugacgagcagucgcgcuuugucgaaaccguugcugcccuggcguaccgugaaggcaugggcgcgcgagucaccgccagccacaccacggcaaugcacuccuauaacggggcguauaccucacgucuguuccgcuugcugaaaauguccgguauuaacuuugucgccaacccgcuggucaauauucaucugcaaggacgauucgauacguauccaaaacgucgcggcaucacgcgcguuaaagagaugcuggaguccggcauuaacgucugcuuuggucacgaugaugucuucgauccgugguauccgcugggaacggcgaauaugcugcaagugcugcauauggggcugcauguuugccaguugaugggcuacgggcagauuaacgauggccugaauuuaaucacccaccacagugccagaacguugaauuugcaggauuacggcauugccgccggaaacagcgcaaaccugauuauccugccggcugaaaauggauuugaugcgcugcgccgucagguuccgauacguuauucgguacguggcggcaaggugauugccaguacacaaccggcacaaaccaccguauaucuggagcagccagaagccaucgauuacaaacgguga

SEQ ID NO: 5307 - RNA, 1299 nt, Artificial Sequence
  derived and/or modified sequence opt1 from Cytosine_Deaminase_codA__Escherichia_coli__CDU35197
auguggcgccugaccgugagcaacaacgcccuccagaccaucaucaacgcccggcugcccggcaaggaggggcuguggcagauccaccuccaggacggcaagaucuccgcgaucgacgcccagagcggggucaugccgaucacggagaacucccuggacgccgagcagggccuggugaucccgcccuucguggagccccacauccaccucgacaccacccagaccgccgggcagcccaacuggaaccagagcggcacgcuguucgagggcaucgagcgcugggccgagcggaaggcgcugcucacccacgacgacgucaagcagcgcgccuggcagacccugaaguggcagaucgccaacgggauccagcacgugcggacccacguggacgucuccgacgccacgcugaccgcgcucaaggccaugcuggaggugaagcaggagguggcccccuggaucgaccugcagaucgucgccuucccccaggagggcauccucagcuaccccaacggggaggcccugcuggaggaggcgcuccgccugggcgccgacguggugggggccaucccgcacuucgaguucacccgggaguacggcgucgagucccugcacaagaccuucgcccucgcccagaaguacgaccgccugaucgacgugcacugcgacgagaucgacgacgagcagagccgguucguggagacggucgcggcccuggccuaccgcgagggcaugggggcccgggugaccgccucccacaccaccgcgaugcacagcuacaacggcgccuacacgucccgccucuuccggcugcugaagaugagcgggaucaacuucguggccaacccccucgucaacauccaccuccagggccgcuucgacaccuaccccaagcggcgcggcaucacccgggugaaggagaugcuggaguccgggaucaacgugugcuucggccacgacgacgucuucgaccccugguacccgcuggggaccgccaacaugcuccaggugcugcacaugggccugcacgugugccagcugaugggguacggccagaucaacgacggccugaaccucaucacgcaccacagcgcccgcacccugaaccugcaggacuacgggaucgcggccggcaacuccgccaaccucaucauccugcccgccgagaacggguucgacgcgcugcggcgccagguccccauccgguacagcgugcgcggcgggaaggucaucgccuccacccagcccgcccagaccacgguguaccucgagcagccggaggccaucgacuacaagcgcuga

SEQ ID NO: 5308 - RNA, 1299 nt, Artificial Sequence
  derived and/or modified sequence opt2 from Cytosine_Deaminase_codA__Escherichia_coli__CDU35197
auguggcgccucaccgucuccaacaacgcccuccagaccaucaucaacgcccgccuccccggcaaggagggccucuggcagauccaccuccaggacggcaagaucuccgccaucgacgcccaguccggcgucaugcccaucaccgagaacucccucgacgccgagcagggccucgucaucccccccuucgucgagccccacauccaccucgacaccacccagaccgccggccagcccaacuggaaccaguccggcacccucuucgagggcaucgagcgcugggccgagcgcaaggcccuccucacccacgacgacgucaagcagcgcgccuggcagacccucaaguggcagaucgccaacggcauccagcacguccgcacccacgucgacgucuccgacgccacccucaccgcccucaaggccaugcucgaggucaagcaggaggucgcccccuggaucgaccuccagaucgucgccuucccccaggagggcauccucuccuaccccaacggcgaggcccuccucgaggaggcccuccgccucggcgccgacgucgucggcgccaucccccacuucgaguucacccgcgaguacggcgucgagucccuccacaagaccuucgcccucgcccagaaguacgaccgccucaucgacguccacugcgacgagaucgacgacgagcagucccgcuucgucgagaccgucgccgcccucgccuaccgcgagggcaugggcgcccgcgucaccgccucccacaccaccgccaugcacuccuacaacggcgccuacaccucccgccucuuccgccuccucaagauguccggcaucaacuucgucgccaacccccucgucaacauccaccuccagggccgcuucgacaccuaccccaagcgccgcggcaucacccgcgucaaggagaugcucgaguccggcaucaacgucugcuucggccacgacgacgucuucgaccccugguacccccucggcaccgccaacaugcuccagguccuccacaugggccuccacgucugccagcucaugggcuacggccagaucaacgacggccucaaccucaucacccaccacuccgcccgcacccucaaccuccaggacuacggcaucgccgccggcaacuccgccaaccucaucauccuccccgccgagaacggcuucgacgcccuccgccgccagguccccauccgcuacuccguccgcggcggcaaggucaucgccuccacccagcccgcccagaccaccgucuaccucgagcagcccgaggccaucgacuacaagcgcuga

SEQ ID NO: 5309 - RNA, 1299 nt, Artificial Sequence
  derived and/or modified sequence opt3 from Cytosine_Deaminase_codA__Escherichia_coli__CDU35197
auguggagacugaccgugagcaacaaugcccuccagacaaucauuaacgcuaggcuucccggcaaggaggggcuguggcaaauacacuugcaggacggaaaaaucuccgcaauugaugcccagucuggugucaugccuaucacugaaaauucauuagacgcggagcagggccugguuauuccaccguucguggaaccccauauccaccuagauacgacccaaacagcugggcagccuaacuggaaucagaguggaacucucuuugagggcauagaacggugggccgagcgcaaggcacugcuuacccaugacgauguaaaacagcgagccuggcaaacacugaaguggcagaucgcuaacgguauucagcacgugcguacccaugucgacgugagcgaugcaacuuugacagcccucaaagcuaugcuggagguuaagcaggaaguggccccauggaucgaccugcaaauugucgcguucccccaggaggggauccucuccuacccuaauggagaagcauuacuggaggaggcccuuagauugggcgcugaugugguaggcgccauaccacacuuugaguucaccagggaauaugggguugaaucucugcacaagacguuugcacuagcucagaaauacgaccggcucauugaugugcauugcgacgagaucgaugacgaacaaucgcgcuucgucgagacuguggccgcgcuggccuauagagagggaaugggugcaagggugaccgcuucacacacaacugccaugcauagcuacaacggcgcuuauaccagucggcuuuuucgccuguugaagauguccgggauuaauuucgucgccaacccccucguuaauauccaucugcagggacgauuugacacauacccuaaaagaaggggcaucacccgggugaaggaaauguuagagucugguauuaacguauguuucgggcacgaugacguguuugauccaugguauccgcugggaacggcaaauaugcuccagguccuucacaugggccugcacgugugccaguugaugggcuacgggcaaauaaacgacggacuaaaucugaucacucaucacagcgcccguacacucaaccugcaggauuacgguauugcugcgggcaacuccgcaaaucuuaucauacugcccgccgaaaacggguucgacgcuuugcgcagacagguuccuauuagguauucagugcggggaggcaaagucaucgccaguacccagccagcacaaacuacaguguaccucgagcagcccgaagccaucgauuauaagcgauga

SEQ ID NO: 5310 - RNA, 1299 nt, Artificial Sequence
  derived and/or modified sequence opt4 from Cytosine_Deaminase_codA__Escherichia_coli__CDU35197
auguggagacugaccgugagcaacaacgcccugcagaccaucaucaacgccagacugcccggcaaggagggccuguggcagauccaccugcaggacggcaagaucagcgccaucgacgcccagagcggcgugaugcccaucaccgagaacagccuggacgccgagcagggccuggugaucccccccuucguggagccccacauccaccuggacaccacccagaccgccggccagcccaacuggaaccagagcggcacccuguucgagggcaucgagagaugggccgagagaaaggcccugcugacccacgacgacgugaagcagagagccuggcagacccugaaguggcagaucgccaacggcauccagcacgugagaacccacguggacgugagcgacgccacccugaccgcccugaaggccaugcuggaggugaagcaggagguggcccccuggaucgaccugcagaucguggccuucccccaggagggcauccugagcuaccccaacggcgaggcccugcuggaggaggcccugagacugggcgccgacguggugggcgccaucccccacuucgaguucaccagagaguacggcguggagagccugcacaagaccuucgcccuggcccagaaguacgacagacugaucgacgugcacugcgacgagaucgacgacgagcagagcagauucguggagaccguggccgcccuggccuacagagagggcaugggcgccagagugaccgccagccacaccaccgccaugcacagcuacaacggcgccuacaccagcagacuguucagacugcugaagaugagcggcaucaacuucguggccaacccccuggugaacauccaccugcagggcagauucgacaccuaccccaagagaagaggcaucaccagagugaaggagaugcuggagagcggcaucaacgugugcuucggccacgacgacguguucgaccccugguacccccugggcaccgccaacaugcugcaggugcugcacaugggccugcacgugugccagcugaugggcuacggccagaucaacgacggccugaaccugaucacccaccacagcgccagaacccugaaccugcaggacuacggcaucgccgccggcaacagcgccaaccugaucauccugcccgccgagaacggcuucgacgcccugagaagacaggugcccaucagauacagcgugagaggcggcaaggugaucgccagcacccagcccgcccagaccaccguguaccuggagcagcccgaggccaucgacuacaagagauga

SEQ ID NO: 5311 - RNA, 1299 nt, Artificial Sequence
  derived and/or modified sequence opt5 from Cytosine_Deaminase_codA__Escherichia_coli__CDU35197
auguggagacugaccgugagcaacaaugcccuccagacaaucauuaacgcucggcugcccggcaaggaggggcuuuggcaaauccaucugcaggacggaaaaauuuccgccaucgaugcgcagucuggcgucaugccuauuacggaaaauagccucgacgcugagcaggggcugguuaucccgcccuucguggaaccucacauccaccuugauaccacacaaaccgccggacagcccaacuggaaucaguccggcacacuguuugaggggauugaacgcugggccgagagaaaggcucuccugacccaugacgaugugaaacagcgggccuggcaaacacugaaguggcagaucgcuaacggcauucagcacguccgcacccauguggacguuucugaugccacgcucaccgcgcugaaagccaugcuugaggugaagcaggaagucgcuccuuggaucgaccugcaaauuguggccuucccccaggagggaauccucagcuacccuaauggcgaagcucugcuugaggaggcccugagacucggggcggauguugugggagccauuccgcacuuugaguucacacgggaauauggcgucgaaucccugcacaagaccuuugcucuggcccagaaauacgaccgccucaucgaugugcauugcgacgagaucgaugacgaacaaucuagauucguggagacagucgcugcccuggccuaucgggaggggaugggagcucgcguuaccgcgagccacacgacagccaugcauuccuacaacggcgcuuauaccagcagacuuuuucggcugcucaagaugucugggauuaauuucguggccaacccccuggugaauauccaccuucagggacgcuuugacacauacccuaaaagacggggcauuacccgcgucaaggaaaugcuggaguccggcaucaacguguguuucgggcacgaugacguuuuugaucccugguauccucucggaaccgccaauaugcuccaggugcugcauaugggccugcacgucugccagcugaugggguacggacaaauuaacgacggccuuaaucugaucacacaucacagcgcuagaacgcucaaccugcaggauuacgggaucgccgcgggaaacucugcuaaucuuauuauccugcccgccgaaaacggcuucgacgcccuccggagacaggugccgauucgcuauuccguucggggcgggaaagugaucgcuagcacccagccugcccaaacaaccgucuaccuggagcagcccgaagcuauugauuauaagagauga

SEQ ID NO: 5312 - RNA, 1299 nt, Artificial Sequence
  derived and/or modified sequence opt6 from Cytosine_Deaminase_codA__Escherichia_coli__CDU35197
auguggagacuaacaguuucaaauaacgcauuacaaacaauaauaaaugcuagacucccaggaaaagaaggacuauggcaaauccauuuacaagauggaaaaaucucagcaauagaugcacaaaguggaguaaugccaauaacagaaaacagccuagaugcagaacaaggcuuaguaauaccaccauuuguagagccacacauacacuuagauacgacucaaacagcaggccaaccaaauuggaaccaaaguggaacacuauuugaaggaauagaaagaugggcagaaagaaaagcauuacuaacacacgaugacguaaaacaaagagcauggcaaacauuaaaauggcaaauagcaaacggaauccaacauguaagaacacacguagacguaucagacgcuacauuaacagcacucaaagcaaugcuagaaguaaaacaagaaguagccccauggauagaucuacaaauaguagcauuuccucaagaaggaauauuauccuauccuaauggagaagcacuacuagaagaagcauuacgacuaggugcagacguaguaggagcaaucccucauuuugaauucacaagggaauacggcguagaaagcuuacacaaaaccuuugcucuagcacaaaaauacgacagauuaauagauguccauugcgacgaaauagacgaugaacaaucaagauuuguagaaacaguagcagcauuagcauauagagaagguaugggugcaagaguaacagcaucacauacuacagcaaugcauagcuacaauggugcauacacaucaagacucuuuagauuacuuaaaaugaguggaauaaauuuuguugcuaacccacuaguaaacauacaccuucaaggaagauucgauacguacccaaaaagaagagguaucacaagaguaaaagagauguuagaaucaggaauaaacguaugcuucggacacgacgauguauuugacccaugguauccauuaggaacagccaauaugcuacaaguacuacauaugggucuccauguaugucaacucaugggauacggucaaauaaacgauggacuaaauuuaauaacucaucacucagcaagaacucuaaaccuacaagacuauggaauagccgcaggaaauucagcaaauuugauaauacuaccagcagaaaacgguuuugacgcacuaagaagacaaguuccaauaagauauagcgucagagguggaaaaguaauagcaagcacucaaccagcucaaacaacaguuuacuuagaacaaccagaagcaauagacuauaaaagauaa

SEQ ID NO: 5313 - protein, 432 aa, Artificial Sequence
  Cytosine_Deaminase_codA__Escherichia_coli__A0A0H2V4N7
MWRLTVSNNALQTIINARLPGKEGLWQIHLHDGKISAIDTQSGVMPVTENSLDAEQGLVLPPFVEPHIHLDTTQTAGQPNWNQSGTLFEGIERWAERKALLTHDDVKQRAWQTLKWQIANGIQHVRTHVDVSDATLTALKAMLEVKQEVAPWIDLQIVAFPQEGILSYPNGEALLEEALRLGADVVGAIPHFEFTREYGVESLHKTFALAQKYDRLIDVHCDEIDDEQSRFVETVAALAHREGMGARVTASHTTAMHSYNGAYTSRLFRLLKMSGINFVANPLVNIHLQGRFDTYPKRRGITRVKEMLESGINVCFGHDDVFDPWYPLGTANMLQVLHMGLHVCQLMGYGQINDGLNLITHHSARTLNLQDYGIAAGNSANLIILPAENGFDALRRQVPVRYSVRGGKVMASTQPAQTTVYLEQPEAIDYKR

SEQ ID NO: 5314 - RNA, 1299 nt, Artificial Sequence
  Cytosine_Deaminase_codA__Escherichia_coli__AAN78935
auguggaggcuaacagugucgaauaacgcuuuacaaacaauuauuaacgcccgguuacccggcaaagaggggcuguggcagauucaucuucacgacggaaaaaucagcgccauugauacgcaaucuggugugaugcccguaacugaaaacagccuggaugccgaacaagguuuaguuuuaccgccguuuguggagccgcauauucaccuggacaccacgcaaaccgccggacaaccgaacuggaaucaguccggcacgcuguuugaaggcauugaacgcugggccgagcgcaaagcguuauuaacccaugacgaugugaaacaacgcgccuggcaaacgcugaaauggcagauugccaacggcauucagcaugugcguacccaugucgaugucuccgacgcaacgcugacugcguugaaagcgaugcuggaagugaaacaggaaguugcgccguggauugaucugcaaaucgucgccuucccgcaggaagggauuuugucguaucccaacggugaagcguugcuggaagaggcguuacgcuuaggggcagacguuguuggggcgauuccgcauuuugaauuuacccgugaauauggcguggagucgcugcauaaaaccuucgcccuggcgcaaaaauacgaccgucucaucgauguucacugugacgagauugaugaugagcaaucacgcuuugucgaaaccguugcugcccuggcgcaccgugaaggcaugggcgcgcgagucaccgccagccauacuacggcaaugcacuccuauaacggggcguauacuucgcgccuguuucguuugcugaaaauguccgguauuaacuuugucgccaacccguuggucaauauucaucugcaaggacguuucgauacguauccaaaacgucgcggcaucacgcgcguuaaagagaugcuggaguccggcauuaacgucugcuuuggucacgaugaugucuucgauccgugguauccgcugggaacggcgaauaugcugcaagugcugcauauggggcugcauguuugccagcugaugggcuacgggcagauuaacgacggccugaauuuaaucacccaccacagcgccaggacguugaauuugcaggauuacggcauugccgccggaaacagcgccaaccugauuauccugccggcugaaaauggguuugaugcguugcgccgucagguuccgguacguuauucgguacguggcgguaaggugauggccagcacacaaccggcacaaaccaccguauaucuggagcagccagaagccaucgauuacaaacgguaa

SEQ ID NO: 5315 - RNA, 1299 nt, Artificial Sequence
  derived and/or modified sequence opt1 from Cytosine_Deaminase_codA__Escherichia_coli__AAN78935
auguggcgccugaccgugagcaacaacgcccuccagaccaucaucaacgcccggcugcccggcaaggaggggcuguggcagauccaccuccacgacggcaagaucuccgcgaucgacacgcagagcggggucaugccggugaccgagaacucccuggacgccgagcagggccuggugcucccgcccuucgucgagccccacauccaccuggacaccacccagacggccgggcagcccaacuggaaccagagcggcacccuguucgagggcaucgagcgcugggccgagcggaaggcccuccugacccacgacgacgugaagcagcgcgcguggcagacccugaaguggcagaucgccaacgggauccagcacgugcggacgcacgucgacguguccgacgccacccucaccgcccugaaggcgaugcuggaggugaagcaggaggucgcccccuggaucgaccuccagaucguggccuucccccaggagggcauccugagcuaccccaacggggaggcccugcucgaggaggcccugcgccugggcgcggacguggucggggccaucccgcacuucgaguucacccgggaguacggcguggagucccuccacaagacguucgcccuggcccagaaguacgaccgccugaucgacgugcacugcgacgagaucgacgacgagcagagccgguucgucgagaccguggccgcgcucgcccaccgcgagggcaugggggcccgggugaccgccucccacaccacggccaugcacagcuacaacggcgcguacaccucccgccuguuccggcugcucaagaugagcgggaucaacuucgucgccaacccccuggugaacauccaccuccagggccgcuucgacaccuaccccaagcggcgcggcaucacccgggugaaggagaugcuggaguccgggaucaacgucugcuucggccacgacgacguguucgaccccugguacccgcuggggacggccaacaugcuccaggugcugcacaugggccugcacgucugccagcugaugggguacggccagaucaacgacggccucaaccugaucacccaccacagcgcccgcacccugaaccuccaggacuacgggaucgccgcgggcaacuccgccaaccugaucauccugcccgccgagaacggguucgacgcccuccggcgccaggugcccguccgguacagcgugcgcggcgggaaggugauggcguccacccagcccgcccagacgaccgucuaccuggagcagccggaggccaucgacuacaagcgcuga

SEQ ID NO: 5316 - RNA, 1299 nt, Artificial Sequence
  derived and/or modified sequence opt2 from Cytosine_Deaminase_codA__Escherichia_coli__AAN78935
auguggcgccucaccgucuccaacaacgcccuccagaccaucaucaacgcccgccuccccggcaaggagggccucuggcagauccaccuccacgacggcaagaucuccgccaucgacacccaguccggcgucaugcccgucaccgagaacucccucgacgccgagcagggccucguccucccccccuucgucgagccccacauccaccucgacaccacccagaccgccggccagcccaacuggaaccaguccggcacccucuucgagggcaucgagcgcugggccgagcgcaaggcccuccucacccacgacgacgucaagcagcgcgccuggcagacccucaaguggcagaucgccaacggcauccagcacguccgcacccacgucgacgucuccgacgccacccucaccgcccucaaggccaugcucgaggucaagcaggaggucgcccccuggaucgaccuccagaucgucgccuucccccaggagggcauccucuccuaccccaacggcgaggcccuccucgaggaggcccuccgccucggcgccgacgucgucggcgccaucccccacuucgaguucacccgcgaguacggcgucgagucccuccacaagaccuucgcccucgcccagaaguacgaccgccucaucgacguccacugcgacgagaucgacgacgagcagucccgcuucgucgagaccgucgccgcccucgcccaccgcgagggcaugggcgcccgcgucaccgccucccacaccaccgccaugcacuccuacaacggcgccuacaccucccgccucuuccgccuccucaagauguccggcaucaacuucgucgccaacccccucgucaacauccaccuccagggccgcuucgacaccuaccccaagcgccgcggcaucacccgcgucaaggagaugcucgaguccggcaucaacgucugcuucggccacgacgacgucuucgaccccugguacccccucggcaccgccaacaugcuccagguccuccacaugggccuccacgucugccagcucaugggcuacggccagaucaacgacggccucaaccucaucacccaccacuccgcccgcacccucaaccuccaggacuacggcaucgccgccggcaacuccgccaaccucaucauccuccccgccgagaacggcuucgacgcccuccgccgccagguccccguccgcuacuccguccgcggcggcaaggucauggccuccacccagcccgcccagaccaccgucuaccucgagcagcccgaggccaucgacuacaagcgcuga

SEQ ID NO: 5317 - RNA, 1299 nt, Artificial Sequence
  derived and/or modified sequence opt3 from Cytosine_Deaminase_codA__Escherichia_coli__AAN78935
auguggagacugaccgugagcaacaaugcccuccagacaaucauuaacgcuaggcuucccggcaaggaggggcuguggcaaauacacuugcaugacggaaaaaucuccgcaauugauacucagucuggugucaugccuguuacggaaaauucauuagacgccgagcagggccuggugcuaccaccguucguagaaccccacauccaucucgauaccacacagacugcggggcaaccuaacuggaaucagaguggaacccuguuugagggcauugaacggugggcugagcgcaaggcccuucugacacacgacgaugugaaacagcgagcauggcagaccuugaaguggcaaaucgccaacgguauacagcauguccguacucacguggacguuagcgaugcuacacucaccgcacugaaagccaugcuggaggugaagcaggaagucgcuccauggaucgaccuccagauuguggccuucccccaagaggggaucuuauccuacccuaauggagaagcgcugcuugaggaggcauugagacugggcgccgauguaguuggcgcuauuccacacuuugaguucacgagggaauaugggguggaaucucuacauaagacuuuugcccucgcacagaaauacgaccggcugaucgauguccacugcgacgagauagaugacgaacagucgcgcuucguggagaccguggcugcccuugcgcauagagagggaaugggugccagggucacagcaucacacacuaccgcuaugcacagcuauaacggcgccuacacaagucggcuguuucgcuugcucaagauguccgggauuaauuucguugcuaacccccuggugaauauccauuuacaaggacgauuugacaccuauccuaaaagaaggggcauuacgcggguaaaggaaaugcuggagucugguaucaacguguguuucgggcacgaugacgucuuugauccaugguacccgcucggaacugccaauaugcuucaggugcugcauaugggcuugcacguuugccagcuaaugggcuaugggcagaucaacgacggacugaaucucauuacacaucacagcgcacguacccugaaccuucaagauuacgguauagccgcuggcaacuccgcgaaucugaucauuuugcccgcagaaaacggguucgacgcccuccgcagacaggugccugucagguacucagugcggggaggcaaaguaauggcuaguacucagccagcccagacaaccguuuaucuggagcaacccgaagcaaucgauuacaagcgauga

SEQ ID NO: 5318 - RNA, 1299 nt, Artificial Sequence
  derived and/or modified sequence opt4 from Cytosine_Deaminase_codA__Escherichia_coli__AAN78935
auguggagacugaccgugagcaacaacgcccugcagaccaucaucaacgccagacugcccggcaaggagggccuguggcagauccaccugcacgacggcaagaucagcgccaucgacacccagagcggcgugaugcccgugaccgagaacagccuggacgccgagcagggccuggugcugccccccuucguggagccccacauccaccuggacaccacccagaccgccggccagcccaacuggaaccagagcggcacccuguucgagggcaucgagagaugggccgagagaaaggcccugcugacccacgacgacgugaagcagagagccuggcagacccugaaguggcagaucgccaacggcauccagcacgugagaacccacguggacgugagcgacgccacccugaccgcccugaaggccaugcuggaggugaagcaggagguggcccccuggaucgaccugcagaucguggccuucccccaggagggcauccugagcuaccccaacggcgaggcccugcuggaggaggcccugagacugggcgccgacguggugggcgccaucccccacuucgaguucaccagagaguacggcguggagagccugcacaagaccuucgcccuggcccagaaguacgacagacugaucgacgugcacugcgacgagaucgacgacgagcagagcagauucguggagaccguggccgcccuggcccacagagagggcaugggcgccagagugaccgccagccacaccaccgccaugcacagcuacaacggcgccuacaccagcagacuguucagacugcugaagaugagcggcaucaacuucguggccaacccccuggugaacauccaccugcagggcagauucgacaccuaccccaagagaagaggcaucaccagagugaaggagaugcuggagagcggcaucaacgugugcuucggccacgacgacguguucgaccccugguacccccugggcaccgccaacaugcugcaggugcugcacaugggccugcacgugugccagcugaugggcuacggccagaucaacgacggccugaaccugaucacccaccacagcgccagaacccugaaccugcaggacuacggcaucgccgccggcaacagcgccaaccugaucauccugcccgccgagaacggcuucgacgcccugagaagacaggugcccgugagauacagcgugagaggcggcaaggugauggccagcacccagcccgcccagaccaccguguaccuggagcagcccgaggccaucgacuacaagagauga

SEQ ID NO: 5319 - RNA, 1299 nt, Artificial Sequence
  derived and/or modified sequence opt5 from Cytosine_Deaminase_codA__Escherichia_coli__AAN78935
auguggagacugaccgugagcaacaaugcccuccagacaaucauuaacgcucggcugcccggcaaggaggggcuuuggcaaauccaucugcacgacggaaaaauuuccgccaucgauacgcagucuggcgucaugccuguuaccgaaaauagccucgacgcggagcaggggcuggugcuuccgcccuucguggaaccucacauucaucuggauacaacccagacagcuggacaacccaacuggaaucaguccggcacccucuuugaggggaucgaacgcugggccgagagaaaggcccugcugacacacgacgaugucaaacagcgggcuuggcagacccucaaguggcaaaucgccaacggcauucagcaugugcgcacgcacguugacgugucugaugcuacccugacagcccuuaaagcgaugcuggaggucaagcaggaaguggccccuuggaucgaccuccagauuguugcuuucccccaagagggaauccugagcuacccuaauggcgaagcccuucuggaggaggcucucagacugggggccgauguggucggagcgauuccgcacuuugaguucacccgggaauauggcguggaaucccugcauaagacauuugcccucgcucagaaauacgaccgccugaucgaugugcacugcgacgagauugaugacgaacagucuagauucgucgagaccguugccgcucuugcccaucgggaggggaugggagcccgcgugacggcuagccacacaaccgcgaugcacuccuauaacggcgccuacacaagcagacuguuucggcuccugaagaugucugggaucaauuucguggcuaacccccuugucaauauccaucugcaaggacgcuuugacaccuauccuaaaagacggggcauuacccgcgugaaggaaaugcucgaguccggcaucaacguuuguuucgggcacgaugacguguuugaucccugguacccucugggaacagccaauaugcugcagguccuccauaugggccugcacgugugccagcuuaugggguauggacagauuaacgacggccugaaucucaucacgcaucacagcgccagaacccugaaccuucaagauuacgggauugcugccggaaacucugcgaaucugaucauccuccccgcugaaaacggcuucgacgcccugcggagacagguuccggugcgcuacuccguccggggcgggaaagugauggccagcacacagccugcucagaccacagucuaucuggagcaacccgaagccauugauuacaagagauga

SEQ ID NO: 5320 - RNA, 1299 nt, Artificial Sequence
  derived and/or modified sequence opt6 from Cytosine_Deaminase_codA__Escherichia_coli__AAN78935
auguggagacuaacagucucaaauaacgcuuuacaaacaauaauaaaugcaagacuaccaggaaaagaaggacuauggcaaauacaccuacacgacggaaaaauaagcgcaauagacacacaaucaggaguaaugccagucacagaaaauagcuuagacgcugaacaaggauugguauuaccaccauuuguagaaccacacauccacuuagacacuacacaaacagccggacaaccaaauuggaaccaaaguggaacacuauucgaaggaauagaaagaugggcagaaagaaaagcacuauuaacccacgacgacguaaaacaaagagcauggcaaacacuaaaauggcaaauagcaaaugggauacaacauguacgaacacauguagauguaucagaugcaacauuaaccgcauugaaagcaauguuagaaguaaaacaagaagucgcaccauggauagaccuacaaauugucgcauucccccaagaaggaauacuaucauaccccaauggugaagcauuacuagaagaagcacuaagacucggagcagauguaguuggagcaauaccacacuuugaauucacuagagaauauggagucgaaagccuacacaaaacauuugcacuagcucaaaaauaugauagauuaauagacguacacugugaugaaauagaugaugaacaaucaagguuuguagaaacaguagcagcauuagcacauagagaaggaaugggagcaagaguaacagcaagucauacaacagcaaugcauucauacaacggagcauacacaagcagacuauuuaggcuacuaaaaauguccggaauaaauuuugucgcaaacccacuaguaaacauacacuuacaaggacgauucgacacauacccaaaaagacgaggaaucacuagaguaaaagaaauguuagaaucaggaauaaacguaugcuuuggacaugacgauguuuuugaucccugguauccauuaggaacagccaacauguuacaaguacuacacaugggacuacaugucugucaauuaauggguuauggacaaauaaacgaugguuuaaaucuaauaacacaccacucagcaagaacauuaaauuuacaagacuacggaauagcagcaggaaauucagcaaacuuaauaauacuaccugcagaaaacggauucgacgcguuaagacgacaaguacccguaagauacagcguaagagguggaaaaguaauggcaucaacucaacccgcacaaacaacaguuuacuuagaacaaccagaagcaauagacuauaaaagauaa

SEQ ID NO: 5321 - protein, 432 aa, Artificial Sequence
  Cytosine_Deaminase_codA__Escherichia_coli__A0A0H2YX33
MWRLTVSNNALQTIINAQLPGKEGLWQIHLHDGKISAIDAQSGVMPVTENSLDAEQGLVLPPFVEPHIHLDTTQTAGQPNWNQSGTLFEGIERWAERKALLTHDDVKQRAWQTLKWQIANGIQHVRTHVDVSDATLTALKAMLEVKQEVAPWIDLQIVAFPQEGILSYPNGEALLEEALRLGADVVGAIPHFEFTREYGVESLHKTFALAQKYDRLIDVHCDEIDDEQSRFVETVAALAHREGMGARVTASHTTAMHSYNGAYTSRLFRLLKMSGINFVANPLVNIHLQGRFDTYPKRRGITRVKEMLESGINVCFGHDDVFDPWYPLGTANMLQVLHMGLHVCQLMGYGQINDGLNLITHHSARTLNLQDYGIAAGNSANLIILPAENGFDALRRQVPVRYSVRGGKVIASTQPAQTTVYLEQPEAIDYKR

SEQ ID NO: 5322 - RNA, 1299 nt, Artificial Sequence
  Cytosine_Deaminase_codA__Escherichia_coli__ABI99817
auguggaggcuaacagugucgaauaaugcuuuacaaacaauuauuaacgcccaguuacccggcaaagaggggcuguggcagauucaucuucacgacggaaaaaucagcgccauugaugcgcaauccggggugaugcccguaacugaaaacagccuggaugccgaacaagguuuaguuuuaccgccguuuguggagccgcauauucaccuggacaccacgcaaaccgccggacaaccgaacuggaaucaguccggcacgcuguuugaaggcauugaacgcugggccgagcgcaaagcguuauuaacucaugacgaugugaaacaacgcgcauggcaaacgcugaaauggcagauugccaacggcauucagcaugugcguacccaugucgaugucuccgacgcaacgcugacugcguugaaagcgaugcuggaagugaaacaggaaguugcgccguggauugaucugcaaaucgucgccuucccgcaggaagggauuuugucguaucccaacggugaagcguugcuggaagaggcgcuacgcuuaggggcagauguuguuggggcgauuccgcauuuugaauuuacccgugaauacggcguggagucgcugcauaaaaccuucgcccuggcgcaaaaauacgaccgucucaucgacguucacugugaugagaucgaugacgagcagucgcgcuuugucgaaaccguugcugcccuggcgcaccgugaaggcaugggcgcgcgagucaccgccagccauacuacggcaaugcacuccuauaacggggcguauacuucgcgccuguuccguuugcugaaaauguccgguauuaacuuugucgccaacccguuggucaauauucaucugcaaggacguuucgauacguauccaaaacgucgcggcaucacgcgcguuaaagagaugcuggaguccggcauuaacgucugcuuuggucacgaugaugucuucgauccgugguauccgcugggaacggcgaauaugcugcaagugcugcauauggggcugcauguuugccagcugaugggcuacgggcagauuaacgacggccugaauuuaaucacccaccacagcgccaggacguugaauuugcaggauuacggcauugccgccggaaacagcgccaaccugauuauccugccggcugaaaauggguuugaugcgcugcgccgucagguuccgguacguuauucgguacguggcggcaaggugauugccagcacacaaccggcacaaaccaccguauaucuggagcagccagaagccaucgauuacaaacgguaa

SEQ ID NO: 5323 - RNA, 1299 nt, Artificial Sequence
  derived and/or modified sequence opt1 from Cytosine_Deaminase_codA__Escherichia_coli__ABI99817
auguggcgccugaccgugagcaacaacgcccuccagaccaucaucaacgcccagcugcccggcaaggaggggcuguggcagauccaccuccacgacggcaagaucuccgcgaucgacgcccagagcggggucaugccggugacggagaacucccuggacgccgagcagggccuggugcucccgcccuucgucgagccccacauccaccuggacaccacccagaccgccgggcagcccaacuggaaccagagcggcacgcuguucgagggcaucgagcggugggccgagcgcaaggcgcuccugacccacgacgacgugaagcagcgggccuggcagacccugaaguggcagaucgccaacgggauccagcacgugcgcacccacgucgacguguccgacgccacgcucaccgcgcugaaggccaugcuggaggugaagcaggaggucgcccccuggaucgaccuccagaucguggccuucccccaggagggcauccugagcuaccccaacggggaggcccugcucgaggaggcgcugcggcugggcgccgacguggucggggccaucccgcacuucgaguucacccgcgaguacggcguggagucccuccacaagaccuucgcccuggcccagaaguacgaccggcugaucgacgugcacugcgacgagaucgacgacgagcagagccgcuucgucgagacgguggcggcccucgcccaccgggagggcaugggggcccgcgugaccgccucccacaccaccgcgaugcacagcuacaacggcgccuacacgucccggcuguuccgccugcucaagaugagcgggaucaacuucgucgccaacccccuggugaacauccaccuccagggccgguucgacaccuaccccaagcgccggggcaucacccgcgugaaggagaugcuggaguccgggaucaacgucugcuucggccacgacgacguguucgaccccugguacccgcuggggaccgccaacaugcuccaggugcugcacaugggccugcacgucugccagcugaugggguacggccagaucaacgacggccucaaccugaucacgcaccacagcgcccggacccugaaccuccaggacuacgggaucgcggccggcaacuccgccaaccugaucauccugcccgccgagaacggguucgacgcgcuccgccgccaggugcccguccgguacagcgugcggggcgggaaggugaucgccuccacccagcccgcccagaccacggucuaccuggagcagccggaggccaucgacuacaagcgcuga

SEQ ID NO: 5324 - RNA, 1299 nt, Artificial Sequence
  derived and/or modified sequence opt2 from Cytosine_Deaminase_codA__Escherichia_coli__ABI99817
auguggcgccucaccgucuccaacaacgcccuccagaccaucaucaacgcccagcuccccggcaaggagggccucuggcagauccaccuccacgacggcaagaucuccgccaucgacgcccaguccggcgucaugcccgucaccgagaacucccucgacgccgagcagggccucguccucccccccuucgucgagccccacauccaccucgacaccacccagaccgccggccagcccaacuggaaccaguccggcacccucuucgagggcaucgagcgcugggccgagcgcaaggcccuccucacccacgacgacgucaagcagcgcgccuggcagacccucaaguggcagaucgccaacggcauccagcacguccgcacccacgucgacgucuccgacgccacccucaccgcccucaaggccaugcucgaggucaagcaggaggucgcccccuggaucgaccuccagaucgucgccuucccccaggagggcauccucuccuaccccaacggcgaggcccuccucgaggaggcccuccgccucggcgccgacgucgucggcgccaucccccacuucgaguucacccgcgaguacggcgucgagucccuccacaagaccuucgcccucgcccagaaguacgaccgccucaucgacguccacugcgacgagaucgacgacgagcagucccgcuucgucgagaccgucgccgcccucgcccaccgcgagggcaugggcgcccgcgucaccgccucccacaccaccgccaugcacuccuacaacggcgccuacaccucccgccucuuccgccuccucaagauguccggcaucaacuucgucgccaacccccucgucaacauccaccuccagggccgcuucgacaccuaccccaagcgccgcggcaucacccgcgucaaggagaugcucgaguccggcaucaacgucugcuucggccacgacgacgucuucgaccccugguacccccucggcaccgccaacaugcuccagguccuccacaugggccuccacgucugccagcucaugggcuacggccagaucaacgacggccucaaccucaucacccaccacuccgcccgcacccucaaccuccaggacuacggcaucgccgccggcaacuccgccaaccucaucauccuccccgccgagaacggcuucgacgcccuccgccgccagguccccguccgcuacuccguccgcggcggcaaggucaucgccuccacccagcccgcccagaccaccgucuaccucgagcagcccgaggccaucgacuacaagcgcuga

SEQ ID NO: 5325 - RNA, 1299 nt, Artificial Sequence
  derived and/or modified sequence opt3 from Cytosine_Deaminase_codA__Escherichia_coli__ABI99817
auguggagacugaccgugagcaacaaugcccuccagacaaucauuaacgcucaacuucccggcaaggaggggcuguggcagauacacuugcaugacggaaaaaucuccgcaauugaugcccagucuggugucaugccuguuacugaaaauucauuagacgcggagcagggccuggugcuaccaccguucguagaaccccacauccaucucgauacgacccaaacagcugggcagccuaacuggaaucagaguggaacucuguuugagggcauugaaaggugggccgagcggaaggcacuucugacccacgacgaugugaaacagcgcgccuggcaaacauugaaguggcagaucgcuaacgguauacagcauguccgaacccacguggacguuagcgaugcaacucucacagcccugaaagcuaugcuggaggugaagcaggaagucgccccauggaucgaccuccaaauuguggcguucccccaggaggggaucuuauccuacccuaauggagaagcacugcuugaggaggccuugcgucugggcgcugauguaguuggcgccauuccacacuuugaguucaccagagaauaugggguggaaucucuacauaagacguuugcacucgcucagaaauacgacaggcugaucgauguccacugcgacgagauagaugacgaacaaucgcgguucguggagacuguggccgcgcuugcccaucgcgagggaaugggugcaagagucaccgcuucacacacaacugccaugcacagcuauaacggcgcuuacaccaguaggcuguuucgguugcucaagauguccgggauuaauuucguugccaacccccuggugaauauccauuuacagggacgcuuugacacauauccuaaacgaagaggcauuaccaggguaaaggaaaugcuggagucugguaucaacguguguuucgggcacgaugacgucuuugauccaugguacccgcucggaacggcaaauaugcuucaggugcugcauaugggcuugcacguuugccagcuaaugggcuaugggcaaaucaacgacggacugaaucucauuacucaucacagcgcccggacacugaaccuucaggauuacgguauagcugcgggcaacuccgcaaaucugaucauuuugcccgccgaaaacggguucgacgcucuccgucgccaggugccugucagauacucagugaggggaggcaaaguaaucgccaguacccagccagcacaaacuacaguuuaucuggagcagcccgaagccauagauuacaagcgguga

SEQ ID NO: 5326 - RNA, 1299 nt, Artificial Sequence
  derived and/or modified sequence opt4 from Cytosine_Deaminase_codA__Escherichia_coli__ABI99817
auguggagacugaccgugagcaacaacgcccugcagaccaucaucaacgcccagcugcccggcaaggagggccuguggcagauccaccugcacgacggcaagaucagcgccaucgacgcccagagcggcgugaugcccgugaccgagaacagccuggacgccgagcagggccuggugcugccccccuucguggagccccacauccaccuggacaccacccagaccgccggccagcccaacuggaaccagagcggcacccuguucgagggcaucgagagaugggccgagagaaaggcccugcugacccacgacgacgugaagcagagagccuggcagacccugaaguggcagaucgccaacggcauccagcacgugagaacccacguggacgugagcgacgccacccugaccgcccugaaggccaugcuggaggugaagcaggagguggcccccuggaucgaccugcagaucguggccuucccccaggagggcauccugagcuaccccaacggcgaggcccugcuggaggaggcccugagacugggcgccgacguggugggcgccaucccccacuucgaguucaccagagaguacggcguggagagccugcacaagaccuucgcccuggcccagaaguacgacagacugaucgacgugcacugcgacgagaucgacgacgagcagagcagauucguggagaccguggccgcccuggcccacagagagggcaugggcgccagagugaccgccagccacaccaccgccaugcacagcuacaacggcgccuacaccagcagacuguucagacugcugaagaugagcggcaucaacuucguggccaacccccuggugaacauccaccugcagggcagauucgacaccuaccccaagagaagaggcaucaccagagugaaggagaugcuggagagcggcaucaacgugugcuucggccacgacgacguguucgaccccugguacccccugggcaccgccaacaugcugcaggugcugcacaugggccugcacgugugccagcugaugggcuacggccagaucaacgacggccugaaccugaucacccaccacagcgccagaacccugaaccugcaggacuacggcaucgccgccggcaacagcgccaaccugaucauccugcccgccgagaacggcuucgacgcccugagaagacaggugcccgugagauacagcgugagaggcggcaaggugaucgccagcacccagcccgcccagaccaccguguaccuggagcagcccgaggccaucgacuacaagagauga

SEQ ID NO: 5327 - RNA, 1299 nt, Artificial Sequence
  derived and/or modified sequence opt5 from Cytosine_Deaminase_codA__Escherichia_coli__ABI99817
auguggagacugaccgugagcaacaaugcccuccagacaaucauuaacgcucaacugcccggcaaggaggggcuuuggcagauccaccuucaugacggaaaaauuuccgccaucgaugcgcagucuggcgucaugccuguuacggaaaauagccucgacgcugagcaggggcuggugcuuccgcccuucguggaaccucacauucaucuggauaccacacaaaccgccggacagcccaacuggaaucaguccggcacacucuuugaggggaucgaacggugggccgagcgcaaggcucugcugacccacgacgaugucaaacagagagccuggcaaacacucaaguggcagaucgcuaacggcauucagcaugugcggacccacguugacgugucugaugccacgcugaccgcgcuuaaagccaugcuggaggucaagcaggaaguggcuccuuggaucgaccuccaaauuguugccuucccccaggagggaauccugagcuacccuaauggcgaagcucugcuggaggaggcccuccgccugggggcggauguggucggagccauuccgcacuuugaguucacaagagaauauggcguggaaucccugcauaagaccuuugcucucgcccagaaauacgaccggcugaucgaugugcacugcgacgagauugaugacgaacaaucucgcuucgucgagacaguugcugcccuugcccauagagaggggaugggagcucgggugaccgcgagccacacgacagccaugcacuccuauaacggcgcuuacaccagccgccuguuuagacuccugaagaugucugggaucaauuucguggccaacccccuugucaauauccaucugcagggacgguuugacacauauccuaaacgcagaggcauuacccgggugaaggaaaugcucgaguccggcaucaacguuuguuucgggcacgaugacguguuugaucccugguacccucugggaaccgccaauaugcugcagguccuccauaugggccugcacgugugccagcuuaugggguauggacaaauuaacgacggccugaaucucaucacacaucacagcgcucgcacgcugaaccuucaggauuacgggauugccgcgggaaacucugcuaaucugaucauccuccccgccgaaaacggcuucgacgcccugagacggcagguuccggugagauacuccguccgcggcgggaaagugauugcuagcacccagccugcccaaacaaccgucuaucuggagcagcccgaagcuaucgauuacaagcgguga

SEQ ID NO: 5328 - RNA, 1299 nt, Artificial Sequence
  derived and/or modified sequence opt6 from Cytosine_Deaminase_codA__Escherichia_coli__ABI99817
auguggagauuaacaguaucaaauaaugcacuacaaacaauaauaaaugcacaacuaccuggaaaagaaggacuauggcaaauacaucuacacgauggaaaaauaucugcaauagacgcacaaucaggaguaaugccagucacagaaaauagcuuagacgcugaacaaggacuaguacuccccccauucgucgaaccacauauacacuuagauacuacacaaacagccggacaaccaaauuggaaucaaucaggaacauuauuugaaggaauagaaagaugggccgaaagaaaagcauuacuaacacacgaugacguaaaacaaagagcuuggcaaacauuaaaauggcaaauagcaaauggcauacagcaugucagaacacacgucgauguaucugacgcaacccuaacagcacuaaaagcuaugcuagaaguaaaacaagaaguagcuccauggauagauuuacaaauagucgcauuuccacaagaaggaauacuaucauaucccaauggagaagcuuuauuagaagaagcuuuaagacuaggugcagaugucguuggagcaaucccucauuucgaauucacaagagaauacggaguugaaucacuacacaaaacauucgcacuagcccaaaaauacgaucgauuaauagacguucauugcgaugaaauagaugaugaacaaucacgauuuguugaaacaguagcagcauuagcacauagagaaggcaugggagcacgaguaacagcaucacacacaacugcaaugcacucauacaauggagcauauacaucacgguuauucagacuacuaaaaaugagugggauaaacuuuguagccaacccacuaguaaacauacacuuacaaggacgauuugacacauauccuaaaagacgaggaauaaccagaguaaaagaaaugcuagaaucaggaaucaauguaugcuucggacacgaugauguauuugacccaugguauccacuuggcacagcaaauauguuacaaguacuccauaugggacuacaugucugucaacuaaugggauacggacaaauaaacgauggauuaaaccuaauaacacaccauucugcaagaacuuuaaauuuacaagauuauggaauagcagcaggcaauucagcaaaccuuauaauucuacccgcagaaaauggcuucgaugcauuaagaagacaaguuccaguaagauauucaguaagaggaggaaaaguaaucgcaucaacacaaccugcacaaacaacaguauaccuagaacaaccagaagcaauagacuauaaacgauaa

SEQ ID NO: 5329 - protein, 432 aa, Artificial Sequence
  Cytosine_Deaminase_codA__Escherichia_coli__F4NM90
MWRLTVSNNALQTIINARLPGKEGLWQIHLQDGKISAIDAQSGVMPITENSLDAEQGLVIPPFVEPHIHLDTTQTAGQPNWNQSGTLFEGIERWAERKALLTHDDVKQRAWQTLKWQIANGIQHVRTHVDVSDATLTALKAMLEVKQEVAPWIDLQIVAFPQEGILSYPNGEALLEEALRLGADVVGAIPHFEFTREYGVESLHKTFALAQKYDRLIDVHCDEIDDEQSRFVETVAALAHREGMGARVTASHTTAMHSYNGAYTSRLFRLLKMSGINFVANPLVNIHLQGRFDTYPKRRGITRVKEMLESGINVCFGHDDVFDPWYPLGTANMLQVLHMGLHVCQLMGYGQINDGLNLITHHSARTLNLQDYGIAAGNSANLIILPAENGFDALRRQVPVRYSVRGGKVIASTQPAQTTVYLEQPEAIDYKR

SEQ ID NO: 5330 - RNA, 1299 nt, Artificial Sequence
  Cytosine_Deaminase_codA__Escherichia_coli__EGJ07181
auguggagguuaacagugucgaauaacgcuuuacaaacaauuauuaacgcccgguuaccaggcaaagaggggcuguggcagauucaucugcaggacggaaaaaucagcgccauugaugcgcaauccggcgugaugcccauaacugaaaacagccuggaugccgaacaagguuuaguuauaccgccguuuguggagccgcauauucaccuggacaccacgcaaaccgccggacaaccgaacuggaaucaguccggcacgcuguuugaaggcauugaacgcugggccgagcgcaaagcguuauuaacccaugacgaugugaaacaacgcgccuggcaaacgcugaaauggcagauugccaacggcauucagcaugugcguacccaugucgauguuucggaugcaacgcuaacugcgcugaaagcaaugcuggaagugaagcaggaagucgcgccguggauugaucugcaaauugucgccuucccucaggaagggauuuugucguaucccaacggugaagcguugcuggaagaggcguuacgcuuaggggcagauguagugggggcgauuccgcauuuugaauuuacccgugaauacggcguggagucgcugcauaaaaccuucgcccuggcgcaaaaauacgaccgucucaucgacguucacugugaugagaucgaugacgagcagucgcgcuuugucgaaaccguugcugcccuggcgcaccgugaaggcaugggcgcgcgagucaccgccagccacaccacggcaaugcacuccuauaacggggcguauaccucacgccuguuccgcuugcugaaaauguccgguauuaacuuugucgccaacccgcuggucaauauucaucugcaaggacguuucgauacguauccaaaacgucgcggcaucacgcgcguuaaagagaugcuggaguccggcauuaacgucugcuuuggucacgaugaugucuucgauccgugguauccgcugggaacggcgaauaugcugcaagugcugcauauggggcugcauguuugccaguugaugggcuacgggcagauuaacgauggccugaauuuaaucacccaccacagugccagaacauugaauuugcaggauuacggcauugccgccggaaacagcgcaaaccugauuauccugccggcugaaaauggauuugaugcgcugcgccgucagguuccgguacguuauucgguacguggcggcaaggugauugccaguacacaaccggcacaaaccaccguauaucuggagcagccagaagccaucgauuacaaacgguaa

SEQ ID NO: 5331 - RNA, 1299 nt, Artificial Sequence
  derived and/or modified sequence opt1 from Cytosine_Deaminase_codA__Escherichia_coli__EGJ07181
auguggcgccugaccgugagcaacaacgcccuccagaccaucaucaacgcccggcugcccggcaaggaggggcuguggcagauccaccuccaggacggcaagaucuccgcgaucgacgcccagagcggggucaugccgaucacggagaacucccuggacgccgagcagggccuggugaucccgcccuucguggagccccacauccaccucgacaccacccagaccgccgggcagcccaacuggaaccagagcggcacgcuguucgagggcaucgagcgcugggccgagcggaaggcgcugcucacccacgacgacgucaagcagcgcgccuggcagacccugaaguggcagaucgccaacgggauccagcacgugcggacccacguggacgucuccgacgccacgcugaccgcgcucaaggccaugcuggaggugaagcaggagguggcccccuggaucgaccugcagaucgucgccuucccccaggagggcauccucagcuaccccaacggggaggcccugcuggaggaggcgcuccgccugggcgccgacguggugggggccaucccgcacuucgaguucacccgggaguacggcgucgagucccugcacaagaccuucgcccucgcccagaaguacgaccgccugaucgacgugcacugcgacgagaucgacgacgagcagagccgguucguggagacggucgcggcccuggcccaccgcgagggcaugggggcccgggugaccgccucccacaccaccgcgaugcacagcuacaacggcgccuacacgucccgccucuuccggcugcugaagaugagcgggaucaacuucguggccaacccccucgucaacauccaccuccagggccgcuucgacaccuaccccaagcggcgcggcaucacccgggugaaggagaugcuggaguccgggaucaacgugugcuucggccacgacgacgucuucgaccccugguacccgcuggggaccgccaacaugcuccaggugcugcacaugggccugcacgugugccagcugaugggguacggccagaucaacgacggccugaaccucaucacgcaccacagcgcccgcacccugaaccugcaggacuacgggaucgcggccggcaacuccgccaaccucaucauccugcccgccgagaacggguucgacgcgcugcggcgccagguccccgugcgguacagcguccgcggcgggaaggugaucgccuccacccagcccgcccagaccacgguguaccucgagcagccggaggccaucgacuacaagcgcuga

SEQ ID NO: 5332 - RNA, 1299 nt, Artificial Sequence
  derived and/or modified sequence opt2 from Cytosine_Deaminase_codA__Escherichia_coli__EGJ07181
auguggcgccucaccgucuccaacaacgcccuccagaccaucaucaacgcccgccuccccggcaaggagggccucuggcagauccaccuccaggacggcaagaucuccgccaucgacgcccaguccggcgucaugcccaucaccgagaacucccucgacgccgagcagggccucgucaucccccccuucgucgagccccacauccaccucgacaccacccagaccgccggccagcccaacuggaaccaguccggcacccucuucgagggcaucgagcgcugggccgagcgcaaggcccuccucacccacgacgacgucaagcagcgcgccuggcagacccucaaguggcagaucgccaacggcauccagcacguccgcacccacgucgacgucuccgacgccacccucaccgcccucaaggccaugcucgaggucaagcaggaggucgcccccuggaucgaccuccagaucgucgccuucccccaggagggcauccucuccuaccccaacggcgaggcccuccucgaggaggcccuccgccucggcgccgacgucgucggcgccaucccccacuucgaguucacccgcgaguacggcgucgagucccuccacaagaccuucgcccucgcccagaaguacgaccgccucaucgacguccacugcgacgagaucgacgacgagcagucccgcuucgucgagaccgucgccgcccucgcccaccgcgagggcaugggcgcccgcgucaccgccucccacaccaccgccaugcacuccuacaacggcgccuacaccucccgccucuuccgccuccucaagauguccggcaucaacuucgucgccaacccccucgucaacauccaccuccagggccgcuucgacaccuaccccaagcgccgcggcaucacccgcgucaaggagaugcucgaguccggcaucaacgucugcuucggccacgacgacgucuucgaccccugguacccccucggcaccgccaacaugcuccagguccuccacaugggccuccacgucugccagcucaugggcuacggccagaucaacgacggccucaaccucaucacccaccacuccgcccgcacccucaaccuccaggacuacggcaucgccgccggcaacuccgccaaccucaucauccuccccgccgagaacggcuucgacgcccuccgccgccagguccccguccgcuacuccguccgcggcggcaaggucaucgccuccacccagcccgcccagaccaccgucuaccucgagcagcccgaggccaucgacuacaagcgcuga

SEQ ID NO: 5333 - RNA, 1299 nt, Artificial Sequence
  derived and/or modified sequence opt3 from Cytosine_Deaminase_codA__Escherichia_coli__EGJ07181
auguggagacugaccgugagcaacaaugcccuccagacaaucauuaacgcuaggcuucccggcaaggaggggcuguggcaaauacacuugcaggacggaaaaaucuccgcaauugaugcccagucuggugucaugccuaucacugaaaauucauuagacgcggagcagggccugguuauuccaccguucguggaaccccauauccaccuagauacgacccaaacagcugggcagccuaacuggaaucagaguggaacucucuuugagggcauagaacggugggccgagcgcaaggcacugcuuacccaugacgauguaaaacagcgagccuggcaaacacugaaguggcagaucgcuaacgguauucagcacgugcguacccaugucgacgugagcgaugcaacuuugacagcccucaaagcuaugcuggagguuaagcaggaaguggccccauggaucgaccugcaaauugucgcguucccccaggaggggauccucuccuacccuaauggagaagcauuacuggaggaggcccuuagauugggcgcugaugugguaggcgccauaccacacuuugaguucaccagggaauaugggguugaaucucugcacaagacguuugcacuagcucagaaauacgaccggcucauugaugugcauugcgacgagaucgaugacgaacaaucgcgcuucgucgagacuguggccgcgcuggcccacagagagggaaugggugcaagggugaccgcuucacauacaacugccaugcacagcuauaacggcgcuuacaccagucggcuuuuucgccuguugaagauguccgggauuaauuucgucgccaacccccucguuaauauccaucugcagggacgauuugacacauauccuaaaagaaggggcaucacccgggugaaggaaauguuagagucugguauuaacguauguuucgggcacgaugacguguuugauccaugguacccgcugggaacggcaaauaugcuccagguccuucacaugggccugcaugugugccaguugaugggcuaugggcaaauaaacgacggacuaaaucugaucacucaccauagcgcccguacacucaaccugcaggauuacgguauugcugcgggcaacuccgcaaaucuuaucauacugcccgccgaaaacggguucgacgcuuugcgcagacagguuccugugagguacucaguccggggaggcaaagugauugccaguacccagccagcacaaacuacaguauaucucgagcagcccgaagccaucgauuacaagcgauga

SEQ ID NO: 5334 - RNA, 1299 nt, Artificial Sequence
  derived and/or modified sequence opt4 from Cytosine_Deaminase_codA__Escherichia_coli__EGJ07181
auguggagacugaccgugagcaacaacgcccugcagaccaucaucaacgccagacugcccggcaaggagggccuguggcagauccaccugcaggacggcaagaucagcgccaucgacgcccagagcggcgugaugcccaucaccgagaacagccuggacgccgagcagggccuggugaucccccccuucguggagccccacauccaccuggacaccacccagaccgccggccagcccaacuggaaccagagcggcacccuguucgagggcaucgagagaugggccgagagaaaggcccugcugacccacgacgacgugaagcagagagccuggcagacccugaaguggcagaucgccaacggcauccagcacgugagaacccacguggacgugagcgacgccacccugaccgcccugaaggccaugcuggaggugaagcaggagguggcccccuggaucgaccugcagaucguggccuucccccaggagggcauccugagcuaccccaacggcgaggcccugcuggaggaggcccugagacugggcgccgacguggugggcgccaucccccacuucgaguucaccagagaguacggcguggagagccugcacaagaccuucgcccuggcccagaaguacgacagacugaucgacgugcacugcgacgagaucgacgacgagcagagcagauucguggagaccguggccgcccuggcccacagagagggcaugggcgccagagugaccgccagccacaccaccgccaugcacagcuacaacggcgccuacaccagcagacuguucagacugcugaagaugagcggcaucaacuucguggccaacccccuggugaacauccaccugcagggcagauucgacaccuaccccaagagaagaggcaucaccagagugaaggagaugcuggagagcggcaucaacgugugcuucggccacgacgacguguucgaccccugguacccccugggcaccgccaacaugcugcaggugcugcacaugggccugcacgugugccagcugaugggcuacggccagaucaacgacggccugaaccugaucacccaccacagcgccagaacccugaaccugcaggacuacggcaucgccgccggcaacagcgccaaccugaucauccugcccgccgagaacggcuucgacgcccugagaagacaggugcccgugagauacagcgugagaggcggcaaggugaucgccagcacccagcccgcccagaccaccguguaccuggagcagcccgaggccaucgacuacaagagauga

SEQ ID NO: 5335 - RNA, 1299 nt, Artificial Sequence
  derived and/or modified sequence opt5 from Cytosine_Deaminase_codA__Escherichia_coli__EGJ07181
auguggagacugaccgugagcaacaaugcccuccagacaaucauuaacgcucggcugcccggcaaggaggggcuuuggcaaauccaucugcaggacggaaaaauuuccgccaucgaugcgcagucuggcgucaugccuauuacggaaaauagccucgacgcugagcaggggcugguuaucccgcccuucguggaaccucacauccaccuugauaccacacaaaccgccggacagcccaacuggaaucaguccggcacacuguuugaggggauugaacgcugggccgagagaaaggcucuccugacccaugacgaugugaaacagcgggccuggcaaacacugaaguggcagaucgcuaacggcauucagcacguccgcacccauguggacguuucugaugccacgcucaccgcgcugaaagccaugcuugaggugaagcaggaagucgcuccuuggaucgaccugcaaauuguggccuucccccaggagggaauccucagcuacccuaauggcgaagcucugcuugaggaggcccugagacucggggcggauguugugggagccauuccgcacuuugaguucacacgggaauauggcgucgaaucccugcacaagaccuuugcucuggcccagaaauacgaccgccucaucgaugugcauugcgacgagaucgaugacgaacaaucuagauucguggagacagucgcugcccuggcccaccgggaggggaugggagcucgcguuaccgcgagccauacgacagccaugcacuccuauaacggcgcuuacaccagcagacuuuuucggcugcucaagaugucugggauuaauuucguggccaacccccuggugaauauccaccuucagggacgcuuugacacauauccuaaaagacggggcauuacccgcgucaaggaaaugcuggaguccggcaucaacguguguuucgggcaugaugacguuuuugaucccugguacccucucggaaccgccaauaugcuccaggugcugcacaugggccugcaugucugccagcugaugggguauggacaaauuaacgacggccuuaaucugaucacacaccauagcgcuagaacgcucaaccugcaggauuacgggaucgccgcgggaaacucugcuaaucuuauuauccugcccgccgaaaacggcuucgacgcccuccggagacaggugccgguucgcuacuccgugcggggcgggaaagucauugcuagcacccagccugcccaaacaaccguguaucuggagcagcccgaagcuaucgauuacaagagauga

SEQ ID NO: 5336 - RNA, 1299 nt, Artificial Sequence
  derived and/or modified sequence opt6 from Cytosine_Deaminase_codA__Escherichia_coli__EGJ07181
auguggagauuaacuguaucaaauaacgcauuacaaacaauaauaaaugcaagacuaccaggaaaagaagguuuauggcaaauacaucuacaagacggaaaaauaucagccauagacgcacaaagcggcguaaugccaauaaccgaaaauaguuuagacgcagaacaaggacuaguaauaccaccuuuuguagaaccacacauacacuuagauacuacacaaacggcaggacaaccaaauuggaaucaaucaggaacacuuuuugaaggaauagaaagaugggcagaaagaaaagcucuguuaacucacgaugauguuaaacaaagagccuggcaaacucucaaauggcaaauagcaaacggaauacaacauguacgaacacauguugauguuagcgacgcaacacuaacagcuuuaaaagccauguuagaaguaaaacaagaaguagcaccauggauagauuugcaaauaguagcauuuccacaagaaggaauauuaucauauccuaauggagaagcacuacuagaagaagcauuaagauuaggagcagacguugucggugcaauaccacacuuugaauuuacacgagaauacggaguagaaucacuacauaaaacauuugcauuggcacaaaaauacgacagauuaauagauguacauugcgacgaaauugacgacgaacaaucaagauucguagaaacaguagcagccuuagcacaccgagaagggaugggagcaagaguaacagcaagccauacaacagcaaugcacucauacaauggagccuauacaucaagacuauucagacuauuaaaaaugaguggcaucaacuuuguagcaaauccauuagucaacauacacuuacaaggucgauuugauacauauccuaaaagaagaggcaucacaagaguaaaagaaauguuagagucuggaauaaauguaugcuuuggacaugacgacguauuugaucccugguauccauuaggaaccgcuaauauguuacaaguauugcauaugggcuuacacguaugucaauuaauggguuauggccaaauaaacgacggccuaaauuuaauuacucaccauagugcaagaacauuaaaccuacaagacuauggcauagcagcaggaaacucagcuaacuuaauaauacuaccagcagaaaacggcuuugaugcacuaagaagacaaguaccaguacgauauuccguaagaggaggaaaaguaauagcuagcacacaaccagcacaaacaacaguauaccuugaacaaccagaagcaauagacuauaaaagauaa

SEQ ID NO: 5337 - protein, 388 aa, Artificial Sequence
  Cytosine_Deaminase_codA__Escherichia_coli__H9UNZ4
MPITENSLDAEQGLVIPPFVEPHIHLDTTQTAGQPNWNQSGTLFEGIERWAERKALLTHDDVKQRAWQTLKWQIANGIQHVRTHVDVSDATLTALKAMLEVKQEVAPWIDLQIVAFPQEGILSYPNGEALLEEALRLGADVVGAIPHFEFTREYGVESLHKTFALAQKYDRLIDVHCDEIDDEQSRFVETVAALAHHEGMGARVTASHTTAMHSYNGAYTSRLFRLLKMSGINFVANPLVNIHLQGRFDTYPKRRGITRVKEMLESGINVCFGHDDVFDPWYPLGTANMLQVLHMGLHVCQLMGYGQINDGLNLITHHSARTLNLQDYGIAAGNSANLIILPAENGFDALRRQVPVRYSVRGGKVIASTQPAQTTVYLEQPEAIDYKR

SEQ ID NO: 5338 - RNA, 1167 nt, Artificial Sequence
  Cytosine_Deaminase_codA__Escherichia_coli__AFG39237
augcccauaacugaaaacagccuggaugccgaacaagguuuaguuauaccgccguuuguggagccacauauucaccuggacaccacgcaaaccgccggacaaccgaacuggaaucaguccggcacgcuguuugaaggcauugaacgcugggccgagcgcaaagcguuauuaacccaugacgaugugaaacaacgcgcauggcaaacgcugaaauggcagauugccaacggcauucagcaugugcguacccaugucgauguuucggaugcaacgcuaacugcgcugaaagcaaugcuggaagugaagcaggaagucgcgccguggauugaucugcaaaucgucgccuucccucaggaagggauuuugucguaucccaacggugaagcguugcuggaagaggcguuacgcuuaggggcagauguagugggggcgauuccgcauuuugaauuuacccgugaauacggcguggagucgcugcauaaaaccuucgcccuggcgcaaaaauacgaccgucucaucgacguucacugugaugagaucgaugacgagcagucgcgcuuugucgaaaccguugcugcccuggcgcaccaugaaggcaugggcgcgcgagucaccgccagccacaccacggcaaugcacuccuauaacggggcguauaccucacgccuguuccgcuugcugaaaauguccgguauuaacuuugucgccaacccgcuggucaauauucaucugcaaggacguuucgauacguauccaaaacgucgcggcaucacgcgcguuaaagagaugcuggaguccggcauuaacgucugcuuuggucacgaugaugucuucgauccgugguauccgcugggaacggcgaauaugcugcaagugcugcauauggggcugcauguuugccaguugaugggcuacgggcagauuaacgauggccugaauuuaaucacccaccacagcgcaaggacguugaauuugcaggauuacggcauugccgccggaaacagcgccaaccugauuauccugccggcugaaaauggguuugaugcgcugcgccgucagguuccgguacguuauucgguacguggcggcaaggugauugccagcacacaaccggcacaaaccaccguauaucuggagcagccagaagccaucgauuacaaacguuga

SEQ ID NO: 5339 - RNA, 1167 nt, Artificial Sequence
  derived and/or modified sequence opt1 from Cytosine_Deaminase_codA__Escherichia_coli__AFG39237
augcccaucaccgagaacagccuggacgccgagcagggccucgugaucccgcccuucgucgagccccacauccaccuggacaccacgcagaccgccgggcagcccaacuggaaccaguccggcacccuguucgaggggaucgagcgcugggcggagcggaaggcccuccugacccacgacgacgugaagcagcgcgccuggcagacgcugaaguggcagaucgccaacggcauccagcacgugcggacccacgucgacgugagcgacgccacccucaccgcgcugaaggccaugcuggaggugaagcaggaggucgccccguggaucgaccuccagaucguggccuucccccaggaggggauccuguccuaccccaacggcgaggcgcugcucgaggaggcccugcgccugggcgccgacguggucggggccaucccccacuucgaguucacgcgggaguacggcguggagagccuccacaagaccuucgcccuggcgcagaaguacgaccgccugaucgacgugcacugcgacgagaucgacgacgagcagucccgguucgucgagaccguggccgcccucgcccaccacgaggggaugggcgcccgcgugaccgcgagccacacgaccgccaugcacuccuacaacggggccuacaccagccggcuguuccgccugcucaagauguccggcaucaacuucgucgccaacccgcuggugaacauccaccuccagggccgguucgacaccuaccccaagcgccgggggaucacgcgcgugaaggagaugcuggagagcggcaucaacgucugcuucgggcacgacgacguguucgaccccugguacccccugggcaccgccaacaugcuccaggugcugcacaugggccugcacgucugccagcugaugggguacggccagaucaacgacgggcucaaccugaucacccaccacuccgcgcggacccugaaccuccaggacuacggcaucgccgccgggaacagcgccaaccugaucauccugccggccgagaacggcuucgacgcgcuccgccgccaggugcccgugcgguacuccguccggggcgggaaggugaucgccagcacgcagcccgcccagaccaccgucuaccuggagcagcccgaggccaucgacuacaagcgcuga

SEQ ID NO: 5340 - RNA, 1167 nt, Artificial Sequence
  derived and/or modified sequence opt2 from Cytosine_Deaminase_codA__Escherichia_coli__AFG39237
augcccaucaccgagaacucccucgacgccgagcagggccucgucaucccccccuucgucgagccccacauccaccucgacaccacccagaccgccggccagcccaacuggaaccaguccggcacccucuucgagggcaucgagcgcugggccgagcgcaaggcccuccucacccacgacgacgucaagcagcgcgccuggcagacccucaaguggcagaucgccaacggcauccagcacguccgcacccacgucgacgucuccgacgccacccucaccgcccucaaggccaugcucgaggucaagcaggaggucgcccccuggaucgaccuccagaucgucgccuucccccaggagggcauccucuccuaccccaacggcgaggcccuccucgaggaggcccuccgccucggcgccgacgucgucggcgccaucccccacuucgaguucacccgcgaguacggcgucgagucccuccacaagaccuucgcccucgcccagaaguacgaccgccucaucgacguccacugcgacgagaucgacgacgagcagucccgcuucgucgagaccgucgccgcccucgcccaccacgagggcaugggcgcccgcgucaccgccucccacaccaccgccaugcacuccuacaacggcgccuacaccucccgccucuuccgccuccucaagauguccggcaucaacuucgucgccaacccccucgucaacauccaccuccagggccgcuucgacaccuaccccaagcgccgcggcaucacccgcgucaaggagaugcucgaguccggcaucaacgucugcuucggccacgacgacgucuucgaccccugguacccccucggcaccgccaacaugcuccagguccuccacaugggccuccacgucugccagcucaugggcuacggccagaucaacgacggccucaaccucaucacccaccacuccgcccgcacccucaaccuccaggacuacggcaucgccgccggcaacuccgccaaccucaucauccuccccgccgagaacggcuucgacgcccuccgccgccagguccccguccgcuacuccguccgcggcggcaaggucaucgccuccacccagcccgcccagaccaccgucuaccucgagcagcccgaggccaucgacuacaagcgcuga

SEQ ID NO: 5341 - RNA, 1167 nt, Artificial Sequence
  derived and/or modified sequence opt3 from Cytosine_Deaminase_codA__Escherichia_coli__AFG39237
augcccaucaccgagaacagccuggacgccgaacagggccucgugauuccuccauucgucgagccgcacauacaucuugauacaacucaaacggcugggcagcccaauuggaaccaguccggaacccuguuugaagguaucgagagaugggcagaaaggaaggccuuguuaacacacgacgauguuaaacagcgggcguggcaaacucugaaguggcagauugcuaauggcauccagcaugugcgcacccacguagacgugucugaugccacacuaaccgcacucaaagccaugcuggaggucaagcaggagguggcuccuuggauugaccuucaaaucguugcauucccacaggaagggauacugucauaccccaacggagaggccuugcucgaagaggcucugcgacugggcgccgauguggucggugcgaucccucauuuugaguucacucgugaauaugggguggagagucuccacaaaacauuugcauuagcccagaaguacgacagacugauugauguacacugcgacgaaaucgaugacgagcagagcagguucguugaaaccguggcugcccuugcacaucacgagggaaugggcgcucgggucacggccucccauacuaccgcgaugcacucuuauaauggcgccuacacaucgcgcuuguuuagacugcuaaagaugucagggauuaacuucguggcaaauccacucgugaacauccaucugcaaggaagguuugauacuuaucccaaacggcgcgguauaacccgagucaaggagaugcuugaaagcggcauuaauguuuguuucgggcacgacgacguguuugauccuugguacccacugggaacagcuaacauguugcagguacuccacaugggccugcaugugugccaguuaauggguuaugggcaaaucaaugacggacugaaccucauuacccaccauagugccagaacgcuuaaucugcaggauuacggcaucgcugccggcaacuccgcaaauuugaucauucuaccggccgagaacggguucgacgcucugaggcggcagguccccgugcguuacucuguucgcggagguaaagugauagcgagcacucagccugcacaaacaaccgucuaucucgaacagccagaggccaucgauuacaagagauga

SEQ ID NO: 5342 - RNA, 1167 nt, Artificial Sequence
  derived and/or modified sequence opt4 from Cytosine_Deaminase_codA__Escherichia_coli__AFG39237
augcccaucaccgagaacagccuggacgccgagcagggccuggugaucccccccuucguggagccccacauccaccuggacaccacccagaccgccggccagcccaacuggaaccagagcggcacccuguucgagggcaucgagagaugggccgagagaaaggcccugcugacccacgacgacgugaagcagagagccuggcagacccugaaguggcagaucgccaacggcauccagcacgugagaacccacguggacgugagcgacgccacccugaccgcccugaaggccaugcuggaggugaagcaggagguggcccccuggaucgaccugcagaucguggccuucccccaggagggcauccugagcuaccccaacggcgaggcccugcuggaggaggcccugagacugggcgccgacguggugggcgccaucccccacuucgaguucaccagagaguacggcguggagagccugcacaagaccuucgcccuggcccagaaguacgacagacugaucgacgugcacugcgacgagaucgacgacgagcagagcagauucguggagaccguggccgcccuggcccaccacgagggcaugggcgccagagugaccgccagccacaccaccgccaugcacagcuacaacggcgccuacaccagcagacuguucagacugcugaagaugagcggcaucaacuucguggccaacccccuggugaacauccaccugcagggcagauucgacaccuaccccaagagaagaggcaucaccagagugaaggagaugcuggagagcggcaucaacgugugcuucggccacgacgacguguucgaccccugguacccccugggcaccgccaacaugcugcaggugcugcacaugggccugcacgugugccagcugaugggcuacggccagaucaacgacggccugaaccugaucacccaccacagcgccagaacccugaaccugcaggacuacggcaucgccgccggcaacagcgccaaccugaucauccugcccgccgagaacggcuucgacgcccugagaagacaggugcccgugagauacagcgugagaggcggcaaggugaucgccagcacccagcccgcccagaccaccguguaccuggagcagcccgaggccaucgacuacaagagauga

SEQ ID NO: 5343 - RNA, 1167 nt, Artificial Sequence
  derived and/or modified sequence opt5 from Cytosine_Deaminase_codA__Escherichia_coli__AFG39237
augcccaucaccgagaacagccuggacgccgaacagggccucgugauuccuccguucgucgagccccacauccaucuggauacaacgcaaaccgcugggcagccuaauuggaaccaguccggaacacuuuuugaaggcauugagagaugggccgaacggaaggcgcugcucacccacgacgauguuaaacagcgcgcuuggcaaacacugaaguggcagaucgccaaugggauucagcaugugagaacccacguggacgucucugaugccacacuuaccgcucugaaagccaugcucgaggugaagcaggagguugcucccuggaucgaccugcaaaucguggccuucccucaggaaggcauucugagcuaccccaacggagaggcgcuccuggaagaggcccuucggcugggggcugaugucgugggagccaucccucauuuugaguucacgcgcgaauauggcguugagucccuccacaaaaccuuugcucuggcccagaaguacgacagacuuauugaugugcacugcgacgaaaucgaugacgagcagucucgguucgucgaaacaguggcggcccuggcucaucacgagggcaugggggcccgcgugaccgcuagccauacaaccgccaugcacuccuauaauggagccuacacgucuagacucuuucggcugcugaagaugagcggcauuaacuucgucgcuaauccgcucguuaacauccaucugcaagggcgcuuugauacauaucccaaaagacggggaauuacccgcgugaaggagaugcuugaauccggcaucaauguguguuucgggcacgacgacgucuuugauccuugguacccccugggaacagcgaacaugcuccaggugcugcacaugggccuucauguuugccagcugaugggcuaugggcaaaucaaugacggacucaaccugauuacccaccauagcgccagaacccugaaucuccaggauuacggcaucgcugccgggaacucugccaaucugauuauccuuccugcugagaacggauucgacgcccugcggcgccaggugcccgucagauacuccgugcggggcgggaaaguuauugcgagcacacagccggcucaaacgaccguguaucucgaacagccugaggccaucgauuacaagagauga

SEQ ID NO: 5344 - RNA, 1167 nt, Artificial Sequence
  derived and/or modified sequence opt6 from Cytosine_Deaminase_codA__Escherichia_coli__AFG39237
augccaauaacagaaaauucauuggaugcagaacaaggauuaguaauuccaccauucguagaaccacacauacauuuagacacaacacaaacagcaggacaaccaaauuggaaucaaucaggaacuuuauucgaaggaaucgaacgcugggcagaaagaaaagcacuauuaacacacgacgauguuaaacaaagagccuggcaaacucuaaaauggcaaauagcaaacggaauacaacacguaagaacacacguagacguaucagacgcaacuuuaacagcacuaaaagcaauguuagaaguaaaacaagaaguagcaccguggauagaccuacaaauaguagcauuuccacaagaaggaaucuuaagcuauccaaacggagaagcauuacuagaagaagcacuaagacucggagcagauguaguaggagcaauaccacacuuugaauucacaagagaauauggaguagaaucuuuacauaaaacauuugcacuagcacaaaaauacgacagacucaucgauguccacugcgaugaaauagacgaugaacaaaguagauuugucgaaacaguugcagcacuagcacaucacgaaggaaugggagcaagaguaacagcaucacauacaacagcaaugcacucauacaauggcgcauacacaagucgacuauuuagauuauuaaaaaugucaggaauaaacuuuguagcuaacccacuaguaaauauccaccuccaaggaagauucgacacauacccaaaaagacgaggaaucacaagaguaaaagaaauguuagaaaguggaauaaacguaugcuuuggacaugacgauguauucgauccaugguauccucuuggaacagccaauauguuacaaguacuacacaugggacuacauguaugccaauuaaugggauacggacaaauaaacgacggucuuaacuuaauaacacaucacagugcaagaacauuaaacuuacaagacuauggcauagcagccggaaauucagcaaaucuaauaauucuaccagcagaaaacggcuuugaugcauuaagaagacaaguuccaguaagauacucaguaagaggagguaaaguaaucgcaucaacacaaccagcccaaacaacaguauauuuagaacaaccagaagcaauagacuacaaaagauaa

SEQ ID NO: 5345 - protein, 432 aa, Artificial Sequence; identical to SEQ ID NO: 5321
  Cytosine_Deaminase_codA__Escherichia_coli__Q1RFJ5

SEQ ID NO: 5346 - RNA, 1299 nt, Artificial Sequence
  Cytosine_Deaminase_codA__Escherichia_coli__ABE05869
auguggaggcuaacagugucgaauaaugcuuuacaaacaauuauuaacgcccaguuacccggcaaagaggggcuguggcagauucaucuucacgacggaaaaaucagcgccauugaugcgcaauccggggugaugcccguaacugaaaacagccuggaugccgaacaagguuuaguuuuaccgccguuuguggagccgcauauucaccuggacaccacgcaaaccgccggacaaccgaacuggaaucaguccggcacgcuguuugaaggcauugaacgcugggccgagcgcaaagcguuauuaacucaugacgaugugaaacaacgcgcauggcaaacgcugaaauggcagauugccaacggcauucagcaugugcguacccaugucgaugucuccgacgcaacgcugacugcguugaaagcgaugcuggaagugaaacaggaaguugcgccguggauugaucugcaaaucgucgccuucccgcaggaagggauuuugucguaucccaacggugaagcgcugcuggaagaggcgcuacgcuuaggggcagauguuguuggggcgauuccgcauuuugaauuuacccgugaauacggcguggagucgcugcauaaaaccuucgcccuggcgcaaaaauacgaccgucucaucgacguucacugugaugagaucgaugacgagcagucgcgcuuugucgaaaccguugcugcccuggcgcaccgugaaggcaugggcgcgcgagucaccgccagccauacuacggcaaugcacuccuauaacggggcguauacuucgcgccuguuccguuugcugaaaauguccgguauuaacuuugucgccaacccguuggucaauauucaucugcaaggacguuucgauacguauccaaaacgucgcggcaucacgcgcguuaaagagaugcuggaguccggcauuaacgucugcuuuggucacgaugaugucuucgauccgugguauccgcugggaacggcgaauaugcugcaagugcugcauauggggcugcauguuugccagcugaugggcuacgggcagauuaacgacggccugaauuuaaucacccaccacagcgccaggacguugaauuugcaggauuacggcauugccgccggaaacagcgccaaccugauuauccugccggcugaaaauggguuugaugcgcugcgccgucagguuccgguacguuauucgguacguggcggcaaggugauugccagcacacaaccggcacaaaccaccguauaucuggagcagccagaagccaucgauuacaaacgguaa

SEQ ID NO: 5347 - RNA, 1299 nt, Artificial Sequence; identical to SEQ ID NO: 5323
  derived and/or modified sequence opt1 from Cytosine_Deaminase_codA__Escherichia_coli__ABE05869

SEQ ID NO: 5348 - RNA, 1299 nt, Artificial Sequence; identical to SEQ ID NO: 5324
  derived and/or modified sequence opt2 from Cytosine_Deaminase_codA__Escherichia_coli__ABE05869

SEQ ID NO: 5349 - RNA, 1299 nt, Artificial Sequence; identical to SEQ ID NO: 5325
  derived and/or modified sequence opt3 from Cytosine_Deaminase_codA__Escherichia_coli__ABE05869

SEQ ID NO: 5350 - RNA, 1299 nt, Artificial Sequence; identical to SEQ ID NO: 5326
  derived and/or modified sequence opt4 from Cytosine_Deaminase_codA__Escherichia_coli__ABE05869

SEQ ID NO: 5351 - RNA, 1299 nt, Artificial Sequence; identical to SEQ ID NO: 5327
  derived and/or modified sequence opt5 from Cytosine_Deaminase_codA__Escherichia_coli__ABE05869

SEQ ID NO: 5352 - RNA, 1299 nt, Artificial Sequence
  derived and/or modified sequence opt6 from Cytosine_Deaminase_codA__Escherichia_coli__ABE05869
auguggagauuaacaguaagcaauaacgcacuacaaacaauaauaaaugcacaacucccaggaaaagaaggauuauggcaaauucacuuacaugacggaaaaauaucagcaauagaugcacaaucaggagucaugccaguaacagaaaauagccuugacgcagaacaagggcuaguccuacccccauucguagaaccacacauacauuuagauacuacacaaacagcaggucaaccaaauuggaaucaaucaggaacacuauuugaaggaauagaaagaugggcagaaagaaaagcauuacuaacacaugaugacguaaaacaaagagcauggcaaacacucaaauggcaaauagccaauggaauacaacauguaagaacucacgucgacgucagugacgcuacauuaacugcacuuaaagcaaugcuggaaguaaaacaagaaguagcaccauggaucgaucuacaaauaguagcauuuccacaagaaggaauauuaucuuacccuaauggagaagcuuuacuagaagaagcauuaagacuaggagcugacguaguaggagcaauaccacacuuugaauuuacaagagaauauggcguagaaucuuuacauaagacauucgcacuagcacaaaaauacgauaggcuaauagauguacauugcgacgaaauagaugaugaacaaagcagauucguagaaacaguagcagcacuugcacacagagaaggaaugggagcaagaguuacagcaucacacacaacagcaaugcauaguuacaauggagcauacacaagcagauuauuuagacuccuaaaaaugaguggaauaaacuuuguagcaaauccacuaguaaauauacauuuacaaggacgauuugauacuuauccaaaaagacgaggaauaacaagaguaaaagaaaugcuagaaucuggcauaaaugugugcuucggccaugaugaugucuuugauccaugguauccacuagguacagcaaauaugcuacaaguucuacacaugggauuacauguaugccaacuuaugggauauggacaaauaaacgacggccuuaaccuaauaacacaccacucagccagaacauuaaauuuacaagacuacggaauagcagcaggaaauucagcaaaucucauaauacugccagcagaaaacggauuugaugccuuaagaagacaaguaccuguuagauacagcguuagaggagguaagguaauagcaucaacacaaccagcacaaacaacaguauaccuagaacaaccagaagcuauagacuacaaaagauaa

SEQ ID NO: 5353 - protein, 72 aa, Artificial Sequence
  Cytosine_Deaminase_codA__Escherichia_coli__Q2VP09
MKQRITVTVDSDSYQLLKAYDVNISGLVSTTMQNEARRLRAERWKAENQEGMAEVARFIEMNGSFADENRDW

SEQ ID NO: 5354 - RNA, 219 nt, Artificial Sequence
  Cytosine_Deaminase_codA__Escherichia_coli__ACQ41973
augaagcagcguauuacagugacaguugacagcgacagcuaucaguugcucaaggcauaugaugucaauaucuccggucugguaagcacaaccaugcagaaugaagcccgucgucugcgugccgaacgcuggaaagcggaaaaucaggaagggauggcugaggucgcccgguuuauugaaaugaacggcucuuuugcugacgagaacagggacugguga

SEQ ID NO: 5355 - RNA, 219 nt, Artificial Sequence
  derived and/or modified sequence opt1 from Cytosine_Deaminase_codA__Escherichia_coli__ACQ41973
augaagcagcgcaucaccgugaccgucgacagcgacuccuaccagcugcucaaggccuacgacgugaacaucagcggccugguguccacgaccaugcagaacgaggcccggcgccugcgggcggagcgcuggaaggccgagaaccaggaggggauggccgaggucgcccgguucaucgagaugaacggcagcuucgccgacgagaaccgcgacugguga

SEQ ID NO: 5356 - RNA, 219 nt, Artificial Sequence
  derived and/or modified sequence opt2 from Cytosine_Deaminase_codA__Escherichia_coli__ACQ41973
augaagcagcgcaucaccgucaccgucgacuccgacuccuaccagcuccucaaggccuacgacgucaacaucuccggccucgucuccaccaccaugcagaacgaggcccgccgccuccgcgccgagcgcuggaaggccgagaaccaggagggcauggccgaggucgcccgcuucaucgagaugaacggcuccuucgccgacgagaaccgcgacugguga

SEQ ID NO: 5357 - RNA, 219 nt, Artificial Sequence
  derived and/or modified sequence opt3 from Cytosine_Deaminase_codA__Escherichia_coli__ACQ41973
augaagcagagaaucaccgugacagucgacagcgauuccuaccaacugcucaaagccuaugacguuaacauuucuggccuugugucaacuacgaugcagaaugaggcuaggcggcugcgcgcagaacgauggaaggccgagaaccaggaagggauggcggagguagcucguuucauagaaaugaauggaaguuuugccgaugagaacagagacugguga

SEQ ID NO: 5358 - RNA, 219 nt, Artificial Sequence
  derived and/or modified sequence opt4 from Cytosine_Deaminase_codA__Escherichia_coli__ACQ41973
augaagcagagaaucaccgugaccguggacagcgacagcuaccagcugcugaaggccuacgacgugaacaucagcggccuggugagcaccaccaugcagaacgaggccagaagacugagagccgagagauggaaggccgagaaccaggagggcauggccgagguggccagauucaucgagaugaacggcagcuucgccgacgagaacagagacugguga

SEQ ID NO: 5359 - RNA, 219 nt, Artificial Sequence
  derived and/or modified sequence opt5 from Cytosine_Deaminase_codA__Escherichia_coli__ACQ41973
augaagcagagaaucaccgugacagucgacagcgauuccuaccaacugcucaaagccuaugacguuaacauuucuggccuggugagcacgaccaugcagaaugaggcucggcgccuuagagccgaacgguggaaggcggagaaccaggaagggauggcugagguggcccgcuucaucgaaaugaauggauccuuugccgaugagaacagagacugguga

SEQ ID NO: 5360 - RNA, 219 nt, Artificial Sequence
  derived and/or modified sequence opt6 from Cytosine_Deaminase_codA__Escherichia_coli__ACQ41973
augaaacaaagaauaacaguaacaguagauagcgacagcuaucaauuacuaaaagcauaugacguaaacauaagcggacuaguaagcacaacaaugcaaaaugaagcaagaagacuaagagcagaaagauggaaagcagaaaaucaagaaggaauggcagaaguagcaagauuuauagaaaugaauggaucauucgcagacgaaaacagagacugguaa

SEQ ID NO: 5361 - protein, 427 aa, Artificial Sequence
  Cytosine_Deaminase_codA__Escherichia_coli__Q53ZC8
MSNNALQTIINARLPGEEGLWQIHLQDGKISAIDAQSGVMPITENSLDAEQGLVIPPFVEPHIHLDTTQTAGQPNWNQSGTLFEGIERWAERKALLTHDDVKQRAWQTLKWQIANGIQHVRTHVDVSDATLTALKAMLEVKQEVAPWIDLQIVAFPQEGILSYPNGEALLEEALRLGADVVGAIPHFEFTREYGVESLHKTFALAQKYDRLIDVHCDEIDDEQSRFVETVAALAHHEGMGARVTASHTTAMHSYNGAYTSRLFRLLKMSGINFVANPLVNIHLQGRFDTYPKRRGITRVKEMLESGINVCFGHDDVFDPWYPLGTANMLQVLHMGLHVCQLMGYGQINDGLNLITHHSARTLNLQDYGIAAGNSANLIILPAENGFDALRRQVPVRYSVRGGKVIASTQPAQTTVYLEQPEAIDYKR

SEQ ID NO: 5362 - RNA, 1284 nt, Artificial Sequence
  Cytosine_Deaminase_codA__Escherichia_coli__AAP92816
augucgaauaacgcuuuacaaacaauuauuaacgcccgguuaccaggcgaagaggggcuguggcagauucaucugcaggacggaaaaaucagcgccauugaugcgcaauccggcgugaugcccauaacugaaaacagccuggaugccgaacaagguuuaguuauaccgccguuuguggagccacauauucaccuggacaccacgcaaaccgccggacaaccgaacuggaaucaguccggcacgcuguuugaaggcauugaacgcugggccgagcgcaaagcguuauuaacccaugacgaugugaaacaacgcgcauggcaaacgcugaaauggcagauugccaacggcauucagcaugugcguacccaugucgauguuucggaugcaacgcuaacugcgcugaaagcaaugcuggaagugaagcaggaagucgcgccguggauugaucugcaaaucgucgccuucccucaggaagggauuuugucguaucccaacggugaagcguugcuggaagaggcguuacgcuuaggggcagauguagugggggcgauuccgcauuuugaauuuacccgugaauacggcguggagucgcugcauaaaaccuucgcccuggcgcaaaaauacgaccgucucaucgacguucacugugaugagaucgaugacgagcagucgcgcuuugucgaaaccguugcugcccuggcgcaccaugaaggcaugggcgcgcgagucaccgccagccacaccacggcaaugcacuccuauaacggggcguauaccucacgccuguuccgcuugcugaaaauguccgguauuaacuuugucgccaacccgcuggucaauauucaucugcaaggacguuucgauacguauccaaaacgucgcggcaucacgcgcguuaaagagaugcuggaguccggcauuaacgucugcuuuggucacgaugaugucuucgauccgugguauccgcugggaacggcgaauaugcugcaagugcugcauauggggcugcauguuugccaguugaugggcuacgggcagauuaacgauggccugaauuuaaucacccaccacagcgcaaggacguugaauuugcaggauuacggcauugccgccggaaacagcgccaaccugauuauccugccggcugaaaauggguuugaugcgcugcgccgucagguuccgguacguuauucgguacguggcggcaaggugauugccagcacacaaccggcacaaaccaccguauaucuggagcagccagaagccaucgauuacaaacguuga

SEQ ID NO: 5363 - RNA, 1284 nt, Artificial Sequence
  derived and/or modified sequence opt1 from Cytosine_Deaminase_codA__Escherichia_coli__AAP92816
augagcaacaacgcccugcagaccaucaucaacgcccgccuccccggcgaggaggggcuguggcagauccaccuccaggacggcaagaucuccgcgaucgacgcccagagcggggugaugccgaucaccgagaacucccuggacgccgagcagggccuggucaucccgcccuucguggagccccacauccaccuggacacgacccagaccgccgggcagcccaacuggaaccagagcggcacccucuucgagggcaucgagcggugggccgagcgcaaggcgcugcugacgcacgacgacgugaagcagcgggccuggcagacccucaaguggcagaucgccaacgggauccagcacguccgcacccacguggacguguccgacgccacccugacggcgcugaaggccaugcucgaggucaagcaggagguggcccccuggaucgaccugcagaucguggccuucccccaggagggcauccugagcuaccccaacggggaggcccuccuggaggaggcgcugcggcucggcgccgacgucgugggggccaucccgcacuucgaguucacccgcgaguacggcguggagucccugcacaagaccuucgcccuggcccagaaguacgaccggcucaucgacguccacugcgacgagaucgacgacgagcagagccgcuucguggagaccguggcggcccuggcccaccacgagggcaugggggcccgggucacggccucccacaccaccgcgaugcacagcuacaacggcgccuacaccucccgccuguuccggcuccugaagaugagcgggaucaacuucguggccaacccccuggugaacauccaccuccagggccgcuucgacacguaccccaagcggcgcggcaucacccgggucaaggagaugcuggaguccgggaucaacgugugcuucggccacgacgacguguucgaccccugguacccgcuggggaccgccaacaugcuccagguccugcacaugggccugcacgugugccagcucaugggguacggccagaucaacgacggccugaaccugaucacccaccacagcgcccgcacgcucaaccugcaggacuacgggaucgcggccggcaacuccgccaaccugaucauccuccccgccgagaacggguucgacgcgcugcggcgccaggugcccguccgguacagcgugcgcggcgggaaggucaucgccuccacccagcccgcccagaccaccguguaccuggagcagccggaggccaucgacuacaagcgguga

SEQ ID NO: 5364 - RNA, 1284 nt, Artificial Sequence
  derived and/or modified sequence opt2 from Cytosine_Deaminase_codA__Escherichia_coli__AAP92816
auguccaacaacgcccuccagaccaucaucaacgcccgccuccccggcgaggagggccucuggcagauccaccuccaggacggcaagaucuccgccaucgacgcccaguccggcgucaugcccaucaccgagaacucccucgacgccgagcagggccucgucaucccccccuucgucgagccccacauccaccucgacaccacccagaccgccggccagcccaacuggaaccaguccggcacccucuucgagggcaucgagcgcugggccgagcgcaaggcccuccucacccacgacgacgucaagcagcgcgccuggcagacccucaaguggcagaucgccaacggcauccagcacguccgcacccacgucgacgucuccgacgccacccucaccgcccucaaggccaugcucgaggucaagcaggaggucgcccccuggaucgaccuccagaucgucgccuucccccaggagggcauccucuccuaccccaacggcgaggcccuccucgaggaggcccuccgccucggcgccgacgucgucggcgccaucccccacuucgaguucacccgcgaguacggcgucgagucccuccacaagaccuucgcccucgcccagaaguacgaccgccucaucgacguccacugcgacgagaucgacgacgagcagucccgcuucgucgagaccgucgccgcccucgcccaccacgagggcaugggcgcccgcgucaccgccucccacaccaccgccaugcacuccuacaacggcgccuacaccucccgccucuuccgccuccucaagauguccggcaucaacuucgucgccaacccccucgucaacauccaccuccagggccgcuucgacaccuaccccaagcgccgcggcaucacccgcgucaaggagaugcucgaguccggcaucaacgucugcuucggccacgacgacgucuucgaccccugguacccccucggcaccgccaacaugcuccagguccuccacaugggccuccacgucugccagcucaugggcuacggccagaucaacgacggccucaaccucaucacccaccacuccgcccgcacccucaaccuccaggacuacggcaucgccgccggcaacuccgccaaccucaucauccuccccgccgagaacggcuucgacgcccuccgccgccagguccccguccgcuacuccguccgcggcggcaaggucaucgccuccacccagcccgcccagaccaccgucuaccucgagcagcccgaggccaucgacuacaagcgcuga

SEQ ID NO: 5365 - RNA, 1284 nt, Artificial Sequence
  derived and/or modified sequence opt3 from Cytosine_Deaminase_codA__Escherichia_coli__AAP92816
augagcaacaaugcccugcagaccaucauuaacgcuagacuccccggcgaggaagggcuuuggcaaauacaucugcaggacggaaagaucuccgcaauugaugcccagucuggugugaugccuaucacagagaauaguuuggacgcggaacagggcuuagucauuccaccguucguugagccccacauccaccuggauacuacgcaaaccgcugggcagccuaacuggaaucagaguggaacacuauuugaaggcauagagaggugggccgagcggaaagcacuccugacucaugacgaugugaagcagcgcgccuggcaaacccuuaaauggcagaucgcuaacgguauucagcacguacgaacacauguggacgucagcgaugcaacccugacugccuugaaggcuaugcucgaagugaaacaggagguugccccauggaucgaccugcaaauuguggcguucccccaggaagggauccuguccuacccuaauggagaggcacucuuagaggaagcccugcgucuuggcgcugaugucgugggcgccauaccacacuuugaguucacaagagaauaugggguagagucuuugcacaagaccuuugcacuggcucagaaguacgacaggcuaauugauguucauugcgacgaaaucgaugacgagcaaucgcgguucguggagacggucgccgcgcucgcccaccaugaaggaaugggugcacgcgugacugcuucacacaccacagccaugcacagcuauaacggcgcuuacacuucaagacuguuuaggcuucugaaaauguccgggauuaauuucguggccaaccccuuggucaauauccaucuccagggacgguuugacaccuauccuaagcgccgaggcaucacaagaguuaaagagaugcuggaaucugguauuaacguguguuucgggcacgaugacguauuugauccaugguacccguuaggaaccgcaaauaugcuccaggugcugcauaugggccuucacgucugccagcugaugggcuaugggcaaauaaacgacggauugaaucuaaucacgcaucacagcgccaggacucugaaccuccaggauuacgguauugcugcgggcaacuccgcaaaucugaucauacuucccgccgagaacggguucgacgcucugcggcgucaggugccuguucgcuacucagugagaggaggcaaggucauugccaguacacagccagcacaaaccacuguguauuuggaacagcccgaggccaucgauuacaaaagguga

SEQ ID NO: 5366 - RNA, 1284 nt, Artificial Sequence
  derived and/or modified sequence opt4 from Cytosine_Deaminase_codA__Escherichia_coli__AAP92816
augagcaacaacgcccugcagaccaucaucaacgccagacugcccggcgaggagggccuguggcagauccaccugcaggacggcaagaucagcgccaucgacgcccagagcggcgugaugcccaucaccgagaacagccuggacgccgagcagggccuggugaucccccccuucguggagccccacauccaccuggacaccacccagaccgccggccagcccaacuggaaccagagcggcacccuguucgagggcaucgagagaugggccgagagaaaggcccugcugacccacgacgacgugaagcagagagccuggcagacccugaaguggcagaucgccaacggcauccagcacgugagaacccacguggacgugagcgacgccacccugaccgcccugaaggccaugcuggaggugaagcaggagguggcccccuggaucgaccugcagaucguggccuucccccaggagggcauccugagcuaccccaacggcgaggcccugcuggaggaggcccugagacugggcgccgacguggugggcgccaucccccacuucgaguucaccagagaguacggcguggagagccugcacaagaccuucgcccuggcccagaaguacgacagacugaucgacgugcacugcgacgagaucgacgacgagcagagcagauucguggagaccguggccgcccuggcccaccacgagggcaugggcgccagagugaccgccagccacaccaccgccaugcacagcuacaacggcgccuacaccagcagacuguucagacugcugaagaugagcggcaucaacuucguggccaacccccuggugaacauccaccugcagggcagauucgacaccuaccccaagagaagaggcaucaccagagugaaggagaugcuggagagcggcaucaacgugugcuucggccacgacgacguguucgaccccugguacccccugggcaccgccaacaugcugcaggugcugcacaugggccugcacgugugccagcugaugggcuacggccagaucaacgacggccugaaccugaucacccaccacagcgccagaacccugaaccugcaggacuacggcaucgccgccggcaacagcgccaaccugaucauccugcccgccgagaacggcuucgacgcccugagaagacaggugcccgugagauacagcgugagaggcggcaaggugaucgccagcacccagcccgcccagaccaccguguaccuggagcagcccgaggccaucgacuacaagagauga

SEQ ID NO: 5367 - RNA, 1284 nt, Artificial Sequence
  derived and/or modified sequence opt5 from Cytosine_Deaminase_codA__Escherichia_coli__AAP92816
augagcaacaaugcccugcagaccaucauuaacgcuagacuccccggcgaggaagggcuguggcaaauccaccuucaggacggaaagauuuccgccaucgaugcgcagucuggcgugaugccuauuacagagaauagccuggacgcugaacaggggcucgucaucccgcccuucguugagccucauauccaccuggauacgacccaaacagccggacagcccaacuggaaucaguccggcacccuuuuugaagggauugagcggugggccgagcgcaaagcucugcucacacaugacgaugugaagcagagagccuggcaaacccugaaauggcagaucgcuaacggcauucagcacgugcggacacaugucgacgugucugaugccacccugacggcgcucaaggccaugcuggaaguuaaacaggagguggcuccuuggaucgaccuucaaauugucgccuucccccaggaaggaauccugagcuacccuaauggcgaggcucuccuggaggaagcccuucgccugggggcggaugugguuggagccauuccgcacuuugaguucaccagagaauauggcguggagucccuccacaagacauuugcucuggcccagaaguacgaccggcugaucgauguccauugcgacgaaaucgaugacgagcaaucucgcuucguggagaccguggcugcccucgcccaccaugaagggaugggagcuagagucacagcgagccacaccacggccaugcacuccuauaacggcgcuuacacaagccggcuguuucgccuucugaaaaugucugggauuaauuucguugccaacccccucgugaauauccaucugcagggaagauuugacaccuauccuaagcggcgcggcauuacaagagugaaagagaugcuugaauccggcaucaacgucuguuucgggcacgaugacguguuugaucccugguacccucugggaaccgccaauaugcuccagguucugcauaugggccugcacgugugccagcucaugggguauggacaaauuaacgacggccugaaucuuaucacccaucacagcgcucggacacugaaccuccaggauuacgggaucgccgcgggaaacucugcuaaucugauuauccuucccgccgagaacggcuucgacgcccugcgcagacaggucccggugcgguacuccguuagaggcgggaaggugauugcuagcacgcagccugcccaaaccacagucuaucucgaacagcccgaggcuaucgauuacaaacgcuga

SEQ ID NO: 5368 - RNA, 1284 nt, Artificial Sequence
  derived and/or modified sequence opt6 from Cytosine_Deaminase_codA__Escherichia_coli__AAP92816
augucaaauaacgcauuacaaacaauaauaaaugcaagacuacccggagaagaaggacuauggcaaauacacuuacaagacggaaaaaucagugcuaucgaugcacaaucaggaguaaugccaauaacugaaaauagccuagacgcagaacaaggccuaguaauaccaccauuuguugaaccgcauauacaccuagacacaacacaaacagcagggcaaccaaacuggaaccaaucaggaacacuauuugaaggaauagaaagaugggcugaaagaaaagcacuacuaacacacgacgacguaaaacaacgagccuggcaaacacuaaaauggcaaauagcaaacggaauacaacacguuagaacucauguagaugucucagaugcaacauuaacagcguuaaaagcaaugcuugaaguaaaacaagaaguugcaccauggauagacuuacagauaguagcauucccccaagaaggaauacuaucauacccuaacggagaagcauuacuugaagaagcucuaagacuaggcgcagauguaguaggagcaauaccacacuucgaauuuacaagagaauacggaguagaaucacuacacaaaacauucgcuuuagcacaaaaauaugaccgauuaauagacguucacugcgacgaaaucgacgaugagcaaucuagauucguagaaacaguagcugccuuagcucaucacgaaggaaugggggcaagaguaacagcaucucauacaacagcuaugcacuccuacaacggagcauacacaagucgacuauuuagauuauuaaaaaugucaggcauaaauuuuguagcaaauccacuaguaaauauacacuuacaagguagauuugauacauacccaaaacgacgaggaauaacaagaguaaaagaaaugcuagaaagcggcauaaauguaugcuucggacacgacgacguauucgauccaugguauccccuaggaacagcaaauaugcuacaaguuuuacauaugggacuacacguaugucaauuaaugggauacggacaaauaaaugacggccuaaaucugauaacacaccacucagcacgaacacuaaauuuacaagacuacggaauagcagcaggaaacagcgcaaaccuuaucauauuaccagcagaaaacggauuugacgcauuaagaagacaaguaccaguuagauauuccguaagaggaggaaaaguaauagcaucuacacaaccagcacaaacaacaguauaccuagaacaaccagaagcaauagauuacaaaagauaa

SEQ ID NO: 5369 - protein, 427 aa, Artificial Sequence
  Cytosine_Deaminase_codA__Escherichia_coli__Q6Q8Q1
MSNNALQTIINARLPGEEGLWQIHLQDGKISAIDAQSGVMPITENSLDAEQGLVIPPFVEPHIHLDTTQTAGQPNWNQSGTLFEGIERWAERKALLTHDDVKQRAWQTLKWQIANGIQHVRTHVDVSDATLTALKAMLEVKQEVAPWIDLQIVAFPQEGILSYPNGEALLEEALRLRADVVGAIPHFEFTREYGVESLHKTFALAQKYDRLIDVHCDEIDDEQSRFVETVAALAHHEGMGARVTASHTTAMHSYNGAYTSRLFRLLKMSGINFVANPLVNIHLQGRFDTYPKRRGITRVKEMLESGINVCFGHDDVFDPWYPLGTANMLQVLHMGLHVCQLMGYGQINDGLNLITHHSARTLNLQDYGIAAGNSANLIILPAENGFDALRRQVPVRYSVRGGKVIASTQPAQTTVYLEQPEAIDYKR

SEQ ID NO: 5370 - RNA, 1284 nt, Artificial Sequence
  Cytosine_Deaminase_codA__Escherichia_coli__AAS58473
augucgaauaacgcuuuacaaacaauuauuaacgcccgguuaccaggcgaagaggggcuguggcagauucaucugcaggacggaaaaaucagcgccauugaugcgcaauccggcgugaugcccauaacugaaaacagccuggaugccgaacaagguuuaguuauaccgccguuuguggagccacauauucaccuggacaccacgcaaaccgccggacaaccgaacuggaaucaguccggcacgcuguuugaaggcauugaacgcugggccgagcgcaaagcguuauuaacccaugacgaugugaaacaacgcgcauggcagacgcugaaauggcagauugccaacggcauucagcaugugcguacccaugucgauguuucggaugcaacgcuaacugcgcugaaagcaaugcuggaagugaagcaggaagucgcgccguggauugaucugcaaaucgucgccuucccucaggaagggauuuugucguaucccaacggugaagcguugcuggaagaggcguuacgcuuaagggcagauguagugggggcgauuccgcauuuugaauuuacccgugaauacggcguggagucgcugcauaaaaccuucgcccuggcgcaaaaauacgaccgucucaucgacguucacugugaugagaucgaugacgagcagucgcgcuuugucgaaaccguugcugcccuggcgcaccaugaaggcaugggcgcgcgagucaccgccagccacaccacggcaaugcacuccuauaacggggcguauaccucacgccuguuccgcuugcugaaaauguccgguauuaacuuugucgccaacccgcuggucaauauucaucugcaaggacguuucgauacguauccaaaacgucgcggcaucacgcgcguuaaagagaugcuggaguccggcauuaacgucugcuuuggucacgaugaugucuucgauccgugguauccgcugggaacggcgaauaugcugcaagugcugcauauggggcugcauguuugccaguugaugggcuacgggcagauuaacgauggccugaauuuaaucacccaccacagcgcaaggacguugaauuugcaggauuacggcauugccgccggaaacagcgccaaccugauuauccugccggcugaaaauggguuugaugcgcugcgccgucagguuccgguacguuauucgguacguggcggcaaggugauugccagcacacaaccggcacaaaccaccguauaucuggagcagccagaagccaucgauuacaaacguuga

SEQ ID NO: 5371 - RNA, 1284 nt, Artificial Sequence
  derived and/or modified sequence opt1 from Cytosine_Deaminase_codA__Escherichia_coli__AAS58473
augagcaacaacgcccugcagaccaucaucaacgcccgccuccccggcgaggaggggcuguggcagauccaccuccaggacggcaagaucuccgcgaucgacgcccagagcggggugaugccgaucaccgagaacucccuggacgccgagcagggccuggucaucccgcccuucguggagccccacauccaccuggacacgacccagaccgccgggcagcccaacuggaaccagagcggcacccucuucgagggcaucgagcggugggccgagcgcaaggcgcugcugacgcacgacgacgugaagcagcgggccuggcagacccucaaguggcagaucgccaacgggauccagcacguccgcacccacguggacguguccgacgccacccugacggcgcugaaggccaugcucgaggucaagcaggagguggcccccuggaucgaccugcagaucguggccuucccccaggagggcauccugagcuaccccaacggggaggcccuccuggaggaggcgcugcggcuccgcgccgacgucgugggcgccaucccgcacuucgaguucacccgggaguacgggguggagucccugcacaagaccuucgcccuggcccagaaguacgaccgccucaucgacguccacugcgacgagaucgacgacgagcagagccgguucguggagaccguggcggcccuggcccaccacgagggcaugggcgcccgcgucacggccucccacaccaccgcgaugcacagcuacaacggggccuacaccucccggcuguuccgccuccugaagaugagcggcaucaacuucguggccaacccccuggugaacauccaccuccaggggcgguucgacacguaccccaagcgccggggcaucacccgcgucaaggagaugcuggaguccggcaucaacgugugcuucgggcacgacgacguguucgaccccugguacccgcugggcaccgccaacaugcuccagguccugcacauggggcugcacgugugccagcucaugggcuacgggcagaucaacgacggccugaaccugaucacccaccacagcgcccggacgcucaaccugcaggacuacggcaucgcggccgggaacuccgccaaccugaucauccuccccgccgagaacggcuucgacgcgcugcgccgccaggugcccguccgguacagcgugcgcgggggcaaggucaucgccuccacccagcccgcccagaccaccguguaccuggagcagccggaggccaucgacuacaagcgguga

SEQ ID NO: 5372 - RNA, 1284 nt, Artificial Sequence
  derived and/or modified sequence opt2 from Cytosine_Deaminase_codA__Escherichia_coli__AAS58473
auguccaacaacgcccuccagaccaucaucaacgcccgccuccccggcgaggagggccucuggcagauccaccuccaggacggcaagaucuccgccaucgacgcccaguccggcgucaugcccaucaccgagaacucccucgacgccgagcagggccucgucaucccccccuucgucgagccccacauccaccucgacaccacccagaccgccggccagcccaacuggaaccaguccggcacccucuucgagggcaucgagcgcugggccgagcgcaaggcccuccucacccacgacgacgucaagcagcgcgccuggcagacccucaaguggcagaucgccaacggcauccagcacguccgcacccacgucgacgucuccgacgccacccucaccgcccucaaggccaugcucgaggucaagcaggaggucgcccccuggaucgaccuccagaucgucgccuucccccaggagggcauccucuccuaccccaacggcgaggcccuccucgaggaggcccuccgccuccgcgccgacgucgucggcgccaucccccacuucgaguucacccgcgaguacggcgucgagucccuccacaagaccuucgcccucgcccagaaguacgaccgccucaucgacguccacugcgacgagaucgacgacgagcagucccgcuucgucgagaccgucgccgcccucgcccaccacgagggcaugggcgcccgcgucaccgccucccacaccaccgccaugcacuccuacaacggcgccuacaccucccgccucuuccgccuccucaagauguccggcaucaacuucgucgccaacccccucgucaacauccaccuccagggccgcuucgacaccuaccccaagcgccgcggcaucacccgcgucaaggagaugcucgaguccggcaucaacgucugcuucggccacgacgacgucuucgaccccugguacccccucggcaccgccaacaugcuccagguccuccacaugggccuccacgucugccagcucaugggcuacggccagaucaacgacggccucaaccucaucacccaccacuccgcccgcacccucaaccuccaggacuacggcaucgccgccggcaacuccgccaaccucaucauccuccccgccgagaacggcuucgacgcccuccgccgccagguccccguccgcuacuccguccgcggcggcaaggucaucgccuccacccagcccgcccagaccaccgucuaccucgagcagcccgaggccaucgacuacaagcgcuga

SEQ ID NO: 5373 - RNA, 1284 nt, Artificial Sequence
  derived and/or modified sequence opt3 from Cytosine_Deaminase_codA__Escherichia_coli__AAS58473
augagcaacaaugcccugcagaccaucauuaacgcuagacuccccggcgaggaagggcuuuggcaaauacaucugcaggacggaaagaucuccgcaauugaugcccagucuggugugaugccuaucacagagaauaguuuggacgcggaacagggcuuagucauuccaccguucguugagccccacauccaccuggauacuacgcaaaccgcugggcagccuaacuggaaucagaguggaacacuauuugaaggcauagagaggugggccgagcggaaagcacuccugacucaugacgaugugaagcagcgcgccuggcaaacccuuaaauggcagaucgcuaacgguauucagcacguacgaacacauguggacgucagcgaugcaacccugacugccuugaaggcuaugcucgaagugaaacaggagguugccccauggaucgaccugcaaauuguggcguucccccaggaagggauccuguccuacccuaauggagaggcacucuuagaggaagcccugcgucuuagagcugaugucgugggcgccauaccacacuuugaguucacaagggaauauggcguagagucuuugcacaagaccuuugcacuggcucagaaguacgaccggcuaauugauguucauugcgacgaaaucgaugacgagcaaucgcgcuucguggagacggucgccgcgcucgcccaccaugaagggaugggagcaagagugacugcuucacacaccacagccaugcacagcuauaacggugcuuacacuucaaggcuguuucggcuucugaaaauguccggcauuaauuucguggccaaccccuuggucaauauccaucuccaggggcgcuuugacaccuauccuaagcgaagaggaaucacaaggguuaaagagaugcuggaaucuggcauuaacguguguuucggucacgaugacguauuugauccaugguacccguuagggaccgcaaauaugcuccaggugcugcauaugggacuucacgucugccagcugaugggcuauggccaaauaaacgacggguugaaucuaaucacgcaucacagcgcccggacucugaaccuccaggauuacggaauugcugcggguaacuccgcaaaucugaucauacuucccgccgagaacggcuucgacgcucugcgucgccaggugccuguuagauacucagugaggggagggaaggucauugccaguacacagccagcacaaaccacuguguauuuggaacagcccgaggccaucgauuacaaacgguga

SEQ ID NO: 5374 - RNA, 1284 nt, Artificial Sequence
  derived and/or modified sequence opt4 from Cytosine_Deaminase_codA__Escherichia_coli__AAS58473
augagcaacaacgcccugcagaccaucaucaacgccagacugcccggcgaggagggccuguggcagauccaccugcaggacggcaagaucagcgccaucgacgcccagagcggcgugaugcccaucaccgagaacagccuggacgccgagcagggccuggugaucccccccuucguggagccccacauccaccuggacaccacccagaccgccggccagcccaacuggaaccagagcggcacccuguucgagggcaucgagagaugggccgagagaaaggcccugcugacccacgacgacgugaagcagagagccuggcagacccugaaguggcagaucgccaacggcauccagcacgugagaacccacguggacgugagcgacgccacccugaccgcccugaaggccaugcuggaggugaagcaggagguggcccccuggaucgaccugcagaucguggccuucccccaggagggcauccugagcuaccccaacggcgaggcccugcuggaggaggcccugagacugagagccgacguggugggcgccaucccccacuucgaguucaccagagaguacggcguggagagccugcacaagaccuucgcccuggcccagaaguacgacagacugaucgacgugcacugcgacgagaucgacgacgagcagagcagauucguggagaccguggccgcccuggcccaccacgagggcaugggcgccagagugaccgccagccacaccaccgccaugcacagcuacaacggcgccuacaccagcagacuguucagacugcugaagaugagcggcaucaacuucguggccaacccccuggugaacauccaccugcagggcagauucgacaccuaccccaagagaagaggcaucaccagagugaaggagaugcuggagagcggcaucaacgugugcuucggccacgacgacguguucgaccccugguacccccugggcaccgccaacaugcugcaggugcugcacaugggccugcacgugugccagcugaugggcuacggccagaucaacgacggccugaaccugaucacccaccacagcgccagaacccugaaccugcaggacuacggcaucgccgccggcaacagcgccaaccugaucauccugcccgccgagaacggcuucgacgcccugagaagacaggugcccgugagauacagcgugagaggcggcaaggugaucgccagcacccagcccgcccagaccaccguguaccuggagcagcccgaggccaucgacuacaagagauga

SEQ ID NO: 5375 - RNA, 1284 nt, Artificial Sequence
  derived and/or modified sequence opt5 from Cytosine_Deaminase_codA__Escherichia_coli__AAS58473
augagcaacaaugcccugcagaccaucauuaacgcuagacuccccggcgaggaagggcuguggcaaauccaccuucaggacggaaagauuuccgccaucgaugcgcagucuggcgugaugccuauuacagagaauagccuggacgcugaacaggggcucgucaucccgcccuucguugagccucauauccaccuggauacgacccaaacagccggacagcccaacuggaaucaguccggcacccuuuuugaagggauugagcggugggccgagcgcaaagcucugcucacacaugacgaugugaagcagagagccuggcaaacccugaaauggcagaucgcuaacggcauucagcacgugcggacacaugucgacgugucugaugccacccugacggcgcucaaggccaugcuggaaguuaaacaggagguggcuccuuggaucgaccuucaaauugucgccuucccccaggaaggaauccugagcuacccuaauggcgaggcucuccuggaggaagcccuucgccugagagcggaugugguuggggccauuccgcacuuugaguucacccgggaauauggaguggagucccuccacaagacauuugcucuggcccagaaguacgaccgccugaucgauguccauugcgacgaaaucgaugacgagcaaucuagauucguggagaccguggcugcccucgcccaccaugaaggcaugggggcucgggucacagcgagccacaccacggccaugcacuccuauaacggagcuuacacaagccgccuguuuagacuucugaaaaugucuggcauuaauuucguugccaacccccucgugaauauccaucugcaggggcgguuugacaccuauccuaagcgcagaggaauuacacgggugaaagagaugcuugaauccggcaucaacgucuguuucggccacgaugacguguuugaucccugguacccucuggggaccgccaauaugcuccagguucugcauaugggacugcacgugugccagcucaugggcuaugggcaaauuaacgacggacugaaucuuaucacccaucacagcgcucgcacacugaaccuccaggauuacggcaucgccgcggggaacucugcuaaucugauuauccuucccgccgagaacggauucgacgcccugagacggcaggucccggugagauacuccguucgcggcggcaaggugauugcuagcacgcagccugcccaaaccacagucuaucucgaacagcccgaggcuaucgauuacaaacgguga

SEQ ID NO: 5376 - RNA, 1284 nt, Artificial Sequence
  derived and/or modified sequence opt6 from Cytosine_Deaminase_codA__Escherichia_coli__AAS58473
augaguaacaacgcauuacaaacaauaauaaaugcgagauuaccaggugaagaaggacuuuggcaaauacauuuacaagauggaaaaauaucugcaauagacgcacaaagcggaguaaugccaauaacagaaaauucacuagaugcagaacaaggauuaguaauaccaccuuucguagaaccacauauacauuuagacacuacacaaacagcaggucaaccaaacuggaaccaaucaggaacauuauuugaaggaauagagagaugggccgaaagaaaagccuuacuaacacacgacgacgucaaacaaagagcauggcaaacauuaaaauggcaaauagcaaacggaauacaacauguaagaacacauguagacguaagugacgcaacacuaacagcacuaaaagcaauguuagaaguaaagcaagaaguagcaccauggauagaucuacaaauaguagcauucccccaagaaggaauacuaucauauccaaacggagaagcacuacuugaagaagcccuaagacuaagagcagauguaguaggagcaauaccacacuuugaauucacaagagaauacggaguagaaucacuacauaaaacuuuugcccuagcacaaaaauacgauagacuaauagauguacauugugacgaaauagacgaugaacaaucacgauucguugaaaccgucgcugcacuagcacaucacgaagggaugggugcaagaguaacagcuucacacacaacugccaugcacucuuauaacggagcauacacaagcagauuauucagacuauuaaaaaugaguggaauaaacuuuguagcuaauccccuaguaaauauacauuuacaagguagauuugacacauacccgaaaagaagaggaauaacaagaguaaaagaaaugcuagaaagcggcauaaacguauguuucggacaugacgacguauucgaccccugguauccauuaggaacagccaacauguuacaaguccuacacaugggccuacaugucugccaacuuaugggauacggacaaauuaacgacggacuaaacuuaaucacacaucauuccgcaagaacacucaauuuacaagacuaugguauagcagcaggaaacucagcuaaccuaauaauacuaccugcagaaaacggcuucgacgcauuaagaagacaaguuccaguaagauacucaguacgaggagggaaaguaauagcaucaacgcaaccagcucaaacaacaguauauuuagaacaaccagaagcaauagacuauaaaagauaa

SEQ ID NO: 5377 - protein, 432 aa, Artificial Sequence
  Cytosine_Deaminase_codA__Escherichia_coli__W8ZNH5
MWRLTVSNNALQTIINARLPGKEGLWQIHFHDGKISAIDAQSGVMPVTENSLDAEQGLVLPPFVEPHIHLDTTQTAGQPNWNQSGTLFEGIERWAERKALLTHDDVKQRAWQTLKWQIANGIQHVRTHVDVSDATLTALKAMLEVKQEVAPWIDLQIVAFPQEGILSYPNGEALLEEALRLGADVVGAIPHFEFTREYGVESLHKTFALAQKYDRLIDVHCDEIDDEQSRFVETVAALAHREGMGARVTASHTTAMHSYNGAYTSRLFRLLKMSGINFVANPLVNIHLQGRFDTYPKRRGITRVKEMLESGINVCFGHDDVFDPWYPLGTANMLQVLHMGLHVCQLMGYGQINDGLNLITHHSARTLNLQDYGIAAGNSANLIILPAENGFDALRRQVPVRYSVRGGKVIASTKPAQTTVYLEQPEAIDYKR

SEQ ID NO: 5378 - RNA, 1299 nt, Artificial Sequence
  Cytosine_Deaminase_codA__Escherichia_coli__CDN80736
auguggaggcuaacagugucgaauaaugcuuuacaaacaauuauuaacgcccgguuacccggcaaagaggggcuguggcagauucauuuucacgacggaaaaaucagcgccauugaugcgcaauccggcgugaugcccguaacugaaaacagccuggaugccgaacaagguuuaguuuuaccgccguuuguggagccgcauauucaccuggacaccacgcaaaccgccggacaaccgaacuggaaucaguccggcacgcuguuugaaggcauugaacgcugggccgagcgcaaagcguuauuaacucaugacgaugugaaacaacgcgcauggcaaacgcugaaauggcagauugccaacggcauucagcaugugcguacccaugucgauguuucggacgcaacgcugacugcgcugaaagcaaugcuggaagugaaacaggaaguugcgccguggauugaucuacaaaucgucgccuucccgcaggaagggauuuugucguaucccaauggugaagcguugcuggaagaggcguuacgcuuaggggcagacguuguuggggcgauuccgcauuuugaauuuacccgugaauauggcguggagucgcugcauaaaaccuucgcccuggcgcaaaaauacgaccgucucaucgauguucacugugacgagauugaugaugagcaaucacgcuuugucgaaaccguugcugcccuggcgcaccgugaaggcaugggcgcgcgagucaccgccagccauacuacggcaaugcacuccuauaacggggcguauacuucgcgccuguuucguuugcugaaaauguccgguauuaacuuugucgccaacccguuggucaauauucaucugcaaggacguuucgauacguauccaaaacgucgcggcaucacgcgcguuaaagagaugcuggaguccggcauuaacgucugcuuuggucacgaugaugucuucgauccgugguauccgcugggaacggcgaauaugcugcaagugcugcauauggggcugcauguuugccagcugaugggcuaugggcagauuaacgacggccugaauuuaaucacccaccacagugccagaacguugaauuugcaggauuacggcauugccgccggaaacagcgccaaccugauuauccugccggcugaaaauggguuugacgcgcugcgccgucagguuccggugcgcuauucgguacguggcggcaaggugauugccagcacaaaaccggcacaaaccaccguauaucuggagcagccagaagccaucgauuacaaacgguaa

SEQ ID NO: 5379 - RNA, 1299 nt, Artificial Sequence
  derived and/or modified sequence opt1 from Cytosine_Deaminase_codA__Escherichia_coli__CDN80736
auguggcgccugaccgugagcaacaacgcccuccagaccaucaucaacgcccggcugcccggcaaggaggggcuguggcagauccacuuccacgacggcaagaucuccgcgaucgacgcccagagcggggucaugccggugacggagaacucccucgacgccgagcagggccuggugcugccgcccuucgucgagccccacauccaccucgacaccacccagaccgccgggcagcccaacuggaaccagagcggcacgcuguucgagggcaucgagcgcugggccgagcggaaggcgcugcucacccacgacgacgugaagcagcgcgccuggcagacccugaaguggcagaucgccaacgggauccagcacgugcggacccacgucgacguguccgacgccacgcugaccgcgcucaaggccaugcuggaggugaagcaggaggucgcccccuggaucgaccugcagaucguggccuucccccaggagggcauccucagcuaccccaacggggaggcccugcuggaggaggcgcuccgccugggcgccgacguggucggggccaucccgcacuucgaguucacccgggaguacggcguggagucccugcacaagaccuucgcccucgcccagaaguacgaccgccugaucgacgugcacugcgacgagaucgacgacgagcagagccgguucgucgagacgguggcggcccuggcccaccgcgagggcaugggggcccgggugaccgccucccacaccaccgcgaugcacagcuacaacggcgccuacacgucccgccucuuccggcugcugaagaugagcgggaucaacuucgucgccaacccccucgugaacauccaccuccagggccgcuucgacaccuaccccaagcggcgcggcaucacccgggugaaggagaugcuggaguccgggaucaacgucugcuucggccacgacgacguguucgaccccugguacccgcuggggaccgccaacaugcuccaggugcugcacaugggccugcacgucugccagcugaugggguacggccagaucaacgacggccugaaccucaucacgcaccacagcgcccgcacccugaaccugcaggacuacgggaucgcggccggcaacuccgccaaccucaucauccugcccgccgagaacggguucgacgcgcugcggcgccaggugcccguccgguacagcgugcgcggcgggaaggugaucgccuccaccaagcccgcccagaccacggucuaccucgagcagccggaggccaucgacuacaagcgcuga

SEQ ID NO: 5380 - RNA, 1299 nt, Artificial Sequence
  derived and/or modified sequence opt2 from Cytosine_Deaminase_codA__Escherichia_coli__CDN80736
auguggcgccucaccgucuccaacaacgcccuccagaccaucaucaacgcccgccuccccggcaaggagggccucuggcagauccacuuccacgacggcaagaucuccgccaucgacgcccaguccggcgucaugcccgucaccgagaacucccucgacgccgagcagggccucguccucccccccuucgucgagccccacauccaccucgacaccacccagaccgccggccagcccaacuggaaccaguccggcacccucuucgagggcaucgagcgcugggccgagcgcaaggcccuccucacccacgacgacgucaagcagcgcgccuggcagacccucaaguggcagaucgccaacggcauccagcacguccgcacccacgucgacgucuccgacgccacccucaccgcccucaaggccaugcucgaggucaagcaggaggucgcccccuggaucgaccuccagaucgucgccuucccccaggagggcauccucuccuaccccaacggcgaggcccuccucgaggaggcccuccgccucggcgccgacgucgucggcgccaucccccacuucgaguucacccgcgaguacggcgucgagucccuccacaagaccuucgcccucgcccagaaguacgaccgccucaucgacguccacugcgacgagaucgacgacgagcagucccgcuucgucgagaccgucgccgcccucgcccaccgcgagggcaugggcgcccgcgucaccgccucccacaccaccgccaugcacuccuacaacggcgccuacaccucccgccucuuccgccuccucaagauguccggcaucaacuucgucgccaacccccucgucaacauccaccuccagggccgcuucgacaccuaccccaagcgccgcggcaucacccgcgucaaggagaugcucgaguccggcaucaacgucugcuucggccacgacgacgucuucgaccccugguacccccucggcaccgccaacaugcuccagguccuccacaugggccuccacgucugccagcucaugggcuacggccagaucaacgacggccucaaccucaucacccaccacuccgcccgcacccucaaccuccaggacuacggcaucgccgccggcaacuccgccaaccucaucauccuccccgccgagaacggcuucgacgcccuccgccgccagguccccguccgcuacuccguccgcggcggcaaggucaucgccuccaccaagcccgcccagaccaccgucuaccucgagcagcccgaggccaucgacuacaagcgcuga

SEQ ID NO: 5381 - RNA, 1299 nt, Artificial Sequence
  derived and/or modified sequence opt3 from Cytosine_Deaminase_codA__Escherichia_coli__CDN80736
auguggagacugaccgugagcaacaaugcccuccagacaaucauuaacgcuaggcuucccggcaaggaggggcuguggcaaauacacuuccaugacggaaaaaucuccgcaauugaugcccagucuggugucaugccuguuacugaaaauucauuggacgcggagcagggcuuagugcugccaccguuuguagaaccccacauccaucuagauacgacccagacagcugggcaaccuaacuggaaucagaguggaacucucuucgagggcauugaacggugggccgagcgcaaggcacugcuuacccacgacgaugugaaacagcgagccuggcagacacugaaguggcaaaucgcuaacgguauacagcauguccguacccacguggacguuagcgaugcaacuuugacagcccucaaagcuaugcuggaggugaagcaggaagucgccccauggaucgaccugcagauuguggcguuuccccaagaggggauccucuccuacccuaauggagaagcauuacuggaggaggcccuuagauugggcgcugauguaguuggcgccauuccacacuucgaauuuaccagggaguaugggguggaaucucugcauaagacguucgcacuagcucagaaauacgaccggcucaucgauguccacugcgacgagauagaugacgaacagucgcgcuuuguggagacuguggccgcgcuggcccauagagagggaaugggugcaagggucaccgcuucacacacaacugccaugcacagcuauaacggcgcuuacaccagucggcuuuuccgccuguugaagauguccgggauuaauuuuguugccaacccccucgugaauauccaucugcaaggacgauucgacacauauccuaaaagaaggggcauuacccggguaaaggaaauguuagagucugguaucaacguguguuuugggcacgaugacgucuucgauccaugguacccgcugggaacggcaaauaugcuccaggugcuucauaugggccugcacguuugccaguugaugggcuaugggcagaucaacgacggacuaaaucugauuacucaucacagcgcccguacacucaaccugcaagauuacgguauagcugcgggcaacuccgcaaaucuuaucauucugcccgccgaaaacggguuugacgcuuugcgcagacaggugccugucagguacucagugcggggaggcaaaguaaucgccaguaccaagccagcacagacuacaguuuaucucgagcagcccgaagccauagauuacaagcgauga

SEQ ID NO: 5382 - RNA, 1299 nt, Artificial Sequence
  derived and/or modified sequence opt4 from Cytosine_Deaminase_codA__Escherichia_coli__CDN80736
auguggagacugaccgugagcaacaacgcccugcagaccaucaucaacgccagacugcccggcaaggagggccuguggcagauccacuuccacgacggcaagaucagcgccaucgacgcccagagcggcgugaugcccgugaccgagaacagccuggacgccgagcagggccuggugcugccccccuucguggagccccacauccaccuggacaccacccagaccgccggccagcccaacuggaaccagagcggcacccuguucgagggcaucgagagaugggccgagagaaaggcccugcugacccacgacgacgugaagcagagagccuggcagacccugaaguggcagaucgccaacggcauccagcacgugagaacccacguggacgugagcgacgccacccugaccgcccugaaggccaugcuggaggugaagcaggagguggcccccuggaucgaccugcagaucguggccuucccccaggagggcauccugagcuaccccaacggcgaggcccugcuggaggaggcccugagacugggcgccgacguggugggcgccaucccccacuucgaguucaccagagaguacggcguggagagccugcacaagaccuucgcccuggcccagaaguacgacagacugaucgacgugcacugcgacgagaucgacgacgagcagagcagauucguggagaccguggccgcccuggcccacagagagggcaugggcgccagagugaccgccagccacaccaccgccaugcacagcuacaacggcgccuacaccagcagacuguucagacugcugaagaugagcggcaucaacuucguggccaacccccuggugaacauccaccugcagggcagauucgacaccuaccccaagagaagaggcaucaccagagugaaggagaugcuggagagcggcaucaacgugugcuucggccacgacgacguguucgaccccugguacccccugggcaccgccaacaugcugcaggugcugcacaugggccugcacgugugccagcugaugggcuacggccagaucaacgacggccugaaccugaucacccaccacagcgccagaacccugaaccugcaggacuacggcaucgccgccggcaacagcgccaaccugaucauccugcccgccgagaacggcuucgacgcccugagaagacaggugcccgugagauacagcgugagaggcggcaaggugaucgccagcaccaagcccgcccagaccaccguguaccuggagcagcccgaggccaucgacuacaagagauga

SEQ ID NO: 5383 - RNA, 1299 nt, Artificial Sequence
  derived and/or modified sequence opt5 from Cytosine_Deaminase_codA__Escherichia_coli__CDN80736
auguggagacugaccgugagcaacaaugcccuccagacaaucauuaacgcucggcugcccggcaaggaggggcuuuggcaaauccacuuccaugacggaaaaauuuccgccaucgaugcgcagucuggcgucaugccuguuacggaaaauagccuggacgcugagcaggggcucgugcugccgcccuuuguggaaccucacauucaucuugauaccacacagaccgccggacaacccaacuggaaucaguccggcacacuguucgaggggaucgaacgcugggccgagagaaaggcucuccugacccacgacgaugucaaacagcgggccuggcagacacugaaguggcaaaucgcuaacggcauucagcaugugcgcacccacguugacgugucugaugccacgcucaccgcgcugaaagccaugcuugaggucaagcaggaaguggcuccuuggaucgaccugcagauuguugccuuuccccaagagggaauccucagcuacccuaauggcgaagcucugcuugaggaggcccugagacucggggcggauguggucggagccauuccgcacuucgaauuuacacgggaguauggcguggaaucccugcauaagaccuucgcucuggcccagaaauacgaccgccucaucgaugugcacugcgacgagauugaugacgaacagucuagauuugucgagacaguugcugcccuggcccaucgggaggggaugggagcucgcgugaccgcgagccacacgacagccaugcacuccuauaacggcgcuuacaccagcagacuuuuccggcugcucaagaugucugggaucaauuuuguggccaacccccuggucaauauccaucuucaaggacgcuucgacacauauccuaaaagacggggcauuacccgcgugaaggaaaugcuggaguccggcaucaacguuuguuuugggcacgaugacguguucgaucccugguacccucucggaaccgccaauaugcugcagguccugcauaugggccuccacgugugccagcugaugggguauggacagauuaacgacggccuuaaucugaucacacaucacagcgcuagaacgcucaaccugcaagauuacgggauugccgcgggaaacucugcuaaucuuaucauccugcccgccgaaaacggcuuugacgcccuccggagacagguuccggugcgcuacuccguccggggcgggaaagugauugcuagcaccaagccugcccagacaaccgucuaucuggagcagcccgaagcuaucgauuacaagagauga

SEQ ID NO: 5384 - RNA, 1299 nt, Artificial Sequence
  derived and/or modified sequence opt6 from Cytosine_Deaminase_codA__Escherichia_coli__CDN80736
auguggagguuaacaguaucuaacaacgcacuacaaacaauaauaaaugcucgacuuccaggcaaagaaggacuuuggcaaauacacuuucaugauggcaaaaucagcgcaauagacgcacaaucaggagugaugcccgucaccgaaaauucauuagacgcagaacaaggacuagucuuacccccauucguagaaccgcauauacacuuagauacuacacaaacagcaggacaaccaaauuggaaccaaucuggaacacuauucgaaggaauagaaagaugggcagaaagaaaagcacuacuaacacacgaugacguaaaacaaagagcauggcaaacacuaaaauggcaaauagcaaacggaauccaacacguacgaacacauguagaugucucagacgcaacacuaaccgcacuaaaagcaauguuagaagucaaacaagaaguagcaccauggaucgaucuacaaauaguagcauuuccacaagaaggaauacugagcuauccaaacggagaagcauuauuagaagaagcacuaagacuaggagcagacguaguaggugcaauaccacauuuugaauuuacaagagaauauggcguagaaucucuccacaaaacuuucgcacuagcacaaaaauaugauagauuaauagauguacauugcgaugaaauagacgaugaacagaguagauucguagaaacaguagcagcacuugcacauagggaagguaugggcgcaagaguaacagcaagucacacaacagcaaugcacucauacaauggagcauauaccaguagacucuuucgacuccucaaaaugucaggaauaaauuuuguagccaacccucuaguuaauauacacuuacaaggaagauucgacacauacccuaaaagaagaggaauaacaagaguaaaagaaauguuagaaucaggcauaaacguuuguuuuggacacgaugauguauuugauccuugguauccauuaggaacagccaauauguuacaaguacuccauauggguuuacauguaugccaauuaaugggauacggacaaaucaaugauggauuaaacuuaauaacacaccauucagcaagaacacuaaaucuacaagauuauggaauagcagccggaaauucagcaaaucuaauaauacuaccagcagaaaacggauuugacgcccugagaagacaaguaccaguaagauacucaguaagaggaggaaaaguaauagcaucaacaaaaccagcacaaacaaccguauacuuagaacaaccagaagcaauagacuauaaaagauaa

SEQ ID NO: 5385 - protein, 158 aa, Artificial Sequence
  Cytosine_Deaminase_fcy1__Saccharomyces_cerevisiae__A0A023ZJG6
MVTGGMASKWDQKGMDIAYEEAALGYKEGGVPIGGCLINNKDGSVLGRGHNMRFQKGSATLHGEISTLENCGRLEGKVYKDTTLYTTLSPCDMCTGAIIMYGIPRCVVGENVNFKSKGEKYLQTRGHEVVVVDDERCKKIMKQFIDERPQDWFEDIGE

SEQ ID NO: 5386 - RNA, 477 nt, Artificial Sequence
  Cytosine_Deaminase_fcy1__Saccharomyces_cerevisiae__AHY78226
auggugacagggggaauggcaagcaagugggaucagaaggguauggacauugccuaugaggaggcggccuuagguuacaaagagggugguguuccuauuggcggaugucuuaucaauaacaaagacggaaguguucucggucguggucacaacaugagauuucaaaagggauccgccacacuacauggugagaucuccacuuuggaaaacugugggagauuagagggcaaaguguacaaagauaccacuuuguauacgacgcugucuccaugcgacauguguacaggugccaucaucauguaugguauuccacgcuguguugucggugagaacguuaauuucaaaaguaagggcgagaaauauuuacaaacuagaggucacgagguuguuguuguugacgaugagagguguaaaaagaucaugaaacaauuuaucgaugaaagaccucaggauugguuugaagauauuggugaguag

SEQ ID NO: 5387 - RNA, 477 nt, Artificial Sequence
  derived and/or modified sequence opt1 from Cytosine_Deaminase_fcy1__Saccharomyces_cerevisiae__AHY78226
auggugaccggcgggauggccagcaagugggaccagaagggcauggacaucgccuacgaggaggcggcccugggguacaaggagggcgggguccccaucggcggcugccucaucaacaacaaggacggguccgugcugggccgcgggcacaacaugcgguuccagaagggcagcgccacccugcacggggagaucuccacgcucgagaacugcggccgccuggagggcaagguguacaaggacaccacccuguacaccacgcucagcccgugcgacaugugcaccggggccaucaucauguacggcaucccccggugcgucgugggggagaacgugaacuucaaguccaagggcgagaaguaccugcagacccgcggccacgaggucgugguggucgacgacgagcggugcaagaagaucaugaagcaguucaucgacgagcgcccccaggacugguucgaggacaucggggaguga

SEQ ID NO: 5388 - RNA, 477 nt, Artificial Sequence
  derived and/or modified sequence opt2 from Cytosine_Deaminase_fcy1__Saccharomyces_cerevisiae__AHY78226
auggucaccggcggcauggccuccaagugggaccagaagggcauggacaucgccuacgaggaggccgcccucggcuacaaggagggcggcguccccaucggcggcugccucaucaacaacaaggacggcuccguccucggccgcggccacaacaugcgcuuccagaagggcuccgccacccuccacggcgagaucuccacccucgagaacugcggccgccucgagggcaaggucuacaaggacaccacccucuacaccacccucucccccugcgacaugugcaccggcgccaucaucauguacggcaucccccgcugcgucgucggcgagaacgucaacuucaaguccaagggcgagaaguaccuccagacccgcggccacgaggucgucgucgucgacgacgagcgcugcaagaagaucaugaagcaguucaucgacgagcgcccccaggacugguucgaggacaucggcgaguga

SEQ ID NO: 5389 - RNA, 477 nt, Artificial Sequence
  derived and/or modified sequence opt3 from Cytosine_Deaminase_fcy1__Saccharomyces_cerevisiae__AHY78226
auggugaccggcgggauggccagcaagugggaccagaaaggaauggauaucgcuuacgaggaagcagcccuggguuauaaggagggcgggguccccauuggaggcugccucauaaacaauaaagacgguuccguucuugggagaggacacaacaugagguuccaaaagggcucugcgacacugcauggcgaaaucucaacuuuggagaauugugggcgguuagaaggaaaaguguacaaggauacgacccuguauacaacucuaaguccuugcgacauguguaccggugcuauuaucauguacggcauuccacgcugcguagugggggagaacgucaauuuuaagagcaaaggagagaaguaucuccagacacgaggccacgaagugguuguggucgaugacgagcguuguaaaaagaucaugaaacaguucauagaugaaagaccgcaggacugguuugaggauaucggugaguga

SEQ ID NO: 5390 - RNA, 477 nt, Artificial Sequence
  derived and/or modified sequence opt4 from Cytosine_Deaminase_fcy1__Saccharomyces_cerevisiae__AHY78226
auggugaccggcggcauggccagcaagugggaccagaagggcauggacaucgccuacgaggaggccgcccugggcuacaaggagggcggcgugcccaucggcggcugccugaucaacaacaaggacggcagcgugcugggcagaggccacaacaugagauuccagaagggcagcgccacccugcacggcgagaucagcacccuggagaacugcggcagacuggagggcaagguguacaaggacaccacccuguacaccacccugagccccugcgacaugugcaccggcgccaucaucauguacggcauccccagaugcguggugggcgagaacgugaacuucaagagcaagggcgagaaguaccugcagaccagaggccacgaggugguggugguggacgacgagagaugcaagaagaucaugaagcaguucaucgacgagagaccccaggacugguucgaggacaucggcgaguga

SEQ ID NO: 5391 - RNA, 477 nt, Artificial Sequence
  derived and/or modified sequence opt5 from Cytosine_Deaminase_fcy1__Saccharomyces_cerevisiae__AHY78226
auggugaccggcgggauggccagcaagugggaccagaaaggaauggauaucgcuuacgaggaagccgcgcugggcuauaaggaagggggaguccccauuggcgggugccucaucaacaauaaagacggauccguucugggcagaggccacaacaugcgguuccaaaaggggucugcuacacuucauggagagauuagcacgcuggagaauuguggccgccucgaagggaaaguguacaaggauaccacacuguauaccacacuuuccccuugcgacauguguaccggagccaucauuauguacggcaucccgagaugcguggucggggagaacgugaauuuuaagucuaaaggagagaaguaucugcagacacggggccacgaaguuguggucguggaugacgagcgcuguaaaaagaucaugaaacaguucauugaugaaagaccccaggacugguuugaggauaucggcgaguga

SEQ ID NO: 5392 - RNA, 477 nt, Artificial Sequence
  derived and/or modified sequence opt6 from Cytosine_Deaminase_fcy1__Saccharomyces_cerevisiae__AHY78226
augguaacaggaggaauggcaagcaaaugggaucaaaaaggaauggacauagcauaugaagaagcagcguuaggauauaaagaaggaggaguaccaauaggaggauguuuaauaaauaauaaagauggaagcguauuaggaagaggacauaauaugagauuucaaaaaggaagugcaacauuacauggagaaauaaguacauuagaaaauuguggaagacuagaaggaaaaguauauaaagauacaacauuauauacaacauuaaguccaugugacaugugcacaggagcaauaauaauguauggaauaccaagauguguaguaggagaaaauguaaauuuuaaaaguaaaggagaaaaauauuuacaaacaaggggacaugaaguaguaguaguagaugacgaaagauguaaaaaaauaaugaaacaauuuauagaugaaagaccacaagauugguuugaagauauaggagaauag

SEQ ID NO: 5393 - protein, 158 aa, Artificial Sequence; identical to SEQ ID NO: 5385
  Cytosine_Deaminase_fcy1__Saccharomyces_cerevisiae__A0A024XGF7

SEQ ID NO: 5394 - RNA, 477 nt, Artificial Sequence; identical to SEQ ID NO: 5386
  Cytosine_Deaminase_fcy1__Saccharomyces_cerevisiae__EWG88187

SEQ ID NO: 5395 - RNA, 477 nt, Artificial Sequence; identical to SEQ ID NO: 5387
  derived and/or modified sequence opt1 from Cytosine_Deaminase_fcy1__Saccharomyces_cerevisiae__EWG88187

SEQ ID NO: 5396 - RNA, 477 nt, Artificial Sequence; identical to SEQ ID NO: 5388
  derived and/or modified sequence opt2 from Cytosine_Deaminase_fcy1__Saccharomyces_cerevisiae__EWG88187

SEQ ID NO: 5397 - RNA, 477 nt, Artificial Sequence; identical to SEQ ID NO: 5389
  derived and/or modified sequence opt3 from Cytosine_Deaminase_fcy1__Saccharomyces_cerevisiae__EWG88187

SEQ ID NO: 5398 - RNA, 477 nt, Artificial Sequence; identical to SEQ ID NO: 5390
  derived and/or modified sequence opt4 from Cytosine_Deaminase_fcy1__Saccharomyces_cerevisiae__EWG88187

SEQ ID NO: 5399 - RNA, 477 nt, Artificial Sequence; identical to SEQ ID NO: 5391
  derived and/or modified sequence opt5 from Cytosine_Deaminase_fcy1__Saccharomyces_cerevisiae__EWG88187

SEQ ID NO: 5400 - RNA, 477 nt, Artificial Sequence
  derived and/or modified sequence opt6 from Cytosine_Deaminase_fcy1__Saccharomyces_cerevisiae__EWG88187
augguaacaggaggaauggcaaguaaaugggaucaaaaaggaauggacauagcauaugaagaagcagcacuaggauauaaagaaggaggaguaccaauaggaggaugcuuaauaaauaauaaagaugggaguguauuaggaagaggacauaauaugagauuucaaaaaggaagugcaacauuacacggagaaauaaguacauuagaaaacuguggaaggcuagaaggaaaaguauauaaagauacaacauuauauacaacauuaaguccaugugauauguguacaggagcaauaauaauguauggaauaccaagauguguaguaggagaaaauguaaauuuuaaaaguaaaggagaaaaauaucuacaaacaagaggacaugaaguaguaguaguagaugacgaaagauguaaaaaaauaaugaaacaauuuauagaugaaagaccacaagauugguuugaagauauaggagaauaa

SEQ ID NO: 5401 - protein, 158 aa, Artificial Sequence; identical to SEQ ID NO: 5385
  Cytosine_Deaminase_fcy1__Saccharomyces_cerevisiae__A0A024XUW9

SEQ ID NO: 5402 - RNA, 477 nt, Artificial Sequence; identical to SEQ ID NO: 5386
  Cytosine_Deaminase_fcy1__Saccharomyces_cerevisiae__EWG92959

SEQ ID NO: 5403 - RNA, 477 nt, Artificial Sequence; identical to SEQ ID NO: 5387
  derived and/or modified sequence opt1 from Cytosine_Deaminase_fcy1__Saccharomyces_cerevisiae__EWG92959

SEQ ID NO: 5404 - RNA, 477 nt, Artificial Sequence; identical to SEQ ID NO: 5388
  derived and/or modified sequence opt2 from Cytosine_Deaminase_fcy1__Saccharomyces_cerevisiae__EWG92959

SEQ ID NO: 5405 - RNA, 477 nt, Artificial Sequence; identical to SEQ ID NO: 5389
  derived and/or modified sequence opt3 from Cytosine_Deaminase_fcy1__Saccharomyces_cerevisiae__EWG92959

SEQ ID NO: 5406 - RNA, 477 nt, Artificial Sequence; identical to SEQ ID NO: 5390
  derived and/or modified sequence opt4 from Cytosine_Deaminase_fcy1__Saccharomyces_cerevisiae__EWG92959

SEQ ID NO: 5407 - RNA, 477 nt, Artificial Sequence; identical to SEQ ID NO: 5391
  derived and/or modified sequence opt5 from Cytosine_Deaminase_fcy1__Saccharomyces_cerevisiae__EWG92959

SEQ ID NO: 5408 - RNA, 477 nt, Artificial Sequence
  derived and/or modified sequence opt6 from Cytosine_Deaminase_fcy1__Saccharomyces_cerevisiae__EWG92959
augguaacaggaggaauggcaaguaaaugggaucaaaaaggaauggacauagcauaugaagaagcagcauuaggauauaaagaaggaggaguaccaauaggaggaugccuaauaaauaauaaagacggaaguguauuaggaagaggacauaauaugagauuucaaaaaggaagugcaacauuacacggagaaauaaguacauuagaaaacuguggaagauuagaaggaaaaguauauaaagauacaacauuauauacaacauuaaguccaugugacaugugcacaggagcaauaauaauguauggaauaccaagaugugugguaggagaaaauguaaauuuuaaaaguaaaggagaaaaauauuuacaaacaagaggacaugaaguaguaguaguagaugacgaaagauguaaaaaaauaaugaaacaauuuauagaugaaagaccacaagauugguuugaagauauaggagaauaa

SEQ ID NO: 5409 - protein, 158 aa, Artificial Sequence; identical to SEQ ID NO: 5385
  Cytosine_Deaminase_fcy1__Saccharomyces_cerevisiae__A0A0C5ITD0

SEQ ID NO: 5410 - RNA, 477 nt, Artificial Sequence; identical to SEQ ID NO: 5386
  Cytosine_Deaminase_fcy1__Saccharomyces_cerevisiae__AJP42194

SEQ ID NO: 5411 - RNA, 477 nt, Artificial Sequence; identical to SEQ ID NO: 5387
  derived and/or modified sequence opt1 from Cytosine_Deaminase_fcy1__Saccharomyces_cerevisiae__AJP42194

SEQ ID NO: 5412 - RNA, 477 nt, Artificial Sequence; identical to SEQ ID NO: 5388
  derived and/or modified sequence opt2 from Cytosine_Deaminase_fcy1__Saccharomyces_cerevisiae__AJP42194

SEQ ID NO: 5413 - RNA, 477 nt, Artificial Sequence; identical to SEQ ID NO: 5389
  derived and/or modified sequence opt3 from Cytosine_Deaminase_fcy1__Saccharomyces_cerevisiae__AJP42194

SEQ ID NO: 5414 - RNA, 477 nt, Artificial Sequence; identical to SEQ ID NO: 5390
  derived and/or modified sequence opt4 from Cytosine_Deaminase_fcy1__Saccharomyces_cerevisiae__AJP42194

SEQ ID NO: 5415 - RNA, 477 nt, Artificial Sequence; identical to SEQ ID NO: 5391
  derived and/or modified sequence opt5 from Cytosine_Deaminase_fcy1__Saccharomyces_cerevisiae__AJP42194

SEQ ID NO: 5416 - RNA, 477 nt, Artificial Sequence
  derived and/or modified sequence opt6 from Cytosine_Deaminase_fcy1__Saccharomyces_cerevisiae__AJP42194
augguaacaggaggaauggcaaguaaaugggaucaaaaaggaauggacauagcauaugaagaagcagcauuaggauauaaagaaggaggaguaccaauaggaggguguuuaauaaauaauaaagacggaaguguauuaggaagagggcauaauaugagauuucaaaaaggaagugcaacauuacacggagaaauaaguacacuagaaaacuguggaagacuagaaggaaaaguauauaaagauacaacauuauauacaacauuaaguccaugugacaugugcacaggagcaauaauaauguauggaauaccaagauguguaguaggagaaaauguaaauuuuaaaaguaaaggagaaaaauauuuacaaacaagaggacaugaaguaguaguaguagaugacgaaagaugcaaaaaaauaaugaaacaauuuauagaugaaagaccacaagauugguuugaagauauaggagaauaa

SEQ ID NO: 5417 - protein, 158 aa, Artificial Sequence; identical to SEQ ID NO: 5385
  Cytosine_Deaminase_fcy1__Saccharomyces_cerevisiae__A0A0D4WVI5

SEQ ID NO: 5418 - RNA, 477 nt, Artificial Sequence
  Cytosine_Deaminase_fcy1__Saccharomyces_cerevisiae__AJV91284
auggugacagggggaauggcaagcaagugggaucagaaggguauggacauugccuaugaggaggcggccuuagguuacaaagagggugguguuccaauuggcggaugucuuaucaauaacaaagacggaaguguucucggucguggucacaacaugagauuucaaaagggauccgccacacuacauggugagaucuccacuuuggaaaacugugggagauuagagggcaaaguguacaaagauaccacuuuguauacgacgcugucuccaugcgacauguguacaggugccaucaucauguaugguauuccacgcuguguugucggugagaacguuaauuucaaaaguaagggcgagaaauauuuacaaacuagaggucacgagguuguuguuguugacgaugagagguguaaaaagaucaugaaacaauucaucgaugaaagaccucaggauugguuugaagauauuggugaguag

SEQ ID NO: 5419 - RNA, 477 nt, Artificial Sequence; identical to SEQ ID NO: 5387
  derived and/or modified sequence opt1 from Cytosine_Deaminase_fcy1__Saccharomyces_cerevisiae__AJV91284

SEQ ID NO: 5420 - RNA, 477 nt, Artificial Sequence; identical to SEQ ID NO: 5388
  derived and/or modified sequence opt2 from Cytosine_Deaminase_fcy1__Saccharomyces_cerevisiae__AJV91284

SEQ ID NO: 5421 - RNA, 477 nt, Artificial Sequence; identical to SEQ ID NO: 5389
  derived and/or modified sequence opt3 from Cytosine_Deaminase_fcy1__Saccharomyces_cerevisiae__AJV91284

SEQ ID NO: 5422 - RNA, 477 nt, Artificial Sequence; identical to SEQ ID NO: 5390
  derived and/or modified sequence opt4 from Cytosine_Deaminase_fcy1__Saccharomyces_cerevisiae__AJV91284

SEQ ID NO: 5423 - RNA, 477 nt, Artificial Sequence; identical to SEQ ID NO: 5391
  derived and/or modified sequence opt5 from Cytosine_Deaminase_fcy1__Saccharomyces_cerevisiae__AJV91284

SEQ ID NO: 5424 - RNA, 477 nt, Artificial Sequence
  derived and/or modified sequence opt6 from Cytosine_Deaminase_fcy1__Saccharomyces_cerevisiae__AJV91284
augguaacaggaggaauggcgaguaaaugggaccaaaaaggaauggauauagcauaugaagaagcagcauuaggauauaaagaaggaggaguaccaauaggagggugucuaauaaauaauaaagacggaaguguauuaggaagaggacauaauaugagauuucaaaaaggaagugcaacauuacauggagaaauaaguacauuagaaaauuguggaagacuagaaggaaaaguauauaaagauacaacauuauauacaacauuaaguccaugugauauguguacaggggcaauaauaauguauggaauaccaagauguguaguaggagaaaauguaaauuuuaaaaguaaaggagaaaaauauuuacaaacaagaggacaugaaguaguaguaguagaugaugaaagauguaaaaaaauaaugaaacaauuuauagaugaaagaccacaagauugguuugaagauauaggagaauaa

SEQ ID NO: 5425 - protein, 158 aa, Artificial Sequence; identical to SEQ ID NO: 5385
  Cytosine_Deaminase_fcy1__Saccharomyces_cerevisiae__A0A0D4WY08

SEQ ID NO: 5426 - RNA, 477 nt, Artificial Sequence; identical to SEQ ID NO: 5386
  Cytosine_Deaminase_fcy1__Saccharomyces_cerevisiae__AJV91722

SEQ ID NO: 5427 - RNA, 477 nt, Artificial Sequence; identical to SEQ ID NO: 5387
  derived and/or modified sequence opt1 from Cytosine_Deaminase_fcy1__Saccharomyces_cerevisiae__AJV91722

SEQ ID NO: 5428 - RNA, 477 nt, Artificial Sequence; identical to SEQ ID NO: 5388
  derived and/or modified sequence opt2 from Cytosine_Deaminase_fcy1__Saccharomyces_cerevisiae__AJV91722

SEQ ID NO: 5429 - RNA, 477 nt, Artificial Sequence; identical to SEQ ID NO: 5389
  derived and/or modified sequence opt3 from Cytosine_Deaminase_fcy1__Saccharomyces_cerevisiae__AJV91722

SEQ ID NO: 5430 - RNA, 477 nt, Artificial Sequence; identical to SEQ ID NO: 5390
  derived and/or modified sequence opt4 from Cytosine_Deaminase_fcy1__Saccharomyces_cerevisiae__AJV91722

SEQ ID NO: 5431 - RNA, 477 nt, Artificial Sequence; identical to SEQ ID NO: 5391
  derived and/or modified sequence opt5 from Cytosine_Deaminase_fcy1__Saccharomyces_cerevisiae__AJV91722

SEQ ID NO: 5432 - RNA, 477 nt, Artificial Sequence
  derived and/or modified sequence opt6 from Cytosine_Deaminase_fcy1__Saccharomyces_cerevisiae__AJV91722
augguaacaggaggaauggcaaguaaaugggaucaaaaaggaauggacauagcauaugaagaagcagcauuaggauauaaagaaggaggaguaccaauaggaggaugcuuaauaaauaauaaagauggaaguguauuaggaagaggacauaauaugagauuucaaaaaggaagugcaacauuacauggagaaauaagcacauuagaaaacuguggaagacuagaaggaaaaguauauaaagauacaacauuauauacaacauuaaguccaugugacaugugcacaggagcaauaauaauguauggaauaccaagauguguaguaggagaaaauguaaauuuuaaaaguaaaggagaaaaauauuuacaaacaagaggacaugaaguaguaguaguagaugaugaaagaugcaaaaaaauaaugaaacaauuuauagaugaaagaccacaagauugguuugaagauauaggagaauaa

SEQ ID NO: 5433 - protein, 158 aa, Artificial Sequence; identical to SEQ ID NO: 5385
  Cytosine_Deaminase_fcy1__Saccharomyces_cerevisiae__A0A0D4WZA2

SEQ ID NO: 5434 - RNA, 477 nt, Artificial Sequence; identical to SEQ ID NO: 5386
  Cytosine_Deaminase_fcy1__Saccharomyces_cerevisiae__AJV92162

SEQ ID NO: 5435 - RNA, 477 nt, Artificial Sequence; identical to SEQ ID NO: 5387
  derived and/or modified sequence opt1 from Cytosine_Deaminase_fcy1__Saccharomyces_cerevisiae__AJV92162

SEQ ID NO: 5436 - RNA, 477 nt, Artificial Sequence; identical to SEQ ID NO: 5388
  derived and/or modified sequence opt2 from Cytosine_Deaminase_fcy1__Saccharomyces_cerevisiae__AJV92162

SEQ ID NO: 5437 - RNA, 477 nt, Artificial Sequence; identical to SEQ ID NO: 5389
  derived and/or modified sequence opt3 from Cytosine_Deaminase_fcy1__Saccharomyces_cerevisiae__AJV92162

SEQ ID NO: 5438 - RNA, 477 nt, Artificial Sequence; identical to SEQ ID NO: 5390
  derived and/or modified sequence opt4 from Cytosine_Deaminase_fcy1__Saccharomyces_cerevisiae__AJV92162

SEQ ID NO: 5439 - RNA, 477 nt, Artificial Sequence; identical to SEQ ID NO: 5391
  derived and/or modified sequence opt5 from Cytosine_Deaminase_fcy1__Saccharomyces_cerevisiae__AJV92162

SEQ ID NO: 5440 - RNA, 477 nt, Artificial Sequence
  derived and/or modified sequence opt6 from Cytosine_Deaminase_fcy1__Saccharomyces_cerevisiae__AJV92162
augguaacaggaggaauggcaaguaaaugggaucaaaaaggaauggacauagcauaugaagaagcagcauuaggauauaaagaaggaggaguaccaauaggaggaugcuuaauaaauaauaaagacggaucaguauuaggaagaggacauaauaugagauuucaaaaaggaagugcaacauuacacggagaaauaaguacauuagaaaacuguggaagacuagaaggaaaaguauauaaagauacaacauuauauacaacauuaaguccaugugacaugugcacaggagcaauaauaauguauggaauaccaagauguguaguaggagaaaauguaaauuuuaaaaguaaaggagaaaaauauuuacaaacaagaggacaugaaguaguaguaguagaugacgaaagauguaaaaaaauaaugaaacaauuuauagaugaaagaccacaagauugguuugaagauauaggagaauaa

SEQ ID NO: 5441 - protein, 158 aa, Artificial Sequence; identical to SEQ ID NO: 5385
  Cytosine_Deaminase_fcy1__Saccharomyces_cerevisiae__A0A0D4WZQ5

SEQ ID NO: 5442 - RNA, 477 nt, Artificial Sequence; identical to SEQ ID NO: 5386
  Cytosine_Deaminase_fcy1__Saccharomyces_cerevisiae__AJV92601

SEQ ID NO: 5443 - RNA, 477 nt, Artificial Sequence; identical to SEQ ID NO: 5387
  derived and/or modified sequence opt1 from Cytosine_Deaminase_fcy1__Saccharomyces_cerevisiae__AJV92601

SEQ ID NO: 5444 - RNA, 477 nt, Artificial Sequence; identical to SEQ ID NO: 5388
  derived and/or modified sequence opt2 from Cytosine_Deaminase_fcy1__Saccharomyces_cerevisiae__AJV92601

SEQ ID NO: 5445 - RNA, 477 nt, Artificial Sequence; identical to SEQ ID NO: 5389
  derived and/or modified sequence opt3 from Cytosine_Deaminase_fcy1__Saccharomyces_cerevisiae__AJV92601

SEQ ID NO: 5446 - RNA, 477 nt, Artificial Sequence; identical to SEQ ID NO: 5390
  derived and/or modified sequence opt4 from Cytosine_Deaminase_fcy1__Saccharomyces_cerevisiae__AJV92601

SEQ ID NO: 5447 - RNA, 477 nt, Artificial Sequence; identical to SEQ ID NO: 5391
  derived and/or modified sequence opt5 from Cytosine_Deaminase_fcy1__Saccharomyces_cerevisiae__AJV92601

SEQ ID NO: 5448 - RNA, 477 nt, Artificial Sequence
  derived and/or modified sequence opt6 from Cytosine_Deaminase_fcy1__Saccharomyces_cerevisiae__AJV92601
augguaacaggaggaauggcaaguaaaugggaucaaaaaggaauggauauagcauaugaagaagcagcauuaggauauaaagaaggaggaguaccaauaggaggauguuuaauaaauaauaaagauggaaguguauuaggaagaggacauaauaugagauuucaaaaaggaagugcaacauuacauggagaaauaaguacauuagaaaauuguggaagauuagaagggaaaguauauaaagauacaacauuauauacaacauuaaguccaugugauauguguacaggagcaauaauaauguauggaauaccaagauguguaguaggagaaaauguaaauuuuaaaaguaaaggagaaaaauauuuacaaacaagaggacaugaaguaguaguaguagaugaugaaagauguaaaaaaauaaugaaacaauuuauagaugaaagaccacaagauugguuugaagauauaggagaauaa

SEQ ID NO: 5449 - protein, 158 aa, Artificial Sequence; identical to SEQ ID NO: 5385
  Cytosine_Deaminase_fcy1__Saccharomyces_cerevisiae__A0A0D4X0R8

SEQ ID NO: 5450 - RNA, 477 nt, Artificial Sequence; identical to SEQ ID NO: 5418
  Cytosine_Deaminase_fcy1__Saccharomyces_cerevisiae__AJV93034

SEQ ID NO: 5451 - RNA, 477 nt, Artificial Sequence; identical to SEQ ID NO: 5387
  derived and/or modified sequence opt1 from Cytosine_Deaminase_fcy1__Saccharomyces_cerevisiae__AJV93034

SEQ ID NO: 5452 - RNA, 477 nt, Artificial Sequence; identical to SEQ ID NO: 5388
  derived and/or modified sequence opt2 from Cytosine_Deaminase_fcy1__Saccharomyces_cerevisiae__AJV93034

SEQ ID NO: 5453 - RNA, 477 nt, Artificial Sequence; identical to SEQ ID NO: 5389
  derived and/or modified sequence opt3 from Cytosine_Deaminase_fcy1__Saccharomyces_cerevisiae__AJV93034

SEQ ID NO: 5454 - RNA, 477 nt, Artificial Sequence; identical to SEQ ID NO: 5390
  derived and/or modified sequence opt4 from Cytosine_Deaminase_fcy1__Saccharomyces_cerevisiae__AJV93034

SEQ ID NO: 5455 - RNA, 477 nt, Artificial Sequence; identical to SEQ ID NO: 5391
  derived and/or modified sequence opt5 from Cytosine_Deaminase_fcy1__Saccharomyces_cerevisiae__AJV93034

SEQ ID NO: 5456 - RNA, 477 nt, Artificial Sequence
  derived and/or modified sequence opt6 from Cytosine_Deaminase_fcy1__Saccharomyces_cerevisiae__AJV93034
augguaacaggaggaauggcaaguaaaugggaucaaaaaggaauggauauagcauaugaagaagcagcauuaggauauaaagaaggaggaguaccaauaggaggauguuuaauaaauaauaaagacggaaguguauuaggaagaggacauaauaugagauuucaaaaaggaagcgcaacauuacauggagaaauaaguacauuagaaaauuguggaagauuagaaggaaaaguauauaaagauacaacauuauauacaacauuaaguccaugugauauguguacaggagcaauaauaauguauggaauaccaagauguguaguaggagaaaauguaaauuuuaaaaguaaaggagaaaaauauuuacaaacaagaggacaugaaguaguaguaguggacgaugaaagauguaaaaaaauaaugaaacaauuuauagaugaaagaccacaagauugguuugaagauauaggagaauag

SEQ ID NO: 5457 - protein, 158 aa, Artificial Sequence; identical to SEQ ID NO: 5385
  Cytosine_Deaminase_fcy1__Saccharomyces_cerevisiae__A0A0D4X195

SEQ ID NO: 5458 - RNA, 477 nt, Artificial Sequence; identical to SEQ ID NO: 5386
  Cytosine_Deaminase_fcy1__Saccharomyces_cerevisiae__AJV93300

SEQ ID NO: 5459 - RNA, 477 nt, Artificial Sequence; identical to SEQ ID NO: 5387
  derived and/or modified sequence opt1 from Cytosine_Deaminase_fcy1__Saccharomyces_cerevisiae__AJV93300

SEQ ID NO: 5460 - RNA, 477 nt, Artificial Sequence; identical to SEQ ID NO: 5388
  derived and/or modified sequence opt2 from Cytosine_Deaminase_fcy1__Saccharomyces_cerevisiae__AJV93300

SEQ ID NO: 5461 - RNA, 477 nt, Artificial Sequence; identical to SEQ ID NO: 5389
  derived and/or modified sequence opt3 from Cytosine_Deaminase_fcy1__Saccharomyces_cerevisiae__AJV93300

SEQ ID NO: 5462 - RNA, 477 nt, Artificial Sequence; identical to SEQ ID NO: 5390
  derived and/or modified sequence opt4 from Cytosine_Deaminase_fcy1__Saccharomyces_cerevisiae__AJV93300

SEQ ID NO: 5463 - RNA, 477 nt, Artificial Sequence; identical to SEQ ID NO: 5391
  derived and/or modified sequence opt5 from Cytosine_Deaminase_fcy1__Saccharomyces_cerevisiae__AJV93300

SEQ ID NO: 5464 - RNA, 477 nt, Artificial Sequence
  derived and/or modified sequence opt6 from Cytosine_Deaminase_fcy1__Saccharomyces_cerevisiae__AJV93300
augguaacaggaggaauggcaaguaaaugggaucaaaaaggaauggauauagcauaugaagaagcagcacuaggauauaaagaaggaggaguaccaauaggaggaugucuaauaaauaauaaagauggaaguguauuaggaagaggacauaauaugagauuucaaaaaggaagugcaacauuacauggagaaauaaguacauuagaaaauuguggaagacuagaaggaaaaguauauaaagauacaacauuauauacaacauuaaguccgugugauaugugcacaggagcaauaauaauguauggaauaccaagauguguaguaggagaaaauguaaauuuuaaaagcaaaggagaaaaauauuuacaaacaagaggacaugaaguaguaguaguagaugaugaaagauguaaaaaaauaaugaaacaauuuauagaugaaagaccacaagauugguuugaagauauaggagaauaa

SEQ ID NO: 5465 - protein, 158 aa, Artificial Sequence; identical to SEQ ID NO: 5385
  Cytosine_Deaminase_fcy1__Saccharomyces_cerevisiae__A0A0D4X2R9

SEQ ID NO: 5466 - RNA, 477 nt, Artificial Sequence
  Cytosine_Deaminase_fcy1__Saccharomyces_cerevisiae__AJV93739
auggugacagggggaauggcaagcaagugggaucagaaggguauggacauugccuaugaggaggcggccuuagguuacaaagagggugguguuccaauuggcggaugucuuaucaauaacaaagacggaaguguucucggucguggucacaacaugagguuucaaaagggauccgccacacuacauggugagaucuccacuuuggaaaacugugggagauuagagggcaaaguguacaaagauaccacuuuguauacgacgcuguccccaugcgacauguguacaggugccaucaucauguaugguauuccacgcuguguugucggugagaacguuaauuucaaaaguaagggcgagaaauauuuacaaacuagaggucacgagguuguuguuguugacgaugagagguguaaaaagaucaugaaacaauuuaucgaugaaagaccucaggauugguuugaagauauuggugaguag

SEQ ID NO: 5467 - RNA, 477 nt, Artificial Sequence; identical to SEQ ID NO: 5387
  derived and/or modified sequence opt1 from Cytosine_Deaminase_fcy1__Saccharomyces_cerevisiae__AJV93739

SEQ ID NO: 5468 - RNA, 477 nt, Artificial Sequence; identical to SEQ ID NO: 5388
  derived and/or modified sequence opt2 from Cytosine_Deaminase_fcy1__Saccharomyces_cerevisiae__AJV93739

SEQ ID NO: 5469 - RNA, 477 nt, Artificial Sequence; identical to SEQ ID NO: 5389
  derived and/or modified sequence opt3 from Cytosine_Deaminase_fcy1__Saccharomyces_cerevisiae__AJV93739

SEQ ID NO: 5470 - RNA, 477 nt, Artificial Sequence; identical to SEQ ID NO: 5390
  derived and/or modified sequence opt4 from Cytosine_Deaminase_fcy1__Saccharomyces_cerevisiae__AJV93739

SEQ ID NO: 5471 - RNA, 477 nt, Artificial Sequence; identical to SEQ ID NO: 5391
  derived and/or modified sequence opt5 from Cytosine_Deaminase_fcy1__Saccharomyces_cerevisiae__AJV93739

SEQ ID NO: 5472 - RNA, 477 nt, Artificial Sequence
  derived and/or modified sequence opt6 from Cytosine_Deaminase_fcy1__Saccharomyces_cerevisiae__AJV93739
augguaacaggaggaauggcaaguaaaugggaucaaaaaggaauggacauagcauaugaagaagcagcauuaggauauaaggaaggaggaguaccaauaggaggaugcuuaauaaauaauaaagacggaaguguauuaggaagaggacauaauaugagauuucaaaaaggaagugcaacacuacacggagaaauaaguacauuagaaaacuguggaagacuagaaggaaaaguauauaaagauacaacauuauauacaacauuaaguccaugugacaugugcacaggagcaauaauaauguauggaauaccaagauguguaguaggagaaaauguaaauuuuaaaaguaaaggagaaaaauauuuacaaacaagaggacaugaaguaguaguaguagaugacgaaagauguaaaaaaauaaugaaacaauuuauagaugaaagaccacaagauugguuugaagauauaggagaauaa

SEQ ID NO: 5473 - protein, 158 aa, Artificial Sequence; identical to SEQ ID NO: 5385
  Cytosine_Deaminase_fcy1__Saccharomyces_cerevisiae__A0A0D4X3Q1

SEQ ID NO: 5474 - RNA, 477 nt, Artificial Sequence; identical to SEQ ID NO: 5418
  Cytosine_Deaminase_fcy1__Saccharomyces_cerevisiae__AJV94006

SEQ ID NO: 5475 - RNA, 477 nt, Artificial Sequence; identical to SEQ ID NO: 5387
  derived and/or modified sequence opt1 from Cytosine_Deaminase_fcy1__Saccharomyces_cerevisiae__AJV94006

SEQ ID NO: 5476 - RNA, 477 nt, Artificial Sequence; identical to SEQ ID NO: 5388
  derived and/or modified sequence opt2 from Cytosine_Deaminase_fcy1__Saccharomyces_cerevisiae__AJV94006

SEQ ID NO: 5477 - RNA, 477 nt, Artificial Sequence; identical to SEQ ID NO: 5389
  derived and/or modified sequence opt3 from Cytosine_Deaminase_fcy1__Saccharomyces_cerevisiae__AJV94006

SEQ ID NO: 5478 - RNA, 477 nt, Artificial Sequence; identical to SEQ ID NO: 5390
  derived and/or modified sequence opt4 from Cytosine_Deaminase_fcy1__Saccharomyces_cerevisiae__AJV94006

SEQ ID NO: 5479 - RNA, 477 nt, Artificial Sequence; identical to SEQ ID NO: 5391
  derived and/or modified sequence opt5 from Cytosine_Deaminase_fcy1__Saccharomyces_cerevisiae__AJV94006

SEQ ID NO: 5480 - RNA, 477 nt, Artificial Sequence
  derived and/or modified sequence opt6 from Cytosine_Deaminase_fcy1__Saccharomyces_cerevisiae__AJV94006
augguaacaggaggaauggcaaguaaaugggaucaaaaaggaauggacauagcauaugaagaagcagcauuaggauauaaagaaggaggaguaccaauaggaggaugcuuaauaaauaauaaagacggaagcguauuaggaagaggacauaauaugagauuucaaaaaggaagugcaacauuacacggagaaauaaguacauuagaaaacuguggaagauuagaaggaaaaguauauaaagauacaacacuauauacaacauuaaguccaugugacaugugcacaggagcgauaauaauguauggaauaccaagauguguaguaggagaaaauguaaauuuuaaaaguaaaggagaaaaauauuuacaaacaagaggacaugaaguaguaguaguagaugacgaaagauguaaaaaaauaaugaaacaauuuauagaugaaagaccacaagauugguuugaagauauaggagaauaa

SEQ ID NO: 5481 - protein, 158 aa, Artificial Sequence; identical to SEQ ID NO: 5385
  Cytosine_Deaminase_fcy1__Saccharomyces_cerevisiae__A0A0D4X4K1

SEQ ID NO: 5482 - RNA, 477 nt, Artificial Sequence; identical to SEQ ID NO: 5386
  Cytosine_Deaminase_fcy1__Saccharomyces_cerevisiae__AJV94445

SEQ ID NO: 5483 - RNA, 477 nt, Artificial Sequence; identical to SEQ ID NO: 5387
  derived and/or modified sequence opt1 from Cytosine_Deaminase_fcy1__Saccharomyces_cerevisiae__AJV94445

SEQ ID NO: 5484 - RNA, 477 nt, Artificial Sequence; identical to SEQ ID NO: 5388
  derived and/or modified sequence opt2 from Cytosine_Deaminase_fcy1__Saccharomyces_cerevisiae__AJV94445

SEQ ID NO: 5485 - RNA, 477 nt, Artificial Sequence; identical to SEQ ID NO: 5389
  derived and/or modified sequence opt3 from Cytosine_Deaminase_fcy1__Saccharomyces_cerevisiae__AJV94445

SEQ ID NO: 5486 - RNA, 477 nt, Artificial Sequence; identical to SEQ ID NO: 5390
  derived and/or modified sequence opt4 from Cytosine_Deaminase_fcy1__Saccharomyces_cerevisiae__AJV94445

SEQ ID NO: 5487 - RNA, 477 nt, Artificial Sequence; identical to SEQ ID NO: 5391
  derived and/or modified sequence opt5 from Cytosine_Deaminase_fcy1__Saccharomyces_cerevisiae__AJV94445

SEQ ID NO: 5488 - RNA, 477 nt, Artificial Sequence
  derived and/or modified sequence opt6 from Cytosine_Deaminase_fcy1__Saccharomyces_cerevisiae__AJV94445
augguaacaggaggaauggcaaguaaaugggaucaaaaaggaauggauauagcauaugaagaagcagcauuaggauauaaagaaggaggaguaccaauaggaggauguuuaauaaauaauaaagauggaagcguacuaggaagaggacauaauaugagguuucaaaaaggaagcgcaacauuacauggagaaauaagcacauuagaaaauugugggagguuagaaggaaaaguauauaaagauacaacauuauauacaacauuaaguccaugugauauguguacaggagcaauaauaauguauggaauaccaagauguguaguaggagaaaauguaaauuuuaaaaguaaaggagaaaaauauuuacaaacaagaggacaugaaguaguaguaguagaugaugaaagauguaaaaaaauaaugaaacaauuuauagaugaaagaccacaagauugguuugaagauauaggagaauaa

SEQ ID NO: 5489 - protein, 158 aa, Artificial Sequence; identical to SEQ ID NO: 5385
  Cytosine_Deaminase_fcy1__Saccharomyces_cerevisiae__A0A0D4X5B7

SEQ ID NO: 5490 - RNA, 477 nt, Artificial Sequence; identical to SEQ ID NO: 5386
  Cytosine_Deaminase_fcy1__Saccharomyces_cerevisiae__AJV94715

SEQ ID NO: 5491 - RNA, 477 nt, Artificial Sequence; identical to SEQ ID NO: 5387
  derived and/or modified sequence opt1 from Cytosine_Deaminase_fcy1__Saccharomyces_cerevisiae__AJV94715

SEQ ID NO: 5492 - RNA, 477 nt, Artificial Sequence; identical to SEQ ID NO: 5388
  derived and/or modified sequence opt2 from Cytosine_Deaminase_fcy1__Saccharomyces_cerevisiae__AJV94715

SEQ ID NO: 5493 - RNA, 477 nt, Artificial Sequence; identical to SEQ ID NO: 5389
  derived and/or modified sequence opt3 from Cytosine_Deaminase_fcy1__Saccharomyces_cerevisiae__AJV94715

SEQ ID NO: 5494 - RNA, 477 nt, Artificial Sequence; identical to SEQ ID NO: 5390
  derived and/or modified sequence opt4 from Cytosine_Deaminase_fcy1__Saccharomyces_cerevisiae__AJV94715

SEQ ID NO: 5495 - RNA, 477 nt, Artificial Sequence; identical to SEQ ID NO: 5391
  derived and/or modified sequence opt5 from Cytosine_Deaminase_fcy1__Saccharomyces_cerevisiae__AJV94715

SEQ ID NO: 5496 - RNA, 477 nt, Artificial Sequence
  derived and/or modified sequence opt6 from Cytosine_Deaminase_fcy1__Saccharomyces_cerevisiae__AJV94715
augguaacgggaggaauggcaaguaaaugggaucaaaaaggaauggacauagcauaugaagaagcagcauuaggauauaaagaaggaggaguaccaauaggaggaugcuuaauaaauaauaaagacggaaguguauuaggaagaggacauaauaugagauuucaaaaaggaagugcaacauuacacggagaaauaaguacauuagaaaacuguggaagacuagaaggaaaaguauauaaagauacaacacuauauacaacauuaaguccaugugacaugugcacaggagcaauaauaauguauggaauaccaagauguguaguaggagaaaauguaaauuuuaaaaguaaaggagaaaaauauuuacaaacaagaggacaugaaguaguaguaguagaugacgaaagauguaaaaaaauaaugaaacaauuuauagaugaaagaccacaagauugguuugaagauauaggagaauaa

SEQ ID NO: 5497 - protein, 158 aa, Artificial Sequence; identical to SEQ ID NO: 5385
  Cytosine_Deaminase_fcy1__Saccharomyces_cerevisiae__A0A0D4X7R4

SEQ ID NO: 5498 - RNA, 477 nt, Artificial Sequence
  Cytosine_Deaminase_fcy1__Saccharomyces_cerevisiae__AJV95147
auggugacagggggaauggcaagcaaaugggaucagaaggguauggacauugccuaugaggaggcggccuuagguuacaaagagggugguguuccaauuggcggaugucuuaucaauaacaaagacggaaguguucucggucguggucacaacaugagauuucaaaagggauccgccacacuacauggugagaucuccacuuuggaaaacugugggagauuagagggcaaaguguacaaagauaccacuuuguauacgacgcugucuccaugcgacauguguacaggugccaucaucauguaugguauuccacgcuguguugucggugagaacguuaauuucaaaaguaagggcgagaaauauuuacaaacuagaggucacgagguuguuguuguugacgaugagagguguaaaaagaucaugaaacaauucaucgaugaaagaccucaggauugguuugaagauauuggugaguag

SEQ ID NO: 5499 - RNA, 477 nt, Artificial Sequence; identical to SEQ ID NO: 5387
  derived and/or modified sequence opt1 from Cytosine_Deaminase_fcy1__Saccharomyces_cerevisiae__AJV95147

SEQ ID NO: 5500 - RNA, 477 nt, Artificial Sequence; identical to SEQ ID NO: 5388
  derived and/or modified sequence opt2 from Cytosine_Deaminase_fcy1__Saccharomyces_cerevisiae__AJV95147

SEQ ID NO: 5501 - RNA, 477 nt, Artificial Sequence; identical to SEQ ID NO: 5389
  derived and/or modified sequence opt3 from Cytosine_Deaminase_fcy1__Saccharomyces_cerevisiae__AJV95147

SEQ ID NO: 5502 - RNA, 477 nt, Artificial Sequence; identical to SEQ ID NO: 5390
  derived and/or modified sequence opt4 from Cytosine_Deaminase_fcy1__Saccharomyces_cerevisiae__AJV95147

SEQ ID NO: 5503 - RNA, 477 nt, Artificial Sequence; identical to SEQ ID NO: 5391
  derived and/or modified sequence opt5 from Cytosine_Deaminase_fcy1__Saccharomyces_cerevisiae__AJV95147

SEQ ID NO: 5504 - RNA, 477 nt, Artificial Sequence
  derived and/or modified sequence opt6 from Cytosine_Deaminase_fcy1__Saccharomyces_cerevisiae__AJV95147
augguaacaggaggaauggcaaguaaaugggaucaaaaaggaauggacauagcauaugaagaagcagcauuaggauauaaagaaggaggaguaccaauaggaggauguuuaauaaauaauaaagauggaaguguauuaggaagaggacauaauaugagauuucaaaaaggaagugcaacauugcauggagaaauaaguacauuagaaaauuguggaagauuagaaggaaaaguauauaaagauacaacacuauauacaacauuaagcccaugugauauguguacaggagcaauaauaauguauggaauaccaagauguguaguaggagaaaauguaaauuuuaaaagcaaaggagaaaaauauuuacaaacaagaggacaugaaguaguaguaguagaugaugaaagauguaaaaaaauaaugaaacaauuuauagaugaaagaccacaagauugguuugaagauauaggagaauaa

SEQ ID NO: 5505 - protein, 158 aa, Artificial Sequence; identical to SEQ ID NO: 5385
  Cytosine_Deaminase_fcy1__Saccharomyces_cerevisiae__A0A0D4X7X4

SEQ ID NO: 5506 - RNA, 477 nt, Artificial Sequence; identical to SEQ ID NO: 5386
  Cytosine_Deaminase_fcy1__Saccharomyces_cerevisiae__AJV95584

SEQ ID NO: 5507 - RNA, 477 nt, Artificial Sequence; identical to SEQ ID NO: 5387
  derived and/or modified sequence opt1 from Cytosine_Deaminase_fcy1__Saccharomyces_cerevisiae__AJV95584

SEQ ID NO: 5508 - RNA, 477 nt, Artificial Sequence; identical to SEQ ID NO: 5388
  derived and/or modified sequence opt2 from Cytosine_Deaminase_fcy1__Saccharomyces_cerevisiae__AJV95584

SEQ ID NO: 5509 - RNA, 477 nt, Artificial Sequence; identical to SEQ ID NO: 5389
  derived and/or modified sequence opt3 from Cytosine_Deaminase_fcy1__Saccharomyces_cerevisiae__AJV95584

SEQ ID NO: 5510 - RNA, 477 nt, Artificial Sequence; identical to SEQ ID NO: 5390
  derived and/or modified sequence opt4 from Cytosine_Deaminase_fcy1__Saccharomyces_cerevisiae__AJV95584

SEQ ID NO: 5511 - RNA, 477 nt, Artificial Sequence; identical to SEQ ID NO: 5391
  derived and/or modified sequence opt5 from Cytosine_Deaminase_fcy1__Saccharomyces_cerevisiae__AJV95584

SEQ ID NO: 5512 - RNA, 477 nt, Artificial Sequence
  derived and/or modified sequence opt6 from Cytosine_Deaminase_fcy1__Saccharomyces_cerevisiae__AJV95584
augguaacaggaggaauggcaaguaaaugggaucaaaaaggaauggauauagcauaugaagaagcagcauuaggauauaaagaaggaggaguaccaauagggggauguuuaauaaauaauaaagauggaaguguauuaggaaggggacauaauaugagauuucaaaaaggaagugcaacauuacauggagaaauaaguacauuagaaaauuguggaagacuagaaggaaaaguauauaaagauacaacauuauauacaacauuaaguccaugugauauguguacaggagcaauaauaauguauggaauaccaagauguguaguaggagaaaauguaaauuuuaaaaguaaaggagaaaaauaucuacaaacaaggggacaugaaguaguaguaguagaugaugaaagauguaaaaaaauaaugaaacaauuuauagaugaaagaccacaagauugguuugaagauauaggagaauag

SEQ ID NO: 5513 - protein, 158 aa, Artificial Sequence; identical to SEQ ID NO: 5385
  Cytosine_Deaminase_fcy1__Saccharomyces_cerevisiae__A0A0D4XA07

SEQ ID NO: 5514 - RNA, 477 nt, Artificial Sequence; identical to SEQ ID NO: 5386
  Cytosine_Deaminase_fcy1__Saccharomyces_cerevisiae__AJV95852

SEQ ID NO: 5515 - RNA, 477 nt, Artificial Sequence; identical to SEQ ID NO: 5387
  derived and/or modified sequence opt1 from Cytosine_Deaminase_fcy1__Saccharomyces_cerevisiae__AJV95852

SEQ ID NO: 5516 - RNA, 477 nt, Artificial Sequence; identical to SEQ ID NO: 5388
  derived and/or modified sequence opt2 from Cytosine_Deaminase_fcy1__Saccharomyces_cerevisiae__AJV95852

SEQ ID NO: 5517 - RNA, 477 nt, Artificial Sequence; identical to SEQ ID NO: 5389
  derived and/or modified sequence opt3 from Cytosine_Deaminase_fcy1__Saccharomyces_cerevisiae__AJV95852

SEQ ID NO: 5518 - RNA, 477 nt, Artificial Sequence; identical to SEQ ID NO: 5390
  derived and/or modified sequence opt4 from Cytosine_Deaminase_fcy1__Saccharomyces_cerevisiae__AJV95852

SEQ ID NO: 5519 - RNA, 477 nt, Artificial Sequence; identical to SEQ ID NO: 5391
  derived and/or modified sequence opt5 from Cytosine_Deaminase_fcy1__Saccharomyces_cerevisiae__AJV95852

SEQ ID NO: 5520 - RNA, 477 nt, Artificial Sequence
  derived and/or modified sequence opt6 from Cytosine_Deaminase_fcy1__Saccharomyces_cerevisiae__AJV95852
augguaacaggaggaauggcaaguaaaugggaucaaaaaggaauggacauagcauaugaagaagcagcacuaggauauaaagaaggaggaguaccaauaggaggaugcuuaauaaauaauaaagacggaaguguauuaggaagaggacauaauaugagauuucaaaaaggaagugcaacauuacauggagaaauaaguacauuagaaaacugcggaagauuagaaggaaaaguauauaaagauacaacauuauauacaacauuaaguccaugugacaugugcacaggagcaauaauaauguauggaauaccaagguguguaguaggagaaaauguaaauuuuaaaaguaaaggagaaaaauaucuacaaacaagaggacaugaaguaguaguaguagaugacgaaagauguaaaaaaauaaugaaacaauuuauagaugaaagaccacaagauugguuugaagauauaggagaauaa

SEQ ID NO: 5521 - protein, 158 aa, Artificial Sequence; identical to SEQ ID NO: 5385
  Cytosine_Deaminase_fcy1__Saccharomyces_cerevisiae__A0A0D4XA25

SEQ ID NO: 5522 - RNA, 477 nt, Artificial Sequence; identical to SEQ ID NO: 5386
  Cytosine_Deaminase_fcy1__Saccharomyces_cerevisiae__AJV96293

SEQ ID NO: 5523 - RNA, 477 nt, Artificial Sequence; identical to SEQ ID NO: 5387
  derived and/or modified sequence opt1 from Cytosine_Deaminase_fcy1__Saccharomyces_cerevisiae__AJV96293

SEQ ID NO: 5524 - RNA, 477 nt, Artificial Sequence; identical to SEQ ID NO: 5388
  derived and/or modified sequence opt2 from Cytosine_Deaminase_fcy1__Saccharomyces_cerevisiae__AJV96293

SEQ ID NO: 5525 - RNA, 477 nt, Artificial Sequence; identical to SEQ ID NO: 5389
  derived and/or modified sequence opt3 from Cytosine_Deaminase_fcy1__Saccharomyces_cerevisiae__AJV96293

SEQ ID NO: 5526 - RNA, 477 nt, Artificial Sequence; identical to SEQ ID NO: 5390
  derived and/or modified sequence opt4 from Cytosine_Deaminase_fcy1__Saccharomyces_cerevisiae__AJV96293

SEQ ID NO: 5527 - RNA, 477 nt, Artificial Sequence; identical to SEQ ID NO: 5391
  derived and/or modified sequence opt5 from Cytosine_Deaminase_fcy1__Saccharomyces_cerevisiae__AJV96293

SEQ ID NO: 5528 - RNA, 477 nt, Artificial Sequence
  derived and/or modified sequence opt6 from Cytosine_Deaminase_fcy1__Saccharomyces_cerevisiae__AJV96293
augguaacaggaggaauggcaagcaaaugggaucaaaaaggaauggacauagcauaugaagaagcagcauuaggauauaaagaaggaggaguaccaauaggaggaugcuuaauaaauaauaaagacggaaguguauuaggaagaggacauaauaugagauuucaaaaaggaagugcaacauuacacggagaaauaaguacauuagaaaacuguggaagauuagaaggaaaaguauauaaagauacaacauuauauacaacauuaaguccaugugacaugugcacaggagcaauaauaauguauggaauaccaagauguguaguaggagaaaauguaaauuuuaaaaguaaaggagaaaaauauuuacaaacaagaggacaugaaguaguagugguagaugacgaaagauguaaaaaaauaaugaaacaauuuauagaugaaagaccacaagauugguuugaagauauaggagaauaa

SEQ ID NO: 5529 - protein, 158 aa, Artificial Sequence
  Cytosine_Deaminase_fcy1__Saccharomyces_cerevisiae__A0A0D4XAV6
MVTGGMASKWDQKGMDIAYEEAALGYKEGGVPIGGCLINNKDGSVLGRGHNMRFQKGSATLHGEISTLENCGRLEGKVYKDTTLYTTLSPCDMCTGAIIMYGIPRCVVGENVNFKSKGEKYLQTRGHEVVVVDDERCKKIMKQFINERPQDWFEDIGE

SEQ ID NO: 5530 - RNA, 477 nt, Artificial Sequence
  Cytosine_Deaminase_fcy1__Saccharomyces_cerevisiae__AJV96709
auggugacagggggaauggcaagcaagugggaucagaaggguauggacauugccuaugaggaggcggccuuagguuacaaagagggugguguuccuauuggcggaugucuuaucaauaacaaagacggaaguguucucggucguggucacaacaugagauuucaaaagggauccgccacacuacauggugagaucuccacuuuggaaaacugugggagauuagagggcaaaguguacaaagauaccacuuuguauacgacgcugucuccaugcgacauguguacaggugccaucaucauguaugguauuccacgcuguguugucggugagaacguuaauuucaaaaguaagggcgagaaauauuuacaaacuagaggucacgagguuguuguuguugacgaugagagguguaaaaagaucaugaaacaauuuaucaaugaaagaccucaggauugguuugaagauauuggugaguag

SEQ ID NO: 5531 - RNA, 477 nt, Artificial Sequence
  derived and/or modified sequence opt1 from Cytosine_Deaminase_fcy1__Saccharomyces_cerevisiae__AJV96709
auggugaccggcgggauggccagcaagugggaccagaagggcauggacaucgccuacgaggaggcggcccugggguacaaggagggcgggguccccaucggcggcugccucaucaacaacaaggacggguccgugcugggccgcgggcacaacaugcgguuccagaagggcagcgccacccugcacggggagaucuccacgcucgagaacugcggccgccuggagggcaagguguacaaggacaccacccuguacaccacgcucagcccgugcgacaugugcaccggggccaucaucauguacggcaucccccggugcgucgugggggagaacgugaacuucaaguccaagggcgagaaguaccugcagacccgcggccacgaggucgugguggucgacgacgagcggugcaagaagaucaugaagcaguucaucaacgagcgcccccaggacugguucgaggacaucggggaguga

SEQ ID NO: 5532 - RNA, 477 nt, Artificial Sequence
  derived and/or modified sequence opt2 from Cytosine_Deaminase_fcy1__Saccharomyces_cerevisiae__AJV96709
auggucaccggcggcauggccuccaagugggaccagaagggcauggacaucgccuacgaggaggccgcccucggcuacaaggagggcggcguccccaucggcggcugccucaucaacaacaaggacggcuccguccucggccgcggccacaacaugcgcuuccagaagggcuccgccacccuccacggcgagaucuccacccucgagaacugcggccgccucgagggcaaggucuacaaggacaccacccucuacaccacccucucccccugcgacaugugcaccggcgccaucaucauguacggcaucccccgcugcgucgucggcgagaacgucaacuucaaguccaagggcgagaaguaccuccagacccgcggccacgaggucgucgucgucgacgacgagcgcugcaagaagaucaugaagcaguucaucaacgagcgcccccaggacugguucgaggacaucggcgaguga

SEQ ID NO: 5533 - RNA, 477 nt, Artificial Sequence
  derived and/or modified sequence opt3 from Cytosine_Deaminase_fcy1__Saccharomyces_cerevisiae__AJV96709
auggugaccggcgggauggccagcaagugggaccagaaaggaauggauaucgcuuacgaggaagcagcccuggguuauaaggagggcgggguccccauuggaggcugccucauaaacaauaaagacgguuccguucuugggagaggacacaacaugagguuccaaaagggcucugcgacacugcauggcgaaaucucaacuuuggagaauugugggcgguuagaaggaaaaguguacaaggauacgacccuguauacaacucuaaguccuugcgacauguguaccggugcuauuaucauguacggcauuccacgcugcguagugggggagaacgucaauuuuaagagcaaaggagagaaguaucuccagacacgaggccacgaagugguuguggucgaugacgagcguuguaaaaagaucaugaaacaguucauaaacgaaagaccgcaggauugguuugaggacaucggugaguga

SEQ ID NO: 5534 - RNA, 477 nt, Artificial Sequence
  derived and/or modified sequence opt4 from Cytosine_Deaminase_fcy1__Saccharomyces_cerevisiae__AJV96709
auggugaccggcggcauggccagcaagugggaccagaagggcauggacaucgccuacgaggaggccgcccugggcuacaaggagggcggcgugcccaucggcggcugccugaucaacaacaaggacggcagcgugcugggcagaggccacaacaugagauuccagaagggcagcgccacccugcacggcgagaucagcacccuggagaacugcggcagacuggagggcaagguguacaaggacaccacccuguacaccacccugagccccugcgacaugugcaccggcgccaucaucauguacggcauccccagaugcguggugggcgagaacgugaacuucaagagcaagggcgagaaguaccugcagaccagaggccacgaggugguggugguggacgacgagagaugcaagaagaucaugaagcaguucaucaacgagagaccccaggacugguucgaggacaucggcgaguga

SEQ ID NO: 5535 - RNA, 477 nt, Artificial Sequence
  derived and/or modified sequence opt5 from Cytosine_Deaminase_fcy1__Saccharomyces_cerevisiae__AJV96709
auggugaccggcgggauggccagcaagugggaccagaaaggaauggauaucgcuuacgaggaagccgcgcugggcuauaaggaagggggaguccccauuggcgggugccucaucaacaauaaagacggauccguucugggcagaggccacaacaugcgguuccaaaaggggucugcuacacuucauggagagauuagcacgcuggagaauuguggccgccucgaagggaaaguguacaaggauaccacacuguauaccacacuuuccccuugcgacauguguaccggagccaucauuauguacggcaucccgagaugcguggucggggagaacgugaauuuuaagucuaaaggagagaaguaucugcagacacggggccacgaaguuguggucguggaugacgagcgcuguaaaaagaucaugaaacaguucauuaacgaaagaccccaggauugguuugaggacaucggcgaguga

SEQ ID NO: 5536 - RNA, 477 nt, Artificial Sequence
  derived and/or modified sequence opt6 from Cytosine_Deaminase_fcy1__Saccharomyces_cerevisiae__AJV96709
augguaacaggaggaauggcaagcaaaugggaucaaaaaggaauggacauagcauaugaagaagcagcguuaggauauaaagaaggaggaguaccaauaggaggaugcuuaauaaauaacaaagacggaagcguguuaggaagaggacauaauaugagauuccaaaaaggaagugcaacauuacacggagaaauaagcacacuagaaaacuguggaagacuagaaggaaaaguauauaaagacacaacauuauauacaacacuaaguccaugugacaugugcacaggagcaauaauaauguauggaauaccaagaugcguaguaggagaaaauguaaauuucaaaaguaaaggagaaaaauaucuacaaacaagaggacaugaaguaguaguaguagaugacgaaagauguaaaaaaauaaugaaacaauuuauaaaugaaagaccacaagauugguuugaagauauaggagaauaa

SEQ ID NO: 5537 - protein, 158 aa, Artificial Sequence; identical to SEQ ID NO: 5385
  Cytosine_Deaminase_fcy1__Saccharomyces_cerevisiae__A0A0D4XCJ5

SEQ ID NO: 5538 - RNA, 477 nt, Artificial Sequence; identical to SEQ ID NO: 5386
  Cytosine_Deaminase_fcy1__Saccharomyces_cerevisiae__AJV97145

SEQ ID NO: 5539 - RNA, 477 nt, Artificial Sequence; identical to SEQ ID NO: 5387
  derived and/or modified sequence opt1 from Cytosine_Deaminase_fcy1__Saccharomyces_cerevisiae__AJV97145

SEQ ID NO: 5540 - RNA, 477 nt, Artificial Sequence; identical to SEQ ID NO: 5388
  derived and/or modified sequence opt2 from Cytosine_Deaminase_fcy1__Saccharomyces_cerevisiae__AJV97145

SEQ ID NO: 5541 - RNA, 477 nt, Artificial Sequence; identical to SEQ ID NO: 5389
  derived and/or modified sequence opt3 from Cytosine_Deaminase_fcy1__Saccharomyces_cerevisiae__AJV97145

SEQ ID NO: 5542 - RNA, 477 nt, Artificial Sequence; identical to SEQ ID NO: 5390
  derived and/or modified sequence opt4 from Cytosine_Deaminase_fcy1__Saccharomyces_cerevisiae__AJV97145

SEQ ID NO: 5543 - RNA, 477 nt, Artificial Sequence; identical to SEQ ID NO: 5391
  derived and/or modified sequence opt5 from Cytosine_Deaminase_fcy1__Saccharomyces_cerevisiae__AJV97145

SEQ ID NO: 5544 - RNA, 477 nt, Artificial Sequence
  derived and/or modified sequence opt6 from Cytosine_Deaminase_fcy1__Saccharomyces_cerevisiae__AJV97145
augguaacaggaggaauggcaaguaaaugggaucaaaaaggaauggauauagcauaugaagaagcagcauuaggauauaaagaaggaggaguaccaauaggaggauguuuaauaaauaauaaagauggaaguguauuaggaagaggacauaauaugagauuucaaaaaggaagcgcaacauuacauggagaaauaaguacauuagaaaauugcggaagacuagaaggaaaaguauauaaagauacaacauuauauacaacauuaaguccaugugauauguguacaggagcaauaauaauguauggaauaccaagauguguaguaggagaaaauguaaauuuuaaaagcaaaggagaaaaauauuuacaaacaagaggacaugaaguaguaguaguagaugaugaaagauguaaaaaaauaaugaaacaauuuauagaugaaagaccacaagauugguuugaagauauaggagaauaa

SEQ ID NO: 5545 - protein, 158 aa, Artificial Sequence; identical to SEQ ID NO: 5385
  Cytosine_Deaminase_fcy1__Saccharomyces_cerevisiae__A0A0D4XDL4

SEQ ID NO: 5546 - RNA, 477 nt, Artificial Sequence; identical to SEQ ID NO: 5386
  Cytosine_Deaminase_fcy1__Saccharomyces_cerevisiae__AJV97588

SEQ ID NO: 5547 - RNA, 477 nt, Artificial Sequence; identical to SEQ ID NO: 5387
  derived and/or modified sequence opt1 from Cytosine_Deaminase_fcy1__Saccharomyces_cerevisiae__AJV97588

SEQ ID NO: 5548 - RNA, 477 nt, Artificial Sequence; identical to SEQ ID NO: 5388
  derived and/or modified sequence opt2 from Cytosine_Deaminase_fcy1__Saccharomyces_cerevisiae__AJV97588

SEQ ID NO: 5549 - RNA, 477 nt, Artificial Sequence; identical to SEQ ID NO: 5389
  derived and/or modified sequence opt3 from Cytosine_Deaminase_fcy1__Saccharomyces_cerevisiae__AJV97588

SEQ ID NO: 5550 - RNA, 477 nt, Artificial Sequence; identical to SEQ ID NO: 5390
  derived and/or modified sequence opt4 from Cytosine_Deaminase_fcy1__Saccharomyces_cerevisiae__AJV97588

SEQ ID NO: 5551 - RNA, 477 nt, Artificial Sequence; identical to SEQ ID NO: 5391
  derived and/or modified sequence opt5 from Cytosine_Deaminase_fcy1__Saccharomyces_cerevisiae__AJV97588

SEQ ID NO: 5552 - RNA, 477 nt, Artificial Sequence
  derived and/or modified sequence opt6 from Cytosine_Deaminase_fcy1__Saccharomyces_cerevisiae__AJV97588
augguaacaggaggaauggcaagcaaaugggaucaaaaaggaauggauauagcauaugaagaagcagcauuaggauauaaagaaggaggaguaccaauaggaggauguuuaauaaauaauaaagauggaaguguauuaggaagaggacauaauaugagauuucaaaaagggagugcaacauuacauggagaaauaaguacauuagaaaauuguggaagacuagaaggaaaaguauauaaagauacgacauuauauacaacauuaaguccaugugauauguguacaggagcaauaauaauguauggaauaccaagguguguaguaggagaaaauguaaauuuuaaaaguaaaggagaaaaauauuuacaaacaagaggacaugaaguaguaguaguagaugaugaaagauguaaaaaaauaaugaaacaauuuauagaugaaagaccacaagauugguuugaagauauaggagaauaa

SEQ ID NO: 5553 - protein, 158 aa, Artificial Sequence; identical to SEQ ID NO: 5385
  Cytosine_Deaminase_fcy1__Saccharomyces_cerevisiae__A0A0D4XG53

SEQ ID NO: 5554 - RNA, 477 nt, Artificial Sequence; identical to SEQ ID NO: 5386
  Cytosine_Deaminase_fcy1__Saccharomyces_cerevisiae__AJV98027

SEQ ID NO: 5555 - RNA, 477 nt, Artificial Sequence; identical to SEQ ID NO: 5387
  derived and/or modified sequence opt1 from Cytosine_Deaminase_fcy1__Saccharomyces_cerevisiae__AJV98027

SEQ ID NO: 5556 - RNA, 477 nt, Artificial Sequence; identical to SEQ ID NO: 5388
  derived and/or modified sequence opt2 from Cytosine_Deaminase_fcy1__Saccharomyces_cerevisiae__AJV98027

SEQ ID NO: 5557 - RNA, 477 nt, Artificial Sequence; identical to SEQ ID NO: 5389
  derived and/or modified sequence opt3 from Cytosine_Deaminase_fcy1__Saccharomyces_cerevisiae__AJV98027

SEQ ID NO: 5558 - RNA, 477 nt, Artificial Sequence; identical to SEQ ID NO: 5390
  derived and/or modified sequence opt4 from Cytosine_Deaminase_fcy1__Saccharomyces_cerevisiae__AJV98027

SEQ ID NO: 5559 - RNA, 477 nt, Artificial Sequence; identical to SEQ ID NO: 5391
  derived and/or modified sequence opt5 from Cytosine_Deaminase_fcy1__Saccharomyces_cerevisiae__AJV98027

SEQ ID NO: 5560 - RNA, 477 nt, Artificial Sequence
  derived and/or modified sequence opt6 from Cytosine_Deaminase_fcy1__Saccharomyces_cerevisiae__AJV98027
augguaacaggaggaauggcgaguaaaugggaucaaaaaggaauggacauagcauaugaagaagcagcauuaggauauaaagaaggaggaguaccaauaggaggaugcuuaauaaauaauaaagacggaaguguauuaggaagaggacauaauaugagauuucaaaaaggaagugcaacacuacacggagaaauaagcacauuagaaaacuguggaagacuagaaggaaaaguauauaaagauacaacauuauauacaacauuaaguccaugugacaugugcacaggagcaauaauaauguauggaauaccaagauguguaguaggagaaaauguaaauuuuaaaaguaaaggagaaaaauauuuacaaacaagaggacaugaaguaguaguaguagaugacgaaagauguaaaaaaauaaugaaacaauuuauagaugaaagaccacaagauugguuugaagauauaggagaauaa

SEQ ID NO: 5561 - protein, 158 aa, Artificial Sequence; identical to SEQ ID NO: 5385
  Cytosine_Deaminase_fcy1__Saccharomyces_cerevisiae__A0A0D4XGH3

SEQ ID NO: 5562 - RNA, 477 nt, Artificial Sequence; identical to SEQ ID NO: 5386
  Cytosine_Deaminase_fcy1__Saccharomyces_cerevisiae__AJV98465

SEQ ID NO: 5563 - RNA, 477 nt, Artificial Sequence; identical to SEQ ID NO: 5387
  derived and/or modified sequence opt1 from Cytosine_Deaminase_fcy1__Saccharomyces_cerevisiae__AJV98465

SEQ ID NO: 5564 - RNA, 477 nt, Artificial Sequence; identical to SEQ ID NO: 5388
  derived and/or modified sequence opt2 from Cytosine_Deaminase_fcy1__Saccharomyces_cerevisiae__AJV98465

SEQ ID NO: 5565 - RNA, 477 nt, Artificial Sequence; identical to SEQ ID NO: 5389
  derived and/or modified sequence opt3 from Cytosine_Deaminase_fcy1__Saccharomyces_cerevisiae__AJV98465

SEQ ID NO: 5566 - RNA, 477 nt, Artificial Sequence; identical to SEQ ID NO: 5390
  derived and/or modified sequence opt4 from Cytosine_Deaminase_fcy1__Saccharomyces_cerevisiae__AJV98465

SEQ ID NO: 5567 - RNA, 477 nt, Artificial Sequence; identical to SEQ ID NO: 5391
  derived and/or modified sequence opt5 from Cytosine_Deaminase_fcy1__Saccharomyces_cerevisiae__AJV98465

SEQ ID NO: 5568 - RNA, 477 nt, Artificial Sequence
  derived and/or modified sequence opt6 from Cytosine_Deaminase_fcy1__Saccharomyces_cerevisiae__AJV98465
augguaacaggagggauggcaaguaaaugggaucaaaaaggaauggacauagcauaugaagaagcagcguuaggauauaaagaaggaggaguaccaauaggaggauguuuaauaaauaauaaagacggaaguguacuaggaagaggacauaauaugagauuucaaaaaggaagugcaacauuacauggagaaauaaguacauuagaaaacuguggaagacuagaaggaaaaguauauaaagauacaacacuauauacaacauuaaguccaugugacaugugcacaggagcaauaauaauguauggaauaccaagauguguaguaggagaaaauguaaauuuuaaaaguaaaggagaaaaauaucuacaaacaagaggacaugaaguaguaguaguagaugacgaaagauguaaaaaaauaaugaaacaauuuauagaugaaagaccacaagauugguuugaagauauaggagaauaa

SEQ ID NO: 5569 - protein, 158 aa, Artificial Sequence; identical to SEQ ID NO: 5385
  Cytosine_Deaminase_fcy1__Saccharomyces_cerevisiae__A0A0D4XHD4

SEQ ID NO: 5570 - RNA, 477 nt, Artificial Sequence; identical to SEQ ID NO: 5386
  Cytosine_Deaminase_fcy1__Saccharomyces_cerevisiae__AJV98898

SEQ ID NO: 5571 - RNA, 477 nt, Artificial Sequence; identical to SEQ ID NO: 5387
  derived and/or modified sequence opt1 from Cytosine_Deaminase_fcy1__Saccharomyces_cerevisiae__AJV98898

SEQ ID NO: 5572 - RNA, 477 nt, Artificial Sequence; identical to SEQ ID NO: 5388
  derived and/or modified sequence opt2 from Cytosine_Deaminase_fcy1__Saccharomyces_cerevisiae__AJV98898

SEQ ID NO: 5573 - RNA, 477 nt, Artificial Sequence; identical to SEQ ID NO: 5389
  derived and/or modified sequence opt3 from Cytosine_Deaminase_fcy1__Saccharomyces_cerevisiae__AJV98898

SEQ ID NO: 5574 - RNA, 477 nt, Artificial Sequence; identical to SEQ ID NO: 5390
  derived and/or modified sequence opt4 from Cytosine_Deaminase_fcy1__Saccharomyces_cerevisiae__AJV98898

SEQ ID NO: 5575 - RNA, 477 nt, Artificial Sequence; identical to SEQ ID NO: 5391
  derived and/or modified sequence opt5 from Cytosine_Deaminase_fcy1__Saccharomyces_cerevisiae__AJV98898

SEQ ID NO: 5576 - RNA, 477 nt, Artificial Sequence
  derived and/or modified sequence opt6 from Cytosine_Deaminase_fcy1__Saccharomyces_cerevisiae__AJV98898
augguaacaggaggaauggcaaguaaaugggaucaaaaaggaauggacauagcauaugaagaagcagcauuaggauauaaagaagggggaguaccaauaggaggaugcuuaauaaauaauaaagacggaaguguauuaggaagaggacauaauaugagauuucaaaaaggaagugcaacacuacacggagaaauaagcacauuagaaaacuguggaagauuagaaggaaaaguauauaaagauacaacauuauauacaacauuaaguccaugugacaugugcacaggagcaauaauaauguauggaauaccaagauguguaguaggagaaaauguaaauuuuaaaaguaaaggagagaaauaucuacaaacaagaggacaugaaguaguaguaguagaugacgaaagauguaaaaaaauaaugaaacaauuuauagaugaaagaccacaagauugguuugaagauauaggagaauaa

SEQ ID NO: 5577 - protein, 158 aa, Artificial Sequence; identical to SEQ ID NO: 5385
  Cytosine_Deaminase_fcy1__Saccharomyces_cerevisiae__A0A0D4XIK5

SEQ ID NO: 5578 - RNA, 477 nt, Artificial Sequence; identical to SEQ ID NO: 5418
  Cytosine_Deaminase_fcy1__Saccharomyces_cerevisiae__AJV99338

SEQ ID NO: 5579 - RNA, 477 nt, Artificial Sequence; identical to SEQ ID NO: 5387
  derived and/or modified sequence opt1 from Cytosine_Deaminase_fcy1__Saccharomyces_cerevisiae__AJV99338

SEQ ID NO: 5580 - RNA, 477 nt, Artificial Sequence; identical to SEQ ID NO: 5388
  derived and/or modified sequence opt2 from Cytosine_Deaminase_fcy1__Saccharomyces_cerevisiae__AJV99338

SEQ ID NO: 5581 - RNA, 477 nt, Artificial Sequence; identical to SEQ ID NO: 5389
  derived and/or modified sequence opt3 from Cytosine_Deaminase_fcy1__Saccharomyces_cerevisiae__AJV99338

SEQ ID NO: 5582 - RNA, 477 nt, Artificial Sequence; identical to SEQ ID NO: 5390
  derived and/or modified sequence opt4 from Cytosine_Deaminase_fcy1__Saccharomyces_cerevisiae__AJV99338

SEQ ID NO: 5583 - RNA, 477 nt, Artificial Sequence; identical to SEQ ID NO: 5391
  derived and/or modified sequence opt5 from Cytosine_Deaminase_fcy1__Saccharomyces_cerevisiae__AJV99338

SEQ ID NO: 5584 - RNA, 477 nt, Artificial Sequence
  derived and/or modified sequence opt6 from Cytosine_Deaminase_fcy1__Saccharomyces_cerevisiae__AJV99338
augguaacaggaggaauggcaaguaaaugggaucaaaaaggaauggauauagcauaugaagaagcagcauuaggauauaaagaaggaggaguaccaauaggaggauguuuaauaaauaauaaagauggaagcguauugggaaggggacauaauaugagauuucaaaaaggaagugcgacacuacauggagaaauaaguacacuagaaaauuguggaagacuagaaggaaaaguauauaaagauacaacauuauauacaacauuaaguccaugugauauguguacaggagcaauaauaauguauggaauaccaagauguguaguaggagaaaauguaaauuuuaaaaguaaaggagaaaaauauuuacaaacaagaggacaugaaguaguaguaguggaugaugaaagauguaaaaaaauaaugaaacaauuuauagaugaaagaccacaagauugguuugaagauauaggagaauaa

SEQ ID NO: 5585 - protein, 158 aa, Artificial Sequence; identical to SEQ ID NO: 5385
  Cytosine_Deaminase_fcy1__Saccharomyces_cerevisiae__A0A0D4XJR4

SEQ ID NO: 5586 - RNA, 477 nt, Artificial Sequence; identical to SEQ ID NO: 5466
  Cytosine_Deaminase_fcy1__Saccharomyces_cerevisiae__AJV99779

SEQ ID NO: 5587 - RNA, 477 nt, Artificial Sequence; identical to SEQ ID NO: 5387
  derived and/or modified sequence opt1 from Cytosine_Deaminase_fcy1__Saccharomyces_cerevisiae__AJV99779

SEQ ID NO: 5588 - RNA, 477 nt, Artificial Sequence; identical to SEQ ID NO: 5388
  derived and/or modified sequence opt2 from Cytosine_Deaminase_fcy1__Saccharomyces_cerevisiae__AJV99779

SEQ ID NO: 5589 - RNA, 477 nt, Artificial Sequence; identical to SEQ ID NO: 5389
  derived and/or modified sequence opt3 from Cytosine_Deaminase_fcy1__Saccharomyces_cerevisiae__AJV99779

SEQ ID NO: 5590 - RNA, 477 nt, Artificial Sequence; identical to SEQ ID NO: 5390
  derived and/or modified sequence opt4 from Cytosine_Deaminase_fcy1__Saccharomyces_cerevisiae__AJV99779

SEQ ID NO: 5591 - RNA, 477 nt, Artificial Sequence; identical to SEQ ID NO: 5391
  derived and/or modified sequence opt5 from Cytosine_Deaminase_fcy1__Saccharomyces_cerevisiae__AJV99779

SEQ ID NO: 5592 - RNA, 477 nt, Artificial Sequence
  derived and/or modified sequence opt6 from Cytosine_Deaminase_fcy1__Saccharomyces_cerevisiae__AJV99779
augguaacaggaggaauggcaaguaaaugggaucaaaaaggaauggacauagcauaugaagaagcagcauuaggauauaaagaaggaggaguaccaauaggaggaugcuuaauaaauaauaaagacggaaguguguuaggaagaggacauaauaugagauuucaaaaaggaagcgcaacauuacacggagaaauaaguacauuagaaaacuguggaagacuagaaggaaaaguauauaaagauacaacacuauauacaacauuaaguccaugugacaugugcacaggagcaauaauaauguauggaauaccaagauguguaguaggagaaaauguaaauuuuaaaaguaaaggagaaaaauauuuacaaacaagaggacaugaaguaguaguaguagaugacgaaagauguaaaaaaauaaugaaacaauuuauagaugaaagaccacaagauugguucgaagauauaggagaauaa

SEQ ID NO: 5593 - protein, 158 aa, Artificial Sequence; identical to SEQ ID NO: 5385
  Cytosine_Deaminase_fcy1__Saccharomyces_cerevisiae__A0A0D4XL36

SEQ ID NO: 5594 - RNA, 477 nt, Artificial Sequence; identical to SEQ ID NO: 5386
  Cytosine_Deaminase_fcy1__Saccharomyces_cerevisiae__AJW00204

SEQ ID NO: 5595 - RNA, 477 nt, Artificial Sequence; identical to SEQ ID NO: 5387
  derived and/or modified sequence opt1 from Cytosine_Deaminase_fcy1__Saccharomyces_cerevisiae__AJW00204

SEQ ID NO: 5596 - RNA, 477 nt, Artificial Sequence; identical to SEQ ID NO: 5388
  derived and/or modified sequence opt2 from Cytosine_Deaminase_fcy1__Saccharomyces_cerevisiae__AJW00204

SEQ ID NO: 5597 - RNA, 477 nt, Artificial Sequence; identical to SEQ ID NO: 5389
  derived and/or modified sequence opt3 from Cytosine_Deaminase_fcy1__Saccharomyces_cerevisiae__AJW00204

SEQ ID NO: 5598 - RNA, 477 nt, Artificial Sequence; identical to SEQ ID NO: 5390
  derived and/or modified sequence opt4 from Cytosine_Deaminase_fcy1__Saccharomyces_cerevisiae__AJW00204

SEQ ID NO: 5599 - RNA, 477 nt, Artificial Sequence; identical to SEQ ID NO: 5391
  derived and/or modified sequence opt5 from Cytosine_Deaminase_fcy1__Saccharomyces_cerevisiae__AJW00204

SEQ ID NO: 5600 - RNA, 477 nt, Artificial Sequence
  derived and/or modified sequence opt6 from Cytosine_Deaminase_fcy1__Saccharomyces_cerevisiae__AJW00204
augguaacaggaggaauggcaaguaaaugggaucaaaaaggaauggauauagcauaugaagaagcagcauuaggauauaaagaaggaggaguaccaauaggaggauguuuaauaaauaauaaagauggaaguguauuaggaagaggacauaauaugagauuucaaaaaggaagugcaacauuacauggagaaauaagcacauuagaaaauuguggaagauuagaaggaaaaguauauaaagauacaacauuauauacaacacuaaguccaugugauauguguacaggagcaauaauaauguauggaauaccaagauguguaguaggagaaaauguaaauuuuaaaaguaaaggagaaaaauauuuacaaacaagaggacaugaaguaguaguaguagaugaugaaagauguaaaaaaauaaugaaacaauuuauagaugaaaggccacaagauugguuugaagauauaggagaauaa

SEQ ID NO: 5601 - protein, 158 aa, Artificial Sequence; identical to SEQ ID NO: 5385
  Cytosine_Deaminase_fcy1__Saccharomyces_cerevisiae__A0A0D4XNH2

SEQ ID NO: 5602 - RNA, 477 nt, Artificial Sequence; identical to SEQ ID NO: 5386
  Cytosine_Deaminase_fcy1__Saccharomyces_cerevisiae__AJW00633

SEQ ID NO: 5603 - RNA, 477 nt, Artificial Sequence; identical to SEQ ID NO: 5387
  derived and/or modified sequence opt1 from Cytosine_Deaminase_fcy1__Saccharomyces_cerevisiae__AJW00633

SEQ ID NO: 5604 - RNA, 477 nt, Artificial Sequence; identical to SEQ ID NO: 5388
  derived and/or modified sequence opt2 from Cytosine_Deaminase_fcy1__Saccharomyces_cerevisiae__AJW00633

SEQ ID NO: 5605 - RNA, 477 nt, Artificial Sequence; identical to SEQ ID NO: 5389
  derived and/or modified sequence opt3 from Cytosine_Deaminase_fcy1__Saccharomyces_cerevisiae__AJW00633

SEQ ID NO: 5606 - RNA, 477 nt, Artificial Sequence; identical to SEQ ID NO: 5390
  derived and/or modified sequence opt4 from Cytosine_Deaminase_fcy1__Saccharomyces_cerevisiae__AJW00633

SEQ ID NO: 5607 - RNA, 477 nt, Artificial Sequence; identical to SEQ ID NO: 5391
  derived and/or modified sequence opt5 from Cytosine_Deaminase_fcy1__Saccharomyces_cerevisiae__AJW00633

SEQ ID NO: 5608 - RNA, 477 nt, Artificial Sequence
  derived and/or modified sequence opt6 from Cytosine_Deaminase_fcy1__Saccharomyces_cerevisiae__AJW00633
augguaacaggaggaauggcaaguaaaugggaucaaaaaggaauggacauagcauaugaagaagcagcauuaggauauaaagaaggaggaguaccaauaggaggaugcuuaauaaauaauaaagacggaaguguauuaggaagaggacauaauaugagauuucaaaaaggaagugcaacacuacacggagaaauaaguacacuagaaaacuguggaagacuagaaggaaaaguauauaaagauacaacauuauauacaacauuaaguccaugugauaugugcacaggagcaauaauaauguauggaauaccaagauguguaguaggagaaaauguaaauuuuaaaaguaaaggagaaaaauauuuacaaacaagaggacaugaaguaguaguaguagaugacgaaagauguaaaaaaauaaugaaacaauuuauagaugaaagaccacaagauugguuugaagauauaggagaauaa

SEQ ID NO: 5609 - protein, 158 aa, Artificial Sequence; identical to SEQ ID NO: 5385
  Cytosine_Deaminase_fcy1__Saccharomyces_cerevisiae__A0A0D4XNS1

SEQ ID NO: 5610 - RNA, 477 nt, Artificial Sequence; identical to SEQ ID NO: 5386
  Cytosine_Deaminase_fcy1__Saccharomyces_cerevisiae__AJW01072

SEQ ID NO: 5611 - RNA, 477 nt, Artificial Sequence; identical to SEQ ID NO: 5387
  derived and/or modified sequence opt1 from Cytosine_Deaminase_fcy1__Saccharomyces_cerevisiae__AJW01072

SEQ ID NO: 5612 - RNA, 477 nt, Artificial Sequence; identical to SEQ ID NO: 5388
  derived and/or modified sequence opt2 from Cytosine_Deaminase_fcy1__Saccharomyces_cerevisiae__AJW01072

SEQ ID NO: 5613 - RNA, 477 nt, Artificial Sequence; identical to SEQ ID NO: 5389
  derived and/or modified sequence opt3 from Cytosine_Deaminase_fcy1__Saccharomyces_cerevisiae__AJW01072

SEQ ID NO: 5614 - RNA, 477 nt, Artificial Sequence; identical to SEQ ID NO: 5390
  derived and/or modified sequence opt4 from Cytosine_Deaminase_fcy1__Saccharomyces_cerevisiae__AJW01072

SEQ ID NO: 5615 - RNA, 477 nt, Artificial Sequence; identical to SEQ ID NO: 5391
  derived and/or modified sequence opt5 from Cytosine_Deaminase_fcy1__Saccharomyces_cerevisiae__AJW01072

SEQ ID NO: 5616 - RNA, 477 nt, Artificial Sequence
  derived and/or modified sequence opt6 from Cytosine_Deaminase_fcy1__Saccharomyces_cerevisiae__AJW01072
augguaacaggaggaauggcaagcaaaugggaucaaaaaggaauggauauagcauaugaagaagcagcauuaggauauaaagaaggaggaguaccaauaggaggauguuuaauaaauaauaaagauggaaguguauuaggaagagggcauaauaugagauuucaaaaaggaagugcaacauuacauggagaaauaaguacauuagaaaauuguggaagguuagaaggaaaaguauauaaagauacaacauuauauacaacauuaaguccaugugauauguguacaggagcaauaauaauguauggaauaccaagauguguaguaggagaaaauguaaauuuuaaaaguaaaggagaaaaauauuuacaaacaaggggacaugaaguaguaguaguagaugaugaaagauguaaaaaaauaaugaaacaauuuauagaugaaagaccacaagauugguuugaagauauaggagaauaa

SEQ ID NO: 5617 - protein, 158 aa, Artificial Sequence; identical to SEQ ID NO: 5385
  Cytosine_Deaminase_fcy1__Saccharomyces_cerevisiae__A0A0D4XQY5

SEQ ID NO: 5618 - RNA, 477 nt, Artificial Sequence; identical to SEQ ID NO: 5386
  Cytosine_Deaminase_fcy1__Saccharomyces_cerevisiae__AJW01508

SEQ ID NO: 5619 - RNA, 477 nt, Artificial Sequence; identical to SEQ ID NO: 5387
  derived and/or modified sequence opt1 from Cytosine_Deaminase_fcy1__Saccharomyces_cerevisiae__AJW01508

SEQ ID NO: 5620 - RNA, 477 nt, Artificial Sequence; identical to SEQ ID NO: 5388
  derived and/or modified sequence opt2 from Cytosine_Deaminase_fcy1__Saccharomyces_cerevisiae__AJW01508

SEQ ID NO: 5621 - RNA, 477 nt, Artificial Sequence; identical to SEQ ID NO: 5389
  derived and/or modified sequence opt3 from Cytosine_Deaminase_fcy1__Saccharomyces_cerevisiae__AJW01508

SEQ ID NO: 5622 - RNA, 477 nt, Artificial Sequence; identical to SEQ ID NO: 5390
  derived and/or modified sequence opt4 from Cytosine_Deaminase_fcy1__Saccharomyces_cerevisiae__AJW01508

SEQ ID NO: 5623 - RNA, 477 nt, Artificial Sequence; identical to SEQ ID NO: 5391
  derived and/or modified sequence opt5 from Cytosine_Deaminase_fcy1__Saccharomyces_cerevisiae__AJW01508

SEQ ID NO: 5624 - RNA, 477 nt, Artificial Sequence
  derived and/or modified sequence opt6 from Cytosine_Deaminase_fcy1__Saccharomyces_cerevisiae__AJW01508
augguaacaggagggauggcaaguaaaugggaucaaaaaggaauggacauagcauaugaagaagcagcauuaggauauaaagaaggaggaguaccaauaggaggaugcuuaauaaauaauaaagacgggaguguauuaggaagaggacauaauaugagauuucaaaaaggaagugcaacauuacacggagaaauaaguacauuagaaaacuguggaagacuagaaggaaaaguauauaaagauacaacauuauauacaacauuaaguccaugugacaugugcacaggagcaauaauaauguauggaauaccaagauguguaguaggagaaaauguaaauuuuaaaaguaaaggagaaaaauacuuacaaacaagaggacaugaaguaguaguaguagaugacgaaagauguaaaaaaauaaugaaacaguuuauagaugaaagaccacaagauugguuugaagauauaggagaauaa

SEQ ID NO: 5625 - protein, 158 aa, Artificial Sequence; identical to SEQ ID NO: 5385
  Cytosine_Deaminase_fcy1__Saccharomyces_cerevisiae__A0A0D4XS80

SEQ ID NO: 5626 - RNA, 477 nt, Artificial Sequence; identical to SEQ ID NO: 5386
  Cytosine_Deaminase_fcy1__Saccharomyces_cerevisiae__AJW02360

SEQ ID NO: 5627 - RNA, 477 nt, Artificial Sequence; identical to SEQ ID NO: 5387
  derived and/or modified sequence opt1 from Cytosine_Deaminase_fcy1__Saccharomyces_cerevisiae__AJW02360

SEQ ID NO: 5628 - RNA, 477 nt, Artificial Sequence; identical to SEQ ID NO: 5388
  derived and/or modified sequence opt2 from Cytosine_Deaminase_fcy1__Saccharomyces_cerevisiae__AJW02360

SEQ ID NO: 5629 - RNA, 477 nt, Artificial Sequence; identical to SEQ ID NO: 5389
  derived and/or modified sequence opt3 from Cytosine_Deaminase_fcy1__Saccharomyces_cerevisiae__AJW02360

SEQ ID NO: 5630 - RNA, 477 nt, Artificial Sequence; identical to SEQ ID NO: 5390
  derived and/or modified sequence opt4 from Cytosine_Deaminase_fcy1__Saccharomyces_cerevisiae__AJW02360

SEQ ID NO: 5631 - RNA, 477 nt, Artificial Sequence; identical to SEQ ID NO: 5391
  derived and/or modified sequence opt5 from Cytosine_Deaminase_fcy1__Saccharomyces_cerevisiae__AJW02360

SEQ ID NO: 5632 - RNA, 477 nt, Artificial Sequence
  derived and/or modified sequence opt6 from Cytosine_Deaminase_fcy1__Saccharomyces_cerevisiae__AJW02360
augguaacaggaggaauggcaaguaaaugggaucaaaaaggaauggacauagcauaugaagaagcagcacuaggauauaaagaaggaggaguaccaauaggaggaugcuuaauaaauaacaaagacggaaguguacuaggaagaggacauaauaugagauuucaaaaaggaagugcaacauuacacggagaaauaagcacauuagaaaacuguggaagacuagaaggaaaaguauauaaagauacaacauuauauacaacauuaaguccaugugacaugugcacaggagcaauaauaauguauggaauaccaagauguguaguaggagaaaauguaaauuucaaaagcaaaggagaaaaauauuuacaaacaagaggacaugaaguaguaguaguagaugacgaaagauguaaaaaaauaaugaaacaauuuauagacgaaagaccacaagauugguuugaagauauaggagaauaa

SEQ ID NO: 5633 - protein, 158 aa, Artificial Sequence; identical to SEQ ID NO: 5385
  Cytosine_Deaminase_fcy1__Saccharomyces_cerevisiae__A0A0D4XS82

SEQ ID NO: 5634 - RNA, 477 nt, Artificial Sequence; identical to SEQ ID NO: 5386
  Cytosine_Deaminase_fcy1__Saccharomyces_cerevisiae__AJW01943

SEQ ID NO: 5635 - RNA, 477 nt, Artificial Sequence; identical to SEQ ID NO: 5387
  derived and/or modified sequence opt1 from Cytosine_Deaminase_fcy1__Saccharomyces_cerevisiae__AJW01943

SEQ ID NO: 5636 - RNA, 477 nt, Artificial Sequence; identical to SEQ ID NO: 5388
  derived and/or modified sequence opt2 from Cytosine_Deaminase_fcy1__Saccharomyces_cerevisiae__AJW01943

SEQ ID NO: 5637 - RNA, 477 nt, Artificial Sequence; identical to SEQ ID NO: 5389
  derived and/or modified sequence opt3 from Cytosine_Deaminase_fcy1__Saccharomyces_cerevisiae__AJW01943

SEQ ID NO: 5638 - RNA, 477 nt, Artificial Sequence; identical to SEQ ID NO: 5390
  derived and/or modified sequence opt4 from Cytosine_Deaminase_fcy1__Saccharomyces_cerevisiae__AJW01943

SEQ ID NO: 5639 - RNA, 477 nt, Artificial Sequence; identical to SEQ ID NO: 5391
  derived and/or modified sequence opt5 from Cytosine_Deaminase_fcy1__Saccharomyces_cerevisiae__AJW01943

SEQ ID NO: 5640 - RNA, 477 nt, Artificial Sequence
  derived and/or modified sequence opt6 from Cytosine_Deaminase_fcy1__Saccharomyces_cerevisiae__AJW01943
augguaacaggaggaauggcaaguaaaugggaucaaaaaggaauggauauagcauaugaagaagcagcauuaggauauaaagaaggaggaguaccaauaggaggauguuuaauaaauaauaaagauggaaguguguugggaagaggacauaauaugagauuucaaaaaggaagugcaacauuacauggagaaauaaguacauuagaaaauuguggaagauuagaaggaaaaguauauaaagauacaacauuauauacaacauuaaguccaugugauauguguacaggagcaauaauaauguauggaauaccaagauguguaguaggagaaaauguaaauuuuaaaagcaaaggagaaaaauauuuacaaacaagaggacaugaaguaguaguaguagaugaugaaagauguaaaaaaauaaugaaacaauuuauagaugaaagaccacaagauugguuugaagauauaggagaauaa

SEQ ID NO: 5641 - protein, 158 aa, Artificial Sequence; identical to SEQ ID NO: 5385
  Cytosine_Deaminase_fcy1__Saccharomyces_cerevisiae__A0A0D4XTC2

SEQ ID NO: 5642 - RNA, 477 nt, Artificial Sequence; identical to SEQ ID NO: 5386
  Cytosine_Deaminase_fcy1__Saccharomyces_cerevisiae__AJW02785

SEQ ID NO: 5643 - RNA, 477 nt, Artificial Sequence; identical to SEQ ID NO: 5387
  derived and/or modified sequence opt1 from Cytosine_Deaminase_fcy1__Saccharomyces_cerevisiae__AJW02785

SEQ ID NO: 5644 - RNA, 477 nt, Artificial Sequence; identical to SEQ ID NO: 5388
  derived and/or modified sequence opt2 from Cytosine_Deaminase_fcy1__Saccharomyces_cerevisiae__AJW02785

SEQ ID NO: 5645 - RNA, 477 nt, Artificial Sequence; identical to SEQ ID NO: 5389
  derived and/or modified sequence opt3 from Cytosine_Deaminase_fcy1__Saccharomyces_cerevisiae__AJW02785

SEQ ID NO: 5646 - RNA, 477 nt, Artificial Sequence; identical to SEQ ID NO: 5390
  derived and/or modified sequence opt4 from Cytosine_Deaminase_fcy1__Saccharomyces_cerevisiae__AJW02785

SEQ ID NO: 5647 - RNA, 477 nt, Artificial Sequence; identical to SEQ ID NO: 5391
  derived and/or modified sequence opt5 from Cytosine_Deaminase_fcy1__Saccharomyces_cerevisiae__AJW02785

SEQ ID NO: 5648 - RNA, 477 nt, Artificial Sequence
  derived and/or modified sequence opt6 from Cytosine_Deaminase_fcy1__Saccharomyces_cerevisiae__AJW02785
augguaacaggaggaauggcaaguaaaugggaucaaaaaggaauggauauagcauaugaagaagcagcauuaggauauaaagaaggaggaguaccaauaggaggauguuuaauaaauaauaaagaugggaguguauuaggaagaggacacaauaugagauuucaaaaaggaagugcaacguuacauggagaaauaaguacauuagaaaauuguggaagauuagaaggaaaaguauauaaagauacaacauuauauacaacauuaaguccaugugauauguguacaggagcaauaauaauguauggaauaccaagauguguaguaggagaaaauguaaauuuuaaaaguaaaggagaaaaauauuuacaaacaagaggacaugaaguaguaguaguagaugaugaaagauguaaaaaaauaaugaaacaauuuauagaugaaagaccacaagauugguuugaagauauaggagaauaa

SEQ ID NO: 5649 - protein, 158 aa, Artificial Sequence; identical to SEQ ID NO: 5385
  Cytosine_Deaminase_fcy1__Saccharomyces_cerevisiae__A0A0D4XUZ4

SEQ ID NO: 5650 - RNA, 477 nt, Artificial Sequence; identical to SEQ ID NO: 5418
  Cytosine_Deaminase_fcy1__Saccharomyces_cerevisiae__AJW03227

SEQ ID NO: 5651 - RNA, 477 nt, Artificial Sequence; identical to SEQ ID NO: 5387
  derived and/or modified sequence opt1 from Cytosine_Deaminase_fcy1__Saccharomyces_cerevisiae__AJW03227

SEQ ID NO: 5652 - RNA, 477 nt, Artificial Sequence; identical to SEQ ID NO: 5388
  derived and/or modified sequence opt2 from Cytosine_Deaminase_fcy1__Saccharomyces_cerevisiae__AJW03227

SEQ ID NO: 5653 - RNA, 477 nt, Artificial Sequence; identical to SEQ ID NO: 5389
  derived and/or modified sequence opt3 from Cytosine_Deaminase_fcy1__Saccharomyces_cerevisiae__AJW03227

SEQ ID NO: 5654 - RNA, 477 nt, Artificial Sequence; identical to SEQ ID NO: 5390
  derived and/or modified sequence opt4 from Cytosine_Deaminase_fcy1__Saccharomyces_cerevisiae__AJW03227

SEQ ID NO: 5655 - RNA, 477 nt, Artificial Sequence; identical to SEQ ID NO: 5391
  derived and/or modified sequence opt5 from Cytosine_Deaminase_fcy1__Saccharomyces_cerevisiae__AJW03227

SEQ ID NO: 5656 - RNA, 477 nt, Artificial Sequence
  derived and/or modified sequence opt6 from Cytosine_Deaminase_fcy1__Saccharomyces_cerevisiae__AJW03227
augguaacaggaggaauggcaaguaaaugggaucaaaaaggaauggauauagcauaugaagaagcagcauuaggauauaaagaaggaggaguaccaauaggaggauguuuaauaaauaauaaagauggaaguguauuaggaaggggacauaauaugagauuucaaaaaggaagugcaacauugcauggagaaauaaguacauuagaaaauuguggaagauuagaaggaaaaguauauaaagauacaacauuauauacaacauuaaguccaugugauaugugcacaggagcaauaauaauguauggaauaccaagauguguaguaggagaaaauguaaauuuuaaaaguaaaggagaaaaauauuuacaaacaagaggacaugaaguaguagugguagaugaugaaagauguaaaaaaauaaugaaacaauuuauagaugaaagaccacaagauugguuugaagauauaggagaauaa

SEQ ID NO: 5657 - protein, 158 aa, Artificial Sequence; identical to SEQ ID NO: 5385
  Cytosine_Deaminase_fcy1__Saccharomyces_cerevisiae__A0A0D4XW26

SEQ ID NO: 5658 - RNA, 477 nt, Artificial Sequence; identical to SEQ ID NO: 5498
  Cytosine_Deaminase_fcy1__Saccharomyces_cerevisiae__AJW03664

SEQ ID NO: 5659 - RNA, 477 nt, Artificial Sequence; identical to SEQ ID NO: 5387
  derived and/or modified sequence opt1 from Cytosine_Deaminase_fcy1__Saccharomyces_cerevisiae__AJW03664

SEQ ID NO: 5660 - RNA, 477 nt, Artificial Sequence; identical to SEQ ID NO: 5388
  derived and/or modified sequence opt2 from Cytosine_Deaminase_fcy1__Saccharomyces_cerevisiae__AJW03664

SEQ ID NO: 5661 - RNA, 477 nt, Artificial Sequence; identical to SEQ ID NO: 5389
  derived and/or modified sequence opt3 from Cytosine_Deaminase_fcy1__Saccharomyces_cerevisiae__AJW03664

SEQ ID NO: 5662 - RNA, 477 nt, Artificial Sequence; identical to SEQ ID NO: 5390
  derived and/or modified sequence opt4 from Cytosine_Deaminase_fcy1__Saccharomyces_cerevisiae__AJW03664

SEQ ID NO: 5663 - RNA, 477 nt, Artificial Sequence; identical to SEQ ID NO: 5391
  derived and/or modified sequence opt5 from Cytosine_Deaminase_fcy1__Saccharomyces_cerevisiae__AJW03664

SEQ ID NO: 5664 - RNA, 477 nt, Artificial Sequence
  derived and/or modified sequence opt6 from Cytosine_Deaminase_fcy1__Saccharomyces_cerevisiae__AJW03664
augguaacaggaggaauggcaaguaaaugggaucaaaaaggaauggacauagcauaugaagaagcagcacuaggauauaaagaaggaggaguaccaauaggaggaugcuuaauaaauaauaaagacggaaguguauuaggaagaggacauaauaugagauuucaaaaaggaagugcaacacuacauggagaaauaaguacacuagaaaacuguggaagacuagaaggaaaaguauauaaagauacaacauuauauacaacauuaaguccaugugacaugugcacaggagcaauaauaauguauggaauaccaagauguguaguaggagaaaauguaaauuuuaaaaguaaaggagaaaaauauuuacaaacaagaggacaugaaguaguaguaguagaugaugaaagauguaaaaaaauaaugaaacaauuuauagaugaaagaccacaagauugguuugaagauauaggagaauaa

SEQ ID NO: 5665 - protein, 158 aa, Artificial Sequence; identical to SEQ ID NO: 5385
  Cytosine_Deaminase_fcy1__Saccharomyces_cerevisiae__A0A0D4XXD1

SEQ ID NO: 5666 - RNA, 477 nt, Artificial Sequence
  Cytosine_Deaminase_fcy1__Saccharomyces_cerevisiae__AJW04100
auggugacagggggaauggcaagcaagugggaucagaaggguauggacauugccuaugaggaggcggccuuagguuacaaagagggugguguuccuauuggcggaugucuuaucaauaacaaagacggaaguguucucggucguggucacaacaugagauuucaaaagggauccgccacacuacauggugagaucuccacuuuggaaaacugugggagauuagagggcaaaguguacaaagauaccacuuuguauacgacgcugucuccaugcgacauguguacaggugccaucaucauguaugguauuccacgcuguguugucggugagaacguuaauuucaaaaguaagggcgagaaauauuuacaaacuagaggucacgagguuguuguuguugacgaugagagguguaaaaagaucaugaaacaauuuaucgaugaaagaccccaggauugguuugaagauauuggugaguag

SEQ ID NO: 5667 - RNA, 477 nt, Artificial Sequence; identical to SEQ ID NO: 5387
  derived and/or modified sequence opt1 from Cytosine_Deaminase_fcy1__Saccharomyces_cerevisiae__AJW04100

SEQ ID NO: 5668 - RNA, 477 nt, Artificial Sequence; identical to SEQ ID NO: 5388
  derived and/or modified sequence opt2 from Cytosine_Deaminase_fcy1__Saccharomyces_cerevisiae__AJW04100

SEQ ID NO: 5669 - RNA, 477 nt, Artificial Sequence; identical to SEQ ID NO: 5389
  derived and/or modified sequence opt3 from Cytosine_Deaminase_fcy1__Saccharomyces_cerevisiae__AJW04100

SEQ ID NO: 5670 - RNA, 477 nt, Artificial Sequence; identical to SEQ ID NO: 5390
  derived and/or modified sequence opt4 from Cytosine_Deaminase_fcy1__Saccharomyces_cerevisiae__AJW04100

SEQ ID NO: 5671 - RNA, 477 nt, Artificial Sequence; identical to SEQ ID NO: 5391
  derived and/or modified sequence opt5 from Cytosine_Deaminase_fcy1__Saccharomyces_cerevisiae__AJW04100

SEQ ID NO: 5672 - RNA, 477 nt, Artificial Sequence
  derived and/or modified sequence opt6 from Cytosine_Deaminase_fcy1__Saccharomyces_cerevisiae__AJW04100
augguaacaggaggaauggcaaguaaaugggaucaaaagggaauggacauagcauaugaagaagcagcauuaggauauaaagaaggaggaguaccaauaggaggaugcuuaauaaauaauaaagacggaagcguauuaggaagaggacauaauaugagauuucaaaaaggaagugcaacauuacauggagaaauaaguacacuagaaaacuguggaagauuagaaggaaaaguauauaaagauacaacauuauauacaacauuaaguccaugugacaugugcacaggagcaauaauaauguauggaauaccaagauguguaguaggagaaaauguaaauuuuaaaagcaaaggagaaaaauauuuacaaacaagaggacaugaaguaguaguaguagaugacgaaagauguaaaaaaauaaugaaacaauuuauagaugaaagaccacaagauugguucgaagauauaggagaauaa

SEQ ID NO: 5673 - protein, 158 aa, Artificial Sequence; identical to SEQ ID NO: 5385
  Cytosine_Deaminase_fcy1__Saccharomyces_cerevisiae__A0A0D4XYH3

SEQ ID NO: 5674 - RNA, 477 nt, Artificial Sequence; identical to SEQ ID NO: 5418
  Cytosine_Deaminase_fcy1__Saccharomyces_cerevisiae__AJW04531

SEQ ID NO: 5675 - RNA, 477 nt, Artificial Sequence; identical to SEQ ID NO: 5387
  derived and/or modified sequence opt1 from Cytosine_Deaminase_fcy1__Saccharomyces_cerevisiae__AJW04531

SEQ ID NO: 5676 - RNA, 477 nt, Artificial Sequence; identical to SEQ ID NO: 5388
  derived and/or modified sequence opt2 from Cytosine_Deaminase_fcy1__Saccharomyces_cerevisiae__AJW04531

SEQ ID NO: 5677 - RNA, 477 nt, Artificial Sequence; identical to SEQ ID NO: 5389
  derived and/or modified sequence opt3 from Cytosine_Deaminase_fcy1__Saccharomyces_cerevisiae__AJW04531

SEQ ID NO: 5678 - RNA, 477 nt, Artificial Sequence; identical to SEQ ID NO: 5390
  derived and/or modified sequence opt4 from Cytosine_Deaminase_fcy1__Saccharomyces_cerevisiae__AJW04531

SEQ ID NO: 5679 - RNA, 477 nt, Artificial Sequence; identical to SEQ ID NO: 5391
  derived and/or modified sequence opt5 from Cytosine_Deaminase_fcy1__Saccharomyces_cerevisiae__AJW04531

SEQ ID NO: 5680 - RNA, 477 nt, Artificial Sequence
  derived and/or modified sequence opt6 from Cytosine_Deaminase_fcy1__Saccharomyces_cerevisiae__AJW04531
augguaacaggaggaauggcaaguaaaugggaucaaaaaggaauggauauagcauaugaagaagcagcauuaggauauaaagaaggaggaguaccaauaggaggaugcuuaauaaauaauaaagacggaaguguauuaggaagaggacauaauaugagauuucaaaaaggaagugcaacauuacacggagaaauaaguacauuagaaaauuguggaagauuagaaggaaaaguauauaaagauacaacauuauauacaacauuaaguccaugugacaugugcacaggagcaauaauaauguauggaauaccaagauguguaguaggagaaaauguaaauuuuaaaagcaaaggagaaaaauauuuacaaacaagaggacaugaaguaguaguaguagaugacgaaagauguaaaaaaauaaugaaacaauuuauagaugaaagaccacaagauugguuugaagauauaggagaauaa

SEQ ID NO: 5681 - protein, 158 aa, Artificial Sequence; identical to SEQ ID NO: 5385
  Cytosine_Deaminase_fcy1__Saccharomyces_cerevisiae__A0A0D4XZT0

SEQ ID NO: 5682 - RNA, 477 nt, Artificial Sequence; identical to SEQ ID NO: 5418
  Cytosine_Deaminase_fcy1__Saccharomyces_cerevisiae__AJW04966

SEQ ID NO: 5683 - RNA, 477 nt, Artificial Sequence; identical to SEQ ID NO: 5387
  derived and/or modified sequence opt1 from Cytosine_Deaminase_fcy1__Saccharomyces_cerevisiae__AJW04966

SEQ ID NO: 5684 - RNA, 477 nt, Artificial Sequence; identical to SEQ ID NO: 5388
  derived and/or modified sequence opt2 from Cytosine_Deaminase_fcy1__Saccharomyces_cerevisiae__AJW04966

SEQ ID NO: 5685 - RNA, 477 nt, Artificial Sequence; identical to SEQ ID NO: 5389
  derived and/or modified sequence opt3 from Cytosine_Deaminase_fcy1__Saccharomyces_cerevisiae__AJW04966

SEQ ID NO: 5686 - RNA, 477 nt, Artificial Sequence; identical to SEQ ID NO: 5390
  derived and/or modified sequence opt4 from Cytosine_Deaminase_fcy1__Saccharomyces_cerevisiae__AJW04966

SEQ ID NO: 5687 - RNA, 477 nt, Artificial Sequence; identical to SEQ ID NO: 5391
  derived and/or modified sequence opt5 from Cytosine_Deaminase_fcy1__Saccharomyces_cerevisiae__AJW04966

SEQ ID NO: 5688 - RNA, 477 nt, Artificial Sequence
  derived and/or modified sequence opt6 from Cytosine_Deaminase_fcy1__Saccharomyces_cerevisiae__AJW04966
augguaacaggaggaauggcaaguaaaugggaucaaaaaggaauggacauagcauaugaagaagcagcauuaggauauaaagaaggaggaguaccaauaggaggaugucuaauaaauaauaaagacggaaguguauuaggaagaggacauaauaugagauuucaaaaaggaagugcgacauuacacggagaaauaaguacacuagaaaacuguggaagacuagaaggaaaaguauauaaagauacaacauuauauacaacauuaaguccaugugacaugugcacaggagcaauaauaauguauggaauaccaagauguguaguaggagaaaauguaaauuuuaaaagcaaaggagaaaaauaucuacaaacaagaggacaugaaguaguaguaguagaugacgaaagauguaaaaaaauaaugaaacaauuuauagaugaaagaccacaagauugguuugaagauauaggagaauaa

SEQ ID NO: 5689 - protein, 158 aa, Artificial Sequence; identical to SEQ ID NO: 5385
  Cytosine_Deaminase_fcy1__Saccharomyces_cerevisiae__A0A0D4Y164

SEQ ID NO: 5690 - RNA, 477 nt, Artificial Sequence; identical to SEQ ID NO: 5386
  Cytosine_Deaminase_fcy1__Saccharomyces_cerevisiae__AJW05404

SEQ ID NO: 5691 - RNA, 477 nt, Artificial Sequence; identical to SEQ ID NO: 5387
  derived and/or modified sequence opt1 from Cytosine_Deaminase_fcy1__Saccharomyces_cerevisiae__AJW05404

SEQ ID NO: 5692 - RNA, 477 nt, Artificial Sequence; identical to SEQ ID NO: 5388
  derived and/or modified sequence opt2 from Cytosine_Deaminase_fcy1__Saccharomyces_cerevisiae__AJW05404

SEQ ID NO: 5693 - RNA, 477 nt, Artificial Sequence; identical to SEQ ID NO: 5389
  derived and/or modified sequence opt3 from Cytosine_Deaminase_fcy1__Saccharomyces_cerevisiae__AJW05404

SEQ ID NO: 5694 - RNA, 477 nt, Artificial Sequence; identical to SEQ ID NO: 5390
  derived and/or modified sequence opt4 from Cytosine_Deaminase_fcy1__Saccharomyces_cerevisiae__AJW05404

SEQ ID NO: 5695 - RNA, 477 nt, Artificial Sequence; identical to SEQ ID NO: 5391
  derived and/or modified sequence opt5 from Cytosine_Deaminase_fcy1__Saccharomyces_cerevisiae__AJW05404

SEQ ID NO: 5696 - RNA, 477 nt, Artificial Sequence
  derived and/or modified sequence opt6 from Cytosine_Deaminase_fcy1__Saccharomyces_cerevisiae__AJW05404
augguaacaggaggaauggcaaguaaaugggaucaaaaagggauggauauagcauaugaagaagcagcauuaggauauaaagaaggaggaguaccaauaggaggauguuuaauaaauaauaaagauggaaguguauuaggaagaggacauaauaugagauuucaaaaaggaagugcaacauuacauggagaaauaaguacauuagaaaauuguggaagauuagaaggaaaaguauauaaagauacaacacuauauacaacauuaaguccaugugauauguguacaggagcaauaauaauguauggaauaccaagauguguaguaggagaaaauguaaauuuuaaaaguaaaggagaaaaauauuuacaaacaaggggacaugaaguaguaguaguagaugaugaaagauguaaaaaaauaaugaaacaauuuauagaugaaagaccacaagauugguuugaagauauaggagaauga

SEQ ID NO: 5697 - protein, 158 aa, Artificial Sequence; identical to SEQ ID NO: 5385
  Cytosine_Deaminase_fcy1__Saccharomyces_cerevisiae__A0A0D4Y2A8

SEQ ID NO: 5698 - RNA, 477 nt, Artificial Sequence; identical to SEQ ID NO: 5386
  Cytosine_Deaminase_fcy1__Saccharomyces_cerevisiae__AJW05846

SEQ ID NO: 5699 - RNA, 477 nt, Artificial Sequence; identical to SEQ ID NO: 5387
  derived and/or modified sequence opt1 from Cytosine_Deaminase_fcy1__Saccharomyces_cerevisiae__AJW05846

SEQ ID NO: 5700 - RNA, 477 nt, Artificial Sequence; identical to SEQ ID NO: 5388
  derived and/or modified sequence opt2 from Cytosine_Deaminase_fcy1__Saccharomyces_cerevisiae__AJW05846

SEQ ID NO: 5701 - RNA, 477 nt, Artificial Sequence; identical to SEQ ID NO: 5389
  derived and/or modified sequence opt3 from Cytosine_Deaminase_fcy1__Saccharomyces_cerevisiae__AJW05846

SEQ ID NO: 5702 - RNA, 477 nt, Artificial Sequence; identical to SEQ ID NO: 5390
  derived and/or modified sequence opt4 from Cytosine_Deaminase_fcy1__Saccharomyces_cerevisiae__AJW05846

SEQ ID NO: 5703 - RNA, 477 nt, Artificial Sequence; identical to SEQ ID NO: 5391
  derived and/or modified sequence opt5 from Cytosine_Deaminase_fcy1__Saccharomyces_cerevisiae__AJW05846

SEQ ID NO: 5704 - RNA, 477 nt, Artificial Sequence
  derived and/or modified sequence opt6 from Cytosine_Deaminase_fcy1__Saccharomyces_cerevisiae__AJW05846
augguaacaggaggaauggcaaguaaaugggaucaaaaaggaauggauauagcauaugaagaagcagcauuaggauauaaagaaggaggaguaccaauaggaggaugcuuaauaaauaauaaagauggaaguguauuaggaagaggacauaauaugagauuucaaaaaggaagugcaacauugcacggagaaauaagcacauuagaaaacuguggaagacuagaaggaaaaguauauaaagauacaacauuauauacaacauuaaguccaugugacauguguacaggagcaauaauaauguauggaauaccaagauguguaguaggagaaaauguaaauuuuaaaagcaaaggagaaaaauauuuacaaacaagaggacaugaaguaguaguaguagaugacgaaagauguaaaaaaauaaugaaacaauuuauagaugaaagaccacaagauugguuugaagauauaggagaauaa

SEQ ID NO: 5705 - protein, 158 aa, Artificial Sequence; identical to SEQ ID NO: 5385
  Cytosine_Deaminase_fcy1__Saccharomyces_cerevisiae__A0A0D4Y3N1

SEQ ID NO: 5706 - RNA, 477 nt, Artificial Sequence; identical to SEQ ID NO: 5386
  Cytosine_Deaminase_fcy1__Saccharomyces_cerevisiae__AJW06284

SEQ ID NO: 5707 - RNA, 477 nt, Artificial Sequence; identical to SEQ ID NO: 5387
  derived and/or modified sequence opt1 from Cytosine_Deaminase_fcy1__Saccharomyces_cerevisiae__AJW06284

SEQ ID NO: 5708 - RNA, 477 nt, Artificial Sequence; identical to SEQ ID NO: 5388
  derived and/or modified sequence opt2 from Cytosine_Deaminase_fcy1__Saccharomyces_cerevisiae__AJW06284

SEQ ID NO: 5709 - RNA, 477 nt, Artificial Sequence; identical to SEQ ID NO: 5389
  derived and/or modified sequence opt3 from Cytosine_Deaminase_fcy1__Saccharomyces_cerevisiae__AJW06284

SEQ ID NO: 5710 - RNA, 477 nt, Artificial Sequence; identical to SEQ ID NO: 5390
  derived and/or modified sequence opt4 from Cytosine_Deaminase_fcy1__Saccharomyces_cerevisiae__AJW06284

SEQ ID NO: 5711 - RNA, 477 nt, Artificial Sequence; identical to SEQ ID NO: 5391
  derived and/or modified sequence opt5 from Cytosine_Deaminase_fcy1__Saccharomyces_cerevisiae__AJW06284

SEQ ID NO: 5712 - RNA, 477 nt, Artificial Sequence
  derived and/or modified sequence opt6 from Cytosine_Deaminase_fcy1__Saccharomyces_cerevisiae__AJW06284
augguaacaggaggaauggcaaguaaaugggaucaaaaaggaauggacauagcauaugaagaagcagcauuaggauauaaagaaggaggaguaccaauaggaggaugcuuaauaaauaauaaagacggaaguguacuaggaagaggacauaauaugagauuucaaaaaggaagugcaacacuacacggagaaauaaguacauuagaaaacuguggaagauuagaaggaaaaguauauaaagauacaacauuauauacaacacuaagcccaugugacaugugcacaggagcaauaauaauguauggaauaccaagauguguaguaggagaaaacguaaauuuuaaaaguaaaggagaaaaauauuuacaaacaagaggacaugaaguaguaguaguagaugacgaaagauguaaaaaaauaaugaaacaauuuauagaugaaagaccacaagauugguuugaagauauaggagaauaa

SEQ ID NO: 5713 - protein, 158 aa, Artificial Sequence; identical to SEQ ID NO: 5385
  Cytosine_Deaminase_fcy1__Saccharomyces_cerevisiae__A0A0D4Y5S3

SEQ ID NO: 5714 - RNA, 477 nt, Artificial Sequence
  Cytosine_Deaminase_fcy1__Saccharomyces_cerevisiae__AJW06723
auggugacagggggaauggcaagcaagugggaucagaaggguauggacauugccuaugaggaggcggccuuagguuacaaagagggugguguuccuauuggcggaugucuuaucaauaacaaagacggaaguguucucggucguggucacaacaugagauuucaaaagggauccgccacacuacauggugagaucuccacuuuggaaaacugugggagauuagagggcaaaguguacaaagauaccacuuuguauacgacgcugucuccaugcgacauguguacaggugccaucaucauguaugguauuccacgcuguguugucggugagaacguuaauuucaaaaguaagggcgagaaauauuuacaaacuagaggucacgagguuguuguuguugacgaugagagguguaaaaagaucaugaaacaauucaucgaugaaagaccucaggauugguuugaagauauuggugaguag

SEQ ID NO: 5715 - RNA, 477 nt, Artificial Sequence; identical to SEQ ID NO: 5387
  derived and/or modified sequence opt1 from Cytosine_Deaminase_fcy1__Saccharomyces_cerevisiae__AJW06723

SEQ ID NO: 5716 - RNA, 477 nt, Artificial Sequence; identical to SEQ ID NO: 5388
  derived and/or modified sequence opt2 from Cytosine_Deaminase_fcy1__Saccharomyces_cerevisiae__AJW06723

SEQ ID NO: 5717 - RNA, 477 nt, Artificial Sequence; identical to SEQ ID NO: 5389
  derived and/or modified sequence opt3 from Cytosine_Deaminase_fcy1__Saccharomyces_cerevisiae__AJW06723

SEQ ID NO: 5718 - RNA, 477 nt, Artificial Sequence; identical to SEQ ID NO: 5390
  derived and/or modified sequence opt4 from Cytosine_Deaminase_fcy1__Saccharomyces_cerevisiae__AJW06723

SEQ ID NO: 5719 - RNA, 477 nt, Artificial Sequence; identical to SEQ ID NO: 5391
  derived and/or modified sequence opt5 from Cytosine_Deaminase_fcy1__Saccharomyces_cerevisiae__AJW06723

SEQ ID NO: 5720 - RNA, 477 nt, Artificial Sequence
  derived and/or modified sequence opt6 from Cytosine_Deaminase_fcy1__Saccharomyces_cerevisiae__AJW06723
augguaacaggaggaauggcaagcaaaugggaucaaaaaggaauggacauagcauaugaagaagcagcauuaggauauaaagaaggaggaguaccaauaggaggaugcuuaauaaauaauaaagacggaaguguauuaggaagaggacauaauaugagauuucaaaaaggaagugcaacauuacacggagaaauaaguacauuagaaaauuguggaagauuagaaggaaaaguauauaaagauacaacauuauauacaacacuaaguccaugugacaugugcacaggagcaauaauaauguauggaauaccaagauguguaguaggagaaaauguaaauuuuaaaaguaaaggagaaaaauauuuacaaacaagaggacaugaaguaguaguaguagaugacgaaagauguaaaaaaauaaugaaacaauuuauagaugaaagaccacaagauugguuugaagauauaggagaauaa

SEQ ID NO: 5721 - protein, 158 aa, Artificial Sequence; identical to SEQ ID NO: 5385
  Cytosine_Deaminase_fcy1__Saccharomyces_cerevisiae__A0A0D4Y5Y1

SEQ ID NO: 5722 - RNA, 477 nt, Artificial Sequence; identical to SEQ ID NO: 5386
  Cytosine_Deaminase_fcy1__Saccharomyces_cerevisiae__AJW07156

SEQ ID NO: 5723 - RNA, 477 nt, Artificial Sequence; identical to SEQ ID NO: 5387
  derived and/or modified sequence opt1 from Cytosine_Deaminase_fcy1__Saccharomyces_cerevisiae__AJW07156

SEQ ID NO: 5724 - RNA, 477 nt, Artificial Sequence; identical to SEQ ID NO: 5388
  derived and/or modified sequence opt2 from Cytosine_Deaminase_fcy1__Saccharomyces_cerevisiae__AJW07156

SEQ ID NO: 5725 - RNA, 477 nt, Artificial Sequence; identical to SEQ ID NO: 5389
  derived and/or modified sequence opt3 from Cytosine_Deaminase_fcy1__Saccharomyces_cerevisiae__AJW07156

SEQ ID NO: 5726 - RNA, 477 nt, Artificial Sequence; identical to SEQ ID NO: 5390
  derived and/or modified sequence opt4 from Cytosine_Deaminase_fcy1__Saccharomyces_cerevisiae__AJW07156

SEQ ID NO: 5727 - RNA, 477 nt, Artificial Sequence; identical to SEQ ID NO: 5391
  derived and/or modified sequence opt5 from Cytosine_Deaminase_fcy1__Saccharomyces_cerevisiae__AJW07156

SEQ ID NO: 5728 - RNA, 477 nt, Artificial Sequence
  derived and/or modified sequence opt6 from Cytosine_Deaminase_fcy1__Saccharomyces_cerevisiae__AJW07156
augguaacaggaggaauggcaaguaaaugggaucaaaaaggaauggacauagcauaugaagaagcagcauuaggauauaaagaaggaggaguaccaauaggaggaugcuuaauaaauaauaaagacggaaguguauuaggaagaggacauaauaugagauuccaaaaaggaagugcaacacuacauggagaaauaaguacauuagaaaacuguggaagacuagaaggaaaaguauauaaagauacaacacuauauacaacauuaaguccaugugacaugugcacaggagcaauaauaauguauggaauaccaagauguguaguaggagaaaauguaaauuuuaaaaguaaaggagaaaaauaucuacaaacaagaggacaugaaguaguaguaguagaugacgaaagauguaaaaaaauaaugaaacaauucauagaugaaagaccacaagauugguuugaagauauaggagaauaa

SEQ ID NO: 5729 - protein, 158 aa, Artificial Sequence; identical to SEQ ID NO: 5385
  Cytosine_Deaminase_fcy1__Saccharomyces_cerevisiae__A0A0D4Y7I2

SEQ ID NO: 5730 - RNA, 477 nt, Artificial Sequence; identical to SEQ ID NO: 5714
  Cytosine_Deaminase_fcy1__Saccharomyces_cerevisiae__AJW07594

SEQ ID NO: 5731 - RNA, 477 nt, Artificial Sequence; identical to SEQ ID NO: 5387
  derived and/or modified sequence opt1 from Cytosine_Deaminase_fcy1__Saccharomyces_cerevisiae__AJW07594

SEQ ID NO: 5732 - RNA, 477 nt, Artificial Sequence; identical to SEQ ID NO: 5388
  derived and/or modified sequence opt2 from Cytosine_Deaminase_fcy1__Saccharomyces_cerevisiae__AJW07594

SEQ ID NO: 5733 - RNA, 477 nt, Artificial Sequence; identical to SEQ ID NO: 5389
  derived and/or modified sequence opt3 from Cytosine_Deaminase_fcy1__Saccharomyces_cerevisiae__AJW07594

SEQ ID NO: 5734 - RNA, 477 nt, Artificial Sequence; identical to SEQ ID NO: 5390
  derived and/or modified sequence opt4 from Cytosine_Deaminase_fcy1__Saccharomyces_cerevisiae__AJW07594

SEQ ID NO: 5735 - RNA, 477 nt, Artificial Sequence; identical to SEQ ID NO: 5391
  derived and/or modified sequence opt5 from Cytosine_Deaminase_fcy1__Saccharomyces_cerevisiae__AJW07594

SEQ ID NO: 5736 - RNA, 477 nt, Artificial Sequence
  derived and/or modified sequence opt6 from Cytosine_Deaminase_fcy1__Saccharomyces_cerevisiae__AJW07594
augguaacaggaggaauggcaaguaaaugggaucaaaaaggaauggacauagcauaugaagaagcagcguuaggauauaaagaagggggaguaccaauaggaggauguuuaauaaauaauaaagacggaaguguauuaggaagaggacauaauaugagauuucaaaaaggaagugcaacauuacacggagaaauaaguacauuagaaaacuguggaagacuagaaggaaaaguauauaaagauacaacauuauauacaacauuaaguccaugugacaugugcacaggagcaauaauaauguauggaauaccaagauguguaguaggagaaaauguaaauuucaaaaguaaaggagaaaaauauuuacaaacaagaggacaugaaguaguaguaguagaugaugaaagauguaaaaaaauaaugaaacaauuuauagaugaaagaccacaagauugguuugaagauauaggagaauaa

SEQ ID NO: 5737 - protein, 158 aa, Artificial Sequence; identical to SEQ ID NO: 5385
  Cytosine_Deaminase_fcy1__Saccharomyces_cerevisiae__A0A0D4Y8S5

SEQ ID NO: 5738 - RNA, 477 nt, Artificial Sequence; identical to SEQ ID NO: 5386
  Cytosine_Deaminase_fcy1__Saccharomyces_cerevisiae__AJW08024

SEQ ID NO: 5739 - RNA, 477 nt, Artificial Sequence; identical to SEQ ID NO: 5387
  derived and/or modified sequence opt1 from Cytosine_Deaminase_fcy1__Saccharomyces_cerevisiae__AJW08024

SEQ ID NO: 5740 - RNA, 477 nt, Artificial Sequence; identical to SEQ ID NO: 5388
  derived and/or modified sequence opt2 from Cytosine_Deaminase_fcy1__Saccharomyces_cerevisiae__AJW08024

SEQ ID NO: 5741 - RNA, 477 nt, Artificial Sequence; identical to SEQ ID NO: 5389
  derived and/or modified sequence opt3 from Cytosine_Deaminase_fcy1__Saccharomyces_cerevisiae__AJW08024

SEQ ID NO: 5742 - RNA, 477 nt, Artificial Sequence; identical to SEQ ID NO: 5390
  derived and/or modified sequence opt4 from Cytosine_Deaminase_fcy1__Saccharomyces_cerevisiae__AJW08024

SEQ ID NO: 5743 - RNA, 477 nt, Artificial Sequence; identical to SEQ ID NO: 5391
  derived and/or modified sequence opt5 from Cytosine_Deaminase_fcy1__Saccharomyces_cerevisiae__AJW08024

SEQ ID NO: 5744 - RNA, 477 nt, Artificial Sequence
  derived and/or modified sequence opt6 from Cytosine_Deaminase_fcy1__Saccharomyces_cerevisiae__AJW08024
augguaacaggaggaauggcaaguaaaugggaucaaaaaggaauggauauagcauaugaagaagcagcauuaggauauaaagaaggaggaguaccaauaggaggaugcuuaauaaauaauaaagauggaaguguauuaggaagaggacauaauaugagauuucaaaaaggaagugcaacacuacauggggaaauaaguacauuagaaaauuguggaagauuagaaggaaaaguauauaaagauacaacauuauauacaacauuaagcccaugugacauguguacaggagcaauaauaauguauggaauaccaagauguguaguaggagaaaauguaaauuuuaaaagcaaaggagaaaaauauuuacaaacaagaggacaugaaguaguaguaguagaugaugaaagauguaaaaaaauaaugaaacaauuuauagaugaaagaccacaagauugguuugaagauauaggagaauaa

SEQ ID NO: 5745 - protein, 158 aa, Artificial Sequence; identical to SEQ ID NO: 5385
  Cytosine_Deaminase_fcy1__Saccharomyces_cerevisiae__A0A0D4YAR2

SEQ ID NO: 5746 - RNA, 477 nt, Artificial Sequence
  Cytosine_Deaminase_fcy1__Saccharomyces_cerevisiae__AJW08463
auggugacagggggaauggcaagcaagugggaucagaaggguauggacauugccuaugaggaggcggccuuagguuacaaagagggugguguuccuauuggcggaugucuuaucaauaacaaggacggaaguguucucggucguggucacaacaugagauuucaaaagggauccgccacacuacauggugagaucuccacuuuggaaaacugugggagauuagagggcaaaguguacaaagauaccacuuuguauacgacgcugucuccaugcgacauguguacaggugccaucaucauguaugguauuccacgcuguguugucggugagaacguuaauuucaaaaguaagggcgagaaauauuuacaaacuagaggucacgagguuguuguuguugacgaugagagguguaaaaagaucaugaaacaauuuaucgaugaaagaccucaggauugguuugaagauauuggugaguag

SEQ ID NO: 5747 - RNA, 477 nt, Artificial Sequence; identical to SEQ ID NO: 5387
  derived and/or modified sequence opt1 from Cytosine_Deaminase_fcy1__Saccharomyces_cerevisiae__AJW08463

SEQ ID NO: 5748 - RNA, 477 nt, Artificial Sequence; identical to SEQ ID NO: 5388
  derived and/or modified sequence opt2 from Cytosine_Deaminase_fcy1__Saccharomyces_cerevisiae__AJW08463

SEQ ID NO: 5749 - RNA, 477 nt, Artificial Sequence; identical to SEQ ID NO: 5389
  derived and/or modified sequence opt3 from Cytosine_Deaminase_fcy1__Saccharomyces_cerevisiae__AJW08463

SEQ ID NO: 5750 - RNA, 477 nt, Artificial Sequence; identical to SEQ ID NO: 5390
  derived and/or modified sequence opt4 from Cytosine_Deaminase_fcy1__Saccharomyces_cerevisiae__AJW08463

SEQ ID NO: 5751 - RNA, 477 nt, Artificial Sequence; identical to SEQ ID NO: 5391
  derived and/or modified sequence opt5 from Cytosine_Deaminase_fcy1__Saccharomyces_cerevisiae__AJW08463

SEQ ID NO: 5752 - RNA, 477 nt, Artificial Sequence
  derived and/or modified sequence opt6 from Cytosine_Deaminase_fcy1__Saccharomyces_cerevisiae__AJW08463
augguaacaggaggaauggcaaguaaaugggaucaaaaaggaauggacauagcauaugaagaagcagcauuaggauauaaagaaggaggaguaccaauaggaggauguuuaauaaauaauaaagacggaaguguauuaggaagaggacauaauaugagauuucaaaaaggaagugcgacauuacauggagaaauaaguacauuagaaaacuguggaagacuagaaggaaaaguauauaaagauacaacacuauauacaacacuaaguccaugugauaugugcacaggagcaauaauaauguauggaauaccaagauguguaguaggagaaaauguaaauuuuaaaaguaaaggagaaaaauauuuacaaacaagaggacaugaaguaguaguaguagaugacgaaagauguaaaaaaauaaugaaacaauuuauagaugaaagaccgcaagauugguuugaagauauaggagaauaa

SEQ ID NO: 5753 - protein, 158 aa, Artificial Sequence; identical to SEQ ID NO: 5385
  Cytosine_Deaminase_fcy1__Saccharomyces_cerevisiae__A0A0D4YBY2

SEQ ID NO: 5754 - RNA, 477 nt, Artificial Sequence; identical to SEQ ID NO: 5386
  Cytosine_Deaminase_fcy1__Saccharomyces_cerevisiae__AJW08888

SEQ ID NO: 5755 - RNA, 477 nt, Artificial Sequence; identical to SEQ ID NO: 5387
  derived and/or modified sequence opt1 from Cytosine_Deaminase_fcy1__Saccharomyces_cerevisiae__AJW08888

SEQ ID NO: 5756 - RNA, 477 nt, Artificial Sequence; identical to SEQ ID NO: 5388
  derived and/or modified sequence opt2 from Cytosine_Deaminase_fcy1__Saccharomyces_cerevisiae__AJW08888

SEQ ID NO: 5757 - RNA, 477 nt, Artificial Sequence; identical to SEQ ID NO: 5389
  derived and/or modified sequence opt3 from Cytosine_Deaminase_fcy1__Saccharomyces_cerevisiae__AJW08888

SEQ ID NO: 5758 - RNA, 477 nt, Artificial Sequence; identical to SEQ ID NO: 5390
  derived and/or modified sequence opt4 from Cytosine_Deaminase_fcy1__Saccharomyces_cerevisiae__AJW08888

SEQ ID NO: 5759 - RNA, 477 nt, Artificial Sequence; identical to SEQ ID NO: 5391
  derived and/or modified sequence opt5 from Cytosine_Deaminase_fcy1__Saccharomyces_cerevisiae__AJW08888

SEQ ID NO: 5760 - RNA, 477 nt, Artificial Sequence
  derived and/or modified sequence opt6 from Cytosine_Deaminase_fcy1__Saccharomyces_cerevisiae__AJW08888
augguaacaggaggaauggcaaguaaaugggaucaaaaaggaauggauauagcauaugaagaagcagcauuaggauauaaagaaggaggaguaccaauaggaggaugucuaauaaauaauaaagauggaaguguauuaggaagaggacauaauaugagauuucaaaaaggaagcgcaacauuacauggagaaauaaguacauuagaaaauuguggaagauuagaaggaaaaguauauaaagauacgacacuauauacaacauuaaguccaugugauauguguacaggagcaauaauaauguauggaauaccaagauguguaguaggagaaaauguaaauuuuaaaaguaaaggagaaaaauaucuacaaacaagaggacaugaaguaguaguaguagaugaugaaagauguaaaaaaauaaugaaacaauuuauagaugaaagaccacaagauugguuugaagauauaggagaauag

SEQ ID NO: 5761 - protein, 158 aa, Artificial Sequence; identical to SEQ ID NO: 5385
  Cytosine_Deaminase_fcy1__Saccharomyces_cerevisiae__A0A0D4YCB3

SEQ ID NO: 5762 - RNA, 477 nt, Artificial Sequence; identical to SEQ ID NO: 5386
  Cytosine_Deaminase_fcy1__Saccharomyces_cerevisiae__AJW09327

SEQ ID NO: 5763 - RNA, 477 nt, Artificial Sequence; identical to SEQ ID NO: 5387
  derived and/or modified sequence opt1 from Cytosine_Deaminase_fcy1__Saccharomyces_cerevisiae__AJW09327

SEQ ID NO: 5764 - RNA, 477 nt, Artificial Sequence; identical to SEQ ID NO: 5388
  derived and/or modified sequence opt2 from Cytosine_Deaminase_fcy1__Saccharomyces_cerevisiae__AJW09327

SEQ ID NO: 5765 - RNA, 477 nt, Artificial Sequence; identical to SEQ ID NO: 5389
  derived and/or modified sequence opt3 from Cytosine_Deaminase_fcy1__Saccharomyces_cerevisiae__AJW09327

SEQ ID NO: 5766 - RNA, 477 nt, Artificial Sequence; identical to SEQ ID NO: 5390
  derived and/or modified sequence opt4 from Cytosine_Deaminase_fcy1__Saccharomyces_cerevisiae__AJW09327

SEQ ID NO: 5767 - RNA, 477 nt, Artificial Sequence; identical to SEQ ID NO: 5391
  derived and/or modified sequence opt5 from Cytosine_Deaminase_fcy1__Saccharomyces_cerevisiae__AJW09327

SEQ ID NO: 5768 - RNA, 477 nt, Artificial Sequence
  derived and/or modified sequence opt6 from Cytosine_Deaminase_fcy1__Saccharomyces_cerevisiae__AJW09327
augguaacaggaggaauggcaagcaaaugggaucaaaaaggaauggacauagcauaugaagaagcagcauuaggauauaaagaaggaggaguaccaauaggaggaugcuuaauaaauaauaaagacggaaguguauuaggaagaggacacaauaugagauuucaaaaaggaagugcaacauuacacggagaaauaaguacauuagaaaacuguggaagacuagaaggaaaaguauauaaagauacaacauuauauacaacacuaaguccaugugacaugugcacaggagcaauaauaauguauggaauaccaagauguguaguaggggaaaauguaaauuuuaaaagcaaaggagaaaaauauuuacaaacaagaggacaugaaguaguaguaguagaugacgaaagauguaaaaaaauaaugaaacaauuuauagaugaaagaccacaagauugguuugaagauauaggagaauaa

SEQ ID NO: 5769 - protein, 158 aa, Artificial Sequence; identical to SEQ ID NO: 5385
  Cytosine_Deaminase_fcy1__Saccharomyces_cerevisiae__A0A0D4YEC2

SEQ ID NO: 5770 - RNA, 477 nt, Artificial Sequence
  Cytosine_Deaminase_fcy1__Saccharomyces_cerevisiae__AJW09763
auggugacagggggaauggcaagcaagugggaucagaaggguauggacauugccuaugaggaggcggccuuagguuacaaagagggugguguuccaauuggcggaugucuuaucaauaacaaagacggaaguguucucggucguggucacaacaugagauuucaaaagggauccgccacacuacauggugagaucuccacuuuggaaaacugugggagauuagagggcaaaguguacaaagauaccacuuuguauacgacgcugucuccaugcgacauguguacaggugccaucaucauguaugguauuccacgcuguguugucggugagaacguuaauuucaaaaguaagggcgagaaauauuuacaaacuagaggucacgagguuguuguuguugacgaugagagguguaaaaagaucaugaaacaauuuaucgaugaaagaccucaggauugguuugaagauauuggugaguag

SEQ ID NO: 5771 - RNA, 477 nt, Artificial Sequence; identical to SEQ ID NO: 5387
  derived and/or modified sequence opt1 from Cytosine_Deaminase_fcy1__Saccharomyces_cerevisiae__AJW09763

SEQ ID NO: 5772 - RNA, 477 nt, Artificial Sequence; identical to SEQ ID NO: 5388
  derived and/or modified sequence opt2 from Cytosine_Deaminase_fcy1__Saccharomyces_cerevisiae__AJW09763

SEQ ID NO: 5773 - RNA, 477 nt, Artificial Sequence; identical to SEQ ID NO: 5389
  derived and/or modified sequence opt3 from Cytosine_Deaminase_fcy1__Saccharomyces_cerevisiae__AJW09763

SEQ ID NO: 5774 - RNA, 477 nt, Artificial Sequence; identical to SEQ ID NO: 5390
  derived and/or modified sequence opt4 from Cytosine_Deaminase_fcy1__Saccharomyces_cerevisiae__AJW09763

SEQ ID NO: 5775 - RNA, 477 nt, Artificial Sequence; identical to SEQ ID NO: 5391
  derived and/or modified sequence opt5 from Cytosine_Deaminase_fcy1__Saccharomyces_cerevisiae__AJW09763

SEQ ID NO: 5776 - RNA, 477 nt, Artificial Sequence
  derived and/or modified sequence opt6 from Cytosine_Deaminase_fcy1__Saccharomyces_cerevisiae__AJW09763
augguaacaggaggaauggcaagcaaaugggaucaaaaaggaauggacauagcauaugaagaagcagcacuaggauauaaagaaggaggaguaccaauaggaggaugcuuaauaaauaacaaagacggaaguguacuaggaagaggacauaauaugagauuccaaaaaggaagugcaacacuacacggagaaauaagcacauuagaaaacuguggaagauuagaaggaaaaguauauaaagauacaacacuauauacaacacuaucaccaugugacaugugcacaggagcaauaauaauguauggaauaccaagauguguaguaggggaaaauguaaauuucaaaaguaaaggagaaaaauaucuacaaacaagaggacaugaaguaguaguaguagaugacgaaagauguaaaaaaauaaugaaacaauuuauagacgaaagaccacaagauugguuugaagauauaggagaauaa

SEQ ID NO: 5777 - protein, 158 aa, Artificial Sequence; identical to SEQ ID NO: 5385
  Cytosine_Deaminase_fcy1__Saccharomyces_cerevisiae__A0A0D4YF30

SEQ ID NO: 5778 - RNA, 477 nt, Artificial Sequence; identical to SEQ ID NO: 5386
  Cytosine_Deaminase_fcy1__Saccharomyces_cerevisiae__AJW10199

SEQ ID NO: 5779 - RNA, 477 nt, Artificial Sequence; identical to SEQ ID NO: 5387
  derived and/or modified sequence opt1 from Cytosine_Deaminase_fcy1__Saccharomyces_cerevisiae__AJW10199

SEQ ID NO: 5780 - RNA, 477 nt, Artificial Sequence; identical to SEQ ID NO: 5388
  derived and/or modified sequence opt2 from Cytosine_Deaminase_fcy1__Saccharomyces_cerevisiae__AJW10199

SEQ ID NO: 5781 - RNA, 477 nt, Artificial Sequence; identical to SEQ ID NO: 5389
  derived and/or modified sequence opt3 from Cytosine_Deaminase_fcy1__Saccharomyces_cerevisiae__AJW10199

SEQ ID NO: 5782 - RNA, 477 nt, Artificial Sequence; identical to SEQ ID NO: 5390
  derived and/or modified sequence opt4 from Cytosine_Deaminase_fcy1__Saccharomyces_cerevisiae__AJW10199

SEQ ID NO: 5783 - RNA, 477 nt, Artificial Sequence; identical to SEQ ID NO: 5391
  derived and/or modified sequence opt5 from Cytosine_Deaminase_fcy1__Saccharomyces_cerevisiae__AJW10199

SEQ ID NO: 5784 - RNA, 477 nt, Artificial Sequence
  derived and/or modified sequence opt6 from Cytosine_Deaminase_fcy1__Saccharomyces_cerevisiae__AJW10199
augguaacaggaggaauggcaaguaaaugggaucaaaaaggaauggacauagcauaugaagaagcagcacuaggauauaaagaaggaggaguaccaauaggaggaugcuuaauaaauaauaaagacggaaguguauuaggaagaggacauaauaugagauuucaaaaaggaagugcaacauuacacggagaaauaaguacauuagaaaacuguggaagacuagaaggaaaaguauauaaagauacaacacuauauacaacauuaaguccaugcgacaugugcacaggagcaauaauaauguauggaauaccaagauguguaguaggagaaaauguaaauuuuaaaaguaaaggagaaaaauauuuacaaacaagaggacaugaaguaguaguaguagaugacgaaagauguaaaaaaauaaugaaacaauuuauagaugaaagaccacaagauugguuugaagauauaggagaauaa

SEQ ID NO: 5785 - protein, 158 aa, Artificial Sequence; identical to SEQ ID NO: 5385
  Cytosine_Deaminase_fcy1__Saccharomyces_cerevisiae__A0A0D4YGU2

SEQ ID NO: 5786 - RNA, 477 nt, Artificial Sequence; identical to SEQ ID NO: 5386
  Cytosine_Deaminase_fcy1__Saccharomyces_cerevisiae__AJW10633

SEQ ID NO: 5787 - RNA, 477 nt, Artificial Sequence; identical to SEQ ID NO: 5387
  derived and/or modified sequence opt1 from Cytosine_Deaminase_fcy1__Saccharomyces_cerevisiae__AJW10633

SEQ ID NO: 5788 - RNA, 477 nt, Artificial Sequence; identical to SEQ ID NO: 5388
  derived and/or modified sequence opt2 from Cytosine_Deaminase_fcy1__Saccharomyces_cerevisiae__AJW10633

SEQ ID NO: 5789 - RNA, 477 nt, Artificial Sequence; identical to SEQ ID NO: 5389
  derived and/or modified sequence opt3 from Cytosine_Deaminase_fcy1__Saccharomyces_cerevisiae__AJW10633

SEQ ID NO: 5790 - RNA, 477 nt, Artificial Sequence; identical to SEQ ID NO: 5390
  derived and/or modified sequence opt4 from Cytosine_Deaminase_fcy1__Saccharomyces_cerevisiae__AJW10633

SEQ ID NO: 5791 - RNA, 477 nt, Artificial Sequence; identical to SEQ ID NO: 5391
  derived and/or modified sequence opt5 from Cytosine_Deaminase_fcy1__Saccharomyces_cerevisiae__AJW10633

SEQ ID NO: 5792 - RNA, 477 nt, Artificial Sequence
  derived and/or modified sequence opt6 from Cytosine_Deaminase_fcy1__Saccharomyces_cerevisiae__AJW10633
augguaacaggaggaauggcaaguaaaugggaucaaaaaggaauggacauagcauaugaagaagcagcauuaggauauaaagaaggaggaguaccaauaggaggaugcuuaauaaauaauaaagacggaaguguauuaggaagaggacauaauaugagauuucaaaaaggaagugcaacauuacacggagaaauaaguacauuagaaaacuguggaagacuagaaggaaaaguauauaaagauacaacauuauacacaacauuaaguccaugugacaugugcacgggagcaauaauaauguauggaauaccaagauguguaguaggagaaaauguaaauuuuaaaaguaaaggagaaaaauauuuacaaacaagaggacaugaaguaguaguaguagaugaugaaagauguaaaaaaauaaugaaacaauuuauagaugaaagaccgcaagauugguuugaagauauaggagaauaa

SEQ ID NO: 5793 - protein, 158 aa, Artificial Sequence; identical to SEQ ID NO: 5385
  Cytosine_Deaminase_fcy1__Saccharomyces_cerevisiae__A0A0D4YHN3

SEQ ID NO: 5794 - RNA, 477 nt, Artificial Sequence; identical to SEQ ID NO: 5386
  Cytosine_Deaminase_fcy1__Saccharomyces_cerevisiae__AJW10903

SEQ ID NO: 5795 - RNA, 477 nt, Artificial Sequence; identical to SEQ ID NO: 5387
  derived and/or modified sequence opt1 from Cytosine_Deaminase_fcy1__Saccharomyces_cerevisiae__AJW10903

SEQ ID NO: 5796 - RNA, 477 nt, Artificial Sequence; identical to SEQ ID NO: 5388
  derived and/or modified sequence opt2 from Cytosine_Deaminase_fcy1__Saccharomyces_cerevisiae__AJW10903

SEQ ID NO: 5797 - RNA, 477 nt, Artificial Sequence; identical to SEQ ID NO: 5389
  derived and/or modified sequence opt3 from Cytosine_Deaminase_fcy1__Saccharomyces_cerevisiae__AJW10903

SEQ ID NO: 5798 - RNA, 477 nt, Artificial Sequence; identical to SEQ ID NO: 5390
  derived and/or modified sequence opt4 from Cytosine_Deaminase_fcy1__Saccharomyces_cerevisiae__AJW10903

SEQ ID NO: 5799 - RNA, 477 nt, Artificial Sequence; identical to SEQ ID NO: 5391
  derived and/or modified sequence opt5 from Cytosine_Deaminase_fcy1__Saccharomyces_cerevisiae__AJW10903

SEQ ID NO: 5800 - RNA, 477 nt, Artificial Sequence
  derived and/or modified sequence opt6 from Cytosine_Deaminase_fcy1__Saccharomyces_cerevisiae__AJW10903
augguaacaggaggaauggcaaguaaaugggaucaaaaaggaauggacauagcauaugaagaagcagcauuaggauauaaagaaggaggaguaccaauaggaggaugucuaauaaauaauaaagauggaaguguauuaggaagaggacauaauaugagauuucaaaaaggaagugcaacauuacauggagaaauaaguacauuagaaaauuguggaagauuagaaggaaaaguauauaaagauacaacacuauauacaacauuaaguccaugugauauguguacaggagcaauaauaauguauggaauaccaagauguguaguaggagaaaauguaaauuuuaaaaguaaaggagaaaaauauuuacaaacaagaggacaugaaguaguaguaguagaugaugaaagauguaaaaaaauaaugaaacaauuuauagaugaaaggccacaagauugguuugaagauauaggagaauaa

SEQ ID NO: 5801 - protein, 158 aa, Artificial Sequence; identical to SEQ ID NO: 5385
  Cytosine_Deaminase_fcy1__Saccharomyces_cerevisiae__A0A0D4YIU4

SEQ ID NO: 5802 - RNA, 477 nt, Artificial Sequence; identical to SEQ ID NO: 5386
  Cytosine_Deaminase_fcy1__Saccharomyces_cerevisiae__AJW11343

SEQ ID NO: 5803 - RNA, 477 nt, Artificial Sequence; identical to SEQ ID NO: 5387
  derived and/or modified sequence opt1 from Cytosine_Deaminase_fcy1__Saccharomyces_cerevisiae__AJW11343

SEQ ID NO: 5804 - RNA, 477 nt, Artificial Sequence; identical to SEQ ID NO: 5388
  derived and/or modified sequence opt2 from Cytosine_Deaminase_fcy1__Saccharomyces_cerevisiae__AJW11343

SEQ ID NO: 5805 - RNA, 477 nt, Artificial Sequence; identical to SEQ ID NO: 5389
  derived and/or modified sequence opt3 from Cytosine_Deaminase_fcy1__Saccharomyces_cerevisiae__AJW11343

SEQ ID NO: 5806 - RNA, 477 nt, Artificial Sequence; identical to SEQ ID NO: 5390
  derived and/or modified sequence opt4 from Cytosine_Deaminase_fcy1__Saccharomyces_cerevisiae__AJW11343

SEQ ID NO: 5807 - RNA, 477 nt, Artificial Sequence; identical to SEQ ID NO: 5391
  derived and/or modified sequence opt5 from Cytosine_Deaminase_fcy1__Saccharomyces_cerevisiae__AJW11343

SEQ ID NO: 5808 - RNA, 477 nt, Artificial Sequence
  derived and/or modified sequence opt6 from Cytosine_Deaminase_fcy1__Saccharomyces_cerevisiae__AJW11343
augguaacaggaggaauggcaaguaaaugggaucaaaaaggaauggacauagcauaugaagaagcagcauuaggauauaaagaaggaggaguaccaauaggaggauguuuaauaaauaauaaagacggaaguguauuaggaagaggacauaauaugagauuucaaaaaggaagugcaacauuacacggagaaauaaguacauuagaaaauuguggaagauuagaaggaaaaguauacaaagauacaacauuauauacaacauuaaguccaugugauauguguacaggagcaauaauaauguauggaauaccaagauguguaguaggagaaaauguaaauuuuaaaaguaaaggagaaaaauauuuacaaacgagaggacaugaaguaguaguaguagaugaugaaagauguaaaaaaauaaugaaacaauuuauagaugaaagaccacaagauugguuugaagauauaggagaauaa

SEQ ID NO: 5809 - protein, 158 aa, Artificial Sequence; identical to SEQ ID NO: 5385
  Cytosine_Deaminase_fcy1__Saccharomyces_cerevisiae__A0A0D4YJ74

SEQ ID NO: 5810 - RNA, 477 nt, Artificial Sequence; identical to SEQ ID NO: 5386
  Cytosine_Deaminase_fcy1__Saccharomyces_cerevisiae__AJW11786

SEQ ID NO: 5811 - RNA, 477 nt, Artificial Sequence; identical to SEQ ID NO: 5387
  derived and/or modified sequence opt1 from Cytosine_Deaminase_fcy1__Saccharomyces_cerevisiae__AJW11786

SEQ ID NO: 5812 - RNA, 477 nt, Artificial Sequence; identical to SEQ ID NO: 5388
  derived and/or modified sequence opt2 from Cytosine_Deaminase_fcy1__Saccharomyces_cerevisiae__AJW11786

SEQ ID NO: 5813 - RNA, 477 nt, Artificial Sequence; identical to SEQ ID NO: 5389
  derived and/or modified sequence opt3 from Cytosine_Deaminase_fcy1__Saccharomyces_cerevisiae__AJW11786

SEQ ID NO: 5814 - RNA, 477 nt, Artificial Sequence; identical to SEQ ID NO: 5390
  derived and/or modified sequence opt4 from Cytosine_Deaminase_fcy1__Saccharomyces_cerevisiae__AJW11786

SEQ ID NO: 5815 - RNA, 477 nt, Artificial Sequence; identical to SEQ ID NO: 5391
  derived and/or modified sequence opt5 from Cytosine_Deaminase_fcy1__Saccharomyces_cerevisiae__AJW11786

SEQ ID NO: 5816 - RNA, 477 nt, Artificial Sequence
  derived and/or modified sequence opt6 from Cytosine_Deaminase_fcy1__Saccharomyces_cerevisiae__AJW11786
augguaacaggaggaauggcaaguaaaugggaucaaaaaggaauggauauagcauaugaagaagcagcauuaggauauaaagaaggaggaguaccaauaggaggaugcuuaauaaauaauaaagacggaaguguauuaggaagaggacauaauaugagauuucaaaaaggaagugcaacauuacacggagaaauaaguacauuagaaaacuguggaagacuagaaggaaaaguauauaaagauacaacauuauauacaacauuaaguccaugugacauguguacaggagcaauaauaauguauggaauaccaagauguguaguaggagaaaauguaaauuuuaaaagcaaaggagaaaaauauuuacaaacaagaggacaugaaguaguaguaguagaugacgaaagauguaaaaaaauaaugaaacaauuuauagaugaaagaccacaagauugguuugaagauauaggagaauaa

SEQ ID NO: 5817 - protein, 158 aa, Artificial Sequence; identical to SEQ ID NO: 5385
  Cytosine_Deaminase_fcy1__Saccharomyces_cerevisiae__A0A0D4YKC5

SEQ ID NO: 5818 - RNA, 477 nt, Artificial Sequence; identical to SEQ ID NO: 5386
  Cytosine_Deaminase_fcy1__Saccharomyces_cerevisiae__AJW12225

SEQ ID NO: 5819 - RNA, 477 nt, Artificial Sequence; identical to SEQ ID NO: 5387
  derived and/or modified sequence opt1 from Cytosine_Deaminase_fcy1__Saccharomyces_cerevisiae__AJW12225

SEQ ID NO: 5820 - RNA, 477 nt, Artificial Sequence; identical to SEQ ID NO: 5388
  derived and/or modified sequence opt2 from Cytosine_Deaminase_fcy1__Saccharomyces_cerevisiae__AJW12225

SEQ ID NO: 5821 - RNA, 477 nt, Artificial Sequence; identical to SEQ ID NO: 5389
  derived and/or modified sequence opt3 from Cytosine_Deaminase_fcy1__Saccharomyces_cerevisiae__AJW12225

SEQ ID NO: 5822 - RNA, 477 nt, Artificial Sequence; identical to SEQ ID NO: 5390
  derived and/or modified sequence opt4 from Cytosine_Deaminase_fcy1__Saccharomyces_cerevisiae__AJW12225

SEQ ID NO: 5823 - RNA, 477 nt, Artificial Sequence; identical to SEQ ID NO: 5391
  derived and/or modified sequence opt5 from Cytosine_Deaminase_fcy1__Saccharomyces_cerevisiae__AJW12225

SEQ ID NO: 5824 - RNA, 477 nt, Artificial Sequence
  derived and/or modified sequence opt6 from Cytosine_Deaminase_fcy1__Saccharomyces_cerevisiae__AJW12225
augguaacaggaggaauggcaaguaaaugggaucaaaaaggaauggauauagcauaugaagaagcagcauuaggauauaaagaaggaggaguaccaauaggaggauguuuaauaaauaauaaagauggaaguguauuaggaagaggacauaauaugagauuucaaaaaggaagugcgacauuacauggagaaauaaguacauuagaaaauuguggaagauuagaaggaaaaguauauaaagauacaacauuauauacaacauuaaguccaugugacauguguacaggagcaauaauaauguauggaauaccaagauguguaguaggagaaaauguaaauuuuaaaaguaaaggagaaaaauauuuacaaacaagaggacaugaaguaguaguaguagaugaugaaagauguaaaaaaauaaugaaacaauuuauagaugaaagaccacaagauugguuugaggauauaggagaauag

SEQ ID NO: 5825 - protein, 158 aa, Artificial Sequence; identical to SEQ ID NO: 5385
  Cytosine_Deaminase_fcy1__Saccharomyces_cerevisiae__A0A0D4YMN8

SEQ ID NO: 5826 - RNA, 477 nt, Artificial Sequence; identical to SEQ ID NO: 5386
  Cytosine_Deaminase_fcy1__Saccharomyces_cerevisiae__AJW12668

SEQ ID NO: 5827 - RNA, 477 nt, Artificial Sequence; identical to SEQ ID NO: 5387
  derived and/or modified sequence opt1 from Cytosine_Deaminase_fcy1__Saccharomyces_cerevisiae__AJW12668

SEQ ID NO: 5828 - RNA, 477 nt, Artificial Sequence; identical to SEQ ID NO: 5388
  derived and/or modified sequence opt2 from Cytosine_Deaminase_fcy1__Saccharomyces_cerevisiae__AJW12668

SEQ ID NO: 5829 - RNA, 477 nt, Artificial Sequence; identical to SEQ ID NO: 5389
  derived and/or modified sequence opt3 from Cytosine_Deaminase_fcy1__Saccharomyces_cerevisiae__AJW12668

SEQ ID NO: 5830 - RNA, 477 nt, Artificial Sequence; identical to SEQ ID NO: 5390
  derived and/or modified sequence opt4 from Cytosine_Deaminase_fcy1__Saccharomyces_cerevisiae__AJW12668

SEQ ID NO: 5831 - RNA, 477 nt, Artificial Sequence; identical to SEQ ID NO: 5391
  derived and/or modified sequence opt5 from Cytosine_Deaminase_fcy1__Saccharomyces_cerevisiae__AJW12668

SEQ ID NO: 5832 - RNA, 477 nt, Artificial Sequence
  derived and/or modified sequence opt6 from Cytosine_Deaminase_fcy1__Saccharomyces_cerevisiae__AJW12668
augguaacaggaggaauggcaaguaaaugggaucaaaaaggaauggacauagcauaugaagaagcagcacuaggauauaaagaaggaggaguaccaauaggaggaugccuaauaaauaauaaagacggaaguguauuaggaagaggacauaauaugagauuucaaaaaggaagugcaacauuacauggagaaauaaguacauuagaaaacuguggaagacuagaaggaaaaguauauaaagauacaacacuauauacaacauuaaguccaugugacaugugcacaggagcaauaauaauguacggaauaccaagauguguaguaggagaaaauguaaauuuuaaaaguaaaggagaaaaauauuuacaaacaagaggacaugaagugguaguaguagaugacgaaagauguaaaaaaauaaugaaacaauuuauagaugaaagaccacaagauugguuugaagauauaggagaauaa

SEQ ID NO: 5833 - protein, 158 aa, Artificial Sequence; identical to SEQ ID NO: 5385
  Cytosine_Deaminase_fcy1__Saccharomyces_cerevisiae__A0A0D4YMV6

SEQ ID NO: 5834 - RNA, 477 nt, Artificial Sequence; identical to SEQ ID NO: 5386
  Cytosine_Deaminase_fcy1__Saccharomyces_cerevisiae__AJW13105

SEQ ID NO: 5835 - RNA, 477 nt, Artificial Sequence; identical to SEQ ID NO: 5387
  derived and/or modified sequence opt1 from Cytosine_Deaminase_fcy1__Saccharomyces_cerevisiae__AJW13105

SEQ ID NO: 5836 - RNA, 477 nt, Artificial Sequence; identical to SEQ ID NO: 5388
  derived and/or modified sequence opt2 from Cytosine_Deaminase_fcy1__Saccharomyces_cerevisiae__AJW13105

SEQ ID NO: 5837 - RNA, 477 nt, Artificial Sequence; identical to SEQ ID NO: 5389
  derived and/or modified sequence opt3 from Cytosine_Deaminase_fcy1__Saccharomyces_cerevisiae__AJW13105

SEQ ID NO: 5838 - RNA, 477 nt, Artificial Sequence; identical to SEQ ID NO: 5390
  derived and/or modified sequence opt4 from Cytosine_Deaminase_fcy1__Saccharomyces_cerevisiae__AJW13105

SEQ ID NO: 5839 - RNA, 477 nt, Artificial Sequence; identical to SEQ ID NO: 5391
  derived and/or modified sequence opt5 from Cytosine_Deaminase_fcy1__Saccharomyces_cerevisiae__AJW13105

SEQ ID NO: 5840 - RNA, 477 nt, Artificial Sequence
  derived and/or modified sequence opt6 from Cytosine_Deaminase_fcy1__Saccharomyces_cerevisiae__AJW13105
augguaacaggaggaauggcaagcaaaugggaucaaaaaggaauggacauagcauaugaagaagcagcacuaggauauaaagaaggaggaguaccaauaggaggaugcuuaauaaauaauaaagacggaaguguauuaggaagaggacauaauaugagauuucaaaaaggaagugcaacauuacacggagaaauaagcacauuagaaaacuguggaagauuagaaggaaaaguauauaaagauacaacacuauauacaacauuaaguccaugugacaugugcacaggagcaauaauaauguauggaauaccaagauguguaguaggagaaaauguaaauuuuaaaaguaaaggagaaaaauauuuacaaacaagaggacaugaaguaguaguaguagaugacgaaagauguaaaaaaauaaugaaacaauuuauagaugaaagaccacaagauugguuugaagauauaggagaauaa

SEQ ID NO: 5841 - protein, 158 aa, Artificial Sequence; identical to SEQ ID NO: 5385
  Cytosine_Deaminase_fcy1__Saccharomyces_cerevisiae__A0A0D4YPP6

SEQ ID NO: 5842 - RNA, 477 nt, Artificial Sequence; identical to SEQ ID NO: 5386
  Cytosine_Deaminase_fcy1__Saccharomyces_cerevisiae__AJW13529

SEQ ID NO: 5843 - RNA, 477 nt, Artificial Sequence; identical to SEQ ID NO: 5387
  derived and/or modified sequence opt1 from Cytosine_Deaminase_fcy1__Saccharomyces_cerevisiae__AJW13529

SEQ ID NO: 5844 - RNA, 477 nt, Artificial Sequence; identical to SEQ ID NO: 5388
  derived and/or modified sequence opt2 from Cytosine_Deaminase_fcy1__Saccharomyces_cerevisiae__AJW13529

SEQ ID NO: 5845 - RNA, 477 nt, Artificial Sequence; identical to SEQ ID NO: 5389
  derived and/or modified sequence opt3 from Cytosine_Deaminase_fcy1__Saccharomyces_cerevisiae__AJW13529

SEQ ID NO: 5846 - RNA, 477 nt, Artificial Sequence; identical to SEQ ID NO: 5390
  derived and/or modified sequence opt4 from Cytosine_Deaminase_fcy1__Saccharomyces_cerevisiae__AJW13529

SEQ ID NO: 5847 - RNA, 477 nt, Artificial Sequence; identical to SEQ ID NO: 5391
  derived and/or modified sequence opt5 from Cytosine_Deaminase_fcy1__Saccharomyces_cerevisiae__AJW13529

SEQ ID NO: 5848 - RNA, 477 nt, Artificial Sequence
  derived and/or modified sequence opt6 from Cytosine_Deaminase_fcy1__Saccharomyces_cerevisiae__AJW13529
augguaacaggagggauggcaaguaaaugggaucaaaaaggaauggacauagcauaugaagaagcagcauuaggauauaaagaaggaggaguaccaauaggaggaugcuuaauaaauaauaaagacggaaguguauuaggaagaggacauaauaugagauuucaaaaaggaagugcaacauuacacggagaaauaaguacauuagaaaacuguggaagguuagaaggaaaaguauauaaagauacaacauuauauacaacauuaaguccaugugacauguguacaggagcaauaauaauguauggaauaccaagauguguaguaggagaaaauguaaauuuuaaaaguaaaggagaaaaauauuuacaaacaagaggacaugaaguaguaguaguagaugacgaaagauguaaaaaaauaaugaaacaauuuauagaugaaagaccacaagauugguuugaagauauaggagaauaa

SEQ ID NO: 5849 - protein, 158 aa, Artificial Sequence; identical to SEQ ID NO: 5385
  Cytosine_Deaminase_fcy1__Saccharomyces_cerevisiae__A0A0D4YRD4

SEQ ID NO: 5850 - RNA, 477 nt, Artificial Sequence; identical to SEQ ID NO: 5386
  Cytosine_Deaminase_fcy1__Saccharomyces_cerevisiae__AJW13968

SEQ ID NO: 5851 - RNA, 477 nt, Artificial Sequence; identical to SEQ ID NO: 5387
  derived and/or modified sequence opt1 from Cytosine_Deaminase_fcy1__Saccharomyces_cerevisiae__AJW13968

SEQ ID NO: 5852 - RNA, 477 nt, Artificial Sequence; identical to SEQ ID NO: 5388
  derived and/or modified sequence opt2 from Cytosine_Deaminase_fcy1__Saccharomyces_cerevisiae__AJW13968

SEQ ID NO: 5853 - RNA, 477 nt, Artificial Sequence; identical to SEQ ID NO: 5389
  derived and/or modified sequence opt3 from Cytosine_Deaminase_fcy1__Saccharomyces_cerevisiae__AJW13968

SEQ ID NO: 5854 - RNA, 477 nt, Artificial Sequence; identical to SEQ ID NO: 5390
  derived and/or modified sequence opt4 from Cytosine_Deaminase_fcy1__Saccharomyces_cerevisiae__AJW13968

SEQ ID NO: 5855 - RNA, 477 nt, Artificial Sequence; identical to SEQ ID NO: 5391
  derived and/or modified sequence opt5 from Cytosine_Deaminase_fcy1__Saccharomyces_cerevisiae__AJW13968

SEQ ID NO: 5856 - RNA, 477 nt, Artificial Sequence
  derived and/or modified sequence opt6 from Cytosine_Deaminase_fcy1__Saccharomyces_cerevisiae__AJW13968
augguaacaggaggaauggcaaguaaaugggaucaaaaaggaauggacauagcauaugaagaagcagcacuaggauauaaagaaggaggaguaccaauaggaggaugcuuaauaaauaauaaagauggaagcguauuaggaagaggacauaauaugagauuucaaaaaggaagugcaacauuacacggagaaauaaguacauuagaaaacuguggaagauuagaaggaaaaguauauaaagauacaacauuauauacaacauuaaguccaugugacauguguacaggagcgauaauaauguauggaauaccaagauguguaguaggagaaaauguaaauuuuaaaaguaaaggagaaaaauauuuacaaacaagaggacaugaaguaguaguaguagaugacgaaagauguaaaaaaauaaugaaacaauuuauagaugaaagaccacaagauugguuugaagauauaggagaauaa

SEQ ID NO: 5857 - protein, 158 aa, Artificial Sequence; identical to SEQ ID NO: 5385
  Cytosine_Deaminase_fcy1__Saccharomyces_cerevisiae__A0A0D4YS13

SEQ ID NO: 5858 - RNA, 477 nt, Artificial Sequence; identical to SEQ ID NO: 5746
  Cytosine_Deaminase_fcy1__Saccharomyces_cerevisiae__AJW14407

SEQ ID NO: 5859 - RNA, 477 nt, Artificial Sequence; identical to SEQ ID NO: 5387
  derived and/or modified sequence opt1 from Cytosine_Deaminase_fcy1__Saccharomyces_cerevisiae__AJW14407

SEQ ID NO: 5860 - RNA, 477 nt, Artificial Sequence; identical to SEQ ID NO: 5388
  derived and/or modified sequence opt2 from Cytosine_Deaminase_fcy1__Saccharomyces_cerevisiae__AJW14407

SEQ ID NO: 5861 - RNA, 477 nt, Artificial Sequence; identical to SEQ ID NO: 5389
  derived and/or modified sequence opt3 from Cytosine_Deaminase_fcy1__Saccharomyces_cerevisiae__AJW14407

SEQ ID NO: 5862 - RNA, 477 nt, Artificial Sequence; identical to SEQ ID NO: 5390
  derived and/or modified sequence opt4 from Cytosine_Deaminase_fcy1__Saccharomyces_cerevisiae__AJW14407

SEQ ID NO: 5863 - RNA, 477 nt, Artificial Sequence; identical to SEQ ID NO: 5391
  derived and/or modified sequence opt5 from Cytosine_Deaminase_fcy1__Saccharomyces_cerevisiae__AJW14407

SEQ ID NO: 5864 - RNA, 477 nt, Artificial Sequence
  derived and/or modified sequence opt6 from Cytosine_Deaminase_fcy1__Saccharomyces_cerevisiae__AJW14407
augguaacaggaggaauggcaaguaaaugggaucaaaaaggaauggacauagcauaugaagaagcagcauuaggauauaaagaaggaggaguaccaauaggaggaugcuuaauaaauaauaaagacggaaguguauuaggaagaggacauaauaugagauuucaaaaaggaagugcaacauuacauggagaaauaaguacauuagaaaacuguggaagacuagaaggaaaaguauauaaagauacaacauuauauacaacacuaaguccaugugacaugugcacaggagcaauaauaauguauggaauaccaagauguguaguaggagaaaauguaaacuuuaaaaguaaaggagaaaaauauuuacaaacaaggggacaugaaguaguaguaguagaugacgaaagauguaaaaaaauaaugaaacaauuuauagaugaaagaccacaagauugguuugaagauauaggagaauaa

SEQ ID NO: 5865 - protein, 158 aa, Artificial Sequence; identical to SEQ ID NO: 5385
  Cytosine_Deaminase_fcy1__Saccharomyces_cerevisiae__A0A0D4YTJ7

SEQ ID NO: 5866 - RNA, 477 nt, Artificial Sequence; identical to SEQ ID NO: 5386
  Cytosine_Deaminase_fcy1__Saccharomyces_cerevisiae__AJW14829

SEQ ID NO: 5867 - RNA, 477 nt, Artificial Sequence; identical to SEQ ID NO: 5387
  derived and/or modified sequence opt1 from Cytosine_Deaminase_fcy1__Saccharomyces_cerevisiae__AJW14829

SEQ ID NO: 5868 - RNA, 477 nt, Artificial Sequence; identical to SEQ ID NO: 5388
  derived and/or modified sequence opt2 from Cytosine_Deaminase_fcy1__Saccharomyces_cerevisiae__AJW14829

SEQ ID NO: 5869 - RNA, 477 nt, Artificial Sequence; identical to SEQ ID NO: 5389
  derived and/or modified sequence opt3 from Cytosine_Deaminase_fcy1__Saccharomyces_cerevisiae__AJW14829

SEQ ID NO: 5870 - RNA, 477 nt, Artificial Sequence; identical to SEQ ID NO: 5390
  derived and/or modified sequence opt4 from Cytosine_Deaminase_fcy1__Saccharomyces_cerevisiae__AJW14829

SEQ ID NO: 5871 - RNA, 477 nt, Artificial Sequence; identical to SEQ ID NO: 5391
  derived and/or modified sequence opt5 from Cytosine_Deaminase_fcy1__Saccharomyces_cerevisiae__AJW14829

SEQ ID NO: 5872 - RNA, 477 nt, Artificial Sequence
  derived and/or modified sequence opt6 from Cytosine_Deaminase_fcy1__Saccharomyces_cerevisiae__AJW14829
augguaacaggaggaauggcaaguaaaugggaucaaaaaggaauggacauagcauaugaagaagcagcauuaggauauaaagaaggaggaguaccaauaggaggaugcuuaauaaauaauaaagacggaaguguauuaggaagaggacauaauaugagauuucaaaaaggaagugcaacauuacacggagaaauaaguacauuagaaaacuguggaagacuagaaggaaaaguauauaaagauacaacacuauauacaacguuaaguccaugugacaugugcacaggagcaauaauaauguauggaauaccaagauguguaguaggagaaaauguaaauuuuaaaaguaaaggagaaaaauauuuacaaacaagaggacaugaaguaguaguaguagaugacgaaagauguaaaaaaauaaugaaacaauuuauagaugaaagaccacaagauugguucgaagauauaggagaauaa

SEQ ID NO: 5873 - protein, 158 aa, Artificial Sequence; identical to SEQ ID NO: 5385
  Cytosine_Deaminase_fcy1__Saccharomyces_cerevisiae__A0A0D4YUX9

SEQ ID NO: 5874 - RNA, 477 nt, Artificial Sequence; identical to SEQ ID NO: 5386
  Cytosine_Deaminase_fcy1__Saccharomyces_cerevisiae__AJW15253

SEQ ID NO: 5875 - RNA, 477 nt, Artificial Sequence; identical to SEQ ID NO: 5387
  derived and/or modified sequence opt1 from Cytosine_Deaminase_fcy1__Saccharomyces_cerevisiae__AJW15253

SEQ ID NO: 5876 - RNA, 477 nt, Artificial Sequence; identical to SEQ ID NO: 5388
  derived and/or modified sequence opt2 from Cytosine_Deaminase_fcy1__Saccharomyces_cerevisiae__AJW15253

SEQ ID NO: 5877 - RNA, 477 nt, Artificial Sequence; identical to SEQ ID NO: 5389
  derived and/or modified sequence opt3 from Cytosine_Deaminase_fcy1__Saccharomyces_cerevisiae__AJW15253

SEQ ID NO: 5878 - RNA, 477 nt, Artificial Sequence; identical to SEQ ID NO: 5390
  derived and/or modified sequence opt4 from Cytosine_Deaminase_fcy1__Saccharomyces_cerevisiae__AJW15253

SEQ ID NO: 5879 - RNA, 477 nt, Artificial Sequence; identical to SEQ ID NO: 5391
  derived and/or modified sequence opt5 from Cytosine_Deaminase_fcy1__Saccharomyces_cerevisiae__AJW15253

SEQ ID NO: 5880 - RNA, 477 nt, Artificial Sequence
  derived and/or modified sequence opt6 from Cytosine_Deaminase_fcy1__Saccharomyces_cerevisiae__AJW15253
augguaacaggaggaauggcaaguaaaugggaucaaaaaggaauggacauagcauaugaagaagcagcacuaggauauaaagaaggaggaguaccaauaggaggauguuuaauaaauaauaaagacggaaguguauuaggaagaggacauaauaugagauuucaaaaaggaagugcaacauuacacggagaaauaaguacauuagaaaacuguggaagauuagaaggaaaaguauauaaagauacaacauuauauacaacauuaaguccaugugauauguguacaggagcaauaauaauguauggaauaccaagauguguaguaggagaaaauguaaauuuuaaaaguaaaggagaaaaauauuuacaaacaagaggacaugaaguaguaguaguagaugacgaaagauguaaaaaaauaaugaaacaauuuauagaugaaagaccacaagauugguuugaagauauaggagaauaa

SEQ ID NO: 5881 - protein, 158 aa, Artificial Sequence; identical to SEQ ID NO: 5385
  Cytosine_Deaminase_fcy1__Saccharomyces_cerevisiae__A0A0D4YV34

SEQ ID NO: 5882 - RNA, 477 nt, Artificial Sequence; identical to SEQ ID NO: 5386
  Cytosine_Deaminase_fcy1__Saccharomyces_cerevisiae__AJW15690

SEQ ID NO: 5883 - RNA, 477 nt, Artificial Sequence; identical to SEQ ID NO: 5387
  derived and/or modified sequence opt1 from Cytosine_Deaminase_fcy1__Saccharomyces_cerevisiae__AJW15690

SEQ ID NO: 5884 - RNA, 477 nt, Artificial Sequence; identical to SEQ ID NO: 5388
  derived and/or modified sequence opt2 from Cytosine_Deaminase_fcy1__Saccharomyces_cerevisiae__AJW15690

SEQ ID NO: 5885 - RNA, 477 nt, Artificial Sequence; identical to SEQ ID NO: 5389
  derived and/or modified sequence opt3 from Cytosine_Deaminase_fcy1__Saccharomyces_cerevisiae__AJW15690

SEQ ID NO: 5886 - RNA, 477 nt, Artificial Sequence; identical to SEQ ID NO: 5390
  derived and/or modified sequence opt4 from Cytosine_Deaminase_fcy1__Saccharomyces_cerevisiae__AJW15690

SEQ ID NO: 5887 - RNA, 477 nt, Artificial Sequence; identical to SEQ ID NO: 5391
  derived and/or modified sequence opt5 from Cytosine_Deaminase_fcy1__Saccharomyces_cerevisiae__AJW15690

SEQ ID NO: 5888 - RNA, 477 nt, Artificial Sequence
  derived and/or modified sequence opt6 from Cytosine_Deaminase_fcy1__Saccharomyces_cerevisiae__AJW15690
augguaacaggaggaauggcaaguaaaugggaucaaaaaggaauggauauagcauaugaagaagcagcauuaggauauaaagaaggaggaguaccaauaggaggauguuuaauaaauaauaaagauggaagcguauuaggaagagggcauaauaugagauuucaaaaaggaagugcaacacuacacggagaaauaaguacauuagaaaauuguggaagacuagaaggaaaaguauauaaagauacaacauuauauacgacauuaaguccaugugauauguguacaggagcaauaauaauguauggaauaccaagauguguaguaggagaaaauguaaauuuuaaaaguaaaggagaaaaauauuuacaaacaagaggacaugaaguaguaguaguagaugaugaaagauguaaaaaaauaaugaaacaauuuauagaugaaagaccacaagauugguuugaagauauaggagaauaa

SEQ ID NO: 5889 - protein, 158 aa, Artificial Sequence; identical to SEQ ID NO: 5385
  Cytosine_Deaminase_fcy1__Saccharomyces_cerevisiae__A0A0D4YXE1

SEQ ID NO: 5890 - RNA, 477 nt, Artificial Sequence; identical to SEQ ID NO: 5386
  Cytosine_Deaminase_fcy1__Saccharomyces_cerevisiae__AJW16133

SEQ ID NO: 5891 - RNA, 477 nt, Artificial Sequence; identical to SEQ ID NO: 5387
  derived and/or modified sequence opt1 from Cytosine_Deaminase_fcy1__Saccharomyces_cerevisiae__AJW16133

SEQ ID NO: 5892 - RNA, 477 nt, Artificial Sequence; identical to SEQ ID NO: 5388
  derived and/or modified sequence opt2 from Cytosine_Deaminase_fcy1__Saccharomyces_cerevisiae__AJW16133

SEQ ID NO: 5893 - RNA, 477 nt, Artificial Sequence; identical to SEQ ID NO: 5389
  derived and/or modified sequence opt3 from Cytosine_Deaminase_fcy1__Saccharomyces_cerevisiae__AJW16133

SEQ ID NO: 5894 - RNA, 477 nt, Artificial Sequence; identical to SEQ ID NO: 5390
  derived and/or modified sequence opt4 from Cytosine_Deaminase_fcy1__Saccharomyces_cerevisiae__AJW16133

SEQ ID NO: 5895 - RNA, 477 nt, Artificial Sequence; identical to SEQ ID NO: 5391
  derived and/or modified sequence opt5 from Cytosine_Deaminase_fcy1__Saccharomyces_cerevisiae__AJW16133

SEQ ID NO: 5896 - RNA, 477 nt, Artificial Sequence
  derived and/or modified sequence opt6 from Cytosine_Deaminase_fcy1__Saccharomyces_cerevisiae__AJW16133
augguaacaggaggaauggcaaguaaaugggaucaaaaaggaauggauauagcauaugaagaggcagcauuaggauauaaagaaggaggaguaccaauaggaggauguuuaauaaauaauaaagauggaaguguauuaggaagaggacauaauaugagauuucaaaaaggaagugcaacauuacauggagaaauaagcacguuagaaaauuguggaagauuagaaggaaaaguauauaaagauacaacauuauauacaacauuaaguccaugugauauguguacaggagcaauaauaauguauggaauaccaagauguguaguaggagaaaaugugaauuuuaaaaguaaaggagaaaaauauuuacaaacaagaggacaugaaguaguaguaguagaugaugaaagauguaaaaaaauaaugaaacaauuuauagaugaaagaccacaagauugguuugaagauauaggagaauaa

SEQ ID NO: 5897 - protein, 158 aa, Artificial Sequence; identical to SEQ ID NO: 5385
  Cytosine_Deaminase_fcy1__Saccharomyces_cerevisiae__A0A0D4YYM6

SEQ ID NO: 5898 - RNA, 477 nt, Artificial Sequence; identical to SEQ ID NO: 5386
  Cytosine_Deaminase_fcy1__Saccharomyces_cerevisiae__AJW16568

SEQ ID NO: 5899 - RNA, 477 nt, Artificial Sequence; identical to SEQ ID NO: 5387
  derived and/or modified sequence opt1 from Cytosine_Deaminase_fcy1__Saccharomyces_cerevisiae__AJW16568

SEQ ID NO: 5900 - RNA, 477 nt, Artificial Sequence; identical to SEQ ID NO: 5388
  derived and/or modified sequence opt2 from Cytosine_Deaminase_fcy1__Saccharomyces_cerevisiae__AJW16568

SEQ ID NO: 5901 - RNA, 477 nt, Artificial Sequence; identical to SEQ ID NO: 5389
  derived and/or modified sequence opt3 from Cytosine_Deaminase_fcy1__Saccharomyces_cerevisiae__AJW16568

SEQ ID NO: 5902 - RNA, 477 nt, Artificial Sequence; identical to SEQ ID NO: 5390
  derived and/or modified sequence opt4 from Cytosine_Deaminase_fcy1__Saccharomyces_cerevisiae__AJW16568

SEQ ID NO: 5903 - RNA, 477 nt, Artificial Sequence; identical to SEQ ID NO: 5391
  derived and/or modified sequence opt5 from Cytosine_Deaminase_fcy1__Saccharomyces_cerevisiae__AJW16568

SEQ ID NO: 5904 - RNA, 477 nt, Artificial Sequence
  derived and/or modified sequence opt6 from Cytosine_Deaminase_fcy1__Saccharomyces_cerevisiae__AJW16568
augguaacaggaggaauggcaaguaaaugggaucaaaaaggaauggacauagcauaugaagaagcagcauuaggauauaaagaaggaggaguaccaauaggaggaugccuaauaaauaauaaagacggaaguguauuaggaagaggacauaauaugagauuucaaaaaggaagcgcaacauuacacggagaaauaaguacauuagaaaacuguggaagacuagaaggaaaaguauauaaagauacaacauuauauacaacauuaaguccaugugacaugugcacaggagcaauaauaauguauggaauaccaagauguguaguaggagaaaauguaaauuucaaaagcaaaggagaaaaauauuuacaaacaagaggacaugaaguaguaguaguagaugacgaaagauguaaaaaaauaaugaaacaauuuauagaugaaagaccacaagauugguuugaagauauaggagaauaa

SEQ ID NO: 5905 - protein, 158 aa, Artificial Sequence; identical to SEQ ID NO: 5385
  Cytosine_Deaminase_fcy1__Saccharomyces_cerevisiae__A0A0D4YZB7

SEQ ID NO: 5906 - RNA, 477 nt, Artificial Sequence; identical to SEQ ID NO: 5386
  Cytosine_Deaminase_fcy1__Saccharomyces_cerevisiae__AJW17006

SEQ ID NO: 5907 - RNA, 477 nt, Artificial Sequence; identical to SEQ ID NO: 5387
  derived and/or modified sequence opt1 from Cytosine_Deaminase_fcy1__Saccharomyces_cerevisiae__AJW17006

SEQ ID NO: 5908 - RNA, 477 nt, Artificial Sequence; identical to SEQ ID NO: 5388
  derived and/or modified sequence opt2 from Cytosine_Deaminase_fcy1__Saccharomyces_cerevisiae__AJW17006

SEQ ID NO: 5909 - RNA, 477 nt, Artificial Sequence; identical to SEQ ID NO: 5389
  derived and/or modified sequence opt3 from Cytosine_Deaminase_fcy1__Saccharomyces_cerevisiae__AJW17006

SEQ ID NO: 5910 - RNA, 477 nt, Artificial Sequence; identical to SEQ ID NO: 5390
  derived and/or modified sequence opt4 from Cytosine_Deaminase_fcy1__Saccharomyces_cerevisiae__AJW17006

SEQ ID NO: 5911 - RNA, 477 nt, Artificial Sequence; identical to SEQ ID NO: 5391
  derived and/or modified sequence opt5 from Cytosine_Deaminase_fcy1__Saccharomyces_cerevisiae__AJW17006

SEQ ID NO: 5912 - RNA, 477 nt, Artificial Sequence
  derived and/or modified sequence opt6 from Cytosine_Deaminase_fcy1__Saccharomyces_cerevisiae__AJW17006
augguaacaggaggaauggcaaguaaaugggaucaaaaaggaauggauauagcauaugaagaagcagcauuaggauauaaagaaggaggaguaccaauaggaggauguuuaauaaauaauaaagauggaaguguauuaggaagaggacauaauaugagauuucaaaaaggaagugcaacguuacacggagaaauaaguacauuagaaaauuguggaagauuagaaggaaaaguauauaaagauacaacauuauauacaacauuaaguccaugugauauguguacaggagcaauaauaauguauggaauaccaagauguguagugggagaaaauguaaauuuuaaaaguaaaggagaaaaauaucuacaaacaagaggacaugaaguaguaguaguagaugaugaaagauguaaaaaaauaaugaaacaauuuauagaugaaagaccacaagauugguuugaagauauaggagaauaa

SEQ ID NO: 5913 - protein, 158 aa, Artificial Sequence; identical to SEQ ID NO: 5385
  Cytosine_Deaminase_fcy1__Saccharomyces_cerevisiae__A0A0D4Z060

SEQ ID NO: 5914 - RNA, 477 nt, Artificial Sequence; identical to SEQ ID NO: 5418
  Cytosine_Deaminase_fcy1__Saccharomyces_cerevisiae__AJW17430

SEQ ID NO: 5915 - RNA, 477 nt, Artificial Sequence; identical to SEQ ID NO: 5387
  derived and/or modified sequence opt1 from Cytosine_Deaminase_fcy1__Saccharomyces_cerevisiae__AJW17430

SEQ ID NO: 5916 - RNA, 477 nt, Artificial Sequence; identical to SEQ ID NO: 5388
  derived and/or modified sequence opt2 from Cytosine_Deaminase_fcy1__Saccharomyces_cerevisiae__AJW17430

SEQ ID NO: 5917 - RNA, 477 nt, Artificial Sequence; identical to SEQ ID NO: 5389
  derived and/or modified sequence opt3 from Cytosine_Deaminase_fcy1__Saccharomyces_cerevisiae__AJW17430

SEQ ID NO: 5918 - RNA, 477 nt, Artificial Sequence; identical to SEQ ID NO: 5390
  derived and/or modified sequence opt4 from Cytosine_Deaminase_fcy1__Saccharomyces_cerevisiae__AJW17430

SEQ ID NO: 5919 - RNA, 477 nt, Artificial Sequence; identical to SEQ ID NO: 5391
  derived and/or modified sequence opt5 from Cytosine_Deaminase_fcy1__Saccharomyces_cerevisiae__AJW17430

SEQ ID NO: 5920 - RNA, 477 nt, Artificial Sequence
  derived and/or modified sequence opt6 from Cytosine_Deaminase_fcy1__Saccharomyces_cerevisiae__AJW17430
augguaacaggaggaauggcaaguaaaugggaucaaaaaggaauggauauagcauaugaagaagcagcauuaggauauaaagaaggaggaguaccaauaggaggauguuuaauaaauaauaaagauggaaguguacuaggaagaggacauaauaugagauuucaaaaaggaagugcaacauuacauggagaaauaaguacauuagaaaauuguggaagauuagaaggaaaaguauauaaagauacaacauuauauacaacauuaaguccgugugauauguguacaggagcaauaauaauguauggaauaccaagauguguaguaggagaaaauguaaauuuuaaaaguaaaggagaaaaauauuuacaaacaagaggacaugaaguaguaguaguagaugaugaaagauguaaaaaaauaaugaaacaauuuauagaugaaagaccacaagauugguuugaagauauaggagaauaa

SEQ ID NO: 5921 - protein, 158 aa, Artificial Sequence; identical to SEQ ID NO: 5385
  Cytosine_Deaminase_fcy1__Saccharomyces_cerevisiae__A0A0D4Z1S2

SEQ ID NO: 5922 - RNA, 477 nt, Artificial Sequence; identical to SEQ ID NO: 5386
  Cytosine_Deaminase_fcy1__Saccharomyces_cerevisiae__AJW17876

SEQ ID NO: 5923 - RNA, 477 nt, Artificial Sequence; identical to SEQ ID NO: 5387
  derived and/or modified sequence opt1 from Cytosine_Deaminase_fcy1__Saccharomyces_cerevisiae__AJW17876

SEQ ID NO: 5924 - RNA, 477 nt, Artificial Sequence; identical to SEQ ID NO: 5388
  derived and/or modified sequence opt2 from Cytosine_Deaminase_fcy1__Saccharomyces_cerevisiae__AJW17876

SEQ ID NO: 5925 - RNA, 477 nt, Artificial Sequence; identical to SEQ ID NO: 5389
  derived and/or modified sequence opt3 from Cytosine_Deaminase_fcy1__Saccharomyces_cerevisiae__AJW17876

SEQ ID NO: 5926 - RNA, 477 nt, Artificial Sequence; identical to SEQ ID NO: 5390
  derived and/or modified sequence opt4 from Cytosine_Deaminase_fcy1__Saccharomyces_cerevisiae__AJW17876

SEQ ID NO: 5927 - RNA, 477 nt, Artificial Sequence; identical to SEQ ID NO: 5391
  derived and/or modified sequence opt5 from Cytosine_Deaminase_fcy1__Saccharomyces_cerevisiae__AJW17876

SEQ ID NO: 5928 - RNA, 477 nt, Artificial Sequence
  derived and/or modified sequence opt6 from Cytosine_Deaminase_fcy1__Saccharomyces_cerevisiae__AJW17876
augguaacaggaggaauggcaaguaaaugggaucaaaaaggaauggacauagcauaugaagaagcagcauuaggauauaaagaaggaggaguaccaauaggaggaugcuuaauaaauaauaaagacggaaguguauuaggaagaggacacaauaugagauuucaaaaaggaagcgcaacauuacacggagaaauaagcacacuagaaaauuguggaagguuagaaggaaaaguauauaaagauacaacauuauauacaacauuaaguccaugcgacaugugcacaggagcaauaauaauguauggaauaccaagauguguaguaggagaaaauguaaauuuuaaaaguaaaggagaaaaauaucuacaaacaagaggacaugaaguaguaguaguagacgacgaaagauguaaaaaaauaaugaaacaauuuauagaugaaagaccacaagauugguuugaagauauaggagaauaa

SEQ ID NO: 5929 - protein, 158 aa, Artificial Sequence; identical to SEQ ID NO: 5385
  Cytosine_Deaminase_fcy1__Saccharomyces_cerevisiae__A0A0D4Z2L6

SEQ ID NO: 5930 - RNA, 477 nt, Artificial Sequence; identical to SEQ ID NO: 5386
  Cytosine_Deaminase_fcy1__Saccharomyces_cerevisiae__AJW18315

SEQ ID NO: 5931 - RNA, 477 nt, Artificial Sequence; identical to SEQ ID NO: 5387
  derived and/or modified sequence opt1 from Cytosine_Deaminase_fcy1__Saccharomyces_cerevisiae__AJW18315

SEQ ID NO: 5932 - RNA, 477 nt, Artificial Sequence; identical to SEQ ID NO: 5388
  derived and/or modified sequence opt2 from Cytosine_Deaminase_fcy1__Saccharomyces_cerevisiae__AJW18315

SEQ ID NO: 5933 - RNA, 477 nt, Artificial Sequence; identical to SEQ ID NO: 5389
  derived and/or modified sequence opt3 from Cytosine_Deaminase_fcy1__Saccharomyces_cerevisiae__AJW18315

SEQ ID NO: 5934 - RNA, 477 nt, Artificial Sequence; identical to SEQ ID NO: 5390
  derived and/or modified sequence opt4 from Cytosine_Deaminase_fcy1__Saccharomyces_cerevisiae__AJW18315

SEQ ID NO: 5935 - RNA, 477 nt, Artificial Sequence; identical to SEQ ID NO: 5391
  derived and/or modified sequence opt5 from Cytosine_Deaminase_fcy1__Saccharomyces_cerevisiae__AJW18315

SEQ ID NO: 5936 - RNA, 477 nt, Artificial Sequence
  derived and/or modified sequence opt6 from Cytosine_Deaminase_fcy1__Saccharomyces_cerevisiae__AJW18315
augguaacaggaggaauggcaaguaaaugggaucaaaaaggaauggacauagcauaugaagaagcagcauuaggguauaaagaaggaggaguaccaauaggaggauguuuaauaaauaauaaagauggaaguguacuaggaagaggacauaauaugagauuucaaaaaggaagugcaacauuacacggagaaauaucaacauuagaaaauuguggaagauuagaaggaaaaguauauaaagauacaacauuauauacaacauuaaguccaugugauauguguacaggagcaauaauaauguauggaauaccaagauguguaguaggagaaaauguaaauuuuaaaaguaaaggagaaaaauauuuacaaacaagaggacaugaaguaguaguaguagaugacgaaagauguaaaaaaauaaugaaacaauuuauagaugaaagaccacaagauugguuugaagauauaggagaauaa

SEQ ID NO: 5937 - protein, 158 aa, Artificial Sequence; identical to SEQ ID NO: 5385
  Cytosine_Deaminase_fcy1__Saccharomyces_cerevisiae__A0A0D4Z4A1

SEQ ID NO: 5938 - RNA, 477 nt, Artificial Sequence; identical to SEQ ID NO: 5466
  Cytosine_Deaminase_fcy1__Saccharomyces_cerevisiae__AJW18752

SEQ ID NO: 5939 - RNA, 477 nt, Artificial Sequence; identical to SEQ ID NO: 5387
  derived and/or modified sequence opt1 from Cytosine_Deaminase_fcy1__Saccharomyces_cerevisiae__AJW18752

SEQ ID NO: 5940 - RNA, 477 nt, Artificial Sequence; identical to SEQ ID NO: 5388
  derived and/or modified sequence opt2 from Cytosine_Deaminase_fcy1__Saccharomyces_cerevisiae__AJW18752

SEQ ID NO: 5941 - RNA, 477 nt, Artificial Sequence; identical to SEQ ID NO: 5389
  derived and/or modified sequence opt3 from Cytosine_Deaminase_fcy1__Saccharomyces_cerevisiae__AJW18752

SEQ ID NO: 5942 - RNA, 477 nt, Artificial Sequence; identical to SEQ ID NO: 5390
  derived and/or modified sequence opt4 from Cytosine_Deaminase_fcy1__Saccharomyces_cerevisiae__AJW18752

SEQ ID NO: 5943 - RNA, 477 nt, Artificial Sequence; identical to SEQ ID NO: 5391
  derived and/or modified sequence opt5 from Cytosine_Deaminase_fcy1__Saccharomyces_cerevisiae__AJW18752

SEQ ID NO: 5944 - RNA, 477 nt, Artificial Sequence
  derived and/or modified sequence opt6 from Cytosine_Deaminase_fcy1__Saccharomyces_cerevisiae__AJW18752
augguaacaggaggaauggcaaguaaaugggaucaaaaaggaauggacauagcauaugaagaagcagcacuaggauauaaagaaggaggaguaccaauaggaggaugcuuaauaaauaauaaagacggaaguguauuaggaagaggacacaauaugagauuccaaaaaggaagugcaacauuacacggagaaauaaguacauuagaaaauuguggaagacuagaaggaaaaguauauaaagauacaacauuauauacaacacuaaguccaugugacaugugcacaggagcaauaauaauguauggaauaccaagauguguaguaggagaaaauguaaauuuuaaaagcaaaggagaaaaauauuuacaaacaagaggacaugaaguaguaguaguagaugacgaaagauguaaaaaaauaaugaaacaauuuauagaugaaagaccacaagauugguuugaagauauaggagaauag

SEQ ID NO: 5945 - protein, 158 aa, Artificial Sequence; identical to SEQ ID NO: 5385
  Cytosine_Deaminase_fcy1__Saccharomyces_cerevisiae__A0A0D4Z552

SEQ ID NO: 5946 - RNA, 477 nt, Artificial Sequence; identical to SEQ ID NO: 5386
  Cytosine_Deaminase_fcy1__Saccharomyces_cerevisiae__AJW19190

SEQ ID NO: 5947 - RNA, 477 nt, Artificial Sequence; identical to SEQ ID NO: 5387
  derived and/or modified sequence opt1 from Cytosine_Deaminase_fcy1__Saccharomyces_cerevisiae__AJW19190

SEQ ID NO: 5948 - RNA, 477 nt, Artificial Sequence; identical to SEQ ID NO: 5388
  derived and/or modified sequence opt2 from Cytosine_Deaminase_fcy1__Saccharomyces_cerevisiae__AJW19190

SEQ ID NO: 5949 - RNA, 477 nt, Artificial Sequence; identical to SEQ ID NO: 5389
  derived and/or modified sequence opt3 from Cytosine_Deaminase_fcy1__Saccharomyces_cerevisiae__AJW19190

SEQ ID NO: 5950 - RNA, 477 nt, Artificial Sequence; identical to SEQ ID NO: 5390
  derived and/or modified sequence opt4 from Cytosine_Deaminase_fcy1__Saccharomyces_cerevisiae__AJW19190

SEQ ID NO: 5951 - RNA, 477 nt, Artificial Sequence; identical to SEQ ID NO: 5391
  derived and/or modified sequence opt5 from Cytosine_Deaminase_fcy1__Saccharomyces_cerevisiae__AJW19190

SEQ ID NO: 5952 - RNA, 477 nt, Artificial Sequence
  derived and/or modified sequence opt6 from Cytosine_Deaminase_fcy1__Saccharomyces_cerevisiae__AJW19190
augguaacaggaggaauggcaaguaaaugggaucaaaaaggaauggauauagcauaugaagaagcagcauuaggauauaaagaaggaggaguaccaauaggaggauguuuaauaaauaauaaggacggaagcguauuaggaagaggacauaauaugagauuucaaaaaggaagugcaacauuacacggagaaauaaguacauuagaaaauuguggaagauuagaaggaaaaguauauaaagauacaacauuauauacaacauuaaguccaugugacauguguacaggagcaauaauaauguauggaauaccaagaugugugguaggagaaaauguaaauuuuaaaaguaaaggagaaaaauauuuacaaacaagaggacaugaaguaguaguaguagaugacgaaagauguaaaaaaauaaugaaacaauuuauagaugaaagaccacaagauugguuugaagauauaggagaauaa

SEQ ID NO: 5953 - protein, 158 aa, Artificial Sequence; identical to SEQ ID NO: 5385
  Cytosine_Deaminase_fcy1__Saccharomyces_cerevisiae__A0A0D4Z6N6

SEQ ID NO: 5954 - RNA, 477 nt, Artificial Sequence; identical to SEQ ID NO: 5386
  Cytosine_Deaminase_fcy1__Saccharomyces_cerevisiae__AJW19616

SEQ ID NO: 5955 - RNA, 477 nt, Artificial Sequence; identical to SEQ ID NO: 5387
  derived and/or modified sequence opt1 from Cytosine_Deaminase_fcy1__Saccharomyces_cerevisiae__AJW19616

SEQ ID NO: 5956 - RNA, 477 nt, Artificial Sequence; identical to SEQ ID NO: 5388
  derived and/or modified sequence opt2 from Cytosine_Deaminase_fcy1__Saccharomyces_cerevisiae__AJW19616

SEQ ID NO: 5957 - RNA, 477 nt, Artificial Sequence; identical to SEQ ID NO: 5389
  derived and/or modified sequence opt3 from Cytosine_Deaminase_fcy1__Saccharomyces_cerevisiae__AJW19616

SEQ ID NO: 5958 - RNA, 477 nt, Artificial Sequence; identical to SEQ ID NO: 5390
  derived and/or modified sequence opt4 from Cytosine_Deaminase_fcy1__Saccharomyces_cerevisiae__AJW19616

SEQ ID NO: 5959 - RNA, 477 nt, Artificial Sequence; identical to SEQ ID NO: 5391
  derived and/or modified sequence opt5 from Cytosine_Deaminase_fcy1__Saccharomyces_cerevisiae__AJW19616

SEQ ID NO: 5960 - RNA, 477 nt, Artificial Sequence
  derived and/or modified sequence opt6 from Cytosine_Deaminase_fcy1__Saccharomyces_cerevisiae__AJW19616
augguaacaggaggaauggcaaguaaaugggaucaaaaaggaauggauauagcauaugaagaagcagcauuaggauauaaagaaggaggaguaccaauaggaggauguuuaauaaauaauaaagauggaagcguauuaggaagaggacauaauaugagauuucaaaaaggaagcgcaacauuacauggagaaauaaguacacuagaaaauuguggaagauuagaaggaaaaguauauaaagauacaacauuauauacaacauuaaguccaugugauauguguacaggagcaauaauaauguauggaauaccaagguguguaguaggagaaaauguaaauuuuaaaaguaaaggagaaaaauauuuacaaacaagaggacaugaagugguagugguagaugaugaaagguguaaaaaaauaaugaaacaauuuauagaugaaagaccacaagauugguuugaagauauaggagaauaa

SEQ ID NO: 5961 - protein, 158 aa, Artificial Sequence; identical to SEQ ID NO: 5385
  Cytosine_Deaminase_fcy1__Saccharomyces_cerevisiae__A0A0D4Z800

SEQ ID NO: 5962 - RNA, 477 nt, Artificial Sequence; identical to SEQ ID NO: 5386
  Cytosine_Deaminase_fcy1__Saccharomyces_cerevisiae__AJW20032

SEQ ID NO: 5963 - RNA, 477 nt, Artificial Sequence; identical to SEQ ID NO: 5387
  derived and/or modified sequence opt1 from Cytosine_Deaminase_fcy1__Saccharomyces_cerevisiae__AJW20032

SEQ ID NO: 5964 - RNA, 477 nt, Artificial Sequence; identical to SEQ ID NO: 5388
  derived and/or modified sequence opt2 from Cytosine_Deaminase_fcy1__Saccharomyces_cerevisiae__AJW20032

SEQ ID NO: 5965 - RNA, 477 nt, Artificial Sequence; identical to SEQ ID NO: 5389
  derived and/or modified sequence opt3 from Cytosine_Deaminase_fcy1__Saccharomyces_cerevisiae__AJW20032

SEQ ID NO: 5966 - RNA, 477 nt, Artificial Sequence; identical to SEQ ID NO: 5390
  derived and/or modified sequence opt4 from Cytosine_Deaminase_fcy1__Saccharomyces_cerevisiae__AJW20032

SEQ ID NO: 5967 - RNA, 477 nt, Artificial Sequence; identical to SEQ ID NO: 5391
  derived and/or modified sequence opt5 from Cytosine_Deaminase_fcy1__Saccharomyces_cerevisiae__AJW20032

SEQ ID NO: 5968 - RNA, 477 nt, Artificial Sequence
  derived and/or modified sequence opt6 from Cytosine_Deaminase_fcy1__Saccharomyces_cerevisiae__AJW20032
augguaacaggaggaauggcaaguaaaugggaucaaaaaggaauggacauagcauaugaagaagcagcauuaggauauaaagaaggaggaguaccaauaggaggaugcuuaauaaauaauaaagauggaaguguacuaggaagaggacauaauaugagauuucaaaaaggaagugcaacacuacauggagaaauaagcacauuagaaaacuguggaagacuagaaggaaaaguauauaaagauacaacauuauauacaacauuaagcccaugugacauguguacaggagcaauaauaauguauggaauaccaagauguguaguaggagaaaauguaaauuuuaaaaguaaaggagaaaaauauuuacaaacaagaggacacgaaguaguaguaguagaugacgaaagauguaaaaaaauaaugaaacaauuuauagaugaaagaccacaagauugguuugaagauauaggagaauaa

SEQ ID NO: 5969 - protein, 158 aa, Artificial Sequence; identical to SEQ ID NO: 5385
  Cytosine_Deaminase_fcy1__Saccharomyces_cerevisiae__A0A0D4Z9V2

SEQ ID NO: 5970 - RNA, 477 nt, Artificial Sequence; identical to SEQ ID NO: 5418
  Cytosine_Deaminase_fcy1__Saccharomyces_cerevisiae__AJW20469

SEQ ID NO: 5971 - RNA, 477 nt, Artificial Sequence; identical to SEQ ID NO: 5387
  derived and/or modified sequence opt1 from Cytosine_Deaminase_fcy1__Saccharomyces_cerevisiae__AJW20469

SEQ ID NO: 5972 - RNA, 477 nt, Artificial Sequence; identical to SEQ ID NO: 5388
  derived and/or modified sequence opt2 from Cytosine_Deaminase_fcy1__Saccharomyces_cerevisiae__AJW20469

SEQ ID NO: 5973 - RNA, 477 nt, Artificial Sequence; identical to SEQ ID NO: 5389
  derived and/or modified sequence opt3 from Cytosine_Deaminase_fcy1__Saccharomyces_cerevisiae__AJW20469

SEQ ID NO: 5974 - RNA, 477 nt, Artificial Sequence; identical to SEQ ID NO: 5390
  derived and/or modified sequence opt4 from Cytosine_Deaminase_fcy1__Saccharomyces_cerevisiae__AJW20469

SEQ ID NO: 5975 - RNA, 477 nt, Artificial Sequence; identical to SEQ ID NO: 5391
  derived and/or modified sequence opt5 from Cytosine_Deaminase_fcy1__Saccharomyces_cerevisiae__AJW20469

SEQ ID NO: 5976 - RNA, 477 nt, Artificial Sequence
  derived and/or modified sequence opt6 from Cytosine_Deaminase_fcy1__Saccharomyces_cerevisiae__AJW20469
augguaacaggaggaauggcaagcaaaugggaucaaaaaggaauggauauagcauaugaagaagcagcauuaggauauaaagaaggaggaguaccaauaggaggaugucuaauaaauaauaaagauggaagcguauuaggaagaggacauaauaugagauuucaaaaaggaagugcaacauuacauggagaaauaaguacauuagaaaauuguggaagauuagaaggaaaaguauauaaagauacaacauuauauacaacauuaaguccaugugauauguguacaggagcaauaauaauguauggaauaccaagauguguaguaggagaaaauguaaauuuuaaaaguaaaggggaaaaauauuuacagacaagaggacaugaaguaguaguaguagaugaugaaagauguaaaaaaauaaugaaacaauuuauagaugaaagaccacaagauugguuugaagauauaggagaauaa

SEQ ID NO: 5977 - protein, 158 aa, Artificial Sequence; identical to SEQ ID NO: 5385
  Cytosine_Deaminase_fcy1__Saccharomyces_cerevisiae__A0A0D4ZB52

SEQ ID NO: 5978 - RNA, 477 nt, Artificial Sequence; identical to SEQ ID NO: 5386
  Cytosine_Deaminase_fcy1__Saccharomyces_cerevisiae__AJW20914

SEQ ID NO: 5979 - RNA, 477 nt, Artificial Sequence; identical to SEQ ID NO: 5387
  derived and/or modified sequence opt1 from Cytosine_Deaminase_fcy1__Saccharomyces_cerevisiae__AJW20914

SEQ ID NO: 5980 - RNA, 477 nt, Artificial Sequence; identical to SEQ ID NO: 5388
  derived and/or modified sequence opt2 from Cytosine_Deaminase_fcy1__Saccharomyces_cerevisiae__AJW20914

SEQ ID NO: 5981 - RNA, 477 nt, Artificial Sequence; identical to SEQ ID NO: 5389
  derived and/or modified sequence opt3 from Cytosine_Deaminase_fcy1__Saccharomyces_cerevisiae__AJW20914

SEQ ID NO: 5982 - RNA, 477 nt, Artificial Sequence; identical to SEQ ID NO: 5390
  derived and/or modified sequence opt4 from Cytosine_Deaminase_fcy1__Saccharomyces_cerevisiae__AJW20914

SEQ ID NO: 5983 - RNA, 477 nt, Artificial Sequence; identical to SEQ ID NO: 5391
  derived and/or modified sequence opt5 from Cytosine_Deaminase_fcy1__Saccharomyces_cerevisiae__AJW20914

SEQ ID NO: 5984 - RNA, 477 nt, Artificial Sequence
  derived and/or modified sequence opt6 from Cytosine_Deaminase_fcy1__Saccharomyces_cerevisiae__AJW20914
augguaacaggaggaauggcaagcaaaugggaucaaaaaggaauggacauagcauaugaagaagcagcauuaggauauaaagaaggaggaguaccaauaggaggaugcuuaauaaauaauaaagacggaagcguauuaggaagaggacauaauaugagauuucaaaaaggaagugcaacacuacacggagaaauaagcacauuagaaaacuguggaaggcuagaaggaaaaguauauaaagauacaacauuauauacaacauuaaguccaugugacaugugcacaggagcaauaauaauguauggaauaccaagauguguaguaggagaaaauguaaauuuuaaaaguaaaggagaaaaauauuuacaaacaagaggacaugaaguaguaguaguagaugaugaaagauguaaaaaaauaaugaaacaauuuauagaugaaagaccacaagauugguuugaagauauaggagaauaa

SEQ ID NO: 5985 - protein, 158 aa, Artificial Sequence; identical to SEQ ID NO: 5385
  Cytosine_Deaminase_fcy1__Saccharomyces_cerevisiae__A0A0D4ZCA2

SEQ ID NO: 5986 - RNA, 477 nt, Artificial Sequence; identical to SEQ ID NO: 5418
  Cytosine_Deaminase_fcy1__Saccharomyces_cerevisiae__AJW21349

SEQ ID NO: 5987 - RNA, 477 nt, Artificial Sequence; identical to SEQ ID NO: 5387
  derived and/or modified sequence opt1 from Cytosine_Deaminase_fcy1__Saccharomyces_cerevisiae__AJW21349

SEQ ID NO: 5988 - RNA, 477 nt, Artificial Sequence; identical to SEQ ID NO: 5388
  derived and/or modified sequence opt2 from Cytosine_Deaminase_fcy1__Saccharomyces_cerevisiae__AJW21349

SEQ ID NO: 5989 - RNA, 477 nt, Artificial Sequence; identical to SEQ ID NO: 5389
  derived and/or modified sequence opt3 from Cytosine_Deaminase_fcy1__Saccharomyces_cerevisiae__AJW21349

SEQ ID NO: 5990 - RNA, 477 nt, Artificial Sequence; identical to SEQ ID NO: 5390
  derived and/or modified sequence opt4 from Cytosine_Deaminase_fcy1__Saccharomyces_cerevisiae__AJW21349

SEQ ID NO: 5991 - RNA, 477 nt, Artificial Sequence; identical to SEQ ID NO: 5391
  derived and/or modified sequence opt5 from Cytosine_Deaminase_fcy1__Saccharomyces_cerevisiae__AJW21349

SEQ ID NO: 5992 - RNA, 477 nt, Artificial Sequence
  derived and/or modified sequence opt6 from Cytosine_Deaminase_fcy1__Saccharomyces_cerevisiae__AJW21349
augguaacaggaggaauggcaaguaaaugggaucaaaaaggaauggacauagcauaugaagaagcagcauuaggguauaaagaaggaggaguaccaauaggaggauguuuaauaaauaauaaagacggaagcguauuaggaagaggacauaauaugagauuucaaaaaggaagugcaacauuacacggagaaauaaguacauuagaaaacuguggaagacuagaaggaaaaguauauaaagauacaacauuauauacaacauuaaguccaugugacaugugcacaggagcaauaauaauguauggaauaccaagauguguaguaggagaaaauguaaauuuuaaaaguaaaggagaaaaauauuuacaaacaagaggacaugaaguaguaguaguagaugacgaaagauguaaaaaaauaaugaaacaauuuauagaugaaagaccacaagauugguuugaagauauaggagaauaa

SEQ ID NO: 5993 - protein, 158 aa, Artificial Sequence; identical to SEQ ID NO: 5385
  Cytosine_Deaminase_fcy1__Saccharomyces_cerevisiae__A0A0D4ZCG3

SEQ ID NO: 5994 - RNA, 477 nt, Artificial Sequence; identical to SEQ ID NO: 5714
  Cytosine_Deaminase_fcy1__Saccharomyces_cerevisiae__AJW21790

SEQ ID NO: 5995 - RNA, 477 nt, Artificial Sequence; identical to SEQ ID NO: 5387
  derived and/or modified sequence opt1 from Cytosine_Deaminase_fcy1__Saccharomyces_cerevisiae__AJW21790

SEQ ID NO: 5996 - RNA, 477 nt, Artificial Sequence; identical to SEQ ID NO: 5388
  derived and/or modified sequence opt2 from Cytosine_Deaminase_fcy1__Saccharomyces_cerevisiae__AJW21790

SEQ ID NO: 5997 - RNA, 477 nt, Artificial Sequence; identical to SEQ ID NO: 5389
  derived and/or modified sequence opt3 from Cytosine_Deaminase_fcy1__Saccharomyces_cerevisiae__AJW21790

SEQ ID NO: 5998 - RNA, 477 nt, Artificial Sequence; identical to SEQ ID NO: 5390
  derived and/or modified sequence opt4 from Cytosine_Deaminase_fcy1__Saccharomyces_cerevisiae__AJW21790

SEQ ID NO: 5999 - RNA, 477 nt, Artificial Sequence; identical to SEQ ID NO: 5391
  derived and/or modified sequence opt5 from Cytosine_Deaminase_fcy1__Saccharomyces_cerevisiae__AJW21790

SEQ ID NO: 6000 - RNA, 477 nt, Artificial Sequence
  derived and/or modified sequence opt6 from Cytosine_Deaminase_fcy1__Saccharomyces_cerevisiae__AJW21790
augguaacaggaggaauggcaaguaaaugggaucaaaaaggaauggacauagcauaugaagaagcagcauuaggauauaaagaaggaggaguaccaauaggaggaugcuuaauaaauaauaaagacggaaguguauuaggaagaggacauaauaugagauuucaaaaaggaagugcaacauuacacggagaaauaaguacauuagaaaacuguggaagauuagaaggaaaaguauauaaagauacaacauuauauacaacacuaaguccaugugacaugugcacaggagcaauaauaauguauggaauaccaagauguguaguaggagaaaauguaaauuuuaaaaguaaaggagaaaaauauuuacaaacaagaggacaugaaguaguaguaguagaugacgaaagauguaaaaaaauaaugaaacaauuuauagaugaaagaccacaagauugguuugaagauauaggagaauaa

SEQ ID NO: 6001 - protein, 158 aa, Artificial Sequence; identical to SEQ ID NO: 5385
  Cytosine_Deaminase_fcy1__Saccharomyces_cerevisiae__A0A0D4ZEM2

SEQ ID NO: 6002 - RNA, 477 nt, Artificial Sequence; identical to SEQ ID NO: 5386
  Cytosine_Deaminase_fcy1__Saccharomyces_cerevisiae__AJW22218

SEQ ID NO: 6003 - RNA, 477 nt, Artificial Sequence; identical to SEQ ID NO: 5387
  derived and/or modified sequence opt1 from Cytosine_Deaminase_fcy1__Saccharomyces_cerevisiae__AJW22218

SEQ ID NO: 6004 - RNA, 477 nt, Artificial Sequence; identical to SEQ ID NO: 5388
  derived and/or modified sequence opt2 from Cytosine_Deaminase_fcy1__Saccharomyces_cerevisiae__AJW22218

SEQ ID NO: 6005 - RNA, 477 nt, Artificial Sequence; identical to SEQ ID NO: 5389
  derived and/or modified sequence opt3 from Cytosine_Deaminase_fcy1__Saccharomyces_cerevisiae__AJW22218

SEQ ID NO: 6006 - RNA, 477 nt, Artificial Sequence; identical to SEQ ID NO: 5390
  derived and/or modified sequence opt4 from Cytosine_Deaminase_fcy1__Saccharomyces_cerevisiae__AJW22218

SEQ ID NO: 6007 - RNA, 477 nt, Artificial Sequence; identical to SEQ ID NO: 5391
  derived and/or modified sequence opt5 from Cytosine_Deaminase_fcy1__Saccharomyces_cerevisiae__AJW22218

SEQ ID NO: 6008 - RNA, 477 nt, Artificial Sequence
  derived and/or modified sequence opt6 from Cytosine_Deaminase_fcy1__Saccharomyces_cerevisiae__AJW22218
augguaacaggaggaauggcaaguaaaugggaucaaaaaggaauggacauagcauacgaagaagcagcauuaggauauaaagaaggaggaguaccaauaggaggaugucuaauaaauaauaaagauggaaguguauuaggaagaggacauaauaugagauuccaaaaaggaagugcaacauuacauggagaaauaaguacacuagaaaacuguggaagacuagaaggaaaaguauauaaagauacaacauuauauacaacauuaaguccaugugacaugugcacaggagcaauaauaauguauggaauaccaagauguguaguaggagaaaauguaaauuuuaaaagcaaaggagaaaaauauuuacaaacaagaggacaugaaguaguagugguagaugacgaaagauguaaaaaaauaaugaaacaauuuauagaugaaagaccacaagauugguuugaagauauaggagaauaa

SEQ ID NO: 6009 - protein, 158 aa, Artificial Sequence; identical to SEQ ID NO: 5385
  Cytosine_Deaminase_fcy1__Saccharomyces_cerevisiae__A0A0D4ZFD0

SEQ ID NO: 6010 - RNA, 477 nt, Artificial Sequence; identical to SEQ ID NO: 5386
  Cytosine_Deaminase_fcy1__Saccharomyces_cerevisiae__AJW22656

SEQ ID NO: 6011 - RNA, 477 nt, Artificial Sequence; identical to SEQ ID NO: 5387
  derived and/or modified sequence opt1 from Cytosine_Deaminase_fcy1__Saccharomyces_cerevisiae__AJW22656

SEQ ID NO: 6012 - RNA, 477 nt, Artificial Sequence; identical to SEQ ID NO: 5388
  derived and/or modified sequence opt2 from Cytosine_Deaminase_fcy1__Saccharomyces_cerevisiae__AJW22656

SEQ ID NO: 6013 - RNA, 477 nt, Artificial Sequence; identical to SEQ ID NO: 5389
  derived and/or modified sequence opt3 from Cytosine_Deaminase_fcy1__Saccharomyces_cerevisiae__AJW22656

SEQ ID NO: 6014 - RNA, 477 nt, Artificial Sequence; identical to SEQ ID NO: 5390
  derived and/or modified sequence opt4 from Cytosine_Deaminase_fcy1__Saccharomyces_cerevisiae__AJW22656

SEQ ID NO: 6015 - RNA, 477 nt, Artificial Sequence; identical to SEQ ID NO: 5391
  derived and/or modified sequence opt5 from Cytosine_Deaminase_fcy1__Saccharomyces_cerevisiae__AJW22656

SEQ ID NO: 6016 - RNA, 477 nt, Artificial Sequence
  derived and/or modified sequence opt6 from Cytosine_Deaminase_fcy1__Saccharomyces_cerevisiae__AJW22656
augguaacaggaggaauggcaaguaaaugggaucaaaaaggaauggacauagcauaugaagaagcagcauuaggauauaaagaaggaggaguaccaauaggaggaugccuaauaaauaauaaagacggaaguguacuaggaagaggacauaauaugagauuucaaaaaggaagugcaacauuacacggagaaauaaguacauuagaaaauuguggaagacuagaaggaaaaguauauaaagauacaacauuauauacaacauuaaguccaugugauaugugcacaggagcaauaauaauguauggaauaccaagauguguaguaggagaaaauguaaacuuuaaaaguaaaggagaaaaauauuuacaaacaagaggacaugaaguaguaguaguagaugacgaaagauguaaaaaaauaaugaaacaauuuauagaugaaagaccacaagauugguuugaagauauaggagaauaa

SEQ ID NO: 6017 - protein, 158 aa, Artificial Sequence
  Cytosine_Deaminase_fcy1__Saccharomyces_cerevisiae__A0A0D4ZGR1
MVTGGMASKWDQKGMDIAYEEAALGYKEGGVPIGGCLINNKDGSVLGRGHNMRFQKGSATLHGEITTLENCGRLEGKVYKDTTLYTTLSPCDMCTGAIIMYGIPRCVVGENVNFKSKGEKYLQTRGHEVVVVDDERCKKIMKQFIDERPQDWFEDIGE

SEQ ID NO: 6018 - RNA, 477 nt, Artificial Sequence
  Cytosine_Deaminase_fcy1__Saccharomyces_cerevisiae__AJW23097
auggugacagggggaauggcaagcaagugggaucagaaggguauggacauugccuaugaggaggcggccuuagguuacaaagagggugguguuccaauuggcggaugucuuaucaauaacaaagacggaaguguucucggucguggucacaacaugagauuucaaaagggauccgccacacuacauggugagaucaccacuuuggaaaacugugggagauuagagggcaaaguguacaaagauaccacuuuguauacgacgcugucuccaugcgacauguguacaggugccaucaucauguaugguauuccacgcuguguugucggugagaacguuaauuucaaaaguaagggcgagaaauauuuacaaacuagaggucacgagguuguuguuguugacgaugagagguguaaaaagaucaugaaacaauucaucgaugaaagaccucaggauugguuugaagauauuggugaguag

SEQ ID NO: 6019 - RNA, 477 nt, Artificial Sequence
  derived and/or modified sequence opt1 from Cytosine_Deaminase_fcy1__Saccharomyces_cerevisiae__AJW23097
auggugaccggcgggauggccagcaagugggaccagaagggcauggacaucgccuacgaggaggcggcccugggguacaaggagggcgggguccccaucggcggcugccucaucaacaacaaggacggguccgugcugggccgcgggcacaacaugcgguuccagaagggcagcgccacccugcacggggagaucacgacccucgagaacugcggccgccuggagggcaagguguacaaggacaccacccuguacacgacccucuccccgugcgacaugugcaccggggccaucaucauguacggcaucccccggugcgucgugggggagaacgugaacuucaagagcaagggcgagaaguaccugcagacccgcggccacgaggucgugguggucgacgacgagcggugcaagaagaucaugaagcaguucaucgacgagcgcccccaggacugguucgaggacaucggggaguga

SEQ ID NO: 6020 - RNA, 477 nt, Artificial Sequence
  derived and/or modified sequence opt2 from Cytosine_Deaminase_fcy1__Saccharomyces_cerevisiae__AJW23097
auggucaccggcggcauggccuccaagugggaccagaagggcauggacaucgccuacgaggaggccgcccucggcuacaaggagggcggcguccccaucggcggcugccucaucaacaacaaggacggcuccguccucggccgcggccacaacaugcgcuuccagaagggcuccgccacccuccacggcgagaucaccacccucgagaacugcggccgccucgagggcaaggucuacaaggacaccacccucuacaccacccucucccccugcgacaugugcaccggcgccaucaucauguacggcaucccccgcugcgucgucggcgagaacgucaacuucaaguccaagggcgagaaguaccuccagacccgcggccacgaggucgucgucgucgacgacgagcgcugcaagaagaucaugaagcaguucaucgacgagcgcccccaggacugguucgaggacaucggcgaguga

SEQ ID NO: 6021 - RNA, 477 nt, Artificial Sequence
  derived and/or modified sequence opt3 from Cytosine_Deaminase_fcy1__Saccharomyces_cerevisiae__AJW23097
auggugaccggcgggauggccagcaagugggaccagaaaggaauggauaucgcuuacgaggaagcagcccuggguuauaaggagggcgggguccccauuggaggcugccucauaaacaauaaagacgguuccguucuugggagaggacacaacaugagguuccaaaagggcucugcgacacugcauggcgaaaucacuacguuggagaauugugggcgguuagaaggaaaaguguacaaggauaccacacuguauacuacccuaucaccuugcgacauguguacaggugcuauuaucauguacggcauuccacgcugcguagugggggagaacgucaauuuuaagaguaaaggagagaaguaucuccagacccgaggccacgaagugguuguggucgaugacgagcguuguaaaaagaucaugaaacaguucauagaugaaagaccgcaggacugguuugaggauaucggugaguga

SEQ ID NO: 6022 - RNA, 477 nt, Artificial Sequence
  derived and/or modified sequence opt4 from Cytosine_Deaminase_fcy1__Saccharomyces_cerevisiae__AJW23097
auggugaccggcggcauggccagcaagugggaccagaagggcauggacaucgccuacgaggaggccgcccugggcuacaaggagggcggcgugcccaucggcggcugccugaucaacaacaaggacggcagcgugcugggcagaggccacaacaugagauuccagaagggcagcgccacccugcacggcgagaucaccacccuggagaacugcggcagacuggagggcaagguguacaaggacaccacccuguacaccacccugagccccugcgacaugugcaccggcgccaucaucauguacggcauccccagaugcguggugggcgagaacgugaacuucaagagcaagggcgagaaguaccugcagaccagaggccacgaggugguggugguggacgacgagagaugcaagaagaucaugaagcaguucaucgacgagagaccccaggacugguucgaggacaucggcgaguga

SEQ ID NO: 6023 - RNA, 477 nt, Artificial Sequence
  derived and/or modified sequence opt5 from Cytosine_Deaminase_fcy1__Saccharomyces_cerevisiae__AJW23097
auggugaccggcgggauggccagcaagugggaccagaaaggaauggauaucgcuuacgaggaagccgcgcugggcuauaaggaagggggaguccccauuggcgggugccucaucaacaauaaagacggauccguucugggcagaggccacaacaugcgguuccaaaaggggucugcuacacuucauggagagauuacgacccuggagaauuguggccgccucgaagggaaaguguacaaggauacaacccuguauacaacccuuagcccuugcgacauguguacaggagccaucauuauguacggcaucccgagaugcguggucggggagaacgugaauuuuaaguccaaaggagagaaguaucugcagacccggggccacgaaguuguggucguggaugacgagcgcuguaaaaagaucaugaaacaguucauugaugaaagaccccaggacugguuugaggauaucggcgaguga

SEQ ID NO: 6024 - RNA, 477 nt, Artificial Sequence
  derived and/or modified sequence opt6 from Cytosine_Deaminase_fcy1__Saccharomyces_cerevisiae__AJW23097
augguaacaggaggaauggcaaguaaaugggaucaaaaaggaauggacauagcauaugaagaagcagcacuaggauauaaagaaggaggaguaccaauaggaggauguuuaauaaauaauaaagauggaagcguauuaggaagaggacauaauaugagauuucaaaaaggaagugcaacauuacacggagaaauaacaacauuagaaaacuguggaagauuagaaggaaaaguauauaaagauacaacauuauauacaacauuaaguccaugugauauguguacaggagcaauaauaauguauggaauaccaagauguguaguaggagaaaauguaaauuuuaaaaguaaaggagaaaaauaucuacaaacaagaggacaugaaguaguaguaguagaugaugaaagauguaaaaaaauaaugaaacaauuuauagaugaaaggccacaagauugguuugaagauauaggagaauaa

SEQ ID NO: 6025 - protein, 158 aa, Artificial Sequence; identical to SEQ ID NO: 5385
  Cytosine_Deaminase_fcy1__Saccharomyces_cerevisiae__A0A0D4ZIM2

SEQ ID NO: 6026 - RNA, 477 nt, Artificial Sequence; identical to SEQ ID NO: 5386
  Cytosine_Deaminase_fcy1__Saccharomyces_cerevisiae__AJW23539

SEQ ID NO: 6027 - RNA, 477 nt, Artificial Sequence; identical to SEQ ID NO: 5387
  derived and/or modified sequence opt1 from Cytosine_Deaminase_fcy1__Saccharomyces_cerevisiae__AJW23539

SEQ ID NO: 6028 - RNA, 477 nt, Artificial Sequence; identical to SEQ ID NO: 5388
  derived and/or modified sequence opt2 from Cytosine_Deaminase_fcy1__Saccharomyces_cerevisiae__AJW23539

SEQ ID NO: 6029 - RNA, 477 nt, Artificial Sequence; identical to SEQ ID NO: 5389
  derived and/or modified sequence opt3 from Cytosine_Deaminase_fcy1__Saccharomyces_cerevisiae__AJW23539

SEQ ID NO: 6030 - RNA, 477 nt, Artificial Sequence; identical to SEQ ID NO: 5390
  derived and/or modified sequence opt4 from Cytosine_Deaminase_fcy1__Saccharomyces_cerevisiae__AJW23539

SEQ ID NO: 6031 - RNA, 477 nt, Artificial Sequence; identical to SEQ ID NO: 5391
  derived and/or modified sequence opt5 from Cytosine_Deaminase_fcy1__Saccharomyces_cerevisiae__AJW23539

SEQ ID NO: 6032 - RNA, 477 nt, Artificial Sequence
  derived and/or modified sequence opt6 from Cytosine_Deaminase_fcy1__Saccharomyces_cerevisiae__AJW23539
augguaacaggaggaauggcaaguaaaugggaucaaaaaggaauggauauagcauaugaagaagcagcacuaggauauaaagaaggaggaguaccaauaggaggaugcuuaauaaauaauaaagacggaaguguauuaggaagaggacauaauaugagauuucaaaaaggaagugcaacacuacacggagaaauaaguacauuagaaaacuguggaagacuagaaggaaaaguauauaaagauacaacauuauauacaacauuaaguccaugugauaugugcacaggagcaauaauaauguauggaauaccaagauguguaguaggagaaaauguaaauuuuaaaaguaaaggagaaaaauauuuacaaacaagaggacaugaaguaguaguaguagaugacgaaagauguaaaaaaauaaugaaacaauuuauagaugaaagaccacaagauugguuugaagauauaggagaauaa

SEQ ID NO: 6033 - protein, 158 aa, Artificial Sequence; identical to SEQ ID NO: 5385
  Cytosine_Deaminase_fcy1__Saccharomyces_cerevisiae__A0A0D4ZJC0

SEQ ID NO: 6034 - RNA, 477 nt, Artificial Sequence; identical to SEQ ID NO: 5418
  Cytosine_Deaminase_fcy1__Saccharomyces_cerevisiae__AJW23972

SEQ ID NO: 6035 - RNA, 477 nt, Artificial Sequence; identical to SEQ ID NO: 5387
  derived and/or modified sequence opt1 from Cytosine_Deaminase_fcy1__Saccharomyces_cerevisiae__AJW23972

SEQ ID NO: 6036 - RNA, 477 nt, Artificial Sequence; identical to SEQ ID NO: 5388
  derived and/or modified sequence opt2 from Cytosine_Deaminase_fcy1__Saccharomyces_cerevisiae__AJW23972

SEQ ID NO: 6037 - RNA, 477 nt, Artificial Sequence; identical to SEQ ID NO: 5389
  derived and/or modified sequence opt3 from Cytosine_Deaminase_fcy1__Saccharomyces_cerevisiae__AJW23972

SEQ ID NO: 6038 - RNA, 477 nt, Artificial Sequence; identical to SEQ ID NO: 5390
  derived and/or modified sequence opt4 from Cytosine_Deaminase_fcy1__Saccharomyces_cerevisiae__AJW23972

SEQ ID NO: 6039 - RNA, 477 nt, Artificial Sequence; identical to SEQ ID NO: 5391
  derived and/or modified sequence opt5 from Cytosine_Deaminase_fcy1__Saccharomyces_cerevisiae__AJW23972

SEQ ID NO: 6040 - RNA, 477 nt, Artificial Sequence
  derived and/or modified sequence opt6 from Cytosine_Deaminase_fcy1__Saccharomyces_cerevisiae__AJW23972
augguaacaggaggaauggcgaguaaaugggaucaaaaaggaauggacauagcauaugaagaagcagcauuaggauauaaagaaggaggaguaccaauaggaggaugcuuaauaaauaauaaagacggaaguguauuaggaagaggacauaauaugagauuucaaaaagggagugcaacauuacacggagaaauaaguacauuagaaaacugcggaagacuagaaggaaaaguauauaaagauacaacauuauauacaacauuaaguccaugugacaugugcacaggagcaauaauaauguauggaauaccaagauguguaguaggagaaaauguaaauuuuaaaaguaaaggagaaaaauaucuacaaacaagaggacaugaaguaguaguaguagaugacgaaagauguaaaaaaauaaugaaacaauuuauagaugaaagaccacaagauugguuugaagauauaggagaauaa

SEQ ID NO: 6041 - protein, 158 aa, Artificial Sequence; identical to SEQ ID NO: 5385
  Cytosine_Deaminase_fcy1__Saccharomyces_cerevisiae__A0A0D4ZK17

SEQ ID NO: 6042 - RNA, 477 nt, Artificial Sequence; identical to SEQ ID NO: 5386
  Cytosine_Deaminase_fcy1__Saccharomyces_cerevisiae__AJW24410

SEQ ID NO: 6043 - RNA, 477 nt, Artificial Sequence; identical to SEQ ID NO: 5387
  derived and/or modified sequence opt1 from Cytosine_Deaminase_fcy1__Saccharomyces_cerevisiae__AJW24410

SEQ ID NO: 6044 - RNA, 477 nt, Artificial Sequence; identical to SEQ ID NO: 5388
  derived and/or modified sequence opt2 from Cytosine_Deaminase_fcy1__Saccharomyces_cerevisiae__AJW24410

SEQ ID NO: 6045 - RNA, 477 nt, Artificial Sequence; identical to SEQ ID NO: 5389
  derived and/or modified sequence opt3 from Cytosine_Deaminase_fcy1__Saccharomyces_cerevisiae__AJW24410

SEQ ID NO: 6046 - RNA, 477 nt, Artificial Sequence; identical to SEQ ID NO: 5390
  derived and/or modified sequence opt4 from Cytosine_Deaminase_fcy1__Saccharomyces_cerevisiae__AJW24410

SEQ ID NO: 6047 - RNA, 477 nt, Artificial Sequence; identical to SEQ ID NO: 5391
  derived and/or modified sequence opt5 from Cytosine_Deaminase_fcy1__Saccharomyces_cerevisiae__AJW24410

SEQ ID NO: 6048 - RNA, 477 nt, Artificial Sequence
  derived and/or modified sequence opt6 from Cytosine_Deaminase_fcy1__Saccharomyces_cerevisiae__AJW24410
augguaacaggaggaauggcaaguaaaugggaucaaaaaggaauggacauagcauaugaagaagcagcauuaggauauaaagaaggaggaguaccaauaggaggaugcuuaauaaauaacaaagacggaagcguauuaggaagaggacauaauaugagauuucaaaaaggaagugcaacauuacacggagaaauaagcacauuagaaaacuguggaagacuagaaggaaaaguauauaaagauacaacauuauauacaacauuaaguccaugcgacaugugcacaggagcaauaauaauguauggaauaccaagauguguaguaggagaaaauguaaauuuuaaaaguaaaggagaaaaauauuuacaaacaagaggacaugaaguaguaguaguagaugacgaaagauguaaaaaaauaaugaaacaauuuauagaugaaagaccacaagauugguuugaagauauaggagaauaa

SEQ ID NO: 6049 - protein, 158 aa, Artificial Sequence; identical to SEQ ID NO: 5385
  Cytosine_Deaminase_fcy1__Saccharomyces_cerevisiae__A0A0D4ZMC8

SEQ ID NO: 6050 - RNA, 477 nt, Artificial Sequence; identical to SEQ ID NO: 5386
  Cytosine_Deaminase_fcy1__Saccharomyces_cerevisiae__AJW24849

SEQ ID NO: 6051 - RNA, 477 nt, Artificial Sequence; identical to SEQ ID NO: 5387
  derived and/or modified sequence opt1 from Cytosine_Deaminase_fcy1__Saccharomyces_cerevisiae__AJW24849

SEQ ID NO: 6052 - RNA, 477 nt, Artificial Sequence; identical to SEQ ID NO: 5388
  derived and/or modified sequence opt2 from Cytosine_Deaminase_fcy1__Saccharomyces_cerevisiae__AJW24849

SEQ ID NO: 6053 - RNA, 477 nt, Artificial Sequence; identical to SEQ ID NO: 5389
  derived and/or modified sequence opt3 from Cytosine_Deaminase_fcy1__Saccharomyces_cerevisiae__AJW24849

SEQ ID NO: 6054 - RNA, 477 nt, Artificial Sequence; identical to SEQ ID NO: 5390
  derived and/or modified sequence opt4 from Cytosine_Deaminase_fcy1__Saccharomyces_cerevisiae__AJW24849

SEQ ID NO: 6055 - RNA, 477 nt, Artificial Sequence; identical to SEQ ID NO: 5391
  derived and/or modified sequence opt5 from Cytosine_Deaminase_fcy1__Saccharomyces_cerevisiae__AJW24849

SEQ ID NO: 6056 - RNA, 477 nt, Artificial Sequence
  derived and/or modified sequence opt6 from Cytosine_Deaminase_fcy1__Saccharomyces_cerevisiae__AJW24849
augguaacaggaggaauggcaaguaaaugggaucaaaaaggaauggacauagcauaugaagaagcagcacuaggauauaaagaaggaggaguaccaauaggaggaugccuaauaaauaauaaagacggaaguguauuaggaagaggacauaauaugagauuucaaaaaggaagugcaacauuacacggagaaauaaguacauuagaaaacuguggaagacuagaaggaaaaguauauaaagauacaacauuauauacaacauuaaguccaugugauaugugcacaggagcaauaauaauguauggaauaccaagauguguaguaggagaaaauguaaauuuuaaaagcaaaggagaaaaauaucuacaaacaagaggacaugaaguaguaguaguagaugacgaaagauguaaaaaaauaaugaaacaauuuauagaugaaagaccacaagauugguuugaagauauaggagaauaa

SEQ ID NO: 6057 - protein, 158 aa, Artificial Sequence; identical to SEQ ID NO: 5385
  Cytosine_Deaminase_fcy1__Saccharomyces_cerevisiae__A0A0D4ZMX9

SEQ ID NO: 6058 - RNA, 477 nt, Artificial Sequence; identical to SEQ ID NO: 5386
  Cytosine_Deaminase_fcy1__Saccharomyces_cerevisiae__AJW25291

SEQ ID NO: 6059 - RNA, 477 nt, Artificial Sequence; identical to SEQ ID NO: 5387
  derived and/or modified sequence opt1 from Cytosine_Deaminase_fcy1__Saccharomyces_cerevisiae__AJW25291

SEQ ID NO: 6060 - RNA, 477 nt, Artificial Sequence; identical to SEQ ID NO: 5388
  derived and/or modified sequence opt2 from Cytosine_Deaminase_fcy1__Saccharomyces_cerevisiae__AJW25291

SEQ ID NO: 6061 - RNA, 477 nt, Artificial Sequence; identical to SEQ ID NO: 5389
  derived and/or modified sequence opt3 from Cytosine_Deaminase_fcy1__Saccharomyces_cerevisiae__AJW25291

SEQ ID NO: 6062 - RNA, 477 nt, Artificial Sequence; identical to SEQ ID NO: 5390
  derived and/or modified sequence opt4 from Cytosine_Deaminase_fcy1__Saccharomyces_cerevisiae__AJW25291

SEQ ID NO: 6063 - RNA, 477 nt, Artificial Sequence; identical to SEQ ID NO: 5391
  derived and/or modified sequence opt5 from Cytosine_Deaminase_fcy1__Saccharomyces_cerevisiae__AJW25291

SEQ ID NO: 6064 - RNA, 477 nt, Artificial Sequence
  derived and/or modified sequence opt6 from Cytosine_Deaminase_fcy1__Saccharomyces_cerevisiae__AJW25291
augguaacaggagggauggcaaguaaaugggaccaaaaaggaauggauauagcauaugaagaagcagcauuaggauauaaagaaggaggaguaccaauaggaggauguuuaauaaauaauaaagauggaaguguauuaggaagaggacauaauaugagauuucaaaaaggaagugcgacauuacauggagaaauaaguacauuagaaaauuguggaagacuagaaggaaaaguauauaaagauacaacacuauauacaacauuaaguccaugugacaugugcacaggagcaauaauaauguauggaauaccaagguguguaguaggagaaaauguaaauuuuaaaaguaaaggagaaaaauauuuacaaacaagaggacaugaaguaguaguaguagaugaugaaagauguaaaaaaauaaugaaacaauuuauagaugaaagaccacaagauugguuugaagauauaggagaauaa

SEQ ID NO: 6065 - protein, 158 aa, Artificial Sequence; identical to SEQ ID NO: 5385
  Cytosine_Deaminase_fcy1__Saccharomyces_cerevisiae__A0A0D4ZP21

SEQ ID NO: 6066 - RNA, 477 nt, Artificial Sequence; identical to SEQ ID NO: 5418
  Cytosine_Deaminase_fcy1__Saccharomyces_cerevisiae__AJW25697

SEQ ID NO: 6067 - RNA, 477 nt, Artificial Sequence; identical to SEQ ID NO: 5387
  derived and/or modified sequence opt1 from Cytosine_Deaminase_fcy1__Saccharomyces_cerevisiae__AJW25697

SEQ ID NO: 6068 - RNA, 477 nt, Artificial Sequence; identical to SEQ ID NO: 5388
  derived and/or modified sequence opt2 from Cytosine_Deaminase_fcy1__Saccharomyces_cerevisiae__AJW25697

SEQ ID NO: 6069 - RNA, 477 nt, Artificial Sequence; identical to SEQ ID NO: 5389
  derived and/or modified sequence opt3 from Cytosine_Deaminase_fcy1__Saccharomyces_cerevisiae__AJW25697

SEQ ID NO: 6070 - RNA, 477 nt, Artificial Sequence; identical to SEQ ID NO: 5390
  derived and/or modified sequence opt4 from Cytosine_Deaminase_fcy1__Saccharomyces_cerevisiae__AJW25697

SEQ ID NO: 6071 - RNA, 477 nt, Artificial Sequence; identical to SEQ ID NO: 5391
  derived and/or modified sequence opt5 from Cytosine_Deaminase_fcy1__Saccharomyces_cerevisiae__AJW25697

SEQ ID NO: 6072 - RNA, 477 nt, Artificial Sequence
  derived and/or modified sequence opt6 from Cytosine_Deaminase_fcy1__Saccharomyces_cerevisiae__AJW25697
augguaacaggaggaauggcaaguaaaugggaucaaaaaggaauggauauagcauaugaagaagcagcauuaggauauaaagaaggaggaguaccgauaggaggauguuuaauaaauaauaaagauggaaguguauuaggaagagggcacaauaugagguuucaaaaaggaagugcaacauuacauggagaaauaaguacacuagaaaauugugggagacuagaaggaaaaguauauaaagauacaacauuauauacaacauuaaguccaugugauauguguacaggagcaauaauaauguauggaauaccaagauguguaguaggagaaaauguaaauuuuaaaaguaaaggagaaaaauauuuacaaacaagaggacaugaaguaguaguaguagaugaugaaagauguaaaaaaauaaugaaacaauuuauagaugaaagaccacaagauugguuugaagauauaggagaauaa

SEQ ID NO: 6073 - protein, 158 aa, Artificial Sequence; identical to SEQ ID NO: 5385
  Cytosine_Deaminase_fcy1__Saccharomyces_cerevisiae__A0A0D4ZQ62

SEQ ID NO: 6074 - RNA, 477 nt, Artificial Sequence; identical to SEQ ID NO: 5386
  Cytosine_Deaminase_fcy1__Saccharomyces_cerevisiae__AJW26215

SEQ ID NO: 6075 - RNA, 477 nt, Artificial Sequence; identical to SEQ ID NO: 5387
  derived and/or modified sequence opt1 from Cytosine_Deaminase_fcy1__Saccharomyces_cerevisiae__AJW26215

SEQ ID NO: 6076 - RNA, 477 nt, Artificial Sequence; identical to SEQ ID NO: 5388
  derived and/or modified sequence opt2 from Cytosine_Deaminase_fcy1__Saccharomyces_cerevisiae__AJW26215

SEQ ID NO: 6077 - RNA, 477 nt, Artificial Sequence; identical to SEQ ID NO: 5389
  derived and/or modified sequence opt3 from Cytosine_Deaminase_fcy1__Saccharomyces_cerevisiae__AJW26215

SEQ ID NO: 6078 - RNA, 477 nt, Artificial Sequence; identical to SEQ ID NO: 5390
  derived and/or modified sequence opt4 from Cytosine_Deaminase_fcy1__Saccharomyces_cerevisiae__AJW26215

SEQ ID NO: 6079 - RNA, 477 nt, Artificial Sequence; identical to SEQ ID NO: 5391
  derived and/or modified sequence opt5 from Cytosine_Deaminase_fcy1__Saccharomyces_cerevisiae__AJW26215

SEQ ID NO: 6080 - RNA, 477 nt, Artificial Sequence
  derived and/or modified sequence opt6 from Cytosine_Deaminase_fcy1__Saccharomyces_cerevisiae__AJW26215
augguaacaggaggaauggcaaguaaaugggaucaaaaaggaauggauauagcauaugaagaagcagcauuaggauauaaagaaggagggguaccaauaggaggauguuuaauaaauaauaaagauggaaguguauuaggaagaggacauaauaugagauuucaaaaaggaagugcaacauuacauggagaaauaaguacauuagaaaauuguggaagauuagaaggaaaaguauauaaagauacaacauuauauacaacauuaaguccaugugauauguguacaggagcaauaauaauguauggaauaccaagauguguaguaggagaaaauguaaauuuuaaaagcaaaggagagaaauauuuacaaacaagaggacaugaaguaguaguaguagaugaugaaagauguaaaaaaauaaugaaacaauuuauagaugaaagaccacaagauugguuugaagauauaggagaauaa

SEQ ID NO: 6081 - protein, 158 aa, Artificial Sequence; identical to SEQ ID NO: 5385
  Cytosine_Deaminase_fcy1__Saccharomyces_cerevisiae__A0A0D4ZQ92

SEQ ID NO: 6082 - RNA, 477 nt, Artificial Sequence; identical to SEQ ID NO: 5386
  Cytosine_Deaminase_fcy1__Saccharomyces_cerevisiae__AJW25948

SEQ ID NO: 6083 - RNA, 477 nt, Artificial Sequence; identical to SEQ ID NO: 5387
  derived and/or modified sequence opt1 from Cytosine_Deaminase_fcy1__Saccharomyces_cerevisiae__AJW25948

SEQ ID NO: 6084 - RNA, 477 nt, Artificial Sequence; identical to SEQ ID NO: 5388
  derived and/or modified sequence opt2 from Cytosine_Deaminase_fcy1__Saccharomyces_cerevisiae__AJW25948

SEQ ID NO: 6085 - RNA, 477 nt, Artificial Sequence; identical to SEQ ID NO: 5389
  derived and/or modified sequence opt3 from Cytosine_Deaminase_fcy1__Saccharomyces_cerevisiae__AJW25948

SEQ ID NO: 6086 - RNA, 477 nt, Artificial Sequence; identical to SEQ ID NO: 5390
  derived and/or modified sequence opt4 from Cytosine_Deaminase_fcy1__Saccharomyces_cerevisiae__AJW25948

SEQ ID NO: 6087 - RNA, 477 nt, Artificial Sequence; identical to SEQ ID NO: 5391
  derived and/or modified sequence opt5 from Cytosine_Deaminase_fcy1__Saccharomyces_cerevisiae__AJW25948

SEQ ID NO: 6088 - RNA, 477 nt, Artificial Sequence
  derived and/or modified sequence opt6 from Cytosine_Deaminase_fcy1__Saccharomyces_cerevisiae__AJW25948
augguaacaggaggaauggcaaguaaaugggaucaaaaaggaauggauauagcauaugaagaagcagcauuaggauauaaagaaggaggaguaccaauaggaggaugcuuaauaaauaauaaagacggaaguguauuaggaagaggacauaauaugagauuucaaaaaggaagugcaacacuacauggagaaauaaguacauuagaaaauuguggaagauuagaaggaaaaguauauaaagauacaacacuauauacaacauuaaguccaugugauaugugcacaggagcaauaauaauguauggaauaccaagauguguaguaggagaaaauguaaauuuuaaaaguaaaggagaaaaauauuuacaaacaagaggacaugaaguaguaguaguagaugaugaaagauguaaaaaaauaaugaaacaauuuauagaugaaagaccacaagauugguuugaagauauaggagaauaa

SEQ ID NO: 6089 - protein, 158 aa, Artificial Sequence; identical to SEQ ID NO: 5385
  Cytosine_Deaminase_fcy1__Saccharomyces_cerevisiae__A0A0D4ZS31

SEQ ID NO: 6090 - RNA, 477 nt, Artificial Sequence; identical to SEQ ID NO: 5386
  Cytosine_Deaminase_fcy1__Saccharomyces_cerevisiae__AJW26880

SEQ ID NO: 6091 - RNA, 477 nt, Artificial Sequence; identical to SEQ ID NO: 5387
  derived and/or modified sequence opt1 from Cytosine_Deaminase_fcy1__Saccharomyces_cerevisiae__AJW26880

SEQ ID NO: 6092 - RNA, 477 nt, Artificial Sequence; identical to SEQ ID NO: 5388
  derived and/or modified sequence opt2 from Cytosine_Deaminase_fcy1__Saccharomyces_cerevisiae__AJW26880

SEQ ID NO: 6093 - RNA, 477 nt, Artificial Sequence; identical to SEQ ID NO: 5389
  derived and/or modified sequence opt3 from Cytosine_Deaminase_fcy1__Saccharomyces_cerevisiae__AJW26880

SEQ ID NO: 6094 - RNA, 477 nt, Artificial Sequence; identical to SEQ ID NO: 5390
  derived and/or modified sequence opt4 from Cytosine_Deaminase_fcy1__Saccharomyces_cerevisiae__AJW26880

SEQ ID NO: 6095 - RNA, 477 nt, Artificial Sequence; identical to SEQ ID NO: 5391
  derived and/or modified sequence opt5 from Cytosine_Deaminase_fcy1__Saccharomyces_cerevisiae__AJW26880

SEQ ID NO: 6096 - RNA, 477 nt, Artificial Sequence
  derived and/or modified sequence opt6 from Cytosine_Deaminase_fcy1__Saccharomyces_cerevisiae__AJW26880
augguaacaggaggaauggcaaguaaaugggaucaaaaaggaauggacauagcauaugaagaagcagcauuaggauacaaagaagggggaguaccaauaggaggaugcuuaauaaauaauaaagacggaaguguauuaggaagaggacauaauaugagauuucaaaaaggaagugcaacauuacacggagaaauaagcacauuagaaaacuguggaagacuagaaggaaaaguauauaaagauacaacauuauauacaacauuaaguccaugugacaugugcacaggagcaauaauaauguauggaauaccaagauguguaguaggagaaaauguaaauuuuaaaaguaaaggagaaaaauaucuacaaacaaggggacaugaaguaguaguaguagaugacgaaagauguaaaaaaauaaugaaacaauuuauagaugaaagaccacaagauugguuugaagauauaggagaauaa

SEQ ID NO: 6097 - protein, 158 aa, Artificial Sequence; identical to SEQ ID NO: 5385
  Cytosine_Deaminase_fcy1__Saccharomyces_cerevisiae__A0A0D4ZS87

SEQ ID NO: 6098 - RNA, 477 nt, Artificial Sequence; identical to SEQ ID NO: 5386
  Cytosine_Deaminase_fcy1__Saccharomyces_cerevisiae__AJW26613

SEQ ID NO: 6099 - RNA, 477 nt, Artificial Sequence; identical to SEQ ID NO: 5387
  derived and/or modified sequence opt1 from Cytosine_Deaminase_fcy1__Saccharomyces_cerevisiae__AJW26613

SEQ ID NO: 6100 - RNA, 477 nt, Artificial Sequence; identical to SEQ ID NO: 5388
  derived and/or modified sequence opt2 from Cytosine_Deaminase_fcy1__Saccharomyces_cerevisiae__AJW26613

SEQ ID NO: 6101 - RNA, 477 nt, Artificial Sequence; identical to SEQ ID NO: 5389
  derived and/or modified sequence opt3 from Cytosine_Deaminase_fcy1__Saccharomyces_cerevisiae__AJW26613

SEQ ID NO: 6102 - RNA, 477 nt, Artificial Sequence; identical to SEQ ID NO: 5390
  derived and/or modified sequence opt4 from Cytosine_Deaminase_fcy1__Saccharomyces_cerevisiae__AJW26613

SEQ ID NO: 6103 - RNA, 477 nt, Artificial Sequence; identical to SEQ ID NO: 5391
  derived and/or modified sequence opt5 from Cytosine_Deaminase_fcy1__Saccharomyces_cerevisiae__AJW26613

SEQ ID NO: 6104 - RNA, 477 nt, Artificial Sequence
  derived and/or modified sequence opt6 from Cytosine_Deaminase_fcy1__Saccharomyces_cerevisiae__AJW26613
augguaacaggaggaauggcaaguaaaugggaucaaaaaggaauggauauagcauaugaagaagcagcauuaggauauaaagaaggaggaguaccaauaggaggaugcuuaauaaauaauaaagacggaaguguacuaggaagaggacauaauaugagauuucaaaaaggaagcgcgacauuacauggagaaauaaguacauuagaaaauugcggaagguuagaaggaaaaguauauaaagauacaacauuauauacaacauuaaguccaugugauauguguacaggagcaauaauaauguauggaauaccaagauguguaguaggagaaaauguaaauuuuaaaagcaaaggagaaaaauauuuacaaacaagaggacaugaaguaguaguaguagaugaugaaagauguaaaaaaauaaugaaacaauuuauagaugaaagaccacaagauugguuugaagauauaggagaauaa

SEQ ID NO: 6105 - protein, 158 aa, Artificial Sequence; identical to SEQ ID NO: 5385
  Cytosine_Deaminase_fcy1__Saccharomyces_cerevisiae__A0A0D4ZTS6

SEQ ID NO: 6106 - RNA, 477 nt, Artificial Sequence; identical to SEQ ID NO: 5386
  Cytosine_Deaminase_fcy1__Saccharomyces_cerevisiae__AJW27148

SEQ ID NO: 6107 - RNA, 477 nt, Artificial Sequence; identical to SEQ ID NO: 5387
  derived and/or modified sequence opt1 from Cytosine_Deaminase_fcy1__Saccharomyces_cerevisiae__AJW27148

SEQ ID NO: 6108 - RNA, 477 nt, Artificial Sequence; identical to SEQ ID NO: 5388
  derived and/or modified sequence opt2 from Cytosine_Deaminase_fcy1__Saccharomyces_cerevisiae__AJW27148

SEQ ID NO: 6109 - RNA, 477 nt, Artificial Sequence; identical to SEQ ID NO: 5389
  derived and/or modified sequence opt3 from Cytosine_Deaminase_fcy1__Saccharomyces_cerevisiae__AJW27148

SEQ ID NO: 6110 - RNA, 477 nt, Artificial Sequence; identical to SEQ ID NO: 5390
  derived and/or modified sequence opt4 from Cytosine_Deaminase_fcy1__Saccharomyces_cerevisiae__AJW27148

SEQ ID NO: 6111 - RNA, 477 nt, Artificial Sequence; identical to SEQ ID NO: 5391
  derived and/or modified sequence opt5 from Cytosine_Deaminase_fcy1__Saccharomyces_cerevisiae__AJW27148

SEQ ID NO: 6112 - RNA, 477 nt, Artificial Sequence
  derived and/or modified sequence opt6 from Cytosine_Deaminase_fcy1__Saccharomyces_cerevisiae__AJW27148
augguaacaggaggaauggcaaguaaaugggaucaaaaaggaauggacauagcauaugaagaagcagcauuaggauauaaagaaggaggaguaccaauaggaggaugcuuaauaaauaauaaagacggaaguguauuaggaagaggacauaauaugagauuucaaaaaggaagugcaacauuacacggagaaauaaguacauuagaaaacuguggaagauuagaaggaaaaguauauaaagauacaacauuauauacaacauuaaguccaugugacauguguacaggagcaauaauaauguauggaauaccaagauguguaguaggagaaaauguaaauuuuaaaaguaaaggagaaaaauauuuacaaacaagaggacaugaaguaguaguaguagaugacgaaagauguaaaaaaauaaugaaacaauuuauagaugaaagaccacaagauugguuugaagauauaggagaauaa

SEQ ID NO: 6113 - protein, 158 aa, Artificial Sequence; identical to SEQ ID NO: 5385
  Cytosine_Deaminase_fcy1__Saccharomyces_cerevisiae__A0A0D4ZUK0

SEQ ID NO: 6114 - RNA, 477 nt, Artificial Sequence; identical to SEQ ID NO: 5386
  Cytosine_Deaminase_fcy1__Saccharomyces_cerevisiae__AJW27576

SEQ ID NO: 6115 - RNA, 477 nt, Artificial Sequence; identical to SEQ ID NO: 5387
  derived and/or modified sequence opt1 from Cytosine_Deaminase_fcy1__Saccharomyces_cerevisiae__AJW27576

SEQ ID NO: 6116 - RNA, 477 nt, Artificial Sequence; identical to SEQ ID NO: 5388
  derived and/or modified sequence opt2 from Cytosine_Deaminase_fcy1__Saccharomyces_cerevisiae__AJW27576

SEQ ID NO: 6117 - RNA, 477 nt, Artificial Sequence; identical to SEQ ID NO: 5389
  derived and/or modified sequence opt3 from Cytosine_Deaminase_fcy1__Saccharomyces_cerevisiae__AJW27576

SEQ ID NO: 6118 - RNA, 477 nt, Artificial Sequence; identical to SEQ ID NO: 5390
  derived and/or modified sequence opt4 from Cytosine_Deaminase_fcy1__Saccharomyces_cerevisiae__AJW27576

SEQ ID NO: 6119 - RNA, 477 nt, Artificial Sequence; identical to SEQ ID NO: 5391
  derived and/or modified sequence opt5 from Cytosine_Deaminase_fcy1__Saccharomyces_cerevisiae__AJW27576

SEQ ID NO: 6120 - RNA, 477 nt, Artificial Sequence
  derived and/or modified sequence opt6 from Cytosine_Deaminase_fcy1__Saccharomyces_cerevisiae__AJW27576
augguaacaggaggaauggcaaguaaaugggaucaaaaaggaauggauauagcauaugaagaagcagcauuaggauauaaagaaggaggaguaccaauaggaggaugcuuaauaaauaauaaagacggaaguguacuaggaagaggacauaauaugagauuucaaaaaggaagugcaacauuacacggagaaauaaguacauuagaaaacuguggaagauuagaaggaaaaguauauaaagauacaacauuauauacaacauuaaguccaugugacaugugcacaggagcaauaauaauguauggaauaccaagauguguaguaggagaaaauguaaauuuuaaaaguaaaggagagaaauauuuacaaacaagaggacaugaaguaguaguaguagaugaugaaagauguaaaaaaauaaugaaacaauuuauagaugaaagaccacaagauugguuugaagauauaggagaauaa

SEQ ID NO: 6121 - protein, 158 aa, Artificial Sequence; identical to SEQ ID NO: 5385
  Cytosine_Deaminase_fcy1__Saccharomyces_cerevisiae__A0A0D4ZVN6

SEQ ID NO: 6122 - RNA, 477 nt, Artificial Sequence; identical to SEQ ID NO: 5386
  Cytosine_Deaminase_fcy1__Saccharomyces_cerevisiae__AJW27843

SEQ ID NO: 6123 - RNA, 477 nt, Artificial Sequence; identical to SEQ ID NO: 5387
  derived and/or modified sequence opt1 from Cytosine_Deaminase_fcy1__Saccharomyces_cerevisiae__AJW27843

SEQ ID NO: 6124 - RNA, 477 nt, Artificial Sequence; identical to SEQ ID NO: 5388
  derived and/or modified sequence opt2 from Cytosine_Deaminase_fcy1__Saccharomyces_cerevisiae__AJW27843

SEQ ID NO: 6125 - RNA, 477 nt, Artificial Sequence; identical to SEQ ID NO: 5389
  derived and/or modified sequence opt3 from Cytosine_Deaminase_fcy1__Saccharomyces_cerevisiae__AJW27843

SEQ ID NO: 6126 - RNA, 477 nt, Artificial Sequence; identical to SEQ ID NO: 5390
  derived and/or modified sequence opt4 from Cytosine_Deaminase_fcy1__Saccharomyces_cerevisiae__AJW27843

SEQ ID NO: 6127 - RNA, 477 nt, Artificial Sequence; identical to SEQ ID NO: 5391
  derived and/or modified sequence opt5 from Cytosine_Deaminase_fcy1__Saccharomyces_cerevisiae__AJW27843

SEQ ID NO: 6128 - RNA, 477 nt, Artificial Sequence
  derived and/or modified sequence opt6 from Cytosine_Deaminase_fcy1__Saccharomyces_cerevisiae__AJW27843
augguaacaggaggaauggcaaguaaaugggaucaaaaaggaauggauauagcauaugaagaagcagcauuaggauauaaagaaggaggaguaccaauaggaggauguuuaauaaauaauaaagauggaaguguauuaggaagagggcauaauaugagauuucaaaaaggaagugcaacauuacauggagaaauaagcacauuagaaaauuguggaagauuagaaggaaaaguauauaaagauacaacauuauauacaacauuaaguccaugugauauguguacaggagcaauaauaauguauggaauaccaagauguguaguaggagaaaauguaaauuuuaaaagcaaaggagaaaaauauuuacaaacaaggggacaugaaguaguaguaguagaugaugaaagguguaaaaaaauaaugaaacaauuuauagaugaaagaccacaagauugguuugaagauauaggagaauaa

SEQ ID NO: 6129 - protein, 158 aa, Artificial Sequence; identical to SEQ ID NO: 5385
  Cytosine_Deaminase_fcy1__Saccharomyces_cerevisiae__A0A0D4ZWP2

SEQ ID NO: 6130 - RNA, 477 nt, Artificial Sequence; identical to SEQ ID NO: 5386
  Cytosine_Deaminase_fcy1__Saccharomyces_cerevisiae__AJW28286

SEQ ID NO: 6131 - RNA, 477 nt, Artificial Sequence; identical to SEQ ID NO: 5387
  derived and/or modified sequence opt1 from Cytosine_Deaminase_fcy1__Saccharomyces_cerevisiae__AJW28286

SEQ ID NO: 6132 - RNA, 477 nt, Artificial Sequence; identical to SEQ ID NO: 5388
  derived and/or modified sequence opt2 from Cytosine_Deaminase_fcy1__Saccharomyces_cerevisiae__AJW28286

SEQ ID NO: 6133 - RNA, 477 nt, Artificial Sequence; identical to SEQ ID NO: 5389
  derived and/or modified sequence opt3 from Cytosine_Deaminase_fcy1__Saccharomyces_cerevisiae__AJW28286

SEQ ID NO: 6134 - RNA, 477 nt, Artificial Sequence; identical to SEQ ID NO: 5390
  derived and/or modified sequence opt4 from Cytosine_Deaminase_fcy1__Saccharomyces_cerevisiae__AJW28286

SEQ ID NO: 6135 - RNA, 477 nt, Artificial Sequence; identical to SEQ ID NO: 5391
  derived and/or modified sequence opt5 from Cytosine_Deaminase_fcy1__Saccharomyces_cerevisiae__AJW28286

SEQ ID NO: 6136 - RNA, 477 nt, Artificial Sequence
  derived and/or modified sequence opt6 from Cytosine_Deaminase_fcy1__Saccharomyces_cerevisiae__AJW28286
augguaacaggaggaauggcaaguaaaugggaucaaaaaggaauggauauagcauaugaagaagcagcacuaggauauaaagaaggaggaguaccaauaggaggauguuuaauaaauaauaaagauggaagcguauuaggaagaggacauaauaugagauuucaaaaaggaagugcaacauuacauggagaaauaaguacauuagaaaauuguggaagguuagaaggaaaaguauauaaagauacaacauuauauacaacacuaaguccaugugauauguguacaggagcaauaauaauguauggaauaccaagauguguaguaggagaaaauguaaauuuuaaaagcaaaggggaaaaauauuuacaaacaagaggacaugaaguaguaguaguagaugaugaaagauguaaaaaaauaaugaaacaauuuauagaugaaagaccacaagauugguuugaagauauaggagaauaa

SEQ ID NO: 6137 - protein, 158 aa, Artificial Sequence; identical to SEQ ID NO: 5385
  Cytosine_Deaminase_fcy1__Saccharomyces_cerevisiae__A0A0D4ZX07

SEQ ID NO: 6138 - RNA, 477 nt, Artificial Sequence; identical to SEQ ID NO: 5386
  Cytosine_Deaminase_fcy1__Saccharomyces_cerevisiae__AJW28555

SEQ ID NO: 6139 - RNA, 477 nt, Artificial Sequence; identical to SEQ ID NO: 5387
  derived and/or modified sequence opt1 from Cytosine_Deaminase_fcy1__Saccharomyces_cerevisiae__AJW28555

SEQ ID NO: 6140 - RNA, 477 nt, Artificial Sequence; identical to SEQ ID NO: 5388
  derived and/or modified sequence opt2 from Cytosine_Deaminase_fcy1__Saccharomyces_cerevisiae__AJW28555

SEQ ID NO: 6141 - RNA, 477 nt, Artificial Sequence; identical to SEQ ID NO: 5389
  derived and/or modified sequence opt3 from Cytosine_Deaminase_fcy1__Saccharomyces_cerevisiae__AJW28555

SEQ ID NO: 6142 - RNA, 477 nt, Artificial Sequence; identical to SEQ ID NO: 5390
  derived and/or modified sequence opt4 from Cytosine_Deaminase_fcy1__Saccharomyces_cerevisiae__AJW28555

SEQ ID NO: 6143 - RNA, 477 nt, Artificial Sequence; identical to SEQ ID NO: 5391
  derived and/or modified sequence opt5 from Cytosine_Deaminase_fcy1__Saccharomyces_cerevisiae__AJW28555

SEQ ID NO: 6144 - RNA, 477 nt, Artificial Sequence
  derived and/or modified sequence opt6 from Cytosine_Deaminase_fcy1__Saccharomyces_cerevisiae__AJW28555
augguaacaggaggaauggcaaguaaaugggaucaaaaaggaauggacauagcauaugaagaagcagcauuaggauauaaagaaggaggaguaccaauaggaggaugcuuaauaaauaauaaagacggaaguguauuaggaagaggacauaauaugagauuucaaaaaggaagugcaacauuacacggagaaauaagcacauuagaaaacuguggaaggcuagaaggaaaaguauauaaagauacaacauuauauacaacauuaaguccaugugacaugugcacaggagcaauaauaauguauggaauaccaagauguguaguaggagaaaauguaaauuuuaaaaguaaaggagaaaaauauuuacaaacaagaggacaugaaguaguaguaguagaugacgaaagauguaaaaaaauaaugaaacaauuuauagaugaaagaccacaagauugguuugaagauauaggagaauaa

SEQ ID NO: 6145 - protein, 158 aa, Artificial Sequence; identical to SEQ ID NO: 5385
  Cytosine_Deaminase_fcy1__Saccharomyces_cerevisiae__Q12178

SEQ ID NO: 6146 - RNA, 477 nt, Artificial Sequence
  Cytosine_Deaminase_fcy1__Saccharomyces_cerevisiae__AAB67713
auggugacagggggaauggcaagcaagugggaucagaaggguauggacauugccuaugaggaggcggccuuagguuacaaagagggugguguuccuauuggcggaugucuuaucaauaacaaagacggaaguguucucggucguggucacaacaugagauuucaaaaggguuccgccacacuacauggugagaucuccacuuuggaaaacugugggagauuagagggcaaaguguacaaagauaccacuuuguauacgacgcugucuccaugcgacauguguacaggugccaucaucauguaugguauuccacgcuguguugucggugagaacguuaauuucaaaaguaagggcgagaaauauuuacaaacuagaggucacgagguuguuguuguugacgaugagagguguaaaaagaucaugaaacaauuuaucgaugaaagaccucaggauugguuugaagauauuggugaguag

SEQ ID NO: 6147 - RNA, 477 nt, Artificial Sequence; identical to SEQ ID NO: 5387
  derived and/or modified sequence opt1 from Cytosine_Deaminase_fcy1__Saccharomyces_cerevisiae__AAB67713

SEQ ID NO: 6148 - RNA, 477 nt, Artificial Sequence; identical to SEQ ID NO: 5388
  derived and/or modified sequence opt2 from Cytosine_Deaminase_fcy1__Saccharomyces_cerevisiae__AAB67713

SEQ ID NO: 6149 - RNA, 477 nt, Artificial Sequence; identical to SEQ ID NO: 5389
  derived and/or modified sequence opt3 from Cytosine_Deaminase_fcy1__Saccharomyces_cerevisiae__AAB67713

SEQ ID NO: 6150 - RNA, 477 nt, Artificial Sequence; identical to SEQ ID NO: 5390
  derived and/or modified sequence opt4 from Cytosine_Deaminase_fcy1__Saccharomyces_cerevisiae__AAB67713

SEQ ID NO: 6151 - RNA, 477 nt, Artificial Sequence; identical to SEQ ID NO: 5391
  derived and/or modified sequence opt5 from Cytosine_Deaminase_fcy1__Saccharomyces_cerevisiae__AAB67713

SEQ ID NO: 6152 - RNA, 477 nt, Artificial Sequence
  derived and/or modified sequence opt6 from Cytosine_Deaminase_fcy1__Saccharomyces_cerevisiae__AAB67713
augguaacaggaggaauggcaagcaaaugggaucaaaaaggaauggacauagcauaugaagaagcagcgcuaggauauaaagaaggaggaguaccaauaggaggaugcuuaauaaauaacaaagacggaagcguacuaggaagaggacauaauaugagauuccaaaaaggaagugcaacauuacacggagaaauaagcacacuagaaaacuguggaagacuagaaggaaaaguauauaaagauacaacacuauauacaacauuaucaccaugugacaugugcacaggagcaauaauaauguacggaauaccaagauguguaguaggagaaaauguaaauuucaaaagcaaaggagaaaaauaucuacaaacaagaggacaugaaguaguaguaguagaugacgaaagauguaaaaaaauaaugaaacaauuuauagacgaaagaccacaagauugguuugaagauauaggagaauaa

SEQ ID NO: 6153 - protein, 158 aa, Artificial Sequence; identical to SEQ ID NO: 5385
  Cytosine_Deaminase_fcy1__Saccharomyces_cerevisiae__W7PK48

SEQ ID NO: 6154 - RNA, 477 nt, Artificial Sequence; identical to SEQ ID NO: 5386
  Cytosine_Deaminase_fcy1__Saccharomyces_cerevisiae__EWG82851

SEQ ID NO: 6155 - RNA, 477 nt, Artificial Sequence; identical to SEQ ID NO: 5387
  derived and/or modified sequence opt1 from Cytosine_Deaminase_fcy1__Saccharomyces_cerevisiae__EWG82851

SEQ ID NO: 6156 - RNA, 477 nt, Artificial Sequence; identical to SEQ ID NO: 5388
  derived and/or modified sequence opt2 from Cytosine_Deaminase_fcy1__Saccharomyces_cerevisiae__EWG82851

SEQ ID NO: 6157 - RNA, 477 nt, Artificial Sequence; identical to SEQ ID NO: 5389
  derived and/or modified sequence opt3 from Cytosine_Deaminase_fcy1__Saccharomyces_cerevisiae__EWG82851

SEQ ID NO: 6158 - RNA, 477 nt, Artificial Sequence; identical to SEQ ID NO: 5390
  derived and/or modified sequence opt4 from Cytosine_Deaminase_fcy1__Saccharomyces_cerevisiae__EWG82851

SEQ ID NO: 6159 - RNA, 477 nt, Artificial Sequence; identical to SEQ ID NO: 5391
  derived and/or modified sequence opt5 from Cytosine_Deaminase_fcy1__Saccharomyces_cerevisiae__EWG82851

SEQ ID NO: 6160 - RNA, 477 nt, Artificial Sequence
  derived and/or modified sequence opt6 from Cytosine_Deaminase_fcy1__Saccharomyces_cerevisiae__EWG82851
augguaacaggaggaauggcaaguaaaugggaucaaaaaggaauggauauagcauaugaagaagcagcauuaggauauaaagaaggaggaguaccaauaggaggauguuuaauaaauaauaaagauggaaguguauuaggaaggggacauaauaugagauuucaaaaaggaagugcaacauuacauggggaaauaaguacauuagaaaauuguggaagauuagaaggaaaaguauauaaagauacaacguuauauacaacauuaaguccaugugauauguguacaggagcaauaauaauguauggaauaccaagaugcguaguaggagaaaauguaaauuuuaaaaguaaaggagaaaaauauuuacaaacaagaggacaugaaguaguaguaguagaugaugaaagauguaaaaaaauaaugaaacaauuuauagaugaaagaccacaagauugguuugaagauauaggagaauaa

SEQ ID NO: 6161 - protein, 158 aa, Artificial Sequence; identical to SEQ ID NO: 5385
  Cytosine_Deaminase_fcy1__Saccharomyces_cerevisiae__W7R647

SEQ ID NO: 6162 - RNA, 477 nt, Artificial Sequence; identical to SEQ ID NO: 5386
  Cytosine_Deaminase_fcy1__Saccharomyces_cerevisiae__EWH15533

SEQ ID NO: 6163 - RNA, 477 nt, Artificial Sequence; identical to SEQ ID NO: 5387
  derived and/or modified sequence opt1 from Cytosine_Deaminase_fcy1__Saccharomyces_cerevisiae__EWH15533

SEQ ID NO: 6164 - RNA, 477 nt, Artificial Sequence; identical to SEQ ID NO: 5388
  derived and/or modified sequence opt2 from Cytosine_Deaminase_fcy1__Saccharomyces_cerevisiae__EWH15533

SEQ ID NO: 6165 - RNA, 477 nt, Artificial Sequence; identical to SEQ ID NO: 5389
  derived and/or modified sequence opt3 from Cytosine_Deaminase_fcy1__Saccharomyces_cerevisiae__EWH15533

SEQ ID NO: 6166 - RNA, 477 nt, Artificial Sequence; identical to SEQ ID NO: 5390
  derived and/or modified sequence opt4 from Cytosine_Deaminase_fcy1__Saccharomyces_cerevisiae__EWH15533

SEQ ID NO: 6167 - RNA, 477 nt, Artificial Sequence; identical to SEQ ID NO: 5391
  derived and/or modified sequence opt5 from Cytosine_Deaminase_fcy1__Saccharomyces_cerevisiae__EWH15533

SEQ ID NO: 6168 - RNA, 477 nt, Artificial Sequence
  derived and/or modified sequence opt6 from Cytosine_Deaminase_fcy1__Saccharomyces_cerevisiae__EWH15533
augguaacaggaggaauggcaaguaaaugggaucaaaaaggaauggacauagcauaugaagaagcagcauuaggauauaaagaaggaggaguaccaauaggaggauguuuaauaaauaauaaagacggaaguguauuaggaagaggacauaauaugagauuucaaaaaggaagugcaacauuacacggagaaauaaguacacuagaaaacuguggaagacuagaaggaaaaguauauaaagauacaacauuauauacaacauuaaguccaugugacaugugcacaggagcaauaauaauguauggaauaccaagauguguaguaggagaaaauguaaauuuuaaaagcaaaggagaaaaauauuuacaaacaagaggacaugaaguaguaguaguagaugacgaaagauguaaaaaaauaaugaaacaauuuauagaugaaagaccgcaagauugguuugaagauauaggagaauaa

SEQ ID NO: 6169 - protein, 260 aa, Artificial Sequence [sequence omitted]

SEQ ID NO: 6170 - RNA, 783 nt, Artificial Sequence
  Deoxy-cytidine_Kinase_dCK__Homo_sapiens__AAA35752
auggccaccccgcccaagagaagcugcccgucuuucucagccagcucugaggggacccgcaucaagaaaaucuccaucgaagggaacaucgcugcagggaagucaacauuugugaauauccuuaaacaauugugugaagauugggaagugguuccugaaccuguugccagauggugcaauguucaaaguacucaagaugaauuugaggaacuuacaaugucucagaaaaauggugggaauguucuucagaugauguaugagaaaccugaacgauggucuuuuaccuuccaaacauaugccugucucagucgaauaagagcucagcuugccucucugaauggcaagcucaaagaugcagagaaaccuguauuauuuuuugaacgaucuguguauagugacagguauauuuuugcaucuaauuuguaugaaucugaaugcaugaaugagacagaguggacaauuuaucaagacuggcaugacuggaugaauaaccaauuuggccaaagccuugaauuggauggaaucauuuaucuucaagccacuccagagacaugcuuacauagaauauauuuacggggaagaaaugaagagcaaggcauuccucuugaauauuuagagaagcuucauuauaaacaugaaagcuggcuccugcauaggacacugaaaaccaacuucgauuaucuucaagaggugccuaucuuaacacuggauguuaaugaagacuuuaaagacaaauaugaaagucugguugaaaaggucaaagaguuuuugaguacuuuguga

SEQ ID NO: 6171 - RNA, 783 nt, Artificial Sequence
  derived and/or modified sequence opt1 from Deoxy-cytidine_Kinase_dCK__Homo_sapiens__AAA35752
auggccacgcccccgaagcgcagcugccccuccuucagcgccuccagcgagggcacccggaucaagaagaucuccaucgaggggaacaucgcggccggcaagagcaccuucgugaacauccugaagcagcucugcgaggacugggaggucgugcccgagcccguggcccgcuggugcaacguccaguccacccaggacgaguucgaggagcugaccaugagccagaagaacgggggcaacgugcugcagaugauguacgagaagccggagcggugguccuucaccuuccagacguacgccugccucagccgcauccgggcccagcuggcgucccugaacgggaagcucaaggacgccgagaagcccgugcuguucuucgagcgcagcgucuacuccgaccgguacaucuucgccagcaaccuguacgaguccgagugcaugaacgagaccgaguggaccaucuaccaggacuggcacgacuggaugaacaaccaguucggccagagccucgagcuggacggcaucaucuaccugcaggccacccccgagacgugccuccaccgcaucuaccugcgggggcgcaacgaggagcagggcaucccccuggaguaccucgagaagcugcacuacaagcacgaguccuggcugcuccaccggacccugaagaccaacuucgacuaccugcaggaggugccgauccucacccuggacgugaacgaggacuucaaggacaaguacgagagccuggucgagaaggugaaggaguuccucuccacgcuguga

SEQ ID NO: 6172 - RNA, 783 nt, Artificial Sequence
  derived and/or modified sequence opt2 from Deoxy-cytidine_Kinase_dCK__Homo_sapiens__AAA35752
auggccaccccccccaagcgcuccugccccuccuucuccgccuccuccgagggcacccgcaucaagaagaucuccaucgagggcaacaucgccgccggcaaguccaccuucgucaacauccucaagcagcucugcgaggacugggaggucguccccgagcccgucgcccgcuggugcaacguccaguccacccaggacgaguucgaggagcucaccaugucccagaagaacggcggcaacguccuccagaugauguacgagaagcccgagcgcugguccuucaccuuccagaccuacgccugccucucccgcauccgcgcccagcucgccucccucaacggcaagcucaaggacgccgagaagcccguccucuucuucgagcgcuccgucuacuccgaccgcuacaucuucgccuccaaccucuacgaguccgagugcaugaacgagaccgaguggaccaucuaccaggacuggcacgacuggaugaacaaccaguucggccagucccucgagcucgacggcaucaucuaccuccaggccacccccgagaccugccuccaccgcaucuaccuccgcggccgcaacgaggagcagggcaucccccucgaguaccucgagaagcuccacuacaagcacgaguccuggcuccuccaccgcacccucaagaccaacuucgacuaccuccaggagguccccauccucacccucgacgucaacgaggacuucaaggacaaguacgagucccucgucgagaaggucaaggaguuccucuccacccucuga

SEQ ID NO: 6173 - RNA, 783 nt, Artificial Sequence
  derived and/or modified sequence opt3 from Deoxy-cytidine_Kinase_dCK__Homo_sapiens__AAA35752
auggccacacccccuaagagaagcugcccauccuucucugcuucaagugagggcaccaggaucaaaaagauuagcauagaagggaacaucgcagccggaaaauccacuuuugugaauauucugaagcagcucugugaggacugggaagucguuccggagcccguggcgcgguggugcaacguacaaucuacgcaggaugaauuugaggagcuuaccaugucgcagaaaaaugguggcaacgugcugcagaugauguacgaaaagccugagcgcuggucauucacauuccaaacuuaugcuuguuugagccgaauccgugcccaguuagcaagucugaaugggaagcuaaaagacgccgaaaagccaguccucuuuuucgagagauccguguacucugauagguauauuuuugcuagcaaccuguacgaguccgaaugcaugaaugagaccgaauggacaaucuaucaggacuggcacgauuggaugaacaaucaguucggacaaucacuugagcuggacggcauaaucuacuugcaggcaacccccgaaacuugucuccaucggauuuaucugcgcgguagaaacgaggagcaggggaucccucuggaauaccucgagaaauuacacuacaagcaugaaaguuggcugcuucacaggacauugaaaaccaauuuugauuaucugcaggagguuccaauucuaacgcucgacgugaacgaagauuucaaggacaaguacgagagccuggucgagaaagugaaggaauuucuuucuacucuguga

SEQ ID NO: 6174 - RNA, 783 nt, Artificial Sequence
  derived and/or modified sequence opt4 from Deoxy-cytidine_Kinase_dCK__Homo_sapiens__AAA35752
auggccaccccccccaagagaagcugccccagcuucagcgccagcagcgagggcaccagaaucaagaagaucagcaucgagggcaacaucgccgccggcaagagcaccuucgugaacauccugaagcagcugugcgaggacugggagguggugcccgagcccguggccagauggugcaacgugcagagcacccaggacgaguucgaggagcugaccaugagccagaagaacggcggcaacgugcugcagaugauguacgagaagcccgagagauggagcuucaccuuccagaccuacgccugccugagcagaaucagagcccagcuggccagccugaacggcaagcugaaggacgccgagaagcccgugcuguucuucgagagaagcguguacagcgacagauacaucuucgccagcaaccuguacgagagcgagugcaugaacgagaccgaguggaccaucuaccaggacuggcacgacuggaugaacaaccaguucggccagagccuggagcuggacggcaucaucuaccugcaggccacccccgagaccugccugcacagaaucuaccugagaggcagaaacgaggagcagggcaucccccuggaguaccuggagaagcugcacuacaagcacgagagcuggcugcugcacagaacccugaagaccaacuucgacuaccugcaggaggugcccauccugacccuggacgugaacgaggacuucaaggacaaguacgagagccugguggagaaggugaaggaguuccugagcacccuguga

SEQ ID NO: 6175 - RNA, 783 nt, Artificial Sequence
  derived and/or modified sequence opt5 from Deoxy-cytidine_Kinase_dCK__Homo_sapiens__AAA35752
auggccacacccccuaagagaagcugcccguccuucucugcuagcuccgagggcacccggaucaaaaagauuucuaucgaagggaacauugccgcgggaaaaagcacguuugugaauauccugaagcagcucugugaggacugggaagucguucccgagccuguggcucgcuggugcaacgugcaauccacccaggaugaauuugaggagcugacaaugucucagaaaaauggcgggaacguccuucagaugauguacgaaaagcccgagagauggagcuucaccuuccaaacauaugccugucugucccggauucgcgcccagcucgcuagccugaauggaaaacuuaaggacgccgaaaagccugugcuguuuuucgagagaucuguuuacuccgaucgguauaucuuugcuagcaaccucuacgagucugaaugcaugaaugagaccgaauggacaaucuaucaggacuggcacgauuggaugaacaaucaguucggccaaucccuggagcuggacgggauuaucuaccuccaggccacccccgaaacgugucugcaucgcauuuaucuuagaggacggaacgaggagcagggcaucccucuggaauaccucgagaaacugcacuacaagcaugaaagcuggcuucugcaccgcacccucaaaacaaauuuugauuaucugcaggaggugccgauucugacccucgacgucaacgaagauuucaaggacaaguacgagucucugguggagaaaguuaaggaauuucuuuccacacuguga

SEQ ID NO: 6176 - RNA, 783 nt, Artificial Sequence
  derived and/or modified sequence opt6 from Deoxy-cytidine_Kinase_dCK__Homo_sapiens__AAA35752
auggcaacaccaccaaaaagaagcugcccaucauucucagcaucaucagaaggcacaagaauaaaaaaaauaaguauagaaggaaauauagcagcaggaaaaucaacauucguaaacauacuaaaacaauuaugcgaagacugggaaguaguaccagaaccaguagcaagauggugcaacguacaaucaacacaagaugaauucgaagaacuaacaaugagccaaaaaaacggaggaaacguccuacaaaugauguacgaaaaaccagaaagauggucauucacauuccaaacauacgcaugccuaucaagaauaagagcacaacuagcaucccuaaacggaaaacuaaaagacgccgaaaaaccaguacuauucuucgaaagaucaguauacagcgacagauacauauucgcaucaaacuuauaugaaagcgaaugcaugaaugaaacagaauggacaauauaccaagauuggcacgacuggaugaauaaccaauucggacaaucacuagaauuagauggaauaauauauuuacaagcaacaccagaaacaugucuacacagaauauaccuaagaggaagaaacgaagaacaaggaauaccacuagaauacuuagaaaaauuacacuacaaacacgaaucauggcuauuacacagaacacuaaaaacaaauuucgauuaccuacaagaaguaccaauacuaacacuagacguaaacgaagacuucaaagacaaauacgaaucacuaguagaaaaaguaaaagaauucuuaucaacacuauaa

SEQ ID NO: 6177 - protein, 250 aa, Artificial Sequence
  Deoxynucleoside_Kinase_dNK__Drosophila_melanogaster__Q540Z9
MAEAASCARKGTKYAEGTQPFTVLIEGNIGSGKTTYLNHFEKYKNDICLLTEPVEKWRNVNGVNLLELMYKDPKKWAMPFQSYVTLTMLQSHTAPTNKKLKIMERSIFSARYCFVENMRRNGSLEQGMYNTLEEWYKFIEESIHVQADLIIYLRTSPEVAYERIRQRARSEESCVPLKYLQELHELHEDWLIHQRRPQSCKVLVLDADLNLENIGTEYQRSESSIFDAISSNQQPSPVLVSPSKRQRVAR

SEQ ID NO: 6178 - RNA, 753 nt, Artificial Sequence
  Deoxynucleoside_Kinase_dNK__Drosophila_melanogaster__AAM27518
auggcggaggcagcauccugugcccgaaaggggaccaaguacgccgagggcacccagcccuucaccguccucaucgagggcaacaucggcagcgggaagaccacguauuugaaccacuucgagaaguacaagaacgacauuugccugcugaccgagcccgucgagaaguggcgcaacgucaacgggguaaaucugcuggagcugauguacaaagaucccaagaagugggccaugcccuuucagaguuaugucacgcugaccaugcugcagucgcacaccgccccaaccaacaagaagcuaaaaauaauggagcgcuccauuuuuagcgcucgcuauugcuucguggagaacaugcgacgaaacggcucgcuggagcagggcauguacaauacgcuggaggagugguacaaguucaucgaagaguccauucacgugcaggcggaccucaucauauaucugcgcaccucgccggagguggcguacgaacgcauccggcagcgggcucguucugaggagagcugcgugccgcuuaaguaccuucaggagcugcaugaguugcacgaggacugguugauacaccagagacgaccgcagucgugcaagguccuaguccucgaugccgaucugaaccuggaaaacauuggcaccgaguaccagcgcucggagagcagcauauucgacgccaucucaaguaaccaacagcccucgccgguucuggugucgcccagcaagcgccagagggucgccagauaa

SEQ ID NO: 6179 - RNA, 753 nt, Artificial Sequence
  derived and/or modified sequence opt1 from Deoxynucleoside_Kinase_dNK__Drosophila_melanogaster__AAM27518
auggccgaggccgcgagcugcgcccgcaagggcaccaaguacgccgaggggacccagcccuucacggugcugaucgagggcaacaucggguccggcaagaccaccuaccucaaccacuucgagaaguacaagaacgacaucugccugcugaccgagccggucgagaaguggcggaacgugaacggggugaaccuccuggagcugauguacaaggaccccaagaagugggccaugcccuuccagagcuacgucacgcucaccaugcugcagucccacaccgcccccaccaacaagaagcugaagaucauggagcgcagcaucuucuccgcgcgguacugcuucguggagaacaugcgccggaacggcagccucgagcagggcauguacaacacgcuggaggagugguacaaguucaucgaggaguccauccacgugcaggccgaccugaucaucuaccuccgcaccagcccggaggucgccuacgagcggauccgccagcgggcccgcuccgaggagagcugcgugccccugaaguaccugcaggagcuccacgagcugcacgaggacuggcugauccaccagcggcgcccccaguccugcaaggugcucguccuggacgcggaccugaaccucgagaacaucgggaccgaguaccagcggagcgaguccagcaucuucgacgccaucuccagcaaccagcagcccuccccggugcuggugagccccuccaagcgccagcgggucgcccgcuga

SEQ ID NO: 6180 - RNA, 753 nt, Artificial Sequence
  derived and/or modified sequence opt2 from Deoxynucleoside_Kinase_dNK__Drosophila_melanogaster__AAM27518
auggccgaggccgccuccugcgcccgcaagggcaccaaguacgccgagggcacccagcccuucaccguccucaucgagggcaacaucggcuccggcaagaccaccuaccucaaccacuucgagaaguacaagaacgacaucugccuccucaccgagcccgucgagaaguggcgcaacgucaacggcgucaaccuccucgagcucauguacaaggaccccaagaagugggccaugcccuuccaguccuacgucacccucaccaugcuccagucccacaccgcccccaccaacaagaagcucaagaucauggagcgcuccaucuucuccgcccgcuacugcuucgucgagaacaugcgccgcaacggcucccucgagcagggcauguacaacacccucgaggagugguacaaguucaucgaggaguccauccacguccaggccgaccucaucaucuaccuccgcaccucccccgaggucgccuacgagcgcauccgccagcgcgcccgcuccgaggaguccugcgucccccucaaguaccuccaggagcuccacgagcuccacgaggacuggcucauccaccagcgccgcccccaguccugcaagguccucguccucgacgccgaccucaaccucgagaacaucggcaccgaguaccagcgcuccgaguccuccaucuucgacgccaucuccuccaaccagcagcccucccccguccucgucucccccuccaagcgccagcgcgucgcccgcuga

SEQ ID NO: 6181 - RNA, 753 nt, Artificial Sequence
  derived and/or modified sequence opt3 from Deoxynucleoside_Kinase_dNK__Drosophila_melanogaster__AAM27518
auggccgaggcugcaagcugcgccagaaagggcaccaaauacgcggaagggacacagcccuucacugugcugaucgagggaaacauugguuccggcaagacgaccuaucucaaucacuuugaaaaauacaagaacgacauaugucuucugacagagccugucgaaaaauggaggaauguuaacggggugaauuuguuagagcugauguauaaggauccaaagaaaugggcuaugccguuccaaucuuacguaacucuaaccaugcuccagucacauacagcccccaccaacaagaaacugaagaucauggagcggaguauuuuuagcgcacgcuauugcuucguggaaaauaugcgacguaacggaucccuugagcagggcauguacaauacucuggaagagugguauaaauuuaucgaggaaucuauucacguccaggccgacuugaucauauaccucagaacaucgccugagguggcuuacgaaaggauccggcaacgcgcaagaucagaggaaagcuguguuccacugaaguaucugcaggagcuccaugaguuacacgaagauuggcugauucaucagaggcggccccagaguugcaaggugcuugucuuggacgccgaucugaaccuagagaauaucgguaccgaauaccaacgcuccgagucuagcauuuucgacgcuaucuccucaaaccagcagccuaguccagugcucguaagccccucuaaacgacagagaguugccagguga

SEQ ID NO: 6182 - RNA, 753 nt, Artificial Sequence
  derived and/or modified sequence opt4 from Deoxynucleoside_Kinase_dNK__Drosophila_melanogaster__AAM27518
auggccgaggccgccagcugcgccagaaagggcaccaaguacgccgagggcacccagcccuucaccgugcugaucgagggcaacaucggcagcggcaagaccaccuaccugaaccacuucgagaaguacaagaacgacaucugccugcugaccgagcccguggagaaguggagaaacgugaacggcgugaaccugcuggagcugauguacaaggaccccaagaagugggccaugcccuuccagagcuacgugacccugaccaugcugcagagccacaccgcccccaccaacaagaagcugaagaucauggagagaagcaucuucagcgccagauacugcuucguggagaacaugagaagaaacggcagccuggagcagggcauguacaacacccuggaggagugguacaaguucaucgaggagagcauccacgugcaggccgaccugaucaucuaccugagaaccagccccgagguggccuacgagagaaucagacagagagccagaagcgaggagagcugcgugccccugaaguaccugcaggagcugcacgagcugcacgaggacuggcugauccaccagagaagaccccagagcugcaaggugcuggugcuggacgccgaccugaaccuggagaacaucggcaccgaguaccagagaagcgagagcagcaucuucgacgccaucagcagcaaccagcagcccagccccgugcuggugagccccagcaagagacagagaguggccagauga

SEQ ID NO: 6183 - RNA, 753 nt, Artificial Sequence
  derived and/or modified sequence opt5 from Deoxynucleoside_Kinase_dNK__Drosophila_melanogaster__AAM27518
auggccgaggcugccagcugcgcgagaaagggcaccaaauacgcugaagggacacagcccuucacggugcugaucgagggaaacauuggcuccgggaagaccacauaucucaaucacuuugaaaaauacaagaacgacaucugucugcuuaccgagccugucgaaaaauggcggaauguuaacggagugaaucugcucgagcugauguauaaggauccgaagaaaugggccaugcccuuccaaucuuacgugacacuuaccaugcugcagagccauacagccccuaccaacaagaaacucaagauuauggagcgcuccaucuuuucugcuagauauugcuucgucgaaaauaugcggcgcaacggcagccuggagcaggggauguacaauacgcuggaagagugguauaaauuuauugaggaauccauccacgugcaggccgaccucaucauuuaccugagaaccucucccgagguugcuuacgaacggauccgccaaagagcccggagcgaggaauccugugugccucuuaaguaucugcaggagcuccaugagcugcacgaagauuggcuuauucaucagcgcagaccccagagcugcaagguccuggugcucgacgcggaucugaaccuggagaauaucggaacagaauaccaacggucugaguccagcauuuucgacgccaucucuuccaaccagcagccuagcccgguucucgugucucccuccaaacgccagagagucgcucgguga

SEQ ID NO: 6184 - RNA, 753 nt, Artificial Sequence
  derived and/or modified sequence opt6 from Deoxynucleoside_Kinase_dNK__Drosophila_melanogaster__AAM27518
auggcagaagcagcaucaugcgcaagaaaaggaacaaaauacgcagaaggcacacaaccauucacaguauuaauagaaggaaacauaggaucaggaaaaacaacauaccuaaaccauuucgaaaaauacaaaaacgacauaugccuacuaaccgaaccaguagaaaaauggagaaacguaaacggaguaaaccuacuagaacuaauguacaaagacccaaaaaaaugggcaaugccauuccaaucauacgucacacuaacaauguuacaaucacacaccgccccaacaaacaaaaaauuaaaaauaauggaaagaucaauauucagcgcaagauacugcuuuguagaaaacaugagaagaaacggaucacuugaacaaggcauguauaacacacuagaagaaugguacaaauucaucgaagaaucaauacauguccaagccgaccuaauaauauauuuaagaaccucaccagaaguagcauacgaaagaauaagacaaagagcaagaucugaagaaagcugcguaccauuaaaauaccuacaagaacuacacgaauuacacgaagacuggcuaauacaccaaagaagaccacaaucauguaaaguacuaguacuagacgcagacuuaaaccuagaaaacauaggaacagaauaccaaagaucagaaucaucaauauucgacgcaauaucaucaaaccaacaaccaucaccaguacuaguaucaccaucaaaaagacaaagagucgccagauaa

SEQ ID NO: 6185 - protein, 250 aa, Artificial Sequence; identical to SEQ ID NO: 6177
  Deoxynucleoside_Kinase_dNK__Drosophila_melanogaster__Q9XZT6

SEQ ID NO: 6186 - RNA, 753 nt, Artificial Sequence; identical to SEQ ID NO: 6178
  Deoxynucleoside_Kinase_dNK__Drosophila_melanogaster__AAD47355

SEQ ID NO: 6187 - RNA, 753 nt, Artificial Sequence; identical to SEQ ID NO: 6179
  derived and/or modified sequence opt1 from Deoxynucleoside_Kinase_dNK__Drosophila_melanogaster__AAD47355

SEQ ID NO: 6188 - RNA, 753 nt, Artificial Sequence; identical to SEQ ID NO: 6180
  derived and/or modified sequence opt2 from Deoxynucleoside_Kinase_dNK__Drosophila_melanogaster__AAD47355

SEQ ID NO: 6189 - RNA, 753 nt, Artificial Sequence; identical to SEQ ID NO: 6181
  derived and/or modified sequence opt3 from Deoxynucleoside_Kinase_dNK__Drosophila_melanogaster__AAD47355

SEQ ID NO: 6190 - RNA, 753 nt, Artificial Sequence; identical to SEQ ID NO: 6182
  derived and/or modified sequence opt4 from Deoxynucleoside_Kinase_dNK__Drosophila_melanogaster__AAD47355

SEQ ID NO: 6191 - RNA, 753 nt, Artificial Sequence; identical to SEQ ID NO: 6183
  derived and/or modified sequence opt5 from Deoxynucleoside_Kinase_dNK__Drosophila_melanogaster__AAD47355

SEQ ID NO: 6192 - RNA, 753 nt, Artificial Sequence
  derived and/or modified sequence opt6 from Deoxynucleoside_Kinase_dNK__Drosophila_melanogaster__AAD47355
auggcagaagcagcaucaugcgcaagaaaaggaacuaaauacgcagaaggcacacaaccauucacaguauuaauagaaggaaacauaggaagcggaaaaacaacauacuuaaaccacuucgaaaaauauaaaaacgacauaugccuacuaacugaaccaguagaaaaauggagaaacguaaacggaguaaacuuacuagaacuaauguacaaagacccuaaaaaaugggcaaugccauuccaaucauacguaacacuaacaaugcuacaaucacauacagcaccaacaaacaaaaaacuaaaaauaauggaaagaaguauauucucagcaagauauugcuucguagaaaacaugagaagaaacggaagccuagaacaaggaauguacaacacauuagaagaaugguacaaauucauagaagaaucaauacacguacaagccgaccuaauaauauaccuaagaacaucaccagaaguagcauacgaaagaauaagacaaagagcaagaagcgaagaaagcugcguaccauuaaaauaccuacaagaacuacacgaacuacacgaagacuggcuaauacaccaaagaagaccacaaaguugcaaaguauuaguauuagacgcagaccuaaaucuagaaaacauaggaacagaauaucaaagaucagaaucaaguauauucgacgcaauaucaucaaaccaacaaccaucaccaguacuaguaucacccucaaaaagacaaagaguagcaagauaa

SEQ ID NO: 6193 - protein, 239 aa, Artificial Sequence
  Purine_Nucleoside_Phosphorylase_deoD__Escherichia_coli_ _A0A023Z7B9
MATPHINAEMGDFADVVLMPGDPLRAKYIAETFLEDAREVNNVRGMLGFTGTYKGRKISVMGHGMGIPSCSIYTKELITDFGVKKIIRVGSCGAVLPHVKLRDVVIGMGACTDSKVNRIRFKDHDFAAIADFDMVRNAVDAAKALGIDARVGNLFSADLFYSPDGEMFDVMEKYGILGVEMEAAGIYGVAAEFGAKALTICTVSDHIRTHEQTTAAERQTTFNDMIKIALESVLLGDKE

SEQ ID NO: 6194 - RNA, 720 nt, Artificial Sequence
  Purine_Nucleoside_Phosphorylase_deoD__Escherichia_coli__AHY74112
auggcuaccccacacauuaaugcagaaaugggcgauuucgcugacguaguuuugaugccaggcgacccgcugcgugcgaaguauauugcugaaacuuuccuugaagaugcccgugaagugaacaacguucgcgguaugcugggcuucaccgguacuuacaaaggccgcaaaauuuccguaaugggucacgguauggguaucccguccugcuccaucuacaccaaagaacugaucaccgauuucggcgugaagaaaauuauccgcguggguuccuguggcgcaguucugccgcacguaaaacugcgcgacgucguuaucgguaugggugccugcaccgauuccaaaguuaaccgcauccguuuuaaagaccaugacuuugccgcuaucgcugacuucgacauggugcguaacgcaguagaugcagcuaaagcacugggcauugaugcucgcguggguaaccuguucuccgcugaccuguucuacucuccggacggcgaaauguucgacgugauggaaaaauacggcauucucggcguggaaauggaagcggcugguaucuacggcgucgcugcagaauuuggcgcgaaagcccugaccaucugcaccguaucugaccacauccgcacucacgagcagaccacugccgcugagcgucagaccaccuucaacgacaugaucaaaaucgcacuggaauccguucugcugggcgauaaagaguaa

SEQ ID NO: 6195 - RNA, 720 nt, Artificial Sequence
  derived and/or modified sequence opt1 from Purine_Nucleoside_Phosphorylase_deoD__Escherichia_coli__AHY74112
auggccacgccccacaucaacgccgagaugggcgacuucgcggacgugguccugaugccgggggacccccuccgcgccaaguacaucgccgagaccuuccuggaggacgcccgggaggugaacaacgugcgcggcaugcugggguucaccggcaccuacaaggggcggaagaucagcgucaugggccacggcauggggauccccuccugcagcaucuacaccaaggagcucaucaccgacuucggcgugaagaagaucauccgcgugggguccugcggcgccguccugccccacgugaagcugcgggacguggucaucgggaugggcgcgugcacggacagcaaggugaaccgcauccgguucaaggaccacgacuucgccgccaucgccgacuucgacauggugcgcaacgcggucgacgccgccaaggcccucggcaucgacgcccggguggggaaccuguucuccgcggaccuguucuacagcccggacggcgagauguucgacgugauggagaaguacgggauccucggcgucgagauggaggccgccggcaucuacgggguggccgccgaguucggcgcgaaggcccugaccaucugcaccguguccgaccacauccgcacccacgagcagacgaccgccgccgagcggcagaccaccuucaacgacaugaucaagaucgcccuggagagcguccuccugggggacaaggaguga

SEQ ID NO: 6196 - RNA, 720 nt, Artificial Sequence
  derived and/or modified sequence opt2 from Purine_Nucleoside_Phosphorylase_deoD__Escherichia_coli__AHY74112
auggccaccccccacaucaacgccgagaugggcgacuucgccgacgucguccucaugcccggcgacccccuccgcgccaaguacaucgccgagaccuuccucgaggacgcccgcgaggucaacaacguccgcggcaugcucggcuucaccggcaccuacaagggccgcaagaucuccgucaugggccacggcaugggcauccccuccugcuccaucuacaccaaggagcucaucaccgacuucggcgucaagaagaucauccgcgucggcuccugcggcgccguccucccccacgucaagcuccgcgacgucgucaucggcaugggcgccugcaccgacuccaaggucaaccgcauccgcuucaaggaccacgacuucgccgccaucgccgacuucgacaugguccgcaacgccgucgacgccgccaaggcccucggcaucgacgcccgcgucggcaaccucuucuccgccgaccucuucuacucccccgacggcgagauguucgacgucauggagaaguacggcauccucggcgucgagauggaggccgccggcaucuacggcgucgccgccgaguucggcgccaaggcccucaccaucugcaccgucuccgaccacauccgcacccacgagcagaccaccgccgccgagcgccagaccaccuucaacgacaugaucaagaucgcccucgaguccguccuccucggcgacaaggaguga

SEQ ID NO: 6197 - RNA, 720 nt, Artificial Sequence
  derived and/or modified sequence opt3 from Purine_Nucleoside_Phosphorylase_deoD__Escherichia_coli__AHY74112
auggccacaccccacaucaacgcugagaugggcgacuucgcagaugugguccugaugccuggggacccacucagagccaaguacauugcggaaaccuuucuugaggaugcuagggaaguuaauaacgugcggggaaugcuggguuucacuggcacguauaaagggcgcaagauaagcguaaugggacauggcauggguaucccguccugcucuauuuacaccaaagaguugaucacagacuuuggggugaagaaaauuauccgagucggaucauguggcgccguguuaccccacguuaagcugcgugauguggucauaggcaugggggcaugcacugacaguaaggugaauagaaucagguucaaagaucaugacuuugccgcuauugcagauuucgacaugguacggaacgccguugaugcugccaaggcgcuaggaaucgacgcacgcguggguaaucucuuuagcgccgaucuguucuauuccccugacggcgaaauguuugacgucauggagaaauacgggauucuuggaguggagauggaagcugccggcaucuaugguguggcagcugaguucggggccaaggcgcugaccauauguacagucucugaucacauuagaacccaugaacagacuacagccgcagagaggcaaaccacguuuaacgacaugaucaaaauugcuuuggagucgguucuccugggagauaaggaauga

SEQ ID NO: 6198 - RNA, 720 nt, Artificial Sequence
  derived and/or modified sequence opt4 from Purine_Nucleoside_Phosphorylase_deoD__Escherichia_coli__AHY74112
auggccaccccccacaucaacgccgagaugggcgacuucgccgacguggugcugaugcccggcgacccccugagagccaaguacaucgccgagaccuuccuggaggacgccagagaggugaacaacgugagaggcaugcugggcuucaccggcaccuacaagggcagaaagaucagcgugaugggccacggcaugggcauccccagcugcagcaucuacaccaaggagcugaucaccgacuucggcgugaagaagaucaucagagugggcagcugcggcgccgugcugccccacgugaagcugagagacguggugaucggcaugggcgccugcaccgacagcaaggugaacagaaucagauucaaggaccacgacuucgccgccaucgccgacuucgacauggugagaaacgccguggacgccgccaaggcccugggcaucgacgccagagugggcaaccuguucagcgccgaccuguucuacagccccgacggcgagauguucgacgugauggagaaguacggcauccugggcguggagauggaggccgccggcaucuacggcguggccgccgaguucggcgccaaggcccugaccaucugcaccgugagcgaccacaucagaacccacgagcagaccaccgccgccgagagacagaccaccuucaacgacaugaucaagaucgcccuggagagcgugcugcugggcgacaaggaguga

SEQ ID NO: 6199 - RNA, 720 nt, Artificial Sequence
  derived and/or modified sequence opt5 from Purine_Nucleoside_Phosphorylase_deoD__Escherichia_coli__AHY74112
auggccacaccccacaucaacgcugagaugggcgacuucgccgaugugguccugaugccuggggacccgcucagagcgaaguacauugcugaaaccuuucuggaggaugcccgggaaguuaauaacgugcgcggaaugcuuggcuucacggggaccuauaaaggaagaaagaucagcgugaugggccaugggaugggcauucccuccugcucuaucuacacaaaagagcugauuaccgacuuuggagucaagaaaaucauccgggugggcagcuguggggccguucucccucacgugaagcugcgcgaugucgugauuggaaugggcgcuugcacagacuccaagguuaauagaauccgguucaaagaucaugacuuugccgcuauugccgauuucgacauggugcgcaacgcggucgaugccgcuaaggcccuugggaucgacgcuagagugggaaaucuguuuucugccgaucucuucuauagccccgacggcgaaauguuugacgugauggagaaauacgggauucugggagucgagauggaagcggccggcaucuauggcguugcugccgaguucggggcuaaggcccugaccauuuguacaguguccgaucacauccggacccaugaacagacgaccgccgcugagcgccaaacaaccuuuaacgacaugaucaaaauugcgcucgagucugugcugcuuggagauaaggaauga

SEQ ID NO: 6200 - RNA, 720 nt, Artificial Sequence
  derived and/or modified sequence opt6 from Purine_Nucleoside_Phosphorylase_deoD__Escherichia_coli__AHY74112
auggcaacaccacauauaaaugcagaaaugggggacuuugcagauguaguacuaaugccaggggacccauuaagagcaaaauacauagcagaaacauuuuuagaagacgcaagagaaguaaauaacguaagaggaauguuaggauuuacaggaaccuauaaagggagaaaaauaucaguaaugggacauggaaugggcauuccaaguugcaguauauauacaaaagaauuaauaacagacuuuggaguaaaaaaaauaauaagaguaggaucauguggagcaguacuaccacacguaaaauuaagagauguaguaauaggaaugggagcauguacagauagcaaaguaaauagaauaagauuuaaagaucacgauuucgcagcaauagcagauuuugauaugguacgaaaugccguagacgcagccaaagcauuaggaauagacgcaagagugggaaaucuuuuuagcgcagacuuauuuuauagcccagacggagaaauguucgauguaauggaaaaauacggaauauuaggaguagaaauggaagcagcagggauauauggaguagcagcagaauuuggagcaaaagcacuaacaauauguaccguaagcgaccacauaagaacacacgaacaaacaacagcagcagaaagacaaacaacauucaaugacaugauaaaaauagcacuagaaaguguacuauuaggagacaaagaauaa

SEQ ID NO: 6201 - protein, 239 aa, Artificial Sequence
  Purine_Nucleoside_Phosphorylase_deoD__Escherichia_coli_ _A0A024KMI2
MATPHINAEMGDFADVVLMPGDPLRAKYIAETFLEDAREVNNVRGMLGFTGTYKGRKISVMGHGMGIPSCSIYTKELITDFGVKKIIRVGSCGAVLPHVKLRDVVIGMGACTDSKVNRIRFKDHDFAAIADFDMVRNAVDAAKALGVDARVGNLFSADLFYSPDGEMFDVMEKYGILGVEMEAAGIYGVAAEFGAKALTICTVSDHIRTHEQTTAAERQTTFNDMIKIALESVLLGDKE

SEQ ID NO: 6202 - RNA, 720 nt, Artificial Sequence
  Purine_Nucleoside_Phosphorylase_deoD__Escherichia_coli__CDU33019
auggcuaccccacacauuaaugcagaaaugggcgauuucgcugacguaguuuugaugccaggcgacccgcugcgugcgaaguauauugcugaaacuuuccuugaagaugcccgugaagugaacaacguucgcgguaugcugggcuucaccgguacuuacaaaggccgcaaaauuuccguaaugggucacgguauggguaucccguccugcuccaucuacaccaaagaacugaucaccgauuucggcgugaagaaaauuauccgcguggguuccuguggcgcaguucugccgcacguaaaacugcgcgacgucguuaucgguaugggugccugcaccgauuccaaaguuaaccguauccguuuuaaagaccaugacuuugccgcuaucgcugacuuugacauggugcguaacgcgguagacgcggcuaaagcacuggguguugaugcucgcguggguaaccuguucuccgcugaccuguucuacucuccggacggcgaaauguucgacgugauggaaaaauacggcauccucggcguggaaauggaagcggcugguaucuacggcgucgcugcagaguuuggcgcgaaagcccugaccaucugcaccgugucugaccacauccgcacucacgagcagaccacugccgcugagcgucagaccaccuucaacgacaugaucaaaaucgcacuggaauccguucugcugggcgauaaagaguaa

SEQ ID NO: 6203 - RNA, 720 nt, Artificial Sequence
  derived and/or modified sequence opt1 from Purine_Nucleoside_Phosphorylase_deoD__Escherichia_coli__CDU33019
auggccacgccccacaucaacgccgagaugggcgacuucgcggacgugguccugaugccgggggacccccuccgcgccaaguacaucgccgagaccuuccuggaggacgcccgggaggugaacaacgugcgcggcaugcugggguucaccggcaccuacaaggggcggaagaucagcgucaugggccacggcauggggauccccuccugcagcaucuacaccaaggagcucaucaccgacuucggcgugaagaagaucauccgcgugggguccugcggcgccguccugccccacgugaagcugcgggacguggucaucgggaugggcgcgugcacggacagcaaggugaaccgcauccgguucaaggaccacgacuucgccgccaucgccgacuucgacauggugcgcaacgcggucgacgccgccaaggcccucggcguggacgcccggguggggaaccuguucuccgcggaccuguucuacagcccggacggcgagauguucgacgucauggagaaguacgggauccucggcguggagauggaggccgccggcaucuacgggguggccgccgaguucggcgcgaaggcccugaccaucugcaccgucuccgaccacauccgcacccacgagcagacgaccgccgccgagcggcagaccaccuucaacgacaugaucaagaucgcccuggagagcgugcuccugggggacaaggaguga

SEQ ID NO: 6204 - RNA, 720 nt, Artificial Sequence
  derived and/or modified sequence opt2 from Purine_Nucleoside_Phosphorylase_deoD__Escherichia_coli__CDU33019
auggccaccccccacaucaacgccgagaugggcgacuucgccgacgucguccucaugcccggcgacccccuccgcgccaaguacaucgccgagaccuuccucgaggacgcccgcgaggucaacaacguccgcggcaugcucggcuucaccggcaccuacaagggccgcaagaucuccgucaugggccacggcaugggcauccccuccugcuccaucuacaccaaggagcucaucaccgacuucggcgucaagaagaucauccgcgucggcuccugcggcgccguccucccccacgucaagcuccgcgacgucgucaucggcaugggcgccugcaccgacuccaaggucaaccgcauccgcuucaaggaccacgacuucgccgccaucgccgacuucgacaugguccgcaacgccgucgacgccgccaaggcccucggcgucgacgcccgcgucggcaaccucuucuccgccgaccucuucuacucccccgacggcgagauguucgacgucauggagaaguacggcauccucggcgucgagauggaggccgccggcaucuacggcgucgccgccgaguucggcgccaaggcccucaccaucugcaccgucuccgaccacauccgcacccacgagcagaccaccgccgccgagcgccagaccaccuucaacgacaugaucaagaucgcccucgaguccguccuccucggcgacaaggaguga

SEQ ID NO: 6205 - RNA, 720 nt, Artificial Sequence
  derived and/or modified sequence opt3 from Purine_Nucleoside_Phosphorylase_deoD__Escherichia_coli__CDU33019
auggccacaccccacaucaacgcugagaugggcgacuucgcagaugugguccugaugccuggggacccacucagagccaaguacauugcggaaaccuuucuugaggaugcuagggaaguuaauaacgugcggggaaugcuggguuucacuggcacguauaaagggcgcaagauaagcguaaugggacauggcauggguaucccguccugcucuauuuacaccaaagaguugaucacagacuuuggggugaagaaaauuauccgagucggaucauguggcgccguguuaccccacguuaagcugcgugauguggucauaggcaugggggcaugcacugacaguaaggugaauagaaucagguucaaagaucaugacuuugccgcuauugcagauuucgacaugguacggaacgccguugaugcugccaaggcgcuaggaguggacgcacgcgucgguaaucucuuuagcgccgaucuguucuauuccccugacggcgaaauguuugacgugauggagaaauacgggauccuuggaguggagauggaagcugccggcauuuauggugucgcagcugaguucggggccaaggcgcugaccaucuguacaguuucugaucacauaagaacccaugaacagacuacagccgcagagaggcaaaccacguuuaacgacaugauuaaaaucgcuuuggagucggugcuccugggagauaaggaauga

SEQ ID NO: 6206 - RNA, 720 nt, Artificial Sequence
  derived and/or modified sequence opt4 from Purine_Nucleoside_Phosphorylase_deoD__Escherichia_coli__CDU33019
auggccaccccccacaucaacgccgagaugggcgacuucgccgacguggugcugaugcccggcgacccccugagagccaaguacaucgccgagaccuuccuggaggacgccagagaggugaacaacgugagaggcaugcugggcuucaccggcaccuacaagggcagaaagaucagcgugaugggccacggcaugggcauccccagcugcagcaucuacaccaaggagcugaucaccgacuucggcgugaagaagaucaucagagugggcagcugcggcgccgugcugccccacgugaagcugagagacguggugaucggcaugggcgccugcaccgacagcaaggugaacagaaucagauucaaggaccacgacuucgccgccaucgccgacuucgacauggugagaaacgccguggacgccgccaaggcccugggcguggacgccagagugggcaaccuguucagcgccgaccuguucuacagccccgacggcgagauguucgacgugauggagaaguacggcauccugggcguggagauggaggccgccggcaucuacggcguggccgccgaguucggcgccaaggcccugaccaucugcaccgugagcgaccacaucagaacccacgagcagaccaccgccgccgagagacagaccaccuucaacgacaugaucaagaucgcccuggagagcgugcugcugggcgacaaggaguga

SEQ ID NO: 6207 - RNA, 720 nt, Artificial Sequence
  derived and/or modified sequence opt5 from Purine_Nucleoside_Phosphorylase_deoD__Escherichia_coli__CDU33019
auggccacaccccacaucaacgcugagaugggcgacuucgccgaugugguccugaugccuggggacccgcucagagcgaaguacauugcugaaaccuuucuggaggaugcccgggaaguuaauaacgugcgcggaaugcuuggcuucacggggaccuauaaaggaagaaagaucagcgugaugggccaugggaugggcauucccuccugcucuaucuacacaaaagagcugauuaccgacuuuggagucaagaaaaucauccgggugggcagcuguggggccguucucccucacgugaagcugcgcgaugucgugauuggaaugggcgcuugcacagacuccaagguuaauagaauccgguucaaagaucaugacuuugccgcuauugccgauuucgacauggugcgcaacgcggucgaugccgcuaaggcccuugggguggacgcuagagugggaaaucuguuuucugccgaucucuucuauagccccgacggcgaaauguuugacgucauggagaaauacgggauccugggaguugagauggaagcggccggcauuuauggcguggcugccgaguucggggcuaaggcccugaccaucuguacaguguccgaucacauucggacccaugaacagacgaccgccgcugagcgccaaacaaccuuuaacgacaugaucaaaaucgcgcucgagucuguccugcuuggagauaaggaauga

SEQ ID NO: 6208 - RNA, 720 nt, Artificial Sequence
  derived and/or modified sequence opt6 from Purine_Nucleoside_Phosphorylase_deoD__Escherichia_coli__CDU33019
auggcaacaccacauauaaaugcagaaaugggagacuuugcagauguaguacuaaugccaggagacccauuaagagcaaaauauauagcagaaacauuccucgaagacgcaagagaaguaaauaacguaagagggauguuaggauuuacagggacauauaaaggaagaaaaauaaguguaaugggacaugguaugggaauaccaucaugcaguauauauaccaaagaauuaauaacggacuuuggaguaaaaaaaauaauaagaguaggaucaugcggggccguacuaccacaugugaaauuaagagauguaguaauaggaaugggggcauguacagacaguaaaguaaauaggauaagauuuaaagaucacgauuucgcagcaauagcagacuucgauaugguaagaaaugcaguugacgcagcaaaagcauuaggaguagacgcaagagugggaaaucuauucagugcagacuuauucuauagcccagacggagaaauguucgauguaauggaaaaauacgggauauuaggaguggaaauggaagcagcaggaauauauggaguagcagcagaauuuggagcaaaagcguuaacaauauguacgguaagcgaucacauaagaacacacgaacaaacaacagcagcagaaagacaaacaacauucaaugauaugauaaaaauagcauuagaaaguguacuauuaggagauaaagaauga

SEQ ID NO: 6209 - protein, 235 aa, Artificial Sequence
  Purine_Nucleoside_Phosphorylase_deoD__Escherichia_coli_ _A0A0E0SRY5
MTAHINAKLGDFAPTVIMPGDPLRAKFIAENYLQDHREVTNVRNMLGYTGFYSGQLISVMGHGMGIPSMTLYAHELVNDFDVKRIIRVGSLGATQRTIKMRDIILAVASGTDSVTNFKRSSGYFMASSAYFPLLQKAWSLAQEAGLEVKAGNVFSGDIYYDPDDNLIPALEKFGVLGIDMEVAGLYALAHQFGIEALAILTVSDHCLTGEETTAEERQLTFNNMIELALNTAVAI

SEQ ID NO: 6210 - RNA, 708 nt, Artificial Sequence
  Purine_Nucleoside_Phosphorylase_deoD__Escherichia_coli__ACD54493
augacugcacauauaaaugcuaaacuaggcgauuuugcaccaacaguaauuaugccaggagauccucuaagggcgaaauuuauagccgaaaacuaucugcaggaccaccgugaagucacaaauguucggaauauguugggauacacgggauucuauucagggcaacucauuucugugauggggcacggaaugggaauuccaucaaugacauuauaugcccaugaacugguuaaugauuuugauguaaaacggauuauucguguuggcagucuuggugcaacacaacguacaauuaaaaugcgggauauuauuuuagcggucgcuuccggaacagacucugucacuaauuuuaaacguaguucggguuacuuuauggcguccuccgcauauuuccccuuauuacaaaaagcauggucauuagcucaggaagccgguuuagagguaaaagcuggcaauguauuuagcggcgacauuuauuacgauccggaugauaauuuaauuccggcacuugagaaauucggagugcuagguaucgauauggaagucgcaggguuauaugcacuugcacaucaauucgguauugaagcguuggcaauuuuaacgguauccgaucacugucugacaggagaagaaacaacagcagaagagcgacaguuaacauuuaacaacaugauugaauuggcgcugaauacugcugucgccauuuag

SEQ ID NO: 6211 - RNA, 708 nt, Artificial Sequence
  derived and/or modified sequence opt1 from Purine_Nucleoside_Phosphorylase_deoD__Escherichia_coli__ACD54493
augaccgcccacaucaacgccaagcugggcgacuucgcgcccaccgugaucaugccgggggacccccuccgcgccaaguucaucgccgagaacuaccugcaggaccaccgggaggucacgaacgugcgcaacaugcugggcuacaccggguucuacagcggccagcucaucuccgugauggggcacggcaugggcauccccagcaugacccuguacgcccacgagcuggucaacgacuucgacgugaagcggaucauccgcguggggucccucggcgccacccagcggacgaucaagaugcgcgacaucauccuggcggucgccagcgggaccgacuccgugaccaacuucaagcggagcuccggcuacuucauggccagcuccgccuacuucccccugcuccagaaggcguggagccuggcccaggaggccgggcuggaggugaaggccggcaacgucuucuccggcgacaucuacuacgacccggacgacaaccucauccccgcccuggagaaguucggggugcugggcaucgacauggagguggcggggcucuacgcccuggcccaccaguucggcaucgaggcccuggccauccucaccgucagcgaccacugccugacgggcgaggagaccaccgcggaggagcgccagcugaccuucaacaacaugaucgagcucgcccugaacacggccguggccaucuga

SEQ ID NO: 6212 - RNA, 708 nt, Artificial Sequence
  derived and/or modified sequence opt2 from Purine_Nucleoside_Phosphorylase_deoD__Escherichia_coli__ACD54493
augaccgcccacaucaacgccaagcucggcgacuucgcccccaccgucaucaugcccggcgacccccuccgcgccaaguucaucgccgagaacuaccuccaggaccaccgcgaggucaccaacguccgcaacaugcucggcuacaccggcuucuacuccggccagcucaucuccgucaugggccacggcaugggcauccccuccaugacccucuacgcccacgagcucgucaacgacuucgacgucaagcgcaucauccgcgucggcucccucggcgccacccagcgcaccaucaagaugcgcgacaucauccucgccgucgccuccggcaccgacuccgucaccaacuucaagcgcuccuccggcuacuucauggccuccuccgccuacuucccccuccuccagaaggccuggucccucgcccaggaggccggccucgaggucaaggccggcaacgucuucuccggcgacaucuacuacgaccccgacgacaaccucauccccgcccucgagaaguucggcguccucggcaucgacauggaggucgccggccucuacgcccucgcccaccaguucggcaucgaggcccucgccauccucaccgucuccgaccacugccucaccggcgaggagaccaccgccgaggagcgccagcucaccuucaacaacaugaucgagcucgcccucaacaccgccgucgccaucuga

SEQ ID NO: 6213 - RNA, 708 nt, Artificial Sequence
  derived and/or modified sequence opt3 from Purine_Nucleoside_Phosphorylase_deoD__Escherichia_coli__ACD54493
augaccgcccacaucaacgcuaagcugggcgacuucgcacccacagugauuaugccuggggauccacucagagccaaauuuauagcggagaauuaccuucaggaccauagggaagucacuaacguucggaauaugcugggauauacggguuucuacagcggccaauugaucuccgugauggggcacggaaugggcauuccgucuaugaccuuauaugcucaugagcugguaaacgauuuugacgugaagcgcaucauucgagucgguucacuaggggccacacagcguacuaucaaaaugagagauauaauccucgcaguggccaguggaaccgacagcguuacaaauuucaagagguccucuggcuacuuuauggcuucgucagcauauuucccccugcuucagaaagccuggagccuggcucaggaagccggcuuggaggugaaggcggggaacgucuuuaguggagauauuuacuaugacccugaugacaaucucaucccagcacuggaaaaguucggugugcugggcauugauauggagguagccgggcucuacgcuuuagcccaccaauuuggaaucgaggcacuggcuauacuuaccguuuccgaccauugcuugacuggcgaagagacaaccgccgaggaacggcagcugacguucaacaauaugauugagcuagcgcucaacacugccguggcaaucuga

SEQ ID NO: 6214 - RNA, 708 nt, Artificial Sequence
  derived and/or modified sequence opt4 from Purine_Nucleoside_Phosphorylase_deoD__Escherichia_coli__ACD54493
augaccgcccacaucaacgccaagcugggcgacuucgcccccaccgugaucaugcccggcgacccccugagagccaaguucaucgccgagaacuaccugcaggaccacagagaggugaccaacgugagaaacaugcugggcuacaccggcuucuacagcggccagcugaucagcgugaugggccacggcaugggcauccccagcaugacccuguacgcccacgagcuggugaacgacuucgacgugaagagaaucaucagagugggcagccugggcgccacccagagaaccaucaagaugagagacaucauccuggccguggccagcggcaccgacagcgugaccaacuucaagagaagcagcggcuacuucauggccagcagcgccuacuucccccugcugcagaaggccuggagccuggcccaggaggccggccuggaggugaaggccggcaacguguucagcggcgacaucuacuacgaccccgacgacaaccugauccccgcccuggagaaguucggcgugcugggcaucgacauggagguggccggccuguacgcccuggcccaccaguucggcaucgaggcccuggccauccugaccgugagcgaccacugccugaccggcgaggagaccaccgccgaggagagacagcugaccuucaacaacaugaucgagcuggcccugaacaccgccguggccaucuga

SEQ ID NO: 6215 - RNA, 708 nt, Artificial Sequence
  derived and/or modified sequence opt5 from Purine_Nucleoside_Phosphorylase_deoD__Escherichia_coli__ACD54493
augaccgcccacaucaacgcuaagcugggcgacuucgcccccacagugauuaugccuggggauccgcucagagcgaaauuuaucgcugagaauuaccugcaggaccaucgggaagucacgaacguucgcaauaugcuuggauauaccggcuucuacagcgggcaacugauuuccgugaugggacacggcauggggauccccucuaugacacucuaugcccaugagcuggugaacgauuuugacgucaagagaauuauccgggugggaagccuuggcgccacccagcgcacaaucaaaaugagagauauuauccuggcuguugccuccggcaccgacucugugacaaauuucaagcggagcuccggguacuuuauggcuucuagcgccuauuucccucuccugcagaaagcguggucccuggcccaggaagcuggacucgaggucaaggccggcaacguguuuagcggggauauuuacuaugaccccgaugacaaucugaucccugcucuugaaaaguucggaguucugggcauugauauggagguggccgggcucuacgcgcuggcccaccaauuuggaaucgaggcucuugccauucugaccgucucugaccauugccucacgggcgaagagaccacagcugaggaacgccagcugaccuucaacaauaugaucgagcuggcccucaacacagccguggcuaucuga

SEQ ID NO: 6216 - RNA, 708 nt, Artificial Sequence
  derived and/or modified sequence opt6 from Purine_Nucleoside_Phosphorylase_deoD__Escherichia_coli__ACD54493
augacagcacacauaaaugcaaaacuaggagauuucgcaccaacaguaauaaugccaggagacccauuaagagcaaaauucauagcagaaaacuacuuacaagaucacagggaaguaacaaacgucagaaacaugcuaggauacacaggauucuacucaggacaauuaauaaguguaaugggacacgggaugggaauaccaucaaugacauuauacgcacacgaauuaguaaacgacuucgacguuaaaagaauaauaagaguaggaagccuaggagcaacccaaagaacaauaaaaaugagagacauaauacuagcaguagcaucaggaacagacucaguaacaaacuuuaaaagaaguucaggauauuucauggcaucaucagcauacuucccacuacuacaaaaagcauggucauuagcacaagaagcaggcuuagaaguaaaagcaggaaacguauucucaggagacauauacuaugacccagacgacaacuuaauaccagcacuagaaaaauucggaguacuaggaauagacauggaaguagcuggacuauacgcauuagcacaccaauucggaauagaagcacuagcaaucuuaacaguaucagaccacugccuaacaggagaagaaacaacagcagaagaaagacaauuaacauucaacaacaugauagaauuagcacuaaauacagcaguagcaauauaa

SEQ ID NO: 6217 - protein, 239 aa, Artificial Sequence; identical to SEQ ID NO: 6201
  Purine_Nucleoside_Phosphorylase_deoD__Escherichia_coli_ _A0A0E0U7I4

SEQ ID NO: 6218 - RNA, 720 nt, Artificial Sequence
  Purine_Nucleoside_Phosphorylase_deoD__Escherichia_coli__AEE59766
auggcuaccccacacauuaaugcagaaaugggcgauuucgcugacguaguuuugaugccaggcgacccgcugcgugcgaaguauauugcugaaacuuuccuugaagaugcccgugaagugaacaacguucgcgguaugcugggcuucaccgguacuuacaaaggccgcaaaauuuccguaaugggucacgguauggguaucccguccugcuccaucuacaccaaagaacugaucaccgauuucggcgugaagaaaauuauccgcguggguuccuguggcgcaguucugccgcacguaaaacuacgcgacgucguuaucgguaugggugccugcaccgauuccaaaguuaaccgcauccguuuuaaagaccaugacuuugccgcuaucgcugacuuugacauggugcguaacgcgguagacgcggcuaaagcacugggcguugaugcucgcguggguaaccuguucuccgcugaccuguucuacucuccggacggcgaaauguucgacgugauggaaaaauacggcauccucggcguggaaauggaagcggcugguaucuacggcgucgcugcagaauuuggcgcgaaagcccugaccaucugcaccgugucugaccacauccgcacucacgagcagaccacugccgcugagcgucagaccaccuucaacgacaugaucaaaaucgcacuggaauccguucugcugggcgauaaagaguaa

SEQ ID NO: 6219 - RNA, 720 nt, Artificial Sequence; identical to SEQ ID NO: 6203
  derived and/or modified sequence opt1 from Purine_Nucleoside_Phosphorylase_deoD__Escherichia_coli__AEE59766

SEQ ID NO: 6220 - RNA, 720 nt, Artificial Sequence; identical to SEQ ID NO: 6204
  derived and/or modified sequence opt2 from Purine_Nucleoside_Phosphorylase_deoD__Escherichia_coli__AEE59766

SEQ ID NO: 6221 - RNA, 720 nt, Artificial Sequence; identical to SEQ ID NO: 6205
  derived and/or modified sequence opt3 from Purine_Nucleoside_Phosphorylase_deoD__Escherichia_coli__AEE59766

SEQ ID NO: 6222 - RNA, 720 nt, Artificial Sequence; identical to SEQ ID NO: 6206
  derived and/or modified sequence opt4 from Purine_Nucleoside_Phosphorylase_deoD__Escherichia_coli__AEE59766

SEQ ID NO: 6223 - RNA, 720 nt, Artificial Sequence; identical to SEQ ID NO: 6207
  derived and/or modified sequence opt5 from Purine_Nucleoside_Phosphorylase_deoD__Escherichia_coli__AEE59766

SEQ ID NO: 6224 - RNA, 720 nt, Artificial Sequence
  derived and/or modified sequence opt6 from Purine_Nucleoside_Phosphorylase_deoD__Escherichia_coli__AEE59766
auggcaacaccacauauaaacgcagaaaugggggacuuugcagauguaguacuaaugccaggagacccacuaagagcaaaauacauagcagaaacauuucuagaagaugcaagagaaguaaauaauguaagaggaauguuaggauuuacagggacauauaaaggaagaaaaauaaguguaaugggacauggaaugggcauaccaucaugcaguauauauacaaaagaauuaauaacagacuucggagugaaaaaaauaauaagaguaggaucaugcggagcaguacuaccacacguaaaauuaagagauguaguaauuggaaugggagcauguaccgauagcaaaguaaauagaauaagauuuaaagaucaugauuucgcagcaauagccgauuucgauaugguacgaaaugcaguagacgcagcaaaggcauuaggaguagacgcaagaguaggaaaucuauucagcgcagacuuauuuuauaguccagacggagaaauguucgauguaauggaaaaauacggaauauuaggaguagaaauggaagcagcaggaauauacggaguagccgcagaauuuggagcaaaagcacuuacaauauguacaguaagcgaucacauaagaacacacgaacaaacaacagcagcagaaagacaaacaacauucaaugacaugauaaaaauagcacucgaaagcguauuauuaggagauaaagaauaa

SEQ ID NO: 6225 - protein, 239 aa, Artificial Sequence; identical to SEQ ID NO: 6201
  Purine_Nucleoside_Phosphorylase_deoD__Escherichia_coli_ _A0A0E0VFI3

SEQ ID NO: 6226 - RNA, 720 nt, Artificial Sequence
  Purine_Nucleoside_Phosphorylase_deoD__Escherichia_coli__AEQ15845
auggcuaccccacacauuaaugcagaaaugggcgauuucgcugacguaguuuugaugccaggcgacccgcugcgugcgaaguauauugcugaaacuuuccuugaagaugcccgugaagugaacaacguucgcgguaugcugggcuucaccgguacuuacaaaggccgcaaaauuuccguaaugggucacgguauggguaucccguccugcuccaucuacaccaaagaacugaucaccgauuucggcgugaagaaaauuauccgcguaggcuccuguggcgcuguucugccacacguaaaacugcgcgacgucguuaucgguaugggugccugcaccgauuccaaaguuaaccguauccguuuuaaagaccaugacuuugccgcuaucgcugacuuugacauggugcguaacgcgguagacgcggcuaaagcacugggcguugaugcucgcguugguaaccuguucuccgcugaccuguucuacucuccggacggcgaaauguucgaugugauggaaaaauacggcauccucggcguggaaauggaagcagcugguaucuacggcgucgcugcagaauuuggcgcgaaagcccugaccaucugcaccgugucugaccacauccgcacucacgagcagaccacugccgcugagcgucagaccaccuucaacgacaugaucaaaaucgcacuggaauccguucuguugggcgauaaagaguaa

SEQ ID NO: 6227 - RNA, 720 nt, Artificial Sequence; identical to SEQ ID NO: 6203
  derived and/or modified sequence opt1 from Purine_Nucleoside_Phosphorylase_deoD__Escherichia_coli__AEQ15845

SEQ ID NO: 6228 - RNA, 720 nt, Artificial Sequence; identical to SEQ ID NO: 6204
  derived and/or modified sequence opt2 from Purine_Nucleoside_Phosphorylase_deoD__Escherichia_coli__AEQ15845

SEQ ID NO: 6229 - RNA, 720 nt, Artificial Sequence; identical to SEQ ID NO: 6205
  derived and/or modified sequence opt3 from Purine_Nucleoside_Phosphorylase_deoD__Escherichia_coli__AEQ15845

SEQ ID NO: 6230 - RNA, 720 nt, Artificial Sequence; identical to SEQ ID NO: 6206
  derived and/or modified sequence opt4 from Purine_Nucleoside_Phosphorylase_deoD__Escherichia_coli__AEQ15845

SEQ ID NO: 6231 - RNA, 720 nt, Artificial Sequence; identical to SEQ ID NO: 6207
  derived and/or modified sequence opt5 from Purine_Nucleoside_Phosphorylase_deoD__Escherichia_coli__AEQ15845

SEQ ID NO: 6232 - RNA, 720 nt, Artificial Sequence
  derived and/or modified sequence opt6 from Purine_Nucleoside_Phosphorylase_deoD__Escherichia_coli__AEQ15845
auggcaacaccacauauaaaugccgaaaugggagacuuugcagacguaguacuaaugccaggagauccacuaagagcaaaauacauagcagaaacauuucuagaagacgcaagagaaguaaauaauguaagaggaauguuaggauuuacaggaacauauaaaggaagaaaaauaaguguaaugggacauggaauggguauaccaucauguaguauauacacaaaagaauuaaucacagacuuuggaguaaaaaaaauaauaagaguaggaaguugcggagcaguacuaccacacguaaaauuaagagauguaguaauaggaaugggagcauguacagacagcaaaguaaauagaauaagauuuaaagaccaugauuuugccgcaauagcagauuucgauaugguacgaaacgcaguagacgcagcaaaagcacuaggaguagaugcaagaguaggaaauuuauuuagcgcggacuuauuuuacagcccagacggagaaauguucgauguaauggaaaaauacggaauauuaggaguagaaauggaagcagcaggaauauauggaguagcagcagaauuuggagcaaaagcacuaacgauauguacaguaagcgaucacauaagaacacacgaacaaacaacagcagcagaaagacaaacaacuuucaaugacaugauaaaaauagcauuagaaagcguuuuacuaggagauaaagaauaa

SEQ ID NO: 6233 - protein, 239 aa, Artificial Sequence; identical to SEQ ID NO: 6193
  Purine_Nucleoside_Phosphorylase_deoD__Escherichia_coli_ _A0A0E0Y455

SEQ ID NO: 6234 - RNA, 720 nt, Artificial Sequence
  Purine_Nucleoside_Phosphorylase_deoD__Escherichia_coli__AFS76188
auggcuaccccacacauuaaugcagaaaugggcgauuucgcugacguaguuuugaugccaggcgacccgcugcgugcaaaguauauugcugaaacuuuccuugaagaugcccgugaagugaacaacguucgcgguaugcugggcuucaccgguacuuauaaaggccgcaaaauuuccguaaugggucacgguauggguaucccguccugcuccaucuacaccaaagaacugaucaccgauuucggcgugaagaaaauuauccgcguggguuccuguggcgcaguucugccgcacguaaaacugcgcgacgucguuaucgguaugggugccugcaccgauuccaaaguuaaccgcauccguuuuaaagaucaugacuuugccgcuaucgcugacuuugacauggugcguaacgcgguagacgcggcuaaagcacugggcauugaugcucgcguugguaaccuguucuccgcugaccuguucuacucuccggacggcgaaauguucgacgugauggaaaaauacggcauccucggcguggaaauggaagcggcugguaucuacggcgucgcugcagaauuuggcgcgaaagcccugaccaucuguaccgugucugaccacauccgcacucacgagcagaccacugccgcugagcgucagaccaccuucaacgacaugaucaaaaucgcacuggaauccguucugcugggcgauaaagaguaa

SEQ ID NO: 6235 - RNA, 720 nt, Artificial Sequence; identical to SEQ ID NO: 6195
  derived and/or modified sequence opt1 from Purine_Nucleoside_Phosphorylase_deoD__Escherichia_coli__AFS76188

SEQ ID NO: 6236 - RNA, 720 nt, Artificial Sequence; identical to SEQ ID NO: 6196
  derived and/or modified sequence opt2 from Purine_Nucleoside_Phosphorylase_deoD__Escherichia_coli__AFS76188

SEQ ID NO: 6237 - RNA, 720 nt, Artificial Sequence; identical to SEQ ID NO: 6197
  derived and/or modified sequence opt3 from Purine_Nucleoside_Phosphorylase_deoD__Escherichia_coli__AFS76188

SEQ ID NO: 6238 - RNA, 720 nt, Artificial Sequence; identical to SEQ ID NO: 6198
  derived and/or modified sequence opt4 from Purine_Nucleoside_Phosphorylase_deoD__Escherichia_coli__AFS76188

SEQ ID NO: 6239 - RNA, 720 nt, Artificial Sequence; identical to SEQ ID NO: 6199
  derived and/or modified sequence opt5 from Purine_Nucleoside_Phosphorylase_deoD__Escherichia_coli__AFS76188

SEQ ID NO: 6240 - RNA, 720 nt, Artificial Sequence
  derived and/or modified sequence opt6 from Purine_Nucleoside_Phosphorylase_deoD__Escherichia_coli__AFS76188
auggcaacaccacauauaaaugcagaaaugggagacuuugcagauguaguauuaaugccaggagauccccuaagagcaaaauacauagcagaaacauuucuagaagacgcaagagaagucaauaacguaagaggaauguuaggauuuacaggaacauauaaaggaagaaaaauaucaguaaugggacauggaaugggaauaccaucaugcucaauauauacaaaagaauuaauaacggacuuuggaguaaaaaaaauaauaagaguaggaucaugcggagcaguauuaccacacgugaaacuaagagauguaguaauaggaaugggagcauguacagauagcaaaguaaauagaauaagauuuaaagaucacgauuuugcagcaauagcagauuucgauaugguaagaaaugcaguagacgcagcaaaagcacuaggaauagacgcaagagugggaaauuuauuuagcgcagacuuauucuauagcccagacggagaaauguucgauguaauggaaaaauacggaaucuuaggaguagaaauggaagcggcaggaauauauggaguagcagcagaauuuggagcaaaagcauuaacgauauguacaguaagcgaucacauaagaacgcacgaacaaacaacagcagcagaacgacaaacaacauucaaugauaugauaaaaauagcacuagaaagcguacuauuaggcgauaaagaauaa

SEQ ID NO: 6241 - protein, 239 aa, Artificial Sequence; identical to SEQ ID NO: 6201
  Purine_Nucleoside_Phosphorylase_deoD__Escherichia_coli_ _A0A0E1M7E2

SEQ ID NO: 6242 - RNA, 720 nt, Artificial Sequence; identical to SEQ ID NO: 6202
  Purine_Nucleoside_Phosphorylase_deoD__Escherichia_coli__AJF59253

SEQ ID NO: 6243 - RNA, 720 nt, Artificial Sequence; identical to SEQ ID NO: 6203
  derived and/or modified sequence opt1 from Purine_Nucleoside_Phosphorylase_deoD__Escherichia_coli__AJF59253

SEQ ID NO: 6244 - RNA, 720 nt, Artificial Sequence; identical to SEQ ID NO: 6204
  derived and/or modified sequence opt2 from Purine_Nucleoside_Phosphorylase_deoD__Escherichia_coli__AJF59253

SEQ ID NO: 6245 - RNA, 720 nt, Artificial Sequence; identical to SEQ ID NO: 6205
  derived and/or modified sequence opt3 from Purine_Nucleoside_Phosphorylase_deoD__Escherichia_coli__AJF59253

SEQ ID NO: 6246 - RNA, 720 nt, Artificial Sequence; identical to SEQ ID NO: 6206
  derived and/or modified sequence opt4 from Purine_Nucleoside_Phosphorylase_deoD__Escherichia_coli__AJF59253

SEQ ID NO: 6247 - RNA, 720 nt, Artificial Sequence; identical to SEQ ID NO: 6207
  derived and/or modified sequence opt5 from Purine_Nucleoside_Phosphorylase_deoD__Escherichia_coli__AJF59253

SEQ ID NO: 6248 - RNA, 720 nt, Artificial Sequence
  derived and/or modified sequence opt6 from Purine_Nucleoside_Phosphorylase_deoD__Escherichia_coli__AJF59253
auggcaacaccacauauaaaugcagaaaugggagauuuugcagauguaguacuaaugccaggagacccgcuaagagccaaauacauagcagaaacauuuuuagaagacgcaagagaagucaauaauguaagagggauguuaggauuuacaggaaccuacaaaggaagaaaaauaucaguaaugggacauggaaugggaauaccuucaugcaguauauauacaaaagaauuaauaacagacuuuggaguaaaaaaaauaauaagaguaggaucaugcggagcaguacuaccacacguaaaacuaagagauguaguaauaggaaugggagccuguacagauagcaaaguaaauagaauaagauuuaaagaucacgauuucgcagcaauagcagauuuugacaugguaagaaaugcaguggacgcagcaaaagcauuaggaguagacgcaagaguaggaaaucuauuuagcgcagauuuauucuauaguccagacggagaaauguucgauguaauggaaaaauauggaauacuaggaguagaaauggaagcagcagggauauauggaguagcagcagaauuuggagcaaaagcacuaacaauauguacaguaagugaucauauaaggacgcacgaacaaacaacagcagcagaaagacaaacuacauuuaaugacaugauaaaaauagcacuagaaagcguauuauuaggagauaaagaauaa

SEQ ID NO: 6249 - protein, 239 aa, Artificial Sequence; identical to SEQ ID NO: 6193
  Purine_Nucleoside_Phosphorylase_deoD__Escherichia_coli_ _A0A0E3KJD7

SEQ ID NO: 6250 - RNA, 720 nt, Artificial Sequence
  Purine_Nucleoside_Phosphorylase_deoD__Escherichia_coli__AKA93549
auggcuaccccacacauuaaugcagaaaugggcgauuucgcugacguaguuuugaugccaggcgacccgcugcgugcgaaguauauugcugaaacuuuccuugaagaugcccgugaagugaacaacguucgcgguaugcugggcuucaccgguacuuacaaaggccgcaaaauuuccguaaugggucacgguauggguaucccguccugcuccaucuacaccaaagaacugaucaccgauuucggcgugaagaaaauuauccgcguaggcuccuguggcgcuguucugccgcacguaaaacugcgcgacgucguuaucgguaugggugccugcaccgauuccaaaguuaaccguauccguuuuaaagaccaugacuuugccgcuaucgcugacuuugacauggugcguaacgcgguagacgcggcuaaagcacugggcauugaugcucgcguugguaaccuguucuccgcugaccuguucuacucuccggacggcgaaauguucgacgugauggaaaaauacggcauccucggcguggaaauggaagcggcugguaucuacggcgucgcugcagaauuuggcgcgaaagcccugaccaucuguaccgugucugaccacauccgcacucacgagcagaccacugccgcugagcgucagaccaccuucaacgacaugaucaaaaucgcacuggaauccguucugcugggcgauaaagaguaa

SEQ ID NO: 6251 - RNA, 720 nt, Artificial Sequence; identical to SEQ ID NO: 6195
  derived and/or modified sequence opt1 from Purine_Nucleoside_Phosphorylase_deoD__Escherichia_coli__AKA93549

SEQ ID NO: 6252 - RNA, 720 nt, Artificial Sequence; identical to SEQ ID NO: 6196
  derived and/or modified sequence opt2 from Purine_Nucleoside_Phosphorylase_deoD__Escherichia_coli__AKA93549

SEQ ID NO: 6253 - RNA, 720 nt, Artificial Sequence; identical to SEQ ID NO: 6197
  derived and/or modified sequence opt3 from Purine_Nucleoside_Phosphorylase_deoD__Escherichia_coli__AKA93549

SEQ ID NO: 6254 - RNA, 720 nt, Artificial Sequence; identical to SEQ ID NO: 6198
  derived and/or modified sequence opt4 from Purine_Nucleoside_Phosphorylase_deoD__Escherichia_coli__AKA93549

SEQ ID NO: 6255 - RNA, 720 nt, Artificial Sequence; identical to SEQ ID NO: 6199
  derived and/or modified sequence opt5 from Purine_Nucleoside_Phosphorylase_deoD__Escherichia_coli__AKA93549

SEQ ID NO: 6256 - RNA, 720 nt, Artificial Sequence
  derived and/or modified sequence opt6 from Purine_Nucleoside_Phosphorylase_deoD__Escherichia_coli__AKA93549
auggcaacaccacauauaaacgcagaaaugggagacuuugcagauguaguacuaaugcccggagauccacuaagagcaaaauacauagcagaaacauucuuagaagacgcaagagaaguaaauaacguaagaggaauguuagguuuuacaggaacauauaaaggaagaaaaauaucaguaaugggacauggaaugggaauaccaaguugcucaauauauacaaaagaauuaauaacagacuuuggaguaaaaaaaauaauaagaguagguucgugcggagcaguacuaccacacguaaaauuaagagauguaguaauaggaaugggagcauguacagauagcaaaguaaauagaauaagauuuaaagaucacgauuucgcagcaauagcagauuucgauaugguaagaaaugcaguagacgcagcaaaagcauuaggaauagacgcaaggguaggcaauuuauuuagugcagacuuauucuauagcccagacggagaaauguucgauguaauggaaaaauacggaauauuaggaguagaaauggaagcagcuggaauauauggaguagcagcagaauuuggagcaaaagcacuaacaaucugcacaguaagugaucacauaagaacacaugaacaaacaacagcagcagaacgacaaacaacauucaaugacaugauaaaaauagcacuagaaaguguauuauuaggagauaaagaauaa

SEQ ID NO: 6257 - protein, 239 aa, Artificial Sequence; identical to SEQ ID NO: 6193
  Purine_Nucleoside_Phosphorylase_deoD__Escherichia_coli_ _A0A0F6CCW6

SEQ ID NO: 6258 - RNA, 720 nt, Artificial Sequence
  Purine_Nucleoside_Phosphorylase_deoD__Escherichia_coli__AFJ32072
auggcuaccccacacauuaaugcagaaaugggcgauuucgcugacguaguuuugaugccaggcgacccgcugcgugcgaaguauauugcugaaacuuuccuugaagaugcccgugaagugaacaacguucgcgguaugcugggcuucaccgguacuuacaaaggccgcaaaauuuccguaaugggucacgguauggguaucccguccugcuccaucuacaccaaagaacugaucaccgauuucggcgugaagaaaauuauccgcguggguuccuguggcgcaguucugccgcacguaaaacugcgcgacgucguuaucgguaugggugccugcaccgauuccaaaguuaaccgcauccguuuuaaagaccaugacuuugccgcuaucgcugacuucgacauggugcguaacgcaguagaugcagcuaaagcacugggcauugaugcucgcguugguaaccuguucuccgcugaccuguucuacucuccggacggcgaaauguucgacgugauggaaaaauacggcauucucggcguggaaauggaagcggcugguaucuacggcguggcugcagaguuuggcgcgaaagcccugaccaucugcaccgugucugaccacauccgcacucacgagcaaaccacugccgcugagcgucagaccaccuucaacgacaugaucaaaaucgcacuggaauccguucugcugggcgauaaagaguaa

SEQ ID NO: 6259 - RNA, 720 nt, Artificial Sequence; identical to SEQ ID NO: 6195
  derived and/or modified sequence opt1 from Purine_Nucleoside_Phosphorylase_deoD__Escherichia_coli__AFJ32072

SEQ ID NO: 6260 - RNA, 720 nt, Artificial Sequence; identical to SEQ ID NO: 6196
  derived and/or modified sequence opt2 from Purine_Nucleoside_Phosphorylase_deoD__Escherichia_coli__AFJ32072

SEQ ID NO: 6261 - RNA, 720 nt, Artificial Sequence; identical to SEQ ID NO: 6197
  derived and/or modified sequence opt3 from Purine_Nucleoside_Phosphorylase_deoD__Escherichia_coli__AFJ32072

SEQ ID NO: 6262 - RNA, 720 nt, Artificial Sequence; identical to SEQ ID NO: 6198
  derived and/or modified sequence opt4 from Purine_Nucleoside_Phosphorylase_deoD__Escherichia_coli__AFJ32072

SEQ ID NO: 6263 - RNA, 720 nt, Artificial Sequence; identical to SEQ ID NO: 6199
  derived and/or modified sequence opt5 from Purine_Nucleoside_Phosphorylase_deoD__Escherichia_coli__AFJ32072

SEQ ID NO: 6264 - RNA, 720 nt, Artificial Sequence
  derived and/or modified sequence opt6 from Purine_Nucleoside_Phosphorylase_deoD__Escherichia_coli__AFJ32072
auggcaacaccccauauaaaugcagaaaugggggacuuugcagauguaguacuaaugccaggggauccacuaagagcaaaauacauagcagaaacauuuuuagaagacgcaagggaaguaaauaacguacgaggaauguuaggauuuacaggaacauauaaaggaagaaaaauaaguguaaugggccauggaaugggaauaccaucaugcucaauauauacaaaagaauuaauaacagacuuuggaguaaaaaaaauaauaagaguaggaucaugcggagcaguacuaccacacguaaaauuaagagauguuguaauaggaaugggagcauguacagauagcaaaguaaauagaauaagauuuaaagaucacgauuucgcagcuauagcagauuucgauaugguaagaaaugccguagacgcggcaaaagcacuaggaauagacgcgagaguaggaaaucuauuuagcgcagacuuauucuauagcccagacggagaaauguucgacguaauggaaaaguauggaauacuaggaguagaaauggaagcagcaggaauauauggaguagcagcagaauucggagcaaaagcacuaacaauauguacaguaagugaucacauaagaacacacgaacaaacaacagcagcagaaagacaaacaacauuuaaugacaugauaaaaauagcacuagaaagcguacuauuaggagauaaagaauaa

SEQ ID NO: 6265 - protein, 239 aa, Artificial Sequence; identical to SEQ ID NO: 6193
  Purine_Nucleoside_Phosphorylase_deoD__Escherichia_coli_ _A0A0F6FGI8

SEQ ID NO: 6266 - RNA, 720 nt, Artificial Sequence; identical to SEQ ID NO: 6258
  Purine_Nucleoside_Phosphorylase_deoD__Escherichia_coli__AJA29528

SEQ ID NO: 6267 - RNA, 720 nt, Artificial Sequence; identical to SEQ ID NO: 6195
  derived and/or modified sequence opt1 from Purine_Nucleoside_Phosphorylase_deoD__Escherichia_coli__AJA29528

SEQ ID NO: 6268 - RNA, 720 nt, Artificial Sequence; identical to SEQ ID NO: 6196
  derived and/or modified sequence opt2 from Purine_Nucleoside_Phosphorylase_deoD__Escherichia_coli__AJA29528

SEQ ID NO: 6269 - RNA, 720 nt, Artificial Sequence; identical to SEQ ID NO: 6197
  derived and/or modified sequence opt3 from Purine_Nucleoside_Phosphorylase_deoD__Escherichia_coli__AJA29528

SEQ ID NO: 6270 - RNA, 720 nt, Artificial Sequence; identical to SEQ ID NO: 6198
  derived and/or modified sequence opt4 from Purine_Nucleoside_Phosphorylase_deoD__Escherichia_coli__AJA29528

SEQ ID NO: 6271 - RNA, 720 nt, Artificial Sequence; identical to SEQ ID NO: 6199
  derived and/or modified sequence opt5 from Purine_Nucleoside_Phosphorylase_deoD__Escherichia_coli__AJA29528

SEQ ID NO: 6272 - RNA, 720 nt, Artificial Sequence
  derived and/or modified sequence opt6 from Purine_Nucleoside_Phosphorylase_deoD__Escherichia_coli__AJA29528
auggcaacaccacauauaaaugcagaaaugggagacuuugcagauguaguacuaaugccaggagauccacuaagagcuaaauacauagcagaaacauuucuagaagacgcaagagaaguaaauaauguaagaggaauguuaggauuuacaggaacauauaaaggaagaaaaauaucaguaaugggacauggaaugggaauaccaaguugcucaauauauacaaaagaacuaauaacagacuuuggaguaaaaaaaauaauaagagugggaaguugcggagcaguucuaccacacguaaaauuaagagauguaguaauaggaaugggagcauguacagauaguaaaguaaauagaauaagauuuaaagaccacgauuucgcagcaauagcagauuuugauaugguaagaaaugcaguagaugcagcgaaagcauuaggaauagacgcacgaguaggaaauuuauuuagcgcagacuuauucuauagcccagacggggaaauguucgauguaauggaaaaauacgggauauuaggaguagaaauggaagcagcaggaauauauggaguagcagcagaauuuggagcaaaggcauuaacaauaugcacaguaagcgaucacauaagaacacacgaacaaacaacagcagcagaaagacagacaacauucaaugacaugauaaaaauagcauuagaaaguguacuacuaggagauaaagaauaa

SEQ ID NO: 6273 - protein, 239 aa, Artificial Sequence; identical to SEQ ID NO: 6193
  Purine_Nucleoside_Phosphorylase_deoD__Escherichia_coli_ _A0A0F6GWR2

SEQ ID NO: 6274 - RNA, 720 nt, Artificial Sequence
  Purine_Nucleoside_Phosphorylase_deoD__Escherichia_coli__BAI57857
auggcuacuccacacauuaaugcagaaaugggcgauuucgcugacguaguuuugaugccaggcgacccgcugcgugcgaaguauauugcugaaacuuuccuugaagaugcucgugaagugaacaacguucgcgguaugcugggcuucaccgguacuuacaaaggccgcaaaauuucuguaaugggccacgguauggguaucccguccugcuccaucuacacuaaagaacugaucaccgauuucggcgugaagaaaaucauucgcguugguuccuguggcgcaguucugccgcacguaaaacugcgugacguagugauugguaugggugccugcaccgauuccaaaguuaaccgcauccguuuuaaagaccaugacuuugcagcuaucgcugacuucgacauggugcguaacgcaguagaugcagcuaaagcacugggcauugaugcucgcguugguaaccuguucuccgcugaccuguucuacucuccggacggugaaauguucgacgugauggaaaaauacggcauucucggcguggaaauggaagcagcugguaucuacggcguggcugcagaguuuggcgcgaaagcccugaccaucugcaccguaucugaccauauucgcacgcacgagcagaccacugccgcugagcgucagacuaccuucaacgacaugaucaaaaucgcacuggaauccguucugcugggcgauaaagaguaa

SEQ ID NO: 6275 - RNA, 720 nt, Artificial Sequence; identical to SEQ ID NO: 6195
  derived and/or modified sequence opt1 from Purine_Nucleoside_Phosphorylase_deoD__Escherichia_coli__BAI57857

SEQ ID NO: 6276 - RNA, 720 nt, Artificial Sequence; identical to SEQ ID NO: 6196
  derived and/or modified sequence opt2 from Purine_Nucleoside_Phosphorylase_deoD__Escherichia_coli__BAI57857

SEQ ID NO: 6277 - RNA, 720 nt, Artificial Sequence; identical to SEQ ID NO: 6197
  derived and/or modified sequence opt3 from Purine_Nucleoside_Phosphorylase_deoD__Escherichia_coli__BAI57857

SEQ ID NO: 6278 - RNA, 720 nt, Artificial Sequence; identical to SEQ ID NO: 6198
  derived and/or modified sequence opt4 from Purine_Nucleoside_Phosphorylase_deoD__Escherichia_coli__BAI57857

SEQ ID NO: 6279 - RNA, 720 nt, Artificial Sequence; identical to SEQ ID NO: 6199
  derived and/or modified sequence opt5 from Purine_Nucleoside_Phosphorylase_deoD__Escherichia_coli__BAI57857

SEQ ID NO: 6280 - RNA, 720 nt, Artificial Sequence
  derived and/or modified sequence opt6 from Purine_Nucleoside_Phosphorylase_deoD__Escherichia_coli__BAI57857
auggcaacaccacauaucaaugcagaaaugggagacuuugcagauguaguacuaaugccaggagacccacuaagagccaaauacauagcagaaacauuuuuagaagacgcaagagaaguaaauaauguaagaggaauguuaggauuuacaggaaccuauaaaggacgaaaaauaaguguaaugggacauggaaugggaauaccaaguuguucaauauauacaaaagaauuaauaacagacuuuggaguaaagaaaauaauaagaguaggaucaugcggagcaguacuaccacacguaaaacuaagagauguaguaauagggaugggagcauguacagauagcaaaguaaauagaauaagauuuaaagaucacgauuuugcagcaauagcagauuucgauaugguaagaaaugcaguagacgcagcaaaagcauuaggaauagacgcaagaguaggaaaucuauuuagcgcagaccuauucuauagcccagacggagaaauguucgauguaauggaaaaauacggaauauuaggaguagaaauggaagcagcaggaauauauggaguagcagcagaauuuggagcaaaagcauuaacaauauguacaguaagcgaucacauaagaacacacgaacaaacaacggcagcagaaagacaaacgacguucaaugacaugauaaaaauagcauuagaaagcguacuauuaggagauaaagaguaa

SEQ ID NO: 6281 - protein, 239 aa, Artificial Sequence; identical to SEQ ID NO: 6201
  Purine_Nucleoside_Phosphorylase_deoD__Escherichia_coli_ _A0A0G2SIK5

SEQ ID NO: 6282 - RNA, 720 nt, Artificial Sequence
  Purine_Nucleoside_Phosphorylase_deoD__Escherichia_coli__AJM76720
auggcuacuccacacauuaaugcagaaaugggcgauuuugcugacguaguuuugaugccaggugacccgcugcgugcgaaguauauugcugaaacuuuccuugaagaugcccgugaagugaacaacguucgcgguaugcugggcuucacugguacuuacaaaggccgcaaaauuuccguaaugggccacgguauggguaucccguccugcuccaucuacaccaaagaacugaucacugauuucggcgugaagaaaauuauccgcguugguuccuguggcgcuguucugccgcacguaaaacugcgcgacgucguuaucgguaugggugccugcaccgauuccaaaguuaaccgcauccguuuuaaagaccaugacuuugccgcuaucgcugacuucgacauggugcguaacgcgguagacgcggcaaaagcacugggcguugaugcucguguugguaaccuguucuccgcugaccuguucuacucuccggacggcgaaauguucgacgugauggaaaaauacggcauccucggcguggaaauggaagcggcugguaucuacggcgucgcugcagaauuuggcgcgaaagcccugaccaucugcaccgugucugaccacauccgcacucacgagcagaccacugccgcugagcgucagaccaccuucaacgacaugaucaaaaucgcgcuggaauccguucugcugggcgauaaagaguaa

SEQ ID NO: 6283 - RNA, 720 nt, Artificial Sequence; identical to SEQ ID NO: 6203
  derived and/or modified sequence opt1 from Purine_Nucleoside_Phosphorylase_deoD__Escherichia_coli__AJM76720

SEQ ID NO: 6284 - RNA, 720 nt, Artificial Sequence; identical to SEQ ID NO: 6204
  derived and/or modified sequence opt2 from Purine_Nucleoside_Phosphorylase_deoD__Escherichia_coli__AJM76720

SEQ ID NO: 6285 - RNA, 720 nt, Artificial Sequence; identical to SEQ ID NO: 6205
  derived and/or modified sequence opt3 from Purine_Nucleoside_Phosphorylase_deoD__Escherichia_coli__AJM76720

SEQ ID NO: 6286 - RNA, 720 nt, Artificial Sequence; identical to SEQ ID NO: 6206
  derived and/or modified sequence opt4 from Purine_Nucleoside_Phosphorylase_deoD__Escherichia_coli__AJM76720

SEQ ID NO: 6287 - RNA, 720 nt, Artificial Sequence; identical to SEQ ID NO: 6207
  derived and/or modified sequence opt5 from Purine_Nucleoside_Phosphorylase_deoD__Escherichia_coli__AJM76720

SEQ ID NO: 6288 - RNA, 720 nt, Artificial Sequence
  derived and/or modified sequence opt6 from Purine_Nucleoside_Phosphorylase_deoD__Escherichia_coli__AJM76720
auggcaacaccccauauaaaugcagagaugggagacuucgcagauguaguacuaaugccaggagauccacuaagagcaaaauacauagcagaaacauuucuagaagacgcgagagaaguaaacaacguaagaggaaugcuaggauuuacaggaacauauaaaggaagaaaaauaucagucaugggacauggcaugggaauaccaaguuguaguauauauaccaaagaauuaauaacagacuuuggagucaaaaaaauaauaagaguaggaucaugcggagcaguacucccacacguaaaauuaagagauguaguaauaggaaugggagcauguacagauaguaagguaaauagaauacgauuuaaagaucacgauuucgcagcaauagcagauuucgauaugguaagaaaugcaguagacgcagcaaaagcauuaggaguagacgcacgaguaggaaaucuauuuagcgcagacuuauucuauagcccggacggagaaauguuugauguaauggaaaaauacggaauauuaggaguagaaauggaagcagcagggauauauggaguagcagcagaauuuggagcaaaagcacuaacaauauguacaguaagugaucacauaagaacacacgaacaaacaacagcagcagaaagacaaacaacauucaaugacaugauaaaaauagcauuagaaagcguauuauuaggagauaaagaauaa

SEQ ID NO: 6289 - protein, 239 aa, Artificial Sequence; identical to SEQ ID NO: 6201
  Purine_Nucleoside_Phosphorylase_deoD__Escherichia_coli_ _A0A0G3J9R6

SEQ ID NO: 6290 - RNA, 720 nt, Artificial Sequence
  Purine_Nucleoside_Phosphorylase_deoD__Escherichia_coli__AKK37374
auggcuaccccacacauuaaugcagaaaugggcgauuucgcugacguaguuuugaugccaggcgacccgcugcgugcgaaguauauugcugaaacuuuccuugaagaugcccgugaagugaacaacguucgcgguaugcugggcuucaccgguacuuacaaaggccgcaaaauuuccguaaugggccacgguauggguaucccguccugcuccaucuacaccaaagaacugaucaccgauuucggcgugaagaaaauuauccgcguugguuccuguggcgcuguucugccgcacguaaaacugcgcgacgucguuaucgguaugggugccugcaccgauuccaaaguuaaccgcauccguuuuaaagaccaugacuuugccgcuaucgcugacuucgacauggugcguaacgcgguagacgcggcuaaagcacugggcguugaugcucgcguugguaaccuguucuccgcugaccuguucuacucuccggacggcgaaauguucgacgugauggaaaaauacggcauccucggcguggaaauggaagccgcuggcaucuacggcgucgcugcagaauuuggcgcgaaagcccugaccaucugcaccgugucugaccacauccgcacucacgagcagaccacugccgcugagcgucagaccaccuucaacgacaugaucaaaaucgcacuggaauccguucuguugggcgauaaagaguaa

SEQ ID NO: 6291 - RNA, 720 nt, Artificial Sequence; identical to SEQ ID NO: 6203
  derived and/or modified sequence opt1 from Purine_Nucleoside_Phosphorylase_deoD__Escherichia_coli__AKK37374

SEQ ID NO: 6292 - RNA, 720 nt, Artificial Sequence; identical to SEQ ID NO: 6204
  derived and/or modified sequence opt2 from Purine_Nucleoside_Phosphorylase_deoD__Escherichia_coli__AKK37374

SEQ ID NO: 6293 - RNA, 720 nt, Artificial Sequence; identical to SEQ ID NO: 6205
  derived and/or modified sequence opt3 from Purine_Nucleoside_Phosphorylase_deoD__Escherichia_coli__AKK37374

SEQ ID NO: 6294 - RNA, 720 nt, Artificial Sequence; identical to SEQ ID NO: 6206
  derived and/or modified sequence opt4 from Purine_Nucleoside_Phosphorylase_deoD__Escherichia_coli__AKK37374

SEQ ID NO: 6295 - RNA, 720 nt, Artificial Sequence; identical to SEQ ID NO: 6207
  derived and/or modified sequence opt5 from Purine_Nucleoside_Phosphorylase_deoD__Escherichia_coli__AKK37374

SEQ ID NO: 6296 - RNA, 720 nt, Artificial Sequence
  derived and/or modified sequence opt6 from Purine_Nucleoside_Phosphorylase_deoD__Escherichia_coli__AKK37374
auggcaacaccacauauaaaugcagaaaugggagacuuugcagauguaguauuaaugccaggagacccacuaagagcaaaauacauagcagaaacauuuuuagaagacgcaagggaaguaaauaacgucagaggaauguuaggcuuuacaggaacauauaaaggaagaaaaauaaguguaaugggacauggaaugggaauaccaucaugcaguauauauacaaaagaauuaauaacagacuuuggaguaaaaaaaauaauaagaguaggaaguuguggagcaguacuaccacacguaaaacuaagagacguaguaauaggaaugggagcauguacagauagcaaaguaaauagaauaagauuuaaggaucaugauuucgcagcuauagcagauuucgauaugguaagaaaugcaguagacgcagcaaaagcccuaggaguagacgcaagagugggaaaucuauuuagugcagaccuauucuauagcccggacggagaaauguucgauguaauggaaaaauacggaauauuaggaguagaaauggaagcagcaggaauauauggaguagcagcagaauuuggagcaaaagcauuaacaauauguacaguaucagaucacauaagaacacacgaacaaacaacagcagccgaaagacaaacuacguuuaaugacaugauaaaaauagcacuagaaagugugcuauuaggagauaaagaauaa

SEQ ID NO: 6297 - protein, 239 aa, Artificial Sequence; identical to SEQ ID NO: 6201
  Purine_Nucleoside_Phosphorylase_deoD__Escherichia_coli_ _A0A0G3J9Y2

SEQ ID NO: 6298 - RNA, 720 nt, Artificial Sequence; identical to SEQ ID NO: 6282
  Purine_Nucleoside_Phosphorylase_deoD__Escherichia_coli__AKK35966

SEQ ID NO: 6299 - RNA, 720 nt, Artificial Sequence; identical to SEQ ID NO: 6203
  derived and/or modified sequence opt1 from Purine_Nucleoside_Phosphorylase_deoD__Escherichia_coli__AKK35966

SEQ ID NO: 6300 - RNA, 720 nt, Artificial Sequence; identical to SEQ ID NO: 6204
  derived and/or modified sequence opt2 from Purine_Nucleoside_Phosphorylase_deoD__Escherichia_coli__AKK35966

SEQ ID NO: 6301 - RNA, 720 nt, Artificial Sequence; identical to SEQ ID NO: 6205
  derived and/or modified sequence opt3 from Purine_Nucleoside_Phosphorylase_deoD__Escherichia_coli__AKK35966

SEQ ID NO: 6302 - RNA, 720 nt, Artificial Sequence; identical to SEQ ID NO: 6206
  derived and/or modified sequence opt4 from Purine_Nucleoside_Phosphorylase_deoD__Escherichia_coli__AKK35966

SEQ ID NO: 6303 - RNA, 720 nt, Artificial Sequence; identical to SEQ ID NO: 6207
  derived and/or modified sequence opt5 from Purine_Nucleoside_Phosphorylase_deoD__Escherichia_coli__AKK35966

SEQ ID NO: 6304 - RNA, 720 nt, Artificial Sequence
  derived and/or modified sequence opt6 from Purine_Nucleoside_Phosphorylase_deoD__Escherichia_coli__AKK35966
auggcaacaccacauauaaaugcagaaaugggagacuuugcagauguaguauuaaugccaggagacccacuaagagcaaaauacauagcagaaacauuuuuagaagaugcaagagaaguaaauaacguaagaggaaugcuaggauuuacaggaacauauaaaggaagaaaaauaucaguaaugggacauggaaugggaauaccaucaugcucaauauauacaaaagaauuaauaacagacuuuggaguaaaaaaaauaauaagagugggaucaugcggagcaguacuaccacacguuaaacuaagagauguaguaauaggaaugggagcauguaccgauagcaaaguaaauagaauaagauuuaaagaucaugauuucgcagcaauagcagauuucgauaugguaaggaaugcaguagacgcggcaaaagcauuaggaguggacgcaagaguaggaaauuuauuuagcgcagacuuauucuauagcccagauggagaaauguucgauguaauggaaaaauaugggauauuaggaguagaaauggaagcagcaggaauauauggaguagcagcagaauuuggagcaaaagcacuaacaauauguacaguaagcgaucacauaagaacacacgaacaaacaacagcggcagaaagacaaacaacauucaaugacaugauaaaaauagcacuagaaagcguacuauuaggagauaaagaauaa

SEQ ID NO: 6305 - protein, 239 aa, Artificial Sequence; identical to SEQ ID NO: 6201
  Purine_Nucleoside_Phosphorylase_deoD__Escherichia_coli_ _A0A0G3KD68

SEQ ID NO: 6306 - RNA, 720 nt, Artificial Sequence
  Purine_Nucleoside_Phosphorylase_deoD__Escherichia_coli__AKK51383
auggcuaccccacacauuaaugcagaaaugggcgauuucgcugacguaguuuugaugccaggcgacccgcugcgugcgaaguauauugcugaaacuuuccuugaagaugcccgugaagugaacaacguucgcgguaugcugggcuucaccgguacuuacaaaggccgcaaaauuuccguaaugggucacgguauggguaucccguccugcuccaucuacaccaaagaacugaucaccgauuucggcgugaagaaaauuauccgcguaggcuccuguggcgcuguucugccacacguaaaacugcgcgacgucguuaucgguaugggugccugcaccgauuccaaaguuaaccguauccguuuuaaagaccaugacuuugccgcuaucgcugacuuugacauggugcguaacgcgguagacgcggcuaaagcacugggcguugaugcucgcguugguaaccuguucuccgcugaccuguucuacucuccggacggcgaaauguucgacgugauggaaaaauacggcauccucggcguggaaauggaagcagcugguaucuacggcgucgcugcagaauuuggcgcgaaagcccugaccaucuguaccguaucugaccacauccgcacucacgagcagaccacugccgcugagcgucagaccaccuucaacgacaugaucaaaaucgcacuggaauccguucugcugggcgauaaagaguaa

SEQ ID NO: 6307 - RNA, 720 nt, Artificial Sequence; identical to SEQ ID NO: 6203
  derived and/or modified sequence opt1 from Purine_Nucleoside_Phosphorylase_deoD__Escherichia_coli__AKK51383

SEQ ID NO: 6308 - RNA, 720 nt, Artificial Sequence; identical to SEQ ID NO: 6204
  derived and/or modified sequence opt2 from Purine_Nucleoside_Phosphorylase_deoD__Escherichia_coli__AKK51383

SEQ ID NO: 6309 - RNA, 720 nt, Artificial Sequence; identical to SEQ ID NO: 6205
  derived and/or modified sequence opt3 from Purine_Nucleoside_Phosphorylase_deoD__Escherichia_coli__AKK51383

SEQ ID NO: 6310 - RNA, 720 nt, Artificial Sequence; identical to SEQ ID NO: 6206
  derived and/or modified sequence opt4 from Purine_Nucleoside_Phosphorylase_deoD__Escherichia_coli__AKK51383

SEQ ID NO: 6311 - RNA, 720 nt, Artificial Sequence; identical to SEQ ID NO: 6207
  derived and/or modified sequence opt5 from Purine_Nucleoside_Phosphorylase_deoD__Escherichia_coli__AKK51383

SEQ ID NO: 6312 - RNA, 720 nt, Artificial Sequence
  derived and/or modified sequence opt6 from Purine_Nucleoside_Phosphorylase_deoD__Escherichia_coli__AKK51383
auggcaacaccacauauaaaugcagaaaugggagacuuugcagauguuguauuaaugccaggagacccauuaagagccaaguacauagcagaaacauuucuagaagacgcaagagaaguaaauaacgugagaggaauguuaggauuuacaggaacauauaaaggaaggaaaauaagcguaaugggccauggaaugggaauaccaucaugcucaauauauacaaaagaauuaauaacagacuucggaguaaaaaaaauaauaagaguaggaucauguggagcagugcuaccacacguaaaauuaagagauguaguaauaggaaugggagccuguacagauaguaaaguaaauagaauaagauuuaaagaucaugauuucgcagcaauagcagauuucgauaugguacgaaaugcaguagacgcagcaaaagcauuaggaguagaugcaagaguaggaaaucuauuuagcgcggacuuauucuauagcccagacggagaaauguucgacguaauggaaaaauacggaauauuaggaguagaaauggaagcagcaggaauauauggaguagcagcagaauuuggagcaaaagcacuaacaauauguaccguaagugaucacauaagaacacacgaacaaacaacagcagcagaacgacaaaccacauucaaugacaugauaaaaauagcacuagaaagcguacuacuaggagauaaagaauaa

SEQ ID NO: 6313 - protein, 258 aa, Artificial Sequence
  Purine_Nucleoside_Phosphorylase_deoD__Escherichia_coli_ _A0A0H2Z6H1
MDLGGAVTPPLICHKKDKMMATPHINAEMGDFADVVLMPGDPLRAKYIAETFLEDAREVNNVRGMLGFTGTYKGRKISVMGHGMGIPSCSIYTKELITDFGVKKIIRVGSCGAVLPHVKLRDVVIGMGACTDSKVNRIRFKDHDFAAIADFDMVRNAVDAAKALGVDARVGNLFSADLFYSPDGEMFDVMEKYGILGVEMEAAGIYGVAAEFGAKALTICTVSDHIRTHEQTTAAERQTTFNDMIKIALESVLLGDKE

SEQ ID NO: 6314 - RNA, 777 nt, Artificial Sequence
  Purine_Nucleoside_Phosphorylase_deoD__Escherichia_coli__ABJ03941
auggauuugggcggagcagugacuccgccuuuaauaugucacaaaaaggauaaaaugauggcuacuccacacauuaaugcagaaaugggcgauuuugcugacguaguuuugaugccaggugacccgcugcgugcgaaguauauugcugaaacuuuccuugaagaugcccgugaagugaacaacguucgcgguaugcugggcuucacugguacuuacaaaggccgcaaaauuuccguaaugggccacgguauggguaucccguccugcuccaucuacaccaaagaacugaucacugauuucggcgugaagaaaauuauccgcguugguuccuguggcgcuguucugccgcacguaaaacugcgcgacgucguuaucgguaugggugccugcaccgauuccaaaguuaaccgcauccguuuuaaagaccaugacuuugccgcuaucgcugacuucgacauggugcguaacgcgguagacgcggcaaaagcacugggcguugaugcucguguugguaaccuguucuccgcugaccuguucuacucuccggacggcgaaauguucgacgugauggaaaaauacggcauccucggcguggaaauggaagcggcugguaucuacggcgucgcugcagaauuuggcgcgaaagcccugaccaucugcaccgugucugaccacauccgcacucacgagcagaccacugccgcugagcgucagaccaccuucaacgacaugaucaaaaucgcgcuggaauccguucugcugggcgauaaagaguaa

SEQ ID NO: 6315 - RNA, 777 nt, Artificial Sequence
  derived and/or modified sequence opt1 from Purine_Nucleoside_Phosphorylase_deoD__Escherichia_coli__ABJ03941
auggaccugggcggggccgugacgcccccgcucaucugccacaagaaggacaagaugauggccacgccccacaucaacgcggagaugggcgacuucgccgacgucgugcugaugcccggggacccccugcgcgccaaguacaucgccgagaccuuccucgaggacgcccgggaggugaacaacguccgcggcaugcugggguucaccggcaccuacaagggccggaagaucagcgugauggggcacggcauggggaucccguccugcagcaucuacaccaaggagcugaucaccgacuucggcgugaagaagaucauccgcgucggguccugcggcgcggugcucccccacgugaagcugcgggacgucgugaucggcaugggggccugcaccgacagcaaggugaaccgcauccgguucaaggaccacgacuucgccgccaucgcggacuucgacaugguccgcaacgccguggacgccgccaaggcccugggcguggacgcgcgggucgggaaccucuucuccgccgaccuguucuacagccccgacggcgagauguucgacgugauggagaaguacggcauccuggggguggagauggaggccgccggcaucuacggggucgccgcggaguucggcgccaaggcccucaccaucugcaccguguccgaccacauccgcacgcacgagcagaccaccgccgccgagcggcagaccacguucaacgacaugaucaagaucgcgcuggagagcgugcugcucggggacaaggaguga

SEQ ID NO: 6316 - RNA, 777 nt, Artificial Sequence
  derived and/or modified sequence opt2 from Purine_Nucleoside_Phosphorylase_deoD__Escherichia_coli__ABJ03941
auggaccucggcggcgccgucacccccccccucaucugccacaagaaggacaagaugauggccaccccccacaucaacgccgagaugggcgacuucgccgacgucguccucaugcccggcgacccccuccgcgccaaguacaucgccgagaccuuccucgaggacgcccgcgaggucaacaacguccgcggcaugcucggcuucaccggcaccuacaagggccgcaagaucuccgucaugggccacggcaugggcauccccuccugcuccaucuacaccaaggagcucaucaccgacuucggcgucaagaagaucauccgcgucggcuccugcggcgccguccucccccacgucaagcuccgcgacgucgucaucggcaugggcgccugcaccgacuccaaggucaaccgcauccgcuucaaggaccacgacuucgccgccaucgccgacuucgacaugguccgcaacgccgucgacgccgccaaggcccucggcgucgacgcccgcgucggcaaccucuucuccgccgaccucuucuacucccccgacggcgagauguucgacgucauggagaaguacggcauccucggcgucgagauggaggccgccggcaucuacggcgucgccgccgaguucggcgccaaggcccucaccaucugcaccgucuccgaccacauccgcacccacgagcagaccaccgccgccgagcgccagaccaccuucaacgacaugaucaagaucgcccucgaguccguccuccucggcgacaaggaguga

SEQ ID NO: 6317 - RNA, 777 nt, Artificial Sequence
  derived and/or modified sequence opt3 from Purine_Nucleoside_Phosphorylase_deoD__Escherichia_coli__ABJ03941
auggaccugggcggggccgugacucccccucucaucugccacaagaaagauaagaugauggcuacaccacauauuaacgcagagaugggagacuucgccgaugucguucuuaugccgggugacccccugagagcgaaauacauagcugaaaccuuuuuggaggaugccagggaagugaauaacguacggggcauguuaggguucacgggaaccuauaagggccgcaaaaucagcgugaugggucacgggaugggcauuccuuccuguucuaucuacacaaaggagcugauuacugacuuuggagucaagaaaaucauacgagugggcucaugcggggcaguucuaccacaugugaagcuccgugaugucgugaucggaaugggugccuguaccgacaguaaaguaaauagaauuagguucaaggaucacgacuuugcugcaaucgccgauuucgacaugguucggaacgcuguggaugccgcgaaagcacugggcgucgacgcccgcguggggaaucuuuuuagcgcugaccuguucuauucccccgauggagaaauguuugacgugauggagaaguacggcauuuugggugucgagauggaagccgcagggaucuauggaguugcugccgaguucggcgcgaaggcccucacaauaugcaccgugucugaucauauuagaacucacgaacagacaaccgcagcugagaggcaaacgacuuuuaacgacaugaucaaaauugcccuggagucgguacugcucggcgauaaggaauga

SEQ ID NO: 6318 - RNA, 777 nt, Artificial Sequence
  derived and/or modified sequence opt4 from Purine_Nucleoside_Phosphorylase_deoD__Escherichia_coli__ABJ03941
auggaccugggcggcgccgugacccccccccugaucugccacaagaaggacaagaugauggccaccccccacaucaacgccgagaugggcgacuucgccgacguggugcugaugcccggcgacccccugagagccaaguacaucgccgagaccuuccuggaggacgccagagaggugaacaacgugagaggcaugcugggcuucaccggcaccuacaagggcagaaagaucagcgugaugggccacggcaugggcauccccagcugcagcaucuacaccaaggagcugaucaccgacuucggcgugaagaagaucaucagagugggcagcugcggcgccgugcugccccacgugaagcugagagacguggugaucggcaugggcgccugcaccgacagcaaggugaacagaaucagauucaaggaccacgacuucgccgccaucgccgacuucgacauggugagaaacgccguggacgccgccaaggcccugggcguggacgccagagugggcaaccuguucagcgccgaccuguucuacagccccgacggcgagauguucgacgugauggagaaguacggcauccugggcguggagauggaggccgccggcaucuacggcguggccgccgaguucggcgccaaggcccugaccaucugcaccgugagcgaccacaucagaacccacgagcagaccaccgccgccgagagacagaccaccuucaacgacaugaucaagaucgcccuggagagcgugcugcugggcgacaaggaguga

SEQ ID NO: 6319 - RNA, 777 nt, Artificial Sequence
  derived and/or modified sequence opt5 from Purine_Nucleoside_Phosphorylase_deoD__Escherichia_coli__ABJ03941
auggaccugggcggggccgugacacccccucucaucugccacaagaaagauaagaugauggcuaccccgcauauuaacgccgagaugggagacuucgcggaugucguucugaugcccggcgacccucuuagagcuaaauacaucgccgaaacguuucuggaggaugcccgggaagugaauaacgugcgcgggaugcucggauucaccggcacauauaaggggagaaaaauuagcgucaugggacacggcaugggcauccccuccuguucuauuuacaccaaggagcugaucacagacuuuggggugaagaaaaucauucggguuggaagcugcggcgcugugcuuccucaugucaagcugcgcgaugugguuaucgggaugggagccuguaccgacuccaaagugaaucggauuagauucaaggaucacgacuuugcugccaucgcggauuucgacaugguccgcaacgccguggaugcugccaaagcucucggcguggacgccagagucgggaaucuguuuucugcggaccuguucuauagccccgauggagaaauguuugacguuauggagaaguacggcauucucggcguggagauggaagccgcugggaucuauggaguggccgcugaguucggcgccaaggcccugacaauuugcaccgucuccgaucauauccggacgcacgaacagaccacagcugcggagcgccaaaccacauuuaacgacaugaucaaaauugcccuugagucugugcugcucggggauaaggaauga

SEQ ID NO: 6320 - RNA, 777 nt, Artificial Sequence
  derived and/or modified sequence opt6 from Purine_Nucleoside_Phosphorylase_deoD__Escherichia_coli__ABJ03941
auggauuuaggaggagcaguaacgccaccacuaauaugccauaaaaaagacaaaaugauggcaacaccacauauaaaugcagaaaugggagacuuugcagauguaguauuaaugccaggagacccacuaagagcaaaauacauagcagaaacauuucuagaagacgcaagagaaguaaauaauguacgaggaauguuaggauuuacaggaacauauaaaggaagaaaaauaucaguaaugggacauggaaugggaauaccaucaugcagcauauauacaaaagaauuaauaacagauuuuggaguaaaaaaaauaauacgaguaggaaguugcggagcaguacuaccacacguaaaauuaagagauguaguaauaggaaugggagccuguacagauagcaaaguaaauagaauuagauuuaaagaucacgacuucgcagcaaucgcagauuucgauaugguaagaaaugcaguggacgcggcaaaagcauuaggaguagacgcaagaguaggaaauuuauuuagugcugacuuauuuuauagcccagacggagaaauguucgauguaauggaaaaauacggaauacuaggaguagaaauggaagcagcaggaauauauggaguagcagcagaauuuggagcaaaagcacuaacaauaugcacaguaucagaucauauaagaacacaugaacaaacgacagcagcagaaagacaaacaacauucaaugauaugauaaaaauagcauuagaaaguguacuauuaggagauaaggaauaa

SEQ ID NO: 6321 - protein, 239 aa, Artificial Sequence; identical to SEQ ID NO: 6201
  Purine_Nucleoside_Phosphorylase_deoD__Escherichia_coli_ _A0A0H3EQW1

SEQ ID NO: 6322 - RNA, 720 nt, Artificial Sequence
  Purine_Nucleoside_Phosphorylase_deoD__Escherichia_coli__ADR29841
auggcuacuccacacauuaaugcagaaaugggcgauuuugcugacguaguuuugaugccaggcgacccgcugcgugcgaaguauauugcugaaacuuuccuugaagaugcccgugaagugaacaacguucgcgguaugcugggcuucaccgguacuuauaaaggccgcaaaauuuccguaaugggucacgguauggguaucccguccugcuccaucuacaccaaagaacugaucaccgauuucggcgugaagaaaauuauccgcguagguuccuguggugcuguucugccgcacguaaaacugcgugacgucguuaucgguaugggugccugcaccgauuccaaaguuaaccgcauccguuuuaaagaccaugacuuugccgcuaucgcugacuucgacauggugcguaacgcgguagacgcggcaaaagcacugggcguugaugcucgcguugguaaccuguucuccgcugaccuguucuacucuccggacggcgaaauguucgacgugauggaaaaauacggcauccucggcguggaaauggaagcggcugguaucuacggcgucgcugcagaauuuggcgcgaaagcccugaccaucugcaccgugucugaccacauccgcacucacgagcagaccacugccgcugagcgucagaccaccuucaacgacaugaucaaaaucgcgcuggaauccguucugcugggcgauaaagaguaa

SEQ ID NO: 6323 - RNA, 720 nt, Artificial Sequence; identical to SEQ ID NO: 6203
  derived and/or modified sequence opt1 from Purine_Nucleoside_Phosphorylase_deoD__Escherichia_coli__ADR29841

SEQ ID NO: 6324 - RNA, 720 nt, Artificial Sequence; identical to SEQ ID NO: 6204
  derived and/or modified sequence opt2 from Purine_Nucleoside_Phosphorylase_deoD__Escherichia_coli__ADR29841

SEQ ID NO: 6325 - RNA, 720 nt, Artificial Sequence; identical to SEQ ID NO: 6205
  derived and/or modified sequence opt3 from Purine_Nucleoside_Phosphorylase_deoD__Escherichia_coli__ADR29841

SEQ ID NO: 6326 - RNA, 720 nt, Artificial Sequence; identical to SEQ ID NO: 6206
  derived and/or modified sequence opt4 from Purine_Nucleoside_Phosphorylase_deoD__Escherichia_coli__ADR29841

SEQ ID NO: 6327 - RNA, 720 nt, Artificial Sequence; identical to SEQ ID NO: 6207
  derived and/or modified sequence opt5 from Purine_Nucleoside_Phosphorylase_deoD__Escherichia_coli__ADR29841

SEQ ID NO: 6328 - RNA, 720 nt, Artificial Sequence
  derived and/or modified sequence opt6 from Purine_Nucleoside_Phosphorylase_deoD__Escherichia_coli__ADR29841
auggcaacaccacauauaaaugcagaaaugggagacuuugcagauguaguauuaaugcccggagacccgcuaagagcaaaauacauagcagaaacauuucuagaagacgcaagagaaguaaauaacguaagaggaauguuaggauuuacaggaacauauaaagggagaaaaauaucaguaaugggacauggaaugggaauaccaaguugcucaauauauacaaaagaauuaauaacagacuuuggaguaaaaaaaauaauaagaguaggaucaugcggagcaguacuaccacacguaaaacuaagagauguaguaauaggaaugggagcauguacagauaguaaaguaaauagaauaagauuuaaagaucacgauuucgcagcaauagcagauuuugauaugguaagaaaugcaguggacgcagcaaaagcauugggaguagaugcaagaguaggaaaucuauuuagcgcagacuuguucuauagcccagacggagaaauguuugauguaauggaaaaauacggaauacuaggaguagaaauggaagcagcaggaauauauggcguagcagcagaauuuggagcaaaagcacuaacgauauguacaguaagcgaucacauaagaacacacgaacaaacaacagcagcagaaagacaaacaacauucaaugacaugauaaaaauagcacuagaaagcguacuauuaggagauaaagaauaa

SEQ ID NO: 6329 - protein, 239 aa, Artificial Sequence; identical to SEQ ID NO: 6193
  Purine_Nucleoside_Phosphorylase_deoD__Escherichia_coli_ _A0A0H3XF09

SEQ ID NO: 6330 - RNA, 720 nt, Artificial Sequence
  Purine_Nucleoside_Phosphorylase_deoD__Escherichia_coli__AKM37993
auggcuaccccacacauuaaugcagaaaugggcgauuucgcugacguaguuuugaugccaggcgacccgcugcgugcgaaguauauugcugaaacuuuccuugaagaugcccgugaagugaacaacguucgcgguaugcugggcuucaccgguacuuacaaaggccgcaaaauuuccguaaugggucacgguauggguaucccguccugcuccaucuacaccaaagaacugaucaccgauuucggcgugaagaaaauuauccgcguggguuccuguggcgcaguucugccgcacguaaaacugcgcgacgucguuaucgguaugggugccugcaccgauuccaaaguuaaccgcauccguuuuaaagaucaugacuuugccgcuaucgcugacuuugacauggugcguaacgcgguagacgcggcuaaagcacugggcauugaugcucgcguugguaaccuguucuccgcugaccuguucuacucuccggacggcgaaauguucgacgugauggaaaaauacggcauccucggcguggaaauggaagcggcugguaucuacggcgucgcugcagaauuuggcgcgaaagcccugaccaucuguaccgugucugaccacauccgcacucacgagcagaccacugccgcugagcgucagaccaccuucaacgacaugaucaaaaucgcacuggaauccguucugcugggcgauaaagaguaa

SEQ ID NO: 6331 - RNA, 720 nt, Artificial Sequence; identical to SEQ ID NO: 6195
  derived and/or modified sequence opt1 from Purine_Nucleoside_Phosphorylase_deoD__Escherichia_coli__AKM37993

SEQ ID NO: 6332 - RNA, 720 nt, Artificial Sequence; identical to SEQ ID NO: 6196
  derived and/or modified sequence opt2 from Purine_Nucleoside_Phosphorylase_deoD__Escherichia_coli__AKM37993

SEQ ID NO: 6333 - RNA, 720 nt, Artificial Sequence; identical to SEQ ID NO: 6197
  derived and/or modified sequence opt3 from Purine_Nucleoside_Phosphorylase_deoD__Escherichia_coli__AKM37993

SEQ ID NO: 6334 - RNA, 720 nt, Artificial Sequence; identical to SEQ ID NO: 6198
  derived and/or modified sequence opt4 from Purine_Nucleoside_Phosphorylase_deoD__Escherichia_coli__AKM37993

SEQ ID NO: 6335 - RNA, 720 nt, Artificial Sequence; identical to SEQ ID NO: 6199
  derived and/or modified sequence opt5 from Purine_Nucleoside_Phosphorylase_deoD__Escherichia_coli__AKM37993

SEQ ID NO: 6336 - RNA, 720 nt, Artificial Sequence
  derived and/or modified sequence opt6 from Purine_Nucleoside_Phosphorylase_deoD__Escherichia_coli__AKM37993
auggcaacgccucauauaaaugcagaaaugggagacuuugcagauguaguacuaaugccaggagacccuuuaagagcaaaguacauagcagagacauuucuagaagacgcaagagaaguaaauaacguaagaggaauguuaggauucacaggaacauauaaaggacgaaaaauaucaguaaugggacauggaaugggaauaccaucaugcucaauauacacaaaagaauuaauaacagacuuuggaguaaaaaaaauaauaagaguagguucaugcggagcaguauuaccacacguaaaauuacgagauguaguaaucggaaugggagcauguacagauaguaaaguaaauagaauaagauuuaaagaucacgauuuugcagccauagcagauuucgauaugguaagaaaugcaguagacgcagcuaaagcauuaggaauagacgcaagaguaggaaaucuauuuagugcagaccuauucuauagcccagacggagaaauguucgauguaauggaaaaauacgggauauuaggaguagaaauggaagcagcaggaauauauggaguagcagcagaauuuggagcaaaagcacuaacaauauguacaguaagugaucacauacguacacacgaacaaacaacagcagcagaaagacaaacaacauucaaugacaugauaaaaauagcauuagaaagcguauuauuaggagauaaagaauaa

SEQ ID NO: 6337 - protein, 239 aa, Artificial Sequence; identical to SEQ ID NO: 6193
  Purine_Nucleoside_Phosphorylase_deoD__Escherichia_coli_ _A0A0J9WZC9

SEQ ID NO: 6338 - RNA, 720 nt, Artificial Sequence
  Purine_Nucleoside_Phosphorylase_deoD__Escherichia_coli__BAL40848
auggcuaccccacacauuaaugcagaaaugggcgauuucgcugacguaguuuugaugccaggcgacccgcugcgugcgaaguauauugcugaaacuuuccuugaagaugcccgugaagugaacaacguucgcgguaugcugggcuucaccgguacuuacaaaggccgcaaaauuuccguaaugggucacgguauggguaucccguccugcuccaucuacaccaaagaacugaucaccgauuucggcgugaagaaaauuauccgcguggguuccuguggcgcaguucugccgcacguaaaacugcgcgacgucguuaucgguaugggugccugcaccgauuccaaaguuaaccgcauccguuuuaaagaccaugacuuugccgcuaucgcugacuucgacauggugcguaacgcaguagaugcagcuaaagcacuggguauugaugcucgcguggguaaccuguucuccgcugaccuguucuacucuccggacggcgaaauguucgacgugauggaaaaauacggcauucucggcguggaaauggaagcggcugguaucuacggcgucgcugcagaauuuggcgcgaaagcccugaccaucugcaccguaucugaccacauccgcacucacgagcagaccacugccgcugagcgucagacuaccuucaacgacaugaucaaaaucgcacuggaauccguucugcugggcgauaaagaguaa

SEQ ID NO: 6339 - RNA, 720 nt, Artificial Sequence; identical to SEQ ID NO: 6195
  derived and/or modified sequence opt1 from Purine_Nucleoside_Phosphorylase_deoD__Escherichia_coli__BAL40848

SEQ ID NO: 6340 - RNA, 720 nt, Artificial Sequence; identical to SEQ ID NO: 6196
  derived and/or modified sequence opt2 from Purine_Nucleoside_Phosphorylase_deoD__Escherichia_coli__BAL40848

SEQ ID NO: 6341 - RNA, 720 nt, Artificial Sequence; identical to SEQ ID NO: 6197
  derived and/or modified sequence opt3 from Purine_Nucleoside_Phosphorylase_deoD__Escherichia_coli__BAL40848

SEQ ID NO: 6342 - RNA, 720 nt, Artificial Sequence; identical to SEQ ID NO: 6198
  derived and/or modified sequence opt4 from Purine_Nucleoside_Phosphorylase_deoD__Escherichia_coli__BAL40848

SEQ ID NO: 6343 - RNA, 720 nt, Artificial Sequence; identical to SEQ ID NO: 6199
  derived and/or modified sequence opt5 from Purine_Nucleoside_Phosphorylase_deoD__Escherichia_coli__BAL40848

SEQ ID NO: 6344 - RNA, 720 nt, Artificial Sequence
  derived and/or modified sequence opt6 from Purine_Nucleoside_Phosphorylase_deoD__Escherichia_coli__BAL40848
auggcaacaccacauauaaacgcagaaaugggagacuuugcagauguaguacuaaugccaggagacccauuaagagcgaaauacauagcagaaacauuucuagaagacgcaagagaaguaaauaacguaagaggaauguuaggauuuacaggaacauauaaaggaagaaaaauaucaguaaugggacauggaaugggaauaccuucaugcaguauauauacaaaagaacuaauaacggauuuuggaguaaaaaaaauaauaagaguaggaucauguggagcaguacuaccacacguaaaauuaagagauguaguaauaggaaugggggccuguacagauagcaaaguaaauagaauaagauuuaaagaucacgauuucgcagcaauagcagauuucgauaugguaagaaaugcaguggacgcagcaaaagcacuaggaauagacgcaagaguaggaaaucuauuuagcgcagacuuauucuauaguccggacggagaaauguucgauguaauggaaaaauacggaauauuaggaguagaaauggaagcagccggaauauauggaguagcagcagaauuuggagcgaaagcauuaacaauauguacaguaagugaucacauaagaacacacgaacaaacaacagcagcagaaagacaaacaacauucaaugacaugauaaaaauagcacuagaaaguguacucuuaggagauaaagaauaa

SEQ ID NO: 6345 - protein, 239 aa, Artificial Sequence; identical to SEQ ID NO: 6193
  Purine_Nucleoside_Phosphorylase_deoD__Escherichia_coli__A7ZVS7

SEQ ID NO: 6346 - RNA, 720 nt, Artificial Sequence; identical to SEQ ID NO: 6234
  Purine_Nucleoside_Phosphorylase_deoD__Escherichia_coli__ABV17365

SEQ ID NO: 6347 - RNA, 720 nt, Artificial Sequence; identical to SEQ ID NO: 6195
  derived and/or modified sequence opt1 from Purine_Nucleoside_Phosphorylase_deoD__Escherichia_coli__ABV17365

SEQ ID NO: 6348 - RNA, 720 nt, Artificial Sequence; identical to SEQ ID NO: 6196
  derived and/or modified sequence opt2 from Purine_Nucleoside_Phosphorylase_deoD__Escherichia_coli__ABV17365

SEQ ID NO: 6349 - RNA, 720 nt, Artificial Sequence; identical to SEQ ID NO: 6197
  derived and/or modified sequence opt3 from Purine_Nucleoside_Phosphorylase_deoD__Escherichia_coli__ABV17365

SEQ ID NO: 6350 - RNA, 720 nt, Artificial Sequence; identical to SEQ ID NO: 6198
  derived and/or modified sequence opt4 from Purine_Nucleoside_Phosphorylase_deoD__Escherichia_coli__ABV17365

SEQ ID NO: 6351 - RNA, 720 nt, Artificial Sequence; identical to SEQ ID NO: 6199
  derived and/or modified sequence opt5 from Purine_Nucleoside_Phosphorylase_deoD__Escherichia_coli__ABV17365

SEQ ID NO: 6352 - RNA, 720 nt, Artificial Sequence
  derived and/or modified sequence opt6 from Purine_Nucleoside_Phosphorylase_deoD__Escherichia_coli__ABV17365
auggcaacaccacauauaaaugcagaaaugggagacuucgcagacguuguacuaaugccaggagacccauuaagagcaaaauacauagcagaaacauuucuagaagacgcaagagaaguaaauaacguaagaggaauguuaggcuuuacaggaacauauaaaggaagaaaaauaaguguaaugggacauggaaugggaauaccaucaugcaguauauauacaaaagaacuaauaacagacuuuggaguaaaaaaaauaauaagaguaggaucaugcggagcaguacuaccacacguaaaauuaagggauguagugauaggaaugggagcauguacagauagcaaaguaaauagaauaagauucaaagaucacgauuucgcagcaauagcagauuucgacaugguaagaaaugcaguagacgcagcaaaagcauuaggaauagacgcaagaguaggaaaucuauuuagcgcagaccuauucuauaguccagacggagaaauguucgauguaauggaaaaauacggaauacuaggaguggaaauggaagcagcaggaauauauggaguagcagcagaauuuggagcaaaagcacuaacaauauguacagugagcgaucacauaagaacacacgaacaaacaacagcggcagaaagacaaacaacauucaaugacaugauaaaaauagcacuagaaaguguauuauuaggagauaaagaauaa

SEQ ID NO: 6353 - protein, 239 aa, Artificial Sequence; identical to SEQ ID NO: 6193
  Purine_Nucleoside_Phosphorylase_deoD__Escherichia_coli__A8A8B3

SEQ ID NO: 6354 - RNA, 720 nt, Artificial Sequence; identical to SEQ ID NO: 6330
  Purine_Nucleoside_Phosphorylase_deoD__Escherichia_coli__ABV08767
